United States Patent Application Publication US 2005/0221354 A1 - sequence listing, part 5

SEQ ID NO: 139973 - DNA, 25 bp, probe
acgctggccttcagcagcatgatgc

SEQ ID NO: 139974 - DNA, 25 bp, probe
acgctggccttcagcagcatgatgc

SEQ ID NO: 139975 - DNA, 25 bp, probe
acctgaggttcacgctgctagcgtg

SEQ ID NO: 139976 - DNA, 25 bp, probe
acgctggagttcatggctccggaga

SEQ ID NO: 139977 - DNA, 25 bp, probe
acccgaggtcttcctatctggaatg

SEQ ID NO: 139978 - DNA, 25 bp, probe
acccgaggtcttcctatctggaatg

SEQ ID NO: 139979 - DNA, 25 bp, probe
acccgcaggttttcagatctaggat

SEQ ID NO: 139980 - DNA, 25 bp, probe
acccagcagctatctaagtcacagg

SEQ ID NO: 139981 - DNA, 25 bp, probe
acccagcagctatctaagtcacagg

SEQ ID NO: 139982 - DNA, 25 bp, probe
accccatgcagtttgaagaatcgga

SEQ ID NO: 139983 - DNA, 25 bp, probe
accctagcaggctgtagaccgcaga

SEQ ID NO: 139984 - DNA, 25 bp, probe
accctggcaccggaaggccagcaga

SEQ ID NO: 139985 - DNA, 25 bp, probe
accggagcagccataaggacagcat

SEQ ID NO: 139986 - DNA, 25 bp, probe
accgagtgatccgtcatacgaagat

SEQ ID NO: 139987 - DNA, 25 bp, probe
accgagcgatcatgtcgcacaaaca

SEQ ID NO: 139988 - DNA, 25 bp, probe
acctgagagctctgtctgatatcac

SEQ ID NO: 139989 - DNA, 25 bp, probe
acctgagacaagatgctgtcatgca

SEQ ID NO: 139990 - DNA, 25 bp, probe
acctggaagctgttcagctctcaca

SEQ ID NO: 139991 - DNA, 25 bp, probe
acctggagatcatccatctgctggc

SEQ ID NO: 139992 - DNA, 25 bp, probe
acctggatgctattacacatgcttt

SEQ ID NO: 139993 - DNA, 25 bp, probe
acctgtcaccgtgagcagctttgga

SEQ ID NO: 139994 - DNA, 25 bp, probe
acctggcacccagaacagttggaag

SEQ ID NO: 139995 - DNA, 25 bp, probe
acctggccaccaggaactgcctggt

SEQ ID NO: 139996 - DNA, 25 bp, probe
accgagccaccaagaggcagcatgt

SEQ ID NO: 139997 - DNA, 25 bp, probe
accgaccaccagaggctgatgaaac

SEQ ID NO: 139998 - DNA, 25 bp, probe
accgcaccattccggagtgtataga

SEQ ID NO: 139999 - DNA, 25 bp, probe
accctggcattccggttgatgctaa

SEQ ID NO: 140000 - DNA, 25 bp, probe
acctgtgagattctggctgttctaa

SEQ ID NO: 140001 - DNA, 25 bp, probe
acctgtgagattctggctgttctaa

SEQ ID NO: 140002 - DNA, 25 bp, probe
aaatttattttgcacttcaacatgt

SEQ ID NO: 140003 - DNA, 25 bp, probe
aaatcctgctttggcgacaaaaagg

SEQ ID NO: 140004 - DNA, 25 bp, probe
aacaccgttcttcagctctaacggg

SEQ ID NO: 140005 - DNA, 25 bp, probe
aacactcggattgaaccttactaca

SEQ ID NO: 140006 - DNA, 25 bp, probe
aacactcggattgaaccttactaca

SEQ ID NO: 140007 - DNA, 25 bp, probe
acactcttggtagaagcccttctac

SEQ ID NO: 140008 - DNA, 25 bp, probe
acctgttaataatgagcccatcact

SEQ ID NO: 140009 - DNA, 25 bp, probe
accgtctgaaatcatgttacatcac

SEQ ID NO: 140010 - DNA, 25 bp, probe
accgtctgaaatcatgttacatcac

SEQ ID NO: 140011 - DNA, 25 bp, probe
acctgtccaattggttttacatctt

SEQ ID NO: 140012 - DNA, 25 bp, probe
acctggccaatgtgcatttttgcac

SEQ ID NO: 140013 - DNA, 25 bp, probe
acctgtgacagctggcaattttata

SEQ ID NO: 140014 - DNA, 25 bp, probe
accggatccttgacaactttatcag

SEQ ID NO: 140015 - DNA, 25 bp, probe
accggatccttgacaactttatcag

SEQ ID NO: 140016 - DNA, 25 bp, probe
accgaattgctgtaacctcaggatc

SEQ ID NO: 140017 - DNA, 25 bp, probe
accgaaggtgatcatcatccaggcc

SEQ ID NO: 140018 - DNA, 25 bp, probe
accgggagtcagctatcaagggcat

SEQ ID NO: 140019 - DNA, 25 bp, probe
acgcccggatctcagtcaaaggcat

SEQ ID NO: 140020 - DNA, 25 bp, probe
acgctcccctgacactgaagaggat

SEQ ID NO: 140021 - DNA, 25 bp, probe
acgctcccctgacactgaagaggat

SEQ ID NO: 140022 - DNA, 25 bp, probe
acgtacgtagaagaggagggcatcc

SEQ ID NO: 140023 - DNA, 25 bp, probe
acgaccgtgctgtgaaggagggccc

SEQ ID NO: 140024 - DNA, 25 bp, probe
acccggacgaggtggtggtgcctct

SEQ ID NO: 140025 - DNA, 25 bp, probe
acccagctggggtgggtgaggcctg

SEQ ID NO: 140026 - DNA, 25 bp, probe
acccagctggggtgggtgaggcctg

SEQ ID NO: 140027 - DNA, 25 bp, probe
acccagcttctggagggttggccgt

SEQ ID NO: 140028 - DNA, 25 bp, probe
accgagcagtcggatgtgaggttca

SEQ ID NO: 140029 - DNA, 25 bp, probe
accgagggctgcgtgagcaagtaca

SEQ ID NO: 140030 - DNA, 25 bp, probe
acctggtagcctagaacagctaaga

SEQ ID NO: 140031 - DNA, 25 bp, probe
acccagtacctcagacaggaaagtc

SEQ ID NO: 140032 - DNA, 25 bp, probe
acacctgtttgtataagggaagtcg

SEQ ID NO: 140033 - DNA, 25 bp, probe
acccattttggcattgctactaagt

SEQ ID NO: 140034 - DNA, 25 bp, probe
acccttttgtcatctgtaccagatc

SEQ ID NO: 140035 - DNA, 25 bp, probe
acccctttggaattcaacacagaca

SEQ ID NO: 140036 - DNA, 25 bp, probe
acctggctgtggcaacggacaaaac

SEQ ID NO: 140037 - DNA, 25 bp, probe
acctggtgtgccagcgaaaccaaac

SEQ ID NO: 140038 - DNA, 25 bp, probe
acctggtgtgccagcgaaaccaaac

SEQ ID NO: 140039 - DNA, 25 bp, probe
acctggttcctctgagaagcctgga

SEQ ID NO: 140040 - DNA, 25 bp, probe
acctggtgtcccgtgaggagtgtga

SEQ ID NO: 140041 - DNA, 25 bp, probe
acctgggtctggacgtgccagtgtg

SEQ ID NO: 140042 - DNA, 25 bp, probe
acctggggctggccgtggagatgaa

SEQ ID NO: 140043 - DNA, 25 bp, probe
acctggggctggccgtggagatgaa

SEQ ID NO: 140044 - DNA, 25 bp, probe
acctggaccgagccattgaggaatt

SEQ ID NO: 140045 - DNA, 25 bp, probe
acccagacactgacctctactggtt

SEQ ID NO: 140046 - DNA, 25 bp, probe
accggacctgttgctagcaggcaat

SEQ ID NO: 140047 - DNA, 25 bp, probe
accggggctgttaatgccacacgtc

SEQ ID NO: 140048 - DNA, 25 bp, probe
acctggagtgtgtgaagtactgcgt

SEQ ID NO: 140049 - DNA, 25 bp, probe
accgctggtggactgtaataatgcc

SEQ ID NO: 140050 - DNA, 25 bp, probe
accctgagtgagacattaaagtaag

SEQ ID NO: 140051 - DNA, 25 bp, probe
acccatgagatgtacttgaacgtaa

SEQ ID NO: 140052 - DNA, 25 bp, probe
accgaagtgattgtggactgtcaat

SEQ ID NO: 140053 - DNA, 25 bp, probe
accgaagcgcaatgtggtggtcact

SEQ ID NO: 140054 - DNA, 25 bp, probe
accgctactggccagatgagggtgc

SEQ ID NO: 140055 - DNA, 25 bp, probe
accctactggcgtgtggggctgatg

SEQ ID NO: 140056 - DNA, 25 bp, probe
acctggacaaggtggggctggtgct

SEQ ID NO: 140057 - DNA, 25 bp, probe
acctggacaaggtggggctggtgct

SEQ ID NO: 140058 - DNA, 25 bp, probe
acctggcccagcaacaggggggtgg

SEQ ID NO: 140059 - DNA, 25 bp, probe
acctggcccagttcctggtgaagga

SEQ ID NO: 140060 - DNA, 25 bp, probe
acctggcccagtatatgtctcagca

SEQ ID NO: 140061 - DNA, 25 bp, probe
acctggcccagtttatggtgcagaa

SEQ ID NO: 140062 - DNA, 25 bp, probe
accccacggatgttgtcaggaatca

SEQ ID NO: 140063 - DNA, 25 bp, probe
accccacggatgttgtcaggaatca

SEQ ID NO: 140064 - DNA, 25 bp, probe
accccatcccggaagcaggagatca

SEQ ID NO: 140065 - DNA, 25 bp, probe
acccaccccgtgtgacagaatagga

SEQ ID NO: 140066 - DNA, 25 bp, probe
accggcccaaggtgacacagtgagg

SEQ ID NO: 140067 - DNA, 25 bp, probe
accccctcaaggtgaagagctgatt

SEQ ID NO: 140068 - DNA, 25 bp, probe
accccctcaaggtgaagagctgatt

SEQ ID NO: 140069 - DNA, 25 bp, probe
accccgacaaggtgagcagagctgc

SEQ ID NO: 140070 - DNA, 25 bp, probe
accccgacaaggtgagcagagctgc

SEQ ID NO: 140071 - DNA, 25 bp, probe
accggcgaggacacacgcagagtgc

SEQ ID NO: 140072 - DNA, 25 bp, probe
accgctcgggaaatgcaggaaggcc

SEQ ID NO: 140073 - DNA, 25 bp, probe
accctagggcaaacctgaatgctgt

SEQ ID NO: 140074 - DNA, 25 bp, probe
actgttaagacctcctattgagttt

SEQ ID NO: 140075 - DNA, 25 bp, probe
acgtgtgaaaactccctattctctt

SEQ ID NO: 140076 - DNA, 25 bp, probe
acgtggataaactaacctctaacag

SEQ ID NO: 140077 - DNA, 25 bp, probe
acgccactaatatacatccctaata

SEQ ID NO: 140078 - DNA, 25 bp, probe
acccacaaatgcttattagcctaaa

SEQ ID NO: 140079 - DNA, 25 bp, probe
accctcacagacttttagacatcgt

SEQ ID NO: 140080 - DNA, 25 bp, probe
accctcacagacttttagacatcgt

SEQ ID NO: 140081 - DNA, 25 bp, probe
acgcctgaaacaggtgctgctccac

SEQ ID NO: 140082 - DNA, 25 bp, probe
acgcctgaaacaggtgctgctccac

SEQ ID NO: 140083 - DNA, 25 bp, probe
accctggaagagtccactgccaaaa

SEQ ID NO: 140084 - DNA, 25 bp, probe
acctgtggaatacccaatggaaaca

SEQ ID NO: 140085 - DNA, 25 bp, probe
accctgaacatacctactgaggaac

SEQ ID NO: 140086 - DNA, 25 bp, probe
acccgaaatgatgtactggatgaca

SEQ ID NO: 140087 - DNA, 25 bp, probe
accctgggatgaagtatctgtgaac

SEQ ID NO: 140088 - DNA, 25 bp, probe
accccttgagctgctttggagactc

SEQ ID NO: 140089 - DNA, 25 bp, probe
acccctgtgtggctgtatgccagac

SEQ ID NO: 140090 - DNA, 25 bp, probe
acgactcagtgaagtttctccagtc

SEQ ID NO: 140091 - DNA, 25 bp, probe
actgcagcgaggagatgtaccgcct

SEQ ID NO: 140092 - DNA, 25 bp, probe
accgcgcagccgcatgaaccggatg

SEQ ID NO: 140093 - DNA, 25 bp, probe
accggtggcaggacaagcactcgat

SEQ ID NO: 140094 - DNA, 25 bp, probe
accggtggcaggacaagcactcgat

SEQ ID NO: 140095 - DNA, 25 bp, probe
accggaggagagactcaccatcgag

SEQ ID NO: 140096 - DNA, 25 bp, probe
accgaagcgaatactgcagaagaac

SEQ ID NO: 140097 - DNA, 25 bp, probe
acccagattaccgtggaagatcagc

SEQ ID NO: 140098 - DNA, 25 bp, probe
accgctataagcgctggaagtcaga

SEQ ID NO: 140099 - DNA, 25 bp, probe
accgctatgacagcctgggcttact

SEQ ID NO: 140100 - DNA, 25 bp, probe
accgctatgacagcctgggcttact

SEQ ID NO: 140101 - DNA, 25 bp, probe
accgctatgacagcctgggcttact

SEQ ID NO: 140102 - DNA, 25 bp, probe
accgtgacatcagcgtagtgttttg

SEQ ID NO: 140103 - DNA, 25 bp, probe
accgtgtcatcagcacagtgttttt

SEQ ID NO: 140104 - DNA, 25 bp, probe
accgcatctctgatcaatgagttta

SEQ ID NO: 140105 - DNA, 25 bp, probe
accgctacatgaaccagagcttccc

SEQ ID NO: 140106 - DNA, 25 bp, probe
accgctacagcaaccgatattgtgg

SEQ ID NO: 140107 - DNA, 25 bp, probe
actggcctcaataccttgtttagga

SEQ ID NO: 140108 - DNA, 25 bp, probe
accctctacattgttctctcaaaga

SEQ ID NO: 140109 - DNA, 25 bp, probe
accggccagattgttgctattaagc

SEQ ID NO: 140110 - DNA, 25 bp, probe
accgagacagttggttttgcatgtc

SEQ ID NO: 140111 - DNA, 25 bp, probe
accgagatgagcgtggacgttggct

SEQ ID NO: 140112 - DNA, 25 bp, probe
accgctatgagcctgtgctctttga

SEQ ID NO: 140113 - DNA, 25 bp, probe
accgctatgagcctgtgctctttga

SEQ ID NO: 140114 - DNA, 25 bp, probe
accctcagtctgctgcttttaagag

SEQ ID NO: 140115 - DNA, 25 bp, probe
accccattccttatattcagcaagc

SEQ ID NO: 140116 - DNA, 25 bp, probe
acagactttcaggtttttactcact

SEQ ID NO: 140117 - DNA, 25 bp, probe
acccaatgtgatgtttttcacttgc

SEQ ID NO: 140118 - DNA, 25 bp, probe
acccaagctgatgagtttccttcct

SEQ ID NO: 140119 - DNA, 25 bp, probe
acccataatggtctttcacttgtca

SEQ ID NO: 140120 - DNA, 25 bp, probe
accgtctatggtgtgttttttcatt

SEQ ID NO: 140121 - DNA, 25 bp, probe
accgcttgggtaacttgttcaagat

SEQ ID NO: 140122 - DNA, 25 bp, probe
actcccgggctgggcttttgaattg

SEQ ID NO: 140123 - DNA, 25 bp, probe
acgaccagggtggccctgtggagat

SEQ ID NO: 140124 - DNA, 25 bp, probe
acgacccagaaggctgaacgggagg

SEQ ID NO: 140125 - DNA, 25 bp, probe
acccccaagagtgccaagtgcgagg

SEQ ID NO: 140126 - DNA, 25 bp, probe
accccaagaggcttccactggggag

SEQ ID NO: 140127 - DNA, 25 bp, probe
accccaagaggcttccactggggag

SEQ ID NO: 140128 - DNA, 25 bp, probe
accccaaatcagatcaagtcgggaa

SEQ ID NO: 140129 - DNA, 25 bp, probe
acccccaagcagatcaagtccagat

SEQ ID NO: 140130 - DNA, 25 bp, probe
actacccaaggtgctatgcttacat

SEQ ID NO: 140131 - DNA, 25 bp, probe
accctccaagggatctgcttgatat

SEQ ID NO: 140132 - DNA, 25 bp, probe
acgccccaacaaggactgttgaaat

SEQ ID NO: 140133 - DNA, 25 bp, probe
accccgacacaaggagctcttgttc

SEQ ID NO: 140134 - DNA, 25 bp, probe
accccgagaagaggccatcctttgt

SEQ ID NO: 140135 - DNA, 25 bp, probe
accccaagatagacgcttcatgtta

SEQ ID NO: 140136 - DNA, 25 bp, probe
accctgaagactccacatactatta

SEQ ID NO: 140137 - DNA, 25 bp, probe
acgagattagcccacaaactgaata

SEQ ID NO: 140138 - DNA, 25 bp, probe
acgagattagcccacaaactgaata

SEQ ID NO: 140139 - DNA, 25 bp, probe
acgaaaacctggtcaatctgattga

SEQ ID NO: 140140 - DNA, 25 bp, probe
acgtgaagccctccaatatgctagt

SEQ ID NO: 140141 - DNA, 25 bp, probe
acatggatactagtgccgtactggc

SEQ ID NO: 140142 - DNA, 25 bp, probe
acgagattgctgtgcttgaattggc

SEQ ID NO: 140143 - DNA, 25 bp, probe
acgagatgtggctcttcgttgttta

SEQ ID NO: 140144 - DNA, 25 bp, probe
acgaaattcactgctccttttgtga

SEQ ID NO: 140145 - DNA, 25 bp, probe
acgaaatatggttccttttgtggct

SEQ ID NO: 140146 - DNA, 25 bp, probe
acgtactgggggactcaattggagc

SEQ ID NO: 140147 - DNA, 25 bp, probe
acgtactgggggactcaattggagc

SEQ ID NO: 140148 - DNA, 25 bp, probe
actgtttagggccctgatttgctgg

SEQ ID NO: 140149 - DNA, 25 bp, probe
actgtttagggccctgatttgctgg

SEQ ID NO: 140150 - DNA, 25 bp, probe
actgtttagggccctgatttgctgg

SEQ ID NO: 140151 - DNA, 25 bp, probe
acgatgttggaatccgacttgggga

SEQ ID NO: 140152 - DNA, 25 bp, probe
actgctaatgaggacattcgtccgg

SEQ ID NO: 140153 - DNA, 25 bp, probe
accccagagtacatagctcctgagg

SEQ ID NO: 140154 - DNA, 25 bp, probe
accccaatctaggaggctcctggcg

SEQ ID NO: 140155 - DNA, 25 bp, probe
accccaatctaggaggctcctggcg

SEQ ID NO: 140156 - DNA, 25 bp, probe
accggaagctgggtgtctacgtgct

SEQ ID NO: 140157 - DNA, 25 bp, probe
accggaacgtgactgccgagcaagc

SEQ ID NO: 140158 - DNA, 25 bp, probe
accgtttcctgattgctcagggact

SEQ ID NO: 140159 - DNA, 25 bp, probe
accgaagccctgtttcagacagacc

SEQ ID NO: 140160 - DNA, 25 bp, probe
acccattgttctcttcagaacccta

SEQ ID NO: 140161 - DNA, 25 bp, probe
acgcactttatgagggagaccccga

SEQ ID NO: 140162 - DNA, 25 bp, probe
acgcccataagcagtgcaaatcctg

SEQ ID NO: 140163 - DNA, 25 bp, probe
acccactaactggctaattagcatg

SEQ ID NO: 140164 - DNA, 25 bp, probe
acgccaataactgcgactatgagca

SEQ ID NO: 140165 - DNA, 25 bp, probe
accctttactacactcatgagtggc

SEQ ID NO: 140166 - DNA, 25 bp, probe
accctgtttagcattcactaagccc

SEQ ID NO: 140167 - DNA, 25 bp, probe
accctgtatatagcccagccaggcc

SEQ ID NO: 140168 - DNA, 25 bp, probe
acccttgggacaccaacgagtgccg

SEQ ID NO: 140169 - DNA, 25 bp, probe
accccagggacacgaagcagagact

SEQ ID NO: 140170 - DNA, 25 bp, probe
accctatgacgaaaaagcagctaat

SEQ ID NO: 140171 - DNA, 25 bp, probe
accctctatcataaacatatgctgc

SEQ ID NO: 140172 - DNA, 25 bp, probe
accctcgctctgaatgacttcgggg

SEQ ID NO: 140173 - DNA, 25 bp, probe
accctcgctctgaatgacttcgggg

SEQ ID NO: 140174 - DNA, 25 bp, probe
acccttgctgcaagtaccaagtgga

SEQ ID NO: 140175 - DNA, 25 bp, probe
acccttccactgcccaatgtggaga

SEQ ID NO: 140176 - DNA, 25 bp, probe
acccttccactgcccaatgtggaga

SEQ ID NO: 140177 - DNA, 25 bp, probe
acgttacagctttcacagagttaaa

SEQ ID NO: 140178 - DNA, 25 bp, probe
acgtcttcgttggcagagatttcca

SEQ ID NO: 140179 - DNA, 25 bp, probe
acgcactttctgtgcacgcatttgc

SEQ ID NO: 140180 - DNA, 25 bp, probe
acgcactttctgtgcacgcatttgc

SEQ ID NO: 140181 - DNA, 25 bp, probe
acgccgagatctacgactatttaat

SEQ ID NO: 140182 - DNA, 25 bp, probe
accctgaggcttgttacattggcac

SEQ ID NO: 140183 - DNA, 25 bp, probe
acccagggcagtgtgtacaaagtca

SEQ ID NO: 140184 - DNA, 25 bp, probe
acgccagtccctgaggacaaagggc

SEQ ID NO: 140185 - DNA, 25 bp, probe
acgccagtccctgaggacaaagggc

SEQ ID NO: 140186 - DNA, 25 bp, probe
acccctcccattaggacaatcagtc

SEQ ID NO: 140187 - DNA, 25 bp, probe
acccactgaccaacagggccatgag

SEQ ID NO: 140188 - DNA, 25 bp, probe
acccaggccgatgagttgcctgcct

SEQ ID NO: 140189 - DNA, 25 bp, probe
acccacccacaggaattcattgcct

SEQ ID NO: 140190 - DNA, 25 bp, probe
acccctgacatcgagaacgctgagc

SEQ ID NO: 140191 - DNA, 25 bp, probe
accgcacagacactgacaagcacgc

SEQ ID NO: 140192 - DNA, 25 bp, probe
accgcaagatagcagctggccgggc

SEQ ID NO: 140193 - DNA, 25 bp, probe
acccgtggagaattggccagagcct

SEQ ID NO: 140194 - DNA, 25 bp, probe
actccgggagtaaggacaagaccag

SEQ ID NO: 140195 - DNA, 25 bp, probe
accgagcccctatgaaaagaccaga

SEQ ID NO: 140196 - DNA, 25 bp, probe
accgagcccctatgaaaagaccaga

SEQ ID NO: 140197 - DNA, 25 bp, probe
acgaagccacctttgaagaagtaag

SEQ ID NO: 140198 - DNA, 25 bp, probe
acgatctgcccctggaagattaaac

SEQ ID NO: 140199 - DNA, 25 bp, probe
actactggtcactgggaatcctaat

SEQ ID NO: 140200 - DNA, 25 bp, probe
actggggtaaatgtgtacctaatga

SEQ ID NO: 140201 - DNA, 25 bp, probe
actgggtgggttctgtgtcaataaa

SEQ ID NO: 140202 - DNA, 25 bp, probe
actgggtgggttctgtgtcaataaa

SEQ ID NO: 140203 - DNA, 25 bp, probe
accgttgtgaatttctgtctcaaaa

SEQ ID NO: 140204 - DNA, 25 bp, probe
accgttgctggatctgctgtttgaa

SEQ ID NO: 140205 - DNA, 25 bp, probe
accctcgtggaggccgtgaataagg

SEQ ID NO: 140206 - DNA, 25 bp, probe
acccatggtgggacacggagtttgc

SEQ ID NO: 140207 - DNA, 25 bp, probe
accgcgggggctgtgagcagcggtg

SEQ ID NO: 140208 - DNA, 25 bp, probe
acgcgaggcagaggctcggaaccgg

SEQ ID NO: 140209 - DNA, 25 bp, probe
acgcgaggcagaggctcggaaccgg

SEQ ID NO: 140210 - DNA, 25 bp, probe
acgctgggcacgttgagtgaatctc

SEQ ID NO: 140211 - DNA, 25 bp, probe
accggagtcatttgatgtgattctg

SEQ ID NO: 140212 - DNA, 25 bp, probe
accggaggcaattgcactgtgtagc

SEQ ID NO: 140213 - DNA, 25 bp, probe
accggggcatcaaaggtgtggtgac

SEQ ID NO: 140214 - DNA, 25 bp, probe
accgtacaacatcatggtgctggtg

SEQ ID NO: 140215 - DNA, 25 bp, probe
accgtacaacatcatggtgctggtg

SEQ ID NO: 140216 - DNA, 25 bp, probe
accgctacactacagagtctgatgt

SEQ ID NO: 140217 - DNA, 25 bp, probe
accgctaagcaagcattgtctgtgc

SEQ ID NO: 140218 - DNA, 25 bp, probe
accctgaatgcaacttctgtgcctt

SEQ ID NO: 140219 - DNA, 25 bp, probe
acccgcagagcaacctgcatctgct

SEQ ID NO: 140220 - DNA, 25 bp, probe
acgccgcgcgaaggtgatgagctcg

SEQ ID NO: 140221 - DNA, 25 bp, probe
acccgggcaagaatgagacctacca

SEQ ID NO: 140222 - DNA, 25 bp, probe
accctggagcaccttagacaaacta

SEQ ID NO: 140223 - DNA, 25 bp, probe
accgtggccctcatgaacatgaact

SEQ ID NO: 140224 - DNA, 25 bp, probe
accctggctccttgtgccagagaac

SEQ ID NO: 140225 - DNA, 25 bp, probe
accgcgtgttctggctgcaaagaat

SEQ ID NO: 140226 - DNA, 25 bp, probe
accgcttgtcttgggctggacatat

SEQ ID NO: 140227 - DNA, 25 bp, probe
cccttttcttctgcggagtcaaagt

SEQ ID NO: 140228 - DNA, 25 bp, probe
accctctttgtctgggtgcggagga

SEQ ID NO: 140229 - DNA, 25 bp, probe
acccttcttcactgctggagggaat

SEQ ID NO: 140230 - DNA, 25 bp, probe
acccaaattgcctctggcatgaagt

SEQ ID NO: 140231 - DNA, 25 bp, probe
acccaaagtgcctcataggcaatgc

SEQ ID NO: 140232 - DNA, 25 bp, probe
accctaaggacgtcatcggcagagg

SEQ ID NO: 140233 - DNA, 25 bp, probe
acccggaggcacctctggaaggtgg

SEQ ID NO: 140234 - DNA, 25 bp, probe
acccggagtgcatacatggaggaag

SEQ ID NO: 140235 - DNA, 25 bp, probe
accgcctgagtctcctggaggagta

SEQ ID NO: 140236 - DNA, 25 bp, probe
acggacaggtaggcacgagacggta

SEQ ID NO: 140237 - DNA, 25 bp, probe
acgctgacaggtgtgcttgaaaggg

SEQ ID NO: 140238 - DNA, 25 bp, probe
acccatcagcgcaatacttgaacct

SEQ ID NO: 140239 - DNA, 25 bp, probe
accctctccagcataaaacctagtg

SEQ ID NO: 140240 - DNA, 25 bp, probe
accctgccacatgttcatatatcct

SEQ ID NO: 140241 - DNA, 25 bp, probe
accccctattatacattatgatctt

SEQ ID NO: 140242 - DNA, 25 bp, probe
accccaaattgtgtatatatcttat

SEQ ID NO: 140243 - DNA, 25 bp, probe
accccagaatagttaaactctatga

SEQ ID NO: 140244 - DNA, 25 bp, probe
acgcgggcaaagttaagaccatcaa

SEQ ID NO: 140245 - DNA, 25 bp, probe
acgacgggaagacaagttcatgtac

SEQ ID NO: 140246 - DNA, 25 bp, probe
cactacgggtggtgccagtttagag

SEQ ID NO: 140247 - DNA, 25 bp, probe
actacgggtggtgccagtttagagc

SEQ ID NO: 140248 - DNA, 25 bp, probe
actgggggtggtgccagtttggagc

SEQ ID NO: 140249 - DNA, 25 bp, probe
acgatggacgatgttccctttggac

SEQ ID NO: 140250 - DNA, 25 bp, probe
acgacgacgacgatgtcgtcggggc

SEQ ID NO: 140251 - DNA, 25 bp, probe
cactacgggaagacctcaggggtgg

SEQ ID NO: 140252 - DNA, 25 bp, probe
actacagggagctcccagttgaggt

SEQ ID NO: 140253 - DNA, 25 bp, probe
actaagggagttcattgatttggtt

SEQ ID NO: 140254 - DNA, 25 bp, probe
actaaggtgagtatactaagggagt

SEQ ID NO: 140255 - DNA, 25 bp, probe
acgagagggggatcatctacaggga

SEQ ID NO: 140256 - DNA, 25 bp, probe
acgtagagagggtggccacaagggg

SEQ ID NO: 140257 - DNA, 25 bp, probe
acccagatatgggaaccccaaggag

SEQ ID NO: 140258 - DNA, 25 bp, probe
acccgaagtgaggagtcccaaggag

SEQ ID NO: 140259 - DNA, 25 bp, probe
acccagacagtgagaagcccctgga

SEQ ID NO: 140260 - DNA, 25 bp, probe
acgcgaacgtgaatgggtcctgtgt

SEQ ID NO: 140261 - DNA, 25 bp, probe
acaccaacgtggtcgagtacgtgga

SEQ ID NO: 140262 - DNA, 25 bp, probe
acaccaacgtggtcgagtacgtgga

SEQ ID NO: 140263 - DNA, 25 bp, probe
acccaacctggtaattatcctcaag

SEQ ID NO: 140264 - DNA, 25 bp, probe
acccaaccgcccaaatataattcag

SEQ ID NO: 140265 - DNA, 25 bp, probe
acccaaaggaccaagagatccacct

SEQ ID NO: 140266 - DNA, 25 bp, probe
acccagaagagccgcaaggaccaga

SEQ ID NO: 140267 - DNA, 25 bp, probe
accgcaacatggatggaggcaacga

SEQ ID NO: 140268 - DNA, 25 bp, probe
accccacaggctacgtgccaaagat

SEQ ID NO: 140269 - DNA, 25 bp, probe
accctacattctactagccaatcaa

SEQ ID NO: 140270 - DNA, 25 bp, probe
acccaactttcgatcgaatcgccct

SEQ ID NO: 140271 - DNA, 25 bp, probe
acccaatttctgggctctggatcct

SEQ ID NO: 140272 - DNA, 25 bp, probe
acgtattttctgggctcttgcaagt

SEQ ID NO: 140273 - DNA, 25 bp, probe
acccctcttagggctctgtgagagg

SEQ ID NO: 140274 - DNA, 25 bp, probe
acccactcatctatgcctattggca

SEQ ID NO: 140275 - DNA, 25 bp, probe
acccagtgatcccatgcctttggga

SEQ ID NO: 140276 - DNA, 25 bp, probe
accctgtgagctttgcctttgaggt

SEQ ID NO: 140277 - DNA, 25 bp, probe
accctgctgtggttggcttggggtg

SEQ ID NO: 140278 - DNA, 25 bp, probe
accgcttgtgctcggtggggaggga

SEQ ID NO: 140279 - DNA, 25 bp, probe
accgcttgtgctcggtggggaggga

SEQ ID NO: 140280 - DNA, 25 bp, probe
accgactgctgaggtgtggggcggg

SEQ ID NO: 140281 - DNA, 25 bp, probe
accgcatcggctgcattgtggtgga

SEQ ID NO: 140282 - DNA, 25 bp, probe
accgcaccctggtctatggaggaat

SEQ ID NO: 140283 - DNA, 25 bp, probe
acccagctgcctgactataagggca

SEQ ID NO: 140284 - DNA, 25 bp, probe
acccaagcgcatcacgacaaggata

SEQ ID NO: 140285 - DNA, 25 bp, probe
acccagagctcaaccagaagggata

SEQ ID NO: 140286 - DNA, 25 bp, probe
acccggctcaacggggccaagatga

SEQ ID NO: 140287 - DNA, 25 bp, probe
acccaggccaagctgctggctaaga

SEQ ID NO: 140288 - DNA, 25 bp, probe
acccaggccaagctgctggctaaga

SEQ ID NO: 140289 - DNA, 25 bp, probe
acccggccaagcaactgtatgaaga

SEQ ID NO: 140290 - DNA, 25 bp, probe
accccctgagtcaactggagcaaga

SEQ ID NO: 140291 - DNA, 25 bp, probe
accctcaaagccagcatgagagaat

SEQ ID NO: 140292 - DNA, 25 bp, probe
accccatcacagtcatcgagggcag

SEQ ID NO: 140293 - DNA, 25 bp, probe
accgcatctatgtcacagctaagga

SEQ ID NO: 140294 - DNA, 25 bp, probe
accgactaccaagtgaacatccaga

SEQ ID NO: 140295 - DNA, 25 bp, probe
accgagggctacgtcaagatcgcag

SEQ ID NO: 140296 - DNA, 25 bp, probe
accgagagcgcttagtaggtcggag

SEQ ID NO: 140297 - DNA, 25 bp, probe
accgcaacctgaactgtgaggcggg

SEQ ID NO: 140298 - DNA, 25 bp, probe
accgaactctgtgctgggcatttgg

SEQ ID NO: 140299 - DNA, 25 bp, probe
accgaattctgtggctcagcacaca

SEQ ID NO: 140300 - DNA, 25 bp, probe
accgagatatcaaagctgccaacgt

SEQ ID NO: 140301 - DNA, 25 bp, probe
accgagatatcaaagctgccaacgt

SEQ ID NO: 140302 - DNA, 25 bp, probe
accgagattccaactccacagagtg

SEQ ID NO: 140303 - DNA, 25 bp, probe
accgagtctacactcaccagagtga

SEQ ID NO: 140304 - DNA, 25 bp, probe
accgagacctggccaccaggaactg

SEQ ID NO: 140305 - DNA, 25 bp, probe
acccagatactgcagaacaccaaca

SEQ ID NO: 140306 - DNA, 25 bp, probe
acccagatactgcagaacaccaaca

SEQ ID NO: 140307 - DNA, 25 bp, probe
accccaaagaatcacaccaagactt

SEQ ID NO: 140308 - DNA, 25 bp, probe
accccacaagtagaatatagagaat

SEQ ID NO: 140309 - DNA, 25 bp, probe
accccacgagctttcacaataaatt

SEQ ID NO: 140310 - DNA, 25 bp, probe
accccggtgctctaaaataagatgt

SEQ ID NO: 140311 - DNA, 25 bp, probe
accccggtgctctaaaataagatgt

SEQ ID NO: 140312 - DNA, 25 bp, probe
accccgctctcttcaggaaaagtgt

SEQ ID NO: 140313 - DNA, 25 bp, probe
accccgttccagcagctgaagcagg

SEQ ID NO: 140314 - DNA, 25 bp, probe
acccttattccagatgctgagagtg

SEQ ID NO: 140315 - DNA, 25 bp, probe
accctctattccttgatagcggatt

SEQ ID NO: 140316 - DNA, 25 bp, probe
acccttattcctccaaggctgtgat

SEQ ID NO: 140317 - DNA, 25 bp, probe
acccttattcctccaaggctgtgat

SEQ ID NO: 140318 - DNA, 25 bp, probe
acccctttccatacagattgctttt

SEQ ID NO: 140319 - DNA, 25 bp, probe
acccctttccatacagattgctttt

SEQ ID NO: 140320 - DNA, 25 bp, probe
accccttacactatgatgtggttat

SEQ ID NO: 140321 - DNA, 25 bp, probe
acccagctctcagctaaatgtggtc

SEQ ID NO: 140322 - DNA, 25 bp, probe
acccagcactaggacaccaggaggc

SEQ ID NO: 140323 - DNA, 25 bp, probe
accctgtgccagaagcaacagaggt

SEQ ID NO: 140324 - DNA, 25 bp, probe
accccatccatgcagtagaggcgct

SEQ ID NO: 140325 - DNA, 25 bp, probe
accccatccatgcagtagaggcgct

SEQ ID NO: 140326 - DNA, 25 bp, probe
accctaccacaaattcatggccttc

SEQ ID NO: 140327 - DNA, 25 bp, probe
accctgcaaaaaagcctgggctagc

SEQ ID NO: 140328 - DNA, 25 bp, probe
acccgaacactgatcgctgggtggc

SEQ ID NO: 140329 - DNA, 25 bp, probe
acccacaacactgtccgagggtgct

SEQ ID NO: 140330 - DNA, 25 bp, probe
acccaaagtatcgccagaagcagtg

SEQ ID NO: 140331 - DNA, 25 bp, probe
accccagcaggatgtctaatatgtg

SEQ ID NO: 140332 - DNA, 25 bp, probe
accccagcaggatgtctaatatgtg

SEQ ID NO: 140333 - DNA, 25 bp, probe
acgtcatccagactactcgaaatgg

SEQ ID NO: 140334 - DNA, 25 bp, probe
acgaatgcactacattaaagatgtg

SEQ ID NO: 140335 - DNA, 25 bp, probe
acgactactcccaattcacagggtt

SEQ ID NO: 140336 - DNA, 25 bp, probe
aaatcttgtacagaaatcagggttc

SEQ ID NO: 140337 - DNA, 25 bp, probe
aagtctggttaataacgagttctct

SEQ ID NO: 140338 - DNA, 25 bp, probe
aaatattttaatcaggcagagtttt

SEQ ID NO: 140339 - DNA, 25 bp, probe
aaatttcgtgaagagccaggttgct

SEQ ID NO: 140340 - DNA, 25 bp, probe
acccttctgtgacaagccaggcttt

SEQ ID NO: 140341 - DNA, 25 bp, probe
acccttgtggacgaagcaattgtaa

SEQ ID NO: 140342 - DNA, 25 bp, probe
accccgcagagagagcagatttgaa

SEQ ID NO: 140343 - DNA, 25 bp, probe
acccctgatggagtggagtatctga

SEQ ID NO: 140344 - DNA, 25 bp, probe
acccccggagctgatggatgtgagc

SEQ ID NO: 140345 - DNA, 25 bp, probe
accgcagctaggaataatggaatag

SEQ ID NO: 140346 - DNA, 25 bp, probe
acgccctacagcaagacggaaacct

SEQ ID NO: 140347 - DNA, 25 bp, probe
accctcagagccagcatgcgggaac

SEQ ID NO: 140348 - DNA, 25 bp, probe
acccaagaccatcggaagtgaagca

SEQ ID NO: 140349 - DNA, 25 bp, probe
acaccaggtttgagaagccacgcat

SEQ ID NO: 140350 - DNA, 25 bp, probe
acgctcaggttggaaaagccactgt

SEQ ID NO: 140351 - DNA, 25 bp, probe
acccgcatgtgtaacaacagccgct

SEQ ID NO: 140352 - DNA, 25 bp, probe
acccctcatggaaagacagctggat

SEQ ID NO: 140353 - DNA, 25 bp, probe
accgcccaggatcagattgcatgtg

SEQ ID NO: 140354 - DNA, 25 bp, probe
accccaatgctgcagagcagtcagg

SEQ ID NO: 140355 - DNA, 25 bp, probe
accgccatgggggatcagtgcaggt

SEQ ID NO: 140356 - DNA, 25 bp, probe
accccagaggaggaagggacttctg

SEQ ID NO: 140357 - DNA, 25 bp, probe
accccagcgaggggcggagacctgt

SEQ ID NO: 140358 - DNA, 25 bp, probe
accctagtgaggtggaggtcctgcg

SEQ ID NO: 140359 - DNA, 25 bp, probe
accgctcgggcatggagaattccgc

SEQ ID NO: 140360 - DNA, 25 bp, probe
acacgacgggaagacaagttcatgt

SEQ ID NO: 140361 - DNA, 25 bp, probe
aaaggggtgaagcgcaggccttgct

SEQ ID NO: 140362 - DNA, 25 bp, probe
aagaggggttgagaatggaatcctc

SEQ ID NO: 140363 - DNA, 25 bp, probe
cgggctggtgttctaagagcccccg

SEQ ID NO: 140364 - DNA, 25 bp, probe
aagcaggcgtttgatgaaagtcccc

SEQ ID NO: 140365 - DNA, 25 bp, probe
gaactgtgggttgtgttggtccccg

SEQ ID NO: 140366 - DNA, 25 bp, probe
catcctggggttcttagggtcccag

SEQ ID NO: 140367 - DNA, 25 bp, probe
ctcctgggggcctgtaagaaccgag

SEQ ID NO: 140368 - DNA, 25 bp, probe
cacctggagggcttggtaaaacaca

SEQ ID NO: 140369 - DNA, 25 bp, probe
cacctggagggcttggtaaaacaca

SEQ ID NO: 140370 - DNA, 25 bp, probe
actgctagtgttctgtctaaaaacc

SEQ ID NO: 140371 - DNA, 25 bp, probe
acgctatttctgttggttagtagac

SEQ ID NO: 140372 - DNA, 25 bp, probe
acccctccttgtaatgtagacagac

SEQ ID NO: 140373 - DNA, 25 bp, probe
acgccggagcttggaagtcataccc

SEQ ID NO: 140374 - DNA, 25 bp, probe
acccgaggcttgggagaccacagcc

SEQ ID NO: 140375 - DNA, 25 bp, probe
acgccagggcctgggactaccaggc

SEQ ID NO: 140376 - DNA, 25 bp, probe
acgccagggcctgggactaccaggc

SEQ ID NO: 140377 - DNA, 25 bp, probe
actggcaaggtcaggccttcaaggc

SEQ ID NO: 140378 - DNA, 25 bp, probe
actggcaaggtcaggccttcaaggc

SEQ ID NO: 140379 - DNA, 25 bp, probe
actcgaatggaggggtcagtagacc

SEQ ID NO: 140380 - DNA, 25 bp, probe
actcgaatggaggggtcagtagacc

SEQ ID NO: 140381 - DNA, 25 bp, probe
acccaatggcagcagtgtcaacaga

SEQ ID NO: 140382 - DNA, 25 bp, probe
acccaatggcagcagtgtcaacaga

SEQ ID NO: 140383 - DNA, 25 bp, probe
accctcggcagggagataccgtgaa

SEQ ID NO: 140384 - DNA, 25 bp, probe
accccagccaggtcagataccaggc

SEQ ID NO: 140385 - DNA, 25 bp, probe
acccatgaccatgaagattccaatg

SEQ ID NO: 140386 - DNA, 25 bp, probe
accctgtggaagcatttcgcgatgg

SEQ ID NO: 140387 - DNA, 25 bp, probe
accccatgggagctttggctgagtg

SEQ ID NO: 140388 - DNA, 25 bp, probe
accctgctgggatctttgagcttgt

SEQ ID NO: 140389 - DNA, 25 bp, probe
acccctgcagtgtgctgttgtgcac

SEQ ID NO: 140390 - DNA, 25 bp, probe
acgacgatgcggacgtgtgggccgc

SEQ ID NO: 140391 - DNA, 25 bp, probe
acgacgatgcggacgtgtgggccgc

SEQ ID NO: 140392 - DNA, 25 bp, probe
accgcgatgcaagtatgttgggctc

SEQ ID NO: 140393 - DNA, 25 bp, probe
acccagacagatgagattgtcgcac

SEQ ID NO: 140394 - DNA, 25 bp, probe
acccatatatgagagcctgttgagg

SEQ ID NO: 140395 - DNA, 25 bp, probe
accctagatatggcagctctttaat

SEQ ID NO: 140396 - DNA, 25 bp, probe
acccatagcttggtgtcattaacat

SEQ ID NO: 140397 - DNA, 25 bp, probe
acccatagcttccatgagaacagca

SEQ ID NO: 140398 - DNA, 25 bp, probe
acccagagctcctacagaagcagcc

SEQ ID NO: 140399 - DNA, 25 bp, probe
acccagagctcctacagaagcagcc

SEQ ID NO: 140400 - DNA, 25 bp, probe
acccagagctcctacagaagcagcc

SEQ ID NO: 140401 - DNA, 25 bp, probe
acccaagtccaaagacaatggcctt

SEQ ID NO: 140402 - DNA, 25 bp, probe
acccaatgcccgagtcactgtggca

SEQ ID NO: 140403 - DNA, 25 bp, probe
acccaagcaacaaagtcccgagcaa

SEQ ID NO: 140404 - DNA, 25 bp, probe
acgccaagaactgctggccgtagcc

SEQ ID NO: 140405 - DNA, 25 bp, probe
acgccaagaactgctggccgtagcc

SEQ ID NO: 140406 - DNA, 25 bp, probe
accgccagacacacagggagtcagt

SEQ ID NO: 140407 - DNA, 25 bp, probe
acccgaactgcatcaggcgtggcag

SEQ ID NO: 140408 - DNA, 25 bp, probe
acccagagacgggcgagcagattca

SEQ ID NO: 140409 - DNA, 25 bp, probe
acccggatcggggcagagactcagg

SEQ ID NO: 140410 - DNA, 25 bp, probe
acccggatcggggcagagactcagg

SEQ ID NO: 140411 - DNA, 25 bp, probe
acccatggattgcaggagatacagc

SEQ ID NO: 140412 - DNA, 25 bp, probe
acccatggctcgtggcagagtcatg

SEQ ID NO: 140413 - DNA, 25 bp, probe
acccaggctttaggcagcagcttga

SEQ ID NO: 140414 - DNA, 25 bp, probe
accctgaagtgatccgagctctgga

SEQ ID NO: 140415 - DNA, 25 bp, probe
acccaggaatgcgggggtctgctca

SEQ ID NO: 140416 - DNA, 25 bp, probe
acccaggcagatgggagggttgtgc

SEQ ID NO: 140417 - DNA, 25 bp, probe
acccagtgaaggccatggaggtggt

SEQ ID NO: 140418 - DNA, 25 bp, probe
acccacccaggctatggcaaggagg

SEQ ID NO: 140419 - DNA, 25 bp, probe
acccaccgacgtggggcaggcagag

SEQ ID NO: 140420 - DNA, 25 bp, probe
accccacgatcttcgaggagagaca

SEQ ID NO: 140421 - DNA, 25 bp, probe
acgcctacaggttcgtgaaggacag

SEQ ID NO: 140422 - DNA, 25 bp, probe
acccatcacaaccacactaaaacgg

SEQ ID NO: 140423 - DNA, 25 bp, probe
acccaccagagacagtacagaatcc

SEQ ID NO: 140424 - DNA, 25 bp, probe
accgccactgtgtgaaactgtatct

SEQ ID NO: 140425 - DNA, 25 bp, probe
accccagctgctcagaagacactat

SEQ ID NO: 140426 - DNA, 25 bp, probe
accctactgccagcacagaggctat

SEQ ID NO: 140427 - DNA, 25 bp, probe
accctactttgtgcaggtcatacct

SEQ ID NO: 140428 - DNA, 25 bp, probe
accctgacatgtattgcgggcgctc

SEQ ID NO: 140429 - DNA, 25 bp, probe
accccttgctgaactggaggctgat

SEQ ID NO: 140430 - DNA, 25 bp, probe
accctttgtgctcaggggctgttca

SEQ ID NO: 140431 - DNA, 25 bp, probe
acgcctctcgttctgggaggcttac

SEQ ID NO: 140432 - DNA, 25 bp, probe
acccctcagctcacttcagagagct

SEQ ID NO: 140433 - DNA, 25 bp, probe
acgccgtcaagatcattgagaagca

SEQ ID NO: 140434 - DNA, 25 bp, probe
accctgtcactttcctgagacatga

SEQ ID NO: 140435 - DNA, 25 bp, probe
acccatgtgaggctcctcagacagg

SEQ ID NO: 140436 - DNA, 25 bp, probe
acgctggtagaggccatccagacgg

SEQ ID NO: 140437 - DNA, 25 bp, probe
acgggatggggtacacagccagccc

SEQ ID NO: 140438 - DNA, 25 bp, probe
ctcgggcaggggagaacattccggg

SEQ ID NO: 140439 - DNA, 25 bp, probe
acgggcagaaggcgaaagtccagct

SEQ ID NO: 140440 - DNA, 25 bp, probe
acgaggagatagccctgcacaagta

SEQ ID NO: 140441 - DNA, 25 bp, probe
acgaggagatagccctgcacaagta

SEQ ID NO: 140442 - DNA, 25 bp, probe
acgcaatagcgacgcgctggcgtta

SEQ ID NO: 140443 - DNA, 25 bp, probe
acgctctgatcaggggtgctggttt

SEQ ID NO: 140444 - DNA, 25 bp, probe
accctgattgcccgtaggttaagag

SEQ ID NO: 140445 - DNA, 25 bp, probe
acgcctgactgcccaaaggctgtac

SEQ ID NO: 140446 - DNA, 25 bp, probe
accctcagccagacagaagtcataa

SEQ ID NO: 140447 - DNA, 25 bp, probe
accctcagccagacagaagtcataa

SEQ ID NO: 140448 - DNA, 25 bp, probe
accctgcagcgccaatgaggatctg

SEQ ID NO: 140449 - DNA, 25 bp, probe
actcctgaaatctatcagatcatgc

SEQ ID NO: 140450 - DNA, 25 bp, probe
accctggagatgttcgcagctcggt

SEQ ID NO: 140451 - DNA, 25 bp, probe
accctggagatgttcgcagctcggt

SEQ ID NO: 140452 - DNA, 25 bp, probe
accctcagctattcttcagcttggt

SEQ ID NO: 140453 - DNA, 25 bp, probe
accccagcaagcattatatctcagt

SEQ ID NO: 140454 - DNA, 25 bp, probe
accccagaagccatatcctgacaga

SEQ ID NO: 140455 - DNA, 25 bp, probe
accccggagccaaatccagtaacag

SEQ ID NO: 140456 - DNA, 25 bp, probe
acgcccggacatatatccagtccct

SEQ ID NO: 140457 - DNA, 25 bp, probe
accccagtgacagatgatgtcttcc

SEQ ID NO: 140458 - DNA, 25 bp, probe
acccctcagacagtttgcttatttt

SEQ ID NO: 140459 - DNA, 25 bp, probe
acccattaaacaacactgttctgtt

SEQ ID NO: 140460 - DNA, 25 bp, probe
accctaaatccaactcatttatact

SEQ ID NO: 140461 - DNA, 25 bp, probe
acccataaacactgccatcatctaa

SEQ ID NO: 140462 - DNA, 25 bp, probe
accccatatacatgtgactaatata

SEQ ID NO: 140463 - DNA, 25 bp, probe
acgaccatcaacagagactgactgc

SEQ ID NO: 140464 - DNA, 25 bp, probe
acgaccatcaacagagactgactgc

SEQ ID NO: 140465 - DNA, 25 bp, probe
acccccagcagaggcaacatgcctc

SEQ ID NO: 140466 - DNA, 25 bp, probe
acccccagcagaggcaacatgcctc

SEQ ID NO: 140467 - DNA, 25 bp, probe
acgcccaagcaaggtttgatgccta

SEQ ID NO: 140468 - DNA, 25 bp, probe
acccctagtcatcgtttgtgtgtat

SEQ ID NO: 140469 - DNA, 25 bp, probe
acccccatgtatgcctatatgtgta

SEQ ID NO: 140470 - DNA, 25 bp, probe
acccctcattgtgacttatgaggag

SEQ ID NO: 140471 - DNA, 25 bp, probe
accccatgatttacagcctaaggaa

SEQ ID NO: 140472 - DNA, 25 bp, probe
accccatcatctatagcctgaggaa

SEQ ID NO: 140473 - DNA, 25 bp, probe
accccttgatctacagcttgaggaa

SEQ ID NO: 140474 - DNA, 25 bp, probe
acccctggatctatgcatctttcag

SEQ ID NO: 140475 - DNA, 25 bp, probe
acccctggatctatgcatctttcag

SEQ ID NO: 140476 - DNA, 25 bp, probe
accccattctgtatgttttcatggg

SEQ ID NO: 140477 - DNA, 25 bp, probe
acccgcatgtcagtgttgtcattct

SEQ ID NO: 140478 - DNA, 25 bp, probe
acccgcttagctgcgcatttgcggg

SEQ ID NO: 140479 - DNA, 25 bp, probe
acccgcttagctgcgcatttgcggg

SEQ ID NO: 140480 - DNA, 25 bp, probe
accctgcatggaccctgacttgggt

SEQ ID NO: 140481 - DNA, 25 bp, probe
accctgctgagcagcgtgtttggtg

SEQ ID NO: 140482 - DNA, 25 bp, probe
acccaatgactggcgtatcttggtc

SEQ ID NO: 140483 - DNA, 25 bp, probe
acccaatgtttcgtatatctgttct

SEQ ID NO: 140484 - DNA, 25 bp, probe
accctgcagtttgtgaatttttgca

SEQ ID NO: 140485 - DNA, 25 bp, probe
accctggtgttgactgactttaaca

SEQ ID NO: 140486 - DNA, 25 bp, probe
accctggatttgcatacattcttca

SEQ ID NO: 140487 - DNA, 25 bp, probe
acccccactgataaactcttcatca

SEQ ID NO: 140488 - DNA, 25 bp, probe
acccccactgataaactcttcatca

SEQ ID NO: 140489 - DNA, 25 bp, probe
accctgaacgttagtctcttgcatg

SEQ ID NO: 140490 - DNA, 25 bp, probe
accctgaatttgacctacttgctgg

SEQ ID NO: 140491 - DNA, 25 bp, probe
accctgaatttgacctacttgctgg

SEQ ID NO: 140492 - DNA, 25 bp, probe
acccgaatggtgtccatcgtggtgg

SEQ ID NO: 140493 - DNA, 25 bp, probe
acgccgagatgactggctacgtggt

SEQ ID NO: 140494 - DNA, 25 bp, probe
acccaagagtgatgtacagtctatt

SEQ ID NO: 140495 - DNA, 25 bp, probe
acccaatggagcaaccacactctac

SEQ ID NO: 140496 - DNA, 25 bp, probe
acccaatcattctaaagcagcctcc

SEQ ID NO: 140497 - DNA, 25 bp, probe
acccagaaatctagaggatctctcc

SEQ ID NO: 140498 - DNA, 25 bp, probe
actgacaaatactggggtgtcctca

SEQ ID NO: 140499 - DNA, 25 bp, probe
actgaatgaaactggagaagttgtc

SEQ ID NO: 140500 - DNA, 25 bp, probe
acgttgctaccgagagatggttatg

SEQ ID NO: 140501 - DNA, 25 bp, probe
acgttggcccagatgggggctgaat

SEQ ID NO: 140502 - DNA, 25 bp, probe
actgtttcatcctctgggggtagaa

SEQ ID NO: 140503 - DNA, 25 bp, probe
acgtcatccacctggagggtgtcgt

SEQ ID NO: 140504 - DNA, 25 bp, probe
acgaatgtcactgaagagggaacac

SEQ ID NO: 140505 - DNA, 25 bp, probe
acgagcttccagaaaagcgtcccac

SEQ ID NO: 140506 - DNA, 25 bp, probe
acgccttactggcaatgcttccaca

SEQ ID NO: 140507 - DNA, 25 bp, probe
acccttacactttggctatgaacaa

SEQ ID NO: 140508 - DNA, 25 bp, probe
acccttgagcacaacagcaaataag

SEQ ID NO: 140509 - DNA, 25 bp, probe
acccaagcagccaaagcagtgtcga

SEQ ID NO: 140510 - DNA, 25 bp, probe
caccttaccactgacaggtcgtggc

SEQ ID NO: 140511 - DNA, 25 bp, probe
acccgaggatctgacggtggtgctc

SEQ ID NO: 140512 - DNA, 25 bp, probe
acgctccagttcaccgtggatgtgt

SEQ ID NO: 140513 - DNA, 25 bp, probe
acccagagttcacccaggaagctgt

SEQ ID NO: 140514 - DNA, 25 bp, probe
acccagtttcactcaagaaatcttg

SEQ ID NO: 140515 - DNA, 25 bp, probe
acccagttgtacctaatcacagact

SEQ ID NO: 140516 - DNA, 25 bp, probe
acccttgttcttaggatcacagaat

SEQ ID NO: 140517 - DNA, 25 bp, probe
acgcctttaatgtgggcagcatata

SEQ ID NO: 140518 - DNA, 25 bp, probe
acgcctttggtatctgaccataaag

SEQ ID NO: 140519 - DNA, 25 bp, probe
acccttctagacttcagaccacaga

SEQ ID NO: 140520 - DNA, 25 bp, probe
acccattctgaagacagtccatgag

SEQ ID NO: 140521 - DNA, 25 bp, probe
acccagatctgcaaatacatgtcct

SEQ ID NO: 140522 - DNA, 25 bp, probe
acccacattctgttcaggatacttt

SEQ ID NO: 140523 - DNA, 25 bp, probe
acccacattctgttcaggatacttt

SEQ ID NO: 140524 - DNA, 25 bp, probe
accctcacctgatgcaggaacatat

SEQ ID NO: 140525 - DNA, 25 bp, probe
acccgagacagatagatgacaccat

SEQ ID NO: 140526 - DNA, 25 bp, probe
accctggagagaccctgataccatc

SEQ ID NO: 140527 - DNA, 25 bp, probe
accctggagagaccctgataccatc

SEQ ID NO: 140528 - DNA, 25 bp, probe
acccaggcaagaacgtgtagcaata

SEQ ID NO: 140529 - DNA, 25 bp, probe
acccaggcaagaacgtgtagcaata

SEQ ID NO: 140530 - DNA, 25 bp, probe
acgctgcttgtagacatgttaatat

SEQ ID NO: 140531 - DNA, 25 bp, probe
acgcatttggataccttgtgatttc

SEQ ID NO: 140532 - DNA, 25 bp, probe
acgcatttggataccttgtgatttc

SEQ ID NO: 140533 - DNA, 25 bp, probe
accctggagaaccatttcatttcat

SEQ ID NO: 140534 - DNA, 25 bp, probe
accctgtgcctcatatttcaatagt

SEQ ID NO: 140535 - DNA, 25 bp, probe
acccttgacattaatactgagaagt

SEQ ID NO: 140536 - DNA, 25 bp, probe
actgccgattgcttattacttaatt

SEQ ID NO: 140537 - DNA, 25 bp, probe
acccagcactgtcatctagattttc

SEQ ID NO: 140538 - DNA, 25 bp, probe
acgaccactttgtcaagctcatttc

SEQ ID NO: 140539 - DNA, 25 bp, probe
acgacacacatgttagagcccttct

SEQ ID NO: 140540 - DNA, 25 bp, probe
acccatccaaggaatggccactgct

SEQ ID NO: 140541 - DNA, 25 bp, probe
acccacgcaaggacagtgagcgcta

SEQ ID NO: 140542 - DNA, 25 bp, probe
acccacaaggtgaggatggtcagaa

SEQ ID NO: 140543 - DNA, 25 bp, probe
acccaaaatttatcatatgtagaaa

SEQ ID NO: 140544 - DNA, 25 bp, probe
accctaagtttatagaatctgccaa

SEQ ID NO: 140545 - DNA, 25 bp, probe
acccaaagggaatagagattctcca

SEQ ID NO: 140546 - DNA, 25 bp, probe
acccccagtaaagagctttctcaca

SEQ ID NO: 140547 - DNA, 25 bp, probe
acccccagtaaagagctttctcaca

SEQ ID NO: 140548 - DNA, 25 bp, probe
cacccccaaatataactgttatcca

SEQ ID NO: 140549 - DNA, 25 bp, probe
accctcacataatcaaactttatca

SEQ ID NO: 140550 - DNA, 25 bp, probe
accctgtctaatgaaacctgtgtct

SEQ ID NO: 140551 - DNA, 25 bp, probe
acccttctttaccacaagctatggt

SEQ ID NO: 140552 - DNA, 25 bp, probe
accctttaacaccaccagatgggtg

SEQ ID NO: 140553 - DNA, 25 bp, probe
accctatgtaccgcttcactgaggg

SEQ ID NO: 140554 - DNA, 25 bp, probe
acccgattagacccttgatgctatt

SEQ ID NO: 140555 - DNA, 25 bp, probe
acccgattagacccttgatgctatt

SEQ ID NO: 140556 - DNA, 25 bp, probe
acccagacttaatcttgaatgatac

SEQ ID NO: 140557 - DNA, 25 bp, probe
acccaagtttgattttgccatgaag

SEQ ID NO: 140558 - DNA, 25 bp, probe
accctagtttcattctcaactctag

SEQ ID NO: 140559 - DNA, 25 bp, probe
acccttcagacctttcagacataag

SEQ ID NO: 140560 - DNA, 25 bp, probe
acccttcagacctttcagacataag

SEQ ID NO: 140561 - DNA, 25 bp, probe
acagctttcacagagttaaaaggct

SEQ ID NO: 140562 - DNA, 25 bp, probe
acgttcccaaaaccatccagatggt

SEQ ID NO: 140563 - DNA, 25 bp, probe
acgtacaaaatccagctatgaatat

SEQ ID NO: 140564 - DNA, 25 bp, probe
acggagattaaccgtcggcacatca

SEQ ID NO: 140565 - DNA, 25 bp, probe
acgaagatttgtgatccaggcctca

SEQ ID NO: 140566 - DNA, 25 bp, probe
acagaaaaatctgcccagagcctac

SEQ ID NO: 140567 - DNA, 25 bp, probe
acgacagggatctcgtcatggcact

SEQ ID NO: 140568 - DNA, 25 bp, probe
acgaagtggatacctctagtgcaat

SEQ ID NO: 140569 - DNA, 25 bp, probe
acgaagcgtgatcagccgtggaaca

SEQ ID NO: 140570 - DNA, 25 bp, probe
acgacgatgtatcaacagagaaact

SEQ ID NO: 140571 - DNA, 25 bp, probe
acgaagcacttccgactggaaaccg

SEQ ID NO: 140572 - DNA, 25 bp, probe
acgcagaccttcggcatcgagaagt

SEQ ID NO: 140573 - DNA, 25 bp, probe
acccaactatgctgcaccagaagta

SEQ ID NO: 140574 - DNA, 25 bp, probe
accctcaatagctatgtccagctgg

SEQ ID NO: 140575 - DNA, 25 bp, probe
acccatcaaaagcaccagcaggcac

SEQ ID NO: 140576 - DNA, 25 bp, probe
acgcgtcatcactgcagaaacgtgc

SEQ ID NO: 140577 - DNA, 25 bp, probe
acgccatgattcttataaccgtgct

SEQ ID NO: 140578 - DNA, 25 bp, probe
acgcacatgggtagcgaccgcgtgt

SEQ ID NO: 140579 - DNA, 25 bp, probe
acgcacatgggtagcgaccgcgtgt

SEQ ID NO: 140580 - DNA, 25 bp, probe
acccaggtgtgtcgacatcagttgt

SEQ ID NO: 140581 - DNA, 25 bp, probe
acgctcagcctggtcaagactgttg

SEQ ID NO: 140582 - DNA, 25 bp, probe
acgctcagcctggtcaagactgttg

SEQ ID NO: 140583 - DNA, 25 bp, probe
acccagctctgagttcatggatgtt

SEQ ID NO: 140584 - DNA, 25 bp, probe
acccagctctgagttcatggatgtt

SEQ ID NO: 140585 - DNA, 25 bp, probe
accctgatgctgtataatgtatgtt

SEQ ID NO: 140586 - DNA, 25 bp, probe
acccagatgtgtacaagggcttcat

SEQ ID NO: 140587 - DNA, 25 bp, probe
acccaatgatgaccgagaggccctg

SEQ ID NO: 140588 - DNA, 25 bp, probe
accctgtgtctgacgacagtgacct

SEQ ID NO: 140589 - DNA, 25 bp, probe
acccgtggatgagtacatgctgccc

SEQ ID NO: 140590 - DNA, 25 bp, probe
accctgtgcgtgatcagcattgaca

SEQ ID NO: 140591 - DNA, 25 bp, probe
accctggcatgatgcctcatcaaca

SEQ ID NO: 140592 - DNA, 25 bp, probe
acgttctattagcccatcaactata

SEQ ID NO: 140593 - DNA, 25 bp, probe
acgtttgactacttacagagcgtcc

SEQ ID NO: 140594 - DNA, 25 bp, probe
acgtttgactacttacagagcgtcc

SEQ ID NO: 140595 - DNA, 25 bp, probe
acgtatttaaacagagagcctcagc

SEQ ID NO: 140596 - DNA, 25 bp, probe
acgtatttaaacagagagcctcagc

SEQ ID NO: 140597 - DNA, 25 bp, probe
acgctgttctaaaaaaggtctcctg

SEQ ID NO: 140598 - DNA, 25 bp, probe
acggtggatggcaccggagtccctg

SEQ ID NO: 140599 - DNA, 25 bp, probe
acggaccatgacatcaaaaggcctt

SEQ ID NO: 140600 - DNA, 25 bp, probe
acaggacgaacttgcgttacctctt

SEQ ID NO: 140601 - DNA, 25 bp, probe
acaggacgaacttgcgttacctctt

SEQ ID NO: 140602 - DNA, 25 bp, probe
acaggaggagacgcgtttcgcgcgc

SEQ ID NO: 140603 - DNA, 25 bp, probe
acggggaagctgagcttcatcccca

SEQ ID NO: 140604 - DNA, 25 bp, probe
acgaggaatgaggggcttcacgaga

SEQ ID NO: 140605 - DNA, 25 bp, probe
acgagtgggaggtgtctcgagagaa

SEQ ID NO: 140606 - DNA, 25 bp, probe
acgcgctttaagtgtgctgggcaga

SEQ ID NO: 140607 - DNA, 25 bp, probe
acccttggaaatctgtgtgtgtgcg

SEQ ID NO: 140608 - DNA, 25 bp, probe
acccttcgcagttactggttggtgt

SEQ ID NO: 140609 - DNA, 25 bp, probe
accctgtccgtgacgtggattggtg

SEQ ID NO: 140610 - DNA, 25 bp, probe
acgtcttccgatcagtggtgtctgt

SEQ ID NO: 140611 - DNA, 25 bp, probe
acgctatatgcctccagaagtgttg

SEQ ID NO: 140612 - DNA, 25 bp, probe
acgctatatgcctccagaagtgttg

SEQ ID NO: 140613 - DNA, 25 bp, probe
acgctgtgggcttcagcgtcggtag

SEQ ID NO: 140614 - DNA, 25 bp, probe
acgctggaggtggacgtggcgtcct

SEQ ID NO: 140615 - DNA, 25 bp, probe
acgctggaggtggacgtggcgtcct

SEQ ID NO: 140616 - DNA, 25 bp, probe
acgctggaggtggacgtggcgtcct

SEQ ID NO: 140617 - DNA, 25 bp, probe
acgcccagggaaagcggcgttatga

SEQ ID NO: 140618 - DNA, 25 bp, probe
acccacagaggcaactcaggagtaa

SEQ ID NO: 140619 - DNA, 25 bp, probe
acccagcagaggagctaggccagtc

SEQ ID NO: 140620 - DNA, 25 bp, probe
acccagcattgtttgaagtgccctc

SEQ ID NO: 140621 - DNA, 25 bp, probe
acccagatagccatgaaggtcatcc

SEQ ID NO: 140622 - DNA, 25 bp, probe
acccagcaagcctgcaatgcaaagg

SEQ ID NO: 140623 - DNA, 25 bp, probe
acccagcaatggctcaatgcacaac

SEQ ID NO: 140624 - DNA, 25 bp, probe
acccaaatatcgtcatagccaagat

SEQ ID NO: 140625 - DNA, 25 bp, probe
acgccaagaacgttcccaggcagaa

SEQ ID NO: 140626 - DNA, 25 bp, probe
acccaaaccagactgtcctggctag

SEQ ID NO: 140627 - DNA, 25 bp, probe
actaaaaaagagcatcctcgagggc

SEQ ID NO: 140628 - DNA, 25 bp, probe
acgaagaaaaagccatccagtgaag

SEQ ID NO: 140629 - DNA, 25 bp, probe
acccagaggaattacatggttcaag

SEQ ID NO: 140630 - DNA, 25 bp, probe
acccagaggaattacatggttcaag

SEQ ID NO: 140631 - DNA, 25 bp, probe
acccacaggaattcattgcctctca

SEQ ID NO: 140632 - DNA, 25 bp, probe
acgcacagcggaaacatattcttgc

SEQ ID NO: 140633 - DNA, 25 bp, probe
acgcggcaagcaacaaatccacagc

SEQ ID NO: 140634 - DNA, 25 bp, probe
acgtggcaatgccgctgaacttcac

SEQ ID NO: 140635 - DNA, 25 bp, probe
acgctggtttatggcatcctgagac

SEQ ID NO: 140636 - DNA, 25 bp, probe
acgtagtcatgtttatgttgagaac

SEQ ID NO: 140637 - DNA, 25 bp, probe
actctagttcttaagttgttagcca

SEQ ID NO: 140638 - DNA, 25 bp, probe
acgctagtgattgtggtcgtctatg

SEQ ID NO: 140639 - DNA, 25 bp, probe
acgctagtgattgtggtcgtctatg

SEQ ID NO: 140640 - DNA, 25 bp, probe
acgctgatgtggagtggaaatttgc

SEQ ID NO: 140641 - DNA, 25 bp, probe
acgcattcagccaggagatgatact

SEQ ID NO: 140642 - DNA, 25 bp, probe
acgactcagtatccgagagctgaca

SEQ ID NO: 140643 - DNA, 25 bp, probe
acgtgctcatcattgctaagatgcg

SEQ ID NO: 140644 - DNA, 25 bp, probe
acgtgctcatcgtcatctatcacgc

SEQ ID NO: 140645 - DNA, 25 bp, probe
acgtgctcatcgtcatctatcacgc

SEQ ID NO: 140646 - DNA, 25 bp, probe
acgatcttgcaattcataatcaccc

SEQ ID NO: 140647 - DNA, 25 bp, probe
acgaccagcaaatgctgagcccctc

SEQ ID NO: 140648 - DNA, 25 bp, probe
acgaggccaaatgtgtcaccttcag

SEQ ID NO: 140649 - DNA, 25 bp, probe
acgaagccaaactttctgtcttctc

SEQ ID NO: 140650 - DNA, 25 bp, probe
acgaagccgacatgctgttctctgt

SEQ ID NO: 140651 - DNA, 25 bp, probe
acgaagccgacatgctgttctctgt

SEQ ID NO: 140652 - DNA, 25 bp, probe
acaagacacggctgggttggatatg

SEQ ID NO: 140653 - DNA, 25 bp, probe
acaagtgacctatgtggattttagc

SEQ ID NO: 140654 - DNA, 25 bp, probe
acggtgacctgaagccttttgtcgt

SEQ ID NO: 140655 - DNA, 25 bp, probe
acgtgaaattgtctagtccttcgtt

SEQ ID NO: 140656 - DNA, 25 bp, probe
acgagcaagtttctcattactgtct

SEQ ID NO: 140657 - DNA, 25 bp, probe
acgaaacattccgtgattaagcttt

SEQ ID NO: 140658 - DNA, 25 bp, probe
acgacaacggccacattattctgaa

SEQ ID NO: 140659 - DNA, 25 bp, probe
acgactacccagaagtgttctggaa

SEQ ID NO: 140660 - DNA, 25 bp, probe
acgatactccgagaagtactggaag

SEQ ID NO: 140661 - DNA, 25 bp, probe
acgtactactggaccacgaaggcca

SEQ ID NO: 140662 - DNA, 25 bp, probe
acgatgaagactggaaagcgacggg

SEQ ID NO: 140663 - DNA, 25 bp, probe
acgagacaattgaaaagtcaagtaa

SEQ ID NO: 140664 - DNA, 25 bp, probe
acatcatacattataaggtaaccac

SEQ ID NO: 140665 - DNA, 25 bp, probe
acatcatacattataaggtaaccac

SEQ ID NO: 140666 - DNA, 25 bp, probe
accctgctgtacaagagagtaacca

SEQ ID NO: 140667 - DNA, 25 bp, probe
acccactgtgtcggagaaataggag

SEQ ID NO: 140668 - DNA, 25 bp, probe
acccagtttctggagcaaatgcaaa

SEQ ID NO: 140669 - DNA, 25 bp, probe
acgccctatttttgcaatggctata

SEQ ID NO: 140670 - DNA, 25 bp, probe
acgtccatctttttaagggattgct

SEQ ID NO: 140671 - DNA, 25 bp, probe
acgtactcttggcagaaaggattta

SEQ ID NO: 140672 - DNA, 25 bp, probe
acgaatttctggcaaaatggcactg

SEQ ID NO: 140673 - DNA, 25 bp, probe
acgacattttgtgactgaagagact

SEQ ID NO: 140674 - DNA, 25 bp, probe
acgactgttgttacactggagctga

SEQ ID NO: 140675 - DNA, 25 bp, probe
acgcatctttgcttacagtgcatca

SEQ ID NO: 140676 - DNA, 25 bp, probe
acgcatcctatgcctcagctggatg

SEQ ID NO: 140677 - DNA, 25 bp, probe
acgtcctgaggcagcaagaaccttt

SEQ ID NO: 140678 - DNA, 25 bp, probe
acgtctgcgtccaacaatgagacct

SEQ ID NO: 140679 - DNA, 25 bp, probe
acgttcgatcttgcatggagcaatc

SEQ ID NO: 140680 - DNA, 25 bp, probe
acccagcgagctgccattggcaatt

SEQ ID NO: 140681 - DNA, 25 bp, probe
acgacagcggctttggaggcagttt

SEQ ID NO: 140682 - DNA, 25 bp, probe
acccagcccatgtgtgataggattt

SEQ ID NO: 140683 - DNA, 25 bp, probe
acccaatcactctctgtattgctgt

SEQ ID NO: 140684 - DNA, 25 bp, probe
acccagacttgcttccatagtggag

SEQ ID NO: 140685 - DNA, 25 bp, probe
acccaggtcagcttccatggtagtg

SEQ ID NO: 140686 - DNA, 25 bp, probe
acccagagggcttgcattggtcagg

SEQ ID NO: 140687 - DNA, 25 bp, probe
acccaggctggagtgcaatggtgca

SEQ ID NO: 140688 - DNA, 25 bp, probe
acccaggctggagtgcaatggtgca

SEQ ID NO: 140689 - DNA, 25 bp, probe
acccagagggagcagtgaggcagga

SEQ ID NO: 140690 - DNA, 25 bp, probe
acccagagggagcagtgaggcagga

SEQ ID NO: 140691 - DNA, 25 bp, probe
acgcaaagggagaagtgtgagagga

SEQ ID NO: 140692 - DNA, 25 bp, probe
acggcaatgcggctgcactggtgga

SEQ ID NO: 140693 - DNA, 25 bp, probe
acccacagtggcagcgtgttggagc

SEQ ID NO: 140694 - DNA, 25 bp, probe
taaagctcgagaaaggggccatagt

SEQ ID NO: 140695 - DNA, 25 bp, probe
acgccaccgggagagatgctgagaa

SEQ ID NO: 140696 - DNA, 25 bp, probe
acgccaccgggagagatgctgagaa

SEQ ID NO: 140697 - DNA, 25 bp, probe
acgcggccgaggctgcgtgtaaaga

SEQ ID NO: 140698 - DNA, 25 bp, probe
acgcggccgaggctgcgtgtaaaga

SEQ ID NO: 140699 - DNA, 25 bp, probe
acgtggccaagggtgaggtggccaa

SEQ ID NO: 140700 - DNA, 25 bp, probe
acgtgtcgggaggttagctgcggaa

SEQ ID NO: 140701 - DNA, 25 bp, probe
acgtgtcgggaggttagctgcggaa

SEQ ID NO: 140702 - DNA, 25 bp, probe
acggccggtgggaggtgcatggcat

SEQ ID NO: 140703 - DNA, 25 bp, probe
acgacttggtgctggagttgctggt

SEQ ID NO: 140704 - DNA, 25 bp, probe
acgacctgggcttgatgggctatgt

SEQ ID NO: 140705 - DNA, 25 bp, probe
acgaccctgggctatggagacatgt

SEQ ID NO: 140706 - DNA, 25 bp, probe
acgcagcccgggacaagagcaagct

SEQ ID NO: 140707 - DNA, 25 bp, probe
acgcagcccgggacaagagcaagct

SEQ ID NO: 140708 - DNA, 25 bp, probe
acgcagcccgggacaagagcaagct

SEQ ID NO: 140709 - DNA, 25 bp, probe
acgcagcccgggacaagagcaagct

SEQ ID NO: 140710 - DNA, 25 bp, probe
acgcagcccgggacaagagcaagct

SEQ ID NO: 140711 - DNA, 25 bp, probe
acgaccagtgtgccatgaaagccct

SEQ ID NO: 140712 - DNA, 25 bp, probe
acgatgccaaggcagaacccattct

SEQ ID NO: 140713 - DNA, 25 bp, probe
acgatgccaaggcagaacccattct

SEQ ID NO: 140714 - DNA, 25 bp, probe
acgacaaagcggccaaatcctacat

SEQ ID NO: 140715 - DNA, 25 bp, probe
actggcaaatggagcaacaacaaca

SEQ ID NO: 140716 - DNA, 25 bp, probe
acgtcacaagacatgcaaaactcaa

SEQ ID NO: 140717 - DNA, 25 bp, probe
acgtcacaagacatgcaaaactcaa

SEQ ID NO: 140718 - DNA, 25 bp, probe
acccacagtgacatgcttaagtcca

SEQ ID NO: 140719 - DNA, 25 bp, probe
acgtgcaaaacaggctctagcgttc

SEQ ID NO: 140720 - DNA, 25 bp, probe
acgccaaccaacgagctgagcgtcc

SEQ ID NO: 140721 - DNA, 25 bp, probe
acccatgacatgaagccagcttccc

SEQ ID NO: 140722 - DNA, 25 bp, probe
accctactgtagtcactaccagtac

SEQ ID NO: 140723 - DNA, 25 bp, probe
actacttagtgggactattacacac

SEQ ID NO: 140724 - DNA, 25 bp, probe
acagactaagggcgcttgtcccatc

SEQ ID NO: 140725 - DNA, 25 bp, probe
acgattatggtggtggctcgttctc

SEQ ID NO: 140726 - DNA, 25 bp, probe
accctactgatgatgtgttgttgcc

SEQ ID NO: 140727 - DNA, 25 bp, probe
accctactgtggcatgacctgtgcc

SEQ ID NO: 140728 - DNA, 25 bp, probe
acgcatccacttcggattcagtggg

SEQ ID NO: 140729 - DNA, 25 bp, probe
acgacgacgtgctgttcgaggatgt

SEQ ID NO: 140730 - DNA, 25 bp, probe
acccagacagactgtgtgccaggag

SEQ ID NO: 140731 - DNA, 25 bp, probe
acccatgctaaccatgctagccatg

SEQ ID NO: 140732 - DNA, 25 bp, probe
acccatgctggagtgcagtggcaca

SEQ ID NO: 140733 - DNA, 25 bp, probe
acccatgggaatcatacagcatctg

SEQ ID NO: 140734 - DNA, 25 bp, probe
acgcctgggcaatttcagccaggac

SEQ ID NO: 140735 - DNA, 25 bp, probe
acacttggtaattgtactaaagcca

SEQ ID NO: 140736 - DNA, 25 bp, probe
acacttggtaattgtactaaagcca

SEQ ID NO: 140737 - DNA, 25 bp, probe
actcttggtagaagcccttctacct

SEQ ID NO: 140738 - DNA, 25 bp, probe
aatcttggaatatgcccgttggtct

SEQ ID NO: 140739 - DNA, 25 bp, probe
caccattaaaaagcctgtggacctt

SEQ ID NO: 140740 - DNA, 25 bp, probe
acgattaacacaccacactggcgaa

SEQ ID NO: 140741 - DNA, 25 bp, probe
acgattcaaattaccgttgagtata

SEQ ID NO: 140742 - DNA, 25 bp, probe
acggacccatacagtttgaatacag

SEQ ID NO: 140743 - DNA, 25 bp, probe
aagcggccctaagggagtgtctaag

SEQ ID NO: 140744 - DNA, 25 bp, probe
acatcagtgcccagagggagtttgc

SEQ ID NO: 140745 - DNA, 25 bp, probe
aatggatcaactctaggatttaggc

SEQ ID NO: 140746 - DNA, 25 bp, probe
acaaatgccactcttgggccaaggc

SEQ ID NO: 140747 - DNA, 25 bp, probe
acgagcgccagctctttgggaagtc

SEQ ID NO: 140748 - DNA, 25 bp, probe
acgaagctaccttttgggatgattg

SEQ ID NO: 140749 - DNA, 25 bp, probe
acgaagctaccttttgggatgattg

SEQ ID NO: 140750 - DNA, 25 bp, probe
acgacctccctgattttgacatcag

SEQ ID NO: 140751 - DNA, 25 bp, probe
acgcgctcagcctgatgtgtttaca

SEQ ID NO: 140752 - DNA, 25 bp, probe
acccatagtctttgtgtgcttgcta

SEQ ID NO: 140753 - DNA, 25 bp, probe
acccatattatttgcgtgtacgaag

SEQ ID NO: 140754 - DNA, 25 bp, probe
caggaagttacttggttcccataat

SEQ ID NO: 140755 - DNA, 25 bp, probe
acgtgcagtctgttatgagttccct

SEQ ID NO: 140756 - DNA, 25 bp, probe
acgacaaggatatgatgtccgctct

SEQ ID NO: 140757 - DNA, 25 bp, probe
actacaaagtcctatgtacttcttc

SEQ ID NO: 140758 - DNA, 25 bp, probe
acccaaagtgctcagaccttgtcta

SEQ ID NO: 140759 - DNA, 25 bp, probe
caccagaaaggtcacctgccttcta

SEQ ID NO: 140760 - DNA, 25 bp, probe
acccacataggtaactcttcatttt

SEQ ID NO: 140761 - DNA, 25 bp, probe
acgcaccaagcggaactgcgcttaa

SEQ ID NO: 140762 - DNA, 25 bp, probe
acgacaccagcagagatctgcctcc

SEQ ID NO: 140763 - DNA, 25 bp, probe
acgcacacacacgcaaatacatgcc

SEQ ID NO: 140764 - DNA, 25 bp, probe
acgcatgaaacgctacatcctgcac

SEQ ID NO: 140765 - DNA, 25 bp, probe
acgctaagggcgaattccagcacac

SEQ ID NO: 140766 - DNA, 25 bp, probe
acgataaaggtgaatgtggacccaa

SEQ ID NO: 140767 - DNA, 25 bp, probe
acgtacaacagccacaggtaccaca

SEQ ID NO: 140768 - DNA, 25 bp, probe
acgtacaaagcctgacttacaatat

SEQ ID NO: 140769 - DNA, 25 bp, probe
acgtaccacggattctctttaatat

SEQ ID NO: 140770 - DNA, 25 bp, probe
actgtccgagggtgctcttatttct

SEQ ID NO: 140771 - DNA, 25 bp, probe
actgtccgagggtgctcttatttct

SEQ ID NO: 140772 - DNA, 25 bp, probe
acagatcccggtgacattctatttc

SEQ ID NO: 140773 - DNA, 25 bp, probe
actgacctttatgacttctttttat

SEQ ID NO: 140774 - DNA, 25 bp, probe
actgaccgttgtgaatttctgtctc

SEQ ID NO: 140775 - DNA, 25 bp, probe
actacggtctggacaactttgacac

SEQ ID NO: 140776 - DNA, 25 bp, probe
actaagccctacataggattctcag

SEQ ID NO: 140777 - DNA, 25 bp, probe
actcaaccctaagagcagccttcag

SEQ ID NO: 140778 - DNA, 25 bp, probe
acgaacacctgtcagaggcgcttcg

SEQ ID NO: 140779 - DNA, 25 bp, probe
actgagactccgaccagctcagact

SEQ ID NO: 140780 - DNA, 25 bp, probe
acgtgacgcggcattgtcatgcact

SEQ ID NO: 140781 - DNA, 25 bp, probe
acgtgacgcggcattgtcatgcact

SEQ ID NO: 140782 - DNA, 25 bp, probe
acgtttgtgcagaatctctatgtat

SEQ ID NO: 140783 - DNA, 25 bp, probe
actgttgattcaaatttatcctgtg

SEQ ID NO: 140784 - DNA, 25 bp, probe
acgggcatctagaaattgtccgctt

SEQ ID NO: 140785 - DNA, 25 bp, probe
acgatggcactattgaattcacgag

SEQ ID NO: 140786 - DNA, 25 bp, probe
acgaagcatgttcagcattcaggtg

SEQ ID NO: 140787 - DNA, 25 bp, probe
acgcaaggatgtcgcactgctggtg

SEQ ID NO: 140788 - DNA, 25 bp, probe
acgaggcgctggccaagcaagtagc

SEQ ID NO: 140789 - DNA, 25 bp, probe
acgtgtggggaacaagtaccgcctg

SEQ ID NO: 140790 - DNA, 25 bp, probe
acgtgttggtggtggatgtacgcca

SEQ ID NO: 140791 - DNA, 25 bp, probe
acgagttcggacgggattcgaggcg

SEQ ID NO: 140792 - DNA, 25 bp, probe
acgcttttggacaaggctgtgctga

SEQ ID NO: 140793 - DNA, 25 bp, probe
acgcacttatcaggaacgcctcgat

SEQ ID NO: 140794 - DNA, 25 bp, probe
acgcgcgtgacggagaggttcagat

SEQ ID NO: 140795 - DNA, 25 bp, probe
acgtggtacctgacgggcatcgtca

SEQ ID NO: 140796 - DNA, 25 bp, probe
acgagttctacgattcacatggtca

SEQ ID NO: 140797 - DNA, 25 bp, probe
acgcattttacgaattcaccttccg

SEQ ID NO: 140798 - DNA, 25 bp, probe
acgcctttctagatgacaacttccg

SEQ ID NO: 140799 - DNA, 25 bp, probe
acggctacttcaacgagaacttccg

SEQ ID NO: 140800 - DNA, 25 bp, probe
acgtggacaagactcgcagattttc

SEQ ID NO: 140801 - DNA, 25 bp, probe
actggcatggcaagagcccagcttc

SEQ ID NO: 140802 - DNA, 25 bp, probe
actggcatggcaagagcccagcttc

SEQ ID NO: 140803 - DNA, 25 bp, probe
acgccattgtactccagcttgggag

SEQ ID NO: 140804 - DNA, 25 bp, probe
acgcctgtaatcccagcactttggg

SEQ ID NO: 140805 - DNA, 25 bp, probe
acgtctgtataatcggcttctggag

SEQ ID NO: 140806 - DNA, 25 bp, probe
acgcctgcaaaacagaagcctggag

SEQ ID NO: 140807 - DNA, 25 bp, probe
acgcccaggcaacaagggctgagct

SEQ ID NO: 140808 - DNA, 25 bp, probe
ttacccattgactcaaggggacata

SEQ ID NO: 140809 - DNA, 25 bp, probe
ttacccattgactcaaggggacata

SEQ ID NO: 140810 - DNA, 25 bp, probe
gtacctttacctgcgagggactaag

SEQ ID NO: 140811 - DNA, 25 bp, probe
ctacctttcaaagcttggagggaag

SEQ ID NO: 140812 - DNA, 25 bp, probe
cttccttatttagcctaggagtaag

SEQ ID NO: 140813 - DNA, 25 bp, probe
cacttttatttagcaccagggaagg

SEQ ID NO: 140814 - DNA, 25 bp, probe
acttgttcacaagccattagggaaa

SEQ ID NO: 140815 - DNA, 25 bp, probe
actgggtccgaatcagtaggtgacc

SEQ ID NO: 140816 - DNA, 25 bp, probe
acgggggagcagcacgattttgcac

SEQ ID NO: 140817 - DNA, 25 bp, probe
acgggggagcagcacgattttgcac

SEQ ID NO: 140818 - DNA, 25 bp, probe
acgtgtgtgtggagatcgcatattt

SEQ ID NO: 140819 - DNA, 25 bp, probe
actggcattgattttgatcctttac

SEQ ID NO: 140820 - DNA, 25 bp, probe
acgagcttgttctttgttctttgtc

SEQ ID NO: 140821 - DNA, 25 bp, probe
acaggggattgtgttttgtcactct

SEQ ID NO: 140822 - DNA, 25 bp, probe
acaggagctgacaggtttttcaatt

SEQ ID NO: 140823 - DNA, 25 bp, probe
actgggctacttgagtttgctagat

SEQ ID NO: 140824 - DNA, 25 bp, probe
acggtccactttctttgatgagtgg

SEQ ID NO: 140825 - DNA, 25 bp, probe
acgcttcatcccacaatcttaaggg

SEQ ID NO: 140826 - DNA, 25 bp, probe
acgctaccacgaagacattttcggg

SEQ ID NO: 140827 - DNA, 25 bp, probe
acccaagaagcagaatctcattcag

SEQ ID NO: 140828 - DNA, 25 bp, probe
acccaagacattaaatctgccatct

SEQ ID NO: 140829 - DNA, 25 bp, probe
acgacaaacgtgacttctgcgcaca

SEQ ID NO: 140830 - DNA, 25 bp, probe
acgacaaacgtgacttctgcgcaca

SEQ ID NO: 140831 - DNA, 25 bp, probe
acgacgtgaaggacgtcattgagca

SEQ ID NO: 140832 - DNA, 25 bp, probe
acgccggtggacagtcctgatgaca

SEQ ID NO: 140833 - DNA, 25 bp, probe
acgccggtggacagtcctgatgaca

SEQ ID NO: 140834 - DNA, 25 bp, probe
acgtcctgaggacagttctgtgaac

SEQ ID NO: 140835 - DNA, 25 bp, probe
acgtccgaggtcgacacaaggtact

SEQ ID NO: 140836 - DNA, 25 bp, probe
acgatcggggccggagacaagtgac

SEQ ID NO: 140837 - DNA, 25 bp, probe
acgatgccacgacggtggacacact

SEQ ID NO: 140838 - DNA, 25 bp, probe
acgaagcactatggtgggaacccca

SEQ ID NO: 140839 - DNA, 25 bp, probe
acgaaggatcatgtggtaactgcga

SEQ ID NO: 140840 - DNA, 25 bp, probe
acgaggagatctgtgtttacttaag

SEQ ID NO: 140841 - DNA, 25 bp, probe
acgaggcgatcaggttggtcaatgt

SEQ ID NO: 140842 - DNA, 25 bp, probe
acgctggctgatgtactggtacagg

SEQ ID NO: 140843 - DNA, 25 bp, probe
acgcgatgttgactgcacaggtaat

SEQ ID NO: 140844 - DNA, 25 bp, probe
acgcgcaggtgacggccttagatct

SEQ ID NO: 140845 - DNA, 25 bp, probe
acgctggagggggactttgtgctca

SEQ ID NO: 140846 - DNA, 25 bp, probe
acactggaaggtgacgacctcatcc

SEQ ID NO: 140847 - DNA, 25 bp, probe
acgctgagcgaggtggactatgccc

SEQ ID NO: 140848 - DNA, 25 bp, probe
acgctgctagcgtggacatagccct

SEQ ID NO: 140849 - DNA, 25 bp, probe
acggccatggatgccaatagtcagt

SEQ ID NO: 140850 - DNA, 25 bp, probe
acgctccagctgatccagatgttat

SEQ ID NO: 140851 - DNA, 25 bp, probe
acgacgtgctgttcgaggatgtgta

SEQ ID NO: 140852 - DNA, 25 bp, probe
acgcacaggctattagtcatgatag

SEQ ID NO: 140853 - DNA, 25 bp, probe
acgccaagcattatgtgctgtgcgt

SEQ ID NO: 140854 - DNA, 25 bp, probe
acgccacagcatcaaggatgtgcac

SEQ ID NO: 140855 - DNA, 25 bp, probe
acgcccagtgagaacatctggccgg

SEQ ID NO: 140856 - DNA, 25 bp, probe
acgcccagtgagaacatctggccgg

SEQ ID NO: 140857 - DNA, 25 bp, probe
acgccagcagctttacgctggctgc

SEQ ID NO: 140858 - DNA, 25 bp, probe
acgctgcagcagatcatgcgagggt

SEQ ID NO: 140859 - DNA, 25 bp, probe
acgctgcagagatcatttctgcact

SEQ ID NO: 140860 - DNA, 25 bp, probe
acgctgcagagatcatttctgcact

SEQ ID NO: 140861 - DNA, 25 bp, probe
acgctctgatgaagatctcctgcac

SEQ ID NO: 140862 - DNA, 25 bp, probe
acgctctgatgaagatctcctgcac

SEQ ID NO: 140863 - DNA, 25 bp, probe
acgtctggtatgacccagccgaagt

SEQ ID NO: 140864 - DNA, 25 bp, probe
acgtgcttgtcacccacgggaaagt

SEQ ID NO: 140865 - DNA, 25 bp, probe
acgtttgaccccagcgagatcaaag

SEQ ID NO: 140866 - DNA, 25 bp, probe
acgcttctttcccaggacagaaaat

SEQ ID NO: 140867 - DNA, 25 bp, probe
acgcttctttcccaggacagaaaat

SEQ ID NO: 140868 - DNA, 25 bp, probe
acgttgcattgtgccaacatcagca

SEQ ID NO: 140869 - DNA, 25 bp, probe
acgcccatcattgtcatgatcacca

SEQ ID NO: 140870 - DNA, 25 bp, probe
acgcccattgagacactgatcagag

SEQ ID NO: 140871 - DNA, 25 bp, probe
acgccacatgtgtcacttcattgaa

SEQ ID NO: 140872 - DNA, 25 bp, probe
acgccacatgtgtcacttcattgaa

SEQ ID NO: 140873 - DNA, 25 bp, probe
acgccacatgtgtcacttcattgaa

SEQ ID NO: 140874 - DNA, 25 bp, probe
acgccacatgtgtcacttcattgag

SEQ ID NO: 140875 - DNA, 25 bp, probe
acgccacagcaccagtgtgttggag

SEQ ID NO: 140876 - DNA, 25 bp, probe
acgtccaggttgtccttgagtaata

SEQ ID NO: 140877 - DNA, 25 bp, probe
actggtcacgtttggaaagaatatt

SEQ ID NO: 140878 - DNA, 25 bp, probe
acgatgtcacgtattgccaagagct

SEQ ID NO: 140879 - DNA, 25 bp, probe
acagagtaagttattctagacctca

SEQ ID NO: 140880 - DNA, 25 bp, probe
acgatttagaagctttaggtcatat

SEQ ID NO: 140881 - DNA, 25 bp, probe
acgtgttctaatcttaggcgcttca

SEQ ID NO: 140882 - DNA, 25 bp, probe
acggccttagatctctcgccgccaa

SEQ ID NO: 140883 - DNA, 25 bp, probe
acgaccttaatggtcatgctgccgc

SEQ ID NO: 140884 - DNA, 25 bp, probe
acgacctgtacatgatcatgcggga

SEQ ID NO: 140885 - DNA, 25 bp, probe
acgacctgtacatgatcatgcggga

SEQ ID NO: 140886 - DNA, 25 bp, probe
acgacagtaccattgagttgtgcgt

SEQ ID NO: 140887 - DNA, 25 bp, probe
acgagcgtccgcatgctaatcgctt

SEQ ID NO: 140888 - DNA, 25 bp, probe
acgacgagacctggtacatcctgtc

SEQ ID NO: 140889 - DNA, 25 bp, probe
acgactggacgaggtcctacttccg

SEQ ID NO: 140890 - DNA, 25 bp, probe
acgacggaatgcaggacgagccccg

SEQ ID NO: 140891 - DNA, 25 bp, probe
acgacgaggtcatgaacaggcccag

SEQ ID NO: 140892 - DNA, 25 bp, probe
acgacgaggtcatgaacaggcccag

SEQ ID NO: 140893 - DNA, 25 bp, probe
acgtcgaggcagtgaacatcccgga

SEQ ID NO: 140894 - DNA, 25 bp, probe
acgggaagttcaccagcaagtcgga

SEQ ID NO: 140895 - DNA, 25 bp, probe
acgcggcagagatcgccaacatgtc

SEQ ID NO: 140896 - DNA, 25 bp, probe
acgcggcatcagagcgtgcagacgg

SEQ ID NO: 140897 - DNA, 25 bp, probe
acgcaggaacgtggtgatgccaggc

SEQ ID NO: 140898 - DNA, 25 bp, probe
acgggcacacgaaggtggcggtgaa

SEQ ID NO: 140899 - DNA, 25 bp, probe
acgagaggccacagggcctggctgg

SEQ ID NO: 140900 - DNA, 25 bp, probe
acaccaaccagcaggaccagtttga

SEQ ID NO: 140901 - DNA, 25 bp, probe
acccaactcatcaggcagcgggtag

SEQ ID NO: 140902 - DNA, 25 bp, probe
acggaactcatgcgcaaggggaacc

SEQ ID NO: 140903 - DNA, 25 bp, probe
acggaactcatgcgcaaggggaacc

SEQ ID NO: 140904 - DNA, 25 bp, probe
acggaactcatgcgcaaggggaacc

SEQ ID NO: 140905 - DNA, 25 bp, probe
acgagaactactgatagggctgggt

SEQ ID NO: 140906 - DNA, 25 bp, probe
acgaagacttcttagagctcccagg

SEQ ID NO: 140907 - DNA, 25 bp, probe
acgaagacttcttagagctcccagg

SEQ ID NO: 140908 - DNA, 25 bp, probe
acgaagacattttcgggctcacgct

SEQ ID NO: 140909 - DNA, 25 bp, probe
acgaggactttgtgctagtcctggc

SEQ ID NO: 140910 - DNA, 25 bp, probe
acgaggttttcacctatggccagtg

SEQ ID NO: 140911 - DNA, 25 bp, probe
acgaggttttcacctatggccagtg

SEQ ID NO: 140912 - DNA, 25 bp, probe
acgggtttttccatggcatcagtat

SEQ ID NO: 140913 - DNA, 25 bp, probe
actgggttttctgtgggccacagtc

SEQ ID NO: 140914 - DNA, 25 bp, probe
acgggttcctctctgagcgagcgga

SEQ ID NO: 140915 - DNA, 25 bp, probe
acgaagagccagaccctgggaggga

SEQ ID NO: 140916 - DNA, 25 bp, probe
acggacaccgacgagtgggagcggg

SEQ ID NO: 140917 - DNA, 25 bp, probe
acggacaccgacgagtgggagcggg

SEQ ID NO: 140918 - DNA, 25 bp, probe
acgagacgctggaggtggacgtggc

SEQ ID NO: 140919 - DNA, 25 bp, probe
acgagacgctggaggtggacgtggc

SEQ ID NO: 140920 - DNA, 25 bp, probe
acgacctctctgcccgttgtggtga

SEQ ID NO: 140921 - DNA, 25 bp, probe
acgactgtgtcactttgcttgggga

SEQ ID NO: 140922 - DNA, 25 bp, probe
acgactgggggttgcaagggaacag

SEQ ID NO: 140923 - DNA, 25 bp, probe
acgtgctggccatgtggccagggac

SEQ ID NO: 140924 - DNA, 25 bp, probe
acgctgtcctcagggaccattaggg

SEQ ID NO: 140925 - DNA, 25 bp, probe
acgcgccctcagggaagacggtgag

SEQ ID NO: 140926 - DNA, 25 bp, probe
acgcacctcttcgaaagcctggagg

SEQ ID NO: 140927 - DNA, 25 bp, probe
acgacctctaagccgagagaggagg

SEQ ID NO: 140928 - DNA, 25 bp, probe
acccacacgtgcacgtcattggaga

SEQ ID NO: 140929 - DNA, 25 bp, probe
acgaccattacgtcatgcaggaaca

SEQ ID NO: 140930 - DNA, 25 bp, probe
acgcaacatcctggtctcagaggac

SEQ ID NO: 140931 - DNA, 25 bp, probe
acgcagactgtagctgctgtgggaa

SEQ ID NO: 140932 - DNA, 25 bp, probe
acgcattcttcaggagtgtggcagc

SEQ ID NO: 140933 - DNA, 25 bp, probe
acgattgtgacagcgtatgtgatga

SEQ ID NO: 140934 - DNA, 25 bp, probe
acgttgctgcagttcaggcattggc

SEQ ID NO: 140935 - DNA, 25 bp, probe
acgccatcaggcctcaagtgggcat

SEQ ID NO: 140936 - DNA, 25 bp, probe
acccaagtgcccatggtggtcatgc

SEQ ID NO: 140937 - DNA, 25 bp, probe
acccaacacccattagctctgttgg

SEQ ID NO: 140938 - DNA, 25 bp, probe
cacggaagaacctatagcctatgga

SEQ ID NO: 140939 - DNA, 25 bp, probe
acgagacagacaacatgaaccagat

SEQ ID NO: 140940 - DNA, 25 bp, probe
acgcatgactacattacaacgggcc

SEQ ID NO: 140941 - DNA, 25 bp, probe
acgtgatgctggattccgaggggca

SEQ ID NO: 140942 - DNA, 25 bp, probe
acgctgatggcagtggtcgggggcc

SEQ ID NO: 140943 - DNA, 25 bp, probe
acgctgatggcagtcacagggggcc

SEQ ID NO: 140944 - DNA, 25 bp, probe
acgctgctgcatatgaagtggaaga

SEQ ID NO: 140945 - DNA, 25 bp, probe
acgctgctgcatatgaagtggaaga

SEQ ID NO: 140946 - DNA, 25 bp, probe
acggcaacattatgctggacaagaa

SEQ ID NO: 140947 - DNA, 25 bp, probe
acccaacattacgccaagatcagtg

SEQ ID NO: 140948 - DNA, 25 bp, probe
taccccaattaagcccaccattggt

SEQ ID NO: 140949 - DNA, 25 bp, probe
taccccaactaataccaccgtggag

SEQ ID NO: 140950 - DNA, 25 bp, probe
acgacctcctcataaagaccgtgga

SEQ ID NO: 140951 - DNA, 25 bp, probe
acgcccttcgagaaactgacacagg

SEQ ID NO: 140952 - DNA, 25 bp, probe
acgcctcaacatggattactggaag

SEQ ID NO: 140953 - DNA, 25 bp, probe
acgcctctgacatgagtccagggag

SEQ ID NO: 140954 - DNA, 25 bp, probe
acgcctgcgacatgaccatagagga

SEQ ID NO: 140955 - DNA, 25 bp, probe
acgcttcagagataccaatgggcat

SEQ ID NO: 140956 - DNA, 25 bp, probe
acgcttcagctgttgatccgctggt

SEQ ID NO: 140957 - DNA, 25 bp, probe
acgcttcagctgttgatccgctggt

SEQ ID NO: 140958 - DNA, 25 bp, probe
acgcctctgtgaagatctctgggct

SEQ ID NO: 140959 - DNA, 25 bp, probe
acgccatctgctactactacatggc

SEQ ID NO: 140960 - DNA, 25 bp, probe
acgccaggtagcatcaccagagcag

SEQ ID NO: 140961 - DNA, 25 bp, probe
acgccaggacagacgatggcagagg

SEQ ID NO: 140962 - DNA, 25 bp, probe
acgccgcccatgaagatggtgacag

SEQ ID NO: 140963 - DNA, 25 bp, probe
actgctcgtcctatgttgatgcagg

SEQ ID NO: 140964 - DNA, 25 bp, probe
acgcctcatcctctacaatgatggt

SEQ ID NO: 140965 - DNA, 25 bp, probe
actgcctgacctttaaaaggccatc

SEQ ID NO: 140966 - DNA, 25 bp, probe
acgactccctgctggtcaaagtcat

SEQ ID NO: 140967 - DNA, 25 bp, probe
acgaccagtctcagtacaagaggct

SEQ ID NO: 140968 - DNA, 25 bp, probe
acgaaaactgcagctccaagagcct

SEQ ID NO: 140969 - DNA, 25 bp, probe
acggaaagcatcctctccaaagttg

SEQ ID NO: 140970 - DNA, 25 bp, probe
aatttactgtggtctctaagtttgg

SEQ ID NO: 140971 - DNA, 25 bp, probe
acgtttctgtggagtaaatattggg

SEQ ID NO: 140972 - DNA, 25 bp, probe
acgctttctgtgtatttatatagat

SEQ ID NO: 140973 - DNA, 25 bp, probe
acgctttccgggttcatgtgagtta

SEQ ID NO: 140974 - DNA, 25 bp, probe
acgtttgtagaagatactagttgag

SEQ ID NO: 140975 - DNA, 25 bp, probe
acaggtggtaaagacacttgtgggg

SEQ ID NO: 140976 - DNA, 25 bp, probe
acgggtgtaagtgccatctggtagc

SEQ ID NO: 140977 - DNA, 25 bp, probe
acgctcgtggaaaccacactcaaag

SEQ ID NO: 140978 - DNA, 25 bp, probe
acgctcgtgaaagcacataccacta

SEQ ID NO: 140979 - DNA, 25 bp, probe
acgcttatgaaaccaaagatgcctt

SEQ ID NO: 140980 - DNA, 25 bp, probe
acgccattattacgacagtaccatt

SEQ ID NO: 140981 - DNA, 25 bp, probe
acgctcattttatgtaatattcttc

SEQ ID NO: 140982 - DNA, 25 bp, probe
acgccatctttgacctaggcatgtc

SEQ ID NO: 140983 - DNA, 25 bp, probe
acgctcagcttgtatccattgactg

SEQ ID NO: 140984 - DNA, 25 bp, probe
acgtcctttgcattatctgatcaaa

SEQ ID NO: 140985 - DNA, 25 bp, probe
acgcccaactgcagcatctatgaac

SEQ ID NO: 140986 - DNA, 25 bp, probe
acgcccaactgcagcatctatgaac

SEQ ID NO: 140987 - DNA, 25 bp, probe
acgctccaactgatccagatgctac

SEQ ID NO: 140988 - DNA, 25 bp, probe
acgctctggttgagctcagtggagc

SEQ ID NO: 140989 - DNA, 25 bp, probe
acgacttctgtaagctccaggagct

SEQ ID NO: 140990 - DNA, 25 bp, probe
acgatttcgtgaggcggcagccagg

SEQ ID NO: 140991 - DNA, 25 bp, probe
acgacttcaggaggctcctgcgcaa

SEQ ID NO: 140992 - DNA, 25 bp, probe
acgtttcaggcaggcacctagcaat

SEQ ID NO: 140993 - DNA, 25 bp, probe
acgttctgaggcacatcctcactgt

SEQ ID NO: 140994 - DNA, 25 bp, probe
acgttcaggctcacaagcttgatct

SEQ ID NO: 140995 - DNA, 25 bp, probe
acgctacagcgtggacaaatctctc

SEQ ID NO: 140996 - DNA, 25 bp, probe
acgctacagatgggatcaagggctc

SEQ ID NO: 140997 - DNA, 25 bp, probe
acgctggcctgggatgagagggccc

SEQ ID NO: 140998 - DNA, 25 bp, probe
acgcggcgggcagtgcggaagatgc

SEQ ID NO: 140999 - DNA, 25 bp, probe
acgctggggaaacggataggcttct

SEQ ID NO: 141000 - DNA, 25 bp, probe
acgggaggacaagcaataactctct

SEQ ID NO: 141001 - DNA, 25 bp, probe
acggagggcaggtccaaagccttca

SEQ ID NO: 141002 - DNA, 25 bp, probe
acggagggcaggtccaaagccttca

SEQ ID NO: 141003 - DNA, 25 bp, probe
acgggggcagtctcattaatctgac

SEQ ID NO: 141004 - DNA, 25 bp, probe
acgtggggcacctgagcagaatcta

SEQ ID NO: 141005 - DNA, 25 bp, probe
acgcaggaggccgacggccagaaga

SEQ ID NO: 141006 - DNA, 25 bp, probe
acgggcagccgggcttcaaaagcaa

SEQ ID NO: 141007 - DNA, 25 bp, probe
acgtgtgactagtgcttaccatact

SEQ ID NO: 141008 - DNA, 25 bp, probe
acgctggaaatgctctttcctagcc

SEQ ID NO: 141009 - DNA, 25 bp, probe
acgtaaaatgtgtcgctccgtatcc

SEQ ID NO: 141010 - DNA, 25 bp, probe
acgtactttctgttatcaagctacc

SEQ ID NO: 141011 - DNA, 25 bp, probe
acgtgttacctgtttcacatgtacg

SEQ ID NO: 141012 - DNA, 25 bp, probe
acgctggttttgtgtacagtgaagc

SEQ ID NO: 141013 - DNA, 25 bp, probe
actcgggcttgtgaggccggaatcc

SEQ ID NO: 141014 - DNA, 25 bp, probe
acgggcactaggggagccgaattct

SEQ ID NO: 141015 - DNA, 25 bp, probe
acgtgtcagtggtggacctgacctg

SEQ ID NO: 141016 - DNA, 25 bp, probe
acgtgtcgcccatgggcctgaagat

SEQ ID NO: 141017 - DNA, 25 bp, probe
actgtgggaccaggaccctaagtct

SEQ ID NO: 141018 - DNA, 25 bp, probe
acgatggtacctagtctttgaattt

SEQ ID NO: 141019 - DNA, 25 bp, probe
acgtggcgtcctggttcaaggatgt

SEQ ID NO: 141020 - DNA, 25 bp, probe
acagtaagtcaggaattcaagcgtg

SEQ ID NO: 141021 - DNA, 25 bp, probe
acagtaagtcaggaattcaagcgtg

SEQ ID NO: 141022 - DNA, 25 bp, probe
acgcttgagccagaatctcaggacc

SEQ ID NO: 141023 - DNA, 25 bp, probe
acgctcatcacctaaacttgtactt

SEQ ID NO: 141024 - DNA, 25 bp, probe
acgctggcatcgaaaacactgagat

SEQ ID NO: 141025 - DNA, 25 bp, probe
acgctggctgctcaagtactagccc

SEQ ID NO: 141026 - DNA, 25 bp, probe
acgctggctgctcaagtactagccc

SEQ ID NO: 141027 - DNA, 25 bp, probe
acgaagtgcttgggtatctcagctc

SEQ ID NO: 141028 - DNA, 25 bp, probe
acgaagtgcttgggtatctcagctc

SEQ ID NO: 141029 - DNA, 25 bp, probe
acgaatagtctgagtagatcccccc

SEQ ID NO: 141030 - DNA, 25 bp, probe
acgcagaagccgaaggtgagccctt

SEQ ID NO: 141031 - DNA, 25 bp, probe
acatcagtaccaaggagtacgccta

SEQ ID NO: 141032 - DNA, 25 bp, probe
actcattacatatgatgcctaccct

SEQ ID NO: 141033 - DNA, 25 bp, probe
actagtacattcctgttattttctg

SEQ ID NO: 141034 - DNA, 25 bp, probe
acgcaggacattcttgccgtattct

SEQ ID NO: 141035 - DNA, 25 bp, probe
acgcgggcattgatgccacagctga

SEQ ID NO: 141036 - DNA, 25 bp, probe
actggggcttttcctattgatttgg

SEQ ID NO: 141037 - DNA, 25 bp, probe
acggttgcatttgccacttcattta

SEQ ID NO: 141038 - DNA, 25 bp, probe
actggtttcttacattgccattttc

SEQ ID NO: 141039 - DNA, 25 bp, probe
actggttacctacgaaggctccaat

SEQ ID NO: 141040 - DNA, 25 bp, probe
actggtacaccgtgggcaccaaata

SEQ ID NO: 141041 - DNA, 25 bp, probe
acggacagcacatgtggaggcccaa

SEQ ID NO: 141042 - DNA, 25 bp, probe
actggacagtagatgggccgacaca

SEQ ID NO: 141043 - DNA, 25 bp, probe
acggaaatgttcagctgccgacgct

SEQ ID NO: 141044 - DNA, 25 bp, probe
acggaaatctcctgtggtggcagct

SEQ ID NO: 141045 - DNA, 25 bp, probe
acgaggacttcgtgcagtgggagat

SEQ ID NO: 141046 - DNA, 25 bp, probe
acgcggaggacgcgagggggacgct

SEQ ID NO: 141047 - DNA, 25 bp, probe
acggagctgtcccctagtgagggac

SEQ ID NO: 141048 - DNA, 25 bp, probe
acgtgagcttccgctcagcggagaa

SEQ ID NO: 141049 - DNA, 25 bp, probe
acgtcagttctgtccatgtgggaga

SEQ ID NO: 141050 - DNA, 25 bp, probe
actggctggcacaccagggcaatga

SEQ ID NO: 141051 - DNA, 25 bp, probe
acgcgctggcgttacagcgcaacag

SEQ ID NO: 141052 - DNA, 25 bp, probe
acgcactgtcagttacaccaatctg

SEQ ID NO: 141053 - DNA, 25 bp, probe
acgcactgtcagttacaccaatctg

SEQ ID NO: 141054 - DNA, 25 bp, probe
acgcactgtcagttacaccaatctg

SEQ ID NO: 141055 - DNA, 25 bp, probe
acgactgccaggaagaggagatctc

SEQ ID NO: 141056 - DNA, 25 bp, probe
acgaccgcgagatggtgcagcaggc

SEQ ID NO: 141057 - DNA, 25 bp, probe
acgaccgcgagatggtgcagcaggc

SEQ ID NO: 141058 - DNA, 25 bp, probe
acgacgggagtcgctgcagaagcaa

SEQ ID NO: 141059 - DNA, 25 bp, probe
actgaagaaggtgcggatggacaag

SEQ ID NO: 141060 - DNA, 25 bp, probe
actgcagagaaacacggaaactagg

SEQ ID NO: 141061 - DNA, 25 bp, probe
acgagaaagctgcacagtatcaaat

SEQ ID NO: 141062 - DNA, 25 bp, probe
acgggccagctcaagctgtacaaat

SEQ ID NO: 141063 - DNA, 25 bp, probe
acggtgcacagtaatatgaaagcca

SEQ ID NO: 141064 - DNA, 25 bp, probe
acggtgcacagtaatatgaaagcca

SEQ ID NO: 141065 - DNA, 25 bp, probe
acggcatcagcaagttcgaagtcaa

SEQ ID NO: 141066 - DNA, 25 bp, probe
acgtctgcagcatttatctgtttga

SEQ ID NO: 141067 - DNA, 25 bp, probe
acgatccacgattattgatgttgac

SEQ ID NO: 141068 - DNA, 25 bp, probe
acgagcccagtgtagttgtgtggcg

SEQ ID NO: 141069 - DNA, 25 bp, probe
acgaggccaggatgaagggtctgga

SEQ ID NO: 141070 - DNA, 25 bp, probe
acgaggccctcttggaggaggcgaa

SEQ ID NO: 141071 - DNA, 25 bp, probe
acgggtacctgtggagcgaggtgta

SEQ ID NO: 141072 - DNA, 25 bp, probe
acgggtacctgtggagcgaggtgta

SEQ ID NO: 141073 - DNA, 25 bp, probe
acgggaagcggtgcagaggggcagg

SEQ ID NO: 141074 - DNA, 25 bp, probe
acgggaaggccgtagatgtgtgggc

SEQ ID NO: 141075 - DNA, 25 bp, probe
acgggaaggccgtagatgtgtgggc

SEQ ID NO: 141076 - DNA, 25 bp, probe
actgggagcggctggaacgattgga

SEQ ID NO: 141077 - DNA, 25 bp, probe
actggtgatggaaggttacaagtgg

SEQ ID NO: 141078 - DNA, 25 bp, probe
acggctgggttggatatgcctttgc

SEQ ID NO: 141079 - DNA, 25 bp, probe
acggtggtgcttggtacagcgtacc

SEQ ID NO: 141080 - DNA, 25 bp, probe
acggcatagcttaggtgcgccgtcc

SEQ ID NO: 141081 - DNA, 25 bp, probe
acgtgttgctgctggtgcgcagcgt

SEQ ID NO: 141082 - DNA, 25 bp, probe
acgttcatgtgctggatactgtgta

SEQ ID NO: 141083 - DNA, 25 bp, probe
acgcttccagcccggagtgctggag

SEQ ID NO: 141084 - DNA, 25 bp, probe
acgcaatcggcccagggcttgggtg

SEQ ID NO: 141085 - DNA, 25 bp, probe
acgcaatcggcccagggcttgggtg

SEQ ID NO: 141086 - DNA, 25 bp, probe
acgctcagctgccaacagtggattg

SEQ ID NO: 141087 - DNA, 25 bp, probe
acgctgagaccactagtgaatgtga

SEQ ID NO: 141088 - DNA, 25 bp, probe
acgctgagaccactagtgaatgtga

SEQ ID NO: 141089 - DNA, 25 bp, probe
acgctgcagatcgaggactttctgg

SEQ ID NO: 141090 - DNA, 25 bp, probe
acgcttcatcaatcactcgtgtgag

SEQ ID NO: 141091 - DNA, 25 bp, probe
acgtgctccacagcttcatttagag

SEQ ID NO: 141092 - DNA, 25 bp, probe
acgagtgcctgaactgcatgattta

SEQ ID NO: 141093 - DNA, 25 bp, probe
acgaatgcaagaattgagatctcgg

SEQ ID NO: 141094 - DNA, 25 bp, probe
acgaatcaatgttttatctctgtcc

SEQ ID NO: 141095 - DNA, 25 bp, probe
acgtatgcagtatcctatctctttc

SEQ ID NO: 141096 - DNA, 25 bp, probe
actgggcccaacatatccattttta

SEQ ID NO: 141097 - DNA, 25 bp, probe
acgttctcaaaactatccagatggt

SEQ ID NO: 141098 - DNA, 25 bp, probe
actgtttaaaagtgcccttatgcct

SEQ ID NO: 141099 - DNA, 25 bp, probe
actctgtttaaatctgccactttct

SEQ ID NO: 141100 - DNA, 25 bp, probe
actctgtttaaatctgccactttct

SEQ ID NO: 141101 - DNA, 25 bp, probe
actctaaagggaactgtgacatttc

SEQ ID NO: 141102 - DNA, 25 bp, probe
actgtaaacgtagcaagatctgtat

SEQ ID NO: 141103 - DNA, 25 bp, probe
acggaaacagaactcgatgcactga

SEQ ID NO: 141104 - DNA, 25 bp, probe
acggaacaatcccaaatgcactgtc

SEQ ID NO: 141105 - DNA, 25 bp, probe
acacaaaggtcccatttgcagttag

SEQ ID NO: 141106 - DNA, 25 bp, probe
acgcacaagacccggtgctgcgtta

SEQ ID NO: 141107 - DNA, 25 bp, probe
acgaaagaggccatgtctgcagaaa

SEQ ID NO: 141108 - DNA, 25 bp, probe
acgaggaatggcctttctacaaagc

SEQ ID NO: 141109 - DNA, 25 bp, probe
acgagatgaatctcatttcaccaaa

SEQ ID NO: 141110 - DNA, 25 bp, probe
acgtgggtgtactccatcaacaacg

SEQ ID NO: 141111 - DNA, 25 bp, probe
acgatgggattatgcacttcccaat

SEQ ID NO: 141112 - DNA, 25 bp, probe
acgggtgttgaaggtgtcttcagaa

SEQ ID NO: 141113 - DNA, 25 bp, probe
acggaggcttcacctggtgtttgaa

SEQ ID NO: 141114 - DNA, 25 bp, probe
acgatgaacatgccgttggttttat

SEQ ID NO: 141115 - DNA, 25 bp, probe
acggtactagcatttgttatttcat

SEQ ID NO: 141116 - DNA, 25 bp, probe
acggtgttcaccaagttagattatt

SEQ ID NO: 141117 - DNA, 25 bp, probe
acgtttctactccaattaagaatat

SEQ ID NO: 141118 - DNA, 25 bp, probe
acgtttctactccaattaagaatat

SEQ ID NO: 141119 - DNA, 25 bp, probe
cacgtttccttctgatttggaatct

SEQ ID NO: 141120 - DNA, 25 bp, probe
acgatttctttgtttttggcttgat

SEQ ID NO: 141121 - DNA, 25 bp, probe
acggtcaggtttaacatttgccttg

SEQ ID NO: 141122 - DNA, 25 bp, probe
actggtcggcttcagagtttccaca

SEQ ID NO: 141123 - DNA, 25 bp, probe
actttttgttggtaacttgccacat

SEQ ID NO: 141124 - DNA, 25 bp, probe
actttttgttggtaacttgccacat

SEQ ID NO: 141125 - DNA, 25 bp, probe
actggaaatgggttaatcttgccaa

SEQ ID NO: 141126 - DNA, 25 bp, probe
acgtaaagctagaaatgatccccag

SEQ ID NO: 141127 - DNA, 25 bp, probe
acgtcagaatgttgcttttcccacg

SEQ ID NO: 141128 - DNA, 25 bp, probe
acgaagagatgtcttctgtgcccag

SEQ ID NO: 141129 - DNA, 25 bp, probe
acgaagagatgtcttctgtgcccag

SEQ ID NO: 141130 - DNA, 25 bp, probe
acgcaaacatgggtgctcttggagc

SEQ ID NO: 141131 - DNA, 25 bp, probe
acggcaagcatgaggccttgtctcc

SEQ ID NO: 141132 - DNA, 25 bp, probe
acggcaagcatgaggccttgtctcc

SEQ ID NO: 141133 - DNA, 25 bp, probe
acggaaggaggggacatgtctcccg

SEQ ID NO: 141134 - DNA, 25 bp, probe
acggaatgaaaacagagcttcccgt

SEQ ID NO: 141135 - DNA, 25 bp, probe
acgagatgatagaaacagaatgctt

SEQ ID NO: 141136 - DNA, 25 bp, probe
acgaccaagtgacagcaatgctgtt

SEQ ID NO: 141137 - DNA, 25 bp, probe
acgaacagactcaggcgatgtgctt

SEQ ID NO: 141138 - DNA, 25 bp, probe
acgtcaaggccgtggacatctacct

SEQ ID NO: 141139 - DNA, 25 bp, probe
acgaacactccctggagtgctacct

SEQ ID NO: 141140 - DNA, 25 bp, probe
acgacttcatccgggaggtcaatgc

SEQ ID NO: 141141 - DNA, 25 bp, probe
acgacatcaccgaggagtgtaggcc

SEQ ID NO: 141142 - DNA, 25 bp, probe
acgtcaactctgtggaggctttgca

SEQ ID NO: 141143 - DNA, 25 bp, probe
actgtgaactctgagacgtctcctg

SEQ ID NO: 141144 - DNA, 25 bp, probe
actgtgaactctgagacgtctcctg

SEQ ID NO: 141145 - DNA, 25 bp, probe
actgtgtttcttttggttccattgt

SEQ ID NO: 141146 - DNA, 25 bp, probe
acgattttctgtatgatgttacttt

SEQ ID NO: 141147 - DNA, 25 bp, probe
acgttctacgataagcattgtgacc

SEQ ID NO: 141148 - DNA, 25 bp, probe
acgttctatctggcaactggtactt

SEQ ID NO: 141149 - DNA, 25 bp, probe
acgggtttggcaactgcgtggagct

SEQ ID NO: 141150 - DNA, 25 bp, probe
acgaggtaaggtgcaagtgcagagt

SEQ ID NO: 141151 - DNA, 25 bp, probe
acgggaaaacaccatttcagcagat

SEQ ID NO: 141152 - DNA, 25 bp, probe
acgggaaaacaccatttcagcagat

SEQ ID NO: 141153 - DNA, 25 bp, probe
acgaggacatgaaagctattccaga

SEQ ID NO: 141154 - DNA, 25 bp, probe
acgaggatattgactgggtacagac

SEQ ID NO: 141155 - DNA, 25 bp, probe
acggtatttcagaaggtcatcagat

SEQ ID NO: 141156 - DNA, 25 bp, probe
acggattattacaggatctatgtag

SEQ ID NO: 141157 - DNA, 25 bp, probe
aagtattttgacagggccgtcaccg

SEQ ID NO: 141158 - DNA, 25 bp, probe
acgttttgtgaccactgtgggtcac

SEQ ID NO: 141159 - DNA, 25 bp, probe
actgtgcccgtaaactgggcttcac

SEQ ID NO: 141160 - DNA, 25 bp, probe
actgtgcccgtaaactgggcttcac

SEQ ID NO: 141161 - DNA, 25 bp, probe
actggtgcacttaaactgtacttca

SEQ ID NO: 141162 - DNA, 25 bp, probe
actggtgcacttaaactgtacttca

SEQ ID NO: 141163 - DNA, 25 bp, probe
actggtgcacttaaactgtacttca

SEQ ID NO: 141164 - DNA, 25 bp, probe
actatgtccatgtgaacgctactta

SEQ ID NO: 141165 - DNA, 25 bp, probe
acgattggctgaagtaccagacctg

SEQ ID NO: 141166 - DNA, 25 bp, probe
acgagaagctaaccatgcagaacct

SEQ ID NO: 141167 - DNA, 25 bp, probe
acggaggctcgtgcatgtaatccta

SEQ ID NO: 141168 - DNA, 25 bp, probe
actgtgggtcttgcatttatgtcta

SEQ ID NO: 141169 - DNA, 25 bp, probe
actgtcgggcttcttatgtatctac

SEQ ID NO: 141170 - DNA, 25 bp, probe
acgtcagtggtgttttcatatggta

SEQ ID NO: 141171 - DNA, 25 bp, probe
actgtcatctagattttccatttca

SEQ ID NO: 141172 - DNA, 25 bp, probe
acaggatgtaatattaccaaccttt

SEQ ID NO: 141173 - DNA, 25 bp, probe
acaggatgtaatattaccaaccttt

SEQ ID NO: 141174 - DNA, 25 bp, probe
acgtcaataattttgaccaagactt

SEQ ID NO: 141175 - DNA, 25 bp, probe
acgtcacgctgaatatatgaccacg

SEQ ID NO: 141176 - DNA, 25 bp, probe
acgatactgtgcaatcatcacctct

SEQ ID NO: 141177 - DNA, 25 bp, probe
acgatgaaggagtaaccctgttaca

SEQ ID NO: 141178 - DNA, 25 bp, probe
acgtcaaagaaagcgccgctcatga

SEQ ID NO: 141179 - DNA, 25 bp, probe
acgtatgaggagaagccgccctacg

SEQ ID NO: 141180 - DNA, 25 bp, probe
acgtcagagcaggtgacacgacccc

SEQ ID NO: 141181 - DNA, 25 bp, probe
acggcaaacattactgctacccgca

SEQ ID NO: 141182 - DNA, 25 bp, probe
acggaagacattcttcagcctggcc

SEQ ID NO: 141183 - DNA, 25 bp, probe
acggaagcacggctcagcacgtggt

SEQ ID NO: 141184 - DNA, 25 bp, probe
acgtgctcaacatcgtcaacgtggt

SEQ ID NO: 141185 - DNA, 25 bp, probe
acgtccatcagccggacaacattgg

SEQ ID NO: 141186 - DNA, 25 bp, probe
acgtccattgctggcaactgacttg

SEQ ID NO: 141187 - DNA, 25 bp, probe
actccacttctggaactactttatc

SEQ ID NO: 141188 - DNA, 25 bp, probe
acaccattttaggcattacattttc

SEQ ID NO: 141189 - DNA, 25 bp, probe
acgtttttcaccttagcattttgtg

SEQ ID NO: 141190 - DNA, 25 bp, probe
actttttccacctgtcagattggtg

SEQ ID NO: 141191 - DNA, 25 bp, probe
acgtattttccgtagtgctctgggt

SEQ ID NO: 141192 - DNA, 25 bp, probe
acgttatttacgtcaatacacagtt

SEQ ID NO: 141193 - DNA, 25 bp, probe
acggtttaactgtcccagcgagatt

SEQ ID NO: 141194 - DNA, 25 bp, probe
acgagctatttcagtctatcatgga

SEQ ID NO: 141195 - DNA, 25 bp, probe
acgtccatgtttgactattgtgatg

SEQ ID NO: 141196 - DNA, 25 bp, probe
acgtccatgtttgactattgtgatg

SEQ ID NO: 141197 - DNA, 25 bp, probe
acgtccatacttcgattcttatcat

SEQ ID NO: 141198 - DNA, 25 bp, probe
acgttaactcacatttatacagcag

SEQ ID NO: 141199 - DNA, 25 bp, probe
acgacttactagatctcatacaagg

SEQ ID NO: 141200 - DNA, 25 bp, probe
acgttaactcgaattctcacaagga

SEQ ID NO: 141201 - DNA, 25 bp, probe
acgtgtccacttcagactacaagga

SEQ ID NO: 141202 - DNA, 25 bp, probe
acggtcacagttgagactgtcgtct

SEQ ID NO: 141203 - DNA, 25 bp, probe
acaggccacgttaaactgcccatct

SEQ ID NO: 141204 - DNA, 25 bp, probe
actgaccaggctgtacctgaccatc

SEQ ID NO: 141205 - DNA, 25 bp, probe
actgaaaagctaacaccgactgccc

SEQ ID NO: 141206 - DNA, 25 bp, probe
actgaagggctaaccgtgatagtcc

SEQ ID NO: 141207 - DNA, 25 bp, probe
acgacagaagcattccctataaggc

SEQ ID NO: 141208 - DNA, 25 bp, probe
acggcgaaccgcaacatataatggc

SEQ ID NO: 141209 - DNA, 25 bp, probe
acgatggacctcaagaatcaaattt

SEQ ID NO: 141210 - DNA, 25 bp, probe
acgtggactttagcatgcagagcag

SEQ ID NO: 141211 - DNA, 25 bp, probe
acgtatgtttgtccgcacatgcaag

SEQ ID NO: 141212 - DNA, 25 bp, probe
acgggcttatgcagaccagcaagct

SEQ ID NO: 141213 - DNA, 25 bp, probe
acggtttatgaggaacagcttcagc

SEQ ID NO: 141214 - DNA, 25 bp, probe
actggactctagcctacaacatgct

SEQ ID NO: 141215 - DNA, 25 bp, probe
actggactctagcctacaacatgct

SEQ ID NO: 141216 - DNA, 25 bp, probe
acgtcatcgcgctcaatcagaagct

SEQ ID NO: 141217 - DNA, 25 bp, probe
acgtcatcgttgccaacacaatgcc

SEQ ID NO: 141218 - DNA, 25 bp, probe
acgtcatcgttgccaacacaatgcc

SEQ ID NO: 141219 - DNA, 25 bp, probe
acgttctcattggcaacatctacat

SEQ ID NO: 141220 - DNA, 25 bp, probe
acgtcttgctctcattatctgcaat

SEQ ID NO: 141221 - DNA, 25 bp, probe
acgtcttgctctcattatctgcaat

SEQ ID NO: 141222 - DNA, 25 bp, probe
acgtgcttcccatgatctctgaagc

SEQ ID NO: 141223 - DNA, 25 bp, probe
acgtattgccaagagcttgaagctc

SEQ ID NO: 141224 - DNA, 25 bp, probe
acggatatggctgctactgtgggct

SEQ ID NO: 141225 - DNA, 25 bp, probe
acggatatggctgctactgtgggct

SEQ ID NO: 141226 - DNA, 25 bp, probe
acgggtacagcagacagtgtcacat

SEQ ID NO: 141227 - DNA, 25 bp, probe
acgggtacagcagacagtgtcacat

SEQ ID NO: 141228 - DNA, 25 bp, probe
acggatgtcgcagaagagtgtcaga

SEQ ID NO: 141229 - DNA, 25 bp, probe
acggctgctcgaagaacaatgtcag

SEQ ID NO: 141230 - DNA, 25 bp, probe
acgtggccctgaggatgaagctcat

SEQ ID NO: 141231 - DNA, 25 bp, probe
acgtgtcccatgtcgtgggctatat

SEQ ID NO: 141232 - DNA, 25 bp, probe
acgttcattcaactgtgatcacttt

SEQ ID NO: 141233 - DNA, 25 bp, probe
acgttcattcaactgtgatcacttt

SEQ ID NO: 141234 - DNA, 25 bp, probe
acgttcatccaattaggcatccttc

SEQ ID NO: 141235 - DNA, 25 bp, probe
acgtgctgacgtttgaagacctcct

SEQ ID NO: 141236 - DNA, 25 bp, probe
acgatgggcagtttcacagttcatc

SEQ ID NO: 141237 - DNA, 25 bp, probe
acggcgtgcattatcaacatcatat

SEQ ID NO: 141238 - DNA, 25 bp, probe
acgagcagtgtgagagccagctcaa

SEQ ID NO: 141239 - DNA, 25 bp, probe
acgtcacgcagacagcactgtcaac

SEQ ID NO: 141240 - DNA, 25 bp, probe
acgttctgcaaggactgtgttcccg

SEQ ID NO: 141241 - DNA, 25 bp, probe
acgtcttgaacaggcgctgatgacc

SEQ ID NO: 141242 - DNA, 25 bp, probe
acgatcggtacatggctatctgcca

SEQ ID NO: 141243 - DNA, 25 bp, probe
acggctgttgcagcaggctttccgg

SEQ ID NO: 141244 - DNA, 25 bp, probe
actggcttagcaaccggcattccag

SEQ ID NO: 141245 - DNA, 25 bp, probe
actggcctagccatgtggaattccc

SEQ ID NO: 141246 - DNA, 25 bp, probe
actggcctagagatgttgcccttcc

SEQ ID NO: 141247 - DNA, 25 bp, probe
acggtttatgtgtgtgcctcattcc

SEQ ID NO: 141248 - DNA, 25 bp, probe
acggtttatgtgtgtgcctcattcc

SEQ ID NO: 141249 - DNA, 25 bp, probe
acggccttcatggatggtgccttgg

SEQ ID NO: 141250 - DNA, 25 bp, probe
acgtctctctcaccaggatttggtg

SEQ ID NO: 141251 - DNA, 25 bp, probe
acggcactccgcgagctgtatcggg

SEQ ID NO: 141252 - DNA, 25 bp, probe
acgtcacgggcatcgtacaggtgta

SEQ ID NO: 141253 - DNA, 25 bp, probe
acgtcacgggcatcgtacaggtgta

SEQ ID NO: 141254 - DNA, 25 bp, probe
acgagaagggcagcgtgccagtcct

SEQ ID NO: 141255 - DNA, 25 bp, probe
acgagaagggcagcgtgccagtcct

SEQ ID NO: 141256 - DNA, 25 bp, probe
acgagacggtggacgtggaggacat

SEQ ID NO: 141257 - DNA, 25 bp, probe
acgactgcgagtgacgtgtgggcct

SEQ ID NO: 141258 - DNA, 25 bp, probe
acgagctgcggatagcgaggctgcg

SEQ ID NO: 141259 - DNA, 25 bp, probe
acggagaggtcttcaaggtgcgctc

SEQ ID NO: 141260 - DNA, 25 bp, probe
acgtgcgagggctgcaagagcttct

SEQ ID NO: 141261 - DNA, 25 bp, probe
acgacgcggagaacaaactgaacga

SEQ ID NO: 141262 - DNA, 25 bp, probe
acggggagagcaatgaagacagcaa

SEQ ID NO: 141263 - DNA, 25 bp, probe
acggggagagcaatgaagacagcaa

SEQ ID NO: 141264 - DNA, 25 bp, probe
acggaggcagacaagcccaatggca

SEQ ID NO: 141265 - DNA, 25 bp, probe
acggaagacatcacgctcatcatcg

SEQ ID NO: 141266 - DNA, 25 bp, probe
actgaggaacaaagccatgcccgta

SEQ ID NO: 141267 - DNA, 25 bp, probe
cactaagaaaatacctccctgggag

SEQ ID NO: 141268 - DNA, 25 bp, probe
cactaagaaaatacctccctgggag

SEQ ID NO: 141269 - DNA, 25 bp, probe
acgagcagaaagatccatcttgctg

SEQ ID NO: 141270 - DNA, 25 bp, probe
acgggagacaggtctgtcttctgcc

SEQ ID NO: 141271 - DNA, 25 bp, probe
acgggagacaggtctgtcttctgcc

SEQ ID NO: 141272 - DNA, 25 bp, probe
acgggcacatacggattcttgctgc

SEQ ID NO: 141273 - DNA, 25 bp, probe
acgtggagctccttagccatgagct

SEQ ID NO: 141274 - DNA, 25 bp, probe
acgtgcggttcattgactatgaata

SEQ ID NO: 141275 - DNA, 25 bp, probe
actgcatctggatatataccagtat

SEQ ID NO: 141276 - DNA, 25 bp, probe
acgactggattctatcttcatttta

SEQ ID NO: 141277 - DNA, 25 bp, probe
acgatctggatttcttaattttttg

SEQ ID NO: 141278 - DNA, 25 bp, probe
acgtctctggattttaaaacttatg

SEQ ID NO: 141279 - DNA, 25 bp, probe
acgtgtgcggtctagtttaatccca

SEQ ID NO: 141280 - DNA, 25 bp, probe
acgtgtctgttatttcctaatcaaa

SEQ ID NO: 141281 - DNA, 25 bp, probe
acggtctggacaactttgacacaca

SEQ ID NO: 141282 - DNA, 25 bp, probe
acggtgctgcgaatcctctcgcagc

SEQ ID NO: 141283 - DNA, 25 bp, probe
acggtgctgcgaatcctctcgcagc

SEQ ID NO: 141284 - DNA, 25 bp, probe
acggtctgagctagctagcgcaccg

SEQ ID NO: 141285 - DNA, 25 bp, probe
acggcatgcaggtgctcatggacct

SEQ ID NO: 141286 - DNA, 25 bp, probe
acgagcagcatatccatctagaaca

SEQ ID NO: 141287 - DNA, 25 bp, probe
actgacgtacccatcaggacagtga

SEQ ID NO: 141288 - DNA, 25 bp, probe
actgattatacctctagtatagatg

SEQ ID NO: 141289 - DNA, 25 bp, probe
actggttcccaactagatgcttgtt

SEQ ID NO: 141290 - DNA, 25 bp, probe
acgggatccgcattgacgtcattgt

SEQ ID NO: 141291 - DNA, 25 bp, probe
acgagtgaccgattatgctttcttt

SEQ ID NO: 141292 - DNA, 25 bp, probe
acgagtgaccgattatgctttcttt

SEQ ID NO: 141293 - DNA, 25 bp, probe
acggtaatctgcattttgtctcttt

SEQ ID NO: 141294 - DNA, 25 bp, probe
acgggaactgctctttaattattag

SEQ ID NO: 141295 - DNA, 25 bp, probe
acgatcgaaaccatttcacttttag

SEQ ID NO: 141296 - DNA, 25 bp, probe
acgtcagaaccaatatttcactgtc

SEQ ID NO: 141297 - DNA, 25 bp, probe
acgtctgagaccattcagtacagga

SEQ ID NO: 141298 - DNA, 25 bp, probe
acgattcgcacgatgagtgtaaaga

SEQ ID NO: 141299 - DNA, 25 bp, probe
actgttcgacatagtgacggaagca

SEQ ID NO: 141300 - DNA, 25 bp, probe
acgtcatcgagtctgacagtgaggg

SEQ ID NO: 141301 - DNA, 25 bp, probe
acgagcagggtcttgctagtgagct

SEQ ID NO: 141302 - DNA, 25 bp, probe
acgagaagcgcctgcgcgtacatgc

SEQ ID NO: 141303 - DNA, 25 bp, probe
acggcagatccctcaggaaacctgc

SEQ ID NO: 141304 - DNA, 25 bp, probe
acgggatctacaccaaggtcaccgc

SEQ ID NO: 141305 - DNA, 25 bp, probe
acgggcatcgtacaggtgtacaaca

SEQ ID NO: 141306 - DNA, 25 bp, probe
acgggcatcgtacaggtgtacaaca

SEQ ID NO: 141307 - DNA, 25 bp, probe
acggtgatatctttgagggtgacaa

SEQ ID NO: 141308 - DNA, 25 bp, probe
acgagcagctgtgagtgaggggaca

SEQ ID NO: 141309 - DNA, 25 bp, probe
acgaggcagatctgtgagggtgtgc

SEQ ID NO: 141310 - DNA, 25 bp, probe
acgaggcagatctgtgagggtgtgc

SEQ ID NO: 141311 - DNA, 25 bp, probe
acgagctggacaatggggagatggc

SEQ ID NO: 141312 - DNA, 25 bp, probe
acgagatgctggtgggtgagtgccc

SEQ ID NO: 141313 - DNA, 25 bp, probe
acgagatgctggtgggtgagtgccc

SEQ ID NO: 141314 - DNA, 25 bp, probe
acgaggctagtccaagtgcagtgat

SEQ ID NO: 141315 - DNA, 25 bp, probe
actggacgagttcaggcagacctgg

SEQ ID NO: 141316 - DNA, 25 bp, probe
actgggggttgcaagggaacagaga

SEQ ID NO: 141317 - DNA, 25 bp, probe
actggggagtctttgtggattctga

SEQ ID NO: 141318 - DNA, 25 bp, probe
actgttggtgccttcttggtattgt

SEQ ID NO: 141319 - DNA, 25 bp, probe
actgttggtgccttcttggtattgt

SEQ ID NO: 141320 - DNA, 25 bp, probe
actggtggtcaagattggtgatttt

SEQ ID NO: 141321 - DNA, 25 bp, probe
acgagttctctagcgctagtgatgt

SEQ ID NO: 141322 - DNA, 25 bp, probe
acggaactctgatcttcatgtatgt

SEQ ID NO: 141323 - DNA, 25 bp, probe
acggaactctgatcttcatgtatgt

SEQ ID NO: 141324 - DNA, 25 bp, probe
actggcaatcacgccgtattacatc

SEQ ID NO: 141325 - DNA, 25 bp, probe
actggcaatcacgccgtattacatc

SEQ ID NO: 141326 - DNA, 25 bp, probe
actggcaacgatgtcaaatgtaatt

SEQ ID NO: 141327 - DNA, 25 bp, probe
acgtagatggtgatgcagcagatgt

SEQ ID NO: 141328 - DNA, 25 bp, probe
acgtgaatgtgaattgcaaggctga

SEQ ID NO: 141329 - DNA, 25 bp, probe
acgagacagtgatgtatgtgtgctg

SEQ ID NO: 141330 - DNA, 25 bp, probe
acgagacagtgatgtatgtgtgctg

SEQ ID NO: 141331 - DNA, 25 bp, probe
acgatgaagccatcattgctgcttg

SEQ ID NO: 141332 - DNA, 25 bp, probe
acgatgacacctccaattttgatga

SEQ ID NO: 141333 - DNA, 25 bp, probe
acgatcatctcagagcatttgtaag

SEQ ID NO: 141334 - DNA, 25 bp, probe
acgtcattcagcttcacggtgatga

SEQ ID NO: 141335 - DNA, 25 bp, probe
actgtctccagcacggagctgacac

SEQ ID NO: 141336 - DNA, 25 bp, probe
actgtctccagcacggagctgacac

SEQ ID NO: 141337 - DNA, 25 bp, probe
actgctgttcagataggggacggaa

SEQ ID NO: 141338 - DNA, 25 bp, probe
aagtgttcaaggtgggtctggccct

SEQ ID NO: 141339 - DNA, 25 bp, probe
acggggagcaggtggagtatgggcc

SEQ ID NO: 141340 - DNA, 25 bp, probe
acgggaggcgagtggttggtgggca

SEQ ID NO: 141341 - DNA, 25 bp, probe
acgggatgggattgtggttttctgt

SEQ ID NO: 141342 - DNA, 25 bp, probe
acggaatcacgtatggttctttctg

SEQ ID NO: 141343 - DNA, 25 bp, probe
actggaatcaggcttggttcatttt

SEQ ID NO: 141344 - DNA, 25 bp, probe
actggcagatgtggtttgcagccct

SEQ ID NO: 141345 - DNA, 25 bp, probe
acggaggaggtcttcacagctcaaa

SEQ ID NO: 141346 - DNA, 25 bp, probe
acgtggtgaggatctacagccgcat

SEQ ID NO: 141347 - DNA, 25 bp, probe
acgtacttggtagacatgcagcgct

SEQ ID NO: 141348 - DNA, 25 bp, probe
acgatcctccgatgaaagcagccat

SEQ ID NO: 141349 - DNA, 25 bp, probe
acgatcctccgatgaaagcagccat

SEQ ID NO: 141350 - DNA, 25 bp, probe
acgatcttcgaggagagacacctca

SEQ ID NO: 141351 - DNA, 25 bp, probe
acgtgtttgagcaggcatccagcaa

SEQ ID NO: 141352 - DNA, 25 bp, probe
acggtaaagtgtgcacacatgctga

SEQ ID NO: 141353 - DNA, 25 bp, probe
acggtaaagtgtgcacacatgctga

SEQ ID NO: 141354 - DNA, 25 bp, probe
actggccaacagatgaccaagagat

SEQ ID NO: 141355 - DNA, 25 bp, probe
actgagctaatagccactagcagaa

SEQ ID NO: 141356 - DNA, 25 bp, probe
actgaccggatggccactaggtcca

SEQ ID NO: 141357 - DNA, 25 bp, probe
actgaccggatggccactaggtcca

SEQ ID NO: 141358 - DNA, 25 bp, probe
actgaccggatggccactaggtcca

SEQ ID NO: 141359 - DNA, 25 bp, probe
actatgcgggtagactacgaccagg

SEQ ID NO: 141360 - DNA, 25 bp, probe
acttcgacgaacactacgagtaccg

SEQ ID NO: 141361 - DNA, 25 bp, probe
aatgttaagaacacaacgaccagct

SEQ ID NO: 141362 - DNA, 25 bp, probe
acaaaatgaaacgcaaccaccacca

SEQ ID NO: 141363 - DNA, 25 bp, probe
acggttgcaaactgctgaccacgcc

SEQ ID NO: 141364 - DNA, 25 bp, probe
acggggccagaggaggaacatgccc

SEQ ID NO: 141365 - DNA, 25 bp, probe
acgtggtccagaagaagctcctgcc

SEQ ID NO: 141366 - DNA, 25 bp, probe
acgggttcggtgaactcatgcggtc

SEQ ID NO: 141367 - DNA, 25 bp, probe
acgtcgatctaggtgtgaccagggt

SEQ ID NO: 141368 - DNA, 25 bp, probe
acgtcgatctaggtgtgaccagggt

SEQ ID NO: 141369 - DNA, 25 bp, probe
acgtccattgacttgtggtcagctg

SEQ ID NO: 141370 - DNA, 25 bp, probe
acgtttggagccttggcatcatcgt

SEQ ID NO: 141371 - DNA, 25 bp, probe
acgtttggagccttggcatcatcgt

SEQ ID NO: 141372 - DNA, 25 bp, probe
actgtttgagatctacgccatcgtc

SEQ ID NO: 141373 - DNA, 25 bp, probe
actgtttgagatctacgccatcgtc

SEQ ID NO: 141374 - DNA, 25 bp, probe
actggttgtgatctacctgctaggc

SEQ ID NO: 141375 - DNA, 25 bp, probe
actgacttgctgtgtgaccttagga

SEQ ID NO: 141376 - DNA, 25 bp, probe
actgacggagattaaccgtcggcac

SEQ ID NO: 141377 - DNA, 25 bp, probe
aagatccgaacacagcggtcgacat

SEQ ID NO: 141378 - DNA, 25 bp, probe
acgtcctgaaagcccaggtggacag

SEQ ID NO: 141379 - DNA, 25 bp, probe
acgtacacaatatcctgctgctggg

SEQ ID NO: 141380 - DNA, 25 bp, probe
acgtaccgacaatggtctggggtat

SEQ ID NO: 141381 - DNA, 25 bp, probe
acgtctcctccagaggacggcagag

SEQ ID NO: 141382 - DNA, 25 bp, probe
acatcccctactgaggaggggacct

SEQ ID NO: 141383 - DNA, 25 bp, probe
actaccaatcctggggagtcgaaca

SEQ ID NO: 141384 - DNA, 25 bp, probe
actgaataaaccaggcaccgaaaat

SEQ ID NO: 141385 - DNA, 25 bp, probe
actggaacgaccagcgctgcaaaac

SEQ ID NO: 141386 - DNA, 25 bp, probe
acggaactagtgacggcgacaggca

SEQ ID NO: 141387 - DNA, 25 bp, probe
acggaacaagctgagacggatgata

SEQ ID NO: 141388 - DNA, 25 bp, probe
acggtccacctctgtatgatgatgt

SEQ ID NO: 141389 - DNA, 25 bp, probe
acgtgtagactttgcgcttgatgaa

SEQ ID NO: 141390 - DNA, 25 bp, probe
acgtttacttatcttatgccacggg

SEQ ID NO: 141391 - DNA, 25 bp, probe
acggttttggatcttactgcacagc

SEQ ID NO: 141392 - DNA, 25 bp, probe
acggttttggatcttactgcacagc

SEQ ID NO: 141393 - DNA, 25 bp, probe
acgggttctgtgtgttcaacaacgt

SEQ ID NO: 141394 - DNA, 25 bp, probe
acgggaatgctggcaagttcaacat

SEQ ID NO: 141395 - DNA, 25 bp, probe
actgggatgctgtgtagttcattca

SEQ ID NO: 141396 - DNA, 25 bp, probe
actgggatgctgtgtagttcattca

SEQ ID NO: 141397 - DNA, 25 bp, probe
acggcagatgggctactatctgatt

SEQ ID NO: 141398 - DNA, 25 bp, probe
acggcagatgggctactatctgatt

SEQ ID NO: 141399 - DNA, 25 bp, probe
acggcaggagaccaactatgtggag

SEQ ID NO: 141400 - DNA, 25 bp, probe
acggcgggcaccaactggatgtgcg

SEQ ID NO: 141401 - DNA, 25 bp, probe
acggccacacctcaatggagcagaa

SEQ ID NO: 141402 - DNA, 25 bp, probe
acgtggtcaccacaagctgaagaca

SEQ ID NO: 141403 - DNA, 25 bp, probe
acgttgatgccggtgaacgtgcaaa

SEQ ID NO: 141404 - DNA, 25 bp, probe
acgtaatgcagggttatcttcacac

SEQ ID NO: 141405 - DNA, 25 bp, probe
acgtcattgcaagtgtattcaaaca

SEQ ID NO: 141406 - DNA, 25 bp, probe
acgttattattgcttcaaacaccca

SEQ ID NO: 141407 - DNA, 25 bp, probe
acgttattattgcttcaaacaccca

SEQ ID NO: 141408 - DNA, 25 bp, probe
acttacattactattccataactcc

SEQ ID NO: 141409 - DNA, 25 bp, probe
acttgccattactcaattgataaac

SEQ ID NO: 141410 - DNA, 25 bp, probe
acttgccattactcaattgataaac

SEQ ID NO: 141411 - DNA, 25 bp, probe
actacaactcaatgcaatctttaac

SEQ ID NO: 141412 - DNA, 25 bp, probe
actacaactcaatgcaatctttaac

SEQ ID NO: 141413 - DNA, 25 bp, probe
actacaactcaatgcaatctttaac

SEQ ID NO: 141414 - DNA, 25 bp, probe
actaaacttcaagcctctggagcag

SEQ ID NO: 141415 - DNA, 25 bp, probe
actagggctggagccctctgaagag

SEQ ID NO: 141416 - DNA, 25 bp, probe
acgattacttggacaccgtgaagga

SEQ ID NO: 141417 - DNA, 25 bp, probe
acgtcaccttggtcacagcagtaag

SEQ ID NO: 141418 - DNA, 25 bp, probe
acgtcacctggtgcgagttcagggc

SEQ ID NO: 141419 - DNA, 25 bp, probe
acggacctggtggagcatttcaaga

SEQ ID NO: 141420 - DNA, 25 bp, probe
actggaccgagtgactactatacag

SEQ ID NO: 141421 - DNA, 25 bp, probe
actagtaccaatgacagacttagac

SEQ ID NO: 141422 - DNA, 25 bp, probe
actggtgatcgcatacatcatgacc

SEQ ID NO: 141423 - DNA, 25 bp, probe
actggtgatcgcatacatcatgacc

SEQ ID NO: 141424 - DNA, 25 bp, probe
acgggcatgtattatcacatcaagc

SEQ ID NO: 141425 - DNA, 25 bp, probe
acgtgcagctgtttgacctgatgag

SEQ ID NO: 141426 - DNA, 25 bp, probe
acgtgtctgtggccaccatgaaggc

SEQ ID NO: 141427 - DNA, 25 bp, probe
acgtgggtgagctgcaaactggcct

SEQ ID NO: 141428 - DNA, 25 bp, probe
acgtgtttgctgagcaggacgacgc

SEQ ID NO: 141429 - DNA, 25 bp, probe
acgtgtttggatcaagactgcagag

SEQ ID NO: 141430 - DNA, 25 bp, probe
acgtgtttggatcaagactgcagag

SEQ ID NO: 141431 - DNA, 25 bp, probe
acgtctggaggactcaagcaatgga

SEQ ID NO: 141432 - DNA, 25 bp, probe
acgtgcaggaagagcggctttgata

SEQ ID NO: 141433 - DNA, 25 bp, probe
actggcaggaactgtgggttgtgtt

SEQ ID NO: 141434 - DNA, 25 bp, probe
acggggctaccactgtggtgcgtgt

SEQ ID NO: 141435 - DNA, 25 bp, probe
acggaggctgatgagagctcgccga

SEQ ID NO: 141436 - DNA, 25 bp, probe
cagctgggtctgacaaggacccgtg

SEQ ID NO: 141437 - DNA, 25 bp, probe
actgggactacgaggctcacgtccc

SEQ ID NO: 141438 - DNA, 25 bp, probe
acgtgagttggagcggccacgtgcc

SEQ ID NO: 141439 - DNA, 25 bp, probe
acgtgagttggagcggccacgtgcc

SEQ ID NO: 141440 - DNA, 25 bp, probe
acggggattgaggaggcctcaggcg

SEQ ID NO: 141441 - DNA, 25 bp, probe
acgggagatatgagggctcaagtcg

SEQ ID NO: 141442 - DNA, 25 bp, probe
acgtgggcagagacgtgaccaagcc

SEQ ID NO: 141443 - DNA, 25 bp, probe
acagtgactacaacacgacctactc

SEQ ID NO: 141444 - DNA, 25 bp, probe
acgtagtaattctgtgacatacttt

SEQ ID NO: 141445 - DNA, 25 bp, probe
acgtatattttcaaggactcactct

SEQ ID NO: 141446 - DNA, 25 bp, probe
actgtatcagtcatccagagaccgt

SEQ ID NO: 141447 - DNA, 25 bp, probe
actgtatagctgaaccagcattaca

SEQ ID NO: 141448 - DNA, 25 bp, probe
acgtcatgcaggaacatcgcaaggt

SEQ ID NO: 141449 - DNA, 25 bp, probe
acggcatggtgcaaatccagatctg

SEQ ID NO: 141450 - DNA, 25 bp, probe
acggatgttgtcaggaatcatgatc

SEQ ID NO: 141451 - DNA, 25 bp, probe
acggtgatcttgggcagaacatacc

SEQ ID NO: 141452 - DNA, 25 bp, probe
acggttgatgtggcctgaaagcact

SEQ ID NO: 141453 - DNA, 25 bp, probe
actggttagtcaaatggccagacta

SEQ ID NO: 141454 - DNA, 25 bp, probe
acgggtagattgctggcctgttgta

SEQ ID NO: 141455 - DNA, 25 bp, probe
acgggtcagattgtggccatcaaga

SEQ ID NO: 141456 - DNA, 25 bp, probe
actgggggatttagtgccactgaag

SEQ ID NO: 141457 - DNA, 25 bp, probe
actgtgggcaataatatggcattta

SEQ ID NO: 141458 - DNA, 25 bp, probe
acgtttgccatattttctttgcatt

SEQ ID NO: 141459 - DNA, 25 bp, probe
acgtgtctggatgtgattctctact

SEQ ID NO: 141460 - DNA, 25 bp, probe
acggcctggacttgaaactcagctc

SEQ ID NO: 141461 - DNA, 25 bp, probe
acggccaggagatacaaccagcact

SEQ ID NO: 141462 - DNA, 25 bp, probe
acggccagaagatctcctggcaggc

SEQ ID NO: 141463 - DNA, 25 bp, probe
actggccttacatgtccatccagtg

SEQ ID NO: 141464 - DNA, 25 bp, probe
actgtgactttatgcttttcgtggg

SEQ ID NO: 141465 - DNA, 25 bp, probe
actgtcctaaaacgttaccagcagc

SEQ ID NO: 141466 - DNA, 25 bp, probe
actgttccaataaaattcaaatcgc

SEQ ID NO: 141467 - DNA, 25 bp, probe
actgtacctatcaggactatacctc

SEQ ID NO: 141468 - DNA, 25 bp, probe
actgaaccgacttttctaaagctct

SEQ ID NO: 141469 - DNA, 25 bp, probe
actgaactgaactcttttgggcctg

SEQ ID NO: 141470 - DNA, 25 bp, probe
actgaagtatccagttcttagtcct

SEQ ID NO: 141471 - DNA, 25 bp, probe
actgtgatggactcgttctgtagat

SEQ ID NO: 141472 - DNA, 25 bp, probe
acggtgagggccgatgtctgggaac

SEQ ID NO: 141473 - DNA, 25 bp, probe
acggtgagggccgatgtctgggaac

SEQ ID NO: 141474 - DNA, 25 bp, probe
acgtggatgagctcctggacatgga

SEQ ID NO: 141475 - DNA, 25 bp, probe
acggcctactgagcggacagaatga

SEQ ID NO: 141476 - DNA, 25 bp, probe
acggccacctaggactgaggacaga

SEQ ID NO: 141477 - DNA, 25 bp, probe
actgagcccctttggctaagacggg

SEQ ID NO: 141478 - DNA, 25 bp, probe
actgagcccctttggctaagacggg

SEQ ID NO: 141479 - DNA, 25 bp, probe
actgaccctgcatttgggaaactgt

SEQ ID NO: 141480 - DNA, 25 bp, probe
acgtcgcttatattgggatgacctg

SEQ ID NO: 141481 - DNA, 25 bp, probe
acgtggctgattggctggagtggct

SEQ ID NO: 141482 - DNA, 25 bp, probe
acggagctgaaggctttgcaggcca

SEQ ID NO: 141483 - DNA, 25 bp, probe
acgggcaagtgacttctgcaagcct

SEQ ID NO: 141484 - DNA, 25 bp, probe
acggtcaaagactctaactcatgcc

SEQ ID NO: 141485 - DNA, 25 bp, probe
acggtcaaagactctaactcatgcc

SEQ ID NO: 141486 - DNA, 25 bp, probe
acggtcaaaagggcaagtgcctctc

SEQ ID NO: 141487 - DNA, 25 bp, probe
acgggcaaacactacggtgcctcga

SEQ ID NO: 141488 - DNA, 25 bp, probe
acgggcactaaccaggctgtatctg

SEQ ID NO: 141489 - DNA, 25 bp, probe
acgggcactaaccaggctgtatctg

SEQ ID NO: 141490 - DNA, 25 bp, probe
acgggcagtacaagcgctgcggtgt

SEQ ID NO: 141491 - DNA, 25 bp, probe
acgggcagatggaggctgctcagtc

SEQ ID NO: 141492 - DNA, 25 bp, probe
acgggcagatggaggctgctcagtc

SEQ ID NO: 141493 - DNA, 25 bp, probe
acgtggcggagaagctgctacagct

SEQ ID NO: 141494 - DNA, 25 bp, probe
acgtgccagtcactgttctaatgct

SEQ ID NO: 141495 - DNA, 25 bp, probe
actggctcagtcaagattggagacc

SEQ ID NO: 141496 - DNA, 25 bp, probe
actggatcgacatgaagcgggccct

SEQ ID NO: 141497 - DNA, 25 bp, probe
actggatcgacatgaagcgggccct

SEQ ID NO: 141498 - DNA, 25 bp, probe
acggcagcagacatgaagcgggtag

SEQ ID NO: 141499 - DNA, 25 bp, probe
actggaggtttatgagaggaatcga

SEQ ID NO: 141500 - DNA, 25 bp, probe
acggcagtgtttttggtctgccacc

SEQ ID NO: 141501 - DNA, 25 bp, probe
acggaggtcattgagtgcattaccc

SEQ ID NO: 141502 - DNA, 25 bp, probe
actgggctgtacgacagtgaggacc

SEQ ID NO: 141503 - DNA, 25 bp, probe
actggtgtcccggatatcagcgatc

SEQ ID NO: 141504 - DNA, 25 bp, probe
acattttccacggaaacagaactcg

SEQ ID NO: 141505 - DNA, 25 bp, probe
actgtttcctcaccaagaagttccg

SEQ ID NO: 141506 - DNA, 25 bp, probe
actggtacttgaaacatacagtata

SEQ ID NO: 141507 - DNA, 25 bp, probe
actgactattctcaaattcgccata

SEQ ID NO: 141508 - DNA, 25 bp, probe
actggccattctgacttctagtcag

SEQ ID NO: 141509 - DNA, 25 bp, probe
actggcccatccatcttatgaggat

SEQ ID NO: 141510 - DNA, 25 bp, probe
actggacatcccatgttcagcaatg

SEQ ID NO: 141511 - DNA, 25 bp, probe
actggacaagcacctcattcagcag

SEQ ID NO: 141512 - DNA, 25 bp, probe
actggacaagcacctcattcagcag

SEQ ID NO: 141513 - DNA, 25 bp, probe
acgtcacagagcagctggatgccgg

SEQ ID NO: 141514 - DNA, 25 bp, probe
actggctcagtgcacgacttatcag

SEQ ID NO: 141515 - DNA, 25 bp, probe
actggcttcttgtgcaataatatga

SEQ ID NO: 141516 - DNA, 25 bp, probe
actggatctcttggccacagataat

SEQ ID NO: 141517 - DNA, 25 bp, probe
actggttcttgagcatttaatccta

SEQ ID NO: 141518 - DNA, 25 bp, probe
actgtattttcgtttctaactctat

SEQ ID NO: 141519 - DNA, 25 bp, probe
actggctttgggcttctatgacttt

SEQ ID NO: 141520 - DNA, 25 bp, probe
acgggtgctggctatgttcaagatc

SEQ ID NO: 141521 - DNA, 25 bp, probe
acgtcgtgtgactcagtgcagagac

SEQ ID NO: 141522 - DNA, 25 bp, probe
acgtcgtgtgactcagtgcagagac

SEQ ID NO: 141523 - DNA, 25 bp, probe
actgtccttaagacggcaggaagca

SEQ ID NO: 141524 - DNA, 25 bp, probe
actaccttacagtgagggctataca

SEQ ID NO: 141525 - DNA, 25 bp, probe
actaccttacagtgagggctataca

SEQ ID NO: 141526 - DNA, 25 bp, probe
actgactgggacacaggtggttaca

SEQ ID NO: 141527 - DNA, 25 bp, probe
actggcgggcacagggtcaggtgct

SEQ ID NO: 141528 - DNA, 25 bp, probe
actgagcgtggaagggagaagcgac

SEQ ID NO: 141529 - DNA, 25 bp, probe
acggctctagataaggaggggcaga

SEQ ID NO: 141530 - DNA, 25 bp, probe
acggctctagataaggaggggcaga

SEQ ID NO: 141531 - DNA, 25 bp, probe
acgtcattggagaggatgccgcctg

SEQ ID NO: 141532 - DNA, 25 bp, probe
acgtcatgggcataggtgaccgctg

SEQ ID NO: 141533 - DNA, 25 bp, probe
acgtgcgaagcacaggctgaagagg

SEQ ID NO: 141534 - DNA, 25 bp, probe
acggctgacagctgagtgtgtacag

SEQ ID NO: 141535 - DNA, 25 bp, probe
actgcgtggagctgcaggcttcagc

SEQ ID NO: 141536 - DNA, 25 bp, probe
actgggcgactagggctttgagctg

SEQ ID NO: 141537 - DNA, 25 bp, probe
actgggaggcttatctcactgagtg

SEQ ID NO: 141538 - DNA, 25 bp, probe
actgtcaggtccaagtgtactgttg

SEQ ID NO: 141539 - DNA, 25 bp, probe
acgtcatggtcaccgggtgcatgcc

SEQ ID NO: 141540 - DNA, 25 bp, probe
acgtgctgttcgaggatgtgtacga

SEQ ID NO: 141541 - DNA, 25 bp, probe
acgtgctgctctcggagcagggtga

SEQ ID NO: 141542 - DNA, 25 bp, probe
acgtgctgctctcggagcagggtga

SEQ ID NO: 141543 - DNA, 25 bp, probe
acggctcctgtcgaatgggtgggaa

SEQ ID NO: 141544 - DNA, 25 bp, probe
actggtccggtttgtggtggaagat

SEQ ID NO: 141545 - DNA, 25 bp, probe
acggtactgtgaacgtcgtgtgact

SEQ ID NO: 141546 - DNA, 25 bp, probe
acggtactgtgaacgtcgtgtgact

SEQ ID NO: 141547 - DNA, 25 bp, probe
actggttcttcttggtctcagtgtc

SEQ ID NO: 141548 - DNA, 25 bp, probe
actggtctattttctcctagatgct

SEQ ID NO: 141549 - DNA, 25 bp, probe
actggtctattttctcctagatgct

SEQ ID NO: 141550 - DNA, 25 bp, probe
acggaatacaatttcactatatctg

SEQ ID NO: 141551 - DNA, 25 bp, probe
acggaaacatattctagaggacaga

SEQ ID NO: 141552 - DNA, 25 bp, probe
acggctaccacatccaaggaaggca

SEQ ID NO: 141553 - DNA, 25 bp, probe
acggctaccacatccaaggaaggca

SEQ ID NO: 141554 - DNA, 25 bp, probe
actggtccctcatctacatggacag

SEQ ID NO: 141555 - DNA, 25 bp, probe
acttcccctgactttcaggatgcta

SEQ ID NO: 141556 - DNA, 25 bp, probe
actccacggaaaaatcagaagctca

SEQ ID NO: 141557 - DNA, 25 bp, probe
actccacggcgtctcaggacgtggc

SEQ ID NO: 141558 - DNA, 25 bp, probe
actccacggcgtctcaggacgtggc

SEQ ID NO: 141559 - DNA, 25 bp, probe
actgccctggagatgacggactgtg

SEQ ID NO: 141560 - DNA, 25 bp, probe
acgtcgccgagatgaagggcgcata

SEQ ID NO: 141561 - DNA, 25 bp, probe
actgtcagccaatgtggggggtcct

SEQ ID NO: 141562 - DNA, 25 bp, probe
actgtttcagacttggaaaggtcac

SEQ ID NO: 141563 - DNA, 25 bp, probe
actggttccagagtgggatagttag

SEQ ID NO: 141564 - DNA, 25 bp, probe
actggcttctttagagagtagtaag

SEQ ID NO: 141565 - DNA, 25 bp, probe
actggcttctttagagagtagtaag

SEQ ID NO: 141566 - DNA, 25 bp, probe
actgaggccagctggtattagtaag

SEQ ID NO: 141567 - DNA, 25 bp, probe
actggtgcacactgaaattttactt

SEQ ID NO: 141568 - DNA, 25 bp, probe
actggtacctcgttaagatgtagtg

SEQ ID NO: 141569 - DNA, 25 bp, probe
actggcaatcctcagtatagttaca

SEQ ID NO: 141570 - DNA, 25 bp, probe
actctttctcagcagtatcgtagcc

SEQ ID NO: 141571 - DNA, 25 bp, probe
actctttctcagcagtatcgtagcc

SEQ ID NO: 141572 - DNA, 25 bp, probe
actgtttatcaatgtcatttggcta

SEQ ID NO: 141573 - DNA, 25 bp, probe
acggtcagtcattatttttgtgata

SEQ ID NO: 141574 - DNA, 25 bp, probe
actggagagtattcatttgtttgct

SEQ ID NO: 141575 - DNA, 25 bp, probe
actgcaaagctgtccgttgtattcc

SEQ ID NO: 141576 - DNA, 25 bp, probe
acatccacagcgtcggtaaattaag

SEQ ID NO: 141577 - DNA, 25 bp, probe
actccacagagatcgggatcagtta

SEQ ID NO: 141578 - DNA, 25 bp, probe
acgtgctcgagttcctgaaggtgta

SEQ ID NO: 141579 - DNA, 25 bp, probe
actgttctgagatcttttgggtgca

SEQ ID NO: 141580 - DNA, 25 bp, probe
actgtgtgtgaatctgcttttcctc

SEQ ID NO: 141581 - DNA, 25 bp, probe
actgggatgacgacagcctagggcc

SEQ ID NO: 141582 - DNA, 25 bp, probe
actgggatgacgacagcctagggcc

SEQ ID NO: 141583 - DNA, 25 bp, probe
actgcggcatagcaacctggtgcag

SEQ ID NO: 141584 - DNA, 25 bp, probe
actggcaccatgccatttcgggcag

SEQ ID NO: 141585 - DNA, 25 bp, probe
actggccacgagtttgcggtgaaga

SEQ ID NO: 141586 - DNA, 25 bp, probe
actgtgaaactgtttcggttatctc

SEQ ID NO: 141587 - DNA, 25 bp, probe
actgtgccaactttatgtggggtct

SEQ ID NO: 141588 - DNA, 25 bp, probe
actggacttctatcaatggtactct

SEQ ID NO: 141589 - DNA, 25 bp, probe
actgggcttatgaccaaggaatcag

SEQ ID NO: 141590 - DNA, 25 bp, probe
actggcactggacttcaagcgaaag

SEQ ID NO: 141591 - DNA, 25 bp, probe
actggcctggccgcaacagcagggg

SEQ ID NO: 141592 - DNA, 25 bp, probe
acgtgtctggcaggtaaaagctgga

SEQ ID NO: 141593 - DNA, 25 bp, probe
actgtgtccatagaaaaactgtgct

SEQ ID NO: 141594 - DNA, 25 bp, probe
actgtgtccatagaaaaactgtgct

SEQ ID NO: 141595 - DNA, 25 bp, probe
actgtgtactgtatagacagtttgt

SEQ ID NO: 141596 - DNA, 25 bp, probe
acggtgtctgtttatccgtgctgtg

SEQ ID NO: 141597 - DNA, 25 bp, probe
actggtttgtgctctactggttgag

SEQ ID NO: 141598 - DNA, 25 bp, probe
acggtgttgtgagtccacatgagct

SEQ ID NO: 141599 - DNA, 25 bp, probe
actgtgtcttattccatctatgagc

SEQ ID NO: 141600 - DNA, 25 bp, probe
actgtacttcagggatttgccaatt

SEQ ID NO: 141601 - DNA, 25 bp, probe
actgtacttcagggatttgccaatt

SEQ ID NO: 141602 - DNA, 25 bp, probe
actgtgtttcgcattaagcacacac

SEQ ID NO: 141603 - DNA, 25 bp, probe
actctttcggaaataacacctcaca

SEQ ID NO: 141604 - DNA, 25 bp, probe
actctttcggaaataacacctcaca

SEQ ID NO: 141605 - DNA, 25 bp, probe
actgttaccaaaaaacaactgtcag

SEQ ID NO: 141606 - DNA, 25 bp, probe
actgtataaacaaattagcaatcat

SEQ ID NO: 141607 - DNA, 25 bp, probe
actgtatagacagtttgtaaatgtt

SEQ ID NO: 141608 - DNA, 25 bp, probe
actgtataacctgcataactttttg

SEQ ID NO: 141609 - DNA, 25 bp, probe
actggaccagttacataactctttg

SEQ ID NO: 141610 - DNA, 25 bp, probe
actgtggcatagttacaatttctgt

SEQ ID NO: 141611 - DNA, 25 bp, probe
actgatggtcactccgattctgagt

SEQ ID NO: 141612 - DNA, 25 bp, probe
actgggtctgcaggacgttgctgca

SEQ ID NO: 141613 - DNA, 25 bp, probe
acgggtctaggagcctgagaggtga

SEQ ID NO: 141614 - DNA, 25 bp, probe
acgggtgcagagaatcccgagttgt

SEQ ID NO: 141615 - DNA, 25 bp, probe
actgaggtggatgcagcctccgttt

SEQ ID NO: 141616 - DNA, 25 bp, probe
actgagggtactggcctagccatgt

SEQ ID NO: 141617 - DNA, 25 bp, probe
actgggattacagctcagacgcctc

SEQ ID NO: 141618 - DNA, 25 bp, probe
actgggattacagctcagacgcctc

SEQ ID NO: 141619 - DNA, 25 bp, probe
actactgttccaggtaacgtctgta

SEQ ID NO: 141620 - DNA, 25 bp, probe
caccctttccaagagactccttgtg

SEQ ID NO: 141621 - DNA, 25 bp, probe
acacccttacacggtgacttccgtg

SEQ ID NO: 141622 - DNA, 25 bp, probe
actccgtttccaaatacattccagt

SEQ ID NO: 141623 - DNA, 25 bp, probe
actccaagtctcctaaaattctagg

SEQ ID NO: 141624 - DNA, 25 bp, probe
actccggtccttgctaaatctagat

SEQ ID NO: 141625 - DNA, 25 bp, probe
actccaggactgtctccataacatc

SEQ ID NO: 141626 - DNA, 25 bp, probe
actccttgatcatgtccaggaccgt

SEQ ID NO: 141627 - DNA, 25 bp, probe
actccctgatttatgacgacggcct

SEQ ID NO: 141628 - DNA, 25 bp, probe
actcctatggtcacagacttctggc

SEQ ID NO: 141629 - DNA, 25 bp, probe
actcaggacagagccaaccctggct

SEQ ID NO: 141630 - DNA, 25 bp, probe
actgacgaagaagcaactaagttaa

SEQ ID NO: 141631 - DNA, 25 bp, probe
actacgggacattcaccatcaagtc

SEQ ID NO: 141632 - DNA, 25 bp, probe
actgtctaggagcatcacctccagt

SEQ ID NO: 141633 - DNA, 25 bp, probe
actgttgaagcataatcccagccag

SEQ ID NO: 141634 - DNA, 25 bp, probe
acgtggactgcacaatgacagagaa

SEQ ID NO: 141635 - DNA, 25 bp, probe
acgggaatgcgaatcagacaggagg

SEQ ID NO: 141636 - DNA, 25 bp, probe
acggggagctgaatgcggacgaccc

SEQ ID NO: 141637 - DNA, 25 bp, probe
actgggggctacagtgactgtcctg

SEQ ID NO: 141638 - DNA, 25 bp, probe
actgagggttactccagttgctctg

SEQ ID NO: 141639 - DNA, 25 bp, probe
actgtgaggctggaatctcccattc

SEQ ID NO: 141640 - DNA, 25 bp, probe
actgcaaggggatgctgcaccccct

SEQ ID NO: 141641 - DNA, 25 bp, probe
actcaagaggggctccaagccgtcg

SEQ ID NO: 141642 - DNA, 25 bp, probe
actgtggagacccgtcctgaacggg

SEQ ID NO: 141643 - DNA, 25 bp, probe
acggcgaggaacgtgccgataccgg

SEQ ID NO: 141644 - DNA, 25 bp, probe
acgggaggagcggatgcctattacg

SEQ ID NO: 141645 - DNA, 25 bp, probe
acgtggttagtggcatctatattgg

SEQ ID NO: 141646 - DNA, 25 bp, probe
actgtgttaagtgcatctgtattgt

SEQ ID NO: 141647 - DNA, 25 bp, probe
actgtgggaagtcagctgttctggc

SEQ ID NO: 141648 - DNA, 25 bp, probe
acaggcagtgcatgtgaagcatgct

SEQ ID NO: 141649 - DNA, 25 bp, probe
acggcatgtgcaaggaaggcctggg

SEQ ID NO: 141650 - DNA, 25 bp, probe
actgggctgatcctgaatggcacag

SEQ ID NO: 141651 - DNA, 25 bp, probe
actgggctgatcctgaatggcacag

SEQ ID NO: 141652 - DNA, 25 bp, probe
actgtgagcatgcagtacggcctga

SEQ ID NO: 141653 - DNA, 25 bp, probe
actggagctcggagctgcaccgagg

SEQ ID NO: 141654 - DNA, 25 bp, probe
actggcgtcttcaccaccatggaga

SEQ ID NO: 141655 - DNA, 25 bp, probe
actggagtcttcataacgctaagca

SEQ ID NO: 141656 - DNA, 25 bp, probe
actaggtcttgcatttttaagtcct

SEQ ID NO: 141657 - DNA, 25 bp, probe
actgtggttgctgtggttggaattc

SEQ ID NO: 141658 - DNA, 25 bp, probe
actgtagtcactgctgagttaatag

SEQ ID NO: 141659 - DNA, 25 bp, probe
actgtcaacactgggccttaggaga

SEQ ID NO: 141660 - DNA, 25 bp, probe
actccataccgaactccgaagagtg

SEQ ID NO: 141661 - DNA, 25 bp, probe
actgactaccttgacttgaaatgct

SEQ ID NO: 141662 - DNA, 25 bp, probe
actggtctcactggaaccagaactt

SEQ ID NO: 141663 - DNA, 25 bp, probe
acatcgttactacatccagattcct

SEQ ID NO: 141664 - DNA, 25 bp, probe
actccttcacgaggaatctgggcct

SEQ ID NO: 141665 - DNA, 25 bp, probe
actggctcaacatggttcgggccgg

SEQ ID NO: 141666 - DNA, 25 bp, probe
actgtgtctacacggttcagagcga

SEQ ID NO: 141667 - DNA, 25 bp, probe
actgtatttctgatgttgcaagcca

SEQ ID NO: 141668 - DNA, 25 bp, probe
actgtatttctgatgttgcaagcca

SEQ ID NO: 141669 - DNA, 25 bp, probe
actgattacttcatgactgccacgc

SEQ ID NO: 141670 - DNA, 25 bp, probe
actgttccattttgcaacatcctgc

SEQ ID NO: 141671 - DNA, 25 bp, probe
actggtctgagtgctctagcacctg

SEQ ID NO: 141672 - DNA, 25 bp, probe
actggatgtcagtctcttggcagtg

SEQ ID NO: 141673 - DNA, 25 bp, probe
actgggctgcaattcactggcagtg

SEQ ID NO: 141674 - DNA, 25 bp, probe
actggtcatgcctgctgtgggcatg

SEQ ID NO: 141675 - DNA, 25 bp, probe
actgtgtagccgtctgctggagtat

SEQ ID NO: 141676 - DNA, 25 bp, probe
actgtgtagccgtctgctggagtat

SEQ ID NO: 141677 - DNA, 25 bp, probe
actgtgtagccgtctgctggagtat

SEQ ID NO: 141678 - DNA, 25 bp, probe
actgtgctacacttgcacctggtac

SEQ ID NO: 141679 - DNA, 25 bp, probe
actgttaagggcttctgctgccatc

SEQ ID NO: 141680 - DNA, 25 bp, probe
actggaagcgagccttcaatgccac

SEQ ID NO: 141681 - DNA, 25 bp, probe
actggaagcgagccttcaatgccac

SEQ ID NO: 141682 - DNA, 25 bp, probe
acggaagagatgatgcgcgaggcgc

SEQ ID NO: 141683 - DNA, 25 bp, probe
acggaggaaggcagcgagggcgagg

SEQ ID NO: 141684 - DNA, 25 bp, probe
acggaggaaggcagcgagggcgagg

SEQ ID NO: 141685 - DNA, 25 bp, probe
acggggagaggctgtgggagtgcac

SEQ ID NO: 141686 - DNA, 25 bp, probe
acgggtacagcgtgctgggcatgga

SEQ ID NO: 141687 - DNA, 25 bp, probe
acgggattcgaggcgtgcgagtgga

SEQ ID NO: 141688 - DNA, 25 bp, probe
acggcagccacgaggatgcgatgta

SEQ ID NO: 141689 - DNA, 25 bp, probe
actggaccacgaaggccactgtaaa

SEQ ID NO: 141690 - DNA, 25 bp, probe
actggaacagtatgagttctgctac

SEQ ID NO: 141691 - DNA, 25 bp, probe
actgagtaagtctgaacctctaatg

SEQ ID NO: 141692 - DNA, 25 bp, probe
actggtgacgacgaagacttcttag

SEQ ID NO: 141693 - DNA, 25 bp, probe
actgcaattcgggaaatttctctat

SEQ ID NO: 141694 - DNA, 25 bp, probe
actgcaattcgggaaatttctctat

SEQ ID NO: 141695 - DNA, 25 bp, probe
actgaacttgtggaccatgtactgc

SEQ ID NO: 141696 - DNA, 25 bp, probe
actgtactgtgtttcgcattaagca

SEQ ID NO: 141697 - DNA, 25 bp, probe
actgtgacagttctccaggaaggag

SEQ ID NO: 141698 - DNA, 25 bp, probe
actggagagttcttccgagaccaag

SEQ ID NO: 141699 - DNA, 25 bp, probe
actgagaagattttcttaagcactt

SEQ ID NO: 141700 - DNA, 25 bp, probe
actggacagcacagacttcaccagc

SEQ ID NO: 141701 - DNA, 25 bp, probe
actggtcagcagtgccttagacagc

SEQ ID NO: 141702 - DNA, 25 bp, probe
actggtcatcagtatgtcctacgtc

SEQ ID NO: 141703 - DNA, 25 bp, probe
actggctcagcgtgtgcctacccta

SEQ ID NO: 141704 - DNA, 25 bp, probe
actgtgatctggagtccttcttgct

SEQ ID NO: 141705 - DNA, 25 bp, probe
actgtgatctggagtccttcttgct

SEQ ID NO: 141706 - DNA, 25 bp, probe
actgtgatctggagtccttcttgct

SEQ ID NO: 141707 - DNA, 25 bp, probe
actgatgtctggcttaagtccttag

SEQ ID NO: 141708 - DNA, 25 bp, probe
actgggtgctgtgtgaagtcctgga

SEQ ID NO: 141709 - DNA, 25 bp, probe
acgggtgtgctgcctaatggtagga

SEQ ID NO: 141710 - DNA, 25 bp, probe
acggtggccgtgaagatgctgaaag

SEQ ID NO: 141711 - DNA, 25 bp, probe
actgtggggcggcgtgtgaagactg

SEQ ID NO: 141712 - DNA, 25 bp, probe
acggtgggcagcgtgggtaaggtgg

SEQ ID NO: 141713 - DNA, 25 bp, probe
acggtgggcagcgtgggtaaggtgg

SEQ ID NO: 141714 - DNA, 25 bp, probe
acggtgcaccggggcatcaaaggtg

SEQ ID NO: 141715 - DNA, 25 bp, probe
acggtgcaccggggcatcaaaggtg

SEQ ID NO: 141716 - DNA, 25 bp, probe
actggctgggggtacatcaaagagg

SEQ ID NO: 141717 - DNA, 25 bp, probe
actggctgagcgtggtccacggagg

SEQ ID NO: 141718 - DNA, 25 bp, probe
actgtggagctgtgaactgccggaa

SEQ ID NO: 141719 - DNA, 25 bp, probe
actggcagggatagtcactggctgg

SEQ ID NO: 141720 - DNA, 25 bp, probe
actggccatctgatggactggtgtc

SEQ ID NO: 141721 - DNA, 25 bp, probe
actggacctgagtaggcctggtcag

SEQ ID NO: 141722 - DNA, 25 bp, probe
actggacgtcacagagcagctggat

SEQ ID NO: 141723 - DNA, 25 bp, probe
actggactggcagggtggctgagcg

SEQ ID NO: 141724 - DNA, 25 bp, probe
acggaacaggctctgcgcatgagcg

SEQ ID NO: 141725 - DNA, 25 bp, probe
acggagaagaggctgtgcaagatgt

SEQ ID NO: 141726 - DNA, 25 bp, probe
acggagaagaggctgtgcaagatgt

SEQ ID NO: 141727 - DNA, 25 bp, probe
actgtgagcacatgggcattgccag

SEQ ID NO: 141728 - DNA, 25 bp, probe
actgtgagcacatggccatcgtgaa

SEQ ID NO: 141729 - DNA, 25 bp, probe
actggccgcaacggctcagtgacag

SEQ ID NO: 141730 - DNA, 25 bp, probe
actgtcctcaaggtgctagattgca

SEQ ID NO: 141731 - DNA, 25 bp, probe
actgaactgcaactgtggcagatgg

SEQ ID NO: 141732 - DNA, 25 bp, probe
acggagctgacactgttcagctgcc

SEQ ID NO: 141733 - DNA, 25 bp, probe
acggcagcgagagctgtgcactcac

SEQ ID NO: 141734 - DNA, 25 bp, probe
actgatgatgaaatccttcacgcat

SEQ ID NO: 141735 - DNA, 25 bp, probe
actggatcaattcggtgattgcaaa

SEQ ID NO: 141736 - DNA, 25 bp, probe
actgcgaaaccaagctgactcacaa

SEQ ID NO: 141737 - DNA, 25 bp, probe
actgtattaccatgccacaaaagct

SEQ ID NO: 141738 - DNA, 25 bp, probe
actcatattaccacaacaaccttta

SEQ ID NO: 141739 - DNA, 25 bp, probe
actctatgagatggggaacaagctt

SEQ ID NO: 141740 - DNA, 25 bp, probe
actgcctgtaaggagtagaactgtt

SEQ ID NO: 141741 - DNA, 25 bp, probe
actgcctgtaaggagtagaactgtt

SEQ ID NO: 141742 - DNA, 25 bp, probe
actgctgtgcaatgccttaggactt

SEQ ID NO: 141743 - DNA, 25 bp, probe
actgctgtgcaatgccttaggactt

SEQ ID NO: 141744 - DNA, 25 bp, probe
actgcgagaaccgtgagtggagctc

SEQ ID NO: 141745 - DNA, 25 bp, probe
actgaaacaccctgagtgagacatt

SEQ ID NO: 141746 - DNA, 25 bp, probe
actaaagcagccatctttaaaatcc

SEQ ID NO: 141747 - DNA, 25 bp, probe
actgaacagcatcaatttcgacaaa

SEQ ID NO: 141748 - DNA, 25 bp, probe
actgtacagacactaattcattaaa

SEQ ID NO: 141749 - DNA, 25 bp, probe
actgcaacgtcattaagtcaaaaat

SEQ ID NO: 141750 - DNA, 25 bp, probe
actgcaacgtcattaagtcaaaaat

SEQ ID NO: 141751 - DNA, 25 bp, probe
actggcctgatctaacaatgaaaaa

SEQ ID NO: 141752 - DNA, 25 bp, probe
actgggcaacaatttgctgtaaaaa

SEQ ID NO: 141753 - DNA, 25 bp, probe
acggctagtcaattgttcttgaaaa

SEQ ID NO: 141754 - DNA, 25 bp, probe
acggctagtcaattgttcttgaaaa

SEQ ID NO: 141755 - DNA, 25 bp, probe
actgccttccagaatgttattgaaa

SEQ ID NO: 141756 - DNA, 25 bp, probe
actgcccctcgagattttggaattc

SEQ ID NO: 141757 - DNA, 25 bp, probe
actccctcttcatagtgttgtgttt

SEQ ID NO: 141758 - DNA, 25 bp, probe
actacttccctgagttttgcttatt

SEQ ID NO: 141759 - DNA, 25 bp, probe
actaactagcttcttatcttgtttt

SEQ ID NO: 141760 - DNA, 25 bp, probe
actggactggttcaaatgttgttct

SEQ ID NO: 141761 - DNA, 25 bp, probe
actggatgctttataaatttgttca

SEQ ID NO: 141762 - DNA, 25 bp, probe
actggtgttttggataacttggtgg

SEQ ID NO: 141763 - DNA, 25 bp, probe
actggtactttgggaacttcctatg

SEQ ID NO: 141764 - DNA, 25 bp, probe
actgtacaggtctggaaccaccgag

SEQ ID NO: 141765 - DNA, 25 bp, probe
actgtacaggtctggaaccaccgag

SEQ ID NO: 141766 - DNA, 25 bp, probe
actggaagagatcctgctggacccc

SEQ ID NO: 141767 - DNA, 25 bp, probe
actggaagagatcctgctggacccc

SEQ ID NO: 141768 - DNA, 25 bp, probe
actgaaatagatactggtgacgacg

SEQ ID NO: 141769 - DNA, 25 bp, probe
actgctaccagtagtgggcactcag

SEQ ID NO: 141770 - DNA, 25 bp, probe
actgctaccagtagtgggcactcag

SEQ ID NO: 141771 - DNA, 25 bp, probe
actgcagaagacagtatggcagctt

SEQ ID NO: 141772 - DNA, 25 bp, probe
actggagaaactccacgatcttcct

SEQ ID NO: 141773 - DNA, 25 bp, probe
actacgaaccagtcactacttttag

SEQ ID NO: 141774 - DNA, 25 bp, probe
actacgaaccagtcactacttttag

SEQ ID NO: 141775 - DNA, 25 bp, probe
actgaagacctcattctgtcatgct

SEQ ID NO: 141776 - DNA, 25 bp, probe
actgaaaccctgccattgaattgca

SEQ ID NO: 141777 - DNA, 25 bp, probe
actgaaaccctgccattgaattgca

SEQ ID NO: 141778 - DNA, 25 bp, probe
actgtacatacctggctggattgag

SEQ ID NO: 141779 - DNA, 25 bp, probe
actgaacattccagagcgtgtagtg

SEQ ID NO: 141780 - DNA, 25 bp, probe
actggaagcttaatgtggtttgagg

SEQ ID NO: 141781 - DNA, 25 bp, probe
actggagcccatgtaggtttgcagt

SEQ ID NO: 141782 - DNA, 25 bp, probe
actgtaggcctcctaagtctaatat

SEQ ID NO: 141783 - DNA, 25 bp, probe
actgtaatgtacctgaagtttctga

SEQ ID NO: 141784 - DNA, 25 bp, probe
actgaaagtatttaaatgtttgcca

SEQ ID NO: 141785 - DNA, 25 bp, probe
actgaagaaatttcacagcagttta

SEQ ID NO: 141786 - DNA, 25 bp, probe
actgaattatagaaactggtttatt

SEQ ID NO: 141787 - DNA, 25 bp, probe
acggttgctcagaaacagcagtggt

SEQ ID NO: 141788 - DNA, 25 bp, probe
actggtggcggaggaagcagctagt

SEQ ID NO: 141789 - DNA, 25 bp, probe
actggagaccgtggacagaccaata

SEQ ID NO: 141790 - DNA, 25 bp, probe
actgaagatgccgcacacaaacaat

SEQ ID NO: 141791 - DNA, 25 bp, probe
acggcaatatcatcaccacacgcac

SEQ ID NO: 141792 - DNA, 25 bp, probe
actggaactgcatcccaaggagctc

SEQ ID NO: 141793 - DNA, 25 bp, probe
actggattgctctcccattatgagc

SEQ ID NO: 141794 - DNA, 25 bp, probe
actggcatggccttccgtgtcccca

SEQ ID NO: 141795 - DNA, 25 bp, probe
actggcatggccttccgtgtcccca

SEQ ID NO: 141796 - DNA, 25 bp, probe
actgtacgcctttggtatctgacca

SEQ ID NO: 141797 - DNA, 25 bp, probe
actgtacgcactcatgagtgactgc

SEQ ID NO: 141798 - DNA, 25 bp, probe
actggatggcttcatgatgtacctg

SEQ ID NO: 141799 - DNA, 25 bp, probe
actggatcatctacaagattgtccg

SEQ ID NO: 141800 - DNA, 25 bp, probe
actggaaggtcacgatcatctcaga

SEQ ID NO: 141801 - DNA, 25 bp, probe
actgtacatagatgtatcattaatg

SEQ ID NO: 141802 - DNA, 25 bp, probe
actggcctgatgagtatgctctaaa

SEQ ID NO: 141803 - DNA, 25 bp, probe
actggctgcgagtgttcctgagagt

SEQ ID NO: 141804 - DNA, 25 bp, probe
actggtcactgggaatcctaatgta

SEQ ID NO: 141805 - DNA, 25 bp, probe
actgtgaacggctcatggtacattc

SEQ ID NO: 141806 - DNA, 25 bp, probe
actgtgaacggctcatggtacattc

SEQ ID NO: 141807 - DNA, 25 bp, probe
actggaggggctgtggccatcagct

SEQ ID NO: 141808 - DNA, 25 bp, probe
acggagcagagagtggttcctggct

SEQ ID NO: 141809 - DNA, 25 bp, probe
actgagcaccaggtggtctcctctg

SEQ ID NO: 141810 - DNA, 25 bp, probe
actggcacgaagtgcctcatctctg

SEQ ID NO: 141811 - DNA, 25 bp, probe
actgtcaagtaatccacctctggct

SEQ ID NO: 141812 - DNA, 25 bp, probe
actccagattatatcgccccagaga

SEQ ID NO: 141813 - DNA, 25 bp, probe
actccagagtatgtagccccagaga

SEQ ID NO: 141814 - DNA, 25 bp, probe
actaaagaatacaacctgctaagtt

SEQ ID NO: 141815 - DNA, 25 bp, probe
actggaaggagacgcaccgcttcat

SEQ ID NO: 141816 - DNA, 25 bp, probe
actgtgagggcatcacaccagtggc

SEQ ID NO: 141817 - DNA, 25 bp, probe
actgtgagggcatcacaccagtggc

SEQ ID NO: 141818 - DNA, 25 bp, probe
actggtgggctgtcatcaccatgac

SEQ ID NO: 141819 - DNA, 25 bp, probe
actggagatgctgggccaccagacc

SEQ ID NO: 141820 - DNA, 25 bp, probe
actggaattgctgctacccagctgg

SEQ ID NO: 141821 - DNA, 25 bp, probe
actggaattgctgctacccagctgg

SEQ ID NO: 141822 - DNA, 25 bp, probe
actggctttgctgccagtacctggc

SEQ ID NO: 141823 - DNA, 25 bp, probe
actggatggtgagcgagtagcactg

SEQ ID NO: 141824 - DNA, 25 bp, probe
actggatgtgtccatcgagatgcca

SEQ ID NO: 141825 - DNA, 25 bp, probe
actgtagtgtagtcaggtgctcaat

SEQ ID NO: 141826 - DNA, 25 bp, probe
actggcgtgtggggctgatgtgaat

SEQ ID NO: 141827 - DNA, 25 bp, probe
actgctcgtgtgagggggccaagga

SEQ ID NO: 141828 - DNA, 25 bp, probe
actgttgttactggaagacgaaggt

SEQ ID NO: 141829 - DNA, 25 bp, probe
actgttgttactggaagacgaaggt

SEQ ID NO: 141830 - DNA, 25 bp, probe
actgtcttgtactgacacatccaaa

SEQ ID NO: 141831 - DNA, 25 bp, probe
actggcttctaaaaccctgccaaat

SEQ ID NO: 141832 - DNA, 25 bp, probe
actgactactacaggttctacacct

SEQ ID NO: 141833 - DNA, 25 bp, probe
actggctactacatccttgtagcct

SEQ ID NO: 141834 - DNA, 25 bp, probe
actggctgagaattctcctttagac

SEQ ID NO: 141835 - DNA, 25 bp, probe
actggcgaaattccattcgctcatc

SEQ ID NO: 141836 - DNA, 25 bp, probe
actggaggaaattgttcgctccctg

SEQ ID NO: 141837 - DNA, 25 bp, probe
acatccggatagaagattccccgga

SEQ ID NO: 141838 - DNA, 25 bp, probe
acatccggaagtatcccaccaagaa

SEQ ID NO: 141839 - DNA, 25 bp, probe
acttttagggagcacaaacaagaag

SEQ ID NO: 141840 - DNA, 25 bp, probe
catccagctctatgtgggaaaaaag

SEQ ID NO: 141841 - DNA, 25 bp, probe
actgcagctgccaggggcaaatacc

SEQ ID NO: 141842 - DNA, 25 bp, probe
actgcaatctgtgcgagtcaagcat

SEQ ID NO: 141843 - DNA, 25 bp, probe
actcaactgactcatacctgtttcc

SEQ ID NO: 141844 - DNA, 25 bp, probe
actctactacggtgctgctatgttc

SEQ ID NO: 141845 - DNA, 25 bp, probe
actccctaagtccactctagttgtg

SEQ ID NO: 141846 - DNA, 25 bp, probe
actgcagcaaatctctccttagttg

SEQ ID NO: 141847 - DNA, 25 bp, probe
actgtgcagtgacctccacatatga

SEQ ID NO: 141848 - DNA, 25 bp, probe
actggagtatgcttcacctagaaac

SEQ ID NO: 141849 - DNA, 25 bp, probe
actggcatgtcatttgcacacaaaa

SEQ ID NO: 141850 - DNA, 25 bp, probe
actgttttattctagcaatgaattt

SEQ ID NO: 141851 - DNA, 25 bp, probe
actgtgtctgataccaaaatgcttc

SEQ ID NO: 141852 - DNA, 25 bp, probe
actgtgtctgataccaaaatgcttc

SEQ ID NO: 141853 - DNA, 25 bp, probe
actgggagatgaccaatcaagatgt

SEQ ID NO: 141854 - DNA, 25 bp, probe
actggtagatggaacagcatgtggt

SEQ ID NO: 141855 - DNA, 25 bp, probe
actggtcacatgttccacattgatt

SEQ ID NO: 141856 - DNA, 25 bp, probe
actgtgctccatatgccatcaaatg

SEQ ID NO: 141857 - DNA, 25 bp, probe
actggcagccaagatcatcaaagtg

SEQ ID NO: 141858 - DNA, 25 bp, probe
actggctctcaacacatagtaggtg

SEQ ID NO: 141859 - DNA, 25 bp, probe
actgtttcatgactgactgactaaa

SEQ ID NO: 141860 - DNA, 25 bp, probe
actgtttcatgactgactgactaaa

SEQ ID NO: 141861 - DNA, 25 bp, probe
actgctttgcttcttgagtagagcc

SEQ ID NO: 141862 - DNA, 25 bp, probe
actggggctctttgtgagtgagggt

SEQ ID NO: 141863 - DNA, 25 bp, probe
actggtcaccttggtggtggtgctg

SEQ ID NO: 141864 - DNA, 25 bp, probe
actggtaccttcttcagtgctgagt

SEQ ID NO: 141865 - DNA, 25 bp, probe
actgtggagctcctgttcagggata

SEQ ID NO: 141866 - DNA, 25 bp, probe
actgtggagctcctgttcagggata

SEQ ID NO: 141867 - DNA, 25 bp, probe
actgtgctgctgccttaacagggaa

SEQ ID NO: 141868 - DNA, 25 bp, probe
actggcgctgccaaggctgtgggca

SEQ ID NO: 141869 - DNA, 25 bp, probe
actgtgccccagaggttggagcaat

SEQ ID NO: 141870 - DNA, 25 bp, probe
actggctccgcacggagaacgagct

SEQ ID NO: 141871 - DNA, 25 bp, probe
actcagatgcccagtatcatacgtt

SEQ ID NO: 141872 - DNA, 25 bp, probe
actcttcagccatgattagacgttg

SEQ ID NO: 141873 - DNA, 25 bp, probe
actgctgctacctgaccagcaagct

SEQ ID NO: 141874 - DNA, 25 bp, probe
actgcattgtgggacaccaacacat

SEQ ID NO: 141875 - DNA, 25 bp, probe
actcaggctgatgagctccaacata

SEQ ID NO: 141876 - DNA, 25 bp, probe
actgagtgtcagtatgtctacctac

SEQ ID NO: 141877 - DNA, 25 bp, probe
actggagtcagaagaccaggctaca

SEQ ID NO: 141878 - DNA, 25 bp, probe
actgaagtaataactgatgagatac

SEQ ID NO: 141879 - DNA, 25 bp, probe
actgtaggacacaagctgtgagcaa

SEQ ID NO: 141880 - DNA, 25 bp, probe
actggctgagcaaaagcttccagaa

SEQ ID NO: 141881 - DNA, 25 bp, probe
actggctggagaaggagtccgagca

SEQ ID NO: 141882 - DNA, 25 bp, probe
actgactggctcagcgtgtgcctac

SEQ ID NO: 141883 - DNA, 25 bp, probe
actgccgagtgcatcgtgaggttca

SEQ ID NO: 141884 - DNA, 25 bp, probe
actgccgagtgcatcgtgaggttca

SEQ ID NO: 141885 - DNA, 25 bp, probe
actgtttctgcaatggcgaggtaca

SEQ ID NO: 141886 - DNA, 25 bp, probe
actggcattcagattggagcctaca

SEQ ID NO: 141887 - DNA, 25 bp, probe
actggtctgaagaggatgctctaca

SEQ ID NO: 141888 - DNA, 25 bp, probe
actggacacaagccagggctgggac

SEQ ID NO: 141889 - DNA, 25 bp, probe
actggtgagcacctgggttgtgggc

SEQ ID NO: 141890 - DNA, 25 bp, probe
actggcttcaaggggtactgtggca

SEQ ID NO: 141891 - DNA, 25 bp, probe
actgtgtttgagatggctacaggga

SEQ ID NO: 141892 - DNA, 25 bp, probe
actggtccgagaagggacatgtggg

SEQ ID NO: 141893 - DNA, 25 bp, probe
actgtgaaggggctggccaggggcc

SEQ ID NO: 141894 - DNA, 25 bp, probe
actggacaggggctgctgggagtac

SEQ ID NO: 141895 - DNA, 25 bp, probe
actgggctgaggcagagctaggact

SEQ ID NO: 141896 - DNA, 25 bp, probe
actgtggcgagggaagccagctggt

SEQ ID NO: 141897 - DNA, 25 bp, probe
actgaaagatccgaacacagcggtc

SEQ ID NO: 141898 - DNA, 25 bp, probe
acacaaagtggagaagagctatccc

SEQ ID NO: 141899 - DNA, 25 bp, probe
cactagggtgaagcctcacttccct

SEQ ID NO: 141900 - DNA, 25 bp, probe
actctggtggaagaaccaaacactt

SEQ ID NO: 141901 - DNA, 25 bp, probe
actgcatggggatccaaccaattca

SEQ ID NO: 141902 - DNA, 25 bp, probe
actcaggcgcgaaaccagccaattc

SEQ ID NO: 141903 - DNA, 25 bp, probe
actgctggggagtccctgccacact

SEQ ID NO: 141904 - DNA, 25 bp, probe
actgctgtgggacagccagtcttcc

SEQ ID NO: 141905 - DNA, 25 bp, probe
actcgtgccggaggcaaaggtcctg

SEQ ID NO: 141906 - DNA, 25 bp, probe
actcgggcgtattcaacaaccagga

SEQ ID NO: 141907 - DNA, 25 bp, probe
actgcacaggtaatacaacacgccg

SEQ ID NO: 141908 - DNA, 25 bp, probe
actgcacaggaagccttcacactgg

SEQ ID NO: 141909 - DNA, 25 bp, probe
actcataagccacctctgtaatcgg

SEQ ID NO: 141910 - DNA, 25 bp, probe
actgcaagacaacctggttatcgct

SEQ ID NO: 141911 - DNA, 25 bp, probe
actgcaagaaaactatggctgaact

SEQ ID NO: 141912 - DNA, 25 bp, probe
actgcactggaaaatagggaacatg

SEQ ID NO: 141913 - DNA, 25 bp, probe
actgcacggacatacaaaatcaatc

SEQ ID NO: 141914 - DNA, 25 bp, probe
actcctagaagaaccaaatacctca

SEQ ID NO: 141915 - DNA, 25 bp, probe
actgcctagtttgtatattcctata

SEQ ID NO: 141916 - DNA, 25 bp, probe
actgcctcgtagggtagaaaccaat

SEQ ID NO: 141917 - DNA, 25 bp, probe
actgcctcgtagggtagaaaccaat

SEQ ID NO: 141918 - DNA, 25 bp, probe
actgacttgtttgatcgaaaaggat

SEQ ID NO: 141919 - DNA, 25 bp, probe
actgtgctggtatttgctggacaaa

SEQ ID NO: 141920 - DNA, 25 bp, probe
actgtgctggtatttgctggacaaa

SEQ ID NO: 141921 - DNA, 25 bp, probe
actggctttgttacatcaacagcac

SEQ ID NO: 141922 - DNA, 25 bp, probe
actgtgtgtgtggatttctcaccct

SEQ ID NO: 141923 - DNA, 25 bp, probe
actgttcagtgtttgtcaagcttct

SEQ ID NO: 141924 - DNA, 25 bp, probe
actgatccagtttcttcaagcatcc

SEQ ID NO: 141925 - DNA, 25 bp, probe
actaaagtctagctcagcagtcccc

SEQ ID NO: 141926 - DNA, 25 bp, probe
actccatacttcggtagcagtcgac

SEQ ID NO: 141927 - DNA, 25 bp, probe
actggctcacagaccgtcaagtatg

SEQ ID NO: 141928 - DNA, 25 bp, probe
actgtctatcagtacgtcggcaatg

SEQ ID NO: 141929 - DNA, 25 bp, probe
actgtctatgcactacattctgcta

SEQ ID NO: 141930 - DNA, 25 bp, probe
actggtatgtgtggatgatgctgcc

SEQ ID NO: 141931 - DNA, 25 bp, probe
actggtatgtgtggatgatgctgcc

SEQ ID NO: 141932 - DNA, 25 bp, probe
actgtcatcagaatctgtcggccaa

SEQ ID NO: 141933 - DNA, 25 bp, probe
actgcagcacagatctgtactccct

SEQ ID NO: 141934 - DNA, 25 bp, probe
actggagatgacttgtttccagctg

SEQ ID NO: 141935 - DNA, 25 bp, probe
actggagatgacttgtttccagctg

SEQ ID NO: 141936 - DNA, 25 bp, probe
actgctagattcgtctttggaggga

SEQ ID NO: 141937 - DNA, 25 bp, probe
actgcattgagccctcagaatggag

SEQ ID NO: 141938 - DNA, 25 bp, probe
actgctctgtgctgggatcatggaa

SEQ ID NO: 141939 - DNA, 25 bp, probe
actgccattggccatggccatggca

SEQ ID NO: 141940 - DNA, 25 bp, probe
actccacgatgccaaggcagaaccc

SEQ ID NO: 141941 - DNA, 25 bp, probe
actccacgatgccaaggcagaaccc

SEQ ID NO: 141942 - DNA, 25 bp, probe
actacgttggcatttcagaaatccc

SEQ ID NO: 141943 - DNA, 25 bp, probe
actgacgtgtggcttaatacatgta

SEQ ID NO: 141944 - DNA, 25 bp, probe
actgaccggctgcgcaaatggatgt

SEQ ID NO: 141945 - DNA, 25 bp, probe
actacaggtgtgttgaatcatggtt

SEQ ID NO: 141946 - DNA, 25 bp, probe
actacaggtgtgttgaatcatggtt

SEQ ID NO: 141947 - DNA, 25 bp, probe
actgacaaagtgtttctagggtgta

SEQ ID NO: 141948 - DNA, 25 bp, probe
actgaagtcactttatctgggtgtc

SEQ ID NO: 141949 - DNA, 25 bp, probe
actgagtccactttattctggggca

SEQ ID NO: 141950 - DNA, 25 bp, probe
actagctcttcgcataactggggca

SEQ ID NO: 141951 - DNA, 25 bp, probe
actcgccttggggttctgcgagtgc

SEQ ID NO: 141952 - DNA, 25 bp, probe
actgggttgggattatgctgctgtt

SEQ ID NO: 141953 - DNA, 25 bp, probe
actgtggcctggaaaatcagatgtg

SEQ ID NO: 141954 - DNA, 25 bp, probe
actgcaggcctgggatacggatcat

SEQ ID NO: 141955 - DNA, 25 bp, probe
actgagtgactggagacagggatga

SEQ ID NO: 141956 - DNA, 25 bp, probe
actggtgaggaagcagcctgcaggg

SEQ ID NO: 141957 - DNA, 25 bp, probe
actgtgagatgaacagcccccaggt

SEQ ID NO: 141958 - DNA, 25 bp, probe
actgcaatgtgaaacctctcgctgc

SEQ ID NO: 141959 - DNA, 25 bp, probe
actgaatgagcaaggcctcttggac

SEQ ID NO: 141960 - DNA, 25 bp, probe
actgcagaagagaccctctgtggac

SEQ ID NO: 141961 - DNA, 25 bp, probe
actgcgacgttcgatcttgcatgga

SEQ ID NO: 141962 - DNA, 25 bp, probe
actggacaacgtactactggaccac

SEQ ID NO: 141963 - DNA, 25 bp, probe
actggacaacgtactactggaccac

SEQ ID NO: 141964 - DNA, 25 bp, probe
actggacaatgtattactggactct

SEQ ID NO: 141965 - DNA, 25 bp, probe
actgtgggtttaagccttgcacctc

SEQ ID NO: 141966 - DNA, 25 bp, probe
actgtggctttaacatccatgtgac

SEQ ID NO: 141967 - DNA, 25 bp, probe
actgatgaattagaagccatctgac

SEQ ID NO: 141968 - DNA, 25 bp, probe
actgcagatacttcatatagcccat

SEQ ID NO: 141969 - DNA, 25 bp, probe
actgcagatacttcatatagcccat

SEQ ID NO: 141970 - DNA, 25 bp, probe
actgcagacatcatgaaatcaccta

SEQ ID NO: 141971 - DNA, 25 bp, probe
actgcacaatcaggaatacagggaa

SEQ ID NO: 141972 - DNA, 25 bp, probe
actccttcgtgatctggggatgtgc

SEQ ID NO: 141973 - DNA, 25 bp, probe
actctttcctcacagggaaggcgcc

SEQ ID NO: 141974 - DNA, 25 bp, probe
actcttcacctccgggaaagacact

SEQ ID NO: 141975 - DNA, 25 bp, probe
actcttcacctccgggaaagacact

SEQ ID NO: 141976 - DNA, 25 bp, probe
aatccatacaccagggtaaacacca

SEQ ID NO: 141977 - DNA, 25 bp, probe
actcgtagcaccagggtttggaggc

SEQ ID NO: 141978 - DNA, 25 bp, probe
actctcgactggccaaggtttgggg

SEQ ID NO: 141979 - DNA, 25 bp, probe
acttgggtaacatggcttgggcctt

SEQ ID NO: 141980 - DNA, 25 bp, probe
actgtggatgtttggggctttggct

SEQ ID NO: 141981 - DNA, 25 bp, probe
actgatactactggggcttttccta

SEQ ID NO: 141982 - DNA, 25 bp, probe
actgtactgtgatgtagctttcttc

SEQ ID NO: 141983 - DNA, 25 bp, probe
actggagagtaacactgctctcatt

SEQ ID NO: 141984 - DNA, 25 bp, probe
actggatgacagtgatatctccctt

SEQ ID NO: 141985 - DNA, 25 bp, probe
actgggaagttgtcagctactcctc

SEQ ID NO: 141986 - DNA, 25 bp, probe
actgggaaggatccaggttcgcttc

SEQ ID NO: 141987 - DNA, 25 bp, probe
actggtgacacgagaggtgcccttt

SEQ ID NO: 141988 - DNA, 25 bp, probe
actgtgctgacttggaaggtgccct

SEQ ID NO: 141989 - DNA, 25 bp, probe
actgtggttttaggcgcacactctc

SEQ ID NO: 141990 - DNA, 25 bp, probe
actgatggtcagattccaaagtcct

SEQ ID NO: 141991 - DNA, 25 bp, probe
actgtgttagaatttcataagcaat

SEQ ID NO: 141992 - DNA, 25 bp, probe
actgtccaagagtattccaaagcat

SEQ ID NO: 141993 - DNA, 25 bp, probe
actgcccaaaggctgtacacactgg

SEQ ID NO: 141994 - DNA, 25 bp, probe
actgaccctgaggcttgttacattg

SEQ ID NO: 141995 - DNA, 25 bp, probe
actgcaccctggatttgcatacatt

SEQ ID NO: 141996 - DNA, 25 bp, probe
actgcgcccaggacttcaataatta

SEQ ID NO: 141997 - DNA, 25 bp, probe
actccttgaggagacatatacagaa

SEQ ID NO: 141998 - DNA, 25 bp, probe
actccttgaggagacatatacagaa

SEQ ID NO: 141999 - DNA, 25 bp, probe
actcggaaggaggtctacatcaaga

SEQ ID NO: 142000 - DNA, 25 bp, probe
actcggattgaaccttactacagca

SEQ ID NO: 142001 - DNA, 25 bp, probe
actcaggtacaaactcgacttcaga

SEQ ID NO: 142002 - DNA, 25 bp, probe
actgggctacaatgcggagttacac

SEQ ID NO: 142003 - DNA, 25 bp, probe
actggtgtcctatggagatattaca

SEQ ID NO: 142004 - DNA, 25 bp, probe
actggtgacctgtaggccatgttag

SEQ ID NO: 142005 - DNA, 25 bp, probe
actggtgttgtgagatgcctgtgtc

SEQ ID NO: 142006 - DNA, 25 bp, probe
actggatttgtgagtgctgggacgg

SEQ ID NO: 142007 - DNA, 25 bp, probe
actgtgactcttcagatggggagtg

SEQ ID NO: 142008 - DNA, 25 bp, probe
actgtgtctgttctcattgggagct

SEQ ID NO: 142009 - DNA, 25 bp, probe
actgagcctgttcattctgatgtcc

SEQ ID NO: 142010 - DNA, 25 bp, probe
actgagcactggccgaggtgatgcc

SEQ ID NO: 142011 - DNA, 25 bp, probe
actgcacagctttctgagaagttct

SEQ ID NO: 142012 - DNA, 25 bp, probe
actgcacagctttctgagaagttct

SEQ ID NO: 142013 - DNA, 25 bp, probe
actgacattgtattggaactgcttc

SEQ ID NO: 142014 - DNA, 25 bp, probe
actgacctctttccagcagtgattc

SEQ ID NO: 142015 - DNA, 25 bp, probe
acataccctataccaagagggccga

SEQ ID NO: 142016 - DNA, 25 bp, probe
acataccctataccaagagggccga

SEQ ID NO: 142017 - DNA, 25 bp, probe
acttcaccgataaccagttggacgt

SEQ ID NO: 142018 - DNA, 25 bp, probe
acttcaccgataaccagttggacgt

SEQ ID NO: 142019 - DNA, 25 bp, probe
actccctcgtaagcattggaaggtc

SEQ ID NO: 142020 - DNA, 25 bp, probe
actcccgactaagcgtgcgagggcc

SEQ ID NO: 142021 - DNA, 25 bp, probe
actcccataaatcactggggggctg

SEQ ID NO: 142022 - DNA, 25 bp, probe
actcctggaacactgactggggtga

SEQ ID NO: 142023 - DNA, 25 bp, probe
actccaagcgactagaccggagtgt

SEQ ID NO: 142024 - DNA, 25 bp, probe
actccgaccagctcagactggcagt

SEQ ID NO: 142025 - DNA, 25 bp, probe
actccgaccagctcagactggcagt

SEQ ID NO: 142026 - DNA, 25 bp, probe
actcggcccagatagcctgtgggat

SEQ ID NO: 142027 - DNA, 25 bp, probe
actgcacgggcaacaaaggatggga

SEQ ID NO: 142028 - DNA, 25 bp, probe
actgcacggccaccatgaagtctgg

SEQ ID NO: 142029 - DNA, 25 bp, probe
actgacgggcaagtgacttctgcaa

SEQ ID NO: 142030 - DNA, 25 bp, probe
actgtcgccagttgtgcacttttac

SEQ ID NO: 142031 - DNA, 25 bp, probe
actgtgtccattcgggttattagca

SEQ ID NO: 142032 - DNA, 25 bp, probe
actggtctcattggcaatgtttcga

SEQ ID NO: 142033 - DNA, 25 bp, probe
actggtgcatttacagctgttaaag

SEQ ID NO: 142034 - DNA, 25 bp, probe
actggtgcatttacagctgttaaag

SEQ ID NO: 142035 - DNA, 25 bp, probe
actgcctgaggctcacggtacagag

SEQ ID NO: 142036 - DNA, 25 bp, probe
actgcgatgaggggactttagaaga

SEQ ID NO: 142037 - DNA, 25 bp, probe
actggtgcaggagagtttcagggac

SEQ ID NO: 142038 - DNA, 25 bp, probe
actgggggactcaattggagcggcc

SEQ ID NO: 142039 - DNA, 25 bp, probe
actgggatgcaggttttggaggacc

SEQ ID NO: 142040 - DNA, 25 bp, probe
actgtggtgccgtacttggaggacc

SEQ ID NO: 142041 - DNA, 25 bp, probe
actgggagcacctcatttgtggaaa

SEQ ID NO: 142042 - DNA, 25 bp, probe
actgtggtaacccatctgttggaat

SEQ ID NO: 142043 - DNA, 25 bp, probe
actgttgtatacgcttattgagaaa

SEQ ID NO: 142044 - DNA, 25 bp, probe
actgtctgattatgcatggttctaa

SEQ ID NO: 142045 - DNA, 25 bp, probe
actgtgtatgtattgatgtttggaa

SEQ ID NO: 142046 - DNA, 25 bp, probe
actgtgtagttgtatatttgtaaga

SEQ ID NO: 142047 - DNA, 25 bp, probe
actgtcctgatgaattatttgctgt

SEQ ID NO: 142048 - DNA, 25 bp, probe
actccctgcatgatacatctgtggc

SEQ ID NO: 142049 - DNA, 25 bp, probe
actccctgcatgatacatctgtggc

SEQ ID NO: 142050 - DNA, 25 bp, probe
cagctccttgatattttagaaacgg

SEQ ID NO: 142051 - DNA, 25 bp, probe
actcctcttcctgttaaaaccatga

SEQ ID NO: 142052 - DNA, 25 bp, probe
actcctcccctcatttaagaagact

SEQ ID NO: 142053 - DNA, 25 bp, probe
actcccactttctcttcaaagtggt

SEQ ID NO: 142054 - DNA, 25 bp, probe
actcccacaaccgccaaaagatgga

SEQ ID NO: 142055 - DNA, 25 bp, probe
actcccacaaccgccaaaagatgga

SEQ ID NO: 142056 - DNA, 25 bp, probe
actacccaaatctgaaaaagcagca

SEQ ID NO: 142057 - DNA, 25 bp, probe
acaggtcccttcagtaggcaagcgt

SEQ ID NO: 142058 - DNA, 25 bp, probe
cacagggcccaggtaaaccaagctg

SEQ ID NO: 142059 - DNA, 25 bp, probe
actgagggccaccaaatagcctagg

SEQ ID NO: 142060 - DNA, 25 bp, probe
actggggcctcccagaatggaaagt

SEQ ID NO: 142061 - DNA, 25 bp, probe
actgggttctccaataatgtccaaa

SEQ ID NO: 142062 - DNA, 25 bp, probe
actgggatgatctcattaataagaa

SEQ ID NO: 142063 - DNA, 25 bp, probe
actgtgccatgtgcctttataatga

SEQ ID NO: 142064 - DNA, 25 bp, probe
actgtgattgtggctctcctaagga

SEQ ID NO: 142065 - DNA, 25 bp, probe
actgtgatggtggtgcggatagggc

SEQ ID NO: 142066 - DNA, 25 bp, probe
actgtgatggtggtgcggatagggc

SEQ ID NO: 142067 - DNA, 25 bp, probe
actgtgtggcagggggatggcaggt

SEQ ID NO: 142068 - DNA, 25 bp, probe
actgttggctgctagggacacagag

SEQ ID NO: 142069 - DNA, 25 bp, probe
actgttggctgctagggacacagag

SEQ ID NO: 142070 - DNA, 25 bp, probe
actgatggtgcggaggagaccctca

SEQ ID NO: 142071 - DNA, 25 bp, probe
actgatggtgcggaggagaccctca

SEQ ID NO: 142072 - DNA, 25 bp, probe
actgaggtgcatgcactctgggggc

SEQ ID NO: 142073 - DNA, 25 bp, probe
actgaggtgcatgcactctgggggc

SEQ ID NO: 142074 - DNA, 25 bp, probe
actgcagggcttgctggagaggcct

SEQ ID NO: 142075 - DNA, 25 bp, probe
actgagcagccaagactgttgcccg

SEQ ID NO: 142076 - DNA, 25 bp, probe
actgtgcggatgccacagtgacccc

SEQ ID NO: 142077 - DNA, 25 bp, probe
actgtgcggatgccacagtgacccc

SEQ ID NO: 142078 - DNA, 25 bp, probe
actgctggaagtgagtggcccacca

SEQ ID NO: 142079 - DNA, 25 bp, probe
actgctggaagtgagtggcccacca

SEQ ID NO: 142080 - DNA, 25 bp, probe
actgtggtcagagcagctcgacccc

SEQ ID NO: 142081 - DNA, 25 bp, probe
actgtggttgatggcatggccctcc

SEQ ID NO: 142082 - DNA, 25 bp, probe
actgtggtgtgaaagtgtcatcttc

SEQ ID NO: 142083 - DNA, 25 bp, probe
actgtgaatggaacagggactcctg

SEQ ID NO: 142084 - DNA, 25 bp, probe
actgttgctggatcttgagtcccat

SEQ ID NO: 142085 - DNA, 25 bp, probe
actgttgttacactcgagctgacga

SEQ ID NO: 142086 - DNA, 25 bp, probe
actgttgtggacaatctcagctggg

SEQ ID NO: 142087 - DNA, 25 bp, probe
actgttgtggacaatctcagctggg

SEQ ID NO: 142088 - DNA, 25 bp, probe
actgttgtggacaatctcagctggg

SEQ ID NO: 142089 - DNA, 25 bp, probe
actgtcttggtcactggcaaaacaa

SEQ ID NO: 142090 - DNA, 25 bp, probe
actgccttgggcttcatggaaaaca

SEQ ID NO: 142091 - DNA, 25 bp, probe
actgcctttctagtatgtgccaaaa

SEQ ID NO: 142092 - DNA, 25 bp, probe
actcctaattacattgctcctgaaa

SEQ ID NO: 142093 - DNA, 25 bp, probe
actctagctattcttcgtcgtgaga

SEQ ID NO: 142094 - DNA, 25 bp, probe
actctggttaccttggtcagtgaaa

SEQ ID NO: 142095 - DNA, 25 bp, probe
actgctaggaaccttggtcttctta

SEQ ID NO: 142096 - DNA, 25 bp, probe
actgcagggattacttggcctttat

SEQ ID NO: 142097 - DNA, 25 bp, probe
actgcagtggattttttgcctctag

SEQ ID NO: 142098 - DNA, 25 bp, probe
actaagagtacctttgcctgctcag

SEQ ID NO: 142099 - DNA, 25 bp, probe
actgaaaggacttgattacctccat

SEQ ID NO: 142100 - DNA, 25 bp, probe
actgagctaggagacttccctgcaa

SEQ ID NO: 142101 - DNA, 25 bp, probe
actgtctgggagcagcttcaactgg

SEQ ID NO: 142102 - DNA, 25 bp, probe
actgtccaggtgaacttctacgggg

SEQ ID NO: 142103 - DNA, 25 bp, probe
cactgtccaggtgaacttctacggg

SEQ ID NO: 142104 - DNA, 25 bp, probe
actgctcccgtggaagattaaaggg

SEQ ID NO: 142105 - DNA, 25 bp, probe
actgcttcctggtaaactataacaa

SEQ ID NO: 142106 - DNA, 25 bp, probe
actgattcctgtccagtggctaaga

SEQ ID NO: 142107 - DNA, 25 bp, probe
actgagtcgcgaggcatttggagag

SEQ ID NO: 142108 - DNA, 25 bp, probe
actgaagctggtggcgtgctaatgg

SEQ ID NO: 142109 - DNA, 25 bp, probe
actgatagggctgggtctgtgtgag

SEQ ID NO: 142110 - DNA, 25 bp, probe
actgtcataggcattgcctctggtg

SEQ ID NO: 142111 - DNA, 25 bp, probe
actactgggcatgtgctttggggac

SEQ ID NO: 142112 - DNA, 25 bp, probe
actcctagagcaactctgtggggtg

SEQ ID NO: 142113 - DNA, 25 bp, probe
actcctctgattatcgctgcaaagg

SEQ ID NO: 142114 - DNA, 25 bp, probe
actgctttgatcaaccctaaatgca

SEQ ID NO: 142115 - DNA, 25 bp, probe
actgatctctgtatcccattattac

SEQ ID NO: 142116 - DNA, 25 bp, probe
actgatctctgtatcccattattac

SEQ ID NO: 142117 - DNA, 25 bp, probe
actgtatcaatttctaatgtttact

SEQ ID NO: 142118 - DNA, 25 bp, probe
actgtaccttcaataatggactatg

SEQ ID NO: 142119 - DNA, 25 bp, probe
actgtcactgcaaccatgaatgggc

SEQ ID NO: 142120 - DNA, 25 bp, probe
actgtcactgcaaccatgaatgggc

SEQ ID NO: 142121 - DNA, 25 bp, probe
actgctacatcttcatcttcagggc

SEQ ID NO: 142122 - DNA, 25 bp, probe
actgtgaactcaatctccagggctc

SEQ ID NO: 142123 - DNA, 25 bp, probe
actgtacctcaaactctggaacctg

SEQ ID NO: 142124 - DNA, 25 bp, probe
actcgaaccaaagtcgtcactccat

SEQ ID NO: 142125 - DNA, 25 bp, probe
actgaacagaagaattcgtcccact

SEQ ID NO: 142126 - DNA, 25 bp, probe
actgacaacaagacgggctgcgcca

SEQ ID NO: 142127 - DNA, 25 bp, probe
actgccaatcaaggctaggaggctc

SEQ ID NO: 142128 - DNA, 25 bp, probe
actgaccagctcagcgaggagccat

SEQ ID NO: 142129 - DNA, 25 bp, probe
actgaccagctcagcgaggagccat

SEQ ID NO: 142130 - DNA, 25 bp, probe
actgactcagatgcagggtctgctc

SEQ ID NO: 142131 - DNA, 25 bp, probe
actgatgccaaggatgatttatgtc

SEQ ID NO: 142132 - DNA, 25 bp, probe
actgatgccaaggatgatttatgtc

SEQ ID NO: 142133 - DNA, 25 bp, probe
actgtggcagatggagagctttttt

SEQ ID NO: 142134 - DNA, 25 bp, probe
actgtggagtgcggagcctcattac

SEQ ID NO: 142135 - DNA, 25 bp, probe
actgacgcagtcgcagatgctgcat

SEQ ID NO: 142136 - DNA, 25 bp, probe
actcacagctgactccaagctgcat

SEQ ID NO: 142137 - DNA, 25 bp, probe
actgcacagctaatggcacaggagg

SEQ ID NO: 142138 - DNA, 25 bp, probe
actgcacagctaatggcacaggagg

SEQ ID NO: 142139 - DNA, 25 bp, probe
actgcaagctcctgccaggagtagc

SEQ ID NO: 142140 - DNA, 25 bp, probe
actgcggcccttgcaggaggacaag

SEQ ID NO: 142141 - DNA, 25 bp, probe
actgcccccagtgaatatggtgaag

SEQ ID NO: 142142 - DNA, 25 bp, probe
actgtcctccggcaaacagcagaag

SEQ ID NO: 142143 - DNA, 25 bp, probe
actgatgttcctagtgaaagaggca

SEQ ID NO: 142144 - DNA, 25 bp, probe
actgatgctgcatctagaaaacacc

SEQ ID NO: 142145 - DNA, 25 bp, probe
actgtctgcatctggttatcagccc

SEQ ID NO: 142146 - DNA, 25 bp, probe
actgcacgatattcagatttcggcc

SEQ ID NO: 142147 - DNA, 25 bp, probe
actgcagtaatgtcaatggttggtt

SEQ ID NO: 142148 - DNA, 25 bp, probe
actgcaggacagtcaaggtgatata

SEQ ID NO: 142149 - DNA, 25 bp, probe
actgcacagaatggctgacttgaag

SEQ ID NO: 142150 - DNA, 25 bp, probe
actgcagaacaccaacatgctgaag

SEQ ID NO: 142151 - DNA, 25 bp, probe
actgcaatcagacaaagttcaggat

SEQ ID NO: 142152 - DNA, 25 bp, probe
actgtctgtgtgaagcaatcattta

SEQ ID NO: 142153 - DNA, 25 bp, probe
actgtgctgttaagcatccatttaa

SEQ ID NO: 142154 - DNA, 25 bp, probe
actgcagatttctcacctgtaagat

SEQ ID NO: 142155 - DNA, 25 bp, probe
actgcagaatttatcactgaaatgg

SEQ ID NO: 142156 - DNA, 25 bp, probe
actgcatttttcaatcctcttttgg

SEQ ID NO: 142157 - DNA, 25 bp, probe
actactttgaaattccttgatttgt

SEQ ID NO: 142158 - DNA, 25 bp, probe
actgactctgggatgctcctagttt

SEQ ID NO: 142159 - DNA, 25 bp, probe
actgcagcttggagtctctctaggt

SEQ ID NO: 142160 - DNA, 25 bp, probe
actgcatcgtggtcttcatcgtaag

SEQ ID NO: 142161 - DNA, 25 bp, probe
actgcaccatcgtgatcatcgttca

SEQ ID NO: 142162 - DNA, 25 bp, probe
actgcaccatcgtgatcatcgttca

SEQ ID NO: 142163 - DNA, 25 bp, probe
actgcaccacgattgtgacagcgta

SEQ ID NO: 142164 - DNA, 25 bp, probe
actgcagtgctggaattggccggac

SEQ ID NO: 142165 - DNA, 25 bp, probe
actgaatgtggattcaggcaccatc

SEQ ID NO: 142166 - DNA, 25 bp, probe
actacagtggcattaggacttaccg

SEQ ID NO: 142167 - DNA, 25 bp, probe
actccagtagcgagagacggcaccc

SEQ ID NO: 142168 - DNA, 25 bp, probe
actccaaagccaagacgcggagcgc

SEQ ID NO: 142169 - DNA, 25 bp, probe
actgccagaaacaggctgaacagcc

SEQ ID NO: 142170 - DNA, 25 bp, probe
actgccagaaacaggctgaacagcc

SEQ ID NO: 142171 - DNA, 25 bp, probe
actgcccaccgtagggaagcagcac

SEQ ID NO: 142172 - DNA, 25 bp, probe
actcacccttgtggacgaagcaatt

SEQ ID NO: 142173 - DNA, 25 bp, probe
actgcatcacgcagggacgtgagtt

SEQ ID NO: 142174 - DNA, 25 bp, probe
actgcgaccgtacgacgtgaaggac

SEQ ID NO: 142175 - DNA, 25 bp, probe
actgcaaactgctggtccataagcg

SEQ ID NO: 142176 - DNA, 25 bp, probe
actgctaaatactgtacatagatgt

SEQ ID NO: 142177 - DNA, 25 bp, probe
actgtgaagtcaacaataatggcag

SEQ ID NO: 142178 - DNA, 25 bp, probe
actgctaagtcaggaaatggggtat

SEQ ID NO: 142179 - DNA, 25 bp, probe
actcccagtcagctgcaaggggaaa

SEQ ID NO: 142180 - DNA, 25 bp, probe
actgctctcctagggaatggggaaa

SEQ ID NO: 142181 - DNA, 25 bp, probe
actgctctcctagggaatggggaaa

SEQ ID NO: 142182 - DNA, 25 bp, probe
actcttcccggttgatcgtggatta

SEQ ID NO: 142183 - DNA, 25 bp, probe
acattacctggtttcctgggattca

SEQ ID NO: 142184 - DNA, 25 bp, probe
acttccacggctgtctcgtggacgg

SEQ ID NO: 142185 - DNA, 25 bp, probe
gactattaccggatccagggccggg

SEQ ID NO: 142186 - DNA, 25 bp, probe
actttactctgtgtccggatgtttg

SEQ ID NO: 142187 - DNA, 25 bp, probe
actttactctgtgtccggatgtttg

SEQ ID NO: 142188 - DNA, 25 bp, probe
actgtttcacgtgtacctgtgtcat

SEQ ID NO: 142189 - DNA, 25 bp, probe
acttttccagatgaacggaccataa

SEQ ID NO: 142190 - DNA, 25 bp, probe
actgtttgctcattggaaaaaccaa

SEQ ID NO: 142191 - DNA, 25 bp, probe
actatcactgcagaaaaaaacccaa

SEQ ID NO: 142192 - DNA, 25 bp, probe
actgtcctccaaggctacaggaccc

SEQ ID NO: 142193 - DNA, 25 bp, probe
actgtccccaaagtaccaacagctc

SEQ ID NO: 142194 - DNA, 25 bp, probe
actaccaccaaattatccaactgtt

SEQ ID NO: 142195 - DNA, 25 bp, probe
actcccttcaaacacaaagattgct

SEQ ID NO: 142196 - DNA, 25 bp, probe
actgcccttgcatggaaaactgttt

SEQ ID NO: 142197 - DNA, 25 bp, probe
actgcccttgcatggaaaactgttt

SEQ ID NO: 142198 - DNA, 25 bp, probe
actgccccgcagagaaaggcaggtc

SEQ ID NO: 142199 - DNA, 25 bp, probe
actaccgccggaggagatggggtct

SEQ ID NO: 142200 - DNA, 25 bp, probe
actcatctccctcaagagtgggact

SEQ ID NO: 142201 - DNA, 25 bp, probe
actctgtctcctgatgaacgggttg

SEQ ID NO: 142202 - DNA, 25 bp, probe
actgtgctcacggttggacttggtg

SEQ ID NO: 142203 - DNA, 25 bp, probe
actttaccttggcacttgagacaga

SEQ ID NO: 142204 - DNA, 25 bp, probe
actttaccttggcacttgagacaga

SEQ ID NO: 142205 - DNA, 25 bp, probe
actgctgctaccaggaactctttga

SEQ ID NO: 142206 - DNA, 25 bp, probe
actgtctacactgggtacactttgt

SEQ ID NO: 142207 - DNA, 25 bp, probe
actcagcaacactggtcacgtttgg

SEQ ID NO: 142208 - DNA, 25 bp, probe
actcagcaacactggtcacgtttgg

SEQ ID NO: 142209 - DNA, 25 bp, probe
actccaacatcatgcatgtggctta

SEQ ID NO: 142210 - DNA, 25 bp, probe
actccacatgtccacaggtgttgca

SEQ ID NO: 142211 - DNA, 25 bp, probe
actcctctgacgaatgggtatattg

SEQ ID NO: 142212 - DNA, 25 bp, probe
actacgtgaagattaagctttgctt

SEQ ID NO: 142213 - DNA, 25 bp, probe
actacgtgaagattaagctttgctt

SEQ ID NO: 142214 - DNA, 25 bp, probe
acatccgtgagcaaggacgctttct

SEQ ID NO: 142215 - DNA, 25 bp, probe
actgccgctgagaagggttgatcct

SEQ ID NO: 142216 - DNA, 25 bp, probe
actgccctggtctagtgggagctgc

SEQ ID NO: 142217 - DNA, 25 bp, probe
acttcttgggcatgtggttcccttc

SEQ ID NO: 142218 - DNA, 25 bp, probe
actgtttagtcatgtgttttcatct

SEQ ID NO: 142219 - DNA, 25 bp, probe
actgttgatgggtaatgtccttact

SEQ ID NO: 142220 - DNA, 25 bp, probe
actgttctgggctacatttgtgctt

SEQ ID NO: 142221 - DNA, 25 bp, probe
actgtctgagggatcactgtgtcat

SEQ ID NO: 142222 - DNA, 25 bp, probe
actgcctgtggaactccaggctatg

SEQ ID NO: 142223 - DNA, 25 bp, probe
actgcccaggtagctggagctgatc

SEQ ID NO: 142224 - DNA, 25 bp, probe
actgcccaggtagctggagctgatc

SEQ ID NO: 142225 - DNA, 25 bp, probe
actgcccatgactagttggtggata

SEQ ID NO: 142226 - DNA, 25 bp, probe
actgtcaatgattagatcgggtctc

SEQ ID NO: 142227 - DNA, 25 bp, probe
actgctcatggattacatcggtatt

SEQ ID NO: 142228 - DNA, 25 bp, probe
actgtcagagaatctggagttgaat

SEQ ID NO: 142229 - DNA, 25 bp, probe
actgctatgggcggctggaggagaa

SEQ ID NO: 142230 - DNA, 25 bp, probe
actgctggtggttctggacatggag

SEQ ID NO: 142231 - DNA, 25 bp, probe
actgcagcgtcactcaggaaaggaa

SEQ ID NO: 142232 - DNA, 25 bp, probe
actgcaggtgatcaagaagacggag

SEQ ID NO: 142233 - DNA, 25 bp, probe
actgcaggtttccgagcagagggtc

SEQ ID NO: 142234 - DNA, 25 bp, probe
actgcaggtttccgagcagagggtc

SEQ ID NO: 142235 - DNA, 25 bp, probe
actgcagtttttcacaatggtggca

SEQ ID NO: 142236 - DNA, 25 bp, probe
actgctgcttttaccatcacattgg

SEQ ID NO: 142237 - DNA, 25 bp, probe
actcagtgtcttacacccagctgag

SEQ ID NO: 142238 - DNA, 25 bp, probe
actcggctgtattaatcacgcgatg

SEQ ID NO: 142239 - DNA, 25 bp, probe
actgaggcgatagaattggcgcatg

SEQ ID NO: 142240 - DNA, 25 bp, probe
actgcagggcttgaaatggacatct

SEQ ID NO: 142241 - DNA, 25 bp, probe
actgctgagaccaaaaggcttcact

SEQ ID NO: 142242 - DNA, 25 bp, probe
actcgaacctaatccagaccaacga

SEQ ID NO: 142243 - DNA, 25 bp, probe
actcggacctagaggaggcctccga

SEQ ID NO: 142244 - DNA, 25 bp, probe
actctctaccaagagggtcttccta

SEQ ID NO: 142245 - DNA, 25 bp, probe
actcttaggcagctatgggtttctt

SEQ ID NO: 142246 - DNA, 25 bp, probe
actttaggactgtgtagttgtatat

SEQ ID NO: 142247 - DNA, 25 bp, probe
acttacgaagtgtgccagccttttg

SEQ ID NO: 142248 - DNA, 25 bp, probe
actaacttactgtccaccagtttat

SEQ ID NO: 142249 - DNA, 25 bp, probe
actaacttactgtccaccagtttat

SEQ ID NO: 142250 - DNA, 25 bp, probe
actacaattacaaccagcatgcgta

SEQ ID NO: 142251 - DNA, 25 bp, probe
actgtcagttacaccaatctgaagt

SEQ ID NO: 142252 - DNA, 25 bp, probe
actgtcaccaacaaccaagctaaat

SEQ ID NO: 142253 - DNA, 25 bp, probe
actgtcaccagatattgccattttt

SEQ ID NO: 142254 - DNA, 25 bp, probe
actgcacacctattacctattattt

SEQ ID NO: 142255 - DNA, 25 bp, probe
actgaacctattagcaaatcttgtc

SEQ ID NO: 142256 - DNA, 25 bp, probe
actaaccttgtcctaatacgctatg

SEQ ID NO: 142257 - DNA, 25 bp, probe
actacctcattttataaaactatgc

SEQ ID NO: 142258 - DNA, 25 bp, probe
actacctattatgtgaggacagttg

SEQ ID NO: 142259 - DNA, 25 bp, probe
actcgcagattttcttgggagagtc

SEQ ID NO: 142260 - DNA, 25 bp, probe
actgccagctcttcctagctggaga

SEQ ID NO: 142261 - DNA, 25 bp, probe
actgtatccttggcccaggagagcg

SEQ ID NO: 142262 - DNA, 25 bp, probe
actgtcaccataactcacaagacac

SEQ ID NO: 142263 - DNA, 25 bp, probe
actgatctctactaccacaaggaaa

SEQ ID NO: 142264 - DNA, 25 bp, probe
actgttctgaagcaccgagacacac

SEQ ID NO: 142265 - DNA, 25 bp, probe
actttctgacctcctgaaacagggc

SEQ ID NO: 142266 - DNA, 25 bp, probe
acttctctagcctcgagtccgaggt

SEQ ID NO: 142267 - DNA, 25 bp, probe
actcatcctaactaacagtcacgcc

SEQ ID NO: 142268 - DNA, 25 bp, probe
actgcactacaaaagagaccagccc

SEQ ID NO: 142269 - DNA, 25 bp, probe
actgactgactaaatgacacccaaa

SEQ ID NO: 142270 - DNA, 25 bp, probe
actgactgactaaatgacacccaaa

SEQ ID NO: 142271 - DNA, 25 bp, probe
acattctgacttcagatccccaaat

SEQ ID NO: 142272 - DNA, 25 bp, probe
acttccctgggatccccagagttgg

SEQ ID NO: 142273 - DNA, 25 bp, probe
actctccctagactctcctagggtt

SEQ ID NO: 142274 - DNA, 25 bp, probe
acttacttttccttgatagggtgct

SEQ ID NO: 142275 - DNA, 25 bp, probe
actgtactttagtgacattgtgggc

SEQ ID NO: 142276 - DNA, 25 bp, probe
actgtactttgacaccgtggctgac

SEQ ID NO: 142277 - DNA, 25 bp, probe
actgctggtttgagacctattctga

SEQ ID NO: 142278 - DNA, 25 bp, probe
actgcggggagcatgacacaaccga

SEQ ID NO: 142279 - DNA, 25 bp, probe
actcgagttggcaccaaacgctata

SEQ ID NO: 142280 - DNA, 25 bp, probe
actgaaggaggcgtccgagagtgct

SEQ ID NO: 142281 - DNA, 25 bp, probe
actaaggcgcagactcctaaggcac

SEQ ID NO: 142282 - DNA, 25 bp, probe
actcgggaatccggcacaaggcact

SEQ ID NO: 142283 - DNA, 25 bp, probe
actgccgagcaattccaggaagagc

SEQ ID NO: 142284 - DNA, 25 bp, probe
actgcattccagaaccagcgaaggg

SEQ ID NO: 142285 - DNA, 25 bp, probe
actgactccgaatgggactggctgc

SEQ ID NO: 142286 - DNA, 25 bp, probe
actgacaccgaggcagggatcggtc

SEQ ID NO: 142287 - DNA, 25 bp, probe
actgccgctctgggcagtggacgct

SEQ ID NO: 142288 - DNA, 25 bp, probe
actcacctctgcctcaatgtgaatc

SEQ ID NO: 142289 - DNA, 25 bp, probe
actactctggcgtcaatggatattc

SEQ ID NO: 142290 - DNA, 25 bp, probe
actccctgctggtcaaagtcattgc

SEQ ID NO: 142291 - DNA, 25 bp, probe
actgctgacctttgcaaaggctgcc

SEQ ID NO: 142292 - DNA, 25 bp, probe
actgctatcctttaccagagttgga

SEQ ID NO: 142293 - DNA, 25 bp, probe
actgtatcacctttgccaagtaaga

SEQ ID NO: 142294 - DNA, 25 bp, probe
actgaaagctctgttgcaattagga

SEQ ID NO: 142295 - DNA, 25 bp, probe
actgaaatgttccatgtgagtaaaa

SEQ ID NO: 142296 - DNA, 25 bp, probe
actgattttttattatgtaagcaaa

SEQ ID NO: 142297 - DNA, 25 bp, probe
actgtatttttctctgctaagaccg

SEQ ID NO: 142298 - DNA, 25 bp, probe
actgtattttgaatccttaaaggtg

SEQ ID NO: 142299 - DNA, 25 bp, probe
actgactaaatgacacccaaaatgg

SEQ ID NO: 142300 - DNA, 25 bp, probe
actgactaaatgacacccaaaatgg

SEQ ID NO: 142301 - DNA, 25 bp, probe
actcatctaactagcctccagaata

SEQ ID NO: 142302 - DNA, 25 bp, probe
actctttgaccggatcacggatgag

SEQ ID NO: 142303 - DNA, 25 bp, probe
actcatttgacaagtttgggaagtg

SEQ ID NO: 142304 - DNA, 25 bp, probe
actcatttgacaagtttgggaagtg

SEQ ID NO: 142305 - DNA, 25 bp, probe
actcattttgttcttgccagacgtg

SEQ ID NO: 142306 - DNA, 25 bp, probe
actgctttctgtactcttgcaaaca

SEQ ID NO: 142307 - DNA, 25 bp, probe
actgctgtgagcatttgttagatca

SEQ ID NO: 142308 - DNA, 25 bp, probe
actgttacagctgagcattatgatg

SEQ ID NO: 142309 - DNA, 25 bp, probe
actgttcagcagtcctgcttcaagc

SEQ ID NO: 142310 - DNA, 25 bp, probe
actgttgagatgtatgtgcatgtga

SEQ ID NO: 142311 - DNA, 25 bp, probe
actgatcagagacatgctgctgtcg

SEQ ID NO: 142312 - DNA, 25 bp, probe
actgcagagagtcatgatcatgtcc

SEQ ID NO: 142313 - DNA, 25 bp, probe
actgcagtatgtcccaagacctacc

SEQ ID NO: 142314 - DNA, 25 bp, probe
actgcatggtgtcccaggacttcac

SEQ ID NO: 142315 - DNA, 25 bp, probe
actgcatggtcgcccatgattttac

SEQ ID NO: 142316 - DNA, 25 bp, probe
gactttgccccgagtttacgaagag

SEQ ID NO: 142317 - DNA, 25 bp, probe
gactttcacctgcttttaacctgaa

SEQ ID NO: 142318 - DNA, 25 bp, probe
actaaccgtgccatcttgcaaacta

SEQ ID NO: 142319 - DNA, 25 bp, probe
actctacagtgtcttaagcaatatt

SEQ ID NO: 142320 - DNA, 25 bp, probe
actctacagtgtcttaagcaatatt

SEQ ID NO: 142321 - DNA, 25 bp, probe
actctcagcgtatgttcaggactca

SEQ ID NO: 142322 - DNA, 25 bp, probe
actccactatagttcatcaagactt

SEQ ID NO: 142323 - DNA, 25 bp, probe
actcagcctttgtctcaacgagggg

SEQ ID NO: 142324 - DNA, 25 bp, probe
actgagttattagtcgatcgagatg

SEQ ID NO: 142325 - DNA, 25 bp, probe
actgagttattagtcgatcgagatg

SEQ ID NO: 142326 - DNA, 25 bp, probe
acataattataaccgagggctggcg

SEQ ID NO: 142327 - DNA, 25 bp, probe
actagattgatctaagggggaaaga

SEQ ID NO: 142328 - DNA, 25 bp, probe
actagattttaagggagctgaggga

SEQ ID NO: 142329 - DNA, 25 bp, probe
actaagggatgcagtggagtgtggt

SEQ ID NO: 142330 - DNA, 25 bp, probe
actgagaggggtcaggctgctcgtg

SEQ ID NO: 142331 - DNA, 25 bp, probe
actgaagtggctaaagagctttgtg

SEQ ID NO: 142332 - DNA, 25 bp, probe
actgctacggcgcaagagcctgcag

SEQ ID NO: 142333 - DNA, 25 bp, probe
actgctacggcgcaagagcctgcag

SEQ ID NO: 142334 - DNA, 25 bp, probe
actgctacagagccacagtaccagc

SEQ ID NO: 142335 - DNA, 25 bp, probe
actgctacagagccacagtaccagc

SEQ ID NO: 142336 - DNA, 25 bp, probe
actgatcacagagtcaaggaagcag

SEQ ID NO: 142337 - DNA, 25 bp, probe
actgaccaactgaagtatagactta

SEQ ID NO: 142338 - DNA, 25 bp, probe
actgcaccaacgaactgtacatgat

SEQ ID NO: 142339 - DNA, 25 bp, probe
actgctccaagtcagatgtggatat

SEQ ID NO: 142340 - DNA, 25 bp, probe
actgcccagacctagcagtgacatc

SEQ ID NO: 142341 - DNA, 25 bp, probe
actcgccagcctttgacatgagcat

SEQ ID NO: 142342 - DNA, 25 bp, probe
actcgccagcctttgacatgagcat

SEQ ID NO: 142343 - DNA, 25 bp, probe
actcgccagcctttgacatgagcat

SEQ ID NO: 142344 - DNA, 25 bp, probe
actctatcggctgatgcagcgctgc

SEQ ID NO: 142345 - DNA, 25 bp, probe
actcattcgtgggaacagcgcagta

SEQ ID NO: 142346 - DNA, 25 bp, probe
actcgaccacgtagaaggcagtgag

SEQ ID NO: 142347 - DNA, 25 bp, probe
actcgggctctgactacagaagtgg

SEQ ID NO: 142348 - DNA, 25 bp, probe
actcggcacctgttaaacttggagg

SEQ ID NO: 142349 - DNA, 25 bp, probe
actcggccggagagctgaggggagg

SEQ ID NO: 142350 - DNA, 25 bp, probe
actagaccaaaggcgctgggaaggg

SEQ ID NO: 142351 - DNA, 25 bp, probe
actaggagccactgggggagatgtg

SEQ ID NO: 142352 - DNA, 25 bp, probe
actccagggcacggcgtgggagggg

SEQ ID NO: 142353 - DNA, 25 bp, probe
actgactggacggctgccaaggagg

SEQ ID NO: 142354 - DNA, 25 bp, probe
actgctgtggttgcagccacagggg

SEQ ID NO: 142355 - DNA, 25 bp, probe
actgcctgtgttgaggcagccgcgg

SEQ ID NO: 142356 - DNA, 25 bp, probe
actgactggtgaggaagcagcctgc

SEQ ID NO: 142357 - DNA, 25 bp, probe
actgcaggaggagaaccgcgacctg

SEQ ID NO: 142358 - DNA, 25 bp, probe
actcaggagggttccttggtcctca

SEQ ID NO: 142359 - DNA, 25 bp, probe
actaggactgtaaacttttgtgata

SEQ ID NO: 142360 - DNA, 25 bp, probe
acttcagcctgttaggtttaggata

SEQ ID NO: 142361 - DNA, 25 bp, probe
gacgtaccgacaatggtctggggta

SEQ ID NO: 142362 - DNA, 25 bp, probe
actgcatacccctggtttgcaggta

SEQ ID NO: 142363 - DNA, 25 bp, probe
actctaccagactgtgtattcattg

SEQ ID NO: 142364 - DNA, 25 bp, probe
actctaccagactgtgtattcattg

SEQ ID NO: 142365 - DNA, 25 bp, probe
actgctggccaatcagtgtcatctc

SEQ ID NO: 142366 - DNA, 25 bp, probe
actgctggacaatctgcatgggcat

SEQ ID NO: 142367 - DNA, 25 bp, probe
actgcatggacaatgagaggcggcc

SEQ ID NO: 142368 - DNA, 25 bp, probe
actgcatcgtcaacatggacgcccc

SEQ ID NO: 142369 - DNA, 25 bp, probe
actgcatcgtcaacatggacgcccc

SEQ ID NO: 142370 - DNA, 25 bp, probe
actgcaaccatgaatgggcaccccc

SEQ ID NO: 142371 - DNA, 25 bp, probe
actgcaaccatgaatgggcaccccc

SEQ ID NO: 142372 - DNA, 25 bp, probe
actgcatgtatgggtgggcacctcc

SEQ ID NO: 142373 - DNA, 25 bp, probe
actgcatgtatgggtgggcacctcc

SEQ ID NO: 142374 - DNA, 25 bp, probe
actgctgacgggaatggcactgtcc

SEQ ID NO: 142375 - DNA, 25 bp, probe
actgctgacgggaatggcactgtcc

SEQ ID NO: 142376 - DNA, 25 bp, probe
actgctcactagctgtggaggtcct

SEQ ID NO: 142377 - DNA, 25 bp, probe
actgctcattgcctgtgtggcacaa

SEQ ID NO: 142378 - DNA, 25 bp, probe
actctcagtgtgttctggtcatctt

SEQ ID NO: 142379 - DNA, 25 bp, probe
actctttggagagggtcaagtctgc

SEQ ID NO: 142380 - DNA, 25 bp, probe
actctgctggaaaagcggaggttgg

SEQ ID NO: 142381 - DNA, 25 bp, probe
actctcggaatgactgccgagcagt

SEQ ID NO: 142382 - DNA, 25 bp, probe
actcgctggacgacagcggcagctg

SEQ ID NO: 142383 - DNA, 25 bp, probe
actgagctgaactgcagctgggtgc

SEQ ID NO: 142384 - DNA, 25 bp, probe
actgactgtacatagtgtggtgaag

SEQ ID NO: 142385 - DNA, 25 bp, probe
actgacttgagaccagttgaataaa

SEQ ID NO: 142386 - DNA, 25 bp, probe
actactgggacctactctggaaagg

SEQ ID NO: 142387 - DNA, 25 bp, probe
actcctgcagaagtcaactgtgtga

SEQ ID NO: 142388 - DNA, 25 bp, probe
actgcgccagaagcaattgcctatc

SEQ ID NO: 142389 - DNA, 25 bp, probe
actgagcggacagaatgatgccaaa

SEQ ID NO: 142390 - DNA, 25 bp, probe
actagcgtacatctaaggaaaaccg

SEQ ID NO: 142391 - DNA, 25 bp, probe
actcgaattctcacaaggaaaaggc

SEQ ID NO: 142392 - DNA, 25 bp, probe
actgcgtattacaatccggcagaaa

SEQ ID NO: 142393 - DNA, 25 bp, probe
actgctgtatggactcatccaccag

SEQ ID NO: 142394 - DNA, 25 bp, probe
actctgtgctgggcatttggccgga

SEQ ID NO: 142395 - DNA, 25 bp, probe
actgcatcttgcagcttttcgggaa

SEQ ID NO: 142396 - DNA, 25 bp, probe
actgcatcttgcagcttttcgggaa

SEQ ID NO: 142397 - DNA, 25 bp, probe
actgacttcactggagtctcaggaa

SEQ ID NO: 142398 - DNA, 25 bp, probe
actgaattcttctgtgcatatgtac

SEQ ID NO: 142399 - DNA, 25 bp, probe
actgccttattatgatcttgtacct

SEQ ID NO: 142400 - DNA, 25 bp, probe
actgccttattatgatcttgtacct

SEQ ID NO: 142401 - DNA, 25 bp, probe
actgctttttagcagtcctggccgt

SEQ ID NO: 142402 - DNA, 25 bp, probe
actgctttttagcagtcctggccgt

SEQ ID NO: 142403 - DNA, 25 bp, probe
actgcttctgttaaagtcactgacc

SEQ ID NO: 142404 - DNA, 25 bp, probe
actcgacgatgtagaaggcagtgag

SEQ ID NO: 142405 - DNA, 25 bp, probe
actcagccaagaagtagatgactag

SEQ ID NO: 142406 - DNA, 25 bp, probe
actcagccaagaagtagatgactag

SEQ ID NO: 142407 - DNA, 25 bp, probe
actcatgcgcaaggggaacctgcag

SEQ ID NO: 142408 - DNA, 25 bp, probe
actcatggccaggagagtgacacca

SEQ ID NO: 142409 - DNA, 25 bp, probe
actgcagtccagggatgagagagct

SEQ ID NO: 142410 - DNA, 25 bp, probe
actgcgaccacaagaaggatgattc

SEQ ID NO: 142411 - DNA, 25 bp, probe
actccagccaaatagtgttctcggg

SEQ ID NO: 142412 - DNA, 25 bp, probe
actacgccaagatcagcgactttgg

SEQ ID NO: 142413 - DNA, 25 bp, probe
actacaggcaagtggcaaatgctga

SEQ ID NO: 142414 - DNA, 25 bp, probe
actgacaggtgaccgatgtacagga

SEQ ID NO: 142415 - DNA, 25 bp, probe
actaatttggcgcagatgacagatg

SEQ ID NO: 142416 - DNA, 25 bp, probe
actgaactaggcctggtggaaggag

SEQ ID NO: 142417 - DNA, 25 bp, probe
actgaactaggcctggtggaaggag

SEQ ID NO: 142418 - DNA, 25 bp, probe
actgaagacgagcctggggtggaga

SEQ ID NO: 142419 - DNA, 25 bp, probe
actatccccagctgtgggttgcaag

SEQ ID NO: 142420 - DNA, 25 bp, probe
acatcatctcccaaggggtgctaaa

SEQ ID NO: 142421 - DNA, 25 bp, probe
actgcatgtccaaacgaagtaacaa

SEQ ID NO: 142422 - DNA, 25 bp, probe
actcagtaaaacgcagtgattcaaa

SEQ ID NO: 142423 - DNA, 25 bp, probe
actcagtaaaacgcagtgattcaaa

SEQ ID NO: 142424 - DNA, 25 bp, probe
actcctatgagatgcgcctggttat

SEQ ID NO: 142425 - DNA, 25 bp, probe
actgctttgagatcacgctggaact

SEQ ID NO: 142426 - DNA, 25 bp, probe
actgcatttgcataaaaactactct

SEQ ID NO: 142427 - DNA, 25 bp, probe
actgctttcaaatactattttctaa

SEQ ID NO: 142428 - DNA, 25 bp, probe
actgcaactgccagaacttggtatt

SEQ ID NO: 142429 - DNA, 25 bp, probe
actgaacgccaaaacttccacatgg

SEQ ID NO: 142430 - DNA, 25 bp, probe
actgaaacgccaggaatcccagcag

SEQ ID NO: 142431 - DNA, 25 bp, probe
actaacagctccctgaatccagtaa

SEQ ID NO: 142432 - DNA, 25 bp, probe
actaacagctccctgaatccagtaa

SEQ ID NO: 142433 - DNA, 25 bp, probe
actgcaaagtcccgagttactcaga

SEQ ID NO: 142434 - DNA, 25 bp, probe
actgcagaagtttaggctcacctca

SEQ ID NO: 142435 - DNA, 25 bp, probe
actgcgcaagttgttacatctctct

SEQ ID NO: 142436 - DNA, 25 bp, probe
actgcgacatgctcaagattgcctc

SEQ ID NO: 142437 - DNA, 25 bp, probe
actgcgacatgctcaagattgcctc

SEQ ID NO: 142438 - DNA, 25 bp, probe
actgccagagcaccaaatatgccca

SEQ ID NO: 142439 - DNA, 25 bp, probe
actccatgatggacgatcttgctcc

SEQ ID NO: 142440 - DNA, 25 bp, probe
actgcctgtatgagatggtgctaga

SEQ ID NO: 142441 - DNA, 25 bp, probe
actgcctgtagtctgatgacgatag

SEQ ID NO: 142442 - DNA, 25 bp, probe
actgcttaattgctgataccatatg

SEQ ID NO: 142443 - DNA, 25 bp, probe
actgcataaattcggtgccgatctt

SEQ ID NO: 142444 - DNA, 25 bp, probe
actgaaatcctgcgagcaagaattt

SEQ ID NO: 142445 - DNA, 25 bp, probe
actgacacggtctggaagaattatt

SEQ ID NO: 142446 - DNA, 25 bp, probe
actacacaggcctgataactctgta

SEQ ID NO: 142447 - DNA, 25 bp, probe
actcagggtgtctactacagttgta

SEQ ID NO: 142448 - DNA, 25 bp, probe
actctcgggaaagcacttgtgctag

SEQ ID NO: 142449 - DNA, 25 bp, probe
actctcgggaaagcacttgtgctag

SEQ ID NO: 142450 - DNA, 25 bp, probe
actcacgaggaatggcctttctaca

SEQ ID NO: 142451 - DNA, 25 bp, probe
actccaagtggagtcccttcattca

SEQ ID NO: 142452 - DNA, 25 bp, probe
actgaaatggtgcctaccttctgga

SEQ ID NO: 142453 - DNA, 25 bp, probe
acatgaattgggacgaccttctggc

SEQ ID NO: 142454 - DNA, 25 bp, probe
actagttgtgagataacattctggt

SEQ ID NO: 142455 - DNA, 25 bp, probe
actagtgaattagcgactttggtca

SEQ ID NO: 142456 - DNA, 25 bp, probe
actagtgcatgattcaccaagcagt

SEQ ID NO: 142457 - DNA, 25 bp, probe
actgctgcgatatgaccaccagtca

SEQ ID NO: 142458 - DNA, 25 bp, probe
actcatcaaatgaacagacaatgtc

SEQ ID NO: 142459 - DNA, 25 bp, probe
actgcaaatactacagataattctg

SEQ ID NO: 142460 - DNA, 25 bp, probe
actgccctagctgccagatatttac

SEQ ID NO: 142461 - DNA, 25 bp, probe
actgcagttagaagctcgattctta

SEQ ID NO: 142462 - DNA, 25 bp, probe
actctgttgcagaaggatattattc

SEQ ID NO: 142463 - DNA, 25 bp, probe
actgcttatgaaaagcaatttcctg

SEQ ID NO: 142464 - DNA, 25 bp, probe
actgctttgtatctgctttgtactg

SEQ ID NO: 142465 - DNA, 25 bp, probe
actcttgggcatattttccatggga

SEQ ID NO: 142466 - DNA, 25 bp, probe
actcctggttagtacattctcagag

SEQ ID NO: 142467 - DNA, 25 bp, probe
actcctgattatgtaactcccaggg

SEQ ID NO: 142468 - DNA, 25 bp, probe
actgcctctataaaaacgtcgcaca

SEQ ID NO: 142469 - DNA, 25 bp, probe
actgcctctataaaaacgtcgcaca

SEQ ID NO: 142470 - DNA, 25 bp, probe
actcccaataatgaagtgtggccag

SEQ ID NO: 142471 - DNA, 25 bp, probe
actaccagaaattaccctgagctca

SEQ ID NO: 142472 - DNA, 25 bp, probe
actaccagaaattaccctgagctca

SEQ ID NO: 142473 - DNA, 25 bp, probe
actagcactatataattccggtcag

SEQ ID NO: 142474 - DNA, 25 bp, probe
actaaagaaggaactgccgcccagg

SEQ ID NO: 142475 - DNA, 25 bp, probe
actccaagggtttctgacccaagag

SEQ ID NO: 142476 - DNA, 25 bp, probe
actccaagggtttctgacccaagag

SEQ ID NO: 142477 - DNA, 25 bp, probe
actccaaaggtctccagattctagg

SEQ ID NO: 142478 - DNA, 25 bp, probe
actcccacaggtgggcccatattct

SEQ ID NO: 142479 - DNA, 25 bp, probe
gcatcccttcatcgtggatttaatt

SEQ ID NO: 142480 - DNA, 25 bp, probe
actgcactctagcctgggcaagaga

SEQ ID NO: 142481 - DNA, 25 bp, probe
actcacctcagcaacggacagatgt

SEQ ID NO: 142482 - DNA, 25 bp, probe
actgccactgaaatagccatcaatg

SEQ ID NO: 142483 - DNA, 25 bp, probe
actgccacaagttcatccagcaagt

SEQ ID NO: 142484 - DNA, 25 bp, probe
actccagaagcattacccataggtc

SEQ ID NO: 142485 - DNA, 25 bp, probe
actccagaagcattacccataggtc

SEQ ID NO: 142486 - DNA, 25 bp, probe
actgccttgagagtgacccaaagat

SEQ ID NO: 142487 - DNA, 25 bp, probe
actgccttgagagtgacccaaagat

SEQ ID NO: 142488 - DNA, 25 bp, probe
actgccttgagagtgacccaaagat

SEQ ID NO: 142489 - DNA, 25 bp, probe
actgcctcttagcagcctaaagcaa

SEQ ID NO: 142490 - DNA, 25 bp, probe
actgcctcatgttccagcaaaagga

SEQ ID NO: 142491 - DNA, 25 bp, probe
actgctccagtggggccatgattgg

SEQ ID NO: 142492 - DNA, 25 bp, probe
actgctccagtggggccatgattgg

SEQ ID NO: 142493 - DNA, 25 bp, probe
actgcccagatgagctctatgacat

SEQ ID NO: 142494 - DNA, 25 bp, probe
actgcccagatgagctctatgacat

SEQ ID NO: 142495 - DNA, 25 bp, probe
actgccacagcaagggaatcatgca

SEQ ID NO: 142496 - DNA, 25 bp, probe
actgctgctcgcaaggaagtccagg

SEQ ID NO: 142497 - DNA, 25 bp, probe
actctctggcaaatgactaccaagc

SEQ ID NO: 142498 - DNA, 25 bp, probe
actcttctgcaaagttactcacatc

SEQ ID NO: 142499 - DNA, 25 bp, probe
actgctttggatagtctcctacgca

SEQ ID NO: 142500 - DNA, 25 bp, probe
actccttggatttctcctggagcct

SEQ ID NO: 142501 - DNA, 25 bp, probe
actcctattgttctgcactggatgc

SEQ ID NO: 142502 - DNA, 25 bp, probe
actcagtatggttcttcagtcgata

SEQ ID NO: 142503 - DNA, 25 bp, probe
actgcggatggtgttcatgtgtgct

SEQ ID NO: 142504 - DNA, 25 bp, probe
actgctgggagtggaccatgcttat

SEQ ID NO: 142505 - DNA, 25 bp, probe
actctgtgtactgaccactgagata

SEQ ID NO: 142506 - DNA, 25 bp, probe
actcaggctccgagccagctggatt

SEQ ID NO: 142507 - DNA, 25 bp, probe
actgcccttcagagctgcgggagat

SEQ ID NO: 142508 - DNA, 25 bp, probe
actgcccttcagagctgcgggagat

SEQ ID NO: 142509 - DNA, 25 bp, probe
actgcttcccatgagctgagggaga

SEQ ID NO: 142510 - DNA, 25 bp, probe
actgcttcccatgagctgagggaga

SEQ ID NO: 142511 - DNA, 25 bp, probe
actgcatcccaaggagctcagggcc

SEQ ID NO: 142512 - DNA, 25 bp, probe
actgcagctgtcaatagcctagggc

SEQ ID NO: 142513 - DNA, 25 bp, probe
actgctgctgttcagtccagggaaa

SEQ ID NO: 142514 - DNA, 25 bp, probe
actgctgctttaagtcaagggtgaa

SEQ ID NO: 142515 - DNA, 25 bp, probe
actctgacattgatggcgaggcgga

SEQ ID NO: 142516 - DNA, 25 bp, probe
actgcttcttcaatggagaggtgcg

SEQ ID NO: 142517 - DNA, 25 bp, probe
actgcattttgcatgggatgaacag

SEQ ID NO: 142518 - DNA, 25 bp, probe
actgcatatcttctggtttacatga

SEQ ID NO: 142519 - DNA, 25 bp, probe
actgcttctcgaatggagtctaatg

SEQ ID NO: 142520 - DNA, 25 bp, probe
actgcttttcatctgagtcaccatt

SEQ ID NO: 142521 - DNA, 25 bp, probe
actgcttgatgtaactaggactcct

SEQ ID NO: 142522 - DNA, 25 bp, probe
actgcttgatgtaactaggactcct

SEQ ID NO: 142523 - DNA, 25 bp, probe
actgcttgattgttctatggagatt

SEQ ID NO: 142524 - DNA, 25 bp, probe
actcttcatgacttcagggattcat

SEQ ID NO: 142525 - DNA, 25 bp, probe
actgcttataatgctggtgatctac

SEQ ID NO: 142526 - DNA, 25 bp, probe
actgcttctagagatgggattgtga

SEQ ID NO: 142527 - DNA, 25 bp, probe
actgcttcttgggaggagtggtggg

SEQ ID NO: 142528 - DNA, 25 bp, probe
actgcttcttgggaggagtggtggg

SEQ ID NO: 142529 - DNA, 25 bp, probe
actgcctcattgctcaggcagtgct

SEQ ID NO: 142530 - DNA, 25 bp, probe
actgcaccctggagagcgtcagggg

SEQ ID NO: 142531 - DNA, 25 bp, probe
actgcccagtggagtgttcagtctg

SEQ ID NO: 142532 - DNA, 25 bp, probe
actgccacaatgcaggtgtacctgt

SEQ ID NO: 142533 - DNA, 25 bp, probe
actgcctccatctgtggggcagctg

SEQ ID NO: 142534 - DNA, 25 bp, probe
actgctacgtacctgatgacgcgtg

SEQ ID NO: 142535 - DNA, 25 bp, probe
actcaacaaccgcaacatggatgga

SEQ ID NO: 142536 - DNA, 25 bp, probe
acatcaaatgccccgaatttagtca

SEQ ID NO: 142537 - DNA, 25 bp, probe
acatagagagcctcctgttctttct

SEQ ID NO: 142538 - DNA, 25 bp, probe
actagagatcaaacttcgacatttt

SEQ ID NO: 142539 - DNA, 25 bp, probe
actaacatcgaagcatctgaatcat

SEQ ID NO: 142540 - DNA, 25 bp, probe
actaatcagcgtgacctggacctgc

SEQ ID NO: 142541 - DNA, 25 bp, probe
acttatcaggaacgcctcgatacgc

SEQ ID NO: 142542 - DNA, 25 bp, probe
actttcggaaagctatgcttctggg

SEQ ID NO: 142543 - DNA, 25 bp, probe
actttcggaaagctatgcttctggg

SEQ ID NO: 142544 - DNA, 25 bp, probe
actttggctttagcatgacattcgg

SEQ ID NO: 142545 - DNA, 25 bp, probe
actttggctttagcatgacattcgg

SEQ ID NO: 142546 - DNA, 25 bp, probe
acttaagtttctgacctgtcgtaca

SEQ ID NO: 142547 - DNA, 25 bp, probe
actctaattttggattccttggtgg

SEQ ID NO: 142548 - DNA, 25 bp, probe
actcctttcctagttatttggctgg

SEQ ID NO: 142549 - DNA, 25 bp, probe
actccttgagcaatagttgtttctt

SEQ ID NO: 142550 - DNA, 25 bp, probe
actactggaatcaggcttggttcat

SEQ ID NO: 142551 - DNA, 25 bp, probe
actgccaggataacgaattggaaaa

SEQ ID NO: 142552 - DNA, 25 bp, probe
actccaagaaaccaacgctgagaaa

SEQ ID NO: 142553 - DNA, 25 bp, probe
actccaagtttggcaacaccatcaa

SEQ ID NO: 142554 - DNA, 25 bp, probe
actccaagtttggcaacaccatcaa

SEQ ID NO: 142555 - DNA, 25 bp, probe
actcccgctgtctcaaaaataaaat

SEQ ID NO: 142556 - DNA, 25 bp, probe
actcgggttttatacaatagaatgt

SEQ ID NO: 142557 - DNA, 25 bp, probe
actctgtggttcctacaacaacaaa

SEQ ID NO: 142558 - DNA, 25 bp, probe
actgcgtggtgtatgataacaacag

SEQ ID NO: 142559 - DNA, 25 bp, probe
actgcctagtgtattcaacagaagg

SEQ ID NO: 142560 - DNA, 25 bp, probe
actgcctgggctaatgctcaaagct

SEQ ID NO: 142561 - DNA, 25 bp, probe
actccaaggcaaatgtccaagcatc

SEQ ID NO: 142562 - DNA, 25 bp, probe
actcctggccaaatgaaagcccaag

SEQ ID NO: 142563 - DNA, 25 bp, probe
actcctggcccaagacaggggccgc

SEQ ID NO: 142564 - DNA, 25 bp, probe
actccatgtccccagaaatgatggc

SEQ ID NO: 142565 - DNA, 25 bp, probe
actcgtgtcccgaactggtgttggg

SEQ ID NO: 142566 - DNA, 25 bp, probe
actcgtgtcccgaactggtgttggg

SEQ ID NO: 142567 - DNA, 25 bp, probe
actgcgctctcagtcagatactgcg

SEQ ID NO: 142568 - DNA, 25 bp, probe
acatcagctctgttcatgagtgctc

SEQ ID NO: 142569 - DNA, 25 bp, probe
acatggacatgcttcagtgctgctc

SEQ ID NO: 142570 - DNA, 25 bp, probe
actacatcatcatcatctcatgccc

SEQ ID NO: 142571 - DNA, 25 bp, probe
actacatcatcatcatctcatgccc

SEQ ID NO: 142572 - DNA, 25 bp, probe
actcagatgcagggtctgctcaccc

SEQ ID NO: 142573 - DNA, 25 bp, probe
actcgagatgacctcatctacaccc

SEQ ID NO: 142574 - DNA, 25 bp, probe
actccagatgacgatcatctttcca

SEQ ID NO: 142575 - DNA, 25 bp, probe
actccagaggagtcactttgcatct

SEQ ID NO: 142576 - DNA, 25 bp, probe
actccaccggaggcaattgcactgt

SEQ ID NO: 142577 - DNA, 25 bp, probe
actccaccggaggcaattgcactgt

SEQ ID NO: 142578 - DNA, 25 bp, probe
actccaccggaggcaattgcactgt

SEQ ID NO: 142579 - DNA, 25 bp, probe
gaacctggaagggctagaacctgta

SEQ ID NO: 142580 - DNA, 25 bp, probe
actccacgggcatcatcatgtaccg

SEQ ID NO: 142581 - DNA, 25 bp, probe
actccagggatcagtagttcctacc

SEQ ID NO: 142582 - DNA, 25 bp, probe
actccagggtctgaagggactgttc

SEQ ID NO: 142583 - DNA, 25 bp, probe
actccaggggctgaggtgacagcat

SEQ ID NO: 142584 - DNA, 25 bp, probe
actccaggtgggcagagatgaaagt

SEQ ID NO: 142585 - DNA, 25 bp, probe
actacctgtgggcaccgagaatgtg

SEQ ID NO: 142586 - DNA, 25 bp, probe
actacaacgggcacacgaaggtggc

SEQ ID NO: 142587 - DNA, 25 bp, probe
actacaccagggggtctacagtgct

SEQ ID NO: 142588 - DNA, 25 bp, probe
actacaccagggggtctacagtgct

SEQ ID NO: 142589 - DNA, 25 bp, probe
actacccatgccgttatttcatgtg

SEQ ID NO: 142590 - DNA, 25 bp, probe
actacccatgccgttatttcatgtg

SEQ ID NO: 142591 - DNA, 25 bp, probe
actaggccacctattaatatggaag

SEQ ID NO: 142592 - DNA, 25 bp, probe
actccgtaccttactgagatctgga

SEQ ID NO: 142593 - DNA, 25 bp, probe
actacagtccccaggagatgtggaa

SEQ ID NO: 142594 - DNA, 25 bp, probe
actactgatagggctgggtctgtgt

SEQ ID NO: 142595 - DNA, 25 bp, probe
actatgagatactcgaggtggatgt

SEQ ID NO: 142596 - DNA, 25 bp, probe
actatgtgagaggatccaacggatc

SEQ ID NO: 142597 - DNA, 25 bp, probe
actcagagcgcaagatccaccgaga

SEQ ID NO: 142598 - DNA, 25 bp, probe
actcagagcgcaagatccaccgaga

SEQ ID NO: 142599 - DNA, 25 bp, probe
actaggcagtattcatgccctgaat

SEQ ID NO: 142600 - DNA, 25 bp, probe
actaatcaggcttatccgatgtgct

SEQ ID NO: 142601 - DNA, 25 bp, probe
actaactcatgttcattcagcgtgc

SEQ ID NO: 142602 - DNA, 25 bp, probe
actaactcatgttcattcagcgtgc

SEQ ID NO: 142603 - DNA, 25 bp, probe
actcatcagtcctgattagcctccc

SEQ ID NO: 142604 - DNA, 25 bp, probe
actcacagcgctctgacatactttc

SEQ ID NO: 142605 - DNA, 25 bp, probe
actcaaatgctcagaccagctcttc

SEQ ID NO: 142606 - DNA, 25 bp, probe
actcaaatgctcagaccagctcttc

SEQ ID NO: 142607 - DNA, 25 bp, probe
actccaagctgcatggcaagttctg

SEQ ID NO: 142608 - DNA, 25 bp, probe
actccgcagatcttccaagttctgc

SEQ ID NO: 142609 - DNA, 25 bp, probe
actccacagatcgaatcaaagtcag

SEQ ID NO: 142610 - DNA, 25 bp, probe
actccatccctggttcgagtatgtc

SEQ ID NO: 142611 - DNA, 25 bp, probe
actacaggcattgcttggagataat

SEQ ID NO: 142612 - DNA, 25 bp, probe
actccagacatcactggcagaagta

SEQ ID NO: 142613 - DNA, 25 bp, probe
actccagacatcactggcagaagta

SEQ ID NO: 142614 - DNA, 25 bp, probe
actgcctgcacaaacacgcaaacaa

SEQ ID NO: 142615 - DNA, 25 bp, probe
actgccccactccacaaaataggaa

SEQ ID NO: 142616 - DNA, 25 bp, probe
actgcccagcttggaaggtattata

SEQ ID NO: 142617 - DNA, 25 bp, probe
acatcgccgataaccaggatttaca

SEQ ID NO: 142618 - DNA, 25 bp, probe
actatgggttaccaggatttcgctg

SEQ ID NO: 142619 - DNA, 25 bp, probe
actaagtcttctggaggttctattt

SEQ ID NO: 142620 - DNA, 25 bp, probe
actaagtctgacgtgtggagtttcg

SEQ ID NO: 142621 - DNA, 25 bp, probe
actaaatgatgaatgtgggattatt

SEQ ID NO: 142622 - DNA, 25 bp, probe
actagaatctgaaggtgagaatctg

SEQ ID NO: 142623 - DNA, 25 bp, probe
actacacagccaaggcggacatctt

SEQ ID NO: 142624 - DNA, 25 bp, probe
actactacaaagtggactattccag

SEQ ID NO: 142625 - DNA, 25 bp, probe
actactacaaagtggactattccag

SEQ ID NO: 142626 - DNA, 25 bp, probe
acttcaactacggggatgttccaca

SEQ ID NO: 142627 - DNA, 25 bp, probe
acttgagcactgtggggattctccg

SEQ ID NO: 142628 - DNA, 25 bp, probe
actagtgccgtactggctgaaatcc

SEQ ID NO: 142629 - DNA, 25 bp, probe
actagtccacgtcatggaacaccta

SEQ ID NO: 142630 - DNA, 25 bp, probe
actactccaagtttggcaacaccat

SEQ ID NO: 142631 - DNA, 25 bp, probe
actacacaaaattttccacctctgg

SEQ ID NO: 142632 - DNA, 25 bp, probe
actgccaataacattcttcgatctc

SEQ ID NO: 142633 - DNA, 25 bp, probe
actgctcaaaccattcgtctgatat

SEQ ID NO: 142634 - DNA, 25 bp, probe
actgctcaccatgattgtctgctat

SEQ ID NO: 142635 - DNA, 25 bp, probe
actccaccagtcaactgcctataaa

SEQ ID NO: 142636 - DNA, 25 bp, probe
actccaccagtcaactgcctataaa

SEQ ID NO: 142637 - DNA, 25 bp, probe
actccagtagtaaatttattcaata

SEQ ID NO: 142638 - DNA, 25 bp, probe
actcctgtattgttattttgttcat

SEQ ID NO: 142639 - DNA, 25 bp, probe
actgccattgatattcctgttttta

SEQ ID NO: 142640 - DNA, 25 bp, probe
actgcgcaagaatacattgttttaa

SEQ ID NO: 142641 - DNA, 25 bp, probe
acttgaatgagaaacgtgtttagta

SEQ ID NO: 142642 - DNA, 25 bp, probe
acttgggaacaaggctcctctatgg

SEQ ID NO: 142643 - DNA, 25 bp, probe
acttgaggagcctcttctaccaggc

SEQ ID NO: 142644 - DNA, 25 bp, probe
actagaggaggtgctctctactgag

SEQ ID NO: 142645 - DNA, 25 bp, probe
actagaggagggcctagcagaggag

SEQ ID NO: 142646 - DNA, 25 bp, probe
actatgtggatggtggtatcaggga

SEQ ID NO: 142647 - DNA, 25 bp, probe
actcaggcgatgtgctttatggcag

SEQ ID NO: 142648 - DNA, 25 bp, probe
actaacctgcttgggtatgcagcag

SEQ ID NO: 142649 - DNA, 25 bp, probe
actaacctgcttgggtatgcagcag

SEQ ID NO: 142650 - DNA, 25 bp, probe
actcaacatggccggttatgcacat

SEQ ID NO: 142651 - DNA, 25 bp, probe
actcagcaatggcagattatcgaca

SEQ ID NO: 142652 - DNA, 25 bp, probe
actagcagctggactgattttgaat

SEQ ID NO: 142653 - DNA, 25 bp, probe
actcctccgactttctggaatttgt

SEQ ID NO: 142654 - DNA, 25 bp, probe
acatcctgcgtatatttgggatttg

SEQ ID NO: 142655 - DNA, 25 bp, probe
actcctatgtcaacttcgagcgttt

SEQ ID NO: 142656 - DNA, 25 bp, probe
acactaagtcttctggaggttctat

SEQ ID NO: 142657 - DNA, 25 bp, probe
ccctacgacttcaggaggctcctgc

SEQ ID NO: 142658 - DNA, 25 bp, probe
ccttactgtttcacgtgtacctgtg

SEQ ID NO: 142659 - DNA, 25 bp, probe
acttgaaagttcactgggactcagt

SEQ ID NO: 142660 - DNA, 25 bp, probe
actctaagctcctgagcgggagtca

SEQ ID NO: 142661 - DNA, 25 bp, probe
actccgcagcacttgggcggtagcc

SEQ ID NO: 142662 - DNA, 25 bp, probe
actcctgtgcaatgaaggtgataac

SEQ ID NO: 142663 - DNA, 25 bp, probe
actcctgccaatggagctggggccc

SEQ ID NO: 142664 - DNA, 25 bp, probe
actcggctgccagagggagggccat

SEQ ID NO: 142665 - DNA, 25 bp, probe
actgccactgcatgtatgggtgggc

SEQ ID NO: 142666 - DNA, 25 bp, probe
actgccacccagaagactgtggatg

SEQ ID NO: 142667 - DNA, 25 bp, probe
actccagcccaaattgctttgcaga

SEQ ID NO: 142668 - DNA, 25 bp, probe
actccagcccaaattgctttgcaga

SEQ ID NO: 142669 - DNA, 25 bp, probe
actcagcccaagaatttgtcaggag

SEQ ID NO: 142670 - DNA, 25 bp, probe
actcgcccagttgtgtgtgtgggga

SEQ ID NO: 142671 - DNA, 25 bp, probe
actcctttttgtgtgtgtgcacgca

SEQ ID NO: 142672 - DNA, 25 bp, probe
acattaagtattccttggcccagca

SEQ ID NO: 142673 - DNA, 25 bp, probe
actacaagttccggctggccaagtc

SEQ ID NO: 142674 - DNA, 25 bp, probe
actactaggggtggcatgggcaatg

SEQ ID NO: 142675 - DNA, 25 bp, probe
actactagatgtctttaggcagcag

SEQ ID NO: 142676 - DNA, 25 bp, probe
actatccagcaacatttgggccagc

SEQ ID NO: 142677 - DNA, 25 bp, probe
acatttgcaggacacttttacaggc

SEQ ID NO: 142678 - DNA, 25 bp, probe
actttggccgaaatttctacacctg

SEQ ID NO: 142679 - DNA, 25 bp, probe
actttgccaaacctttgtaccacag

SEQ ID NO: 142680 - DNA, 25 bp, probe
actttgccaaacctttgtaccacag

SEQ ID NO: 142681 - DNA, 25 bp, probe
actttggaatggctttgtaataatc

SEQ ID NO: 142682 - DNA, 25 bp, probe
actctgggaaatggtttgtcttcaa

SEQ ID NO: 142683 - DNA, 25 bp, probe
actctgaatgcatgacctttggtac

SEQ ID NO: 142684 - DNA, 25 bp, probe
acttgaacactgacattttgttagt

SEQ ID NO: 142685 - DNA, 25 bp, probe
acttagaccttatttctgctactgt

SEQ ID NO: 142686 - DNA, 25 bp, probe
actccaagagtaagttctgctacct

SEQ ID NO: 142687 - DNA, 25 bp, probe
actgccaacgtgtcagtggtggacc

SEQ ID NO: 142688 - DNA, 25 bp, probe
actgccaacgtgtcagtggtggacc

SEQ ID NO: 142689 - DNA, 25 bp, probe
actcccctggcatatgtggagacgc

SEQ ID NO: 142690 - DNA, 25 bp, probe
acttcgccttgctcttgaaagtgca

SEQ ID NO: 142691 - DNA, 25 bp, probe
actccccattccatccaaatatgaa

SEQ ID NO: 142692 - DNA, 25 bp, probe
actacacatgttgccccaaatacaa

SEQ ID NO: 142693 - DNA, 25 bp, probe
actacacatgttgccccaaatacaa

SEQ ID NO: 142694 - DNA, 25 bp, probe
actatccgatgcaccaaactaataa

SEQ ID NO: 142695 - DNA, 25 bp, probe
actactaacgtcagaaccaatattt

SEQ ID NO: 142696 - DNA, 25 bp, probe
actttaccccaaaagccgtgatgtg

SEQ ID NO: 142697 - DNA, 25 bp, probe
actctggacactcaacaagacctga

SEQ ID NO: 142698 - DNA, 25 bp, probe
actctggacccggaactgatggtgc

SEQ ID NO: 142699 - DNA, 25 bp, probe
actctggacccggaactgatggtgc

SEQ ID NO: 142700 - DNA, 25 bp, probe
acttggttcccataatagcttccag

SEQ ID NO: 142701 - DNA, 25 bp, probe
acttggttcccataatagcttccag

SEQ ID NO: 142702 - DNA, 25 bp, probe
acttagttcccaaaatgagcctact

SEQ ID NO: 142703 - DNA, 25 bp, probe
actttgattttcttgaggaccgatt

SEQ ID NO: 142704 - DNA, 25 bp, probe
actaattttctctgagagaacagct

SEQ ID NO: 142705 - DNA, 25 bp, probe
actccaaggtcctgtgcaaatagtg

SEQ ID NO: 142706 - DNA, 25 bp, probe
actccagagctgggggctaaaaggg

SEQ ID NO: 142707 - DNA, 25 bp, probe
acttcaagtaagcggcaacaagggt

SEQ ID NO: 142708 - DNA, 25 bp, probe
acataccactaagcggccaatggtg

SEQ ID NO: 142709 - DNA, 25 bp, probe
actaccctcacagtgaggccctcag

SEQ ID NO: 142710 - DNA, 25 bp, probe
actacactgtccctgggcaggtgtg

SEQ ID NO: 142711 - DNA, 25 bp, probe
actcaccgtcacctggaagcagggc

SEQ ID NO: 142712 - DNA, 25 bp, probe
actctccctatccggagagcagccc

SEQ ID NO: 142713 - DNA, 25 bp, probe
actcccactatgcctgatgtgacgc

SEQ ID NO: 142714 - DNA, 25 bp, probe
actgccatcatctaaccattacagc

SEQ ID NO: 142715 - DNA, 25 bp, probe
actgccactgaaacacagtaccagg

SEQ ID NO: 142716 - DNA, 25 bp, probe
actgccactcaagtacatcagacca

SEQ ID NO: 142717 - DNA, 25 bp, probe
actctctctcaaagaatgaggcctc

SEQ ID NO: 142718 - DNA, 25 bp, probe
actcgagccagtagcaagggcccgg

SEQ ID NO: 142719 - DNA, 25 bp, probe
actcgagccagtagcaagggcccgg

SEQ ID NO: 142720 - DNA, 25 bp, probe
actcgggcgactacgagtgccacgt

SEQ ID NO: 142721 - DNA, 25 bp, probe
actcggatggcagcaaggactcctg

SEQ ID NO: 142722 - DNA, 25 bp, probe
acaagtcggaactgggatgcctgcg

SEQ ID NO: 142723 - DNA, 25 bp, probe
actacagcgtgaacggggagccggt

SEQ ID NO: 142724 - DNA, 25 bp, probe
actacagcgtgaacggggagccggt

SEQ ID NO: 142725 - DNA, 25 bp, probe
actaacggatcaaggcagggccaga

SEQ ID NO: 142726 - DNA, 25 bp, probe
actattcggacaagtacggccttgg

SEQ ID NO: 142727 - DNA, 25 bp, probe
actattcggacaaatacgacgacga

SEQ ID NO: 142728 - DNA, 25 bp, probe
actactcggacaagtacttcgacga

SEQ ID NO: 142729 - DNA, 25 bp, probe
actcctcgtacaatgctattcttag

SEQ ID NO: 142730 - DNA, 25 bp, probe
actccttgttcaatgtcatctctat

SEQ ID NO: 142731 - DNA, 25 bp, probe
actcgcttatctccatatcaacata

SEQ ID NO: 142732 - DNA, 25 bp, probe
actcggtcattgctgttgaaaaaga

SEQ ID NO: 142733 - DNA, 25 bp, probe
actcaaggcctgctgtttaatcaca

SEQ ID NO: 142734 - DNA, 25 bp, probe
actcaaggactgctattctccttct

SEQ ID NO: 142735 - DNA, 25 bp, probe
actctaggttgatattccctgcctc

SEQ ID NO: 142736 - DNA, 25 bp, probe
actctatggtagaatttcccatgca

SEQ ID NO: 142737 - DNA, 25 bp, probe
actttgggagttataggagacagga

SEQ ID NO: 142738 - DNA, 25 bp, probe
acttcgggaaatcatgggaacacca

SEQ ID NO: 142739 - DNA, 25 bp, probe
acttggggaaatcaggtgcagcggc

SEQ ID NO: 142740 - DNA, 25 bp, probe
acttgggcgatgacatgccggaccc

SEQ ID NO: 142741 - DNA, 25 bp, probe
actatgtgccggagacggaccagtg

SEQ ID NO: 142742 - DNA, 25 bp, probe
actatgtgccggagacggaccagtg

SEQ ID NO: 142743 - DNA, 25 bp, probe
acttgtccggaggagcgtaagaaga

SEQ ID NO: 142744 - DNA, 25 bp, probe
actctgtcctggaggcactgggaag

SEQ ID NO: 142745 - DNA, 25 bp, probe
actcctcactgtctacctgagagaa

SEQ ID NO: 142746 - DNA, 25 bp, probe
actccttcagccattgcagtgatta

SEQ ID NO: 142747 - DNA, 25 bp, probe
actcagcaaagtctggcgtgatcaa

SEQ ID NO: 142748 - DNA, 25 bp, probe
actctgctaatcatgtgggtgagcc

SEQ ID NO: 142749 - DNA, 25 bp, probe
actcatgctattgggttcttgcagc

SEQ ID NO: 142750 - DNA, 25 bp, probe
actcagatactcgtggctttgcggc

SEQ ID NO: 142751 - DNA, 25 bp, probe
actcaagcctcctagcattcaaact

SEQ ID NO: 142752 - DNA, 25 bp, probe
cacagcctattccaagcctaaacgg

SEQ ID NO: 142753 - DNA, 25 bp, probe
actccatttcagcagctcaaacagg

SEQ ID NO: 142754 - DNA, 25 bp, probe
actgccatttagtgcttgtactgtt

SEQ ID NO: 142755 - DNA, 25 bp, probe
actgccaatatgtctgttaggggat

SEQ ID NO: 142756 - DNA, 25 bp, probe
actcaggatcattctgtaaggtcct

SEQ ID NO: 142757 - DNA, 25 bp, probe
actcatcagtcacctgggagagctc

SEQ ID NO: 142758 - DNA, 25 bp, probe
actcatcagtcacctgggagagctc

SEQ ID NO: 142759 - DNA, 25 bp, probe
actcagagccagacagggcagcctc

SEQ ID NO: 142760 - DNA, 25 bp, probe
actcatgaccacagtccatgccatc

SEQ ID NO: 142761 - DNA, 25 bp, probe
actcatcgccaaagcatcctggcaa

SEQ ID NO: 142762 - DNA, 25 bp, probe
actcctgaacaactcattgaaaacc

SEQ ID NO: 142763 - DNA, 25 bp, probe
actccagaatacttccagaaaactt

SEQ ID NO: 142764 - DNA, 25 bp, probe
actctacacaaatccagctaacacc

SEQ ID NO: 142765 - DNA, 25 bp, probe
actctgaaggacgacggacagcaca

SEQ ID NO: 142766 - DNA, 25 bp, probe
actctggcagagggagggacgcccc

SEQ ID NO: 142767 - DNA, 25 bp, probe
actctgctgcagatggtgggggatg

SEQ ID NO: 142768 - DNA, 25 bp, probe
actagtgagagtcatcgggcgtgga

SEQ ID NO: 142769 - DNA, 25 bp, probe
actagttcaatggatcccggggaca

SEQ ID NO: 142770 - DNA, 25 bp, probe
actagttcaatggatcccggggaca

SEQ ID NO: 142771 - DNA, 25 bp, probe
actagattaagagtcaatctgcaag

SEQ ID NO: 142772 - DNA, 25 bp, probe
actctgatagcctgctacatcatga

SEQ ID NO: 142773 - DNA, 25 bp, probe
actcaagtgcctgctacacatacaa

SEQ ID NO: 142774 - DNA, 25 bp, probe
actcacactcctacaacgaaggaca

SEQ ID NO: 142775 - DNA, 25 bp, probe
actccatctcttacaagatcgagga

SEQ ID NO: 142776 - DNA, 25 bp, probe
actccatctcttacaagatcgagga

SEQ ID NO: 142777 - DNA, 25 bp, probe
actctctcatcttaattttaggaaa

SEQ ID NO: 142778 - DNA, 25 bp, probe
actcttcatcgttcatctaggggaa

SEQ ID NO: 142779 - DNA, 25 bp, probe
actttctgcaggcccataacgggca

SEQ ID NO: 142780 - DNA, 25 bp, probe
actttctgcaggcccataacgggca

SEQ ID NO: 142781 - DNA, 25 bp, probe
actttctgcaggcccataacgggca

SEQ ID NO: 142782 - DNA, 25 bp, probe
acatgttccaggacctgaaccggaa

SEQ ID NO: 142783 - DNA, 25 bp, probe
acttcccaggcgctcaggcctggat

SEQ ID NO: 142784 - DNA, 25 bp, probe
actacccaggcagatgggagggttg

SEQ ID NO: 142785 - DNA, 25 bp, probe
actcagccatctggcacaggggaag

SEQ ID NO: 142786 - DNA, 25 bp, probe
actcagccatcccaagctggttaaa

SEQ ID NO: 142787 - DNA, 25 bp, probe
actcacctgtggcacggaatgaaaa

SEQ ID NO: 142788 - DNA, 25 bp, probe
actcaaatgtggcacctggtgaaaa

SEQ ID NO: 142789 - DNA, 25 bp, probe
actccacagggacctttcagacaaa

SEQ ID NO: 142790 - DNA, 25 bp, probe
actcatcagtcctgattagcctccc

SEQ ID NO: 142791 - DNA, 25 bp, probe
actcatcagtcctgattagcctccc

SEQ ID NO: 142792 - DNA, 25 bp, probe
actcatcagtcttaagtatggttgt

SEQ ID NO: 142793 - DNA, 25 bp, probe
actccatgtctctgagcattagatt

SEQ ID NO: 142794 - DNA, 25 bp, probe
acatcactgattgctggctttgttt

SEQ ID NO: 142795 - DNA, 25 bp, probe
acatcactgattgctggctttgttt

SEQ ID NO: 142796 - DNA, 25 bp, probe
actcctgtacagctgctttgtttct

SEQ ID NO: 142797 - DNA, 25 bp, probe
actccttatcacctgtttagcattt

SEQ ID NO: 142798 - DNA, 25 bp, probe
actccttatcctctatggaatcatg

SEQ ID NO: 142799 - DNA, 25 bp, probe
actcccttttgcttatagtgtgcat

SEQ ID NO: 142800 - DNA, 25 bp, probe
actcccttttgcttatagtgtgcat

SEQ ID NO: 142801 - DNA, 25 bp, probe
actccctcagattatgtaatttatt

SEQ ID NO: 142802 - DNA, 25 bp, probe
actccctgccattgatggtctggat

SEQ ID NO: 142803 - DNA, 25 bp, probe
actacctgcgcagtgtgctggagga

SEQ ID NO: 142804 - DNA, 25 bp, probe
actacctgcgcagtgtgctggagga

SEQ ID NO: 142805 - DNA, 25 bp, probe
actacctgcgcagtgtgctggagga

SEQ ID NO: 142806 - DNA, 25 bp, probe
actcaccatcgagggagtgctggac

SEQ ID NO: 142807 - DNA, 25 bp, probe
actcacctctgtgagcagagggtcc

SEQ ID NO: 142808 - DNA, 25 bp, probe
actccccaagattgagcggagtgcc

SEQ ID NO: 142809 - DNA, 25 bp, probe
actccctcaggatgagcgtgagcca

SEQ ID NO: 142810 - DNA, 25 bp, probe
actccagcctggacaacaagagcaa

SEQ ID NO: 142811 - DNA, 25 bp, probe
actccagcctgcgggacagagtgag

SEQ ID NO: 142812 - DNA, 25 bp, probe
actccagcctgggcgacagagcgag

SEQ ID NO: 142813 - DNA, 25 bp, probe
actccagcctgggcagctgaacaag

SEQ ID NO: 142814 - DNA, 25 bp, probe
actctgcatccacctatgtaacaag

SEQ ID NO: 142815 - DNA, 25 bp, probe
actctgcataccctcatcaaaaaca

SEQ ID NO: 142816 - DNA, 25 bp, probe
actaaacacgtgacacaaacacaca

SEQ ID NO: 142817 - DNA, 25 bp, probe
actaaacacgtgacacaaacacaca

SEQ ID NO: 142818 - DNA, 25 bp, probe
actcaaacgcgtggaaaatatctat

SEQ ID NO: 142819 - DNA, 25 bp, probe
actcactcacggagccaaagtcaac

SEQ ID NO: 142820 - DNA, 25 bp, probe
actactcccggagaagatcatatga

SEQ ID NO: 142821 - DNA, 25 bp, probe
actttctccggacccagaagatcat

SEQ ID NO: 142822 - DNA, 25 bp, probe
actttctccggacccagaagatcat

SEQ ID NO: 142823 - DNA, 25 bp, probe
cacttttacaggccccaattatcca

SEQ ID NO: 142824 - DNA, 25 bp, probe
actctttgtccgtgcgagactacga

SEQ ID NO: 142825 - DNA, 25 bp, probe
actcttttgctcttacgaacataat

SEQ ID NO: 142826 - DNA, 25 bp, probe
acttatttctgctctggaataaagt

SEQ ID NO: 142827 - DNA, 25 bp, probe
actttaccatgctcaatgaaaaggt

SEQ ID NO: 142828 - DNA, 25 bp, probe
actccttccagctgaaatcaaggga

SEQ ID NO: 142829 - DNA, 25 bp, probe
actcaccctccacaaagcaaaggca

SEQ ID NO: 142830 - DNA, 25 bp, probe
actacctcactagacatccaaagga

SEQ ID NO: 142831 - DNA, 25 bp, probe
actaagtgccttttcatccaaatgg

SEQ ID NO: 142832 - DNA, 25 bp, probe
actaaggactatttattgataatgt

SEQ ID NO: 142833 - DNA, 25 bp, probe
actctagtgtttcatcttcataatt

SEQ ID NO: 142834 - DNA, 25 bp, probe
actctcagagtcctggatctgcaca

SEQ ID NO: 142835 - DNA, 25 bp, probe
actctcactgtctaggagcatcacc

SEQ ID NO: 142836 - DNA, 25 bp, probe
actcctcgtgagtaggaaccctgtc

SEQ ID NO: 142837 - DNA, 25 bp, probe
actcctcgtgagtaggaaccctgtc

SEQ ID NO: 142838 - DNA, 25 bp, probe
actaccagtaccaatgattaccatg

SEQ ID NO: 142839 - DNA, 25 bp, probe
actcgccattaccgagcaccagaag

SEQ ID NO: 142840 - DNA, 25 bp, probe
actcgccattaccgagcaccagaag

SEQ ID NO: 142841 - DNA, 25 bp, probe
actatgctttacatggcaatcaaag

SEQ ID NO: 142842 - DNA, 25 bp, probe
actattgtaatctccctcaaagaaa

SEQ ID NO: 142843 - DNA, 25 bp, probe
actcttgaacttacccacaataaga

SEQ ID NO: 142844 - DNA, 25 bp, probe
actattacaataacaccacctgaaa

SEQ ID NO: 142845 - DNA, 25 bp, probe
actaagacaagaacattctctcata

SEQ ID NO: 142846 - DNA, 25 bp, probe
actacaacaagatctcctttaagga

SEQ ID NO: 142847 - DNA, 25 bp, probe
actacaaatcactaccgctttgcaa

SEQ ID NO: 142848 - DNA, 25 bp, probe
actactgaactgtaccagttgcaca

SEQ ID NO: 142849 - DNA, 25 bp, probe
actcctgaatcgtttgtgttagcaa

SEQ ID NO: 142850 - DNA, 25 bp, probe
actccgatgtggtttgtggaacaca

SEQ ID NO: 142851 - DNA, 25 bp, probe
actcgtggtggaaagtgtcaccctc

SEQ ID NO: 142852 - DNA, 25 bp, probe
actcgtggtggaaagtgtcaccctc

SEQ ID NO: 142853 - DNA, 25 bp, probe
actcaggcgggacagtgctgcagct

SEQ ID NO: 142854 - DNA, 25 bp, probe
actaggcaggaatatgaggtgtaaa

SEQ ID NO: 142855 - DNA, 25 bp, probe
acttcgaagccatagggtggagaaa

SEQ ID NO: 142856 - DNA, 25 bp, probe
actcttaaccatcagtttgtgacaa

SEQ ID NO: 142857 - DNA, 25 bp, probe
actcttgagggacatctttgctgat

SEQ ID NO: 142858 - DNA, 25 bp, probe
actcttgagggacatctttgctgat

SEQ ID NO: 142859 - DNA, 25 bp, probe
actcctgaagagatactgctgcgta

SEQ ID NO: 142860 - DNA, 25 bp, probe
actcctgacagggtgaccttgggta

SEQ ID NO: 142861 - DNA, 25 bp, probe
actcctgatgaaggtgacagatctg

SEQ ID NO: 142862 - DNA, 25 bp, probe
actcctgatagctgaatgtgtgctg

SEQ ID NO: 142863 - DNA, 25 bp, probe
actcgtatagcatgcatctgtttat

SEQ ID NO: 142864 - DNA, 25 bp, probe
actcgtatagcatgcatctgtttat

SEQ ID NO: 142865 - DNA, 25 bp, probe
actctggaggccctcttgtgtgtaa

SEQ ID NO: 142866 - DNA, 25 bp, probe
actctgcggtaccagtggaggaata

SEQ ID NO: 142867 - DNA, 25 bp, probe
actctggggagacgggcgctagatt

SEQ ID NO: 142868 - DNA, 25 bp, probe
actctgtggagcacgatgtgcccag

SEQ ID NO: 142869 - DNA, 25 bp, probe
actctgtggagcacgatgtgcccag

SEQ ID NO: 142870 - DNA, 25 bp, probe
actcaaggagaggcagattcaccag

SEQ ID NO: 142871 - DNA, 25 bp, probe
actcaagtgcacaacagcttccaga

SEQ ID NO: 142872 - DNA, 25 bp, probe
actcagagtgacacatgtccgctgg

SEQ ID NO: 142873 - DNA, 25 bp, probe
actcagaggatattttgcttctggt

SEQ ID NO: 142874 - DNA, 25 bp, probe
actcgtgtgctctttgatattctga

SEQ ID NO: 142875 - DNA, 25 bp, probe
actcgtgtgctctttgatattctga

SEQ ID NO: 142876 - DNA, 25 bp, probe
actctggctgtcttactttgatgaa

SEQ ID NO: 142877 - DNA, 25 bp, probe
actcggtgatcatagttgataagaa

SEQ ID NO: 142878 - DNA, 25 bp, probe
actagaggtcatcagaagtcagcag

SEQ ID NO: 142879 - DNA, 25 bp, probe
actactcagtcatagaggctacaga

SEQ ID NO: 142880 - DNA, 25 bp, probe
actactcagtcatagaggctacaga

SEQ ID NO: 142881 - DNA, 25 bp, probe
actaacagactttggactacgcaaa

SEQ ID NO: 142882 - DNA, 25 bp, probe
actacagcaacctacgggagaccga

SEQ ID NO: 142883 - DNA, 25 bp, probe
actcatcgaaactggggaaccatga

SEQ ID NO: 142884 - DNA, 25 bp, probe
actctcgaaagcgatgggaacgctt

SEQ ID NO: 142885 - DNA, 25 bp, probe
actctgcagaaacatcagcgtttct

SEQ ID NO: 142886 - DNA, 25 bp, probe
acttcgtagcagcacctactatgct

SEQ ID NO: 142887 - DNA, 25 bp, probe
actatcctgcactgacacaacaatt

SEQ ID NO: 142888 - DNA, 25 bp, probe
acttgctcatgaccgacaagggttg

SEQ ID NO: 142889 - DNA, 25 bp, probe
acatatcacaaacgactacggtctg

SEQ ID NO: 142890 - DNA, 25 bp, probe
actatacaaagccacctagggcctg

SEQ ID NO: 142891 - DNA, 25 bp, probe
actataaaagcatgccaaatcttgg

SEQ ID NO: 142892 - DNA, 25 bp, probe
cactcaagaaagttctgaaactgct

SEQ ID NO: 142893 - DNA, 25 bp, probe
actacaatgtagtctcataaccagg

SEQ ID NO: 142894 - DNA, 25 bp, probe
actcacctccagtttaacagcagag

SEQ ID NO: 142895 - DNA, 25 bp, probe
actcacctccagtttaacagcagag

SEQ ID NO: 142896 - DNA, 25 bp, probe
actaccccactcaagaacagcagtt

SEQ ID NO: 142897 - DNA, 25 bp, probe
actcccctttgtagtgccagagact

SEQ ID NO: 142898 - DNA, 25 bp, probe
actcccctttgtagtgccagagact

SEQ ID NO: 142899 - DNA, 25 bp, probe
actctgccctcttggagcgcaagag

SEQ ID NO: 142900 - DNA, 25 bp, probe
acttcctttgggactaagcgcaggg

SEQ ID NO: 142901 - DNA, 25 bp, probe
acttcctcaaagcccaaagccaagg

SEQ ID NO: 142902 - DNA, 25 bp, probe
acttcctcaaagcccaaagccaagg

SEQ ID NO: 142903 - DNA, 25 bp, probe
actttcccaagcccaaaggatcagg

SEQ ID NO: 142904 - DNA, 25 bp, probe
acttttacaagccgcaaaggcagca

SEQ ID NO: 142905 - DNA, 25 bp, probe
actttcagaaagcgcagacctgccc

SEQ ID NO: 142906 - DNA, 25 bp, probe
acttccggaagaggcatgcacccaa

SEQ ID NO: 142907 - DNA, 25 bp, probe
actcccgggacaggatgcaaaagag

SEQ ID NO: 142908 - DNA, 25 bp, probe
actactgagggaaatagccaaaaag

SEQ ID NO: 142909 - DNA, 25 bp, probe
actacggggatgttccacacaaact

SEQ ID NO: 142910 - DNA, 25 bp, probe
acttctgttagttcaccaaaaacat

SEQ ID NO: 142911 - DNA, 25 bp, probe
acatttttcaggttccaaggaagag

SEQ ID NO: 142912 - DNA, 25 bp, probe
actttttaagctgctcaaagaggga

SEQ ID NO: 142913 - DNA, 25 bp, probe
actcattttatgagcctcatcaaga

SEQ ID NO: 142914 - DNA, 25 bp, probe
actttttgtgggactccagagtatg

SEQ ID NO: 142915 - DNA, 25 bp, probe
actcaggtttcagagcccaagtcag

SEQ ID NO: 142916 - DNA, 25 bp, probe
actcgagttacagacaaagcgtggt

SEQ ID NO: 142917 - DNA, 25 bp, probe
actcgagttacagacaaagcgtggt

SEQ ID NO: 142918 - DNA, 25 bp, probe
actataacaacagtaccaaggtggc

SEQ ID NO: 142919 - DNA, 25 bp, probe
actaacctgacatcaccaagtgtgg

SEQ ID NO: 142920 - DNA, 25 bp, probe
actctacgcagtggtcaccaaggag

SEQ ID NO: 142921 - DNA, 25 bp, probe
actctcaacgagttcccagaggaac

SEQ ID NO: 142922 - DNA, 25 bp, probe
actctaaggagatcatctacaggga

SEQ ID NO: 142923 - DNA, 25 bp, probe
cgtcttaggaatactccacggccgt

SEQ ID NO: 142924 - DNA, 25 bp, probe
cagccaaacgaaacttccgttgcct

SEQ ID NO: 142925 - DNA, 25 bp, probe
cagccaaacgaaacttccgttgcct

SEQ ID NO: 142926 - DNA, 25 bp, probe
actaaaagaaccaccagatctgctt

SEQ ID NO: 142927 - DNA, 25 bp, probe
actatcaatcggacaaaacttctgc

SEQ ID NO: 142928 - DNA, 25 bp, probe
actacaagggccaaacagccatcca

SEQ ID NO: 142929 - DNA, 25 bp, probe
actctcaaatgccactcaagcatgc

SEQ ID NO: 142930 - DNA, 25 bp, probe
actctgaagattccccatgcatggg

SEQ ID NO: 142931 - DNA, 25 bp, probe
actctgtagtgtcccactcgataaa

SEQ ID NO: 142932 - DNA, 25 bp, probe
actcttcaggttccacatggtatag

SEQ ID NO: 142933 - DNA, 25 bp, probe
cagtttatggtgcagaatggattga

SEQ ID NO: 142934 - DNA, 25 bp, probe
cagttttggtaactaggatcctagg

SEQ ID NO: 142935 - DNA, 25 bp, probe
actttatgcctatgaagtccccagg

SEQ ID NO: 142936 - DNA, 25 bp, probe
actctttttgattgaactatcccag

SEQ ID NO: 142937 - DNA, 25 bp, probe
actttaattattgttatacacagct

SEQ ID NO: 142938 - DNA, 25 bp, probe
acttgaaattttgcagaatacccag

SEQ ID NO: 142939 - DNA, 25 bp, probe
actaaatcctttccaataattgact

SEQ ID NO: 142940 - DNA, 25 bp, probe
actctagtccaggtgccaagaattt

SEQ ID NO: 142941 - DNA, 25 bp, probe
acttagtctactgggctacgtattt

SEQ ID NO: 142942 - DNA, 25 bp, probe
actcttttgagcagtaaatgtatat

SEQ ID NO: 142943 - DNA, 25 bp, probe
actcttttgagcagtaaatgtatat

SEQ ID NO: 142944 - DNA, 25 bp, probe
actcagttccatccgtaaaatatgt

SEQ ID NO: 142945 - DNA, 25 bp, probe
acatcatgatgcgctgctggaaaaa

SEQ ID NO: 142946 - DNA, 25 bp, probe
actcatgagtgactgctggatctac

SEQ ID NO: 142947 - DNA, 25 bp, probe
actatgagcaacatgcagatctaca

SEQ ID NO: 142948 - DNA, 25 bp, probe
actctagcaatagcagctgctgccg

SEQ ID NO: 142949 - DNA, 25 bp, probe
actctcagaatcgcactgaccagcc

SEQ ID NO: 142950 - DNA, 25 bp, probe
acattccagtgggacggccacgggg

SEQ ID NO: 142951 - DNA, 25 bp, probe
actctcgctggtgaagccaagcggg

SEQ ID NO: 142952 - DNA, 25 bp, probe
actctcgctggtgaagccaagcggg

SEQ ID NO: 142953 - DNA, 25 bp, probe
actctggtcagagatacctggcctg

SEQ ID NO: 142954 - DNA, 25 bp, probe
actctggccacgctaggtgaacagg

SEQ ID NO: 142955 - DNA, 25 bp, probe
actcttctcagtgtaggtaaccgtc

SEQ ID NO: 142956 - DNA, 25 bp, probe
acttttaggtcccatgtcaacactg

SEQ ID NO: 142957 - DNA, 25 bp, probe
acttttaggtcccatgtcaacactg

SEQ ID NO: 142958 - DNA, 25 bp, probe
actcttcgtcgggtatgtaaatctc

SEQ ID NO: 142959 - DNA, 25 bp, probe
actcttcgtcgggtatgtaaatctc

SEQ ID NO: 142960 - DNA, 25 bp, probe
actctattttggtctctgtgacatt

SEQ ID NO: 142961 - DNA, 25 bp, probe
actctgtcttgtgggtgtctgacag

SEQ ID NO: 142962 - DNA, 25 bp, probe
actatgtctactggtttctgcctgt

SEQ ID NO: 142963 - DNA, 25 bp, probe
actatgttgacacatttcctggtgc

SEQ ID NO: 142964 - DNA, 25 bp, probe
actatttattaaaaccattctgctt

SEQ ID NO: 142965 - DNA, 25 bp, probe
acttgtatttggaggctcttctgtg

SEQ ID NO: 142966 - DNA, 25 bp, probe
actaatattattcctggtctttggg

SEQ ID NO: 142967 - DNA, 25 bp, probe
acttctcagttttggaggttgggag

SEQ ID NO: 142968 - DNA, 25 bp, probe
acttctgagttggggaatgtttgga

SEQ ID NO: 142969 - DNA, 25 bp, probe
actttggactagccagagcttttgg

SEQ ID NO: 142970 - DNA, 25 bp, probe
actagaggactttgaatgcctactg

SEQ ID NO: 142971 - DNA, 25 bp, probe
actcatgcttcagttataacctatt

SEQ ID NO: 142972 - DNA, 25 bp, probe
actcatgcttcagttataacctatt

SEQ ID NO: 142973 - DNA, 25 bp, probe
acatatgccatagcttggcccttgc

SEQ ID NO: 142974 - DNA, 25 bp, probe
actcacaaacacttggctcctagag

SEQ ID NO: 142975 - DNA, 25 bp, probe
actactatcaactgtcatcggcagg

SEQ ID NO: 142976 - DNA, 25 bp, probe
actcacacatcaccatttgtgggag

SEQ ID NO: 142977 - DNA, 25 bp, probe
actcaccagagatattgtggatggc

SEQ ID NO: 142978 - DNA, 25 bp, probe
actacagcaagtgatgtgtgggcct

SEQ ID NO: 142979 - DNA, 25 bp, probe
actcaagcaatggagagcggcgagc

SEQ ID NO: 142980 - DNA, 25 bp, probe
actctggaatgcaggctgccagatg

SEQ ID NO: 142981 - DNA, 25 bp, probe
actctggacagcaggcatcacagca

SEQ ID NO: 142982 - DNA, 25 bp, probe
actctcggagcctgcacaagcagat

SEQ ID NO: 142983 - DNA, 25 bp, probe
actctcggagcctgcacaagcagat

SEQ ID NO: 142984 - DNA, 25 bp, probe
actctcggagcctgcacaagcagat

SEQ ID NO: 142985 - DNA, 25 bp, probe
actctgcaggagcccgaaacactgc

SEQ ID NO: 142986 - DNA, 25 bp, probe
actctcagacactcagaagcaactg

SEQ ID NO: 142987 - DNA, 25 bp, probe
actctcatgcacttatcgagatgtg

SEQ ID NO: 142988 - DNA, 25 bp, probe
actctcactttagtggatgtaaatg

SEQ ID NO: 142989 - DNA, 25 bp, probe
actctgagactaagggtgaaagtgg

SEQ ID NO: 142990 - DNA, 25 bp, probe
actctgagccacaaggggaaggggg

SEQ ID NO: 142991 - DNA, 25 bp, probe
actacatgtaccagcggaaggaagg

SEQ ID NO: 142992 - DNA, 25 bp, probe
actatgagtacgactgggccgggaa

SEQ ID NO: 142993 - DNA, 25 bp, probe
actaagcgtgcgagggcctggagct

SEQ ID NO: 142994 - DNA, 25 bp, probe
actacgcgaggcagaggctcggaac

SEQ ID NO: 142995 - DNA, 25 bp, probe
actacgtcaggcagaattcttcaat

SEQ ID NO: 142996 - DNA, 25 bp, probe
acttgctggggtacagttgcttcct

SEQ ID NO: 142997 - DNA, 25 bp, probe
acttgctggggtacagttgcttcct

SEQ ID NO: 142998 - DNA, 25 bp, probe
actctgtctcgggaatgttttgtct

SEQ ID NO: 142999 - DNA, 25 bp, probe
actcttctggcagctagttagtgcc

SEQ ID NO: 143000 - DNA, 25 bp, probe
actctctgctacattcagttcttgt

SEQ ID NO: 143001 - DNA, 25 bp, probe
actctgcattacagtctgaattgag

SEQ ID NO: 143002 - DNA, 25 bp, probe
actctgctaccattttggctgtttg

SEQ ID NO: 143003 - DNA, 25 bp, probe
actctgcaaccagtgttgcctgcct

SEQ ID NO: 143004 - DNA, 25 bp, probe
actctgcaaccagtgttgcctgcct

SEQ ID NO: 143005 - DNA, 25 bp, probe
actctgcactctacttgtgctgtgt

SEQ ID NO: 143006 - DNA, 25 bp, probe
actctaggcttccagtctgtgtttg

SEQ ID NO: 143007 - DNA, 25 bp, probe
actaagccttagttctttcatctag

SEQ ID NO: 143008 - DNA, 25 bp, probe
actcacagtctgagttcttgtccgc

SEQ ID NO: 143009 - DNA, 25 bp, probe
actcacagtctgagttcttgtccgc

SEQ ID NO: 143010 - DNA, 25 bp, probe
actcatatctctcagttctgttttg

SEQ ID NO: 143011 - DNA, 25 bp, probe
actcaattttcgtgctatttctata

SEQ ID NO: 143012 - DNA, 25 bp, probe
actatagttcatcaagacttagcta

SEQ ID NO: 143013 - DNA, 25 bp, probe
actcatactcctccaaaagtcataa

SEQ ID NO: 143014 - DNA, 25 bp, probe
actctcactaggctaaactcaagat

SEQ ID NO: 143015 - DNA, 25 bp, probe
actctcatttgactgtgagaactca

SEQ ID NO: 143016 - DNA, 25 bp, probe
actctgctatggctgtggtatcaag

SEQ ID NO: 143017 - DNA, 25 bp, probe
actctgttgccaggctggtctcaaa

SEQ ID NO: 143018 - DNA, 25 bp, probe
actctgctggccagtcagtcgaaat

SEQ ID NO: 143019 - DNA, 25 bp, probe
actcatctgggcatgccagcgtgga

SEQ ID NO: 143020 - DNA, 25 bp, probe
actcatctgggcatgccagcgtgga

SEQ ID NO: 143021 - DNA, 25 bp, probe
actacatgggcttggccgaagagct

SEQ ID NO: 143022 - DNA, 25 bp, probe
actacatgatgactcaaggccaata

SEQ ID NO: 143023 - DNA, 25 bp, probe
actcttgtcagacaatggctataaa

SEQ ID NO: 143024 - DNA, 25 bp, probe
acttttcaagccaatcccttaatgt

SEQ ID NO: 143025 - DNA, 25 bp, probe
acttttcaccttaccactgacaggt

SEQ ID NO: 143026 - DNA, 25 bp, probe
ggctgataaacccggggtgacctca

SEQ ID NO: 143027 - DNA, 25 bp, probe
actaatcgagcacttctcaccaaac

SEQ ID NO: 143028 - DNA, 25 bp, probe
actttagagccactcaaggaaacgc

SEQ ID NO: 143029 - DNA, 25 bp, probe
actcttgtgaccgtgccaagaaaac

SEQ ID NO: 143030 - DNA, 25 bp, probe
acttctcttgcagaccaagagggac

SEQ ID NO: 143031 - DNA, 25 bp, probe
actcttgcattcttaggcatacagg

SEQ ID NO: 143032 - DNA, 25 bp, probe
actcttgcattcttaggcatacagg

SEQ ID NO: 143033 - DNA, 25 bp, probe
actcttcagtccagatcatccaagc

SEQ ID NO: 143034 - DNA, 25 bp, probe
actctctcatgtggctaaacaccct

SEQ ID NO: 143035 - DNA, 25 bp, probe
actctgctctcaggctgaaatctgg

SEQ ID NO: 143036 - DNA, 25 bp, probe
actctcccattctactgatatcggg

SEQ ID NO: 143037 - DNA, 25 bp, probe
acttcacctggtttatatcatggcc

SEQ ID NO: 143038 - DNA, 25 bp, probe
actctcacggtgacatgtttacagc

SEQ ID NO: 143039 - DNA, 25 bp, probe
actcttgctgtttatttatgacaga

SEQ ID NO: 143040 - DNA, 25 bp, probe
actcttggtcattatagtatatgcc

SEQ ID NO: 143041 - DNA, 25 bp, probe
actcttggtcattatagtatatgcc

SEQ ID NO: 143042 - DNA, 25 bp, probe
actcagttgcatcctacaatttgcc

SEQ ID NO: 143043 - DNA, 25 bp, probe
actcagtgtaccaaagttgccctca

SEQ ID NO: 143044 - DNA, 25 bp, probe
acacgtaacctatgtcagacactac

SEQ ID NO: 143045 - DNA, 25 bp, probe
acattgtcaaccgggtgaaccaagg

SEQ ID NO: 143046 - DNA, 25 bp, probe
acatgtttgacagcggaaaccctgg

SEQ ID NO: 143047 - DNA, 25 bp, probe
acatgagcggaagagcgaaccccag

SEQ ID NO: 143048 - DNA, 25 bp, probe
actcagcttaagtggagcatcccct

SEQ ID NO: 143049 - DNA, 25 bp, probe
actcagcttaagtggagcatcccct

SEQ ID NO: 143050 - DNA, 25 bp, probe
actacttcagagagaggttcctaaa

SEQ ID NO: 143051 - DNA, 25 bp, probe
actacagtcaagatgaggagtccaa

SEQ ID NO: 143052 - DNA, 25 bp, probe
actacatccaggctgagaaggctca

SEQ ID NO: 143053 - DNA, 25 bp, probe
actacgcctggagagaggagcatca

SEQ ID NO: 143054 - DNA, 25 bp, probe
actacgcctggagagaggagcatca

SEQ ID NO: 143055 - DNA, 25 bp, probe
actaggcctggtggaaggaggcgca

SEQ ID NO: 143056 - DNA, 25 bp, probe
actacgccgagaggataggggcaca

SEQ ID NO: 143057 - DNA, 25 bp, probe
actacgccgagaggataggggcaca

SEQ ID NO: 143058 - DNA, 25 bp, probe
acttcgggctggctagggacatcat

SEQ ID NO: 143059 - DNA, 25 bp, probe
acttgcggacaggaattcggcccag

SEQ ID NO: 143060 - DNA, 25 bp, probe
acttctgggagcacttgctccactc

SEQ ID NO: 143061 - DNA, 25 bp, probe
acttatgtaactttactccctcaat

SEQ ID NO: 143062 - DNA, 25 bp, probe
actctattaaactgggcctctgctt

SEQ ID NO: 143063 - DNA, 25 bp, probe
acttgtataaactgtgtgacttgtg

SEQ ID NO: 143064 - DNA, 25 bp, probe
acttgtataaactgtgtgacttgtg

SEQ ID NO: 143065 - DNA, 25 bp, probe
tacttgttaaactctagttcttaag

SEQ ID NO: 143066 - DNA, 25 bp, probe
actaatctaaactgtagctgtatta

SEQ ID NO: 143067 - DNA, 25 bp, probe
acttacctaacaagtactgctcatt

SEQ ID NO: 143068 - DNA, 25 bp, probe
actaactcaagacaatactcagcag

SEQ ID NO: 143069 - DNA, 25 bp, probe
actacagctggaaaaattgctagag

SEQ ID NO: 143070 - DNA, 25 bp, probe
actcaagccgcaccagagatggctg

SEQ ID NO: 143071 - DNA, 25 bp, probe
actcaaggtcgctggatgctgatct

SEQ ID NO: 143072 - DNA, 25 bp, probe
actcaacagttgggtgcactacttc

SEQ ID NO: 143073 - DNA, 25 bp, probe
actcataagcttcttgtcattcttc

SEQ ID NO: 143074 - DNA, 25 bp, probe
actcataagcttcttgtcattcttc

SEQ ID NO: 143075 - DNA, 25 bp, probe
actctatactggagttcccttcttc

SEQ ID NO: 143076 - DNA, 25 bp, probe
actctatactggagttcccttcttc

SEQ ID NO: 143077 - DNA, 25 bp, probe
acaggcatttggatttttctacttc

SEQ ID NO: 143078 - DNA, 25 bp, probe
acttttctggttcttatccattatc

SEQ ID NO: 143079 - DNA, 25 bp, probe
acaccttttagtattgatagcttac

SEQ ID NO: 143080 - DNA, 25 bp, probe
actacatgtttagtaattgatactt

SEQ ID NO: 143081 - DNA, 25 bp, probe
actaagcatttgtgttctgatatct

SEQ ID NO: 143082 - DNA, 25 bp, probe
actaagcatttgtgttctgatatct

SEQ ID NO: 143083 - DNA, 25 bp, probe
actcacacagttgactatctgaatc

SEQ ID NO: 143084 - DNA, 25 bp, probe
actcagaagttcaagctaaatattg

SEQ ID NO: 143085 - DNA, 25 bp, probe
actcaacatgcttctaccaagttat

SEQ ID NO: 143086 - DNA, 25 bp, probe
actcaacatgcttctaccaagttat

SEQ ID NO: 143087 - DNA, 25 bp, probe
actaacttctccgcaagttgtccta

SEQ ID NO: 143088 - DNA, 25 bp, probe
actaacgtcagaaccaatatttcac

SEQ ID NO: 143089 - DNA, 25 bp, probe
actaatgcctggcactcctatttaa

SEQ ID NO: 143090 - DNA, 25 bp, probe
actttctgtggtactcctaattaca

SEQ ID NO: 143091 - DNA, 25 bp, probe
actttgtgggttgcaatacaaactg

SEQ ID NO: 143092 - DNA, 25 bp, probe
actttggggagatcagcatcatcaa

SEQ ID NO: 143093 - DNA, 25 bp, probe
acttggactggatccaccactatgt

SEQ ID NO: 143094 - DNA, 25 bp, probe
actagtgacggcgacaggcaactat

SEQ ID NO: 143095 - DNA, 25 bp, probe
actcagatggaaccgcaggaagctg

SEQ ID NO: 143096 - DNA, 25 bp, probe
actcacatttagcccatgtcattta

SEQ ID NO: 143097 - DNA, 25 bp, probe
actcatttctcatgccattagctct

SEQ ID NO: 143098 - DNA, 25 bp, probe
actcatttctcatgccattagctct

SEQ ID NO: 143099 - DNA, 25 bp, probe
actcattccatatgcatctgtgtgt

SEQ ID NO: 143100 - DNA, 25 bp, probe
actcagctgcgcaataatgtctttc

SEQ ID NO: 143101 - DNA, 25 bp, probe
actcttggaatggattctttcctgt

SEQ ID NO: 143102 - DNA, 25 bp, probe
actcttgttatcttttgtgtcctgt

SEQ ID NO: 143103 - DNA, 25 bp, probe
actcttgtctatttttgtcttatat

SEQ ID NO: 143104 - DNA, 25 bp, probe
actcttgtgttacatcatctcatta

SEQ ID NO: 143105 - DNA, 25 bp, probe
actaatctttcaaaatcatcctatg

SEQ ID NO: 143106 - DNA, 25 bp, probe
actaactttttattcatgcacttca

SEQ ID NO: 143107 - DNA, 25 bp, probe
actatatgttttgttccctatcatg

SEQ ID NO: 143108 - DNA, 25 bp, probe
acttacatacttgtccctctaagtc

SEQ ID NO: 143109 - DNA, 25 bp, probe
actattgctattcttcaactccaag

SEQ ID NO: 143110 - DNA, 25 bp, probe
actatcagtagttattagactctaa

SEQ ID NO: 143111 - DNA, 25 bp, probe
actacatctactgatgctagacact

SEQ ID NO: 143112 - DNA, 25 bp, probe
actacactcaaggatgtgaacctgg

SEQ ID NO: 143113 - DNA, 25 bp, probe
actaccacagccctgtggaccacga

SEQ ID NO: 143114 - DNA, 25 bp, probe
actaccacagccctgtggaccacga

SEQ ID NO: 143115 - DNA, 25 bp, probe
actacaacagcgccttcaagaactt

SEQ ID NO: 143116 - DNA, 25 bp, probe
actacaacagcgccttcaagaactt

SEQ ID NO: 143117 - DNA, 25 bp, probe
actatcatagccctgcttactaaaa

SEQ ID NO: 143118 - DNA, 25 bp, probe
actcattcctgccttggagaaaata

SEQ ID NO: 143119 - DNA, 25 bp, probe
actcatccaccaggggatgaaatgt

SEQ ID NO: 143120 - DNA, 25 bp, probe
actcttctcacccaggctggaatgc

SEQ ID NO: 143121 - DNA, 25 bp, probe
actcattcccagaacctggatgcta

SEQ ID NO: 143122 - DNA, 25 bp, probe
acatttcctcatcccggaagcatga

SEQ ID NO: 143123 - DNA, 25 bp, probe
acttagctgcctcactggaagtgat

SEQ ID NO: 143124 - DNA, 25 bp, probe
acttcagtcctttcttagggaaatg

SEQ ID NO: 143125 - DNA, 25 bp, probe
acttagtcctgatgtactttaaata

SEQ ID NO: 143126 - DNA, 25 bp, probe
acatctactcagcagactactacaa

SEQ ID NO: 143127 - DNA, 25 bp, probe
acttaacagagtgcatagcatacac

SEQ ID NO: 143128 - DNA, 25 bp, probe
acttctcacagctcaaagataacag

SEQ ID NO: 143129 - DNA, 25 bp, probe
acttctcacagctcaaagataacag

SEQ ID NO: 143130 - DNA, 25 bp, probe
actttccagcaagcacagatgtaca

SEQ ID NO: 143131 - DNA, 25 bp, probe
actattccataactccagacatcac

SEQ ID NO: 143132 - DNA, 25 bp, probe
actattccataactccagacatcac

SEQ ID NO: 143133 - DNA, 25 bp, probe
actattccttgattgctaggaccct

SEQ ID NO: 143134 - DNA, 25 bp, probe
acttgtggttgaggcagggccatcc

SEQ ID NO: 143135 - DNA, 25 bp, probe
actatatgctgtggaccgtcaaccc

SEQ ID NO: 143136 - DNA, 25 bp, probe
actatattgtgaacgagccacctcc

SEQ ID NO: 143137 - DNA, 25 bp, probe
cttgacttgtcaattactacccttt

SEQ ID NO: 143138 - DNA, 25 bp, probe
actactagctttagattacccctat

SEQ ID NO: 143139 - DNA, 25 bp, probe
actactcaacttataaactgtctgc

SEQ ID NO: 143140 - DNA, 25 bp, probe
actcactcactgtttataaatgttc

SEQ ID NO: 143141 - DNA, 25 bp, probe
actatgtgactgcctttacggtttc

SEQ ID NO: 143142 - DNA, 25 bp, probe
acattgtgccagctatcctgagggt

SEQ ID NO: 143143 - DNA, 25 bp, probe
acattgtgccagctatcctgagggt

SEQ ID NO: 143144 - DNA, 25 bp, probe
acttgtgcctcccattttatggtgg

SEQ ID NO: 143145 - DNA, 25 bp, probe
actcatcccccttttctatggggtg

SEQ ID NO: 143146 - DNA, 25 bp, probe
acttcccacctctctgaatagtgtg

SEQ ID NO: 143147 - DNA, 25 bp, probe
actatcagccaagcccatgaagggt

SEQ ID NO: 143148 - DNA, 25 bp, probe
acatatcccaagccctttagggcta

SEQ ID NO: 143149 - DNA, 25 bp, probe
actacatccggggctatggtgggga

SEQ ID NO: 143150 - DNA, 25 bp, probe
actacagcctggccagcaaggtgga

SEQ ID NO: 143151 - DNA, 25 bp, probe
actacagtgtgtcccacgggaacct

SEQ ID NO: 143152 - DNA, 25 bp, probe
actacatggtgtttgccgtgtttcc

SEQ ID NO: 143153 - DNA, 25 bp, probe
actaatggtgattatgctccaattt

SEQ ID NO: 143154 - DNA, 25 bp, probe
acttagcggattcctgccttttgat

SEQ ID NO: 143155 - DNA, 25 bp, probe
acttaggacttgatcctgtggttgc

SEQ ID NO: 143156 - DNA, 25 bp, probe
acttaaataatcctctatgtggttg

SEQ ID NO: 143157 - DNA, 25 bp, probe
actttctcagaaggtgtttggtatg

SEQ ID NO: 143158 - DNA, 25 bp, probe
acttttctatagttttgagagttcg

SEQ ID NO: 143159 - DNA, 25 bp, probe
actttatctacggatttagaatgtg

SEQ ID NO: 143160 - DNA, 25 bp, probe
actttatttgcggagcatttctgca

SEQ ID NO: 143161 - DNA, 25 bp, probe
actttattactctgaatgcctacta

SEQ ID NO: 143162 - DNA, 25 bp, probe
actttattactctgaatgcctacta

SEQ ID NO: 143163 - DNA, 25 bp, probe
acttgttctacctggattgtcaaca

SEQ ID NO: 143164 - DNA, 25 bp, probe
acttttctggatgtattgattcaac

SEQ ID NO: 143165 - DNA, 25 bp, probe
actaactcggtcattgctgttgaaa

SEQ ID NO: 143166 - DNA, 25 bp, probe
actacctcggccatgtcatggtaaa

SEQ ID NO: 143167 - DNA, 25 bp, probe
actacatcctggtcacgactgtgct

SEQ ID NO: 143168 - DNA, 25 bp, probe
actacatcaatggccagatgatctg

SEQ ID NO: 143169 - DNA, 25 bp, probe
actacatcaatggccagatgatctg

SEQ ID NO: 143170 - DNA, 25 bp, probe
actcacatagtgacaggatggcgcc

SEQ ID NO: 143171 - DNA, 25 bp, probe
acttgatcgtgcagctgctgggcac

SEQ ID NO: 143172 - DNA, 25 bp, probe
acttgatcgtgcagctgctgggcac

SEQ ID NO: 143173 - DNA, 25 bp, probe
actatatgcagaaggggaggccgag

SEQ ID NO: 143174 - DNA, 25 bp, probe
actagcatctacctggaggccaagg

SEQ ID NO: 143175 - DNA, 25 bp, probe
actagattccagagatggtcacttg

SEQ ID NO: 143176 - DNA, 25 bp, probe
actagattccagagatggtcacttg

SEQ ID NO: 143177 - DNA, 25 bp, probe
actattacgcagagcttggccaatg

SEQ ID NO: 143178 - DNA, 25 bp, probe
actaatctagataacttggctcagc

SEQ ID NO: 143179 - DNA, 25 bp, probe
actaatctagataacttggctcagc

SEQ ID NO: 143180 - DNA, 25 bp, probe
acttatgcatggggagcctgttagc

SEQ ID NO: 143181 - DNA, 25 bp, probe
actcatggcaggggtggtttatctg

SEQ ID NO: 143182 - DNA, 25 bp, probe
actcatggaagtctgtttttatcaa

SEQ ID NO: 143183 - DNA, 25 bp, probe
actattaacttttcattattagcaa

SEQ ID NO: 143184 - DNA, 25 bp, probe
acttaatgttatccagtattgttca

SEQ ID NO: 143185 - DNA, 25 bp, probe
actacactttatccattattctact

SEQ ID NO: 143186 - DNA, 25 bp, probe
actacttgtctctcttttgctaaga

SEQ ID NO: 143187 - DNA, 25 bp, probe
actagctttttcattgtctttccat

SEQ ID NO: 143188 - DNA, 25 bp, probe
actactaatattattcctggtcttt

SEQ ID NO: 143189 - DNA, 25 bp, probe
actcactaaatcctttccaataatt

SEQ ID NO: 143190 - DNA, 25 bp, probe
gaccagtaaagtccaattaaaatat

SEQ ID NO: 143191 - DNA, 25 bp, probe
actcacaagaagacctcttaaaaat

SEQ ID NO: 143192 - DNA, 25 bp, probe
actcaaagatatcccttcgacagaa

SEQ ID NO: 143193 - DNA, 25 bp, probe
actaacaatgtccactacgagaact

SEQ ID NO: 143194 - DNA, 25 bp, probe
acttcgccagtcaactacgcgaggc

SEQ ID NO: 143195 - DNA, 25 bp, probe
actatgagctcacctacaacctaga

SEQ ID NO: 143196 - DNA, 25 bp, probe
actaagttggtgtactgcctcgacc

SEQ ID NO: 143197 - DNA, 25 bp, probe
actacgtgggtgtactccatcaaca

SEQ ID NO: 143198 - DNA, 25 bp, probe
actacagagtcagaactccagcacc

SEQ ID NO: 143199 - DNA, 25 bp, probe
actatcccgagaaatctccagcatg

SEQ ID NO: 143200 - DNA, 25 bp, probe
actatctgaccattatgagcccaag

SEQ ID NO: 143201 - DNA, 25 bp, probe
actacatagctcctgagatcctgca

SEQ ID NO: 143202 - DNA, 25 bp, probe
actacatagccccggagatcattgc

SEQ ID NO: 143203 - DNA, 25 bp, probe
actaacaccactggaagcttgtgca

SEQ ID NO: 143204 - DNA, 25 bp, probe
actattatcccagtgacgcatctgt

SEQ ID NO: 143205 - DNA, 25 bp, probe
actattatcccagtgacgcatctgt

SEQ ID NO: 143206 - DNA, 25 bp, probe
actatatacccatctctgatttggc

SEQ ID NO: 143207 - DNA, 25 bp, probe
actacatgagccctgaattgttctc

SEQ ID NO: 143208 - DNA, 25 bp, probe
actacatgagccctgaattgttctc

SEQ ID NO: 143209 - DNA, 25 bp, probe
actacagcatcattgcataattctt

SEQ ID NO: 143210 - DNA, 25 bp, probe
actcaactctcaatctatttgctgg

SEQ ID NO: 143211 - DNA, 25 bp, probe
actaggtgctcaattcatgcctgtg

SEQ ID NO: 143212 - DNA, 25 bp, probe
actcagaggctgtatctctgccctg

SEQ ID NO: 143213 - DNA, 25 bp, probe
actcagaggctgtatctctgccctg

SEQ ID NO: 143214 - DNA, 25 bp, probe
actagcagagagtcctgagccactg

SEQ ID NO: 143215 - DNA, 25 bp, probe
actaccaagccggagcacgaggatc

SEQ ID NO: 143216 - DNA, 25 bp, probe
acttcaaagatgccagagacgcgga

SEQ ID NO: 143217 - DNA, 25 bp, probe
actacacgcagatctcaacgctggc

SEQ ID NO: 143218 - DNA, 25 bp, probe
actacacggagttcaagttccctca

SEQ ID NO: 143219 - DNA, 25 bp, probe
actacacggagttcaagttccctca

SEQ ID NO: 143220 - DNA, 25 bp, probe
actacacagaatttaaattccctca

SEQ ID NO: 143221 - DNA, 25 bp, probe
actacaactcctcaaattccaataa

SEQ ID NO: 143222 - DNA, 25 bp, probe
acttgacgcttgcaaaattaccaaa

SEQ ID NO: 143223 - DNA, 25 bp, probe
acttgccagcaacaaaaggaagagc

SEQ ID NO: 143224 - DNA, 25 bp, probe
acttacacaaggagaagaggattgt

SEQ ID NO: 143225 - DNA, 25 bp, probe
acttactcttggaagaaggcggcct

SEQ ID NO: 143226 - DNA, 25 bp, probe
acttactctgtgttcaggtgtggaa

SEQ ID NO: 143227 - DNA, 25 bp, probe
acttcatcctgtctctaggggacaa

SEQ ID NO: 143228 - DNA, 25 bp, probe
acatactcctgccagcttgggggag

SEQ ID NO: 143229 - DNA, 25 bp, probe
actcactccctcacggggagagaga

SEQ ID NO: 143230 - DNA, 25 bp, probe
actttgtccacgtggcggagaagct

SEQ ID NO: 143231 - DNA, 25 bp, probe
gaattagaccccagggagtgacctc

SEQ ID NO: 143232 - DNA, 25 bp, probe
acagcaaaaaccaggcgttgaactc

SEQ ID NO: 143233 - DNA, 25 bp, probe
acatgctcaaacaccagggttacct

SEQ ID NO: 143234 - DNA, 25 bp, probe
acatccaaagctgccacaagttcga

SEQ ID NO: 143235 - DNA, 25 bp, probe
actttgcatcaggtctacacagtcc

SEQ ID NO: 143236 - DNA, 25 bp, probe
actattgacatgggcatcaacactt

SEQ ID NO: 143237 - DNA, 25 bp, probe
actatgtgactgagatcgcacagga

SEQ ID NO: 143238 - DNA, 25 bp, probe
actagggctgcgaatctagaggagg

SEQ ID NO: 143239 - DNA, 25 bp, probe
actaagtgaatgtatctgcagagga

SEQ ID NO: 143240 - DNA, 25 bp, probe
actactgctcaaaattcatgaggtg

SEQ ID NO: 143241 - DNA, 25 bp, probe
actagcttgcacattttaggtctgt

SEQ ID NO: 143242 - DNA, 25 bp, probe
acttattgaatatatgatcggccat

SEQ ID NO: 143243 - DNA, 25 bp, probe
actactggatagtgagtcgtgcgct

SEQ ID NO: 143244 - DNA, 25 bp, probe
actactgtgaaaaactgctgccctg

SEQ ID NO: 143245 - DNA, 25 bp, probe
actactggaccacgaaggccactgt

SEQ ID NO: 143246 - DNA, 25 bp, probe
actactggaccacgaaggccactgt

SEQ ID NO: 143247 - DNA, 25 bp, probe
actagctctgatcctaacaggccac

SEQ ID NO: 143248 - DNA, 25 bp, probe
actacttcactgctacagagccaca

SEQ ID NO: 143249 - DNA, 25 bp, probe
actacttcactgctacagagccaca

SEQ ID NO: 143250 - DNA, 25 bp, probe
acttattgcaatttaacaccagagt

SEQ ID NO: 143251 - DNA, 25 bp, probe
acttattcgctactacgagaacagt

SEQ ID NO: 143252 - DNA, 25 bp, probe
actttgtccttcagcaagaaaggtg

SEQ ID NO: 143253 - DNA, 25 bp, probe
acagtttccctacaagaactgcaag

SEQ ID NO: 143254 - DNA, 25 bp, probe
acagtttccctgaggacaacgatga

SEQ ID NO: 143255 - DNA, 25 bp, probe
acaggtggaccaacggactgattta

SEQ ID NO: 143256 - DNA, 25 bp, probe
acagtggagtccaccagtgctacct

SEQ ID NO: 143257 - DNA, 25 bp, probe
acttggtgtccaacagagtctaggc

SEQ ID NO: 143258 - DNA, 25 bp, probe
acttggtgtccaacagagtctaggc

SEQ ID NO: 143259 - DNA, 25 bp, probe
acttttgtccaatgtggttggtcaa

SEQ ID NO: 143260 - DNA, 25 bp, probe
actttgtttcagcatgtaattttaa

SEQ ID NO: 143261 - DNA, 25 bp, probe
actattgtctcttggaggaagtttt

SEQ ID NO: 143262 - DNA, 25 bp, probe
actatttgtctttcaggaccttttg

SEQ ID NO: 143263 - DNA, 25 bp, probe
actaaactctgaataagcacttttt

SEQ ID NO: 143264 - DNA, 25 bp, probe
actatgaagactctagacgtttact

SEQ ID NO: 143265 - DNA, 25 bp, probe
acttacagagtttgatgaatgcttc

SEQ ID NO: 143266 - DNA, 25 bp, probe
actataccagtaagtgccacttctg

SEQ ID NO: 143267 - DNA, 25 bp, probe
actagatctcatacaaggcttattc

SEQ ID NO: 143268 - DNA, 25 bp, probe
actagatgtctttaggcagcagctt

SEQ ID NO: 143269 - DNA, 25 bp, probe
actagaccatttagagcccaatttg

SEQ ID NO: 143270 - DNA, 25 bp, probe
actagcaccattttaagtccctgtc

SEQ ID NO: 143271 - DNA, 25 bp, probe
actaattcattgttacgtcactttt

SEQ ID NO: 143272 - DNA, 25 bp, probe
actaattcattgttacgtcactttt

SEQ ID NO: 143273 - DNA, 25 bp, probe
actacatctatttctataattttta

SEQ ID NO: 143274 - DNA, 25 bp, probe
actacatctacttcttccagtatag

SEQ ID NO: 143275 - DNA, 25 bp, probe
actaactgagctccttcacttaaaa

SEQ ID NO: 143276 - DNA, 25 bp, probe
actagatcgattgtacatcttcaca

SEQ ID NO: 143277 - DNA, 25 bp, probe
actacaggttctacaccttaatgaa

SEQ ID NO: 143278 - DNA, 25 bp, probe
actacaggttctacaccttaatgaa

SEQ ID NO: 143279 - DNA, 25 bp, probe
actactttatctacggatttagaat

SEQ ID NO: 143280 - DNA, 25 bp, probe
actactgacttcactggagtctcag

SEQ ID NO: 143281 - DNA, 25 bp, probe
actacgagctcaacctgggtcagat

SEQ ID NO: 143282 - DNA, 25 bp, probe
actacgagctcaacctgggtcagat

SEQ ID NO: 143283 - DNA, 25 bp, probe
actagcaactgctccaaggatagat

SEQ ID NO: 143284 - DNA, 25 bp, probe
actatgggatggcccatgaggaggt

SEQ ID NO: 143285 - DNA, 25 bp, probe
acagatgggatgggtctgacccctt

SEQ ID NO: 143286 - DNA, 25 bp, probe
actatggtatgctggccagcaccct

SEQ ID NO: 143287 - DNA, 25 bp, probe
actaggcggctgcagcaagcagacc

SEQ ID NO: 143288 - DNA, 25 bp, probe
actagtggagtcctgagtcagcacc

SEQ ID NO: 143289 - DNA, 25 bp, probe
actacaccatgtttgagctcagacc

SEQ ID NO: 143290 - DNA, 25 bp, probe
actatacagactttagtcagactgc

SEQ ID NO: 143291 - DNA, 25 bp, probe
actacatgtgtccttagtcaactgt

SEQ ID NO: 143292 - DNA, 25 bp, probe
actacaggtcaagtggtagccatga

SEQ ID NO: 143293 - DNA, 25 bp, probe
actacaggtcaagtggtagccatga

SEQ ID NO: 143294 - DNA, 25 bp, probe
actataggtatgtggtcaggaagca

SEQ ID NO: 143295 - DNA, 25 bp, probe
acttatcagtctttatggaggaagc

SEQ ID NO: 143296 - DNA, 25 bp, probe
actttcctcttagtcgagccaagtt

SEQ ID NO: 143297 - DNA, 25 bp, probe
actttccatttctcatggtcaacat

SEQ ID NO: 143298 - DNA, 25 bp, probe
acttttgcttctgtcggaactcatt

SEQ ID NO: 143299 - DNA, 25 bp, probe
acttaatcccatgtcatgcgaccct

SEQ ID NO: 143300 - DNA, 25 bp, probe
actttgtcaatcagtgccatgatcc

SEQ ID NO: 143301 - DNA, 25 bp, probe
actttcgcaatcacttctgcatcac

SEQ ID NO: 143302 - DNA, 25 bp, probe
actttccaaaacgtttccagcatct

SEQ ID NO: 143303 - DNA, 25 bp, probe
acttccgacaaatgggtctcaagct

SEQ ID NO: 143304 - DNA, 25 bp, probe
acttccgcagcatattgcggtgctg

SEQ ID NO: 143305 - DNA, 25 bp, probe
acttctctaccaagtctgatgtctg

SEQ ID NO: 143306 - DNA, 25 bp, probe
acttctctaccaagtctgatgtctg

SEQ ID NO: 143307 - DNA, 25 bp, probe
actactccactcagattgacatgtg

SEQ ID NO: 143308 - DNA, 25 bp, probe
actacctacttgtgtgattgtggga

SEQ ID NO: 143309 - DNA, 25 bp, probe
actttctttgtgtgttcctgatgga

SEQ ID NO: 143310 - DNA, 25 bp, probe
acttactttgtgggttgcaatacaa

SEQ ID NO: 143311 - DNA, 25 bp, probe
acttcacctctgtggtctcagaaat

SEQ ID NO: 143312 - DNA, 25 bp, probe
actacaacctgatgcgtctgctgag

SEQ ID NO: 143313 - DNA, 25 bp, probe
actagcaatttatgcttcttgggag

SEQ ID NO: 143314 - DNA, 25 bp, probe
actacacagaattcatgttttgcag

SEQ ID NO: 143315 - DNA, 25 bp, probe
actacagcacacgtcatttcttagc

SEQ ID NO: 143316 - DNA, 25 bp, probe
acttcagccagcgacgtttggagct

SEQ ID NO: 143317 - DNA, 25 bp, probe
acagaggccgccattttggattctt

SEQ ID NO: 143318 - DNA, 25 bp, probe
aaggggatccctgtagtgagttttg

SEQ ID NO: 143319 - DNA, 25 bp, probe
acttgggttcctggatggtgggatt

SEQ ID NO: 143320 - DNA, 25 bp, probe
acttgggagtcctcatgtgtattga

SEQ ID NO: 143321 - DNA, 25 bp, probe
acttggaaggtgccctgtgctatgt

SEQ ID NO: 143322 - DNA, 25 bp, probe
actatggacagctttctgattgttg

SEQ ID NO: 143323 - DNA, 25 bp, probe
actaaacagcttccttcagatctgg

SEQ ID NO: 143324 - DNA, 25 bp, probe
actacataacttcctacgtatcctg

SEQ ID NO: 143325 - DNA, 25 bp, probe
acataaagacgtgcgccggatccgc

SEQ ID NO: 143326 - DNA, 25 bp, probe
actacagaggggccaggggatccct

SEQ ID NO: 143327 - DNA, 25 bp, probe
actacagaggggccaggggatccct

SEQ ID NO: 143328 - DNA, 25 bp, probe
acttggagggggcgtgcaggcccat

SEQ ID NO: 143329 - DNA, 25 bp, probe
acttctgcaaggcagtaattcccct

SEQ ID NO: 143330 - DNA, 25 bp, probe
acttccagggaagaatgacagccac

SEQ ID NO: 143331 - DNA, 25 bp, probe
acttcaggaggctcctgcgcaaaac

SEQ ID NO: 143332 - DNA, 25 bp, probe
acttcagaacggcactacataaatg

SEQ ID NO: 143333 - DNA, 25 bp, probe
acttcagaacggcactacataaatg

SEQ ID NO: 143334 - DNA, 25 bp, probe
actttgacaaggccactgacatcgt

SEQ ID NO: 143335 - DNA, 25 bp, probe
acttcgtattgacccttatctgtaa

SEQ ID NO: 143336 - DNA, 25 bp, probe
acttcgtattgacccttatctgtaa

SEQ ID NO: 143337 - DNA, 25 bp, probe
acttctgtactacaacgctggtgaa

SEQ ID NO: 143338 - DNA, 25 bp, probe
acttttcagcctcaagctttacaca

SEQ ID NO: 143339 - DNA, 25 bp, probe
acttttccactaatgagttccgaag

SEQ ID NO: 143340 - DNA, 25 bp, probe
acttacctcccaaaggttctgcagg

SEQ ID NO: 143341 - DNA, 25 bp, probe
acttacctcccaaaggttctgcagg

SEQ ID NO: 143342 - DNA, 25 bp, probe
actaggactcccataaatcactggg

SEQ ID NO: 143343 - DNA, 25 bp, probe
actaaaatcccatactatctgcttg

SEQ ID NO: 143344 - DNA, 25 bp, probe
actaaaatcctgggcatcattctgg

SEQ ID NO: 143345 - DNA, 25 bp, probe
actataacatacacgtcattgcaag

SEQ ID NO: 143346 - DNA, 25 bp, probe
actatcgacatacctcagaatccta

SEQ ID NO: 143347 - DNA, 25 bp, probe
actatcgacatacctcagaatccta

SEQ ID NO: 143348 - DNA, 25 bp, probe
acttctctctatctggaatttaatt

SEQ ID NO: 143349 - DNA, 25 bp, probe
acttcccctgttcaatagtatggga

SEQ ID NO: 143350 - DNA, 25 bp, probe
actacccctgatgagaacagtatga

SEQ ID NO: 143351 - DNA, 25 bp, probe
actacccctgatgagaacagtatga

SEQ ID NO: 143352 - DNA, 25 bp, probe
actaccctctcaaatggacaatacc

SEQ ID NO: 143353 - DNA, 25 bp, probe
actacttctacatggtgaccaacac

SEQ ID NO: 143354 - DNA, 25 bp, probe
actacctcagaatgacgaccattac

SEQ ID NO: 143355 - DNA, 25 bp, probe
actaccttgacttgaaatgctcttt

SEQ ID NO: 143356 - DNA, 25 bp, probe
acatacccatcagtaatttctctaa

SEQ ID NO: 143357 - DNA, 25 bp, probe
actacccgcatgtcagtgttgtcat

SEQ ID NO: 143358 - DNA, 25 bp, probe
actacgtcgatctaggtgtgaccag

SEQ ID NO: 143359 - DNA, 25 bp, probe
acttggtagacatgcagcgcttccg

SEQ ID NO: 143360 - DNA, 25 bp, probe
acttggtagacatgcagcgcttccg

SEQ ID NO: 143361 - DNA, 25 bp, probe
acttgcagatgatatgtgctgcctt

SEQ ID NO: 143362 - DNA, 25 bp, probe
acttgaatgtaaatgtacatgtgca

SEQ ID NO: 143363 - DNA, 25 bp, probe
actatcaagtcagatgtatggtcat

SEQ ID NO: 143364 - DNA, 25 bp, probe
acttcacatggcttttctttcaatc

SEQ ID NO: 143365 - DNA, 25 bp, probe
actataaggcacttttaacagattg

SEQ ID NO: 143366 - DNA, 25 bp, probe
actttgaggcctacgcgaaaatctg

SEQ ID NO: 143367 - DNA, 25 bp, probe
acatactgggagaatttgtaaaatt

SEQ ID NO: 143368 - DNA, 25 bp, probe
actactggggcttttcctattgatt

SEQ ID NO: 143369 - DNA, 25 bp, probe
actactttcttaatatcactttggt

SEQ ID NO: 143370 - DNA, 25 bp, probe
actactgactttgttcttattggat

SEQ ID NO: 143371 - DNA, 25 bp, probe
actacacagtttacttttatattgt

SEQ ID NO: 143372 - DNA, 25 bp, probe
acatagaccttcgctttatttttgt

SEQ ID NO: 143373 - DNA, 25 bp, probe
acattgacgtagtcgttgtcattcc

SEQ ID NO: 143374 - DNA, 25 bp, probe
actatatgtgggtagtattccagca

SEQ ID NO: 143375 - DNA, 25 bp, probe
actttgagggcgagttcacagggct

SEQ ID NO: 143376 - DNA, 25 bp, probe
actttggcgaagtgttcagcggacg

SEQ ID NO: 143377 - DNA, 25 bp, probe
actttgggatagtggtgatctgtac

SEQ ID NO: 143378 - DNA, 25 bp, probe
actttgggatagtggtgatctgtac

SEQ ID NO: 143379 - DNA, 25 bp, probe
acttctgtgggagtgggaactgttc

SEQ ID NO: 143380 - DNA, 25 bp, probe
actttgtggagctgaccgaagatat

SEQ ID NO: 143381 - DNA, 25 bp, probe
actttggctcagctgatcctgacat

SEQ ID NO: 143382 - DNA, 25 bp, probe
actttggccatgttagcctggtcaa

SEQ ID NO: 143383 - DNA, 25 bp, probe
actttcattatactacctggccaga

SEQ ID NO: 143384 - DNA, 25 bp, probe
actactatacagactacgtggctac

SEQ ID NO: 143385 - DNA, 25 bp, probe
actactgtacatactagtgttcata

SEQ ID NO: 143386 - DNA, 25 bp, probe
actactggatgcaaactgttatgta

SEQ ID NO: 143387 - DNA, 25 bp, probe
actacatttcaagctctccagcatc

SEQ ID NO: 143388 - DNA, 25 bp, probe
acttgatttccaggcttctcagata

SEQ ID NO: 143389 - DNA, 25 bp, probe
acttcatgactgccacgcatttaca

SEQ ID NO: 143390 - DNA, 25 bp, probe
actatcataattcagcacttaacta

SEQ ID NO: 143391 - DNA, 25 bp, probe
actatcatttgagagccctaccttt

SEQ ID NO: 143392 - DNA, 25 bp, probe
actatcatttgagagccctaccttt

SEQ ID NO: 143393 - DNA, 25 bp, probe
acttgcatttggcaccatgctgggc

SEQ ID NO: 143394 - DNA, 25 bp, probe
actttcaagggagatgtgtggcttc

SEQ ID NO: 143395 - DNA, 25 bp, probe
actagttatgggtctatttcttcca

SEQ ID NO: 143396 - DNA, 25 bp, probe
cactggattaagcccttttctacca

SEQ ID NO: 143397 - DNA, 25 bp, probe
caatggttttttcactgcctgacct

SEQ ID NO: 143398 - DNA, 25 bp, probe
acttgtttttatgatgtgcatggac

SEQ ID NO: 143399 - DNA, 25 bp, probe
acttagtttcttactgctcatggat

SEQ ID NO: 143400 - DNA, 25 bp, probe
acttgaattatagttctcaacaata

SEQ ID NO: 143401 - DNA, 25 bp, probe
acttataaatatttctccagcaaat

SEQ ID NO: 143402 - DNA, 25 bp, probe
acattaaacaaaccccagatcaact

SEQ ID NO: 143403 - DNA, 25 bp, probe
acttaaagagaaagcccccaagcat

SEQ ID NO: 143404 - DNA, 25 bp, probe
actttatgagggagaccccgacaga

SEQ ID NO: 143405 - DNA, 25 bp, probe
acttggtggggtcaccaactactca

SEQ ID NO: 143406 - DNA, 25 bp, probe
acatcgtatggggtgacaccgccta

SEQ ID NO: 143407 - DNA, 25 bp, probe
actacattctgggtgacacgctggg

SEQ ID NO: 143408 - DNA, 25 bp, probe
acatactttgacaaccccagtgagt

SEQ ID NO: 143409 - DNA, 25 bp, probe
acttgtgtaacaatcatcccttcag

SEQ ID NO: 143410 - DNA, 25 bp, probe
tcatcatgtaccgctgcgtgacggg

SEQ ID NO: 143411 - DNA, 25 bp, probe
acttcaataataccatcactgacac

SEQ ID NO: 143412 - DNA, 25 bp, probe
actatctgcaaatacagcaccccca

SEQ ID NO: 143413 - DNA, 25 bp, probe
actatctgcaccaggaatccctaaa

SEQ ID NO: 143414 - DNA, 25 bp, probe
acttcatcacccgagagaacctgga

SEQ ID NO: 143415 - DNA, 25 bp, probe
acttcacacgccagtacggggatga

SEQ ID NO: 143416 - DNA, 25 bp, probe
acttcacacgccagtacggggatga

SEQ ID NO: 143417 - DNA, 25 bp, probe
actatccagaccagtacgttcgaga

SEQ ID NO: 143418 - DNA, 25 bp, probe
acttccacaactgtaaatattgggc

SEQ ID NO: 143419 - DNA, 25 bp, probe
actttcctaattaaactatgatgcg

SEQ ID NO: 143420 - DNA, 25 bp, probe
actatttttatcctgcaactcttga

SEQ ID NO: 143421 - DNA, 25 bp, probe
actttggatttgctcggcttttgac

SEQ ID NO: 143422 - DNA, 25 bp, probe
actttggcacgtcacgggatggata

SEQ ID NO: 143423 - DNA, 25 bp, probe
acttcctgcacgagagggggatcat

SEQ ID NO: 143424 - DNA, 25 bp, probe
actattctaagaagggggatggtct

SEQ ID NO: 143425 - DNA, 25 bp, probe
actattcttaaagctgctgaagtgc

SEQ ID NO: 143426 - DNA, 25 bp, probe
actatatccgtaacctggatagtga

SEQ ID NO: 143427 - DNA, 25 bp, probe
acttatcggtgaatcattgatgaga

SEQ ID NO: 143428 - DNA, 25 bp, probe
actacctgttactattatctgtgct

SEQ ID NO: 143429 - DNA, 25 bp, probe
acatcacgtgcatttgctatgtgcc

SEQ ID NO: 143430 - DNA, 25 bp, probe
actacctcagctagctgttgcgtgg

SEQ ID NO: 143431 - DNA, 25 bp, probe
actacctagactggattcgtgacaa

SEQ ID NO: 143432 - DNA, 25 bp, probe
actacttggagtggatcagggaaac

SEQ ID NO: 143433 - DNA, 25 bp, probe
actacttggagtggatcagggaaac

SEQ ID NO: 143434 - DNA, 25 bp, probe
actacttcttggagcaaggcattat

SEQ ID NO: 143435 - DNA, 25 bp, probe
acatacttgtccctctaagtcattt

SEQ ID NO: 143436 - DNA, 25 bp, probe
actagctgttctgctcatatatgaa

SEQ ID NO: 143437 - DNA, 25 bp, probe
acttctggtcatgcttacactgata

SEQ ID NO: 143438 - DNA, 25 bp, probe
actattgtcattgttacattggcat

SEQ ID NO: 143439 - DNA, 25 bp, probe
actttagcaataattaattccatga

SEQ ID NO: 143440 - DNA, 25 bp, probe
acttttgtataggtagatgttcaga

SEQ ID NO: 143441 - DNA, 25 bp, probe
actttgggcttggctagatcactca

SEQ ID NO: 143442 - DNA, 25 bp, probe
actttggagttgtctaccacggaga

SEQ ID NO: 143443 - DNA, 25 bp, probe
actattcggtatctgaccatgtggt

SEQ ID NO: 143444 - DNA, 25 bp, probe
actttcttggtgcggcagagggtga

SEQ ID NO: 143445 - DNA, 25 bp, probe
acttcgtcgttggaggaggccggat

SEQ ID NO: 143446 - DNA, 25 bp, probe
acttgagggaccagagacccggcat

SEQ ID NO: 143447 - DNA, 25 bp, probe
acttctgctaaggagggacccgtgt

SEQ ID NO: 143448 - DNA, 25 bp, probe
acttcgggagctcggtaccagagtg

SEQ ID NO: 143449 - DNA, 25 bp, probe
actaccgcgacatggacatccagta

SEQ ID NO: 143450 - DNA, 25 bp, probe
actaccagctggttcgaaaattagg

SEQ ID NO: 143451 - DNA, 25 bp, probe
actaccagctggttcgaaaattagg

SEQ ID NO: 143452 - DNA, 25 bp, probe
acttctgactccttcaaaacttaag

SEQ ID NO: 143453 - DNA, 25 bp, probe
acttcgttcctgaatacaatcttga

SEQ ID NO: 143454 - DNA, 25 bp, probe
acttcgttcctgaatacaatcttga

SEQ ID NO: 143455 - DNA, 25 bp, probe
acttcgtctccaggcaacacaagga

SEQ ID NO: 143456 - DNA, 25 bp, probe
acttcgtctccaggcaacacaagga

SEQ ID NO: 143457 - DNA, 25 bp, probe
acttcactccctagccaacaggaga

SEQ ID NO: 143458 - DNA, 25 bp, probe
actatgacatccgggccgacgtatg

SEQ ID NO: 143459 - DNA, 25 bp, probe
actatgacatccgggccgacgtatg

SEQ ID NO: 143460 - DNA, 25 bp, probe
actatgacatccgggccgacgtatg

SEQ ID NO: 143461 - DNA, 25 bp, probe
actatgacatccgggccgacgtatg

SEQ ID NO: 143462 - DNA, 25 bp, probe
actatgactacctgcggaagctctt

SEQ ID NO: 143463 - DNA, 25 bp, probe
acatcataaacctcccataattttt

SEQ ID NO: 143464 - DNA, 25 bp, probe
actatcaagccctcaagaaaatttt

SEQ ID NO: 143465 - DNA, 25 bp, probe
acttcgaccagaggccaagaatttt

SEQ ID NO: 143466 - DNA, 25 bp, probe
actacgaccgggacaagctcttcgg

SEQ ID NO: 143467 - DNA, 25 bp, probe
actacgaccaggtgaagatcaagga

SEQ ID NO: 143468 - DNA, 25 bp, probe
acttcttccaggtgcaggagggcga

SEQ ID NO: 143469 - DNA, 25 bp, probe
actttataagtgtccgagagagagc

SEQ ID NO: 143470 - DNA, 25 bp, probe
acttattagagaacttggagagaaa

SEQ ID NO: 143471 - DNA, 25 bp, probe
acattttctggtactctgtgaaaga

SEQ ID NO: 143472 - DNA, 25 bp, probe
acatttgtttggaatcgtgccactg

SEQ ID NO: 143473 - DNA, 25 bp, probe
acatttttggagcatgcactgccag

SEQ ID NO: 143474 - DNA, 25 bp, probe
actttgttgtggcgagcctcatgtt

SEQ ID NO: 143475 - DNA, 25 bp, probe
acttcttgtgggagatactcagtat

SEQ ID NO: 143476 - DNA, 25 bp, probe
acttcttgtggttctgtaatgccaa

SEQ ID NO: 143477 - DNA, 25 bp, probe
acttcttgtggttctgtaatgccaa

SEQ ID NO: 143478 - DNA, 25 bp, probe
acttcattgcggactggtacgcaca

SEQ ID NO: 143479 - DNA, 25 bp, probe
acttcattgcggactggtacgcaca

SEQ ID NO: 143480 - DNA, 25 bp, probe
actatcttcaggatgccgtcagctg

SEQ ID NO: 143481 - DNA, 25 bp, probe
actatctaacatctggctgttgagt

SEQ ID NO: 143482 - DNA, 25 bp, probe
actttaacactctagctattcttcg

SEQ ID NO: 143483 - DNA, 25 bp, probe
actttaaaaatattttcatctctga

SEQ ID NO: 143484 - DNA, 25 bp, probe
actttgtaaattttgttctatatga

SEQ ID NO: 143485 - DNA, 25 bp, probe
actttgtaacaactgctattgtaat

SEQ ID NO: 143486 - DNA, 25 bp, probe
actagttacctcagaatttggattg

SEQ ID NO: 143487 - DNA, 25 bp, probe
actagattgactgaggaatgtatgt

SEQ ID NO: 143488 - DNA, 25 bp, probe
actacgtgatctgattgagatgtac

SEQ ID NO: 143489 - DNA, 25 bp, probe
acttctgtgagtggatgtatgatta

SEQ ID NO: 143490 - DNA, 25 bp, probe
acttctgtgagtggatgtatgatta

SEQ ID NO: 143491 - DNA, 25 bp, probe
acttcgtgcagtgggagatggaggt

SEQ ID NO: 143492 - DNA, 25 bp, probe
acttctggcgcatggtgtggcagga

SEQ ID NO: 143493 - DNA, 25 bp, probe
acttctggagaatggtctgggagca

SEQ ID NO: 143494 - DNA, 25 bp, probe
acttcaagagcaagttctcgggagc

SEQ ID NO: 143495 - DNA, 25 bp, probe
acttcaagagcaagttctcgggagc

SEQ ID NO: 143496 - DNA, 25 bp, probe
acttggagaagggtcctatggcagc

SEQ ID NO: 143497 - DNA, 25 bp, probe
acttggagaaggattactgtagatg

SEQ ID NO: 143498 - DNA, 25 bp, probe
acagctatggattggtttattgccg

SEQ ID NO: 143499 - DNA, 25 bp, probe
acagctatggattggtttattgccg

SEQ ID NO: 143500 - DNA, 25 bp, probe
acatgccgttggttttattggcagt

SEQ ID NO: 143501 - DNA, 25 bp, probe
acaggtgtcgactatttcattgtaa

SEQ ID NO: 143502 - DNA, 25 bp, probe
acatggctggccaagcaattattat

SEQ ID NO: 143503 - DNA, 25 bp, probe
actttgtggcaagattttcatgact

SEQ ID NO: 143504 - DNA, 25 bp, probe
actttaggatcagcagtgttgacca

SEQ ID NO: 143505 - DNA, 25 bp, probe
acttcgagtacagcagttataacta

SEQ ID NO: 143506 - DNA, 25 bp, probe
acttcgagcttcacactaataacaa

SEQ ID NO: 143507 - DNA, 25 bp, probe
acttgctagatgtcatcaagtacaa

SEQ ID NO: 143508 - DNA, 25 bp, probe
acttgctagatgtcatcaagtacaa

SEQ ID NO: 143509 - DNA, 25 bp, probe
actatggaaaatcagctgctcagca

SEQ ID NO: 143510 - DNA, 25 bp, probe
actagacaaataccagctccagcac

SEQ ID NO: 143511 - DNA, 25 bp, probe
actagacacaggtcactgccaagca

SEQ ID NO: 143512 - DNA, 25 bp, probe
actagaagcacttgccagctcagag

SEQ ID NO: 143513 - DNA, 25 bp, probe
actagacgccatggctgcattgaat

SEQ ID NO: 143514 - DNA, 25 bp, probe
actaggagccatgatctctcagatt

SEQ ID NO: 143515 - DNA, 25 bp, probe
actatctggcacatatgcgctcaat

SEQ ID NO: 143516 - DNA, 25 bp, probe
actagtggatccgagctcggtacca

SEQ ID NO: 143517 - DNA, 25 bp, probe
actagtgaactatcgtggctccacg

SEQ ID NO: 143518 - DNA, 25 bp, probe
actagtgatactactgggacccatg

SEQ ID NO: 143519 - DNA, 25 bp, probe
actatacagactacgtggctaccag

SEQ ID NO: 143520 - DNA, 25 bp, probe
actatacagcctactgtcgcagtcc

SEQ ID NO: 143521 - DNA, 25 bp, probe
acttcacagcccagcatgggggccc

SEQ ID NO: 143522 - DNA, 25 bp, probe
acttccacaagcccagggagtcacc

SEQ ID NO: 143523 - DNA, 25 bp, probe
acttccacaagcccagggagtcacc

SEQ ID NO: 143524 - DNA, 25 bp, probe
acttccaatacgacagccgaactct

SEQ ID NO: 143525 - DNA, 25 bp, probe
acttcacaacacggaattggccatt

SEQ ID NO: 143526 - DNA, 25 bp, probe
acttgcaatagagggaaaagccatt

SEQ ID NO: 143527 - DNA, 25 bp, probe
acttactagatctcatacaaggctt

SEQ ID NO: 143528 - DNA, 25 bp, probe
acttgtcaagtcgacatctaacgtt

SEQ ID NO: 143529 - DNA, 25 bp, probe
acatttcaaggcgcatgcacaacct

SEQ ID NO: 143530 - DNA, 25 bp, probe
acatttcaaggcgcatgcacaacct

SEQ ID NO: 143531 - DNA, 25 bp, probe
actttgcactgggctgtacgacagt

SEQ ID NO: 143532 - DNA, 25 bp, probe
acttccagctgtggatgaacaccgt

SEQ ID NO: 143533 - DNA, 25 bp, probe
acttcatccttcttgtaaccatatt

SEQ ID NO: 143534 - DNA, 25 bp, probe
actttccataatttaacacagcttc

SEQ ID NO: 143535 - DNA, 25 bp, probe
actttcctacatttgcataatctcc

SEQ ID NO: 143536 - DNA, 25 bp, probe
acttatgcatctctttgcaagaatc

SEQ ID NO: 143537 - DNA, 25 bp, probe
acttcagccgctattgcaagatgcc

SEQ ID NO: 143538 - DNA, 25 bp, probe
acttcctggtaactcaaggctacca

SEQ ID NO: 143539 - DNA, 25 bp, probe
acttcctggtaactcaaggctacca

SEQ ID NO: 143540 - DNA, 25 bp, probe
acttttagtgaccacgggctacatc

SEQ ID NO: 143541 - DNA, 25 bp, probe
actttcgaagcagccgtggctacta

SEQ ID NO: 143542 - DNA, 25 bp, probe
actttcgaagcagccgtggctacta

SEQ ID NO: 143543 - DNA, 25 bp, probe
acttttgaagatcccagtggtccca

SEQ ID NO: 143544 - DNA, 25 bp, probe
acttttgaagatcccagtggtccca

SEQ ID NO: 143545 - DNA, 25 bp, probe
acttcattgcaaacaccatggaatt

SEQ ID NO: 143546 - DNA, 25 bp, probe
actatattgcgagaaacagagatca

SEQ ID NO: 143547 - DNA, 25 bp, probe
actatattgcgagaaacagagatca

SEQ ID NO: 143548 - DNA, 25 bp, probe
actttgaccaggaaacagtgatcaa

SEQ ID NO: 143549 - DNA, 25 bp, probe
acttaaacagcctccagtcataaaa

SEQ ID NO: 143550 - DNA, 25 bp, probe
acttaaacagcctccagtcataaaa

SEQ ID NO: 143551 - DNA, 25 bp, probe
acttcattttcctccattatacaag

SEQ ID NO: 143552 - DNA, 25 bp, probe
actttttctactatccttgctaagt

SEQ ID NO: 143553 - DNA, 25 bp, probe
actatttttactaatctttctgcag

SEQ ID NO: 143554 - DNA, 25 bp, probe
acttccttaactgcacgatattcag

SEQ ID NO: 143555 - DNA, 25 bp, probe
actttctttgactgcactgagaatt

SEQ ID NO: 143556 - DNA, 25 bp, probe
acttttcttgtctgcgtgtaatgtt

SEQ ID NO: 143557 - DNA, 25 bp, probe
acttatcttatgccacgggaagttt

SEQ ID NO: 143558 - DNA, 25 bp, probe
acttattaatggtagatggacagat

SEQ ID NO: 143559 - DNA, 25 bp, probe
acattaaaatcatcagtgggcagaa

SEQ ID NO: 143560 - DNA, 25 bp, probe
acttcaggaacaagcgggcgctgct

SEQ ID NO: 143561 - DNA, 25 bp, probe
acatcatcaaggattcctgggtgct

SEQ ID NO: 143562 - DNA, 25 bp, probe
acattcacatcttttcgaccgtgct

SEQ ID NO: 143563 - DNA, 25 bp, probe
acttaatataattcgccacttctcc

SEQ ID NO: 143564 - DNA, 25 bp, probe
actttagagaacctgcctgagtctc

SEQ ID NO: 143565 - DNA, 25 bp, probe
acttacagagcgtcctggatgattt

SEQ ID NO: 143566 - DNA, 25 bp, probe
acttacaggcgtttcgagctgatcc

SEQ ID NO: 143567 - DNA, 25 bp, probe
actttctgtgggtctaatgtgatcc

SEQ ID NO: 143568 - DNA, 25 bp, probe
acttattttgtgcctagagctctca

SEQ ID NO: 143569 - DNA, 25 bp, probe
acatctttgtttccaaggttcttgg

SEQ ID NO: 143570 - DNA, 25 bp, probe
acttcttcaattccagagtttctga

SEQ ID NO: 143571 - DNA, 25 bp, probe
actatttcactaagagaggttatgc

SEQ ID NO: 143572 - DNA, 25 bp, probe
actatttcactaagagaggttatgc

SEQ ID NO: 143573 - DNA, 25 bp, probe
acttttccttgatagggtgctgcca

SEQ ID NO: 143574 - DNA, 25 bp, probe
acttcttcttaatagctgttcgcct

SEQ ID NO: 143575 - DNA, 25 bp, probe
acatttaattaacagctgagtccct

SEQ ID NO: 143576 - DNA, 25 bp, probe
acattaaataaccctgaagactcca

SEQ ID NO: 143577 - DNA, 25 bp, probe
aatgtagcaagtttcctaaggtaca

SEQ ID NO: 143578 - DNA, 25 bp, probe
acttacagacgcatcctcaaggtag

SEQ ID NO: 143579 - DNA, 25 bp, probe
acttccagacgccaggctacgagat

SEQ ID NO: 143580 - DNA, 25 bp, probe
acttgccatgaagcagtccaaagaa

SEQ ID NO: 143581 - DNA, 25 bp, probe
acatcttagcaagcaccaaaaaact

SEQ ID NO: 143582 - DNA, 25 bp, probe
acatcagtaccatcctcttagaaga

SEQ ID NO: 143583 - DNA, 25 bp, probe
actagtactgtgtactgtatagaca

SEQ ID NO: 143584 - DNA, 25 bp, probe
actatgtgaagtactgtgttgcaga

SEQ ID NO: 143585 - DNA, 25 bp, probe
actatgtgaagtactgtgttgcaga

SEQ ID NO: 143586 - DNA, 25 bp, probe
actattgaattcacgagcatcgatg

SEQ ID NO: 143587 - DNA, 25 bp, probe
acttcgaattctactgactcgaccc

SEQ ID NO: 143588 - DNA, 25 bp, probe
acttcgatgatgaatttaccgccca

SEQ ID NO: 143589 - DNA, 25 bp, probe
actttgcatgtgactattttcccct

SEQ ID NO: 143590 - DNA, 25 bp, probe
actttctggtcactttgtacaatgt

SEQ ID NO: 143591 - DNA, 25 bp, probe
actttcaatgaccttttgtgcatct

SEQ ID NO: 143592 - DNA, 25 bp, probe
acatcattgcacacctgtttaactt

SEQ ID NO: 143593 - DNA, 25 bp, probe
acatcccagcctgtggttacagtgc

SEQ ID NO: 143594 - DNA, 25 bp, probe
acaccctgagtgagacattaaagta

SEQ ID NO: 143595 - DNA, 25 bp, probe
acttgctcgggttcaattaaaggca

SEQ ID NO: 143596 - DNA, 25 bp, probe
acttctcccactgcatgataaaagt

SEQ ID NO: 143597 - DNA, 25 bp, probe
actttctcacctctgttgaaacatt

SEQ ID NO: 143598 - DNA, 25 bp, probe
acattgatctacctcttgggaaaga

SEQ ID NO: 143599 - DNA, 25 bp, probe
actatatctcaactttgtgtcaaag

SEQ ID NO: 143600 - DNA, 25 bp, probe
actatatctcaactttgtgtcaaag

SEQ ID NO: 143601 - DNA, 25 bp, probe
acttgttcgcacgttgtttagggtg

SEQ ID NO: 143602 - DNA, 25 bp, probe
acattttctaccagtcctacgagga

SEQ ID NO: 143603 - DNA, 25 bp, probe
acatttgttaggctggcctccggag

SEQ ID NO: 143604 - DNA, 25 bp, probe
acatttgttaggctggcctccggag

SEQ ID NO: 143605 - DNA, 25 bp, probe
actttgtgctagtcctggcactgct

SEQ ID NO: 143606 - DNA, 25 bp, probe
acttctggatggtcagcggttgcgt

SEQ ID NO: 143607 - DNA, 25 bp, probe
actttgagcatggaagaggattctg

SEQ ID NO: 143608 - DNA, 25 bp, probe
acttatggagcaccaaagcatttgg

SEQ ID NO: 143609 - DNA, 25 bp, probe
acttagggctaggaacattctgctg

SEQ ID NO: 143610 - DNA, 25 bp, probe
actataaggctagtacctgctttgt

SEQ ID NO: 143611 - DNA, 25 bp, probe
acttcaaggccaatgacacgctggg

SEQ ID NO: 143612 - DNA, 25 bp, probe
acttcaccactcaagaactgtcaag

SEQ ID NO: 143613 - DNA, 25 bp, probe
actttccacatatagagctccaggg

SEQ ID NO: 143614 - DNA, 25 bp, probe
actttactccataagcgcttcagtg

SEQ ID NO: 143615 - DNA, 25 bp, probe
acttgtacttcattgtgctggtccg

SEQ ID NO: 143616 - DNA, 25 bp, probe
acttgagtttgctagatctggtcag

SEQ ID NO: 143617 - DNA, 25 bp, probe
acatagagcgtgacggcactgagtc

SEQ ID NO: 143618 - DNA, 25 bp, probe
actatgaggctgcgaaggcagatgc

SEQ ID NO: 143619 - DNA, 25 bp, probe
acttgatcctgcgtaaccagatcca

SEQ ID NO: 143620 - DNA, 25 bp, probe
acttcactgctacagagccacagta

SEQ ID NO: 143621 - DNA, 25 bp, probe
acttcactgctacagagccacagta

SEQ ID NO: 143622 - DNA, 25 bp, probe
acttcctatgcaaggcagtccatgt

SEQ ID NO: 143623 - DNA, 25 bp, probe
actttgctgcaaaacatgtacattt

SEQ ID NO: 143624 - DNA, 25 bp, probe
acttgtcaaattacaatcacagtta

SEQ ID NO: 143625 - DNA, 25 bp, probe
acttgatcataagccagtgacagtt

SEQ ID NO: 143626 - DNA, 25 bp, probe
acttactgcaatgctcgctggagaa

SEQ ID NO: 143627 - DNA, 25 bp, probe
acttatcgagatgtgccattagaag

SEQ ID NO: 143628 - DNA, 25 bp, probe
acttcatgcggtggtcaccaaggag

SEQ ID NO: 143629 - DNA, 25 bp, probe
cggcaagtgaggatgcagtccagcc

SEQ ID NO: 143630 - DNA, 25 bp, probe
acttcccatctggctcagcataggg

SEQ ID NO: 143631 - DNA, 25 bp, probe
actttgcctcagttgagcatctagg

SEQ ID NO: 143632 - DNA, 25 bp, probe
actttgccgcccgagatatgaggga

SEQ ID NO: 143633 - DNA, 25 bp, probe
gattttgccggctggttgtgtaaaa

SEQ ID NO: 143634 - DNA, 25 bp, probe
gattttgccggctggttgtgtaaaa

SEQ ID NO: 143635 - DNA, 25 bp, probe
actttcgctggatggttttaggata

SEQ ID NO: 143636 - DNA, 25 bp, probe
acttcactgctccaaggcttttgag

SEQ ID NO: 143637 - DNA, 25 bp, probe
acttcactgctccaaggcttttgag

SEQ ID NO: 143638 - DNA, 25 bp, probe
acatatgcctgagaacctttgcatg

SEQ ID NO: 143639 - DNA, 25 bp, probe
acattgcactagtcaactggattga

SEQ ID NO: 143640 - DNA, 25 bp, probe
acttatctcccatatgagagtgtga

SEQ ID NO: 143641 - DNA, 25 bp, probe
acttttcaactttgagcagctatag

SEQ ID NO: 143642 - DNA, 25 bp, probe
acttttctatctgagcgcatctatc

SEQ ID NO: 143643 - DNA, 25 bp, probe
acttttctatctgagcgcatctatc

SEQ ID NO: 143644 - DNA, 25 bp, probe
actttgacttcgtactgtctttcac

SEQ ID NO: 143645 - DNA, 25 bp, probe
actattttgtctgccatgtcattta

SEQ ID NO: 143646 - DNA, 25 bp, probe
actatttatgtaacactttgtatat

SEQ ID NO: 143647 - DNA, 25 bp, probe
acttttgtgaacgcttctgccacat

SEQ ID NO: 143648 - DNA, 25 bp, probe
actttctgataacagctctcttcct

SEQ ID NO: 143649 - DNA, 25 bp, probe
actatttttcagaatctctcttctt

SEQ ID NO: 143650 - DNA, 25 bp, probe
acttctttatcaagcatccatctga

SEQ ID NO: 143651 - DNA, 25 bp, probe
acttgtgtccatggagcatccttct

SEQ ID NO: 143652 - DNA, 25 bp, probe
actttgtcaagctcatttcctggta

SEQ ID NO: 143653 - DNA, 25 bp, probe
actttgtcaatagttttctcattgc

SEQ ID NO: 143654 - DNA, 25 bp, probe
actttggagctctgtctttcattgt

SEQ ID NO: 143655 - DNA, 25 bp, probe
acatttgggccagctaaacatgctt

SEQ ID NO: 143656 - DNA, 25 bp, probe
acttcagagtgcagtctacaacttc

SEQ ID NO: 143657 - DNA, 25 bp, probe
acttcagagtgcagtctacaacttc

SEQ ID NO: 143658 - DNA, 25 bp, probe
acttcagagcatgtgctccagcaag

SEQ ID NO: 143659 - DNA, 25 bp, probe
actttagcatgcagagcagcaaaga

SEQ ID NO: 143660 - DNA, 25 bp, probe
acttagatgagatagcgcataataa

SEQ ID NO: 143661 - DNA, 25 bp, probe
acttggtcaacaggatgcaaatgaa

SEQ ID NO: 143662 - DNA, 25 bp, probe
acttagtccatgtgatgcgcacatt

SEQ ID NO: 143663 - DNA, 25 bp, probe
actttgatactgctcatgctgactt

SEQ ID NO: 143664 - DNA, 25 bp, probe
acttttatgtgtctcagaatatttt

SEQ ID NO: 143665 - DNA, 25 bp, probe
actttctatgcaatgttcaggataa

SEQ ID NO: 143666 - DNA, 25 bp, probe
actttctatgcaatgttcaggataa

SEQ ID NO: 143667 - DNA, 25 bp, probe
acttgcatgtgcacagcttctggta

SEQ ID NO: 143668 - DNA, 25 bp, probe
actattgtgatgactctttggagag

SEQ ID NO: 143669 - DNA, 25 bp, probe
acattggagatattcagtattgagc

SEQ ID NO: 143670 - DNA, 25 bp, probe
actttggcatcattcagtcttcact

SEQ ID NO: 143671 - DNA, 25 bp, probe
acattatcgcaactcagtcaacagg

SEQ ID NO: 143672 - DNA, 25 bp, probe
acattatcgcaactcagtcaacagg

SEQ ID NO: 143673 - DNA, 25 bp, probe
acatgtatcagatgctgagacacat

SEQ ID NO: 143674 - DNA, 25 bp, probe
acttcatcatgctgcagaacaacga

SEQ ID NO: 143675 - DNA, 25 bp, probe
acttcatagcaccaacagagatgta

SEQ ID NO: 143676 - DNA, 25 bp, probe
acttcaagacgctggctgatgtact

SEQ ID NO: 143677 - DNA, 25 bp, probe
acttcaggtgccaggctgaggagct

SEQ ID NO: 143678 - DNA, 25 bp, probe
actatagtggctgccagtagcagac

SEQ ID NO: 143679 - DNA, 25 bp, probe
acttttggcagcaatcagcacggac

SEQ ID NO: 143680 - DNA, 25 bp, probe
acttcttggagcaaggcattatacc

SEQ ID NO: 143681 - DNA, 25 bp, probe
acattctggggaagactattccaga

SEQ ID NO: 143682 - DNA, 25 bp, probe
catccttggactaaggtcttccgac

SEQ ID NO: 143683 - DNA, 25 bp, probe
catccttggactaaggtcttccgac

SEQ ID NO: 143684 - DNA, 25 bp, probe
acttctggactcaagtgatcctccc

SEQ ID NO: 143685 - DNA, 25 bp, probe
actttgatgacaacagcgtctcccc

SEQ ID NO: 143686 - DNA, 25 bp, probe
actttgatgacaacagcgtctcccc

SEQ ID NO: 143687 - DNA, 25 bp, probe
actttaacagggtatgctgcctctg

SEQ ID NO: 143688 - DNA, 25 bp, probe
acttctacgcaggagccctcctgct

SEQ ID NO: 143689 - DNA, 25 bp, probe
acatccttcaaggactgctttctcc

SEQ ID NO: 143690 - DNA, 25 bp, probe
acttcttcagtggatcatcacagtt

SEQ ID NO: 143691 - DNA, 25 bp, probe
acttcagtcaggttcagcactttgg

SEQ ID NO: 143692 - DNA, 25 bp, probe
acatatagctcagatggaatgcttt

SEQ ID NO: 143693 - DNA, 25 bp, probe
acatagaaccgaaaagctggtcatt

SEQ ID NO: 143694 - DNA, 25 bp, probe
acatagaaccgaaaagctggtcatt

SEQ ID NO: 143695 - DNA, 25 bp, probe
acataaaccctccaagggatctgct

SEQ ID NO: 143696 - DNA, 25 bp, probe
acattttccctgccaaggagaatgg

SEQ ID NO: 143697 - DNA, 25 bp, probe
acttgattacctccattcggagaag

SEQ ID NO: 143698 - DNA, 25 bp, probe
acttcttcacaatctattggacaag

SEQ ID NO: 143699 - DNA, 25 bp, probe
acttttctcagttctacttatgaca

SEQ ID NO: 143700 - DNA, 25 bp, probe
acttttctcagttctacttatgaca

SEQ ID NO: 143701 - DNA, 25 bp, probe
acttccctgagttttgcttattcac

SEQ ID NO: 143702 - DNA, 25 bp, probe
acttctagttgctcttgctttggtc

SEQ ID NO: 143703 - DNA, 25 bp, probe
actttcacttgaatcttgctgctaa

SEQ ID NO: 143704 - DNA, 25 bp, probe
acttgcccatctagcactttggaaa

SEQ ID NO: 143705 - DNA, 25 bp, probe
acttaccacatcaaatctgggccca

SEQ ID NO: 143706 - DNA, 25 bp, probe
acttcagccaagcagattccagtcc

SEQ ID NO: 143707 - DNA, 25 bp, probe
acttcacacagacaagtggctaagt

SEQ ID NO: 143708 - DNA, 25 bp, probe
acttcacacagacaagtggctaagt

SEQ ID NO: 143709 - DNA, 25 bp, probe
acttacaataagggtactatatgtg

SEQ ID NO: 143710 - DNA, 25 bp, probe
acttacaaagaggtgctcagcttca

SEQ ID NO: 143711 - DNA, 25 bp, probe
acttcaatgagacggtgctcactgt

SEQ ID NO: 143712 - DNA, 25 bp, probe
acttcaatgagacggtgctcactgt

SEQ ID NO: 143713 - DNA, 25 bp, probe
acattcttgaaggggttctgtgtct

SEQ ID NO: 143714 - DNA, 25 bp, probe
actttcatgtggtaggttctttctc

SEQ ID NO: 143715 - DNA, 25 bp, probe
actttcactggctctgtttgtacat

SEQ ID NO: 143716 - DNA, 25 bp, probe
actttcctgagatgcacttacttct

SEQ ID NO: 143717 - DNA, 25 bp, probe
actttttcaggacatgctatcttct

SEQ ID NO: 143718 - DNA, 25 bp, probe
actttttcacagcagattaccattt

SEQ ID NO: 143719 - DNA, 25 bp, probe
acatttttgaacaatttacctgtca

SEQ ID NO: 143720 - DNA, 25 bp, probe
acattgtttatatcagttcacccgt

SEQ ID NO: 143721 - DNA, 25 bp, probe
acattttccacaacttttgacctgt

SEQ ID NO: 143722 - DNA, 25 bp, probe
acatttgtctcctggtttacgagat

SEQ ID NO: 143723 - DNA, 25 bp, probe
acactgtttcctccgttatacaagg

SEQ ID NO: 143724 - DNA, 25 bp, probe
acatctttgtccacgtttaatactt

SEQ ID NO: 143725 - DNA, 25 bp, probe
cacattgtttccaccatttactcaa

SEQ ID NO: 143726 - DNA, 25 bp, probe
cacattgtttccaccatttactcaa

SEQ ID NO: 143727 - DNA, 25 bp, probe
acttgtgaagccagccaattaataa

SEQ ID NO: 143728 - DNA, 25 bp, probe
acttgtcagaggtggaaacactaca

SEQ ID NO: 143729 - DNA, 25 bp, probe
actttctgcaggtttaacataatac

SEQ ID NO: 143730 - DNA, 25 bp, probe
actttctgcaggtttaacataatac

SEQ ID NO: 143731 - DNA, 25 bp, probe
acttgtggcgtcttataaataatgc

SEQ ID NO: 143732 - DNA, 25 bp, probe
acttgtggcgtcttataaataatgc

SEQ ID NO: 143733 - DNA, 25 bp, probe
acttgatgtaacctggaaactatgc

SEQ ID NO: 143734 - DNA, 25 bp, probe
acttgtgtgattgtgggaaattact

SEQ ID NO: 143735 - DNA, 25 bp, probe
acttgttgtacatctgaataattat

SEQ ID NO: 143736 - DNA, 25 bp, probe
acttcatctgtactgcttgaataca

SEQ ID NO: 143737 - DNA, 25 bp, probe
acttcatctgtactgcttgaataca

SEQ ID NO: 143738 - DNA, 25 bp, probe
acttgtctctgggcttggatgacag

SEQ ID NO: 143739 - DNA, 25 bp, probe
acttggtctgcagtctggaagcttg

SEQ ID NO: 143740 - DNA, 25 bp, probe
acttttctgctcaggacagcagtgg

SEQ ID NO: 143741 - DNA, 25 bp, probe
acttttctgtccctactgtgatgaa

SEQ ID NO: 143742 - DNA, 25 bp, probe
actttctctttgcataataatgtac

SEQ ID NO: 143743 - DNA, 25 bp, probe
actttcctctgtcaactcatttgac

SEQ ID NO: 143744 - DNA, 25 bp, probe
acttccttcatgtaagactttggcc

SEQ ID NO: 143745 - DNA, 25 bp, probe
acttacctgcttgagctttctgtgc

SEQ ID NO: 143746 - DNA, 25 bp, probe
acttccaacttgtgttctcagtgca

SEQ ID NO: 143747 - DNA, 25 bp, probe
actttatattttgtatcatcgtgcc

SEQ ID NO: 143748 - DNA, 25 bp, probe
actttaatgtacttctatcactgca

SEQ ID NO: 143749 - DNA, 25 bp, probe
actttgataaaattcatagcacagt

SEQ ID NO: 143750 - DNA, 25 bp, probe
acattcttaacattgcagcaatcac

SEQ ID NO: 143751 - DNA, 25 bp, probe
acttgtacagtattgccatgaacca

SEQ ID NO: 143752 - DNA, 25 bp, probe
acttgcttcagtcatcctgaacctg

SEQ ID NO: 143753 - DNA, 25 bp, probe
acttcatatagcccattttaacttg

SEQ ID NO: 143754 - DNA, 25 bp, probe
acttcatatagcccattttaacttg

SEQ ID NO: 143755 - DNA, 25 bp, probe
acttctaatgtatttctcttacctg

SEQ ID NO: 143756 - DNA, 25 bp, probe
acatttccatgtatgtccttacatt

SEQ ID NO: 143757 - DNA, 25 bp, probe
acatttaatccaatggtttatgcat

SEQ ID NO: 143758 - DNA, 25 bp, probe
acatttaatccaatggtttatgcat

SEQ ID NO: 143759 - DNA, 25 bp, probe
actttaaagtgttgtctattgcata

SEQ ID NO: 143760 - DNA, 25 bp, probe
acttctcacaaactttctagtgaac

SEQ ID NO: 143761 - DNA, 25 bp, probe
acttacacactctttttgattgaac

SEQ ID NO: 143762 - DNA, 25 bp, probe
acttatgtcctattgttttgtgaat

SEQ ID NO: 143763 - DNA, 25 bp, probe
acttatgtcctattgttttgtgaat

SEQ ID NO: 143764 - DNA, 25 bp, probe
acttactgactttgcattttcgttt

SEQ ID NO: 143765 - DNA, 25 bp, probe
acatctacaactaatctttcccatc

SEQ ID NO: 143766 - DNA, 25 bp, probe
acatctacaactaatctttcccatc

SEQ ID NO: 143767 - DNA, 25 bp, probe
actttcacatcaacctctttcaagt

SEQ ID NO: 143768 - DNA, 25 bp, probe
actttcacatcaacctctttcaagt

SEQ ID NO: 143769 - DNA, 25 bp, probe
acttacctgagacctagttccagct

SEQ ID NO: 143770 - DNA, 25 bp, probe
acttccctgggttagactgccagct

SEQ ID NO: 143771 - DNA, 25 bp, probe
acttccctgggttagactgccagct

SEQ ID NO: 143772 - DNA, 25 bp, probe
acttggcctgagttaggcctgcccg

SEQ ID NO: 143773 - DNA, 25 bp, probe
acttggcctgagttaggcctgcccg

SEQ ID NO: 143774 - DNA, 25 bp, probe
acttgaggtgctttatgtggtcccc

SEQ ID NO: 143775 - DNA, 25 bp, probe
acttcagtctctttgatgtggtcct

SEQ ID NO: 143776 - DNA, 25 bp, probe
acttcaagctcatgtttgaccgctc

SEQ ID NO: 143777 - DNA, 25 bp, probe
acttatcaccattcttatgtcactt

SEQ ID NO: 143778 - DNA, 25 bp, probe
acttgatccaactttatgatgcgtt

SEQ ID NO: 143779 - DNA, 25 bp, probe
acttgatccaactttatgatgcgtt

SEQ ID NO: 143780 - DNA, 25 bp, probe
acttgatgtcaattctaactgtgtt

SEQ ID NO: 143781 - DNA, 25 bp, probe
acttggtaaatggcttgtggatgtt

SEQ ID NO: 143782 - DNA, 25 bp, probe
acttgagaaagttgttgtggtgttg

SEQ ID NO: 143783 - DNA, 25 bp, probe
acattaaatggttgatttggggagg

SEQ ID NO: 143784 - DNA, 25 bp, probe
acttccagcttttgatcttggggcc

SEQ ID NO: 143785 - DNA, 25 bp, probe
acattggaacttgtccatggggcct

SEQ ID NO: 143786 - DNA, 25 bp, probe
acatttgatcacagtttagaggcac

SEQ ID NO: 143787 - DNA, 25 bp, probe
acattctgatcctgtcagtcaggga

SEQ ID NO: 143788 - DNA, 25 bp, probe
acttcgctattcccaggcagggagg

SEQ ID NO: 143789 - DNA, 25 bp, probe
acttcgctattcccaggcagggagg

SEQ ID NO: 143790 - DNA, 25 bp, probe
acttctcaaatcacactcagtctga

SEQ ID NO: 143791 - DNA, 25 bp, probe
acttctcaaatcacactcagtctga

SEQ ID NO: 143792 - DNA, 25 bp, probe
acttctaagtctgatctgagatcta

SEQ ID NO: 143793 - DNA, 25 bp, probe
acttaaactcattccatatgcatct

SEQ ID NO: 143794 - DNA, 25 bp, probe
acttacatcctcttcagattgcttt

SEQ ID NO: 143795 - DNA, 25 bp, probe
actttcacttcagagtgtcatgttt

SEQ ID NO: 143796 - DNA, 25 bp, probe
acttttctctcagttgggatgcttc

SEQ ID NO: 143797 - DNA, 25 bp, probe
actttattccagcattcgatgcatt

SEQ ID NO: 143798 - DNA, 25 bp, probe
acttttagccagaaatcagtctcat

SEQ ID NO: 143799 - DNA, 25 bp, probe
acttttggccaaaactcctgatgaa

SEQ ID NO: 143800 - DNA, 25 bp, probe
actttattataaaatgctcctagaa

SEQ ID NO: 143801 - DNA, 25 bp, probe
actttacaacacaattgcatcccaa

SEQ ID NO: 143802 - DNA, 25 bp, probe
actttaccatatgttgctccagaac

SEQ ID NO: 143803 - DNA, 25 bp, probe
acttttcctatgtgtctccagaatt

SEQ ID NO: 143804 - DNA, 25 bp, probe
actttatctgggtgtctcgcaccat

SEQ ID NO: 143805 - DNA, 25 bp, probe
acttcatccgggaggtcaatgccat

SEQ ID NO: 143806 - DNA, 25 bp, probe
actttcagcaggctgtctgctcaac

SEQ ID NO: 143807 - DNA, 25 bp, probe
acttcatcggccaagtccataaaac

SEQ ID NO: 143808 - DNA, 25 bp, probe
acttgatcaggtcaggccaaataaa

SEQ ID NO: 143809 - DNA, 25 bp, probe
acttctcagcttctgcgatcagatt

SEQ ID NO: 143810 - DNA, 25 bp, probe
acttgctggattcatgcagccagct

SEQ ID NO: 143811 - DNA, 25 bp, probe
acttctggactggtcagcagtgcct

SEQ ID NO: 143812 - DNA, 25 bp, probe
acttgcattgtcattagatgtccag

SEQ ID NO: 143813 - DNA, 25 bp, probe
actttttctttattgtcacattcat

SEQ ID NO: 143814 - DNA, 25 bp, probe
acttttccatttgcatgtacagtca

SEQ ID NO: 143815 - DNA, 25 bp, probe
acttttgcccttccatgactaataa

SEQ ID NO: 143816 - DNA, 25 bp, probe
acttttgcccttccatgactaataa

SEQ ID NO: 143817 - DNA, 25 bp, probe
acttttggttttagatgccacaaag

SEQ ID NO: 143818 - DNA, 25 bp, probe
acttggtggactctgttgctaaaac

SEQ ID NO: 143819 - DNA, 25 bp, probe
acattttggaatagtgtttatggaa

SEQ ID NO: 143820 - DNA, 25 bp, probe
acatttggacaagacatttctgaaa

SEQ ID NO: 143821 - DNA, 25 bp, probe
acatttccactataattttacaaag

SEQ ID NO: 143822 - DNA, 25 bp, probe
aatttccactagagttttgccctca

SEQ ID NO: 143823 - DNA, 25 bp, probe
acttaccaattgatgttttacgtgc

SEQ ID NO: 143824 - DNA, 25 bp, probe
acttctggaactactttatctacgg

SEQ ID NO: 143825 - DNA, 25 bp, probe
acttcttgcttctcattttgctaag

SEQ ID NO: 143826 - DNA, 25 bp, probe
acttttcattcatcattatcgttgt

SEQ ID NO: 143827 - DNA, 25 bp, probe
acttctctgtgttaattgtaatatt

SEQ ID NO: 143828 - DNA, 25 bp, probe
acttgctttgattgaatgtggaatg

SEQ ID NO: 143829 - DNA, 25 bp, probe
actttatctattcctgtgctggatg

SEQ ID NO: 143830 - DNA, 25 bp, probe
actttatctattcctgtgctggatg

SEQ ID NO: 143831 - DNA, 25 bp, probe
acatcttactgagcactctcgagat

SEQ ID NO: 143832 - DNA, 25 bp, probe
acaggaacatgagacttcgcaaatc

SEQ ID NO: 143833 - DNA, 25 bp, probe
acttgatccacacacttgcacaaat

SEQ ID NO: 143834 - DNA, 25 bp, probe
acttcagcatccacaactacaaatc

SEQ ID NO: 143835 - DNA, 25 bp, probe
acttcagcttccgaacaacagaaag

SEQ ID NO: 143836 - DNA, 25 bp, probe
acttcagcttccgaacaacagaaag

SEQ ID NO: 143837 - DNA, 25 bp, probe
acttcagctctcgcaacatcaagat

SEQ ID NO: 143838 - DNA, 25 bp, probe
acttcatgctctgataactgccttt

SEQ ID NO: 143839 - DNA, 25 bp, probe
acttcagtgctggtgaactctccat

SEQ ID NO: 143840 - DNA, 25 bp, probe
acttcattctcactgcaatctatca

SEQ ID NO: 143841 - DNA, 25 bp, probe
acttgctcatcccacatgactgtgg

SEQ ID NO: 143842 - DNA, 25 bp, probe
acttgctcatcccacatgactgtgg

SEQ ID NO: 143843 - DNA, 25 bp, probe
acattccatgacgcaggagctgtgg

SEQ ID NO: 143844 - DNA, 25 bp, probe
acttccaggcccacagcatggggct

SEQ ID NO: 143845 - DNA, 25 bp, probe
acttcactgtctacaaccagcgggt

SEQ ID NO: 143846 - DNA, 25 bp, probe
acatacttctctgcaacttgttgag

SEQ ID NO: 143847 - DNA, 25 bp, probe
acataccacctaacactcgagttgg

SEQ ID NO: 143848 - DNA, 25 bp, probe
acatccctaatatcacagggcttgt

SEQ ID NO: 143849 - DNA, 25 bp, probe
acatccctaatatcacagggcttgt

SEQ ID NO: 143850 - DNA, 25 bp, probe
acatccagaagctattacatgtggt

SEQ ID NO: 143851 - DNA, 25 bp, probe
acatccttggcaattcagctgccct

SEQ ID NO: 143852 - DNA, 25 bp, probe
acatctcatatggaattgaaccgat

SEQ ID NO: 143853 - DNA, 25 bp, probe
acatgtcctgcacagtcaacacggt

SEQ ID NO: 143854 - DNA, 25 bp, probe
acattactgcagagaaacacggaaa

SEQ ID NO: 143855 - DNA, 25 bp, probe
acatagaccaggcccagaatcgaat

SEQ ID NO: 143856 - DNA, 25 bp, probe
acataaagcagtcaggaatccacat

SEQ ID NO: 143857 - DNA, 25 bp, probe
acatatagcctattataaatccctg

SEQ ID NO: 143858 - DNA, 25 bp, probe
acatatagcctattataaatccctg

SEQ ID NO: 143859 - DNA, 25 bp, probe
acttacccaggtagatatctccgaa

SEQ ID NO: 143860 - DNA, 25 bp, probe
acttacccaggtagatatctccgaa

SEQ ID NO: 143861 - DNA, 25 bp, probe
acttctccaagggcaacatcgccga

SEQ ID NO: 143862 - DNA, 25 bp, probe
acttctctctaaggagaatggccca

SEQ ID NO: 143863 - DNA, 25 bp, probe
acttgcttcatgcttgagaatgcag

SEQ ID NO: 143864 - DNA, 25 bp, probe
acttgcttcatgcttgagaatgcag

SEQ ID NO: 143865 - DNA, 25 bp, probe
acttgcaccagcgtctggaagggca

SEQ ID NO: 143866 - DNA, 25 bp, probe
acttcccaggtaagcaggaggaggt

SEQ ID NO: 143867 - DNA, 25 bp, probe
acttcccaggtaagcaggaggaggt

SEQ ID NO: 143868 - DNA, 25 bp, probe
acactcccgactaagcgtgcgaggg

SEQ ID NO: 143869 - DNA, 25 bp, probe
acatccggggctatggtggggagga

SEQ ID NO: 143870 - DNA, 25 bp, probe
acatcctggtagctgaggggcggaa

SEQ ID NO: 143871 - DNA, 25 bp, probe
acatcctggtctcagaggacctggt

SEQ ID NO: 143872 - DNA, 25 bp, probe
acatcctggtctcagaggacctggt

SEQ ID NO: 143873 - DNA, 25 bp, probe
acattgttctctcaaagactttgta

SEQ ID NO: 143874 - DNA, 25 bp, probe
acatcagattgttaagggcattttt

SEQ ID NO: 143875 - DNA, 25 bp, probe
acatcagttcttctcccatagaggt

SEQ ID NO: 143876 - DNA, 25 bp, probe
acttggtcattgtgcccaagatgct

SEQ ID NO: 143877 - DNA, 25 bp, probe
acttgggcaaggcgatgcaggtcca

SEQ ID NO: 143878 - DNA, 25 bp, probe
acttggtcatgcagctggatcaggt

SEQ ID NO: 143879 - DNA, 25 bp, probe
acttggctcagctgtatgaaggttg

SEQ ID NO: 143880 - DNA, 25 bp, probe
acttggctcagctgtatgaaggttg

SEQ ID NO: 143881 - DNA, 25 bp, probe
acttggcccaagtttatggcctgga

SEQ ID NO: 143882 - DNA, 25 bp, probe
acttggataaagttccagagcctgg

SEQ ID NO: 143883 - DNA, 25 bp, probe
acttcatgtaaactacccatgccgt

SEQ ID NO: 143884 - DNA, 25 bp, probe
acttcttcgatagttacctgcacgt

SEQ ID NO: 143885 - DNA, 25 bp, probe
acttctctctcctttacgagacgaa

SEQ ID NO: 143886 - DNA, 25 bp, probe
acatatctcttatcttacgaaaaaa

SEQ ID NO: 143887 - DNA, 25 bp, probe
cactagcgtacatctaaggaaaacc

SEQ ID NO: 143888 - DNA, 25 bp, probe
acaaggtggagacaataggggacgc

SEQ ID NO: 143889 - DNA, 25 bp, probe
acagaggtaggagaactggggttca

SEQ ID NO: 143890 - DNA, 25 bp, probe
acatgggtggtcccacagcatggga

SEQ ID NO: 143891 - DNA, 25 bp, probe
acatggtcagttccccagtgggaat

SEQ ID NO: 143892 - DNA, 25 bp, probe
acaggtacctggtgtgccagcgaaa

SEQ ID NO: 143893 - DNA, 25 bp, probe
acaggtacctggtgtgccagcgaaa

SEQ ID NO: 143894 - DNA, 25 bp, probe
acatgtggacttcagtgtcgccgta

SEQ ID NO: 143895 - DNA, 25 bp, probe
acttgggtgctatgattcaccaaaa

SEQ ID NO: 143896 - DNA, 25 bp, probe
acttgggctctggagatgtaaacag

SEQ ID NO: 143897 - DNA, 25 bp, probe
acttgtccctctaagtcatttagcc

SEQ ID NO: 143898 - DNA, 25 bp, probe
acttgttctttgttggcattttcga

SEQ ID NO: 143899 - DNA, 25 bp, probe
acttgtttgtgtttgaattgatttt

SEQ ID NO: 143900 - DNA, 25 bp, probe
acttgctttttccagagttatttat

SEQ ID NO: 143901 - DNA, 25 bp, probe
acattgttttatcaagtcactgtta

SEQ ID NO: 143902 - DNA, 25 bp, probe
acttgtaatttctaactccttatgt

SEQ ID NO: 143903 - DNA, 25 bp, probe
acttgcataattatatactccttaa

SEQ ID NO: 143904 - DNA, 25 bp, probe
acttgtcaattactaccctttcaca

SEQ ID NO: 143905 - DNA, 25 bp, probe
acttgtgcacttagtagtttttaca

SEQ ID NO: 143906 - DNA, 25 bp, probe
acatgttgccttaaagggttatcta

SEQ ID NO: 143907 - DNA, 25 bp, probe
acacgtacatccaaagccggttcta

SEQ ID NO: 143908 - DNA, 25 bp, probe
aactgacacagtaaacttggttgga

SEQ ID NO: 143909 - DNA, 25 bp, probe
aactgacacagtaaacttggttgga

SEQ ID NO: 143910 - DNA, 25 bp, probe
acattatgacagttaagcgggttgg

SEQ ID NO: 143911 - DNA, 25 bp, probe
acttcatgtgagctattggagtttt

SEQ ID NO: 143912 - DNA, 25 bp, probe
acttcaaagtgattctggagttctt

SEQ ID NO: 143913 - DNA, 25 bp, probe
acttcaaggtgttgcttatctccat

SEQ ID NO: 143914 - DNA, 25 bp, probe
acttcacagggttcacatggtccag

SEQ ID NO: 143915 - DNA, 25 bp, probe
acttcacagatttgtccaggctgcc

SEQ ID NO: 143916 - DNA, 25 bp, probe
acttcacagatttgtccaggctgcc

SEQ ID NO: 143917 - DNA, 25 bp, probe
acttcagatgtttccaagatgtccc

SEQ ID NO: 143918 - DNA, 25 bp, probe
acttggctcataatacaagcttcct

SEQ ID NO: 143919 - DNA, 25 bp, probe
acatatgcgctcaataaacgtgttt

SEQ ID NO: 143920 - DNA, 25 bp, probe
acaaccccaatccacgttttggatg

SEQ ID NO: 143921 - DNA, 25 bp, probe
acaaccccaatccacgttttggatg

SEQ ID NO: 143922 - DNA, 25 bp, probe
acatgaaccagatctacggtttcga

SEQ ID NO: 143923 - DNA, 25 bp, probe
acatcaagatattttccggctttat

SEQ ID NO: 143924 - DNA, 25 bp, probe
acatccaaattttgctcgattttat

SEQ ID NO: 143925 - DNA, 25 bp, probe
acatttcttactgccgattgcttat

SEQ ID NO: 143926 - DNA, 25 bp, probe
acttgttttcccagcatcatgtagt

SEQ ID NO: 143927 - DNA, 25 bp, probe
acttgttttcagatccatagcatgg

SEQ ID NO: 143928 - DNA, 25 bp, probe
acttggcatttaggattccatctgg

SEQ ID NO: 143929 - DNA, 25 bp, probe
acattgccattttctattctttggg

SEQ ID NO: 143930 - DNA, 25 bp, probe
acttgctttatgccttcttattgct

SEQ ID NO: 143931 - DNA, 25 bp, probe
acattgtttccacttcttgatatga

SEQ ID NO: 143932 - DNA, 25 bp, probe
acttgtttcagatttgctctgttag

SEQ ID NO: 143933 - DNA, 25 bp, probe
acttctcgtcaatcactcattatca

SEQ ID NO: 143934 - DNA, 25 bp, probe
acttctttcctacctgatagcatca

SEQ ID NO: 143935 - DNA, 25 bp, probe
acttctttactgccactgaaacaca

SEQ ID NO: 143936 - DNA, 25 bp, probe
acttgtttgacgacgaaaacacagc

SEQ ID NO: 143937 - DNA, 25 bp, probe
acttgaatggacctctataaacgca

SEQ ID NO: 143938 - DNA, 25 bp, probe
acttgagatcaacgtgctagagaaa

SEQ ID NO: 143939 - DNA, 25 bp, probe
acttctctgcaacttgttgagcaac

SEQ ID NO: 143940 - DNA, 25 bp, probe
acttctctagaactgttatcataac

SEQ ID NO: 143941 - DNA, 25 bp, probe
acttctctagaactgttatcataac

SEQ ID NO: 143942 - DNA, 25 bp, probe
acttcctatggccttttggtagcaa

SEQ ID NO: 143943 - DNA, 25 bp, probe
acttactgtggcagctttgcttacg

SEQ ID NO: 143944 - DNA, 25 bp, probe
acttcctgttcttcttggtatactt

SEQ ID NO: 143945 - DNA, 25 bp, probe
aaatcctgacctattgggatactta

SEQ ID NO: 143946 - DNA, 25 bp, probe
aaacttgtccttcctggagataggt

SEQ ID NO: 143947 - DNA, 25 bp, probe
acagaattgtttgtgctgggtattg

SEQ ID NO: 143948 - DNA, 25 bp, probe
acagataagtttgcagttggctaag

SEQ ID NO: 143949 - DNA, 25 bp, probe
acagtacacgtcacagtattgatgt

SEQ ID NO: 143950 - DNA, 25 bp, probe
acagtacacgtcacagtattgatgt

SEQ ID NO: 143951 - DNA, 25 bp, probe
acatcatgaccgtcactgactttgg

SEQ ID NO: 143952 - DNA, 25 bp, probe
acatcatgaccgtcactgactttgg

SEQ ID NO: 143953 - DNA, 25 bp, probe
acatcatgaccgtcactgactttgg

SEQ ID NO: 143954 - DNA, 25 bp, probe
acatcatgaccgtcactgactttgg

SEQ ID NO: 143955 - DNA, 25 bp, probe
acatcatgaccgtcactgactttgg

SEQ ID NO: 143956 - DNA, 25 bp, probe
acatccacggacctgagtttacttt

SEQ ID NO: 143957 - DNA, 25 bp, probe
acaccattagacttagctttacgtg

SEQ ID NO: 143958 - DNA, 25 bp, probe
acatcctttgcctttattctgaaat

SEQ ID NO: 143959 - DNA, 25 bp, probe
acattttgggtttcattgctgcaga

SEQ ID NO: 143960 - DNA, 25 bp, probe
acattttactgtgcagattctgaga

SEQ ID NO: 143961 - DNA, 25 bp, probe
acaggttccagagcttgatctgggc

SEQ ID NO: 143962 - DNA, 25 bp, probe
acaggtaaagcagccaattttgtac

SEQ ID NO: 143963 - DNA, 25 bp, probe
acagggacacagcccctatttggaa

SEQ ID NO: 143964 - DNA, 25 bp, probe
acaggggacccgttgatatctggtc

SEQ ID NO: 143965 - DNA, 25 bp, probe
aaggaagtccgtttgatgattccac

SEQ ID NO: 143966 - DNA, 25 bp, probe
acaggagggcggaagtagagtcctc

SEQ ID NO: 143967 - DNA, 25 bp, probe
acaggctcagggcaaagaagtggcc

SEQ ID NO: 143968 - DNA, 25 bp, probe
acaggccagggaacataagaccgca

SEQ ID NO: 143969 - DNA, 25 bp, probe
acataccaagagacctacaaaagaa

SEQ ID NO: 143970 - DNA, 25 bp, probe
acataccaagagacctacaaaagaa

SEQ ID NO: 143971 - DNA, 25 bp, probe
acatactaacaaagaacaatcagga

SEQ ID NO: 143972 - DNA, 25 bp, probe
acttcgagatacgggcacatacgga

SEQ ID NO: 143973 - DNA, 25 bp, probe
acttctgcgatacgaccatcaacag

SEQ ID NO: 143974 - DNA, 25 bp, probe
acttctgcgatacgaccatcaacag

SEQ ID NO: 143975 - DNA, 25 bp, probe
acattctgctgtcggaaagcgacgt

SEQ ID NO: 143976 - DNA, 25 bp, probe
acattgccttggtgaagctgtctgc

SEQ ID NO: 143977 - DNA, 25 bp, probe
acatatcttctgcattgaagttgtc

SEQ ID NO: 143978 - DNA, 25 bp, probe
acatctcaggtgccatgtaaggctt

SEQ ID NO: 143979 - DNA, 25 bp, probe
acttcatttgccaatcagaggatgt

SEQ ID NO: 143980 - DNA, 25 bp, probe
acttaatctctcctgcacagacatg

SEQ ID NO: 143981 - DNA, 25 bp, probe
acatcatgaatgactccaactacat

SEQ ID NO: 143982 - DNA, 25 bp, probe
acatatgatgatttccatactattg

SEQ ID NO: 143983 - DNA, 25 bp, probe
acttgaatgtagttatctattgaaa

SEQ ID NO: 143984 - DNA, 25 bp, probe
acttgacatcattttactcttggaa

SEQ ID NO: 143985 - DNA, 25 bp, probe
acttccacagattctacttcgagaa

SEQ ID NO: 143986 - DNA, 25 bp, probe
acttctcacaattcagtttctatga

SEQ ID NO: 143987 - DNA, 25 bp, probe
acattgtccataaggaattcgatga

SEQ ID NO: 143988 - DNA, 25 bp, probe
acatatggccaaaggaatacagttt

SEQ ID NO: 143989 - DNA, 25 bp, probe
acttgagcccagagtgaacactctt

SEQ ID NO: 143990 - DNA, 25 bp, probe
acttgctaccagagaggacagctct

SEQ ID NO: 143991 - DNA, 25 bp, probe
acttcttctcaaaagatcacagctc

SEQ ID NO: 143992 - DNA, 25 bp, probe
acatttccaaataactgcagcactt

SEQ ID NO: 143993 - DNA, 25 bp, probe
acatcttcctgacagaatgccactt

SEQ ID NO: 143994 - DNA, 25 bp, probe
acatcttcctgacagaatgccactt

SEQ ID NO: 143995 - DNA, 25 bp, probe
acatttgccgcaaaggggacatcgg

SEQ ID NO: 143996 - DNA, 25 bp, probe
acatttgccgcaaaggggacatcgg

SEQ ID NO: 143997 - DNA, 25 bp, probe
acttctcccaaaaggcagatgacgg

SEQ ID NO: 143998 - DNA, 25 bp, probe
acttctcccaaaaggcagatgacgg

SEQ ID NO: 143999 - DNA, 25 bp, probe
acttccccacagaacatgctgatgt

SEQ ID NO: 144000 - DNA, 25 bp, probe
acttccctcacaatgatgatgcaaa

SEQ ID NO: 144001 - DNA, 25 bp, probe
acttccctcacaatgatgatgcaaa

SEQ ID NO: 144002 - DNA, 25 bp, probe
acttccgccagatgtgctgcaaaac

SEQ ID NO: 144003 - DNA, 25 bp, probe
acttccagtccttcgtcaaagactg

SEQ ID NO: 144004 - DNA, 25 bp, probe
acttccagtccttcgtcaaagactg

SEQ ID NO: 144005 - DNA, 25 bp, probe
acttccagtccttcgtcaaagactg

SEQ ID NO: 144006 - DNA, 25 bp, probe
acttccaggagtttgtcaataaatg

SEQ ID NO: 144007 - DNA, 25 bp, probe
acttccttgtctttgaaataagaga

SEQ ID NO: 144008 - DNA, 25 bp, probe
acttcactgttgtcttactttaaga

SEQ ID NO: 144009 - DNA, 25 bp, probe
acttcactgtattctttactttagg

SEQ ID NO: 144010 - DNA, 25 bp, probe
acttgcactgttactcttaatttta

SEQ ID NO: 144011 - DNA, 25 bp, probe
acatcgactttgacagtttcatctg

SEQ ID NO: 144012 - DNA, 25 bp, probe
acatagagtttaagtatccagtagt

SEQ ID NO: 144013 - DNA, 25 bp, probe
acatatgcagttattccactaaatg

SEQ ID NO: 144014 - DNA, 25 bp, probe
acatctggaaattaccttaatatgc

SEQ ID NO: 144015 - DNA, 25 bp, probe
acatttgacatttatgccggaattc

SEQ ID NO: 144016 - DNA, 25 bp, probe
acatttggttcatccgtgtgctgtt

SEQ ID NO: 144017 - DNA, 25 bp, probe
acatttgggaactcagttgcatcct

SEQ ID NO: 144018 - DNA, 25 bp, probe
acatttgggaaatctcttgcaagct

SEQ ID NO: 144019 - DNA, 25 bp, probe
acttcatcggaaatatcgggacaca

SEQ ID NO: 144020 - DNA, 25 bp, probe
acttgctggtgaaaatcggggactt

SEQ ID NO: 144021 - DNA, 25 bp, probe
acttgctggtgaaaatcggggactt

SEQ ID NO: 144022 - DNA, 25 bp, probe
acttcatggtgaatagtcaagagat

SEQ ID NO: 144023 - DNA, 25 bp, probe
acttcatggagattaagagtcatgt

SEQ ID NO: 144024 - DNA, 25 bp, probe
acatcacatgtggtaaatgagattg

SEQ ID NO: 144025 - DNA, 25 bp, probe
acatatctgagggagaagcacaaga

SEQ ID NO: 144026 - DNA, 25 bp, probe
acttcatgtatatcaagcacagcag

SEQ ID NO: 144027 - DNA, 25 bp, probe
acattcatgtatgtcttgcccagtt

SEQ ID NO: 144028 - DNA, 25 bp, probe
acttcatatattcttggcaattgct

SEQ ID NO: 144029 - DNA, 25 bp, probe
acattatttgcttttctcaactgct

SEQ ID NO: 144030 - DNA, 25 bp, probe
aatgagagttccttccggactctta

SEQ ID NO: 144031 - DNA, 25 bp, probe
acatacgtattttccgtagtgctct

SEQ ID NO: 144032 - DNA, 25 bp, probe
tactactttagcgccgagggcttcc

SEQ ID NO: 144033 - DNA, 25 bp, probe
acatcactttactccataagcgctt

SEQ ID NO: 144034 - DNA, 25 bp, probe
acatgcagagctaatacccaaacta

SEQ ID NO: 144035 - DNA, 25 bp, probe
acaggagaattatacccatctacca

SEQ ID NO: 144036 - DNA, 25 bp, probe
acaggagaattatacccatctacca

SEQ ID NO: 144037 - DNA, 25 bp, probe
acaggagttttaacgtcttcagaca

SEQ ID NO: 144038 - DNA, 25 bp, probe
acaggaggtggttcggtctgtctta

SEQ ID NO: 144039 - DNA, 25 bp, probe
acatgtacggaagcattctgttctt

SEQ ID NO: 144040 - DNA, 25 bp, probe
acagtaagcgaaagagccggcctgt

SEQ ID NO: 144041 - DNA, 25 bp, probe
acagattcggaaaagcccagattgc

SEQ ID NO: 144042 - DNA, 25 bp, probe
acttgtgggagtaataccagcttgc

SEQ ID NO: 144043 - DNA, 25 bp, probe
acttgtgggagtaataccagcttgc

SEQ ID NO: 144044 - DNA, 25 bp, probe
acatggtggtgactgtcacccgctt

SEQ ID NO: 144045 - DNA, 25 bp, probe
acagaagattgccttacgctcgtga

SEQ ID NO: 144046 - DNA, 25 bp, probe
acagaagattgccttacgctcgtga

SEQ ID NO: 144047 - DNA, 25 bp, probe
acagaagattgccttacgctcgtga

SEQ ID NO: 144048 - DNA, 25 bp, probe
acagggaatgctgaggcctcgaggg

SEQ ID NO: 144049 - DNA, 25 bp, probe
acttgaaagatgggtctccgcactt

SEQ ID NO: 144050 - DNA, 25 bp, probe
acttgcaaaagtgtggcccctcact

SEQ ID NO: 144051 - DNA, 25 bp, probe
acttgcaatgacttgggtgacctta

SEQ ID NO: 144052 - DNA, 25 bp, probe
acttgcaatgacttgggtgacctta

SEQ ID NO: 144053 - DNA, 25 bp, probe
acttgttgacaatgcactgacttta

SEQ ID NO: 144054 - DNA, 25 bp, probe
acttgagcaaagagacggttaaatg

SEQ ID NO: 144055 - DNA, 25 bp, probe
acttcctgcaggagtcagcgttcaa

SEQ ID NO: 144056 - DNA, 25 bp, probe
acttcctccatacataagcttcaag

SEQ ID NO: 144057 - DNA, 25 bp, probe
acttgccatctaatttaacttaaat

SEQ ID NO: 144058 - DNA, 25 bp, probe
acatgttattgttttcaacctagaa

SEQ ID NO: 144059 - DNA, 25 bp, probe
acatggcttttctttcaatcttagg

SEQ ID NO: 144060 - DNA, 25 bp, probe
acttcttcattctctcggtatagtt

SEQ ID NO: 144061 - DNA, 25 bp, probe
acattctttattctgcggtgaagtt

SEQ ID NO: 144062 - DNA, 25 bp, probe
aaatccttagatctggcatgttagc

SEQ ID NO: 144063 - DNA, 25 bp, probe
aaatccttagatctggcatgttagc

SEQ ID NO: 144064 - DNA, 25 bp, probe
acagacctaaatatgctggatatag

SEQ ID NO: 144065 - DNA, 25 bp, probe
acagatactagatattttgatgaag

SEQ ID NO: 144066 - DNA, 25 bp, probe
acttcatagtcaatctttctctggc

SEQ ID NO: 144067 - DNA, 25 bp, probe
acatcaagagaaagttaccattcag

SEQ ID NO: 144068 - DNA, 25 bp, probe
acatctatatccaagttacctccac

SEQ ID NO: 144069 - DNA, 25 bp, probe
acatcaatgtgagaggaagcctcca

SEQ ID NO: 144070 - DNA, 25 bp, probe
acatcaaggaggtggcaggagccag

SEQ ID NO: 144071 - DNA, 25 bp, probe
acatcaagtgggtgaaggagaacaa

SEQ ID NO: 144072 - DNA, 25 bp, probe
acatgaatggtttaaacaggacctt

SEQ ID NO: 144073 - DNA, 25 bp, probe
acaggtggtgtgtaagaagtaccgg

SEQ ID NO: 144074 - DNA, 25 bp, probe
acatggatgattctccgaagaaaag

SEQ ID NO: 144075 - DNA, 25 bp, probe
acaggctgttctgcactgaaaaggt

SEQ ID NO: 144076 - DNA, 25 bp, probe
acaggctgttctgcactgaaaaggt

SEQ ID NO: 144077 - DNA, 25 bp, probe
acataggcaatatctttaataggtt

SEQ ID NO: 144078 - DNA, 25 bp, probe
acataggcaatatctttaataggtt

SEQ ID NO: 144079 - DNA, 25 bp, probe
acttggcagtttctaacttgtgttt

SEQ ID NO: 144080 - DNA, 25 bp, probe
acttggtgggtgatgaactatgggt

SEQ ID NO: 144081 - DNA, 25 bp, probe
acagagccgggtgtgaactatggtt

SEQ ID NO: 144082 - DNA, 25 bp, probe
acagagccgggtgtgaactatggtt

SEQ ID NO: 144083 - DNA, 25 bp, probe
aaatcccggctgaatgagaccacgg

SEQ ID NO: 144084 - DNA, 25 bp, probe
acattcaccgacatcggactcacgg

SEQ ID NO: 144085 - DNA, 25 bp, probe
acattcaccgacatcggactcacgg

SEQ ID NO: 144086 - DNA, 25 bp, probe
acattcgtgagctggggactcaggg

SEQ ID NO: 144087 - DNA, 25 bp, probe
acttgttgacactgcgagcactcag

SEQ ID NO: 144088 - DNA, 25 bp, probe
acttgagagcactagggagccatgg

SEQ ID NO: 144089 - DNA, 25 bp, probe
acttgggcagcgaggatatcatgat

SEQ ID NO: 144090 - DNA, 25 bp, probe
acttgggcagcgaggatatcatgat

SEQ ID NO: 144091 - DNA, 25 bp, probe
acattgcccatggctgggaacatga

SEQ ID NO: 144092 - DNA, 25 bp, probe
acattgcccaaggttgaagcaatga

SEQ ID NO: 144093 - DNA, 25 bp, probe
acttgcccagatgttctcagatatg

SEQ ID NO: 144094 - DNA, 25 bp, probe
acattcccatctgtcaccaattggt

SEQ ID NO: 144095 - DNA, 25 bp, probe
acatcatccgcctttacgaagtggt

SEQ ID NO: 144096 - DNA, 25 bp, probe
acatacagccctattctagaggata

SEQ ID NO: 144097 - DNA, 25 bp, probe
acatccagacctaaagctacaaaac

SEQ ID NO: 144098 - DNA, 25 bp, probe
acatacatgaccctcatgagctcaa

SEQ ID NO: 144099 - DNA, 25 bp, probe
acatcacagccctgatggctgccat

SEQ ID NO: 144100 - DNA, 25 bp, probe
acaccgccaaagaggcgaccgtggc

SEQ ID NO: 144101 - DNA, 25 bp, probe
acaccctacaatgtggctatccttc

SEQ ID NO: 144102 - DNA, 25 bp, probe
acaagaatccctatggattccacct

SEQ ID NO: 144103 - DNA, 25 bp, probe
aaataaccagtggcctggccgacct

SEQ ID NO: 144104 - DNA, 25 bp, probe
aaacgaaatggctcggccaggcacg

SEQ ID NO: 144105 - DNA, 25 bp, probe
aaacgaaatggctcggccaggcacg

SEQ ID NO: 144106 - DNA, 25 bp, probe
acagaggaaagcgggtgcccggcat

SEQ ID NO: 144107 - DNA, 25 bp, probe
acagtggaaatctggagactggtca

SEQ ID NO: 144108 - DNA, 25 bp, probe
acattgcgaagtctagaaaggctaa

SEQ ID NO: 144109 - DNA, 25 bp, probe
acttgcacgtattttaatagcgtca

SEQ ID NO: 144110 - DNA, 25 bp, probe
acttccagtcatttgtcaaagactg

SEQ ID NO: 144111 - DNA, 25 bp, probe
acttccagtttattgcatatatgca

SEQ ID NO: 144112 - DNA, 25 bp, probe
acttccagtttattgcatatatgca

SEQ ID NO: 144113 - DNA, 25 bp, probe
acttcctgatattgttgatacatgc

SEQ ID NO: 144114 - DNA, 25 bp, probe
acatatgcaccttgtgtctgtacac

SEQ ID NO: 144115 - DNA, 25 bp, probe
acttgcacatcaaatcgatgtacat

SEQ ID NO: 144116 - DNA, 25 bp, probe
acttgctgctcacactatatacaga

SEQ ID NO: 144117 - DNA, 25 bp, probe
acttggtgcagttctcatgatagag

SEQ ID NO: 144118 - DNA, 25 bp, probe
acatgtgcttgcatttctagcgagc

SEQ ID NO: 144119 - DNA, 25 bp, probe
acatatcactcaatttctctgagga

SEQ ID NO: 144120 - DNA, 25 bp, probe
acttggtatatgctcatctgagtga

SEQ ID NO: 144121 - DNA, 25 bp, probe
acatttgtcataggtattacttaaa

SEQ ID NO: 144122 - DNA, 25 bp, probe
acatttgtaaatgtcttttcaaaag

SEQ ID NO: 144123 - DNA, 25 bp, probe
acatttgtaaatgtcttttcaaaag

SEQ ID NO: 144124 - DNA, 25 bp, probe
acatcttgttcaatcctcactttaa

SEQ ID NO: 144125 - DNA, 25 bp, probe
acttggtggctaataaatgttacat

SEQ ID NO: 144126 - DNA, 25 bp, probe
acttgtcctcttaaaatgtgtcaat

SEQ ID NO: 144127 - DNA, 25 bp, probe
acattctcccttaagcagaaaactt

SEQ ID NO: 144128 - DNA, 25 bp, probe
acattcgggtatatgatgaagaggc

SEQ ID NO: 144129 - DNA, 25 bp, probe
acattctgggtgacacgctgggggt

SEQ ID NO: 144130 - DNA, 25 bp, probe
acttcgggatgaccatggactggat

SEQ ID NO: 144131 - DNA, 25 bp, probe
acttcgtggaggtgcgcagtggact

SEQ ID NO: 144132 - DNA, 25 bp, probe
acttcgtggaggtgcgcagtggact

SEQ ID NO: 144133 - DNA, 25 bp, probe
acttcgtggaggtgcgcagtggact

SEQ ID NO: 144134 - DNA, 25 bp, probe
acttcgtggaggtgcgcagtggact

SEQ ID NO: 144135 - DNA, 25 bp, probe
acttcgtggaggtgcgcagtggact

SEQ ID NO: 144136 - DNA, 25 bp, probe
acattcgaggaattggccgctgtca

SEQ ID NO: 144137 - DNA, 25 bp, probe
acatatggggagttgtactgggcat

SEQ ID NO: 144138 - DNA, 25 bp, probe
acatatggggagttgtactgggcat

SEQ ID NO: 144139 - DNA, 25 bp, probe
acattggtggcatttttatcgtgct

SEQ ID NO: 144140 - DNA, 25 bp, probe
acacggtggctcagatgttctgctc

SEQ ID NO: 144141 - DNA, 25 bp, probe
acacgtgaggtcccttttgctattt

SEQ ID NO: 144142 - DNA, 25 bp, probe
acatgttaggcccttgttttctttg

SEQ ID NO: 144143 - DNA, 25 bp, probe
acatttagcctgttcattttaatct

SEQ ID NO: 144144 - DNA, 25 bp, probe
acatttagcctgttcattttaatct

SEQ ID NO: 144145 - DNA, 25 bp, probe
ggcctgtacatcggcaacttcaaag

SEQ ID NO: 144146 - DNA, 25 bp, probe
acattccgttggcagctggcaaatt

SEQ ID NO: 144147 - DNA, 25 bp, probe
acagctcttgatttgggtggaaaac

SEQ ID NO: 144148 - DNA, 25 bp, probe
acagtcataatgtgttgtgaaaatt

SEQ ID NO: 144149 - DNA, 25 bp, probe
acattcaagcagttggtcgaagact

SEQ ID NO: 144150 - DNA, 25 bp, probe
acatccaagcatgtggccattacac

SEQ ID NO: 144151 - DNA, 25 bp, probe
acatgcaacagtggattgtataacc

SEQ ID NO: 144152 - DNA, 25 bp, probe
acatcaatcagagagtgtcacagat

SEQ ID NO: 144153 - DNA, 25 bp, probe
acatcacatgagaggtctgctcaga

SEQ ID NO: 144154 - DNA, 25 bp, probe
acatcagcagtcagcctgctcagag

SEQ ID NO: 144155 - DNA, 25 bp, probe
acatcgtaattgtctgcatcctgtc

SEQ ID NO: 144156 - DNA, 25 bp, probe
acatcactgttttgcatctctgttg

SEQ ID NO: 144157 - DNA, 25 bp, probe
acattagtgtgttgtctctttccta

SEQ ID NO: 144158 - DNA, 25 bp, probe
acattagtgtgttgtctctttccta

SEQ ID NO: 144159 - DNA, 25 bp, probe
acatatagtctgctttctgttcctc

SEQ ID NO: 144160 - DNA, 25 bp, probe
acatatttagtcttggctgcttcct

SEQ ID NO: 144161 - DNA, 25 bp, probe
acttcgtaggctggcctcaattctc

SEQ ID NO: 144162 - DNA, 25 bp, probe
acttccgatggcgtcaggaatttca

SEQ ID NO: 144163 - DNA, 25 bp, probe
acttgacgttctgaggcacatcctc

SEQ ID NO: 144164 - DNA, 25 bp, probe
acattgaccttctcaaaaccatcca

SEQ ID NO: 144165 - DNA, 25 bp, probe
acaggagcccgagacaatacacctc

SEQ ID NO: 144166 - DNA, 25 bp, probe
acactggcccgggacaatgaattct

SEQ ID NO: 144167 - DNA, 25 bp, probe
acatttcccagtgcaactcacattt

SEQ ID NO: 144168 - DNA, 25 bp, probe
acatttacacatctagcagtcagtt

SEQ ID NO: 144169 - DNA, 25 bp, probe
acattagagtctgtgagtctcattc

SEQ ID NO: 144170 - DNA, 25 bp, probe
acattacagtccaatggtatgctgg

SEQ ID NO: 144171 - DNA, 25 bp, probe
acattcactgtctctgttggtggta

SEQ ID NO: 144172 - DNA, 25 bp, probe
acatcccttgcattttgggcaactt

SEQ ID NO: 144173 - DNA, 25 bp, probe
acattttctcactgtggccaactct

SEQ ID NO: 144174 - DNA, 25 bp, probe
acatcgttcatccggtggaaacagc

SEQ ID NO: 144175 - DNA, 25 bp, probe
acaggatgccccgtgtggagaactg

SEQ ID NO: 144176 - DNA, 25 bp, probe
acaggatgccccgtgtggagaactg

SEQ ID NO: 144177 - DNA, 25 bp, probe
acatgttgccccaaatacaagcaca

SEQ ID NO: 144178 - DNA, 25 bp, probe
acattcgtgcccaagaaccagagag

SEQ ID NO: 144179 - DNA, 25 bp, probe
acatttgtgtgttaaactaatggaa

SEQ ID NO: 144180 - DNA, 25 bp, probe
acatcttgtgataaagagcatttac

SEQ ID NO: 144181 - DNA, 25 bp, probe
acattttgatatttgagccattcct

SEQ ID NO: 144182 - DNA, 25 bp, probe
acatttctgtgagtgctgacttgtc

SEQ ID NO: 144183 - DNA, 25 bp, probe
acattatgtggagccctatctttac

SEQ ID NO: 144184 - DNA, 25 bp, probe
acatatgatgcctaccctaagttta

SEQ ID NO: 144185 - DNA, 25 bp, probe
acatatgatgcctaccctaagttta

SEQ ID NO: 144186 - DNA, 25 bp, probe
acatatgatgcctaccctaagttta

SEQ ID NO: 144187 - DNA, 25 bp, probe
acattaccataccatcagatagcat

SEQ ID NO: 144188 - DNA, 25 bp, probe
acattactattccataactccagac

SEQ ID NO: 144189 - DNA, 25 bp, probe
acattactattccataactccagac

SEQ ID NO: 144190 - DNA, 25 bp, probe
acttcctttcagtagggcgctaatg

SEQ ID NO: 144191 - DNA, 25 bp, probe
acttccttttgctgatgatctttat

SEQ ID NO: 144192 - DNA, 25 bp, probe
acttccttttgctgatgatctttat

SEQ ID NO: 144193 - DNA, 25 bp, probe
acatctcactgttggaaatttttta

SEQ ID NO: 144194 - DNA, 25 bp, probe
acaccacctagctaaagtgttcaat

SEQ ID NO: 144195 - DNA, 25 bp, probe
acacggcctactgagcggacagaat

SEQ ID NO: 144196 - DNA, 25 bp, probe
acacggcctactgagcggacagaat

SEQ ID NO: 144197 - DNA, 25 bp, probe
acacggactacatcaatggccagat

SEQ ID NO: 144198 - DNA, 25 bp, probe
acacggactacatcaatggccagat

SEQ ID NO: 144199 - DNA, 25 bp, probe
acatcggagcacaccgagggctgat

SEQ ID NO: 144200 - DNA, 25 bp, probe
acattgctgagccttactgggttga

SEQ ID NO: 144201 - DNA, 25 bp, probe
acattggcataaatactgaagttga

SEQ ID NO: 144202 - DNA, 25 bp, probe
acttggcagaaatctccatggcttt

SEQ ID NO: 144203 - DNA, 25 bp, probe
acttgtgatgagctactcctgggtc

SEQ ID NO: 144204 - DNA, 25 bp, probe
acttgtcatcagctaatcctttgcc

SEQ ID NO: 144205 - DNA, 25 bp, probe
acttgtcatcagctaatcctttgcc

SEQ ID NO: 144206 - DNA, 25 bp, probe
acatttctaggtacatcaatttcac

SEQ ID NO: 144207 - DNA, 25 bp, probe
acatatattatgcctgcctaagttc

SEQ ID NO: 144208 - DNA, 25 bp, probe
acatcatattcagcccatcacgctg

SEQ ID NO: 144209 - DNA, 25 bp, probe
acatcgaagcatgtctcagccagag

SEQ ID NO: 144210 - DNA, 25 bp, probe
acatagaacacttcagacacaggaa

SEQ ID NO: 144211 - DNA, 25 bp, probe
acagtagacctagttccaggatcca

SEQ ID NO: 144212 - DNA, 25 bp, probe
acaggtgaccgatgtacaggacttt

SEQ ID NO: 144213 - DNA, 25 bp, probe
acaggttcgtgaaggacaggcgccc

SEQ ID NO: 144214 - DNA, 25 bp, probe
acattttcttggagcacaaacaact

SEQ ID NO: 144215 - DNA, 25 bp, probe
acatctctttggatccagcaaaaac

SEQ ID NO: 144216 - DNA, 25 bp, probe
acatatttagcgcacccagagaaaa

SEQ ID NO: 144217 - DNA, 25 bp, probe
acatttcactggacagcccagggag

SEQ ID NO: 144218 - DNA, 25 bp, probe
acatcccctggaagtacaaggactc

SEQ ID NO: 144219 - DNA, 25 bp, probe
acatcccctggaagtacaaggactc

SEQ ID NO: 144220 - DNA, 25 bp, probe
acatcgtcacggagtacatgagcaa

SEQ ID NO: 144221 - DNA, 25 bp, probe
acatcgtcaccgagtatatgaacaa

SEQ ID NO: 144222 - DNA, 25 bp, probe
acatcgtcaccgagtatatgaacaa

SEQ ID NO: 144223 - DNA, 25 bp, probe
acatcgtcaacgtggtgtgcccact

SEQ ID NO: 144224 - DNA, 25 bp, probe
acatattcaacgtttcttccgtctc

SEQ ID NO: 144225 - DNA, 25 bp, probe
acacagtgaacgacttttggcggat

SEQ ID NO: 144226 - DNA, 25 bp, probe
acatctgctgaagccttttgaccag

SEQ ID NO: 144227 - DNA, 25 bp, probe
acatcgtgatgtgttttgtgaccat

SEQ ID NO: 144228 - DNA, 25 bp, probe
acatctgttggacttttgtccatat

SEQ ID NO: 144229 - DNA, 25 bp, probe
acatctgttggacttttgtccatat

SEQ ID NO: 144230 - DNA, 25 bp, probe
acatttagtcatcgatttatcaatc

SEQ ID NO: 144231 - DNA, 25 bp, probe
acattccagtcttgaatttcctcca

SEQ ID NO: 144232 - DNA, 25 bp, probe
acattccagtgttcaactgttttat

SEQ ID NO: 144233 - DNA, 25 bp, probe
acttgcatcgtgtaaatcatctctg

SEQ ID NO: 144234 - DNA, 25 bp, probe
acttgctgctggaaagtatcctgca

SEQ ID NO: 144235 - DNA, 25 bp, probe
acttgctgctggaaagtatcctgca

SEQ ID NO: 144236 - DNA, 25 bp, probe
acttgcacggcaagggcatcattca

SEQ ID NO: 144237 - DNA, 25 bp, probe
acttgcacctggtactgcacatttt

SEQ ID NO: 144238 - DNA, 25 bp, probe
acatcatcatccagtacttcatctt

SEQ ID NO: 144239 - DNA, 25 bp, probe
acatgcatctttggacatcaatgtc

SEQ ID NO: 144240 - DNA, 25 bp, probe
acatacactgtgaactcaatctcca

SEQ ID NO: 144241 - DNA, 25 bp, probe
acatcaacgtctggtatgacccagc

SEQ ID NO: 144242 - DNA, 25 bp, probe
acatcactgtttggtatgaccccgc

SEQ ID NO: 144243 - DNA, 25 bp, probe
acatcatggttggccttatcctgcc

SEQ ID NO: 144244 - DNA, 25 bp, probe
acatattgtcttgttatcatccctt

SEQ ID NO: 144245 - DNA, 25 bp, probe
acataatacattatttctactgtga

SEQ ID NO: 144246 - DNA, 25 bp, probe
acatggaacaataaaggtactggta

SEQ ID NO: 144247 - DNA, 25 bp, probe
acattggatcctacatagggatctg

SEQ ID NO: 144248 - DNA, 25 bp, probe
acttgaacacgactgagcaggtcag

SEQ ID NO: 144249 - DNA, 25 bp, probe
acttgaacacgactgagcaggtcag

SEQ ID NO: 144250 - DNA, 25 bp, probe
acatataccacccatagtgcttcac

SEQ ID NO: 144251 - DNA, 25 bp, probe
acatatacacaaggaagcttttgga

SEQ ID NO: 144252 - DNA, 25 bp, probe
acttgtccatacagagttttgatga

SEQ ID NO: 144253 - DNA, 25 bp, probe
acttgtactagcagagagtcctgag

SEQ ID NO: 144254 - DNA, 25 bp, probe
acttgtgttctcagtgcagttctga

SEQ ID NO: 144255 - DNA, 25 bp, probe
acatctggtctgtgggctgtatcat

SEQ ID NO: 144256 - DNA, 25 bp, probe
acatgcaggacgttagactgttggg

SEQ ID NO: 144257 - DNA, 25 bp, probe
acatcgtgctctgtgagacgttccg

SEQ ID NO: 144258 - DNA, 25 bp, probe
acatcatgatccgagcgaggcctaa

SEQ ID NO: 144259 - DNA, 25 bp, probe
acattcatgctggcagcgatggctt

SEQ ID NO: 144260 - DNA, 25 bp, probe
acattctgttcattgaggcttccaa

SEQ ID NO: 144261 - DNA, 25 bp, probe
acatttcatcactcagtgtatgcga

SEQ ID NO: 144262 - DNA, 25 bp, probe
acatttcatgtcaggattgcaagca

SEQ ID NO: 144263 - DNA, 25 bp, probe
acatttcatgtcaggattgcaagca

SEQ ID NO: 144264 - DNA, 25 bp, probe
acatttgatgttagcgtataaatta

SEQ ID NO: 144265 - DNA, 25 bp, probe
acatttgtgctttctgcagtgaaat

SEQ ID NO: 144266 - DNA, 25 bp, probe
acatcttgcttatttgccaaagctg

SEQ ID NO: 144267 - DNA, 25 bp, probe
acatctaattcatctcgaatgactg

SEQ ID NO: 144268 - DNA, 25 bp, probe
acatctaattcatctcgaatgactg

SEQ ID NO: 144269 - DNA, 25 bp, probe
acattgatattctactggccatgat

SEQ ID NO: 144270 - DNA, 25 bp, probe
acatcttcacatccactgggcatat

SEQ ID NO: 144271 - DNA, 25 bp, probe
acatcgtcaatggcgcagtggtttg

SEQ ID NO: 144272 - DNA, 25 bp, probe
acatcgtcaatggcgcagtggtttg

SEQ ID NO: 144273 - DNA, 25 bp, probe
acatcaggcctggccagctggatgt

SEQ ID NO: 144274 - DNA, 25 bp, probe
acatcgagcctgatgagcgctgctt

SEQ ID NO: 144275 - DNA, 25 bp, probe
acatctagccatgcgaggtcttggg

SEQ ID NO: 144276 - DNA, 25 bp, probe
acatctactgatgctagacacttgg

SEQ ID NO: 144277 - DNA, 25 bp, probe
acatacatcataagctccagccttg

SEQ ID NO: 144278 - DNA, 25 bp, probe
acatcgtcaagtgccaggcgctgag

SEQ ID NO: 144279 - DNA, 25 bp, probe
acatttagctgtgctcagaagggct

SEQ ID NO: 144280 - DNA, 25 bp, probe
acattatactgttaaaagctggtgg

SEQ ID NO: 144281 - DNA, 25 bp, probe
acatctaccagtccaaggaggccgg

SEQ ID NO: 144282 - DNA, 25 bp, probe
acatcgatgccgtgaaggactgccg

SEQ ID NO: 144283 - DNA, 25 bp, probe
acattgaccagctgaagcgcatcat

SEQ ID NO: 144284 - DNA, 25 bp, probe
acagatgatccatttgaacagttgg

SEQ ID NO: 144285 - DNA, 25 bp, probe
acatcgaagcatctgaatcatgtcc

SEQ ID NO: 144286 - DNA, 25 bp, probe
acatcatgaagaccatgggcatgtc

SEQ ID NO: 144287 - DNA, 25 bp, probe
acatcatctcattaaggccattccc

SEQ ID NO: 144288 - DNA, 25 bp, probe
acattctatggaacgctcatgatct

SEQ ID NO: 144289 - DNA, 25 bp, probe
acattcttctgtggcagttatctta

SEQ ID NO: 144290 - DNA, 25 bp, probe
acattttctggcttgtcattctgta

SEQ ID NO: 144291 - DNA, 25 bp, probe
acatttatcgagtgcctctgtttgc

SEQ ID NO: 144292 - DNA, 25 bp, probe
acatgttccaagagccttttagtga

SEQ ID NO: 144293 - DNA, 25 bp, probe
acatgtataaaccctctcttttatg

SEQ ID NO: 144294 - DNA, 25 bp, probe
acaataaattcgctccgtggcactg

SEQ ID NO: 144295 - DNA, 25 bp, probe
acagatctgagaaagttccggtcct

SEQ ID NO: 144296 - DNA, 25 bp, probe
acagaagagaggctgccgggaccag

SEQ ID NO: 144297 - DNA, 25 bp, probe
acagatgggtggatcaggggacggg

SEQ ID NO: 144298 - DNA, 25 bp, probe
acattgatggcgaggcggaggacgg

SEQ ID NO: 144299 - DNA, 25 bp, probe
acattggcacagagccatggaaacc

SEQ ID NO: 144300 - DNA, 25 bp, probe
acatatggccaatgtgcatgtgcac

SEQ ID NO: 144301 - DNA, 25 bp, probe
acatatggccaatgtgcatgtgcac

SEQ ID NO: 144302 - DNA, 25 bp, probe
acatatgctgtcatgattgtgctac

SEQ ID NO: 144303 - DNA, 25 bp, probe
acattgctgattcttcgtgcacagg

SEQ ID NO: 144304 - DNA, 25 bp, probe
acatatgtctgtctttgcaaaggac

SEQ ID NO: 144305 - DNA, 25 bp, probe
acatcagcttgccctgttaaaagat

SEQ ID NO: 144306 - DNA, 25 bp, probe
acatacagtgaggctgattttgaag

SEQ ID NO: 144307 - DNA, 25 bp, probe
acatactgtcagtctcacttctgct

SEQ ID NO: 144308 - DNA, 25 bp, probe
acatagctgtcatctgcactgttgt

SEQ ID NO: 144309 - DNA, 25 bp, probe
acatcagcattccagcagcagcatt

SEQ ID NO: 144310 - DNA, 25 bp, probe
acatcactatccgatgcaccaaact

SEQ ID NO: 144311 - DNA, 25 bp, probe
acatcatccaccgtgacatcaagga

SEQ ID NO: 144312 - DNA, 25 bp, probe
acatctcagatccctccaagaagag

SEQ ID NO: 144313 - DNA, 25 bp, probe
acatctaatgctttgccattgaaga

SEQ ID NO: 144314 - DNA, 25 bp, probe
acatcgagcagttctccactgtgaa

SEQ ID NO: 144315 - DNA, 25 bp, probe
acatctcaagtctccgctatgaact

SEQ ID NO: 144316 - DNA, 25 bp, probe
acagtagtgactcccatgctaaacc

SEQ ID NO: 144317 - DNA, 25 bp, probe
acattatctgaccaatagtacacac

SEQ ID NO: 144318 - DNA, 25 bp, probe
acattcattggccatcaggatatac

SEQ ID NO: 144319 - DNA, 25 bp, probe
acattcttgccgtattctcatgatc

SEQ ID NO: 144320 - DNA, 25 bp, probe
acatttgtgaagtcttgtgctataa

SEQ ID NO: 144321 - DNA, 25 bp, probe
acatgtttgacttcctgtccaaaga

SEQ ID NO: 144322 - DNA, 25 bp, probe
acatgtatttcttacgtacactgta

SEQ ID NO: 144323 - DNA, 25 bp, probe
acatttaactgctccttcagctgtg

SEQ ID NO: 144324 - DNA, 25 bp, probe
acatttaacatggatgcgtcccgcc

SEQ ID NO: 144325 - DNA, 25 bp, probe
acatttaacatggatgcgtcccgcc

SEQ ID NO: 144326 - DNA, 25 bp, probe
acacttattcagaactgtcccgcct

SEQ ID NO: 144327 - DNA, 25 bp, probe
acattgtattggaactgcttcctgc

SEQ ID NO: 144328 - DNA, 25 bp, probe
acattgtcattcctagatgaatcct

SEQ ID NO: 144329 - DNA, 25 bp, probe
acattgctgattggtgttaagttgc

SEQ ID NO: 144330 - DNA, 25 bp, probe
acatctgcattcagctggtataatt

SEQ ID NO: 144331 - DNA, 25 bp, probe
acatcagcattatctcggacacatc

SEQ ID NO: 144332 - DNA, 25 bp, probe
acatcagcattatctcggacacatc

SEQ ID NO: 144333 - DNA, 25 bp, probe
acatagcattgatcattgaactgct

SEQ ID NO: 144334 - DNA, 25 bp, probe
acatattatgttttgatcactgctg

SEQ ID NO: 144335 - DNA, 25 bp, probe
acatgttaatgctttgctccctgaa

SEQ ID NO: 144336 - DNA, 25 bp, probe
acatttatccatatgcctttgcaat

SEQ ID NO: 144337 - DNA, 25 bp, probe
acatttatccatatgcctttgcaat

SEQ ID NO: 144338 - DNA, 25 bp, probe
acatatgctttcactgtttgtgcaa

SEQ ID NO: 144339 - DNA, 25 bp, probe
acatgcaccttatatttctgtgtac

SEQ ID NO: 144340 - DNA, 25 bp, probe
acagtccagttttgtgtgctttact

SEQ ID NO: 144341 - DNA, 25 bp, probe
acagtccagttttgtgtgctttact

SEQ ID NO: 144342 - DNA, 25 bp, probe
acagtcacaatctacttttcttaaa

SEQ ID NO: 144343 - DNA, 25 bp, probe
acagtaccaatactttcccaacatc

SEQ ID NO: 144344 - DNA, 25 bp, probe
acatgttccaatatgattccaccca

SEQ ID NO: 144345 - DNA, 25 bp, probe
acagtctccagggtcagtccctgga

SEQ ID NO: 144346 - DNA, 25 bp, probe
acagcaaaagtcttatccccagaga

SEQ ID NO: 144347 - DNA, 25 bp, probe
acatcaatagatcttttactcacat

SEQ ID NO: 144348 - DNA, 25 bp, probe
acatcaatagatcttttactcacat

SEQ ID NO: 144349 - DNA, 25 bp, probe
acatcaaagagaattgtgccccact

SEQ ID NO: 144350 - DNA, 25 bp, probe
acatcacaaggtgctggcacttatt

SEQ ID NO: 144351 - DNA, 25 bp, probe
acatacacagagactctttcatttt

SEQ ID NO: 144352 - DNA, 25 bp, probe
acattcaatgacttacttcttttct

SEQ ID NO: 144353 - DNA, 25 bp, probe
acatatatttccacttcttcattct

SEQ ID NO: 144354 - DNA, 25 bp, probe
acatttgttgatcccatttgacatt

SEQ ID NO: 144355 - DNA, 25 bp, probe
catcgttgtctgctaaattacttga

SEQ ID NO: 144356 - DNA, 25 bp, probe
ctcagtttccctgaattatatttgg

SEQ ID NO: 144357 - DNA, 25 bp, probe
acagtttcatggagtttaagttgag

SEQ ID NO: 144358 - DNA, 25 bp, probe
acattttttttgacattaagttgct

SEQ ID NO: 144359 - DNA, 25 bp, probe
acagttttcttcatctgtccagttg

SEQ ID NO: 144360 - DNA, 25 bp, probe
acacttcttttcaaggattaattct

SEQ ID NO: 144361 - DNA, 25 bp, probe
acaactttgttgaggattttggaag

SEQ ID NO: 144362 - DNA, 25 bp, probe
acagactttgatatccggttttata

SEQ ID NO: 144363 - DNA, 25 bp, probe
acaggtacagttacccgtttcaatg

SEQ ID NO: 144364 - DNA, 25 bp, probe
acatttgaagatatcccgttagaag

SEQ ID NO: 144365 - DNA, 25 bp, probe
acattgtgtcagattaccagttata

SEQ ID NO: 144366 - DNA, 25 bp, probe
acagggctcaccatacacaagtaaa

SEQ ID NO: 144367 - DNA, 25 bp, probe
acaggagccagggttaggattcaaa

SEQ ID NO: 144368 - DNA, 25 bp, probe
acatgtaccgtggcctggtatatga

SEQ ID NO: 144369 - DNA, 25 bp, probe
acattgaagttcgatcatggtaaaa

SEQ ID NO: 144370 - DNA, 25 bp, probe
acatgtgagagctatttctttaaga

SEQ ID NO: 144371 - DNA, 25 bp, probe
acattggccagcatctgtttatcaa

SEQ ID NO: 144372 - DNA, 25 bp, probe
acattggccaatgtggttacatcat

SEQ ID NO: 144373 - DNA, 25 bp, probe
acatggagctctaaatcgttaattt

SEQ ID NO: 144374 - DNA, 25 bp, probe
acagggactttcacttgaatcttgc

SEQ ID NO: 144375 - DNA, 25 bp, probe
acaggtttttcttcacatacctcct

SEQ ID NO: 144376 - DNA, 25 bp, probe
acaagtttaagatccacacgtactc

SEQ ID NO: 144377 - DNA, 25 bp, probe
aagtgtttaatagccacacgtggtt

SEQ ID NO: 144378 - DNA, 25 bp, probe
tagaggacttacagaaccgaggggt

SEQ ID NO: 144379 - DNA, 25 bp, probe
acaggagtcttcgaaaccgtggagg

SEQ ID NO: 144380 - DNA, 25 bp, probe
acatatgggctgataaacccggggt

SEQ ID NO: 144381 - DNA, 25 bp, probe
acttggcagccagaaacatcctggt

SEQ ID NO: 144382 - DNA, 25 bp, probe
cactgtacagtagcacaaccctggt

SEQ ID NO: 144383 - DNA, 25 bp, probe
acattaaagatgtgcaacctatgcg

SEQ ID NO: 144384 - DNA, 25 bp, probe
acattaatagaaggcatggctcctg

SEQ ID NO: 144385 - DNA, 25 bp, probe
acatacaaaacaggctggtctcgtg

SEQ ID NO: 144386 - DNA, 25 bp, probe
acatgagcaaatagacctttccagg

SEQ ID NO: 144387 - DNA, 25 bp, probe
acatactaaagtttgcattccaggg

SEQ ID NO: 144388 - DNA, 25 bp, probe
acatgtccccagaaagattccaggg

SEQ ID NO: 144389 - DNA, 25 bp, probe
acatatcctaatgaaatggccgtcc

SEQ ID NO: 144390 - DNA, 25 bp, probe
acattgccgactgatgaagacagca

SEQ ID NO: 144391 - DNA, 25 bp, probe
acattgcctccaaaatagccaacga

SEQ ID NO: 144392 - DNA, 25 bp, probe
acattgcctccaaaatagccaacga

SEQ ID NO: 144393 - DNA, 25 bp, probe
acatggcctccaaggagtaagaccc

SEQ ID NO: 144394 - DNA, 25 bp, probe
acattcacgatctggactcgaactc

SEQ ID NO: 144395 - DNA, 25 bp, probe
acatctgccggctggagcgggcagt

SEQ ID NO: 144396 - DNA, 25 bp, probe
acattgacagtggtgggcggggaga

SEQ ID NO: 144397 - DNA, 25 bp, probe
acattgtagatgggggttggcagag

SEQ ID NO: 144398 - DNA, 25 bp, probe
acatttggtgtatgtgcttggctga

SEQ ID NO: 144399 - DNA, 25 bp, probe
acattttccatatttggatggtgaa

SEQ ID NO: 144400 - DNA, 25 bp, probe
acattttccatatttggatggtgaa

SEQ ID NO: 144401 - DNA, 25 bp, probe
acatgatttcttttcttgatggatg

SEQ ID NO: 144402 - DNA, 25 bp, probe
acatgccacctttgtgcttattggt

SEQ ID NO: 144403 - DNA, 25 bp, probe
acatcaagagcctaggttattcaga

SEQ ID NO: 144404 - DNA, 25 bp, probe
acagaaatggcttggctttccgacg

SEQ ID NO: 144405 - DNA, 25 bp, probe
acagaaatggcttggctttccgacg

SEQ ID NO: 144406 - DNA, 25 bp, probe
acagatgaaacaaggatcttccgag

SEQ ID NO: 144407 - DNA, 25 bp, probe
acatgctaaagccaggattgtgttg

SEQ ID NO: 144408 - DNA, 25 bp, probe
acatttcaagctctgttggtgggtt

SEQ ID NO: 144409 - DNA, 25 bp, probe
acatgtcccaggatgagaaggtggt

SEQ ID NO: 144410 - DNA, 25 bp, probe
acagtggacggggagcaggtggagt

SEQ ID NO: 144411 - DNA, 25 bp, probe
aactccacggtgagggccgatgtct

SEQ ID NO: 144412 - DNA, 25 bp, probe
aacgcctcgtttcaggcttgtgact

SEQ ID NO: 144413 - DNA, 25 bp, probe
acaccacttgtctttaggtgggtct

SEQ ID NO: 144414 - DNA, 25 bp, probe
acacgcaactgtctagtgggccagg

SEQ ID NO: 144415 - DNA, 25 bp, probe
acagtgccaggcagtagggatccag

SEQ ID NO: 144416 - DNA, 25 bp, probe
acagttacctggcagggacgctggg

SEQ ID NO: 144417 - DNA, 25 bp, probe
acaggtacttgaaaggggctctgaa

SEQ ID NO: 144418 - DNA, 25 bp, probe
acaggtccctaatactgatgtggag

SEQ ID NO: 144419 - DNA, 25 bp, probe
acatggtacctaacacatactgtgg

SEQ ID NO: 144420 - DNA, 25 bp, probe
acatgttaccaatatcaccatcttg

SEQ ID NO: 144421 - DNA, 25 bp, probe
acatgtcacaacaataacctccata

SEQ ID NO: 144422 - DNA, 25 bp, probe
acatccacaatctcaagcactgggg

SEQ ID NO: 144423 - DNA, 25 bp, probe
acattgagcaaaagcctggctgggg

SEQ ID NO: 144424 - DNA, 25 bp, probe
acatataattgctggctggtgggtt

SEQ ID NO: 144425 - DNA, 25 bp, probe
acattgaattcttggatgcagtggc

SEQ ID NO: 144426 - DNA, 25 bp, probe
acatctgcagattcactggaggctg

SEQ ID NO: 144427 - DNA, 25 bp, probe
acatagagatatttgggacccaagg

SEQ ID NO: 144428 - DNA, 25 bp, probe
acatagacataattgttatctcctt

SEQ ID NO: 144429 - DNA, 25 bp, probe
acatcaattaaacttatgtcctatt

SEQ ID NO: 144430 - DNA, 25 bp, probe
acataattgcagtttctctgttctt

SEQ ID NO: 144431 - DNA, 25 bp, probe
acatgattgtggtttccattgccta

SEQ ID NO: 144432 - DNA, 25 bp, probe
acatgattgtggtttccattgccta

SEQ ID NO: 144433 - DNA, 25 bp, probe
acatgcatttccttgcataatccct

SEQ ID NO: 144434 - DNA, 25 bp, probe
acatcatgttcctgatgataaccca

SEQ ID NO: 144435 - DNA, 25 bp, probe
acatcatggtcctggtttctacctt

SEQ ID NO: 144436 - DNA, 25 bp, probe
acatcatggtcctggtttctacctt

SEQ ID NO: 144437 - DNA, 25 bp, probe
acatcagcggctgcaattttgctac

SEQ ID NO: 144438 - DNA, 25 bp, probe
acatcttggcctgatttgctgccac

SEQ ID NO: 144439 - DNA, 25 bp, probe
acatttgagtatccgattcgccatc

SEQ ID NO: 144440 - DNA, 25 bp, probe
acatttgtgtacagagtcctcatcc

SEQ ID NO: 144441 - DNA, 25 bp, probe
acatttgcgaactggccgcgaggat

SEQ ID NO: 144442 - DNA, 25 bp, probe
acatttagagaactgtggccgttat

SEQ ID NO: 144443 - DNA, 25 bp, probe
acatttaggaggtggtctgatcata

SEQ ID NO: 144444 - DNA, 25 bp, probe
acatttaggaggtggtctgatcata

SEQ ID NO: 144445 - DNA, 25 bp, probe
acatcttagggctggtgtcagaaat

SEQ ID NO: 144446 - DNA, 25 bp, probe
acattaaagtgcaggtcagtgaaca

SEQ ID NO: 144447 - DNA, 25 bp, probe
acattcaaagtgccctgtgcaggct

SEQ ID NO: 144448 - DNA, 25 bp, probe
acagcatcaaaggtcacgtgcggtt

SEQ ID NO: 144449 - DNA, 25 bp, probe
acatcagcaaaggcaagggcaggtt

SEQ ID NO: 144450 - DNA, 25 bp, probe
acatcgcacagtgccaggacagccc

SEQ ID NO: 144451 - DNA, 25 bp, probe
acatatcaagtcccgaggcagcaac

SEQ ID NO: 144452 - DNA, 25 bp, probe
acatacaagatcattcggcatgaag

SEQ ID NO: 144453 - DNA, 25 bp, probe
acatctctagtacttcggatcaaga

SEQ ID NO: 144454 - DNA, 25 bp, probe
acatcagtggaacttctgtactaca

SEQ ID NO: 144455 - DNA, 25 bp, probe
acatcagtggaacttctgtactaca

SEQ ID NO: 144456 - DNA, 25 bp, probe
acatattaaactgcttattcaaaag

SEQ ID NO: 144457 - DNA, 25 bp, probe
acatattgaataatccttgttagag

SEQ ID NO: 144458 - DNA, 25 bp, probe
acatcttcacaaattctagttaaca

SEQ ID NO: 144459 - DNA, 25 bp, probe
acacttgccaaaatgtcagagtccc

SEQ ID NO: 144460 - DNA, 25 bp, probe
acatttccataaatggggtcgagaa

SEQ ID NO: 144461 - DNA, 25 bp, probe
acatgtgtccaaatcggggattggt

SEQ ID NO: 144462 - DNA, 25 bp, probe
acatctgcccagattctgaggttct

SEQ ID NO: 144463 - DNA, 25 bp, probe
acattcttcgatctctgggatttat

SEQ ID NO: 144464 - DNA, 25 bp, probe
acattactcaatcaatggcttcttt

SEQ ID NO: 144465 - DNA, 25 bp, probe
acaccacctgatcagctggttattg

SEQ ID NO: 144466 - DNA, 25 bp, probe
acaacaggctgactgggtgttagtg

SEQ ID NO: 144467 - DNA, 25 bp, probe
acatagagtgtttgcagtggttaat

SEQ ID NO: 144468 - DNA, 25 bp, probe
acatagagtgtttgcagtggttaat

SEQ ID NO: 144469 - DNA, 25 bp, probe
acatggcgtgtgcgagtggctacaa

SEQ ID NO: 144470 - DNA, 25 bp, probe
acatggctgtggaggtttgaaagag

SEQ ID NO: 144471 - DNA, 25 bp, probe
acatggaggatcaccttcggaaccg

SEQ ID NO: 144472 - DNA, 25 bp, probe
acattagctctcactttcaagaagc

SEQ ID NO: 144473 - DNA, 25 bp, probe
acataagctctgccacatttcttaa

SEQ ID NO: 144474 - DNA, 25 bp, probe
acatctcagctggagccattgacct

SEQ ID NO: 144475 - DNA, 25 bp, probe
acatctcagctggagccattgacct

SEQ ID NO: 144476 - DNA, 25 bp, probe
acatcacggggcgaagtgccttctt

SEQ ID NO: 144477 - DNA, 25 bp, probe
acatcacggggcgaagtgccttctt

SEQ ID NO: 144478 - DNA, 25 bp, probe
acatcaaaaatggcactgtcccctt

SEQ ID NO: 144479 - DNA, 25 bp, probe
acatagaatacggcacagtctggtc

SEQ ID NO: 144480 - DNA, 25 bp, probe
acatagcttacaagccagctggaga

SEQ ID NO: 144481 - DNA, 25 bp, probe
acatagctggaaacaacttggagac

SEQ ID NO: 144482 - DNA, 25 bp, probe
acatgacagggaacaggaaggtggc

SEQ ID NO: 144483 - DNA, 25 bp, probe
acatatcaggttgcaaccaggtggt

SEQ ID NO: 144484 - DNA, 25 bp, probe
acattagtttctcactaggcatgtc

SEQ ID NO: 144485 - DNA, 25 bp, probe
acatggtgtcccagatctaggcagg

SEQ ID NO: 144486 - DNA, 25 bp, probe
acatgcctcttccaggtaggccatg

SEQ ID NO: 144487 - DNA, 25 bp, probe
acatgcctcttccaggtaggccatg

SEQ ID NO: 144488 - DNA, 25 bp, probe
acatcctcaatcctgttatgggtgt

SEQ ID NO: 144489 - DNA, 25 bp, probe
acatcttatgccagaattgtggtgg

SEQ ID NO: 144490 - DNA, 25 bp, probe
acatcattatgcctataatgtgccg

SEQ ID NO: 144491 - DNA, 25 bp, probe
acatcagtcagacaagaatcctggg

SEQ ID NO: 144492 - DNA, 25 bp, probe
acatcaacagcactatcaaccctgc

SEQ ID NO: 144493 - DNA, 25 bp, probe
acataatccacaagcaagcacctcc

SEQ ID NO: 144494 - DNA, 25 bp, probe
acataaacaatgccaacttctccaa

SEQ ID NO: 144495 - DNA, 25 bp, probe
acataaacaatgccaacttctccaa

SEQ ID NO: 144496 - DNA, 25 bp, probe
acatcagagacaaggaagcccccca

SEQ ID NO: 144497 - DNA, 25 bp, probe
acatcagcagcagtggtggagcccc

SEQ ID NO: 144498 - DNA, 25 bp, probe
acatcacacatccagagctaaagcc

SEQ ID NO: 144499 - DNA, 25 bp, probe
acatagcccacatcatagagctgct

SEQ ID NO: 144500 - DNA, 25 bp, probe
acatggcccaggacaaggttgctca

SEQ ID NO: 144501 - DNA, 25 bp, probe
acatctgccctaatcagaggggcca

SEQ ID NO: 144502 - DNA, 25 bp, probe
acacgcactttatgagggagacccc

SEQ ID NO: 144503 - DNA, 25 bp, probe
acatggactttttgtgggactccag

SEQ ID NO: 144504 - DNA, 25 bp, probe
acatgcggcctgcatggtgggagct

SEQ ID NO: 144505 - DNA, 25 bp, probe
acatgtgcgcacacgtgtgcggtct

SEQ ID NO: 144506 - DNA, 25 bp, probe
acatgactgtctgtgttgcggactt

SEQ ID NO: 144507 - DNA, 25 bp, probe
acatgaccagctgatctcggtgacc

SEQ ID NO: 144508 - DNA, 25 bp, probe
acatcccaggacgtcagttctgtcc

SEQ ID NO: 144509 - DNA, 25 bp, probe
acatccttggggagattgctgtgtc

SEQ ID NO: 144510 - DNA, 25 bp, probe
acatgcctttggtatcagcaatttt

SEQ ID NO: 144511 - DNA, 25 bp, probe
acatcatatttgggataacattttt

SEQ ID NO: 144512 - DNA, 25 bp, probe
acatcatatttgggataacattttt

SEQ ID NO: 144513 - DNA, 25 bp, probe
acatcagttcattggtcaaatattt

SEQ ID NO: 144514 - DNA, 25 bp, probe
acatcagttcattggtcaaatattt

SEQ ID NO: 144515 - DNA, 25 bp, probe
acatgatgtcagatggtgaattttt

SEQ ID NO: 144516 - DNA, 25 bp, probe
acatggtggctcggtacaggttgta

SEQ ID NO: 144517 - DNA, 25 bp, probe
acaaggttcagttcacagagattga

SEQ ID NO: 144518 - DNA, 25 bp, probe
acatcggttcaggaggagacagtca

SEQ ID NO: 144519 - DNA, 25 bp, probe
acatcatggttcagcagccagggcc

SEQ ID NO: 144520 - DNA, 25 bp, probe
acatcatggttcagcagccagggcc

SEQ ID NO: 144521 - DNA, 25 bp, probe
acatctgtgttgagcaggacaggca

SEQ ID NO: 144522 - DNA, 25 bp, probe
acacctacttcgtgacaggcatcgt

SEQ ID NO: 144523 - DNA, 25 bp, probe
acaactactagccggaaggtccgtg

SEQ ID NO: 144524 - DNA, 25 bp, probe
aaattaccaaataacgagctgcacg

SEQ ID NO: 144525 - DNA, 25 bp, probe
aaatgcgtccaacatggcgaccatc

SEQ ID NO: 144526 - DNA, 25 bp, probe
acaggtgtacaacacggacaccgac

SEQ ID NO: 144527 - DNA, 25 bp, probe
acaggtgtacaacacggacaccgac

SEQ ID NO: 144528 - DNA, 25 bp, probe
acatggaggacccaacaggaggccg

SEQ ID NO: 144529 - DNA, 25 bp, probe
acatgagggtcagcgacgtggggag

SEQ ID NO: 144530 - DNA, 25 bp, probe
acatgggcttcacgtggtttggaga

SEQ ID NO: 144531 - DNA, 25 bp, probe
acatggtgattctcttgtccaggca

SEQ ID NO: 144532 - DNA, 25 bp, probe
acatggtgattctcttgtccaggca

SEQ ID NO: 144533 - DNA, 25 bp, probe
acatatggtctctgggtatcatggc

SEQ ID NO: 144534 - DNA, 25 bp, probe
acatatggcccgggagctacaacaa

SEQ ID NO: 144535 - DNA, 25 bp, probe
acagtggccctgtgcaggctgaaaa

SEQ ID NO: 144536 - DNA, 25 bp, probe
acaggaggctcgggagcccacaagc

SEQ ID NO: 144537 - DNA, 25 bp, probe
acaggacgcagatctctcctaaagc

SEQ ID NO: 144538 - DNA, 25 bp, probe
acatagacacattgtctctttaaaa

SEQ ID NO: 144539 - DNA, 25 bp, probe
acagctgaccttattgtgaagaaaa

SEQ ID NO: 144540 - DNA, 25 bp, probe
acactggtcacgtttggaaagaata

SEQ ID NO: 144541 - DNA, 25 bp, probe
acactggtcacgtttggaaagaata

SEQ ID NO: 144542 - DNA, 25 bp, probe
acagtgaggactgttctggagaaaa

SEQ ID NO: 144543 - DNA, 25 bp, probe
acaggtgagttttgttggagaagaa

SEQ ID NO: 144544 - DNA, 25 bp, probe
acagggaggttcattgtgattaata

SEQ ID NO: 144545 - DNA, 25 bp, probe
acacctaggttcacggtctgagtaa

SEQ ID NO: 144546 - DNA, 25 bp, probe
acacggaggattaccggctgcgact

SEQ ID NO: 144547 - DNA, 25 bp, probe
acacggaggattaccggctgcgact

SEQ ID NO: 144548 - DNA, 25 bp, probe
acagggaacaagacacggctgggtt

SEQ ID NO: 144549 - DNA, 25 bp, probe
acagggaacaagacacggctgggtt

SEQ ID NO: 144550 - DNA, 25 bp, probe
acatgggtagcgaccgcgtgttggt

SEQ ID NO: 144551 - DNA, 25 bp, probe
acagggtggcagtcacggagtgaat

SEQ ID NO: 144552 - DNA, 25 bp, probe
acagggtggagatcagattggatac

SEQ ID NO: 144553 - DNA, 25 bp, probe
acaggtgatggcaactccctggaag

SEQ ID NO: 144554 - DNA, 25 bp, probe
acatggatggagattccctggatca

SEQ ID NO: 144555 - DNA, 25 bp, probe
acatccatgatgttttccagttaac

SEQ ID NO: 144556 - DNA, 25 bp, probe
acatctcggattttcctcttaacaa

SEQ ID NO: 144557 - DNA, 25 bp, probe
acatctcggattttcctcttaacaa

SEQ ID NO: 144558 - DNA, 25 bp, probe
acactgacttatttccctaaactat

SEQ ID NO: 144559 - DNA, 25 bp, probe
acagaatactaaagcacctcaaaaa

SEQ ID NO: 144560 - DNA, 25 bp, probe
acataaactgtaccaccttaaccat

SEQ ID NO: 144561 - DNA, 25 bp, probe
acatacaagtgttctcacctcattg

SEQ ID NO: 144562 - DNA, 25 bp, probe
acatacaagtgttctcacctcattg

SEQ ID NO: 144563 - DNA, 25 bp, probe
acatatcctgtgaactcctagctgt

SEQ ID NO: 144564 - DNA, 25 bp, probe
acataactgcttcttggagctttgg

SEQ ID NO: 144565 - DNA, 25 bp, probe
acataactgcttcttggagctttgg

SEQ ID NO: 144566 - DNA, 25 bp, probe
acaggggctatgggtttgctttggt

SEQ ID NO: 144567 - DNA, 25 bp, probe
acaggtcttattggaattgcttatg

SEQ ID NO: 144568 - DNA, 25 bp, probe
acaggccttgagcagaattttctga

SEQ ID NO: 144569 - DNA, 25 bp, probe
acatggctcctagaagtaattggtt

SEQ ID NO: 144570 - DNA, 25 bp, probe
acatggctcctagaagtaattggtt

SEQ ID NO: 144571 - DNA, 25 bp, probe
aacgccctgacaaactacggcttct

SEQ ID NO: 144572 - DNA, 25 bp, probe
aatcgaccgaaagcaagaggtgcct

SEQ ID NO: 144573 - DNA, 25 bp, probe
acaccccgaggtgaaaagtgccatc

SEQ ID NO: 144574 - DNA, 25 bp, probe
aacccggaggtgattcagaacctgg

SEQ ID NO: 144575 - DNA, 25 bp, probe
acaccctgggttctgagaaacttgg

SEQ ID NO: 144576 - DNA, 25 bp, probe
aacgactacggtctggacaactttg

SEQ ID NO: 144577 - DNA, 25 bp, probe
aactactaacgtcagaaccaatatt

SEQ ID NO: 144578 - DNA, 25 bp, probe
taaacctaacggatatcctaataga

SEQ ID NO: 144579 - DNA, 25 bp, probe
acaaccttacctagatatctgctac

SEQ ID NO: 144580 - DNA, 25 bp, probe
acagacctttgtaacaagtgtacag

SEQ ID NO: 144581 - DNA, 25 bp, probe
acagacctttgtaacaagtgtacag

SEQ ID NO: 144582 - DNA, 25 bp, probe
acagcccttttctcacagagttatt

SEQ ID NO: 144583 - DNA, 25 bp, probe
acagtcccttctgtacaggacaatg

SEQ ID NO: 144584 - DNA, 25 bp, probe
aagcccctctctgttgaagtcaggg

SEQ ID NO: 144585 - DNA, 25 bp, probe
aagttcccttctatatcctcaaggt

SEQ ID NO: 144586 - DNA, 25 bp, probe
acagttccttttagactcaccagag

SEQ ID NO: 144587 - DNA, 25 bp, probe
acatgttcactgtttaactacatta

SEQ ID NO: 144588 - DNA, 25 bp, probe
acagtaatcagagttaccattattt

SEQ ID NO: 144589 - DNA, 25 bp, probe
acagaattccatagcccctaatgtt

SEQ ID NO: 144590 - DNA, 25 bp, probe
acaggtcagtaagcctcattatttg

SEQ ID NO: 144591 - DNA, 25 bp, probe
acaggtacagaagccgaggacgtgc

SEQ ID NO: 144592 - DNA, 25 bp, probe
acaggtcacttggccaaggccacag

SEQ ID NO: 144593 - DNA, 25 bp, probe
acatggtcctgaaccgcatggcaaa

SEQ ID NO: 144594 - DNA, 25 bp, probe
acatagctcctaccacagatgtgga

SEQ ID NO: 144595 - DNA, 25 bp, probe
acatacccacatcccagcatgtgta

SEQ ID NO: 144596 - DNA, 25 bp, probe
acatcaccacagccccagatggtga

SEQ ID NO: 144597 - DNA, 25 bp, probe
acatccccagctgtatgaggagagc

SEQ ID NO: 144598 - DNA, 25 bp, probe
acatgtactaagggatgcagtggag

SEQ ID NO: 144599 - DNA, 25 bp, probe
acaggaccacgacatgcaggggctg

SEQ ID NO: 144600 - DNA, 25 bp, probe
acagggccacggccctgaggcggat

SEQ ID NO: 144601 - DNA, 25 bp, probe
acatgctggaaccttccatgggggt

SEQ ID NO: 144602 - DNA, 25 bp, probe
acaggagagacaccgcctgcggtgg

SEQ ID NO: 144603 - DNA, 25 bp, probe
acagtgaacactgcttctcgaatgg

SEQ ID NO: 144604 - DNA, 25 bp, probe
acatctgaatccatcttctcaacat

SEQ ID NO: 144605 - DNA, 25 bp, probe
acatgtgcaagctgtgcctacaact

SEQ ID NO: 144606 - DNA, 25 bp, probe
acatgaggcagggtctccacaacat

SEQ ID NO: 144607 - DNA, 25 bp, probe
acatgagtgtctgtccagactcagt

SEQ ID NO: 144608 - DNA, 25 bp, probe
acatactgtgatgaccgactcagcc

SEQ ID NO: 144609 - DNA, 25 bp, probe
acatactgagacctccagatgcact

SEQ ID NO: 144610 - DNA, 25 bp, probe
acatacggatcttccaagagcaagt

SEQ ID NO: 144611 - DNA, 25 bp, probe
acatcggcaacttcaaagatgccag

SEQ ID NO: 144612 - DNA, 25 bp, probe
acatacgcaaaccacctgtgacagc

SEQ ID NO: 144613 - DNA, 25 bp, probe
acatatgggaaccaacgtcatcgtt

SEQ ID NO: 144614 - DNA, 25 bp, probe
acatatgggaaccaacgtcatcgtt

SEQ ID NO: 144615 - DNA, 25 bp, probe
acatatgggtagcaagttctccatt

SEQ ID NO: 144616 - DNA, 25 bp, probe
acatgttgaataccaagaactgccc

SEQ ID NO: 144617 - DNA, 25 bp, probe
acatgtgttacccataaacactgcc

SEQ ID NO: 144618 - DNA, 25 bp, probe
acagtttacgcaggacattcttgcc

SEQ ID NO: 144619 - DNA, 25 bp, probe
acatgcttctaccaagttatttctc

SEQ ID NO: 144620 - DNA, 25 bp, probe
acatctgtaaagcaatcaattgtat

SEQ ID NO: 144621 - DNA, 25 bp, probe
acatcttcgaacgcatcgcaggtga

SEQ ID NO: 144622 - DNA, 25 bp, probe
acatcgtcatggtgacccagtgtgt

SEQ ID NO: 144623 - DNA, 25 bp, probe
acatgcttcatcgtcggtccgggct

SEQ ID NO: 144624 - DNA, 25 bp, probe
acatgttgcaacaagagcttctggg

SEQ ID NO: 144625 - DNA, 25 bp, probe
acatcagtgctacaggctttgtaca

SEQ ID NO: 144626 - DNA, 25 bp, probe
acatggtgcccctagctttatatat

SEQ ID NO: 144627 - DNA, 25 bp, probe
acatggtttacatgttccaatatga

SEQ ID NO: 144628 - DNA, 25 bp, probe
acaggatttcaatatgtacagaatt

SEQ ID NO: 144629 - DNA, 25 bp, probe
acagtatttaaccttgcacatgcat

SEQ ID NO: 144630 - DNA, 25 bp, probe
acagtatttaaccttgcacatgcat

SEQ ID NO: 144631 - DNA, 25 bp, probe
acatctaataaaccagtcctgcatc

SEQ ID NO: 144632 - DNA, 25 bp, probe
acatctaacaggtatcattcctatc

SEQ ID NO: 144633 - DNA, 25 bp, probe
acatctaacgagtagctcattttct

SEQ ID NO: 144634 - DNA, 25 bp, probe
acatctcacactaacaggcaaattc

SEQ ID NO: 144635 - DNA, 25 bp, probe
acatctcacactaacaggcaaattc

SEQ ID NO: 144636 - DNA, 25 bp, probe
acatcatcactgaatacatggagaa

SEQ ID NO: 144637 - DNA, 25 bp, probe
acatcatcaagggtgaggcagagac

SEQ ID NO: 144638 - DNA, 25 bp, probe
acatcctgaatgggggcagtgagga

SEQ ID NO: 144639 - DNA, 25 bp, probe
acatcctcactggtcgggagaggtc

SEQ ID NO: 144640 - DNA, 25 bp, probe
acatcctactggtagatggaacagc

SEQ ID NO: 144641 - DNA, 25 bp, probe
acatctcgcctggtacaggaacata

SEQ ID NO: 144642 - DNA, 25 bp, probe
acatctcgcctggtacaggaacata

SEQ ID NO: 144643 - DNA, 25 bp, probe
acatgtccgctggcccaggaagaaa

SEQ ID NO: 144644 - DNA, 25 bp, probe
acatgtccgctggcccaggaagaaa

SEQ ID NO: 144645 - DNA, 25 bp, probe
acatgtaccagcggaaggaaggaag

SEQ ID NO: 144646 - DNA, 25 bp, probe
acatggactacgcccaagcaaggtt

SEQ ID NO: 144647 - DNA, 25 bp, probe
acatgatgcctaagtccttcaagtt

SEQ ID NO: 144648 - DNA, 25 bp, probe
acatgtgcagatattcctaaagttt

SEQ ID NO: 144649 - DNA, 25 bp, probe
acatgtatatttgttttatatttat

SEQ ID NO: 144650 - DNA, 25 bp, probe
acatgtagatttcaattgtcttttc

SEQ ID NO: 144651 - DNA, 25 bp, probe
acaggagaattttactgtgtttctt

SEQ ID NO: 144652 - DNA, 25 bp, probe
acagggacatgtactgagttccttc

SEQ ID NO: 144653 - DNA, 25 bp, probe
acagggacatgtactgagttccttc

SEQ ID NO: 144654 - DNA, 25 bp, probe
acagcaggatcaagacaacccgttg

SEQ ID NO: 144655 - DNA, 25 bp, probe
acagaatatgaacaaccccttgaga

SEQ ID NO: 144656 - DNA, 25 bp, probe
acatcacttgaacaaccctcagaaa

SEQ ID NO: 144657 - DNA, 25 bp, probe
acacaggatggacaagcccaccaac

SEQ ID NO: 144658 - DNA, 25 bp, probe
acatcgagcggaagaactacattca

SEQ ID NO: 144659 - DNA, 25 bp, probe
acatctgggtgatgcaacctgcata

SEQ ID NO: 144660 - DNA, 25 bp, probe
acactgaagtataatcacactgaat

SEQ ID NO: 144661 - DNA, 25 bp, probe
acatctcgagtatacatcattctgg

SEQ ID NO: 144662 - DNA, 25 bp, probe
acatcctgagctaagacatactgtc

SEQ ID NO: 144663 - DNA, 25 bp, probe
acatcactgagtcagtcaactccat

SEQ ID NO: 144664 - DNA, 25 bp, probe
acatctcggaggtacaaccctggga

SEQ ID NO: 144665 - DNA, 25 bp, probe
acatctactgagctaatagccacta

SEQ ID NO: 144666 - DNA, 25 bp, probe
acatcccatccacaatactactgat

SEQ ID NO: 144667 - DNA, 25 bp, probe
acatcaactccaaaactgaagctgc

SEQ ID NO: 144668 - DNA, 25 bp, probe
acatgaagttacaaacatacagcca

SEQ ID NO: 144669 - DNA, 25 bp, probe
acatgaatgtattgtacactgacgc

SEQ ID NO: 144670 - DNA, 25 bp, probe
acatcaatttcttaacatgagctcc

SEQ ID NO: 144671 - DNA, 25 bp, probe
acaggtttatgataatggatcgctt

SEQ ID NO: 144672 - DNA, 25 bp, probe
acaggtgtattactttggaccatgt

SEQ ID NO: 144673 - DNA, 25 bp, probe
acaggcatgttcttgttttctcctt

SEQ ID NO: 144674 - DNA, 25 bp, probe
acagatgtacttctttatctccctg

SEQ ID NO: 144675 - DNA, 25 bp, probe
acatgtatacttccatcgtgttcct

SEQ ID NO: 144676 - DNA, 25 bp, probe
acatggaggcctgacagctgttgtc

SEQ ID NO: 144677 - DNA, 25 bp, probe
acatgaggcctgggcctctgcgttc

SEQ ID NO: 144678 - DNA, 25 bp, probe
acagagtactgactctgcctggttc

SEQ ID NO: 144679 - DNA, 25 bp, probe
acagagtcacggtgcatggggtccc

SEQ ID NO: 144680 - DNA, 25 bp, probe
acagattcccgactgtggcggttag

SEQ ID NO: 144681 - DNA, 25 bp, probe
acatgatcatgcgggagtgctggca

SEQ ID NO: 144682 - DNA, 25 bp, probe
acatgatcatgcgggagtgctggca

SEQ ID NO: 144683 - DNA, 25 bp, probe
acaggtgtgagccatcatgctcgcc

SEQ ID NO: 144684 - DNA, 25 bp, probe
acaggtgtgagccatcatgctcgcc

SEQ ID NO: 144685 - DNA, 25 bp, probe
acagggacatgcctcatgatccttt

SEQ ID NO: 144686 - DNA, 25 bp, probe
acagggacatgcctcatgatccttt

SEQ ID NO: 144687 - DNA, 25 bp, probe
acaggagagaccagtccttccttgt

SEQ ID NO: 144688 - DNA, 25 bp, probe
acatggaaaccttgtacactcgctt

SEQ ID NO: 144689 - DNA, 25 bp, probe
acatggaaaccttgtacactcgctt

SEQ ID NO: 144690 - DNA, 25 bp, probe
acaggacaagccagcttacctgcag

SEQ ID NO: 144691 - DNA, 25 bp, probe
acaggaccaggcaacacataccgta

SEQ ID NO: 144692 - DNA, 25 bp, probe
acaggacaaactagacggccgtaga

SEQ ID NO: 144693 - DNA, 25 bp, probe
acaggaatatccatgtcggcttgta

SEQ ID NO: 144694 - DNA, 25 bp, probe
acaggaatatccatgtcggcttgta

SEQ ID NO: 144695 - DNA, 25 bp, probe
acaggaacattcattgccctggaca

SEQ ID NO: 144696 - DNA, 25 bp, probe
acatggaaattctttcacttaccag

SEQ ID NO: 144697 - DNA, 25 bp, probe
acatggcacctgaagtcatcactcg

SEQ ID NO: 144698 - DNA, 25 bp, probe
acatggcacctgaagtcatcactcg

SEQ ID NO: 144699 - DNA, 25 bp, probe
acatgtcactggacatcctcagtgc

SEQ ID NO: 144700 - DNA, 25 bp, probe
acataaccagcaagctctcagatgc

SEQ ID NO: 144701 - DNA, 25 bp, probe
acagtatctgcagtcgcttggatct

SEQ ID NO: 144702 - DNA, 25 bp, probe
acatgtatctgaggcagctattccg

SEQ ID NO: 144703 - DNA, 25 bp, probe
acatgcatcagatgtacattctcca

SEQ ID NO: 144704 - DNA, 25 bp, probe
acagtaatacattgcttaatatgaa

SEQ ID NO: 144705 - DNA, 25 bp, probe
acaggaacaacatttacaactcatt

SEQ ID NO: 144706 - DNA, 25 bp, probe
acaggttctagatttcatactccat

SEQ ID NO: 144707 - DNA, 25 bp, probe
acaggaatggagaatcacatttaat

SEQ ID NO: 144708 - DNA, 25 bp, probe
acaaaagggagaacatggccaatag

SEQ ID NO: 144709 - DNA, 25 bp, probe
acagacggggaaactgaggctcaga

SEQ ID NO: 144710 - DNA, 25 bp, probe
acatgatgggggtctacgccccaac

SEQ ID NO: 144711 - DNA, 25 bp, probe
acaggggtctgagtaccagccctag

SEQ ID NO: 144712 - DNA, 25 bp, probe
acaggctgggtgttcccagcagccc

SEQ ID NO: 144713 - DNA, 25 bp, probe
acagatgtggttgcatcctaactcc

SEQ ID NO: 144714 - DNA, 25 bp, probe
acaggtgtggctgactctgagccca

SEQ ID NO: 144715 - DNA, 25 bp, probe
acaggacggtttatgagcacacaat

SEQ ID NO: 144716 - DNA, 25 bp, probe
acaggacagtttccctacaagaact

SEQ ID NO: 144717 - DNA, 25 bp, probe
acaggcacgtttattttgctgaaat

SEQ ID NO: 144718 - DNA, 25 bp, probe
acaggggtggccatatttgggcagt

SEQ ID NO: 144719 - DNA, 25 bp, probe
acaggggtggccatatttgggcagt

SEQ ID NO: 144720 - DNA, 25 bp, probe
acaggtgggcccatattctggtgcc

SEQ ID NO: 144721 - DNA, 25 bp, probe
acagggtgaagccctatgtccatgg

SEQ ID NO: 144722 - DNA, 25 bp, probe
aaggccaaacctctgttcagtgtaa

SEQ ID NO: 144723 - DNA, 25 bp, probe
aaggccaaacctctgttcagtgtaa

SEQ ID NO: 144724 - DNA, 25 bp, probe
acaggcaataaactttcttcggtga

SEQ ID NO: 144725 - DNA, 25 bp, probe
acagggataacagcttcctccaggt

SEQ ID NO: 144726 - DNA, 25 bp, probe
acagggataacagcttcctccaggt

SEQ ID NO: 144727 - DNA, 25 bp, probe
acaggcgagaactctcaactccaga

SEQ ID NO: 144728 - DNA, 25 bp, probe
acaggcgagaactctcaactccaga

SEQ ID NO: 144729 - DNA, 25 bp, probe
acatccctgtagtgccaactgaagt

SEQ ID NO: 144730 - DNA, 25 bp, probe
acagtccagcaagggccaaagaggt

SEQ ID NO: 144731 - DNA, 25 bp, probe
acagatccacaggtatgtaaaagac

SEQ ID NO: 144732 - DNA, 25 bp, probe
acaagcggatctctgtagacgaagc

SEQ ID NO: 144733 - DNA, 25 bp, probe
acacgggaagttcaccagcaagtcg

SEQ ID NO: 144734 - DNA, 25 bp, probe
acatgagggaaataagcaaagaggg

SEQ ID NO: 144735 - DNA, 25 bp, probe
acatgcagagcgtgtggaccgaaga

SEQ ID NO: 144736 - DNA, 25 bp, probe
acatgcagacgccgagatgactggc

SEQ ID NO: 144737 - DNA, 25 bp, probe
acatcatcagcgcgcaagagggcag

SEQ ID NO: 144738 - DNA, 25 bp, probe
acatccggaagctggggcagatccc

SEQ ID NO: 144739 - DNA, 25 bp, probe
acatcccgagagtgctggacatgct

SEQ ID NO: 144740 - DNA, 25 bp, probe
acatcagctcctggttcatggaagc

SEQ ID NO: 144741 - DNA, 25 bp, probe
acatcagcaaccatccttgttgccc

SEQ ID NO: 144742 - DNA, 25 bp, probe
acatcgagaagattcctgtggatcc

SEQ ID NO: 144743 - DNA, 25 bp, probe
acaagcagattactgcacgggcaac

SEQ ID NO: 144744 - DNA, 25 bp, probe
acagggcacatactgactgggacac

SEQ ID NO: 144745 - DNA, 25 bp, probe
acagggcagtgacaagtggaggggg

SEQ ID NO: 144746 - DNA, 25 bp, probe
acagtggtggtccggtggagggaag

SEQ ID NO: 144747 - DNA, 25 bp, probe
acatgtgtgggtgcgaggaggctgt

SEQ ID NO: 144748 - DNA, 25 bp, probe
acatgctgtgtcctcgtggggaggt

SEQ ID NO: 144749 - DNA, 25 bp, probe
acatctgtgtttcaagtggggctcg

SEQ ID NO: 144750 - DNA, 25 bp, probe
acatcctgattcttaagtcagtcct

SEQ ID NO: 144751 - DNA, 25 bp, probe
acatctggatttttagtcattctaa

SEQ ID NO: 144752 - DNA, 25 bp, probe
acagcaggaatcagtcagtatctgc

SEQ ID NO: 144753 - DNA, 25 bp, probe
acatgctgaaattcgtgagtcacct

SEQ ID NO: 144754 - DNA, 25 bp, probe
acatcgatgagatcctcagccactc

SEQ ID NO: 144755 - DNA, 25 bp, probe
acatggatagattgcctagtggtga

SEQ ID NO: 144756 - DNA, 25 bp, probe
acatcagatgtttctttgcagtggc

SEQ ID NO: 144757 - DNA, 25 bp, probe
acatggattatgttcctctgtgtgc

SEQ ID NO: 144758 - DNA, 25 bp, probe
acatggattatgttcctctgtgtgc

SEQ ID NO: 144759 - DNA, 25 bp, probe
acatggcatgtattcttttcagtct

SEQ ID NO: 144760 - DNA, 25 bp, probe
acatggcatgtattcttttcagtct

SEQ ID NO: 144761 - DNA, 25 bp, probe
acatgtattaaattcttctgtctat

SEQ ID NO: 144762 - DNA, 25 bp, probe
acagtgcttacttaccttactaact

SEQ ID NO: 144763 - DNA, 25 bp, probe
acaggctctttaatccatctggaaa

SEQ ID NO: 144764 - DNA, 25 bp, probe
acatgtgtccttagtcaactgtacc

SEQ ID NO: 144765 - DNA, 25 bp, probe
acagttcgctcattccaactaatca

SEQ ID NO: 144766 - DNA, 25 bp, probe
acatgtcctgcatcttctataaaca

SEQ ID NO: 144767 - DNA, 25 bp, probe
acatgctcaagattgcctccatgca

SEQ ID NO: 144768 - DNA, 25 bp, probe
acatctctagtgtagctgccacatt

SEQ ID NO: 144769 - DNA, 25 bp, probe
acatcttcaggatgattcatctagc

SEQ ID NO: 144770 - DNA, 25 bp, probe
acatcgtaggcatcaatcttggcaa

SEQ ID NO: 144771 - DNA, 25 bp, probe
acatccttggcagaacctgggaagg

SEQ ID NO: 144772 - DNA, 25 bp, probe
acatccaccgggtgtgtgggaatgc

SEQ ID NO: 144773 - DNA, 25 bp, probe
acagtccccaggagatgtggaactc

SEQ ID NO: 144774 - DNA, 25 bp, probe
acagtgacaggaaggtatggctgct

SEQ ID NO: 144775 - DNA, 25 bp, probe
acagtgacaggaaggtatggctgct

SEQ ID NO: 144776 - DNA, 25 bp, probe
acagttagagtaggttgctatggtt

SEQ ID NO: 144777 - DNA, 25 bp, probe
acaggcatggggagattgccaggct

SEQ ID NO: 144778 - DNA, 25 bp, probe
acatcgagggggcctggccagtcat

SEQ ID NO: 144779 - DNA, 25 bp, probe
acatctggatggcggtgtgccttct

SEQ ID NO: 144780 - DNA, 25 bp, probe
acatctggatggctgtgtgtctgct

SEQ ID NO: 144781 - DNA, 25 bp, probe
acatctgctggagtgttgctgttgc

SEQ ID NO: 144782 - DNA, 25 bp, probe
acatccttaagaatgctgatctcag

SEQ ID NO: 144783 - DNA, 25 bp, probe
acatccttaagaatgctgatctcag

SEQ ID NO: 144784 - DNA, 25 bp, probe
acatccttattgacatggtcctgaa

SEQ ID NO: 144785 - DNA, 25 bp, probe
catcagaatcacctgtgtatttcag

SEQ ID NO: 144786 - DNA, 25 bp, probe
acatcgtcatggagcttgtgcaggg

SEQ ID NO: 144787 - DNA, 25 bp, probe
acaggctggagtcgttgtgcctcag

SEQ ID NO: 144788 - DNA, 25 bp, probe
acatgcctggagggatgtctggctg

SEQ ID NO: 144789 - DNA, 25 bp, probe
acatcatcgaggggctctgctgtgt

SEQ ID NO: 144790 - DNA, 25 bp, probe
acatcatcgtggtgtccatgatctt

SEQ ID NO: 144791 - DNA, 25 bp, probe
acacacatggtccgtgccatgtcac

SEQ ID NO: 144792 - DNA, 25 bp, probe
acatgccaggccaggcctggggccc

SEQ ID NO: 144793 - DNA, 25 bp, probe
acaggtacaatgacctctggggacc

SEQ ID NO: 144794 - DNA, 25 bp, probe
caaattacttacttctggcggggct

SEQ ID NO: 144795 - DNA, 25 bp, probe
acagattcctggtcttttggggtgc

SEQ ID NO: 144796 - DNA, 25 bp, probe
acaggtactcttctgtttgtgggca

SEQ ID NO: 144797 - DNA, 25 bp, probe
acagtgatatctccctttttgtggc

SEQ ID NO: 144798 - DNA, 25 bp, probe
acagtatatcccaagtgcactttct

SEQ ID NO: 144799 - DNA, 25 bp, probe
acagtgttaggcctggcacagtgtc

SEQ ID NO: 144800 - DNA, 25 bp, probe
acaggccttggcttggaaggctgga

SEQ ID NO: 144801 - DNA, 25 bp, probe
acatcgccttcctgcagaatgtgct

SEQ ID NO: 144802 - DNA, 25 bp, probe
acatctactccctcaggatgagcgt

SEQ ID NO: 144803 - DNA, 25 bp, probe
acatctactccctcaggatgagcgt

SEQ ID NO: 144804 - DNA, 25 bp, probe
acatctcctaccgcagggagtctgc

SEQ ID NO: 144805 - DNA, 25 bp, probe
acagaccacaccccaatggagattg

SEQ ID NO: 144806 - DNA, 25 bp, probe
acagttatacatcttcaggatgatt

SEQ ID NO: 144807 - DNA, 25 bp, probe
acactatgatcctgactagaatgct

SEQ ID NO: 144808 - DNA, 25 bp, probe
acatctattctcaaagctaaagggt

SEQ ID NO: 144809 - DNA, 25 bp, probe
acatgtattgcgggcgctctagagg

SEQ ID NO: 144810 - DNA, 25 bp, probe
acatgtattccatcgtgctggtaga

SEQ ID NO: 144811 - DNA, 25 bp, probe
acatgtcttcaagcgagctagccct

SEQ ID NO: 144812 - DNA, 25 bp, probe
acagtctacaagggaaagtggcatg

SEQ ID NO: 144813 - DNA, 25 bp, probe
acagtgatcaacccagagacgggcg

SEQ ID NO: 144814 - DNA, 25 bp, probe
acaggacatgtcccaggatgagaag

SEQ ID NO: 144815 - DNA, 25 bp, probe
acagggcatccccaagcagaaaggc

SEQ ID NO: 144816 - DNA, 25 bp, probe
acagtgtggccctaaattacagcgt

SEQ ID NO: 144817 - DNA, 25 bp, probe
acactgccaggctaaaattacggcc

SEQ ID NO: 144818 - DNA, 25 bp, probe
acatctgcctgtcacaatatattct

SEQ ID NO: 144819 - DNA, 25 bp, probe
acatctgcctgtcacaatatattct

SEQ ID NO: 144820 - DNA, 25 bp, probe
acatcctctggttgccatatatcat

SEQ ID NO: 144821 - DNA, 25 bp, probe
acatctgtctggcgatcagcatcac

SEQ ID NO: 144822 - DNA, 25 bp, probe
acatctttgacactctgcagactgc

SEQ ID NO: 144823 - DNA, 25 bp, probe
acatgctgagctacagcccagaagc

SEQ ID NO: 144824 - DNA, 25 bp, probe
acatgctgagctacagcccagaagc

SEQ ID NO: 144825 - DNA, 25 bp, probe
acatgtcatgctgcccaaggacata

SEQ ID NO: 144826 - DNA, 25 bp, probe
acatgtcatgctgcccaaggacata

SEQ ID NO: 144827 - DNA, 25 bp, probe
acatgattcatgagccagaaccaca

SEQ ID NO: 144828 - DNA, 25 bp, probe
acatgattctagtcaagacggcatc

SEQ ID NO: 144829 - DNA, 25 bp, probe
acatggtccatgtcaaaaggcattg

SEQ ID NO: 144830 - DNA, 25 bp, probe
acagtgataagatcatccgacttta

SEQ ID NO: 144831 - DNA, 25 bp, probe
acatggcctaggtcaccaattttat

SEQ ID NO: 144832 - DNA, 25 bp, probe
acagggcttgtgcattcagattttt

SEQ ID NO: 144833 - DNA, 25 bp, probe
acagggcttgtgcattcagattttt

SEQ ID NO: 144834 - DNA, 25 bp, probe
acaggatgctgtgttgtcaacaaac

SEQ ID NO: 144835 - DNA, 25 bp, probe
acaggatcatgtaaatgctcaaaga

SEQ ID NO: 144836 - DNA, 25 bp, probe
acaggctattagtcatgatagcgaa

SEQ ID NO: 144837 - DNA, 25 bp, probe
acatcctatctagctgcaaggtata

SEQ ID NO: 144838 - DNA, 25 bp, probe
acatgccttgtagctaagtctttct

SEQ ID NO: 144839 - DNA, 25 bp, probe
acatcctcatcaagcctgagacttt

SEQ ID NO: 144840 - DNA, 25 bp, probe
acatcgctcacatagtggagcttct

SEQ ID NO: 144841 - DNA, 25 bp, probe
acatcctatctttatatggccatat

SEQ ID NO: 144842 - DNA, 25 bp, probe
acatgccaacataaatatggcgatt

SEQ ID NO: 144843 - DNA, 25 bp, probe
acatgctcacaaatacatcaggtct

SEQ ID NO: 144844 - DNA, 25 bp, probe
acagtatcaaatgcaagcctcccct

SEQ ID NO: 144845 - DNA, 25 bp, probe
acagatgcacgagaaatccatcccc

SEQ ID NO: 144846 - DNA, 25 bp, probe
acagatatggaccaacacctccttc

SEQ ID NO: 144847 - DNA, 25 bp, probe
acaggatggcgccaaactcagcctt

SEQ ID NO: 144848 - DNA, 25 bp, probe
acaggaagctgtgtgcacgcagcct

SEQ ID NO: 144849 - DNA, 25 bp, probe
acagtgagacttacagacgcatcct

SEQ ID NO: 144850 - DNA, 25 bp, probe
acatgtggactgcaggccacatctt

SEQ ID NO: 144851 - DNA, 25 bp, probe
acatggagaccgtgaccagtgctgc

SEQ ID NO: 144852 - DNA, 25 bp, probe
acacggacaggttgatgccagagcc

SEQ ID NO: 144853 - DNA, 25 bp, probe
acacggacaggttgatgccagagcc

SEQ ID NO: 144854 - DNA, 25 bp, probe
acaggtcaagtggtagccatgaaaa

SEQ ID NO: 144855 - DNA, 25 bp, probe
acaggtcagtggtcaatgcctgaga

SEQ ID NO: 144856 - DNA, 25 bp, probe
acaggccgctaggaagcagccaatg

SEQ ID NO: 144857 - DNA, 25 bp, probe
acaggcctggagtctacaccaaggt

SEQ ID NO: 144858 - DNA, 25 bp, probe
acaggcctagagtggaacccagggc

SEQ ID NO: 144859 - DNA, 25 bp, probe
acatggccgggctgctgaagcccac

SEQ ID NO: 144860 - DNA, 25 bp, probe
acagtggccggggctgaagccacac

SEQ ID NO: 144861 - DNA, 25 bp, probe
acaggatgacagcagccgagaccat

SEQ ID NO: 144862 - DNA, 25 bp, probe
acagagatgatccggtcatatatcc

SEQ ID NO: 144863 - DNA, 25 bp, probe
acatggcatgtgggttataaacgtt

SEQ ID NO: 144864 - DNA, 25 bp, probe
acatcctatgtactagaaaagtctt

SEQ ID NO: 144865 - DNA, 25 bp, probe
acatcctatgtactagaaaagtctt

SEQ ID NO: 144866 - DNA, 25 bp, probe
acatccttccacaaaagtcagccta

SEQ ID NO: 144867 - DNA, 25 bp, probe
acaccattacaaacatggtccagat

SEQ ID NO: 144868 - DNA, 25 bp, probe
acatccatataaatgccagtatcaa

SEQ ID NO: 144869 - DNA, 25 bp, probe
acatccacattgtgccagctatcct

SEQ ID NO: 144870 - DNA, 25 bp, probe
acatccacattgtgccagctatcct

SEQ ID NO: 144871 - DNA, 25 bp, probe
acatgacgctggtagaggccatcca

SEQ ID NO: 144872 - DNA, 25 bp, probe
acatgacgctggtagaggccatcca

SEQ ID NO: 144873 - DNA, 25 bp, probe
acatgacgctggtagaggccatcca

SEQ ID NO: 144874 - DNA, 25 bp, probe
acatgacgctggtagaggccatcca

SEQ ID NO: 144875 - DNA, 25 bp, probe
acatgacgctggtagaggccatcca

SEQ ID NO: 144876 - DNA, 25 bp, probe
acatggccggttatgcacatcattt

SEQ ID NO: 144877 - DNA, 25 bp, probe
acaggctgtggaaccagcaaatttg

SEQ ID NO: 144878 - DNA, 25 bp, probe
acagtctcttgaggcacagaaactc

SEQ ID NO: 144879 - DNA, 25 bp, probe
aaattgtgcgcaatgccaaggacac

SEQ ID NO: 144880 - DNA, 25 bp, probe
aacttgacgttctgaggcacatcct

SEQ ID NO: 144881 - DNA, 25 bp, probe
aacttagtctactgggctacgtatt

SEQ ID NO: 144882 - DNA, 25 bp, probe
aaatagacttactgcagttactttt

SEQ ID NO: 144883 - DNA, 25 bp, probe
aagaaacgtcaatgtatatcctttt

SEQ ID NO: 144884 - DNA, 25 bp, probe
acagggcagctatttagttttcttt

SEQ ID NO: 144885 - DNA, 25 bp, probe
acatgggcatcaacacttttattct

SEQ ID NO: 144886 - DNA, 25 bp, probe
acatggcaatcaaagccttttgatc

SEQ ID NO: 144887 - DNA, 25 bp, probe
acatggaatcatcagccttggtcag

SEQ ID NO: 144888 - DNA, 25 bp, probe
acatgaagatcaagagacaggggaa

SEQ ID NO: 144889 - DNA, 25 bp, probe
acagcatcgtcaacgacgaggttcg

SEQ ID NO: 144890 - DNA, 25 bp, probe
acagcttgaagaggacagggacgga

SEQ ID NO: 144891 - DNA, 25 bp, probe
acagtagaagcggtagaggcccggg

SEQ ID NO: 144892 - DNA, 25 bp, probe
acagtcaattccaggaggcacgcag

SEQ ID NO: 144893 - DNA, 25 bp, probe
acagtggtcatcaaaggagttcgcg

SEQ ID NO: 144894 - DNA, 25 bp, probe
acagggcattcaaatgggctgctgc

SEQ ID NO: 144895 - DNA, 25 bp, probe
acatgggctatcttccaggtgtgcc

SEQ ID NO: 144896 - DNA, 25 bp, probe
acatgctgtgttccatacagccttg

SEQ ID NO: 144897 - DNA, 25 bp, probe
acatgttgcttccagacatacttct

SEQ ID NO: 144898 - DNA, 25 bp, probe
acatgcctgttaatattcatgttct

SEQ ID NO: 144899 - DNA, 25 bp, probe
acatgccttcaaaatgggattgtac

SEQ ID NO: 144900 - DNA, 25 bp, probe
acatcctgtgcatcaaggacatggc

SEQ ID NO: 144901 - DNA, 25 bp, probe
acatcctctgattctaggtgtggtg

SEQ ID NO: 144902 - DNA, 25 bp, probe
acatgcctggtttaggcagcagctt

SEQ ID NO: 144903 - DNA, 25 bp, probe
acatgtttgcttagaggcggctcca

SEQ ID NO: 144904 - DNA, 25 bp, probe
acatgtttgcttagaggcggctcca

SEQ ID NO: 144905 - DNA, 25 bp, probe
acaggcttgtttcatggtgttgcaa

SEQ ID NO: 144906 - DNA, 25 bp, probe
acagtcttttgacatgagccctgaa

SEQ ID NO: 144907 - DNA, 25 bp, probe
acagacctacgggatggcatcatct

SEQ ID NO: 144908 - DNA, 25 bp, probe
acagacctacgggatggcatcatct

SEQ ID NO: 144909 - DNA, 25 bp, probe
acagacaggctacggatggatatgt

SEQ ID NO: 144910 - DNA, 25 bp, probe
acatgagcaaccaggatgtcatcaa

SEQ ID NO: 144911 - DNA, 25 bp, probe
acatggaacagctgaagtatgctga

SEQ ID NO: 144912 - DNA, 25 bp, probe
acatccaaagcatgagtgtgtcaga

SEQ ID NO: 144913 - DNA, 25 bp, probe
acatccacactaggcaggaatatga

SEQ ID NO: 144914 - DNA, 25 bp, probe
acatccactttgcccagcagatata

SEQ ID NO: 144915 - DNA, 25 bp, probe
acatccactttgcccagcagatata

SEQ ID NO: 144916 - DNA, 25 bp, probe
acatccactcctcccaaggatgaga

SEQ ID NO: 144917 - DNA, 25 bp, probe
acagaagccgccacaagggtgacat

SEQ ID NO: 144918 - DNA, 25 bp, probe
acaggccttggaacaaggaggattg

SEQ ID NO: 144919 - DNA, 25 bp, probe
acagtgccctggaacgcaagaggat

SEQ ID NO: 144920 - DNA, 25 bp, probe
acagtgccttgggactggactggca

SEQ ID NO: 144921 - DNA, 25 bp, probe
acagtgccttgggactggactggca

SEQ ID NO: 144922 - DNA, 25 bp, probe
acagtgctcttgtggtaggtggata

SEQ ID NO: 144923 - DNA, 25 bp, probe
acatgagcttgagcaggcaggggga

SEQ ID NO: 144924 - DNA, 25 bp, probe
acatccaaggaaggcagcaggcgcg

SEQ ID NO: 144925 - DNA, 25 bp, probe
acatggaaggcggcgcagaggcagc

SEQ ID NO: 144926 - DNA, 25 bp, probe
acatgagtcaggggcaccatggacc

SEQ ID NO: 144927 - DNA, 25 bp, probe
acatggccactatgaccatggtcac

SEQ ID NO: 144928 - DNA, 25 bp, probe
acagtgacactatgtggcaactcag

SEQ ID NO: 144929 - DNA, 25 bp, probe
acagttcaccaaatagctagtcatg

SEQ ID NO: 144930 - DNA, 25 bp, probe
acagttgacaacttagccaattgca

SEQ ID NO: 144931 - DNA, 25 bp, probe
acagttgacaacttagccaattgca

SEQ ID NO: 144932 - DNA, 25 bp, probe
acagttaaactgtatttctgatgtt

SEQ ID NO: 144933 - DNA, 25 bp, probe
acagttaaactgtatttctgatgtt

SEQ ID NO: 144934 - DNA, 25 bp, probe
acagggaaggctttctcgctgagtc

SEQ ID NO: 144935 - DNA, 25 bp, probe
acagtgggggtgctctggagaggct

SEQ ID NO: 144936 - DNA, 25 bp, probe
acagtgggggtgctctggagaggct

SEQ ID NO: 144937 - DNA, 25 bp, probe
acactggaagcgagccttcaatgcc

SEQ ID NO: 144938 - DNA, 25 bp, probe
acactggaagcgagccttcaatgcc

SEQ ID NO: 144939 - DNA, 25 bp, probe
acagggacagggagccatcattcct

SEQ ID NO: 144940 - DNA, 25 bp, probe
acatggggctggtggtcacaacctg

SEQ ID NO: 144941 - DNA, 25 bp, probe
acatggggctggtggtcacaacctg

SEQ ID NO: 144942 - DNA, 25 bp, probe
acaggctgagggggttcagaaccag

SEQ ID NO: 144943 - DNA, 25 bp, probe
acaggttgaagcagcccgaagactg

SEQ ID NO: 144944 - DNA, 25 bp, probe
acaggttgatgccagagccgtaaga

SEQ ID NO: 144945 - DNA, 25 bp, probe
acagatgaagcacctgaccgtacag

SEQ ID NO: 144946 - DNA, 25 bp, probe
acagtgcatggcctatgagccggtc

SEQ ID NO: 144947 - DNA, 25 bp, probe
acagatcagactgatgatttggcta

SEQ ID NO: 144948 - DNA, 25 bp, probe
acacaagccatgtcagcagcttgtc

SEQ ID NO: 144949 - DNA, 25 bp, probe
acatccaccatgtcttgcaatgagc

SEQ ID NO: 144950 - DNA, 25 bp, probe
acatgccaccatgttgacataagtt

SEQ ID NO: 144951 - DNA, 25 bp, probe
acatgccagaatgtgtctctgaaga

SEQ ID NO: 144952 - DNA, 25 bp, probe
acatgcctgcagagagtatagaata

SEQ ID NO: 144953 - DNA, 25 bp, probe
acatgccacatgccgtgttaagcat

SEQ ID NO: 144954 - DNA, 25 bp, probe
acatgaagcgggccctgatgatgat

SEQ ID NO: 144955 - DNA, 25 bp, probe
acagatgatggggagcggagtgaca

SEQ ID NO: 144956 - DNA, 25 bp, probe
acatgtctggcgggcaggcagagac

SEQ ID NO: 144957 - DNA, 25 bp, probe
acagcatcatgaccgtgaggaaggc

SEQ ID NO: 144958 - DNA, 25 bp, probe
catgcagtctgaaaagggaagaaac

SEQ ID NO: 144959 - DNA, 25 bp, probe
acatgttgagaatcatggacaaaac

SEQ ID NO: 144960 - DNA, 25 bp, probe
acatgtatacatcatagttcaaaac

SEQ ID NO: 144961 - DNA, 25 bp, probe
acatgttatctccaaagccacagaa

SEQ ID NO: 144962 - DNA, 25 bp, probe
acatgttatctccaaagccacagaa

SEQ ID NO: 144963 - DNA, 25 bp, probe
acatgttggttgacaggcgagcaga

SEQ ID NO: 144964 - DNA, 25 bp, probe
acatgtctgcacatgacagtgtaaa

SEQ ID NO: 144965 - DNA, 25 bp, probe
acatgagtgcttagaaatgtacata

SEQ ID NO: 144966 - DNA, 25 bp, probe
acatggcttctttaatgaatcatcg

SEQ ID NO: 144967 - DNA, 25 bp, probe
acatggcttttgctcacactgagtg

SEQ ID NO: 144968 - DNA, 25 bp, probe
acaggtttctgcctcagatcgattt

SEQ ID NO: 144969 - DNA, 25 bp, probe
acagggcttcatcgtaactgcttct

SEQ ID NO: 144970 - DNA, 25 bp, probe
acagggcttcatcgtaactgcttct

SEQ ID NO: 144971 - DNA, 25 bp, probe
acagaagttcatgtgagagccatta

SEQ ID NO: 144972 - DNA, 25 bp, probe
acatgagacttcgcaaatctctgga

SEQ ID NO: 144973 - DNA, 25 bp, probe
acatggactttgtcatggcactcat

SEQ ID NO: 144974 - DNA, 25 bp, probe
acatgtacattatcaggaccatttt

SEQ ID NO: 144975 - DNA, 25 bp, probe
acatgtacattatcaggaccatttt

SEQ ID NO: 144976 - DNA, 25 bp, probe
acatggtcatttccggagtacttgc

SEQ ID NO: 144977 - DNA, 25 bp, probe
acaggtcttccagatgtgtaataca

SEQ ID NO: 144978 - DNA, 25 bp, probe
acaggacttctgtgcattgtaaaca

SEQ ID NO: 144979 - DNA, 25 bp, probe
acaggacttctgtgcattgtaaaca

SEQ ID NO: 144980 - DNA, 25 bp, probe
acagatgccttgcacgtttattcca

SEQ ID NO: 144981 - DNA, 25 bp, probe
acagaggcttgtttgctttgccctc

SEQ ID NO: 144982 - DNA, 25 bp, probe
acatgagccctgaattgttctcaaa

SEQ ID NO: 144983 - DNA, 25 bp, probe
acatgtcgccagaaagactccaggg

SEQ ID NO: 144984 - DNA, 25 bp, probe
acagtccaaacaaacctcagtgtga

SEQ ID NO: 144985 - DNA, 25 bp, probe
acagcacctaccataactgcttgga

SEQ ID NO: 144986 - DNA, 25 bp, probe
acaggcttaccttatcgcattcatg

SEQ ID NO: 144987 - DNA, 25 bp, probe
acaggcccaactttgccatcatttt

SEQ ID NO: 144988 - DNA, 25 bp, probe
acaggcccaactttgccatcatttt

SEQ ID NO: 144989 - DNA, 25 bp, probe
acaggagcagcagctatctgtcttt

SEQ ID NO: 144990 - DNA, 25 bp, probe
acaggaagcccacctggcatttggt

SEQ ID NO: 144991 - DNA, 25 bp, probe
acagtgaacatgccaccttttttct

SEQ ID NO: 144992 - DNA, 25 bp, probe
acagtgaattgacccatgttccctt

SEQ ID NO: 144993 - DNA, 25 bp, probe
acagtaattggtcatgtgatgcaag

SEQ ID NO: 144994 - DNA, 25 bp, probe
acagtatttcggtataataatcgtg

SEQ ID NO: 144995 - DNA, 25 bp, probe
acagcttttcatgtaaattagtctt

SEQ ID NO: 144996 - DNA, 25 bp, probe
acagttattctataatatcttcttt

SEQ ID NO: 144997 - DNA, 25 bp, probe
acagttattctataatatcttcttt

SEQ ID NO: 144998 - DNA, 25 bp, probe
acagttttgtttatgcatttcctta

SEQ ID NO: 144999 - DNA, 25 bp, probe
aacttctggggtaggcagcttcttt

SEQ ID NO: 145000 - DNA, 25 bp, probe
acatgttcgggtgtgggttctacag

SEQ ID NO: 145001 - DNA, 25 bp, probe
acatgtgtgtgacgtttcgggtttg

SEQ ID NO: 145002 - DNA, 25 bp, probe
acaggtgtgacagtttgggagttga

SEQ ID NO: 145003 - DNA, 25 bp, probe
acaggtgtgacagtttgggagttga

SEQ ID NO: 145004 - DNA, 25 bp, probe
acaggtgtgacagtttgggagttga

SEQ ID NO: 145005 - DNA, 25 bp, probe
acatggctgaaaggtgtggggtcag

SEQ ID NO: 145006 - DNA, 25 bp, probe
acatgggcaagaggtgaggatttca

SEQ ID NO: 145007 - DNA, 25 bp, probe
acatggcagaagcttgaggttataa

SEQ ID NO: 145008 - DNA, 25 bp, probe
acatggcagaagcttgaggttataa

SEQ ID NO: 145009 - DNA, 25 bp, probe
acaggctgagagctcagatttagaa

SEQ ID NO: 145010 - DNA, 25 bp, probe
acacgcatccacttcggattcagtg

SEQ ID NO: 145011 - DNA, 25 bp, probe
acacgcatccacttcggattcagtg

SEQ ID NO: 145012 - DNA, 25 bp, probe
acaggcccagcattgctggttctat

SEQ ID NO: 145013 - DNA, 25 bp, probe
acaggcatccatgtgtgcaaaccat

SEQ ID NO: 145014 - DNA, 25 bp, probe
acaggagcctgagtgatgtggccca

SEQ ID NO: 145015 - DNA, 25 bp, probe
acagtgaccgagtcattggcaaagg

SEQ ID NO: 145016 - DNA, 25 bp, probe
acagtgactgctactttgggaatgg

SEQ ID NO: 145017 - DNA, 25 bp, probe
acagtttgtactctggggctgcagg

SEQ ID NO: 145018 - DNA, 25 bp, probe
acagatttgtttcatgtgacctagg

SEQ ID NO: 145019 - DNA, 25 bp, probe
acagatttgtttcatgtgacctagg

SEQ ID NO: 145020 - DNA, 25 bp, probe
acagagacttttactgagctccgag

SEQ ID NO: 145021 - DNA, 25 bp, probe
acatgagcattagtaactgagcact

SEQ ID NO: 145022 - DNA, 25 bp, probe
acatggcattgttcacagtgatctt

SEQ ID NO: 145023 - DNA, 25 bp, probe
acatgacctgcatcatcatttgctt

SEQ ID NO: 145024 - DNA, 25 bp, probe
acatgtcctgatcatatgcttttga

SEQ ID NO: 145025 - DNA, 25 bp, probe
acaggcctgataactctgtacgagg

SEQ ID NO: 145026 - DNA, 25 bp, probe
acatggccaatagtcatatgtgaag

SEQ ID NO: 145027 - DNA, 25 bp, probe
acatggcagctaacacatgaatgag

SEQ ID NO: 145028 - DNA, 25 bp, probe
acatgaccatggaagctgagaggcc

SEQ ID NO: 145029 - DNA, 25 bp, probe
acagagcacatgactagccaggccc

SEQ ID NO: 145030 - DNA, 25 bp, probe
acagatgccttctctaagacagctc

SEQ ID NO: 145031 - DNA, 25 bp, probe
acagagagcctcagctaaaagcccc

SEQ ID NO: 145032 - DNA, 25 bp, probe
acagagagcctcagctaaaagcccc

SEQ ID NO: 145033 - DNA, 25 bp, probe
acaggagcgtgaaccatgagggccc

SEQ ID NO: 145034 - DNA, 25 bp, probe
acagaggcagatgacgctggtcccg

SEQ ID NO: 145035 - DNA, 25 bp, probe
acagtggagatccatggcgtgagcc

SEQ ID NO: 145036 - DNA, 25 bp, probe
acagtgtgaatcctgaggtgccgcc

SEQ ID NO: 145037 - DNA, 25 bp, probe
acatgtgtctacctgagggctagtt

SEQ ID NO: 145038 - DNA, 25 bp, probe
acatgtgtgtgcccaggggtgagtg

SEQ ID NO: 145039 - DNA, 25 bp, probe
acatgagtcatacgggaggcgagtg

SEQ ID NO: 145040 - DNA, 25 bp, probe
acaggccaccgcatgaggagatgga

SEQ ID NO: 145041 - DNA, 25 bp, probe
acaccacctccttggagaattgcac

SEQ ID NO: 145042 - DNA, 25 bp, probe
acacaagccacctgaggccaggatc

SEQ ID NO: 145043 - DNA, 25 bp, probe
acaggagtcacctttgagcctgggc

SEQ ID NO: 145044 - DNA, 25 bp, probe
acagtggatatctggtccgtgggct

SEQ ID NO: 145045 - DNA, 25 bp, probe
acagtggatatctggtccgtgggct

SEQ ID NO: 145046 - DNA, 25 bp, probe
acagtggattgctgcttcttgggga

SEQ ID NO: 145047 - DNA, 25 bp, probe
acatgtggacatgactgcttatggg

SEQ ID NO: 145048 - DNA, 25 bp, probe
acatgtggacatgactgcttatggg

SEQ ID NO: 145049 - DNA, 25 bp, probe
acagtggtatgtgctgctggtgctg

SEQ ID NO: 145050 - DNA, 25 bp, probe
acagagtttgtgggtcagtctgtct

SEQ ID NO: 145051 - DNA, 25 bp, probe
acagtgcatttgccttgtcacctgt

SEQ ID NO: 145052 - DNA, 25 bp, probe
acaggcagatatggctttctccttc

SEQ ID NO: 145053 - DNA, 25 bp, probe
acagtatctgctgttcttcagtcct

SEQ ID NO: 145054 - DNA, 25 bp, probe
acagtcacgccgtgggatgtctctg

SEQ ID NO: 145055 - DNA, 25 bp, probe
acagctaagaccacagggttcagca

SEQ ID NO: 145056 - DNA, 25 bp, probe
acagtgaaaatcagcaccttgtcag

SEQ ID NO: 145057 - DNA, 25 bp, probe
acagtataatttgaccattgctatg

SEQ ID NO: 145058 - DNA, 25 bp, probe
acagtctaattgttcatcctaattg

SEQ ID NO: 145059 - DNA, 25 bp, probe
acatggccaactttatcctatcact

SEQ ID NO: 145060 - DNA, 25 bp, probe
acatggccaactttatcctatcact

SEQ ID NO: 145061 - DNA, 25 bp, probe
acaggcagaagatgtcattcgacac

SEQ ID NO: 145062 - DNA, 25 bp, probe
acaggagcaggctctgatgctgaga

SEQ ID NO: 145063 - DNA, 25 bp, probe
acaggaggaccacgatgcgctgaag

SEQ ID NO: 145064 - DNA, 25 bp, probe
acaggaaacagtggcggcatgaagc

SEQ ID NO: 145065 - DNA, 25 bp, probe
acagggaaagcatcaggcaacctag

SEQ ID NO: 145066 - DNA, 25 bp, probe
acagtggaacacaacagagccctct

SEQ ID NO: 145067 - DNA, 25 bp, probe
acaggaaagacctggctcctttcag

SEQ ID NO: 145068 - DNA, 25 bp, probe
acaggaaagacctggctcctttcag

SEQ ID NO: 145069 - DNA, 25 bp, probe
acaggaaggagaccatggctctcat

SEQ ID NO: 145070 - DNA, 25 bp, probe
acaggcattgcaaggaccctctgat

SEQ ID NO: 145071 - DNA, 25 bp, probe
acaggccacaagaagtcagctatac

SEQ ID NO: 145072 - DNA, 25 bp, probe
acagccacttagtgatcagctccct

SEQ ID NO: 145073 - DNA, 25 bp, probe
acacccctgctggcagaagtacctg

SEQ ID NO: 145074 - DNA, 25 bp, probe
acacccatccaaggaatggccactg

SEQ ID NO: 145075 - DNA, 25 bp, probe
acagggaccataggaaggctcagcc

SEQ ID NO: 145076 - DNA, 25 bp, probe
acaggatggctttctgtagccacac

SEQ ID NO: 145077 - DNA, 25 bp, probe
acagtgaagtatttgaagccatcaa

SEQ ID NO: 145078 - DNA, 25 bp, probe
acagtgaagtatttgaagccatcaa

SEQ ID NO: 145079 - DNA, 25 bp, probe
acagtcgccaagtggaccatcgatg

SEQ ID NO: 145080 - DNA, 25 bp, probe
acagtgcccgtgtcggagccgcgcg

SEQ ID NO: 145081 - DNA, 25 bp, probe
acaggccaaggggaggccagcctcg

SEQ ID NO: 145082 - DNA, 25 bp, probe
acaggggaggtgcgagctgagcccg

SEQ ID NO: 145083 - DNA, 25 bp, probe
acagggatgagtgggggccaccagg

SEQ ID NO: 145084 - DNA, 25 bp, probe
acagggagagtgggaaccactacgc

SEQ ID NO: 145085 - DNA, 25 bp, probe
acagaggtttctgggagacctaccg

SEQ ID NO: 145086 - DNA, 25 bp, probe
acagaggggccaggggatccctctc

SEQ ID NO: 145087 - DNA, 25 bp, probe
acagaggggccaggggatccctctc

SEQ ID NO: 145088 - DNA, 25 bp, probe
acaggctggatggaaggggccctcc

SEQ ID NO: 145089 - DNA, 25 bp, probe
acagtgctggtgtttgtgggcctgt

SEQ ID NO: 145090 - DNA, 25 bp, probe
acagttgagtggtttgggatgtgtt

SEQ ID NO: 145091 - DNA, 25 bp, probe
acagttggttgttctggccaacaat

SEQ ID NO: 145092 - DNA, 25 bp, probe
acagttcagttgtatctatgcccca

SEQ ID NO: 145093 - DNA, 25 bp, probe
acagttcagttgtatctatgcccca

SEQ ID NO: 145094 - DNA, 25 bp, probe
acagtctagaatccataatgctccc

SEQ ID NO: 145095 - DNA, 25 bp, probe
acagtctagaatccataatgctccc

SEQ ID NO: 145096 - DNA, 25 bp, probe
acagtgctgagaatcccatcagctg

SEQ ID NO: 145097 - DNA, 25 bp, probe
acatggctgacattagctctcactt

SEQ ID NO: 145098 - DNA, 25 bp, probe
acaggtgccaaattctaccgtggaa

SEQ ID NO: 145099 - DNA, 25 bp, probe
acagagcccaaatgcttagcagtgc

SEQ ID NO: 145100 - DNA, 25 bp, probe
acagaccgcagagatcttccaggcg

SEQ ID NO: 145101 - DNA, 25 bp, probe
acagacttatggatcgttatggagt

SEQ ID NO: 145102 - DNA, 25 bp, probe
acagttatcaagaatgggtcaggag

SEQ ID NO: 145103 - DNA, 25 bp, probe
acagtagtcaagaagggtgcaagat

SEQ ID NO: 145104 - DNA, 25 bp, probe
acatggggctagtgggatcacagaa

SEQ ID NO: 145105 - DNA, 25 bp, probe
acatgtggtctgttggggtcatcat

SEQ ID NO: 145106 - DNA, 25 bp, probe
acatgtcgctgtttgagaacttcac

SEQ ID NO: 145107 - DNA, 25 bp, probe
acatgtcgcttgttggagctgctgg

SEQ ID NO: 145108 - DNA, 25 bp, probe
acagtctgcttgtgggctctgaaag

SEQ ID NO: 145109 - DNA, 25 bp, probe
acagtcttgtgtgcctggcgagaag

SEQ ID NO: 145110 - DNA, 25 bp, probe
acagcacttggctccttaggaacag

SEQ ID NO: 145111 - DNA, 25 bp, probe
acaaacggggctcaaggaaccacat

SEQ ID NO: 145112 - DNA, 25 bp, probe
aaagccggtggacagcggaacatat

SEQ ID NO: 145113 - DNA, 25 bp, probe
acagcaacttgtcaaacctaagcat

SEQ ID NO: 145114 - DNA, 25 bp, probe
acagatggttctcagacccgacatt

SEQ ID NO: 145115 - DNA, 25 bp, probe
acagggtttctaggacattgtcatt

SEQ ID NO: 145116 - DNA, 25 bp, probe
acagaagtttctactgtctcgtcta

SEQ ID NO: 145117 - DNA, 25 bp, probe
acagaagtttctactgtctcgtcta

SEQ ID NO: 145118 - DNA, 25 bp, probe
acagaagtcttaccagtgctggttt

SEQ ID NO: 145119 - DNA, 25 bp, probe
acaggtgtcttaatgcatttggata

SEQ ID NO: 145120 - DNA, 25 bp, probe
acagggtttgtggttctggatgaaa

SEQ ID NO: 145121 - DNA, 25 bp, probe
acaggaccttgggtcctggctggcc

SEQ ID NO: 145122 - DNA, 25 bp, probe
acaggaccttgggtcctggctggcc

SEQ ID NO: 145123 - DNA, 25 bp, probe
acaggatcctttcaacagggctgcc

SEQ ID NO: 145124 - DNA, 25 bp, probe
aaccactctgttcaaaggggcacca

SEQ ID NO: 145125 - DNA, 25 bp, probe
acactcaactttgtacatcgggacc

SEQ ID NO: 145126 - DNA, 25 bp, probe
acaccaacattttgtaacgttcagc

SEQ ID NO: 145127 - DNA, 25 bp, probe
aactggagtcttcataacgctaagc

SEQ ID NO: 145128 - DNA, 25 bp, probe
aagtcggtttaatcaccttgagtga

SEQ ID NO: 145129 - DNA, 25 bp, probe
acacatcaggttgtaaccaggtggt

SEQ ID NO: 145130 - DNA, 25 bp, probe
acaccatcctggctaacacggtgaa

SEQ ID NO: 145131 - DNA, 25 bp, probe
acagaacgtgggcagagacgtgacc

SEQ ID NO: 145132 - DNA, 25 bp, probe
acagaccgggtgtctacacgaacct

SEQ ID NO: 145133 - DNA, 25 bp, probe
acagacacaaagtttaactggtact

SEQ ID NO: 145134 - DNA, 25 bp, probe
acagctgcagaatgtatataacgca

SEQ ID NO: 145135 - DNA, 25 bp, probe
acagatgcagcaagagtttgaccag

SEQ ID NO: 145136 - DNA, 25 bp, probe
acagctgagcattatgatgttaaca

SEQ ID NO: 145137 - DNA, 25 bp, probe
acagcatgtgccaagattctactct

SEQ ID NO: 145138 - DNA, 25 bp, probe
acaggtgcatcaactgcaaactgct

SEQ ID NO: 145139 - DNA, 25 bp, probe
acaggtgcatcaactgcaaactgct

SEQ ID NO: 145140 - DNA, 25 bp, probe
acaggacatgcaaccagagatcgtg

SEQ ID NO: 145141 - DNA, 25 bp, probe
acagagatatgcacacacacggatg

SEQ ID NO: 145142 - DNA, 25 bp, probe
acagatgactgggatacctggatgt

SEQ ID NO: 145143 - DNA, 25 bp, probe
acagtgtcgccactgacagctggag

SEQ ID NO: 145144 - DNA, 25 bp, probe
acaggctctgcgcatgagcgtggag

SEQ ID NO: 145145 - DNA, 25 bp, probe
acagacacgctgcagatcgaggact

SEQ ID NO: 145146 - DNA, 25 bp, probe
acagatcaactactgctcggtgctc

SEQ ID NO: 145147 - DNA, 25 bp, probe
acaccacacgagcctcgtggtctac

SEQ ID NO: 145148 - DNA, 25 bp, probe
acaccacacgagcctcgtggtctac

SEQ ID NO: 145149 - DNA, 25 bp, probe
acaccaaccatgctgtttacaacct

SEQ ID NO: 145150 - DNA, 25 bp, probe
acacctccctggatgatccaagatg

SEQ ID NO: 145151 - DNA, 25 bp, probe
acaacatccctggtgaacgtcgtgc

SEQ ID NO: 145152 - DNA, 25 bp, probe
acaacatccctggtgaacgtcgtgc

SEQ ID NO: 145153 - DNA, 25 bp, probe
acagaagcagccagtgaactttgtc

SEQ ID NO: 145154 - DNA, 25 bp, probe
acagaagcagccagtgaactttgtc

SEQ ID NO: 145155 - DNA, 25 bp, probe
acagaatggtccttaacagagtttg

SEQ ID NO: 145156 - DNA, 25 bp, probe
acagaatggtccttaacagagtttg

SEQ ID NO: 145157 - DNA, 25 bp, probe
acaggaggtcctcaagggtatgaat

SEQ ID NO: 145158 - DNA, 25 bp, probe
acaggagggcccgcaaggtatatca

SEQ ID NO: 145159 - DNA, 25 bp, probe
acacgtggggtcagcagaggtacca

SEQ ID NO: 145160 - DNA, 25 bp, probe
acacggagggtggggaggcgcagaa

SEQ ID NO: 145161 - DNA, 25 bp, probe
acaccgacgagtgggagcgggacct

SEQ ID NO: 145162 - DNA, 25 bp, probe
acagactgagcgtggaagggagaag

SEQ ID NO: 145163 - DNA, 25 bp, probe
acaggctgtggggtgagaggcccct

SEQ ID NO: 145164 - DNA, 25 bp, probe
acaggcggcagagctgaaggccctg

SEQ ID NO: 145165 - DNA, 25 bp, probe
acagggccagcacagaggggccttc

SEQ ID NO: 145166 - DNA, 25 bp, probe
acagctggggtccagaatggggctc

SEQ ID NO: 145167 - DNA, 25 bp, probe
acagctgggtgccaaaagtgggcca

SEQ ID NO: 145168 - DNA, 25 bp, probe
acagtggttgccaaaagtggagcga

SEQ ID NO: 145169 - DNA, 25 bp, probe
acatggcgtatgtcatcaacggggg

SEQ ID NO: 145170 - DNA, 25 bp, probe
acatggcagtctccaacaccatagg

SEQ ID NO: 145171 - DNA, 25 bp, probe
acaggcagtccatgatcctagtggc

SEQ ID NO: 145172 - DNA, 25 bp, probe
acagggacacaatcctagtcagctt

SEQ ID NO: 145173 - DNA, 25 bp, probe
acagggacctgaaggtcagtatatg

SEQ ID NO: 145174 - DNA, 25 bp, probe
acagggcaccagaggccgaaggtgc

SEQ ID NO: 145175 - DNA, 25 bp, probe
acaggacccagaagctcaccaaaaa

SEQ ID NO: 145176 - DNA, 25 bp, probe
acagcaaccaagtaccctgctaaat

SEQ ID NO: 145177 - DNA, 25 bp, probe
acaggaacaccttccgctgtgaaat

SEQ ID NO: 145178 - DNA, 25 bp, probe
acaggtacacgggccagggaaatgc

SEQ ID NO: 145179 - DNA, 25 bp, probe
acacttgaaagacccggctagaggc

SEQ ID NO: 145180 - DNA, 25 bp, probe
acaccaacctgacccgggaagtcag

SEQ ID NO: 145181 - DNA, 25 bp, probe
acaccaacctgacccgggaagtcag

SEQ ID NO: 145182 - DNA, 25 bp, probe
acagcccaggtcacacgtggggtca

SEQ ID NO: 145183 - DNA, 25 bp, probe
acagcactaggagccactgggggag

SEQ ID NO: 145184 - DNA, 25 bp, probe
acagcactaggagccactgggggag

SEQ ID NO: 145185 - DNA, 25 bp, probe
acacttgcggagtacctgttggttt

SEQ ID NO: 145186 - DNA, 25 bp, probe
acacttccacagtcagcacggggat

SEQ ID NO: 145187 - DNA, 25 bp, probe
acagctatgaacgaggccagtgggg

SEQ ID NO: 145188 - DNA, 25 bp, probe
acagctgagatagagcaccgtgccc

SEQ ID NO: 145189 - DNA, 25 bp, probe
acagtgccatgaggagcaccctgtc

SEQ ID NO: 145190 - DNA, 25 bp, probe
acagacacaacggcaacattatgct

SEQ ID NO: 145191 - DNA, 25 bp, probe
acagacaggatgcaccacatctagt

SEQ ID NO: 145192 - DNA, 25 bp, probe
acagagagccagtaccaacagcagc

SEQ ID NO: 145193 - DNA, 25 bp, probe
acagaactcgatgcactgacctgct

SEQ ID NO: 145194 - DNA, 25 bp, probe
acagcaagaaatccaccagccatga

SEQ ID NO: 145195 - DNA, 25 bp, probe
acagaagaattcgtcccactaaaga

SEQ ID NO: 145196 - DNA, 25 bp, probe
acagccaggttttccctaagaagat

SEQ ID NO: 145197 - DNA, 25 bp, probe
acagtcctgcttagagcccttaaaa

SEQ ID NO: 145198 - DNA, 25 bp, probe
acagttgccatgtagaccccttgaa

SEQ ID NO: 145199 - DNA, 25 bp, probe
acaggtttaccaaccagcattgaat

SEQ ID NO: 145200 - DNA, 25 bp, probe
acagtgttttacccaagcattgctt

SEQ ID NO: 145201 - DNA, 25 bp, probe
acagtttctgctgccactagtactg

SEQ ID NO: 145202 - DNA, 25 bp, probe
acagatttcttcgcaagactatgga

SEQ ID NO: 145203 - DNA, 25 bp, probe
acagacaccatgtcccaggacagtg

SEQ ID NO: 145204 - DNA, 25 bp, probe
acaggaactgaggcgatagaattgg

SEQ ID NO: 145205 - DNA, 25 bp, probe
acagggagctgagggactgcttcag

SEQ ID NO: 145206 - DNA, 25 bp, probe
acagggagctgagggactgcttcag

SEQ ID NO: 145207 - DNA, 25 bp, probe
acagggcctgaagtacacattctct

SEQ ID NO: 145208 - DNA, 25 bp, probe
acaggaccttccaaaatatctcttt

SEQ ID NO: 145209 - DNA, 25 bp, probe
acaagacctcttgacagacctgatt

SEQ ID NO: 145210 - DNA, 25 bp, probe
acagcaacctacgggagaccgatat

SEQ ID NO: 145211 - DNA, 25 bp, probe
acacctacggcagagaacccagagt

SEQ ID NO: 145212 - DNA, 25 bp, probe
aacctcggagagagtcccacaggga

SEQ ID NO: 145213 - DNA, 25 bp, probe
aacctcggagagagtcccacaggga

SEQ ID NO: 145214 - DNA, 25 bp, probe
aacgccaggaagtgtccttcactgt

SEQ ID NO: 145215 - DNA, 25 bp, probe
aacctggaacagggactttcacttg

SEQ ID NO: 145216 - DNA, 25 bp, probe
aaccttcaacagcaacccaagaagg

SEQ ID NO: 145217 - DNA, 25 bp, probe
acactgccaaaacaatgcccgtaag

SEQ ID NO: 145218 - DNA, 25 bp, probe
acagatgccatagagcaattccttt

SEQ ID NO: 145219 - DNA, 25 bp, probe
acagatccttgcggcaattaacttt

SEQ ID NO: 145220 - DNA, 25 bp, probe
acagacctggcccagtatatgtctc

SEQ ID NO: 145221 - DNA, 25 bp, probe
acagggagctcccagttgaggtgcg

SEQ ID NO: 145222 - DNA, 25 bp, probe
acagaatggctcctcgggatggtcg

SEQ ID NO: 145223 - DNA, 25 bp, probe
acagttagctgccttcgaatagtgc

SEQ ID NO: 145224 - DNA, 25 bp, probe
acagtatcactgtctttcctagatg

SEQ ID NO: 145225 - DNA, 25 bp, probe
acagaacatgctgtgttccatacag

SEQ ID NO: 145226 - DNA, 25 bp, probe
acagagaacagctgttgccaaagct

SEQ ID NO: 145227 - DNA, 25 bp, probe
acagagaacagctgttgccaaagct

SEQ ID NO: 145228 - DNA, 25 bp, probe
acaggaatgaaccttctgcaacatc

SEQ ID NO: 145229 - DNA, 25 bp, probe
acaggattgagagactccaacacag

SEQ ID NO: 145230 - DNA, 25 bp, probe
acaggattgagagactccaacacag

SEQ ID NO: 145231 - DNA, 25 bp, probe
acaggatcttgaacagcccaaagta

SEQ ID NO: 145232 - DNA, 25 bp, probe
acagagacctagcagcacgcaacat

SEQ ID NO: 145233 - DNA, 25 bp, probe
acagcatgacctcctgaagtcgagc

SEQ ID NO: 145234 - DNA, 25 bp, probe
acagcagcctgcagctggattacgc

SEQ ID NO: 145235 - DNA, 25 bp, probe
acagcagcctgtgtttgagcagcga

SEQ ID NO: 145236 - DNA, 25 bp, probe
acagcattcagttatttgcagaagg

SEQ ID NO: 145237 - DNA, 25 bp, probe
acacgtccggcagttgcaggagcgg

SEQ ID NO: 145238 - DNA, 25 bp, probe
acaggtcacaggactcatcgtagcc

SEQ ID NO: 145239 - DNA, 25 bp, probe
acaagtcaagttgcacaggcagtgc

SEQ ID NO: 145240 - DNA, 25 bp, probe
acagagtcagaactccagcaccatc

SEQ ID NO: 145241 - DNA, 25 bp, probe
acaggctcagcagattaccacattg

SEQ ID NO: 145242 - DNA, 25 bp, probe
acaggtccacaatattcatactatg

SEQ ID NO: 145243 - DNA, 25 bp, probe
acaggctaaatatacatcatagcaa

SEQ ID NO: 145244 - DNA, 25 bp, probe
acaggggacatattagcacatcaac

SEQ ID NO: 145245 - DNA, 25 bp, probe
acagatgggatcaagggctccacag

SEQ ID NO: 145246 - DNA, 25 bp, probe
acagtttatctatggcacccatgca

SEQ ID NO: 145247 - DNA, 25 bp, probe
acagattctacttcgagaacctgct

SEQ ID NO: 145248 - DNA, 25 bp, probe
ggagctaggatgtatggtgtaggtg

SEQ ID NO: 145249 - DNA, 25 bp, probe
acagtggcgacgatgaacatgccgt

SEQ ID NO: 145250 - DNA, 25 bp, probe
acagggcaggacgaagccatccgat

SEQ ID NO: 145251 - DNA, 25 bp, probe
acagtggcggcatgaagctccagga

SEQ ID NO: 145252 - DNA, 25 bp, probe
acagttcgtaaggagatcatcagga

SEQ ID NO: 145253 - DNA, 25 bp, probe
acaggtggtagaggagccatcgcca

SEQ ID NO: 145254 - DNA, 25 bp, probe
acaggtggtagaggagccatcgcca

SEQ ID NO: 145255 - DNA, 25 bp, probe
acaggtggtagaggagccatcgcca

SEQ ID NO: 145256 - DNA, 25 bp, probe
acaggtggcatatgcgagcaaagca

SEQ ID NO: 145257 - DNA, 25 bp, probe
acaggcactgactagggaaatgatc

SEQ ID NO: 145258 - DNA, 25 bp, probe
acagagatctggctgcaagaaatgt

SEQ ID NO: 145259 - DNA, 25 bp, probe
acaccagtgtagccaaaagagaaac

SEQ ID NO: 145260 - DNA, 25 bp, probe
acaccgtaaccacagtcaggaagtc

SEQ ID NO: 145261 - DNA, 25 bp, probe
acaccttagacctgacatctggcta

SEQ ID NO: 145262 - DNA, 25 bp, probe
acagcctgatattccagaacctgga

SEQ ID NO: 145263 - DNA, 25 bp, probe
acagcagatccagaagaccttgaga

SEQ ID NO: 145264 - DNA, 25 bp, probe
acagatgaccgcacagcactatgtg

SEQ ID NO: 145265 - DNA, 25 bp, probe
acagtgactccacatcaactgatgc

SEQ ID NO: 145266 - DNA, 25 bp, probe
acagggctgcaacaaccagtagctc

SEQ ID NO: 145267 - DNA, 25 bp, probe
acaggtatgtaaaagacaatactct

SEQ ID NO: 145268 - DNA, 25 bp, probe
acagggtgctaaagccaaccagcct

SEQ ID NO: 145269 - DNA, 25 bp, probe
acaggttgtgaggaccaagcacgcc

SEQ ID NO: 145270 - DNA, 25 bp, probe
acagtatgtggggacacccatggcc

SEQ ID NO: 145271 - DNA, 25 bp, probe
acagtggtgagaggagccccatttt

SEQ ID NO: 145272 - DNA, 25 bp, probe
acagtgtgtataaaccttcttcttc

SEQ ID NO: 145273 - DNA, 25 bp, probe
acagtggcatattctcatggtacat

SEQ ID NO: 145274 - DNA, 25 bp, probe
acagtggcatattctcatggtacat

SEQ ID NO: 145275 - DNA, 25 bp, probe
acagtgacatgagctctgtctacag

SEQ ID NO: 145276 - DNA, 25 bp, probe
acagctccagacgcgttaagcgcat

SEQ ID NO: 145277 - DNA, 25 bp, probe
acacggcagacgccggtggacagtc

SEQ ID NO: 145278 - DNA, 25 bp, probe
acacggcagacgccggtggacagtc

SEQ ID NO: 145279 - DNA, 25 bp, probe
acacggcagacgccggtggacagtc

SEQ ID NO: 145280 - DNA, 25 bp, probe
acagcagccgcatgagctggggaat

SEQ ID NO: 145281 - DNA, 25 bp, probe
acagagacatcatcctggagagcat

SEQ ID NO: 145282 - DNA, 25 bp, probe
acagtaacaccctgaagatacaaca

SEQ ID NO: 145283 - DNA, 25 bp, probe
acagtaccagccaggagaaaattta

SEQ ID NO: 145284 - DNA, 25 bp, probe
cactgggcaaacagaagaatttttc

SEQ ID NO: 145285 - DNA, 25 bp, probe
aaggaaaatcctcagaagtttctct

SEQ ID NO: 145286 - DNA, 25 bp, probe
acagtggaagatgcaaataagtttt

SEQ ID NO: 145287 - DNA, 25 bp, probe
acagtggaagatgcaaataagtttt

SEQ ID NO: 145288 - DNA, 25 bp, probe
acagtaaagttgcaatgaagaggtt

SEQ ID NO: 145289 - DNA, 25 bp, probe
acagtaaagttgcaatgaagaggtt

SEQ ID NO: 145290 - DNA, 25 bp, probe
acagtgtgaagtctgacatttggag

SEQ ID NO: 145291 - DNA, 25 bp, probe
acagagtggagccctcagttttatg

SEQ ID NO: 145292 - DNA, 25 bp, probe
acagtgggggcatttctttatatca

SEQ ID NO: 145293 - DNA, 25 bp, probe
acagtttggagttcctctttagcaa

SEQ ID NO: 145294 - DNA, 25 bp, probe
acagtcttggagaagccacctgcac

SEQ ID NO: 145295 - DNA, 25 bp, probe
acagttatggataagacccgagctt

SEQ ID NO: 145296 - DNA, 25 bp, probe
acagtagatgggccgacacacactt

SEQ ID NO: 145297 - DNA, 25 bp, probe
acagctggatggtggaagcagttca

SEQ ID NO: 145298 - DNA, 25 bp, probe
acactgtgcgtgtttcaagcttgta

SEQ ID NO: 145299 - DNA, 25 bp, probe
acagctggggccacaactttggtga

SEQ ID NO: 145300 - DNA, 25 bp, probe
acagctggggccacaactttggtga

SEQ ID NO: 145301 - DNA, 25 bp, probe
acacctaggcctgcaaattctgcct

SEQ ID NO: 145302 - DNA, 25 bp, probe
acactccagggatcagtagttccta

SEQ ID NO: 145303 - DNA, 25 bp, probe
acagctccatggtaggagtcaatct

SEQ ID NO: 145304 - DNA, 25 bp, probe
acagacctggagggaacagacatgt

SEQ ID NO: 145305 - DNA, 25 bp, probe
acagaccatggagtatcatttgact

SEQ ID NO: 145306 - DNA, 25 bp, probe
acagaaaggtgttcatgtgacttca

SEQ ID NO: 145307 - DNA, 25 bp, probe
acagaaatggttccctgagctgcct

SEQ ID NO: 145308 - DNA, 25 bp, probe
acagaatatggcttggcctatggcc

SEQ ID NO: 145309 - DNA, 25 bp, probe
acaggagtgaggacgccgatgacct

SEQ ID NO: 145310 - DNA, 25 bp, probe
acaggatggaggacaggctggccga

SEQ ID NO: 145311 - DNA, 25 bp, probe
acaggaggggtctcatgtcctgctg

SEQ ID NO: 145312 - DNA, 25 bp, probe
acagttggttttgcatgtctgcatg

SEQ ID NO: 145313 - DNA, 25 bp, probe
acagtcatagttcacctgtctctta

SEQ ID NO: 145314 - DNA, 25 bp, probe
acagctgtagaataccatctttcag

SEQ ID NO: 145315 - DNA, 25 bp, probe
acagctgtaatcgtttgcttgttca

SEQ ID NO: 145316 - DNA, 25 bp, probe
acagatgtaagcgtcttactttctc

SEQ ID NO: 145317 - DNA, 25 bp, probe
acagtacaagccttgaacatcgtcc

SEQ ID NO: 145318 - DNA, 25 bp, probe
acaggatcacagacctgggcctgtc

SEQ ID NO: 145319 - DNA, 25 bp, probe
acagatgaccgacctggtcactcct

SEQ ID NO: 145320 - DNA, 25 bp, probe
acagtgcccgaaggggcagctgccc

SEQ ID NO: 145321 - DNA, 25 bp, probe
acagtgccaccaacgtggagctggt

SEQ ID NO: 145322 - DNA, 25 bp, probe
acagatgataccaacagtgaagctg

SEQ ID NO: 145323 - DNA, 25 bp, probe
acaggattcagcagcatggacagtc

SEQ ID NO: 145324 - DNA, 25 bp, probe
acagagatccagtctattcaaggca

SEQ ID NO: 145325 - DNA, 25 bp, probe
acagagactctctttatacaagcat

SEQ ID NO: 145326 - DNA, 25 bp, probe
acagaagcattccctataaggcctg

SEQ ID NO: 145327 - DNA, 25 bp, probe
acagggcttgcccttagaagccgct

SEQ ID NO: 145328 - DNA, 25 bp, probe
acagggcttgcccttagaagccgct

SEQ ID NO: 145329 - DNA, 25 bp, probe
acagggcttgcgatgtaagatgtgc

SEQ ID NO: 145330 - DNA, 25 bp, probe
acagggttatcaatgccaagtgtgc

SEQ ID NO: 145331 - DNA, 25 bp, probe
acagatgatgctgtcaagcaatatt

SEQ ID NO: 145332 - DNA, 25 bp, probe
acagagtgcatagcatacactgttt

SEQ ID NO: 145333 - DNA, 25 bp, probe
acagagatataaggaaccattctcc

SEQ ID NO: 145334 - DNA, 25 bp, probe
acagcggaaacatattcttgcagcc

SEQ ID NO: 145335 - DNA, 25 bp, probe
acagctgtaatctatgaattctaag

SEQ ID NO: 145336 - DNA, 25 bp, probe
acagctgcattgtaagagttctgtc

SEQ ID NO: 145337 - DNA, 25 bp, probe
acagtatctagcagcgttgtgccaa

SEQ ID NO: 145338 - DNA, 25 bp, probe
acagtgatctacatgctttgtgaga

SEQ ID NO: 145339 - DNA, 25 bp, probe
acagtgatctacatgctttgtgaga

SEQ ID NO: 145340 - DNA, 25 bp, probe
acagtatcagagtgcttcatctggc

SEQ ID NO: 145341 - DNA, 25 bp, probe
acagtaagcagcagatctatctcag

SEQ ID NO: 145342 - DNA, 25 bp, probe
acagtcacaatgtattgcataatca

SEQ ID NO: 145343 - DNA, 25 bp, probe
acagctcagactattacaataacac

SEQ ID NO: 145344 - DNA, 25 bp, probe
acagtctctctttatataaatacac

SEQ ID NO: 145345 - DNA, 25 bp, probe
acagtcattcgatatatctcatata

SEQ ID NO: 145346 - DNA, 25 bp, probe
acagtatattgggaagctcaatgat

SEQ ID NO: 145347 - DNA, 25 bp, probe
acagttgtagctacatactcaatgt

SEQ ID NO: 145348 - DNA, 25 bp, probe
acagttggctgtatgactgaagtaa

SEQ ID NO: 145349 - DNA, 25 bp, probe
acagttggcatggtagtatacaaaa

SEQ ID NO: 145350 - DNA, 25 bp, probe
acagggatgatggagagttcatgaa

SEQ ID NO: 145351 - DNA, 25 bp, probe
acagatggaattaacttcatggtga

SEQ ID NO: 145352 - DNA, 25 bp, probe
acagaggggatcactgtgcagtggg

SEQ ID NO: 145353 - DNA, 25 bp, probe
acagcaagggaatcatgcacaggga

SEQ ID NO: 145354 - DNA, 25 bp, probe
acagctaaggaattccaagggccac

SEQ ID NO: 145355 - DNA, 25 bp, probe
acagcaaaaatagttcaaggtcaaa

SEQ ID NO: 145356 - DNA, 25 bp, probe
acagattatacagctctaaggataa

SEQ ID NO: 145357 - DNA, 25 bp, probe
acagttacacggaaagcatggttca

SEQ ID NO: 145358 - DNA, 25 bp, probe
acagcttagcacctgtttctgggtc

SEQ ID NO: 145359 - DNA, 25 bp, probe
acagcctctgcaggggctttgagca

SEQ ID NO: 145360 - DNA, 25 bp, probe
acagactcaggcgatgtgctttatg

SEQ ID NO: 145361 - DNA, 25 bp, probe
acagatccaatgttgctgcagtttt

SEQ ID NO: 145362 - DNA, 25 bp, probe
acagataacatcagctgaggttttt

SEQ ID NO: 145363 - DNA, 25 bp, probe
acagaagttgccttgggattcattt

SEQ ID NO: 145364 - DNA, 25 bp, probe
acagaaggctggtgggtttttgatg

SEQ ID NO: 145365 - DNA, 25 bp, probe
acaaaagggcatgctggttcctaat

SEQ ID NO: 145366 - DNA, 25 bp, probe
acagtaaggacagtctctgcttcct

SEQ ID NO: 145367 - DNA, 25 bp, probe
acaccaatgctgaaccccatgattt

SEQ ID NO: 145368 - DNA, 25 bp, probe
acaccattcagaagcacctgaactc

SEQ ID NO: 145369 - DNA, 25 bp, probe
acactcaccagaccaatctgaactg

SEQ ID NO: 145370 - DNA, 25 bp, probe
acactaggcactgagattaccatga

SEQ ID NO: 145371 - DNA, 25 bp, probe
acaccaggaagttcattaccagaat

SEQ ID NO: 145372 - DNA, 25 bp, probe
acagaagcgaacacactattggaga

SEQ ID NO: 145373 - DNA, 25 bp, probe
acagaagcatgaacaccatcctggg

SEQ ID NO: 145374 - DNA, 25 bp, probe
acagaagcagggacactgcggggga

SEQ ID NO: 145375 - DNA, 25 bp, probe
acagacacgtgtacctagaagggat

SEQ ID NO: 145376 - DNA, 25 bp, probe
acagaccagatgtccactgagatag

SEQ ID NO: 145377 - DNA, 25 bp, probe
acagtccagtggacatctggtctgt

SEQ ID NO: 145378 - DNA, 25 bp, probe
acagtccaatggtatgctggagagt

SEQ ID NO: 145379 - DNA, 25 bp, probe
acagacaaagcgtggtggacatgca

SEQ ID NO: 145380 - DNA, 25 bp, probe
acagacaaagcgtggtggacatgca

SEQ ID NO: 145381 - DNA, 25 bp, probe
acaacatcagcagcagtggtggagc

SEQ ID NO: 145382 - DNA, 25 bp, probe
acagcagacagcaaatggagtgaga

SEQ ID NO: 145383 - DNA, 25 bp, probe
acagcgtgcatgatgggtgtgacct

SEQ ID NO: 145384 - DNA, 25 bp, probe
acagcgtgcatgatgggtgtgacct

SEQ ID NO: 145385 - DNA, 25 bp, probe
acacggcagtgatgctgcggtctct

SEQ ID NO: 145386 - DNA, 25 bp, probe
acagtgagtctgtcagcgcaggttt

SEQ ID NO: 145387 - DNA, 25 bp, probe
acagtgtgtcttcagcagtgttcag

SEQ ID NO: 145388 - DNA, 25 bp, probe
acagatgtattttgatggtggtggt

SEQ ID NO: 145389 - DNA, 25 bp, probe
acagagctttgtcatcagtggtgga

SEQ ID NO: 145390 - DNA, 25 bp, probe
acagatctgtttcgtgcattggaag

SEQ ID NO: 145391 - DNA, 25 bp, probe
acagatcgtatttatgcaatgaaag

SEQ ID NO: 145392 - DNA, 25 bp, probe
acagacagatgatattagtgcagct

SEQ ID NO: 145393 - DNA, 25 bp, probe
acagcacgtaacctagtgagtgact

SEQ ID NO: 145394 - DNA, 25 bp, probe
acagcagttataactataggggctt

SEQ ID NO: 145395 - DNA, 25 bp, probe
acagactgttaattataggagcctt

SEQ ID NO: 145396 - DNA, 25 bp, probe
acagacttttagacatcgtagcttc

SEQ ID NO: 145397 - DNA, 25 bp, probe
acagacttttagacatcgtagcttc

SEQ ID NO: 145398 - DNA, 25 bp, probe
acagtgttatgtagtattgttctat

SEQ ID NO: 145399 - DNA, 25 bp, probe
acagtgcttccaagtacatcttctc

SEQ ID NO: 145400 - DNA, 25 bp, probe
acagtgcttctacacatttcatcta

SEQ ID NO: 145401 - DNA, 25 bp, probe
acagtgccgtagctcttatctagca

SEQ ID NO: 145402 - DNA, 25 bp, probe
acagtgccgtagctcttatctagca

SEQ ID NO: 145403 - DNA, 25 bp, probe
acagcccctaagtcaacttagcatt

SEQ ID NO: 145404 - DNA, 25 bp, probe
acagcccctaactcataaagcaatc

SEQ ID NO: 145405 - DNA, 25 bp, probe
acagcatccccaaaacaaaaagtct

SEQ ID NO: 145406 - DNA, 25 bp, probe
acagatctacacaaactacaaaagt

SEQ ID NO: 145407 - DNA, 25 bp, probe
acagatctacacaaactacaaaagt

SEQ ID NO: 145408 - DNA, 25 bp, probe
acagtctcccaagctatcggtgagt

SEQ ID NO: 145409 - DNA, 25 bp, probe
acacctttcacagctatcagggaag

SEQ ID NO: 145410 - DNA, 25 bp, probe
acacctttcacagctatcagggaag

SEQ ID NO: 145411 - DNA, 25 bp, probe
acactctcgaaagcgatgggaacgc

SEQ ID NO: 145412 - DNA, 25 bp, probe
acagctgccagcaaacctgagggaa

SEQ ID NO: 145413 - DNA, 25 bp, probe
acagcgcatgcaggaacgggggtct

SEQ ID NO: 145414 - DNA, 25 bp, probe
acagctatcagggaaggtaggcact

SEQ ID NO: 145415 - DNA, 25 bp, probe
acagctatcagggaaggtaggcact

SEQ ID NO: 145416 - DNA, 25 bp, probe
acagtcatggaggcaccgtgggcct

SEQ ID NO: 145417 - DNA, 25 bp, probe
acagccaggagacccttgtggttga

SEQ ID NO: 145418 - DNA, 25 bp, probe
acactgcaaggacacttgaaggtac

SEQ ID NO: 145419 - DNA, 25 bp, probe
acacgtagtaattctgtgacatact

SEQ ID NO: 145420 - DNA, 25 bp, probe
acagcgtatgtgatgactgtgacgg

SEQ ID NO: 145421 - DNA, 25 bp, probe
acagccaattatacatcgtgacttg

SEQ ID NO: 145422 - DNA, 25 bp, probe
acagccaacattatagtcagtcatc

SEQ ID NO: 145423 - DNA, 25 bp, probe
acagccgagcatttgttggaggcag

SEQ ID NO: 145424 - DNA, 25 bp, probe
acagtggcagcgtgttggagcgcga

SEQ ID NO: 145425 - DNA, 25 bp, probe
acagctgtaggctgttggggcgggg

SEQ ID NO: 145426 - DNA, 25 bp, probe
acagctgtaggctgttggggcgggg

SEQ ID NO: 145427 - DNA, 25 bp, probe
acagctgggctgtggtagggggtgt

SEQ ID NO: 145428 - DNA, 25 bp, probe
acacagggcgggtgtggggcattta

SEQ ID NO: 145429 - DNA, 25 bp, probe
acacagtggccggggctgaagccac

SEQ ID NO: 145430 - DNA, 25 bp, probe
acactcgtgccggaggcaaaggtcc

SEQ ID NO: 145431 - DNA, 25 bp, probe
acagactggccggaacagggtgtgc

SEQ ID NO: 145432 - DNA, 25 bp, probe
aaatctactcctttgggcgagtgcc

SEQ ID NO: 145433 - DNA, 25 bp, probe
aaatctactcctttgggcgagtgcc

SEQ ID NO: 145434 - DNA, 25 bp, probe
acactctacttatttgttggggaga

SEQ ID NO: 145435 - DNA, 25 bp, probe
acactctagctattcttcgtcgtga

SEQ ID NO: 145436 - DNA, 25 bp, probe
acagcttatgcatcattctgtgttt

SEQ ID NO: 145437 - DNA, 25 bp, probe
acagctattcccagctgctgatgtt

SEQ ID NO: 145438 - DNA, 25 bp, probe
acagctgtggctcacgtgagagtgt

SEQ ID NO: 145439 - DNA, 25 bp, probe
acactgggccctggctgaggagtag

SEQ ID NO: 145440 - DNA, 25 bp, probe
acactgggccctggctgaggagtag

SEQ ID NO: 145441 - DNA, 25 bp, probe
acacggacaccgacgagtgggagcg

SEQ ID NO: 145442 - DNA, 25 bp, probe
acacggacaccgacgagtgggagcg

SEQ ID NO: 145443 - DNA, 25 bp, probe
acacagcgaaccacaggatggggcc

SEQ ID NO: 145444 - DNA, 25 bp, probe
acaactataaggtaggattgggctc

SEQ ID NO: 145445 - DNA, 25 bp, probe
acaactataaggtaggattgggctc

SEQ ID NO: 145446 - DNA, 25 bp, probe
acaacttcaaaaggatttcaggctg

SEQ ID NO: 145447 - DNA, 25 bp, probe
acagactgaccatactgatattagt

SEQ ID NO: 145448 - DNA, 25 bp, probe
acagactgaccatactgatattagt

SEQ ID NO: 145449 - DNA, 25 bp, probe
acacctcatccatcgatgtttggtc

SEQ ID NO: 145450 - DNA, 25 bp, probe
acagttcagcaaccatgaatttgtt

SEQ ID NO: 145451 - DNA, 25 bp, probe
acagactctgaatgcatgacctttg

SEQ ID NO: 145452 - DNA, 25 bp, probe
acagaatggataagccagccaactg

SEQ ID NO: 145453 - DNA, 25 bp, probe
acagacaggtaagcgctgaacagag

SEQ ID NO: 145454 - DNA, 25 bp, probe
acagccatggctaaggaaggacaag

SEQ ID NO: 145455 - DNA, 25 bp, probe
acagctgctggagagaaatcccaag

SEQ ID NO: 145456 - DNA, 25 bp, probe
acagcatgtggtgaaatcaaaatca

SEQ ID NO: 145457 - DNA, 25 bp, probe
acagcagacagtgtcacatcaactt

SEQ ID NO: 145458 - DNA, 25 bp, probe
acagcagacagtgtcacatcaactt

SEQ ID NO: 145459 - DNA, 25 bp, probe
acagcaactgggccagcaaagttga

SEQ ID NO: 145460 - DNA, 25 bp, probe
agcagagtctgtgccatgaagcagt

SEQ ID NO: 145461 - DNA, 25 bp, probe
acagccgtggctgaggaggtgaacg

SEQ ID NO: 145462 - DNA, 25 bp, probe
acagccagtttgtgagtggtgggga

SEQ ID NO: 145463 - DNA, 25 bp, probe
acaccaatgcttcagatgggctgtg

SEQ ID NO: 145464 - DNA, 25 bp, probe
acaccttctacaatgagctgcgtgt

SEQ ID NO: 145465 - DNA, 25 bp, probe
acactgcttctcgaatggagtctaa

SEQ ID NO: 145466 - DNA, 25 bp, probe
acagctctacaccagagagtgctgc

SEQ ID NO: 145467 - DNA, 25 bp, probe
acaattgcacaccagcaaaggcaac

SEQ ID NO: 145468 - DNA, 25 bp, probe
acagttcacagaagcctgcggagcc

SEQ ID NO: 145469 - DNA, 25 bp, probe
acagttgccaaacccattgagcttg

SEQ ID NO: 145470 - DNA, 25 bp, probe
acagttctctgttaccatattttgt

SEQ ID NO: 145471 - DNA, 25 bp, probe
acagttctctgttaccatattttgt

SEQ ID NO: 145472 - DNA, 25 bp, probe
acagtacctttctcagacattttgt

SEQ ID NO: 145473 - DNA, 25 bp, probe
acagtacctttctcagacattttgt

SEQ ID NO: 145474 - DNA, 25 bp, probe
acactagttacctcagaatttggat

SEQ ID NO: 145475 - DNA, 25 bp, probe
acaccgtgaacctcagttattgcta

SEQ ID NO: 145476 - DNA, 25 bp, probe
acaccgtgaacctcagttattgcta

SEQ ID NO: 145477 - DNA, 25 bp, probe
acagctcgtaactcctttattgtac

SEQ ID NO: 145478 - DNA, 25 bp, probe
acagcctgaacaaggcttttcttgt

SEQ ID NO: 145479 - DNA, 25 bp, probe
acagcgccttcaagaacttcttttc

SEQ ID NO: 145480 - DNA, 25 bp, probe
acacctagtcaatacagatttgtat

SEQ ID NO: 145481 - DNA, 25 bp, probe
acacccgtacatcaatgtctggtat

SEQ ID NO: 145482 - DNA, 25 bp, probe
acacccgtacatcaatgtctggtat

SEQ ID NO: 145483 - DNA, 25 bp, probe
acagcccataaaacagcatttgcgt

SEQ ID NO: 145484 - DNA, 25 bp, probe
acagtacatcagcaaccatccttgt

SEQ ID NO: 145485 - DNA, 25 bp, probe
acagtacacatgccagaaatagctt

SEQ ID NO: 145486 - DNA, 25 bp, probe
acagtgactctgagatcccagcttc

SEQ ID NO: 145487 - DNA, 25 bp, probe
acagtgactctgagatcccagcttc

SEQ ID NO: 145488 - DNA, 25 bp, probe
acagtgagtctgaggccaacagcct

SEQ ID NO: 145489 - DNA, 25 bp, probe
acagagaatcagacagggccacagc

SEQ ID NO: 145490 - DNA, 25 bp, probe
acagagtataggaagagccagcagg

SEQ ID NO: 145491 - DNA, 25 bp, probe
acagagtataggaagagccagcagg

SEQ ID NO: 145492 - DNA, 25 bp, probe
acactaataggattggcaccagggg

SEQ ID NO: 145493 - DNA, 25 bp, probe
acacgttaggaatgtccagactgtg

SEQ ID NO: 145494 - DNA, 25 bp, probe
acagccttaggccaacacaaactgc

SEQ ID NO: 145495 - DNA, 25 bp, probe
acagtgcctactgctatcaaaagag

SEQ ID NO: 145496 - DNA, 25 bp, probe
acacctgtactagttgagaaagctg

SEQ ID NO: 145497 - DNA, 25 bp, probe
acagctgctctacagtgtggactcc

SEQ ID NO: 145498 - DNA, 25 bp, probe
acagctgcccctagtgtgagggctg

SEQ ID NO: 145499 - DNA, 25 bp, probe
acagctgactccaagctgcatggca

SEQ ID NO: 145500 - DNA, 25 bp, probe
acagcgatctccaagtcaagactga

SEQ ID NO: 145501 - DNA, 25 bp, probe
acagagcttcccgtgcaaaaagggt

SEQ ID NO: 145502 - DNA, 25 bp, probe
acagctggttccggaagaaacatcc

SEQ ID NO: 145503 - DNA, 25 bp, probe
acagctgtttctgaaagtagcccca

SEQ ID NO: 145504 - DNA, 25 bp, probe
acagctgtctccgtaaatggaggaa

SEQ ID NO: 145505 - DNA, 25 bp, probe
acagttctccatgagttggacagat

SEQ ID NO: 145506 - DNA, 25 bp, probe
acagttctccatcagccagatgatg

SEQ ID NO: 145507 - DNA, 25 bp, probe
acactagctgttctgctcatatatg

SEQ ID NO: 145508 - DNA, 25 bp, probe
acactgcagtttttcacaatggtgg

SEQ ID NO: 145509 - DNA, 25 bp, probe
acagcgcaattttgtgcaaagttgt

SEQ ID NO: 145510 - DNA, 25 bp, probe
acagcagcaattacttggctaaatt

SEQ ID NO: 145511 - DNA, 25 bp, probe
acaacagaattatccccaatttcca

SEQ ID NO: 145512 - DNA, 25 bp, probe
acaccagaaaagaccacctacatta

SEQ ID NO: 145513 - DNA, 25 bp, probe
acactcgaaaagagcacttcacaca

SEQ ID NO: 145514 - DNA, 25 bp, probe
acagccacggaagggcaataccagc

SEQ ID NO: 145515 - DNA, 25 bp, probe
acagccacggaagggcaataccagc

SEQ ID NO: 145516 - DNA, 25 bp, probe
acagaacttgatcctgcgtaaccag

SEQ ID NO: 145517 - DNA, 25 bp, probe
acagcaactgaaatacggaatcaag

SEQ ID NO: 145518 - DNA, 25 bp, probe
acagcaactgaaatacggaatcaag

SEQ ID NO: 145519 - DNA, 25 bp, probe
acagtactggccaacagatgaccaa

SEQ ID NO: 145520 - DNA, 25 bp, probe
acagaagacgccaacagaatcaact

SEQ ID NO: 145521 - DNA, 25 bp, probe
acagaaagcgccataacagcatctc

SEQ ID NO: 145522 - DNA, 25 bp, probe
acagccaaggcctaactatgcctcg

SEQ ID NO: 145523 - DNA, 25 bp, probe
acagcaacacatgccatacttccgg

SEQ ID NO: 145524 - DNA, 25 bp, probe
acagccaatcagaactacttccgcg

SEQ ID NO: 145525 - DNA, 25 bp, probe
acagctcaaagcaatttctacacga

SEQ ID NO: 145526 - DNA, 25 bp, probe
acagtcagaaaaccatcgcctgcga

SEQ ID NO: 145527 - DNA, 25 bp, probe
acagctaacaaaacggcgatggatg

SEQ ID NO: 145528 - DNA, 25 bp, probe
acagctaacaaaacggcgatggatg

SEQ ID NO: 145529 - DNA, 25 bp, probe
acagaaacacaaccggatgtcttga

SEQ ID NO: 145530 - DNA, 25 bp, probe
acagacaagacataggtagccgtag

SEQ ID NO: 145531 - DNA, 25 bp, probe
acagctgaaatctcagggcactcaa

SEQ ID NO: 145532 - DNA, 25 bp, probe
acactggactctgcagggcagccat

SEQ ID NO: 145533 - DNA, 25 bp, probe
acagctggaacccagaggacgccaa

SEQ ID NO: 145534 - DNA, 25 bp, probe
acagcagagtgtggggaggacccca

SEQ ID NO: 145535 - DNA, 25 bp, probe
acacaacttccaggagagcaactcc

SEQ ID NO: 145536 - DNA, 25 bp, probe
acagccctattctagaggatacttg

SEQ ID NO: 145537 - DNA, 25 bp, probe
acagcctgtttctgctgagtttctt

SEQ ID NO: 145538 - DNA, 25 bp, probe
acactctgcattacagtctgaattg

SEQ ID NO: 145539 - DNA, 25 bp, probe
acacccattagctctgttggcaagg

SEQ ID NO: 145540 - DNA, 25 bp, probe
acagccacagtagaagcggtagagg

SEQ ID NO: 145541 - DNA, 25 bp, probe
acaccttgctgagcaagggccaggc

SEQ ID NO: 145542 - DNA, 25 bp, probe
acaacttcatccgaagcatggccgc

SEQ ID NO: 145543 - DNA, 25 bp, probe
acaacttcatccgaagcatggccgc

SEQ ID NO: 145544 - DNA, 25 bp, probe
acaacttcatccgaagcatggccgc

SEQ ID NO: 145545 - DNA, 25 bp, probe
acaccattcgctcgcaaagacttgc

SEQ ID NO: 145546 - DNA, 25 bp, probe
acaccattcgctcgcaaagacttgc

SEQ ID NO: 145547 - DNA, 25 bp, probe
acaccatggtgacaaggtcttgcca

SEQ ID NO: 145548 - DNA, 25 bp, probe
acagacaggtaatagccctagccat

SEQ ID NO: 145549 - DNA, 25 bp, probe
acagacaggtaaaagctccaggtgt

SEQ ID NO: 145550 - DNA, 25 bp, probe
acagcagcatggagtcagtcctcgg

SEQ ID NO: 145551 - DNA, 25 bp, probe
acagactctgacatcatgtagccgg

SEQ ID NO: 145552 - DNA, 25 bp, probe
acacccagacagactgtgtgccagg

SEQ ID NO: 145553 - DNA, 25 bp, probe
acagccctgccatcgaggtcagggc

SEQ ID NO: 145554 - DNA, 25 bp, probe
acagccctgccatcgaggtcagggc

SEQ ID NO: 145555 - DNA, 25 bp, probe
acagcaagcccatcctggtgagggc

SEQ ID NO: 145556 - DNA, 25 bp, probe
acagcaaccgatattgtgggggccc

SEQ ID NO: 145557 - DNA, 25 bp, probe
acagcccctgatgacttgtgggtgc

SEQ ID NO: 145558 - DNA, 25 bp, probe
acagcccctgatgacttgtgggtgc

SEQ ID NO: 145559 - DNA, 25 bp, probe
acagcctcctggagttggtggagta

SEQ ID NO: 145560 - DNA, 25 bp, probe
acagcctcctggagttggtggagta

SEQ ID NO: 145561 - DNA, 25 bp, probe
acagagctcgcacacaagggtggtg

SEQ ID NO: 145562 - DNA, 25 bp, probe
acagcagcctgactgacaaggctgg

SEQ ID NO: 145563 - DNA, 25 bp, probe
acagccctggtgtggtgtggtttaa

SEQ ID NO: 145564 - DNA, 25 bp, probe
acaccacggtggccgtgaagatgct

SEQ ID NO: 145565 - DNA, 25 bp, probe
acagccacggggtttgcaatagcaa

SEQ ID NO: 145566 - DNA, 25 bp, probe
acagcccgggtgagaagtaaaagct

SEQ ID NO: 145567 - DNA, 25 bp, probe
caatgcctcccccaaaaggataaat

SEQ ID NO: 145568 - DNA, 25 bp, probe
acagccttcgcaacaaagaggtcaa

SEQ ID NO: 145569 - DNA, 25 bp, probe
acagcctgaggaacaaggacattca

SEQ ID NO: 145570 - DNA, 25 bp, probe
acacctcagcagttacaagccttca

SEQ ID NO: 145571 - DNA, 25 bp, probe
acaccttaactagctgctgcattat

SEQ ID NO: 145572 - DNA, 25 bp, probe
aaaggagggtaggtctgcattataa

SEQ ID NO: 145573 - DNA, 25 bp, probe
aaaggtggaggtgattgcaggaaaa

SEQ ID NO: 145574 - DNA, 25 bp, probe
aaaggtggaggtgattgcaggaaaa

SEQ ID NO: 145575 - DNA, 25 bp, probe
aaacagttggttgttctggccaaca

SEQ ID NO: 145576 - DNA, 25 bp, probe
aaatctaggtttgttactggcttca

SEQ ID NO: 145577 - DNA, 25 bp, probe
aaaagactgggtgttgactgcagct

SEQ ID NO: 145578 - DNA, 25 bp, probe
acaaccacgggtgtaagtgccatct

SEQ ID NO: 145579 - DNA, 25 bp, probe
aacaaaccaggtgaaattgccaaat

SEQ ID NO: 145580 - DNA, 25 bp, probe
aaaggacgggcgcaaacgccgcaag

SEQ ID NO: 145581 - DNA, 25 bp, probe
aaaggacacgggccaaactggctgc

SEQ ID NO: 145582 - DNA, 25 bp, probe
aaaggacacgggccaaactggctgc

SEQ ID NO: 145583 - DNA, 25 bp, probe
acagaggacgcttgagccagaatct

SEQ ID NO: 145584 - DNA, 25 bp, probe
acagatgtgacgcggacaatgcatt

SEQ ID NO: 145585 - DNA, 25 bp, probe
acagattacaggacgaatagctata

SEQ ID NO: 145586 - DNA, 25 bp, probe
acagcctacaggacgtacacaatat

SEQ ID NO: 145587 - DNA, 25 bp, probe
acagcttggtgactgttcacaaatt

SEQ ID NO: 145588 - DNA, 25 bp, probe
acagctaggctgagatgcaccaagt

SEQ ID NO: 145589 - DNA, 25 bp, probe
acagctaaggagcatgcccatcaga

SEQ ID NO: 145590 - DNA, 25 bp, probe
acagcagcaagaggagtccaagtca

SEQ ID NO: 145591 - DNA, 25 bp, probe
acagcatcagcatgggcttagagct

SEQ ID NO: 145592 - DNA, 25 bp, probe
acagcatcagcatgggcttagagct

SEQ ID NO: 145593 - DNA, 25 bp, probe
acagcatcagggggctcagagtctg

SEQ ID NO: 145594 - DNA, 25 bp, probe
acagcatcagggggctcagagtctg

SEQ ID NO: 145595 - DNA, 25 bp, probe
acagcgagaggcgagatcagtatct

SEQ ID NO: 145596 - DNA, 25 bp, probe
acagcgctgagcgtcgagcgctact

SEQ ID NO: 145597 - DNA, 25 bp, probe
acagctgagcacttagcaggcaccg

SEQ ID NO: 145598 - DNA, 25 bp, probe
acactggacagtagatgggccgaca

SEQ ID NO: 145599 - DNA, 25 bp, probe
acagatgtacaggtatcagggaaca

SEQ ID NO: 145600 - DNA, 25 bp, probe
acagagtccctgaaaggcagcagac

SEQ ID NO: 145601 - DNA, 25 bp, probe
acagagtctcttccaacgaaactga

SEQ ID NO: 145602 - DNA, 25 bp, probe
acagacgcatcctcaaggtagatgt

SEQ ID NO: 145603 - DNA, 25 bp, probe
acagacgctcctgaagttaggtcat

SEQ ID NO: 145604 - DNA, 25 bp, probe
acagacctctctgaagtgtctcctg

SEQ ID NO: 145605 - DNA, 25 bp, probe
acagagtcctcacacttctactctg

SEQ ID NO: 145606 - DNA, 25 bp, probe
acagagatcccaaaccagctattct

SEQ ID NO: 145607 - DNA, 25 bp, probe
acagagagctcctgaaagcttatca

SEQ ID NO: 145608 - DNA, 25 bp, probe
acagagagctcctgaaagcttatca

SEQ ID NO: 145609 - DNA, 25 bp, probe
acagaaacacatcagaactcataca

SEQ ID NO: 145610 - DNA, 25 bp, probe
acagcaaatcctcagacacctgtgg

SEQ ID NO: 145611 - DNA, 25 bp, probe
acagacaacttcatcagcacctgtt

SEQ ID NO: 145612 - DNA, 25 bp, probe
acagactgcctgaattgagaatttt

SEQ ID NO: 145613 - DNA, 25 bp, probe
acagctctgcctgaaggagaccttc

SEQ ID NO: 145614 - DNA, 25 bp, probe
acagctctgcctgaaggagaccttc

SEQ ID NO: 145615 - DNA, 25 bp, probe
acagcaatccatcaacgaagccata

SEQ ID NO: 145616 - DNA, 25 bp, probe
acagaaccactaccaagagctcaat

SEQ ID NO: 145617 - DNA, 25 bp, probe
acaaagtcaacaggcaaggtaatct

SEQ ID NO: 145618 - DNA, 25 bp, probe
acaaccattaaccaaagtcacagct

SEQ ID NO: 145619 - DNA, 25 bp, probe
acagaccttttcagtatgtcacctt

SEQ ID NO: 145620 - DNA, 25 bp, probe
acacgccttttcacttctgaagttg

SEQ ID NO: 145621 - DNA, 25 bp, probe
aacggttaacgacttctggagaatg

SEQ ID NO: 145622 - DNA, 25 bp, probe
aacgtctaactggacttcccaagat

SEQ ID NO: 145623 - DNA, 25 bp, probe
acacctcttattcacctgccgaagc

SEQ ID NO: 145624 - DNA, 25 bp, probe
acacacatgttagagcccttctgaa

SEQ ID NO: 145625 - DNA, 25 bp, probe
acacgcggcagagatcgccaacatg

SEQ ID NO: 145626 - DNA, 25 bp, probe
acaccccaaaacacatacattgaaa

SEQ ID NO: 145627 - DNA, 25 bp, probe
acacgacccatatcaagctacagaa

SEQ ID NO: 145628 - DNA, 25 bp, probe
acacgacccatatcaagctacagaa

SEQ ID NO: 145629 - DNA, 25 bp, probe
acagcaaacagcaatctaagtacag

SEQ ID NO: 145630 - DNA, 25 bp, probe
acagacaacatgaaccagatctacg

SEQ ID NO: 145631 - DNA, 25 bp, probe
acagacaagtgtgccatttgaccat

SEQ ID NO: 145632 - DNA, 25 bp, probe
acagacagaggaggccatacagacc

SEQ ID NO: 145633 - DNA, 25 bp, probe
acagatactggaagctctacgctac

SEQ ID NO: 145634 - DNA, 25 bp, probe
acagatgacggctgctcgaagaaca

SEQ ID NO: 145635 - DNA, 25 bp, probe
acagcagctttgtacacgaagacca

SEQ ID NO: 145636 - DNA, 25 bp, probe
acagctttatgatatcaaagactca

SEQ ID NO: 145637 - DNA, 25 bp, probe
acagcttctataaaagtgacttcat

SEQ ID NO: 145638 - DNA, 25 bp, probe
acactctcctaagaggttctctcca

SEQ ID NO: 145639 - DNA, 25 bp, probe
acagcgtctctgtaaaggtttttat

SEQ ID NO: 145640 - DNA, 25 bp, probe
acagcagacatcggaaagatttctt

SEQ ID NO: 145641 - DNA, 25 bp, probe
acagcatgtctggggaaattttatc

SEQ ID NO: 145642 - DNA, 25 bp, probe
acagttgtggtttatcattctctat

SEQ ID NO: 145643 - DNA, 25 bp, probe
acagttgtggtttatcattctctat

SEQ ID NO: 145644 - DNA, 25 bp, probe
acagcttcggcctaatcatttggga

SEQ ID NO: 145645 - DNA, 25 bp, probe
acagccttggactagcaatttatgc

SEQ ID NO: 145646 - DNA, 25 bp, probe
acaccgaggagtccagtttgtgcaa

SEQ ID NO: 145647 - DNA, 25 bp, probe
acaccgaggagtccagtttgtgcaa

SEQ ID NO: 145648 - DNA, 25 bp, probe
acagcccggatgttgatggttgtgc

SEQ ID NO: 145649 - DNA, 25 bp, probe
acagccccagatctgcacaattgat

SEQ ID NO: 145650 - DNA, 25 bp, probe
acagccccagatctgcacaattgat

SEQ ID NO: 145651 - DNA, 25 bp, probe
acagccccagatctgcacaattgat

SEQ ID NO: 145652 - DNA, 25 bp, probe
acagctaccagggtcacatgcagtc

SEQ ID NO: 145653 - DNA, 25 bp, probe
acagcttcatcaagcgctacgagac

SEQ ID NO: 145654 - DNA, 25 bp, probe
acagctctctgaggccaagggacag

SEQ ID NO: 145655 - DNA, 25 bp, probe
acagctctctgagatactcaggata

SEQ ID NO: 145656 - DNA, 25 bp, probe
acagctgctggttataccacactag

SEQ ID NO: 145657 - DNA, 25 bp, probe
acagatgtgtgcttttcctacagaa

SEQ ID NO: 145658 - DNA, 25 bp, probe
acagatgggcacattcttgtggcaa

SEQ ID NO: 145659 - DNA, 25 bp, probe
acagcgtggacaaatctctcagcca

SEQ ID NO: 145660 - DNA, 25 bp, probe
acagctattcacatcattgcacacc

SEQ ID NO: 145661 - DNA, 25 bp, probe
acacccatcatggtcatctatcatc

SEQ ID NO: 145662 - DNA, 25 bp, probe
acacccatcatggtcatctatcatc

SEQ ID NO: 145663 - DNA, 25 bp, probe
acacctcaatgtccaaatagcggcc

SEQ ID NO: 145664 - DNA, 25 bp, probe
acacctcaatgtccaaatagcggcc

SEQ ID NO: 145665 - DNA, 25 bp, probe
acagccatgcctccgaaagagggcc

SEQ ID NO: 145666 - DNA, 25 bp, probe
acagcagagctgatcaggaagaggg

SEQ ID NO: 145667 - DNA, 25 bp, probe
acagcaacgtcttgaacaggcgctg

SEQ ID NO: 145668 - DNA, 25 bp, probe
acagcaacgatattgccctggtcca

SEQ ID NO: 145669 - DNA, 25 bp, probe
acagaatatttctcctgctgtgccc

SEQ ID NO: 145670 - DNA, 25 bp, probe
acagaagctcttactgacttggccc

SEQ ID NO: 145671 - DNA, 25 bp, probe
acagaatgtctgatcgatcatgcag

SEQ ID NO: 145672 - DNA, 25 bp, probe
acagcgtgcactaacttcatgatga

SEQ ID NO: 145673 - DNA, 25 bp, probe
acagcctcagcatacttcttgctgc

SEQ ID NO: 145674 - DNA, 25 bp, probe
acagcctcatcattagcaactttat

SEQ ID NO: 145675 - DNA, 25 bp, probe
acagcctcatcattagcaactttat

SEQ ID NO: 145676 - DNA, 25 bp, probe
acagcagtgagttacgactttgatg

SEQ ID NO: 145677 - DNA, 25 bp, probe
acagagtaggagagactgctaagtc

SEQ ID NO: 145678 - DNA, 25 bp, probe
acagagtaaagttgatcccaagcct

SEQ ID NO: 145679 - DNA, 25 bp, probe
acagacttcaccagcaccatcaagc

SEQ ID NO: 145680 - DNA, 25 bp, probe
acagagggcaccatgtggctcagtg

SEQ ID NO: 145681 - DNA, 25 bp, probe
acagagggcaccatgtggctcagtg

SEQ ID NO: 145682 - DNA, 25 bp, probe
acagaagaggccatgtgtctcagag

SEQ ID NO: 145683 - DNA, 25 bp, probe
aaaaattgcattagagcacggagtc

SEQ ID NO: 145684 - DNA, 25 bp, probe
acaagagttgctggtggaaggcgtc

SEQ ID NO: 145685 - DNA, 25 bp, probe
acagaggtggctgtgcgaagagggg

SEQ ID NO: 145686 - DNA, 25 bp, probe
acagactgtgcctctctaatgaaga

SEQ ID NO: 145687 - DNA, 25 bp, probe
acagagatatctgcactttgtagaa

SEQ ID NO: 145688 - DNA, 25 bp, probe
acagagatgcttttgcttatgttca

SEQ ID NO: 145689 - DNA, 25 bp, probe
acagagcagatcagtctttgtcaat

SEQ ID NO: 145690 - DNA, 25 bp, probe
acagcagagatatgcctttctcatt

SEQ ID NO: 145691 - DNA, 25 bp, probe
acagcacagtggtccttttgttctt

SEQ ID NO: 145692 - DNA, 25 bp, probe
acagcccagccagtttggctgtttt

SEQ ID NO: 145693 - DNA, 25 bp, probe
acagccaacatcacgaggtgtaatt

SEQ ID NO: 145694 - DNA, 25 bp, probe
acagccaacatcacgaggtgtaatt

SEQ ID NO: 145695 - DNA, 25 bp, probe
acagcaaactgcactgcacttataa

SEQ ID NO: 145696 - DNA, 25 bp, probe
acagacatactcattcatttgattt

SEQ ID NO: 145697 - DNA, 25 bp, probe
acagacatctaaattttcgagactt

SEQ ID NO: 145698 - DNA, 25 bp, probe
acagacacaagtaattttgacagtt

SEQ ID NO: 145699 - DNA, 25 bp, probe
acagctcacaagtatatcattcgaa

SEQ ID NO: 145700 - DNA, 25 bp, probe
acagcacacaaaggatatcagcgaa

SEQ ID NO: 145701 - DNA, 25 bp, probe
acagcagcgacagcagtgacagcaa

SEQ ID NO: 145702 - DNA, 25 bp, probe
acagagtgagaccctgtctgaaaga

SEQ ID NO: 145703 - DNA, 25 bp, probe
acagagcgagactccatctaaaaaa

SEQ ID NO: 145704 - DNA, 25 bp, probe
acagagcgagactccatctcaaaaa

SEQ ID NO: 145705 - DNA, 25 bp, probe
acagagcgagactccatctcaaaaa

SEQ ID NO: 145706 - DNA, 25 bp, probe
aaagggaacccagctctaatacatt

SEQ ID NO: 145707 - DNA, 25 bp, probe
aaagggaacccagctctaatacatt

SEQ ID NO: 145708 - DNA, 25 bp, probe
acacatgttagagcccttctgaaaa

SEQ ID NO: 145709 - DNA, 25 bp, probe
acacggaaagcatggttcaaaagaa

SEQ ID NO: 145710 - DNA, 25 bp, probe
acacccaaagcatggactaacccca

SEQ ID NO: 145711 - DNA, 25 bp, probe
acacccaaagcatggactaacccca

SEQ ID NO: 145712 - DNA, 25 bp, probe
acagcaaataagcaggacgggccca

SEQ ID NO: 145713 - DNA, 25 bp, probe
acagcgaaccacaggatggggccaa

SEQ ID NO: 145714 - DNA, 25 bp, probe
acacggaccatgacatcaaaaggcc

SEQ ID NO: 145715 - DNA, 25 bp, probe
acactggacctaggcaaaaccactg

SEQ ID NO: 145716 - DNA, 25 bp, probe
acactgagaatttatcaaccaccac

SEQ ID NO: 145717 - DNA, 25 bp, probe
acagcatacagcattataaccccgg

SEQ ID NO: 145718 - DNA, 25 bp, probe
acagcatacagcattataaccccgg

SEQ ID NO: 145719 - DNA, 25 bp, probe
acagcatccaacttataatatctcc

SEQ ID NO: 145720 - DNA, 25 bp, probe
acagccgatgacatcatcgactccc

SEQ ID NO: 145721 - DNA, 25 bp, probe
acagccgacacggtgagaccaccgt

SEQ ID NO: 145722 - DNA, 25 bp, probe
acagcagccacaatgaggaactcct

SEQ ID NO: 145723 - DNA, 25 bp, probe
acagcagcaccctggagatactctt

SEQ ID NO: 145724 - DNA, 25 bp, probe
acagcacccccaggagattatcttc

SEQ ID NO: 145725 - DNA, 25 bp, probe
acagcacgttcctggtgttcatgtc

SEQ ID NO: 145726 - DNA, 25 bp, probe
acagcacgttcctggtgttcatgtc

SEQ ID NO: 145727 - DNA, 25 bp, probe
acagaagttccactgatgtgtgtta

SEQ ID NO: 145728 - DNA, 25 bp, probe
acagaaattcatatttggtgtggct

SEQ ID NO: 145729 - DNA, 25 bp, probe
acagctgagtgtatgtttttgttct

SEQ ID NO: 145730 - DNA, 25 bp, probe
acactgagtgtctcatcttggtaat

SEQ ID NO: 145731 - DNA, 25 bp, probe
acactggtgatcgcatacatcatga

SEQ ID NO: 145732 - DNA, 25 bp, probe
acagctgtgtgtgcagacctcatgt

SEQ ID NO: 145733 - DNA, 25 bp, probe
acagctgtgatcacgagccattgtc

SEQ ID NO: 145734 - DNA, 25 bp, probe
acagctgtgatcacgagccattgtc

SEQ ID NO: 145735 - DNA, 25 bp, probe
acagcatctataacagcagcccttc

SEQ ID NO: 145736 - DNA, 25 bp, probe
acagcatctataacagcagcccttc

SEQ ID NO: 145737 - DNA, 25 bp, probe
acagcagctagaatacgccctgctc

SEQ ID NO: 145738 - DNA, 25 bp, probe
acagagctacgcagagcatcctcat

SEQ ID NO: 145739 - DNA, 25 bp, probe
acagcagcttctcggaatgcatgtt

SEQ ID NO: 145740 - DNA, 25 bp, probe
acagcagcttccaggtgatgtacac

SEQ ID NO: 145741 - DNA, 25 bp, probe
acacgttcacattgcggtgatgtac

SEQ ID NO: 145742 - DNA, 25 bp, probe
acagcgttgcagaggactgaccctg

SEQ ID NO: 145743 - DNA, 25 bp, probe
acagcagtcggttggagcgagcatc

SEQ ID NO: 145744 - DNA, 25 bp, probe
acagcaatgcaagatggcagccacc

SEQ ID NO: 145745 - DNA, 25 bp, probe
acagcatcaaggatgtgcacgcccg

SEQ ID NO: 145746 - DNA, 25 bp, probe
acagacatgcagcttggaggttcag

SEQ ID NO: 145747 - DNA, 25 bp, probe
acagcctcccttcgatggggaggac

SEQ ID NO: 145748 - DNA, 25 bp, probe
acagccttggcatggtgtgggggca

SEQ ID NO: 145749 - DNA, 25 bp, probe
acacccggcaagcagccggagacaa

SEQ ID NO: 145750 - DNA, 25 bp, probe
acaaccgggaggtgctggagcaggt

SEQ ID NO: 145751 - DNA, 25 bp, probe
acagcaactttgagtggctggatca

SEQ ID NO: 145752 - DNA, 25 bp, probe
acagcatagcttttagaggcaggat

SEQ ID NO: 145753 - DNA, 25 bp, probe
acagaagctcatgtgaaggcaatga

SEQ ID NO: 145754 - DNA, 25 bp, probe
acagaagctcatgtgaaggcaatga

SEQ ID NO: 145755 - DNA, 25 bp, probe
acagaagctgctagatgaggtcatc

SEQ ID NO: 145756 - DNA, 25 bp, probe
acagcaattgcaatgttgagtgttt

SEQ ID NO: 145757 - DNA, 25 bp, probe
acagcaattgcaatgttgagtgttt

SEQ ID NO: 145758 - DNA, 25 bp, probe
acagcagttgcattttattcgtcat

SEQ ID NO: 145759 - DNA, 25 bp, probe
acagcgtccattttttcatattaga

SEQ ID NO: 145760 - DNA, 25 bp, probe
acagcattctttgattgtcatctta

SEQ ID NO: 145761 - DNA, 25 bp, probe
acagcagtttattaatgtatataaa

SEQ ID NO: 145762 - DNA, 25 bp, probe
acagcgtttctatcaacttacaaaa

SEQ ID NO: 145763 - DNA, 25 bp, probe
acagcgtttctatcaacttacaaaa

SEQ ID NO: 145764 - DNA, 25 bp, probe
acacaagtttaagatccacacgtac

SEQ ID NO: 145765 - DNA, 25 bp, probe
acacggtgtctgtttatccgtgctg

SEQ ID NO: 145766 - DNA, 25 bp, probe
acagctcagtgtcattttcctattt

SEQ ID NO: 145767 - DNA, 25 bp, probe
acagctgattgagaatttccattgt

SEQ ID NO: 145768 - DNA, 25 bp, probe
acactattaggggtgtccgtgtaat

SEQ ID NO: 145769 - DNA, 25 bp, probe
acactattaggggtgtccgtgtaat

SEQ ID NO: 145770 - DNA, 25 bp, probe
acactactgggacctactctggaaa

SEQ ID NO: 145771 - DNA, 25 bp, probe
acacaacggcaacattatgctggac

SEQ ID NO: 145772 - DNA, 25 bp, probe
acaaaaacactgctctgcattgggc

SEQ ID NO: 145773 - DNA, 25 bp, probe
acacattatagactttggactggcc

SEQ ID NO: 145774 - DNA, 25 bp, probe
acagcatgaaactttgtagcatcgg

SEQ ID NO: 145775 - DNA, 25 bp, probe
acagctgacccagttgtccatcagc

SEQ ID NO: 145776 - DNA, 25 bp, probe
acagctgagcggctgagtcctgagc

SEQ ID NO: 145777 - DNA, 25 bp, probe
acagcaagctgtcggtgatccacag

SEQ ID NO: 145778 - DNA, 25 bp, probe
acagcagtgctgcgcgaatacgagg

SEQ ID NO: 145779 - DNA, 25 bp, probe
acagctgattggcggattggagatg

SEQ ID NO: 145780 - DNA, 25 bp, probe
acagcatttgcgtttattgagagag

SEQ ID NO: 145781 - DNA, 25 bp, probe
acagcattgcggattaagaaaacat

SEQ ID NO: 145782 - DNA, 25 bp, probe
acagcattgcggattaagaaaacat

SEQ ID NO: 145783 - DNA, 25 bp, probe
acagaatcacagctaaggaactact

SEQ ID NO: 145784 - DNA, 25 bp, probe
acagacagacaataagccagacaac

SEQ ID NO: 145785 - DNA, 25 bp, probe
acagacagacaataagccagacaac

SEQ ID NO: 145786 - DNA, 25 bp, probe
acaacacaattgcatcccaaataca

SEQ ID NO: 145787 - DNA, 25 bp, probe
acaaacacttggctcctagagacct

SEQ ID NO: 145788 - DNA, 25 bp, probe
aaatgccacaagtgtatctaaaact

SEQ ID NO: 145789 - DNA, 25 bp, probe
acaagatacgtatatttttaactgc

SEQ ID NO: 145790 - DNA, 25 bp, probe
acacaaacgtttacttatcttatgc

SEQ ID NO: 145791 - DNA, 25 bp, probe
acagaaagcagattgttctttgtta

SEQ ID NO: 145792 - DNA, 25 bp, probe
acagcaacagcaattttatccttta

SEQ ID NO: 145793 - DNA, 25 bp, probe
acagaacagtacttttcttttagtg

SEQ ID NO: 145794 - DNA, 25 bp, probe
acagaacagtacttttcttttagtg

SEQ ID NO: 145795 - DNA, 25 bp, probe
acagcaaagaaccaccatcttattc

SEQ ID NO: 145796 - DNA, 25 bp, probe
acagaatcgaactctgcacttctct

SEQ ID NO: 145797 - DNA, 25 bp, probe
acacgctgcagatcgaggactttct

SEQ ID NO: 145798 - DNA, 25 bp, probe
acacgctggcggggaagctggatgc

SEQ ID NO: 145799 - DNA, 25 bp, probe
acacctgggagggagagcggagaaa

SEQ ID NO: 145800 - DNA, 25 bp, probe
acacctgggagggagagcggagaaa

SEQ ID NO: 145801 - DNA, 25 bp, probe
acacctgggccagagatggacgtgt

SEQ ID NO: 145802 - DNA, 25 bp, probe
acagccagggcaccaatgggacctg

SEQ ID NO: 145803 - DNA, 25 bp, probe
acaccaccacagaagatgaggacct

SEQ ID NO: 145804 - DNA, 25 bp, probe
acacctccaattttgatgaaccaaa

SEQ ID NO: 145805 - DNA, 25 bp, probe
acaccaccaggtccagtcggaagaa

SEQ ID NO: 145806 - DNA, 25 bp, probe
acaccaccgggcatttggtgaagat

SEQ ID NO: 145807 - DNA, 25 bp, probe
acaccacaagggatgtgtggcagcc

SEQ ID NO: 145808 - DNA, 25 bp, probe
acacgcagagtgccgactggtggtc

SEQ ID NO: 145809 - DNA, 25 bp, probe
acactagacatgccaactcgggagc

SEQ ID NO: 145810 - DNA, 25 bp, probe
acactgaacagttactccgtggcct

SEQ ID NO: 145811 - DNA, 25 bp, probe
acacaggacgcgctgtacgtggcgc

SEQ ID NO: 145812 - DNA, 25 bp, probe
acacaggcccagaggactggggtga

SEQ ID NO: 145813 - DNA, 25 bp, probe
acagccctccagtgtactgagggta

SEQ ID NO: 145814 - DNA, 25 bp, probe
acaagccaccgttctacgatgtggt

SEQ ID NO: 145815 - DNA, 25 bp, probe
acactgcgaccgtacgacgtgaagg

SEQ ID NO: 145816 - DNA, 25 bp, probe
acactgcgaccgtacgacgtgaagg

SEQ ID NO: 145817 - DNA, 25 bp, probe
acagcggagagcgaacgcctggagg

SEQ ID NO: 145818 - DNA, 25 bp, probe
acaccagcaaaggcaactctggggc

SEQ ID NO: 145819 - DNA, 25 bp, probe
acacacacacacacaaatggaggaa

SEQ ID NO: 145820 - DNA, 25 bp, probe
acagcccatcacctctaatagaggc

SEQ ID NO: 145821 - DNA, 25 bp, probe
acaccctccgaggcaaagggcaggc

SEQ ID NO: 145822 - DNA, 25 bp, probe
acagccctgggagacaagggaaggc

SEQ ID NO: 145823 - DNA, 25 bp, probe
acagccctgtggaccacgaggacat

SEQ ID NO: 145824 - DNA, 25 bp, probe
acagccctgtggaccacgaggacat

SEQ ID NO: 145825 - DNA, 25 bp, probe
acagccaagatgtatcccagatgta

SEQ ID NO: 145826 - DNA, 25 bp, probe
acagccaagatgtatcccagatgta

SEQ ID NO: 145827 - DNA, 25 bp, probe
acagcgcaacagcagcctgcagctg

SEQ ID NO: 145828 - DNA, 25 bp, probe
acagcagcaacgatctcagcagcag

SEQ ID NO: 145829 - DNA, 25 bp, probe
acagcgagtcttacgagcagcatat

SEQ ID NO: 145830 - DNA, 25 bp, probe
acactgagtctattcagctccaatt

SEQ ID NO: 145831 - DNA, 25 bp, probe
acactgagtctattcagctccaatt

SEQ ID NO: 145832 - DNA, 25 bp, probe
acagcagagtctgtgccatgaagca

SEQ ID NO: 145833 - DNA, 25 bp, probe
acagcaagatgtgatcctgccagag

SEQ ID NO: 145834 - DNA, 25 bp, probe
acagcatgaggattttctccagcag

SEQ ID NO: 145835 - DNA, 25 bp, probe
acagcatggggcttggctccaagtt

SEQ ID NO: 145836 - DNA, 25 bp, probe
acagcagtgggtaggcccagcagtg

SEQ ID NO: 145837 - DNA, 25 bp, probe
acacgttaatatccctagcagaggc

SEQ ID NO: 145838 - DNA, 25 bp, probe
acagcagtttatagctccaaccaat

SEQ ID NO: 145839 - DNA, 25 bp, probe
acagcagtttatagctccaaccaat

SEQ ID NO: 145840 - DNA, 25 bp, probe
acagcttctttgcccaaaatgcagt

SEQ ID NO: 145841 - DNA, 25 bp, probe
acagccatacttccagcgaaatggt

SEQ ID NO: 145842 - DNA, 25 bp, probe
acagccatacttccagcgaaatggt

SEQ ID NO: 145843 - DNA, 25 bp, probe
acagccaacatcaagagcctaggtt

SEQ ID NO: 145844 - DNA, 25 bp, probe
acaccgatgctgacaggcctagagt

SEQ ID NO: 145845 - DNA, 25 bp, probe
acagcctcagttaactgcataattc

SEQ ID NO: 145846 - DNA, 25 bp, probe
acagcctagctctgatagtgaattt

SEQ ID NO: 145847 - DNA, 25 bp, probe
acagcacgagtcccaaaacttttag

SEQ ID NO: 145848 - DNA, 25 bp, probe
acagcaacaattccggaacattttc

SEQ ID NO: 145849 - DNA, 25 bp, probe
acacatcaaatgccccgaatttagt

SEQ ID NO: 145850 - DNA, 25 bp, probe
acacacaaatggaggaaatcctgag

SEQ ID NO: 145851 - DNA, 25 bp, probe
acacaaatagagaggggacagaatg

SEQ ID NO: 145852 - DNA, 25 bp, probe
aacattaatggaaggaggtacacac

SEQ ID NO: 145853 - DNA, 25 bp, probe
aacgttaagacctctttcacagcct

SEQ ID NO: 145854 - DNA, 25 bp, probe
aacgtttacttatcttatgccacgg

SEQ ID NO: 145855 - DNA, 25 bp, probe
aacgagacgacgaaagttaggcacg

SEQ ID NO: 145856 - DNA, 25 bp, probe
aaaggactgcctcaagccatagtac

SEQ ID NO: 145857 - DNA, 25 bp, probe
acaacgacctagaaaagtgagaaca

SEQ ID NO: 145858 - DNA, 25 bp, probe
acaactgggggaatcaaatcaaaca

SEQ ID NO: 145859 - DNA, 25 bp, probe
aaattggggcgctcagagaaggagc

SEQ ID NO: 145860 - DNA, 25 bp, probe
acaaaacgccgctggagaaggatgg

SEQ ID NO: 145861 - DNA, 25 bp, probe
acaactacgacgcggagaacaaact

SEQ ID NO: 145862 - DNA, 25 bp, probe
acaacgccgagctggaaaggaagac

SEQ ID NO: 145863 - DNA, 25 bp, probe
acaagccagggctgggacaatggca

SEQ ID NO: 145864 - DNA, 25 bp, probe
acagcagtgatggctggggaacaat

SEQ ID NO: 145865 - DNA, 25 bp, probe
acagcaggagtgcatgaggcaactg

SEQ ID NO: 145866 - DNA, 25 bp, probe
acagcagcgggactttgcaacattg

SEQ ID NO: 145867 - DNA, 25 bp, probe
acagcagagggagttaagccatagg

SEQ ID NO: 145868 - DNA, 25 bp, probe
acagcgaggaggaccctccacagga

SEQ ID NO: 145869 - DNA, 25 bp, probe
acagcgaggaggaccctccacagga

SEQ ID NO: 145870 - DNA, 25 bp, probe
acacgattatgtgcgcgtcaacagg

SEQ ID NO: 145871 - DNA, 25 bp, probe
acactgacctgaacgcagtcatccg

SEQ ID NO: 145872 - DNA, 25 bp, probe
acactgatcactcaggcctgatctc

SEQ ID NO: 145873 - DNA, 25 bp, probe
acacgtatctcttggtatgcatctt

SEQ ID NO: 145874 - DNA, 25 bp, probe
acactgctcaaactttctgctattg

SEQ ID NO: 145875 - DNA, 25 bp, probe
acagcgctcaaaactcggtgatcat

SEQ ID NO: 145876 - DNA, 25 bp, probe
acacctacagtgactctgagtagtc

SEQ ID NO: 145877 - DNA, 25 bp, probe
acagccttcagtcctcagcaggact

SEQ ID NO: 145878 - DNA, 25 bp, probe
acagccggctgtggagcagcaggac

SEQ ID NO: 145879 - DNA, 25 bp, probe
acagctccgcatcctggagcagagc

SEQ ID NO: 145880 - DNA, 25 bp, probe
acactgctcctgccgtgaaagatgt

SEQ ID NO: 145881 - DNA, 25 bp, probe
acactctcttcagatgcaaaatcat

SEQ ID NO: 145882 - DNA, 25 bp, probe
aacctgtaaaatcaacacaagttat

SEQ ID NO: 145883 - DNA, 25 bp, probe
acacctggataactgttacactttt

SEQ ID NO: 145884 - DNA, 25 bp, probe
acacgctggtcatctttaccatgtc

SEQ ID NO: 145885 - DNA, 25 bp, probe
acacaggtgccaaattctaccgtgg

SEQ ID NO: 145886 - DNA, 25 bp, probe
acactggatggcttcatgatgtacc

SEQ ID NO: 145887 - DNA, 25 bp, probe
acacggctgggttggatatgccttt

SEQ ID NO: 145888 - DNA, 25 bp, probe
acactggaggtggagttattttgga

SEQ ID NO: 145889 - DNA, 25 bp, probe
acacttaagttatcattcttttaga

SEQ ID NO: 145890 - DNA, 25 bp, probe
acacttttattatatttttatgctt

SEQ ID NO: 145891 - DNA, 25 bp, probe
acacctttgatataactgtttactt

SEQ ID NO: 145892 - DNA, 25 bp, probe
acagcactttaataatgcgctcccc

SEQ ID NO: 145893 - DNA, 25 bp, probe
acagcactttaataatgcgctcccc

SEQ ID NO: 145894 - DNA, 25 bp, probe
acagccttagtatgacatcctgcac

SEQ ID NO: 145895 - DNA, 25 bp, probe
acagccgcatacgtgaggatcctgc

SEQ ID NO: 145896 - DNA, 25 bp, probe
acagcctcatggatgaagacattgc

SEQ ID NO: 145897 - DNA, 25 bp, probe
acacccatgacatgaagccagcttc

SEQ ID NO: 145898 - DNA, 25 bp, probe
acaccctgcgagaagtcactgttac

SEQ ID NO: 145899 - DNA, 25 bp, probe
acagctccaggaccagtgcaggctg

SEQ ID NO: 145900 - DNA, 25 bp, probe
acagcttgatagaccagtgcagcca

SEQ ID NO: 145901 - DNA, 25 bp, probe
acagctttgagctcagcatgacttg

SEQ ID NO: 145902 - DNA, 25 bp, probe
acacgtctggcttcacagatgtgtg

SEQ ID NO: 145903 - DNA, 25 bp, probe
aacatgacctgcatcatcatttgct

SEQ ID NO: 145904 - DNA, 25 bp, probe
acacaggcctgataactctgtacga

SEQ ID NO: 145905 - DNA, 25 bp, probe
acacagtgcttacttaccttactaa

SEQ ID NO: 145906 - DNA, 25 bp, probe
acagcagggtggagacgtctcctcc

SEQ ID NO: 145907 - DNA, 25 bp, probe
aagcagggggaaggtgtccctgact

SEQ ID NO: 145908 - DNA, 25 bp, probe
aactaggggaaggatcttatgctac

SEQ ID NO: 145909 - DNA, 25 bp, probe
aactaggggaaggatcttatgctac

SEQ ID NO: 145910 - DNA, 25 bp, probe
acactactagtaagcctttatctat

SEQ ID NO: 145911 - DNA, 25 bp, probe
acacaaccattcaggctttacaagc

SEQ ID NO: 145912 - DNA, 25 bp, probe
acacaaccattcaggctttacaagc

SEQ ID NO: 145913 - DNA, 25 bp, probe
acaaactctcatttgactgtgagaa

SEQ ID NO: 145914 - DNA, 25 bp, probe
acaccactgactctgatccagagaa

SEQ ID NO: 145915 - DNA, 25 bp, probe
acaccactgactctgatccagagaa

SEQ ID NO: 145916 - DNA, 25 bp, probe
acaacatgcgaccgtgaccaggaac

SEQ ID NO: 145917 - DNA, 25 bp, probe
acacaatgcccaggtgggtgaagac

SEQ ID NO: 145918 - DNA, 25 bp, probe
acacaatgcccaggtgggtgaagac

SEQ ID NO: 145919 - DNA, 25 bp, probe
acaaatcccggctgaatgagaccac

SEQ ID NO: 145920 - DNA, 25 bp, probe
acaccatacacgcaaaagacaccgg

SEQ ID NO: 145921 - DNA, 25 bp, probe
acaccaccagggtaagaaagatcgg

SEQ ID NO: 145922 - DNA, 25 bp, probe
acacccagcaagaaaacaaagtcca

SEQ ID NO: 145923 - DNA, 25 bp, probe
acaagccagcccaggacaaagtcct

SEQ ID NO: 145924 - DNA, 25 bp, probe
acaagccagcccaggacaaagtcct

SEQ ID NO: 145925 - DNA, 25 bp, probe
acacagagaccctaaacaacgttct

SEQ ID NO: 145926 - DNA, 25 bp, probe
acactcagaccgtaaagccaagtat

SEQ ID NO: 145927 - DNA, 25 bp, probe
acaccaaacttatcagaggagtatt

SEQ ID NO: 145928 - DNA, 25 bp, probe
acaccaagactttattgttaggatc

SEQ ID NO: 145929 - DNA, 25 bp, probe
acaccggcattttatgtactttgtc

SEQ ID NO: 145930 - DNA, 25 bp, probe
acaaacgtttacttatcttatgcca

SEQ ID NO: 145931 - DNA, 25 bp, probe
aaattagtaattttgtttatgctgc

SEQ ID NO: 145932 - DNA, 25 bp, probe
aaattaggagagattactttgtatt

SEQ ID NO: 145933 - DNA, 25 bp, probe
acacttaggaataatacctgccttt

SEQ ID NO: 145934 - DNA, 25 bp, probe
acactgtatggaacccacatctgcc

SEQ ID NO: 145935 - DNA, 25 bp, probe
acactgtatggaacccacatctgcc

SEQ ID NO: 145936 - DNA, 25 bp, probe
acacggtgtgaatcacacatccagc

SEQ ID NO: 145937 - DNA, 25 bp, probe
acacgggacaacaaacatcacccat

SEQ ID NO: 145938 - DNA, 25 bp, probe
acacgatggacctcaagaatcaaat

SEQ ID NO: 145939 - DNA, 25 bp, probe
acaccacagaccccgagaaactgat

SEQ ID NO: 145940 - DNA, 25 bp, probe
acaccacagaccccgagaaactgat

SEQ ID NO: 145941 - DNA, 25 bp, probe
acacccggactcggatcaaatctca

SEQ ID NO: 145942 - DNA, 25 bp, probe
acagctccaggagtttgagaaccat

SEQ ID NO: 145943 - DNA, 25 bp, probe
acagctccaggagtttgagaagcat

SEQ ID NO: 145944 - DNA, 25 bp, probe
acagctccaggagtttgagaagcat

SEQ ID NO: 145945 - DNA, 25 bp, probe
acagctcacaggagcgtgaaccatg

SEQ ID NO: 145946 - DNA, 25 bp, probe
acagcatctcggaggccaagatgag

SEQ ID NO: 145947 - DNA, 25 bp, probe
acactacagaggggccaggggatcc

SEQ ID NO: 145948 - DNA, 25 bp, probe
acactacagaggggccaggggatcc

SEQ ID NO: 145949 - DNA, 25 bp, probe
acaccaggtggccaccaggtggtac

SEQ ID NO: 145950 - DNA, 25 bp, probe
acaccaggtggccaccaggtggtac

SEQ ID NO: 145951 - DNA, 25 bp, probe
acactctggttaccttggtcagtga

SEQ ID NO: 145952 - DNA, 25 bp, probe
acaccatggaacactatgtgtatta

SEQ ID NO: 145953 - DNA, 25 bp, probe
acacactggaacaactggtttattc

SEQ ID NO: 145954 - DNA, 25 bp, probe
acacactggaacaactggtttattc

SEQ ID NO: 145955 - DNA, 25 bp, probe
acaccatggaggatgtagtcctggt

SEQ ID NO: 145956 - DNA, 25 bp, probe
acacaaggagctcttgttcttcagg

SEQ ID NO: 145957 - DNA, 25 bp, probe
acaaagccgctgccattttattaaa

SEQ ID NO: 145958 - DNA, 25 bp, probe
acacaaccggatgtcttgattgatt

SEQ ID NO: 145959 - DNA, 25 bp, probe
aacatcacgaggtgtaatttttaat

SEQ ID NO: 145960 - DNA, 25 bp, probe
aagtatccagttcttagtccttagt

SEQ ID NO: 145961 - DNA, 25 bp, probe
acaaattcatggccttcaagtcctt

SEQ ID NO: 145962 - DNA, 25 bp, probe
acaaatgtgaagttatgcatgatgt

SEQ ID NO: 145963 - DNA, 25 bp, probe
acaagtgctgcaagttagtgaaaca

SEQ ID NO: 145964 - DNA, 25 bp, probe
acacacgatgatagcttcaaggaat

SEQ ID NO: 145965 - DNA, 25 bp, probe
acaccgattatgtagctacgagatg

SEQ ID NO: 145966 - DNA, 25 bp, probe
acacccattacattgtgggaatgga

SEQ ID NO: 145967 - DNA, 25 bp, probe
acacggttatatatgtggggagaac

SEQ ID NO: 145968 - DNA, 25 bp, probe
acagctggttacattgctaggcgag

SEQ ID NO: 145969 - DNA, 25 bp, probe
acagctgagttgttaaccagtcggg

SEQ ID NO: 145970 - DNA, 25 bp, probe
acagcatctgttcaaagtcgtaggg

SEQ ID NO: 145971 - DNA, 25 bp, probe
acagccatttcatgaatgctttacc

SEQ ID NO: 145972 - DNA, 25 bp, probe
acacgctgcttgtagacatgttaat

SEQ ID NO: 145973 - DNA, 25 bp, probe
acacctttgactatgcctatgattg

SEQ ID NO: 145974 - DNA, 25 bp, probe
acacgctcttacagtcgatggactt

SEQ ID NO: 145975 - DNA, 25 bp, probe
acacgctcttacagtcgatggactt

SEQ ID NO: 145976 - DNA, 25 bp, probe
acacctgcttggcttctgaggtatc

SEQ ID NO: 145977 - DNA, 25 bp, probe
acacctgccttgtttttgaaatgtt

SEQ ID NO: 145978 - DNA, 25 bp, probe
acagcccagtttgttcatgtcagtg

SEQ ID NO: 145979 - DNA, 25 bp, probe
acagctaagatttgcacatttctag

SEQ ID NO: 145980 - DNA, 25 bp, probe
acaccaagctctactgcaatttgga

SEQ ID NO: 145981 - DNA, 25 bp, probe
acactcaactccatcgaatagctcc

SEQ ID NO: 145982 - DNA, 25 bp, probe
acactcaactccatcgaatagctcc

SEQ ID NO: 145983 - DNA, 25 bp, probe
acaccgtcacatgtcaccatgagct

SEQ ID NO: 145984 - DNA, 25 bp, probe
acagccgcttctggaacggcagcct

SEQ ID NO: 145985 - DNA, 25 bp, probe
acacatccatggcagacagggcagc

SEQ ID NO: 145986 - DNA, 25 bp, probe
acaccctgcggaataagaatgtaaa

SEQ ID NO: 145987 - DNA, 25 bp, probe
acactcgctgctctcaataaataag

SEQ ID NO: 145988 - DNA, 25 bp, probe
acaccgatgtgcgcacacacagata

SEQ ID NO: 145989 - DNA, 25 bp, probe
acacgcgattgcgcaatgccataaa

SEQ ID NO: 145990 - DNA, 25 bp, probe
acactggagtatgcttcacctagaa

SEQ ID NO: 145991 - DNA, 25 bp, probe
acactggcactggacttcaagcgaa

SEQ ID NO: 145992 - DNA, 25 bp, probe
acactacagcacaagattgaagaag

SEQ ID NO: 145993 - DNA, 25 bp, probe
acacatacagccctattctagagga

SEQ ID NO: 145994 - DNA, 25 bp, probe
acacaaatgtctatctaatgaggaa

SEQ ID NO: 145995 - DNA, 25 bp, probe
acaaaacatcctactggatgaggat

SEQ ID NO: 145996 - DNA, 25 bp, probe
acactaacatttgatgttagcgtat

SEQ ID NO: 145997 - DNA, 25 bp, probe
acactacctctctgattttgtttcc

SEQ ID NO: 145998 - DNA, 25 bp, probe
acaattgcctccagtttgggggctc

SEQ ID NO: 145999 - DNA, 25 bp, probe
aaatcctcccacatttcttggatgc

SEQ ID NO: 146000 - DNA, 25 bp, probe
acaccaaacaacattatgttggggg

SEQ ID NO: 146001 - DNA, 25 bp, probe
acactcaccaccattgggtttgggg

SEQ ID NO: 146002 - DNA, 25 bp, probe
acactcaccaccattgggtttgggg

SEQ ID NO: 146003 - DNA, 25 bp, probe
acacatcacaggaacttagttttgg

SEQ ID NO: 146004 - DNA, 25 bp, probe
acacatcacaggaacttagttttgg

SEQ ID NO: 146005 - DNA, 25 bp, probe
acagctactggttcttgagcattta

SEQ ID NO: 146006 - DNA, 25 bp, probe
acactacgagtaccggcatgttatg

SEQ ID NO: 146007 - DNA, 25 bp, probe
acactcacaagcaaacttctgttta

SEQ ID NO: 146008 - DNA, 25 bp, probe
acacccaaggatatgtcttctgaag

SEQ ID NO: 146009 - DNA, 25 bp, probe
acacctcattttatggcaccagaag

SEQ ID NO: 146010 - DNA, 25 bp, probe
acaccatcattttgattgtcctaaa

SEQ ID NO: 146011 - DNA, 25 bp, probe
acacccatgttaaatcccttgatct

SEQ ID NO: 146012 - DNA, 25 bp, probe
acacaaatgttttcacccaatctct

SEQ ID NO: 146013 - DNA, 25 bp, probe
acacaaatgttttcacccaatctct

SEQ ID NO: 146014 - DNA, 25 bp, probe
acaccaagtcctacaacacaagttg

SEQ ID NO: 146015 - DNA, 25 bp, probe
acacccgttcttccgaaatgttgat

SEQ ID NO: 146016 - DNA, 25 bp, probe
acacaccgttaagccagaggttctg

SEQ ID NO: 146017 - DNA, 25 bp, probe
acaaggagaaacgccagggttggat

SEQ ID NO: 146018 - DNA, 25 bp, probe
acaacaaaaagggcctggtcactgt

SEQ ID NO: 146019 - DNA, 25 bp, probe
acaacaaaaagggcctggtcactgt

SEQ ID NO: 146020 - DNA, 25 bp, probe
acaagcataagaaggaggcggaact

SEQ ID NO: 146021 - DNA, 25 bp, probe
acaagcacgatgagtgaaggggccc

SEQ ID NO: 146022 - DNA, 25 bp, probe
acaagctggggggtaggctgtgccc

SEQ ID NO: 146023 - DNA, 25 bp, probe
acacggtggaggctttgtgctggcc

SEQ ID NO: 146024 - DNA, 25 bp, probe
acacggtgtggtccattggctactg

SEQ ID NO: 146025 - DNA, 25 bp, probe
acagcgctgatgtgtgccagtgagt

SEQ ID NO: 146026 - DNA, 25 bp, probe
acacgctgctgatgatcatccgggc

SEQ ID NO: 146027 - DNA, 25 bp, probe
acacgctgctgatgatcatccgggc

SEQ ID NO: 146028 - DNA, 25 bp, probe
acacctgttctgaatccagcatgga

SEQ ID NO: 146029 - DNA, 25 bp, probe
acagcctgtttcatcctgaagacac

SEQ ID NO: 146030 - DNA, 25 bp, probe
acaccttgcaccatgatctgaaaac

SEQ ID NO: 146031 - DNA, 25 bp, probe
acaccttgcaccatgatctgaaaac

SEQ ID NO: 146032 - DNA, 25 bp, probe
acaccatctaccagatcatgtacag

SEQ ID NO: 146033 - DNA, 25 bp, probe
acacacactcacatttagcccatgt

SEQ ID NO: 146034 - DNA, 25 bp, probe
acacacagctgagttgttaaccagt

SEQ ID NO: 146035 - DNA, 25 bp, probe
acaccgtggatgatttctggcagat

SEQ ID NO: 146036 - DNA, 25 bp, probe
acactgcctgcttttacttggcaga

SEQ ID NO: 146037 - DNA, 25 bp, probe
acactgcctctgagttttgatgctg

SEQ ID NO: 146038 - DNA, 25 bp, probe
acactctcattcagtagttactgaa

SEQ ID NO: 146039 - DNA, 25 bp, probe
acagctgccttcagtgggtagaatg

SEQ ID NO: 146040 - DNA, 25 bp, probe
acactgccttattctgggaaggagg

SEQ ID NO: 146041 - DNA, 25 bp, probe
acacgcacaggagacggcaaggagg

SEQ ID NO: 146042 - DNA, 25 bp, probe
acactcacctgtggcacggaatgaa

SEQ ID NO: 146043 - DNA, 25 bp, probe
acactgcctcttagcagcctaaagc

SEQ ID NO: 146044 - DNA, 25 bp, probe
acacttctcttgcagaccaagaggg

SEQ ID NO: 146045 - DNA, 25 bp, probe
acacctctcctaaacacagcagggc

SEQ ID NO: 146046 - DNA, 25 bp, probe
acacccctgctacaacagcagcgat

SEQ ID NO: 146047 - DNA, 25 bp, probe
acacgacctgtacatgatcatgcgg

SEQ ID NO: 146048 - DNA, 25 bp, probe
acacgacctgtacatgatcatgcgg

SEQ ID NO: 146049 - DNA, 25 bp, probe
acactgtccatgaagcactgagcag

SEQ ID NO: 146050 - DNA, 25 bp, probe
acactgggctgatcctgaatggcac

SEQ ID NO: 146051 - DNA, 25 bp, probe
acactgggctgatcctgaatggcac

SEQ ID NO: 146052 - DNA, 25 bp, probe
acactgttgctggatcttgagtccc

SEQ ID NO: 146053 - DNA, 25 bp, probe
acagccctgtgattgttatgatcac

SEQ ID NO: 146054 - DNA, 25 bp, probe
acacacctgatgtcactttgagcca

SEQ ID NO: 146055 - DNA, 25 bp, probe
acactcatgagtggcatatttatgc

SEQ ID NO: 146056 - DNA, 25 bp, probe
acactcatgagtggcatatttatgc

SEQ ID NO: 146057 - DNA, 25 bp, probe
acagcctgatgtgtatctttctgtc

SEQ ID NO: 146058 - DNA, 25 bp, probe
acagcgctctgacatactttcatgt

SEQ ID NO: 146059 - DNA, 25 bp, probe
acacgacatgtgaatatcctactct

SEQ ID NO: 146060 - DNA, 25 bp, probe
acaccatagatgttcaagtggcctt

SEQ ID NO: 146061 - DNA, 25 bp, probe
acaaatgcgagatcgagctgcgcca

SEQ ID NO: 146062 - DNA, 25 bp, probe
acacagcagcaaatactcagcgggc

SEQ ID NO: 146063 - DNA, 25 bp, probe
acaaccgtaaccatgggctggactt

SEQ ID NO: 146064 - DNA, 25 bp, probe
acaaccgtaaccatgggctggactt

SEQ ID NO: 146065 - DNA, 25 bp, probe
acaaactgtccaggtcggagggatc

SEQ ID NO: 146066 - DNA, 25 bp, probe
acaacatgtgtccaaatcggggatt

SEQ ID NO: 146067 - DNA, 25 bp, probe
acaacatgtgtccaaatcggggatt

SEQ ID NO: 146068 - DNA, 25 bp, probe
acaacatgtgtccaaatcggggatt

SEQ ID NO: 146069 - DNA, 25 bp, probe
acaacatgtgtccaaatcggggatt

SEQ ID NO: 146070 - DNA, 25 bp, probe
acaacatgtgtccaaatcggggatt

SEQ ID NO: 146071 - DNA, 25 bp, probe
acacctgatgccttactgggggatt

SEQ ID NO: 146072 - DNA, 25 bp, probe
acacctgatgccttactgggggatt

SEQ ID NO: 146073 - DNA, 25 bp, probe
acacctgatgccttactgggggatt

SEQ ID NO: 146074 - DNA, 25 bp, probe
acacctgctgaagagtggagcggtc

SEQ ID NO: 146075 - DNA, 25 bp, probe
acacctgtgaggcgtgatgattgtt

SEQ ID NO: 146076 - DNA, 25 bp, probe
acacctgagggactggacatcccat

SEQ ID NO: 146077 - DNA, 25 bp, probe
acacttggggtccacaatcccaggt

SEQ ID NO: 146078 - DNA, 25 bp, probe
acacttccaggtcaacttccggaat

SEQ ID NO: 146079 - DNA, 25 bp, probe
acacttccggatcaactatgctgac

SEQ ID NO: 146080 - DNA, 25 bp, probe
acacttccccacagaacatgctgat

SEQ ID NO: 146081 - DNA, 25 bp, probe
acacttctccctgagtgactgcaag

SEQ ID NO: 146082 - DNA, 25 bp, probe
acaccctatcctacacgactaggaa

SEQ ID NO: 146083 - DNA, 25 bp, probe
acacacgtttgagacgactgttgta

SEQ ID NO: 146084 - DNA, 25 bp, probe
aaacgtttgcggccaattgtgtcta

SEQ ID NO: 146085 - DNA, 25 bp, probe
acacctgttagggaaattgctgatc

SEQ ID NO: 146086 - DNA, 25 bp, probe
acacctgctctagggacgattcgtt

SEQ ID NO: 146087 - DNA, 25 bp, probe
acacctgctctagggacgattcgtt

SEQ ID NO: 146088 - DNA, 25 bp, probe
acacctgctcataccaacgtgtttt

SEQ ID NO: 146089 - DNA, 25 bp, probe
acacctgctcataccaacgtgtttt

SEQ ID NO: 146090 - DNA, 25 bp, probe
acaactgttttaaatggtcttcatg

SEQ ID NO: 146091 - DNA, 25 bp, probe
acaaagtgtttctagggtgtagctg

SEQ ID NO: 146092 - DNA, 25 bp, probe
acacattgtgtaaaggaaggacatg

SEQ ID NO: 146093 - DNA, 25 bp, probe
acaagtgcattaaaagcctggatag

SEQ ID NO: 146094 - DNA, 25 bp, probe
acactgtactgcaataaggggagag

SEQ ID NO: 146095 - DNA, 25 bp, probe
acaactacctattatgtgaggacag

SEQ ID NO: 146096 - DNA, 25 bp, probe
acacacgacctgtacatgatcatgc

SEQ ID NO: 146097 - DNA, 25 bp, probe
acacatcaagctggagcacaacatg

SEQ ID NO: 146098 - DNA, 25 bp, probe
acacatcaatctgggctgcgacatg

SEQ ID NO: 146099 - DNA, 25 bp, probe
acacatcgtatggggtgacaccgcc

SEQ ID NO: 146100 - DNA, 25 bp, probe
acactgctgtcgtgtgaagtcacag

SEQ ID NO: 146101 - DNA, 25 bp, probe
acactttgtgtgctgaatccttgaa

SEQ ID NO: 146102 - DNA, 25 bp, probe
acactttgtgtgctgaatccttgaa

SEQ ID NO: 146103 - DNA, 25 bp, probe
acactcttcttgagcagaccgtgat

SEQ ID NO: 146104 - DNA, 25 bp, probe
acactctgtctcctgatgaacgggt

SEQ ID NO: 146105 - DNA, 25 bp, probe
acaatctgactcgagtcaacccctt

SEQ ID NO: 146106 - DNA, 25 bp, probe
acactgtgcacatggtcagttcccc

SEQ ID NO: 146107 - DNA, 25 bp, probe
acactgtgccatgggggtaagccgc

SEQ ID NO: 146108 - DNA, 25 bp, probe
acactgtgccatgggggtaagccgc

SEQ ID NO: 146109 - DNA, 25 bp, probe
acactgtgccatgggggtaagccgc

SEQ ID NO: 146110 - DNA, 25 bp, probe
acactgtgccatgggggtaagccgc

SEQ ID NO: 146111 - DNA, 25 bp, probe
acactgtgccatgggggtaagccgc

SEQ ID NO: 146112 - DNA, 25 bp, probe
acactgtgccatgggggtaagccgc

SEQ ID NO: 146113 - DNA, 25 bp, probe
acactgtcatcatgagggaagagct

SEQ ID NO: 146114 - DNA, 25 bp, probe
acactgtcaacatggcatccagaat

SEQ ID NO: 146115 - DNA, 25 bp, probe
acagccaaacacagcatccaatatg

SEQ ID NO: 146116 - DNA, 25 bp, probe
acaccaaatcatgggctcactttaa

SEQ ID NO: 146117 - DNA, 25 bp, probe
acaccacaacaggagtcttcgaaac

SEQ ID NO: 146118 - DNA, 25 bp, probe
acactccaatcatcttgctttgata

SEQ ID NO: 146119 - DNA, 25 bp, probe
acacctaacacagtgttttatgcat

SEQ ID NO: 146120 - DNA, 25 bp, probe
acacccaaatctgatatttacagct

SEQ ID NO: 146121 - DNA, 25 bp, probe
acaccaaacagctaactttcacagt

SEQ ID NO: 146122 - DNA, 25 bp, probe
acagccacatgctgcagaaggtcca

SEQ ID NO: 146123 - DNA, 25 bp, probe
acactgtgagcatgcagtacggcct

SEQ ID NO: 146124 - DNA, 25 bp, probe
acactgtgagcattttcatggagtt

SEQ ID NO: 146125 - DNA, 25 bp, probe
acactggtcactcacaggtgtctct

SEQ ID NO: 146126 - DNA, 25 bp, probe
acacatggtccgacagcaagctacc

SEQ ID NO: 146127 - DNA, 25 bp, probe
acacatggtctgtcaatgagagcat

SEQ ID NO: 146128 - DNA, 25 bp, probe
acacatctgtgctatctgtggagac

SEQ ID NO: 146129 - DNA, 25 bp, probe
acacacttgcagtttggaagaaatc

SEQ ID NO: 146130 - DNA, 25 bp, probe
acacacttgcagtttggaagaaatc

SEQ ID NO: 146131 - DNA, 25 bp, probe
acacaattgcatcccaaatacaaat

SEQ ID NO: 146132 - DNA, 25 bp, probe
acacgcatgtatgcatgcacaaaca

SEQ ID NO: 146133 - DNA, 25 bp, probe
acagcctgtatttgccaaaacaata

SEQ ID NO: 146134 - DNA, 25 bp, probe
caacctcctagaacatcacgcaaat

SEQ ID NO: 146135 - DNA, 25 bp, probe
acacccaagtatttgcacaatattt

SEQ ID NO: 146136 - DNA, 25 bp, probe
acacttccttaactgcacgatattc

SEQ ID NO: 146137 - DNA, 25 bp, probe
acactttcctgagatgcacttactt

SEQ ID NO: 146138 - DNA, 25 bp, probe
acactggtccgagaagggacatgtg

SEQ ID NO: 146139 - DNA, 25 bp, probe
tacgagttccccgacaaggactggg

SEQ ID NO: 146140 - DNA, 25 bp, probe
acaagttcttcacacgaggacagcc

SEQ ID NO: 146141 - DNA, 25 bp, probe
acacgttcttcacagggacctgaaa

SEQ ID NO: 146142 - DNA, 25 bp, probe
acacgtgtctgtgcaagggcagcct

SEQ ID NO: 146143 - DNA, 25 bp, probe
acacgtgcacgtcattggagaggat

SEQ ID NO: 146144 - DNA, 25 bp, probe
acacgtgcacgtcattggagaggat

SEQ ID NO: 146145 - DNA, 25 bp, probe
acacgtgcacgtcattggagaggat

SEQ ID NO: 146146 - DNA, 25 bp, probe
acacgtgcacgtcattggagaggat

SEQ ID NO: 146147 - DNA, 25 bp, probe
acacgtgcacgtcattggagaggat

SEQ ID NO: 146148 - DNA, 25 bp, probe
acactgatacttcatgggaaggttg

SEQ ID NO: 146149 - DNA, 25 bp, probe
acactatgttgtctgcggcaaattg

SEQ ID NO: 146150 - DNA, 25 bp, probe
acacttatacttacggtcaattgat

SEQ ID NO: 146151 - DNA, 25 bp, probe
acacttacaataagggtactatatg

SEQ ID NO: 146152 - DNA, 25 bp, probe
acactaaaatttcccatgactacat

SEQ ID NO: 146153 - DNA, 25 bp, probe
acactttaatttggagcatagtacc

SEQ ID NO: 146154 - DNA, 25 bp, probe
aaataacactttgagcaagcccacc

SEQ ID NO: 146155 - DNA, 25 bp, probe
aaataacactttgagcaagcccacc

SEQ ID NO: 146156 - DNA, 25 bp, probe
acaaaaacttctcaaatcacactca

SEQ ID NO: 146157 - DNA, 25 bp, probe
acaaaatactctccagaaagccaag

SEQ ID NO: 146158 - DNA, 25 bp, probe
acaaaatactctccagaaagccaag

SEQ ID NO: 146159 - DNA, 25 bp, probe
acaacattcgtgcccaagaaccaga

SEQ ID NO: 146160 - DNA, 25 bp, probe
acaccatacgctggcatcgaaaaca

SEQ ID NO: 146161 - DNA, 25 bp, probe
acagccaatcaggtgtcgaagacaa

SEQ ID NO: 146162 - DNA, 25 bp, probe
acagccaatcaggtgtcgaagacaa

SEQ ID NO: 146163 - DNA, 25 bp, probe
acaccacaatcaatgtcttagacac

SEQ ID NO: 146164 - DNA, 25 bp, probe
acacgcacacacatgtgcacacaca

SEQ ID NO: 146165 - DNA, 25 bp, probe
acactctccagcatctggcacaata

SEQ ID NO: 146166 - DNA, 25 bp, probe
acacttgcacaaatgtcagccataa

SEQ ID NO: 146167 - DNA, 25 bp, probe
acaccgagacaagcgctaacgtgaa

SEQ ID NO: 146168 - DNA, 25 bp, probe
acaccgagacaagcgctaacgtgaa

SEQ ID NO: 146169 - DNA, 25 bp, probe
acaacgccctacagcaagacggaaa

SEQ ID NO: 146170 - DNA, 25 bp, probe
aaagcaggcccgagccgcctggata

SEQ ID NO: 146171 - DNA, 25 bp, probe
acaaagaactggatcaccccagaat

SEQ ID NO: 146172 - DNA, 25 bp, probe
acaaatgtacaagcttttccagacc

SEQ ID NO: 146173 - DNA, 25 bp, probe
acaagatgttttggattaaccggct

SEQ ID NO: 146174 - DNA, 25 bp, probe
acaaatctttccaactctacggatt

SEQ ID NO: 146175 - DNA, 25 bp, probe
acacctcatttcctaacttctgtgt

SEQ ID NO: 146176 - DNA, 25 bp, probe
acacctcattctggccgagagtagg

SEQ ID NO: 146177 - DNA, 25 bp, probe
acacttctacgccctgaagcgaatc

SEQ ID NO: 146178 - DNA, 25 bp, probe
acactatcttctcactgctgggagt

SEQ ID NO: 146179 - DNA, 25 bp, probe
acaacatctcctaccgcagggagtc

SEQ ID NO: 146180 - DNA, 25 bp, probe
acaagtccctcatggcacaggagaa

SEQ ID NO: 146181 - DNA, 25 bp, probe
acaagtccctcatggcacaggagaa

SEQ ID NO: 146182 - DNA, 25 bp, probe
acaagttatgcctaatagcaggcaa

SEQ ID NO: 146183 - DNA, 25 bp, probe
acaccttagcgctgagactgagcca

SEQ ID NO: 146184 - DNA, 25 bp, probe
acacctatcacgtggagctcaagcc

SEQ ID NO: 146185 - DNA, 25 bp, probe
acacctgaaacatgttctccggcag

SEQ ID NO: 146186 - DNA, 25 bp, probe
acacacatcaagatattttccggct

SEQ ID NO: 146187 - DNA, 25 bp, probe
acacatcaagatattttccggcttt

SEQ ID NO: 146188 - DNA, 25 bp, probe
acaacatatgagattgttctctggc

SEQ ID NO: 146189 - DNA, 25 bp, probe
acaccaaggcagatgctcctctggt

SEQ ID NO: 146190 - DNA, 25 bp, probe
acaacagcagggacagctcccagtc

SEQ ID NO: 146191 - DNA, 25 bp, probe
acacctgcaaggctgtcaacagtct

SEQ ID NO: 146192 - DNA, 25 bp, probe
acacctgaaaagatatgccagtgta

SEQ ID NO: 146193 - DNA, 25 bp, probe
acacttaatataattcgccacttct

SEQ ID NO: 146194 - DNA, 25 bp, probe
acacttaacatattacttagtctgc

SEQ ID NO: 146195 - DNA, 25 bp, probe
acaccatcacctatacgggttgcct

SEQ ID NO: 146196 - DNA, 25 bp, probe
acaccatcacctatacgggttgcct

SEQ ID NO: 146197 - DNA, 25 bp, probe
acaccactcctttttgtgtgtgtgc

SEQ ID NO: 146198 - DNA, 25 bp, probe
acactcgcccagttgtgtgtgtggg

SEQ ID NO: 146199 - DNA, 25 bp, probe
acacccccatgacattgcatttggg

SEQ ID NO: 146200 - DNA, 25 bp, probe
acacacctgaaacatgttctccggc

SEQ ID NO: 146201 - DNA, 25 bp, probe
acacacctgaaacatgttctccggc

SEQ ID NO: 146202 - DNA, 25 bp, probe
acaacctagaagctttgctgcagga

SEQ ID NO: 146203 - DNA, 25 bp, probe
acacaccaagagtgtccgtgcacgt

SEQ ID NO: 146204 - DNA, 25 bp, probe
aaatccaggagttccacaggacaat

SEQ ID NO: 146205 - DNA, 25 bp, probe
acacaaacacacacacactggacag

SEQ ID NO: 146206 - DNA, 25 bp, probe
acacacatacgcgtacacacaggac

SEQ ID NO: 146207 - DNA, 25 bp, probe
acacctccgacaacagcaagaagca

SEQ ID NO: 146208 - DNA, 25 bp, probe
acaccacagtactcagagtgacaca

SEQ ID NO: 146209 - DNA, 25 bp, probe
acactacgaaaactgcagctccaag

SEQ ID NO: 146210 - DNA, 25 bp, probe
acactatctggcacatatgcgctca

SEQ ID NO: 146211 - DNA, 25 bp, probe
acactactgcctgtagtctgatgac

SEQ ID NO: 146212 - DNA, 25 bp, probe
acacacactgttgctggatcttgag

SEQ ID NO: 146213 - DNA, 25 bp, probe
acaaagttcttcagtcctgagccct

SEQ ID NO: 146214 - DNA, 25 bp, probe
acaaaaattctcagtctcttgcgtt

SEQ ID NO: 146215 - DNA, 25 bp, probe
acaaaaattctcagtctcttgcgtt

SEQ ID NO: 146216 - DNA, 25 bp, probe
acaaataaaactcgctgacttcggc

SEQ ID NO: 146217 - DNA, 25 bp, probe
acaaataaagttcctgacacgtcca

SEQ ID NO: 146218 - DNA, 25 bp, probe
aaatataaaggactcaaacgcgtgg

SEQ ID NO: 146219 - DNA, 25 bp, probe
acaatgcaaacggggcaggggcggg

SEQ ID NO: 146220 - DNA, 25 bp, probe
acaatcccagagtggcaggcgggac

SEQ ID NO: 146221 - DNA, 25 bp, probe
acaagccgcaaaggcagcaggctac

SEQ ID NO: 146222 - DNA, 25 bp, probe
acaatgtccactacgagaactatgg

SEQ ID NO: 146223 - DNA, 25 bp, probe
acaatccctctgaagaagaatatga

SEQ ID NO: 146224 - DNA, 25 bp, probe
acaactccatgtccccagaaatgat

SEQ ID NO: 146225 - DNA, 25 bp, probe
acaccttgtggtccccaaatgatgt

SEQ ID NO: 146226 - DNA, 25 bp, probe
acaccattctggaccccaagataga

SEQ ID NO: 146227 - DNA, 25 bp, probe
acactcttgtgaccgtgccaagaaa

SEQ ID NO: 146228 - DNA, 25 bp, probe
acacttaggcccctgggacaatgac

SEQ ID NO: 146229 - DNA, 25 bp, probe
aaattagtccccagtgcaaagcagc

SEQ ID NO: 146230 - DNA, 25 bp, probe
acactcttatcagcctgggcaacac

SEQ ID NO: 146231 - DNA, 25 bp, probe
acacctggatgttcggggtgacact

SEQ ID NO: 146232 - DNA, 25 bp, probe
acaccatggtgtcggtggcctacat

SEQ ID NO: 146233 - DNA, 25 bp, probe
acaccatggtgtcggtggcctacat

SEQ ID NO: 146234 - DNA, 25 bp, probe
acacgctggtatagagctcccgaat

SEQ ID NO: 146235 - DNA, 25 bp, probe
acactgtgatggaggtcccaaatat

SEQ ID NO: 146236 - DNA, 25 bp, probe
acaatgtgatagaggtggctacaga

SEQ ID NO: 146237 - DNA, 25 bp, probe
acactggttttgccggtagagcagc

SEQ ID NO: 146238 - DNA, 25 bp, probe
acactggttgataaagggaagctgc

SEQ ID NO: 146239 - DNA, 25 bp, probe
acacggtatttaagagagaactata

SEQ ID NO: 146240 - DNA, 25 bp, probe
acaccctaataaagcaatcgcaaaa

SEQ ID NO: 146241 - DNA, 25 bp, probe
acaccctagataagatgatccggaa

SEQ ID NO: 146242 - DNA, 25 bp, probe
acaacagtaccaaggtggctgtgaa

SEQ ID NO: 146243 - DNA, 25 bp, probe
acaaagtgttcaaggtgggtctggc

SEQ ID NO: 146244 - DNA, 25 bp, probe
acaaagaggtcaagggcgccctgaa

SEQ ID NO: 146245 - DNA, 25 bp, probe
acacgagcgtgtatgagagccccta

SEQ ID NO: 146246 - DNA, 25 bp, probe
acaaggcgcttaagagacctattaa

SEQ ID NO: 146247 - DNA, 25 bp, probe
acaaacatctatccagaccctagta

SEQ ID NO: 146248 - DNA, 25 bp, probe
acaaacctagctaactgccttctat

SEQ ID NO: 146249 - DNA, 25 bp, probe
acaaacctagctaactgccttctat

SEQ ID NO: 146250 - DNA, 25 bp, probe
acaatccccatcaggtagctgtcta

SEQ ID NO: 146251 - DNA, 25 bp, probe
acaactcccagcagacaagttctct

SEQ ID NO: 146252 - DNA, 25 bp, probe
acaactcccagcagacaagttctct

SEQ ID NO: 146253 - DNA, 25 bp, probe
acaacaacctgaagcacaagttccc

SEQ ID NO: 146254 - DNA, 25 bp, probe
acaacaacctgaagcacaagttccc

SEQ ID NO: 146255 - DNA, 25 bp, probe
acaaagtgtggaagccagggcccag

SEQ ID NO: 146256 - DNA, 25 bp, probe
acaataatgtaaatcaacgcccctc

SEQ ID NO: 146257 - DNA, 25 bp, probe
acaataattaactcttcctctcttc

SEQ ID NO: 146258 - DNA, 25 bp, probe
acaatcatttaacagatttctgtgt

SEQ ID NO: 146259 - DNA, 25 bp, probe
aaattttcagcacagggctctttct

SEQ ID NO: 146260 - DNA, 25 bp, probe
aaatctcttcggcacggtgccgtac

SEQ ID NO: 146261 - DNA, 25 bp, probe
aaatctcttcggcacggtgccgtac

SEQ ID NO: 146262 - DNA, 25 bp, probe
aaatcttttgggagccccaatagag

SEQ ID NO: 146263 - DNA, 25 bp, probe
aaatcatttgggagccccagtagag

SEQ ID NO: 146264 - DNA, 25 bp, probe
aaatcttcatggaattcacaaagta

SEQ ID NO: 146265 - DNA, 25 bp, probe
aaagttcagtgtgtacccttaaatg

SEQ ID NO: 146266 - DNA, 25 bp, probe
gatactgttttagaacaccctaact

SEQ ID NO: 146267 - DNA, 25 bp, probe
acactgttttcaataaatgcacctt

SEQ ID NO: 146268 - DNA, 25 bp, probe
acaagtgttgtaacaataatccatt

SEQ ID NO: 146269 - DNA, 25 bp, probe
acaagtgttgtaacaataatccatt

SEQ ID NO: 146270 - DNA, 25 bp, probe
aaagtggatagaacgcaaacaactt

SEQ ID NO: 146271 - DNA, 25 bp, probe
acaatggagtaaccgacaatatatt

SEQ ID NO: 146272 - DNA, 25 bp, probe
aaagtcagtaagccaagaaaaacag

SEQ ID NO: 146273 - DNA, 25 bp, probe
aacagtttcccacaaaaaatcagct

SEQ ID NO: 146274 - DNA, 25 bp, probe
aaggtttacacagcacagaacccca

SEQ ID NO: 146275 - DNA, 25 bp, probe
aaactttacaacacaattgcatccc

SEQ ID NO: 146276 - DNA, 25 bp, probe
aaaccttagaaaacatttgcctcag

SEQ ID NO: 146277 - DNA, 25 bp, probe
aaatgttgctgacaaacttatccca

SEQ ID NO: 146278 - DNA, 25 bp, probe
acacatttggtgttcacacttcttc

SEQ ID NO: 146279 - DNA, 25 bp, probe
acacaatctgatgttaatttattct

SEQ ID NO: 146280 - DNA, 25 bp, probe
acacacacatgctttacaagtttta

SEQ ID NO: 146281 - DNA, 25 bp, probe
acacatgcagtggcttacagcattt

SEQ ID NO: 146282 - DNA, 25 bp, probe
acaccgctgcactcaagcttgggtg

SEQ ID NO: 146283 - DNA, 25 bp, probe
acacctgtgatcccagcattttggg

SEQ ID NO: 146284 - DNA, 25 bp, probe
acacatttactggatcttttggatg

SEQ ID NO: 146285 - DNA, 25 bp, probe
acacagtaccgctgcttctctgtgt

SEQ ID NO: 146286 - DNA, 25 bp, probe
acacgctcaccgtgtttgcatgctg

SEQ ID NO: 146287 - DNA, 25 bp, probe
acacgccaccgggagagatgctgag

SEQ ID NO: 146288 - DNA, 25 bp, probe
acacgcacaccaacgagctggtgat

SEQ ID NO: 146289 - DNA, 25 bp, probe
acacagccctctacgagacagtgat

SEQ ID NO: 146290 - DNA, 25 bp, probe
acacagccctctacgagacagtgat

SEQ ID NO: 146291 - DNA, 25 bp, probe
acacgcatctttgcttacagtgcat

SEQ ID NO: 146292 - DNA, 25 bp, probe
acactctctgtatcattaaggcttt

SEQ ID NO: 146293 - DNA, 25 bp, probe
acactctctgtatcattaaggcttt

SEQ ID NO: 146294 - DNA, 25 bp, probe
acactttgcaaagccacagcgtttc

SEQ ID NO: 146295 - DNA, 25 bp, probe
acacagttagaagcaaaggccctct

SEQ ID NO: 146296 - DNA, 25 bp, probe
acaagtgcaagatggccgagtgcca

SEQ ID NO: 146297 - DNA, 25 bp, probe
acacaggaacaactgccggtgatac

SEQ ID NO: 146298 - DNA, 25 bp, probe
acaccgtacaacatcatggtgctgg

SEQ ID NO: 146299 - DNA, 25 bp, probe
acacccagcagagcttctcagtggg

SEQ ID NO: 146300 - DNA, 25 bp, probe
acacccagcagagcttctcagtggg

SEQ ID NO: 146301 - DNA, 25 bp, probe
acacccagcagagcttctcagtggg

SEQ ID NO: 146302 - DNA, 25 bp, probe
acaactcagccatctggcacagggg

SEQ ID NO: 146303 - DNA, 25 bp, probe
acacactccatcagcttaggggctg

SEQ ID NO: 146304 - DNA, 25 bp, probe
acacccgcatcaggggagggatggt

SEQ ID NO: 146305 - DNA, 25 bp, probe
acacccaggccatgaaggagatgca

SEQ ID NO: 146306 - DNA, 25 bp, probe
acaaccgcaacatggatggaggcaa

SEQ ID NO: 146307 - DNA, 25 bp, probe
acaactgtgctacaaatggggccac

SEQ ID NO: 146308 - DNA, 25 bp, probe
acaatctctttattactgagggcca

SEQ ID NO: 146309 - DNA, 25 bp, probe
acacactctttttgattgaactatc

SEQ ID NO: 146310 - DNA, 25 bp, probe
acacactctttttgattgaactatc

SEQ ID NO: 146311 - DNA, 25 bp, probe
acacttctgtcaatgagttggcact

SEQ ID NO: 146312 - DNA, 25 bp, probe
acactttgatgcaagccatgtggcc

SEQ ID NO: 146313 - DNA, 25 bp, probe
acactctcattgtagtagctgtgct

SEQ ID NO: 146314 - DNA, 25 bp, probe
acactctcattgtagtagctgtgct

SEQ ID NO: 146315 - DNA, 25 bp, probe
acacatctagcagtcagttcttgtt

SEQ ID NO: 146316 - DNA, 25 bp, probe
acaatctcacaggggtctactccct

SEQ ID NO: 146317 - DNA, 25 bp, probe
acaactcaactgggactatctagtc

SEQ ID NO: 146318 - DNA, 25 bp, probe
acaactcaactgggactatctagtc

SEQ ID NO: 146319 - DNA, 25 bp, probe
acaacatgaaccagatctacggttt

SEQ ID NO: 146320 - DNA, 25 bp, probe
acaagctggacctgctgttgggctt

SEQ ID NO: 146321 - DNA, 25 bp, probe
acaaatacagattcgcgtggggcgt

SEQ ID NO: 146322 - DNA, 25 bp, probe
aacaatggcacatccgtggaggacg

SEQ ID NO: 146323 - DNA, 25 bp, probe
aaagggcttcaatgcgaaggacgcg

SEQ ID NO: 146324 - DNA, 25 bp, probe
acaacgtcctcctggatgcggacgg

SEQ ID NO: 146325 - DNA, 25 bp, probe
acaagcgttacctggtgggcacagt

SEQ ID NO: 146326 - DNA, 25 bp, probe
acaaggtatacctcagttccacggt

SEQ ID NO: 146327 - DNA, 25 bp, probe
aaaggattaccatcgaccttctgtt

SEQ ID NO: 146328 - DNA, 25 bp, probe
aaaggattaccatcgaccttctgtt

SEQ ID NO: 146329 - DNA, 25 bp, probe
aaaggattaccatcgaccttctgtt

SEQ ID NO: 146330 - DNA, 25 bp, probe
acaagtttactctccgtcttgtgtc

SEQ ID NO: 146331 - DNA, 25 bp, probe
acacgtggaacacacgctttctgtg

SEQ ID NO: 146332 - DNA, 25 bp, probe
acacactggaagcgagccttcaatg

SEQ ID NO: 146333 - DNA, 25 bp, probe
acacagtgggtggtgagttctgact

SEQ ID NO: 146334 - DNA, 25 bp, probe
acacaaatgttggagcatgtttaca

SEQ ID NO: 146335 - DNA, 25 bp, probe
acaacagaggcagcagttgcttact

SEQ ID NO: 146336 - DNA, 25 bp, probe
acaaagtggtgccgatatgtgagac

SEQ ID NO: 146337 - DNA, 25 bp, probe
acaaatgaggcttcagaacacaaag

SEQ ID NO: 146338 - DNA, 25 bp, probe
acaagcattggtcgaaacaaagatc

SEQ ID NO: 146339 - DNA, 25 bp, probe
acacatgcagctcccagaaaacaga

SEQ ID NO: 146340 - DNA, 25 bp, probe
acacatggataccgctcaaaagaag

SEQ ID NO: 146341 - DNA, 25 bp, probe
acacatgtgttccgcctgaagaagt

SEQ ID NO: 146342 - DNA, 25 bp, probe
acacagattatacagctctaaggat

SEQ ID NO: 146343 - DNA, 25 bp, probe
acaagttaaccagttgcactacata

SEQ ID NO: 146344 - DNA, 25 bp, probe
acaagttaaccagttgcactacata

SEQ ID NO: 146345 - DNA, 25 bp, probe
acaattgatgactcagaccctgaaa

SEQ ID NO: 146346 - DNA, 25 bp, probe
acacagtgagactccatctcttaaa

SEQ ID NO: 146347 - DNA, 25 bp, probe
acacgatgagaagccctctgacatt

SEQ ID NO: 146348 - DNA, 25 bp, probe
acaacagaaaccacctgacatccac

SEQ ID NO: 146349 - DNA, 25 bp, probe
acaacagaaaccacctgacatccac

SEQ ID NO: 146350 - DNA, 25 bp, probe
aaatcagatcaagtcgggaactcca

SEQ ID NO: 146351 - DNA, 25 bp, probe
acaagaaaaatccttgggtcaacat

SEQ ID NO: 146352 - DNA, 25 bp, probe
aaaggcaaatgagctggggataaac

SEQ ID NO: 146353 - DNA, 25 bp, probe
aaatgtacactagcaggggaaccca

SEQ ID NO: 146354 - DNA, 25 bp, probe
acaataaaacatgaggtggacaggc

SEQ ID NO: 146355 - DNA, 25 bp, probe
aaataagcaaagagggcaatcgcct

SEQ ID NO: 146356 - DNA, 25 bp, probe
caaatccagtaacagggcgaccgct

SEQ ID NO: 146357 - DNA, 25 bp, probe
acaaccagtagctcatggggccttg

SEQ ID NO: 146358 - DNA, 25 bp, probe
acaacaagcccaacatggtcgacct

SEQ ID NO: 146359 - DNA, 25 bp, probe
acaacgaggccaaatgtgtcacctt

SEQ ID NO: 146360 - DNA, 25 bp, probe
acacacagaaggggactgccacctc

SEQ ID NO: 146361 - DNA, 25 bp, probe
acacccaagtgggcactgtgacctc

SEQ ID NO: 146362 - DNA, 25 bp, probe
acactgccacaatgcaggtgtacct

SEQ ID NO: 146363 - DNA, 25 bp, probe
acactgagcaccaggtggtctcctc

SEQ ID NO: 146364 - DNA, 25 bp, probe
acaagcacgtcaaggtgttttcaca

SEQ ID NO: 146365 - DNA, 25 bp, probe
acaacactgtccgagggtgctctta

SEQ ID NO: 146366 - DNA, 25 bp, probe
acaacatgttctgtgtgggcttcct

SEQ ID NO: 146367 - DNA, 25 bp, probe
acactatgtttccgggtgctggtgc

SEQ ID NO: 146368 - DNA, 25 bp, probe
aaatagtgttctcggggtggtggct

SEQ ID NO: 146369 - DNA, 25 bp, probe
aaatagacacttcgaactttgggct

SEQ ID NO: 146370 - DNA, 25 bp, probe
aaatgaaactttgacctttgaggat

SEQ ID NO: 146371 - DNA, 25 bp, probe
aagatgacaactcttcccgttttat

SEQ ID NO: 146372 - DNA, 25 bp, probe
aagatgacaactcttcccgttttat

SEQ ID NO: 146373 - DNA, 25 bp, probe
aaatgcaaatggctaccgttttaca

SEQ ID NO: 146374 - DNA, 25 bp, probe
aaatgaaattaatgccttggtacaa

SEQ ID NO: 146375 - DNA, 25 bp, probe
acaagtagaaagattctcgcttaaa

SEQ ID NO: 146376 - DNA, 25 bp, probe
acacagtacatcagcaaccatcctt

SEQ ID NO: 146377 - DNA, 25 bp, probe
acactgtctctcaatcagatcatct

SEQ ID NO: 146378 - DNA, 25 bp, probe
acactgtctctcaatcagatcatct

SEQ ID NO: 146379 - DNA, 25 bp, probe
acactgtttatcaatgtcatttggc

SEQ ID NO: 146380 - DNA, 25 bp, probe
acacagctttatgatatcaaagact

SEQ ID NO: 146381 - DNA, 25 bp, probe
acaactcaatctaagtcagtccact

SEQ ID NO: 146382 - DNA, 25 bp, probe
acaactgcaactttgcaagctccca

SEQ ID NO: 146383 - DNA, 25 bp, probe
acaatatctagtactgcaactgcca

SEQ ID NO: 146384 - DNA, 25 bp, probe
acaacatgctgagctacagcccaga

SEQ ID NO: 146385 - DNA, 25 bp, probe
acactctcgctggtgaagccaagcg

SEQ ID NO: 146386 - DNA, 25 bp, probe
acactctcgctggtgaagccaagcg

SEQ ID NO: 146387 - DNA, 25 bp, probe
acactctcgctggtgaagccaagcg

SEQ ID NO: 146388 - DNA, 25 bp, probe
acaatctcagctgggtcaataaggg

SEQ ID NO: 146389 - DNA, 25 bp, probe
acacattgtctctttaaaatgctgc

SEQ ID NO: 146390 - DNA, 25 bp, probe
acacatttcatctaatttaatattc

SEQ ID NO: 146391 - DNA, 25 bp, probe
acaacttgcacgtattttaatagcg

SEQ ID NO: 146392 - DNA, 25 bp, probe
acaacttacagtgtgaaagctcgcc

SEQ ID NO: 146393 - DNA, 25 bp, probe
acaacctactggacgacaacggcca

SEQ ID NO: 146394 - DNA, 25 bp, probe
acaacgttctatctggcaactggta

SEQ ID NO: 146395 - DNA, 25 bp, probe
acaactttcttgtatcctttgagga

SEQ ID NO: 146396 - DNA, 25 bp, probe
acaactttcttgtatcctttgagga

SEQ ID NO: 146397 - DNA, 25 bp, probe
acacagctttataaacctcagtggg

SEQ ID NO: 146398 - DNA, 25 bp, probe
acactttttccacctgtcagattgg

SEQ ID NO: 146399 - DNA, 25 bp, probe
acactttcaatcaacactttttcag

SEQ ID NO: 146400 - DNA, 25 bp, probe
acacttggatttacttctttatcaa

SEQ ID NO: 146401 - DNA, 25 bp, probe
acactttgtctagctcactttaaaa

SEQ ID NO: 146402 - DNA, 25 bp, probe
acacagctctgtaaactaccactca

SEQ ID NO: 146403 - DNA, 25 bp, probe
acacagctctgtaaactaccactca

SEQ ID NO: 146404 - DNA, 25 bp, probe
acacggctggatcatctgaccaaac

SEQ ID NO: 146405 - DNA, 25 bp, probe
acactggtgtgaatattgtgccaat

SEQ ID NO: 146406 - DNA, 25 bp, probe
acacatgaggtggacttcgacgatt

SEQ ID NO: 146407 - DNA, 25 bp, probe
acacatgaacatcgactttgacagt

SEQ ID NO: 146408 - DNA, 25 bp, probe
aacaaagcgggctttgccgtcaact

SEQ ID NO: 146409 - DNA, 25 bp, probe
aacaaagcgggctttgccgtcaact

SEQ ID NO: 146410 - DNA, 25 bp, probe
aaataatgcggggtctgcggcatcc

SEQ ID NO: 146411 - DNA, 25 bp, probe
acaaagcatcatgttcttgggcctc

SEQ ID NO: 146412 - DNA, 25 bp, probe
acaaagcatcatgttcttgggcctc

SEQ ID NO: 146413 - DNA, 25 bp, probe
acaagcagctcgagtccataggcat

SEQ ID NO: 146414 - DNA, 25 bp, probe
acaagcagtgcaaggatcgcctgtc

SEQ ID NO: 146415 - DNA, 25 bp, probe
acacagtgataagatcatccgactt

SEQ ID NO: 146416 - DNA, 25 bp, probe
acaagatgattcgcaagcctgatac

SEQ ID NO: 146417 - DNA, 25 bp, probe
acaagtttgccctgtgctgtagagt

SEQ ID NO: 146418 - DNA, 25 bp, probe
aaagatcgtggccatggtgagggtg

SEQ ID NO: 146419 - DNA, 25 bp, probe
aaagacgaggtaaggtgcaagtgca

SEQ ID NO: 146420 - DNA, 25 bp, probe
aaagtcggcgtctgttccaacagat

SEQ ID NO: 146421 - DNA, 25 bp, probe
aaattaggccgaggtaaatacagtg

SEQ ID NO: 146422 - DNA, 25 bp, probe
aaattaggccgaggtaaatacagtg

SEQ ID NO: 146423 - DNA, 25 bp, probe
aaattaagcagatagtcaaagaact

SEQ ID NO: 146424 - DNA, 25 bp, probe
acaacatcactacaagtataagaaa

SEQ ID NO: 146425 - DNA, 25 bp, probe
acaaatgcctatgaaattaaactat

SEQ ID NO: 146426 - DNA, 25 bp, probe
acaacagccaaaacaaccaaactat

SEQ ID NO: 146427 - DNA, 25 bp, probe
acaacagccaaaacaaccaaactat

SEQ ID NO: 146428 - DNA, 25 bp, probe
acaaaccagaagaagacacttttgg

SEQ ID NO: 146429 - DNA, 25 bp, probe
acaaccgcaacgagacctacatacg

SEQ ID NO: 146430 - DNA, 25 bp, probe
acaaccgcaaatatgcccattatcc

SEQ ID NO: 146431 - DNA, 25 bp, probe
aaattcccaaacatctcttatcctg

SEQ ID NO: 146432 - DNA, 25 bp, probe
acaaactaccaatttctcgttcctg

SEQ ID NO: 146433 - DNA, 25 bp, probe
acaaactgaacgacattctcctcat

SEQ ID NO: 146434 - DNA, 25 bp, probe
acaaagtgagacctccctgtctcta

SEQ ID NO: 146435 - DNA, 25 bp, probe
aaatcagggaccatgacctcctgga

SEQ ID NO: 146436 - DNA, 25 bp, probe
acaatcaggggttgtacctccataa

SEQ ID NO: 146437 - DNA, 25 bp, probe
aaatctggggtacagcgtagatgtg

SEQ ID NO: 146438 - DNA, 25 bp, probe
aaatctggggtacagcgtagatgtg

SEQ ID NO: 146439 - DNA, 25 bp, probe
aaatcagggttcttagctagcagtt

SEQ ID NO: 146440 - DNA, 25 bp, probe
acaacaggagtcttcgaaaccgtgg

SEQ ID NO: 146441 - DNA, 25 bp, probe
acacactcgaatcattgaagatccg

SEQ ID NO: 146442 - DNA, 25 bp, probe
acaaatccaactatgtagtactgaa

SEQ ID NO: 146443 - DNA, 25 bp, probe
aaagcaccaagaagcttagtactaa

SEQ ID NO: 146444 - DNA, 25 bp, probe
caacgcccaagggttcctcattaag

SEQ ID NO: 146445 - DNA, 25 bp, probe
acacaccccagggtgtgctgccatc

SEQ ID NO: 146446 - DNA, 25 bp, probe
acactcacccaggtgtgtcgacatc

SEQ ID NO: 146447 - DNA, 25 bp, probe
acactgcacacggtgtctgtttatc

SEQ ID NO: 146448 - DNA, 25 bp, probe
acactcacacagttgactatctgaa

SEQ ID NO: 146449 - DNA, 25 bp, probe
acactcacacagttgactatctgaa

SEQ ID NO: 146450 - DNA, 25 bp, probe
acacacacagaaaagcatacatgca

SEQ ID NO: 146451 - DNA, 25 bp, probe
acaacagcctcaagatcatcagcaa

SEQ ID NO: 146452 - DNA, 25 bp, probe
acaagcatgcccaatcttagagact

SEQ ID NO: 146453 - DNA, 25 bp, probe
acaaggcacctaattacaacaagca

SEQ ID NO: 146454 - DNA, 25 bp, probe
acaacagcttatatggcaccagaag

SEQ ID NO: 146455 - DNA, 25 bp, probe
acaaccggctgcaggacgagagggc

SEQ ID NO: 146456 - DNA, 25 bp, probe
acaacacggacaccgacgagtggga

SEQ ID NO: 146457 - DNA, 25 bp, probe
acaacacggacaccgacgagtggga

SEQ ID NO: 146458 - DNA, 25 bp, probe
acacacgcagagtgccgactggtgg

SEQ ID NO: 146459 - DNA, 25 bp, probe
acacaccaggtggccaccaggtggt

SEQ ID NO: 146460 - DNA, 25 bp, probe
acacaccaggtggccaccaggtggt

SEQ ID NO: 146461 - DNA, 25 bp, probe
acacacgcgggtgcaccgcgagtgg

SEQ ID NO: 146462 - DNA, 25 bp, probe
acacacgcgggtgcaccgcgagtgg

SEQ ID NO: 146463 - DNA, 25 bp, probe
cactaaggggccgaccccatggagt

SEQ ID NO: 146464 - DNA, 25 bp, probe
cactaaggggccgaccccatggagt

SEQ ID NO: 146465 - DNA, 25 bp, probe
acacagcggagagcgaacgcctgga

SEQ ID NO: 146466 - DNA, 25 bp, probe
acacagctgagttgttaaccagtcg

SEQ ID NO: 146467 - DNA, 25 bp, probe
acactgctggtttgagacctattct

SEQ ID NO: 146468 - DNA, 25 bp, probe
acactgctggtttgagacctattct

SEQ ID NO: 146469 - DNA, 25 bp, probe
acaatgctgtggacaggcaccaatt

SEQ ID NO: 146470 - DNA, 25 bp, probe
acaatgatggtgacagcctgcagta

SEQ ID NO: 146471 - DNA, 25 bp, probe
acaaagcggatcactgtgtaggggg

SEQ ID NO: 146472 - DNA, 25 bp, probe
acaaagcggatcactgtgtaggggg

SEQ ID NO: 146473 - DNA, 25 bp, probe
acacaaggtgatagaagtcgggccc

SEQ ID NO: 146474 - DNA, 25 bp, probe
acaaagggactaacatcgaagcatc

SEQ ID NO: 146475 - DNA, 25 bp, probe
acacagagtaaatcaccagaagcct

SEQ ID NO: 146476 - DNA, 25 bp, probe
aaaggtacatggcccctgaagttct

SEQ ID NO: 146477 - DNA, 25 bp, probe
acaatgttcttggcccatcatgaca

SEQ ID NO: 146478 - DNA, 25 bp, probe
acacttttggcagcaatcagcacgg

SEQ ID NO: 146479 - DNA, 25 bp, probe
acaatcattttgtacggatcacggg

SEQ ID NO: 146480 - DNA, 25 bp, probe
acaacaggttggcagagaccagtgg

SEQ ID NO: 146481 - DNA, 25 bp, probe
acaacgtgatgctggattccgaggg

SEQ ID NO: 146482 - DNA, 25 bp, probe
acacactgttgctggatcttgagtc

SEQ ID NO: 146483 - DNA, 25 bp, probe
acactctgcgtctgtgattcatttc

SEQ ID NO: 146484 - DNA, 25 bp, probe
acacattatgtaggtttcttatcac

SEQ ID NO: 146485 - DNA, 25 bp, probe
acacaagtgtaggtatcattttctg

SEQ ID NO: 146486 - DNA, 25 bp, probe
acacagagtttggtatgatatttaa

SEQ ID NO: 146487 - DNA, 25 bp, probe
acacagagtttggtatgatatttaa

SEQ ID NO: 146488 - DNA, 25 bp, probe
acacaattattgtcctggtattaaa

SEQ ID NO: 146489 - DNA, 25 bp, probe
acactatctaacatctggctgttga

SEQ ID NO: 146490 - DNA, 25 bp, probe
acacttccatcaattctgggtaccc

SEQ ID NO: 146491 - DNA, 25 bp, probe
acacagctaccaattctactttacc

SEQ ID NO: 146492 - DNA, 25 bp, probe
aaatataacacttctactcttcacc

SEQ ID NO: 146493 - DNA, 25 bp, probe
aaatataacacttctactcttcacc

SEQ ID NO: 146494 - DNA, 25 bp, probe
acaaaaatccatgaagtctcttcct

SEQ ID NO: 146495 - DNA, 25 bp, probe
acaaaaacaggcaaactcttccaca

SEQ ID NO: 146496 - DNA, 25 bp, probe
acaatgtaagagcctaactccatcc

SEQ ID NO: 146497 - DNA, 25 bp, probe
acaaggggatcgacaaccacaccaa

SEQ ID NO: 146498 - DNA, 25 bp, probe
aaagcatggactaaccccaacgaca

SEQ ID NO: 146499 - DNA, 25 bp, probe
acaatctaacctgccatccaaatga

SEQ ID NO: 146500 - DNA, 25 bp, probe
aaatcagcaaccacaagagcaagtg

SEQ ID NO: 146501 - DNA, 25 bp, probe
aaatcagcaaccacaagagcaagtg

SEQ ID NO: 146502 - DNA, 25 bp, probe
aaagcagccctcagaagaccaggaa

SEQ ID NO: 146503 - DNA, 25 bp, probe
acaacggcctgatgaagaccaccta

SEQ ID NO: 146504 - DNA, 25 bp, probe
acaacatggtagtgcagaccaccgc

SEQ ID NO: 146505 - DNA, 25 bp, probe
acaatagcagtagggcagaaacttg

SEQ ID NO: 146506 - DNA, 25 bp, probe
acaatcattgcatcggaacagacct

SEQ ID NO: 146507 - DNA, 25 bp, probe
acactgcagtatgtcccaagaccta

SEQ ID NO: 146508 - DNA, 25 bp, probe
acactcgagttggcaccaaacgcta

SEQ ID NO: 146509 - DNA, 25 bp, probe
acacaaggtatgtcactcccgagaa

SEQ ID NO: 146510 - DNA, 25 bp, probe
acacaggtgatggcaactccctgga

SEQ ID NO: 146511 - DNA, 25 bp, probe
acaagaatatgctaggctgcactct

SEQ ID NO: 146512 - DNA, 25 bp, probe
acacaatcaagatagctgactttgg

SEQ ID NO: 146513 - DNA, 25 bp, probe
acacaatcaagatagctgactttgg

SEQ ID NO: 146514 - DNA, 25 bp, probe
acactcctatggtcacagacttctg

SEQ ID NO: 146515 - DNA, 25 bp, probe
acactccacatgtccacaggtgttg

SEQ ID NO: 146516 - DNA, 25 bp, probe
acacatctccagtctgcagagcagg

SEQ ID NO: 146517 - DNA, 25 bp, probe
acacatctaatgttgtctgcaccct

SEQ ID NO: 146518 - DNA, 25 bp, probe
acacaccagctatttatgagcctct

SEQ ID NO: 146519 - DNA, 25 bp, probe
acacacccatgacatgaagccagct

SEQ ID NO: 146520 - DNA, 25 bp, probe
acacatctccagctattcagacaga

SEQ ID NO: 146521 - DNA, 25 bp, probe
acaattcccttgaatcagtagccag

SEQ ID NO: 146522 - DNA, 25 bp, probe
aaattcaccaattgcagttacgctg

SEQ ID NO: 146523 - DNA, 25 bp, probe
aaattcatgccagaactgaaagcta

SEQ ID NO: 146524 - DNA, 25 bp, probe
acacaagagccttacaggaacagct

SEQ ID NO: 146525 - DNA, 25 bp, probe
acacacgggctgagcggaacattct

SEQ ID NO: 146526 - DNA, 25 bp, probe
acaatcgtggctcactgtaacctca

SEQ ID NO: 146527 - DNA, 25 bp, probe
acaatgcttggctgaccgagtcttc

SEQ ID NO: 146528 - DNA, 25 bp, probe
acaatgcttggctgaccgagtcttc

SEQ ID NO: 146529 - DNA, 25 bp, probe
acacagcccagatgtacgagctctt

SEQ ID NO: 146530 - DNA, 25 bp, probe
acacagcccagatgtacgagctctt

SEQ ID NO: 146531 - DNA, 25 bp, probe
acaaccaagtataaggagctcagaa

SEQ ID NO: 146532 - DNA, 25 bp, probe
acacaactcagttcaagaggctgaa

SEQ ID NO: 146533 - DNA, 25 bp, probe
acaagactggcttcaggcatagctg

SEQ ID NO: 146534 - DNA, 25 bp, probe
acacacactactgcaatgatatctg

SEQ ID NO: 146535 - DNA, 25 bp, probe
acacacacatacacagagactcttt

SEQ ID NO: 146536 - DNA, 25 bp, probe
acaactgctacagagcagacagtta

SEQ ID NO: 146537 - DNA, 25 bp, probe
aaaccatacatggccattgagttgg

SEQ ID NO: 146538 - DNA, 25 bp, probe
aaattatacattctcgactttgggg

SEQ ID NO: 146539 - DNA, 25 bp, probe
aacttacctaagtgacatttgtagt

SEQ ID NO: 146540 - DNA, 25 bp, probe
acacttacctaacaagtactgctca

SEQ ID NO: 146541 - DNA, 25 bp, probe
aaatatttgtgttcccagtacctca

SEQ ID NO: 146542 - DNA, 25 bp, probe
aaattcgtgagtcacctggaggcca

SEQ ID NO: 146543 - DNA, 25 bp, probe
acaagtcctgaatcccttgcaggta

SEQ ID NO: 146544 - DNA, 25 bp, probe
acaactcctatgtcaacttcgagcg

SEQ ID NO: 146545 - DNA, 25 bp, probe
acaacgacattgacgtgttcatgcc

SEQ ID NO: 146546 - DNA, 25 bp, probe
acaaaggcagtcagtgcctgtgctc

SEQ ID NO: 146547 - DNA, 25 bp, probe
aaatccgcagcaaactgccgtgctg

SEQ ID NO: 146548 - DNA, 25 bp, probe
acacacacgcaaatacatgcctttc

SEQ ID NO: 146549 - DNA, 25 bp, probe
acaaccgaatgcatcctctttgggt

SEQ ID NO: 146550 - DNA, 25 bp, probe
acaaccaagtcatgcctttctggat

SEQ ID NO: 146551 - DNA, 25 bp, probe
acacaaccttcacgacagttggtga

SEQ ID NO: 146552 - DNA, 25 bp, probe
acacatggcctacagacacttctgg

SEQ ID NO: 146553 - DNA, 25 bp, probe
acacatgtggtactctgagctcctc

SEQ ID NO: 146554 - DNA, 25 bp, probe
acacttgctgaaggtggcctgtgct

SEQ ID NO: 146555 - DNA, 25 bp, probe
tactgaatgtaagggggggatcgaa

SEQ ID NO: 146556 - DNA, 25 bp, probe
acacacattggcgggtggggtgcag

SEQ ID NO: 146557 - DNA, 25 bp, probe
acaagcttcagcgcatgggggagcc

SEQ ID NO: 146558 - DNA, 25 bp, probe
aaattatacagccaggtgggaagca

SEQ ID NO: 146559 - DNA, 25 bp, probe
aaatatgaatggcagggaggggcag

SEQ ID NO: 146560 - DNA, 25 bp, probe
aaatctgaagaattaagggagggct

SEQ ID NO: 146561 - DNA, 25 bp, probe
aaatctgaagaattaagggagggct

SEQ ID NO: 146562 - DNA, 25 bp, probe
acaacgggcacacgaaggtggcggt

SEQ ID NO: 146563 - DNA, 25 bp, probe
acaacgaaggacaaactgtccaggt

SEQ ID NO: 146564 - DNA, 25 bp, probe
aaatcagaagctcaaacttcctggt

SEQ ID NO: 146565 - DNA, 25 bp, probe
aaaaaacctccaactgtctcagagt

SEQ ID NO: 146566 - DNA, 25 bp, probe
acaagcgtacctcctattttatgag

SEQ ID NO: 146567 - DNA, 25 bp, probe
acaagttatactcttatttggaagg

SEQ ID NO: 146568 - DNA, 25 bp, probe
acaaacataccctttatctctgtaa

SEQ ID NO: 146569 - DNA, 25 bp, probe
acaaccgagccttttgcaactatga

SEQ ID NO: 146570 - DNA, 25 bp, probe
acaacctgaaaattgtggcaaagaa

SEQ ID NO: 146571 - DNA, 25 bp, probe
acaagactgaaatatgatgacccca

SEQ ID NO: 146572 - DNA, 25 bp, probe
acaaatccgagagatgaaccccaac

SEQ ID NO: 146573 - DNA, 25 bp, probe
acaaatcgaagcaggaattccccac

SEQ ID NO: 146574 - DNA, 25 bp, probe
acaacctgaagcacaagttcccatg

SEQ ID NO: 146575 - DNA, 25 bp, probe
acaacctgaagcacaagttcccatg

SEQ ID NO: 146576 - DNA, 25 bp, probe
acaacctgaagcacaagttcccatg

SEQ ID NO: 146577 - DNA, 25 bp, probe
acaacttgaagcaccgctacgagct

SEQ ID NO: 146578 - DNA, 25 bp, probe
acaaattgcaaatccgctagaaaaa

SEQ ID NO: 146579 - DNA, 25 bp, probe
acaacttggagaccaccttaataca

SEQ ID NO: 146580 - DNA, 25 bp, probe
acacatatatctgatggcacctata

SEQ ID NO: 146581 - DNA, 25 bp, probe
aaataccgcagcgagtcctatacgt

SEQ ID NO: 146582 - DNA, 25 bp, probe
aaataccgcagcgagtcctatacgt

SEQ ID NO: 146583 - DNA, 25 bp, probe
aaatccaggctgggaacatgctagg

SEQ ID NO: 146584 - DNA, 25 bp, probe
aaatccaggctgggaacatgctagg

SEQ ID NO: 146585 - DNA, 25 bp, probe
acaactagggctgcgaatctagagg

SEQ ID NO: 146586 - DNA, 25 bp, probe
acacaatcagggctctgttgcaaga

SEQ ID NO: 146587 - DNA, 25 bp, probe
acaaagaggtgctcagcttcaagcc

SEQ ID NO: 146588 - DNA, 25 bp, probe
acaaagcggttaggctgtgaggaaa

SEQ ID NO: 146589 - DNA, 25 bp, probe
aaattggaattagctcagacaggaa

SEQ ID NO: 146590 - DNA, 25 bp, probe
acaaaggcaacttcctgaccgagga

SEQ ID NO: 146591 - DNA, 25 bp, probe
acaagggaagcttcttgctgccagg

SEQ ID NO: 146592 - DNA, 25 bp, probe
acaagggatggctcattgtttttct

SEQ ID NO: 146593 - DNA, 25 bp, probe
acacttggaggttcttgaaatttgt

SEQ ID NO: 146594 - DNA, 25 bp, probe
acacttggaggttcttgaaatttgt

SEQ ID NO: 146595 - DNA, 25 bp, probe
acaaagaatgggcttgaaacattat

SEQ ID NO: 146596 - DNA, 25 bp, probe
acaaagaattggatctggatcattt

SEQ ID NO: 146597 - DNA, 25 bp, probe
acaaactaaggactatttattgata

SEQ ID NO: 146598 - DNA, 25 bp, probe
acacatacacagagactctttcatt

SEQ ID NO: 146599 - DNA, 25 bp, probe
acacagacacaaagtttaactggta

SEQ ID NO: 146600 - DNA, 25 bp, probe
acaaaccacaccttcatcaagcggt

SEQ ID NO: 146601 - DNA, 25 bp, probe
acaaatccagtgatatctaagctca

SEQ ID NO: 146602 - DNA, 25 bp, probe
acaaagccactgactgagatggagt

SEQ ID NO: 146603 - DNA, 25 bp, probe
acaaagccactgactgagatggagt

SEQ ID NO: 146604 - DNA, 25 bp, probe
acaaacatacagccatctggggtcc

SEQ ID NO: 146605 - DNA, 25 bp, probe
acaaacaactgccatctctgggctg

SEQ ID NO: 146606 - DNA, 25 bp, probe
aaagaaatgctgcttctcgtctggg

SEQ ID NO: 146607 - DNA, 25 bp, probe
acaaagatgagtgactctcgtctgg

SEQ ID NO: 146608 - DNA, 25 bp, probe
acaatcgtttcatcattcggcgtgc

SEQ ID NO: 146609 - DNA, 25 bp, probe
acacagttttcaggactctggcctc

SEQ ID NO: 146610 - DNA, 25 bp, probe
acaactttgtcaggtactacaacaa

SEQ ID NO: 146611 - DNA, 25 bp, probe
acacactatttggtggacaagaaat

SEQ ID NO: 146612 - DNA, 25 bp, probe
acacatctttgtttgtaatgcagta

SEQ ID NO: 146613 - DNA, 25 bp, probe
acaatgtattgcataatcaatgctg

SEQ ID NO: 146614 - DNA, 25 bp, probe
acaatcatgttgcagcaattcactg

SEQ ID NO: 146615 - DNA, 25 bp, probe
acaaccctgtactttcagcaactat

SEQ ID NO: 146616 - DNA, 25 bp, probe
acacagcccagtttgttcatgtcag

SEQ ID NO: 146617 - DNA, 25 bp, probe
acaacacacagtagctcttcaggga

SEQ ID NO: 146618 - DNA, 25 bp, probe
acaacacagcaggaatcagtcagta

SEQ ID NO: 146619 - DNA, 25 bp, probe
aaatccagccagagatgcacattcc

SEQ ID NO: 146620 - DNA, 25 bp, probe
acaacacagtcactctagcaaggcc

SEQ ID NO: 146621 - DNA, 25 bp, probe
acaaatgagagcttccctcaggctc

SEQ ID NO: 146622 - DNA, 25 bp, probe
acaaatgcatacttaccctgtgcct

SEQ ID NO: 146623 - DNA, 25 bp, probe
acaaggcatggcgtagagggtgctg

SEQ ID NO: 146624 - DNA, 25 bp, probe
acaagcgctggcgtaagcatggggt

SEQ ID NO: 146625 - DNA, 25 bp, probe
acaacgtgggtgaggccaggagtcc

SEQ ID NO: 146626 - DNA, 25 bp, probe
acaacgtggggcacctgagcagaat

SEQ ID NO: 146627 - DNA, 25 bp, probe
acacaagaatggccaacctaaaatt

SEQ ID NO: 146628 - DNA, 25 bp, probe
acaaaaacccttcccatgcaaattg

SEQ ID NO: 146629 - DNA, 25 bp, probe
aaatggattcccatcccaaagtctg

SEQ ID NO: 146630 - DNA, 25 bp, probe
aaatcgttctccttacaatcaagtt

SEQ ID NO: 146631 - DNA, 25 bp, probe
aaaggtctcctatgtaaaagcgatt

SEQ ID NO: 146632 - DNA, 25 bp, probe
aaatttcctctatataaggtggcat

SEQ ID NO: 146633 - DNA, 25 bp, probe
aaatccttcctggagtagaggccct

SEQ ID NO: 146634 - DNA, 25 bp, probe
acaatcatttttcttaaggcctgga

SEQ ID NO: 146635 - DNA, 25 bp, probe
acaaatttctctgttccatagttaa

SEQ ID NO: 146636 - DNA, 25 bp, probe
acaaatattcctcgtgctaaaggac

SEQ ID NO: 146637 - DNA, 25 bp, probe
aaatattcctcgtgctaaaggacaa

SEQ ID NO: 146638 - DNA, 25 bp, probe
aaatttcaccagcgttgtagtacag

SEQ ID NO: 146639 - DNA, 25 bp, probe
aaattccacttgcaccgtagggcat

SEQ ID NO: 146640 - DNA, 25 bp, probe
aaattcaaccctcccgatagggctg

SEQ ID NO: 146641 - DNA, 25 bp, probe
aacataaaccctccaagggatctgc

SEQ ID NO: 146642 - DNA, 25 bp, probe
acacaaaatccattccaggtagctc

SEQ ID NO: 146643 - DNA, 25 bp, probe
acacacaaaccagtatcgctcatag

SEQ ID NO: 146644 - DNA, 25 bp, probe
acaacacagaccggagcagccataa

SEQ ID NO: 146645 - DNA, 25 bp, probe
acacacacacacacaaacacaaagg

SEQ ID NO: 146646 - DNA, 25 bp, probe
acaacagcaacgtcttgaacaggcg

SEQ ID NO: 146647 - DNA, 25 bp, probe
acaacagccgcttctggaacggcag

SEQ ID NO: 146648 - DNA, 25 bp, probe
acaacaggcctgacttgatactaag

SEQ ID NO: 146649 - DNA, 25 bp, probe
acaaagtgccttctgtttcacagct

SEQ ID NO: 146650 - DNA, 25 bp, probe
acaacagctccattttatttccagt

SEQ ID NO: 146651 - DNA, 25 bp, probe
acacaacatctttttctactcgagt

SEQ ID NO: 146652 - DNA, 25 bp, probe
acacatacgtattttccgtagtgct

SEQ ID NO: 146653 - DNA, 25 bp, probe
acaacatgcgtatttatagagtagt

SEQ ID NO: 146654 - DNA, 25 bp, probe
acaacatgcgtatttatagagtagt

SEQ ID NO: 146655 - DNA, 25 bp, probe
acaactgcagtattcacctaaagta

SEQ ID NO: 146656 - DNA, 25 bp, probe
acaactcccacatccaggaagtagt

SEQ ID NO: 146657 - DNA, 25 bp, probe
acaacctccatatcctggcggttga

SEQ ID NO: 146658 - DNA, 25 bp, probe
acaaccccattctgcggaagaggaa

SEQ ID NO: 146659 - DNA, 25 bp, probe
acaacctctattactgggaccagga

SEQ ID NO: 146660 - DNA, 25 bp, probe
acaacgtcatggtcctggtgaacac

SEQ ID NO: 146661 - DNA, 25 bp, probe
acaaggtatggggtgggagccacaa

SEQ ID NO: 146662 - DNA, 25 bp, probe
acaaggtggtatggttgtatacaca

SEQ ID NO: 146663 - DNA, 25 bp, probe
acaaggtggtatggttgtatacaca

SEQ ID NO: 146664 - DNA, 25 bp, probe
acaacagttttaattgctgatctgc

SEQ ID NO: 146665 - DNA, 25 bp, probe
acaaatgccttgaaatgctgctgtc

SEQ ID NO: 146666 - DNA, 25 bp, probe
acaaaactcttaatgctttattctc

SEQ ID NO: 146667 - DNA, 25 bp, probe
acacagagactctttcatttttctt

SEQ ID NO: 146668 - DNA, 25 bp, probe
acacaggcaatgtcttcttttctct

SEQ ID NO: 146669 - DNA, 25 bp, probe
acacagccatagtctcagctcttac

SEQ ID NO: 146670 - DNA, 25 bp, probe
acacagcaggaatcagtcagtatct

SEQ ID NO: 146671 - DNA, 25 bp, probe
acacagctgtaatcgtttgcttgtt

SEQ ID NO: 146672 - DNA, 25 bp, probe
acacagctgctgaaagttgtccttt

SEQ ID NO: 146673 - DNA, 25 bp, probe
acacacagcatgtaatggtatctta

SEQ ID NO: 146674 - DNA, 25 bp, probe
acacacagcatgtaatggtatctta

SEQ ID NO: 146675 - DNA, 25 bp, probe
acaacagcattcagttatttgcaga

SEQ ID NO: 146676 - DNA, 25 bp, probe
acacagacttatggatcgttatgga

SEQ ID NO: 146677 - DNA, 25 bp, probe
acacagtctagaggtcctgatggga

SEQ ID NO: 146678 - DNA, 25 bp, probe
acaaatgctcacagctcgtatggta

SEQ ID NO: 146679 - DNA, 25 bp, probe
acaaaagcaacactcgatgatagta

SEQ ID NO: 146680 - DNA, 25 bp, probe
acaaaatccatggcctggaagatga

SEQ ID NO: 146681 - DNA, 25 bp, probe
acaaggatgctcgccggaagcagat

SEQ ID NO: 146682 - DNA, 25 bp, probe
acacaggtgcccgtcatggaagagg

SEQ ID NO: 146683 - DNA, 25 bp, probe
aaattgtgcggctcagcaaggagtg

SEQ ID NO: 146684 - DNA, 25 bp, probe
acaatcgaccgaaagcaagaggtgc

SEQ ID NO: 146685 - DNA, 25 bp, probe
acaaccactgctaccagtagtgggc

SEQ ID NO: 146686 - DNA, 25 bp, probe
acacagaccttttcagtatgtcacc

SEQ ID NO: 146687 - DNA, 25 bp, probe
acacagcatccttccacactgtgta

SEQ ID NO: 146688 - DNA, 25 bp, probe
acacaatctgcttagcccgagtgac

SEQ ID NO: 146689 - DNA, 25 bp, probe
acaatctgcttagcccgagtgacag

SEQ ID NO: 146690 - DNA, 25 bp, probe
acaagattgtcagcggcgaggccga

SEQ ID NO: 146691 - DNA, 25 bp, probe
acaagctttaactgagactccgacc

SEQ ID NO: 146692 - DNA, 25 bp, probe
aaatttatggactcagactcagccc

SEQ ID NO: 146693 - DNA, 25 bp, probe
aaatgtgtttacttcagaacggcac

SEQ ID NO: 146694 - DNA, 25 bp, probe
aaatgtgtttacttcagaacggcac

SEQ ID NO: 146695 - DNA, 25 bp, probe
acaagtatatttttgacaactgcca

SEQ ID NO: 146696 - DNA, 25 bp, probe
acacagttaggatgctgacacagtc

SEQ ID NO: 146697 - DNA, 25 bp, probe
acaaacattgtatctgacatcagct

SEQ ID NO: 146698 - DNA, 25 bp, probe
acaacacagtgataagatcatccga

SEQ ID NO: 146699 - DNA, 25 bp, probe
acacagaatggataagccagccaac

SEQ ID NO: 146700 - DNA, 25 bp, probe
acaataaactcaaagccagccaagc

SEQ ID NO: 146701 - DNA, 25 bp, probe
aaataaacttattggctgttacgtg

SEQ ID NO: 146702 - DNA, 25 bp, probe
aaatacgacgacgaggagtttgagt

SEQ ID NO: 146703 - DNA, 25 bp, probe
aaatatcaggctcccagggtttaat

SEQ ID NO: 146704 - DNA, 25 bp, probe
aaatatcaggctcccagggtttaat

SEQ ID NO: 146705 - DNA, 25 bp, probe
aaatacatacggtcaggtttaacat

SEQ ID NO: 146706 - DNA, 25 bp, probe
aaatctcaaagatcatggtagtact

SEQ ID NO: 146707 - DNA, 25 bp, probe
aaatgaaagcagtactgggattaca

SEQ ID NO: 146708 - DNA, 25 bp, probe
aaattgaatcagtggcaacattaaa

SEQ ID NO: 146709 - DNA, 25 bp, probe
aaatatgagacacttgggactacta

SEQ ID NO: 146710 - DNA, 25 bp, probe
aaattgatccaaaggacctgacctt

SEQ ID NO: 146711 - DNA, 25 bp, probe
aaattgctcgtatggccctagcatt

SEQ ID NO: 146712 - DNA, 25 bp, probe
aaattctggatgtatgtgacgtggt

SEQ ID NO: 146713 - DNA, 25 bp, probe
aaatttgtcatggatggagggtatc

SEQ ID NO: 146714 - DNA, 25 bp, probe
acaattgtcttgccggtgctttatc

SEQ ID NO: 146715 - DNA, 25 bp, probe
acaatgtggccgaggactttgattg

SEQ ID NO: 146716 - DNA, 25 bp, probe
aaattcagacgtactggcttctgtt

SEQ ID NO: 146717 - DNA, 25 bp, probe
acaatgtcaaaactactgtgtctga

SEQ ID NO: 146718 - DNA, 25 bp, probe
acaatgtcaaaactactgtgtctga

SEQ ID NO: 146719 - DNA, 25 bp, probe
acaatgtcaaaactactgtgtctga

SEQ ID NO: 146720 - DNA, 25 bp, probe
acacactctagagatgcactgttca

SEQ ID NO: 146721 - DNA, 25 bp, probe
acaacttcatctgtactgcttgaat

SEQ ID NO: 146722 - DNA, 25 bp, probe
acaacttcatctgtactgcttgaat

SEQ ID NO: 146723 - DNA, 25 bp, probe
acaactgttcaaaatttcatgcaat

SEQ ID NO: 146724 - DNA, 25 bp, probe
acaactgttcaaaatttcatgcaat

SEQ ID NO: 146725 - DNA, 25 bp, probe
acaatctattggacaagttatgcct

SEQ ID NO: 146726 - DNA, 25 bp, probe
acaactttcagcaggctgtctgctc

SEQ ID NO: 146727 - DNA, 25 bp, probe
acaaattctactcactgtgctccat

SEQ ID NO: 146728 - DNA, 25 bp, probe
acaaattcgcataccacgttctctg

SEQ ID NO: 146729 - DNA, 25 bp, probe
acaaaatccattccaggtagctcgg

SEQ ID NO: 146730 - DNA, 25 bp, probe
acaaaagtaccatagcacagcactg

SEQ ID NO: 146731 - DNA, 25 bp, probe
acaaaagtcacatatgagcaagatc

SEQ ID NO: 146732 - DNA, 25 bp, probe
acaaatcgctcacgaatgccaaatc

SEQ ID NO: 146733 - DNA, 25 bp, probe
acaaatgaggcacttcatctgaaga

SEQ ID NO: 146734 - DNA, 25 bp, probe
acaacagacagcatctagccacgat

SEQ ID NO: 146735 - DNA, 25 bp, probe
acaaaacatatttcagacatctgtg

SEQ ID NO: 146736 - DNA, 25 bp, probe
acaaaacatatttcagacatctgtg

SEQ ID NO: 146737 - DNA, 25 bp, probe
acacaagtatgcattcatgacatct

SEQ ID NO: 146738 - DNA, 25 bp, probe
acaatcggctgcattgaagatccag

SEQ ID NO: 146739 - DNA, 25 bp, probe
acaaactgctgcgatatgaccacca

SEQ ID NO: 146740 - DNA, 25 bp, probe
acaacactgctggtttgagacctat

SEQ ID NO: 146741 - DNA, 25 bp, probe
acaacactgctggtttgagacctat

SEQ ID NO: 146742 - DNA, 25 bp, probe
acaaagctgctcttgttagcacttt

SEQ ID NO: 146743 - DNA, 25 bp, probe
aaatagatgctgctgtctacctcag

SEQ ID NO: 146744 - DNA, 25 bp, probe
acaaagctcagcagagctcctccag

SEQ ID NO: 146745 - DNA, 25 bp, probe
acaacatgctaatgagtccccgtgg

SEQ ID NO: 146746 - DNA, 25 bp, probe
acaacatcgtcatggtgacccagtg

SEQ ID NO: 146747 - DNA, 25 bp, probe
acaacacgccggactgactctggcg

SEQ ID NO: 146748 - DNA, 25 bp, probe
aaatctccaggcctgtgacactggc

SEQ ID NO: 146749 - DNA, 25 bp, probe
acaataccagtgctgggatatggga

SEQ ID NO: 146750 - DNA, 25 bp, probe
acaatgactatggccgggccgtgga

SEQ ID NO: 146751 - DNA, 25 bp, probe
acaatgcctatgcccgtgaagaatt

SEQ ID NO: 146752 - DNA, 25 bp, probe
acaatgcctatgcccgtgaagaatt

SEQ ID NO: 146753 - DNA, 25 bp, probe
acaaagccatgcccgtaagcagatt

SEQ ID NO: 146754 - DNA, 25 bp, probe
acaaatcactaccgctttgcaatca

SEQ ID NO: 146755 - DNA, 25 bp, probe
acaaagcaagaccccatctctataa

SEQ ID NO: 146756 - DNA, 25 bp, probe
acaacaaaacaggtcatcactaaga

SEQ ID NO: 146757 - DNA, 25 bp, probe
acaacaaaacaggtcatcactaaga

SEQ ID NO: 146758 - DNA, 25 bp, probe
acacaaagaactggatcaccccaga

SEQ ID NO: 146759 - DNA, 25 bp, probe
acaacaagaacctctgtgtccagat

SEQ ID NO: 146760 - DNA, 25 bp, probe
acaacaagagcaaaactgtctcaaa

SEQ ID NO: 146761 - DNA, 25 bp, probe
acaatgtaactttatgcttccaaat

SEQ ID NO: 146762 - DNA, 25 bp, probe
acaatgtaacaggtcttattggaat

SEQ ID NO: 146763 - DNA, 25 bp, probe
acaatgaaacggactctgctttgac

SEQ ID NO: 146764 - DNA, 25 bp, probe
aaattctacgccacatttctgatcc

SEQ ID NO: 146765 - DNA, 25 bp, probe
aaatttgaggaacctttgctacaag

SEQ ID NO: 146766 - DNA, 25 bp, probe
aaaggtgcggcatccaattcaaata

SEQ ID NO: 146767 - DNA, 25 bp, probe
aaagaatgaggcctccaaacaaaca

SEQ ID NO: 146768 - DNA, 25 bp, probe
aaagttgggccggaacattctcaca

SEQ ID NO: 146769 - DNA, 25 bp, probe
aaagttgggccggaacattctcaca

SEQ ID NO: 146770 - DNA, 25 bp, probe
aaatggggtctcagaacttctactt

SEQ ID NO: 146771 - DNA, 25 bp, probe
aaatggagttccagaaagcactagt

SEQ ID NO: 146772 - DNA, 25 bp, probe
aaatggttggcctgagcaacctagt

SEQ ID NO: 146773 - DNA, 25 bp, probe
aaattttggtcatagcattcacttt

SEQ ID NO: 146774 - DNA, 25 bp, probe
aaattttgcgctcggtgcgatactg

SEQ ID NO: 146775 - DNA, 25 bp, probe
aaattttgcgctcggtgcgatactg

SEQ ID NO: 146776 - DNA, 25 bp, probe
aaattgttcctgggatcgggctgag

SEQ ID NO: 146777 - DNA, 25 bp, probe
aaattgttcctgggatcgggctgag

SEQ ID NO: 146778 - DNA, 25 bp, probe
aaatatgttccgagtgcaatgccca

SEQ ID NO: 146779 - DNA, 25 bp, probe
aaatatgttccgagtgcaatgccca

SEQ ID NO: 146780 - DNA, 25 bp, probe
acaacacccatccaaggaatggcca

SEQ ID NO: 146781 - DNA, 25 bp, probe
acaacatcccataatagaaatgagc

SEQ ID NO: 146782 - DNA, 25 bp, probe
aaattacagttcttgaaatgcagat

SEQ ID NO: 146783 - DNA, 25 bp, probe
aaattacagattttggactttgcaa

SEQ ID NO: 146784 - DNA, 25 bp, probe
aaattaactatctgtacttataagg

SEQ ID NO: 146785 - DNA, 25 bp, probe
aaattagttggctggacattgataa

SEQ ID NO: 146786 - DNA, 25 bp, probe
aaattttatgactggaagtgtgata

SEQ ID NO: 146787 - DNA, 25 bp, probe
aaatatttctccagcaaatttgagg

SEQ ID NO: 146788 - DNA, 25 bp, probe
aaatatttcctcagtactttgcaga

SEQ ID NO: 146789 - DNA, 25 bp, probe
acaatattgtactcagtgttttgaa

SEQ ID NO: 146790 - DNA, 25 bp, probe
acaaattgtattgcttattcattat

SEQ ID NO: 146791 - DNA, 25 bp, probe
acaaattggcttccatttcctacat

SEQ ID NO: 146792 - DNA, 25 bp, probe
acaaattacttgtttatgggagatt

SEQ ID NO: 146793 - DNA, 25 bp, probe
aaatttcccatgactacatggaaat

SEQ ID NO: 146794 - DNA, 25 bp, probe
acaaattcctgcttgtccggcaggt

SEQ ID NO: 146795 - DNA, 25 bp, probe
acaaatttcacatttccatggcatg

SEQ ID NO: 146796 - DNA, 25 bp, probe
acaaatttcacatttccatggcatg

SEQ ID NO: 146797 - DNA, 25 bp, probe
acaaattaaaatacagctgcactga

SEQ ID NO: 146798 - DNA, 25 bp, probe
acaaatataccaagaagatgaatgc

SEQ ID NO: 146799 - DNA, 25 bp, probe
acaagatccacctgatcaataatat

SEQ ID NO: 146800 - DNA, 25 bp, probe
acaagaacattctctcatagaacat

SEQ ID NO: 146801 - DNA, 25 bp, probe
acaaaacagacttcactaacacaga

SEQ ID NO: 146802 - DNA, 25 bp, probe
acaaaacagacttcactaacacaga

SEQ ID NO: 146803 - DNA, 25 bp, probe
acaataccagttcatctataaagca

SEQ ID NO: 146804 - DNA, 25 bp, probe
acaaaacaatctccaccatgaaagt

SEQ ID NO: 146805 - DNA, 25 bp, probe
acaaaatagatacacccatcatggt

SEQ ID NO: 146806 - DNA, 25 bp, probe
acaaaatagatacacccatcatggt

SEQ ID NO: 146807 - DNA, 25 bp, probe
acaaagcaacgaaaccccatggatt

SEQ ID NO: 146808 - DNA, 25 bp, probe
acaagataacgcctacaccactggt

SEQ ID NO: 146809 - DNA, 25 bp, probe
acaaagcatacgccaacactgcctt

SEQ ID NO: 146810 - DNA, 25 bp, probe
acaacaatggcaactataccctcat

SEQ ID NO: 146811 - DNA, 25 bp, probe
acaaagttgcacagcataactactg

SEQ ID NO: 146812 - DNA, 25 bp, probe
acaaattgtccacctacagcttggt

SEQ ID NO: 146813 - DNA, 25 bp, probe
acaaatttgtagaaacgctctggca

SEQ ID NO: 146814 - DNA, 25 bp, probe
acaatttcttggcatagtgcctggc

SEQ ID NO: 146815 - DNA, 25 bp, probe
gactagttgcttgcctatacctggc

SEQ ID NO: 146816 - DNA, 25 bp, probe
acaaatctttcatccatacctgtgc

SEQ ID NO: 146817 - DNA, 25 bp, probe
acaaatctttcatccatacctgtgc

SEQ ID NO: 146818 - DNA, 25 bp, probe
acaaatatttgcttggcaacacgac

SEQ ID NO: 146819 - DNA, 25 bp, probe
acaaatatttgcttggcaacacgac

SEQ ID NO: 146820 - DNA, 25 bp, probe
acaacattattgtcatggactagag

SEQ ID NO: 146821 - DNA, 25 bp, probe
acaacattccgttggcagctggcaa

SEQ ID NO: 146822 - DNA, 25 bp, probe
acaacatgaccatggaagctgagag

SEQ ID NO: 146823 - DNA, 25 bp, probe
acaacatgcattccgagaagctgct

SEQ ID NO: 146824 - DNA, 25 bp, probe
acaactgctgtgaccagacttgtat

SEQ ID NO: 146825 - DNA, 25 bp, probe
acaactgtgtagcagacatctggtc

SEQ ID NO: 146826 - DNA, 25 bp, probe
acaattggtactcacctcagtgctg

SEQ ID NO: 146827 - DNA, 25 bp, probe
acaattggtactcacctcagtgctg

SEQ ID NO: 146828 - DNA, 25 bp, probe
acaaatggaagtgacctcagtgctg

SEQ ID NO: 146829 - DNA, 25 bp, probe
acaaatggaagtgacctcagtgctg

SEQ ID NO: 146830 - DNA, 25 bp, probe
acaaagtcaaggacatctcagaggt

SEQ ID NO: 146831 - DNA, 25 bp, probe
acaaacatcatgagatcttcaactt

SEQ ID NO: 146832 - DNA, 25 bp, probe
acaaggtgcagcatgacctcaactc

SEQ ID NO: 146833 - DNA, 25 bp, probe
acaatgcggagttacactcccgact

SEQ ID NO: 146834 - DNA, 25 bp, probe
aacatccaagttgcagtacctaccc

SEQ ID NO: 146835 - DNA, 25 bp, probe
acaacaacagttggaggagcctcag

SEQ ID NO: 146836 - DNA, 25 bp, probe
acaaccacgcgtcgagtgagcagct

SEQ ID NO: 146837 - DNA, 25 bp, probe
acaactgcccaggtagctggagctg

SEQ ID NO: 146838 - DNA, 25 bp, probe
acaactgcccaggtagctggagctg

SEQ ID NO: 146839 - DNA, 25 bp, probe
acaactctcactttagtggatgtaa

SEQ ID NO: 146840 - DNA, 25 bp, probe
acaaactcagcatctagttctaaga

SEQ ID NO: 146841 - DNA, 25 bp, probe
acaaccaagacatcgtcttccacaa

SEQ ID NO: 146842 - DNA, 25 bp, probe
acaaccaggagaacgccatcatcca

SEQ ID NO: 146843 - DNA, 25 bp, probe
acaaagtggagaagagctatccccg

SEQ ID NO: 146844 - DNA, 25 bp, probe
acaaagactgaagaaatttcacagc

SEQ ID NO: 146845 - DNA, 25 bp, probe
acaaagcctgacttacaatatgcct

SEQ ID NO: 146846 - DNA, 25 bp, probe
acaaaggctactacacgcagatctc

SEQ ID NO: 146847 - DNA, 25 bp, probe
acaaacgtgacttctgcgcacattc

SEQ ID NO: 146848 - DNA, 25 bp, probe
acaaacgtgacttctgcgcacattc

SEQ ID NO: 146849 - DNA, 25 bp, probe
acaaagcctcacaccatgacaatgc

SEQ ID NO: 146850 - DNA, 25 bp, probe
acaaagcctcacaccatgacaatgc

SEQ ID NO: 146851 - DNA, 25 bp, probe
acaaacctctcagcagcatcaaagc

SEQ ID NO: 146852 - DNA, 25 bp, probe
acaagaactagcgctgcacatccgc

SEQ ID NO: 146853 - DNA, 25 bp, probe
acaacaattacatttcctgcaccaa

SEQ ID NO: 146854 - DNA, 25 bp, probe
acaacagaaaaaactgccactgcat

SEQ ID NO: 146855 - DNA, 25 bp, probe
acaacagaaaaaactgccactgcat

SEQ ID NO: 146856 - DNA, 25 bp, probe
acaaaacaatgtaatcccagcgatg

SEQ ID NO: 146857 - DNA, 25 bp, probe
acaaccaagggtacacgcaggcatg

SEQ ID NO: 146858 - DNA, 25 bp, probe
acaaccactgggatcagctggtgtc

SEQ ID NO: 146859 - DNA, 25 bp, probe
acaacacagcagcacacacagctgg

SEQ ID NO: 146860 - DNA, 25 bp, probe
acaaccagcagttcctggcaggcac

SEQ ID NO: 146861 - DNA, 25 bp, probe
acaaccagcatcatccctcagatgc

SEQ ID NO: 146862 - DNA, 25 bp, probe
acaaaatgagattctctctgagtgc

SEQ ID NO: 146863 - DNA, 25 bp, probe
acaaagacacatttatctgaggttc

SEQ ID NO: 146864 - DNA, 25 bp, probe
acaacaagctcaagaccgaggtgtc

SEQ ID NO: 146865 - DNA, 25 bp, probe
acaaacactgcagagaccaggtgaa

SEQ ID NO: 146866 - DNA, 25 bp, probe
acaaacagaacttgatcctgcgtaa

SEQ ID NO: 146867 - DNA, 25 bp, probe
aaattagctgtcaaacctcctaact

SEQ ID NO: 146868 - DNA, 25 bp, probe
aactatttctaccaccgagaaactg

SEQ ID NO: 146869 - DNA, 25 bp, probe
acaattgaggataccccgagactac

SEQ ID NO: 146870 - DNA, 25 bp, probe
acaatggggtcaggccccagaggag

SEQ ID NO: 146871 - DNA, 25 bp, probe
acaatgtcctgttggaccacgaggg

SEQ ID NO: 146872 - DNA, 25 bp, probe
acaatgagctgcgtgtggctcccga

SEQ ID NO: 146873 - DNA, 25 bp, probe
acaatggatgcagtgacctcggaag

SEQ ID NO: 146874 - DNA, 25 bp, probe
acaacgtcacgggcatcgtacaggt

SEQ ID NO: 146875 - DNA, 25 bp, probe
acaacgtcactgtgatggtggtgcg

SEQ ID NO: 146876 - DNA, 25 bp, probe
acaactgtcagttttattgagatgg

SEQ ID NO: 146877 - DNA, 25 bp, probe
acaacttgattatttaggaattcct

SEQ ID NO: 146878 - DNA, 25 bp, probe
acaactgtgttactgtattccatct

SEQ ID NO: 146879 - DNA, 25 bp, probe
acaacttacattactattccataac

SEQ ID NO: 146880 - DNA, 25 bp, probe
acaacttacattactattccataac

SEQ ID NO: 146881 - DNA, 25 bp, probe
acaacattatctgaccaatagtaca

SEQ ID NO: 146882 - DNA, 25 bp, probe
acaacaatattcaccaattcccagg

SEQ ID NO: 146883 - DNA, 25 bp, probe
acaagaacttcgaccagaggccaag

SEQ ID NO: 146884 - DNA, 25 bp, probe
acaagaacttcgtaaagtcattaag

SEQ ID NO: 146885 - DNA, 25 bp, probe
aaatgtacccaatacagctcttaca

SEQ ID NO: 146886 - DNA, 25 bp, probe
aaatgtacccaatacagctcttaca

SEQ ID NO: 146887 - DNA, 25 bp, probe
acaagtacataaaactcttcttaca

SEQ ID NO: 146888 - DNA, 25 bp, probe
acaaaatacaatatcctggctttat

SEQ ID NO: 146889 - DNA, 25 bp, probe
acaaaatacaatatcctggctttat

SEQ ID NO: 146890 - DNA, 25 bp, probe
acaaaaatctgtattatcctcttaa

SEQ ID NO: 146891 - DNA, 25 bp, probe
acaaaactcgacacaacatcatcct

SEQ ID NO: 146892 - DNA, 25 bp, probe
acaacaacacagtgataagatcatc

SEQ ID NO: 146893 - DNA, 25 bp, probe
acaaagccacagtgacactggccgc

SEQ ID NO: 146894 - DNA, 25 bp, probe
aaatatcgacgtcagctccgtcagc

SEQ ID NO: 146895 - DNA, 25 bp, probe
aaatatcgacgtcagctccgtcagc

SEQ ID NO: 146896 - DNA, 25 bp, probe
aaattagaaagtagccacgtatggt

SEQ ID NO: 146897 - DNA, 25 bp, probe
aaattgtggaagaccttcactgatt

SEQ ID NO: 146898 - DNA, 25 bp, probe
aaattgtggaagaccttcactgatt

SEQ ID NO: 146899 - DNA, 25 bp, probe
aaatatgtggattaccacctgcctt

SEQ ID NO: 146900 - DNA, 25 bp, probe
aaatatttgcttggcaacacgactt

SEQ ID NO: 146901 - DNA, 25 bp, probe
aaatatttgcttggcaacacgactt

SEQ ID NO: 146902 - DNA, 25 bp, probe
aaatatgtaggtgctccactaatat

SEQ ID NO: 146903 - DNA, 25 bp, probe
aaaattcaggctgatctctcctctg

SEQ ID NO: 146904 - DNA, 25 bp, probe
aacatttacttcaactctaccttag

SEQ ID NO: 146905 - DNA, 25 bp, probe
aacatttacttcaactctaccttag

SEQ ID NO: 146906 - DNA, 25 bp, probe
aaatctatcctaaatgttcccttga

SEQ ID NO: 146907 - DNA, 25 bp, probe
acaaactcctatcattgataacttg

SEQ ID NO: 146908 - DNA, 25 bp, probe
aaatgagtccgacattgaaaagttg

SEQ ID NO: 146909 - DNA, 25 bp, probe
aaatatctccgaagttaaaatctgt

SEQ ID NO: 146910 - DNA, 25 bp, probe
aaatcctcccatcatgaaacaaact

SEQ ID NO: 146911 - DNA, 25 bp, probe
aaatcccttccatggccaaaactat

SEQ ID NO: 146912 - DNA, 25 bp, probe
aaatcccttccatggccaaaactat

SEQ ID NO: 146913 - DNA, 25 bp, probe
aaatcttccttatgtgtaacgtttg

SEQ ID NO: 146914 - DNA, 25 bp, probe
acaatttcgggatgtattactcctt

SEQ ID NO: 146915 - DNA, 25 bp, probe
acaatttcgggatgtattactcctt

SEQ ID NO: 146916 - DNA, 25 bp, probe
acaaactagaggtaaatatcacatt

SEQ ID NO: 146917 - DNA, 25 bp, probe
acaaacagcacttgaagcaattcct

SEQ ID NO: 146918 - DNA, 25 bp, probe
acaacagcgccttcaagaacttctt

SEQ ID NO: 146919 - DNA, 25 bp, probe
acaacagcgccttcaagaacttctt

SEQ ID NO: 146920 - DNA, 25 bp, probe
acaaccgtctccttgaagttgctgt

SEQ ID NO: 146921 - DNA, 25 bp, probe
acaaccgtctccttgaagttgctgt

SEQ ID NO: 146922 - DNA, 25 bp, probe
acaacctggctctctggatttgtgg

SEQ ID NO: 146923 - DNA, 25 bp, probe
acaacctgggcattgtgtttgggcc

SEQ ID NO: 146924 - DNA, 25 bp, probe
aaatgcctgggatagttcttgggac

SEQ ID NO: 146925 - DNA, 25 bp, probe
ggactcgggggtattttggtcacag

SEQ ID NO: 146926 - DNA, 25 bp, probe
aagccggagaggatttggtccctca

SEQ ID NO: 146927 - DNA, 25 bp, probe
aaattgcgaaggcttttgcctccca

SEQ ID NO: 146928 - DNA, 25 bp, probe
aaatggaataagctacgtcctcaac

SEQ ID NO: 146929 - DNA, 25 bp, probe
aaattcaaaagctttcaacattcaa

SEQ ID NO: 146930 - DNA, 25 bp, probe
aaatttaaaccattgagacttcaga

SEQ ID NO: 146931 - DNA, 25 bp, probe
aaatttaaaccattgagacttcaga

SEQ ID NO: 146932 - DNA, 25 bp, probe
aaatttaagactctcgcatcttccc

SEQ ID NO: 146933 - DNA, 25 bp, probe
aaatttaagactctcgcatcttccc

SEQ ID NO: 146934 - DNA, 25 bp, probe
aaataaaacactctggtcttgccgc

SEQ ID NO: 146935 - DNA, 25 bp, probe
aaataaaacactctggtcttgccgc

SEQ ID NO: 146936 - DNA, 25 bp, probe
aaataaaacactctggtcttgccgc

SEQ ID NO: 146937 - DNA, 25 bp, probe
aaataaaacactctggtcttgccgc

SEQ ID NO: 146938 - DNA, 25 bp, probe
acaaaagaaccgcatgactcctgca

SEQ ID NO: 146939 - DNA, 25 bp, probe
acaagcacgaacctcctacattgct

SEQ ID NO: 146940 - DNA, 25 bp, probe
acaacacgccaccgggagagatgct

SEQ ID NO: 146941 - DNA, 25 bp, probe
acaacacgccaccgggagagatgct

SEQ ID NO: 146942 - DNA, 25 bp, probe
acaacacgccaccgggagagatgct

SEQ ID NO: 146943 - DNA, 25 bp, probe
acaaccgccaaaagatggagatgct

SEQ ID NO: 146944 - DNA, 25 bp, probe
acaaccgccaaaagatggagatgct

SEQ ID NO: 146945 - DNA, 25 bp, probe
aaatcaccgaaaacgtggctgcttc

SEQ ID NO: 146946 - DNA, 25 bp, probe
aaatcaccgaaaacggcgtgcatgg

SEQ ID NO: 146947 - DNA, 25 bp, probe
aaataccttagttgctggcctatcc

SEQ ID NO: 146948 - DNA, 25 bp, probe
aaatcagctgttgtaatcgcctagc

SEQ ID NO: 146949 - DNA, 25 bp, probe
acaatggggatattattcagcctaa

SEQ ID NO: 146950 - DNA, 25 bp, probe
acaatgcggccatcagcttgggcta

SEQ ID NO: 146951 - DNA, 25 bp, probe
acaatatgcctgttatctgtggcgt

SEQ ID NO: 146952 - DNA, 25 bp, probe
acaatcgctctctagacatgtggtc

SEQ ID NO: 146953 - DNA, 25 bp, probe
acaaccaaccagtcatgttgcttga

SEQ ID NO: 146954 - DNA, 25 bp, probe
acaagggcatctttgcgttgcttca

SEQ ID NO: 146955 - DNA, 25 bp, probe
acaagtcctgctttgctgatcttgg

SEQ ID NO: 146956 - DNA, 25 bp, probe
acaagatccatttgcctttctggga

SEQ ID NO: 146957 - DNA, 25 bp, probe
acaaggagctcttgttcttcagggg

SEQ ID NO: 146958 - DNA, 25 bp, probe
acaatggttctagttgcttcatgga

SEQ ID NO: 146959 - DNA, 25 bp, probe
acaatggactcaaccctgtatggcc

SEQ ID NO: 146960 - DNA, 25 bp, probe
acaagggcacattgcccatggctgg

SEQ ID NO: 146961 - DNA, 25 bp, probe
acaagtggcacttcaatgagacggt

SEQ ID NO: 146962 - DNA, 25 bp, probe
acaagtggcacttcaatgagacggt

SEQ ID NO: 146963 - DNA, 25 bp, probe
acaagtgcacacaaaagcatcattg

SEQ ID NO: 146964 - DNA, 25 bp, probe
acaagctgacacatacagacctcaa

SEQ ID NO: 146965 - DNA, 25 bp, probe
acaagtcacaaaagcaacactcgat

SEQ ID NO: 146966 - DNA, 25 bp, probe
acaacttcaataataccatcactga

SEQ ID NO: 146967 - DNA, 25 bp, probe
aaacttcaattcacaatcaccttgg

SEQ ID NO: 146968 - DNA, 25 bp, probe
acaatttatgttctgcaatatcctg

SEQ ID NO: 146969 - DNA, 25 bp, probe
acaagtgttgttaaagattctcagg

SEQ ID NO: 146970 - DNA, 25 bp, probe
acaacttatgacatgcaacttaagg

SEQ ID NO: 146971 - DNA, 25 bp, probe
acaagttcatccagcaagtctacct

SEQ ID NO: 146972 - DNA, 25 bp, probe
acaagttcatccagcaagtctacct

SEQ ID NO: 146973 - DNA, 25 bp, probe
aaagcctacctactgatgtcatgac

SEQ ID NO: 146974 - DNA, 25 bp, probe
aaatactggcctgatgagtatgctc

SEQ ID NO: 146975 - DNA, 25 bp, probe
aaattctgatgctgagatctctatt

SEQ ID NO: 146976 - DNA, 25 bp, probe
acaagtttatggtttctatgatgaa

SEQ ID NO: 146977 - DNA, 25 bp, probe
acaactcttcaggttccacatggta

SEQ ID NO: 146978 - DNA, 25 bp, probe
acaaccattcaggctttacaagcca

SEQ ID NO: 146979 - DNA, 25 bp, probe
acaaccattcaggctttacaagcca

SEQ ID NO: 146980 - DNA, 25 bp, probe
aaatccatagaggtgttaaagcggc

SEQ ID NO: 146981 - DNA, 25 bp, probe
aaatctctactgctttggatcctgg

SEQ ID NO: 146982 - DNA, 25 bp, probe
aaattctcagtctcttgcgtttatt

SEQ ID NO: 146983 - DNA, 25 bp, probe
aaattgtgagtaagcttcggaattc

SEQ ID NO: 146984 - DNA, 25 bp, probe
aaatagaccagtattctcgaattct

SEQ ID NO: 146985 - DNA, 25 bp, probe
aaatagtcactagtattgctaattt

SEQ ID NO: 146986 - DNA, 25 bp, probe
acaacggccacattattctgaattc

SEQ ID NO: 146987 - DNA, 25 bp, probe
acaacggcaacattatgctggacaa

SEQ ID NO: 146988 - DNA, 25 bp, probe
aaatctgtagactcaggagaaacga

SEQ ID NO: 146989 - DNA, 25 bp, probe
aaatcggagacccggaaactgatca

SEQ ID NO: 146990 - DNA, 25 bp, probe
aaataggtgacaacggcaaaccatc

SEQ ID NO: 146991 - DNA, 25 bp, probe
aaattgggtcacagaggcagaaatc

SEQ ID NO: 146992 - DNA, 25 bp, probe
aaattgaggatgacgctgatgtgga

SEQ ID NO: 146993 - DNA, 25 bp, probe
aaatctgagtgagggctatgaagtg

SEQ ID NO: 146994 - DNA, 25 bp, probe
aaatgatagtgatggcaaaggcgat

SEQ ID NO: 146995 - DNA, 25 bp, probe
acaataagtataggattttgcacat

SEQ ID NO: 146996 - DNA, 25 bp, probe
acaatgaaacatgtcttattactaa

SEQ ID NO: 146997 - DNA, 25 bp, probe
acaagagaactcatcataagtactt

SEQ ID NO: 146998 - DNA, 25 bp, probe
acaatgagacctactgccggtcctt

SEQ ID NO: 146999 - DNA, 25 bp, probe
acaacatgggcttctggtggatcct

SEQ ID NO: 147000 - DNA, 25 bp, probe
acaactcgagctttgaggcttcctc

SEQ ID NO: 147001 - DNA, 25 bp, probe
acaagctcaagaccgaggtgtcctc

SEQ ID NO: 147002 - DNA, 25 bp, probe
acaagctcaagaccgaggtgtcctc

SEQ ID NO: 147003 - DNA, 25 bp, probe
acaagtcaggacaggcttcatgcct

SEQ ID NO: 147004 - DNA, 25 bp, probe
acaacatggagattggtgcttccct

SEQ ID NO: 147005 - DNA, 25 bp, probe
acaacatgcgcgtggagttcaagtc

SEQ ID NO: 147006 - DNA, 25 bp, probe
aaatatgctggatatagctttgaga

SEQ ID NO: 147007 - DNA, 25 bp, probe
aaatagcagtattatttttcgtctc

SEQ ID NO: 147008 - DNA, 25 bp, probe
aaatagattagatgttttccttggg

SEQ ID NO: 147009 - DNA, 25 bp, probe
aaatcagacttgattatttcccttg

SEQ ID NO: 147010 - DNA, 25 bp, probe
aaagacacagtgcttacttacctta

SEQ ID NO: 147011 - DNA, 25 bp, probe
aagaaccggggtattgactctgaag

SEQ ID NO: 147012 - DNA, 25 bp, probe
aaatcacctgttatccttgtttgta

SEQ ID NO: 147013 - DNA, 25 bp, probe
aaattggtttttgctcttttgcaga

SEQ ID NO: 147014 - DNA, 25 bp, probe
aaatgtaattttatccctcatgtat

SEQ ID NO: 147015 - DNA, 25 bp, probe
acaaggactctggttacccttgcct

SEQ ID NO: 147016 - DNA, 25 bp, probe
acaaggactcatctgtggtccctgc

SEQ ID NO: 147017 - DNA, 25 bp, probe
acaaggactcatctgtggtccctgc

SEQ ID NO: 147018 - DNA, 25 bp, probe
acaaggtcttgccatttgtcagact

SEQ ID NO: 147019 - DNA, 25 bp, probe
acaagtttgtgctatctatggccct

SEQ ID NO: 147020 - DNA, 25 bp, probe
acaatgccttgttgtattcctgcct

SEQ ID NO: 147021 - DNA, 25 bp, probe
acaatcctcgtctgaatcatccgag

SEQ ID NO: 147022 - DNA, 25 bp, probe
aaatcctagatctcagaatcacaat

SEQ ID NO: 147023 - DNA, 25 bp, probe
acaagcccagtaactgcaccaacga

SEQ ID NO: 147024 - DNA, 25 bp, probe
acaagcacctaattctaccaatcaa

SEQ ID NO: 147025 - DNA, 25 bp, probe
acaagctcctcaagaaaatcagcca

SEQ ID NO: 147026 - DNA, 25 bp, probe
acaagtcccgggacaacagcaggga

SEQ ID NO: 147027 - DNA, 25 bp, probe
acaagattctgcacctcaaagggga

SEQ ID NO: 147028 - DNA, 25 bp, probe
acaatattgtcatgtcccacagggt

SEQ ID NO: 147029 - DNA, 25 bp, probe
acaatttctctaaccacacaacatg

SEQ ID NO: 147030 - DNA, 25 bp, probe
aaatatcctcatcacgaaacattcc

SEQ ID NO: 147031 - DNA, 25 bp, probe
aaataacactgtactgcaataaggg

SEQ ID NO: 147032 - DNA, 25 bp, probe
aaatttgcctgttgccaaactggtg

SEQ ID NO: 147033 - DNA, 25 bp, probe
aaatttgcctgttgccaaactggtg

SEQ ID NO: 147034 - DNA, 25 bp, probe
aaattttttctgtcaatcgcaggtt

SEQ ID NO: 147035 - DNA, 25 bp, probe
acaatttttacttcactggtgtgca

SEQ ID NO: 147036 - DNA, 25 bp, probe
aaattctttccttccagaggctgaa

SEQ ID NO: 147037 - DNA, 25 bp, probe
aaatttattagaactcacaggcata

SEQ ID NO: 147038 - DNA, 25 bp, probe
acaatttcaaggtgcatacattcag

SEQ ID NO: 147039 - DNA, 25 bp, probe
acaatttgatggctctgcatcactt

SEQ ID NO: 147040 - DNA, 25 bp, probe
acaagaggatgtgtctgctactgtc

SEQ ID NO: 147041 - DNA, 25 bp, probe
acaactgagagtgatctgcagattt

SEQ ID NO: 147042 - DNA, 25 bp, probe
acaaccagtatgatctgcagaatga

SEQ ID NO: 147043 - DNA, 25 bp, probe
acaactcggagctactggctgagat

SEQ ID NO: 147044 - DNA, 25 bp, probe
acaaccggatgtcttgattgattta

SEQ ID NO: 147045 - DNA, 25 bp, probe
acaagctcgcaactctaagattttt

SEQ ID NO: 147046 - DNA, 25 bp, probe
acaagctaccatctcagatatatat

SEQ ID NO: 147047 - DNA, 25 bp, probe
acaactagaaccaagatctgatgat

SEQ ID NO: 147048 - DNA, 25 bp, probe
acaattacaaccagcatgcgtatcc

SEQ ID NO: 147049 - DNA, 25 bp, probe
aaatatccacatccatcggcggatc

SEQ ID NO: 147050 - DNA, 25 bp, probe
aaatagcagcctttctggcaggtcc

SEQ ID NO: 147051 - DNA, 25 bp, probe
acaagaagcctgttctgtccagctt

SEQ ID NO: 147052 - DNA, 25 bp, probe
acaagactcacactatcttctcact

SEQ ID NO: 147053 - DNA, 25 bp, probe
acaagactcacactatcttctcact

SEQ ID NO: 147054 - DNA, 25 bp, probe
acaagagccaagttctttatccggg

SEQ ID NO: 147055 - DNA, 25 bp, probe
acaaggcaatggtctatttgttcag

SEQ ID NO: 147056 - DNA, 25 bp, probe
acaattcagtggtcttatttttggg

SEQ ID NO: 147057 - DNA, 25 bp, probe
aaattatcatggttttctttctgca

SEQ ID NO: 147058 - DNA, 25 bp, probe
aaattgctgaggtttccttaggcag

SEQ ID NO: 147059 - DNA, 25 bp, probe
aaatgtaggtcgttccttaggctct

SEQ ID NO: 147060 - DNA, 25 bp, probe
aaatgtaggtcgttccttaggctct

SEQ ID NO: 147061 - DNA, 25 bp, probe
aaattagaggctcatactttagctt

SEQ ID NO: 147062 - DNA, 25 bp, probe
aaattagaggctcatactttagctt

SEQ ID NO: 147063 - DNA, 25 bp, probe
acaaccgcaggtcgaattgttcgtg

SEQ ID NO: 147064 - DNA, 25 bp, probe
acaaccgcaggtcgaattgttcgtg

SEQ ID NO: 147065 - DNA, 25 bp, probe
acaatcctagtcagctttgaacgct

SEQ ID NO: 147066 - DNA, 25 bp, probe
acaacctatgtcactgactcagatg

SEQ ID NO: 147067 - DNA, 25 bp, probe
acaaccttgatgataaccagtggaa

SEQ ID NO: 147068 - DNA, 25 bp, probe
acaaccttgatgataaccagtggaa

SEQ ID NO: 147069 - DNA, 25 bp, probe
aaattcttgtgtgaacgcaatgaca

SEQ ID NO: 147070 - DNA, 25 bp, probe
aaattcttgtgcgcacacttgatga

SEQ ID NO: 147071 - DNA, 25 bp, probe
aaattcttgtgcgcacacttgatga

SEQ ID NO: 147072 - DNA, 25 bp, probe
acaatagctattcccaccatgtgat

SEQ ID NO: 147073 - DNA, 25 bp, probe
acaatgactattccctgacagttat

SEQ ID NO: 147074 - DNA, 25 bp, probe
acaatcactgtttccaaagttatgg

SEQ ID NO: 147075 - DNA, 25 bp, probe
aaatgcaccttagcagaaggtcgat

SEQ ID NO: 147076 - DNA, 25 bp, probe
aaataagctttaggagatagaggta

SEQ ID NO: 147077 - DNA, 25 bp, probe
aaataagctttaggagatagaggta

SEQ ID NO: 147078 - DNA, 25 bp, probe
acaataagggtactatatgtgggta

SEQ ID NO: 147079 - DNA, 25 bp, probe
acaattcggcgaagtctggatgggt

SEQ ID NO: 147080 - DNA, 25 bp, probe
aaatatcgggacacactgatacttc

SEQ ID NO: 147081 - DNA, 25 bp, probe
aaattcggagcactcgcctgaagtt

SEQ ID NO: 147082 - DNA, 25 bp, probe
aaattcgaagctcaggccatagttt

SEQ ID NO: 147083 - DNA, 25 bp, probe
acaatcatcactgctgtgagcgcct

SEQ ID NO: 147084 - DNA, 25 bp, probe
acaatccagctcatggtggccatgg

SEQ ID NO: 147085 - DNA, 25 bp, probe
aaattcactattggctgggagtggt

SEQ ID NO: 147086 - DNA, 25 bp, probe
aaattctccattatgttcgtggtgt

SEQ ID NO: 147087 - DNA, 25 bp, probe
aaataccaattcacaaggtcagttg

SEQ ID NO: 147088 - DNA, 25 bp, probe
aacgagacaattgaaaagtcaagta

SEQ ID NO: 147089 - DNA, 25 bp, probe
aaacgagacaattgaaaagtcaagt

SEQ ID NO: 147090 - DNA, 25 bp, probe
aaatggtaactttacaactggcagt

SEQ ID NO: 147091 - DNA, 25 bp, probe
aaatggtaactttacaactggcagt

SEQ ID NO: 147092 - DNA, 25 bp, probe
aaatcagtacaatcacacaaggagg

SEQ ID NO: 147093 - DNA, 25 bp, probe
aaatcgtaaagcgagctgacgctgg

SEQ ID NO: 147094 - DNA, 25 bp, probe
aaatcagtcaacaagatgctgtttg

SEQ ID NO: 147095 - DNA, 25 bp, probe
aaatcagtcaacaagatgctgtttg

SEQ ID NO: 147096 - DNA, 25 bp, probe
aaatactcccactatgcctgatgtg

SEQ ID NO: 147097 - DNA, 25 bp, probe
aaatcccctcagcagagtgtgttta

SEQ ID NO: 147098 - DNA, 25 bp, probe
aaatacttacgcaaatgtggcttaa

SEQ ID NO: 147099 - DNA, 25 bp, probe
aaatacttacgcaaatgtggcttaa

SEQ ID NO: 147100 - DNA, 25 bp, probe
aaagattggactccctggtggttga

SEQ ID NO: 147101 - DNA, 25 bp, probe
aaattgtgtactcccttgtacttgt

SEQ ID NO: 147102 - DNA, 25 bp, probe
aaagatgtggacccactttctcctt

SEQ ID NO: 147103 - DNA, 25 bp, probe
acaagcagtggacctgacattgccc

SEQ ID NO: 147104 - DNA, 25 bp, probe
acaagctgaggctgtacattgagca

SEQ ID NO: 147105 - DNA, 25 bp, probe
acaatgtgaggggtcctagcagcca

SEQ ID NO: 147106 - DNA, 25 bp, probe
acaatgagggggccacggccctgca

SEQ ID NO: 147107 - DNA, 25 bp, probe
acaatgagggggccacggccctgca

SEQ ID NO: 147108 - DNA, 25 bp, probe
acaagggtggtgtcatcggggtcat

SEQ ID NO: 147109 - DNA, 25 bp, probe
acaaggaggatgaaacgccggaaca

SEQ ID NO: 147110 - DNA, 25 bp, probe
acaaggaggagttacgtagagaggg

SEQ ID NO: 147111 - DNA, 25 bp, probe
acaaggagggtcacctggtgtgccg

SEQ ID NO: 147112 - DNA, 25 bp, probe
acaagggtgtgtacgtgcgggtggg

SEQ ID NO: 147113 - DNA, 25 bp, probe
acaagagggacaaggtatggggtgg

SEQ ID NO: 147114 - DNA, 25 bp, probe
acaaggggcagtgggctcttgggtg

SEQ ID NO: 147115 - DNA, 25 bp, probe
acaagggtatcctgtgctatgctgg

SEQ ID NO: 147116 - DNA, 25 bp, probe
acaagaggctggccaagtccacgct

SEQ ID NO: 147117 - DNA, 25 bp, probe
acaagagccttacaggaacagctag

SEQ ID NO: 147118 - DNA, 25 bp, probe
acaagggttgtgtgaagacagcgga

SEQ ID NO: 147119 - DNA, 25 bp, probe
acaacgaatttggctacagcaacag

SEQ ID NO: 147120 - DNA, 25 bp, probe
acaacgaatttggctacagcaacag

SEQ ID NO: 147121 - DNA, 25 bp, probe
caccacgatatcatgttactaaagt

SEQ ID NO: 147122 - DNA, 25 bp, probe
caccacgatatcatgttactaaagt

SEQ ID NO: 147123 - DNA, 25 bp, probe
acaatctatcatgagtattattaac

SEQ ID NO: 147124 - DNA, 25 bp, probe
aaatcatattgccgttctttaaaag

SEQ ID NO: 147125 - DNA, 25 bp, probe
acaattcactgtcttttggagcaag

SEQ ID NO: 147126 - DNA, 25 bp, probe
acaattctcttcagttagtgtaaac

SEQ ID NO: 147127 - DNA, 25 bp, probe
aaattcattatttctatatgtggaa

SEQ ID NO: 147128 - DNA, 25 bp, probe
aaattctccttactgggatagtcag

SEQ ID NO: 147129 - DNA, 25 bp, probe
aaattagcctttctgtgaaccagat

SEQ ID NO: 147130 - DNA, 25 bp, probe
aaatctcgtttctcttggacaagca

SEQ ID NO: 147131 - DNA, 25 bp, probe
aaatcaagccattcattttggggaa

SEQ ID NO: 147132 - DNA, 25 bp, probe
acaatcacagcctcacagatgtgtg

SEQ ID NO: 147133 - DNA, 25 bp, probe
acaagcagatccggctgcaggtgga

SEQ ID NO: 147134 - DNA, 25 bp, probe
acaagagacgctggcgcaagatccc

SEQ ID NO: 147135 - DNA, 25 bp, probe
acaagtggttcgccacaaccagctg

SEQ ID NO: 147136 - DNA, 25 bp, probe
acaagtggcgttcagccacccgaga

SEQ ID NO: 147137 - DNA, 25 bp, probe
aaactgcaagttccgacgccggaga

SEQ ID NO: 147138 - DNA, 25 bp, probe
aaactgaggttcaggagaccggcct

SEQ ID NO: 147139 - DNA, 25 bp, probe
aaagcagctggtccgaggagaaccc

SEQ ID NO: 147140 - DNA, 25 bp, probe
aaagcagctggtccgaggagaaccc

SEQ ID NO: 147141 - DNA, 25 bp, probe
acaatcagggtgtggtagaacactt

SEQ ID NO: 147142 - DNA, 25 bp, probe
aaatcaggtgaaaggctacaagctc

SEQ ID NO: 147143 - DNA, 25 bp, probe
aaatcagggccgctgctacaatggc

SEQ ID NO: 147144 - DNA, 25 bp, probe
aaatagagccaccatatcaacactt

SEQ ID NO: 147145 - DNA, 25 bp, probe
aaatgaagccttcacaacagttgaa

SEQ ID NO: 147146 - DNA, 25 bp, probe
aaataagctctccccaaacttgctt

SEQ ID NO: 147147 - DNA, 25 bp, probe
aaatgatatccaacccaaccaactt

SEQ ID NO: 147148 - DNA, 25 bp, probe
acaagtagccacagtaacccaatct

SEQ ID NO: 147149 - DNA, 25 bp, probe
acaagaaccatcaagttccaaccat

SEQ ID NO: 147150 - DNA, 25 bp, probe
acaaggcacacaataggttaatcga

SEQ ID NO: 147151 - DNA, 25 bp, probe
acaatggaaaggctgttatatggaa

SEQ ID NO: 147152 - DNA, 25 bp, probe
aaatgacaaagccattcttttaaat

SEQ ID NO: 147153 - DNA, 25 bp, probe
aaatgacaaagccattcttttaaat

SEQ ID NO: 147154 - DNA, 25 bp, probe
aaatcttaagtgagcagtttaatat

SEQ ID NO: 147155 - DNA, 25 bp, probe
aaattgtaaatcctgtgtttcatta

SEQ ID NO: 147156 - DNA, 25 bp, probe
acaatcccaaatgcactgtcttcat

SEQ ID NO: 147157 - DNA, 25 bp, probe
acaatcccagtggctcaatgtcttt

SEQ ID NO: 147158 - DNA, 25 bp, probe
acaatcccagtggctcaatgtcttt

SEQ ID NO: 147159 - DNA, 25 bp, probe
acaattctcgtggctactttcactt

SEQ ID NO: 147160 - DNA, 25 bp, probe
acaattgcctgggctccttgaagct

SEQ ID NO: 147161 - DNA, 25 bp, probe
acaattgcctgggctccttgaagct

SEQ ID NO: 147162 - DNA, 25 bp, probe
aaattgcactagactgcttgtaact

SEQ ID NO: 147163 - DNA, 25 bp, probe
aaattgccaggttgtctgatatttc

SEQ ID NO: 147164 - DNA, 25 bp, probe
aaattcctggggctgatacttctct

SEQ ID NO: 147165 - DNA, 25 bp, probe
aaattctgtgggtccgataatatct

SEQ ID NO: 147166 - DNA, 25 bp, probe
acaatattggggacaccaactgtct

SEQ ID NO: 147167 - DNA, 25 bp, probe
acaatatgggtattacctttgtctc

SEQ ID NO: 147168 - DNA, 25 bp, probe
aaatttcaattatccattcttataa

SEQ ID NO: 147169 - DNA, 25 bp, probe
aaattgctactttttcactttggat

SEQ ID NO: 147170 - DNA, 25 bp, probe
aaatattatctgaactggactagtg

SEQ ID NO: 147171 - DNA, 25 bp, probe
gaaaattactggtgtgacttttaat

SEQ ID NO: 147172 - DNA, 25 bp, probe
aaatttacgtgacattcttttgcaa

SEQ ID NO: 147173 - DNA, 25 bp, probe
aaatcctacaggggattgtgttttg

SEQ ID NO: 147174 - DNA, 25 bp, probe
acaatcttacccgcaggttttcaga

SEQ ID NO: 147175 - DNA, 25 bp, probe
aaattctacctcttcatggtttaca

SEQ ID NO: 147176 - DNA, 25 bp, probe
aaattctacctcttcatggtttaca

SEQ ID NO: 147177 - DNA, 25 bp, probe
acaattaaccattttatatttgcca

SEQ ID NO: 147178 - DNA, 25 bp, probe
aaataacccagacttaatcttgaat

SEQ ID NO: 147179 - DNA, 25 bp, probe
aaaacctgcaaaccgaattctgaca

SEQ ID NO: 147180 - DNA, 25 bp, probe
aaaagcccacgtccagaaggtgaca

SEQ ID NO: 147181 - DNA, 25 bp, probe
acaaggccaagcgccagtgaggact

SEQ ID NO: 147182 - DNA, 25 bp, probe
acaagcccaatggcatgaaacggtc

SEQ ID NO: 147183 - DNA, 25 bp, probe
aaatcagccatttcatgcaaccaga

SEQ ID NO: 147184 - DNA, 25 bp, probe
aaatagccagcgtacacaatgagat

SEQ ID NO: 147185 - DNA, 25 bp, probe
aaatcgctgcagcgacacaagtgac

SEQ ID NO: 147186 - DNA, 25 bp, probe
aaatacatgctgccagcacactcca

SEQ ID NO: 147187 - DNA, 25 bp, probe
acaatgctagcctatgatgcctcca

SEQ ID NO: 147188 - DNA, 25 bp, probe
acaattagagcttgatgcctcccgg

SEQ ID NO: 147189 - DNA, 25 bp, probe
acaataagctcttgtgacctcctgg

SEQ ID NO: 147190 - DNA, 25 bp, probe
acaataagctcttgtgacctcctgg

SEQ ID NO: 147191 - DNA, 25 bp, probe
acaagtgtgccatttgaccatctcg

SEQ ID NO: 147192 - DNA, 25 bp, probe
acaagttgccatctaccttgggatc

SEQ ID NO: 147193 - DNA, 25 bp, probe
cactagttcaatggatcccggggac

SEQ ID NO: 147194 - DNA, 25 bp, probe
acaaggtgcaaggttgctcagggga

SEQ ID NO: 147195 - DNA, 25 bp, probe
acaaggcataggctgttgcaggaca

SEQ ID NO: 147196 - DNA, 25 bp, probe
acaaggatatggaagttctgtccca

SEQ ID NO: 147197 - DNA, 25 bp, probe
acaaggtgatagaagtcgggccctg

SEQ ID NO: 147198 - DNA, 25 bp, probe
acaagtgtagaaagtgcaggcgatc

SEQ ID NO: 147199 - DNA, 25 bp, probe
acaagtgtagaaagtgcaggcgatc

SEQ ID NO: 147200 - DNA, 25 bp, probe
acaagtgttgaatatgggcatggga

SEQ ID NO: 147201 - DNA, 25 bp, probe
aagggaagaaacaggatggctttct

SEQ ID NO: 147202 - DNA, 25 bp, probe
aagtgagaaaaaactagggctgact

SEQ ID NO: 147203 - DNA, 25 bp, probe
acaagcagaaacactcctgtggatg

SEQ ID NO: 147204 - DNA, 25 bp, probe
acaagcaataactctctacaggaat

SEQ ID NO: 147205 - DNA, 25 bp, probe
acaagcaataactctctacaggaat

SEQ ID NO: 147206 - DNA, 25 bp, probe
acaagaagacccatctacggaggag

SEQ ID NO: 147207 - DNA, 25 bp, probe
aaatgaagtgccttttcccgaggct

SEQ ID NO: 147208 - DNA, 25 bp, probe
aaattggagctcttttccacatggc

SEQ ID NO: 147209 - DNA, 25 bp, probe
aagatgtgaacatggtttacccttt

SEQ ID NO: 147210 - DNA, 25 bp, probe
aaatatgatgaccccatggtacccg

SEQ ID NO: 147211 - DNA, 25 bp, probe
aaattggaagccgagatggaccgca

SEQ ID NO: 147212 - DNA, 25 bp, probe
aaattcttcagggagtgtcacctca

SEQ ID NO: 147213 - DNA, 25 bp, probe
aaatttctaggtgtgccactgctca

SEQ ID NO: 147214 - DNA, 25 bp, probe
aaatttctgcatggtctaaatcttt

SEQ ID NO: 147215 - DNA, 25 bp, probe
aaatttgctaagtctgctaatcttc

SEQ ID NO: 147216 - DNA, 25 bp, probe
aaatttgtagcaactctgaagtatc

SEQ ID NO: 147217 - DNA, 25 bp, probe
aaatttgtagcatcaactagaataa

SEQ ID NO: 147218 - DNA, 25 bp, probe
aaatatattacagtcaccccataaa

SEQ ID NO: 147219 - DNA, 25 bp, probe
aaatagagtcaggctcctccagaaa

SEQ ID NO: 147220 - DNA, 25 bp, probe
aaatggaccggcatgccaagatcaa

SEQ ID NO: 147221 - DNA, 25 bp, probe
aaagtacaagtcacaaaagcaacac

SEQ ID NO: 147222 - DNA, 25 bp, probe
aaatatccaaaagaatgcaaaacca

SEQ ID NO: 147223 - DNA, 25 bp, probe
aaagctcaaaaacaatgcccagacc

SEQ ID NO: 147224 - DNA, 25 bp, probe
aaagctcaaaaacaatgcccagacc

SEQ ID NO: 147225 - DNA, 25 bp, probe
aaataagagtgagccaagccgcaga

SEQ ID NO: 147226 - DNA, 25 bp, probe
acaataatgagttcactacagacga

SEQ ID NO: 147227 - DNA, 25 bp, probe
acaataatgagttcactacagacga

SEQ ID NO: 147228 - DNA, 25 bp, probe
cactatgcgggtagactacgaccag

SEQ ID NO: 147229 - DNA, 25 bp, probe
acaatgcgcgttgactacgagcaga

SEQ ID NO: 147230 - DNA, 25 bp, probe
acaagggcttcatatacaatcagga

SEQ ID NO: 147231 - DNA, 25 bp, probe
acaaggggaaatcagcaaagttatc

SEQ ID NO: 147232 - DNA, 25 bp, probe
acaatgggggacctatgcagaagct

SEQ ID NO: 147233 - DNA, 25 bp, probe
aaagggcattggcaataaactcttt

SEQ ID NO: 147234 - DNA, 25 bp, probe
aaagggcactggcactggaaccctc

SEQ ID NO: 147235 - DNA, 25 bp, probe
acaagagtactgcagacatcatgaa

SEQ ID NO: 147236 - DNA, 25 bp, probe
acaatgacaaatggaggcagcatta

SEQ ID NO: 147237 - DNA, 25 bp, probe
acaagacaagatccacctgatcaat

SEQ ID NO: 147238 - DNA, 25 bp, probe
acaagacaaagcaaagccacatttt

SEQ ID NO: 147239 - DNA, 25 bp, probe
acaagacaaagcaaagccacatttt

SEQ ID NO: 147240 - DNA, 25 bp, probe
acaagaggacacaatggcacctctg

SEQ ID NO: 147241 - DNA, 25 bp, probe
aaatgcgccctcatggagcagtgta

SEQ ID NO: 147242 - DNA, 25 bp, probe
acaatggaagtcagtagcagtgttg

SEQ ID NO: 147243 - DNA, 25 bp, probe
acaatggaagtcagtagcagtgttg

SEQ ID NO: 147244 - DNA, 25 bp, probe
acaaggacattcaaagtgccctgtg

SEQ ID NO: 147245 - DNA, 25 bp, probe
acaaggacattcaaagtgccctgtg

SEQ ID NO: 147246 - DNA, 25 bp, probe
acaaggatcttccgagtgcttgggg

SEQ ID NO: 147247 - DNA, 25 bp, probe
acaagttctctgcagagtttgttga

SEQ ID NO: 147248 - DNA, 25 bp, probe
aaattttgatgctggttggtgtgaa

SEQ ID NO: 147249 - DNA, 25 bp, probe
aacttatttgtatgttggtagctga

SEQ ID NO: 147250 - DNA, 25 bp, probe
aaatatttcttgtgtagcgttctta

SEQ ID NO: 147251 - DNA, 25 bp, probe
aaatatatctctgcctttggtttta

SEQ ID NO: 147252 - DNA, 25 bp, probe
aaatatatctggaactttttagatt

SEQ ID NO: 147253 - DNA, 25 bp, probe
aaatatactggaagcttgataataa

SEQ ID NO: 147254 - DNA, 25 bp, probe
aaataacagctccagttatataact

SEQ ID NO: 147255 - DNA, 25 bp, probe
aaataccagctccagcactacagga

SEQ ID NO: 147256 - DNA, 25 bp, probe
aaatcatttctgcatcagctgctga

SEQ ID NO: 147257 - DNA, 25 bp, probe
aaatcattatcgttgcagccattat

SEQ ID NO: 147258 - DNA, 25 bp, probe
aaatcaacatcgtctaccaggagct

SEQ ID NO: 147259 - DNA, 25 bp, probe
aaatacgacagtacacacagtgact

SEQ ID NO: 147260 - DNA, 25 bp, probe
aaatacgacagtacacacagtgact

SEQ ID NO: 147261 - DNA, 25 bp, probe
aaatattgccatctccactatgcac

SEQ ID NO: 147262 - DNA, 25 bp, probe
acaaggtggcatctgaagcattagc

SEQ ID NO: 147263 - DNA, 25 bp, probe
acaaggtgctgaagatagagctgga

SEQ ID NO: 147264 - DNA, 25 bp, probe
acaagggcatgaggtcagaccagga

SEQ ID NO: 147265 - DNA, 25 bp, probe
acaatgaggcatgggctaaggattt

SEQ ID NO: 147266 - DNA, 25 bp, probe
aaataatgcactgtaaagattactg

SEQ ID NO: 147267 - DNA, 25 bp, probe
aaataatgcactgtaaagattactg

SEQ ID NO: 147268 - DNA, 25 bp, probe
aaatactactaatataactactgtt

SEQ ID NO: 147269 - DNA, 25 bp, probe
aaatttaccacataaacatcacttt

SEQ ID NO: 147270 - DNA, 25 bp, probe
aaatttatcctgtgaaactggcttt

SEQ ID NO: 147271 - DNA, 25 bp, probe
aaatttatcctgtgaaactggcttt

SEQ ID NO: 147272 - DNA, 25 bp, probe
aacattttactctcaaaggtctcct

SEQ ID NO: 147273 - DNA, 25 bp, probe
aaatttataccattctcaagagtta

SEQ ID NO: 147274 - DNA, 25 bp, probe
aaatttataagctagcattaagtaa

SEQ ID NO: 147275 - DNA, 25 bp, probe
aaatttccaccattatttactcaga

SEQ ID NO: 147276 - DNA, 25 bp, probe
aaattatccaactgttatactacca

SEQ ID NO: 147277 - DNA, 25 bp, probe
aaaatcactccctggctaattaaga

SEQ ID NO: 147278 - DNA, 25 bp, probe
acaagtaccgcctgggacggaagat

SEQ ID NO: 147279 - DNA, 25 bp, probe
aaaatacctccctgggaggatgagc

SEQ ID NO: 147280 - DNA, 25 bp, probe
aaaatacatctcgcctggtacagga

SEQ ID NO: 147281 - DNA, 25 bp, probe
aaaatacatctcgcctggtacagga

SEQ ID NO: 147282 - DNA, 25 bp, probe
aaatgaaatccacccggtatctcca

SEQ ID NO: 147283 - DNA, 25 bp, probe
aaatgaaattcacacaactatacct

SEQ ID NO: 147284 - DNA, 25 bp, probe
aaataacttgggccatcctatcatc

SEQ ID NO: 147285 - DNA, 25 bp, probe
aaataactggaacccagcctctcct

SEQ ID NO: 147286 - DNA, 25 bp, probe
aaatacttggattctatccctcctg

SEQ ID NO: 147287 - DNA, 25 bp, probe
aaatacttggattctatccctcctg

SEQ ID NO: 147288 - DNA, 25 bp, probe
aaatacttggattctatccctcctg

SEQ ID NO: 147289 - DNA, 25 bp, probe
aaatactgtaattccaacctacatt

SEQ ID NO: 147290 - DNA, 25 bp, probe
aaatactcataagccacctctgtaa

SEQ ID NO: 147291 - DNA, 25 bp, probe
acaattacaaacagcctctttcaca

SEQ ID NO: 147292 - DNA, 25 bp, probe
acaatcaaaaacaaacgatattctt

SEQ ID NO: 147293 - DNA, 25 bp, probe
aaatccaaaactctatgatgatgtc

SEQ ID NO: 147294 - DNA, 25 bp, probe
aaatccaaatttctctcaatgttag

SEQ ID NO: 147295 - DNA, 25 bp, probe
aaatccaaatttctctcaatgttag

SEQ ID NO: 147296 - DNA, 25 bp, probe
aaatcgcttttctggctgactatta

SEQ ID NO: 147297 - DNA, 25 bp, probe
aaatcttccttgtgaggattatggg

SEQ ID NO: 147298 - DNA, 25 bp, probe
aaatcttccttgtgaggattatggg

SEQ ID NO: 147299 - DNA, 25 bp, probe
aaatggaccctgtggggtatagccg

SEQ ID NO: 147300 - DNA, 25 bp, probe
acaagggccctgggatggagccaac

SEQ ID NO: 147301 - DNA, 25 bp, probe
aaagggggtggcttggtcacaacag

SEQ ID NO: 147302 - DNA, 25 bp, probe
aaatggggtatgcagggtctggaag

SEQ ID NO: 147303 - DNA, 25 bp, probe
acaatgctgtgctttccagtggtct

SEQ ID NO: 147304 - DNA, 25 bp, probe
acaatcaggctctcacagttgtttc

SEQ ID NO: 147305 - DNA, 25 bp, probe
acaatgagtgtctctgctggtgctt

SEQ ID NO: 147306 - DNA, 25 bp, probe
acaatgagtgtctctgctggtgctt

SEQ ID NO: 147307 - DNA, 25 bp, probe
aaatgccttgaaatgctgctgtcct

SEQ ID NO: 147308 - DNA, 25 bp, probe
acaaggctcaaaattctcatcatct

SEQ ID NO: 147309 - DNA, 25 bp, probe
acaaggtgacaacttcttatctttc

SEQ ID NO: 147310 - DNA, 25 bp, probe
acaatgggataactgctatccttta

SEQ ID NO: 147311 - DNA, 25 bp, probe
aaatcatggatcaagagatactctt

SEQ ID NO: 147312 - DNA, 25 bp, probe
aaatcatcagtgggcagaactttcc

SEQ ID NO: 147313 - DNA, 25 bp, probe
aaatcacagtgcacaatattcttaa

SEQ ID NO: 147314 - DNA, 25 bp, probe
aaatcaactgatgagccttctgaga

SEQ ID NO: 147315 - DNA, 25 bp, probe
acaatgaagatgactacctgtctga

SEQ ID NO: 147316 - DNA, 25 bp, probe
acaaggatatgatgtccgctctgat

SEQ ID NO: 147317 - DNA, 25 bp, probe
acaaggatctgatgacgcaaaatgg

SEQ ID NO: 147318 - DNA, 25 bp, probe
acaaggctcgtctcaaagatatcag

SEQ ID NO: 147319 - DNA, 25 bp, probe
aaaggatcgccatccggatcacggc

SEQ ID NO: 147320 - DNA, 25 bp, probe
aaaggacgccactggcgaggctgcc

SEQ ID NO: 147321 - DNA, 25 bp, probe
acaatggacagtagcaacaggaggt

SEQ ID NO: 147322 - DNA, 25 bp, probe
acaatggacagtagcaacaggaggt

SEQ ID NO: 147323 - DNA, 25 bp, probe
acaaggctctgaaacccgaggatgc

SEQ ID NO: 147324 - DNA, 25 bp, probe
acaatggctataaactgaattaggc

SEQ ID NO: 147325 - DNA, 25 bp, probe
acaatgagccttactgtatttagtg

SEQ ID NO: 147326 - DNA, 25 bp, probe
acaatgtgcacatcctgtatgtgtg

SEQ ID NO: 147327 - DNA, 25 bp, probe
acaaggcagccgccctaatgtgtgg

SEQ ID NO: 147328 - DNA, 25 bp, probe
acaaggcagccgccctaatgtgtgg

SEQ ID NO: 147329 - DNA, 25 bp, probe
aaaggccacgtctgacttgggaggc

SEQ ID NO: 147330 - DNA, 25 bp, probe
aaaggccacgtctgacttgggaggc

SEQ ID NO: 147331 - DNA, 25 bp, probe
aaaggccggacacagtgggggtgct

SEQ ID NO: 147332 - DNA, 25 bp, probe
acaaggccctgaaggtgcggggtct

SEQ ID NO: 147333 - DNA, 25 bp, probe
aaaggaggctgaaagtgactggaat

SEQ ID NO: 147334 - DNA, 25 bp, probe
aaaggaggctgaaagtgactggaat

SEQ ID NO: 147335 - DNA, 25 bp, probe
acaaggcagggcagtgctcacgcct

SEQ ID NO: 147336 - DNA, 25 bp, probe
aaatccgacgactgtcaatgccttc

SEQ ID NO: 147337 - DNA, 25 bp, probe
aaattgcgtcaatagctcagtcctg

SEQ ID NO: 147338 - DNA, 25 bp, probe
aaattgcgtcaatagctcagtcctg

SEQ ID NO: 147339 - DNA, 25 bp, probe
aaattcctgcttaatgtcagtctac

SEQ ID NO: 147340 - DNA, 25 bp, probe
aaattgggctctaggtctctgtccc

SEQ ID NO: 147341 - DNA, 25 bp, probe
aaattgagatccaggctcatctaca

SEQ ID NO: 147342 - DNA, 25 bp, probe
aaattgcaagccacacttctagaga

SEQ ID NO: 147343 - DNA, 25 bp, probe
aaatgaaaccaccagtgttatcaac

SEQ ID NO: 147344 - DNA, 25 bp, probe
aaatataacgtcgaggtcaagcaca

SEQ ID NO: 147345 - DNA, 25 bp, probe
aaatataactgtagctttaagacta

SEQ ID NO: 147346 - DNA, 25 bp, probe
aaatcagaactgcgtattacaatcc

SEQ ID NO: 147347 - DNA, 25 bp, probe
aaatcaaacagttggattcagaacc

SEQ ID NO: 147348 - DNA, 25 bp, probe
aaatcaaacagttggattcagaacc

SEQ ID NO: 147349 - DNA, 25 bp, probe
aaataaccctgaagactccacatac

SEQ ID NO: 147350 - DNA, 25 bp, probe
aaatcaacctgcctgaactggccat

SEQ ID NO: 147351 - DNA, 25 bp, probe
aaatccaccagccatgacctggtct

SEQ ID NO: 147352 - DNA, 25 bp, probe
acaatgccctctccagagacttgtt

SEQ ID NO: 147353 - DNA, 25 bp, probe
acaatgccctctccagagacttgtt

SEQ ID NO: 147354 - DNA, 25 bp, probe
aaatcgcatggcgctcagacatttt

SEQ ID NO: 147355 - DNA, 25 bp, probe
aaatcctgcgagcaagaatttcata

SEQ ID NO: 147356 - DNA, 25 bp, probe
aaataatggaagtatggctcttata

SEQ ID NO: 147357 - DNA, 25 bp, probe
aaattgtgaaagtctggttcttaat

SEQ ID NO: 147358 - DNA, 25 bp, probe
aaatcgtgaatctcagttatcttaa

SEQ ID NO: 147359 - DNA, 25 bp, probe
aaatttgactcatgttctatcttaa

SEQ ID NO: 147360 - DNA, 25 bp, probe
aaatttattgcttgatacttttgac

SEQ ID NO: 147361 - DNA, 25 bp, probe
acaatactttgtaatttatgatagt

SEQ ID NO: 147362 - DNA, 25 bp, probe
acaatatctcactttcattatacta

SEQ ID NO: 147363 - DNA, 25 bp, probe
acaatgatcattttgaccttactaa

SEQ ID NO: 147364 - DNA, 25 bp, probe
aatgaatttttatcttatgtaaatt

SEQ ID NO: 147365 - DNA, 25 bp, probe
aatgttttgtttcttcttacaaatg

SEQ ID NO: 147366 - DNA, 25 bp, probe
aaatttctatttctgtttcaacatt

SEQ ID NO: 147367 - DNA, 25 bp, probe
aaatattccattgctctgtagttca

SEQ ID NO: 147368 - DNA, 25 bp, probe
acaattgcctgaatcctctgtttta

SEQ ID NO: 147369 - DNA, 25 bp, probe
aaataccgaatgggtcttattcaga

SEQ ID NO: 147370 - DNA, 25 bp, probe
aaattcgccatagaccttattcagg

SEQ ID NO: 147371 - DNA, 25 bp, probe
aaatatggtcgttactattttcagt

SEQ ID NO: 147372 - DNA, 25 bp, probe
aaattggtgagttcagtagctttgg

SEQ ID NO: 147373 - DNA, 25 bp, probe
aaatgctgctgtcagacgattgttc

SEQ ID NO: 147374 - DNA, 25 bp, probe
aaattgctatgttactattttctac

SEQ ID NO: 147375 - DNA, 25 bp, probe
aaatttatcattggctatctcttcc

SEQ ID NO: 147376 - DNA, 25 bp, probe
aaatttcatgcaatggtccatctat

SEQ ID NO: 147377 - DNA, 25 bp, probe
aaatttcatgcaatggtccatctat

SEQ ID NO: 147378 - DNA, 25 bp, probe
aaataatcgataagtctcagctgga

SEQ ID NO: 147379 - DNA, 25 bp, probe
aaatgattccaaagtaacatgtaat

SEQ ID NO: 147380 - DNA, 25 bp, probe
aaatatattcagagtaacacaggat

SEQ ID NO: 147381 - DNA, 25 bp, probe
aacttagtagaactgaaccaggagc

SEQ ID NO: 147382 - DNA, 25 bp, probe
aactgctgaccacgccgaatccgga

SEQ ID NO: 147383 - DNA, 25 bp, probe
aactgtttagagccaggtccaggaa

SEQ ID NO: 147384 - DNA, 25 bp, probe
aaatgtttccaggcatgaccctgga

SEQ ID NO: 147385 - DNA, 25 bp, probe
aaatcatcttcaccctgacacgggt

SEQ ID NO: 147386 - DNA, 25 bp, probe
aaatcaccgagggcgacctgtggat

SEQ ID NO: 147387 - DNA, 25 bp, probe
aaatcaccctaggccacttggaggg

SEQ ID NO: 147388 - DNA, 25 bp, probe
aaatcctctctacttgactcagggg

SEQ ID NO: 147389 - DNA, 25 bp, probe
aaatcctgtatatgtatctacatgg

SEQ ID NO: 147390 - DNA, 25 bp, probe
aaatactgtacatagatgtatcatt

SEQ ID NO: 147391 - DNA, 25 bp, probe
acaatactcttgtgttacatcatct

SEQ ID NO: 147392 - DNA, 25 bp, probe
acaatactcttgtgttacatcatct

SEQ ID NO: 147393 - DNA, 25 bp, probe
aaataccatcaggcctaatctcata

SEQ ID NO: 147394 - DNA, 25 bp, probe
aaatacttctggtctgatacctaag

SEQ ID NO: 147395 - DNA, 25 bp, probe
aaattattctgctaatatacctaga

SEQ ID NO: 147396 - DNA, 25 bp, probe
aaattattctgctaatatacctaga

SEQ ID NO: 147397 - DNA, 25 bp, probe
aaatctgttagcgtttgactctaga

SEQ ID NO: 147398 - DNA, 25 bp, probe
aaatctgttagcgtttgactctaga

SEQ ID NO: 147399 - DNA, 25 bp, probe
aaattgtattgcttattcattatag

SEQ ID NO: 147400 - DNA, 25 bp, probe
aaattttattgtatcctatgaactc

SEQ ID NO: 147401 - DNA, 25 bp, probe
aaaagaagaggtctccctcaatcct

SEQ ID NO: 147402 - DNA, 25 bp, probe
aaaaaaaagccctctctgcaatctc

SEQ ID NO: 147403 - DNA, 25 bp, probe
aaatttaacacctaggcctgcaaat

SEQ ID NO: 147404 - DNA, 25 bp, probe
aaatttaacacctaggcctgcaaat

SEQ ID NO: 147405 - DNA, 25 bp, probe
aaatattaactgacgaagaagcaac

SEQ ID NO: 147406 - DNA, 25 bp, probe
aaatgcgctacccaccaataatgaa

SEQ ID NO: 147407 - DNA, 25 bp, probe
aaatcgtgtccttcgacaagctcaa

SEQ ID NO: 147408 - DNA, 25 bp, probe
aaatcggttcattcgatgagacctg

SEQ ID NO: 147409 - DNA, 25 bp, probe
aaatctgcatttaagggagactctg

SEQ ID NO: 147410 - DNA, 25 bp, probe
aaatctgcatttaagggagactctg

SEQ ID NO: 147411 - DNA, 25 bp, probe
aaagtcattgataagaagagagcca

SEQ ID NO: 147412 - DNA, 25 bp, probe
aaattcattatgatcaacagacctc

SEQ ID NO: 147413 - DNA, 25 bp, probe
aaattcaccacagtgcatcaaaacc

SEQ ID NO: 147414 - DNA, 25 bp, probe
aaattctcccaggagcaagaggagc

SEQ ID NO: 147415 - DNA, 25 bp, probe
aaatgtcctccaacaataaagagct

SEQ ID NO: 147416 - DNA, 25 bp, probe
aaattgctctctttaccagacaggc

SEQ ID NO: 147417 - DNA, 25 bp, probe
aaattgtgctcttttctaatccaaa

SEQ ID NO: 147418 - DNA, 25 bp, probe
aaatttcctaattctggtaaatatg

SEQ ID NO: 147419 - DNA, 25 bp, probe
aaatatcctatttaaagtaatctat

SEQ ID NO: 147420 - DNA, 25 bp, probe
aaataactcttataacacaacaata

SEQ ID NO: 147421 - DNA, 25 bp, probe
aaatgaacttcatgaagctctaaaa

SEQ ID NO: 147422 - DNA, 25 bp, probe
aaattccttcttccagcattataaa

SEQ ID NO: 147423 - DNA, 25 bp, probe
aaattctttttgtgcatttgagggc

SEQ ID NO: 147424 - DNA, 25 bp, probe
aaatttgttatgactgttttgagag

SEQ ID NO: 147425 - DNA, 25 bp, probe
aaatttctggtgattgctttgaaga

SEQ ID NO: 147426 - DNA, 25 bp, probe
aaattttgtttcctgtacttcatag

SEQ ID NO: 147427 - DNA, 25 bp, probe
aaattttgtttcctgtacttcatag

SEQ ID NO: 147428 - DNA, 25 bp, probe
aaatcttggtttggtacagttcata

SEQ ID NO: 147429 - DNA, 25 bp, probe
aaatcttggtttggtacagttcata

SEQ ID NO: 147430 - DNA, 25 bp, probe
aaatcatgtacttcgcttaagtttc

SEQ ID NO: 147431 - DNA, 25 bp, probe
aaatcatgacccattttgagatttc

SEQ ID NO: 147432 - DNA, 25 bp, probe
aaataggttctgttttatgtcttga

SEQ ID NO: 147433 - DNA, 25 bp, probe
aaatctatgtatctattctttttag

SEQ ID NO: 147434 - DNA, 25 bp, probe
aaatcttatccttgtatctttttat

SEQ ID NO: 147435 - DNA, 25 bp, probe
aaatcttatccttgtatctttttat

SEQ ID NO: 147436 - DNA, 25 bp, probe
aaatttcacagcagtttattaatgt

SEQ ID NO: 147437 - DNA, 25 bp, probe
aattattcaagcactcttaaaacca

SEQ ID NO: 147438 - DNA, 25 bp, probe
aattattcaagcactcttaaaacca

SEQ ID NO: 147439 - DNA, 25 bp, probe
aaatcctcagacacctgtggaatac

SEQ ID NO: 147440 - DNA, 25 bp, probe
aaatcttcatgtacccaggcaacaa

SEQ ID NO: 147441 - DNA, 25 bp, probe
aaattttcttaatgtgaagctacga

SEQ ID NO: 147442 - DNA, 25 bp, probe
aaattaccttaatatgcaagactct

SEQ ID NO: 147443 - DNA, 25 bp, probe
aaagtccagcttgaacatctagaat

SEQ ID NO: 147444 - DNA, 25 bp, probe
aaattctcactggcgaaattccatt

SEQ ID NO: 147445 - DNA, 25 bp, probe
aaatcgccactggagatatcccgtt

SEQ ID NO: 147446 - DNA, 25 bp, probe
aaattgaagctggcaagaccctgtt

SEQ ID NO: 147447 - DNA, 25 bp, probe
aaattgaagctggcaagaccctgtt

SEQ ID NO: 147448 - DNA, 25 bp, probe
aaatcttgatgatccaagccctttt

SEQ ID NO: 147449 - DNA, 25 bp, probe
aactttggatgctgaaccttgtttg

SEQ ID NO: 147450 - DNA, 25 bp, probe
aaatttgtataagccacttgtcttg

SEQ ID NO: 147451 - DNA, 25 bp, probe
aaattatgatctacacccgtttctt

SEQ ID NO: 147452 - DNA, 25 bp, probe
aaatatgtacttgccttgttttctt

SEQ ID NO: 147453 - DNA, 25 bp, probe
aaattgtgatctctctcttcattct

SEQ ID NO: 147454 - DNA, 25 bp, probe
aaatatttcatttctcattcaattg

SEQ ID NO: 147455 - DNA, 25 bp, probe
aaattctttgcatctcctgcaagcg

SEQ ID NO: 147456 - DNA, 25 bp, probe
aaattgctttgatcgcgcatgacaa

SEQ ID NO: 147457 - DNA, 25 bp, probe
acaattggttcttcagcagtacaga

SEQ ID NO: 147458 - DNA, 25 bp, probe
aaatttggagtgtcagcagctatag

SEQ ID NO: 147459 - DNA, 25 bp, probe
aaatcttatcttgcagcactatcag

SEQ ID NO: 147460 - DNA, 25 bp, probe
aaattctggcttgggatgctgatga

SEQ ID NO: 147461 - DNA, 25 bp, probe
aaatcgctgactttggcatgtgtaa

SEQ ID NO: 147462 - DNA, 25 bp, probe
aaatcactgattttggtctgtccaa

SEQ ID NO: 147463 - DNA, 25 bp, probe
aaatcacatttaaacactgttgcat

SEQ ID NO: 147464 - DNA, 25 bp, probe
aaattcattttcctgcacattctgt

SEQ ID NO: 147465 - DNA, 25 bp, probe
aaattatctgatgtgatgcctgttg

SEQ ID NO: 147466 - DNA, 25 bp, probe
aaattgccaagaggatggctgtgtt

SEQ ID NO: 147467 - DNA, 25 bp, probe
aaatttcatgaagatcctggttgtt

SEQ ID NO: 147468 - DNA, 25 bp, probe
aaattattcaagtatcagaggattt

SEQ ID NO: 147469 - DNA, 25 bp, probe
aaattattcaaattctcacgccttc

SEQ ID NO: 147470 - DNA, 25 bp, probe
aaattgtcatcagaactcacctttg

SEQ ID NO: 147471 - DNA, 25 bp, probe
aaattgtcatcagaactcacctttg

SEQ ID NO: 147472 - DNA, 25 bp, probe
caaacccacaaggagtcccttgcgg

SEQ ID NO: 147473 - DNA, 25 bp, probe
aacatcccaagggaactccttcgca

SEQ ID NO: 147474 - DNA, 25 bp, probe
aaatggccaagggaaccactgaaga

SEQ ID NO: 147475 - DNA, 25 bp, probe
aaatgtagaaggccatacctggaat

SEQ ID NO: 147476 - DNA, 25 bp, probe
aaatgctggaaacatcactgcgtac

SEQ ID NO: 147477 - DNA, 25 bp, probe
aaatattgacaacagattctgatag

SEQ ID NO: 147478 - DNA, 25 bp, probe
aaatattgacaacagattctgatag

SEQ ID NO: 147479 - DNA, 25 bp, probe
aaatttatgatgcccagttggaaga

SEQ ID NO: 147480 - DNA, 25 bp, probe
aaattggctaatcagtatacaagat

SEQ ID NO: 147481 - DNA, 25 bp, probe
aaatcaggtggttagctcaaccaat

SEQ ID NO: 147482 - DNA, 25 bp, probe
aaatagtgggtttacatactcaact

SEQ ID NO: 147483 - DNA, 25 bp, probe
aaattcaggcgaattccataccgtt

SEQ ID NO: 147484 - DNA, 25 bp, probe
aaattcagctagctcttcaacacgt

SEQ ID NO: 147485 - DNA, 25 bp, probe
aaattggcgacgacctcagtgtcag

SEQ ID NO: 147486 - DNA, 25 bp, probe
aaattcagcgtcgacctcatgagtt

SEQ ID NO: 147487 - DNA, 25 bp, probe
aaattcagcgtcgacctcatgagtt

SEQ ID NO: 147488 - DNA, 25 bp, probe
aaattcatatgtccctcgtgaggct

SEQ ID NO: 147489 - DNA, 25 bp, probe
aaattctattaccatgcagtcagga

SEQ ID NO: 147490 - DNA, 25 bp, probe
aaattatcatcagctccagtcggag

SEQ ID NO: 147491 - DNA, 25 bp, probe
aaattgacatcagcattccagcagc

SEQ ID NO: 147492 - DNA, 25 bp, probe
aaatggactagactaccaagtagtt

SEQ ID NO: 147493 - DNA, 25 bp, probe
aaatcccaatataatcccagctagt

SEQ ID NO: 147494 - DNA, 25 bp, probe
aaatcccaatataatcccagctagt

SEQ ID NO: 147495 - DNA, 25 bp, probe
aaatctccgataagacagacatgtg

SEQ ID NO: 147496 - DNA, 25 bp, probe
aaatctcagggcactcaaatgtggc

SEQ ID NO: 147497 - DNA, 25 bp, probe
aaatgacagggcatctgagttttgc

SEQ ID NO: 147498 - DNA, 25 bp, probe
aaatcaagtgtattgctggttctgc

SEQ ID NO: 147499 - DNA, 25 bp, probe
aaatcaagcatctttctgttactga

SEQ ID NO: 147500 - DNA, 25 bp, probe
aaataaagattcctgtgtactggtt

SEQ ID NO: 147501 - DNA, 25 bp, probe
aaataaaaaagagtgtcctggcagt

SEQ ID NO: 147502 - DNA, 25 bp, probe
aaataaacctagtctgtcctgtgcc

SEQ ID NO: 147503 - DNA, 25 bp, probe
aaatacattcactgtctctgttggt

SEQ ID NO: 147504 - DNA, 25 bp, probe
aaatacaggctctgagtctggtgta

SEQ ID NO: 147505 - DNA, 25 bp, probe
aaattgactctctaaatctggtgta

SEQ ID NO: 147506 - DNA, 25 bp, probe
aaatttcctaatgcatctgagagat

SEQ ID NO: 147507 - DNA, 25 bp, probe
aaattatcctacagatgatgcgagt

SEQ ID NO: 147508 - DNA, 25 bp, probe
aaattcagttacaggagcgagagcg

SEQ ID NO: 147509 - DNA, 25 bp, probe
aaatatcagttactcagccctgggc

SEQ ID NO: 147510 - DNA, 25 bp, probe
aaatatcagttactcagccctgggc

SEQ ID NO: 147511 - DNA, 25 bp, probe
aaatagatatttcaggccgggcctg

SEQ ID NO: 147512 - DNA, 25 bp, probe
aaatggtattctcacccagtaggcc

SEQ ID NO: 147513 - DNA, 25 bp, probe
aaatagtattgctgaactcttaggc

SEQ ID NO: 147514 - DNA, 25 bp, probe
aaagattttgcccaactggtcggct

SEQ ID NO: 147515 - DNA, 25 bp, probe
aaatttgtatacccacggcttcagc

SEQ ID NO: 147516 - DNA, 25 bp, probe
aaatttgtgatagcgctctggttgc

SEQ ID NO: 147517 - DNA, 25 bp, probe
aaatttgaattcctgctctgtgtta

SEQ ID NO: 147518 - DNA, 25 bp, probe
aaattgtaatgttgccttgcttcaa

SEQ ID NO: 147519 - DNA, 25 bp, probe
aaattgttgatgtagccaagttcac

SEQ ID NO: 147520 - DNA, 25 bp, probe
aaatatgttatgtctccagagctct

SEQ ID NO: 147521 - DNA, 25 bp, probe
aaatctattattccactggcgcatc

SEQ ID NO: 147522 - DNA, 25 bp, probe
aaatatattctaacagtacgcactg

SEQ ID NO: 147523 - DNA, 25 bp, probe
aaattcttctgaacaacactcattg

SEQ ID NO: 147524 - DNA, 25 bp, probe
aaatgtttggataccgcccattggc

SEQ ID NO: 147525 - DNA, 25 bp, probe
aaatgtttggataccgcccattggc

SEQ ID NO: 147526 - DNA, 25 bp, probe
aaatctttagtttcctccatatttg

SEQ ID NO: 147527 - DNA, 25 bp, probe
aaatctttagtttcctccatatttg

SEQ ID NO: 147528 - DNA, 25 bp, probe
aaaatttgggtctggcccatttcag

SEQ ID NO: 147529 - DNA, 25 bp, probe
aaaggctcgggtgatggccaccatt

SEQ ID NO: 147530 - DNA, 25 bp, probe
aaatggatacagttcaatggacgct

SEQ ID NO: 147531 - DNA, 25 bp, probe
aaaggctccagaatcgtgtaccagg

SEQ ID NO: 147532 - DNA, 25 bp, probe
aaattctcaaggtgagtacaagaga

SEQ ID NO: 147533 - DNA, 25 bp, probe
aaattccacattcaggccacgagag

SEQ ID NO: 147534 - DNA, 25 bp, probe
aaatattacttttggccgagcatgg

SEQ ID NO: 147535 - DNA, 25 bp, probe
aaatgttaaattgagcggccgcgaa

SEQ ID NO: 147536 - DNA, 25 bp, probe
aaagatataaagtcatgtgggccac

SEQ ID NO: 147537 - DNA, 25 bp, probe
aacagctaagaccacagggttcagc

SEQ ID NO: 147538 - DNA, 25 bp, probe
aaatctatggacagcaaaggtcaga

SEQ ID NO: 147539 - DNA, 25 bp, probe
aaatctatggacagcaaaggtcaga

SEQ ID NO: 147540 - DNA, 25 bp, probe
aaatcatttgccagagcgaggtaat

SEQ ID NO: 147541 - DNA, 25 bp, probe
aaatatattcgcaaaatcggttcat

SEQ ID NO: 147542 - DNA, 25 bp, probe
aaatatttcgcaaactctggtgtcg

SEQ ID NO: 147543 - DNA, 25 bp, probe
aaatattttataagacatggtgttg

SEQ ID NO: 147544 - DNA, 25 bp, probe
aaattttggcatatggcattttcta

SEQ ID NO: 147545 - DNA, 25 bp, probe
aaattcttgctctgggcatctaatt

SEQ ID NO: 147546 - DNA, 25 bp, probe
aaattctcttcagtgggccacagag

SEQ ID NO: 147547 - DNA, 25 bp, probe
aaatatctcatgaaggtggaaaacc

SEQ ID NO: 147548 - DNA, 25 bp, probe
aaattctagccatttgtcacacaac

SEQ ID NO: 147549 - DNA, 25 bp, probe
aaattctactcactgtgctccatat

SEQ ID NO: 147550 - DNA, 25 bp, probe
aaatcatctgcattcctgatgacca

SEQ ID NO: 147551 - DNA, 25 bp, probe
aaatgagctgcactccatgagtgca

SEQ ID NO: 147552 - DNA, 25 bp, probe
aaagtctgcatgtccgaggacggcc

SEQ ID NO: 147553 - DNA, 25 bp, probe
aaagttggggcaggctggctggccc

SEQ ID NO: 147554 - DNA, 25 bp, probe
aaagtctgagggtcctctaggctcc

SEQ ID NO: 147555 - DNA, 25 bp, probe
aaagctggggcagcccagggtcgtg

SEQ ID NO: 147556 - DNA, 25 bp, probe
aataggattggcaccaggggtattt

SEQ ID NO: 147557 - DNA, 25 bp, probe
aaactggttccagagtgggatagtt

SEQ ID NO: 147558 - DNA, 25 bp, probe
aaatcctttccaataattgactggt

SEQ ID NO: 147559 - DNA, 25 bp, probe
aaatctgcatcttccactattttca

SEQ ID NO: 147560 - DNA, 25 bp, probe
aaatatcacattaatctgtattatc

SEQ ID NO: 147561 - DNA, 25 bp, probe
aaatctagcaggaaattgtcatcag

SEQ ID NO: 147562 - DNA, 25 bp, probe
aaatctagcaggaaattgtcatcag

SEQ ID NO: 147563 - DNA, 25 bp, probe
aaatcagcaagggtattttagctaa

SEQ ID NO: 147564 - DNA, 25 bp, probe
aaatcagcaagggtattttagctaa

SEQ ID NO: 147565 - DNA, 25 bp, probe
aaatagagagagggtctttggctgc

SEQ ID NO: 147566 - DNA, 25 bp, probe
aaatcagcatgatgggacgcgtggt

SEQ ID NO: 147567 - DNA, 25 bp, probe
aaatctcataacccacatgttcagt

SEQ ID NO: 147568 - DNA, 25 bp, probe
aaatctcattccagcatagttttgg

SEQ ID NO: 147569 - DNA, 25 bp, probe
aaatgtatgtcaaccaagtgtttag

SEQ ID NO: 147570 - DNA, 25 bp, probe
aaattagtgacttcggttgctctga

SEQ ID NO: 147571 - DNA, 25 bp, probe
aaatcaagatgactaccagctggtt

SEQ ID NO: 147572 - DNA, 25 bp, probe
aaatcagaagcaatcccagctccac

SEQ ID NO: 147573 - DNA, 25 bp, probe
aaatcaagagtcctcagcactccac

SEQ ID NO: 147574 - DNA, 25 bp, probe
aaatgcaagaccttccatatgtcca

SEQ ID NO: 147575 - DNA, 25 bp, probe
aaattctaccgtggaatgtccctgg

SEQ ID NO: 147576 - DNA, 25 bp, probe
aaatattacctggccaatatcccac

SEQ ID NO: 147577 - DNA, 25 bp, probe
aaatgttacactgccttattctggg

SEQ ID NO: 147578 - DNA, 25 bp, probe
aaatttactcatctctctagtgctg

SEQ ID NO: 147579 - DNA, 25 bp, probe
aaattctcacctctattaagctgct

SEQ ID NO: 147580 - DNA, 25 bp, probe
aaatatctcctgctgtttcacagcc

SEQ ID NO: 147581 - DNA, 25 bp, probe
aaatcactgcgcaagttgttacatc

SEQ ID NO: 147582 - DNA, 25 bp, probe
aaatgcagtgccaagttgggttcct

SEQ ID NO: 147583 - DNA, 25 bp, probe
aaatggtgcctgattcggctgtctc

SEQ ID NO: 147584 - DNA, 25 bp, probe
aaatggtgcctgattcggctgtctc

SEQ ID NO: 147585 - DNA, 25 bp, probe
aaatattgcattattcacactttca

SEQ ID NO: 147586 - DNA, 25 bp, probe
aaatttctctgttccatagttaaag

SEQ ID NO: 147587 - DNA, 25 bp, probe
aaattagtatgattcctatttaaag

SEQ ID NO: 147588 - DNA, 25 bp, probe
aaatctagaagagtctattgtctcc

SEQ ID NO: 147589 - DNA, 25 bp, probe
aaatctctaaattcttgtgtctgcc

SEQ ID NO: 147590 - DNA, 25 bp, probe
aaatcgaccaaatttgactctgcaa

SEQ ID NO: 147591 - DNA, 25 bp, probe
aaataacccaaaggcatgctccaga

SEQ ID NO: 147592 - DNA, 25 bp, probe
aaatgtggcccagtgaacatctccg

SEQ ID NO: 147593 - DNA, 25 bp, probe
aaagtcccgagcaatgaagtcatcc

SEQ ID NO: 147594 - DNA, 25 bp, probe
aaagtcccgagcaatgaagtcatcc

SEQ ID NO: 147595 - DNA, 25 bp, probe
aaatgtactgcaggctctgggtcag

SEQ ID NO: 147596 - DNA, 25 bp, probe
aaatctggcatcatctcaggttccc

SEQ ID NO: 147597 - DNA, 25 bp, probe
aaatctggcatcatctcaggttccc

SEQ ID NO: 147598 - DNA, 25 bp, probe
aaagagaccagttcaggtcctgccc

SEQ ID NO: 147599 - DNA, 25 bp, probe
aaagcgaagcaggagagggccgccc

SEQ ID NO: 147600 - DNA, 25 bp, probe
aaagcgaagcaggagagggccgccc

SEQ ID NO: 147601 - DNA, 25 bp, probe
aaatgctaaagacagtggctgcagc

SEQ ID NO: 147602 - DNA, 25 bp, probe
aaatgccatcgagcctgtggctggc

SEQ ID NO: 147603 - DNA, 25 bp, probe
aaatctatcagatcatgctggactg

SEQ ID NO: 147604 - DNA, 25 bp, probe
aaatcttcatattctctgtagcctt

SEQ ID NO: 147605 - DNA, 25 bp, probe
aaatcttcatattctctgtagcctt

SEQ ID NO: 147606 - DNA, 25 bp, probe
aaatgctgtagtgttgaatacttgg

SEQ ID NO: 147607 - DNA, 25 bp, probe
aaatgctgtagtgttgaatacttgg

SEQ ID NO: 147608 - DNA, 25 bp, probe
aaatcttagttgagaatccatcagc

SEQ ID NO: 147609 - DNA, 25 bp, probe
aaatataggattatgatttcatcat

SEQ ID NO: 147610 - DNA, 25 bp, probe
aaatttgctgcttcgagaagtcata

SEQ ID NO: 147611 - DNA, 25 bp, probe
aaatcttggccagtgtccagcacat

SEQ ID NO: 147612 - DNA, 25 bp, probe
aaatgttgatgcactgtagtcactg

SEQ ID NO: 147613 - DNA, 25 bp, probe
aaatatcgtgtgtgtgattccttgt

SEQ ID NO: 147614 - DNA, 25 bp, probe
aaataaggcttgctgtttgttctcc

SEQ ID NO: 147615 - DNA, 25 bp, probe
aaagtgaggcttctgggtgcatacc

SEQ ID NO: 147616 - DNA, 25 bp, probe
aaagtgatggggcctccgatgaagc

SEQ ID NO: 147617 - DNA, 25 bp, probe
aaagtgatggggcctccgatgaagc

SEQ ID NO: 147618 - DNA, 25 bp, probe
aaatggagaggccagtacgacgtgg

SEQ ID NO: 147619 - DNA, 25 bp, probe
aaatgtgatgcccggtggagtcctg

SEQ ID NO: 147620 - DNA, 25 bp, probe
aaatgtgaaccttgttgcagtgtat

SEQ ID NO: 147621 - DNA, 25 bp, probe
aaatgtgaaccttgttgcagtgtat

SEQ ID NO: 147622 - DNA, 25 bp, probe
aaatatgaagccatgtctcactgtt

SEQ ID NO: 147623 - DNA, 25 bp, probe
aaatatgaagccatgtctcactgtt

SEQ ID NO: 147624 - DNA, 25 bp, probe
aaattatatgtcatttcacattgta

SEQ ID NO: 147625 - DNA, 25 bp, probe
aaatcaaggatcatgtgtgcacaat

SEQ ID NO: 147626 - DNA, 25 bp, probe
aaataggtgatcttgggcatgtaac

SEQ ID NO: 147627 - DNA, 25 bp, probe
aaataggtgatcttgggcatgtaac

SEQ ID NO: 147628 - DNA, 25 bp, probe
aaataggtgatcttgggcatgtaac

SEQ ID NO: 147629 - DNA, 25 bp, probe
aaatcgggatgccgcggagcacaga

SEQ ID NO: 147630 - DNA, 25 bp, probe
aaatcgggatgccgcggagcacaga

SEQ ID NO: 147631 - DNA, 25 bp, probe
aaatcggggattggtgagccagctg

SEQ ID NO: 147632 - DNA, 25 bp, probe
aaatagggcaatgcgtgtgaccttc

SEQ ID NO: 147633 - DNA, 25 bp, probe
aaataggaacacgtgctctacctcc

SEQ ID NO: 147634 - DNA, 25 bp, probe
aaataggaacacgtgctctacctcc

SEQ ID NO: 147635 - DNA, 25 bp, probe
aaagcagaactactgtgccgagccc

SEQ ID NO: 147636 - DNA, 25 bp, probe
aaatcgatactgctggccaatcagt

SEQ ID NO: 147637 - DNA, 25 bp, probe
aaatcagcatttctatgtaacatat

SEQ ID NO: 147638 - DNA, 25 bp, probe
aaatgccagtatcaatggatacaga

SEQ ID NO: 147639 - DNA, 25 bp, probe
aaatgacagtaatattggcatagaa

SEQ ID NO: 147640 - DNA, 25 bp, probe
aaatgccaagaactgttgtgcaagt

SEQ ID NO: 147641 - DNA, 25 bp, probe
aaatgccaaacatgttgtcacacac

SEQ ID NO: 147642 - DNA, 25 bp, probe
aaatgccaaacatgttgtcacacac

SEQ ID NO: 147643 - DNA, 25 bp, probe
aaatcagccaaggaagcttcaccag

SEQ ID NO: 147644 - DNA, 25 bp, probe
aaatcagccaaggaagcttcaccag

SEQ ID NO: 147645 - DNA, 25 bp, probe
aaatctgccagggatgtgttcacca

SEQ ID NO: 147646 - DNA, 25 bp, probe
aaatcgaagcaggaattccccactt

SEQ ID NO: 147647 - DNA, 25 bp, probe
aaatcgaagcaggaattccccactt

SEQ ID NO: 147648 - DNA, 25 bp, probe
aaaaatcgcaggattccagccctgt

SEQ ID NO: 147649 - DNA, 25 bp, probe
aaaggtgcgaggatgcttacccgag

SEQ ID NO: 147650 - DNA, 25 bp, probe
aaatcaggtagtgtggctactcctt

SEQ ID NO: 147651 - DNA, 25 bp, probe
aaatggagtatgtttcccactttat

SEQ ID NO: 147652 - DNA, 25 bp, probe
aaatggagtatgtttcccactttat

SEQ ID NO: 147653 - DNA, 25 bp, probe
aacaaagttttctcctgcagtgctt

SEQ ID NO: 147654 - DNA, 25 bp, probe
aaagaaatttccactcaggtctgtt

SEQ ID NO: 147655 - DNA, 25 bp, probe
aaatataccttcagagtccgtcagt

SEQ ID NO: 147656 - DNA, 25 bp, probe
aaatataccttcagagtccgtcagt

SEQ ID NO: 147657 - DNA, 25 bp, probe
aaatgtgtatttatagtccctccta

SEQ ID NO: 147658 - DNA, 25 bp, probe
aaatgtatatatatcctagtcccct

SEQ ID NO: 147659 - DNA, 25 bp, probe
aaatgtcatggtggtctataactcc

SEQ ID NO: 147660 - DNA, 25 bp, probe
aaatctcagagcagacagaaacatt

SEQ ID NO: 147661 - DNA, 25 bp, probe
aaatgcacacatcaagagaaagtta

SEQ ID NO: 147662 - DNA, 25 bp, probe
aaatgcctatgaaattaaactataa

SEQ ID NO: 147663 - DNA, 25 bp, probe
aaaactctgcaaatctaaggccaaa

SEQ ID NO: 147664 - DNA, 25 bp, probe
aaaactctgcaaatctaaggccaaa

SEQ ID NO: 147665 - DNA, 25 bp, probe
aacagaagctaaatccaaagacaaa

SEQ ID NO: 147666 - DNA, 25 bp, probe
aaatatcagaaaatccaacagaagc

SEQ ID NO: 147667 - DNA, 25 bp, probe
aaatatagatgctttccattgaaat

SEQ ID NO: 147668 - DNA, 25 bp, probe
aaatatttgctctcagctaactatc

SEQ ID NO: 147669 - DNA, 25 bp, probe
aaatagcctgttgcatcttagccac

SEQ ID NO: 147670 - DNA, 25 bp, probe
aaatcatgatctgtacctaagctca

SEQ ID NO: 147671 - DNA, 25 bp, probe
aaatatgtgctcatctcctaagtag

SEQ ID NO: 147672 - DNA, 25 bp, probe
aaatatgttgattcatggctataat

SEQ ID NO: 147673 - DNA, 25 bp, probe
aaatatgttgattcatggctataat

SEQ ID NO: 147674 - DNA, 25 bp, probe
aaatagcttatttgaataaactaca

SEQ ID NO: 147675 - DNA, 25 bp, probe
aaatcactattttggtcaaagtcaa

SEQ ID NO: 147676 - DNA, 25 bp, probe
aaatttcatacgtagtgcaaagctt

SEQ ID NO: 147677 - DNA, 25 bp, probe
aaatatagatccttcttcagaagct

SEQ ID NO: 147678 - DNA, 25 bp, probe
aaaggctgcccaatctctgagaagc

SEQ ID NO: 147679 - DNA, 25 bp, probe
aaaggctgcccaatctctgagaagc

SEQ ID NO: 147680 - DNA, 25 bp, probe
aaagtctgcctttctcaagatgatc

SEQ ID NO: 147681 - DNA, 25 bp, probe
aaaatccgatcacctcgaagattta

SEQ ID NO: 147682 - DNA, 25 bp, probe
aaatagccaacgagctgaagcttta

SEQ ID NO: 147683 - DNA, 25 bp, probe
aaaggccaagatttgcagaacttgt

SEQ ID NO: 147684 - DNA, 25 bp, probe
aaaggatcaaggtgatgcagacaag

SEQ ID NO: 147685 - DNA, 25 bp, probe
aaatgcgtgacatgaggatggacaa

SEQ ID NO: 147686 - DNA, 25 bp, probe
aaatgtatgcacttaggaatgctaa

SEQ ID NO: 147687 - DNA, 25 bp, probe
aaatgtatgcacttaggaatgctaa

SEQ ID NO: 147688 - DNA, 25 bp, probe
aaatgaatgtcgaagctatctgctc

SEQ ID NO: 147689 - DNA, 25 bp, probe
aaatgaagatatgcacatccagatc

SEQ ID NO: 147690 - DNA, 25 bp, probe
aaagaggatcgaccagtcagagttc

SEQ ID NO: 147691 - DNA, 25 bp, probe
aaaacccgatgtggtgggtatcagg

SEQ ID NO: 147692 - DNA, 25 bp, probe
aaaggcccagtgtctgttggtgtag

SEQ ID NO: 147693 - DNA, 25 bp, probe
aaaggcccagtgtctgttggtgtag

SEQ ID NO: 147694 - DNA, 25 bp, probe
aaaggtgtcagtccgttctggatgg

SEQ ID NO: 147695 - DNA, 25 bp, probe
aaactgagtcagagcggggcgtgcg

SEQ ID NO: 147696 - DNA, 25 bp, probe
aaagtgcagatctttggcgttcgtc

SEQ ID NO: 147697 - DNA, 25 bp, probe
aaagggatcggagccatcatcgcgc

SEQ ID NO: 147698 - DNA, 25 bp, probe
aaagggcatgctggttcctaatccc

SEQ ID NO: 147699 - DNA, 25 bp, probe
aaactgttgctatttcctaacctgc

SEQ ID NO: 147700 - DNA, 25 bp, probe
aaatcgtagtgcttgtacttacctc

SEQ ID NO: 147701 - DNA, 25 bp, probe
aaacggaggtctcatctgtgtcctc

SEQ ID NO: 147702 - DNA, 25 bp, probe
aaacggaggtctcatctgtgtcctc

SEQ ID NO: 147703 - DNA, 25 bp, probe
aaactggggcttcatgtgtggcctg

SEQ ID NO: 147704 - DNA, 25 bp, probe
aaacatcctggtagctgaggggcgg

SEQ ID NO: 147705 - DNA, 25 bp, probe
aaatcctcaggtagtactgggaatg

SEQ ID NO: 147706 - DNA, 25 bp, probe
aaatcgtcttatattagggaattag

SEQ ID NO: 147707 - DNA, 25 bp, probe
aaatcgtgcgtgacattaaggagaa

SEQ ID NO: 147708 - DNA, 25 bp, probe
aaatatggctgtgagtaaggcagga

SEQ ID NO: 147709 - DNA, 25 bp, probe
aaatctgcctgaatcgtcaatgtca

SEQ ID NO: 147710 - DNA, 25 bp, probe
aaatagctgctaatctgtcaacctg

SEQ ID NO: 147711 - DNA, 25 bp, probe
aaatgcagcctagtcttgagaacat

SEQ ID NO: 147712 - DNA, 25 bp, probe
aaatacatgtacctatagaaataga

SEQ ID NO: 147713 - DNA, 25 bp, probe
aaaggcgatacacaagggatggatt

SEQ ID NO: 147714 - DNA, 25 bp, probe
aaatgggatcccttactggatcgtg

SEQ ID NO: 147715 - DNA, 25 bp, probe
aaatgggcttgccctggtgaggcct

SEQ ID NO: 147716 - DNA, 25 bp, probe
aaatgggtcgaggatctggtgcggc

SEQ ID NO: 147717 - DNA, 25 bp, probe
aaatgggtcgaggatctggtgcggc

SEQ ID NO: 147718 - DNA, 25 bp, probe
aaatgtggccgttgccatgttgacg

SEQ ID NO: 147719 - DNA, 25 bp, probe
aaatatgccaaggtgaagcttatcc

SEQ ID NO: 147720 - DNA, 25 bp, probe
aaagtcaacaggcaaggtaatcttc

SEQ ID NO: 147721 - DNA, 25 bp, probe
aaagtttccgatctggtagtctacg

SEQ ID NO: 147722 - DNA, 25 bp, probe
aaagtagttctagtgtggtcgttat

SEQ ID NO: 147723 - DNA, 25 bp, probe
aaagtagttctagtgtggtcgttat

SEQ ID NO: 147724 - DNA, 25 bp, probe
caggagtaccctttagtttgtgttg

SEQ ID NO: 147725 - DNA, 25 bp, probe
caggagtaccctttagtttgtgttg

SEQ ID NO: 147726 - DNA, 25 bp, probe
aaagtaccaagatagtttcctgctg

SEQ ID NO: 147727 - DNA, 25 bp, probe
aaatctgaccataagaaatttactg

SEQ ID NO: 147728 - DNA, 25 bp, probe
aaatcgaagcagtaaatattgggtt

SEQ ID NO: 147729 - DNA, 25 bp, probe
aaatctgtcaagtcataaaaaggct

SEQ ID NO: 147730 - DNA, 25 bp, probe
aaatatgtgaacttagaagaagcag

SEQ ID NO: 147731 - DNA, 25 bp, probe
aaatatggagccttcaaagaatcag

SEQ ID NO: 147732 - DNA, 25 bp, probe
aaatatgtggagttcatcttgaatt

SEQ ID NO: 147733 - DNA, 25 bp, probe
aaatatgtggagttcatcttgaatt

SEQ ID NO: 147734 - DNA, 25 bp, probe
aaatcatgctgcatctatatctttt

SEQ ID NO: 147735 - DNA, 25 bp, probe
aaatcatccttgcatcatcaagatt

SEQ ID NO: 147736 - DNA, 25 bp, probe
aaatctctcttggaatccatgtgcc

SEQ ID NO: 147737 - DNA, 25 bp, probe
aaatatcttaggtttcattgcttca

SEQ ID NO: 147738 - DNA, 25 bp, probe
aaatactgttcgcttttctatcatc

SEQ ID NO: 147739 - DNA, 25 bp, probe
aaatactgttcgcttttctatcatc

SEQ ID NO: 147740 - DNA, 25 bp, probe
aaatagatgtacctgttttgctttc

SEQ ID NO: 147741 - DNA, 25 bp, probe
aaatctgatgtctggtcatttgcca

SEQ ID NO: 147742 - DNA, 25 bp, probe
aaatctgatgtctggtcatttgcca

SEQ ID NO: 147743 - DNA, 25 bp, probe
aaatggagctccaggtattgccaag

SEQ ID NO: 147744 - DNA, 25 bp, probe
aaatgagtctacagttataccaagt

SEQ ID NO: 147745 - DNA, 25 bp, probe
aaagcagacgacggactgagaccaa

SEQ ID NO: 147746 - DNA, 25 bp, probe
caaacgactacggtctggacaactt

SEQ ID NO: 147747 - DNA, 25 bp, probe
caaagggaacatgtctgggaaccgc

SEQ ID NO: 147748 - DNA, 25 bp, probe
aaatgggaattcactgctgggatgt

SEQ ID NO: 147749 - DNA, 25 bp, probe
aaatgggaattcactgctgggatgt

SEQ ID NO: 147750 - DNA, 25 bp, probe
aaagggctattctgtggatgttgac

SEQ ID NO: 147751 - DNA, 25 bp, probe
aaaggggcattctctggttggagga

SEQ ID NO: 147752 - DNA, 25 bp, probe
aaagagggcaatcgcctccttggag

SEQ ID NO: 147753 - DNA, 25 bp, probe
aaatggtacagacaccttatggcat

SEQ ID NO: 147754 - DNA, 25 bp, probe
aaaggtgtcgagaaccctgctgtac

SEQ ID NO: 147755 - DNA, 25 bp, probe
aaagtggctgtcagaccgagagtag

SEQ ID NO: 147756 - DNA, 25 bp, probe
aaagtggggatgggacataagccac

SEQ ID NO: 147757 - DNA, 25 bp, probe
aaaggatagccaaagaaattcagca

SEQ ID NO: 147758 - DNA, 25 bp, probe
aaaggatagccaaagaaattcagca

SEQ ID NO: 147759 - DNA, 25 bp, probe
aaaggttcctaagcctggctgcaaa

SEQ ID NO: 147760 - DNA, 25 bp, probe
aaacgttctttatccagacagacaa

SEQ ID NO: 147761 - DNA, 25 bp, probe
aaatacccttcttttatgagcagaa

SEQ ID NO: 147762 - DNA, 25 bp, probe
aaatacctgtgttcagattgtaaga

SEQ ID NO: 147763 - DNA, 25 bp, probe
aaatactgctgtgagcatttgttag

SEQ ID NO: 147764 - DNA, 25 bp, probe
aaatatcttgtctacattcttttaa

SEQ ID NO: 147765 - DNA, 25 bp, probe
aaatcagcttgatactctttataaa

SEQ ID NO: 147766 - DNA, 25 bp, probe
aaatagtttcaagcctgaatctcag

SEQ ID NO: 147767 - DNA, 25 bp, probe
aaatagtttcaagcctgaatctcag

SEQ ID NO: 147768 - DNA, 25 bp, probe
aaatactgttaaactcttgtccagt

SEQ ID NO: 147769 - DNA, 25 bp, probe
aaatcccttacatcctttagcagat

SEQ ID NO: 147770 - DNA, 25 bp, probe
aaatcaactgttgacctgttaacaa

SEQ ID NO: 147771 - DNA, 25 bp, probe
aaatcaacttgctatagactttata

SEQ ID NO: 147772 - DNA, 25 bp, probe
aaatgacactctccaaggtccattc

SEQ ID NO: 147773 - DNA, 25 bp, probe
aaatgacagattccagttcccattc

SEQ ID NO: 147774 - DNA, 25 bp, probe
aaatgagcaggtccaagacacttat

SEQ ID NO: 147775 - DNA, 25 bp, probe
aaatctgagatttcactgacaactt

SEQ ID NO: 147776 - DNA, 25 bp, probe
aaatcatgatgagatctatccaata

SEQ ID NO: 147777 - DNA, 25 bp, probe
aaatgctagaaactgagccagtaga

SEQ ID NO: 147778 - DNA, 25 bp, probe
aaatgcttggcttctgtgtatctag

SEQ ID NO: 147779 - DNA, 25 bp, probe
aaatgcttggcttctgtgtatctag

SEQ ID NO: 147780 - DNA, 25 bp, probe
aaatgcttccatttgtaatcaagtt

SEQ ID NO: 147781 - DNA, 25 bp, probe
aaatgctactgctttttccaagaat

SEQ ID NO: 147782 - DNA, 25 bp, probe
aaatggcacagctgtttctgaaagt

SEQ ID NO: 147783 - DNA, 25 bp, probe
aaatgaacaactcttcaagaagatc

SEQ ID NO: 147784 - DNA, 25 bp, probe
aaatagaaccgccttaagagagata

SEQ ID NO: 147785 - DNA, 25 bp, probe
aaagataagccccaaaagtgatgtt

SEQ ID NO: 147786 - DNA, 25 bp, probe
aaagagacccctgacactttgttga

SEQ ID NO: 147787 - DNA, 25 bp, probe
aaagagacccctgacactttgttga

SEQ ID NO: 147788 - DNA, 25 bp, probe
aaagggaccttggaacaatggattg

SEQ ID NO: 147789 - DNA, 25 bp, probe
aaagggagggtgaaagtgattatgg

SEQ ID NO: 147790 - DNA, 25 bp, probe
aaaccgtgaggaggactctatttgg

SEQ ID NO: 147791 - DNA, 25 bp, probe
aaatgccggaggtgtttgatgccat

SEQ ID NO: 147792 - DNA, 25 bp, probe
aaatgcgaaaggttgtatgtgatca

SEQ ID NO: 147793 - DNA, 25 bp, probe
aaatgctgtagaagtgagtttgtaa

SEQ ID NO: 147794 - DNA, 25 bp, probe
aaatctcatcgtcatggttctgctt

SEQ ID NO: 147795 - DNA, 25 bp, probe
aaatctcatcgtcatggttctgctt

SEQ ID NO: 147796 - DNA, 25 bp, probe
aaatgccatcgtatgtattttgtgt

SEQ ID NO: 147797 - DNA, 25 bp, probe
aaccctcgtttctgattaatgctaa

SEQ ID NO: 147798 - DNA, 25 bp, probe
aaagtccagcaatttcgttacttat

SEQ ID NO: 147799 - DNA, 25 bp, probe
aaatggccagactatttcattaatt

SEQ ID NO: 147800 - DNA, 25 bp, probe
aaagtgcaaagtagattcgtagtta

SEQ ID NO: 147801 - DNA, 25 bp, probe
aaatggcaagagatcatatcctcag

SEQ ID NO: 147802 - DNA, 25 bp, probe
aaatagttgatgaatttgctatgcg

SEQ ID NO: 147803 - DNA, 25 bp, probe
aaatactgtggttgcctctatgtgc

SEQ ID NO: 147804 - DNA, 25 bp, probe
aaatactgtggttgcctctatgtgc

SEQ ID NO: 147805 - DNA, 25 bp, probe
aaatgcagtggacatggcctttgtt

SEQ ID NO: 147806 - DNA, 25 bp, probe
aaatgcgtggaattacacttttatt

SEQ ID NO: 147807 - DNA, 25 bp, probe
aaatcagttcaattttccatttgtt

SEQ ID NO: 147808 - DNA, 25 bp, probe
aaatgatttaaccattgccctctcc

SEQ ID NO: 147809 - DNA, 25 bp, probe
aaagatttgtacattcccactctaa

SEQ ID NO: 147810 - DNA, 25 bp, probe
aaagatttgtacattcccactctaa

SEQ ID NO: 147811 - DNA, 25 bp, probe
aaagatttaccaggtctacaccatt

SEQ ID NO: 147812 - DNA, 25 bp, probe
aaagactataccagtccacggatag

SEQ ID NO: 147813 - DNA, 25 bp, probe
aaataaaactctatgctaccggcag

SEQ ID NO: 147814 - DNA, 25 bp, probe
aaatagatacctgtttgactttgag

SEQ ID NO: 147815 - DNA, 25 bp, probe
aaatagatacctgtttgactttgag

SEQ ID NO: 147816 - DNA, 25 bp, probe
aaatgagcatacatcttaaatcttt

SEQ ID NO: 147817 - DNA, 25 bp, probe
aaatactctcatatagtcacacttt

SEQ ID NO: 147818 - DNA, 25 bp, probe
aaagacccaacttgccaaaatgttg

SEQ ID NO: 147819 - DNA, 25 bp, probe
aaaggccaacaccgccaaagcaaat

SEQ ID NO: 147820 - DNA, 25 bp, probe
aaagggcaatcgggaaggagcacaa

SEQ ID NO: 147821 - DNA, 25 bp, probe
aaaggtcctacagagggataccgtg

SEQ ID NO: 147822 - DNA, 25 bp, probe
aaaggacctagagaagtgtgcccag

SEQ ID NO: 147823 - DNA, 25 bp, probe
aaatctgcacctaaccaaggtccct

SEQ ID NO: 147824 - DNA, 25 bp, probe
aaatctcatcctagatcaccgaggt

SEQ ID NO: 147825 - DNA, 25 bp, probe
aaatctgatatttacagctttggtg

SEQ ID NO: 147826 - DNA, 25 bp, probe
aaatctgctgcaaaatctctcttgg

SEQ ID NO: 147827 - DNA, 25 bp, probe
aaatctgtctagaatcctgctttac

SEQ ID NO: 147828 - DNA, 25 bp, probe
aaatctgcctagaaaacctctcgct

SEQ ID NO: 147829 - DNA, 25 bp, probe
aaatgctgccaatgagtttctctac

SEQ ID NO: 147830 - DNA, 25 bp, probe
aaatctgtgatgtaggagtctctct

SEQ ID NO: 147831 - DNA, 25 bp, probe
aaatcatctctgtagtgaccacgta

SEQ ID NO: 147832 - DNA, 25 bp, probe
aaatgcagctgccaatgtactcagg

SEQ ID NO: 147833 - DNA, 25 bp, probe
aaatgagctcgggtgactgcagatt

SEQ ID NO: 147834 - DNA, 25 bp, probe
aaatggctctgctgatgcaagcagc

SEQ ID NO: 147835 - DNA, 25 bp, probe
aaaggatcagatgtgcaagaggttc

SEQ ID NO: 147836 - DNA, 25 bp, probe
aaatgggcatgagtgtcaggggtcc

SEQ ID NO: 147837 - DNA, 25 bp, probe
aaaggagagggccatgggcgtgcgg

SEQ ID NO: 147838 - DNA, 25 bp, probe
aaaggagagggccatgggcgtgcgg

SEQ ID NO: 147839 - DNA, 25 bp, probe
aaaggagagcggatggggtgccctg

SEQ ID NO: 147840 - DNA, 25 bp, probe
aaaggaagcagaaacggggcgaatg

SEQ ID NO: 147841 - DNA, 25 bp, probe
aaaaaagccattggcgggctctgtt

SEQ ID NO: 147842 - DNA, 25 bp, probe
aaagaagaccaatgccaagtcatgg

SEQ ID NO: 147843 - DNA, 25 bp, probe
aaagaagaccaatgccaagtcatgg

SEQ ID NO: 147844 - DNA, 25 bp, probe
aaataaaacacatgagccaggcgtg

SEQ ID NO: 147845 - DNA, 25 bp, probe
aaatacaaaagttagccaggcatgg

SEQ ID NO: 147846 - DNA, 25 bp, probe
aaaaccagtagtttccacacaggtg

SEQ ID NO: 147847 - DNA, 25 bp, probe
aaaaacagaagtcttaccagtgctg

SEQ ID NO: 147848 - DNA, 25 bp, probe
aaatggaaaagcacactaccagtgt

SEQ ID NO: 147849 - DNA, 25 bp, probe
aaatggaaaagcacactaccagtgt

SEQ ID NO: 147850 - DNA, 25 bp, probe
aaaggataagacctctctccgatgg

SEQ ID NO: 147851 - DNA, 25 bp, probe
aaaggcataagtcattccaatcagc

SEQ ID NO: 147852 - DNA, 25 bp, probe
aaaggtaagttattcctatcctgtg

SEQ ID NO: 147853 - DNA, 25 bp, probe
aaaggtaagttattcctatcctgtg

SEQ ID NO: 147854 - DNA, 25 bp, probe
aaagtataacttgtcacttaatgtt

SEQ ID NO: 147855 - DNA, 25 bp, probe
aaagtgtgaatcttggatccagtaa

SEQ ID NO: 147856 - DNA, 25 bp, probe
aaatgttaatctatgatccagccaa

SEQ ID NO: 147857 - DNA, 25 bp, probe
aaataaaatctgctacacgccaggg

SEQ ID NO: 147858 - DNA, 25 bp, probe
aaaaaccagtcggcagaccacaggg

SEQ ID NO: 147859 - DNA, 25 bp, probe
aaaaaccagtcggcagaccacaggg

SEQ ID NO: 147860 - DNA, 25 bp, probe
aaagacgctcaggagaaggccaacg

SEQ ID NO: 147861 - DNA, 25 bp, probe
aaagaccttgaagagcccatcacag

SEQ ID NO: 147862 - DNA, 25 bp, probe
aaaggccttaagtacatccactctg

SEQ ID NO: 147863 - DNA, 25 bp, probe
aaaggacaaacctctcagcagcatc

SEQ ID NO: 147864 - DNA, 25 bp, probe
aaaggacaaacctctcagcagcatc

SEQ ID NO: 147865 - DNA, 25 bp, probe
aaatctgaaactgcttctgccacat

SEQ ID NO: 147866 - DNA, 25 bp, probe
aaatcagggactgctactccacaga

SEQ ID NO: 147867 - DNA, 25 bp, probe
aaatcagggactgctactccacaga

SEQ ID NO: 147868 - DNA, 25 bp, probe
aaatcggatctcaagtacccactga

SEQ ID NO: 147869 - DNA, 25 bp, probe
aaaaggagccaagagcccaccttgt

SEQ ID NO: 147870 - DNA, 25 bp, probe
aaagaggggcaagagccactctgcg

SEQ ID NO: 147871 - DNA, 25 bp, probe
aaatggcagggacacttctcttgca

SEQ ID NO: 147872 - DNA, 25 bp, probe
aaatcgtggtcatactggaaggcat

SEQ ID NO: 147873 - DNA, 25 bp, probe
aaatcgtggtcatactggaaggcat

SEQ ID NO: 147874 - DNA, 25 bp, probe
aaaggtggacatgtcctgaaggaca

SEQ ID NO: 147875 - DNA, 25 bp, probe
aaagggagaacatggccaatagtca

SEQ ID NO: 147876 - DNA, 25 bp, probe
aaagggatggtcaggcccagttctc

SEQ ID NO: 147877 - DNA, 25 bp, probe
aaagaagaggtctccctcaatcctc

SEQ ID NO: 147878 - DNA, 25 bp, probe
aaagaagaggtctccctcaatcctc

SEQ ID NO: 147879 - DNA, 25 bp, probe
aaagaacacttctccctgagtgact

SEQ ID NO: 147880 - DNA, 25 bp, probe
aaaggcaacttcctgaccgaggatc

SEQ ID NO: 147881 - DNA, 25 bp, probe
aaatggaacttctgcaaggcagtaa

SEQ ID NO: 147882 - DNA, 25 bp, probe
aaatgccaatttgaacatgagaaaa

SEQ ID NO: 147883 - DNA, 25 bp, probe
aaatgccaatttgaacatgagaaaa

SEQ ID NO: 147884 - DNA, 25 bp, probe
aaaggcattcttgcaccatggtaaa

SEQ ID NO: 147885 - DNA, 25 bp, probe
aagggattctttatgtgtaaatggg

SEQ ID NO: 147886 - DNA, 25 bp, probe
aaatcttttgttctcatggaattgg

SEQ ID NO: 147887 - DNA, 25 bp, probe
aaatgctttctgttcatttggtatt

SEQ ID NO: 147888 - DNA, 25 bp, probe
aaatctgttcagtttgcattggtac

SEQ ID NO: 147889 - DNA, 25 bp, probe
aaatctatgacacttctgttgtgta

SEQ ID NO: 147890 - DNA, 25 bp, probe
aaatctatgacacttctgttgtgta

SEQ ID NO: 147891 - DNA, 25 bp, probe
aaatcaagccaattcttctgctgta

SEQ ID NO: 147892 - DNA, 25 bp, probe
aaatcacagcctcatcattagcaac

SEQ ID NO: 147893 - DNA, 25 bp, probe
aaatcacagcctcatcattagcaac

SEQ ID NO: 147894 - DNA, 25 bp, probe
aaatcaagagtcctcagcactccac

SEQ ID NO: 147895 - DNA, 25 bp, probe
aaatcacagcaaagaaccaccatct

SEQ ID NO: 147896 - DNA, 25 bp, probe
aaataatcagcaacattccagtctt

SEQ ID NO: 147897 - DNA, 25 bp, probe
aaatcaatcagaagtgctcctatat

SEQ ID NO: 147898 - DNA, 25 bp, probe
aaatcctgagagcatctcgaatatc

SEQ ID NO: 147899 - DNA, 25 bp, probe
aaatcctgagagcatctcgaatatc

SEQ ID NO: 147900 - DNA, 25 bp, probe
aaatcgtgcacgcttcatcaatcac

SEQ ID NO: 147901 - DNA, 25 bp, probe
aaatgatggcagggataacacacaa

SEQ ID NO: 147902 - DNA, 25 bp, probe
aaatgaagtgcacaagagcacgcag

SEQ ID NO: 147903 - DNA, 25 bp, probe
aaatcagagtggccaagagagagag

SEQ ID NO: 147904 - DNA, 25 bp, probe
aaagagctggtgcatgatgacgagg

SEQ ID NO: 147905 - DNA, 25 bp, probe
aaaggagaatcttatgaatgcagag

SEQ ID NO: 147906 - DNA, 25 bp, probe
aaagggaatgcatacattgctagtc

SEQ ID NO: 147907 - DNA, 25 bp, probe
aaatgtggaggctccatattaatgc

SEQ ID NO: 147908 - DNA, 25 bp, probe
aaatgtggaagctgcctctgaagag

SEQ ID NO: 147909 - DNA, 25 bp, probe
aaaggagcaggctccctgaaggcct

SEQ ID NO: 147910 - DNA, 25 bp, probe
aagcggaatatctccccaaagatcc

SEQ ID NO: 147911 - DNA, 25 bp, probe
aactggtagacgctcccaagaagtc

SEQ ID NO: 147912 - DNA, 25 bp, probe
aaatggtcaacgccatgcaccagaa

SEQ ID NO: 147913 - DNA, 25 bp, probe
aaatgtatttcctatcaccatactt

SEQ ID NO: 147914 - DNA, 25 bp, probe
aaatgtttgacaaagtcctcacttt

SEQ ID NO: 147915 - DNA, 25 bp, probe
aaatgttagaccaccctcacataat

SEQ ID NO: 147916 - DNA, 25 bp, probe
aaagttaactcacatgacccaaatg

SEQ ID NO: 147917 - DNA, 25 bp, probe
aaaggataaccacctgaaagggatg

SEQ ID NO: 147918 - DNA, 25 bp, probe
aaaaagatacgtcctgaaagcccag

SEQ ID NO: 147919 - DNA, 25 bp, probe
aaaaagatacgtcctgaaagcccag

SEQ ID NO: 147920 - DNA, 25 bp, probe
aactgaagctactggtactccccag

SEQ ID NO: 147921 - DNA, 25 bp, probe
aactgaagctactggtactccccag

SEQ ID NO: 147922 - DNA, 25 bp, probe
aaagaagtagctgtgttctcccagc

SEQ ID NO: 147923 - DNA, 25 bp, probe
aaaggagtgagcagttctcctcccc

SEQ ID NO: 147924 - DNA, 25 bp, probe
aaagtgtcgctcaagtcttccgacc

SEQ ID NO: 147925 - DNA, 25 bp, probe
aaaggttctcaggtgttgccaaata

SEQ ID NO: 147926 - DNA, 25 bp, probe
aaaggtattagatttactgctaatg

SEQ ID NO: 147927 - DNA, 25 bp, probe
aaagactatttttatcctgcaactc

SEQ ID NO: 147928 - DNA, 25 bp, probe
aaatctctttttgactcttgcaatc

SEQ ID NO: 147929 - DNA, 25 bp, probe
aaatctttgtgacacactttgacaa

SEQ ID NO: 147930 - DNA, 25 bp, probe
aaatctttgtgacacactttgacaa

SEQ ID NO: 147931 - DNA, 25 bp, probe
aaatcacttgatgtaacctggaaac

SEQ ID NO: 147932 - DNA, 25 bp, probe
aaatcatattgtttaagcctggtaa

SEQ ID NO: 147933 - DNA, 25 bp, probe
aaagatcattatttaacctagttca

SEQ ID NO: 147934 - DNA, 25 bp, probe
aaatgattttgtacacctccttcta

SEQ ID NO: 147935 - DNA, 25 bp, probe
aaatgattttgtacacctccttcta

SEQ ID NO: 147936 - DNA, 25 bp, probe
aactgtcttagtacaccataaactg

SEQ ID NO: 147937 - DNA, 25 bp, probe
aaatgtttagttgccacagtgaacc

SEQ ID NO: 147938 - DNA, 25 bp, probe
aaagtggtcacttccaccgtgaagc

SEQ ID NO: 147939 - DNA, 25 bp, probe
aaagggaactgtgacatttcaagct

SEQ ID NO: 147940 - DNA, 25 bp, probe
aaatgggaagttggtagctctgaag

SEQ ID NO: 147941 - DNA, 25 bp, probe
aaatgggaagttggtagctctgaag

SEQ ID NO: 147942 - DNA, 25 bp, probe
aaatgcaggaaggccgggttgtgag

SEQ ID NO: 147943 - DNA, 25 bp, probe
aaatgcaggccacgccagagtgctt

SEQ ID NO: 147944 - DNA, 25 bp, probe
aaagagatgccagccaggtatttta

SEQ ID NO: 147945 - DNA, 25 bp, probe
aacggaatcacgtatggttctttct

SEQ ID NO: 147946 - DNA, 25 bp, probe
aaaggtcacgtgcggttcattgact

SEQ ID NO: 147947 - DNA, 25 bp, probe
aaaggtacatatgggttcacattga

SEQ ID NO: 147948 - DNA, 25 bp, probe
aaaggtgcaattgcttttctcatga

SEQ ID NO: 147949 - DNA, 25 bp, probe
aaatgctgtgaattactcttcctcc

SEQ ID NO: 147950 - DNA, 25 bp, probe
aaatcttgctggtactcttctatcc

SEQ ID NO: 147951 - DNA, 25 bp, probe
aaatcttgctcatgcttttcaacca

SEQ ID NO: 147952 - DNA, 25 bp, probe
aaatctttatcgtttccaaacagca

SEQ ID NO: 147953 - DNA, 25 bp, probe
aaatgctgaagaggcccccaaaatg

SEQ ID NO: 147954 - DNA, 25 bp, probe
aacagtgatagagcccccattacac

SEQ ID NO: 147955 - DNA, 25 bp, probe
aacagtgatagagcccccattacac

SEQ ID NO: 147956 - DNA, 25 bp, probe
aaactgacaggtgaccgatgtacag

SEQ ID NO: 147957 - DNA, 25 bp, probe
aaaggcagcaggctaccggacggca

SEQ ID NO: 147958 - DNA, 25 bp, probe
aaaggacggcgcacacggagaggcc

SEQ ID NO: 147959 - DNA, 25 bp, probe
aaaggcagccggaattcgtgtgagc

SEQ ID NO: 147960 - DNA, 25 bp, probe
aaagaggcacattgaattcttggat

SEQ ID NO: 147961 - DNA, 25 bp, probe
aaagggactaacatcgaagcatctg

SEQ ID NO: 147962 - DNA, 25 bp, probe
aaagaggatttgattggaaagcagt

SEQ ID NO: 147963 - DNA, 25 bp, probe
aaagaggtttgcatgctggtaatgc

SEQ ID NO: 147964 - DNA, 25 bp, probe
aaagaactactgggcatgtgctttg

SEQ ID NO: 147965 - DNA, 25 bp, probe
aaaggctatgccgggagtctttggc

SEQ ID NO: 147966 - DNA, 25 bp, probe
aaaggcaaggacgggcagattgggg

SEQ ID NO: 147967 - DNA, 25 bp, probe
aaaggccgctgaagctggcgacagg

SEQ ID NO: 147968 - DNA, 25 bp, probe
aaatggccgtgcaagcttaggctgg

SEQ ID NO: 147969 - DNA, 25 bp, probe
aaaggctctggttcgagggggcctg

SEQ ID NO: 147970 - DNA, 25 bp, probe
aaaggctctggttcgagggggcctg

SEQ ID NO: 147971 - DNA, 25 bp, probe
aaaacctgttacctcaggggagcag

SEQ ID NO: 147972 - DNA, 25 bp, probe
aaaactggttccagagtgggatagt

SEQ ID NO: 147973 - DNA, 25 bp, probe
aacagcaagggctcttaggggtcag

SEQ ID NO: 147974 - DNA, 25 bp, probe
aaagcagaggggattttggatgtct

SEQ ID NO: 147975 - DNA, 25 bp, probe
aaatgtgactttcttgttttgtctc

SEQ ID NO: 147976 - DNA, 25 bp, probe
aaatgtttctacagatattaatgtt

SEQ ID NO: 147977 - DNA, 25 bp, probe
aaatgctcatttaatagatattcac

SEQ ID NO: 147978 - DNA, 25 bp, probe
aaatcctttttcgatcattcaatgc

SEQ ID NO: 147979 - DNA, 25 bp, probe
aaatctcattttgctcatcttacca

SEQ ID NO: 147980 - DNA, 25 bp, probe
aaatgtctgttttcgctttaggcat

SEQ ID NO: 147981 - DNA, 25 bp, probe
aaatgtttctcttgatgtttacatg

SEQ ID NO: 147982 - DNA, 25 bp, probe
aaatgtatcttgagaggtaggagca

SEQ ID NO: 147983 - DNA, 25 bp, probe
aaatcatactttgggtgtggtgacc

SEQ ID NO: 147984 - DNA, 25 bp, probe
aaatcatactttgggtgtggtgacc

SEQ ID NO: 147985 - DNA, 25 bp, probe
aaatcattgctttcagggctcttga

SEQ ID NO: 147986 - DNA, 25 bp, probe
aaatgcaaccagcaggcctgcaaga

SEQ ID NO: 147987 - DNA, 25 bp, probe
aaatgaactgcttatggcttgtaaa

SEQ ID NO: 147988 - DNA, 25 bp, probe
aaagacagactgtgcctctctaatg

SEQ ID NO: 147989 - DNA, 25 bp, probe
aaagcacaggctgtactgccaggct

SEQ ID NO: 147990 - DNA, 25 bp, probe
aaaggcaggcgacagcatcctgacg

SEQ ID NO: 147991 - DNA, 25 bp, probe
aaagatgctccccgagcatcctggt

SEQ ID NO: 147992 - DNA, 25 bp, probe
aaagatgctccccgagcatcctggt

SEQ ID NO: 147993 - DNA, 25 bp, probe
aaagtgcatccacagagacctggct

SEQ ID NO: 147994 - DNA, 25 bp, probe
aaatgactcctgatgaacagtgtgt

SEQ ID NO: 147995 - DNA, 25 bp, probe
aaatgtatattgatgtaactgtgtc

SEQ ID NO: 147996 - DNA, 25 bp, probe
aaatggtactcttttcatcatggtg

SEQ ID NO: 147997 - DNA, 25 bp, probe
aaatgttatccttgttcctgttaca

SEQ ID NO: 147998 - DNA, 25 bp, probe
aaatgttatccttgttcctgttaca

SEQ ID NO: 147999 - DNA, 25 bp, probe
aaatgtattttcttttatgttcaga

SEQ ID NO: 148000 - DNA, 25 bp, probe
aaatgttatgctattctttgcaaaa

SEQ ID NO: 148001 - DNA, 25 bp, probe
aaatgtgtcctatctatcttccaaa

SEQ ID NO: 148002 - DNA, 25 bp, probe
aaagtgtcctatgaacccatcacaa

SEQ ID NO: 148003 - DNA, 25 bp, probe
aaagtctttatctgacccatcaaca

SEQ ID NO: 148004 - DNA, 25 bp, probe
aaagtctttatctgacccatcaaca

SEQ ID NO: 148005 - DNA, 25 bp, probe
taaagttctttctgccttataaggc

SEQ ID NO: 148006 - DNA, 25 bp, probe
aaagttctttctgccttataaggct

SEQ ID NO: 148007 - DNA, 25 bp, probe
aaagggcttattgactctttctatt

SEQ ID NO: 148008 - DNA, 25 bp, probe
aaaggacttgattacctccattcgg

SEQ ID NO: 148009 - DNA, 25 bp, probe
aaacaagtggcttactgcccttctg

SEQ ID NO: 148010 - DNA, 25 bp, probe
aaactgaatgagcaaggcctcttgg

SEQ ID NO: 148011 - DNA, 25 bp, probe
aaagtgggaggaggaggcccggctg

SEQ ID NO: 148012 - DNA, 25 bp, probe
aaagtgtgatggcaccgagtcctac

SEQ ID NO: 148013 - DNA, 25 bp, probe
aaaggttgtgtagctgtgtcatgta

SEQ ID NO: 148014 - DNA, 25 bp, probe
aaatgtttttgttgtgtgacactga

SEQ ID NO: 148015 - DNA, 25 bp, probe
aaagatttcgtttcgatgactcatt

SEQ ID NO: 148016 - DNA, 25 bp, probe
aaagcatttttttcactgcattcta

SEQ ID NO: 148017 - DNA, 25 bp, probe
aaagagcttctagtaattgaaccat

SEQ ID NO: 148018 - DNA, 25 bp, probe
aaatggcatttaggaattagaagtc

SEQ ID NO: 148019 - DNA, 25 bp, probe
aaagtgcattgcagggtgatgaaag

SEQ ID NO: 148020 - DNA, 25 bp, probe
ttaaggcttgggcggacaaagggcg

SEQ ID NO: 148021 - DNA, 25 bp, probe
aaaggttgggcaagggaatatggag

SEQ ID NO: 148022 - DNA, 25 bp, probe
aaaccgtgggcttgggactgtgaat

SEQ ID NO: 148023 - DNA, 25 bp, probe
aaatccctcggttctaagatacaat

SEQ ID NO: 148024 - DNA, 25 bp, probe
aaaccacggagttcacaacacagca

SEQ ID NO: 148025 - DNA, 25 bp, probe
aaaccacggagttcacaacacagca

SEQ ID NO: 148026 - DNA, 25 bp, probe
aaaggccttgagaaagcgaagcagg

SEQ ID NO: 148027 - DNA, 25 bp, probe
aaaggccttagtgagcgagtcatgg

SEQ ID NO: 148028 - DNA, 25 bp, probe
aaagacttctaaggaggcagttggt

SEQ ID NO: 148029 - DNA, 25 bp, probe
aaatgaccttgaaatgggcatgctg

SEQ ID NO: 148030 - DNA, 25 bp, probe
aaatgaccttgaaatgggcatgctg

SEQ ID NO: 148031 - DNA, 25 bp, probe
aaatggagttgctgatggagtgatc

SEQ ID NO: 148032 - DNA, 25 bp, probe
aaatggatcatttggtgtggtatat

SEQ ID NO: 148033 - DNA, 25 bp, probe
aaatggactgactttatgcctatga

SEQ ID NO: 148034 - DNA, 25 bp, probe
aaatgctggtaatagatgcatctaa

SEQ ID NO: 148035 - DNA, 25 bp, probe
aaatgctggtaatagatgcatctaa

SEQ ID NO: 148036 - DNA, 25 bp, probe
aaatctgttttgtatatgatctaat

SEQ ID NO: 148037 - DNA, 25 bp, probe
aaatcctattagtcatatatttata

SEQ ID NO: 148038 - DNA, 25 bp, probe
aaatcctgtgtttcattacttgaat

SEQ ID NO: 148039 - DNA, 25 bp, probe
aaaacttcttgataacttgcatgat

SEQ ID NO: 148040 - DNA, 25 bp, probe
aaaacttcttgataacttgcatgat

SEQ ID NO: 148041 - DNA, 25 bp, probe
aaagacttcatttaacactgagtga

SEQ ID NO: 148042 - DNA, 25 bp, probe
aaatgactacactcaaggatgtgaa

SEQ ID NO: 148043 - DNA, 25 bp, probe
aaatgataaggctctgaaatggaat

SEQ ID NO: 148044 - DNA, 25 bp, probe
aaatgttaggtgttgacattgagaa

SEQ ID NO: 148045 - DNA, 25 bp, probe
aaatctgctagggaatatcaataga

SEQ ID NO: 148046 - DNA, 25 bp, probe
aaatgctgtacgggcctgcagtaga

SEQ ID NO: 148047 - DNA, 25 bp, probe
aaatgcgagatcgagctgcgccagg

SEQ ID NO: 148048 - DNA, 25 bp, probe
aaatctgcagatggaatccgagcag

SEQ ID NO: 148049 - DNA, 25 bp, probe
aaatgtgagcggaattccatgcagt

SEQ ID NO: 148050 - DNA, 25 bp, probe
aaatgctgactcttatcaccatcac

SEQ ID NO: 148051 - DNA, 25 bp, probe
aaatgctagtataaacaaacaaatt

SEQ ID NO: 148052 - DNA, 25 bp, probe
aaagtgtgcacaaaactaaagaata

SEQ ID NO: 148053 - DNA, 25 bp, probe
aaagtgttcctgtacataagcaaat

SEQ ID NO: 148054 - DNA, 25 bp, probe
aaatgtgcatgacctctacattgaa

SEQ ID NO: 148055 - DNA, 25 bp, probe
aaatgtatcatcttgctactggaaa

SEQ ID NO: 148056 - DNA, 25 bp, probe
aaatgtatcatcttgctactggaaa

SEQ ID NO: 148057 - DNA, 25 bp, probe
aaatgttctttcaagtgcaaagtaa

SEQ ID NO: 148058 - DNA, 25 bp, probe
aacgctagtttgataaaaatggaag

SEQ ID NO: 148059 - DNA, 25 bp, probe
aacacggtttgacagtaaataaatg

SEQ ID NO: 148060 - DNA, 25 bp, probe
aaatctggtgtatgggtattaaata

SEQ ID NO: 148061 - DNA, 25 bp, probe
aaagtggtttagtgctagaaggaga

SEQ ID NO: 148062 - DNA, 25 bp, probe
aaatgtggtttatcacttaagagaa

SEQ ID NO: 148063 - DNA, 25 bp, probe
aaatgtggcgtttttctaagaatga

SEQ ID NO: 148064 - DNA, 25 bp, probe
aaatgctgtggatgttttccaggtt

SEQ ID NO: 148065 - DNA, 25 bp, probe
aaatctggaaatctgttttgtatat

SEQ ID NO: 148066 - DNA, 25 bp, probe
aaatctggactgaaggtgtcctttt

SEQ ID NO: 148067 - DNA, 25 bp, probe
aaatccctgtatcgtggaccttttg

SEQ ID NO: 148068 - DNA, 25 bp, probe
aaatccctgtatcgtggaccttttg

SEQ ID NO: 148069 - DNA, 25 bp, probe
aaatgccacgtctgtttaaattatt

SEQ ID NO: 148070 - DNA, 25 bp, probe
aaatgaaggtctggtgtatatgttt

SEQ ID NO: 148071 - DNA, 25 bp, probe
aaagtattacatgtgtttgatttta

SEQ ID NO: 148072 - DNA, 25 bp, probe
aaatgtaaatgatgtgtagtttatt

SEQ ID NO: 148073 - DNA, 25 bp, probe
aaatgctaaatatggtcgttactat

SEQ ID NO: 148074 - DNA, 25 bp, probe
aaagtcgacatatggtctctgggta

SEQ ID NO: 148075 - DNA, 25 bp, probe
aaatgccacatttctggtctctggg

SEQ ID NO: 148076 - DNA, 25 bp, probe
aaagctgcatcaagacccatttggc

SEQ ID NO: 148077 - DNA, 25 bp, probe
aaagctgcatcaagacccatttggc

SEQ ID NO: 148078 - DNA, 25 bp, probe
aaatctgtgatgatcctcatatggc

SEQ ID NO: 148079 - DNA, 25 bp, probe
aaacattgatgtagaatttggggca

SEQ ID NO: 148080 - DNA, 25 bp, probe
aaacataactctgaattggggccca

SEQ ID NO: 148081 - DNA, 25 bp, probe
aaagcatcctctccaaagttggagc

SEQ ID NO: 148082 - DNA, 25 bp, probe
aaatgcagccttaaacagtgtccag

SEQ ID NO: 148083 - DNA, 25 bp, probe
aaatgcagccttaaacagtgtccag

SEQ ID NO: 148084 - DNA, 25 bp, probe
aaatgcacctaaagaggcctccatg

SEQ ID NO: 148085 - DNA, 25 bp, probe
aaatgacctgcatcaagtcttctga

SEQ ID NO: 148086 - DNA, 25 bp, probe
aaatccagcatcccaagatcattct

SEQ ID NO: 148087 - DNA, 25 bp, probe
aaatgcccacatccaggaagtccta

SEQ ID NO: 148088 - DNA, 25 bp, probe
aaatgctccacattgccagtcagat

SEQ ID NO: 148089 - DNA, 25 bp, probe
aaatgtcatatctctgatgtctttt

SEQ ID NO: 148090 - DNA, 25 bp, probe
aaatggctatcttccactgtttatt

SEQ ID NO: 148091 - DNA, 25 bp, probe
aaatgggtttgctaatgtgctgttt

SEQ ID NO: 148092 - DNA, 25 bp, probe
aaatgggtttgctaatgtgctgttt

SEQ ID NO: 148093 - DNA, 25 bp, probe
aaagctggtttatcatcctggtatt

SEQ ID NO: 148094 - DNA, 25 bp, probe
aaatgtggtattagacactttgatt

SEQ ID NO: 148095 - DNA, 25 bp, probe
aaagtggtgactggacaatgaagac

SEQ ID NO: 148096 - DNA, 25 bp, probe
aaagtgatgatactgtaacgaagat

SEQ ID NO: 148097 - DNA, 25 bp, probe
aaaggtgatgttcaacagaagtgaa

SEQ ID NO: 148098 - DNA, 25 bp, probe
aaaggttgtatgtgatcagaagctg

SEQ ID NO: 148099 - DNA, 25 bp, probe
aaatggtattactttgatgatagca

SEQ ID NO: 148100 - DNA, 25 bp, probe
aaatgagctttatagtacatacaaa

SEQ ID NO: 148101 - DNA, 25 bp, probe
aaatgccatttattaggcaataatt

SEQ ID NO: 148102 - DNA, 25 bp, probe
aaatgccatttattaggcaataatt

SEQ ID NO: 148103 - DNA, 25 bp, probe
aaatccactgatttacacaatcttt

SEQ ID NO: 148104 - DNA, 25 bp, probe
aaatccactatgacatctaagtttt

SEQ ID NO: 148105 - DNA, 25 bp, probe
aaatggcactgaatcatccatattt

SEQ ID NO: 148106 - DNA, 25 bp, probe
aaatcgcagtgatagttgactttgg

SEQ ID NO: 148107 - DNA, 25 bp, probe
aaatgctgcattttgagtggacttg

SEQ ID NO: 148108 - DNA, 25 bp, probe
aaatgtgcatcatcttgtcggccat

SEQ ID NO: 148109 - DNA, 25 bp, probe
aaatggctcatacttatatagcact

SEQ ID NO: 148110 - DNA, 25 bp, probe
aaatggtcttctcatgactccttgt

SEQ ID NO: 148111 - DNA, 25 bp, probe
aaatggacatgcatcaaacccttga

SEQ ID NO: 148112 - DNA, 25 bp, probe
aaatggacagcaccggaagctctta

SEQ ID NO: 148113 - DNA, 25 bp, probe
aaatgtcaaaggtgagactctctca

SEQ ID NO: 148114 - DNA, 25 bp, probe
aaagtataaagtgtagccatgtcta

SEQ ID NO: 148115 - DNA, 25 bp, probe
aaatgtgatacccatagcttccatg

SEQ ID NO: 148116 - DNA, 25 bp, probe
aaatgactgagtggtatgcttacaa

SEQ ID NO: 148117 - DNA, 25 bp, probe
aaatgactgagtggtatgcttacaa

SEQ ID NO: 148118 - DNA, 25 bp, probe
aaatgaataatggtagcctaaactt

SEQ ID NO: 148119 - DNA, 25 bp, probe
aaagcaatttccaacctgacaaatc

SEQ ID NO: 148120 - DNA, 25 bp, probe
aaagcttggtgctaaaccacaatat

SEQ ID NO: 148121 - DNA, 25 bp, probe
aaagctaaggtagagctacagtgtg

SEQ ID NO: 148122 - DNA, 25 bp, probe
aaagctcaggggtaggcccaggtgg

SEQ ID NO: 148123 - DNA, 25 bp, probe
aaagtaggtgtgtggctgcggtgag

SEQ ID NO: 148124 - DNA, 25 bp, probe
aaagtagcgtgctattcgtcctgta

SEQ ID NO: 148125 - DNA, 25 bp, probe
aaagatagccccacgaagcatgttc

SEQ ID NO: 148126 - DNA, 25 bp, probe
aaaatagccaacgagctgaagcttt

SEQ ID NO: 148127 - DNA, 25 bp, probe
aaagtagcccagggctgtagcacag

SEQ ID NO: 148128 - DNA, 25 bp, probe
aaagtgaacgcccttgtagagcagc

SEQ ID NO: 148129 - DNA, 25 bp, probe
aaatgctgaacactttctgtgggtc

SEQ ID NO: 148130 - DNA, 25 bp, probe
aaatggactcctatgctcggatctt

SEQ ID NO: 148131 - DNA, 25 bp, probe
aaatggcactcattgtggccttgtt

SEQ ID NO: 148132 - DNA, 25 bp, probe
aaatgacagtgaattgacccatgtt

SEQ ID NO: 148133 - DNA, 25 bp, probe
aaatgagcaagaatcagacatcaca

SEQ ID NO: 148134 - DNA, 25 bp, probe
aaatgagcaagaatcagacatcaca

SEQ ID NO: 148135 - DNA, 25 bp, probe
aaatggaaggcaaagcatcacatgt

SEQ ID NO: 148136 - DNA, 25 bp, probe
aaatgaaaatcaagagatccatctc

SEQ ID NO: 148137 - DNA, 25 bp, probe
aaatgaatttgctggcttctcttat

SEQ ID NO: 148138 - DNA, 25 bp, probe
aaatgaatttgctggcttctcttat

SEQ ID NO: 148139 - DNA, 25 bp, probe
aaatgaatcccaaatgcatttttta

SEQ ID NO: 148140 - DNA, 25 bp, probe
aaatgcaaaccaaatcttctctgtt

SEQ ID NO: 148141 - DNA, 25 bp, probe
aaatgtgcaaccactgcttcttggg

SEQ ID NO: 148142 - DNA, 25 bp, probe
aaatgtgcaaccactgcttcttggg

SEQ ID NO: 148143 - DNA, 25 bp, probe
aaatgtgcaaccactgcttcttggg

SEQ ID NO: 148144 - DNA, 25 bp, probe
aaatgtgacaggacctgctgacttg

SEQ ID NO: 148145 - DNA, 25 bp, probe
aaatgatgtagtccctcaacttggc

SEQ ID NO: 148146 - DNA, 25 bp, probe
aaagagttgtggcctctaccattgc

SEQ ID NO: 148147 - DNA, 25 bp, probe
aaagaagtgtcacctcattccaggc

SEQ ID NO: 148148 - DNA, 25 bp, probe
aaagatgagatggaccgccagccag

SEQ ID NO: 148149 - DNA, 25 bp, probe
aaagatgagatggaccgccagccag

SEQ ID NO: 148150 - DNA, 25 bp, probe
aaaggctgaggaggccggctgcagc

SEQ ID NO: 148151 - DNA, 25 bp, probe
aaagactgtgtaggcccagaagtgg

SEQ ID NO: 148152 - DNA, 25 bp, probe
aaaggatgttgggctaagggctgtg

SEQ ID NO: 148153 - DNA, 25 bp, probe
aaagatgagtttgtatcatggagga

SEQ ID NO: 148154 - DNA, 25 bp, probe
catcaaggtgctgactctcactgac

SEQ ID NO: 148155 - DNA, 25 bp, probe
aaatgatgaatgtgggattattgaa

SEQ ID NO: 148156 - DNA, 25 bp, probe
aaagtccaccagcgatctatatgat

SEQ ID NO: 148157 - DNA, 25 bp, probe
aaagtcaaacagcgcagcttacaga

SEQ ID NO: 148158 - DNA, 25 bp, probe
aacagaaaaacatcagtgctacagg

SEQ ID NO: 148159 - DNA, 25 bp, probe
aaaggagaataccacagagctccag

SEQ ID NO: 148160 - DNA, 25 bp, probe
aaagtaccatagcacagcactgcta

SEQ ID NO: 148161 - DNA, 25 bp, probe
aaatgtcactctttcaaaatctata

SEQ ID NO: 148162 - DNA, 25 bp, probe
aaatgtcgcttcttcaagtgaatga

SEQ ID NO: 148163 - DNA, 25 bp, probe
aaagttcatggctcatggtcaaggt

SEQ ID NO: 148164 - DNA, 25 bp, probe
aaagttcatggctcatggtcaaggt

SEQ ID NO: 148165 - DNA, 25 bp, probe
aaacttcggttacggcatagcctat

SEQ ID NO: 148166 - DNA, 25 bp, probe
aaacttcggttacggcatagcctat

SEQ ID NO: 148167 - DNA, 25 bp, probe
aaagttcgggtcatggcagactcta

SEQ ID NO: 148168 - DNA, 25 bp, probe
aaagtgtgctgtggttcggaagtct

SEQ ID NO: 148169 - DNA, 25 bp, probe
aaagtgcgcgatgccgggatcaaag

SEQ ID NO: 148170 - DNA, 25 bp, probe
aaagactgcgtgaccgggaagaaag

SEQ ID NO: 148171 - DNA, 25 bp, probe
aaagtgggtgatgagggaaggcata

SEQ ID NO: 148172 - DNA, 25 bp, probe
aaagttgagtgtcaggggacatgat

SEQ ID NO: 148173 - DNA, 25 bp, probe
gaattgcttgaacccgggagacgga

SEQ ID NO: 148174 - DNA, 25 bp, probe
aaatgttgaagctcggtgtaccgcg

SEQ ID NO: 148175 - DNA, 25 bp, probe
aaatgttgaagctcggtgtaccgcg

SEQ ID NO: 148176 - DNA, 25 bp, probe
aaaggctgcaaaacggtgttcacca

SEQ ID NO: 148177 - DNA, 25 bp, probe
aaagcctgcatggaagacgtttaat

SEQ ID NO: 148178 - DNA, 25 bp, probe
aaagcctgcatggaagacgtttaat

SEQ ID NO: 148179 - DNA, 25 bp, probe
aaagtattggagcccagatttattc

SEQ ID NO: 148180 - DNA, 25 bp, probe
aaagatttctgctccaaattttcaa

SEQ ID NO: 148181 - DNA, 25 bp, probe
aaagttgttctgaccagggctttca

SEQ ID NO: 148182 - DNA, 25 bp, probe
aaagttgtatatctgaggtgtacca

SEQ ID NO: 148183 - DNA, 25 bp, probe
aaatgctgttaacctggcagtatta

SEQ ID NO: 148184 - DNA, 25 bp, probe
aaatgcatgtttagggatggctaaa

SEQ ID NO: 148185 - DNA, 25 bp, probe
aaatgttttggtggcatgaggacaa

SEQ ID NO: 148186 - DNA, 25 bp, probe
aaagtttccagtggctgcagagaga

SEQ ID NO: 148187 - DNA, 25 bp, probe
aaagtttctcagcgccgagtggact

SEQ ID NO: 148188 - DNA, 25 bp, probe
aaagctacatcaagggccagcagcg

SEQ ID NO: 148189 - DNA, 25 bp, probe
aaagctgactcactgtgagtgacct

SEQ ID NO: 148190 - DNA, 25 bp, probe
aaagagacgacttgggacgcaacga

SEQ ID NO: 148191 - DNA, 25 bp, probe
aaagagccggcctgtgagtgtaaaa

SEQ ID NO: 148192 - DNA, 25 bp, probe
aaaggcgagagctgttttggcaaaa

SEQ ID NO: 148193 - DNA, 25 bp, probe
aaagtcggaccagtgtcaaggaaag

SEQ ID NO: 148194 - DNA, 25 bp, probe
aaagtctgtgactcgggggaaagtg

SEQ ID NO: 148195 - DNA, 25 bp, probe
aaagttgctagtactggggagaaat

SEQ ID NO: 148196 - DNA, 25 bp, probe
aaaggcttactttggagagacagtt

SEQ ID NO: 148197 - DNA, 25 bp, probe
aaaggcttactttggagagacagtt

SEQ ID NO: 148198 - DNA, 25 bp, probe
aaatgtctctttatggatgtattgt

SEQ ID NO: 148199 - DNA, 25 bp, probe
aaatgtctctttatggatgtattgt

SEQ ID NO: 148200 - DNA, 25 bp, probe
aaatgtgcctggacaatggtgtaca

SEQ ID NO: 148201 - DNA, 25 bp, probe
aaatgtgcctggacaatggtgtaca

SEQ ID NO: 148202 - DNA, 25 bp, probe
aaatggtcttaatggtgctcacttt

SEQ ID NO: 148203 - DNA, 25 bp, probe
aaatggggtgaacggtgctggcagt

SEQ ID NO: 148204 - DNA, 25 bp, probe
aaatgaggttgaggacgtgggagac

SEQ ID NO: 148205 - DNA, 25 bp, probe
aaatgcagatggaggatcggtgtga

SEQ ID NO: 148206 - DNA, 25 bp, probe
aaatgagaagacggctcggtgaggg

SEQ ID NO: 148207 - DNA, 25 bp, probe
aaagagaaccccagagatgaaaggc

SEQ ID NO: 148208 - DNA, 25 bp, probe
aaaggaaaccacggagtgcccagtg

SEQ ID NO: 148209 - DNA, 25 bp, probe
aaagtagaagaccctgattgcccgt

SEQ ID NO: 148210 - DNA, 25 bp, probe
aaagtggagaagagctatccccgat

SEQ ID NO: 148211 - DNA, 25 bp, probe
aaagagatcatctgttgctatcccc

SEQ ID NO: 148212 - DNA, 25 bp, probe
aaatgagaaccatactgcacccatc

SEQ ID NO: 148213 - DNA, 25 bp, probe
aaagagcaacgccaagagacccaag

SEQ ID NO: 148214 - DNA, 25 bp, probe
aaagagaaccatcagcaggccagca

SEQ ID NO: 148215 - DNA, 25 bp, probe
aaaggtacctgccaggcacaggcac

SEQ ID NO: 148216 - DNA, 25 bp, probe
aaagcttaatgggctggccaggctg

SEQ ID NO: 148217 - DNA, 25 bp, probe
aaagtttttgttgaaagctgtgctc

SEQ ID NO: 148218 - DNA, 25 bp, probe
aaatgtccatttgtgtaaatgtatt

SEQ ID NO: 148219 - DNA, 25 bp, probe
aaagtgtgtttctatgtgacaattt

SEQ ID NO: 148220 - DNA, 25 bp, probe
aaagtgtgtttctatgtgacaattt

SEQ ID NO: 148221 - DNA, 25 bp, probe
aaatgtcttttgtgctacagtttcg

SEQ ID NO: 148222 - DNA, 25 bp, probe
aaagttggcctgtgctgacatttcc

SEQ ID NO: 148223 - DNA, 25 bp, probe
aaaggatcagtttggctgccttatc

SEQ ID NO: 148224 - DNA, 25 bp, probe
aaaggcatgcagtttgtccattgtg

SEQ ID NO: 148225 - DNA, 25 bp, probe
aaatgtagcaataatgtcttttgaa

SEQ ID NO: 148226 - DNA, 25 bp, probe
aaatgcacaaataatctttttcata

SEQ ID NO: 148227 - DNA, 25 bp, probe
aaatgcacataattaactggttcca

SEQ ID NO: 148228 - DNA, 25 bp, probe
aaatgcacataattaactggttcca

SEQ ID NO: 148229 - DNA, 25 bp, probe
aaatgacacaaatgactgggctaaa

SEQ ID NO: 148230 - DNA, 25 bp, probe
aaagatgcgaacatactggctctta

SEQ ID NO: 148231 - DNA, 25 bp, probe
aaagtggtcacctacaggatcgtat

SEQ ID NO: 148232 - DNA, 25 bp, probe
aaatgtgacccctcagagtagctct

SEQ ID NO: 148233 - DNA, 25 bp, probe
aaatggtctctggcattgaagtaga

SEQ ID NO: 148234 - DNA, 25 bp, probe
aaaggtgctctccagtaactaacta

SEQ ID NO: 148235 - DNA, 25 bp, probe
aaatgggatgctagcgtgccactac

SEQ ID NO: 148236 - DNA, 25 bp, probe
aaatggtcattgtgtgcctcatcac

SEQ ID NO: 148237 - DNA, 25 bp, probe
aaatggtcattgtgtgcctcatcac

SEQ ID NO: 148238 - DNA, 25 bp, probe
aaaggtcagcagagatcctccagcc

SEQ ID NO: 148239 - DNA, 25 bp, probe
aaaggtcagcagagatcctccagcc

SEQ ID NO: 148240 - DNA, 25 bp, probe
aaatggacagcgggtgctgcccgca

SEQ ID NO: 148241 - DNA, 25 bp, probe
aaatgagatcaggctctgcctcacc

SEQ ID NO: 148242 - DNA, 25 bp, probe
aaagcagatgcaagtatccctcacc

SEQ ID NO: 148243 - DNA, 25 bp, probe
aaatgatacttgacatccttccaca

SEQ ID NO: 148244 - DNA, 25 bp, probe
aaatgtacatgtgcagatattccta

SEQ ID NO: 148245 - DNA, 25 bp, probe
aaatgtaagatcgttctctgcctca

SEQ ID NO: 148246 - DNA, 25 bp, probe
aaatgtaagatcgttctctgcctca

SEQ ID NO: 148247 - DNA, 25 bp, probe
aaagttggagcttctattgccatga

SEQ ID NO: 148248 - DNA, 25 bp, probe
aaagttgtggagtgcatcgatcata

SEQ ID NO: 148249 - DNA, 25 bp, probe
aaagttgtggagtgcatcgatcata

SEQ ID NO: 148250 - DNA, 25 bp, probe
aaagtattgtggccgagctgcagct

SEQ ID NO: 148251 - DNA, 25 bp, probe
aaagttgtgctgggtactgcttggt

SEQ ID NO: 148252 - DNA, 25 bp, probe
aaagttgcctatgttttgtgagctg

SEQ ID NO: 148253 - DNA, 25 bp, probe
aaatgttcctgtggtattttgtgtc

SEQ ID NO: 148254 - DNA, 25 bp, probe
aaaggtgtctgtgctatttctgtac

SEQ ID NO: 148255 - DNA, 25 bp, probe
aaagtgatgtgtgggcatttggcgt

SEQ ID NO: 148256 - DNA, 25 bp, probe
aaaggatttgcagcttgcggcggaa

SEQ ID NO: 148257 - DNA, 25 bp, probe
aaaggcctgacagctctgtggcctg

SEQ ID NO: 148258 - DNA, 25 bp, probe
aaaggcctgacatatctgagggaga

SEQ ID NO: 148259 - DNA, 25 bp, probe
aaagtcctccactcagaggcagaga

SEQ ID NO: 148260 - DNA, 25 bp, probe
aaatgatccgcgtcccgaatgctga

SEQ ID NO: 148261 - DNA, 25 bp, probe
aaatgtggtctgtccacgcaatgga

SEQ ID NO: 148262 - DNA, 25 bp, probe
aaatgtgttcctcagcgacagtgta

SEQ ID NO: 148263 - DNA, 25 bp, probe
aaagattctcaggttggcacagtta

SEQ ID NO: 148264 - DNA, 25 bp, probe
aaagattctcaggttggcacagtta

SEQ ID NO: 148265 - DNA, 25 bp, probe
aaagattgagcatttagtcacattt

SEQ ID NO: 148266 - DNA, 25 bp, probe
aaagttgtatactctactttcatgt

SEQ ID NO: 148267 - DNA, 25 bp, probe
aaaggtgttgactgcaacattgacg

SEQ ID NO: 148268 - DNA, 25 bp, probe
aaagagtggtagagcagagcctgac

SEQ ID NO: 148269 - DNA, 25 bp, probe
aaagggtggatttctgagctctatc

SEQ ID NO: 148270 - DNA, 25 bp, probe
aaagggatctgacttctgggttgaa

SEQ ID NO: 148271 - DNA, 25 bp, probe
aaaggtgaggacatctgggtctcat

SEQ ID NO: 148272 - DNA, 25 bp, probe
aaatggtaagctatgcttagtgcca

SEQ ID NO: 148273 - DNA, 25 bp, probe
aaagagtaatgtttctagaatgcac

SEQ ID NO: 148274 - DNA, 25 bp, probe
aaagagtaatgtttctagaatgcac

SEQ ID NO: 148275 - DNA, 25 bp, probe
aaatgtaaatgccttctcaaatgac

SEQ ID NO: 148276 - DNA, 25 bp, probe
aaagctaaatggtcttagaagcata

SEQ ID NO: 148277 - DNA, 25 bp, probe
aaagaacacaggccttggaacaagg

SEQ ID NO: 148278 - DNA, 25 bp, probe
aaatgagaagtggtttggatacact

SEQ ID NO: 148279 - DNA, 25 bp, probe
aaatgtgacactgtctatcagtacg

SEQ ID NO: 148280 - DNA, 25 bp, probe
aaatgtgacaacatctttatcaccg

SEQ ID NO: 148281 - DNA, 25 bp, probe
aaaggagcattcaactttgaccagg

SEQ ID NO: 148282 - DNA, 25 bp, probe
aaaggcaatccagctttcacaaagg

SEQ ID NO: 148283 - DNA, 25 bp, probe
aaagtgacatattggtgttcagcaa

SEQ ID NO: 148284 - DNA, 25 bp, probe
aaaggacagaggctgttccctatgg

SEQ ID NO: 148285 - DNA, 25 bp, probe
aaagaacaagatctttgccctcggg

SEQ ID NO: 148286 - DNA, 25 bp, probe
aaagcacaaagcgttttccacctgt

SEQ ID NO: 148287 - DNA, 25 bp, probe
aaagactaaggatgctgttgcccgt

SEQ ID NO: 148288 - DNA, 25 bp, probe
aaaggtggagtcagtttgtatcagt

SEQ ID NO: 148289 - DNA, 25 bp, probe
aaaggctgtactatatatttatttc

SEQ ID NO: 148290 - DNA, 25 bp, probe
aaagctgtgtatattaattttaatc

SEQ ID NO: 148291 - DNA, 25 bp, probe
aaggttttatcctgattggaaatag

SEQ ID NO: 148292 - DNA, 25 bp, probe
aaaagcttttcctgtaggctagtag

SEQ ID NO: 148293 - DNA, 25 bp, probe
aaagagtgttggtgtgtaggtagat

SEQ ID NO: 148294 - DNA, 25 bp, probe
aaagcaataatgtttggtaggtatt

SEQ ID NO: 148295 - DNA, 25 bp, probe
aaaggaatttctaggtcgtgctaca

SEQ ID NO: 148296 - DNA, 25 bp, probe
aaaggagtcttaatgttctgcccca

SEQ ID NO: 148297 - DNA, 25 bp, probe
aaatgtcggatttatctttccccat

SEQ ID NO: 148298 - DNA, 25 bp, probe
aaagtcaaggccttcattatcctcc

SEQ ID NO: 148299 - DNA, 25 bp, probe
aaagatcaaggcatgtattagacac

SEQ ID NO: 148300 - DNA, 25 bp, probe
aaagatgcaagacatgtagtaaaag

SEQ ID NO: 148301 - DNA, 25 bp, probe
aaaggcatggaaattcaggaattac

SEQ ID NO: 148302 - DNA, 25 bp, probe
aaaggctagttcatcaaccattagt

SEQ ID NO: 148303 - DNA, 25 bp, probe
aaaggaagttcatcaagccaggaga

SEQ ID NO: 148304 - DNA, 25 bp, probe
aaagtagagttcttccacaaacaga

SEQ ID NO: 148305 - DNA, 25 bp, probe
aaactgaggattgtcattaaacaca

SEQ ID NO: 148306 - DNA, 25 bp, probe
aaaggttctgctgacattaaatcca

SEQ ID NO: 148307 - DNA, 25 bp, probe
aaaggtgtcttccacgctatagtct

SEQ ID NO: 148308 - DNA, 25 bp, probe
aaatgtgttgctagcctcagctgat

SEQ ID NO: 148309 - DNA, 25 bp, probe
aaagcagtatgtacaccgtgaccag

SEQ ID NO: 148310 - DNA, 25 bp, probe
aaagcagcaaggacatccggatgaa

SEQ ID NO: 148311 - DNA, 25 bp, probe
aaagcagatagttgctgcctagcaa

SEQ ID NO: 148312 - DNA, 25 bp, probe
aaagcagatagttgctgcctagcaa

SEQ ID NO: 148313 - DNA, 25 bp, probe
aaagcagctaatgaggctacagaaa

SEQ ID NO: 148314 - DNA, 25 bp, probe
aaaggctcattgccacagtacaagc

SEQ ID NO: 148315 - DNA, 25 bp, probe
aaagcaaatgctccatagctaaagc

SEQ ID NO: 148316 - DNA, 25 bp, probe
aaagtttgcagcttatgtaatagca

SEQ ID NO: 148317 - DNA, 25 bp, probe
aaagttacagctgtcataagatcat

SEQ ID NO: 148318 - DNA, 25 bp, probe
aaagtcaacatttgtcataggtatt

SEQ ID NO: 148319 - DNA, 25 bp, probe
aaaggaattcttcatgagttttgga

SEQ ID NO: 148320 - DNA, 25 bp, probe
aaaggaattcttcatgagttttgga

SEQ ID NO: 148321 - DNA, 25 bp, probe
aaaggcaactgcatggtacattgtt

SEQ ID NO: 148322 - DNA, 25 bp, probe
aaaggatccagaaactagagttcat

SEQ ID NO: 148323 - DNA, 25 bp, probe
aaaggacatcaaattcaagaagcta

SEQ ID NO: 148324 - DNA, 25 bp, probe
aaaggagccacaatgtgatagaggt

SEQ ID NO: 148325 - DNA, 25 bp, probe
aaaggcagccaggcgtgagcagcag

SEQ ID NO: 148326 - DNA, 25 bp, probe
aaaggcagccaggcgtgagcagcag

SEQ ID NO: 148327 - DNA, 25 bp, probe
aaagtgcagccacagctacaatgct

SEQ ID NO: 148328 - DNA, 25 bp, probe
aaaggcatgctccagacataaatag

SEQ ID NO: 148329 - DNA, 25 bp, probe
aacacggctctagataaggaggggc

SEQ ID NO: 148330 - DNA, 25 bp, probe
aacacggctctagataaggaggggc

SEQ ID NO: 148331 - DNA, 25 bp, probe
aaagcggatcactgtgtagggggac

SEQ ID NO: 148332 - DNA, 25 bp, probe
gaaagcggtcctctgaaatggtttc

SEQ ID NO: 148333 - DNA, 25 bp, probe
aaagatggtcacacaaacagtttcc

SEQ ID NO: 148334 - DNA, 25 bp, probe
aaatgtggtcaacagtgtcagcagt

SEQ ID NO: 148335 - DNA, 25 bp, probe
aaagtgtgatcattactggccagcg

SEQ ID NO: 148336 - DNA, 25 bp, probe
aaagatatgtactgcaggcccagat

SEQ ID NO: 148337 - DNA, 25 bp, probe
aaagcaatttcctgcaaccagtaag

SEQ ID NO: 148338 - DNA, 25 bp, probe
aaaatccttgccttcaaacgaaatg

SEQ ID NO: 148339 - DNA, 25 bp, probe
aaaccctacgaaagaatggcaacag

SEQ ID NO: 148340 - DNA, 25 bp, probe
aaactccgtcttagaagtggaccag

SEQ ID NO: 148341 - DNA, 25 bp, probe
aaaccacttttccatggggattcag

SEQ ID NO: 148342 - DNA, 25 bp, probe
aaaggcgattttcagcagggagtga

SEQ ID NO: 148343 - DNA, 25 bp, probe
aaaggctttgtctgcagaaggagat

SEQ ID NO: 148344 - DNA, 25 bp, probe
aaaggccttctctcatgatctaagt

SEQ ID NO: 148345 - DNA, 25 bp, probe
aaagtgccattctagaatgtccaaa

SEQ ID NO: 148346 - DNA, 25 bp, probe
aaagtgccattctagaatgtccaaa

SEQ ID NO: 148347 - DNA, 25 bp, probe
aaatgtgcctattgctagagctcct

SEQ ID NO: 148348 - DNA, 25 bp, probe
aaatgtgcctattgctagagctcct

SEQ ID NO: 148349 - DNA, 25 bp, probe
aaagtgtctctgccttgagtcatct

SEQ ID NO: 148350 - DNA, 25 bp, probe
aaatgggttctgatatgtgatctca

SEQ ID NO: 148351 - DNA, 25 bp, probe
aaagtggtgccgatatgtgagacga

SEQ ID NO: 148352 - DNA, 25 bp, probe
aaatgtggtcccagtgtatgacctg

SEQ ID NO: 148353 - DNA, 25 bp, probe
aaagggatccccgtggatgacactg

SEQ ID NO: 148354 - DNA, 25 bp, probe
aaagggatccccgtggatgacactg

SEQ ID NO: 148355 - DNA, 25 bp, probe
aaagggatcctgcgcttgatcaact

SEQ ID NO: 148356 - DNA, 25 bp, probe
aaagggacctggcagttgcaacaca

SEQ ID NO: 148357 - DNA, 25 bp, probe
aaagtggcagagcctaggttcaaac

SEQ ID NO: 148358 - DNA, 25 bp, probe
aaaggacctggtagtgcttattcac

SEQ ID NO: 148359 - DNA, 25 bp, probe
aaatgtccctggtttctattgatct

SEQ ID NO: 148360 - DNA, 25 bp, probe
aaagtcctctcttttgcatattcta

SEQ ID NO: 148361 - DNA, 25 bp, probe
aaagtcgcccaaaatgcaaccttga

SEQ ID NO: 148362 - DNA, 25 bp, probe
aaagtcgcccaaaatgcaaccttga

SEQ ID NO: 148363 - DNA, 25 bp, probe
aaagtccctcgaaaatacgctatgt

SEQ ID NO: 148364 - DNA, 25 bp, probe
aaagaccctccaagaaattctagtg

SEQ ID NO: 148365 - DNA, 25 bp, probe
aaagaaccacgagtaagatattatt

SEQ ID NO: 148366 - DNA, 25 bp, probe
aaagaaccacgagtaagatattatt

SEQ ID NO: 148367 - DNA, 25 bp, probe
aaatggaggcagcattaacagttct

SEQ ID NO: 148368 - DNA, 25 bp, probe
aaatggaggagacctaatgtttcat

SEQ ID NO: 148369 - DNA, 25 bp, probe
aaaggggatcatatacagagacctg

SEQ ID NO: 148370 - DNA, 25 bp, probe
aaaggggtgtttacgagcagctgtg

SEQ ID NO: 148371 - DNA, 25 bp, probe
aaagtgctggagatgttcgactgga

SEQ ID NO: 148372 - DNA, 25 bp, probe
aaagctgctgaagtgcagttcccac

SEQ ID NO: 148373 - DNA, 25 bp, probe
aaagtgctgaatgctcagtctgatc

SEQ ID NO: 148374 - DNA, 25 bp, probe
aaagatcatcattgctgaagtcgtg

SEQ ID NO: 148375 - DNA, 25 bp, probe
aaagatcatcattgctgaagtcgtg

SEQ ID NO: 148376 - DNA, 25 bp, probe
aaagatcatctttattgtcgtggca

SEQ ID NO: 148377 - DNA, 25 bp, probe
aaagtatcttttctctgtcagcgaa

SEQ ID NO: 148378 - DNA, 25 bp, probe
aaagtttttgtcttcagtgctggta

SEQ ID NO: 148379 - DNA, 25 bp, probe
aaactttgtttctccagtggcttag

SEQ ID NO: 148380 - DNA, 25 bp, probe
aaactttggttatcctattttgatg

SEQ ID NO: 148381 - DNA, 25 bp, probe
aaagttgatggtattcattaggttt

SEQ ID NO: 148382 - DNA, 25 bp, probe
aaagttggctctgtagatccaggtt

SEQ ID NO: 148383 - DNA, 25 bp, probe
aaagttggctctgtagatccaggtt

SEQ ID NO: 148384 - DNA, 25 bp, probe
aaagtctaatctctaaatcaagtat

SEQ ID NO: 148385 - DNA, 25 bp, probe
aaagtccagacgtttcgatgaagcc

SEQ ID NO: 148386 - DNA, 25 bp, probe
aaagtccagacgtttcgatgaagcc

SEQ ID NO: 148387 - DNA, 25 bp, probe
aaagtccagacctcggagaagctga

SEQ ID NO: 148388 - DNA, 25 bp, probe
aaagttcaatactcttgaaatgtag

SEQ ID NO: 148389 - DNA, 25 bp, probe
aaagatccagaaccacttgaagaaa

SEQ ID NO: 148390 - DNA, 25 bp, probe
aaagacaagaacaaccactgtggaa

SEQ ID NO: 148391 - DNA, 25 bp, probe
aaagtcttctgagagctcctgagga

SEQ ID NO: 148392 - DNA, 25 bp, probe
aaagtcttctgagagctcctgagga

SEQ ID NO: 148393 - DNA, 25 bp, probe
aaagtgcctgtgaggcccaaggacc

SEQ ID NO: 148394 - DNA, 25 bp, probe
aaagtgcctgtgaggcccaaggacc

SEQ ID NO: 148395 - DNA, 25 bp, probe
aaagtgcacgttaggacacacacag

SEQ ID NO: 148396 - DNA, 25 bp, probe
aaagacatcaaataagcatccacag

SEQ ID NO: 148397 - DNA, 25 bp, probe
aaagaatagacccaagcgcatcacg

SEQ ID NO: 148398 - DNA, 25 bp, probe
aaagacaaccatgaagccagcacga

SEQ ID NO: 148399 - DNA, 25 bp, probe
aaagacaaccatgaagccagcacga

SEQ ID NO: 148400 - DNA, 25 bp, probe
aaaaagacctccagataggcagaca

SEQ ID NO: 148401 - DNA, 25 bp, probe
aacaaagtcccgagcaatgaagtca

SEQ ID NO: 148402 - DNA, 25 bp, probe
aaaacgattccgaaacataatatca

SEQ ID NO: 148403 - DNA, 25 bp, probe
aaaagccatagcaggagttattaac

SEQ ID NO: 148404 - DNA, 25 bp, probe
aaaggcctacagatgagtaatgaag

SEQ ID NO: 148405 - DNA, 25 bp, probe
aaaggtctccagattctaggtcaga

SEQ ID NO: 148406 - DNA, 25 bp, probe
aaaaatccatacagctttcagtcag

SEQ ID NO: 148407 - DNA, 25 bp, probe
aaaggcactttcagcttttgacacc

SEQ ID NO: 148408 - DNA, 25 bp, probe
aaagtgactttcaactcttcttcca

SEQ ID NO: 148409 - DNA, 25 bp, probe
aaagtatgcttgttaattttattca

SEQ ID NO: 148410 - DNA, 25 bp, probe
aaagtatgcttgttaattttattca

SEQ ID NO: 148411 - DNA, 25 bp, probe
aaagatagttgctaatccttatttc

SEQ ID NO: 148412 - DNA, 25 bp, probe
aaagaagtttaaagcatctgtaaat

SEQ ID NO: 148413 - DNA, 25 bp, probe
aaaggaattcaaatagcatatatat

SEQ ID NO: 148414 - DNA, 25 bp, probe
aaaggcaacacaagctcgcaactct

SEQ ID NO: 148415 - DNA, 25 bp, probe
aaaggccaagcggaccagagctgtg

SEQ ID NO: 148416 - DNA, 25 bp, probe
aaaggcctatcggagctatgtgctg

SEQ ID NO: 148417 - DNA, 25 bp, probe
aaagatgtcccaggatccatggcag

SEQ ID NO: 148418 - DNA, 25 bp, probe
aaacaatgcccagaccatgcctggt

SEQ ID NO: 148419 - DNA, 25 bp, probe
aaacaatgcccagaccatgcctggt

SEQ ID NO: 148420 - DNA, 25 bp, probe
aaacaatgcccagaccatgcctggt

SEQ ID NO: 148421 - DNA, 25 bp, probe
aaagtacccagcaagcctgcaatgc

SEQ ID NO: 148422 - DNA, 25 bp, probe
aaagatacccagattccaaggacct

SEQ ID NO: 148423 - DNA, 25 bp, probe
aaagttccctctgtacagagacaaa

SEQ ID NO: 148424 - DNA, 25 bp, probe
aaagttccctctgtacagagacaaa

SEQ ID NO: 148425 - DNA, 25 bp, probe
aaaagtgttcctgtacataagcaaa

SEQ ID NO: 148426 - DNA, 25 bp, probe
aagtcatggtacgtttcctaaagat

SEQ ID NO: 148427 - DNA, 25 bp, probe
aaaaggaaggtattggctgaactga

SEQ ID NO: 148428 - DNA, 25 bp, probe
aaacaggtagtttgcagtctgagat

SEQ ID NO: 148429 - DNA, 25 bp, probe
aaagaggtgagttccagcatctggc

SEQ ID NO: 148430 - DNA, 25 bp, probe
aaagaggaaggggagcattggcatc

SEQ ID NO: 148431 - DNA, 25 bp, probe
aaaggtaagtggcagctgctctatt

SEQ ID NO: 148432 - DNA, 25 bp, probe
aaaggccattgaagtgcgctctttg

SEQ ID NO: 148433 - DNA, 25 bp, probe
aaagagcctgcgaaagccttttggt

SEQ ID NO: 148434 - DNA, 25 bp, probe
aaagaattggatctggatcatttgg

SEQ ID NO: 148435 - DNA, 25 bp, probe
aaccgttgcttgtggatttatagta

SEQ ID NO: 148436 - DNA, 25 bp, probe
aactttcgctggatggttttaggat

SEQ ID NO: 148437 - DNA, 25 bp, probe
aaacctcgtcagtggttattcaggg

SEQ ID NO: 148438 - DNA, 25 bp, probe
aaacccgtatagctttcagtcagat

SEQ ID NO: 148439 - DNA, 25 bp, probe
aaacgcccggatctcagtcaaaggc

SEQ ID NO: 148440 - DNA, 25 bp, probe
aaagcaggggtgtcgtcatgctcaa

SEQ ID NO: 148441 - DNA, 25 bp, probe
aaagcaagaggtgcctcatgatggg

SEQ ID NO: 148442 - DNA, 25 bp, probe
aaagtcaaggacatctcagaggtgg

SEQ ID NO: 148443 - DNA, 25 bp, probe
aaagctcaagagtgacgtgaggtgg

SEQ ID NO: 148444 - DNA, 25 bp, probe
aaagctgcaagatacctctgagttg

SEQ ID NO: 148445 - DNA, 25 bp, probe
aaaggatggaaatttatcatgttta

SEQ ID NO: 148446 - DNA, 25 bp, probe
aaaggctgttatatggaatgtctgt

SEQ ID NO: 148447 - DNA, 25 bp, probe
aaagtctttaatagagtggcctctt

SEQ ID NO: 148448 - DNA, 25 bp, probe
aaagtctttaatagagtggcctctt

SEQ ID NO: 148449 - DNA, 25 bp, probe
aaaggcttgttgtatgagttccact

SEQ ID NO: 148450 - DNA, 25 bp, probe
aaaactgtactgtgtttcgcattaa

SEQ ID NO: 148451 - DNA, 25 bp, probe
aaaactggagtcagaagaccaggct

SEQ ID NO: 148452 - DNA, 25 bp, probe
cgcaaactggggctaaatccgcagc

SEQ ID NO: 148453 - DNA, 25 bp, probe
aaacatatgggctgataaacccggg

SEQ ID NO: 148454 - DNA, 25 bp, probe
aaagctcacctttgaacagatcccg

SEQ ID NO: 148455 - DNA, 25 bp, probe
aaagctcacctttgaacagatcccg

SEQ ID NO: 148456 - DNA, 25 bp, probe
aaagctcccagggaactgaactctt

SEQ ID NO: 148457 - DNA, 25 bp, probe
aaagcccaaggagatcaaagtcaga

SEQ ID NO: 148458 - DNA, 25 bp, probe
aaagcccaaggagatcaaagtcaga

SEQ ID NO: 148459 - DNA, 25 bp, probe
aaagcaccagcaggcacgttaactc

SEQ ID NO: 148460 - DNA, 25 bp, probe
aaagcacccttgacgtcaagtctcc

SEQ ID NO: 148461 - DNA, 25 bp, probe
aaagcacccttgacgtcaagtctcc

SEQ ID NO: 148462 - DNA, 25 bp, probe
aaagcccctggtcatacaggccagg

SEQ ID NO: 148463 - DNA, 25 bp, probe
aaagcgtctctgagtgtagcagggc

SEQ ID NO: 148464 - DNA, 25 bp, probe
aaagttctcagatgttcatcctgtg

SEQ ID NO: 148465 - DNA, 25 bp, probe
aaaatcctcgtaccattctctggtt

SEQ ID NO: 148466 - DNA, 25 bp, probe
aaaatcctcgtaccattctctggtt

SEQ ID NO: 148467 - DNA, 25 bp, probe
aaactcacaaggagatttcttttct

SEQ ID NO: 148468 - DNA, 25 bp, probe
aaagtaaaggcctcatctcctttat

SEQ ID NO: 148469 - DNA, 25 bp, probe
aaagtacaaggccatccggctcatt

SEQ ID NO: 148470 - DNA, 25 bp, probe
aaagggcaagtgcctctccagtttc

SEQ ID NO: 148471 - DNA, 25 bp, probe
aaaggtgcatttttcaacacttact

SEQ ID NO: 148472 - DNA, 25 bp, probe
aaaggtgctatcgttcaacttcaaa

SEQ ID NO: 148473 - DNA, 25 bp, probe
aaaggtgctatcgttcaacttcaaa

SEQ ID NO: 148474 - DNA, 25 bp, probe
aaaggccttgctgacaacttgcaca

SEQ ID NO: 148475 - DNA, 25 bp, probe
aaagatgacttcgtagcagcaccta

SEQ ID NO: 148476 - DNA, 25 bp, probe
aaagtgaatttcaaatgacctgatt

SEQ ID NO: 148477 - DNA, 25 bp, probe
aaagataatttcacggcagctggct

SEQ ID NO: 148478 - DNA, 25 bp, probe
aaaggaatagtctacagggacctga

SEQ ID NO: 148479 - DNA, 25 bp, probe
aaaggaatcatttacagggacctca

SEQ ID NO: 148480 - DNA, 25 bp, probe
aaagctgattcacaaacccacgctc

SEQ ID NO: 148481 - DNA, 25 bp, probe
aaagatgaaatgcaacctcggcgcc

SEQ ID NO: 148482 - DNA, 25 bp, probe
aaagagaaatgggctcgtcccgagg

SEQ ID NO: 148483 - DNA, 25 bp, probe
aaagagaaatgggctcgtcccgagg

SEQ ID NO: 148484 - DNA, 25 bp, probe
aaagatgggaggaccgtcccaggcg

SEQ ID NO: 148485 - DNA, 25 bp, probe
aaagaaagacagtccagtcctaggc

SEQ ID NO: 148486 - DNA, 25 bp, probe
aaagaaacaacactcagtccttcca

SEQ ID NO: 148487 - DNA, 25 bp, probe
aaagaaagaacactaccactgcaac

SEQ ID NO: 148488 - DNA, 25 bp, probe
aaagaaagaacactaccactgcaac

SEQ ID NO: 148489 - DNA, 25 bp, probe
aaagcagagagatactacgcctgga

SEQ ID NO: 148490 - DNA, 25 bp, probe
aaagcagagagatactacgcctgga

SEQ ID NO: 148491 - DNA, 25 bp, probe
aaagaggagcagtcctatgctttta

SEQ ID NO: 148492 - DNA, 25 bp, probe
aaagatgactgaaccttgcagttct

SEQ ID NO: 148493 - DNA, 25 bp, probe
aaagtgaagtatggctgtaagtctc

SEQ ID NO: 148494 - DNA, 25 bp, probe
aaagaggtgctcagcttcaagcctc

SEQ ID NO: 148495 - DNA, 25 bp, probe
aaagcagttgtcatgctgaaccgca

SEQ ID NO: 148496 - DNA, 25 bp, probe
aaagcaggtgtgcgtgcacacccac

SEQ ID NO: 148497 - DNA, 25 bp, probe
aaacttcattgctgtcagcgctgcc

SEQ ID NO: 148498 - DNA, 25 bp, probe
aaagccatcttctgacagcagtgga

SEQ ID NO: 148499 - DNA, 25 bp, probe
aaaggcatcttctaccgcaagaagc

SEQ ID NO: 148500 - DNA, 25 bp, probe
aaagagccttcagggacaaatagct

SEQ ID NO: 148501 - DNA, 25 bp, probe
aaagaggtgtccagagccaaggctt

SEQ ID NO: 148502 - DNA, 25 bp, probe
aaaggagttcgcggaggcagaggat

SEQ ID NO: 148503 - DNA, 25 bp, probe
aaagagatgaacgagagggagaaga

SEQ ID NO: 148504 - DNA, 25 bp, probe
aaaggtgataaattgggtcacagag

SEQ ID NO: 148505 - DNA, 25 bp, probe
aaaggtaataagtcagtccatctga

SEQ ID NO: 148506 - DNA, 25 bp, probe
aaaggtaataagtcagtccatctga

SEQ ID NO: 148507 - DNA, 25 bp, probe
aaaggtggaatcctagcccatgctt

SEQ ID NO: 148508 - DNA, 25 bp, probe
aaagctggggaggtagccctcttgg

SEQ ID NO: 148509 - DNA, 25 bp, probe
aacagtgggagggaattcctagctg

SEQ ID NO: 148510 - DNA, 25 bp, probe
aaactgggaggcttatctcactgag

SEQ ID NO: 148511 - DNA, 25 bp, probe
aaacgctggagaacttctggcggct

SEQ ID NO: 148512 - DNA, 25 bp, probe
aaaccattaggactcactgggacag

SEQ ID NO: 148513 - DNA, 25 bp, probe
aaagccttcaaaacacgaggcactc

SEQ ID NO: 148514 - DNA, 25 bp, probe
aaaggtctcaaaagccgaagaggca

SEQ ID NO: 148515 - DNA, 25 bp, probe
aaagggcctggtcactgtagaagat

SEQ ID NO: 148516 - DNA, 25 bp, probe
aaagaaatctggccaacttcaaagt

SEQ ID NO: 148517 - DNA, 25 bp, probe
aatagaaatcctcaatttagggtga

SEQ ID NO: 148518 - DNA, 25 bp, probe
aaaggatacctttgattttgtgtgt

SEQ ID NO: 148519 - DNA, 25 bp, probe
aaagtgatgaccgtccagaggggtg

SEQ ID NO: 148520 - DNA, 25 bp, probe
aaagttaccattcagaggtgcagtg

SEQ ID NO: 148521 - DNA, 25 bp, probe
aaagtgtaattttaatggctgcaaa

SEQ ID NO: 148522 - DNA, 25 bp, probe
aaagtgtaattttaatggctgcaaa

SEQ ID NO: 148523 - DNA, 25 bp, probe
aaaggttcattttgtgtgtgtgcac

SEQ ID NO: 148524 - DNA, 25 bp, probe
aaaggttcattttgtgtgtgtgcac

SEQ ID NO: 148525 - DNA, 25 bp, probe
aaaggttctgataagcgtggagaca

SEQ ID NO: 148526 - DNA, 25 bp, probe
aaaggtttattccagagaagccagg

SEQ ID NO: 148527 - DNA, 25 bp, probe
aaagggttaccccatgcaatcacac

SEQ ID NO: 148528 - DNA, 25 bp, probe
aaactgcaaaacatcccagatcacc

SEQ ID NO: 148529 - DNA, 25 bp, probe
aaaccacacacactgttgctggatc

SEQ ID NO: 148530 - DNA, 25 bp, probe
aaagcacagccaactgctcttgaac

SEQ ID NO: 148531 - DNA, 25 bp, probe
aaagcacagccaactgctcttgaac

SEQ ID NO: 148532 - DNA, 25 bp, probe
aaacacaagtttaagatccacacgt

SEQ ID NO: 148533 - DNA, 25 bp, probe
aaggccaatgtaggaacccaaaatg

SEQ ID NO: 148534 - DNA, 25 bp, probe
aaagcaagaggaggaccgtcccaag

SEQ ID NO: 148535 - DNA, 25 bp, probe
aaagcaaagaggtacctggctccag

SEQ ID NO: 148536 - DNA, 25 bp, probe
aaagcagcaagatgttcaaactcca

SEQ ID NO: 148537 - DNA, 25 bp, probe
aaagcagcaagatgttcaaactcca

SEQ ID NO: 148538 - DNA, 25 bp, probe
aaagcatgacattcgttcacaatag

SEQ ID NO: 148539 - DNA, 25 bp, probe
aaagcatgacattcgttcacaatag

SEQ ID NO: 148540 - DNA, 25 bp, probe
aaagatgcaatgtgtgaatttctgt

SEQ ID NO: 148541 - DNA, 25 bp, probe
aagaggcatatgggctgaagaagca

SEQ ID NO: 148542 - DNA, 25 bp, probe
aaaggagatgctggcataacatact

SEQ ID NO: 148543 - DNA, 25 bp, probe
aaagtggagtcctagatgaatctac

SEQ ID NO: 148544 - DNA, 25 bp, probe
aaacggagacctcggtcatctagcc

SEQ ID NO: 148545 - DNA, 25 bp, probe
aaacggagacctcggtcatctagcc

SEQ ID NO: 148546 - DNA, 25 bp, probe
aaagccagaagctctagctttaccc

SEQ ID NO: 148547 - DNA, 25 bp, probe
aaagtgatgaacgctcgtaagaccc

SEQ ID NO: 148548 - DNA, 25 bp, probe
aaagcggacatcagctggtcaaaca

SEQ ID NO: 148549 - DNA, 25 bp, probe
aaagcggacatcagctggtcaaaca

SEQ ID NO: 148550 - DNA, 25 bp, probe
aaagctgtgcaaattcatagtaaag

SEQ ID NO: 148551 - DNA, 25 bp, probe
aaagttccatatagacaccaaggag

SEQ ID NO: 148552 - DNA, 25 bp, probe
aaacttccagaaactcatcaaatga

SEQ ID NO: 148553 - DNA, 25 bp, probe
aaacttccagaaactcatcaaatga

SEQ ID NO: 148554 - DNA, 25 bp, probe
aaactgtagctgtattagcagcaaa

SEQ ID NO: 148555 - DNA, 25 bp, probe
aacacgtcctacagaagaatcaccg

SEQ ID NO: 148556 - DNA, 25 bp, probe
aaacctcctggtgatgatttcaatc

SEQ ID NO: 148557 - DNA, 25 bp, probe
gaaagcaatacgtttgtgcagaatc

SEQ ID NO: 148558 - DNA, 25 bp, probe
aaacccagacgcagaacaataaaat

SEQ ID NO: 148559 - DNA, 25 bp, probe
aaacccaggcaagaacgtgtagcaa

SEQ ID NO: 148560 - DNA, 25 bp, probe
aaagataccgaagattagtggagct

SEQ ID NO: 148561 - DNA, 25 bp, probe
aaagaaagccacatttagggctatc

SEQ ID NO: 148562 - DNA, 25 bp, probe
aaagggcaaccagcttgggtgctac

SEQ ID NO: 148563 - DNA, 25 bp, probe
aaagggaacgacattgccctgctca

SEQ ID NO: 148564 - DNA, 25 bp, probe
aaagtgatcaaccactgttccttct

SEQ ID NO: 148565 - DNA, 25 bp, probe
aaaggataactgatattctgcaaat

SEQ ID NO: 148566 - DNA, 25 bp, probe
aaagtgcatagatttctatcttaaa

SEQ ID NO: 148567 - DNA, 25 bp, probe
aaagcatgtcagtttccttaataat

SEQ ID NO: 148568 - DNA, 25 bp, probe
aaagcatgaatgataacttccttaa

SEQ ID NO: 148569 - DNA, 25 bp, probe
aaagatgccttaatccattccttga

SEQ ID NO: 148570 - DNA, 25 bp, probe
aaagatcctgagatggattggtttg

SEQ ID NO: 148571 - DNA, 25 bp, probe
aaagacggatttcgaaggagattca

SEQ ID NO: 148572 - DNA, 25 bp, probe
aaagactgtgttgggaaggaatgct

SEQ ID NO: 148573 - DNA, 25 bp, probe
aaagcactgggtgccgacgacagct

SEQ ID NO: 148574 - DNA, 25 bp, probe
aaagcactgggtgccgacgacagct

SEQ ID NO: 148575 - DNA, 25 bp, probe
aaagccaggatggcccgaggaagag

SEQ ID NO: 148576 - DNA, 25 bp, probe
aaagacagtggtggtccggtggagg

SEQ ID NO: 148577 - DNA, 25 bp, probe
aaagagcacgttttccattatgagg

SEQ ID NO: 148578 - DNA, 25 bp, probe
aaagagacagtcctgccgatttgga

SEQ ID NO: 148579 - DNA, 25 bp, probe
aaacagacaggctacggatggatat

SEQ ID NO: 148580 - DNA, 25 bp, probe
aaactcactgactacggcatgtgta

SEQ ID NO: 148581 - DNA, 25 bp, probe
aaagctgatagagattggagtgcaa

SEQ ID NO: 148582 - DNA, 25 bp, probe
aaagtgggaccaatctgctctgtca

SEQ ID NO: 148583 - DNA, 25 bp, probe
aaagtgggaccaatctgctctgtca

SEQ ID NO: 148584 - DNA, 25 bp, probe
aaagggcggctaattgattgtctgc

SEQ ID NO: 148585 - DNA, 25 bp, probe
aaagggcagcctatctcattatcta

SEQ ID NO: 148586 - DNA, 25 bp, probe
aaagggcagcctatctcattatcta

SEQ ID NO: 148587 - DNA, 25 bp, probe
aaagggaagctgattgatattgtga

SEQ ID NO: 148588 - DNA, 25 bp, probe
aaagcgttggagttttatatgctaa

SEQ ID NO: 148589 - DNA, 25 bp, probe
aaagcgttggagttttatatgctaa

SEQ ID NO: 148590 - DNA, 25 bp, probe
aaagcttttggattgttctaacata

SEQ ID NO: 148591 - DNA, 25 bp, probe
aaacttataggagtttgcacacaaa

SEQ ID NO: 148592 - DNA, 25 bp, probe
aaactttcaaagtttgatgagcaga

SEQ ID NO: 148593 - DNA, 25 bp, probe
aaacgactaacctatctatgaacaa

SEQ ID NO: 148594 - DNA, 25 bp, probe
aaacccaagtcttagttgctacaag

SEQ ID NO: 148595 - DNA, 25 bp, probe
aaacccaatacttttgtccaatgtg

SEQ ID NO: 148596 - DNA, 25 bp, probe
aaaccctacctatcctgaatggtct

SEQ ID NO: 148597 - DNA, 25 bp, probe
aaagcagtcctcttattcctaaggt

SEQ ID NO: 148598 - DNA, 25 bp, probe
aaagcagtcctcttattcctaaggt

SEQ ID NO: 148599 - DNA, 25 bp, probe
aaaggtgactcacattgttacacat

SEQ ID NO: 148600 - DNA, 25 bp, probe
aaaggtgactcacattgttacacat

SEQ ID NO: 148601 - DNA, 25 bp, probe
aaagattaatcctatatgtaatgat

SEQ ID NO: 148602 - DNA, 25 bp, probe
aaagattaagccatgcatgtctaag

SEQ ID NO: 148603 - DNA, 25 bp, probe
aaagtcttgcagaccgagtctacac

SEQ ID NO: 148604 - DNA, 25 bp, probe
aaagcaatatatacccagactacac

SEQ ID NO: 148605 - DNA, 25 bp, probe
aaagctaatcatgctctctaccaac

SEQ ID NO: 148606 - DNA, 25 bp, probe
aaagtcaaatctgcctactctgagc

SEQ ID NO: 148607 - DNA, 25 bp, probe
aaagacacatccacggacctgagtt

SEQ ID NO: 148608 - DNA, 25 bp, probe
aaagtcattcacacggaggattacc

SEQ ID NO: 148609 - DNA, 25 bp, probe
aaagtcatttgcagtgggagttagc

SEQ ID NO: 148610 - DNA, 25 bp, probe
aaagtcttgtgacatgggcaactcc

SEQ ID NO: 148611 - DNA, 25 bp, probe
aaagatcggtgacatctgggctttc

SEQ ID NO: 148612 - DNA, 25 bp, probe
aaagatcgagtgattttgcttttct

SEQ ID NO: 148613 - DNA, 25 bp, probe
aaagagccattttgtcctgttttct

SEQ ID NO: 148614 - DNA, 25 bp, probe
aaagattcattcagtgctcattttc

SEQ ID NO: 148615 - DNA, 25 bp, probe
aaagttctcctgggacatcttctgc

SEQ ID NO: 148616 - DNA, 25 bp, probe
aaagttctcctgggacatcttctgc

SEQ ID NO: 148617 - DNA, 25 bp, probe
aaagtcttatctgcgactctgtctc

SEQ ID NO: 148618 - DNA, 25 bp, probe
aaagtgccttctaggtgcttggtgg

SEQ ID NO: 148619 - DNA, 25 bp, probe
aaagtgccttctaggtgcttggtgg

SEQ ID NO: 148620 - DNA, 25 bp, probe
aaagtgtttctagggtgtagctggg

SEQ ID NO: 148621 - DNA, 25 bp, probe
aaagagttttcgagtgttgcaggct

SEQ ID NO: 148622 - DNA, 25 bp, probe
aaagagttttcgagtgttgcaggct

SEQ ID NO: 148623 - DNA, 25 bp, probe
aaagatgctctgtgcagggctgttg

SEQ ID NO: 148624 - DNA, 25 bp, probe
aaagatcaccagccatgtgccttag

SEQ ID NO: 148625 - DNA, 25 bp, probe
aaagatacctggtctgccttgtaca

SEQ ID NO: 148626 - DNA, 25 bp, probe
aaagaatggctgatgctggcctgta

SEQ ID NO: 148627 - DNA, 25 bp, probe
aaagatgggcaagtgggccatggcc

SEQ ID NO: 148628 - DNA, 25 bp, probe
aaagataggagaaagtgccagccct

SEQ ID NO: 148629 - DNA, 25 bp, probe
aaagggcggcacaaagccctctcta

SEQ ID NO: 148630 - DNA, 25 bp, probe
aaagggatcaggaatacctctacta

SEQ ID NO: 148631 - DNA, 25 bp, probe
aaagttatcagctaaaccttttcat

SEQ ID NO: 148632 - DNA, 25 bp, probe
aaagtaccattctaatacttcttca

SEQ ID NO: 148633 - DNA, 25 bp, probe
aaagtcctgtggttaacgccttcat

SEQ ID NO: 148634 - DNA, 25 bp, probe
aaagagctttgtgatatactggttc

SEQ ID NO: 148635 - DNA, 25 bp, probe
aaagatgcccttctgaactggctta

SEQ ID NO: 148636 - DNA, 25 bp, probe
aaagccccatatctggccaagttca

SEQ ID NO: 148637 - DNA, 25 bp, probe
aaagcatcccttcatcgtggattta

SEQ ID NO: 148638 - DNA, 25 bp, probe
aaagcatcccttcatcgtggattta

SEQ ID NO: 148639 - DNA, 25 bp, probe
aaacttccttttgctgatgatcttt

SEQ ID NO: 148640 - DNA, 25 bp, probe
aaacttccttttgctgatgatcttt

SEQ ID NO: 148641 - DNA, 25 bp, probe
aaaccccttgactggagtgctgttg

SEQ ID NO: 148642 - DNA, 25 bp, probe
aaaccgtcgaactgccaatgtggtg

SEQ ID NO: 148643 - DNA, 25 bp, probe
aaaccttatacctagctcctggagg

SEQ ID NO: 148644 - DNA, 25 bp, probe
aaagttttcattttgccttgaatgg

SEQ ID NO: 148645 - DNA, 25 bp, probe
aaagtgtatttttttattggtgctg

SEQ ID NO: 148646 - DNA, 25 bp, probe
aaagtggttgttagttatagatgtc

SEQ ID NO: 148647 - DNA, 25 bp, probe
aaagtggttcttacagtgctggtgt

SEQ ID NO: 148648 - DNA, 25 bp, probe
aaagctctgtatgtaccgcgctatg

SEQ ID NO: 148649 - DNA, 25 bp, probe
aaagctgggaggaggcagcctctgc

SEQ ID NO: 148650 - DNA, 25 bp, probe
aaactggccgagaagctggcccggg

SEQ ID NO: 148651 - DNA, 25 bp, probe
aaacgggggcaactgtgtgatggat

SEQ ID NO: 148652 - DNA, 25 bp, probe
aaagctgagggagagctgcttaatg

SEQ ID NO: 148653 - DNA, 25 bp, probe
aaagatgtggtggccactctttcat

SEQ ID NO: 148654 - DNA, 25 bp, probe
aaagattgtgtgtcacccctgttta

SEQ ID NO: 148655 - DNA, 25 bp, probe
aaagatgggctttgtcccagtttca

SEQ ID NO: 148656 - DNA, 25 bp, probe
aaagtgcgaggacatcctcgaatta

SEQ ID NO: 148657 - DNA, 25 bp, probe
aaagtcccgagttactcagagcaac

SEQ ID NO: 148658 - DNA, 25 bp, probe
aaagctgctgccagttagccaagac

SEQ ID NO: 148659 - DNA, 25 bp, probe
aaagtctctcaaattaggccagatt

SEQ ID NO: 148660 - DNA, 25 bp, probe
aaagcatctgtaaatttggactgtt

SEQ ID NO: 148661 - DNA, 25 bp, probe
aaaccttcaatttatggtcttctgt

SEQ ID NO: 148662 - DNA, 25 bp, probe
aaaccttacatttatcagtcctgaa

SEQ ID NO: 148663 - DNA, 25 bp, probe
aaaccttacatttatcagtcctgaa

SEQ ID NO: 148664 - DNA, 25 bp, probe
aaacctgtgcatatatgacatgaaa

SEQ ID NO: 148665 - DNA, 25 bp, probe
aaagcctgacttacaatatgcctgt

SEQ ID NO: 148666 - DNA, 25 bp, probe
aaagtctatcaaacagcaagcactg

SEQ ID NO: 148667 - DNA, 25 bp, probe
aaagtctatcaaacagcaagcactg

SEQ ID NO: 148668 - DNA, 25 bp, probe
aaagtcacataaaatgcggcactat

SEQ ID NO: 148669 - DNA, 25 bp, probe
aaagtcacataaaatgcggcactat

SEQ ID NO: 148670 - DNA, 25 bp, probe
aaagccagctgatctgtggagcctt

SEQ ID NO: 148671 - DNA, 25 bp, probe
aaaccctgaagcctggcacgatgtc

SEQ ID NO: 148672 - DNA, 25 bp, probe
aaactctcgggaaagcacttgtgct

SEQ ID NO: 148673 - DNA, 25 bp, probe
aaactctcgggaaagcacttgtgct

SEQ ID NO: 148674 - DNA, 25 bp, probe
aacatgccataaggaaaacgagtgc

SEQ ID NO: 148675 - DNA, 25 bp, probe
aacatgccataaggaaaacgagtgc

SEQ ID NO: 148676 - DNA, 25 bp, probe
aaaccagcagaacattagcctgtgc

SEQ ID NO: 148677 - DNA, 25 bp, probe
aaacagcaggtacaacacatctgta

SEQ ID NO: 148678 - DNA, 25 bp, probe
aaaacggctggttatcaggcagtga

SEQ ID NO: 148679 - DNA, 25 bp, probe
aaaactatgcatttacatatgggga

SEQ ID NO: 148680 - DNA, 25 bp, probe
aaaactatgcatttacatatgggga

SEQ ID NO: 148681 - DNA, 25 bp, probe
aaagagcttgttaatgatgatgagg

SEQ ID NO: 148682 - DNA, 25 bp, probe
aaagtcatgctgactctatgagatg

SEQ ID NO: 148683 - DNA, 25 bp, probe
aaagttatgactaatgatatgccta

SEQ ID NO: 148684 - DNA, 25 bp, probe
aaactttcctaaatgttcatatggg

SEQ ID NO: 148685 - DNA, 25 bp, probe
aaacttctcccaagtgaagcttggg

SEQ ID NO: 148686 - DNA, 25 bp, probe
aaagctcagctcgcaaacaagctaa

SEQ ID NO: 148687 - DNA, 25 bp, probe
aaagctgtgtgctcaacctacttac

SEQ ID NO: 148688 - DNA, 25 bp, probe
aaagcgcttgcctaactcatacttt

SEQ ID NO: 148689 - DNA, 25 bp, probe
aaagcactcatggataactcacaga

SEQ ID NO: 148690 - DNA, 25 bp, probe
aaagaactggatcaccccagaatag

SEQ ID NO: 148691 - DNA, 25 bp, probe
aaagatactgaatacaccctatata

SEQ ID NO: 148692 - DNA, 25 bp, probe
aaagagccgaaagcaccactgcttt

SEQ ID NO: 148693 - DNA, 25 bp, probe
aaagactctaactcatgccattgct

SEQ ID NO: 148694 - DNA, 25 bp, probe
aaagactctaactcatgccattgct

SEQ ID NO: 148695 - DNA, 25 bp, probe
aaagacttttctagctgcaatttaa

SEQ ID NO: 148696 - DNA, 25 bp, probe
aaagacacctggttgctaacctgaa

SEQ ID NO: 148697 - DNA, 25 bp, probe
aaacaccaattgctttacctgaaca

SEQ ID NO: 148698 - DNA, 25 bp, probe
aaaccaagaatctgtgtctcctgga

SEQ ID NO: 148699 - DNA, 25 bp, probe
aaactagaaccaggatttaatgtga

SEQ ID NO: 148700 - DNA, 25 bp, probe
aaactagaaccaggatttaatgtga

SEQ ID NO: 148701 - DNA, 25 bp, probe
aaactacaagtcctgttaaattgca

SEQ ID NO: 148702 - DNA, 25 bp, probe
aaagctcaaggtgcatttcaaactc

SEQ ID NO: 148703 - DNA, 25 bp, probe
aaactgcaggtaggcttctaagcct

SEQ ID NO: 148704 - DNA, 25 bp, probe
aaaccagtttcagagttagctttct

SEQ ID NO: 148705 - DNA, 25 bp, probe
aaaccttgcttgtgatgttaatttt

SEQ ID NO: 148706 - DNA, 25 bp, probe
aatacccttctgtggtcctaatatc

SEQ ID NO: 148707 - DNA, 25 bp, probe
aaaccctggcactggtcacaaagct

SEQ ID NO: 148708 - DNA, 25 bp, probe
aaaccattggccttggtacttatgg

SEQ ID NO: 148709 - DNA, 25 bp, probe
aaaccattggccttggtacttatgg

SEQ ID NO: 148710 - DNA, 25 bp, probe
aaagcacttgtcttttgctctttat

SEQ ID NO: 148711 - DNA, 25 bp, probe
aaagacaatactcttgtgttacatc

SEQ ID NO: 148712 - DNA, 25 bp, probe
aaagacaatactcttgtgttacatc

SEQ ID NO: 148713 - DNA, 25 bp, probe
aaaccagcatttctgtgtttgagag

SEQ ID NO: 148714 - DNA, 25 bp, probe
aaagccctgttgcttgagtgtacgt

SEQ ID NO: 148715 - DNA, 25 bp, probe
aaagctgcctggagtcttgtgttca

SEQ ID NO: 148716 - DNA, 25 bp, probe
aaagctgctgatgtctatgcatttg

SEQ ID NO: 148717 - DNA, 25 bp, probe
aaagctgcgactgatagattggggt

SEQ ID NO: 148718 - DNA, 25 bp, probe
aaagttgatcccaagcctgggcgct

SEQ ID NO: 148719 - DNA, 25 bp, probe
aaagcattatcctgtggcgttgcct

SEQ ID NO: 148720 - DNA, 25 bp, probe
aaagcattatcctgtggcgttgcct

SEQ ID NO: 148721 - DNA, 25 bp, probe
aaagcgattccgatgggtcctttga

SEQ ID NO: 148722 - DNA, 25 bp, probe
aaactggtcctgagaggtcctgtgg

SEQ ID NO: 148723 - DNA, 25 bp, probe
aaagctggtaccagagggctccagg

SEQ ID NO: 148724 - DNA, 25 bp, probe
aaactgctgctcgcaaggaagtcca

SEQ ID NO: 148725 - DNA, 25 bp, probe
aaactttcaaagcaaatgctccata

SEQ ID NO: 148726 - DNA, 25 bp, probe
aaacttcaaagccagaaagctgcta

SEQ ID NO: 148727 - DNA, 25 bp, probe
aaacctaaatttgaatgctgctctt

SEQ ID NO: 148728 - DNA, 25 bp, probe
aaacctataacatacaatgtactgt

SEQ ID NO: 148729 - DNA, 25 bp, probe
aaacctgtcaactgtcatgtgtgcc

SEQ ID NO: 148730 - DNA, 25 bp, probe
aaactctcatccgcgatatgttact

SEQ ID NO: 148731 - DNA, 25 bp, probe
aaactcttgctgtttatttatgaca

SEQ ID NO: 148732 - DNA, 25 bp, probe
aaagtcatgttgttgctaatctata

SEQ ID NO: 148733 - DNA, 25 bp, probe
aaagtcatgttgttgctaatctata

SEQ ID NO: 148734 - DNA, 25 bp, probe
aaagccgtgatgtgcaatgaagcat

SEQ ID NO: 148735 - DNA, 25 bp, probe
aaagcaggctggttggcataatatg

SEQ ID NO: 148736 - DNA, 25 bp, probe
aaagaggcatatgggctgaagaagc

SEQ ID NO: 148737 - DNA, 25 bp, probe
aaagatggcattaggcagagatgag

SEQ ID NO: 148738 - DNA, 25 bp, probe
aaagatggcattaggcagagatgag

SEQ ID NO: 148739 - DNA, 25 bp, probe
aaagtcacatatgagcaagatcaga

SEQ ID NO: 148740 - DNA, 25 bp, probe
aaactcaagtgcctgctacacatac

SEQ ID NO: 148741 - DNA, 25 bp, probe
aaaccagaggcgctccagaggcgtt

SEQ ID NO: 148742 - DNA, 25 bp, probe
aagaccgagtccccaaggactagtg

SEQ ID NO: 148743 - DNA, 25 bp, probe
aaagccagcagcacagccaaggtgc

SEQ ID NO: 148744 - DNA, 25 bp, probe
aaacctcatgcccatgtgcacaagt

SEQ ID NO: 148745 - DNA, 25 bp, probe
aaacttctgagcaaggccaggctgt

SEQ ID NO: 148746 - DNA, 25 bp, probe
aaagcagtcaggaatccacatggtg

SEQ ID NO: 148747 - DNA, 25 bp, probe
aaagcagtgcacaattccgtggcag

SEQ ID NO: 148748 - DNA, 25 bp, probe
aaagcaatcacttgtcattttgcat

SEQ ID NO: 148749 - DNA, 25 bp, probe
aaagagacccagtcaattacatgtt

SEQ ID NO: 148750 - DNA, 25 bp, probe
aaagagaccggccagattgttgcta

SEQ ID NO: 148751 - DNA, 25 bp, probe
aaagcaacaagagcagactcttcta

SEQ ID NO: 148752 - DNA, 25 bp, probe
aaagctacaaaacatcctactcaat

SEQ ID NO: 148753 - DNA, 25 bp, probe
aaagcataaaagatcgcctcaggca

SEQ ID NO: 148754 - DNA, 25 bp, probe
aaagcaaagttttccctcagagaga

SEQ ID NO: 148755 - DNA, 25 bp, probe
aaagcaaagttttccctcagagaga

SEQ ID NO: 148756 - DNA, 25 bp, probe
aaagcaagatcatttacccaaggat

SEQ ID NO: 148757 - DNA, 25 bp, probe
aaagcaaaactgtatcacatagggt

SEQ ID NO: 148758 - DNA, 25 bp, probe
aaagccgttcctacacatagtggtt

SEQ ID NO: 148759 - DNA, 25 bp, probe
aaagcaggttctctagaggtggtgt

SEQ ID NO: 148760 - DNA, 25 bp, probe
aaagaaattcaatgtgggcaaggca

SEQ ID NO: 148761 - DNA, 25 bp, probe
aaagaaattcaatgtgggcaaggca

SEQ ID NO: 148762 - DNA, 25 bp, probe
aactgaactcttttgggcctggagc

SEQ ID NO: 148763 - DNA, 25 bp, probe
aaagtcactcttttgggatctaact

SEQ ID NO: 148764 - DNA, 25 bp, probe
aaaccagcctgaactggtgcattaa

SEQ ID NO: 148765 - DNA, 25 bp, probe
aaacgagcctcagctggcgaatgcc

SEQ ID NO: 148766 - DNA, 25 bp, probe
aaactggccgacttcggaatgtgca

SEQ ID NO: 148767 - DNA, 25 bp, probe
aaagctaattgattttgggattgca

SEQ ID NO: 148768 - DNA, 25 bp, probe
aaagcgacgggtaatgcggcattga

SEQ ID NO: 148769 - DNA, 25 bp, probe
aaacgcaaggatgtcgcactgctgg

SEQ ID NO: 148770 - DNA, 25 bp, probe
aacacaccaggatgacgcaccaagg

SEQ ID NO: 148771 - DNA, 25 bp, probe
aaacccagagctcaaccagaaggga

SEQ ID NO: 148772 - DNA, 25 bp, probe
aaagatccagtccagagaaggaaga

SEQ ID NO: 148773 - DNA, 25 bp, probe
aacgaccagtctcagtacaagaggc

SEQ ID NO: 148774 - DNA, 25 bp, probe
aaagaccactctcagatacatcact

SEQ ID NO: 148775 - DNA, 25 bp, probe
aaagaccactctcagatacatcact

SEQ ID NO: 148776 - DNA, 25 bp, probe
aaagcaacagctcagctcttcatcc

SEQ ID NO: 148777 - DNA, 25 bp, probe
aaacaaacctagctaactgccttct

SEQ ID NO: 148778 - DNA, 25 bp, probe
aaacaaacctagctaactgccttct

SEQ ID NO: 148779 - DNA, 25 bp, probe
aaacatgaactgatggtaactgtac

SEQ ID NO: 148780 - DNA, 25 bp, probe
aaagcatcaaatggctggatggcat

SEQ ID NO: 148781 - DNA, 25 bp, probe
aaagcatggtcttgccagtggctgg

SEQ ID NO: 148782 - DNA, 25 bp, probe
aaagcagacatctacagcctggggg

SEQ ID NO: 148783 - DNA, 25 bp, probe
aaagagtatcaaggccagagtggtg

SEQ ID NO: 148784 - DNA, 25 bp, probe
aaagaggatgagcgccagtggcagg

SEQ ID NO: 148785 - DNA, 25 bp, probe
aaagaggtggacgagtgctctcggc

SEQ ID NO: 148786 - DNA, 25 bp, probe
aaagaggtgtacgatgtcatgctgg

SEQ ID NO: 148787 - DNA, 25 bp, probe
aaagaagctgtgaccccagcaggat

SEQ ID NO: 148788 - DNA, 25 bp, probe
aaagacagctggaaccgagtggccc

SEQ ID NO: 148789 - DNA, 25 bp, probe
aaagacagctggaaccgagtggccc

SEQ ID NO: 148790 - DNA, 25 bp, probe
aaagacattgaatcaccaaggcctg

SEQ ID NO: 148791 - DNA, 25 bp, probe
aaagacattggattacctttggatc

SEQ ID NO: 148792 - DNA, 25 bp, probe
aaagtacttgactacctactggtgt

SEQ ID NO: 148793 - DNA, 25 bp, probe
aaagtacaatgagccttactgtatt

SEQ ID NO: 148794 - DNA, 25 bp, probe
aaagcaacaaactcctatcattgat

SEQ ID NO: 148795 - DNA, 25 bp, probe
aaagaaggtacccatgttctcgata

SEQ ID NO: 148796 - DNA, 25 bp, probe
aaaccaggtaccgatggactgacta

SEQ ID NO: 148797 - DNA, 25 bp, probe
aaaccaggttgcgaactggtgacct

SEQ ID NO: 148798 - DNA, 25 bp, probe
aaacgcacttaggaactttgcctgt

SEQ ID NO: 148799 - DNA, 25 bp, probe
aaacccctcagacagtttgcttatt

SEQ ID NO: 148800 - DNA, 25 bp, probe
aaagcaccgctcacaactatatgct

SEQ ID NO: 148801 - DNA, 25 bp, probe
aaagaacagcacccatctcttagtg

SEQ ID NO: 148802 - DNA, 25 bp, probe
aaagagggccaggtcctaagctgct

SEQ ID NO: 148803 - DNA, 25 bp, probe
aacggcgagctagaggtgaagatcc

SEQ ID NO: 148804 - DNA, 25 bp, probe
aaccggagtcgcagcggcggtaata

SEQ ID NO: 148805 - DNA, 25 bp, probe
aaaccaagtcgcagctgagcgtgtc

SEQ ID NO: 148806 - DNA, 25 bp, probe
aaagctgcaagtgttctgaagagtt

SEQ ID NO: 148807 - DNA, 25 bp, probe
aaagctcaactcgggtgaagacaaa

SEQ ID NO: 148808 - DNA, 25 bp, probe
aaactgaactggccgctgggagaaa

SEQ ID NO: 148809 - DNA, 25 bp, probe
aaagcttactgggatgtcaggaaat

SEQ ID NO: 148810 - DNA, 25 bp, probe
aaagcattgcttgggttggtcaaat

SEQ ID NO: 148811 - DNA, 25 bp, probe
aaacattctcggttgatagaaaact

SEQ ID NO: 148812 - DNA, 25 bp, probe
aaactcctcgtgagtaggaaccctg

SEQ ID NO: 148813 - DNA, 25 bp, probe
aaaccactagttcaatggatcccgg

SEQ ID NO: 148814 - DNA, 25 bp, probe
aaaccactagttcaatggatcccgg

SEQ ID NO: 148815 - DNA, 25 bp, probe
aaaccattcgtctgatatctatccc

SEQ ID NO: 148816 - DNA, 25 bp, probe
aaagccattaaagatatgtatctct

SEQ ID NO: 148817 - DNA, 25 bp, probe
aaagccattaaagatatgtatctct

SEQ ID NO: 148818 - DNA, 25 bp, probe
aaagctcattaacttaactgacatt

SEQ ID NO: 148819 - DNA, 25 bp, probe
aaactgtctacgcaaaggatattca

SEQ ID NO: 148820 - DNA, 25 bp, probe
aaactgtctacgcaaaggatattca

SEQ ID NO: 148821 - DNA, 25 bp, probe
aaactttgacctttgaggatggcat

SEQ ID NO: 148822 - DNA, 25 bp, probe
aaagcttttcctgtaggctagtagg

SEQ ID NO: 148823 - DNA, 25 bp, probe
aaagctggttggtgtagtgctatta

SEQ ID NO: 148824 - DNA, 25 bp, probe
aaactgttgttttgtatgagcgaaa

SEQ ID NO: 148825 - DNA, 25 bp, probe
aaaagtttgggaccatgactgagaa

SEQ ID NO: 148826 - DNA, 25 bp, probe
aaagaattctggggtcatcctgaga

SEQ ID NO: 148827 - DNA, 25 bp, probe
aaacgtctcaggtggcctctgaaac

SEQ ID NO: 148828 - DNA, 25 bp, probe
aaaccagtaaaggcgcctgtgcaag

SEQ ID NO: 148829 - DNA, 25 bp, probe
aaagccaaaagcagcgggtgctaaa

SEQ ID NO: 148830 - DNA, 25 bp, probe
aaagcgaaagactgcagttgtgcta

SEQ ID NO: 148831 - DNA, 25 bp, probe
aaagcgatgggaacgctttgtccac

SEQ ID NO: 148832 - DNA, 25 bp, probe
aaacgaggaatgaggggcttcacga

SEQ ID NO: 148833 - DNA, 25 bp, probe
aaactgacaaatactggggtgtcct

SEQ ID NO: 148834 - DNA, 25 bp, probe
aaactgctatcttttgggggagtct

SEQ ID NO: 148835 - DNA, 25 bp, probe
aaagctgcccagtccatggggacag

SEQ ID NO: 148836 - DNA, 25 bp, probe
aaagctctgcatagtccaggtggac

SEQ ID NO: 148837 - DNA, 25 bp, probe
aaagttgtatgaatcaggttactat

SEQ ID NO: 148838 - DNA, 25 bp, probe
aagacttctatgctcggtttgctac

SEQ ID NO: 148839 - DNA, 25 bp, probe
aaacttctcagtccagcagtttcca

SEQ ID NO: 148840 - DNA, 25 bp, probe
aaagatctgtctgaagcagcttcac

SEQ ID NO: 148841 - DNA, 25 bp, probe
aaagagtgcctgaagagcctcgaca

SEQ ID NO: 148842 - DNA, 25 bp, probe
aaagagaccatgaaagccggtatca

SEQ ID NO: 148843 - DNA, 25 bp, probe
aaagaactctgcaagacgaggtcaa

SEQ ID NO: 148844 - DNA, 25 bp, probe
aaagaatctcacagccagggatatg

SEQ ID NO: 148845 - DNA, 25 bp, probe
aaagaacatcacacatccagagcta

SEQ ID NO: 148846 - DNA, 25 bp, probe
aaagaaagcgccgctcatgactata

SEQ ID NO: 148847 - DNA, 25 bp, probe
aaaaaattcagcgtcgacctcatga

SEQ ID NO: 148848 - DNA, 25 bp, probe
aaagaagcaaagcctcgatccctac

SEQ ID NO: 148849 - DNA, 25 bp, probe
aaagaagcaaagcctcgatccctac

SEQ ID NO: 148850 - DNA, 25 bp, probe
aaagagagaggaccgcagacgcctg

SEQ ID NO: 148851 - DNA, 25 bp, probe
aaagcaggaggctgaatgagccctg

SEQ ID NO: 148852 - DNA, 25 bp, probe
aaactggagtcagaagaccaggcta

SEQ ID NO: 148853 - DNA, 25 bp, probe
aaacggaatcccagccagcggattg

SEQ ID NO: 148854 - DNA, 25 bp, probe
aaacggaatcccagccagcggattg

SEQ ID NO: 148855 - DNA, 25 bp, probe
cagaaccaacacaccccagggtgtg

SEQ ID NO: 148856 - DNA, 25 bp, probe
aaagccagaagacccccagggatgt

SEQ ID NO: 148857 - DNA, 25 bp, probe
aaagctatttgagcccacggaatgt

SEQ ID NO: 148858 - DNA, 25 bp, probe
aaagcattctttgtccagcgtgact

SEQ ID NO: 148859 - DNA, 25 bp, probe
aaagcttctgaagaccacagtcact

SEQ ID NO: 148860 - DNA, 25 bp, probe
aaacgatgggcagtttcacagttca

SEQ ID NO: 148861 - DNA, 25 bp, probe
aaagcctgtggatcttccattacca

SEQ ID NO: 148862 - DNA, 25 bp, probe
aaagcctgtggatcttccattacca

SEQ ID NO: 148863 - DNA, 25 bp, probe
aaagatctgggatatgtgttggaaa

SEQ ID NO: 148864 - DNA, 25 bp, probe
aaacatcaggaatatttatggtgag

SEQ ID NO: 148865 - DNA, 25 bp, probe
aaacacaaaatccattccaggtagc

SEQ ID NO: 148866 - DNA, 25 bp, probe
aaaccaaatcttctctgtttcagaa

SEQ ID NO: 148867 - DNA, 25 bp, probe
aaacccatattatttgcgtgtacga

SEQ ID NO: 148868 - DNA, 25 bp, probe
aaacgcctcttgtattgtcatgtac

SEQ ID NO: 148869 - DNA, 25 bp, probe
aaactgcccttgcatggaaaactgt

SEQ ID NO: 148870 - DNA, 25 bp, probe
aaactgcccatctggagaatcgcct

SEQ ID NO: 148871 - DNA, 25 bp, probe
aaactgctctcctagggaatgggga

SEQ ID NO: 148872 - DNA, 25 bp, probe
aaactgctctcctagggaatgggga

SEQ ID NO: 148873 - DNA, 25 bp, probe
aaacgcctgcaatggtgactcaggg

SEQ ID NO: 148874 - DNA, 25 bp, probe
aaagcgcctctcaggggctatgtgt

SEQ ID NO: 148875 - DNA, 25 bp, probe
aaagctctactcagatggaaattgg

SEQ ID NO: 148876 - DNA, 25 bp, probe
aaagacaaccactgggatcagctgg

SEQ ID NO: 148877 - DNA, 25 bp, probe
aaagaacctcattgttgtactgctg

SEQ ID NO: 148878 - DNA, 25 bp, probe
aaagaaactcatttttacgctgaat

SEQ ID NO: 148879 - DNA, 25 bp, probe
aaagaaactcatttttacgctgaat

SEQ ID NO: 148880 - DNA, 25 bp, probe
aaagaagcacgttgatttcaccaaa

SEQ ID NO: 148881 - DNA, 25 bp, probe
aaagcaccactgctttacagaaaca

SEQ ID NO: 148882 - DNA, 25 bp, probe
aaagactcattgcttaattctaaga

SEQ ID NO: 148883 - DNA, 25 bp, probe
aaagatcttgggctgcgtccaaaga

SEQ ID NO: 148884 - DNA, 25 bp, probe
aaagaaaggcgcttggcatcacaca

SEQ ID NO: 148885 - DNA, 25 bp, probe
aaagaagatcctgtatgccacatca

SEQ ID NO: 148886 - DNA, 25 bp, probe
aaagagcatgacctggaaccctgat

SEQ ID NO: 148887 - DNA, 25 bp, probe
aaagatgcttcatgtagaccctcat

SEQ ID NO: 148888 - DNA, 25 bp, probe
aaagcaatatgattgtgtgactcct

SEQ ID NO: 148889 - DNA, 25 bp, probe
aaacatatgctccatcattcatctg

SEQ ID NO: 148890 - DNA, 25 bp, probe
aaacatatgctccatcattcatctg

SEQ ID NO: 148891 - DNA, 25 bp, probe
aaactcattccatatgcatctgtgt

SEQ ID NO: 148892 - DNA, 25 bp, probe
aaaccattaccattgatctgtctta

SEQ ID NO: 148893 - DNA, 25 bp, probe
aaacttttcctatgtgtctccagaa

SEQ ID NO: 148894 - DNA, 25 bp, probe
aaactttactatcagcagcttaaga

SEQ ID NO: 148895 - DNA, 25 bp, probe
aaacctgtgacttacaagcagctca

SEQ ID NO: 148896 - DNA, 25 bp, probe
aaaccggctgaaacaacctgcagac

SEQ ID NO: 148897 - DNA, 25 bp, probe
aaaccggctgaaacaacctgcagac

SEQ ID NO: 148898 - DNA, 25 bp, probe
aaagcgcagcctgtacatgactctc

SEQ ID NO: 148899 - DNA, 25 bp, probe
aaagcaagtgctgtcagcaatatcc

SEQ ID NO: 148900 - DNA, 25 bp, probe
aaagagttccacaagcagattactg

SEQ ID NO: 148901 - DNA, 25 bp, probe
aaacagatatactcgaatcagactg

SEQ ID NO: 148902 - DNA, 25 bp, probe
aaacagatatactcgaatcagactg

SEQ ID NO: 148903 - DNA, 25 bp, probe
aaagagacgcacttcttcacaatct

SEQ ID NO: 148904 - DNA, 25 bp, probe
aaagagacgcacttcttcacaatct

SEQ ID NO: 148905 - DNA, 25 bp, probe
aaagcgatccaagtttgacatgatt

SEQ ID NO: 148906 - DNA, 25 bp, probe
aaagaatccagagttgctacaataa

SEQ ID NO: 148907 - DNA, 25 bp, probe
aaagagattcgatttcaacctaatg

SEQ ID NO: 148908 - DNA, 25 bp, probe
aaagagataagatttaaccaacatc

SEQ ID NO: 148909 - DNA, 25 bp, probe
aaagagttcagacttatcaccattc

SEQ ID NO: 148910 - DNA, 25 bp, probe
aaagcagtacagtatcttaagtgtc

SEQ ID NO: 148911 - DNA, 25 bp, probe
aaacaattcaggacatggagactgt

SEQ ID NO: 148912 - DNA, 25 bp, probe
aaagcaggtcatcaagccaacgttc

SEQ ID NO: 148913 - DNA, 25 bp, probe
aaagagaaagcccccaagcatgttg

SEQ ID NO: 148914 - DNA, 25 bp, probe
aaagaaaactctctagactctagct

SEQ ID NO: 148915 - DNA, 25 bp, probe
aaagacaaacctctgagctccatca

SEQ ID NO: 148916 - DNA, 25 bp, probe
aaagacaaacctctgagctccatca

SEQ ID NO: 148917 - DNA, 25 bp, probe
aaactgacaacctgtgcagtcccgt

SEQ ID NO: 148918 - DNA, 25 bp, probe
aaactgacaacctgtgcagtcccgt

SEQ ID NO: 148919 - DNA, 25 bp, probe
aaagctgaatgtccctgtgaatcca

SEQ ID NO: 148920 - DNA, 25 bp, probe
aaagcagcagttccgctttatctat

SEQ ID NO: 148921 - DNA, 25 bp, probe
aaagacatagtaggatttgccatca

SEQ ID NO: 148922 - DNA, 25 bp, probe
aaagactgaagaaatttcacagcag

SEQ ID NO: 148923 - DNA, 25 bp, probe
aaagaccagagaagcactctccacc

SEQ ID NO: 148924 - DNA, 25 bp, probe
aaagcatcctggcaaagctgccacc

SEQ ID NO: 148925 - DNA, 25 bp, probe
aaagcaccatgaaaagagaccccac

SEQ ID NO: 148926 - DNA, 25 bp, probe
aaagacattgcagaaactcccacac

SEQ ID NO: 148927 - DNA, 25 bp, probe
aacagttggattcagaaccaagacc

SEQ ID NO: 148928 - DNA, 25 bp, probe
aaagagggatcttcagaaccatatg

SEQ ID NO: 148929 - DNA, 25 bp, probe
aaaaggtgctctccagtaactaact

SEQ ID NO: 148930 - DNA, 25 bp, probe
aaaacgtggctgcttcaaggatcct

SEQ ID NO: 148931 - DNA, 25 bp, probe
aaaccagtgggggtgcaaggagact

SEQ ID NO: 148932 - DNA, 25 bp, probe
aaagccagtctgatgggcaatggga

SEQ ID NO: 148933 - DNA, 25 bp, probe
aaaccagtctttcgacatgggcgtg

SEQ ID NO: 148934 - DNA, 25 bp, probe
aaaccagtctattagacggccaagt

SEQ ID NO: 148935 - DNA, 25 bp, probe
aaaccttctaaaatcttacacagat

SEQ ID NO: 148936 - DNA, 25 bp, probe
aaagctttgaaatatctttccaaga

SEQ ID NO: 148937 - DNA, 25 bp, probe
aaaattggagtctaatctttcaagg

SEQ ID NO: 148938 - DNA, 25 bp, probe
aaacatctggaaattaccttaatat

SEQ ID NO: 148939 - DNA, 25 bp, probe
aaaatctggcaaagttatatttact

SEQ ID NO: 148940 - DNA, 25 bp, probe
aaacctgcagaaaagttcatttaat

SEQ ID NO: 148941 - DNA, 25 bp, probe
aaaccacatattaacttcatggctg

SEQ ID NO: 148942 - DNA, 25 bp, probe
aaaccacatattaacttcatggctg

SEQ ID NO: 148943 - DNA, 25 bp, probe
aaaccaccagttacttgagtgtcac

SEQ ID NO: 148944 - DNA, 25 bp, probe
aaaccagttgaatcattgaggatcc

SEQ ID NO: 148945 - DNA, 25 bp, probe
aaaccagatctacacacttgcagtt

SEQ ID NO: 148946 - DNA, 25 bp, probe
aaactctttatcccatcttgattgg

SEQ ID NO: 148947 - DNA, 25 bp, probe
aaagctctttacctcttgctatttt

SEQ ID NO: 148948 - DNA, 25 bp, probe
aaagctcatatttttctcagttttt

SEQ ID NO: 148949 - DNA, 25 bp, probe
aaagcatcaacatttcatgccacat

SEQ ID NO: 148950 - DNA, 25 bp, probe
aaagcaaagatcttcaggcacaagc

SEQ ID NO: 148951 - DNA, 25 bp, probe
aaacctagatctacagctgaacctg

SEQ ID NO: 148952 - DNA, 25 bp, probe
aaactcatcgttaccaaatatggac

SEQ ID NO: 148953 - DNA, 25 bp, probe
aaagctactcgaacctaatccagac

SEQ ID NO: 148954 - DNA, 25 bp, probe
aaagccatatggagcatctacccag

SEQ ID NO: 148955 - DNA, 25 bp, probe
aaagccatatggagcatctacccag

SEQ ID NO: 148956 - DNA, 25 bp, probe
aaaccatatcacatgcctacatttt

SEQ ID NO: 148957 - DNA, 25 bp, probe
aaaccatatcacatgcctacatttt

SEQ ID NO: 148958 - DNA, 25 bp, probe
aaaccatatcacatgcctacatttt

SEQ ID NO: 148959 - DNA, 25 bp, probe
aaaccatgcccttggcttcattgtt

SEQ ID NO: 148960 - DNA, 25 bp, probe
aaacacatcacggggcgaagtgcct

SEQ ID NO: 148961 - DNA, 25 bp, probe
aaagcccacgagttgctgaatggca

SEQ ID NO: 148962 - DNA, 25 bp, probe
aaacggaatgagtctgctggtctgc

SEQ ID NO: 148963 - DNA, 25 bp, probe
aaaaatgcgagaccagcgcgccatg

SEQ ID NO: 148964 - DNA, 25 bp, probe
aaacaagtcgaagggctgccagagt

SEQ ID NO: 148965 - DNA, 25 bp, probe
aaacacattcaggaggtggtaaatc

SEQ ID NO: 148966 - DNA, 25 bp, probe
aaacacattcaggaggtggtaaatc

SEQ ID NO: 148967 - DNA, 25 bp, probe
aaaccacttgcagagtggctaagga

SEQ ID NO: 148968 - DNA, 25 bp, probe
aaaccagtaacgtgctgctcaagga

SEQ ID NO: 148969 - DNA, 25 bp, probe
aaagcggtagaggaaggctatcgtc

SEQ ID NO: 148970 - DNA, 25 bp, probe
aaacagggcaatgaagggcctctcc

SEQ ID NO: 148971 - DNA, 25 bp, probe
aaacagggcaatgaagggcctctcc

SEQ ID NO: 148972 - DNA, 25 bp, probe
aaactggagccagctcagggcagcc

SEQ ID NO: 148973 - DNA, 25 bp, probe
aaagctggagcggctcatggtgcgc

SEQ ID NO: 148974 - DNA, 25 bp, probe
aaagctgggagcgtgggctcagcag

SEQ ID NO: 148975 - DNA, 25 bp, probe
aaagctctggattactgccacagca

SEQ ID NO: 148976 - DNA, 25 bp, probe
aaagcttttccagtctgctcaagaa

SEQ ID NO: 148977 - DNA, 25 bp, probe
aaactcttccaattcgtcagtgaga

SEQ ID NO: 148978 - DNA, 25 bp, probe
aaacctcttcaatcccactaaatga

SEQ ID NO: 148979 - DNA, 25 bp, probe
aaactattgtaatctccctcaaaga

SEQ ID NO: 148980 - DNA, 25 bp, probe
aaacctatttagtctggagccaaag

SEQ ID NO: 148981 - DNA, 25 bp, probe
aaactctcatttgactgtgagaact

SEQ ID NO: 148982 - DNA, 25 bp, probe
aaagctgctgtgttgaaatatgaaa

SEQ ID NO: 148983 - DNA, 25 bp, probe
aaacgcagatgatgatacattccaa

SEQ ID NO: 148984 - DNA, 25 bp, probe
aaacgcagatgatgatacattccaa

SEQ ID NO: 148985 - DNA, 25 bp, probe
aaagcgccataacagcatctcggag

SEQ ID NO: 148986 - DNA, 25 bp, probe
aaagctgctaagagagactcagaag

SEQ ID NO: 148987 - DNA, 25 bp, probe
aaacgctcacagatgggctccagcg

SEQ ID NO: 148988 - DNA, 25 bp, probe
aaaccatccaaatgaggcctctatt

SEQ ID NO: 148989 - DNA, 25 bp, probe
aaacctgccaaatatgatgacatca

SEQ ID NO: 148990 - DNA, 25 bp, probe
aaagcaagtcaacaaggcacacaat

SEQ ID NO: 148991 - DNA, 25 bp, probe
aaagaaatgcaacctcaccacaagt

SEQ ID NO: 148992 - DNA, 25 bp, probe
aaagaattcttcgatcacaaaaatg

SEQ ID NO: 148993 - DNA, 25 bp, probe
aaagaaatgcactaagacaagaaca

SEQ ID NO: 148994 - DNA, 25 bp, probe
aaacaaatcctgaagatacatggaa

SEQ ID NO: 148995 - DNA, 25 bp, probe
aaagaaaggccaagatttgcagaac

SEQ ID NO: 148996 - DNA, 25 bp, probe
aaagaaatgtggccatgctttaaac

SEQ ID NO: 148997 - DNA, 25 bp, probe
aaagaatctatggcagtgtttgaac

SEQ ID NO: 148998 - DNA, 25 bp, probe
aaagcaataatggcagtagttctca

SEQ ID NO: 148999 - DNA, 25 bp, probe
aaagaatcaatccagcggttctcaa

SEQ ID NO: 149000 - DNA, 25 bp, probe
aaagaatcaatccagcggttctcaa

SEQ ID NO: 149001 - DNA, 25 bp, probe
aaagaaccaccatcttattcaggat

SEQ ID NO: 149002 - DNA, 25 bp, probe
aaagaaccaccagatctgcttcaag

SEQ ID NO: 149003 - DNA, 25 bp, probe
aaagaatcccaatattgctgtatag

SEQ ID NO: 149004 - DNA, 25 bp, probe
aaagcaaatcctgtatatgtatcta

SEQ ID NO: 149005 - DNA, 25 bp, probe
aaagaagttctgttatctgtgtata

SEQ ID NO: 149006 - DNA, 25 bp, probe
aaagaatgttggatatgatgtttca

SEQ ID NO: 149007 - DNA, 25 bp, probe
aaagaatctagcctttggtctctct

SEQ ID NO: 149008 - DNA, 25 bp, probe
aaagccactctattttggtctctgt

SEQ ID NO: 149009 - DNA, 25 bp, probe
aaactcttgagatcttggtcctgtg

SEQ ID NO: 149010 - DNA, 25 bp, probe
aaactctatggtagaatttcccatg

SEQ ID NO: 149011 - DNA, 25 bp, probe
aaaccttatctgtacattatacgat

SEQ ID NO: 149012 - DNA, 25 bp, probe
aaacctttcgagactcctcaagcat

SEQ ID NO: 149013 - DNA, 25 bp, probe
aaagcactttagcatctgttcaggt

SEQ ID NO: 149014 - DNA, 25 bp, probe
aaagcatcatttgcacctatgtggg

SEQ ID NO: 149015 - DNA, 25 bp, probe
aaagctgcattgtcacgtgtgtgtg

SEQ ID NO: 149016 - DNA, 25 bp, probe
aaagctgttggaatgagtatgtgat

SEQ ID NO: 149017 - DNA, 25 bp, probe
aaagctgttggaatgagtatgtgat

SEQ ID NO: 149018 - DNA, 25 bp, probe
aaactttgataatgtaggatttggg

SEQ ID NO: 149019 - DNA, 25 bp, probe
aaacttgtgaagtggaaatgttcta

SEQ ID NO: 149020 - DNA, 25 bp, probe
aaacttgtgaagtggaaatgttcta

SEQ ID NO: 149021 - DNA, 25 bp, probe
aaagctatctattaggaaaatgttt

SEQ ID NO: 149022 - DNA, 25 bp, probe
aaagctatctattaggaaaatgttt

SEQ ID NO: 149023 - DNA, 25 bp, probe
aaaccatattatttgattactgtgt

SEQ ID NO: 149024 - DNA, 25 bp, probe
aaagccattttcattgtacttgata

SEQ ID NO: 149025 - DNA, 25 bp, probe
aaagccaaacatatatatactatta

SEQ ID NO: 149026 - DNA, 25 bp, probe
aaagccaaacatatatatactatta

SEQ ID NO: 149027 - DNA, 25 bp, probe
aaagcaccgacaatctttgattact

SEQ ID NO: 149028 - DNA, 25 bp, probe
aaagcaaggaacctggtgttgaaga

SEQ ID NO: 149029 - DNA, 25 bp, probe
aaagaagtaacttgtgtctcatgaa

SEQ ID NO: 149030 - DNA, 25 bp, probe
aaaaagtcaactgtcctgcaattag

SEQ ID NO: 149031 - DNA, 25 bp, probe
aaaaagctactcgaacctaatccag

SEQ ID NO: 149032 - DNA, 25 bp, probe
aaagaacttgctgaaaataaccaca

SEQ ID NO: 149033 - DNA, 25 bp, probe
aaaccactgtttgaataagccgcac

SEQ ID NO: 149034 - DNA, 25 bp, probe
aaaccactgtttgaataagccgcac

SEQ ID NO: 149035 - DNA, 25 bp, probe
aaagcaatctgtatggaaaggggtt

SEQ ID NO: 149036 - DNA, 25 bp, probe
aaagcttcgtccgagaaacgccagg

SEQ ID NO: 149037 - DNA, 25 bp, probe
aaagcctctctcagcaaaaagccag

SEQ ID NO: 149038 - DNA, 25 bp, probe
aaagcgccgctcatgactatacgct

SEQ ID NO: 149039 - DNA, 25 bp, probe
aaaccctgtctctactaaagataca

SEQ ID NO: 149040 - DNA, 25 bp, probe
aaaaccttgcacgcatttggatacc

SEQ ID NO: 149041 - DNA, 25 bp, probe
aaaaccttgcacgcatttggatacc

SEQ ID NO: 149042 - DNA, 25 bp, probe
aaaccctcacagacttttagacatc

SEQ ID NO: 149043 - DNA, 25 bp, probe
aaaccctcacagacttttagacatc

SEQ ID NO: 149044 - DNA, 25 bp, probe
aaactgatcccactcatttttgaag

SEQ ID NO: 149045 - DNA, 25 bp, probe
aaacttccaacttgtgttctcagtg

SEQ ID NO: 149046 - DNA, 25 bp, probe
aaacttagcttttgatgtctccaag

SEQ ID NO: 149047 - DNA, 25 bp, probe
aaagctttctgtttgtgttccataa

SEQ ID NO: 149048 - DNA, 25 bp, probe
aaagctttctgtttgtgttccataa

SEQ ID NO: 149049 - DNA, 25 bp, probe
aaagccaactgaaagagttccttca

SEQ ID NO: 149050 - DNA, 25 bp, probe
aaagctcaagttcaagtttctgtat

SEQ ID NO: 149051 - DNA, 25 bp, probe
aaagcaaatgtaaaagtgttcctgt

SEQ ID NO: 149052 - DNA, 25 bp, probe
aaagcagaactatccagtgttatct

SEQ ID NO: 149053 - DNA, 25 bp, probe
aaagcaatagcatcacaaatttcac

SEQ ID NO: 149054 - DNA, 25 bp, probe
aaagcaacagtccacactttgtcca

SEQ ID NO: 149055 - DNA, 25 bp, probe
aaagaatgagtctctgtatggaaga

SEQ ID NO: 149056 - DNA, 25 bp, probe
aaagaagatgtctgcttcgagggca

SEQ ID NO: 149057 - DNA, 25 bp, probe
aaagaagatgtctgcttcgagggca

SEQ ID NO: 149058 - DNA, 25 bp, probe
aaagaatgattcagtcttgacggtg

SEQ ID NO: 149059 - DNA, 25 bp, probe
aaagcaatgactgttcttgcggggg

SEQ ID NO: 149060 - DNA, 25 bp, probe
aaacaaggtagtatccgggcgcgca

SEQ ID NO: 149061 - DNA, 25 bp, probe
aaactatttaatatcctggtcagga

SEQ ID NO: 149062 - DNA, 25 bp, probe
aaacttacgttcatccaattaggca

SEQ ID NO: 149063 - DNA, 25 bp, probe
aaactttcctccctcaatagtgaag

SEQ ID NO: 149064 - DNA, 25 bp, probe
aaactgtatcacctttgccaagtaa

SEQ ID NO: 149065 - DNA, 25 bp, probe
aaacattccatccttgagtcaaaaa

SEQ ID NO: 149066 - DNA, 25 bp, probe
aaacacggaccatgacatcaaaagg

SEQ ID NO: 149067 - DNA, 25 bp, probe
aaagcgggggcaggacacagataca

SEQ ID NO: 149068 - DNA, 25 bp, probe
aaacgggaggaggagcgcagcccag

SEQ ID NO: 149069 - DNA, 25 bp, probe
aaacggaagaagcacgtgccacggc

SEQ ID NO: 149070 - DNA, 25 bp, probe
aaacccgagagagacctgatgccgg

SEQ ID NO: 149071 - DNA, 25 bp, probe
aaaagcccaggagcccatttggagg

SEQ ID NO: 149072 - DNA, 25 bp, probe
aaaacgagaggttaagattctggag

SEQ ID NO: 149073 - DNA, 25 bp, probe
aaaaccttggtgtgtgttatggaca

SEQ ID NO: 149074 - DNA, 25 bp, probe
aaaaccttggtgtgtgttatggaca

SEQ ID NO: 149075 - DNA, 25 bp, probe
aaaccatctgtgctggggctttgat

SEQ ID NO: 149076 - DNA, 25 bp, probe
aaagccacatgtctgtgtgtgtgca

SEQ ID NO: 149077 - DNA, 25 bp, probe
aaagccgcactgatggatatgtaat

SEQ ID NO: 149078 - DNA, 25 bp, probe
aaagcacagaatttgagtcagtaga

SEQ ID NO: 149079 - DNA, 25 bp, probe
aaagcacagttcttggttgaacatg

SEQ ID NO: 149080 - DNA, 25 bp, probe
aaagcaacatacggtttgaacagca

SEQ ID NO: 149081 - DNA, 25 bp, probe
aaagcaacactcgatgatagtaaag

SEQ ID NO: 149082 - DNA, 25 bp, probe
aaagcatacaccaaacttatcagag

SEQ ID NO: 149083 - DNA, 25 bp, probe
aaagcaaaccagaatcttatttata

SEQ ID NO: 149084 - DNA, 25 bp, probe
aaacctactctgtattcaatttata

SEQ ID NO: 149085 - DNA, 25 bp, probe
aaacctactctgtattcaatttata

SEQ ID NO: 149086 - DNA, 25 bp, probe
aaagcactcccttaggcattattta

SEQ ID NO: 149087 - DNA, 25 bp, probe
aaacctggccataagtgatttacta

SEQ ID NO: 149088 - DNA, 25 bp, probe
aaacctgagcctatttctagtataa

SEQ ID NO: 149089 - DNA, 25 bp, probe
aaagcccctcttgtactacatgaag

SEQ ID NO: 149090 - DNA, 25 bp, probe
aaactcggctgtattaatcacgcga

SEQ ID NO: 149091 - DNA, 25 bp, probe
aaactgtgcgtgatataaactctta

SEQ ID NO: 149092 - DNA, 25 bp, probe
aaacttctgtgcacaaagtgctccc

SEQ ID NO: 149093 - DNA, 25 bp, probe
aaagcattccgctcaaaggtcactg

SEQ ID NO: 149094 - DNA, 25 bp, probe
aaagcattccgctcaaaggtcactg

SEQ ID NO: 149095 - DNA, 25 bp, probe
aaagcatcttccttaaagcacaaag

SEQ ID NO: 149096 - DNA, 25 bp, probe
aaagctcaatcagatacaaaaacag

SEQ ID NO: 149097 - DNA, 25 bp, probe
aaaccagatccaatcaaacctcagc

SEQ ID NO: 149098 - DNA, 25 bp, probe
aaacctactcagaagacacctaccg

SEQ ID NO: 149099 - DNA, 25 bp, probe
aaacctcatctacgagaacgtggcc

SEQ ID NO: 149100 - DNA, 25 bp, probe
aacagccgcttctggaacggcagcc

SEQ ID NO: 149101 - DNA, 25 bp, probe
aaagccctgtcagacagactgggcc

SEQ ID NO: 149102 - DNA, 25 bp, probe
aaaccctgacatgtattgcgggcgc

SEQ ID NO: 149103 - DNA, 25 bp, probe
aaacctctgaattttgtgggtgtgt

SEQ ID NO: 149104 - DNA, 25 bp, probe
aaaccttaatagttctgcctgcttg

SEQ ID NO: 149105 - DNA, 25 bp, probe
aaagctcaatagatgatttcttgct

SEQ ID NO: 149106 - DNA, 25 bp, probe
aaagctcaatagatgatttcttgct

SEQ ID NO: 149107 - DNA, 25 bp, probe
aaagcatagaagatctcctcttggt

SEQ ID NO: 149108 - DNA, 25 bp, probe
aaagcatggagagtggcatcttctt

SEQ ID NO: 149109 - DNA, 25 bp, probe
aacagatgtaagcgtcttactttct

SEQ ID NO: 149110 - DNA, 25 bp, probe
aaacttatacgacttttcattcagt

SEQ ID NO: 149111 - DNA, 25 bp, probe
aaaacttccaacttgtgttctcagt

SEQ ID NO: 149112 - DNA, 25 bp, probe
aaacagcttgcttaccgtgttctac

SEQ ID NO: 149113 - DNA, 25 bp, probe
aaagcacattgccaaacgcttctgc

SEQ ID NO: 149114 - DNA, 25 bp, probe
aaagccttacggtcatgatgtctgc

SEQ ID NO: 149115 - DNA, 25 bp, probe
aaagccattattctctgatgcactg

SEQ ID NO: 149116 - DNA, 25 bp, probe
aaagcacaaagttctcagagctctc

SEQ ID NO: 149117 - DNA, 25 bp, probe
aaagcagaatgtatcatcagagcgc

SEQ ID NO: 149118 - DNA, 25 bp, probe
aaagcagaatattgtagcccgcaag

SEQ ID NO: 149119 - DNA, 25 bp, probe
aaagcagcgatacgctgacccgaca

SEQ ID NO: 149120 - DNA, 25 bp, probe
aaagcaggtgactttcctatgacac

SEQ ID NO: 149121 - DNA, 25 bp, probe
aaacaggatggctttctgtagccac

SEQ ID NO: 149122 - DNA, 25 bp, probe
taaacggtgacctttagtgccaact

SEQ ID NO: 149123 - DNA, 25 bp, probe
aaactgggcaacaatttgctgtaaa

SEQ ID NO: 149124 - DNA, 25 bp, probe
aaacccaaacattttggcattgaat

SEQ ID NO: 149125 - DNA, 25 bp, probe
aaacttcaagtattattgccttaat

SEQ ID NO: 149126 - DNA, 25 bp, probe
aaacccagggaaaagagctctcaat

SEQ ID NO: 149127 - DNA, 25 bp, probe
aaacctcaacgaattggccgtcaag

SEQ ID NO: 149128 - DNA, 25 bp, probe
aaacgccaagaactgctggccgtag

SEQ ID NO: 149129 - DNA, 25 bp, probe
aaacagtggatatctggtccgtggg

SEQ ID NO: 149130 - DNA, 25 bp, probe
aaacatgggtgctcttggagctgtg

SEQ ID NO: 149131 - DNA, 25 bp, probe
aaactgggtctgcaggacgttgctg

SEQ ID NO: 149132 - DNA, 25 bp, probe
aaacttggtttgtgatcgatctgct

SEQ ID NO: 149133 - DNA, 25 bp, probe
aacactctagctattcttcgtcgtg

SEQ ID NO: 149134 - DNA, 25 bp, probe
aaacagccatgtgggtcctttctgt

SEQ ID NO: 149135 - DNA, 25 bp, probe
aaacagccatgtgggtcctttctgt

SEQ ID NO: 149136 - DNA, 25 bp, probe
aaacccttggaaatctgtgtgtgtg

SEQ ID NO: 149137 - DNA, 25 bp, probe
aaacctatatagtatccctgtgatt

SEQ ID NO: 149138 - DNA, 25 bp, probe
aaactgcttataataatccaggagt

SEQ ID NO: 149139 - DNA, 25 bp, probe
aaacgcgtatctactaggaggagcc

SEQ ID NO: 149140 - DNA, 25 bp, probe
aaacgtggccctgaggatgaagctc

SEQ ID NO: 149141 - DNA, 25 bp, probe
aaacgtggccctgaggatgaagctc

SEQ ID NO: 149142 - DNA, 25 bp, probe
aaagcagttccagaaggaggcgctg

SEQ ID NO: 149143 - DNA, 25 bp, probe
aaagcagctttcgacaaaagtcaca

SEQ ID NO: 149144 - DNA, 25 bp, probe
aaagcagctttcgacaaaagtcaca

SEQ ID NO: 149145 - DNA, 25 bp, probe
aaagcagtgctttgtgaaatgcagt

SEQ ID NO: 149146 - DNA, 25 bp, probe
aaagcgtgccaatcaacatgctggt

SEQ ID NO: 149147 - DNA, 25 bp, probe
aaacgatgcgaggagcgaccgcgac

SEQ ID NO: 149148 - DNA, 25 bp, probe
aaacggcggagcctgaacagcagca

SEQ ID NO: 149149 - DNA, 25 bp, probe
aaacggcggagcctgaacagcagca

SEQ ID NO: 149150 - DNA, 25 bp, probe
aaaccattgagacttcagaagagca

SEQ ID NO: 149151 - DNA, 25 bp, probe
aaaccattgagacttcagaagagca

SEQ ID NO: 149152 - DNA, 25 bp, probe
aaaacattacagttgccaaggagga

SEQ ID NO: 149153 - DNA, 25 bp, probe
aaaatccctatgtgccaaaagtagt

SEQ ID NO: 149154 - DNA, 25 bp, probe
aaaacaacatgtgtccaaatcgggg

SEQ ID NO: 149155 - DNA, 25 bp, probe
aacaaaactgcatttcactttcccg

SEQ ID NO: 149156 - DNA, 25 bp, probe
aaaacccgtatagctttcagtcaga

SEQ ID NO: 149157 - DNA, 25 bp, probe
aaaaacccgtatagctttcagtcag

SEQ ID NO: 149158 - DNA, 25 bp, probe
aaacaaacgagcaggcatttctgtg

SEQ ID NO: 149159 - DNA, 25 bp, probe
aaaaaggccgcatgatctttctggc

SEQ ID NO: 149160 - DNA, 25 bp, probe
aaacgtagctcctagggtgtcttgc

SEQ ID NO: 149161 - DNA, 25 bp, probe
aaacgccgcaaggagcggctggcag

SEQ ID NO: 149162 - DNA, 25 bp, probe
aaaccttgcttggacggctggagta

SEQ ID NO: 149163 - DNA, 25 bp, probe
aaacctttgtgttcgaggagacacg

SEQ ID NO: 149164 - DNA, 25 bp, probe
aaacccttgttcttaggatcacaga

SEQ ID NO: 149165 - DNA, 25 bp, probe
aaactccttccagctgaaatcaagg

SEQ ID NO: 149166 - DNA, 25 bp, probe
aaacatattttctccaaacaagatc

SEQ ID NO: 149167 - DNA, 25 bp, probe
aaacatatctcttatcttacgaaaa

SEQ ID NO: 149168 - DNA, 25 bp, probe
aaacatatgtctgtctttgcaaagg

SEQ ID NO: 149169 - DNA, 25 bp, probe
aaacatatgtctgtctttgcaaagg

SEQ ID NO: 149170 - DNA, 25 bp, probe
aaaccagcaattgcccatcgagatc

SEQ ID NO: 149171 - DNA, 25 bp, probe
aaacctaatcattccaccaagttat

SEQ ID NO: 149172 - DNA, 25 bp, probe
aaacctaatcattccaccaagttat

SEQ ID NO: 149173 - DNA, 25 bp, probe
aaggcctaactatgcctcgaacttc

SEQ ID NO: 149174 - DNA, 25 bp, probe
aaggcctaactatgcctcgaacttc

SEQ ID NO: 149175 - DNA, 25 bp, probe
aagtgactatgacaccccaaactac

SEQ ID NO: 149176 - DNA, 25 bp, probe
aagtgactatgacaccccaaactac

SEQ ID NO: 149177 - DNA, 25 bp, probe
aaagcatctagacagtaaaacttac

SEQ ID NO: 149178 - DNA, 25 bp, probe
aaagcttagagccagtatttatact

SEQ ID NO: 149179 - DNA, 25 bp, probe
aaagccatagcaggagttattaacc

SEQ ID NO: 149180 - DNA, 25 bp, probe
aaacctcatgccctgttgataaacc

SEQ ID NO: 149181 - DNA, 25 bp, probe
aaacctcagcccgaggaaacatgct

SEQ ID NO: 149182 - DNA, 25 bp, probe
aaacccagactgccaagaaaagcct

SEQ ID NO: 149183 - DNA, 25 bp, probe
aaaccctgaagccaggaactatgtc

SEQ ID NO: 149184 - DNA, 25 bp, probe
aaagcgcaaaaccaagtacatagtg

SEQ ID NO: 149185 - DNA, 25 bp, probe
aaagccaaagtcccagagatattgt

SEQ ID NO: 149186 - DNA, 25 bp, probe
aaaccaaattaagggagatcatgat

SEQ ID NO: 149187 - DNA, 25 bp, probe
aaaccagaatcttatttatattgtt

SEQ ID NO: 149188 - DNA, 25 bp, probe
aaaccaaatcagtcttctataatct

SEQ ID NO: 149189 - DNA, 25 bp, probe
aaacctcagaacttactcatcagtc

SEQ ID NO: 149190 - DNA, 25 bp, probe
aaacctatgtattattcatacagct

SEQ ID NO: 149191 - DNA, 25 bp, probe
aaacagtataagtatctcattcagt

SEQ ID NO: 149192 - DNA, 25 bp, probe
aaacagtataagtatctcattcagt

SEQ ID NO: 149193 - DNA, 25 bp, probe
aaactgtacatactgtgcatataat

SEQ ID NO: 149194 - DNA, 25 bp, probe
aaagctatccattgtgtcatattta

SEQ ID NO: 149195 - DNA, 25 bp, probe
aaacatgcacaaagttcaatttgaa

SEQ ID NO: 149196 - DNA, 25 bp, probe
aaaccatcaccatttgaatttcaaa

SEQ ID NO: 149197 - DNA, 25 bp, probe
aaaccatcaccatttgaatttcaaa

SEQ ID NO: 149198 - DNA, 25 bp, probe
aaaaacccacagcattttcaagatt

SEQ ID NO: 149199 - DNA, 25 bp, probe
aaaaacccacagcattttcaagatt

SEQ ID NO: 149200 - DNA, 25 bp, probe
aaactaccaccaaattatccaactg

SEQ ID NO: 149201 - DNA, 25 bp, probe
aaactgacccgaagttgccatctac

SEQ ID NO: 149202 - DNA, 25 bp, probe
aaagctcaaacgacatcttgctctc

SEQ ID NO: 149203 - DNA, 25 bp, probe
aaagctcaatactcatgtggcctta

SEQ ID NO: 149204 - DNA, 25 bp, probe
aaagctactgagctcatttcactta

SEQ ID NO: 149205 - DNA, 25 bp, probe
aaactatcatagccctgcttactaa

SEQ ID NO: 149206 - DNA, 25 bp, probe
aaacgatgcatctcagaatttctaa

SEQ ID NO: 149207 - DNA, 25 bp, probe
aaacgtcctttgcattatctgatca

SEQ ID NO: 149208 - DNA, 25 bp, probe
aaagctgtccgttgtattccttgct

SEQ ID NO: 149209 - DNA, 25 bp, probe
aaagctgtccgttgtattccttgct

SEQ ID NO: 149210 - DNA, 25 bp, probe
aaacttggcagtttctaacttgtgt

SEQ ID NO: 149211 - DNA, 25 bp, probe
aaagctttgctgatcttgaacaatg

SEQ ID NO: 149212 - DNA, 25 bp, probe
aaactctttgtgccttgaaaatgaa

SEQ ID NO: 149213 - DNA, 25 bp, probe
aaactttgggcacagaagacagcaa

SEQ ID NO: 149214 - DNA, 25 bp, probe
aaacctgtgtggctaaagtctgctg

SEQ ID NO: 149215 - DNA, 25 bp, probe
aaagcctggaggctattttgctgcc

SEQ ID NO: 149216 - DNA, 25 bp, probe
aaagcgagctgacgctggttttgtg

SEQ ID NO: 149217 - DNA, 25 bp, probe
aaacgattgatcttgtggcttatgg

SEQ ID NO: 149218 - DNA, 25 bp, probe
aaacgattgatcttgtggcttatgg

SEQ ID NO: 149219 - DNA, 25 bp, probe
aaagctgattgactttggctgtgcc

SEQ ID NO: 149220 - DNA, 25 bp, probe
aaagctgttgacttatctgcgcttg

SEQ ID NO: 149221 - DNA, 25 bp, probe
aaacattggaattgactgatctctg

SEQ ID NO: 149222 - DNA, 25 bp, probe
aaactgctgcgatatgaccaccagt

SEQ ID NO: 149223 - DNA, 25 bp, probe
aaactgatgagatttcaccacaaat

SEQ ID NO: 149224 - DNA, 25 bp, probe
aaacttggacaccatccaaacatca

SEQ ID NO: 149225 - DNA, 25 bp, probe
aaacggtacagctaagatttgcaca

SEQ ID NO: 149226 - DNA, 25 bp, probe
aaacggtacagctaagatttgcaca

SEQ ID NO: 149227 - DNA, 25 bp, probe
aaacggtacacagactattgacatc

SEQ ID NO: 149228 - DNA, 25 bp, probe
aaacgttaccagcagctgaaaccaa

SEQ ID NO: 149229 - DNA, 25 bp, probe
aaacgattccgaaacataatatcaa

SEQ ID NO: 149230 - DNA, 25 bp, probe
aaacttactcgatgtcattgaccaa

SEQ ID NO: 149231 - DNA, 25 bp, probe
aaacgtcacgctgaatatatgacca

SEQ ID NO: 149232 - DNA, 25 bp, probe
aaacccacctactatgttgacacat

SEQ ID NO: 149233 - DNA, 25 bp, probe
aaaccagcagtttctctgtgtacat

SEQ ID NO: 149234 - DNA, 25 bp, probe
aaagctctgcttgtatttgtgatat

SEQ ID NO: 149235 - DNA, 25 bp, probe
aaagctctgcttgtatttgtgatat

SEQ ID NO: 149236 - DNA, 25 bp, probe
aaagctgtgttcatattctgtctag

SEQ ID NO: 149237 - DNA, 25 bp, probe
aacaggtttttgattttgaatagca

SEQ ID NO: 149238 - DNA, 25 bp, probe
aagagggacggtatttatgaatcag

SEQ ID NO: 149239 - DNA, 25 bp, probe
aaaatgccacgtctgtttaaattat

SEQ ID NO: 149240 - DNA, 25 bp, probe
aaactccacgatcttcctgaagaag

SEQ ID NO: 149241 - DNA, 25 bp, probe
aaactcaaaatgtcttcctaacaag

SEQ ID NO: 149242 - DNA, 25 bp, probe
aaactcaaaatgtcttcctaacaag

SEQ ID NO: 149243 - DNA, 25 bp, probe
aaactaacaatggcttcaacgagaa

SEQ ID NO: 149244 - DNA, 25 bp, probe
aaactaacaatggcttcaacgagaa

SEQ ID NO: 149245 - DNA, 25 bp, probe
aaaccaacactagttacctcagaat

SEQ ID NO: 149246 - DNA, 25 bp, probe
aaaccaaactgaatgtgacctgaaa

SEQ ID NO: 149247 - DNA, 25 bp, probe
aaagccattactttacagcctgaac

SEQ ID NO: 149248 - DNA, 25 bp, probe
aaagccttactgttgattgcccatg

SEQ ID NO: 149249 - DNA, 25 bp, probe
aaactcttttgaggaagtctatgcc

SEQ ID NO: 149250 - DNA, 25 bp, probe
aaacgattttctgtatgatgttact

SEQ ID NO: 149251 - DNA, 25 bp, probe
aaacgattttcttctgtagaatgtt

SEQ ID NO: 149252 - DNA, 25 bp, probe
aaacgtgttctaatcttaggcgctt

SEQ ID NO: 149253 - DNA, 25 bp, probe
aaacgtgcattcaacctcaaacttt

SEQ ID NO: 149254 - DNA, 25 bp, probe
aaactgtaataagctcatcaatttc

SEQ ID NO: 149255 - DNA, 25 bp, probe
aaactttttcaggacatgctatctt

SEQ ID NO: 149256 - DNA, 25 bp, probe
aaactttttcaggatttcacctgag

SEQ ID NO: 149257 - DNA, 25 bp, probe
aaactttttcaggatttcacctgag

SEQ ID NO: 149258 - DNA, 25 bp, probe
aatacaggtttacagttcatgcctg

SEQ ID NO: 149259 - DNA, 25 bp, probe
aaacgtgtcttatttttatgcagct

SEQ ID NO: 149260 - DNA, 25 bp, probe
aaacgtctatgctgctttgttcact

SEQ ID NO: 149261 - DNA, 25 bp, probe
aaaccatccaccctggtgttgactg

SEQ ID NO: 149262 - DNA, 25 bp, probe
aaaccatccaccctggtgttgactg

SEQ ID NO: 149263 - DNA, 25 bp, probe
aaactcaacatggccggttatgcac

SEQ ID NO: 149264 - DNA, 25 bp, probe
aaaccagactgtcctggctagtcct

SEQ ID NO: 149265 - DNA, 25 bp, probe
aaagccacatttagggctatcacct

SEQ ID NO: 149266 - DNA, 25 bp, probe
aaagccacagaatatggcttggcct

SEQ ID NO: 149267 - DNA, 25 bp, probe
aaactgacagagattccttggcttt

SEQ ID NO: 149268 - DNA, 25 bp, probe
aaacgagaagccccggctgtcattt

SEQ ID NO: 149269 - DNA, 25 bp, probe
aaacggggacagtagcctgcacttt

SEQ ID NO: 149270 - DNA, 25 bp, probe
aaactcaggtacaaactcgacttca

SEQ ID NO: 149271 - DNA, 25 bp, probe
aaaccgcccacagagtggacttcat

SEQ ID NO: 149272 - DNA, 25 bp, probe
aaagccccgacatacattggtctct

SEQ ID NO: 149273 - DNA, 25 bp, probe
aaacctcctaacttcactgtattct

SEQ ID NO: 149274 - DNA, 25 bp, probe
aaacagacctaatgctccttgttcc

SEQ ID NO: 149275 - DNA, 25 bp, probe
aaaagaccaagatgccatggggcct

SEQ ID NO: 149276 - DNA, 25 bp, probe
aaaaccaccagttacttgagtgtca

SEQ ID NO: 149277 - DNA, 25 bp, probe
aaaacgtcctttgcattatctgatc

SEQ ID NO: 149278 - DNA, 25 bp, probe
aaaatttctcttggctttagatgac

SEQ ID NO: 149279 - DNA, 25 bp, probe
aaacttagctcctgcttttgatcat

SEQ ID NO: 149280 - DNA, 25 bp, probe
aaacctagctaactgccttctatga

SEQ ID NO: 149281 - DNA, 25 bp, probe
aaacctagctaactgccttctatga

SEQ ID NO: 149282 - DNA, 25 bp, probe
aaaccatttaagtctttgtatatgt

SEQ ID NO: 149283 - DNA, 25 bp, probe
aaacaccttttagtattgatagctt

SEQ ID NO: 149284 - DNA, 25 bp, probe
aaacaccttttagtattgatagctt

SEQ ID NO: 149285 - DNA, 25 bp, probe
aaaccctttttgcagtgcatgattg

SEQ ID NO: 149286 - DNA, 25 bp, probe
aaactctcttccatcaaggcatatc

SEQ ID NO: 149287 - DNA, 25 bp, probe
aaacctctgctagttcagatggatt

SEQ ID NO: 149288 - DNA, 25 bp, probe
aaacagtcctgactcacagggcctg

SEQ ID NO: 149289 - DNA, 25 bp, probe
aaactgctgccttcgaagtgtgcga

SEQ ID NO: 149290 - DNA, 25 bp, probe
aaaccagccttctgcagtgggtact

SEQ ID NO: 149291 - DNA, 25 bp, probe
aaactcagccatcccaagctggtta

SEQ ID NO: 149292 - DNA, 25 bp, probe
aaacatcaggcattctccacctgtt

SEQ ID NO: 149293 - DNA, 25 bp, probe
aaacatgagtgctttgcccatcagt

SEQ ID NO: 149294 - DNA, 25 bp, probe
aaagcgaggtggacattcatctgtt

SEQ ID NO: 149295 - DNA, 25 bp, probe
aaaacggaggtctcatctgtgtcct

SEQ ID NO: 149296 - DNA, 25 bp, probe
aaaacggaggtctcatctgtgtcct

SEQ ID NO: 149297 - DNA, 25 bp, probe
aaacctagaggcacaatcttgactt

SEQ ID NO: 149298 - DNA, 25 bp, probe
aaacctcaggtcatagatcattttt

SEQ ID NO: 149299 - DNA, 25 bp, probe
aaacacctagtcaatacagatttgt

SEQ ID NO: 149300 - DNA, 25 bp, probe
aaacacttggctcctagagacctgc

SEQ ID NO: 149301 - DNA, 25 bp, probe
aaaccttccatgtcaagattcagct

SEQ ID NO: 149302 - DNA, 25 bp, probe
aaagccctgccttgtgaagtcagca

SEQ ID NO: 149303 - DNA, 25 bp, probe
aaagccacattttgcattagacaga

SEQ ID NO: 149304 - DNA, 25 bp, probe
aaaccacttcatagcaccaacagag

SEQ ID NO: 149305 - DNA, 25 bp, probe
aaactatgctttacatggcaatcaa

SEQ ID NO: 149306 - DNA, 25 bp, probe
aaaccagcttcatattctatctcaa

SEQ ID NO: 149307 - DNA, 25 bp, probe
aaaccagcttcatttgttgctccga

SEQ ID NO: 149308 - DNA, 25 bp, probe
aaagccgcttcatgagagtgcgcct

SEQ ID NO: 149309 - DNA, 25 bp, probe
aaaccctccaagggatctgcttgat

SEQ ID NO: 149310 - DNA, 25 bp, probe
aaaccccgcagagagagcagatttg

SEQ ID NO: 149311 - DNA, 25 bp, probe
aaaccccgcagagagagcagatttg

SEQ ID NO: 149312 - DNA, 25 bp, probe
aaaccaacgagatgagaagactgtg

SEQ ID NO: 149313 - DNA, 25 bp, probe
aaagcctaatatgcagaaatgaatt

SEQ ID NO: 149314 - DNA, 25 bp, probe
aaacctgaatatccagtgaataata

SEQ ID NO: 149315 - DNA, 25 bp, probe
aaaccaggtgatccatagagatata

SEQ ID NO: 149316 - DNA, 25 bp, probe
aaaccagatcgtgcacagagacata

SEQ ID NO: 149317 - DNA, 25 bp, probe
aaacctctcagcagcatcaaagcag

SEQ ID NO: 149318 - DNA, 25 bp, probe
aaacctctcagcagcatcaaagcag

SEQ ID NO: 149319 - DNA, 25 bp, probe
aaaatctcatcctagatcaccgagg

SEQ ID NO: 149320 - DNA, 25 bp, probe
aaaagcatgcattctagcacaacaa

SEQ ID NO: 149321 - DNA, 25 bp, probe
aaacatgctcatgccatcaataact

SEQ ID NO: 149322 - DNA, 25 bp, probe
aaacatgctaacatagtgctacttc

SEQ ID NO: 149323 - DNA, 25 bp, probe
aaacatgctaacatagtgctacttc

SEQ ID NO: 149324 - DNA, 25 bp, probe
aaacactatgacacagaccagtccg

SEQ ID NO: 149325 - DNA, 25 bp, probe
aaagcctatgaaaagctccagattc

SEQ ID NO: 149326 - DNA, 25 bp, probe
aagaccttaaaagacacatccccag

SEQ ID NO: 149327 - DNA, 25 bp, probe
aaacctaaagaagcatcatcccctc

SEQ ID NO: 149328 - DNA, 25 bp, probe
aaacctaaagaagcatcatcccctc

SEQ ID NO: 149329 - DNA, 25 bp, probe
aaactctctaagtacatccacctgt

SEQ ID NO: 149330 - DNA, 25 bp, probe
aaacttctcaaatcacactcagtct

SEQ ID NO: 149331 - DNA, 25 bp, probe
aaacttctcaaatcacactcagtct

SEQ ID NO: 149332 - DNA, 25 bp, probe
aaactcttgaaatccagttgccatt

SEQ ID NO: 149333 - DNA, 25 bp, probe
aaacgtgttatattccatacttatt

SEQ ID NO: 149334 - DNA, 25 bp, probe
aaactagttacctaatactatcatt

SEQ ID NO: 149335 - DNA, 25 bp, probe
aaactagtaatccttatcaccatga

SEQ ID NO: 149336 - DNA, 25 bp, probe
aaaccaggaagcctagcatcccatg

SEQ ID NO: 149337 - DNA, 25 bp, probe
aaaccaggaagcctagcatcccatg

SEQ ID NO: 149338 - DNA, 25 bp, probe
aaacgaggaatccgacattcaatga

SEQ ID NO: 149339 - DNA, 25 bp, probe
aatactgaaaaacgaggccaatgac

SEQ ID NO: 149340 - DNA, 25 bp, probe
aaactcacagatgggcaaggccttt

SEQ ID NO: 149341 - DNA, 25 bp, probe
aaaccatagtaggcaatacaatttt

SEQ ID NO: 149342 - DNA, 25 bp, probe
aaaccatagtaggcaatacaatttt

SEQ ID NO: 149343 - DNA, 25 bp, probe
aataacaagttatctacaaatttca

SEQ ID NO: 149344 - DNA, 25 bp, probe
aaaaattgttgatgtagccaagttc

SEQ ID NO: 149345 - DNA, 25 bp, probe
aaaagttgttgcactcctgaaattc

SEQ ID NO: 149346 - DNA, 25 bp, probe
aagaattctggggtcatcctgagaa

SEQ ID NO: 149347 - DNA, 25 bp, probe
aaaaatttggagtgtcagcagctat

SEQ ID NO: 149348 - DNA, 25 bp, probe
aaaatatttacactcccatgttcat

SEQ ID NO: 149349 - DNA, 25 bp, probe
aaaaattatctgatccttgtggcac

SEQ ID NO: 149350 - DNA, 25 bp, probe
aaacagaacttgatcctgcgtaacc

SEQ ID NO: 149351 - DNA, 25 bp, probe
aaaccacacttagtcctgatgtact

SEQ ID NO: 149352 - DNA, 25 bp, probe
aaacccattgtgtctctggatttct

SEQ ID NO: 149353 - DNA, 25 bp, probe
aaacccattgtgtctctggatttct

SEQ ID NO: 149354 - DNA, 25 bp, probe
aaaccgttgctggatctgctgtttg

SEQ ID NO: 149355 - DNA, 25 bp, probe
aaactcagggtttctgctgggtgga

SEQ ID NO: 149356 - DNA, 25 bp, probe
aaaacatggggaactctgggtcaga

SEQ ID NO: 149357 - DNA, 25 bp, probe
aaaaaggtgaggacatctgggtctc

SEQ ID NO: 149358 - DNA, 25 bp, probe
aaacagggccacttcagagggtctc

SEQ ID NO: 149359 - DNA, 25 bp, probe
aaacagggccacttcagagggtctc

SEQ ID NO: 149360 - DNA, 25 bp, probe
aaaccagtgcctttaggtgagattc

SEQ ID NO: 149361 - DNA, 25 bp, probe
aaactcctgacctcaggtgatccgc

SEQ ID NO: 149362 - DNA, 25 bp, probe
aaactcctgacctcaggtgatccgc

SEQ ID NO: 149363 - DNA, 25 bp, probe
aaactcctgacctcaagtaatccac

SEQ ID NO: 149364 - DNA, 25 bp, probe
aaactctgtaccgcacaggaataac

SEQ ID NO: 149365 - DNA, 25 bp, probe
aaacctgtaccctgatgctgtataa

SEQ ID NO: 149366 - DNA, 25 bp, probe
aaaccttccacccagtgctgaattt

SEQ ID NO: 149367 - DNA, 25 bp, probe
aaactcttatacagaatatggttct

SEQ ID NO: 149368 - DNA, 25 bp, probe
aaactcttctacagaaattactctc

SEQ ID NO: 149369 - DNA, 25 bp, probe
aaacgtttacttatcttatgccacg

SEQ ID NO: 149370 - DNA, 25 bp, probe
aaacgatggtacctagtctttgaat

SEQ ID NO: 149371 - DNA, 25 bp, probe
aaacgatgggacctcagtcttcttc

SEQ ID NO: 149372 - DNA, 25 bp, probe
aaactgcatggtcgcccatgatttt

SEQ ID NO: 149373 - DNA, 25 bp, probe
aaacagctggggccacaactttggt

SEQ ID NO: 149374 - DNA, 25 bp, probe
aaacagtggcggcatgaagctccag

SEQ ID NO: 149375 - DNA, 25 bp, probe
aaacattgcgcacagagacctcaag

SEQ ID NO: 149376 - DNA, 25 bp, probe
aaacatgcagccttaagcctcagca

SEQ ID NO: 149377 - DNA, 25 bp, probe
aaactcagcaatggcagattatcga

SEQ ID NO: 149378 - DNA, 25 bp, probe
aaaccatgcacatagaatacggcac

SEQ ID NO: 149379 - DNA, 25 bp, probe
aaactgcaaccaacagtaaggactt

SEQ ID NO: 149380 - DNA, 25 bp, probe
aaaccgatccaacctagagaccatt

SEQ ID NO: 149381 - DNA, 25 bp, probe
aaaccagcactctcgtaatgatgtc

SEQ ID NO: 149382 - DNA, 25 bp, probe
aaacgtgcaataatgccaaatgtta

SEQ ID NO: 149383 - DNA, 25 bp, probe
aaacgctatatgcctccagaagtgt

SEQ ID NO: 149384 - DNA, 25 bp, probe
aaacagtgatcaacccagagacggg

SEQ ID NO: 149385 - DNA, 25 bp, probe
aaacaatatgcatcaggagaacaag

SEQ ID NO: 149386 - DNA, 25 bp, probe
aaacagaagtaccctgagcagcagg

SEQ ID NO: 149387 - DNA, 25 bp, probe
aaacaaactacccatccatgagctg

SEQ ID NO: 149388 - DNA, 25 bp, probe
aaaaaccatattgtgcacagggacc

SEQ ID NO: 149389 - DNA, 25 bp, probe
aagaaaacaactctcgattggaagt

SEQ ID NO: 149390 - DNA, 25 bp, probe
aaaaaaaacagatcgtatttatgca

SEQ ID NO: 149391 - DNA, 25 bp, probe
aacataaaaagatccaactgttgga

SEQ ID NO: 149392 - DNA, 25 bp, probe
aattagagacaagaaacctgtttca

SEQ ID NO: 149393 - DNA, 25 bp, probe
aactgggagcctgaagtccttttcg

SEQ ID NO: 149394 - DNA, 25 bp, probe
aactgggagcctgaagtccttttcg

SEQ ID NO: 149395 - DNA, 25 bp, probe
aactggtgacctgtaggccatgtta

SEQ ID NO: 149396 - DNA, 25 bp, probe
aaccactggtctgtagggatttttg

SEQ ID NO: 149397 - DNA, 25 bp, probe
aaccactggtctgtagggatttttg

SEQ ID NO: 149398 - DNA, 25 bp, probe
aaaccatgttctgatggggaagttg

SEQ ID NO: 149399 - DNA, 25 bp, probe
aaactcttcatccagagggccaaga

SEQ ID NO: 149400 - DNA, 25 bp, probe
aaactcttcatccagagggccaaga

SEQ ID NO: 149401 - DNA, 25 bp, probe
aaacctttaacagtgtcagcaaaat

SEQ ID NO: 149402 - DNA, 25 bp, probe
aaacctttaacagtgtcagcaaaat

SEQ ID NO: 149403 - DNA, 25 bp, probe
aaacgctgttaaggttcaagaatca

SEQ ID NO: 149404 - DNA, 25 bp, probe
aaacctgcatagagtttgcaaagat

SEQ ID NO: 149405 - DNA, 25 bp, probe
aaacccatcgtggtatgtgaattga

SEQ ID NO: 149406 - DNA, 25 bp, probe
aaacccatcgtggtatgtgaattga

SEQ ID NO: 149407 - DNA, 25 bp, probe
aaacccattgagcttggggctgccc

SEQ ID NO: 149408 - DNA, 25 bp, probe
aaacccaatgatgaccgagaggccc

SEQ ID NO: 149409 - DNA, 25 bp, probe
aaacctcaagtaacatctgagacag

SEQ ID NO: 149410 - DNA, 25 bp, probe
aaacccactgtgaccatcagtacag

SEQ ID NO: 149411 - DNA, 25 bp, probe
aaacccactgtgaccatcagtacag

SEQ ID NO: 149412 - DNA, 25 bp, probe
aaactacctgctacaataatgactt

SEQ ID NO: 149413 - DNA, 25 bp, probe
aaaaccctctgaacatcattgactt

SEQ ID NO: 149414 - DNA, 25 bp, probe
aaaaacactgctatacctccttagc

SEQ ID NO: 149415 - DNA, 25 bp, probe
aagaaaaatgtagacccatctgggt

SEQ ID NO: 149416 - DNA, 25 bp, probe
aaacagaaatgtacgttccttcgct

SEQ ID NO: 149417 - DNA, 25 bp, probe
aaacagaaatgtacgttccttcgct

SEQ ID NO: 149418 - DNA, 25 bp, probe
aaacacaacatctttttctactcga

SEQ ID NO: 149419 - DNA, 25 bp, probe
aaacacgtaatgcatttttctcgaa

SEQ ID NO: 149420 - DNA, 25 bp, probe
aaaacgctcaagccttacgaccaga

SEQ ID NO: 149421 - DNA, 25 bp, probe
aaaacgtcaactctgtggaggcttt

SEQ ID NO: 149422 - DNA, 25 bp, probe
aaaaaacagactccaggtgaggctg

SEQ ID NO: 149423 - DNA, 25 bp, probe
aaaaatgtggtcccagtgtatgacc

SEQ ID NO: 149424 - DNA, 25 bp, probe
aaaaacttactcgatgtcattgacc

SEQ ID NO: 149425 - DNA, 25 bp, probe
aaaaatgtaaccgattcattgagca

SEQ ID NO: 149426 - DNA, 25 bp, probe
aaaacattaattgaggcttacagta

SEQ ID NO: 149427 - DNA, 25 bp, probe
aaaaatgtgactcaagacttccaga

SEQ ID NO: 149428 - DNA, 25 bp, probe
aaaacattgcctccaaaatagccaa

SEQ ID NO: 149429 - DNA, 25 bp, probe
aaacaattcaactaacagtaacaat

SEQ ID NO: 149430 - DNA, 25 bp, probe
aaaaattgtacatccattaaatgta

SEQ ID NO: 149431 - DNA, 25 bp, probe
aaaaaatgtcactctttcaaaatct

SEQ ID NO: 149432 - DNA, 25 bp, probe
aaacaaaatgaagccttcacaacag

SEQ ID NO: 149433 - DNA, 25 bp, probe
aaacgaaagagagtggtcctagtca

SEQ ID NO: 149434 - DNA, 25 bp, probe
aaacgaaagagagtggtcctagtca

SEQ ID NO: 149435 - DNA, 25 bp, probe
aaaaaaggtgaggacatctgggtct

SEQ ID NO: 149436 - DNA, 25 bp, probe
aaaacaagtggcttactgcccttct

SEQ ID NO: 149437 - DNA, 25 bp, probe
aaacaagggctggtagctgtactat

SEQ ID NO: 149438 - DNA, 25 bp, probe
aaacaagggctggtagctgtactat

SEQ ID NO: 149439 - DNA, 25 bp, probe
aaaagggcctggtcactgtagaaga

SEQ ID NO: 149440 - DNA, 25 bp, probe
aaaagggcctggtcactgtagaaga

SEQ ID NO: 149441 - DNA, 25 bp, probe
aaaaggagcattcaactttgaccag

SEQ ID NO: 149442 - DNA, 25 bp, probe
aaaaggagattctaacatcagttaa

SEQ ID NO: 149443 - DNA, 25 bp, probe
aaaattttcatcagtatcagttcca

SEQ ID NO: 149444 - DNA, 25 bp, probe
aaaattatgtttcttgagatttatc

SEQ ID NO: 149445 - DNA, 25 bp, probe
aaaaaagtccagcttgaacatctag

SEQ ID NO: 149446 - DNA, 25 bp, probe
aaaagaacacaggccttggaacaag

SEQ ID NO: 149447 - DNA, 25 bp, probe
aaacacataccttatagggaacaca

SEQ ID NO: 149448 - DNA, 25 bp, probe
aaacatcctactggtagatggaaca

SEQ ID NO: 149449 - DNA, 25 bp, probe
aaactccttttgaatgcagccagtc

SEQ ID NO: 149450 - DNA, 25 bp, probe
aaacctgttaataatgagcccatca

SEQ ID NO: 149451 - DNA, 25 bp, probe
aaaccgaagaagatggcccagctcc

SEQ ID NO: 149452 - DNA, 25 bp, probe
aaaccggaggagagactcaccatcg

SEQ ID NO: 149453 - DNA, 25 bp, probe
aaaccgctgcggcagtatctgacct

SEQ ID NO: 149454 - DNA, 25 bp, probe
aaacctgtctgagatgttctttcta

SEQ ID NO: 149455 - DNA, 25 bp, probe
aaacctgccagggatgttttcacca

SEQ ID NO: 149456 - DNA, 25 bp, probe
aacacctccagagaaacgacaccag

SEQ ID NO: 149457 - DNA, 25 bp, probe
aacactcccaaagatacccacagga

SEQ ID NO: 149458 - DNA, 25 bp, probe
aacacccaaaataaaccatgcacct

SEQ ID NO: 149459 - DNA, 25 bp, probe
aaacattaaaatacagacctggcca

SEQ ID NO: 149460 - DNA, 25 bp, probe
aaacattaaacattgccaacgcaaa

SEQ ID NO: 149461 - DNA, 25 bp, probe
aaactaaggacatgctgagtccaaa

SEQ ID NO: 149462 - DNA, 25 bp, probe
aaaacacggaccatgacatcaaaag

SEQ ID NO: 149463 - DNA, 25 bp, probe
aaaaacacggaccatgacatcaaaa

SEQ ID NO: 149464 - DNA, 25 bp, probe
aaaatatcacggagacccaggagag

SEQ ID NO: 149465 - DNA, 25 bp, probe
aaactctatcgggggcctacaagag

SEQ ID NO: 149466 - DNA, 25 bp, probe
aacacgtacgggcgcatcattaagg

SEQ ID NO: 149467 - DNA, 25 bp, probe
aaacgtacaaagcctgacttacaat

SEQ ID NO: 149468 - DNA, 25 bp, probe
aaactgaaaacagctatttacaaag

SEQ ID NO: 149469 - DNA, 25 bp, probe
aaactaacagaacttcatttccaga

SEQ ID NO: 149470 - DNA, 25 bp, probe
aaacttataaatatttctccagcaa

SEQ ID NO: 149471 - DNA, 25 bp, probe
aaacattctaattaaaggctttgca

SEQ ID NO: 149472 - DNA, 25 bp, probe
aaaatgtatacacagggaccttgct

SEQ ID NO: 149473 - DNA, 25 bp, probe
aaaagatctaagaacaagtacttgc

SEQ ID NO: 149474 - DNA, 25 bp, probe
cacaaactcgaaccaaagtcgtcac

SEQ ID NO: 149475 - DNA, 25 bp, probe
aaaaccgaatcttcaggtcttcctg

SEQ ID NO: 149476 - DNA, 25 bp, probe
aaactccgagtgaactggtcttcct

SEQ ID NO: 149477 - DNA, 25 bp, probe
aaactgcccagtggagtgttcagtc

SEQ ID NO: 149478 - DNA, 25 bp, probe
aaacatgccttgggagtgtacagac

SEQ ID NO: 149479 - DNA, 25 bp, probe
aaacatgccttgggagtgtacagac

SEQ ID NO: 149480 - DNA, 25 bp, probe
aaacccttggccagtgcaagcatca

SEQ ID NO: 149481 - DNA, 25 bp, probe
aaacccttgagcacaacagcaaata

SEQ ID NO: 149482 - DNA, 25 bp, probe
aaacaccccacttctggatgaaatt

SEQ ID NO: 149483 - DNA, 25 bp, probe
aaaacacaccagccataaaacaagt

SEQ ID NO: 149484 - DNA, 25 bp, probe
aaaactgcacggacatacaaaatca

SEQ ID NO: 149485 - DNA, 25 bp, probe
aaaactgcacggacatacaaaatca

SEQ ID NO: 149486 - DNA, 25 bp, probe
accaacactagttacctcagaattt

SEQ ID NO: 149487 - DNA, 25 bp, probe
aaaagagataagatttaaccaacat

SEQ ID NO: 149488 - DNA, 25 bp, probe
aaaaagctaatcatgctctctacca

SEQ ID NO: 149489 - DNA, 25 bp, probe
aaactagaggaggtgctctctactg

SEQ ID NO: 149490 - DNA, 25 bp, probe
aaactggagactgtgtgtgccctct

SEQ ID NO: 149491 - DNA, 25 bp, probe
aaaatggtgcctgattcggctgtct

SEQ ID NO: 149492 - DNA, 25 bp, probe
aaacaggtccagtatcccagtcatt

SEQ ID NO: 149493 - DNA, 25 bp, probe
aaacagagtcagagaccactgtctt

SEQ ID NO: 149494 - DNA, 25 bp, probe
aaacagagtcagagaccactgtctt

SEQ ID NO: 149495 - DNA, 25 bp, probe
aaacagttcaacactcagctgctct

SEQ ID NO: 149496 - DNA, 25 bp, probe
aaacagttcaacactcagctgctct

SEQ ID NO: 149497 - DNA, 25 bp, probe
aaacatgcttaaccactagcaatca

SEQ ID NO: 149498 - DNA, 25 bp, probe
aaacagtgaaattactagactacac

SEQ ID NO: 149499 - DNA, 25 bp, probe
aaacaggaaaaaatgccactatcca

SEQ ID NO: 149500 - DNA, 25 bp, probe
aaacaggaaaaaatgccactatcca

SEQ ID NO: 149501 - DNA, 25 bp, probe
aaaaagaagcatattccgcggccac

SEQ ID NO: 149502 - DNA, 25 bp, probe
aaaaagaagcatattccgcggccac

SEQ ID NO: 149503 - DNA, 25 bp, probe
aaacaaaagcatcttccctagaaat

SEQ ID NO: 149504 - DNA, 25 bp, probe
aaaaacagacaactcataccttcaa

SEQ ID NO: 149505 - DNA, 25 bp, probe
aaaaacagacaactcataccttcaa

SEQ ID NO: 149506 - DNA, 25 bp, probe
aaacacaaatcttcatatatactta

SEQ ID NO: 149507 - DNA, 25 bp, probe
aaacaggatttcaatatgtacagaa

SEQ ID NO: 149508 - DNA, 25 bp, probe
aaacgagtatcttatatttcagaag

SEQ ID NO: 149509 - DNA, 25 bp, probe
aaacttgttattgtgctctcgaatt

SEQ ID NO: 149510 - DNA, 25 bp, probe
aaacttgctcttatcttctcaaatt

SEQ ID NO: 149511 - DNA, 25 bp, probe
aaactccactatagttcatcaagac

SEQ ID NO: 149512 - DNA, 25 bp, probe
aaacttactcattgcttcaccagtg

SEQ ID NO: 149513 - DNA, 25 bp, probe
aaacttactcattgcttcaccagtg

SEQ ID NO: 149514 - DNA, 25 bp, probe
aaacttgacatgactttaatagtgt

SEQ ID NO: 149515 - DNA, 25 bp, probe
aaacttgacatgactttaatagtgt

SEQ ID NO: 149516 - DNA, 25 bp, probe
aaaactccagttgtaatgcatattt

SEQ ID NO: 149517 - DNA, 25 bp, probe
aaaactacgttggcatttcagaaat

SEQ ID NO: 149518 - DNA, 25 bp, probe
aaaactattgtaatctccctcaaag

SEQ ID NO: 149519 - DNA, 25 bp, probe
aaaactactgtgtctgataccaaaa

SEQ ID NO: 149520 - DNA, 25 bp, probe
aaaactactgtgtctgataccaaaa

SEQ ID NO: 149521 - DNA, 25 bp, probe
aaaacttgtggggaaccacattgat

SEQ ID NO: 149522 - DNA, 25 bp, probe
aaaacatagtggttgcagacctcat

SEQ ID NO: 149523 - DNA, 25 bp, probe
aaaagcatcattgttcacagcccag

SEQ ID NO: 149524 - DNA, 25 bp, probe
aaaacaacatagaaacaccatcaga

SEQ ID NO: 149525 - DNA, 25 bp, probe
aaaacaacatagaaacaccatcaga

SEQ ID NO: 149526 - DNA, 25 bp, probe
aaaacaatgggggacctatgcagaa

SEQ ID NO: 149527 - DNA, 25 bp, probe
aaaaattcagcgtcgacctcatgag

SEQ ID NO: 149528 - DNA, 25 bp, probe
aaaaagtccagcttgaacatctaga

SEQ ID NO: 149529 - DNA, 25 bp, probe
aaaaattccagcaggccatcgattc

SEQ ID NO: 149530 - DNA, 25 bp, probe
aaacatttatcgagtgcctctgttt

SEQ ID NO: 149531 - DNA, 25 bp, probe
aaacatttactgaaagccctctctg

SEQ ID NO: 149532 - DNA, 25 bp, probe
aaacatttcactaaatgtgctttta

SEQ ID NO: 149533 - DNA, 25 bp, probe
aaacatttcctatagagccatatca

SEQ ID NO: 149534 - DNA, 25 bp, probe
aaacttctgcgatacgaccatcaac

SEQ ID NO: 149535 - DNA, 25 bp, probe
aaacttctgcgatacgaccatcaac

SEQ ID NO: 149536 - DNA, 25 bp, probe
aaacattccagatattgcacttgaa

SEQ ID NO: 149537 - DNA, 25 bp, probe
aaacaatgtcatctattccttatca

SEQ ID NO: 149538 - DNA, 25 bp, probe
aaacagctgtctctaacttatttta

SEQ ID NO: 149539 - DNA, 25 bp, probe
aaacgagtgcctgaactgcatgatt

SEQ ID NO: 149540 - DNA, 25 bp, probe
aaaacagtacatgatgagtgcatga

SEQ ID NO: 149541 - DNA, 25 bp, probe
aaacagcctatagatgatgatgtgt

SEQ ID NO: 149542 - DNA, 25 bp, probe
aaacaaaatatgggcatgcatgcta

SEQ ID NO: 149543 - DNA, 25 bp, probe
aaacagaaactgatgctcattgatt

SEQ ID NO: 149544 - DNA, 25 bp, probe
aaacagaaactgatgctcattgatt

SEQ ID NO: 149545 - DNA, 25 bp, probe
aaaagtaagctgtgacattgtctat

SEQ ID NO: 149546 - DNA, 25 bp, probe
aaaagtaagctgtgacattgtctat

SEQ ID NO: 149547 - DNA, 25 bp, probe
aaaactgacaggtgaccgatgtaca

SEQ ID NO: 149548 - DNA, 25 bp, probe
aaacactagcagtaaaacgctgtaa

SEQ ID NO: 149549 - DNA, 25 bp, probe
aaaactacagtatgaaccatgttat

SEQ ID NO: 149550 - DNA, 25 bp, probe
aaaactactggatgcaaactgttat

SEQ ID NO: 149551 - DNA, 25 bp, probe
aaaaatcatccggtccaatctcttt

SEQ ID NO: 149552 - DNA, 25 bp, probe
aaaaactatgcagggacaatccatc

SEQ ID NO: 149553 - DNA, 25 bp, probe
aaaaacaacatgtgtccaaatcggg

SEQ ID NO: 149554 - DNA, 25 bp, probe
aaaaataacatgccaagccagattc

SEQ ID NO: 149555 - DNA, 25 bp, probe
aaaactacaatgcaggcacttacca

SEQ ID NO: 149556 - DNA, 25 bp, probe
aaacagccatccatgaggcatgctt

SEQ ID NO: 149557 - DNA, 25 bp, probe
aaacatcatgctggttgatccagtt

SEQ ID NO: 149558 - DNA, 25 bp, probe
aacacgcagttggcatgcatcctgt

SEQ ID NO: 149559 - DNA, 25 bp, probe
aaactgatcagggcagctgctctgt

SEQ ID NO: 149560 - DNA, 25 bp, probe
aaactgtgatggactcgttctgtag

SEQ ID NO: 149561 - DNA, 25 bp, probe
aaacatgctaggaactgcttttggc

SEQ ID NO: 149562 - DNA, 25 bp, probe
aaacagtagtgatagttgtaccgca

SEQ ID NO: 149563 - DNA, 25 bp, probe
gaatgaagtaaacagtttcccacaa

SEQ ID NO: 149564 - DNA, 25 bp, probe
aaaacatatgtacaacttcccctga

SEQ ID NO: 149565 - DNA, 25 bp, probe
aaaactattaccaaagactcgatct

SEQ ID NO: 149566 - DNA, 25 bp, probe
aaaactattaccaaagactcgatct

SEQ ID NO: 149567 - DNA, 25 bp, probe
aaaaccgtgaacctcaactactgct

SEQ ID NO: 149568 - DNA, 25 bp, probe
aaaacagaagaggcctccagtacct

SEQ ID NO: 149569 - DNA, 25 bp, probe
taataaaactttgacgagtcacctt

SEQ ID NO: 149570 - DNA, 25 bp, probe
aaacaaatctgttggacgagctccc

SEQ ID NO: 149571 - DNA, 25 bp, probe
aaaaaatgatttccagcggtccaca

SEQ ID NO: 149572 - DNA, 25 bp, probe
aaaaatgatttccagcggtccacat

SEQ ID NO: 149573 - DNA, 25 bp, probe
aaaaggttctcaggtgttgccaaat

SEQ ID NO: 149574 - DNA, 25 bp, probe
aaaagtgggccaggttacctacatg

SEQ ID NO: 149575 - DNA, 25 bp, probe
aaaagtgggccaggttacctacatg

SEQ ID NO: 149576 - DNA, 25 bp, probe
aaaagtcggcagagatttatccaat

SEQ ID NO: 149577 - DNA, 25 bp, probe
aaaagtcggcagagatttatccaat

SEQ ID NO: 149578 - DNA, 25 bp, probe
aaaagtcggcagagatttatccaat

SEQ ID NO: 149579 - DNA, 25 bp, probe
aaaacctgacaagacatttcaaaga

SEQ ID NO: 149580 - DNA, 25 bp, probe
aaaacctataacatcatattgaggg

SEQ ID NO: 149581 - DNA, 25 bp, probe
aaaacccaagacattaaatctgcca

SEQ ID NO: 149582 - DNA, 25 bp, probe
aaaatccttagaatcattaaattgt

SEQ ID NO: 149583 - DNA, 25 bp, probe
aaaaaattgagctttctagaatatt

SEQ ID NO: 149584 - DNA, 25 bp, probe
aaaaataatcactacttaagctaat

SEQ ID NO: 149585 - DNA, 25 bp, probe
aaaaataatcactacttaagctaat

SEQ ID NO: 149586 - DNA, 25 bp, probe
aaaaatagatacctgtttgactttg

SEQ ID NO: 149587 - DNA, 25 bp, probe
aaacaacaacaccatggattatttt

SEQ ID NO: 149588 - DNA, 25 bp, probe
aaacaacaacaccatggattatttt

SEQ ID NO: 149589 - DNA, 25 bp, probe
aaacactcaactccatcgaatagct

SEQ ID NO: 149590 - DNA, 25 bp, probe
aaacacatccttcatcgagatctga

SEQ ID NO: 149591 - DNA, 25 bp, probe
aaacaacactgtcactgcaaccatg

SEQ ID NO: 149592 - DNA, 25 bp, probe
aaaaacagctgtaactaactcagga

SEQ ID NO: 149593 - DNA, 25 bp, probe
aaaaacagctgtaactaactcagga

SEQ ID NO: 149594 - DNA, 25 bp, probe
aaaaaatcttttgttctcatggaat

SEQ ID NO: 149595 - DNA, 25 bp, probe
aaaaaatcttcgcagatctttgata

SEQ ID NO: 149596 - DNA, 25 bp, probe
aaaaaggtgtctgtgctatttctgt

SEQ ID NO: 149597 - DNA, 25 bp, probe
aaacacgtgttctcttttgtcagga

SEQ ID NO: 149598 - DNA, 25 bp, probe
aaacatcagtgctacaggctttgta

SEQ ID NO: 149599 - DNA, 25 bp, probe
aaactgcagctgtgagtgcgtgtgt

SEQ ID NO: 149600 - DNA, 25 bp, probe
aaactgcagatgacgaggctgtgtt

SEQ ID NO: 149601 - DNA, 25 bp, probe
aacaatgactgaggcagcctggcct

SEQ ID NO: 149602 - DNA, 25 bp, probe
aaaaacagcaaagtcatgctgactc

SEQ ID NO: 149603 - DNA, 25 bp, probe
aaaaatacagaaatacttatacatt

SEQ ID NO: 149604 - DNA, 25 bp, probe
aaaactggcagctgtgacttacaat

SEQ ID NO: 149605 - DNA, 25 bp, probe
aacaacgtcacgggcatcgtacagg

SEQ ID NO: 149606 - DNA, 25 bp, probe
aacaacgtcacgggcatcgtacagg

SEQ ID NO: 149607 - DNA, 25 bp, probe
aacgtccgggcactgacgtactgtg

SEQ ID NO: 149608 - DNA, 25 bp, probe
aaactctagggacactggcagctgt

SEQ ID NO: 149609 - DNA, 25 bp, probe
aaaaccaagtcgcagctgagcgtgt

SEQ ID NO: 149610 - DNA, 25 bp, probe
aaaaacgagcctcagctggcgaatg

SEQ ID NO: 149611 - DNA, 25 bp, probe
aaacatacagaggtgcatggctggc

SEQ ID NO: 149612 - DNA, 25 bp, probe
aaacttgcaggcggctgcagctcag

SEQ ID NO: 149613 - DNA, 25 bp, probe
aaacttgctggattcatgcagccag

SEQ ID NO: 149614 - DNA, 25 bp, probe
aaacatctgtggtacatgccagaag

SEQ ID NO: 149615 - DNA, 25 bp, probe
aaactctgaagattccccatgcatg

SEQ ID NO: 149616 - DNA, 25 bp, probe
aaactctgaagattccccatgcatg

SEQ ID NO: 149617 - DNA, 25 bp, probe
aaactcaagacaatgcacctagctg

SEQ ID NO: 149618 - DNA, 25 bp, probe
aaactaatctaaactgtagctgtat

SEQ ID NO: 149619 - DNA, 25 bp, probe
aaactagagatcaaacttcgacatt

SEQ ID NO: 149620 - DNA, 25 bp, probe
aagaactggatcaccccagaatagt

SEQ ID NO: 149621 - DNA, 25 bp, probe
aaaagtggatagaacgcaaacaact

SEQ ID NO: 149622 - DNA, 25 bp, probe
aaaagcggaagcttctaccacacct

SEQ ID NO: 149623 - DNA, 25 bp, probe
aataagccgggatctaccataccca

SEQ ID NO: 149624 - DNA, 25 bp, probe
aaaatgcatcgtcactttcaaagcc

SEQ ID NO: 149625 - DNA, 25 bp, probe
aaacatgctctttttgttcaagcag

SEQ ID NO: 149626 - DNA, 25 bp, probe
aaacaccttctcatgtgtcattata

SEQ ID NO: 149627 - DNA, 25 bp, probe
aaacacccaagcttgatgtcaatta

SEQ ID NO: 149628 - DNA, 25 bp, probe
aaacacccaagcttgatgtcaatta

SEQ ID NO: 149629 - DNA, 25 bp, probe
aaaaactgacaggtgaccgatgtac

SEQ ID NO: 149630 - DNA, 25 bp, probe
aaaatacatgttcatgaccaagaac

SEQ ID NO: 149631 - DNA, 25 bp, probe
aaaaacattcatctcccagatggct

SEQ ID NO: 149632 - DNA, 25 bp, probe
aaaaaatctcactgcttcggacatg

SEQ ID NO: 149633 - DNA, 25 bp, probe
aaaaaatctcactgcttcggacatg

SEQ ID NO: 149634 - DNA, 25 bp, probe
aaaaaaatctcactgcttcggacat

SEQ ID NO: 149635 - DNA, 25 bp, probe
aaaaacactgctctgcattgggcag

SEQ ID NO: 149636 - DNA, 25 bp, probe
aaacagcaagtgggggctgaggcag

SEQ ID NO: 149637 - DNA, 25 bp, probe
aaaaatcagcatctgggccaggcaa

SEQ ID NO: 149638 - DNA, 25 bp, probe
aaaagactatggactggaaggcaga

SEQ ID NO: 149639 - DNA, 25 bp, probe
aaaagaaaggccaagatttgcagaa

SEQ ID NO: 149640 - DNA, 25 bp, probe
aacaacacacgagaagagttaaact

SEQ ID NO: 149641 - DNA, 25 bp, probe
aaaagatcaggagactagttgaagt

SEQ ID NO: 149642 - DNA, 25 bp, probe
aaaaatcagcgaggttgatgtagat

SEQ ID NO: 149643 - DNA, 25 bp, probe
aaaaatcagcgaggttgatgtagat

SEQ ID NO: 149644 - DNA, 25 bp, probe
aaaaatcactacatttgttttctag

SEQ ID NO: 149645 - DNA, 25 bp, probe
aaaaatcatagactttggctttagc

SEQ ID NO: 149646 - DNA, 25 bp, probe
aaacactctaaaatctgacttctgg

SEQ ID NO: 149647 - DNA, 25 bp, probe
aaactgcggtcagatgtggcttctg

SEQ ID NO: 149648 - DNA, 25 bp, probe
aaaatcgagtgagaggttccgggca

SEQ ID NO: 149649 - DNA, 25 bp, probe
aaaatcgagtgagaggttccgggca

SEQ ID NO: 149650 - DNA, 25 bp, probe
aaaacgatgggcagtttcacagttc

SEQ ID NO: 149651 - DNA, 25 bp, probe
aaaacaatcaggtttcttcaggctg

SEQ ID NO: 149652 - DNA, 25 bp, probe
aaaaatacaggctctgagtctggtg

SEQ ID NO: 149653 - DNA, 25 bp, probe
aaaaccagaaccagcagtctcctgc

SEQ ID NO: 149654 - DNA, 25 bp, probe
aaaaccattcaggccaagtgaccct

SEQ ID NO: 149655 - DNA, 25 bp, probe
aaaacctttggatcagtgtctaatt

SEQ ID NO: 149656 - DNA, 25 bp, probe
aagaacttcgtgcacgggtctgttg

SEQ ID NO: 149657 - DNA, 25 bp, probe
aagaacttctggctcgaaaggtgga

SEQ ID NO: 149658 - DNA, 25 bp, probe
aaaactgttgtgctagccaaagtaa

SEQ ID NO: 149659 - DNA, 25 bp, probe
aacacaagtttaagatccacacgta

SEQ ID NO: 149660 - DNA, 25 bp, probe
aacacttttccatgaccataggtca

SEQ ID NO: 149661 - DNA, 25 bp, probe
aacagctgtttccattacaaccact

SEQ ID NO: 149662 - DNA, 25 bp, probe
aacagctgtttccattacaaccact

SEQ ID NO: 149663 - DNA, 25 bp, probe
aaactccatctgcaaaagaagagga

SEQ ID NO: 149664 - DNA, 25 bp, probe
aaactccatcctttataaatagtca

SEQ ID NO: 149665 - DNA, 25 bp, probe
aaacatccacacattgtagagttat

SEQ ID NO: 149666 - DNA, 25 bp, probe
aaacatacagccatctggggtccag

SEQ ID NO: 149667 - DNA, 25 bp, probe
aaactacagttcttgttgtgaccag

SEQ ID NO: 149668 - DNA, 25 bp, probe
aaactacagttcttgttgtgaccag

SEQ ID NO: 149669 - DNA, 25 bp, probe
aacatggactttttgtgggactcca

SEQ ID NO: 149670 - DNA, 25 bp, probe
aacagaacttgatcctgcgtaacca

SEQ ID NO: 149671 - DNA, 25 bp, probe
aaaatccattgatccatgggaacgc

SEQ ID NO: 149672 - DNA, 25 bp, probe
aaaacactgatatccagaaggagct

SEQ ID NO: 149673 - DNA, 25 bp, probe
aaacaactgttctaatgcaaaggct

SEQ ID NO: 149674 - DNA, 25 bp, probe
aaacaacgttctatctggcaactgg

SEQ ID NO: 149675 - DNA, 25 bp, probe
aaacagtcttttgacatgagccctg

SEQ ID NO: 149676 - DNA, 25 bp, probe
aaaaggcgtctatgaatgaccagtg

SEQ ID NO: 149677 - DNA, 25 bp, probe
aaaacctcttatactatcatccagg

SEQ ID NO: 149678 - DNA, 25 bp, probe
aaaaacttcattgctgtcagcgctg

SEQ ID NO: 149679 - DNA, 25 bp, probe
aaaatacttcactgccgggcatggt

SEQ ID NO: 149680 - DNA, 25 bp, probe
aaaacctaccctcaatgagcatggt

SEQ ID NO: 149681 - DNA, 25 bp, probe
aaaactgccactgcatgtatgggtg

SEQ ID NO: 149682 - DNA, 25 bp, probe
aaaactgccactgcatgtatgggtg

SEQ ID NO: 149683 - DNA, 25 bp, probe
aaaagtccacccagtgctgtgtgtg

SEQ ID NO: 149684 - DNA, 25 bp, probe
aaacaccactcctttttgtgtgtgt

SEQ ID NO: 149685 - DNA, 25 bp, probe
aaacttgactccatttcatcattgt

SEQ ID NO: 149686 - DNA, 25 bp, probe
aaaattagtctcattctatagttaa

SEQ ID NO: 149687 - DNA, 25 bp, probe
aaaattagtctcattctatagttaa

SEQ ID NO: 149688 - DNA, 25 bp, probe
aaactaagcgctcattctattttat

SEQ ID NO: 149689 - DNA, 25 bp, probe
aaactcaactctcaatctatttgct

SEQ ID NO: 149690 - DNA, 25 bp, probe
caaagccaaccgatacttttctcca

SEQ ID NO: 149691 - DNA, 25 bp, probe
caaagccaaccgatacttttctcca

SEQ ID NO: 149692 - DNA, 25 bp, probe
aaaacaaacgatattcttctcccat

SEQ ID NO: 149693 - DNA, 25 bp, probe
aaaaaaacagatcgtatttatgcaa

SEQ ID NO: 149694 - DNA, 25 bp, probe
aaaaaatactgatgttcctagtgaa

SEQ ID NO: 149695 - DNA, 25 bp, probe
aaaaagatacctggtctgccttgta

SEQ ID NO: 149696 - DNA, 25 bp, probe
aaaaagtatcctgcttctgatatgc

SEQ ID NO: 149697 - DNA, 25 bp, probe
aaaaacttcactgcccagaagcagg

SEQ ID NO: 149698 - DNA, 25 bp, probe
aaaaactggagtcagaagaccaggc

SEQ ID NO: 149699 - DNA, 25 bp, probe
aaaaaactggagtcagaagaccagg

SEQ ID NO: 149700 - DNA, 25 bp, probe
aaaaagactgtatcaaaaagtggat

SEQ ID NO: 149701 - DNA, 25 bp, probe
aaacaactcctatcaggaaattgag

SEQ ID NO: 149702 - DNA, 25 bp, probe
aaacaactcctatcaggaaattgag

SEQ ID NO: 149703 - DNA, 25 bp, probe
aaaatatcctcatcacgaaacattc

SEQ ID NO: 149704 - DNA, 25 bp, probe
aaaacatcctcatcaagaaaaatgg

SEQ ID NO: 149705 - DNA, 25 bp, probe
aaacagagcttcccgtgcaaaaagg

SEQ ID NO: 149706 - DNA, 25 bp, probe
aaacagcagtgatggctggggaaca

SEQ ID NO: 149707 - DNA, 25 bp, probe
aaacaggaaacagtggcggcatgaa

SEQ ID NO: 149708 - DNA, 25 bp, probe
aaacacgcaaacaatgcagccagtg

SEQ ID NO: 149709 - DNA, 25 bp, probe
aaacaggcatagaatctgcctcctt

SEQ ID NO: 149710 - DNA, 25 bp, probe
aaaatggcactgaatcatccatatt

SEQ ID NO: 149711 - DNA, 25 bp, probe
aaaatagcattgagacttgtgtaga

SEQ ID NO: 149712 - DNA, 25 bp, probe
aaaatagcattgagacttgtgtaga

SEQ ID NO: 149713 - DNA, 25 bp, probe
aactaactcggtcattgctgttgaa

SEQ ID NO: 149714 - DNA, 25 bp, probe
aaaagatctgggatatgtgttggaa

SEQ ID NO: 149715 - DNA, 25 bp, probe
aaacagcactgagatttattttaac

SEQ ID NO: 149716 - DNA, 25 bp, probe
aaacacgtgcacaatttcatgatgg

SEQ ID NO: 149717 - DNA, 25 bp, probe
aaacacagtcagattttgggaaagt

SEQ ID NO: 149718 - DNA, 25 bp, probe
aacagccattgccttttttaaagat

SEQ ID NO: 149719 - DNA, 25 bp, probe
aaacactctggcattgacttcaaac

SEQ ID NO: 149720 - DNA, 25 bp, probe
aaacatctatcgcatgtgccttcat

SEQ ID NO: 149721 - DNA, 25 bp, probe
aaacatctatcgcatgtgccttcat

SEQ ID NO: 149722 - DNA, 25 bp, probe
aaacatttctagtagcttctctaac

SEQ ID NO: 149723 - DNA, 25 bp, probe
aaaattcccaaacatctcttatcct

SEQ ID NO: 149724 - DNA, 25 bp, probe
aaaagatctccaagaggtttgtctc

SEQ ID NO: 149725 - DNA, 25 bp, probe
aaaaggccgcatgatctttctggct

SEQ ID NO: 149726 - DNA, 25 bp, probe
aaacagcgtccattttttcatatta

SEQ ID NO: 149727 - DNA, 25 bp, probe
aaacaccggcattttatgtactttg

SEQ ID NO: 149728 - DNA, 25 bp, probe
aaacaaatggcttgttcagtcactt

SEQ ID NO: 149729 - DNA, 25 bp, probe
aaaaacagccttctagcacactttt

SEQ ID NO: 149730 - DNA, 25 bp, probe
aaaatacaggcccttaggctctatt

SEQ ID NO: 149731 - DNA, 25 bp, probe
aaaatgacaggccaaaacctcctcg

SEQ ID NO: 149732 - DNA, 25 bp, probe
aaaatcagaagctcaaacttcctgg

SEQ ID NO: 149733 - DNA, 25 bp, probe
aaacacaaacattcaaagcttaggg

SEQ ID NO: 149734 - DNA, 25 bp, probe
aacaacaacatcacaaagaaaggag

SEQ ID NO: 149735 - DNA, 25 bp, probe
aaacaaaccccactcagaaacagag

SEQ ID NO: 149736 - DNA, 25 bp, probe
aaacaaaccccactcagaaacagag

SEQ ID NO: 149737 - DNA, 25 bp, probe
aaaaaaccccgcagagagagcagat

SEQ ID NO: 149738 - DNA, 25 bp, probe
aaaaaccccgcagagagagcagatt

SEQ ID NO: 149739 - DNA, 25 bp, probe
aaaacacccatccaggcagggggat

SEQ ID NO: 149740 - DNA, 25 bp, probe
aaacaacatgtgtccaaatcgggga

SEQ ID NO: 149741 - DNA, 25 bp, probe
aaacactctttcctaatctggttgt

SEQ ID NO: 149742 - DNA, 25 bp, probe
aaacacattctgagctatgctttgt

SEQ ID NO: 149743 - DNA, 25 bp, probe
aaacacattctgagctatgctttgt

SEQ ID NO: 149744 - DNA, 25 bp, probe
aaacaattcagtggtcttatttttg

SEQ ID NO: 149745 - DNA, 25 bp, probe
aaacaattcagtggtcttatttttg

SEQ ID NO: 149746 - DNA, 25 bp, probe
aaacaagggatggctcattgttttt

SEQ ID NO: 149747 - DNA, 25 bp, probe
aacaagggatggctcattgtttttc

SEQ ID NO: 149748 - DNA, 25 bp, probe
aaaagctgcctggagtcttgtgttc

SEQ ID NO: 149749 - DNA, 25 bp, probe
aaaagctcagctcctatgttggtat

SEQ ID NO: 149750 - DNA, 25 bp, probe
aaaagcttctgggagttctgatttc

SEQ ID NO: 149751 - DNA, 25 bp, probe
aaacagtggcggcagcatctctgct

SEQ ID NO: 149752 - DNA, 25 bp, probe
aaaagggcagggcatctcctgtgca

SEQ ID NO: 149753 - DNA, 25 bp, probe
aaaaaggcctggtcagtgcctgtcc

SEQ ID NO: 149754 - DNA, 25 bp, probe
aaaaaggcctggtcagtgcctgtcc

SEQ ID NO: 149755 - DNA, 25 bp, probe
aaaactggttgccatcaaggccttc

SEQ ID NO: 149756 - DNA, 25 bp, probe
aacaacggtgactttgaggcctacg

SEQ ID NO: 149757 - DNA, 25 bp, probe
aacaacggtgactttgaggcctacg

SEQ ID NO: 149758 - DNA, 25 bp, probe
aacaacggtgactttgaggcctacg

SEQ ID NO: 149759 - DNA, 25 bp, probe
aacaacggtgactttgaggcctacg

SEQ ID NO: 149760 - DNA, 25 bp, probe
aacaacggtgactttgaggcctacg

SEQ ID NO: 149761 - DNA, 25 bp, probe
aaaatcgtggactttggctttagca

SEQ ID NO: 149762 - DNA, 25 bp, probe
aaaagggagaacatggccaatagtc

SEQ ID NO: 149763 - DNA, 25 bp, probe
aaaacaatagttatggcaaaagtct

SEQ ID NO: 149764 - DNA, 25 bp, probe
aaaaccatgagtgttggagccaggt

SEQ ID NO: 149765 - DNA, 25 bp, probe
aacaacgttctatctggcaactggt

SEQ ID NO: 149766 - DNA, 25 bp, probe
aaaaccctgaagccaggaactatgt

SEQ ID NO: 149767 - DNA, 25 bp, probe
aaaaccctgaagcctggcacgatgt

SEQ ID NO: 149768 - DNA, 25 bp, probe
aaaagccactagactcttcactgtt

SEQ ID NO: 149769 - DNA, 25 bp, probe
aaaaggatttgtcttctgccttgtg

SEQ ID NO: 149770 - DNA, 25 bp, probe
aaaacgattttctgttgctgccatt

SEQ ID NO: 149771 - DNA, 25 bp, probe
aaaacgaattgttctgctcgggcgt

SEQ ID NO: 149772 - DNA, 25 bp, probe
aaaaaaatcgattctgctcctctag

SEQ ID NO: 149773 - DNA, 25 bp, probe
aaaagaatttgatactcctctgtga

SEQ ID NO: 149774 - DNA, 25 bp, probe
aaacaatctgttttggctttatgtg

SEQ ID NO: 149775 - DNA, 25 bp, probe
aaacaatctgttttggctttatgtg

SEQ ID NO: 149776 - DNA, 25 bp, probe
aaacagatcgtatttatgcaatgaa

SEQ ID NO: 149777 - DNA, 25 bp, probe
aaacaggctgattgacatatacaaa

SEQ ID NO: 149778 - DNA, 25 bp, probe
aaacaggctgattgacatatacaaa

SEQ ID NO: 149779 - DNA, 25 bp, probe
aaacaggcgacctttcagcagagag

SEQ ID NO: 149780 - DNA, 25 bp, probe
aacaagaagcaccactacagggagc

SEQ ID NO: 149781 - DNA, 25 bp, probe
aaacagtcacagcactgaaggcagg

SEQ ID NO: 149782 - DNA, 25 bp, probe
aaacagtccaggccaaagaggaagc

SEQ ID NO: 149783 - DNA, 25 bp, probe
aaaagttcacagtcaaatggggagg

SEQ ID NO: 149784 - DNA, 25 bp, probe
aaaagtatcatcacaaattggaatt

SEQ ID NO: 149785 - DNA, 25 bp, probe
aaaaatcttttgttctcatggaatt

SEQ ID NO: 149786 - DNA, 25 bp, probe
aaaacattctggccgctccaggaat

SEQ ID NO: 149787 - DNA, 25 bp, probe
aaacacctgtgccgccgcacaggat

SEQ ID NO: 149788 - DNA, 25 bp, probe
aaaaccttctctccagcacaaaggc

SEQ ID NO: 149789 - DNA, 25 bp, probe
aaaaccttctctccagcacaaaggc

SEQ ID NO: 149790 - DNA, 25 bp, probe
aacaaccggctcctcaacaagagga

SEQ ID NO: 149791 - DNA, 25 bp, probe
aaaagccgtgatgtgcaatgaagca

SEQ ID NO: 149792 - DNA, 25 bp, probe
aaaaagccatgtgtggaaacccact

SEQ ID NO: 149793 - DNA, 25 bp, probe
aaaaagggcctgagacattccacct

SEQ ID NO: 149794 - DNA, 25 bp, probe
aaaaagcggccgctgaattctacct

SEQ ID NO: 149795 - DNA, 25 bp, probe
aaaaagggcctggtcactgtagaag

SEQ ID NO: 149796 - DNA, 25 bp, probe
aaaaatggtgcctgattcggctgtc

SEQ ID NO: 149797 - DNA, 25 bp, probe
aaaaatggtgcctgattcggctgtc

SEQ ID NO: 149798 - DNA, 25 bp, probe
aaaaatgactcctagttgtgtttgg

SEQ ID NO: 149799 - DNA, 25 bp, probe
aaaaatgactcctagttgtgtttgg

SEQ ID NO: 149800 - DNA, 25 bp, probe
aaaaattctcagtctcttgcgttta

SEQ ID NO: 149801 - DNA, 25 bp, probe
aaaattttcatgtcactggtggtgg

SEQ ID NO: 149802 - DNA, 25 bp, probe
aaacattcatgtttcttggtgcccg

SEQ ID NO: 149803 - DNA, 25 bp, probe
aaaattactaatgctgaacgccagg

SEQ ID NO: 149804 - DNA, 25 bp, probe
aaaattactaatgctgaacgccagg

SEQ ID NO: 149805 - DNA, 25 bp, probe
aaaatagaccaacgctaaagcctgt

SEQ ID NO: 149806 - DNA, 25 bp, probe
aaacaagatgtctgccaacaacctg

SEQ ID NO: 149807 - DNA, 25 bp, probe
aaacagagtgcctctctgcatcaac

SEQ ID NO: 149808 - DNA, 25 bp, probe
aaaaaggccacatgtgctcgagctg

SEQ ID NO: 149809 - DNA, 25 bp, probe
aaaacagaagtcttaccagtgctgg

SEQ ID NO: 149810 - DNA, 25 bp, probe
aaaatcaacatcgtctaccaggagc

SEQ ID NO: 149811 - DNA, 25 bp, probe
aaaatcagacatgtgagcactacgg

SEQ ID NO: 149812 - DNA, 25 bp, probe
aaaataatcgataagtctcagctgg

SEQ ID NO: 149813 - DNA, 25 bp, probe
aacagtaagcgaaagagccggcctg

SEQ ID NO: 149814 - DNA, 25 bp, probe
aacaaacggatatcaccgacctcct

SEQ ID NO: 149815 - DNA, 25 bp, probe
aaaactgggaaatatggccctatct

SEQ ID NO: 149816 - DNA, 25 bp, probe
aaaactttaaatgataccacatatt

SEQ ID NO: 149817 - DNA, 25 bp, probe
aaaactttaaatgataccacatatt

SEQ ID NO: 149818 - DNA, 25 bp, probe
aagacccattaactggacaaactat

SEQ ID NO: 149819 - DNA, 25 bp, probe
aacacgacttcaactcgaaagagta

SEQ ID NO: 149820 - DNA, 25 bp, probe
aactggacttcccaagataaatggt

SEQ ID NO: 149821 - DNA, 25 bp, probe
aacgggctacaccaatagaagtgtt

SEQ ID NO: 149822 - DNA, 25 bp, probe
aacgggctaatccacggaattgcct

SEQ ID NO: 149823 - DNA, 25 bp, probe
aacgggctaatccacggaattgcct

SEQ ID NO: 149824 - DNA, 25 bp, probe
aacatgagaaaataccgaatgggtc

SEQ ID NO: 149825 - DNA, 25 bp, probe
aaaagaaaaaaccggatgtgctgct

SEQ ID NO: 149826 - DNA, 25 bp, probe
aaaataaaacactctggtcttgccg

SEQ ID NO: 149827 - DNA, 25 bp, probe
aaaatacacaacttagccagtcttg

SEQ ID NO: 149828 - DNA, 25 bp, probe
aaaataccaatgcaactactctaca

SEQ ID NO: 149829 - DNA, 25 bp, probe
aaaagcacataacataaactgtacc

SEQ ID NO: 149830 - DNA, 25 bp, probe
aaacaacaaacaattcaatctgaag

SEQ ID NO: 149831 - DNA, 25 bp, probe
aaacaaactctcatttgactgtgag

SEQ ID NO: 149832 - DNA, 25 bp, probe
aaacagaactcgatgcactgacctg

SEQ ID NO: 149833 - DNA, 25 bp, probe
aaaagtaccacattccatgacgcag

SEQ ID NO: 149834 - DNA, 25 bp, probe
aagaagtaaactagccgggcgcagt

SEQ ID NO: 149835 - DNA, 25 bp, probe
aaacactaaggttcagggagcagag

SEQ ID NO: 149836 - DNA, 25 bp, probe
aaaaccgcattttatttagcagagt

SEQ ID NO: 149837 - DNA, 25 bp, probe
aaaacacaggtgttattattatact

SEQ ID NO: 149838 - DNA, 25 bp, probe
aaaacaccagtcatactctattact

SEQ ID NO: 149839 - DNA, 25 bp, probe
aacaagaccctcatattcgtccatc

SEQ ID NO: 149840 - DNA, 25 bp, probe
aacaagaccctcatattcgtccatc

SEQ ID NO: 149841 - DNA, 25 bp, probe
aaaacactcctgatttcactacctt

SEQ ID NO: 149842 - DNA, 25 bp, probe
aacaaattcctgcttgtccggcagg

SEQ ID NO: 149843 - DNA, 25 bp, probe
aaaatgttagtgattgatcctgaca

SEQ ID NO: 149844 - DNA, 25 bp, probe
aaaagtcttctgagagctcctgagg

SEQ ID NO: 149845 - DNA, 25 bp, probe
aaaagtcttctgagagctcctgagg

SEQ ID NO: 149846 - DNA, 25 bp, probe
aaaattctctataacaatcgtatgg

SEQ ID NO: 149847 - DNA, 25 bp, probe
aaaattctctataacaatcgtatgg

SEQ ID NO: 149848 - DNA, 25 bp, probe
aaaacttggatgaaaatggcttgga

SEQ ID NO: 149849 - DNA, 25 bp, probe
aaaacttggatgaaaatggcttgga

SEQ ID NO: 149850 - DNA, 25 bp, probe
aaaacattaatgaagaggccaataa

SEQ ID NO: 149851 - DNA, 25 bp, probe
aagaatttcgagatggcaccacaac

SEQ ID NO: 149852 - DNA, 25 bp, probe
aaaaatgtctgaatgcttacacaaa

SEQ ID NO: 149853 - DNA, 25 bp, probe
aaaaatgtgcatgacctctacattg

SEQ ID NO: 149854 - DNA, 25 bp, probe
aaaaatgatggccccttgagctctt

SEQ ID NO: 149855 - DNA, 25 bp, probe
aaaatatggctcctccttagagttc

SEQ ID NO: 149856 - DNA, 25 bp, probe
aaacagtgactgctactttgggaat

SEQ ID NO: 149857 - DNA, 25 bp, probe
aaaattgcagtgttcctctctggga

SEQ ID NO: 149858 - DNA, 25 bp, probe
aaaatggctggatagaactgggaca

SEQ ID NO: 149859 - DNA, 25 bp, probe
aaaatggctggatagaactgggaca

SEQ ID NO: 149860 - DNA, 25 bp, probe
aaacagttggattcagaaccaagac

SEQ ID NO: 149861 - DNA, 25 bp, probe
aaacaattgctgatcacacacccgt

SEQ ID NO: 149862 - DNA, 25 bp, probe
aaacatgttgtcacacacacacaca

SEQ ID NO: 149863 - DNA, 25 bp, probe
aaacagacgacttcagcagactcac

SEQ ID NO: 149864 - DNA, 25 bp, probe
aaacagacagatccatcaacaccac

SEQ ID NO: 149865 - DNA, 25 bp, probe
aaacagaacacactgcaactgcccc

SEQ ID NO: 149866 - DNA, 25 bp, probe
aaacagaacacactgcaactgcccc

SEQ ID NO: 149867 - DNA, 25 bp, probe
aaaagaacacttgcactggtcacag

SEQ ID NO: 149868 - DNA, 25 bp, probe
aaaagaacacttgcactggtcacag

SEQ ID NO: 149869 - DNA, 25 bp, probe
aaaacaggcctaacatcaggtctca

SEQ ID NO: 149870 - DNA, 25 bp, probe
aaaacgagcctcagctggcgaatgc

SEQ ID NO: 149871 - DNA, 25 bp, probe
aaaacagagcttcccgtgcaaaaag

SEQ ID NO: 149872 - DNA, 25 bp, probe
aaaaaccttcagctgtgctaaacag

SEQ ID NO: 149873 - DNA, 25 bp, probe
aaaaattcaccacagtgcatcaaaa

SEQ ID NO: 149874 - DNA, 25 bp, probe
aaaattctacctgtgctacatagga

SEQ ID NO: 149875 - DNA, 25 bp, probe
aaaattatctcgaccttacatagga

SEQ ID NO: 149876 - DNA, 25 bp, probe
aaaagtacgagtggcccctagagca

SEQ ID NO: 149877 - DNA, 25 bp, probe
aacaattcagggagtgggctaagca

SEQ ID NO: 149878 - DNA, 25 bp, probe
aaaattggggcgctcagagaaggag

SEQ ID NO: 149879 - DNA, 25 bp, probe
aaaacggcgatggatgtcaaaagtg

SEQ ID NO: 149880 - DNA, 25 bp, probe
aaaacggcgatggatgtcaaaagtg

SEQ ID NO: 149881 - DNA, 25 bp, probe
aaaattgccaatgagctaaagctgt

SEQ ID NO: 149882 - DNA, 25 bp, probe
aaaattccaacaagtagccaggact

SEQ ID NO: 149883 - DNA, 25 bp, probe
aaaataaaacacatgagccaggcgt

SEQ ID NO: 149884 - DNA, 25 bp, probe
aaaaaaactactggatgcaaactgt

SEQ ID NO: 149885 - DNA, 25 bp, probe
aaacaataactactgagagctcaca

SEQ ID NO: 149886 - DNA, 25 bp, probe
aaacaataatcgctgaagatccatg

SEQ ID NO: 149887 - DNA, 25 bp, probe
aaacagtatattgggaagctcaatg

SEQ ID NO: 149888 - DNA, 25 bp, probe
aaaatgttctttcaagtgcaaagta

SEQ ID NO: 149889 - DNA, 25 bp, probe
aacaaggacattcaaagtgccctgt

SEQ ID NO: 149890 - DNA, 25 bp, probe
aaaaaatttacattggatactctgt

SEQ ID NO: 149891 - DNA, 25 bp, probe
aaaaatatattacagtcaccccata

SEQ ID NO: 149892 - DNA, 25 bp, probe
aaaaagcaataatcctactcctcaa

SEQ ID NO: 149893 - DNA, 25 bp, probe
aaaaagcaataatcctactcctcaa

SEQ ID NO: 149894 - DNA, 25 bp, probe
aaacaaacgatattcttctcccatc

SEQ ID NO: 149895 - DNA, 25 bp, probe
aaacaactctatgtgcaaccacctc

SEQ ID NO: 149896 - DNA, 25 bp, probe
aaacagcctttagggactccctgtg

SEQ ID NO: 149897 - DNA, 25 bp, probe
aaacagcctttagggactccctgtg

SEQ ID NO: 149898 - DNA, 25 bp, probe
aaaagtctttggggtctacactgca

SEQ ID NO: 149899 - DNA, 25 bp, probe
aaaagcttgcttggcccattaactc

SEQ ID NO: 149900 - DNA, 25 bp, probe
aaaagcttgcttggcccattaactc

SEQ ID NO: 149901 - DNA, 25 bp, probe
aaacactgctatacctccttagcac

SEQ ID NO: 149902 - DNA, 25 bp, probe
aaaaagcaacccccatgtatgccta

SEQ ID NO: 149903 - DNA, 25 bp, probe
aaaaagcaacccccatgtatgccta

SEQ ID NO: 149904 - DNA, 25 bp, probe
aaaatagcaacccttcatttgctct

SEQ ID NO: 149905 - DNA, 25 bp, probe
aaacagacatactcattcatttgat

SEQ ID NO: 149906 - DNA, 25 bp, probe
aacacagagtactgactctgcctgg

SEQ ID NO: 149907 - DNA, 25 bp, probe
aaacagcagctagaatacgccctgc

SEQ ID NO: 149908 - DNA, 25 bp, probe
aaaacctagcacaataccagccagc

SEQ ID NO: 149909 - DNA, 25 bp, probe
aaaacagccatcttcaagacagccc

SEQ ID NO: 149910 - DNA, 25 bp, probe
aaaacagtcttttgacatgagccct

SEQ ID NO: 149911 - DNA, 25 bp, probe
aaaaagatcttcagccaggcctttc

SEQ ID NO: 149912 - DNA, 25 bp, probe
aaaaaaattgcaagccacacttcta

SEQ ID NO: 149913 - DNA, 25 bp, probe
aaaaacaagtcaagccagagatctg

SEQ ID NO: 149914 - DNA, 25 bp, probe
aaaaaaatcattagccaggcatggt

SEQ ID NO: 149915 - DNA, 25 bp, probe
aaacagaagtcttaccagtgctggt

SEQ ID NO: 149916 - DNA, 25 bp, probe
aaacaaggatcttccgagtgcttgg

SEQ ID NO: 149917 - DNA, 25 bp, probe
aaaaaggtctcctgcagatctgtct

SEQ ID NO: 149918 - DNA, 25 bp, probe
aaaaggttgtcatggcatctcttgc

SEQ ID NO: 149919 - DNA, 25 bp, probe
aaaaatgatctacttggctgccttc

SEQ ID NO: 149920 - DNA, 25 bp, probe
aaaaagattcaattgcttggctgta

SEQ ID NO: 149921 - DNA, 25 bp, probe
aaaaaatctcaattcttccctatct

SEQ ID NO: 149922 - DNA, 25 bp, probe
aaaaatagctgctaatctgtcaacc

SEQ ID NO: 149923 - DNA, 25 bp, probe
aaacactagctgttctgctcatata

SEQ ID NO: 149924 - DNA, 25 bp, probe
aaacactcactctgtgtcttcaaca

SEQ ID NO: 149925 - DNA, 25 bp, probe
aaaactagctggcatggtagcacac

SEQ ID NO: 149926 - DNA, 25 bp, probe
aaaattagctgggcatggtggcatg

SEQ ID NO: 149927 - DNA, 25 bp, probe
aaaattatccaggcatggtggcaca

SEQ ID NO: 149928 - DNA, 25 bp, probe
aaacaatccagctcatggtggccat

SEQ ID NO: 149929 - DNA, 25 bp, probe
aaaataccagctgatgaaggcatct

SEQ ID NO: 149930 - DNA, 25 bp, probe
aacaatcccagtggctcaatgtctt

SEQ ID NO: 149931 - DNA, 25 bp, probe
aacaatcccagtggctcaatgtctt

SEQ ID NO: 149932 - DNA, 25 bp, probe
aaaatcctgggcttcatcatgtttg

SEQ ID NO: 149933 - DNA, 25 bp, probe
aaaacaagggatggctcattgtttt

SEQ ID NO: 149934 - DNA, 25 bp, probe
aaaaaaggttgtgtagctgtgtcat

SEQ ID NO: 149935 - DNA, 25 bp, probe
aacaaaacgttcacaacatcgtcat

SEQ ID NO: 149936 - DNA, 25 bp, probe
aacacaccagccataaaacaagtta

SEQ ID NO: 149937 - DNA, 25 bp, probe
aaacacaccagccataaaacaagtt

SEQ ID NO: 149938 - DNA, 25 bp, probe
aaacagcctccagtcataaaaatgt

SEQ ID NO: 149939 - DNA, 25 bp, probe
aaacagcctccagtcataaaaatgt

SEQ ID NO: 149940 - DNA, 25 bp, probe
aaaagtcatccaatctaaccacatc

SEQ ID NO: 149941 - DNA, 25 bp, probe
aaaagtcatccaatctaaccacatc

SEQ ID NO: 149942 - DNA, 25 bp, probe
aaaagtgcccttatgcctgcacagt

SEQ ID NO: 149943 - DNA, 25 bp, probe
aaaacatgcagccttaagcctcagc

SEQ ID NO: 149944 - DNA, 25 bp, probe
aaaacatgcagccttaagcctcagc

SEQ ID NO: 149945 - DNA, 25 bp, probe
aaaacatgcagccttaagcctcagc

SEQ ID NO: 149946 - DNA, 25 bp, probe
aaaatctgcagatggaatccgagca

SEQ ID NO: 149947 - DNA, 25 bp, probe
aaaattccaaggtgcatcgacatta

SEQ ID NO: 149948 - DNA, 25 bp, probe
aaacaatcctagagagctcagagca

SEQ ID NO: 149949 - DNA, 25 bp, probe
aaacaagagctgcaagagagcgaga

SEQ ID NO: 149950 - DNA, 25 bp, probe
aaacaagagctgcaagagagcgaga

SEQ ID NO: 149951 - DNA, 25 bp, probe
cagcaatccatcaacgaagccatac

SEQ ID NO: 149952 - DNA, 25 bp, probe
aaaaacagatcgtatttatgcaatg

SEQ ID NO: 149953 - DNA, 25 bp, probe
aaaacagatcgtatttatgcaatga

SEQ ID NO: 149954 - DNA, 25 bp, probe
aaaacagacggccagacattgcaaa

SEQ ID NO: 149955 - DNA, 25 bp, probe
aaaacagtagaggagccgtcaaatc

SEQ ID NO: 149956 - DNA, 25 bp, probe
aaaagcagctaatgaggctacagaa

SEQ ID NO: 149957 - DNA, 25 bp, probe
aaaagctgctaagagagactcagaa

SEQ ID NO: 149958 - DNA, 25 bp, probe
aaaagtccagcttgaacatctagaa

SEQ ID NO: 149959 - DNA, 25 bp, probe
aaaagtccaccagcgatctatatga

SEQ ID NO: 149960 - DNA, 25 bp, probe
aaaaggccaccagggtctatgcggt

SEQ ID NO: 149961 - DNA, 25 bp, probe
aaaagcgtgatcttgctgggtcggc

SEQ ID NO: 149962 - DNA, 25 bp, probe
aactactgatagggctgggtctgtg

SEQ ID NO: 149963 - DNA, 25 bp, probe
caactcctggagagctcctactttg

SEQ ID NO: 149964 - DNA, 25 bp, probe
aaacactggagtatgcttcacctag

SEQ ID NO: 149965 - DNA, 25 bp, probe
aaaaatggcaagagatcatatcctc

SEQ ID NO: 149966 - DNA, 25 bp, probe
aaaacatgtaaagaagatcttcctc

SEQ ID NO: 149967 - DNA, 25 bp, probe
aaaacctagaggcacaatcttgact

SEQ ID NO: 149968 - DNA, 25 bp, probe
aaaacaccacaaaacagacttcact

SEQ ID NO: 149969 - DNA, 25 bp, probe
aaaacaccacaaaacagacttcact

SEQ ID NO: 149970 - DNA, 25 bp, probe
aaaatactgaaaaacgaggccaatg

SEQ ID NO: 149971 - DNA, 25 bp, probe
aaaaaatcagaaaaccatgcccttg

SEQ ID NO: 149972 - DNA, 25 bp, probe
aaaagaatatttcacacatcccttc

SEQ ID NO: 149973 - DNA, 25 bp, probe
aaaagaccattctgtcctatccttc

SEQ ID NO: 149974 - DNA, 25 bp, probe
aaaaatctcaattcttccctatctt

SEQ ID NO: 149975 - DNA, 25 bp, probe
aaaaagcgcttgcctaactcatact

SEQ ID NO: 149976 - DNA, 25 bp, probe
aaaaagctgctaagagagactcaga

SEQ ID NO: 149977 - DNA, 25 bp, probe
aaaatggcaatcaagagagtctaat

SEQ ID NO: 149978 - DNA, 25 bp, probe
aaaagccaactcgaagtcatccatg

SEQ ID NO: 149979 - DNA, 25 bp, probe
aaaaacacactctagagatgcactg

SEQ ID NO: 149980 - DNA, 25 bp, probe
aaacacttaacttgcatgtgcacag

SEQ ID NO: 149981 - DNA, 25 bp, probe
aaacacttgccaaaatgtcagagtc

SEQ ID NO: 149982 - DNA, 25 bp, probe
aaaagcattgccatgaactgggatt

SEQ ID NO: 149983 - DNA, 25 bp, probe
aaaagattcccttgcatttgaatta

SEQ ID NO: 149984 - DNA, 25 bp, probe
aaaaatctgaccagcatctcagaat

SEQ ID NO: 149985 - DNA, 25 bp, probe
aaaaatgatgacagtgactccacat

SEQ ID NO: 149986 - DNA, 25 bp, probe
aaaaatgatgtctgacctccttata

SEQ ID NO: 149987 - DNA, 25 bp, probe
aaaaatgatgtctgacctccttata

SEQ ID NO: 149988 - DNA, 25 bp, probe
aaaacactgctatacctccttagca

SEQ ID NO: 149989 - DNA, 25 bp, probe
aaaaattgcaagccacacttctaga

SEQ ID NO: 149990 - DNA, 25 bp, probe
aaacaattgacaacatcctcaaatg

SEQ ID NO: 149991 - DNA, 25 bp, probe
aaaactctgctctcaggctgaaatc

SEQ ID NO: 149992 - DNA, 25 bp, probe
aaaaccatgtctatagctgtagatg

SEQ ID NO: 149993 - DNA, 25 bp, probe
aaaacctgtcaattcagatgctagg

SEQ ID NO: 149994 - DNA, 25 bp, probe
aaaacctgagcctatttctagtata

SEQ ID NO: 149995 - DNA, 25 bp, probe
aaaacactggagtatgcttcaccta

SEQ ID NO: 149996 - DNA, 25 bp, probe
aaaacacggagtgctggctgtgctg

SEQ ID NO: 149997 - DNA, 25 bp, probe
aaaacatcagtgctacaggctttgt

SEQ ID NO: 149998 - DNA, 25 bp, probe
aaacaatccccatcaggtagctgtc

SEQ ID NO: 149999 - DNA, 25 bp, probe
aaaagtggctcctcattgtacttca

SEQ ID NO: 150000 - DNA, 25 bp, probe
aaaatgtggtcccagtgtatgacct

SEQ ID NO: 150001 - DNA, 25 bp, probe
aaaatctgtgacccagggctgacct

SEQ ID NO: 150002 - DNA, 25 bp, probe
aaaatctgtgacccagggctgacct

SEQ ID NO: 150003 - DNA, 25 bp, probe
aaaatctgtgacccagggctgacct

SEQ ID NO: 150004 - DNA, 25 bp, probe
aaaatctgtgacccagggctgacct

SEQ ID NO: 150005 - DNA, 25 bp, probe
aacaatcctgaaccaggcctgtcac

SEQ ID NO: 150006 - DNA, 25 bp, probe
aacaatcctgaaccaggcctgtcac

SEQ ID NO: 150007 - DNA, 25 bp, probe
aaaacatctatcgcatgtgccttca

SEQ ID NO: 150008 - DNA, 25 bp, probe
aaaaacatctatcgcatgtgccttc

SEQ ID NO: 150009 - DNA, 25 bp, probe
aaaaacatctatcgcatgtgccttc

SEQ ID NO: 150010 - DNA, 25 bp, probe
aaacaatcattgacccatgcctact

SEQ ID NO: 150011 - DNA, 25 bp, probe
aacagcaacttgtcaaacctaagca

SEQ ID NO: 150012 - DNA, 25 bp, probe
aacagcaacttgtcaaacctaagca

SEQ ID NO: 150013 - DNA, 25 bp, probe
aacacagaccggagcagccataagg

SEQ ID NO: 150014 - DNA, 25 bp, probe
aacacttccgctgctgcggcagcat

SEQ ID NO: 150015 - DNA, 25 bp, probe
aaaatcgcacagacactgcgtgcaa

SEQ ID NO: 150016 - DNA, 25 bp, probe
aacaacgagcagaaggccctggcga

SEQ ID NO: 150017 - DNA, 25 bp, probe
aacaacaaaaagggcctggtcactg

SEQ ID NO: 150018 - DNA, 25 bp, probe
aaacaagacaaagctcctgaccacg

SEQ ID NO: 150019 - DNA, 25 bp, probe
aaaaggaccaccgtcacagatgcca

SEQ ID NO: 150020 - DNA, 25 bp, probe
aaaagtacatgctcctcaagaccat

SEQ ID NO: 150021 - DNA, 25 bp, probe
aaaagtatcactggattaagccctt

SEQ ID NO: 150022 - DNA, 25 bp, probe
aaaagacatttcatctaagccactt

SEQ ID NO: 150023 - DNA, 25 bp, probe
aaaaatattatcatgtcagacacct

SEQ ID NO: 150024 - DNA, 25 bp, probe
aaaaatattcactttagttctctgt

SEQ ID NO: 150025 - DNA, 25 bp, probe
aaacaatgttacctgtagatttctt

SEQ ID NO: 150026 - DNA, 25 bp, probe
aaaaatgttttgtctgcagtttgtt

SEQ ID NO: 150027 - DNA, 25 bp, probe
aaaaaggttgtgtagctgtgtcatg

SEQ ID NO: 150028 - DNA, 25 bp, probe
cagacacaaagtttaactggtactt

SEQ ID NO: 150029 - DNA, 25 bp, probe
aacatcaaaaagaaccggcatcctg

SEQ ID NO: 150030 - DNA, 25 bp, probe
aaaagccaaagtcccagagatattg

SEQ ID NO: 150031 - DNA, 25 bp, probe
aaaaggaagcgacccagaaatggca

SEQ ID NO: 150032 - DNA, 25 bp, probe
aaaaggaaggagccccaggtgtcag

SEQ ID NO: 150033 - DNA, 25 bp, probe
aacgggaatgggtgggagtgctggt

SEQ ID NO: 150034 - DNA, 25 bp, probe
aactggggtgggcagaagacatttt

SEQ ID NO: 150035 - DNA, 25 bp, probe
aactggggtgggcagaagacatttt

SEQ ID NO: 150036 - DNA, 25 bp, probe
aactgaggtgggctagtgggggtga

SEQ ID NO: 150037 - DNA, 25 bp, probe
aacaagagtgggctggagccaaggg

SEQ ID NO: 150038 - DNA, 25 bp, probe
aacacagtgctgtctggcggcacca

SEQ ID NO: 150039 - DNA, 25 bp, probe
aacacagtgctgtctggcggcacca

SEQ ID NO: 150040 - DNA, 25 bp, probe
aacatcatggtgctggtgtccacgt

SEQ ID NO: 150041 - DNA, 25 bp, probe
aacacgcgttgtctgtgtcggtttt

SEQ ID NO: 150042 - DNA, 25 bp, probe
aacagccaggtgaggtgggaggttg

SEQ ID NO: 150043 - DNA, 25 bp, probe
aacagacaggctacggatggatatg

SEQ ID NO: 150044 - DNA, 25 bp, probe
aacagacaggctacggatggatatg

SEQ ID NO: 150045 - DNA, 25 bp, probe
aaaaggcctatcggagctatgtgct

SEQ ID NO: 150046 - DNA, 25 bp, probe
aaaaacaatatctgcagcgttgctt

SEQ ID NO: 150047 - DNA, 25 bp, probe
aaaaacattctcacctgtcttgctt

SEQ ID NO: 150048 - DNA, 25 bp, probe
aaaaacacttctccctgtattctat

SEQ ID NO: 150049 - DNA, 25 bp, probe
aaaacaccatttcagcagataatta

SEQ ID NO: 150050 - DNA, 25 bp, probe
aaaacaggatttcaatatgtacaga

SEQ ID NO: 150051 - DNA, 25 bp, probe
aaaacagcgtttaagactgtaatga

SEQ ID NO: 150052 - DNA, 25 bp, probe
aaaaactatctgacaaactttctga

SEQ ID NO: 150053 - DNA, 25 bp, probe
aaaagacaactgcaaacttctctag

SEQ ID NO: 150054 - DNA, 25 bp, probe
aaaagacaactgcaaacttctctag

SEQ ID NO: 150055 - DNA, 25 bp, probe
aaaaggaagtgcccaacatctccca

SEQ ID NO: 150056 - DNA, 25 bp, probe
aaaacaaagttgcctgattccgcgc

SEQ ID NO: 150057 - DNA, 25 bp, probe
aaaactcaaggactgctattctcct

SEQ ID NO: 150058 - DNA, 25 bp, probe
aaaactgggaggcttatctcactga

SEQ ID NO: 150059 - DNA, 25 bp, probe
aaaactgaggaggtattttgcatat

SEQ ID NO: 150060 - DNA, 25 bp, probe
aaaaaacagatcgtatttatgcaat

SEQ ID NO: 150061 - DNA, 25 bp, probe
aaaaacagaatctttgtatatcaaa

SEQ ID NO: 150062 - DNA, 25 bp, probe
aaaaatctacactcttgcattctta

SEQ ID NO: 150063 - DNA, 25 bp, probe
aaaaatctacactcttgcattctta

SEQ ID NO: 150064 - DNA, 25 bp, probe
aaaagacaatactcttgtgttacat

SEQ ID NO: 150065 - DNA, 25 bp, probe
aaaaagatattctccagcttctgaa

SEQ ID NO: 150066 - DNA, 25 bp, probe
aaaaaatgcctatgcaacttcaaat

SEQ ID NO: 150067 - DNA, 25 bp, probe
aacaaaggccaaacatacccaacag

SEQ ID NO: 150068 - DNA, 25 bp, probe
aaaacagacaaaacaatccccatca

SEQ ID NO: 150069 - DNA, 25 bp, probe
aaaacaaaatgaagccttcacaaca

SEQ ID NO: 150070 - DNA, 25 bp, probe
aaaacaagaatgcaccttccactgc

SEQ ID NO: 150071 - DNA, 25 bp, probe
aaaactaagatgctgcctgcccagt

SEQ ID NO: 150072 - DNA, 25 bp, probe
aagacgtaattgctgacccacaatc

SEQ ID NO: 150073 - DNA, 25 bp, probe
aaaattaattgtagactccaggata

SEQ ID NO: 150074 - DNA, 25 bp, probe
aaaattaattgtagactccaggata

SEQ ID NO: 150075 - DNA, 25 bp, probe
aaaatcgcaatatctacccagctat

SEQ ID NO: 150076 - DNA, 25 bp, probe
aaaacagaattccatagcccctaat

SEQ ID NO: 150077 - DNA, 25 bp, probe
aaaacaaatttgtagcaactctgaa

SEQ ID NO: 150078 - DNA, 25 bp, probe
aaaagcaaggttcagaaatgtcaga

SEQ ID NO: 150079 - DNA, 25 bp, probe
aacaaggtggttaggaaatatgaag

SEQ ID NO: 150080 - DNA, 25 bp, probe
aaaaggctgattactgaaatttaag

SEQ ID NO: 150081 - DNA, 25 bp, probe
aaaacgagacaattgaaaagtcaag

SEQ ID NO: 150082 - DNA, 25 bp, probe
aaaaacagtatattgggaagctcaa

SEQ ID NO: 150083 - DNA, 25 bp, probe
aaaagagactaatggatgaagctaa

SEQ ID NO: 150084 - DNA, 25 bp, probe
aacaagtagccctgtatggagaaga

SEQ ID NO: 150085 - DNA, 25 bp, probe
aacaagtagccctgtatggagaaga

SEQ ID NO: 150086 - DNA, 25 bp, probe
aaaagttgacggatgtcgcagaaga

SEQ ID NO: 150087 - DNA, 25 bp, probe
aaaactgtgaagctttctcagtgca

SEQ ID NO: 150088 - DNA, 25 bp, probe
aaaagggatccagtttccagctgca

SEQ ID NO: 150089 - DNA, 25 bp, probe
aaaaggtatttctattccaatgata

SEQ ID NO: 150090 - DNA, 25 bp, probe
aaaagtgaattttgtgaccgatatc

SEQ ID NO: 150091 - DNA, 25 bp, probe
aaaaggccttagtgagcgagtcatg

SEQ ID NO: 150092 - DNA, 25 bp, probe
aaaaggcttctagttagctgcttta

SEQ ID NO: 150093 - DNA, 25 bp, probe
aaaaggccattgaagtgcgctcttt

SEQ ID NO: 150094 - DNA, 25 bp, probe
aaaaactcaggcaagacctctctct

SEQ ID NO: 150095 - DNA, 25 bp, probe
aaaaagctcaaacgacatcttgctc

SEQ ID NO: 150096 - DNA, 25 bp, probe
aaaacataaatattactcttccata

SEQ ID NO: 150097 - DNA, 25 bp, probe
aaaactagaatattcaactccatat

SEQ ID NO: 150098 - DNA, 25 bp, probe
aaaactagaatattcaactccatat

SEQ ID NO: 150099 - DNA, 25 bp, probe
aaaactacagaaatgctaactgata

SEQ ID NO: 150100 - DNA, 25 bp, probe
aaaactgagcagtacttacctatat

SEQ ID NO: 150101 - DNA, 25 bp, probe
aaaactgagcagtacttacctatat

SEQ ID NO: 150102 - DNA, 25 bp, probe
aacaatatgggtattacctttgtct

SEQ ID NO: 150103 - DNA, 25 bp, probe
aacactatgggtggggcactccttt

SEQ ID NO: 150104 - DNA, 25 bp, probe
aacagttgggtgcactacttctaag

SEQ ID NO: 150105 - DNA, 25 bp, probe
aacagttggtcaagactttgtaaag

SEQ ID NO: 150106 - DNA, 25 bp, probe
aaaactgtatgaatgactttgtaaa

SEQ ID NO: 150107 - DNA, 25 bp, probe
aaaaagattaatcctatatgtaatg

SEQ ID NO: 150108 - DNA, 25 bp, probe
aaaactagtaatccttatcaccatg

SEQ ID NO: 150109 - DNA, 25 bp, probe
aaaactcttaatgctttattctcaa

SEQ ID NO: 150110 - DNA, 25 bp, probe
aaaatctagaagagtctattgtctc

SEQ ID NO: 150111 - DNA, 25 bp, probe
aaaactctaattgtccattcttgct

SEQ ID NO: 150112 - DNA, 25 bp, probe
aaaacctcaaaatctcttgattgat

SEQ ID NO: 150113 - DNA, 25 bp, probe
aaaacctcaaaatctcttgattgat

SEQ ID NO: 150114 - DNA, 25 bp, probe
aaaacaccaaagtctcctgttcgct

SEQ ID NO: 150115 - DNA, 25 bp, probe
aaaaacccaaacacatgcagtggct

SEQ ID NO: 150116 - DNA, 25 bp, probe
aaaagcacccacgcattatcagagg

SEQ ID NO: 150117 - DNA, 25 bp, probe
aaaacactcacacacactacaagag

SEQ ID NO: 150118 - DNA, 25 bp, probe
aaaacactccgccacgtgaagagac

SEQ ID NO: 150119 - DNA, 25 bp, probe
aaaaccttggctccagcatgaaaac

SEQ ID NO: 150120 - DNA, 25 bp, probe
aaaaccatcgcctgcgaatgaagat

SEQ ID NO: 150121 - DNA, 25 bp, probe
aaaacataattctggcaatgagagt

SEQ ID NO: 150122 - DNA, 25 bp, probe
aaaacataattctggcaatgagagt

SEQ ID NO: 150123 - DNA, 25 bp, probe
aagaattcaatgcccggcgtaagct

SEQ ID NO: 150124 - DNA, 25 bp, probe
aaaagtgaagtatggctgtaagtct

SEQ ID NO: 150125 - DNA, 25 bp, probe
aaaaagaagttctgttatctgtgta

SEQ ID NO: 150126 - DNA, 25 bp, probe
aaaatagatacctgtttgactttga

SEQ ID NO: 150127 - DNA, 25 bp, probe
aaaatagaagtcagctttcacatct

SEQ ID NO: 150128 - DNA, 25 bp, probe
aaaatcagaaccctgcttacctctg

SEQ ID NO: 150129 - DNA, 25 bp, probe
aaaatcagaaccctgcttacctctg

SEQ ID NO: 150130 - DNA, 25 bp, probe
aaaaggacagaggctgttccctatg

SEQ ID NO: 150131 - DNA, 25 bp, probe
aaaactgaatgagcaaggcctcttg

SEQ ID NO: 150132 - DNA, 25 bp, probe
aaaactaagcatccagaggccctga

SEQ ID NO: 150133 - DNA, 25 bp, probe
aaaagcatcaggcgaggccacactg

SEQ ID NO: 150134 - DNA, 25 bp, probe
aaaattcagcgtcgacctcatgagt

SEQ ID NO: 150135 - DNA, 25 bp, probe
aaaaccatgttgcacatctcatcat

SEQ ID NO: 150136 - DNA, 25 bp, probe
aaaactcgacacaacatcatcctga

SEQ ID NO: 150137 - DNA, 25 bp, probe
aaaactcgacacaacatcatcctga

SEQ ID NO: 150138 - DNA, 25 bp, probe
aaaactgattacaactgctacagag

SEQ ID NO: 150139 - DNA, 25 bp, probe
aaaacgtcttgatcactaagcaaag

SEQ ID NO: 150140 - DNA, 25 bp, probe
aaaagcgagttgtttctatagtaga

SEQ ID NO: 150141 - DNA, 25 bp, probe
aacaccagagttttgtggttgagaa

SEQ ID NO: 150142 - DNA, 25 bp, probe
aaaacagcagactctggctttggca

SEQ ID NO: 150143 - DNA, 25 bp, probe
aaaacacaacctttctcttgatgca

SEQ ID NO: 150144 - DNA, 25 bp, probe
aaaaaagagcttgttaatgatgatg

SEQ ID NO: 150145 - DNA, 25 bp, probe
aaaagaggagtttgtcttcatgaag

SEQ ID NO: 150146 - DNA, 25 bp, probe
aaaagaggagtttgtcttcatgaag

SEQ ID NO: 150147 - DNA, 25 bp, probe
aaaagggcatgctggttcctaatcc

SEQ ID NO: 150148 - DNA, 25 bp, probe
aaaagtgtgctgtggttcggaagtc

SEQ ID NO: 150149 - DNA, 25 bp, probe
aaaagtgtgctgtggttcggaagtc

SEQ ID NO: 150150 - DNA, 25 bp, probe
aaaagtgtgcattggataggggaac

SEQ ID NO: 150151 - DNA, 25 bp, probe
aaaagtgactcatgtaccccaacta

SEQ ID NO: 150152 - DNA, 25 bp, probe
aaaaggactcatctacctcacagat

SEQ ID NO: 150153 - DNA, 25 bp, probe
aaaagtactgatcttcaatatgaag

SEQ ID NO: 150154 - DNA, 25 bp, probe
aaaacttcagattgttcaacatgag

SEQ ID NO: 150155 - DNA, 25 bp, probe
aaaacttcagattgttcaacatgag

SEQ ID NO: 150156 - DNA, 25 bp, probe
aaaacttcattgctgtcagcgctgc

SEQ ID NO: 150157 - DNA, 25 bp, probe
aaaactccaggctggcagcattgca

SEQ ID NO: 150158 - DNA, 25 bp, probe
aaaacttagtgtggcatcagcacca

SEQ ID NO: 150159 - DNA, 25 bp, probe
aactacttgggtgctatgattcacc

SEQ ID NO: 150160 - DNA, 25 bp, probe
aaaactgtgctgagaaagtatgccc

SEQ ID NO: 150161 - DNA, 25 bp, probe
aaaagcagttgcaggaagctgagca

SEQ ID NO: 150162 - DNA, 25 bp, probe
aacaagcagtggacctgacattgcc

SEQ ID NO: 150163 - DNA, 25 bp, probe
aaaacagatgccacttcatccacca

SEQ ID NO: 150164 - DNA, 25 bp, probe
aaaacagtcctgtgactcaactcaa

SEQ ID NO: 150165 - DNA, 25 bp, probe
aaaacagtcctgtgactcaactcaa

SEQ ID NO: 150166 - DNA, 25 bp, probe
aaaacaattctgtgacatacatatt

SEQ ID NO: 150167 - DNA, 25 bp, probe
aaaacaattattacacagaatctta

SEQ ID NO: 150168 - DNA, 25 bp, probe
aaaactaatctaaactgtagctgta

SEQ ID NO: 150169 - DNA, 25 bp, probe
aaaagtacaatgagccttactgtat

SEQ ID NO: 150170 - DNA, 25 bp, probe
aaaatgtaaatgatgtgtagtttat

SEQ ID NO: 150171 - DNA, 25 bp, probe
aaaattctcagtctcttgcgtttat

SEQ ID NO: 150172 - DNA, 25 bp, probe
aaaagtccagtttgtgtctcttaat

SEQ ID NO: 150173 - DNA, 25 bp, probe
aaaactccactatagttcatcaaga

SEQ ID NO: 150174 - DNA, 25 bp, probe
aaaactccattattaggattacatt

SEQ ID NO: 150175 - DNA, 25 bp, probe
aaaacataattttaatggctatatt

SEQ ID NO: 150176 - DNA, 25 bp, probe
aaaactcaattttcgtgctatttct

SEQ ID NO: 150177 - DNA, 25 bp, probe
aaaactatgttaacagtgtctctgt

SEQ ID NO: 150178 - DNA, 25 bp, probe
aaaactatgttaacagtgtctctgt

SEQ ID NO: 150179 - DNA, 25 bp, probe
aaaattttcagcacagggctctttc

SEQ ID NO: 150180 - DNA, 25 bp, probe
aaaattattcactgtgtgatttgtt

SEQ ID NO: 150181 - DNA, 25 bp, probe
aaaactatctcatctgtcagatttt

SEQ ID NO: 150182 - DNA, 25 bp, probe
aaaagcatactctatgtgatttatt

SEQ ID NO: 150183 - DNA, 25 bp, probe
aaaagcatactctatgtgatttatt

SEQ ID NO: 150184 - DNA, 25 bp, probe
aaaactcagcaatggcagattatcg

SEQ ID NO: 150185 - DNA, 25 bp, probe
aaaactgcactgtcaagatgatgat

SEQ ID NO: 150186 - DNA, 25 bp, probe
aaaacagcctatagatgatgatgtg

SEQ ID NO: 150187 - DNA, 25 bp, probe
aaaagagctctacagcatcatgctc

SEQ ID NO: 150188 - DNA, 25 bp, probe
aaaacagccttctagcacacttttt

SEQ ID NO: 150189 - DNA, 25 bp, probe
aaaacagttgacactcacttattgt

SEQ ID NO: 150190 - DNA, 25 bp, probe
aaaaaattgcaagccacacttctag

SEQ ID NO: 150191 - DNA, 25 bp, probe
aaaaccaccaaagatcagttatagg

SEQ ID NO: 150192 - DNA, 25 bp, probe
aaaagaaccaccagatctgcttcaa

SEQ ID NO: 150193 - DNA, 25 bp, probe
aacacagtaccaggcacaaccttaa

SEQ ID NO: 150194 - DNA, 25 bp, probe
aaaagtaccatagcacagcactgct

SEQ ID NO: 150195 - DNA, 25 bp, probe
aaaactgctacatccacagatggct

SEQ ID NO: 150196 - DNA, 25 bp, probe
aaaatgctgtaatcctgcagattgt

SEQ ID NO: 150197 - DNA, 25 bp, probe
aaaatgtgttgctagcctcagctga

SEQ ID NO: 150198 - DNA, 25 bp, probe
aaaagttttcacctgagctgagagc

SEQ ID NO: 150199 - DNA, 25 bp, probe
aaaagttttcacctgagctgagagc

SEQ ID NO: 150200 - DNA, 25 bp, probe
aaaagcttaatgggctggccaggct

SEQ ID NO: 150201 - DNA, 25 bp, probe
aaaacttcaagcagttctccagcca

SEQ ID NO: 150202 - DNA, 25 bp, probe
aaaacttcaagcagttctccagcca

SEQ ID NO: 150203 - DNA, 25 bp, probe
aagagacttaaggctacgcccactc

SEQ ID NO: 150204 - DNA, 25 bp, probe
aagagacttaaggctacgcccactc

SEQ ID NO: 150205 - DNA, 25 bp, probe
aaaactctgtatgctagcacaccaa

SEQ ID NO: 150206 - DNA, 25 bp, probe
aaaacacatgataccagcagcaact

SEQ ID NO: 150207 - DNA, 25 bp, probe
aaaaaatatatctcaggagctcaac

SEQ ID NO: 150208 - DNA, 25 bp, probe
aaaacacagatttttgggctccact

SEQ ID NO: 150209 - DNA, 25 bp, probe
aaaacacagatttttgggctccact

SEQ ID NO: 150210 - DNA, 25 bp, probe
aaaacaggataagtggtagcccatt

SEQ ID NO: 150211 - DNA, 25 bp, probe
aaaagaggtcactggctgacccctc

SEQ ID NO: 150212 - DNA, 25 bp, probe
aaaacaatgtccttcgctgaggcca

SEQ ID NO: 150213 - DNA, 25 bp, probe
aaaagaggtccttctgtagtgccat

SEQ ID NO: 150214 - DNA, 25 bp, probe
aaaagaggtccttctgtagtgccat

SEQ ID NO: 150215 - DNA, 25 bp, probe
aaaagaaggctgtgatgtcgctgtc

SEQ ID NO: 150216 - DNA, 25 bp, probe
aaaagaaggctgtgatgtcgctgtc

SEQ ID NO: 150217 - DNA, 25 bp, probe
aaaacattgcaggatttgtcagtct

SEQ ID NO: 150218 - DNA, 25 bp, probe
aaaacttcatggacatttcatgtca

SEQ ID NO: 150219 - DNA, 25 bp, probe
aaaactgtgctggtatttgctggac

SEQ ID NO: 150220 - DNA, 25 bp, probe
aaaactgtgctggtatttgctggac

SEQ ID NO: 150221 - DNA, 25 bp, probe
aaaatcttcgcagatctttgatatc

SEQ ID NO: 150222 - DNA, 25 bp, probe
aaaacttagctcctgcttttgatca

SEQ ID NO: 150223 - DNA, 25 bp, probe
aacaatttactaccttctgatgaag

SEQ ID NO: 150224 - DNA, 25 bp, probe
aacaacattatctgaccaatagtac

SEQ ID NO: 150225 - DNA, 25 bp, probe
aacaacattatgttgggggataagg

SEQ ID NO: 150226 - DNA, 25 bp, probe
aacaccaaataccgagggatcaatc

SEQ ID NO: 150227 - DNA, 25 bp, probe
aacaccgacaacgttgagttccatt

SEQ ID NO: 150228 - DNA, 25 bp, probe
aacaccggcattttatgtactttgt

SEQ ID NO: 150229 - DNA, 25 bp, probe
aacaccagtcatactctattactaa

SEQ ID NO: 150230 - DNA, 25 bp, probe
aaaacagtatattgggaagctcaat

SEQ ID NO: 150231 - DNA, 25 bp, probe
aaaagacttcattcggaacctgatg

SEQ ID NO: 150232 - DNA, 25 bp, probe
aaaagacatcttttggtcatccaga

SEQ ID NO: 150233 - DNA, 25 bp, probe
aaaagacatcttttggtcatccaga

SEQ ID NO: 150234 - DNA, 25 bp, probe
aaaagaagttgtagtgttatcaggc

SEQ ID NO: 150235 - DNA, 25 bp, probe
aaaaccagcttgctttgttgcacgc

SEQ ID NO: 150236 - DNA, 25 bp, probe
aaaaccagcttcatttgttgctccg

SEQ ID NO: 150237 - DNA, 25 bp, probe
aaaagcaagttcttagtgcatcttc

SEQ ID NO: 150238 - DNA, 25 bp, probe
aaaatatcgttcactgtgacctcaa

SEQ ID NO: 150239 - DNA, 25 bp, probe
aacaacacgcactttctgtgcacgc

SEQ ID NO: 150240 - DNA, 25 bp, probe
aacaacacgcactttctgtgcacgc

SEQ ID NO: 150241 - DNA, 25 bp, probe
aaaagcatgccaaatcttggagctg

SEQ ID NO: 150242 - DNA, 25 bp, probe
aaaagcccaaactagtgcagaaact

SEQ ID NO: 150243 - DNA, 25 bp, probe
aaaatccccagctacagtggaacac

SEQ ID NO: 150244 - DNA, 25 bp, probe
aaaacagccagcgggcgggaactgt

SEQ ID NO: 150245 - DNA, 25 bp, probe
aacagagacgtggaggccggaagat

SEQ ID NO: 150246 - DNA, 25 bp, probe
aacagagacgtggaggccggaagat

SEQ ID NO: 150247 - DNA, 25 bp, probe
aacgaagcgtgatcagccgtggaac

SEQ ID NO: 150248 - DNA, 25 bp, probe
aacagggcattttacaggtgcgaat

SEQ ID NO: 150249 - DNA, 25 bp, probe
aaaagagcttgttaatgatgatgag

SEQ ID NO: 150250 - DNA, 25 bp, probe
aaaagatcgaaaagctgtatgtgac

SEQ ID NO: 150251 - DNA, 25 bp, probe
aaaagatcgaaaagctgtatgtgac

SEQ ID NO: 150252 - DNA, 25 bp, probe
aaaagttggaagcctggagtgccta

SEQ ID NO: 150253 - DNA, 25 bp, probe
aaaagttggaagcctggagtgccta

SEQ ID NO: 150254 - DNA, 25 bp, probe
aaaattggcagaacctgaagctggt

SEQ ID NO: 150255 - DNA, 25 bp, probe
aaaattagcactagcctccaggttt

SEQ ID NO: 150256 - DNA, 25 bp, probe
aaaatatatctctgcctttggtttt

SEQ ID NO: 150257 - DNA, 25 bp, probe
aaaatagactctggccttcaccaat

SEQ ID NO: 150258 - DNA, 25 bp, probe
aaaagctaatcatgctctctaccaa

SEQ ID NO: 150259 - DNA, 25 bp, probe
aaaagctgacattgacccagacata

SEQ ID NO: 150260 - DNA, 25 bp, probe
gaacaactactagccggaaggtccg

SEQ ID NO: 150261 - DNA, 25 bp, probe
aacaaccagggatcaggagggtcca

SEQ ID NO: 150262 - DNA, 25 bp, probe
aacaaccagggatcaggagggtcca

SEQ ID NO: 150263 - DNA, 25 bp, probe
aaaagccgtgagtcaggcctgggtt

SEQ ID NO: 150264 - DNA, 25 bp, probe
aaaaccctgacatgtattgcgggcg

SEQ ID NO: 150265 - DNA, 25 bp, probe
aaaactgcctgaaatgtgttttggc

SEQ ID NO: 150266 - DNA, 25 bp, probe
aaaacctggatcatggtgttctggt

SEQ ID NO: 150267 - DNA, 25 bp, probe
aaaagcctggagatggtgactcttt

SEQ ID NO: 150268 - DNA, 25 bp, probe
aaaatcctgtggatggccacggact

SEQ ID NO: 150269 - DNA, 25 bp, probe
aaaatacatgtgtcttggcagccat

SEQ ID NO: 150270 - DNA, 25 bp, probe
aaaagacaaggctatgatgctgctt

SEQ ID NO: 150271 - DNA, 25 bp, probe
aacaagtcaagccagagatctgtta

SEQ ID NO: 150272 - DNA, 25 bp, probe
aaaagcaccagcaggcacgttaact

SEQ ID NO: 150273 - DNA, 25 bp, probe
aacaggaccgcctgcactgaaaact

SEQ ID NO: 150274 - DNA, 25 bp, probe
aacactacagcgcaggattgaagaa

SEQ ID NO: 150275 - DNA, 25 bp, probe
aacagtacaggggtgtggaggactt

SEQ ID NO: 150276 - DNA, 25 bp, probe
aacagtacaggggtgtggaggactt

SEQ ID NO: 150277 - DNA, 25 bp, probe
aacaagacacggctgggttggatat

SEQ ID NO: 150278 - DNA, 25 bp, probe
aaaaggccgcagggcagggggactg

SEQ ID NO: 150279 - DNA, 25 bp, probe
aacaggtcccaagcggttgagcctg

SEQ ID NO: 150280 - DNA, 25 bp, probe
aacactgtacccagctggttgggag

SEQ ID NO: 150281 - DNA, 25 bp, probe
aacacatatagggcttcctttggta

SEQ ID NO: 150282 - DNA, 25 bp, probe
aacacatatagggcttcctttggta

SEQ ID NO: 150283 - DNA, 25 bp, probe
aacaattcagtggtcttatttttgg

SEQ ID NO: 150284 - DNA, 25 bp, probe
aaaattcatgaggtgtcaactgtta

SEQ ID NO: 150285 - DNA, 25 bp, probe
aaaatccaatgcttctgcatactgt

SEQ ID NO: 150286 - DNA, 25 bp, probe
aaaaccactgcaggctgctggcttc

SEQ ID NO: 150287 - DNA, 25 bp, probe
aaaaccactgcaggctgctggcttc

SEQ ID NO: 150288 - DNA, 25 bp, probe
aaaaccattggccttggtacttatg

SEQ ID NO: 150289 - DNA, 25 bp, probe
aaaaccattggccttggtacttatg

SEQ ID NO: 150290 - DNA, 25 bp, probe
aacaaaaagggcctggtcactgtag

SEQ ID NO: 150291 - DNA, 25 bp, probe
aaaaccagaggccctggacagctct

SEQ ID NO: 150292 - DNA, 25 bp, probe
aaaataaggtgcccagcagagagcc

SEQ ID NO: 150293 - DNA, 25 bp, probe
aaaagccagattcctcagcagatga

SEQ ID NO: 150294 - DNA, 25 bp, probe
aaaacattgtttccagatagacgct

SEQ ID NO: 150295 - DNA, 25 bp, probe
aaaatcggttcattcgatgagacct

SEQ ID NO: 150296 - DNA, 25 bp, probe
aacaacggcttttgggaacagctca

SEQ ID NO: 150297 - DNA, 25 bp, probe
aagagacgacttgggacgcaacgac

SEQ ID NO: 150298 - DNA, 25 bp, probe
aaaaggacctcggactgcagggagc

SEQ ID NO: 150299 - DNA, 25 bp, probe
aacagggtcggggaagcagcccatg

SEQ ID NO: 150300 - DNA, 25 bp, probe
aacagggttcgagataagctcactg

SEQ ID NO: 150301 - DNA, 25 bp, probe
aacagtggttgccaaaagtggagcg

SEQ ID NO: 150302 - DNA, 25 bp, probe
aacactgtactgcaataaggggaga

SEQ ID NO: 150303 - DNA, 25 bp, probe
aacagttgactgctattgaaggggc

SEQ ID NO: 150304 - DNA, 25 bp, probe
aacagttgactgctattgaaggggc

SEQ ID NO: 150305 - DNA, 25 bp, probe
aaaagggcttcaatgcgaaggacgc

SEQ ID NO: 150306 - DNA, 25 bp, probe
aaaaggtgataaattgggtcacaga

SEQ ID NO: 150307 - DNA, 25 bp, probe
aacaaacttaacttggagttgcaga

SEQ ID NO: 150308 - DNA, 25 bp, probe
aacaaacttaacttggagttgcaga

SEQ ID NO: 150309 - DNA, 25 bp, probe
aaaaccttccatgtcaagattcagc

SEQ ID NO: 150310 - DNA, 25 bp, probe
aaaacctttcaaacagagcattgtg

SEQ ID NO: 150311 - DNA, 25 bp, probe
aaaatactttctacctacagcgtgc

SEQ ID NO: 150312 - DNA, 25 bp, probe
aaaatactttctacctacagcgtgc

SEQ ID NO: 150313 - DNA, 25 bp, probe
aaaatggctttctcagccaggcgtg

SEQ ID NO: 150314 - DNA, 25 bp, probe
aaaaggccattaaagctcaaggtgc

SEQ ID NO: 150315 - DNA, 25 bp, probe
aaaagccgattaagcactggccgcc

SEQ ID NO: 150316 - DNA, 25 bp, probe
aaaagccattaaagcagctccctgc

SEQ ID NO: 150317 - DNA, 25 bp, probe
aaaaccttaatagttctgcctgctt

SEQ ID NO: 150318 - DNA, 25 bp, probe
aaaaccattcacaggtccacaatat

SEQ ID NO: 150319 - DNA, 25 bp, probe
aaaatccattccaggtagctcggca

SEQ ID NO: 150320 - DNA, 25 bp, probe
aaaatccattccaggtagctcggca

SEQ ID NO: 150321 - DNA, 25 bp, probe
aaaatcctctggctggctaactgga

SEQ ID NO: 150322 - DNA, 25 bp, probe
aaaacctctgccagtgctatattgg

SEQ ID NO: 150323 - DNA, 25 bp, probe
aaaagatctctggctttgctgaaat

SEQ ID NO: 150324 - DNA, 25 bp, probe
aaaagttcaatactcttgaaatgta

SEQ ID NO: 150325 - DNA, 25 bp, probe
aaaaggtgaggacatctgggtctca

SEQ ID NO: 150326 - DNA, 25 bp, probe
aaaatagtggtccacctgggcctga

SEQ ID NO: 150327 - DNA, 25 bp, probe
aaaatagcgagtttctctagccctg

SEQ ID NO: 150328 - DNA, 25 bp, probe
aaaatagcgagtttctctagccctg

SEQ ID NO: 150329 - DNA, 25 bp, probe
aaaatgagtggcttccctagcctct

SEQ ID NO: 150330 - DNA, 25 bp, probe
aaaatgagggtgaccctgctctccc

SEQ ID NO: 150331 - DNA, 25 bp, probe
aacaatgaagaacctcgtgacccac

SEQ ID NO: 150332 - DNA, 25 bp, probe
aaaatgcaagaagcagcggcctccc

SEQ ID NO: 150333 - DNA, 25 bp, probe
aaaatgcaagaagcagcggcctccc

SEQ ID NO: 150334 - DNA, 25 bp, probe
aacaagaagaaccgggctgtgatcc

SEQ ID NO: 150335 - DNA, 25 bp, probe
aaaagaagatacactggctatacag

SEQ ID NO: 150336 - DNA, 25 bp, probe
aaaagaagatcctgtatgccacatc

SEQ ID NO: 150337 - DNA, 25 bp, probe
aaaagagacatgcaggtccctccaa

SEQ ID NO: 150338 - DNA, 25 bp, probe
aacaagagatcgtgttacagtcaca

SEQ ID NO: 150339 - DNA, 25 bp, probe
aaaagtgatccatgttggacataat

SEQ ID NO: 150340 - DNA, 25 bp, probe
aaaagtgatccatgttggacataat

SEQ ID NO: 150341 - DNA, 25 bp, probe
aaaatgtgagcctttgtgatacgaa

SEQ ID NO: 150342 - DNA, 25 bp, probe
aaaattcaccacagtgcatcaaaac

SEQ ID NO: 150343 - DNA, 25 bp, probe
aaaatggcttcactggatcaaataa

SEQ ID NO: 150344 - DNA, 25 bp, probe
aaaatggtgacttggaaatgatgaa

SEQ ID NO: 150345 - DNA, 25 bp, probe
aaaatggtgacttggaaatgatgaa

SEQ ID NO: 150346 - DNA, 25 bp, probe
aaaatcgctgcagcgacacaagtga

SEQ ID NO: 150347 - DNA, 25 bp, probe
aaaatggcatcaaccaccatggatt

SEQ ID NO: 150348 - DNA, 25 bp, probe
aaaatggacagatccacaggtatgt

SEQ ID NO: 150349 - DNA, 25 bp, probe
aaaaggccaaacctctgttcagtgt

SEQ ID NO: 150350 - DNA, 25 bp, probe
aaaaggccaaacctctgttcagtgt

SEQ ID NO: 150351 - DNA, 25 bp, probe
caagaaagccataaacctggtagga

SEQ ID NO: 150352 - DNA, 25 bp, probe
caagaaagccataaacctggtagga

SEQ ID NO: 150353 - DNA, 25 bp, probe
aagacaaccaaatctagccttggaa

SEQ ID NO: 150354 - DNA, 25 bp, probe
aagaacctccaggtctagcctgggt

SEQ ID NO: 150355 - DNA, 25 bp, probe
aacaacctccatatcctggcggttg

SEQ ID NO: 150356 - DNA, 25 bp, probe
aacagaacttctttgtcttcgggtg

SEQ ID NO: 150357 - DNA, 25 bp, probe
aacagaacttctttgtcttcgggtg

SEQ ID NO: 150358 - DNA, 25 bp, probe
aacactgaattcttctgtgcatatg

SEQ ID NO: 150359 - DNA, 25 bp, probe
aacacatcaataaactgacttaccc

SEQ ID NO: 150360 - DNA, 25 bp, probe
aaaatcatgatctccgactttggcc

SEQ ID NO: 150361 - DNA, 25 bp, probe
aaaatgtgcccagcgatttttgccc

SEQ ID NO: 150362 - DNA, 25 bp, probe
aaaatgtgcccagcgatttttgccc

SEQ ID NO: 150363 - DNA, 25 bp, probe
aaaaggccatcgatattctttgctc

SEQ ID NO: 150364 - DNA, 25 bp, probe
aaaagttcattatgttgtttctcta

SEQ ID NO: 150365 - DNA, 25 bp, probe
aaaatgataatttacttgtagtctt

SEQ ID NO: 150366 - DNA, 25 bp, probe
aaaatcatagagcttgccttagttt

SEQ ID NO: 150367 - DNA, 25 bp, probe
aaaactgtgcagcttcctgaacctt

SEQ ID NO: 150368 - DNA, 25 bp, probe
aacaatgcttggctgaccgagtctt

SEQ ID NO: 150369 - DNA, 25 bp, probe
aacaatgcttggctgaccgagtctt

SEQ ID NO: 150370 - DNA, 25 bp, probe
aacaagttgtgggactccagtcagg

SEQ ID NO: 150371 - DNA, 25 bp, probe
aacatcggctacgtcatcaacgtca

SEQ ID NO: 150372 - DNA, 25 bp, probe
aagatgaacgcagccatcaaaatgc

SEQ ID NO: 150373 - DNA, 25 bp, probe
caaaatagccagttataaaatgggg

SEQ ID NO: 150374 - DNA, 25 bp, probe
caaaaacttggatgaaaatggcttg

SEQ ID NO: 150375 - DNA, 25 bp, probe
cagaaaaccctataagaagttcatt

SEQ ID NO: 150376 - DNA, 25 bp, probe
aaaaccccgcagagagagcagattt

SEQ ID NO: 150377 - DNA, 25 bp, probe
aaaatcccctagagcagagagagag

SEQ ID NO: 150378 - DNA, 25 bp, probe
aacaacctgctaagtgacacggaag

SEQ ID NO: 150379 - DNA, 25 bp, probe
aacaacctgctaagtgacacggaag

SEQ ID NO: 150380 - DNA, 25 bp, probe
aacaattaccacctgacctgcaggg

SEQ ID NO: 150381 - DNA, 25 bp, probe
aaaatgatatgcacgctgaatcctg

SEQ ID NO: 150382 - DNA, 25 bp, probe
aaaatgatagatgtggattctctta

SEQ ID NO: 150383 - DNA, 25 bp, probe
aaaatcatgttttggtcttgcatta

SEQ ID NO: 150384 - DNA, 25 bp, probe
aaaatgcttatttcttcttctctta

SEQ ID NO: 150385 - DNA, 25 bp, probe
aaaagcttcattctcactctgcttt

SEQ ID NO: 150386 - DNA, 25 bp, probe
aaaagctgttgacttatctgcgctt

SEQ ID NO: 150387 - DNA, 25 bp, probe
aaaagattgtgagctgcctcgttcc

SEQ ID NO: 150388 - DNA, 25 bp, probe
aaaagtctgcgaccatcgtcatgtt

SEQ ID NO: 150389 - DNA, 25 bp, probe
aacaactgatgccacaatgactatt

SEQ ID NO: 150390 - DNA, 25 bp, probe
aaaagatgtcacgatggcactattg

SEQ ID NO: 150391 - DNA, 25 bp, probe
aacaaattcctggctcactgagcat

SEQ ID NO: 150392 - DNA, 25 bp, probe
aacaaactcctggacatggcagccc

SEQ ID NO: 150393 - DNA, 25 bp, probe
aacaaactcctggacatggcagccc

SEQ ID NO: 150394 - DNA, 25 bp, probe
aacaaatctgttggacgagctcccc

SEQ ID NO: 150395 - DNA, 25 bp, probe
aacaataatgtaaatcaacgcccct

SEQ ID NO: 150396 - DNA, 25 bp, probe
aaaagcaaatgagatcccgcctctt

SEQ ID NO: 150397 - DNA, 25 bp, probe
aaaagcaaatgagatcccgcctctt

SEQ ID NO: 150398 - DNA, 25 bp, probe
aaaagagactgatcatccaggcctc

SEQ ID NO: 150399 - DNA, 25 bp, probe
aaaagcgattgacatctggatggcg

SEQ ID NO: 150400 - DNA, 25 bp, probe
aaaagcgattgacatctggatggcg

SEQ ID NO: 150401 - DNA, 25 bp, probe
aacaacattgtacatcgggacctga

SEQ ID NO: 150402 - DNA, 25 bp, probe
aacaaccagtagctcatggggcctt

SEQ ID NO: 150403 - DNA, 25 bp, probe
aacaggccagttcgttggatggctc

SEQ ID NO: 150404 - DNA, 25 bp, probe
aaaagcactggtcgtcagggagctc

SEQ ID NO: 150405 - DNA, 25 bp, probe
aaaagcactggtcgtcagggagctc

SEQ ID NO: 150406 - DNA, 25 bp, probe
aaaagctccaggctcatctaagctc

SEQ ID NO: 150407 - DNA, 25 bp, probe
aaaagctactgagctcatttcactt

SEQ ID NO: 150408 - DNA, 25 bp, probe
aaaagtacatattccatgttgattt

SEQ ID NO: 150409 - DNA, 25 bp, probe
aaaaggatcacttctctgtctttgc

SEQ ID NO: 150410 - DNA, 25 bp, probe
aaaatggacattttctggcttgtca

SEQ ID NO: 150411 - DNA, 25 bp, probe
aaaatgcggttaataatgcctgtga

SEQ ID NO: 150412 - DNA, 25 bp, probe
aaaatgaggtcaaaagcactttaga

SEQ ID NO: 150413 - DNA, 25 bp, probe
aaaatgattgtcatagacagtgttt

SEQ ID NO: 150414 - DNA, 25 bp, probe
aaaatgtagtctttgaatgtgtgaa

SEQ ID NO: 150415 - DNA, 25 bp, probe
aaaaggagactttattggtcaatat

SEQ ID NO: 150416 - DNA, 25 bp, probe
aaaaggcaactccaattaaactcat

SEQ ID NO: 150417 - DNA, 25 bp, probe
aaaaggcaccaccaactagacatgt

SEQ ID NO: 150418 - DNA, 25 bp, probe
aaaaggcaccaccaactagacatgt

SEQ ID NO: 150419 - DNA, 25 bp, probe
aacaagtgcccccgacaagatagtt

SEQ ID NO: 150420 - DNA, 25 bp, probe
aacaagtcccgggacaacagcaggg

SEQ ID NO: 150421 - DNA, 25 bp, probe
aaaagtcgcctgaggagacgcgcct

SEQ ID NO: 150422 - DNA, 25 bp, probe
aaaagatatcctccggcatatggcc

SEQ ID NO: 150423 - DNA, 25 bp, probe
aaaagcatcttcctgtggcttggct

SEQ ID NO: 150424 - DNA, 25 bp, probe
aacagactttcgtcattcttgtgca

SEQ ID NO: 150425 - DNA, 25 bp, probe
aacaacctgctcatcgaaatgctgc

SEQ ID NO: 150426 - DNA, 25 bp, probe
aaaagcactctcatcagatatctga

SEQ ID NO: 150427 - DNA, 25 bp, probe
aacaaactctcatttgactgtgaga

SEQ ID NO: 150428 - DNA, 25 bp, probe
aacactactgcctgtagtctgatga

SEQ ID NO: 150429 - DNA, 25 bp, probe
aacagtgtcgccactgacagctgga

SEQ ID NO: 150430 - DNA, 25 bp, probe
aaaatatccacaagctggagcagga

SEQ ID NO: 150431 - DNA, 25 bp, probe
aaaatatccacaagctggagcagga

SEQ ID NO: 150432 - DNA, 25 bp, probe
aaaattctgcactgggaggtgtaat

SEQ ID NO: 150433 - DNA, 25 bp, probe
aaaatatctgagcggaactgtgaaa

SEQ ID NO: 150434 - DNA, 25 bp, probe
aaaatatctgagcggaactgtgaaa

SEQ ID NO: 150435 - DNA, 25 bp, probe
aactgaatatgagaggaacgggaga

SEQ ID NO: 150436 - DNA, 25 bp, probe
aactaaatgttgcgtgggtggcatg

SEQ ID NO: 150437 - DNA, 25 bp, probe
aaaagaattctgtgtgtgtgtgtgt

SEQ ID NO: 150438 - DNA, 25 bp, probe
aaaagaatatggcgtcatgcgtgtt

SEQ ID NO: 150439 - DNA, 25 bp, probe
aaaagatctatacatgtagtggata

SEQ ID NO: 150440 - DNA, 25 bp, probe
aacaatgtattaccactagtgcatg

SEQ ID NO: 150441 - DNA, 25 bp, probe
aaaatatacttccctatgatgctac

SEQ ID NO: 150442 - DNA, 25 bp, probe
aaaatatctctttcctgaggatcca

SEQ ID NO: 150443 - DNA, 25 bp, probe
aaaatacctttgtgagagctccaga

SEQ ID NO: 150444 - DNA, 25 bp, probe
aaaatactgctctgtggaacctcgc

SEQ ID NO: 150445 - DNA, 25 bp, probe
aaaatagctgctaatctgtcaacct

SEQ ID NO: 150446 - DNA, 25 bp, probe
aacaagagtgggccatagccagagg

SEQ ID NO: 150447 - DNA, 25 bp, probe
aaaattgttgatgtagccaagttca

SEQ ID NO: 150448 - DNA, 25 bp, probe
aaaatatgttatgtctccagagctc

SEQ ID NO: 150449 - DNA, 25 bp, probe
aacaatgtgaggggtcctagcagcc

SEQ ID NO: 150450 - DNA, 25 bp, probe
aaaaggaggtcagtcctctcagcag

SEQ ID NO: 150451 - DNA, 25 bp, probe
aaaagcaagtgaacaccctgacagg

SEQ ID NO: 150452 - DNA, 25 bp, probe
aaaagcaagtgaacaccctgacagg

SEQ ID NO: 150453 - DNA, 25 bp, probe
aaaagcaagttcctcctgtgactgc

SEQ ID NO: 150454 - DNA, 25 bp, probe
aactccagaggtgtcgggacatggt

SEQ ID NO: 150455 - DNA, 25 bp, probe
aagtcggaggtcatggtaccagtta

SEQ ID NO: 150456 - DNA, 25 bp, probe
aagactaaggatgctgttgcccgtc

SEQ ID NO: 150457 - DNA, 25 bp, probe
aacaccactggaagcttgtgcacat

SEQ ID NO: 150458 - DNA, 25 bp, probe
aacaccactggaagcttgtgcacat

SEQ ID NO: 150459 - DNA, 25 bp, probe
aaaagagctggtggtttgatcattt

SEQ ID NO: 150460 - DNA, 25 bp, probe
aactctagtatgggcttctgacttt

SEQ ID NO: 150461 - DNA, 25 bp, probe
aacacgaggcactcttggatctacc

SEQ ID NO: 150462 - DNA, 25 bp, probe
aacacaaggacatggtgcgcatccc

SEQ ID NO: 150463 - DNA, 25 bp, probe
aacaagagtaaacccagctcccatt

SEQ ID NO: 150464 - DNA, 25 bp, probe
aacaacaataacactgtctcctttc

SEQ ID NO: 150465 - DNA, 25 bp, probe
aaaatgcaaaccaaatcttctctgt

SEQ ID NO: 150466 - DNA, 25 bp, probe
aaaagctcaaacgacatcttgctct

SEQ ID NO: 150467 - DNA, 25 bp, probe
aagaagatcaacaaacagaacttga

SEQ ID NO: 150468 - DNA, 25 bp, probe
aaaagcaagaacacatacactggag

SEQ ID NO: 150469 - DNA, 25 bp, probe
aaaagcaaacgatgaaactggagaa

SEQ ID NO: 150470 - DNA, 25 bp, probe
aaaagaaccgcatgactcctgcaga

SEQ ID NO: 150471 - DNA, 25 bp, probe
aaaagaaccgcatgactcctgcaga

SEQ ID NO: 150472 - DNA, 25 bp, probe
aaaaggaagagctgctccctgcaca

SEQ ID NO: 150473 - DNA, 25 bp, probe
aacaggaaacagtggcggcatgaag

SEQ ID NO: 150474 - DNA, 25 bp, probe
aacagaaccttgtggtccagcagga

SEQ ID NO: 150475 - DNA, 25 bp, probe
aacaacaccgtgtactttgatggga

SEQ ID NO: 150476 - DNA, 25 bp, probe
aacaaccacgggtgtaagtgccatc

SEQ ID NO: 150477 - DNA, 25 bp, probe
gaatctaccaactgtttagggccct

SEQ ID NO: 150478 - DNA, 25 bp, probe
gaatctaccaactgtttagggccct

SEQ ID NO: 150479 - DNA, 25 bp, probe
gaatctaccaactgtttagggccct

SEQ ID NO: 150480 - DNA, 25 bp, probe
aatctaccaactgtttagggccctg

SEQ ID NO: 150481 - DNA, 25 bp, probe
aacttgagaaatgctcttagggtct

SEQ ID NO: 150482 - DNA, 25 bp, probe
aactggaaaagccctgtccggtgag

SEQ ID NO: 150483 - DNA, 25 bp, probe
aacgggcacacgaaggtggcggtga

SEQ ID NO: 150484 - DNA, 25 bp, probe
aacagtatggaagaacatgggtgga

SEQ ID NO: 150485 - DNA, 25 bp, probe
aacagtatggaagaacatgggtgga

SEQ ID NO: 150486 - DNA, 25 bp, probe
aacaaatggctagaaaggactgaat

SEQ ID NO: 150487 - DNA, 25 bp, probe
aacaaatggctagaaaggactgaat

SEQ ID NO: 150488 - DNA, 25 bp, probe
aacagaatgttagaggagcgaaaga

SEQ ID NO: 150489 - DNA, 25 bp, probe
aagctcttcgtacaggacgaaaaag

SEQ ID NO: 150490 - DNA, 25 bp, probe
aagtgattcgtaaatgccaccaaat

SEQ ID NO: 150491 - DNA, 25 bp, probe
aaaatgtgagtttaccagcctagct

SEQ ID NO: 150492 - DNA, 25 bp, probe
aaaatgggattgtactataccagta

SEQ ID NO: 150493 - DNA, 25 bp, probe
aaaagtggtgcgtctcttacgactg

SEQ ID NO: 150494 - DNA, 25 bp, probe
aaaaggaggcagtcatgttagcaaa

SEQ ID NO: 150495 - DNA, 25 bp, probe
aaaatttggagtgtcagcagctata

SEQ ID NO: 150496 - DNA, 25 bp, probe
aaaatgtagaaggttgcaccaacat

SEQ ID NO: 150497 - DNA, 25 bp, probe
aaaatgaaagtcgtccactcactca

SEQ ID NO: 150498 - DNA, 25 bp, probe
aaaatgttagaccaccctcacataa

SEQ ID NO: 150499 - DNA, 25 bp, probe
aaaatgtgtggatgatcaaccactt

SEQ ID NO: 150500 - DNA, 25 bp, probe
aaaatgtcactctttcaaaatctat

SEQ ID NO: 150501 - DNA, 25 bp, probe
aaaatcacctcgatcaaaatcccca

SEQ ID NO: 150502 - DNA, 25 bp, probe
aacattgaccttctcaaaaccatcc

SEQ ID NO: 150503 - DNA, 25 bp, probe
aacagctaactaaagaagacactat

SEQ ID NO: 150504 - DNA, 25 bp, probe
aacagctaactaaagaagacactat

SEQ ID NO: 150505 - DNA, 25 bp, probe
aacagctcaggctcacagaagggca

SEQ ID NO: 150506 - DNA, 25 bp, probe
aacactgcacagcactcaaagtccc

SEQ ID NO: 150507 - DNA, 25 bp, probe
aacacatcacggggcgaagtgcctt

SEQ ID NO: 150508 - DNA, 25 bp, probe
aacacacacgggtagattgctggcc

SEQ ID NO: 150509 - DNA, 25 bp, probe
aaaagatcagggaggtgctggacca

SEQ ID NO: 150510 - DNA, 25 bp, probe
aaaaggctgggatggtgtgcagacc

SEQ ID NO: 150511 - DNA, 25 bp, probe
aaaattgtgggaggaggcatagaac

SEQ ID NO: 150512 - DNA, 25 bp, probe
aaaattgtgggaggaggcatagaac

SEQ ID NO: 150513 - DNA, 25 bp, probe
aaaatttgtaggcagtgcataaagt

SEQ ID NO: 150514 - DNA, 25 bp, probe
aacacttggtagacgggactcgagt

SEQ ID NO: 150515 - DNA, 25 bp, probe
aacaggtggtagaggagccatcgcc

SEQ ID NO: 150516 - DNA, 25 bp, probe
aacagttggttgttctggccaacaa

SEQ ID NO: 150517 - DNA, 25 bp, probe
aacaattggtctcctccagtacaaa

SEQ ID NO: 150518 - DNA, 25 bp, probe
aacacactggtttactcataagaaa

SEQ ID NO: 150519 - DNA, 25 bp, probe
aacagcatgtggtgaaatcaaaatc

SEQ ID NO: 150520 - DNA, 25 bp, probe
aacacatgtgggcattttcacaaca

SEQ ID NO: 150521 - DNA, 25 bp, probe
aacaatgccagaatctttctgaaac

SEQ ID NO: 150522 - DNA, 25 bp, probe
aacaatggagacttttcagcaaatg

SEQ ID NO: 150523 - DNA, 25 bp, probe
aacagcattcagttatttgcagaag

SEQ ID NO: 150524 - DNA, 25 bp, probe
aaaatctcttgattgatgacaaagg

SEQ ID NO: 150525 - DNA, 25 bp, probe
aaaagtcacatatgagcaagatcag

SEQ ID NO: 150526 - DNA, 25 bp, probe
aaaatgatcacttttgcaggctgcc

SEQ ID NO: 150527 - DNA, 25 bp, probe
aaaatggaaatgttgaggtcacctg

SEQ ID NO: 150528 - DNA, 25 bp, probe
aaaattctaataagaggatcagccg

SEQ ID NO: 150529 - DNA, 25 bp, probe
aaaattcttcagggagtgtcacctc

SEQ ID NO: 150530 - DNA, 25 bp, probe
aaaatttctaggtgtgccactgctc

SEQ ID NO: 150531 - DNA, 25 bp, probe
aaaattcattagcttgacccctcaa

SEQ ID NO: 150532 - DNA, 25 bp, probe
aaaatatattacagtcaccccataa

SEQ ID NO: 150533 - DNA, 25 bp, probe
aaaatatattacagtcaccccataa

SEQ ID NO: 150534 - DNA, 25 bp, probe
aaaagatattttctccagcttctaa

SEQ ID NO: 150535 - DNA, 25 bp, probe
aaaatacatttgacttcctctccat

SEQ ID NO: 150536 - DNA, 25 bp, probe
aaaattctatcgaaataatcttcat

SEQ ID NO: 150537 - DNA, 25 bp, probe
aaaatctactggccaagaatatgct

SEQ ID NO: 150538 - DNA, 25 bp, probe
aaaatattgcttccaaaattgccaa

SEQ ID NO: 150539 - DNA, 25 bp, probe
aacacaattgcatcccaaatacaaa

SEQ ID NO: 150540 - DNA, 25 bp, probe
aagaaactgcaaccaacagtaagga

SEQ ID NO: 150541 - DNA, 25 bp, probe
aacaaacatcacccatacagattag

SEQ ID NO: 150542 - DNA, 25 bp, probe
aacagaagaatttgattagtctatg

SEQ ID NO: 150543 - DNA, 25 bp, probe
aacaacagcattcagttatttgcag

SEQ ID NO: 150544 - DNA, 25 bp, probe
aacaacctagaagctttgctgcagg

SEQ ID NO: 150545 - DNA, 25 bp, probe
aacacagcgctggaatactcgggca

SEQ ID NO: 150546 - DNA, 25 bp, probe
aacatcctgctagatgagcggggcc

SEQ ID NO: 150547 - DNA, 25 bp, probe
aacccctacgtgtgggactgagtca

SEQ ID NO: 150548 - DNA, 25 bp, probe
aacgtcccttgtcaggagacggctc

SEQ ID NO: 150549 - DNA, 25 bp, probe
aacgtcccttgtcaggagacggctc

SEQ ID NO: 150550 - DNA, 25 bp, probe
aacagtcccttatgagcgtcactgc

SEQ ID NO: 150551 - DNA, 25 bp, probe
aaaatcagccagtttgagctctccc

SEQ ID NO: 150552 - DNA, 25 bp, probe
aaaatcagccagtttgagctctccc

SEQ ID NO: 150553 - DNA, 25 bp, probe
aacaactgcaactttgcaagctccc

SEQ ID NO: 150554 - DNA, 25 bp, probe
aacaatgcagcagctactggaccac

SEQ ID NO: 150555 - DNA, 25 bp, probe
aacaacagccgcttctggaacggca

SEQ ID NO: 150556 - DNA, 25 bp, probe
aacaatcgacgtgtgggactggcag

SEQ ID NO: 150557 - DNA, 25 bp, probe
aactttgtggtgctggggcggagca

SEQ ID NO: 150558 - DNA, 25 bp, probe
aactacgttatgaaagtggccaaga

SEQ ID NO: 150559 - DNA, 25 bp, probe
aacatcattttaagtctgtggccta

SEQ ID NO: 150560 - DNA, 25 bp, probe
aacatcattttaagtctgtggccta

SEQ ID NO: 150561 - DNA, 25 bp, probe
aacacattcagctgctgggtgtcca

SEQ ID NO: 150562 - DNA, 25 bp, probe
aacacaccccagggtgtgctgccat

SEQ ID NO: 150563 - DNA, 25 bp, probe
aacatcactgcattatgggttttca

SEQ ID NO: 150564 - DNA, 25 bp, probe
aacacccattttggcattgctacta

SEQ ID NO: 150565 - DNA, 25 bp, probe
aacacctttcttgtatccatatact

SEQ ID NO: 150566 - DNA, 25 bp, probe
aacacctgcttttcaaatacataag

SEQ ID NO: 150567 - DNA, 25 bp, probe
aacaaactttactactacattatat

SEQ ID NO: 150568 - DNA, 25 bp, probe
aacaaacttcatgaggttctattat

SEQ ID NO: 150569 - DNA, 25 bp, probe
aacaaactcagcgctcagttgctaa

SEQ ID NO: 150570 - DNA, 25 bp, probe
aaaatactatggacagctttctgat

SEQ ID NO: 150571 - DNA, 25 bp, probe
aaaatactatggacagctttctgat

SEQ ID NO: 150572 - DNA, 25 bp, probe
aaaaggttgtgtagctgtgtcatgt

SEQ ID NO: 150573 - DNA, 25 bp, probe
aacaaggtcatgcttgcgattcttc

SEQ ID NO: 150574 - DNA, 25 bp, probe
aacaaggtatacctcagttccacgg

SEQ ID NO: 150575 - DNA, 25 bp, probe
aacaaggtaagaaaggtcatagcca

SEQ ID NO: 150576 - DNA, 25 bp, probe
aacagagtgatggagaaaggttcgt

SEQ ID NO: 150577 - DNA, 25 bp, probe
aaaagtcattcattaagttatctga

SEQ ID NO: 150578 - DNA, 25 bp, probe
aacaagtacctaaaactcatctgat

SEQ ID NO: 150579 - DNA, 25 bp, probe
aacaatgtccactacgagaactatg

SEQ ID NO: 150580 - DNA, 25 bp, probe
aacactgctcctgccgtgaaagatg

SEQ ID NO: 150581 - DNA, 25 bp, probe
aacaaccgctggggtgaatatcacc

SEQ ID NO: 150582 - DNA, 25 bp, probe
aacaacaccgtgcgcatgatcaact

SEQ ID NO: 150583 - DNA, 25 bp, probe
aacaacaccgtgcgcatgatcaact

SEQ ID NO: 150584 - DNA, 25 bp, probe
aaaatcgccgatcagagctcatacc

SEQ ID NO: 150585 - DNA, 25 bp, probe
aaaattgcctagtcaggcctacatt

SEQ ID NO: 150586 - DNA, 25 bp, probe
aaaattgcctagtcaggcctacatt

SEQ ID NO: 150587 - DNA, 25 bp, probe
aaaattgtatgaacaccttgactta

SEQ ID NO: 150588 - DNA, 25 bp, probe
aaaattgtgagtaagctttgcagtt

SEQ ID NO: 150589 - DNA, 25 bp, probe
aaaatggctattaatgttgtgcaga

SEQ ID NO: 150590 - DNA, 25 bp, probe
aaaatggctattaatgttgtgcaga

SEQ ID NO: 150591 - DNA, 25 bp, probe
aacaaggctcaaaattctcatcatc

SEQ ID NO: 150592 - DNA, 25 bp, probe
aaaatggcaagagatcatatcctca

SEQ ID NO: 150593 - DNA, 25 bp, probe
aaaatccaagatgctcactcctgag

SEQ ID NO: 150594 - DNA, 25 bp, probe
aaaatccatacagctttcagtcaga

SEQ ID NO: 150595 - DNA, 25 bp, probe
aaaatcagctatacacaattcccaa

SEQ ID NO: 150596 - DNA, 25 bp, probe
aaaatcatcacaccagcaattacca

SEQ ID NO: 150597 - DNA, 25 bp, probe
aacaattgcacaccagcaaaggcaa

SEQ ID NO: 150598 - DNA, 25 bp, probe
aaaattgcaagccacacttctagag

SEQ ID NO: 150599 - DNA, 25 bp, probe
aacacatctaatcagcttgtccagg

SEQ ID NO: 150600 - DNA, 25 bp, probe
aacacttgagggcctgtatgcctgg

SEQ ID NO: 150601 - DNA, 25 bp, probe
aacactggagtatgcttcacctaga

SEQ ID NO: 150602 - DNA, 25 bp, probe
aacatccggaagtatcccaccaaga

SEQ ID NO: 150603 - DNA, 25 bp, probe
aacagcctggaagactggcaccatg

SEQ ID NO: 150604 - DNA, 25 bp, probe
aacaccatttactgtggccttcatc

SEQ ID NO: 150605 - DNA, 25 bp, probe
aacagcctttggagtcgcaatgtat

SEQ ID NO: 150606 - DNA, 25 bp, probe
aacacccctggatcacagcaaattc

SEQ ID NO: 150607 - DNA, 25 bp, probe
aacactccacatgtccacaggtgtt

SEQ ID NO: 150608 - DNA, 25 bp, probe
aacacttcagaagcaccgtgtctga

SEQ ID NO: 150609 - DNA, 25 bp, probe
aacaaacagaaacccgtgtatctgg

SEQ ID NO: 150610 - DNA, 25 bp, probe
aacaaacaataatctccttcttgct

SEQ ID NO: 150611 - DNA, 25 bp, probe
aacaaacaataatctccttcttgct

SEQ ID NO: 150612 - DNA, 25 bp, probe
aacaataacactgtctcctttctct

SEQ ID NO: 150613 - DNA, 25 bp, probe
aacaagagtttattcccttatctct

SEQ ID NO: 150614 - DNA, 25 bp, probe
aacaagaatgttcaggcctatccct

SEQ ID NO: 150615 - DNA, 25 bp, probe
aacaagaagtttgcagttgacttca

SEQ ID NO: 150616 - DNA, 25 bp, probe
aaaatggagttatcagttatctgtt

SEQ ID NO: 150617 - DNA, 25 bp, probe
aaaaggagactatcaaagctgcatt

SEQ ID NO: 150618 - DNA, 25 bp, probe
aacacggtgactaaagacacagttc

SEQ ID NO: 150619 - DNA, 25 bp, probe
aacacggtgactaaagacacagttc

SEQ ID NO: 150620 - DNA, 25 bp, probe
aacacggtatttaagagagaactat

SEQ ID NO: 150621 - DNA, 25 bp, probe
aacacctttattgaaaagatctcat

SEQ ID NO: 150622 - DNA, 25 bp, probe
aacaacatttcttcaaccagaactt

SEQ ID NO: 150623 - DNA, 25 bp, probe
aacaacatttcttcaaccagaactt

SEQ ID NO: 150624 - DNA, 25 bp, probe
aacccatatttgtacaccaatattc

SEQ ID NO: 150625 - DNA, 25 bp, probe
aacaactcattgaaaaccttggtgc

SEQ ID NO: 150626 - DNA, 25 bp, probe
aacaccacgtgacacacttttggcc

SEQ ID NO: 150627 - DNA, 25 bp, probe
aacacacatcagtggaacttctgta

SEQ ID NO: 150628 - DNA, 25 bp, probe
aacactcattaacacactactgtgc

SEQ ID NO: 150629 - DNA, 25 bp, probe
aacaatccccatcaggtagctgtct

SEQ ID NO: 150630 - DNA, 25 bp, probe
aacaaccatctacagaacagctgct

SEQ ID NO: 150631 - DNA, 25 bp, probe
aacagcaggttaccaggactgagct

SEQ ID NO: 150632 - DNA, 25 bp, probe
aacagcaggggcgatatcctctgac

SEQ ID NO: 150633 - DNA, 25 bp, probe
aacagcaaaggaatagcctgctcct

SEQ ID NO: 150634 - DNA, 25 bp, probe
aacaatcccaaatgcactgtcttca

SEQ ID NO: 150635 - DNA, 25 bp, probe
aacaaacctagctaactgccttcta

SEQ ID NO: 150636 - DNA, 25 bp, probe
aacaagaactacaacagcgccttca

SEQ ID NO: 150637 - DNA, 25 bp, probe
aacaagaactacaacagcgccttca

SEQ ID NO: 150638 - DNA, 25 bp, probe
aaaatgtcagagtcccaggacatta

SEQ ID NO: 150639 - DNA, 25 bp, probe
aaaaggacgacccagcaacatgctt

SEQ ID NO: 150640 - DNA, 25 bp, probe
aacacggtcaccatggaaatgcagt

SEQ ID NO: 150641 - DNA, 25 bp, probe
aacactggtcacgtttggaaagaat

SEQ ID NO: 150642 - DNA, 25 bp, probe
aacactgggcacgagattggcagac

SEQ ID NO: 150643 - DNA, 25 bp, probe
aacaagaacagtggcttctggcaca

SEQ ID NO: 150644 - DNA, 25 bp, probe
aaaatgtaagatcgttctctgcctc

SEQ ID NO: 150645 - DNA, 25 bp, probe
aaaatgtagctgacttatcctatta

SEQ ID NO: 150646 - DNA, 25 bp, probe
aaaatgtcctatgtatatcttctac

SEQ ID NO: 150647 - DNA, 25 bp, probe
aaaattgctctggccttatctgatc

SEQ ID NO: 150648 - DNA, 25 bp, probe
aaaatctgttccctgattcttctgg

SEQ ID NO: 150649 - DNA, 25 bp, probe
aacaatgtcttggaggattatactg

SEQ ID NO: 150650 - DNA, 25 bp, probe
aacagatgatttcagcccttcctga

SEQ ID NO: 150651 - DNA, 25 bp, probe
aacaggaaggtgtccagttcaagag

SEQ ID NO: 150652 - DNA, 25 bp, probe
aacaggagagcgtactgcggtcagt

SEQ ID NO: 150653 - DNA, 25 bp, probe
aacaggagagcgtactgcggtcagt

SEQ ID NO: 150654 - DNA, 25 bp, probe
aacacggaagattcgcggatgatgt

SEQ ID NO: 150655 - DNA, 25 bp, probe
aacacagctaatgctatggggtgta

SEQ ID NO: 150656 - DNA, 25 bp, probe
aacacaaaatccattccaggtagct

SEQ ID NO: 150657 - DNA, 25 bp, probe
aacaaaaatccaccctcgtagatgc

SEQ ID NO: 150658 - DNA, 25 bp, probe
aacaaaagatagccccacgaagcat

SEQ ID NO: 150659 - DNA, 25 bp, probe
aacaaaatgaagccttcacaacagt

SEQ ID NO: 150660 - DNA, 25 bp, probe
aacaagataacgcctacaccactgg

SEQ ID NO: 150661 - DNA, 25 bp, probe
aacaagattattctcacatacctga

SEQ ID NO: 150662 - DNA, 25 bp, probe
aacacagtgcttgattccaaccaga

SEQ ID NO: 150663 - DNA, 25 bp, probe
aacacagtgataagatcatccgact

SEQ ID NO: 150664 - DNA, 25 bp, probe
aacaagacatggttcacatcagacg

SEQ ID NO: 150665 - DNA, 25 bp, probe
aacacagagggggccatcaagctag

SEQ ID NO: 150666 - DNA, 25 bp, probe
aacacaatgaggtctggcatctggt

SEQ ID NO: 150667 - DNA, 25 bp, probe
aacatcaatggattctcgacttcaa

SEQ ID NO: 150668 - DNA, 25 bp, probe
aacacacagagatgattactacact

SEQ ID NO: 150669 - DNA, 25 bp, probe
aacacacagagatgattactacact

SEQ ID NO: 150670 - DNA, 25 bp, probe
aacacacagcaatagcgttcaactt

SEQ ID NO: 150671 - DNA, 25 bp, probe
aacaccagcggctggttcggctcta

SEQ ID NO: 150672 - DNA, 25 bp, probe
aacaccagcggctggttcggctcta

SEQ ID NO: 150673 - DNA, 25 bp, probe
aacacagcagggtggagacgtctcc

SEQ ID NO: 150674 - DNA, 25 bp, probe
aacacggtggggaagaagtcgcgca

SEQ ID NO: 150675 - DNA, 25 bp, probe
aacactgggcttctagaaccaggca

SEQ ID NO: 150676 - DNA, 25 bp, probe
catgacgacactgggctacggagac

SEQ ID NO: 150677 - DNA, 25 bp, probe
aacaatcggagacctatacagaaga

SEQ ID NO: 150678 - DNA, 25 bp, probe
aacaatcatgtgaagacttgtcgag

SEQ ID NO: 150679 - DNA, 25 bp, probe
aacagtctgcagggactttatgttt

SEQ ID NO: 150680 - DNA, 25 bp, probe
aacagtctgaggagccgcgagtact

SEQ ID NO: 150681 - DNA, 25 bp, probe
aacagtcgtgtacacagtggtgact

SEQ ID NO: 150682 - DNA, 25 bp, probe
aacagtcgtgtacacagtggtgact

SEQ ID NO: 150683 - DNA, 25 bp, probe
aacagtcctgatctccagtaggcat

SEQ ID NO: 150684 - DNA, 25 bp, probe
aacagctccctgaatccagtaattt

SEQ ID NO: 150685 - DNA, 25 bp, probe
aacagctccctgaatccagtaattt

SEQ ID NO: 150686 - DNA, 25 bp, probe
aacagccttctagcacactttttta

SEQ ID NO: 150687 - DNA, 25 bp, probe
aacaccacctgatcagctggttatt

SEQ ID NO: 150688 - DNA, 25 bp, probe
aacacagcaccgtgcatgtatagtt

SEQ ID NO: 150689 - DNA, 25 bp, probe
aacaacctggcttgcagtaagtaat

SEQ ID NO: 150690 - DNA, 25 bp, probe
aacaactcccatcagtagcaataca

SEQ ID NO: 150691 - DNA, 25 bp, probe
aacaaaactcagccagtatccatat

SEQ ID NO: 150692 - DNA, 25 bp, probe
aaaattcctctggcaataccatgtc

SEQ ID NO: 150693 - DNA, 25 bp, probe
aaaatattcagggaaatctctccct

SEQ ID NO: 150694 - DNA, 25 bp, probe
aacaaaaagggccatctctgcccct

SEQ ID NO: 150695 - DNA, 25 bp, probe
aacaaaagggccatctctgccctgc

SEQ ID NO: 150696 - DNA, 25 bp, probe
aacaaaagggccatctctgccctgc

SEQ ID NO: 150697 - DNA, 25 bp, probe
aacaaaagggccatctctgccctgc

SEQ ID NO: 150698 - DNA, 25 bp, probe
aacagcaaaagtcttatccccagag

SEQ ID NO: 150699 - DNA, 25 bp, probe
aacacaacatctttttctactcgag

SEQ ID NO: 150700 - DNA, 25 bp, probe
aaaatcacatcctaatttttctgag

SEQ ID NO: 150701 - DNA, 25 bp, probe
aaaatacccatgctgcttttctgag

SEQ ID NO: 150702 - DNA, 25 bp, probe
aaaattcaaatcgcttttctggctg

SEQ ID NO: 150703 - DNA, 25 bp, probe
caaataaaactcgctgacttcggcc

SEQ ID NO: 150704 - DNA, 25 bp, probe
aacaaaaacatccacgagtccgtca

SEQ ID NO: 150705 - DNA, 25 bp, probe
aacaaaatctgcagatggaatccga

SEQ ID NO: 150706 - DNA, 25 bp, probe
aacaatacactaagaatgactccta

SEQ ID NO: 150707 - DNA, 25 bp, probe
aacaatgcaacgttcctgatttcta

SEQ ID NO: 150708 - DNA, 25 bp, probe
aacaaatagctgttgacgtttgctc

SEQ ID NO: 150709 - DNA, 25 bp, probe
aaaatagagatgatgtaatttcttt

SEQ ID NO: 150710 - DNA, 25 bp, probe
aacagcagaaggagctaaattcttt

SEQ ID NO: 150711 - DNA, 25 bp, probe
aacacaaaggaagtccaacctgaga

SEQ ID NO: 150712 - DNA, 25 bp, probe
aaaataagctgtttgccacctcaaa

SEQ ID NO: 150713 - DNA, 25 bp, probe
aaaatctatgttttaccatacaata

SEQ ID NO: 150714 - DNA, 25 bp, probe
aaaatgctagtataaacaaacaaat

SEQ ID NO: 150715 - DNA, 25 bp, probe
aaaatctgaccataagaaatttact

SEQ ID NO: 150716 - DNA, 25 bp, probe
aaaatgcatcacctttgaaaatatt

SEQ ID NO: 150717 - DNA, 25 bp, probe
aaaatgctgctgctttgacagtaaa

SEQ ID NO: 150718 - DNA, 25 bp, probe
aacacatgctgccatttctggctta

SEQ ID NO: 150719 - DNA, 25 bp, probe
aacaagcggatttcggccaaggcag

SEQ ID NO: 150720 - DNA, 25 bp, probe
aacagggtcaactggcgaagagcag

SEQ ID NO: 150721 - DNA, 25 bp, probe
aacaaggtctacagccataagaaat

SEQ ID NO: 150722 - DNA, 25 bp, probe
aacaaggcttccagtgccaaggagt

SEQ ID NO: 150723 - DNA, 25 bp, probe
aacaaggcttccagtgccaaggagt

SEQ ID NO: 150724 - DNA, 25 bp, probe
aacaagtttgccctgtgctgtagag

SEQ ID NO: 150725 - DNA, 25 bp, probe
aacagcagtatcggccttgtgtaga

SEQ ID NO: 150726 - DNA, 25 bp, probe
aacagcagtatcggccttgtgtaga

SEQ ID NO: 150727 - DNA, 25 bp, probe
aacacagtgaacgacttttggcgga

SEQ ID NO: 150728 - DNA, 25 bp, probe
aacaatgtgaccgatatgttcccgg

SEQ ID NO: 150729 - DNA, 25 bp, probe
aacatatgggctgataaacccgggg

SEQ ID NO: 150730 - DNA, 25 bp, probe
aacacagtcgtgaacaaacacaagg

SEQ ID NO: 150731 - DNA, 25 bp, probe
aacacaggccgaatccaggctctat

SEQ ID NO: 150732 - DNA, 25 bp, probe
aacagcaagctaaagcaagcctctt

SEQ ID NO: 150733 - DNA, 25 bp, probe
aacagcaagctaaagcaagcctctt

SEQ ID NO: 150734 - DNA, 25 bp, probe
aacagctcaaaattaggccttgggc

SEQ ID NO: 150735 - DNA, 25 bp, probe
aacgtcaaagaaagcgccgctcatg

SEQ ID NO: 150736 - DNA, 25 bp, probe
aacagacaaaacaatccccatcagg

SEQ ID NO: 150737 - DNA, 25 bp, probe
aacagcaaccaagtaccctgctaaa

SEQ ID NO: 150738 - DNA, 25 bp, probe
aacatagaccaaatatcccccaata

SEQ ID NO: 150739 - DNA, 25 bp, probe
aacaaacgatattcttctcccatct

SEQ ID NO: 150740 - DNA, 25 bp, probe
aacaaatatggttcttcccttcatg

SEQ ID NO: 150741 - DNA, 25 bp, probe
aacaccatggaatttggcctttcag

SEQ ID NO: 150742 - DNA, 25 bp, probe
aacactgctggtttgagacctattc

SEQ ID NO: 150743 - DNA, 25 bp, probe
aacactgctggtttgagacctattc

SEQ ID NO: 150744 - DNA, 25 bp, probe
aacaagtgtggttagtccttgctct

SEQ ID NO: 150745 - DNA, 25 bp, probe
aacaagtttattgatcacatatcct

SEQ ID NO: 150746 - DNA, 25 bp, probe
aacagtgctttgaacccaattctct

SEQ ID NO: 150747 - DNA, 25 bp, probe
aacagtgctttgaacccaattctct

SEQ ID NO: 150748 - DNA, 25 bp, probe
aacacctaggcctgcaaattctgcc

SEQ ID NO: 150749 - DNA, 25 bp, probe
aacacctaggcctgcaaattctgcc

SEQ ID NO: 150750 - DNA, 25 bp, probe
aacacccaaatctgatatttacagc

SEQ ID NO: 150751 - DNA, 25 bp, probe
aacacccaaatctgatatttacagc

SEQ ID NO: 150752 - DNA, 25 bp, probe
aacaccgccaaagcaaatgtgaccc

SEQ ID NO: 150753 - DNA, 25 bp, probe
aacaccgtcacatgtcaccatgagc

SEQ ID NO: 150754 - DNA, 25 bp, probe
aacagctcctgcagcagtaccgagt

SEQ ID NO: 150755 - DNA, 25 bp, probe
aacaatatctgcagcgttgcttggt

SEQ ID NO: 150756 - DNA, 25 bp, probe
aacagaagcatcaagcccaggggta

SEQ ID NO: 150757 - DNA, 25 bp, probe
aacaagcagctcgagtccataggca

SEQ ID NO: 150758 - DNA, 25 bp, probe
aactaggtcgattgaaagagcaaca

SEQ ID NO: 150759 - DNA, 25 bp, probe
aacattgcctccaaaatagccaacg

SEQ ID NO: 150760 - DNA, 25 bp, probe
aacaatgctctaatcacaatattaa

SEQ ID NO: 150761 - DNA, 25 bp, probe
aacagcatgctcgagtcatcagcca

SEQ ID NO: 150762 - DNA, 25 bp, probe
aacagcatgctcgagtcatcagcca

SEQ ID NO: 150763 - DNA, 25 bp, probe
aacagcctccagtcataaaaatgtg

SEQ ID NO: 150764 - DNA, 25 bp, probe
aacagcagcaacactaaaaagtttc

SEQ ID NO: 150765 - DNA, 25 bp, probe
aaccagaagcggcaaaagcaggtac

SEQ ID NO: 150766 - DNA, 25 bp, probe
aactgcagccaggggttgaaaggga

SEQ ID NO: 150767 - DNA, 25 bp, probe
aacacgccatcatagtggaaccgga

SEQ ID NO: 150768 - DNA, 25 bp, probe
aacacggacatgaagagggccctgg

SEQ ID NO: 150769 - DNA, 25 bp, probe
aacaaagaggtcaagggcgccctga

SEQ ID NO: 150770 - DNA, 25 bp, probe
aacaacagcaagaggagggcccaga

SEQ ID NO: 150771 - DNA, 25 bp, probe
aacaagctaacctagaggccaccga

SEQ ID NO: 150772 - DNA, 25 bp, probe
aacagacacagcccgagggacagcc

SEQ ID NO: 150773 - DNA, 25 bp, probe
aacaatccagctcatggtggccatg

SEQ ID NO: 150774 - DNA, 25 bp, probe
aacaacatgcactctgaggagctct

SEQ ID NO: 150775 - DNA, 25 bp, probe
aacacacatatatctgatggcacct

SEQ ID NO: 150776 - DNA, 25 bp, probe
aacacctcattttatggcaccagaa

SEQ ID NO: 150777 - DNA, 25 bp, probe
aacaacagcttatatggcaccagaa

SEQ ID NO: 150778 - DNA, 25 bp, probe
aacacccttatgattcacacagaag

SEQ ID NO: 150779 - DNA, 25 bp, probe
aacacccttatgattcacacagaag

SEQ ID NO: 150780 - DNA, 25 bp, probe
aacaccctgaagatacaacagccaa

SEQ ID NO: 150781 - DNA, 25 bp, probe
aacttccagaagatcctctcagtct

SEQ ID NO: 150782 - DNA, 25 bp, probe
aacttcatcaagattcccgtggtcc

SEQ ID NO: 150783 - DNA, 25 bp, probe
aacatgttgcaaattacccaaagat

SEQ ID NO: 150784 - DNA, 25 bp, probe
aacatgagggaaataagcaaagagg

SEQ ID NO: 150785 - DNA, 25 bp, probe
aagcgaggtcaacagagaaggcagg

SEQ ID NO: 150786 - DNA, 25 bp, probe
aagcggtccgaggtggaagaagtgg

SEQ ID NO: 150787 - DNA, 25 bp, probe
aacggctccggcatgtgcaaggccg

SEQ ID NO: 150788 - DNA, 25 bp, probe
aacaggcagtcatctttaagggcta

SEQ ID NO: 150789 - DNA, 25 bp, probe
aacagggttatcaatgccaagtgtg

SEQ ID NO: 150790 - DNA, 25 bp, probe
aacaaggttcagttcacagagattg

SEQ ID NO: 150791 - DNA, 25 bp, probe
aacaaggttcagttcacagagattg

SEQ ID NO: 150792 - DNA, 25 bp, probe
aacagacccaagtttgagcagattg

SEQ ID NO: 150793 - DNA, 25 bp, probe
aacaccttcaaatttcaggcatttc

SEQ ID NO: 150794 - DNA, 25 bp, probe
aacactgttgcatgttgtaagacca

SEQ ID NO: 150795 - DNA, 25 bp, probe
aacactgggctgatcctgaatggca

SEQ ID NO: 150796 - DNA, 25 bp, probe
aacagttggctgtatgactgaagta

SEQ ID NO: 150797 - DNA, 25 bp, probe
aacggtggtggtcctgatagttcgc

SEQ ID NO: 150798 - DNA, 25 bp, probe
aacggtggtggtcctgatagttcgc

SEQ ID NO: 150799 - DNA, 25 bp, probe
aacagtgggtggtgtcagcaggtca

SEQ ID NO: 150800 - DNA, 25 bp, probe
aacagctgaagtggcagttccagcg

SEQ ID NO: 150801 - DNA, 25 bp, probe
aacatggagattggtgcttccctgt

SEQ ID NO: 150802 - DNA, 25 bp, probe
aacaaggatctccagtccacaagtt

SEQ ID NO: 150803 - DNA, 25 bp, probe
aacaggatatccaaggccactacat

SEQ ID NO: 150804 - DNA, 25 bp, probe
aacagtaacttaaggaatgatcatg

SEQ ID NO: 150805 - DNA, 25 bp, probe
aactgcaaacttctctagaactgtt

SEQ ID NO: 150806 - DNA, 25 bp, probe
aacacaacacctgtccttactgtgt

SEQ ID NO: 150807 - DNA, 25 bp, probe
aacaaacacctccttattatatata

SEQ ID NO: 150808 - DNA, 25 bp, probe
aacaaatctaatctcttattctaat

SEQ ID NO: 150809 - DNA, 25 bp, probe
aaaattcttctgagcaatattctag

SEQ ID NO: 150810 - DNA, 25 bp, probe
aacacattctcctttgaattgttaa

SEQ ID NO: 150811 - DNA, 25 bp, probe
aacacttctcggccagaatttataa

SEQ ID NO: 150812 - DNA, 25 bp, probe
aacttactcaagcaatagttgaagg

SEQ ID NO: 150813 - DNA, 25 bp, probe
aacaatactttgtaatttatgatag

SEQ ID NO: 150814 - DNA, 25 bp, probe
aaaatattttagatgttattatgct

SEQ ID NO: 150815 - DNA, 25 bp, probe
aaaatatgacttttctgtatgttag

SEQ ID NO: 150816 - DNA, 25 bp, probe
aaaatatgacttttctgtatgttag

SEQ ID NO: 150817 - DNA, 25 bp, probe
aaaattggtgagttcagtagctttg

SEQ ID NO: 150818 - DNA, 25 bp, probe
aacatttggtcacatctgaattttg

SEQ ID NO: 150819 - DNA, 25 bp, probe
aacatttggtcacatctgaattttg

SEQ ID NO: 150820 - DNA, 25 bp, probe
aacagactgcctgaattgagaattt

SEQ ID NO: 150821 - DNA, 25 bp, probe
aacagcctagctctgatagtgaatt

SEQ ID NO: 150822 - DNA, 25 bp, probe
aacacctagtcaatacagatttgta

SEQ ID NO: 150823 - DNA, 25 bp, probe
aacaccagtgtaaaagcttgaggag

SEQ ID NO: 150824 - DNA, 25 bp, probe
aacaacatgtgtccaaatcggggat

SEQ ID NO: 150825 - DNA, 25 bp, probe
aacaaggctctgaaacccgaggatg

SEQ ID NO: 150826 - DNA, 25 bp, probe
aacaagtcctgaatcccttgcaggt

SEQ ID NO: 150827 - DNA, 25 bp, probe
aacaattgcctgaatcctctttttt

SEQ ID NO: 150828 - DNA, 25 bp, probe
aacaatcagattaattacttcttct

SEQ ID NO: 150829 - DNA, 25 bp, probe
aacaatgcgtccaatgacaatattt

SEQ ID NO: 150830 - DNA, 25 bp, probe
aacaatcttcctagactctctgatc

SEQ ID NO: 150831 - DNA, 25 bp, probe
aacagcatttccctgcagctaatgc

SEQ ID NO: 150832 - DNA, 25 bp, probe
aacatcactatccgatgcaccaaac

SEQ ID NO: 150833 - DNA, 25 bp, probe
aacatctctgtggcaatcatagaaa

SEQ ID NO: 150834 - DNA, 25 bp, probe
aacatctctgtggcaatcatagaaa

SEQ ID NO: 150835 - DNA, 25 bp, probe
aacatcttctcccactaggaattta

SEQ ID NO: 150836 - DNA, 25 bp, probe
aacatttgcctcagccacagaattt

SEQ ID NO: 150837 - DNA, 25 bp, probe
aacatgctgatgttccagcagccag

SEQ ID NO: 150838 - DNA, 25 bp, probe
aacatgcagatctacagcgccagag

SEQ ID NO: 150839 - DNA, 25 bp, probe
aacagtgatcaacccagagacgggc

SEQ ID NO: 150840 - DNA, 25 bp, probe
aacaggaaaccaaggtctgacctag

SEQ ID NO: 150841 - DNA, 25 bp, probe
aacttcaacctcaggacagacctcc

SEQ ID NO: 150842 - DNA, 25 bp, probe
aacattctttatattgccaacctcg

SEQ ID NO: 150843 - DNA, 25 bp, probe
aacattctttatattgccaacctcg

SEQ ID NO: 150844 - DNA, 25 bp, probe
aacattcatgtatttcaagccccct

SEQ ID NO: 150845 - DNA, 25 bp, probe
aacagagttcatttccagtaccctc

SEQ ID NO: 150846 - DNA, 25 bp, probe
aacatacctacttccagataaccac

SEQ ID NO: 150847 - DNA, 25 bp, probe
aacaactctcactttagtggatgta

SEQ ID NO: 150848 - DNA, 25 bp, probe
aacagacctaaatatgctggatata

SEQ ID NO: 150849 - DNA, 25 bp, probe
aacaacagtaccaaggtggctgtga

SEQ ID NO: 150850 - DNA, 25 bp, probe
aacacacgatagtaaggagcattta

SEQ ID NO: 150851 - DNA, 25 bp, probe
aacaatgcagatcttagggatgatt

SEQ ID NO: 150852 - DNA, 25 bp, probe
aacaatcaggctctcacagttgttt

SEQ ID NO: 150853 - DNA, 25 bp, probe
aacagaagtcttaccagtgctggtt

SEQ ID NO: 150854 - DNA, 25 bp, probe
aacaaggatcttccgagtgcttggg

SEQ ID NO: 150855 - DNA, 25 bp, probe
aacagcagggctggacggatgttgg

SEQ ID NO: 150856 - DNA, 25 bp, probe
aacaggaggccgtggctctgatgct

SEQ ID NO: 150857 - DNA, 25 bp, probe
aacagtgagatggccgtttctgact

SEQ ID NO: 150858 - DNA, 25 bp, probe
aacaataatctccttcttgctgacc

SEQ ID NO: 150859 - DNA, 25 bp, probe
aacaataatctccttcttgctgacc

SEQ ID NO: 150860 - DNA, 25 bp, probe
aacagacatactcattcatttgatt

SEQ ID NO: 150861 - DNA, 25 bp, probe
aacagcatattcttagtatttcatg

SEQ ID NO: 150862 - DNA, 25 bp, probe
aacaatttatccattcaatcattta

SEQ ID NO: 150863 - DNA, 25 bp, probe
aacaatttatccattcaatcattta

SEQ ID NO: 150864 - DNA, 25 bp, probe
aacactgtgatatcttgtactattt

SEQ ID NO: 150865 - DNA, 25 bp, probe
aacagctcaggatctcttagcattt

SEQ ID NO: 150866 - DNA, 25 bp, probe
aacactagctgttctgctcatatat

SEQ ID NO: 150867 - DNA, 25 bp, probe
aacactagctgttctgctcatatat

SEQ ID NO: 150868 - DNA, 25 bp, probe
aacactcctgatattcaaatccact

SEQ ID NO: 150869 - DNA, 25 bp, probe
aagcctaggtttcaagaggccttat

SEQ ID NO: 150870 - DNA, 25 bp, probe
gaatggaaggttgtaaacccatatt

SEQ ID NO: 150871 - DNA, 25 bp, probe
caaggaaggttacacatctcccaag

SEQ ID NO: 150872 - DNA, 25 bp, probe
caaccaacagtaaggacttacgttg

SEQ ID NO: 150873 - DNA, 25 bp, probe
aacccacaaatgcatacttaccctg

SEQ ID NO: 150874 - DNA, 25 bp, probe
aacaccacggtgcttttatacattg

SEQ ID NO: 150875 - DNA, 25 bp, probe
aacaaaaggtcccaggtcattcttg

SEQ ID NO: 150876 - DNA, 25 bp, probe
aacagaaagaactcaggacatatta

SEQ ID NO: 150877 - DNA, 25 bp, probe
aacagaaaggtgttcatgtgacttc

SEQ ID NO: 150878 - DNA, 25 bp, probe
aacaaattgcgttggcatgtacgtg

SEQ ID NO: 150879 - DNA, 25 bp, probe
aacaatattgaattctcttagcttg

SEQ ID NO: 150880 - DNA, 25 bp, probe
aacacttgtgaatcatgggagtaca

SEQ ID NO: 150881 - DNA, 25 bp, probe
aactactgcgaccagatggggaaca

SEQ ID NO: 150882 - DNA, 25 bp, probe
aactactgcgaccagatggggaaca

SEQ ID NO: 150883 - DNA, 25 bp, probe
aacttcagcctggagtcacggaaca

SEQ ID NO: 150884 - DNA, 25 bp, probe
aacttgccgatgtgccgggaagacg

SEQ ID NO: 150885 - DNA, 25 bp, probe
aacttccttggagcgatgtggttga

SEQ ID NO: 150886 - DNA, 25 bp, probe
aacatctggcttggagcaagtgggt

SEQ ID NO: 150887 - DNA, 25 bp, probe
aacacagagctataaaatgctggat

SEQ ID NO: 150888 - DNA, 25 bp, probe
aacacaagttgggaaatgtggcttc

SEQ ID NO: 150889 - DNA, 25 bp, probe
aagcaggttgtagaacgtggcattc

SEQ ID NO: 150890 - DNA, 25 bp, probe
aagcaggttgtagaacgtggcattc

SEQ ID NO: 150891 - DNA, 25 bp, probe
aactggttccatgtactgtgaactt

SEQ ID NO: 150892 - DNA, 25 bp, probe
aactggttccagagtgggatagtta

SEQ ID NO: 150893 - DNA, 25 bp, probe
aacgattttcttctgtagaatgttt

SEQ ID NO: 150894 - DNA, 25 bp, probe
aacacttttattcttaagcatttca

SEQ ID NO: 150895 - DNA, 25 bp, probe
aactcttggtttcttcaacaggaga

SEQ ID NO: 150896 - DNA, 25 bp, probe
aacatttgcaggacacttttacagg

SEQ ID NO: 150897 - DNA, 25 bp, probe
aacaggtggcagcagccttatcaca

SEQ ID NO: 150898 - DNA, 25 bp, probe
aacaggcttcatggagctctgtcaa

SEQ ID NO: 150899 - DNA, 25 bp, probe
aacatcctatcagtgactctgctcc

SEQ ID NO: 150900 - DNA, 25 bp, probe
aacatacttcagcatcttggagggt

SEQ ID NO: 150901 - DNA, 25 bp, probe
aactacttctggatggtcagcggtt

SEQ ID NO: 150902 - DNA, 25 bp, probe
aacaaccctggaagagtccactgcc

SEQ ID NO: 150903 - DNA, 25 bp, probe
aacactccctggagtgctacctgca

SEQ ID NO: 150904 - DNA, 25 bp, probe
aacaagccctggaatgtgcattcct

SEQ ID NO: 150905 - DNA, 25 bp, probe
aacaacactgctggtttgagaccta

SEQ ID NO: 150906 - DNA, 25 bp, probe
aacaacactgctggtttgagaccta

SEQ ID NO: 150907 - DNA, 25 bp, probe
aacaacatcatgggtatcgagaaca

SEQ ID NO: 150908 - DNA, 25 bp, probe
aacacagcaagggtgatgggaaagc

SEQ ID NO: 150909 - DNA, 25 bp, probe
aacacacttggcagatggaggaagc

SEQ ID NO: 150910 - DNA, 25 bp, probe
aacccatctagtcatagaggaaggc

SEQ ID NO: 150911 - DNA, 25 bp, probe
aacgccactggtgataggaagtagt

SEQ ID NO: 150912 - DNA, 25 bp, probe
aacgccactggtgataggaagtagt

SEQ ID NO: 150913 - DNA, 25 bp, probe
aacagccagcgggcgggaactgtta

SEQ ID NO: 150914 - DNA, 25 bp, probe
aacatccgcagggtgttcaacgact

SEQ ID NO: 150915 - DNA, 25 bp, probe
aacatgccgttggttttattggcag

SEQ ID NO: 150916 - DNA, 25 bp, probe
aacaggctgactgggtgttagtgga

SEQ ID NO: 150917 - DNA, 25 bp, probe
aacaggtactcttctgtttgtgggc

SEQ ID NO: 150918 - DNA, 25 bp, probe
aacagtgaacacacgctttctggtt

SEQ ID NO: 150919 - DNA, 25 bp, probe
aacagtgaacacacgctttctggtt

SEQ ID NO: 150920 - DNA, 25 bp, probe
aacaggagaaggccgtcttccagtt

SEQ ID NO: 150921 - DNA, 25 bp, probe
aacatggtgaaaccctgtctctagt

SEQ ID NO: 150922 - DNA, 25 bp, probe
aacatagtgaaactccgtctctacc

SEQ ID NO: 150923 - DNA, 25 bp, probe
aacactatcgaactacagtcatctc

SEQ ID NO: 150924 - DNA, 25 bp, probe
aacagtttggatggtcagtctctac

SEQ ID NO: 150925 - DNA, 25 bp, probe
aacagtcttttgacatgagccctga

SEQ ID NO: 150926 - DNA, 25 bp, probe
aacactttcctgagatgcacttact

SEQ ID NO: 150927 - DNA, 25 bp, probe
aacaatgcccgtaagatggcttatt

SEQ ID NO: 150928 - DNA, 25 bp, probe
aacaagcacgagctgcaagcgcttc

SEQ ID NO: 150929 - DNA, 25 bp, probe
aacaagctcaagaccgaggtgtcct

SEQ ID NO: 150930 - DNA, 25 bp, probe
aacaagacaagatccacctgatcaa

SEQ ID NO: 150931 - DNA, 25 bp, probe
aacaagccagaatcagcacagataa

SEQ ID NO: 150932 - DNA, 25 bp, probe
aagcagatcaagtccagatgccaag

SEQ ID NO: 150933 - DNA, 25 bp, probe
aacaacatcgtcaagtgccaggcgc

SEQ ID NO: 150934 - DNA, 25 bp, probe
aacaaccagtcaaagaagcagggga

SEQ ID NO: 150935 - DNA, 25 bp, probe
aacaaccagtcaaagaagcagggga

SEQ ID NO: 150936 - DNA, 25 bp, probe
aacaactcagccatctggcacaggg

SEQ ID NO: 150937 - DNA, 25 bp, probe
aacaacacagtgataagatcatccg

SEQ ID NO: 150938 - DNA, 25 bp, probe
aacaacctgctggatgacaatggcc

SEQ ID NO: 150939 - DNA, 25 bp, probe
aacaaggtgctgaagatagagctgg

SEQ ID NO: 150940 - DNA, 25 bp, probe
aacaaggagctgaagaatgccataa

SEQ ID NO: 150941 - DNA, 25 bp, probe
aacagcatggaccagaatatgttca

SEQ ID NO: 150942 - DNA, 25 bp, probe
aacgtgctgacgcatgttcattagc

SEQ ID NO: 150943 - DNA, 25 bp, probe
aacactgctgacctttgcaaaggct

SEQ ID NO: 150944 - DNA, 25 bp, probe
aacactgctgacctttgcaaaggct

SEQ ID NO: 150945 - DNA, 25 bp, probe
aacacatctgctgcttagaagagtg

SEQ ID NO: 150946 - DNA, 25 bp, probe
aacagccatgtgcctaactgagagg

SEQ ID NO: 150947 - DNA, 25 bp, probe
aacaccagctggcaactcagagggt

SEQ ID NO: 150948 - DNA, 25 bp, probe
aacaccagctggcaactcagagggt

SEQ ID NO: 150949 - DNA, 25 bp, probe
aacactgtgggtgatctgctaaagt

SEQ ID NO: 150950 - DNA, 25 bp, probe
aacactgtgggtgatctgctaaagt

SEQ ID NO: 150951 - DNA, 25 bp, probe
aacacgggaagttcaccagcaagtc

SEQ ID NO: 150952 - DNA, 25 bp, probe
aacacgggaagttcaccagcaagtc

SEQ ID NO: 150953 - DNA, 25 bp, probe
aacaccagaaaggtcacctgccttc

SEQ ID NO: 150954 - DNA, 25 bp, probe
aacaaacagaacttgatcctgcgta

SEQ ID NO: 150955 - DNA, 25 bp, probe
aacaaactgaacgacattctcctca

SEQ ID NO: 150956 - DNA, 25 bp, probe
aacaaacatacaggtttctgcctca

SEQ ID NO: 150957 - DNA, 25 bp, probe
aacacaaatatcgttttccatacag

SEQ ID NO: 150958 - DNA, 25 bp, probe
aacacaaatatcgttttccatacag

SEQ ID NO: 150959 - DNA, 25 bp, probe
aacacaattacagtttataatcatc

SEQ ID NO: 150960 - DNA, 25 bp, probe
aacagccctagcagtttatattgca

SEQ ID NO: 150961 - DNA, 25 bp, probe
aacaggctctagcgttcgaacgcac

SEQ ID NO: 150962 - DNA, 25 bp, probe
aacagatgtctacagctttggaatt

SEQ ID NO: 150963 - DNA, 25 bp, probe
aacacttcatgaaagcattctggtg

SEQ ID NO: 150964 - DNA, 25 bp, probe
aacatgggaatatggcatcatgcgt

SEQ ID NO: 150965 - DNA, 25 bp, probe
aacagtagcacaaaagctatcccct

SEQ ID NO: 150966 - DNA, 25 bp, probe
aacagtagcataggaccctaccctc

SEQ ID NO: 150967 - DNA, 25 bp, probe
aacagtgagtactaccacttccgcc

SEQ ID NO: 150968 - DNA, 25 bp, probe
aacagtgagtactaccacttccgcc

SEQ ID NO: 150969 - DNA, 25 bp, probe
cggagggatatttctgtaccccgct

SEQ ID NO: 150970 - DNA, 25 bp, probe
cggccaggaacgccgtaaccacagc

SEQ ID NO: 150971 - DNA, 25 bp, probe
caaccaagtaccctgctaaatccgg

SEQ ID NO: 150972 - DNA, 25 bp, probe
aacacaacgaccagctatggtacag

SEQ ID NO: 150973 - DNA, 25 bp, probe
aacagctgaagatctcgcttggtca

SEQ ID NO: 150974 - DNA, 25 bp, probe
aacagctgaagatctcgcttggtca

SEQ ID NO: 150975 - DNA, 25 bp, probe
aacagccaactgtaccttggctaac

SEQ ID NO: 150976 - DNA, 25 bp, probe
aacagccagatgggccctgtggctt

SEQ ID NO: 150977 - DNA, 25 bp, probe
aacagcacagacagcgagcgctgga

SEQ ID NO: 150978 - DNA, 25 bp, probe
aacaaagacaaccactgggatcagc

SEQ ID NO: 150979 - DNA, 25 bp, probe
aacaaagaccaccgcaatgacatca

SEQ ID NO: 150980 - DNA, 25 bp, probe
aactatgagaccgtggagcagaaga

SEQ ID NO: 150981 - DNA, 25 bp, probe
aactacgacgcggagaacaaactga

SEQ ID NO: 150982 - DNA, 25 bp, probe
aactacgaacaggtgaacatgggtg

SEQ ID NO: 150983 - DNA, 25 bp, probe
aacttgggacgccagaggggcagtg

SEQ ID NO: 150984 - DNA, 25 bp, probe
aactcagggacccagcactgggctg

SEQ ID NO: 150985 - DNA, 25 bp, probe
aacttggtcaacagaagctggtgct

SEQ ID NO: 150986 - DNA, 25 bp, probe
aacttggtaagataactttcatcag

SEQ ID NO: 150987 - DNA, 25 bp, probe
aaccttagaaaacatttgcctcagc

SEQ ID NO: 150988 - DNA, 25 bp, probe
aacagcctaacaaagacacttgcct

SEQ ID NO: 150989 - DNA, 25 bp, probe
aacagtctacaagggaaagtggcat

SEQ ID NO: 150990 - DNA, 25 bp, probe
aacagcactgactagggaaatgatc

SEQ ID NO: 150991 - DNA, 25 bp, probe
aacagcaccctagggacagcagctt

SEQ ID NO: 150992 - DNA, 25 bp, probe
aacagcatctccaagcagcttagag

SEQ ID NO: 150993 - DNA, 25 bp, probe
aacagcatctcggaggccaagatga

SEQ ID NO: 150994 - DNA, 25 bp, probe
aactgctctcctagggaatggggaa

SEQ ID NO: 150995 - DNA, 25 bp, probe
aaggctgacccgggtcattggtggg

SEQ ID NO: 150996 - DNA, 25 bp, probe
aaggctgacccgggtcattggtggg

SEQ ID NO: 150997 - DNA, 25 bp, probe
aacgctaccacgaagacattttcgg

SEQ ID NO: 150998 - DNA, 25 bp, probe
aacactcaaacctagatcattttct

SEQ ID NO: 150999 - DNA, 25 bp, probe
aacacaggcaatgtcttcttttctc

SEQ ID NO: 151000 - DNA, 25 bp, probe
aacacaggcaatgtcttcttttctc

SEQ ID NO: 151001 - DNA, 25 bp, probe
aacacatggaacttaattttctcat

SEQ ID NO: 151002 - DNA, 25 bp, probe
aacagtgtaactaaatttctctagg

SEQ ID NO: 151003 - DNA, 25 bp, probe
aacagtgtaactaaatttctctagg

SEQ ID NO: 151004 - DNA, 25 bp, probe
aacagatgctattttaaattcactg

SEQ ID NO: 151005 - DNA, 25 bp, probe
aacagatcgtatttatgcaatgaaa

SEQ ID NO: 151006 - DNA, 25 bp, probe
aacatggcagctaacacatgaatga

SEQ ID NO: 151007 - DNA, 25 bp, probe
aacatggccggttatgcacatcatt

SEQ ID NO: 151008 - DNA, 25 bp, probe
aacactgtgctgttaagcatccatt

SEQ ID NO: 151009 - DNA, 25 bp, probe
aacatgctgtgttccatacagcctt

SEQ ID NO: 151010 - DNA, 25 bp, probe
aacatcatgttgtccacactcattc

SEQ ID NO: 151011 - DNA, 25 bp, probe
aactcgggtctggacaattcggcga

SEQ ID NO: 151012 - DNA, 25 bp, probe
aacggacttgggaaatctcaggcta

SEQ ID NO: 151013 - DNA, 25 bp, probe
aacctgacccgggaagtcaggccat

SEQ ID NO: 151014 - DNA, 25 bp, probe
aacctgacccgggaagtcaggccat

SEQ ID NO: 151015 - DNA, 25 bp, probe
aacgtgcacctgcggggacaggaca

SEQ ID NO: 151016 - DNA, 25 bp, probe
aacgtgcacctgcggggacaggaca

SEQ ID NO: 151017 - DNA, 25 bp, probe
aactcacccatgagggatgaaaagc

SEQ ID NO: 151018 - DNA, 25 bp, probe
aaaatgctggcaccctaaagccgaa

SEQ ID NO: 151019 - DNA, 25 bp, probe
aacagcatactgtgaggaagaacag

SEQ ID NO: 151020 - DNA, 25 bp, probe
aacagtacatgatgagtgcatgaaa

SEQ ID NO: 151021 - DNA, 25 bp, probe
aacgtagcatgtggcatcgcagtct

SEQ ID NO: 151022 - DNA, 25 bp, probe
aacttagctgtggccagggtttgag

SEQ ID NO: 151023 - DNA, 25 bp, probe
aacttgattgttgagacgccttgct

SEQ ID NO: 151024 - DNA, 25 bp, probe
aagtttgtgctatctatggccctgc

SEQ ID NO: 151025 - DNA, 25 bp, probe
aagtttgtgctatctatggccctgc

SEQ ID NO: 151026 - DNA, 25 bp, probe
aattttagcttggcactggccgtcg

SEQ ID NO: 151027 - DNA, 25 bp, probe
aactactgacttcactggagtctca

SEQ ID NO: 151028 - DNA, 25 bp, probe
aactacaactcctcaaattccaata

SEQ ID NO: 151029 - DNA, 25 bp, probe
aactacaactcctcaaattccaata

SEQ ID NO: 151030 - DNA, 25 bp, probe
aactactaattcctcaattccttct

SEQ ID NO: 151031 - DNA, 25 bp, probe
aactactaattcctcaattccttct

SEQ ID NO: 151032 - DNA, 25 bp, probe
taactttacagggtcagttccgctt

SEQ ID NO: 151033 - DNA, 25 bp, probe
aacactgtgcacatggtcagttccc

SEQ ID NO: 151034 - DNA, 25 bp, probe
aacactgagccttttgaactcagcc

SEQ ID NO: 151035 - DNA, 25 bp, probe
aacactatgtgtattaatccactct

SEQ ID NO: 151036 - DNA, 25 bp, probe
aacacaatggctatcaacagctgct

SEQ ID NO: 151037 - DNA, 25 bp, probe
aacacaggtctaaactcagcatgct

SEQ ID NO: 151038 - DNA, 25 bp, probe
aacagcatggttaaactctgcattg

SEQ ID NO: 151039 - DNA, 25 bp, probe
aacacatcatttaatatcagtgagg

SEQ ID NO: 151040 - DNA, 25 bp, probe
aacacatcatttaatatcagtgagg

SEQ ID NO: 151041 - DNA, 25 bp, probe
aacagactctacatgtaggatggta

SEQ ID NO: 151042 - DNA, 25 bp, probe
aacagccttcgcaacaaagaggtca

SEQ ID NO: 151043 - DNA, 25 bp, probe
aacacctcttgctagcaaagagagc

SEQ ID NO: 151044 - DNA, 25 bp, probe
aacactgccctggagatgacggact

SEQ ID NO: 151045 - DNA, 25 bp, probe
aacacgtcagtgggcagatgctgta

SEQ ID NO: 151046 - DNA, 25 bp, probe
aacacgtcagtgggcagatgctgta

SEQ ID NO: 151047 - DNA, 25 bp, probe
aacacgtgcagctactgcaggtgat

SEQ ID NO: 151048 - DNA, 25 bp, probe
aacactgatgacttgctcattggtg

SEQ ID NO: 151049 - DNA, 25 bp, probe
aacagctgcaagctgtccagcagct

SEQ ID NO: 151050 - DNA, 25 bp, probe
aacagctgaagccgagcacagacct

SEQ ID NO: 151051 - DNA, 25 bp, probe
aacacatgatcccagagaacgctct

SEQ ID NO: 151052 - DNA, 25 bp, probe
aacagcaatcccaaataatgtcggc

SEQ ID NO: 151053 - DNA, 25 bp, probe
aacaggatggccatcaaattcaaaa

SEQ ID NO: 151054 - DNA, 25 bp, probe
aacaggctggtctcgtggtaaaact

SEQ ID NO: 151055 - DNA, 25 bp, probe
aacagggtatgctgcctctgtaaat

SEQ ID NO: 151056 - DNA, 25 bp, probe
aacagaggaacccactcgaaactgg

SEQ ID NO: 151057 - DNA, 25 bp, probe
aacggcgaaccgcaacatataatgg

SEQ ID NO: 151058 - DNA, 25 bp, probe
aacagagcttcccgtgcaaaaaggg

SEQ ID NO: 151059 - DNA, 25 bp, probe
gaaaagtctgtctggacgaagggga

SEQ ID NO: 151060 - DNA, 25 bp, probe
aacacctcattctggccgagagtag

SEQ ID NO: 151061 - DNA, 25 bp, probe
aacacccagccaagcggctgggctg

SEQ ID NO: 151062 - DNA, 25 bp, probe
aacacccccatgacattgcatttgg

SEQ ID NO: 151063 - DNA, 25 bp, probe
aacacccccatgacattgcatttgg

SEQ ID NO: 151064 - DNA, 25 bp, probe
aacacggaccatgacatcaaaaggc

SEQ ID NO: 151065 - DNA, 25 bp, probe
aacacgtgtccctacaggcaaagtg

SEQ ID NO: 151066 - DNA, 25 bp, probe
aacaccatgtcctgaattcatgaag

SEQ ID NO: 151067 - DNA, 25 bp, probe
aacactttccagcctatagcagaag

SEQ ID NO: 151068 - DNA, 25 bp, probe
aacatgttgtacatttcaccatggc

SEQ ID NO: 151069 - DNA, 25 bp, probe
aacagtccacactttgtccaatggt

SEQ ID NO: 151070 - DNA, 25 bp, probe
aacagatcgaccaatttgtgaagat

SEQ ID NO: 151071 - DNA, 25 bp, probe
aacagattatacggcatgaatgaag

SEQ ID NO: 151072 - DNA, 25 bp, probe
aacagtatattgggaagctcaatga

SEQ ID NO: 151073 - DNA, 25 bp, probe
aacaggtatcatgtgaaacagtggt

SEQ ID NO: 151074 - DNA, 25 bp, probe
aacagtgctcttgtggtaggtggat

SEQ ID NO: 151075 - DNA, 25 bp, probe
aacagcggctctgaggtctggtaca

SEQ ID NO: 151076 - DNA, 25 bp, probe
aacagcggctctgaggtctggtaca

SEQ ID NO: 151077 - DNA, 25 bp, probe
aacacagacttccatgagtttggga

SEQ ID NO: 151078 - DNA, 25 bp, probe
aacagcagcctgcagctggattacg

SEQ ID NO: 151079 - DNA, 25 bp, probe
aacagaggcagcagttgcttactga

SEQ ID NO: 151080 - DNA, 25 bp, probe
aacagagaggcaaaatgccatcgta

SEQ ID NO: 151081 - DNA, 25 bp, probe
aacaaagccagattatccatcactg

SEQ ID NO: 151082 - DNA, 25 bp, probe
aacacacgctgcaattttgtctcct

SEQ ID NO: 151083 - DNA, 25 bp, probe
aacacacagctgtaatcgtttgctt

SEQ ID NO: 151084 - DNA, 25 bp, probe
aacagcaagtattggctcgtcaaaa

SEQ ID NO: 151085 - DNA, 25 bp, probe
aacccattggctggcagcccaagga

SEQ ID NO: 151086 - DNA, 25 bp, probe
aacactcttgtgaccgtgccaagaa

SEQ ID NO: 151087 - DNA, 25 bp, probe
aacactggtgtgacctgagggcaga

SEQ ID NO: 151088 - DNA, 25 bp, probe
aacagtgggatgatgtgtgtggcca

SEQ ID NO: 151089 - DNA, 25 bp, probe
aacaggaggcattctgtggccagcc

SEQ ID NO: 151090 - DNA, 25 bp, probe
aacagcgagcagatcaaagccccgg

SEQ ID NO: 151091 - DNA, 25 bp, probe
aacacagcaggaatcagtcagtatc

SEQ ID NO: 151092 - DNA, 25 bp, probe
aactcgctcaagctgtcatgtacgg

SEQ ID NO: 151093 - DNA, 25 bp, probe
aactttgagcagctataggaccagc

SEQ ID NO: 151094 - DNA, 25 bp, probe
aacttcatggagggtgaccccagtc

SEQ ID NO: 151095 - DNA, 25 bp, probe
aactaatcgagcacttctcaccaaa

SEQ ID NO: 151096 - DNA, 25 bp, probe
aacagacacagaattctttcaggaa

SEQ ID NO: 151097 - DNA, 25 bp, probe
aacagaagctgaagtttgctagatt

SEQ ID NO: 151098 - DNA, 25 bp, probe
aacatgggtatgctgtagctaactt

SEQ ID NO: 151099 - DNA, 25 bp, probe
aacatgggtatgctgtagctaactt

SEQ ID NO: 151100 - DNA, 25 bp, probe
aacagcacgtatcagaagccagact

SEQ ID NO: 151101 - DNA, 25 bp, probe
aacacaagttgaaacacctgatctt

SEQ ID NO: 151102 - DNA, 25 bp, probe
aaccagttatactccttgagttatt

SEQ ID NO: 151103 - DNA, 25 bp, probe
aacacttataaaactcttatcttga

SEQ ID NO: 151104 - DNA, 25 bp, probe
aacacttataaaactcttatcttga

SEQ ID NO: 151105 - DNA, 25 bp, probe
aacactaaccaaacaatgcagatct

SEQ ID NO: 151106 - DNA, 25 bp, probe
aacactcaactccatcgaatagctc

SEQ ID NO: 151107 - DNA, 25 bp, probe
aacactcaactccatcgaatagctc

SEQ ID NO: 151108 - DNA, 25 bp, probe
aacacccatccaaggaatggccact

SEQ ID NO: 151109 - DNA, 25 bp, probe
aacacccatccaggcagggggatat

SEQ ID NO: 151110 - DNA, 25 bp, probe
aacacaggaacaactgccggtgata

SEQ ID NO: 151111 - DNA, 25 bp, probe
aacaggacaagcactacggatacaa

SEQ ID NO: 151112 - DNA, 25 bp, probe
aacagcagaaacagtccctaaagca

SEQ ID NO: 151113 - DNA, 25 bp, probe
aacatccaacaaggactttaccagc

SEQ ID NO: 151114 - DNA, 25 bp, probe
aacatccaacaaggactttaccagc

SEQ ID NO: 151115 - DNA, 25 bp, probe
aacacaattcctagacattgtatta

SEQ ID NO: 151116 - DNA, 25 bp, probe
aacacaattcctagacattgtatta

SEQ ID NO: 151117 - DNA, 25 bp, probe
aacacccacctcagattgatatgtt

SEQ ID NO: 151118 - DNA, 25 bp, probe
aacaccactcctttttgtgtgtgtg

SEQ ID NO: 151119 - DNA, 25 bp, probe
aacttcccttttttgatgtagatgc

SEQ ID NO: 151120 - DNA, 25 bp, probe
aacttccaacttgtgttctcagtgc

SEQ ID NO: 151121 - DNA, 25 bp, probe
aacttctgcctcttgggttcaagtg

SEQ ID NO: 151122 - DNA, 25 bp, probe
aacattctgccggtgtctgagtgaa

SEQ ID NO: 151123 - DNA, 25 bp, probe
aacacatagcgccgtgctgtaaata

SEQ ID NO: 151124 - DNA, 25 bp, probe
aacatgcaagctgaggtgacaggta

SEQ ID NO: 151125 - DNA, 25 bp, probe
aacatgcaagctgaggtgacaggta

SEQ ID NO: 151126 - DNA, 25 bp, probe
aacacagacttatggatcgttatgg

SEQ ID NO: 151127 - DNA, 25 bp, probe
aacactgacttagcatatagcttaa

SEQ ID NO: 151128 - DNA, 25 bp, probe
aacacttcttatgattcactacaga

SEQ ID NO: 151129 - DNA, 25 bp, probe
aacacttcttatgattcactacaga

SEQ ID NO: 151130 - DNA, 25 bp, probe
aacaccgtggatgatttctggcaga

SEQ ID NO: 151131 - DNA, 25 bp, probe
aacacagcggtcgacatttcagaaa

SEQ ID NO: 151132 - DNA, 25 bp, probe
aacagagcgagaccctgtctcaaaa

SEQ ID NO: 151133 - DNA, 25 bp, probe
aacatgtcggagtccttcagagaat

SEQ ID NO: 151134 - DNA, 25 bp, probe
aactgcgtaggtggctgtcaaatta

SEQ ID NO: 151135 - DNA, 25 bp, probe
aactgcggatggcgcttgagcaccg

SEQ ID NO: 151136 - DNA, 25 bp, probe
aacaccgtgcgcatgatcaactcgc

SEQ ID NO: 151137 - DNA, 25 bp, probe
aacaccgtgcgcatgatcaactcgc

SEQ ID NO: 151138 - DNA, 25 bp, probe
aacactcgcatggggatgcagcagt

SEQ ID NO: 151139 - DNA, 25 bp, probe
aacaccagatgcaggagaagatccc

SEQ ID NO: 151140 - DNA, 25 bp, probe
aacactcgagttggcaccaaacgct

SEQ ID NO: 151141 - DNA, 25 bp, probe
aacactcgagttggcaccaaacgct

SEQ ID NO: 151142 - DNA, 25 bp, probe
aacacatctgaaatactaaggacct

SEQ ID NO: 151143 - DNA, 25 bp, probe
aacacaggagaattggaaggagccc

SEQ ID NO: 151144 - DNA, 25 bp, probe
aacagcagccatgatagggaggacc

SEQ ID NO: 151145 - DNA, 25 bp, probe
aacagcggcttttgggagcagctca

SEQ ID NO: 151146 - DNA, 25 bp, probe
aacacaggccgctaggaagcagcca

SEQ ID NO: 151147 - DNA, 25 bp, probe
aacagcatctgggaagggagcagcc

SEQ ID NO: 151148 - DNA, 25 bp, probe
aacactcatgcatgaagggggcagt

SEQ ID NO: 151149 - DNA, 25 bp, probe
aacactcatgcatgaagggggcagt

SEQ ID NO: 151150 - DNA, 25 bp, probe
aacagtagatagtggcagtgcagca

SEQ ID NO: 151151 - DNA, 25 bp, probe
aacagttgcatttcagagagttctc

SEQ ID NO: 151152 - DNA, 25 bp, probe
aacagcattcattctatgagggtcc

SEQ ID NO: 151153 - DNA, 25 bp, probe
aacatgtgtatgtcataaggaaggc

SEQ ID NO: 151154 - DNA, 25 bp, probe
aacattctgatattccagctaaacc

SEQ ID NO: 151155 - DNA, 25 bp, probe
aacattctgatattccagctaaacc

SEQ ID NO: 151156 - DNA, 25 bp, probe
aacaccatgaatctactcctgatcc

SEQ ID NO: 151157 - DNA, 25 bp, probe
aacacttggatttacaccagtcttt

SEQ ID NO: 151158 - DNA, 25 bp, probe
aacacttggagctattacatagttt

SEQ ID NO: 151159 - DNA, 25 bp, probe
aacagttggatggattatgataaag

SEQ ID NO: 151160 - DNA, 25 bp, probe
aacttgtaatggtctctgaaaagga

SEQ ID NO: 151161 - DNA, 25 bp, probe
aacagcttatagaacttgaactact

SEQ ID NO: 151162 - DNA, 25 bp, probe
aacagcattgtaaaatggcacaaga

SEQ ID NO: 151163 - DNA, 25 bp, probe
aacacatatggaaggatcaccaagg

SEQ ID NO: 151164 - DNA, 25 bp, probe
aacaccatggtgtgtgcaggcgcgg

SEQ ID NO: 151165 - DNA, 25 bp, probe
aacaccatggaggatgtagtcctgg

SEQ ID NO: 151166 - DNA, 25 bp, probe
aacagtggcggcatgaagctccagg

SEQ ID NO: 151167 - DNA, 25 bp, probe
aacagtggcggcatgaagctccagg

SEQ ID NO: 151168 - DNA, 25 bp, probe
aacaggctctgcgcatgagcgtgga

SEQ ID NO: 151169 - DNA, 25 bp, probe
aacgacatcttcgaacgcatcgcag

SEQ ID NO: 151170 - DNA, 25 bp, probe
aacagactcttcatattcagatgca

SEQ ID NO: 151171 - DNA, 25 bp, probe
aacatatctcttatcttacgaaaaa

SEQ ID NO: 151172 - DNA, 25 bp, probe
aacatacggtttgaacagcatgaaa

SEQ ID NO: 151173 - DNA, 25 bp, probe
aacaccttttgtgacagctgcatac

SEQ ID NO: 151174 - DNA, 25 bp, probe
aacacttgtatttggaggctcttct

SEQ ID NO: 151175 - DNA, 25 bp, probe
aacactcttggtagaagcccttcta

SEQ ID NO: 151176 - DNA, 25 bp, probe
aagcatatttcgagaacccttcctt

SEQ ID NO: 151177 - DNA, 25 bp, probe
aacatttgtcggaaaccagcactct

SEQ ID NO: 151178 - DNA, 25 bp, probe
aacattgtctcacctgaacgaacct

SEQ ID NO: 151179 - DNA, 25 bp, probe
aacagtgttcagttcatagcagaaa

SEQ ID NO: 151180 - DNA, 25 bp, probe
aacaggttcctgccagtgagaaatg

SEQ ID NO: 151181 - DNA, 25 bp, probe
aacagcagtgatggctggggaacaa

SEQ ID NO: 151182 - DNA, 25 bp, probe
aactggtgatggaaggttacaagtg

SEQ ID NO: 151183 - DNA, 25 bp, probe
aactgagttggtagactttatcctg

SEQ ID NO: 151184 - DNA, 25 bp, probe
aacatgggctccagattttctcaag

SEQ ID NO: 151185 - DNA, 25 bp, probe
aacttggccaggtatttcttcaaat

SEQ ID NO: 151186 - DNA, 25 bp, probe
aacttggccctttcctgatggaaat

SEQ ID NO: 151187 - DNA, 25 bp, probe
aacttcccccatgtttgggagatct

SEQ ID NO: 151188 - DNA, 25 bp, probe
aacttcccgtacattgctgctggga

SEQ ID NO: 151189 - DNA, 25 bp, probe
aactataggggctttgacattggga

SEQ ID NO: 151190 - DNA, 25 bp, probe
aactttggggtttgcatttagatca

SEQ ID NO: 151191 - DNA, 25 bp, probe
aacagtcgagagctatgaattttga

SEQ ID NO: 151192 - DNA, 25 bp, probe
aacactctcacctattggttttata

SEQ ID NO: 151193 - DNA, 25 bp, probe
aaccatccaccctggtgttgactga

SEQ ID NO: 151194 - DNA, 25 bp, probe
aaccatccaccctggtgttgactga

SEQ ID NO: 151195 - DNA, 25 bp, probe
aacctttcctagggctgtggagtga

SEQ ID NO: 151196 - DNA, 25 bp, probe
aaccttgatcgtttcggctggcaag

SEQ ID NO: 151197 - DNA, 25 bp, probe
aactttgtcccacctgggagaatgt

SEQ ID NO: 151198 - DNA, 25 bp, probe
caacttttttagtctgctccaaagt

SEQ ID NO: 151199 - DNA, 25 bp, probe
aactgttttgggtagctgccacttg

SEQ ID NO: 151200 - DNA, 25 bp, probe
aacagcctttagggactccctgtgc

SEQ ID NO: 151201 - DNA, 25 bp, probe
aacagcctttagggactccctgtgc

SEQ ID NO: 151202 - DNA, 25 bp, probe
aacacctttagggagattctctgtg

SEQ ID NO: 151203 - DNA, 25 bp, probe
aacacctttagggagattctctgtg

SEQ ID NO: 151204 - DNA, 25 bp, probe
aacaggtcttattggaattgcttat

SEQ ID NO: 151205 - DNA, 25 bp, probe
aacagcgccttcaagaacttctttt

SEQ ID NO: 151206 - DNA, 25 bp, probe
aacagcgccttcaagaacttctttt

SEQ ID NO: 151207 - DNA, 25 bp, probe
aacatccctagcatgcatggtggct

SEQ ID NO: 151208 - DNA, 25 bp, probe
aacagcctatagatgatgatgtgtt

SEQ ID NO: 151209 - DNA, 25 bp, probe
aacagcccaaagtatcattctcaga

SEQ ID NO: 151210 - DNA, 25 bp, probe
aacagcctgatgtgtatctttctgt

SEQ ID NO: 151211 - DNA, 25 bp, probe
aacacctatgattgtttgttttctg

SEQ ID NO: 151212 - DNA, 25 bp, probe
aacaccgtgaacctcagttattgct

SEQ ID NO: 151213 - DNA, 25 bp, probe
aacaggcctaacatcaggtctcagc

SEQ ID NO: 151214 - DNA, 25 bp, probe
gaccaggttaccatatacttcagtg

SEQ ID NO: 151215 - DNA, 25 bp, probe
aactagttacctaatactatcattg

SEQ ID NO: 151216 - DNA, 25 bp, probe
aacattgttcatctttagtgcactt

SEQ ID NO: 151217 - DNA, 25 bp, probe
aacactgcttctcgaatggagtcta

SEQ ID NO: 151218 - DNA, 25 bp, probe
aacactgcttctcgaatggagtcta

SEQ ID NO: 151219 - DNA, 25 bp, probe
aacactgcttctcgaatggagtcta

SEQ ID NO: 151220 - DNA, 25 bp, probe
aacacgccaccgggagagatgctga

SEQ ID NO: 151221 - DNA, 25 bp, probe
aacatccacactaggcaggaatatg

SEQ ID NO: 151222 - DNA, 25 bp, probe
aacatccacacattgtagagttatt

SEQ ID NO: 151223 - DNA, 25 bp, probe
aacagccatccatgaggcatgcttt

SEQ ID NO: 151224 - DNA, 25 bp, probe
aacatgcattccgagaagctgctgt

SEQ ID NO: 151225 - DNA, 25 bp, probe
aacatgcactctgaggagctcttgg

SEQ ID NO: 151226 - DNA, 25 bp, probe
aactgaccattatatgccttcactg

SEQ ID NO: 151227 - DNA, 25 bp, probe
aacagaacaatatctcactttcatt

SEQ ID NO: 151228 - DNA, 25 bp, probe
aacatgcaacgaacacagtttatga

SEQ ID NO: 151229 - DNA, 25 bp, probe
aacagaactaaatgttctatggtta

SEQ ID NO: 151230 - DNA, 25 bp, probe
aacaggcaataaactttcttcggtg

SEQ ID NO: 151231 - DNA, 25 bp, probe
aactgacaaagtgtttctagggtgt

SEQ ID NO: 151232 - DNA, 25 bp, probe
aaccagatctacggtttcgagggtg

SEQ ID NO: 151233 - DNA, 25 bp, probe
aacagcagactctggctttggcagc

SEQ ID NO: 151234 - DNA, 25 bp, probe
aacatcaagctgtctgactttggct

SEQ ID NO: 151235 - DNA, 25 bp, probe
aacagagagcatctagccatgatgg

SEQ ID NO: 151236 - DNA, 25 bp, probe
aacaggatcacagacctgggcctgt

SEQ ID NO: 151237 - DNA, 25 bp, probe
aacaggatcagagaacttgccagat

SEQ ID NO: 151238 - DNA, 25 bp, probe
aacaggatcagagaacttgccagat

SEQ ID NO: 151239 - DNA, 25 bp, probe
aacactgagcaacactctcccagtg

SEQ ID NO: 151240 - DNA, 25 bp, probe
aacagctgtgccaaagacctcacgt

SEQ ID NO: 151241 - DNA, 25 bp, probe
aactgcagtgcaacaaacgctcctt

SEQ ID NO: 151242 - DNA, 25 bp, probe
aactcagtcttcagaggcctcaatt

SEQ ID NO: 151243 - DNA, 25 bp, probe
aacagcctctgtgagagatgcccca

SEQ ID NO: 151244 - DNA, 25 bp, probe
aacagtgcctgctgaatgatttcca

SEQ ID NO: 151245 - DNA, 25 bp, probe
aacagtccttggtcaactatcttaa

SEQ ID NO: 151246 - DNA, 25 bp, probe
aacagtccttggtcaactatcttaa

SEQ ID NO: 151247 - DNA, 25 bp, probe
aacattcctgtataatggtatttca

SEQ ID NO: 151248 - DNA, 25 bp, probe
aacattccgttggcagctggcaaat

SEQ ID NO: 151249 - DNA, 25 bp, probe
aacatggccaatagtcatatgtgaa

SEQ ID NO: 151250 - DNA, 25 bp, probe
aacatggccacagggctctgcttat

SEQ ID NO: 151251 - DNA, 25 bp, probe
aacttgagatgatggctagctttgt

SEQ ID NO: 151252 - DNA, 25 bp, probe
aacattgcattttggatgccatttg

SEQ ID NO: 151253 - DNA, 25 bp, probe
aacatatgcctgagaacctttgcat

SEQ ID NO: 151254 - DNA, 25 bp, probe
aacatatgggaaccaacgtcatcgt

SEQ ID NO: 151255 - DNA, 25 bp, probe
aacatattcgagctcaacggtttac

SEQ ID NO: 151256 - DNA, 25 bp, probe
aacatgaaccagatctacggtttcg

SEQ ID NO: 151257 - DNA, 25 bp, probe
aataatattcgttttctgggttctg

SEQ ID NO: 151258 - DNA, 25 bp, probe
aacattaacatttatttgtggtatt

SEQ ID NO: 151259 - DNA, 25 bp, probe
aacatcctgcgtatatttgggattt

SEQ ID NO: 151260 - DNA, 25 bp, probe
aacacctctgtgtttttgagcaaca

SEQ ID NO: 151261 - DNA, 25 bp, probe
aacagagactctctttatacaagca

SEQ ID NO: 151262 - DNA, 25 bp, probe
aacggcaccttttcattagccatct

SEQ ID NO: 151263 - DNA, 25 bp, probe
aacaggccacgttaaactgcccatc

SEQ ID NO: 151264 - DNA, 25 bp, probe
aacgggcccatataaatccctctgc

SEQ ID NO: 151265 - DNA, 25 bp, probe
aacggctcataaaaagatacgtcct

SEQ ID NO: 151266 - DNA, 25 bp, probe
aacggctcataaaaagatacgtcct

SEQ ID NO: 151267 - DNA, 25 bp, probe
aaccgatccatagaagggcttccca

SEQ ID NO: 151268 - DNA, 25 bp, probe
aactcaatcctagaagctgattatc

SEQ ID NO: 151269 - DNA, 25 bp, probe
aactaacctagttggcgctgacttg

SEQ ID NO: 151270 - DNA, 25 bp, probe
aactaacagactttggactacgcaa

SEQ ID NO: 151271 - DNA, 25 bp, probe
aacagagtaggctttgccactgccg

SEQ ID NO: 151272 - DNA, 25 bp, probe
aacagcagctagaatacgccctgct

SEQ ID NO: 151273 - DNA, 25 bp, probe
aacaggggcaatggtgcgcctgctg

SEQ ID NO: 151274 - DNA, 25 bp, probe
aacagggagctgagggactgcttca

SEQ ID NO: 151275 - DNA, 25 bp, probe
aacagggagctgagggactgcttca

SEQ ID NO: 151276 - DNA, 25 bp, probe
aacatcgtgatcgccgaggacttca

SEQ ID NO: 151277 - DNA, 25 bp, probe
aacatcgtgatcgccgaggacttca

SEQ ID NO: 151278 - DNA, 25 bp, probe
aactggcttcattcctagtacatct

SEQ ID NO: 151279 - DNA, 25 bp, probe
aacttgcttcagtcatcctgaacct

SEQ ID NO: 151280 - DNA, 25 bp, probe
aagcttgacgcaccaagcggaactg

SEQ ID NO: 151281 - DNA, 25 bp, probe
aactataccactgcattgggacgtc

SEQ ID NO: 151282 - DNA, 25 bp, probe
aactattccaatgttcagtggcgga

SEQ ID NO: 151283 - DNA, 25 bp, probe
aacttactctgtgttcaggtgtgga

SEQ ID NO: 151284 - DNA, 25 bp, probe
aacagttttgtggttctctgtgtag

SEQ ID NO: 151285 - DNA, 25 bp, probe
aacagttttatttgcctctactacg

SEQ ID NO: 151286 - DNA, 25 bp, probe
aacatttttttagctcatgactctg

SEQ ID NO: 151287 - DNA, 25 bp, probe
aacatctttctgataacattattat

SEQ ID NO: 151288 - DNA, 25 bp, probe
aacatttatcgagtgcctctgtttg

SEQ ID NO: 151289 - DNA, 25 bp, probe
aactgtttagggccctgatttgctg

SEQ ID NO: 151290 - DNA, 25 bp, probe
aatttcgtgaagagccaggttgctg

SEQ ID NO: 151291 - DNA, 25 bp, probe
aactgtgggaggagcccagttctct

SEQ ID NO: 151292 - DNA, 25 bp, probe
aacagggagggattggtagctttct

SEQ ID NO: 151293 - DNA, 25 bp, probe
aacaggagggtgctgtgtgagcatt

SEQ ID NO: 151294 - DNA, 25 bp, probe
aacattattagtctgtgggtttaga

SEQ ID NO: 151295 - DNA, 25 bp, probe
aacattattagtctgtgggtttaga

SEQ ID NO: 151296 - DNA, 25 bp, probe
aacattcttcgatctctgggattta

SEQ ID NO: 151297 - DNA, 25 bp, probe
aacattcttcgatctctgggattta

SEQ ID NO: 151298 - DNA, 25 bp, probe
aacattgctgtcaggtggaaatttc

SEQ ID NO: 151299 - DNA, 25 bp, probe
aacatatctctcaaggattgtaatt

SEQ ID NO: 151300 - DNA, 25 bp, probe
aacatatgctgtcatgattgtgcta

SEQ ID NO: 151301 - DNA, 25 bp, probe
aacatcagcattcagagtagcaact

SEQ ID NO: 151302 - DNA, 25 bp, probe
aactcagcaatggcagattatcgac

SEQ ID NO: 151303 - DNA, 25 bp, probe
aactatgcagcaagtatctataatc

SEQ ID NO: 151304 - DNA, 25 bp, probe
aactatcaaagcttccactttaaca

SEQ ID NO: 151305 - DNA, 25 bp, probe
aactatcaaagcttccactttaaca

SEQ ID NO: 151306 - DNA, 25 bp, probe
aacaccaaaacctctgtcagaacac

SEQ ID NO: 151307 - DNA, 25 bp, probe
aacggacaaaactctggcaccatcc

SEQ ID NO: 151308 - DNA, 25 bp, probe
aacggacaaaactctggcaccatcc

SEQ ID NO: 151309 - DNA, 25 bp, probe
aacattaagtattccttggcccagc

SEQ ID NO: 151310 - DNA, 25 bp, probe
aacatttgagtatccgattcgccat

SEQ ID NO: 151311 - DNA, 25 bp, probe
aacttagaagaagcagataaccaaa

SEQ ID NO: 151312 - DNA, 25 bp, probe
aactctggggactgggaacccatga

SEQ ID NO: 151313 - DNA, 25 bp, probe
aacttcgggagctcggtaccagagt

SEQ ID NO: 151314 - DNA, 25 bp, probe
aacttcgtggaggccgtgtccaaag

SEQ ID NO: 151315 - DNA, 25 bp, probe
aacattctggtagctcagttaataa

SEQ ID NO: 151316 - DNA, 25 bp, probe
aacattctggtagctcagttaataa

SEQ ID NO: 151317 - DNA, 25 bp, probe
aacatgttattagcacgttgagctg

SEQ ID NO: 151318 - DNA, 25 bp, probe
aacagttagagggcacttgatgagt

SEQ ID NO: 151319 - DNA, 25 bp, probe
aacagttagagggcacttgatgagt

SEQ ID NO: 151320 - DNA, 25 bp, probe
aacagttagagtaggttgctatggt

SEQ ID NO: 151321 - DNA, 25 bp, probe
aacagctttgctatgtgcttcgcat

SEQ ID NO: 151322 - DNA, 25 bp, probe
aacagctttgctatgtgcttcgcat

SEQ ID NO: 151323 - DNA, 25 bp, probe
aacagctgtctcaatccagttctct

SEQ ID NO: 151324 - DNA, 25 bp, probe
aacagctgtctcaatccagttctct

SEQ ID NO: 151325 - DNA, 25 bp, probe
aacagatatccatcatgcacttgct

SEQ ID NO: 151326 - DNA, 25 bp, probe
aacatgattccacagcccatgatgt

SEQ ID NO: 151327 - DNA, 25 bp, probe
aacatattcttgcagcccatcagat

SEQ ID NO: 151328 - DNA, 25 bp, probe
aacttgatcctgccacctataaatc

SEQ ID NO: 151329 - DNA, 25 bp, probe
aacttgatcctgcgtaaccagatcc

SEQ ID NO: 151330 - DNA, 25 bp, probe
aacttctcttcatgtatcaaatacc

SEQ ID NO: 151331 - DNA, 25 bp, probe
aactatcttgtgtgattaacttatt

SEQ ID NO: 151332 - DNA, 25 bp, probe
aactgttttaaatggtcttcatgcc

SEQ ID NO: 151333 - DNA, 25 bp, probe
aactttaaatatgcaggccttcgtg

SEQ ID NO: 151334 - DNA, 25 bp, probe
aacttataatatctcccatcccagt

SEQ ID NO: 151335 - DNA, 25 bp, probe
aactttatgaacttcaccaccacta

SEQ ID NO: 151336 - DNA, 25 bp, probe
aactactaaatattacacctacgag

SEQ ID NO: 151337 - DNA, 25 bp, probe
aagctccataaatgtcaccttgggg

SEQ ID NO: 151338 - DNA, 25 bp, probe
aactcgacaatatggccagctaatg

SEQ ID NO: 151339 - DNA, 25 bp, probe
aactaatacagctgagctatgtagt

SEQ ID NO: 151340 - DNA, 25 bp, probe
aacatataaccacccatatctatcc

SEQ ID NO: 151341 - DNA, 25 bp, probe
aacatataaccacccatatctatcc

SEQ ID NO: 151342 - DNA, 25 bp, probe
aacagaaatccacgctcaatctcag

SEQ ID NO: 151343 - DNA, 25 bp, probe
aacagaaatccacgctcaatctcag

SEQ ID NO: 151344 - DNA, 25 bp, probe
aacagaatttcatgcacaatccaaa

SEQ ID NO: 151345 - DNA, 25 bp, probe
aacagaactcgatgcactgacctgc

SEQ ID NO: 151346 - DNA, 25 bp, probe
aacaggatacgatgactgacactca

SEQ ID NO: 151347 - DNA, 25 bp, probe
aacaggatacgatgactgacactca

SEQ ID NO: 151348 - DNA, 25 bp, probe
caaacaaacctagctaactgccttc

SEQ ID NO: 151349 - DNA, 25 bp, probe
aaccaaaatgtgaccataactgttt

SEQ ID NO: 151350 - DNA, 25 bp, probe
aacatcaaaatgtatccaagccatt

SEQ ID NO: 151351 - DNA, 25 bp, probe
aacagataaatgtaacaaccagtca

SEQ ID NO: 151352 - DNA, 25 bp, probe
aacagataaatgtaacaaccagtca

SEQ ID NO: 151353 - DNA, 25 bp, probe
aagaatgcacaagaaccacaattaa

SEQ ID NO: 151354 - DNA, 25 bp, probe
aacatatgacctgaaacaactctag

SEQ ID NO: 151355 - DNA, 25 bp, probe
aacatatgacctgaaacaactctag

SEQ ID NO: 151356 - DNA, 25 bp, probe
aacagatgaccgtgtacaataccgt

SEQ ID NO: 151357 - DNA, 25 bp, probe
aacagcagaccctctatcaaagctc

SEQ ID NO: 151358 - DNA, 25 bp, probe
aacatcagacctgtcttccaaggag

SEQ ID NO: 151359 - DNA, 25 bp, probe
aacatagaccagtctgattttgaag

SEQ ID NO: 151360 - DNA, 25 bp, probe
aacatcaggcactttggttaatagt

SEQ ID NO: 151361 - DNA, 25 bp, probe
aacatcaggcactttggttaatagt

SEQ ID NO: 151362 - DNA, 25 bp, probe
aacagcaagcaacttttgtatttgg

SEQ ID NO: 151363 - DNA, 25 bp, probe
aacagcaaaatgcccttggcactgg

SEQ ID NO: 151364 - DNA, 25 bp, probe
aacagttactcacctgtggcttctt

SEQ ID NO: 151365 - DNA, 25 bp, probe
aacaggtagcatagctctgtacatc

SEQ ID NO: 151366 - DNA, 25 bp, probe
aacgagtagctcattttctgccgat

SEQ ID NO: 151367 - DNA, 25 bp, probe
aactttgcagttcttacaccgtttg

SEQ ID NO: 151368 - DNA, 25 bp, probe
aactttgcagttcttacaccgtttg

SEQ ID NO: 151369 - DNA, 25 bp, probe
aacttggcagtttctaacttgtgtt

SEQ ID NO: 151370 - DNA, 25 bp, probe
aactttcagtttaaattgtgtacat

SEQ ID NO: 151371 - DNA, 25 bp, probe
aaccaatccttccacatactgttaa

SEQ ID NO: 151372 - DNA, 25 bp, probe
aactaacattttgaacgttgagaca

SEQ ID NO: 151373 - DNA, 25 bp, probe
aacccacttattgataccttaccat

SEQ ID NO: 151374 - DNA, 25 bp, probe
aaccccattatctataacctactgt

SEQ ID NO: 151375 - DNA, 25 bp, probe
aaccccattatctataacctactgt

SEQ ID NO: 151376 - DNA, 25 bp, probe
aactaccaccaaattatccaactgt

SEQ ID NO: 151377 - DNA, 25 bp, probe
aacttctccgcaagttgtcctattt

SEQ ID NO: 151378 - DNA, 25 bp, probe
aacttatctactggatttccgtagt

SEQ ID NO: 151379 - DNA, 25 bp, probe
aactttgcgacaggtgctgttccta

SEQ ID NO: 151380 - DNA, 25 bp, probe
aactttgcgacaggtgctgttccta

SEQ ID NO: 151381 - DNA, 25 bp, probe
aactatgcatgccaaggggttaatg

SEQ ID NO: 151382 - DNA, 25 bp, probe
aactatgctgcaccagaagtaattt

SEQ ID NO: 151383 - DNA, 25 bp, probe
aactaggcatcatacgtgactgtag

SEQ ID NO: 151384 - DNA, 25 bp, probe
aactagctctgatcctaacaggcca

SEQ ID NO: 151385 - DNA, 25 bp, probe
aactatgctgtgtctactaactggg

SEQ ID NO: 151386 - DNA, 25 bp, probe
aactatgctgtgtctactaactggg

SEQ ID NO: 151387 - DNA, 25 bp, probe
aactttgtgtctcggcaacataagg

SEQ ID NO: 151388 - DNA, 25 bp, probe
aactttgtgtctcggcaacataagg

SEQ ID NO: 151389 - DNA, 25 bp, probe
aactttaccatgctcaatgaaaagg

SEQ ID NO: 151390 - DNA, 25 bp, probe
aacttctaaaggtcaatatatcatc

SEQ ID NO: 151391 - DNA, 25 bp, probe
aagctttaacagactaagttgctaa

SEQ ID NO: 151392 - DNA, 25 bp, probe
aacatgctctacatgcctaatgttt

SEQ ID NO: 151393 - DNA, 25 bp, probe
aacagattcatttgcttaattttca

SEQ ID NO: 151394 - DNA, 25 bp, probe
aacagattgtttatagagtgatttt

SEQ ID NO: 151395 - DNA, 25 bp, probe
aacagatcttacaactgagagtgat

SEQ ID NO: 151396 - DNA, 25 bp, probe
aacatgctttcctagctgaagtcat

SEQ ID NO: 151397 - DNA, 25 bp, probe
aacatgctttcctagctgaagtcat

SEQ ID NO: 151398 - DNA, 25 bp, probe
aactgcttcatttggcaacattctg

SEQ ID NO: 151399 - DNA, 25 bp, probe
aacatcgtcatggtgacccagtgtg

SEQ ID NO: 151400 - DNA, 25 bp, probe
aacatcgttactacatccagattcc

SEQ ID NO: 151401 - DNA, 25 bp, probe
aacatctttgacactctgcagactg

SEQ ID NO: 151402 - DNA, 25 bp, probe
aacattttcattaccagcaacttga

SEQ ID NO: 151403 - DNA, 25 bp, probe
aacatcatattcagcccatcacgct

SEQ ID NO: 151404 - DNA, 25 bp, probe
aacatacacagatgccttgcacgtt

SEQ ID NO: 151405 - DNA, 25 bp, probe
aacatcaaagattaggtgaggttta

SEQ ID NO: 151406 - DNA, 25 bp, probe
aacatcatcaaagtaggggacctag

SEQ ID NO: 151407 - DNA, 25 bp, probe
aacatcatcaaagtaggggacctag

SEQ ID NO: 151408 - DNA, 25 bp, probe
aacatcacacaataggaaacaccac

SEQ ID NO: 151409 - DNA, 25 bp, probe
aacatgtcacaacaataacctccat

SEQ ID NO: 151410 - DNA, 25 bp, probe
aacttcacacagcaacacatgccat

SEQ ID NO: 151411 - DNA, 25 bp, probe
aacttcatcaagtaaggctgccatg

SEQ ID NO: 151412 - DNA, 25 bp, probe
aacttgaccagattagctgtcctgt

SEQ ID NO: 151413 - DNA, 25 bp, probe
aactgaacggcacagtgccctgcct

SEQ ID NO: 151414 - DNA, 25 bp, probe
aactgaacggcacagtgccctgcct

SEQ ID NO: 151415 - DNA, 25 bp, probe
aactaatgccgacgtgatgaccgcc

SEQ ID NO: 151416 - DNA, 25 bp, probe
aactaatgccgacgtgatgaccgcc

SEQ ID NO: 151417 - DNA, 25 bp, probe
aactcagtcaaatgtacccagccta

SEQ ID NO: 151418 - DNA, 25 bp, probe
aactgacctcagagtaccacagaaa

SEQ ID NO: 151419 - DNA, 25 bp, probe
aacttactcatcagtcacctgggag

SEQ ID NO: 151420 - DNA, 25 bp, probe
aacttactcatcagtcacctgggag

SEQ ID NO: 151421 - DNA, 25 bp, probe
aactttgtagttgacgctgggaatg

SEQ ID NO: 151422 - DNA, 25 bp, probe
aacttctgtactacaacgctggtga

SEQ ID NO: 151423 - DNA, 25 bp, probe
aactgagcttcagacagggggtggg

SEQ ID NO: 151424 - DNA, 25 bp, probe
aacgacttctggagaatggtctggg

SEQ ID NO: 151425 - DNA, 25 bp, probe
aactacatccggggctatggtgggg

SEQ ID NO: 151426 - DNA, 25 bp, probe
aactacatccggggctatggtgggg

SEQ ID NO: 151427 - DNA, 25 bp, probe
aactagggctgcgaatctagaggag

SEQ ID NO: 151428 - DNA, 25 bp, probe
aactgaggccatgattaagagggac

SEQ ID NO: 151429 - DNA, 25 bp, probe
aactatggactttttaagcctaatg

SEQ ID NO: 151430 - DNA, 25 bp, probe
aactgttcctgttttgaagtgctat

SEQ ID NO: 151431 - DNA, 25 bp, probe
aactttcatcagaaattcacgtccc

SEQ ID NO: 151432 - DNA, 25 bp, probe
aacttgttagctgagctcacgtccc

SEQ ID NO: 151433 - DNA, 25 bp, probe
aacttgggcaaggcgatgcaggtcc

SEQ ID NO: 151434 - DNA, 25 bp, probe
aacttggacaaacggcggagcctga

SEQ ID NO: 151435 - DNA, 25 bp, probe
aacagggacaacctggggatctctg

SEQ ID NO: 151436 - DNA, 25 bp, probe
caacgtggacttgcggaggtccctt

SEQ ID NO: 151437 - DNA, 25 bp, probe
aacaggagacttgcaggagaccgtg

SEQ ID NO: 151438 - DNA, 25 bp, probe
aacaggaactgaggcgatagaattg

SEQ ID NO: 151439 - DNA, 25 bp, probe
aacaggatggctttctgtagccaca

SEQ ID NO: 151440 - DNA, 25 bp, probe
aacaggaatgcttctctgtcaaaac

SEQ ID NO: 151441 - DNA, 25 bp, probe
aacaggatttcaatatgtacagaat

SEQ ID NO: 151442 - DNA, 25 bp, probe
aacagatgatccatttgaacagttg

SEQ ID NO: 151443 - DNA, 25 bp, probe
aactgctatcctttaccagagttgg

SEQ ID NO: 151444 - DNA, 25 bp, probe
aactgtatcacctttgccaagtaag

SEQ ID NO: 151445 - DNA, 25 bp, probe
aacagtataaccattcatttaaact

SEQ ID NO: 151446 - DNA, 25 bp, probe
aacagtatattacctctgtataaaa

SEQ ID NO: 151447 - DNA, 25 bp, probe
aactttctggtgaccggataaagca

SEQ ID NO: 151448 - DNA, 25 bp, probe
aacttcctgagaacattgctgattc

SEQ ID NO: 151449 - DNA, 25 bp, probe
aactgtcctgcaattaggtatccga

SEQ ID NO: 151450 - DNA, 25 bp, probe
aagctgtactggttggtgacccaaa

SEQ ID NO: 151451 - DNA, 25 bp, probe
aaccatgatcttgagggacccaaca

SEQ ID NO: 151452 - DNA, 25 bp, probe
aactatattccctggatcgagaaca

SEQ ID NO: 151453 - DNA, 25 bp, probe
aactactgtggcattggcatcgacg

SEQ ID NO: 151454 - DNA, 25 bp, probe
aactcactgtgtattctcttggagc

SEQ ID NO: 151455 - DNA, 25 bp, probe
aactcactggtcaatgctgctgtgt

SEQ ID NO: 151456 - DNA, 25 bp, probe
aactcactggtcaatgctgctgtgt

SEQ ID NO: 151457 - DNA, 25 bp, probe
aactaaggctcattcatcaggttaa

SEQ ID NO: 151458 - DNA, 25 bp, probe
aactgagattcctatacagggactt

SEQ ID NO: 151459 - DNA, 25 bp, probe
aactgagattcctatacagggactt

SEQ ID NO: 151460 - DNA, 25 bp, probe
aacgcagtgtctcaaatgtaggtcg

SEQ ID NO: 151461 - DNA, 25 bp, probe
aacgcagtgtctcaaatgtaggtcg

SEQ ID NO: 151462 - DNA, 25 bp, probe
aactacattttcaagattaggccat

SEQ ID NO: 151463 - DNA, 25 bp, probe
aacatgatattttatagcttgggaa

SEQ ID NO: 151464 - DNA, 25 bp, probe
aacatatttctattgcagcttttac

SEQ ID NO: 151465 - DNA, 25 bp, probe
aacatagtccgattgcgttatttct

SEQ ID NO: 151466 - DNA, 25 bp, probe
aactagtgttttgctccatttctta

SEQ ID NO: 151467 - DNA, 25 bp, probe
aactgagtgactgtacttgattttt

SEQ ID NO: 151468 - DNA, 25 bp, probe
aactataagcccactgttaatattc

SEQ ID NO: 151469 - DNA, 25 bp, probe
aactatcatagccctgcttactaaa

SEQ ID NO: 151470 - DNA, 25 bp, probe
aactacatatttctctggttgaaga

SEQ ID NO: 151471 - DNA, 25 bp, probe
aactgcaaactgctggtccataagc

SEQ ID NO: 151472 - DNA, 25 bp, probe
aacatcctactggtagatggaacag

SEQ ID NO: 151473 - DNA, 25 bp, probe
aacatccttgttggagtaagacagt

SEQ ID NO: 151474 - DNA, 25 bp, probe
aacatttgatgttagcgtataaatt

SEQ ID NO: 151475 - DNA, 25 bp, probe
aactgagtatgttcagggtaattta

SEQ ID NO: 151476 - DNA, 25 bp, probe
aacatggtcatttccggagtacttg

SEQ ID NO: 151477 - DNA, 25 bp, probe
aacatggtcttggccggagcaattt

SEQ ID NO: 151478 - DNA, 25 bp, probe
aacaggtcttccagatgtgtaatac

SEQ ID NO: 151479 - DNA, 25 bp, probe
aacgttcaagcagttggtagaagac

SEQ ID NO: 151480 - DNA, 25 bp, probe
aagagttaacatttggctatactga

SEQ ID NO: 151481 - DNA, 25 bp, probe
aacagtatcaacactggcttctccc

SEQ ID NO: 151482 - DNA, 25 bp, probe
aacagtattgacatacccacatccc

SEQ ID NO: 151483 - DNA, 25 bp, probe
aacagtattgacatacccacatccc

SEQ ID NO: 151484 - DNA, 25 bp, probe
aactaattgactaacaccaccaacg

SEQ ID NO: 151485 - DNA, 25 bp, probe
aacattatctgaccaatagtacaca

SEQ ID NO: 151486 - DNA, 25 bp, probe
aacataatgctgataaactgacata

SEQ ID NO: 151487 - DNA, 25 bp, probe
aacataatttcccacatctgagctg

SEQ ID NO: 151488 - DNA, 25 bp, probe
aacagtttataccaatacactgcta

SEQ ID NO: 151489 - DNA, 25 bp, probe
aacctgggattccagaagatctctg

SEQ ID NO: 151490 - DNA, 25 bp, probe
aacatcctggtctcagaggacctgg

SEQ ID NO: 151491 - DNA, 25 bp, probe
aacatcctggtagctgaggggcgga

SEQ ID NO: 151492 - DNA, 25 bp, probe
aactactgggcatgtgctttgggga

SEQ ID NO: 151493 - DNA, 25 bp, probe
aactgccgttgatgtgtggagggga

SEQ ID NO: 151494 - DNA, 25 bp, probe
aacatcggatactggggcggtggct

SEQ ID NO: 151495 - DNA, 25 bp, probe
aacagtggatatctggtccgtgggc

SEQ ID NO: 151496 - DNA, 25 bp, probe
aacatgcttcatcgtcggtccgggc

SEQ ID NO: 151497 - DNA, 25 bp, probe
aactttattcatgggctgcggagga

SEQ ID NO: 151498 - DNA, 25 bp, probe
aacagtgcaatcctttctgtggatg

SEQ ID NO: 151499 - DNA, 25 bp, probe
aacagtgcaatcctttctgtggatg

SEQ ID NO: 151500 - DNA, 25 bp, probe
aacagtgactgctactttgggaatg

SEQ ID NO: 151501 - DNA, 25 bp, probe
aactctactgtaccttcaataatgg

SEQ ID NO: 151502 - DNA, 25 bp, probe
aactttgctgtcgtgcttataatat

SEQ ID NO: 151503 - DNA, 25 bp, probe
aactttgctgtcgtgcttataatat

SEQ ID NO: 151504 - DNA, 25 bp, probe
aacagtcactgtcctctacataaag

SEQ ID NO: 151505 - DNA, 25 bp, probe
aacatgtactgttctcttcttgaac

SEQ ID NO: 151506 - DNA, 25 bp, probe
aagcattacctttctacattccaga

SEQ ID NO: 151507 - DNA, 25 bp, probe
aacataattatttctaacactagct

SEQ ID NO: 151508 - DNA, 25 bp, probe
aacgagggataattcaaactgacaa

SEQ ID NO: 151509 - DNA, 25 bp, probe
aacgagggataattcaaactgacaa

SEQ ID NO: 151510 - DNA, 25 bp, probe
aagccagggaatttacaataacatt

SEQ ID NO: 151511 - DNA, 25 bp, probe
aagccagggaatttacaataacatt

SEQ ID NO: 151512 - DNA, 25 bp, probe
aactaaggactatttattgataatg

SEQ ID NO: 151513 - DNA, 25 bp, probe
aactgaatgctagtctgttttgttt

SEQ ID NO: 151514 - DNA, 25 bp, probe
aacttcatgtgagctattggagttt

SEQ ID NO: 151515 - DNA, 25 bp, probe
aacatttcatagacttttgcacaat

SEQ ID NO: 151516 - DNA, 25 bp, probe
aacatcttctggtgacttcaaattc

SEQ ID NO: 151517 - DNA, 25 bp, probe
aacatatttagagcacttaatggtc

SEQ ID NO: 151518 - DNA, 25 bp, probe
aacatgtattaacattccaatgaac

SEQ ID NO: 151519 - DNA, 25 bp, probe
aacattcagaaccactttcaagatg

SEQ ID NO: 151520 - DNA, 25 bp, probe
aacttcagattcaactgggcacata

SEQ ID NO: 151521 - DNA, 25 bp, probe
aacttcagattcaactgggcacata

SEQ ID NO: 151522 - DNA, 25 bp, probe
aacttcaagtaagcggcaacaaggg

SEQ ID NO: 151523 - DNA, 25 bp, probe
aacttcaagaccacagaaaatcagg

SEQ ID NO: 151524 - DNA, 25 bp, probe
aacttgccagatagaaaagacttaa

SEQ ID NO: 151525 - DNA, 25 bp, probe
aacttcaccactcaagaactgtcaa

SEQ ID NO: 151526 - DNA, 25 bp, probe
aactgctttcctgaatggggtcaca

SEQ ID NO: 151527 - DNA, 25 bp, probe
aacatctttttctactcgagttaca

SEQ ID NO: 151528 - DNA, 25 bp, probe
aagcagttttcctctatggctttgc

SEQ ID NO: 151529 - DNA, 25 bp, probe
tgaactttttactcttggtcttgcc

SEQ ID NO: 151530 - DNA, 25 bp, probe
aacgtgttctaatcttaggcgcttc

SEQ ID NO: 151531 - DNA, 25 bp, probe
aacggccttccatctgaaaggcaga

SEQ ID NO: 151532 - DNA, 25 bp, probe
gaaccgacttttctaaagctctgaa

SEQ ID NO: 151533 - DNA, 25 bp, probe
gaaccgacttttctaaagctctgaa

SEQ ID NO: 151534 - DNA, 25 bp, probe
aactcggcacctgttaaacttggag

SEQ ID NO: 151535 - DNA, 25 bp, probe
aactcgggcgtattcaacaaccagg

SEQ ID NO: 151536 - DNA, 25 bp, probe
aactcgggcgtattcaacaaccagg

SEQ ID NO: 151537 - DNA, 25 bp, probe
aactcggaggtaattacagcccttg

SEQ ID NO: 151538 - DNA, 25 bp, probe
aactgaacatggattattagaactc

SEQ ID NO: 151539 - DNA, 25 bp, probe
aactacgttggcatttcagaaatcc

SEQ ID NO: 151540 - DNA, 25 bp, probe
aacgtcctttgcattatctgatcaa

SEQ ID NO: 151541 - DNA, 25 bp, probe
aagacaccttgcctataattaaaat

SEQ ID NO: 151542 - DNA, 25 bp, probe
aacatcccaggagaaattgaaagaa

SEQ ID NO: 151543 - DNA, 25 bp, probe
aactgctcccgtggaagattaaagg

SEQ ID NO: 151544 - DNA, 25 bp, probe
aacttctccctcaagaacacaaacg

SEQ ID NO: 151545 - DNA, 25 bp, probe
aactttgcctcgaaaaagaatgtca

SEQ ID NO: 151546 - DNA, 25 bp, probe
aacatctatcctatgaataagaacc

SEQ ID NO: 151547 - DNA, 25 bp, probe
aacttatccatatgcatgatggaaa

SEQ ID NO: 151548 - DNA, 25 bp, probe
aacttcatttgatgctaaataggag

SEQ ID NO: 151549 - DNA, 25 bp, probe
aacggcgatggatgtcaaaagtggt

SEQ ID NO: 151550 - DNA, 25 bp, probe
aacggcgatggatgtcaaaagtggt

SEQ ID NO: 151551 - DNA, 25 bp, probe
aacttcagagtgcagtctacaactt

SEQ ID NO: 151552 - DNA, 25 bp, probe
aactactagtgctgcatttaactgg

SEQ ID NO: 151553 - DNA, 25 bp, probe
aactacgggcatctagaaattgtcc

SEQ ID NO: 151554 - DNA, 25 bp, probe
aactcctgggctgaaacaatcctcc

SEQ ID NO: 151555 - DNA, 25 bp, probe
aacattctgggtaaatataaggagc

SEQ ID NO: 151556 - DNA, 25 bp, probe
aactcatcttctttcaatataattg

SEQ ID NO: 151557 - DNA, 25 bp, probe
aacatatgcagttattccactaaat

SEQ ID NO: 151558 - DNA, 25 bp, probe
aacatcatgagatcttcaacttact

SEQ ID NO: 151559 - DNA, 25 bp, probe
aacatctggaaattaccttaatatg

SEQ ID NO: 151560 - DNA, 25 bp, probe
aacattggatagtctagtctctaaa

SEQ ID NO: 151561 - DNA, 25 bp, probe
aacatttcataattaccgcttcaaa

SEQ ID NO: 151562 - DNA, 25 bp, probe
aacgttctgagatcccctttaggat

SEQ ID NO: 151563 - DNA, 25 bp, probe
aactttcttgtatcctttgaggaga

SEQ ID NO: 151564 - DNA, 25 bp, probe
aactttctgattttggcttggagag

SEQ ID NO: 151565 - DNA, 25 bp, probe
aacattccgtgattaagctttgtga

SEQ ID NO: 151566 - DNA, 25 bp, probe
aacattccagtgttcaactgtttta

SEQ ID NO: 151567 - DNA, 25 bp, probe
aacatacaagagtaccattgttcct

SEQ ID NO: 151568 - DNA, 25 bp, probe
aacatacaagagtaccattgttcct

SEQ ID NO: 151569 - DNA, 25 bp, probe
aacatgaccagaaatcaaagatgtc

SEQ ID NO: 151570 - DNA, 25 bp, probe
aacatgacactgtgcaggaatgagt

SEQ ID NO: 151571 - DNA, 25 bp, probe
aacatcaagcagttcatggcgagag

SEQ ID NO: 151572 - DNA, 25 bp, probe
aacatgaccatggaagctgagaggc

SEQ ID NO: 151573 - DNA, 25 bp, probe
aacattgcctaacagatgcagcagc

SEQ ID NO: 151574 - DNA, 25 bp, probe
aacattgctgattcttcgtgcacag

SEQ ID NO: 151575 - DNA, 25 bp, probe
aacatcagctgcagatcttgtgaca

SEQ ID NO: 151576 - DNA, 25 bp, probe
aactcatgccattgctgatggtata

SEQ ID NO: 151577 - DNA, 25 bp, probe
aacatcgcaggctgatggtgcttta

SEQ ID NO: 151578 - DNA, 25 bp, probe
aacattgcagaaaaagtgcctacag

SEQ ID NO: 151579 - DNA, 25 bp, probe
aacattgcagaaaaagtgcctacag

SEQ ID NO: 151580 - DNA, 25 bp, probe
aacttgcagatgatatgtgctgcct

SEQ ID NO: 151581 - DNA, 25 bp, probe
aacttcatgtaaatgtcgcttcttc

SEQ ID NO: 151582 - DNA, 25 bp, probe
aacattcggaaagccttgtcatttg

SEQ ID NO: 151583 - DNA, 25 bp, probe
aactatcgtggctccacgggctttg

SEQ ID NO: 151584 - DNA, 25 bp, probe
aacccatggtgggacacggagtttg

SEQ ID NO: 151585 - DNA, 25 bp, probe
aactggccaggtgaatctggggctt

SEQ ID NO: 151586 - DNA, 25 bp, probe
aacttcctgatgggtactgggcgtc

SEQ ID NO: 151587 - DNA, 25 bp, probe
aacgtcatcgggcttctggacgtct

SEQ ID NO: 151588 - DNA, 25 bp, probe
aacgtcacgggcatcgtacaggtgt

SEQ ID NO: 151589 - DNA, 25 bp, probe
aacgcccggatctcagtcaaaggca

SEQ ID NO: 151590 - DNA, 25 bp, probe
caacaccggaacccagaaaactgca

SEQ ID NO: 151591 - DNA, 25 bp, probe
caacaccggaacccagaaaactgca

SEQ ID NO: 151592 - DNA, 25 bp, probe
aacttccgaacacagaagctgtctt

SEQ ID NO: 151593 - DNA, 25 bp, probe
aacatttccaaataactgcagcact

SEQ ID NO: 151594 - DNA, 25 bp, probe
aacattctctccgtgaaatcatggt

SEQ ID NO: 151595 - DNA, 25 bp, probe
aacttgctcatgaccgacaagggtt

SEQ ID NO: 151596 - DNA, 25 bp, probe
aacctttatccctacagggtatctg

SEQ ID NO: 151597 - DNA, 25 bp, probe
aacctttgaagttccagaaattgtg

SEQ ID NO: 151598 - DNA, 25 bp, probe
aactttcaaacattctcaaactttg

SEQ ID NO: 151599 - DNA, 25 bp, probe
aactttctcagggtcatcagtgact

SEQ ID NO: 151600 - DNA, 25 bp, probe
aacatgttctactggatcatctaca

SEQ ID NO: 151601 - DNA, 25 bp, probe
aacattctctcatagaacattgatc

SEQ ID NO: 151602 - DNA, 25 bp, probe
aacttcgtcatccaaatatagtcag

SEQ ID NO: 151603 - DNA, 25 bp, probe
aactacagtagtcacttctgctaga

SEQ ID NO: 151604 - DNA, 25 bp, probe
aactacaaatcactaccgctttgca

SEQ ID NO: 151605 - DNA, 25 bp, probe
aactagcagcaaagtaatccccgcc

SEQ ID NO: 151606 - DNA, 25 bp, probe
aacatgctgcagcaagaggaccccg

SEQ ID NO: 151607 - DNA, 25 bp, probe
aacatgctgcagcaagaggaccccg

SEQ ID NO: 151608 - DNA, 25 bp, probe
aactcatgcgcaaggggaacctgca

SEQ ID NO: 151609 - DNA, 25 bp, probe
aactcatgactctgggccagactcc

SEQ ID NO: 151610 - DNA, 25 bp, probe
aactaactgattttgccatggcaca

SEQ ID NO: 151611 - DNA, 25 bp, probe
aactaacagtaatttgatggctgca

SEQ ID NO: 151612 - DNA, 25 bp, probe
aactaacagtaatttgatggctgca

SEQ ID NO: 151613 - DNA, 25 bp, probe
aacatcacactttaatttggagcat

SEQ ID NO: 151614 - DNA, 25 bp, probe
aacatcacactttaatttggagcat

SEQ ID NO: 151615 - DNA, 25 bp, probe
aacatctcagccgtgaactacgact

SEQ ID NO: 151616 - DNA, 25 bp, probe
aacatctactcagcagactactaca

SEQ ID NO: 151617 - DNA, 25 bp, probe
aacatctactgagctaatagccact

SEQ ID NO: 151618 - DNA, 25 bp, probe
aacatcaagggcatccataccctcc

SEQ ID NO: 151619 - DNA, 25 bp, probe
aacatcaagggcatccataccctcc

SEQ ID NO: 151620 - DNA, 25 bp, probe
aactaaggacctcattcatcgtctc

SEQ ID NO: 151621 - DNA, 25 bp, probe
aactaaggacctcattcatcgtctc

SEQ ID NO: 151622 - DNA, 25 bp, probe
aactcacggacttcaatttcctcat

SEQ ID NO: 151623 - DNA, 25 bp, probe
aactcaaggactgctattctccttc

SEQ ID NO: 151624 - DNA, 25 bp, probe
aactctatggtagaatttcccatgc

SEQ ID NO: 151625 - DNA, 25 bp, probe
aacttcaagaaaaaattctcacagg

SEQ ID NO: 151626 - DNA, 25 bp, probe
aactgtgaagtactaactttccaag

SEQ ID NO: 151627 - DNA, 25 bp, probe
aactgcttagcccaaactgagtaca

SEQ ID NO: 151628 - DNA, 25 bp, probe
caactgcttagcacccctggccaag

SEQ ID NO: 151629 - DNA, 25 bp, probe
aactggccctacggctcgggccagt

SEQ ID NO: 151630 - DNA, 25 bp, probe
aacttgcctctagagtaggccaaat

SEQ ID NO: 151631 - DNA, 25 bp, probe
aacttctccaaggactctggcatca

SEQ ID NO: 151632 - DNA, 25 bp, probe
aacttctccgtgaacctgctgaaga

SEQ ID NO: 151633 - DNA, 25 bp, probe
aacttctccgtgaacctgctgaaga

SEQ ID NO: 151634 - DNA, 25 bp, probe
aactccataccgaactccgaagagt

SEQ ID NO: 151635 - DNA, 25 bp, probe
aactcgacacaacatcatcctgagt

SEQ ID NO: 151636 - DNA, 25 bp, probe
aacatcgaagcatctgaatcatgtc

SEQ ID NO: 151637 - DNA, 25 bp, probe
aacatcccagatactatcacatgca

SEQ ID NO: 151638 - DNA, 25 bp, probe
aacatagagcagtacattcacgatc

SEQ ID NO: 151639 - DNA, 25 bp, probe
aacatatgcacactacttcgatctc

SEQ ID NO: 151640 - DNA, 25 bp, probe
aacatatccagctgcgggatctcct

SEQ ID NO: 151641 - DNA, 25 bp, probe
aacttcttgtgggagatactcagta

SEQ ID NO: 151642 - DNA, 25 bp, probe
aacattttatggcagtcttatgtgc

SEQ ID NO: 151643 - DNA, 25 bp, probe
aacatttgtgcagaagtatgtatgt

SEQ ID NO: 151644 - DNA, 25 bp, probe
aacattatgctggacaagaagggcc

SEQ ID NO: 151645 - DNA, 25 bp, probe
aacttcattggctacgtagtggcaa

SEQ ID NO: 151646 - DNA, 25 bp, probe
aacttgtttccaatgtttagcaaat

SEQ ID NO: 151647 - DNA, 25 bp, probe
aacttgtttccaatgtttagcaaat

SEQ ID NO: 151648 - DNA, 25 bp, probe
aacattgtctgtacaggtttcatgc

SEQ ID NO: 151649 - DNA, 25 bp, probe
aacatgctggagtacaagtcttggc

SEQ ID NO: 151650 - DNA, 25 bp, probe
aacatctgatactgtattctaagac

SEQ ID NO: 151651 - DNA, 25 bp, probe
aactctgtacgaggcttctctaacc

SEQ ID NO: 151652 - DNA, 25 bp, probe
aactgctgtatgggctctactgcca

SEQ ID NO: 151653 - DNA, 25 bp, probe
aactctgtgctgggcatttggccgg

SEQ ID NO: 151654 - DNA, 25 bp, probe
aactctgtgctgggcatttggccgg

SEQ ID NO: 151655 - DNA, 25 bp, probe
aacatctttgaacttgcaggcctag

SEQ ID NO: 151656 - DNA, 25 bp, probe
aactttgcgatacatgagcccagaa

SEQ ID NO: 151657 - DNA, 25 bp, probe
gacaacttcgtaggtagccttaact

SEQ ID NO: 151658 - DNA, 25 bp, probe
aatccttagtgagggtgccctggtc

SEQ ID NO: 151659 - DNA, 25 bp, probe
aaccggcggatgctgctgctcttcg

SEQ ID NO: 151660 - DNA, 25 bp, probe
aaccgagggctggcgttttggaatg

SEQ ID NO: 151661 - DNA, 25 bp, probe
aaccaaggtcagcgactttggcctg

SEQ ID NO: 151662 - DNA, 25 bp, probe
aactcaaggaggctgggtttctggg

SEQ ID NO: 151663 - DNA, 25 bp, probe
aacttctgaaggcatgagtgttttc

SEQ ID NO: 151664 - DNA, 25 bp, probe
aacgtttagtgcctcaggttgtcac

SEQ ID NO: 151665 - DNA, 25 bp, probe
aactctttgttgcagctgttttcca

SEQ ID NO: 151666 - DNA, 25 bp, probe
aactttttcaggacatgctatcttc

SEQ ID NO: 151667 - DNA, 25 bp, probe
aactttttcacagcagattaccatt

SEQ ID NO: 151668 - DNA, 25 bp, probe
aactaacttgatagggtctaccaat

SEQ ID NO: 151669 - DNA, 25 bp, probe
aacttactttgtgggttgcaataca

SEQ ID NO: 151670 - DNA, 25 bp, probe
aactatacttttaggtcccatgtca

SEQ ID NO: 151671 - DNA, 25 bp, probe
aactgcaactttgcaagctcccaat

SEQ ID NO: 151672 - DNA, 25 bp, probe
aacttagcttttgatgtctccaagt

SEQ ID NO: 151673 - DNA, 25 bp, probe
aactttgttttcttgattcaggctt

SEQ ID NO: 151674 - DNA, 25 bp, probe
aacttctttctatttgacttgtggt

SEQ ID NO: 151675 - DNA, 25 bp, probe
aactactttgaaattccttgatttg

SEQ ID NO: 151676 - DNA, 25 bp, probe
aacatcactttgtctatcctcattt

SEQ ID NO: 151677 - DNA, 25 bp, probe
aacatcactttgtctatcctcattt

SEQ ID NO: 151678 - DNA, 25 bp, probe
aactagctccatttacagccatttc

SEQ ID NO: 151679 - DNA, 25 bp, probe
aacgactcaaaatgacagtttcaga

SEQ ID NO: 151680 - DNA, 25 bp, probe
aacgcagtaccatggtcggaacgcc

SEQ ID NO: 151681 - DNA, 25 bp, probe
aactcagtcaacaggaaggcatcaa

SEQ ID NO: 151682 - DNA, 25 bp, probe
aactcagtcaacaggaaggcatcaa

SEQ ID NO: 151683 - DNA, 25 bp, probe
aacttggcagacactgcaagctgta

SEQ ID NO: 151684 - DNA, 25 bp, probe
aacattggagtcatagcatgtgtgt

SEQ ID NO: 151685 - DNA, 25 bp, probe
aacatctggttttcagtgtgttgag

SEQ ID NO: 151686 - DNA, 25 bp, probe
aacttgtgttctcagtgcagttctg

SEQ ID NO: 151687 - DNA, 25 bp, probe
aacgctggttagcaccgcaggtgta

SEQ ID NO: 151688 - DNA, 25 bp, probe
aactgtggccgagaaagcagggtag

SEQ ID NO: 151689 - DNA, 25 bp, probe
aactgtggcgccaagaaatgccgga

SEQ ID NO: 151690 - DNA, 25 bp, probe
aactggagtctctagatattctcag

SEQ ID NO: 151691 - DNA, 25 bp, probe
aacggcgtgcattatcaacatcata

SEQ ID NO: 151692 - DNA, 25 bp, probe
aactggcctgatctaacaatgaaaa

SEQ ID NO: 151693 - DNA, 25 bp, probe
aactgggatgatctcattaataaga

SEQ ID NO: 151694 - DNA, 25 bp, probe
aactggcaggacgtggtccagaaga

SEQ ID NO: 151695 - DNA, 25 bp, probe
aactgggatgacctgtaccacaaga

SEQ ID NO: 151696 - DNA, 25 bp, probe
aactgggatgacctgtaccacaaga

SEQ ID NO: 151697 - DNA, 25 bp, probe
aacttgaggtcacttactaaatata

SEQ ID NO: 151698 - DNA, 25 bp, probe
aacttgaattatagttctcaacaat

SEQ ID NO: 151699 - DNA, 25 bp, probe
aacgtacaaagcctgacttacaata

SEQ ID NO: 151700 - DNA, 25 bp, probe
aacgtagcaagatctgtatatgaat

SEQ ID NO: 151701 - DNA, 25 bp, probe
aacttagcacgattctgtgactgtt

SEQ ID NO: 151702 - DNA, 25 bp, probe
aactctgagacgtctcctgggatgt

SEQ ID NO: 151703 - DNA, 25 bp, probe
aacctggaccccagtgagaggcggt

SEQ ID NO: 151704 - DNA, 25 bp, probe
aactttgccgcccgagatatgaggg

SEQ ID NO: 151705 - DNA, 25 bp, probe
aacatttccgcagaagatgagtagg

SEQ ID NO: 151706 - DNA, 25 bp, probe
aagcttttcctgtaggctagtagga

SEQ ID NO: 151707 - DNA, 25 bp, probe
aacttccccatgtgtgctggggaca

SEQ ID NO: 151708 - DNA, 25 bp, probe
aactctccaccttttctaagtagtg

SEQ ID NO: 151709 - DNA, 25 bp, probe
aactttatcctattctacaagtcag

SEQ ID NO: 151710 - DNA, 25 bp, probe
aacttattttatttccatcatgtca

SEQ ID NO: 151711 - DNA, 25 bp, probe
aactgtgagtttaacaccaagtcct

SEQ ID NO: 151712 - DNA, 25 bp, probe
aactgtgtcttagaccctgttatct

SEQ ID NO: 151713 - DNA, 25 bp, probe
aactgtgtcttagaccctgttatct

SEQ ID NO: 151714 - DNA, 25 bp, probe
aacgtgtcccatgaatcttgtcata

SEQ ID NO: 151715 - DNA, 25 bp, probe
aactggatcccaaacatttgtcgga

SEQ ID NO: 151716 - DNA, 25 bp, probe
aactgagtcgcgaggcatttggaga

SEQ ID NO: 151717 - DNA, 25 bp, probe
aacatatgtgcctgatggatttgga

SEQ ID NO: 151718 - DNA, 25 bp, probe
aacttggcctaatgctaatgagatt

SEQ ID NO: 151719 - DNA, 25 bp, probe
aacataagccaaagactcaagtgta

SEQ ID NO: 151720 - DNA, 25 bp, probe
aactaaggctttactcatcagtctt

SEQ ID NO: 151721 - DNA, 25 bp, probe
aacatacaggtttctgcctcagatc

SEQ ID NO: 151722 - DNA, 25 bp, probe
aagccaaggaacagcaaccaagtac

SEQ ID NO: 151723 - DNA, 25 bp, probe
aactacgggacattcaccatcaagt

SEQ ID NO: 151724 - DNA, 25 bp, probe
aactacgggacattcaccatcaagt

SEQ ID NO: 151725 - DNA, 25 bp, probe
aactatgcagggacaatccatcaga

SEQ ID NO: 151726 - DNA, 25 bp, probe
aacttctgcgatacgaccatcaaca

SEQ ID NO: 151727 - DNA, 25 bp, probe
aacttctgcgatacgaccatcaaca

SEQ ID NO: 151728 - DNA, 25 bp, probe
aactgtgtgcagactcaataaaatc

SEQ ID NO: 151729 - DNA, 25 bp, probe
aacattcaagattatatcagcaatt

SEQ ID NO: 151730 - DNA, 25 bp, probe
aactgcatcaagatgtgacatgttt

SEQ ID NO: 151731 - DNA, 25 bp, probe
aactgcatcaagatgtgacatgttt

SEQ ID NO: 151732 - DNA, 25 bp, probe
aactgtgcatagtctccagagcttc

SEQ ID NO: 151733 - DNA, 25 bp, probe
aacttccagacgccaggctacgaga

SEQ ID NO: 151734 - DNA, 25 bp, probe
ggcaatgtaaacttccagccatcaa

SEQ ID NO: 151735 - DNA, 25 bp, probe
aacattacagtccaatggtatgctg

SEQ ID NO: 151736 - DNA, 25 bp, probe
aacattcctgtccactggaattttc

SEQ ID NO: 151737 - DNA, 25 bp, probe
aacttcctgaccgaggatcaaatcc

SEQ ID NO: 151738 - DNA, 25 bp, probe
aacatacgccagaccaggacaagat

SEQ ID NO: 151739 - DNA, 25 bp, probe
aacatcacaagctaaaagccagaga

SEQ ID NO: 151740 - DNA, 25 bp, probe
aacatacatatataccagttggtaa

SEQ ID NO: 151741 - DNA, 25 bp, probe
aactgcctaaggccctttgtgtaag

SEQ ID NO: 151742 - DNA, 25 bp, probe
aactcttcaaggtctcttttcatcc

SEQ ID NO: 151743 - DNA, 25 bp, probe
aactttccagccattttactgcagc

SEQ ID NO: 151744 - DNA, 25 bp, probe
aacttctgcaaggcagtaattcccc

SEQ ID NO: 151745 - DNA, 25 bp, probe
aactttacaacacaattgcatccca

SEQ ID NO: 151746 - DNA, 25 bp, probe
aactcttctacagaaattactctca

SEQ ID NO: 151747 - DNA, 25 bp, probe
caccaccctccagagaatttttacg

SEQ ID NO: 151748 - DNA, 25 bp, probe
cacccggtcgagctattattcttac

SEQ ID NO: 151749 - DNA, 25 bp, probe
aacctggtcgtcctcaggttcttga

SEQ ID NO: 151750 - DNA, 25 bp, probe
aactctggtggtctccttacaatga

SEQ ID NO: 151751 - DNA, 25 bp, probe
aactattgtaatctccctcaaagaa

SEQ ID NO: 151752 - DNA, 25 bp, probe
aattctcgagaaccctttaatagca

SEQ ID NO: 151753 - DNA, 25 bp, probe
aaccagggaacccatttctctagca

SEQ ID NO: 151754 - DNA, 25 bp, probe
aactgcatggtcgcccatgatttta

SEQ ID NO: 151755 - DNA, 25 bp, probe
aactacagtccctcatatgttggta

SEQ ID NO: 151756 - DNA, 25 bp, probe
aactacagtccccaggagatgtgga

SEQ ID NO: 151757 - DNA, 25 bp, probe
aactaaaccgagggctgagctgatg

SEQ ID NO: 151758 - DNA, 25 bp, probe
aaccctacctacggtgacagatgtc

SEQ ID NO: 151759 - DNA, 25 bp, probe
aaccttaccttcaaggagcaagtga

SEQ ID NO: 151760 - DNA, 25 bp, probe
aactctaccactttggggcaagcta

SEQ ID NO: 151761 - DNA, 25 bp, probe
aacttcatcaaggtgttgggcaaag

SEQ ID NO: 151762 - DNA, 25 bp, probe
aactctgtggaggctttgcaggaaa

SEQ ID NO: 151763 - DNA, 25 bp, probe
aacattgatctgttttacaggaaac

SEQ ID NO: 151764 - DNA, 25 bp, probe
aacatatatctctaattatctgtgt

SEQ ID NO: 151765 - DNA, 25 bp, probe
aactcaactctcaatctatttgctg

SEQ ID NO: 151766 - DNA, 25 bp, probe
aactcatttctcatgccattagctc

SEQ ID NO: 151767 - DNA, 25 bp, probe
aactttattccagcattcgatgcat

SEQ ID NO: 151768 - DNA, 25 bp, probe
aactgcgtattacaatccggcagaa

SEQ ID NO: 151769 - DNA, 25 bp, probe
aactggtatctaaaaccaccaagat

SEQ ID NO: 151770 - DNA, 25 bp, probe
aactggccttacatgtccatccagt

SEQ ID NO: 151771 - DNA, 25 bp, probe
aactgagccaaaccttcagtgcctt

SEQ ID NO: 151772 - DNA, 25 bp, probe
aactgggcaaaccttaagctcacaa

SEQ ID NO: 151773 - DNA, 25 bp, probe
aactggaaatgggttaatcttgcca

SEQ ID NO: 151774 - DNA, 25 bp, probe
aactccgacagggataacagcttcc

SEQ ID NO: 151775 - DNA, 25 bp, probe
aactccgacagggataacagcttcc

SEQ ID NO: 151776 - DNA, 25 bp, probe
aacccagacgggtagccagctataa

SEQ ID NO: 151777 - DNA, 25 bp, probe
aaccaagggacgtagccatctccca

SEQ ID NO: 151778 - DNA, 25 bp, probe
aactcataggaatctaaagcctgaa

SEQ ID NO: 151779 - DNA, 25 bp, probe
aacttcggttacggcatagcctatg

SEQ ID NO: 151780 - DNA, 25 bp, probe
aacttcggttacggcatagcctatg

SEQ ID NO: 151781 - DNA, 25 bp, probe
aacttgtggttgaggcagggccatc

SEQ ID NO: 151782 - DNA, 25 bp, probe
aactttgttatggagggagcagcct

SEQ ID NO: 151783 - DNA, 25 bp, probe
aactgtgctgacttggaaggtgccc

SEQ ID NO: 151784 - DNA, 25 bp, probe
aactgctcttcacgaagtgactcca

SEQ ID NO: 151785 - DNA, 25 bp, probe
aaccttgtccagtggagcccaactt

SEQ ID NO: 151786 - DNA, 25 bp, probe
aactttgtagcatcgggctaagact

SEQ ID NO: 151787 - DNA, 25 bp, probe
aacttatgtagatcaggcatgtaga

SEQ ID NO: 151788 - DNA, 25 bp, probe
aacttatgtagatcaggcatgtaga

SEQ ID NO: 151789 - DNA, 25 bp, probe
aactttgtatatacacagagtatac

SEQ ID NO: 151790 - DNA, 25 bp, probe
aactattgtatgtttcagatttcag

SEQ ID NO: 151791 - DNA, 25 bp, probe
aacttttgatgccattgagattcac

SEQ ID NO: 151792 - DNA, 25 bp, probe
aactctttgaccaaggctgtcaccc

SEQ ID NO: 151793 - DNA, 25 bp, probe
aactttcttccaagtgaagatccat

SEQ ID NO: 151794 - DNA, 25 bp, probe
aactaatttagcttctaggatccaa

SEQ ID NO: 151795 - DNA, 25 bp, probe
aactgattttacatccaaattcatg

SEQ ID NO: 151796 - DNA, 25 bp, probe
aacttgctgctaaattcccaatgta

SEQ ID NO: 151797 - DNA, 25 bp, probe
aactttaatgagaacccagaggaat

SEQ ID NO: 151798 - DNA, 25 bp, probe
aactttaatgagaacccagaggaat

SEQ ID NO: 151799 - DNA, 25 bp, probe
aactttatatgaacactatagtggt

SEQ ID NO: 151800 - DNA, 25 bp, probe
aactttgtaaaatatcgtgtgtgtg

SEQ ID NO: 151801 - DNA, 25 bp, probe
aactaaggaagaacgatcaattgga

SEQ ID NO: 151802 - DNA, 25 bp, probe
aactctaggagaaggcgaatttgga

SEQ ID NO: 151803 - DNA, 25 bp, probe
aactctaggagaaggcgaattggaa

SEQ ID NO: 151804 - DNA, 25 bp, probe
aacttaggcatgaaaacttggtgaa

SEQ ID NO: 151805 - DNA, 25 bp, probe
aacttagccaattgcaactccagtg

SEQ ID NO: 151806 - DNA, 25 bp, probe
aactgtaccagttgcacatgcttga

SEQ ID NO: 151807 - DNA, 25 bp, probe
aacttcactgagagcacagatggag

SEQ ID NO: 151808 - DNA, 25 bp, probe
aactcatctgatgtctgaagaggag

SEQ ID NO: 151809 - DNA, 25 bp, probe
caactatcgatcttgccaaaggagt

SEQ ID NO: 151810 - DNA, 25 bp, probe
caactatcgatcttgccaaaggagt

SEQ ID NO: 151811 - DNA, 25 bp, probe
aactccgtcttagaagtggaccagg

SEQ ID NO: 151812 - DNA, 25 bp, probe
aattccgtttactggcaggaatttg

SEQ ID NO: 151813 - DNA, 25 bp, probe
aacttagtttactggctgtactatg

SEQ ID NO: 151814 - DNA, 25 bp, probe
aactttctggtagaagtgcttcttc

SEQ ID NO: 151815 - DNA, 25 bp, probe
aactggtatggtgaacagtgctctt

SEQ ID NO: 151816 - DNA, 25 bp, probe
aactggcctgtggcgacacgagtct

SEQ ID NO: 151817 - DNA, 25 bp, probe
aactgcctctgagctgggcagaccg

SEQ ID NO: 151818 - DNA, 25 bp, probe
aactgcctggagcctggaatgacaa

SEQ ID NO: 151819 - DNA, 25 bp, probe
aactgcctggagcctggaatgacaa

SEQ ID NO: 151820 - DNA, 25 bp, probe
aactgagtgtagtatgtggagcata

SEQ ID NO: 151821 - DNA, 25 bp, probe
aactgagtgtagtatgtggagcata

SEQ ID NO: 151822 - DNA, 25 bp, probe
aacgagctgtcattatgatggtgac

SEQ ID NO: 151823 - DNA, 25 bp, probe
aactgcactgtcaagatgatgatga

SEQ ID NO: 151824 - DNA, 25 bp, probe
aactcagcgctcagttgctaagtat

SEQ ID NO: 151825 - DNA, 25 bp, probe
aactatgcctcgaacttcagtgtga

SEQ ID NO: 151826 - DNA, 25 bp, probe
aactatgcctcgaacttcagtgtga

SEQ ID NO: 151827 - DNA, 25 bp, probe
aacttgccatgctgcgttttgtggt

SEQ ID NO: 151828 - DNA, 25 bp, probe
aacttagcagcaagcgtcctttggt

SEQ ID NO: 151829 - DNA, 25 bp, probe
aacttggagaaggattactgtagat

SEQ ID NO: 151830 - DNA, 25 bp, probe
aactgtggggcccatttctgttgct

SEQ ID NO: 151831 - DNA, 25 bp, probe
aactagtggctgcccaattgctgct

SEQ ID NO: 151832 - DNA, 25 bp, probe
aactatgtggctccagaagtgctgc

SEQ ID NO: 151833 - DNA, 25 bp, probe
aactcagcgttgccaggtgtgctgc

SEQ ID NO: 151834 - DNA, 25 bp, probe
aactgcacgatattcagatttcggc

SEQ ID NO: 151835 - DNA, 25 bp, probe
aacttgctgtattgcagacttagga

SEQ ID NO: 151836 - DNA, 25 bp, probe
aacttgctgtattgcagacttagga

SEQ ID NO: 151837 - DNA, 25 bp, probe
aacttgtgttagggctgtgagctgt

SEQ ID NO: 151838 - DNA, 25 bp, probe
aacttccattggggggcagttgcta

SEQ ID NO: 151839 - DNA, 25 bp, probe
aacttccttttgctgatgatcttta

SEQ ID NO: 151840 - DNA, 25 bp, probe
aacttccttttgctgatgatcttta

SEQ ID NO: 151841 - DNA, 25 bp, probe
aacttcactgtattctttactttag

SEQ ID NO: 151842 - DNA, 25 bp, probe
aactaccttatttttcactgtacag

SEQ ID NO: 151843 - DNA, 25 bp, probe
aacttccttctggataccaattaca

SEQ ID NO: 151844 - DNA, 25 bp, probe
aactccacttctggaactactttat

SEQ ID NO: 151845 - DNA, 25 bp, probe
aactctcgtagtggaactaatatgg

SEQ ID NO: 151846 - DNA, 25 bp, probe
aactggcgtagttaagctttgcagc

SEQ ID NO: 151847 - DNA, 25 bp, probe
aacgatagtaattcacagtcctcag

SEQ ID NO: 151848 - DNA, 25 bp, probe
aacgggtttttccatggcatcagta

SEQ ID NO: 151849 - DNA, 25 bp, probe
aactggatgtgtattcgtaacctca

SEQ ID NO: 151850 - DNA, 25 bp, probe
aactacaggagttttgtaacagcat

SEQ ID NO: 151851 - DNA, 25 bp, probe
aactagctaagcattattattcaac

SEQ ID NO: 151852 - DNA, 25 bp, probe
aactattagaatgtttatctcctgc

SEQ ID NO: 151853 - DNA, 25 bp, probe
aactattagcccttttgttctcatg

SEQ ID NO: 151854 - DNA, 25 bp, probe
aactttaacactctagctattcttc

SEQ ID NO: 151855 - DNA, 25 bp, probe
aacttgtcaaacctaagcatatttg

SEQ ID NO: 151856 - DNA, 25 bp, probe
aacttgatcaaaggtccgcttctgg

SEQ ID NO: 151857 - DNA, 25 bp, probe
aacttgctcaacgacatcgtgattc

SEQ ID NO: 151858 - DNA, 25 bp, probe
aacttgctcaacgacatcgtgattc

SEQ ID NO: 151859 - DNA, 25 bp, probe
aactgagccaatgccagcaggaatg

SEQ ID NO: 151860 - DNA, 25 bp, probe
aactcagccatctggcacaggggaa

SEQ ID NO: 151861 - DNA, 25 bp, probe
aactcccactggccaacgatggggg

SEQ ID NO: 151862 - DNA, 25 bp, probe
aacttcgccagtcaactacgcgagg

SEQ ID NO: 151863 - DNA, 25 bp, probe
aagccatcccctcaattcagggaag

SEQ ID NO: 151864 - DNA, 25 bp, probe
aactcttccacatagactttggata

SEQ ID NO: 151865 - DNA, 25 bp, probe
aacttccaaaattactttgcatgaa

SEQ ID NO: 151866 - DNA, 25 bp, probe
aacttaccagaatgttttgcatatc

SEQ ID NO: 151867 - DNA, 25 bp, probe
aacccctcagacagtttgcttattt

SEQ ID NO: 151868 - DNA, 25 bp, probe
cataccacctaacactcgagttggc

SEQ ID NO: 151869 - DNA, 25 bp, probe
ctaccaagtgaagatttgggtacct

SEQ ID NO: 151870 - DNA, 25 bp, probe
ctaccacgaagacattttcgggctc

SEQ ID NO: 151871 - DNA, 25 bp, probe
cgatccaaaggccgttttctcgagg

SEQ ID NO: 151872 - DNA, 25 bp, probe
aactcaacatggccggttatgcaca

SEQ ID NO: 151873 - DNA, 25 bp, probe
aactatgactttgggagtagcactg

SEQ ID NO: 151874 - DNA, 25 bp, probe
aacttcagtcctgggagacccatgt

SEQ ID NO: 151875 - DNA, 25 bp, probe
aactatcagttcatagacaccatct

SEQ ID NO: 151876 - DNA, 25 bp, probe
aactctcagcaggcaaagaccgatt

SEQ ID NO: 151877 - DNA, 25 bp, probe
aactctgtgagcgatttgcccgaat

SEQ ID NO: 151878 - DNA, 25 bp, probe
aactcaggaggaaagccacccagat

SEQ ID NO: 151879 - DNA, 25 bp, probe
aactcaggaggaaagccacccagat

SEQ ID NO: 151880 - DNA, 25 bp, probe
aactatgtggagaatcggcccaagt

SEQ ID NO: 151881 - DNA, 25 bp, probe
aacgtgctggtcaagagtcccaacc

SEQ ID NO: 151882 - DNA, 25 bp, probe
aacctgggatgaaatctccccacgt

SEQ ID NO: 151883 - DNA, 25 bp, probe
aaccgggaatgcaaactcctaagag

SEQ ID NO: 151884 - DNA, 25 bp, probe
aacgggatgtgaggctactttatag

SEQ ID NO: 151885 - DNA, 25 bp, probe
aacttgcttgtgagatttttactga

SEQ ID NO: 151886 - DNA, 25 bp, probe
aacttgctttatgccttcttattgc

SEQ ID NO: 151887 - DNA, 25 bp, probe
aactgactttatgatatgaattttc

SEQ ID NO: 151888 - DNA, 25 bp, probe
aactgaccagttgttgataaccact

SEQ ID NO: 151889 - DNA, 25 bp, probe
aactaaagtgaggctcgctaaccct

SEQ ID NO: 151890 - DNA, 25 bp, probe
aactcaaagtattccgagaatttct

SEQ ID NO: 151891 - DNA, 25 bp, probe
aactcatccagttaaccaaatggcc

SEQ ID NO: 151892 - DNA, 25 bp, probe
aactcagccagtatccatatatgtg

SEQ ID NO: 151893 - DNA, 25 bp, probe
aactcagtagagatctatatttttg

SEQ ID NO: 151894 - DNA, 25 bp, probe
aactgtgatattagcttgatttttt

SEQ ID NO: 151895 - DNA, 25 bp, probe
aacgtgattgttgtatttggagtat

SEQ ID NO: 151896 - DNA, 25 bp, probe
aactgttttgttatttgaatcttgg

SEQ ID NO: 151897 - DNA, 25 bp, probe
aactattcttagtcatattaaatct

SEQ ID NO: 151898 - DNA, 25 bp, probe
aacttacattactattccataactc

SEQ ID NO: 151899 - DNA, 25 bp, probe
aacttacattactattccataactc

SEQ ID NO: 151900 - DNA, 25 bp, probe
aactctgaatcttttttcaccgctt

SEQ ID NO: 151901 - DNA, 25 bp, probe
aactctgaatcttttttcaccgctt

SEQ ID NO: 151902 - DNA, 25 bp, probe
aactcttgtctatatttacctttgt

SEQ ID NO: 151903 - DNA, 25 bp, probe
aactctttgaaactgtatcaccttt

SEQ ID NO: 151904 - DNA, 25 bp, probe
aacgccactaatatacatccctaat

SEQ ID NO: 151905 - DNA, 25 bp, probe
aaccaaccaaaatcacatcctaatt

SEQ ID NO: 151906 - DNA, 25 bp, probe
aactcaacctatcttacatccaaat

SEQ ID NO: 151907 - DNA, 25 bp, probe
aaccaacactagttacctcagaatt

SEQ ID NO: 151908 - DNA, 25 bp, probe
aactaacttcttcaactatggactt

SEQ ID NO: 151909 - DNA, 25 bp, probe
aaccaaatttaagactctcgcatct

SEQ ID NO: 151910 - DNA, 25 bp, probe
aaccagtaaggacaactttgatatg

SEQ ID NO: 151911 - DNA, 25 bp, probe
aactgagtaagtctgaacctctaat

SEQ ID NO: 151912 - DNA, 25 bp, probe
aactgaaaagcacaagacctatgaa

SEQ ID NO: 151913 - DNA, 25 bp, probe
gtacgacaagatgcgggactttaag

SEQ ID NO: 151914 - DNA, 25 bp, probe
gaaaggcgagtcagggagttaaaca

SEQ ID NO: 151915 - DNA, 25 bp, probe
aactcggagctactggctgagatta

SEQ ID NO: 151916 - DNA, 25 bp, probe
aactagaatctgaaggtgagaatct

SEQ ID NO: 151917 - DNA, 25 bp, probe
aacccttcatgaagcactgaaacta

SEQ ID NO: 151918 - DNA, 25 bp, probe
aactcattgtatccaacgaacaaga

SEQ ID NO: 151919 - DNA, 25 bp, probe
aactattatctgcaactgcactaag

SEQ ID NO: 151920 - DNA, 25 bp, probe
aactttatcttgtttgacgaagtga

SEQ ID NO: 151921 - DNA, 25 bp, probe
aacttctgtttccttgacaatagga

SEQ ID NO: 151922 - DNA, 25 bp, probe
aacgtttttgctatcactttggaca

SEQ ID NO: 151923 - DNA, 25 bp, probe
aacgaagtctttttcattttgcaga

SEQ ID NO: 151924 - DNA, 25 bp, probe
aactatagttatccttctgctttca

SEQ ID NO: 151925 - DNA, 25 bp, probe
aactatgaaaatcattatgtcattc

SEQ ID NO: 151926 - DNA, 25 bp, probe
aactagctgaaaagactcgtcattt

SEQ ID NO: 151927 - DNA, 25 bp, probe
aactagctgaaaagactcgtcattt

SEQ ID NO: 151928 - DNA, 25 bp, probe
aactcaggtacaaactcgacttcag

SEQ ID NO: 151929 - DNA, 25 bp, probe
aactcaaggaagtcaccaactttgg

SEQ ID NO: 151930 - DNA, 25 bp, probe
aactcaaggaagtcaccaactttgg

SEQ ID NO: 151931 - DNA, 25 bp, probe
aacgcgaggaaggcctgtacttttg

SEQ ID NO: 151932 - DNA, 25 bp, probe
aacctgtgggttgtgctaatttctg

SEQ ID NO: 151933 - DNA, 25 bp, probe
aaccctattttcagctactatttga

SEQ ID NO: 151934 - DNA, 25 bp, probe
aaccacttttccatggggattcaga

SEQ ID NO: 151935 - DNA, 25 bp, probe
aagcccgttaccttttaattgcatg

SEQ ID NO: 151936 - DNA, 25 bp, probe
aagccctgtttgcctaattaaattg

SEQ ID NO: 151937 - DNA, 25 bp, probe
aactccagtgttgataattaaaatg

SEQ ID NO: 151938 - DNA, 25 bp, probe
aactccagtgttgataattaaaatg

SEQ ID NO: 151939 - DNA, 25 bp, probe
aactccgtctctaccaatatacaaa

SEQ ID NO: 151940 - DNA, 25 bp, probe
aactcaagtgcctgctacacataca

SEQ ID NO: 151941 - DNA, 25 bp, probe
aactcaactgtctattgtcacatga

SEQ ID NO: 151942 - DNA, 25 bp, probe
aactaccttcaactccatcatgaag

SEQ ID NO: 151943 - DNA, 25 bp, probe
aactaccgacaacttctggaggaga

SEQ ID NO: 151944 - DNA, 25 bp, probe
aaccctcagaaacactggggctggc

SEQ ID NO: 151945 - DNA, 25 bp, probe
aactttctaaattgactgagccctg

SEQ ID NO: 151946 - DNA, 25 bp, probe
aacttatcaaaaatatgctggacaa

SEQ ID NO: 151947 - DNA, 25 bp, probe
aacttataaatatttctccagcaaa

SEQ ID NO: 151948 - DNA, 25 bp, probe
aactgtgatcagtatcctttacaaa

SEQ ID NO: 151949 - DNA, 25 bp, probe
aactggaatattctcactagataaa

SEQ ID NO: 151950 - DNA, 25 bp, probe
aactggaatattctcactagataaa

SEQ ID NO: 151951 - DNA, 25 bp, probe
aactcggtcattgctgttgaaaaag

SEQ ID NO: 151952 - DNA, 25 bp, probe
aactctcgtttggcctggaaagaag

SEQ ID NO: 151953 - DNA, 25 bp, probe
aactcactgtttgctcattggaaaa

SEQ ID NO: 151954 - DNA, 25 bp, probe
aactaagacttcacttggagcaaga

SEQ ID NO: 151955 - DNA, 25 bp, probe
aactaagacttcacttggagcaaga

SEQ ID NO: 151956 - DNA, 25 bp, probe
aaaagcagcaagatgttcaaactcc

SEQ ID NO: 151957 - DNA, 25 bp, probe
aactacctggtcatctggtgtgctg

SEQ ID NO: 151958 - DNA, 25 bp, probe
aactttaggtaactctgctgtgctg

SEQ ID NO: 151959 - DNA, 25 bp, probe
aactttaggtaactctgctgtgctg

SEQ ID NO: 151960 - DNA, 25 bp, probe
aactcttcaggttccacatggtata

SEQ ID NO: 151961 - DNA, 25 bp, probe
aactttcatttcttgcacatttatt

SEQ ID NO: 151962 - DNA, 25 bp, probe
aacgtgttatattccatacttatta

SEQ ID NO: 151963 - DNA, 25 bp, probe
aacgtcttacattttctctgatgat

SEQ ID NO: 151964 - DNA, 25 bp, probe
aacgtttgccatattttctttgcat

SEQ ID NO: 151965 - DNA, 25 bp, probe
aaccttacctagatatctgctactc

SEQ ID NO: 151966 - DNA, 25 bp, probe
aactcttaaccagttctccatactg

SEQ ID NO: 151967 - DNA, 25 bp, probe
aactagtaatccttatcaccatgac

SEQ ID NO: 151968 - DNA, 25 bp, probe
aactatgtagtactgaaaacaacaa

SEQ ID NO: 151969 - DNA, 25 bp, probe
aactatgctttacatggcaatcaaa

SEQ ID NO: 151970 - DNA, 25 bp, probe
aactattttacatgaatgacacaag

SEQ ID NO: 151971 - DNA, 25 bp, probe
aacgattcggactcggacctagagg

SEQ ID NO: 151972 - DNA, 25 bp, probe
aaccccaagacctggatcccaggag

SEQ ID NO: 151973 - DNA, 25 bp, probe
aaccccagaaccgctacacagcgga

SEQ ID NO: 151974 - DNA, 25 bp, probe
aactccacaaaccttccaaatctgg

SEQ ID NO: 151975 - DNA, 25 bp, probe
aactccaacacaggttttggcatct

SEQ ID NO: 151976 - DNA, 25 bp, probe
aactcttagccaaggcttcttcatt

SEQ ID NO: 151977 - DNA, 25 bp, probe
aactcttagccaaggcttcttcatt

SEQ ID NO: 151978 - DNA, 25 bp, probe
aactgttcacaaattctctgtccct

SEQ ID NO: 151979 - DNA, 25 bp, probe
aactgataccattttctgttgctca

SEQ ID NO: 151980 - DNA, 25 bp, probe
aactgaggcgatagaattggcgcat

SEQ ID NO: 151981 - DNA, 25 bp, probe
aactggagtcagaagaccaggctac

SEQ ID NO: 151982 - DNA, 25 bp, probe
aactggatccacatcacagaggcca

SEQ ID NO: 151983 - DNA, 25 bp, probe
aactggatccacatcacagaggcca

SEQ ID NO: 151984 - DNA, 25 bp, probe
aactggatcgacatgaagcgggccc

SEQ ID NO: 151985 - DNA, 25 bp, probe
aacggacagccaagacgtagatcca

SEQ ID NO: 151986 - DNA, 25 bp, probe
aaccgaagccaagtgataaagccac

SEQ ID NO: 151987 - DNA, 25 bp, probe
aacgagaagctaaccatgcagaacc

SEQ ID NO: 151988 - DNA, 25 bp, probe
aactataatgaaatctgctgcaaaa

SEQ ID NO: 151989 - DNA, 25 bp, probe
aactataagataacccagcagcaaa

SEQ ID NO: 151990 - DNA, 25 bp, probe
aactataagataacccagcagcaaa

SEQ ID NO: 151991 - DNA, 25 bp, probe
aactacaaaaaaacagcatcaaaga

SEQ ID NO: 151992 - DNA, 25 bp, probe
aactacaaaaaaacagcatcaaaga

SEQ ID NO: 151993 - DNA, 25 bp, probe
aactcacaggcatactgacagtaaa

SEQ ID NO: 151994 - DNA, 25 bp, probe
aactctcagccaaaccaaacagaag

SEQ ID NO: 151995 - DNA, 25 bp, probe
aactctcagccaaaccaaacagaag

SEQ ID NO: 151996 - DNA, 25 bp, probe
aactccaccaacccatcagaaggag

SEQ ID NO: 151997 - DNA, 25 bp, probe
aactaactccatcggaagcagagga

SEQ ID NO: 151998 - DNA, 25 bp, probe
aactaactgctgtggttggagcgaa

SEQ ID NO: 151999 - DNA, 25 bp, probe
aactcaaccaggtgattggcaggtg

SEQ ID NO: 152000 - DNA, 25 bp, probe
aactgaactaggcctggtggaagga

SEQ ID NO: 152001 - DNA, 25 bp, probe
aacgaaatctgaggatggatcggag

SEQ ID NO: 152002 - DNA, 25 bp, probe
aagcgttcttggaagcatggggagt

SEQ ID NO: 152003 - DNA, 25 bp, probe
aactggttagtcaaatggccagact

SEQ ID NO: 152004 - DNA, 25 bp, probe
aagcggttcatctgaagactccagt

SEQ ID NO: 152005 - DNA, 25 bp, probe
aacgaatttctggcaaaatggcact

SEQ ID NO: 152006 - DNA, 25 bp, probe
aactgcaaccaacagtaaggactta

SEQ ID NO: 152007 - DNA, 25 bp, probe
aactggtccaaatgctgaaagacat

SEQ ID NO: 152008 - DNA, 25 bp, probe
aactggtcgccatcaagaaagtatt

SEQ ID NO: 152009 - DNA, 25 bp, probe
aactacctgctacaataatgacttt

SEQ ID NO: 152010 - DNA, 25 bp, probe
aactccctctagcaagatatttttc

SEQ ID NO: 152011 - DNA, 25 bp, probe
aactcccattttcatgttttgtctt

SEQ ID NO: 152012 - DNA, 25 bp, probe
aactcccattttcatgttttgtctt

SEQ ID NO: 152013 - DNA, 25 bp, probe
aactcttacttttgctattttgtct

SEQ ID NO: 152014 - DNA, 25 bp, probe
aactctctacaggaatatatttttt

SEQ ID NO: 152015 - DNA, 25 bp, probe
aactctctacaggaatatatttttt

SEQ ID NO: 152016 - DNA, 25 bp, probe
aactttcacagtagagcgtcttgtt

SEQ ID NO: 152017 - DNA, 25 bp, probe
aactgtcgccagttgtgcactttta

SEQ ID NO: 152018 - DNA, 25 bp, probe
aactttgtgggaacactgattcata

SEQ ID NO: 152019 - DNA, 25 bp, probe
aactactggatgcaaactgttatgt

SEQ ID NO: 152020 - DNA, 25 bp, probe
aactactcttgacatgattgttcat

SEQ ID NO: 152021 - DNA, 25 bp, probe
aactaatctaaactgtagctgtatt

SEQ ID NO: 152022 - DNA, 25 bp, probe
aactactataagatgctgatgctgc

SEQ ID NO: 152023 - DNA, 25 bp, probe
aactccatcatgaagtgtgacgtgg

SEQ ID NO: 152024 - DNA, 25 bp, probe
aactccatcatgaagtgtgacgtgg

SEQ ID NO: 152025 - DNA, 25 bp, probe
aactctatcggctgatgcagcgctg

SEQ ID NO: 152026 - DNA, 25 bp, probe
aactcattcgtgggaacagcgcagt

SEQ ID NO: 152027 - DNA, 25 bp, probe
aactcttcagccatgattagacgtt

SEQ ID NO: 152028 - DNA, 25 bp, probe
aactgtatataaatcttcaaagctt

SEQ ID NO: 152029 - DNA, 25 bp, probe
aactgttatactaccagaaggcttt

SEQ ID NO: 152030 - DNA, 25 bp, probe
aactgtttccttcatcatgagttct

SEQ ID NO: 152031 - DNA, 25 bp, probe
aacgtatctcctggctacaatttca

SEQ ID NO: 152032 - DNA, 25 bp, probe
aacgttctatctggcaactggtact

SEQ ID NO: 152033 - DNA, 25 bp, probe
aactgtatcttccaaaatgagtggt

SEQ ID NO: 152034 - DNA, 25 bp, probe
aactgttcttcatcattgacactgg

SEQ ID NO: 152035 - DNA, 25 bp, probe
aactgttatccaagctatacacaag

SEQ ID NO: 152036 - DNA, 25 bp, probe
aactgttagccacgcagatgccgat

SEQ ID NO: 152037 - DNA, 25 bp, probe
aactgattagctagtggacagagat

SEQ ID NO: 152038 - DNA, 25 bp, probe
aactgattacaactgctacagagca

SEQ ID NO: 152039 - DNA, 25 bp, probe
aactctcatcaacatctgacaacaa

SEQ ID NO: 152040 - DNA, 25 bp, probe
aactccatgctacactgcaaacttt

SEQ ID NO: 152041 - DNA, 25 bp, probe
aactcaatctaagtcagtccacttt

SEQ ID NO: 152042 - DNA, 25 bp, probe
aactaactaactttatacatgattt

SEQ ID NO: 152043 - DNA, 25 bp, probe
aagtgaacaatactttgtaatttat

SEQ ID NO: 152044 - DNA, 25 bp, probe
caaccaaaatcacatcctaattttt

SEQ ID NO: 152045 - DNA, 25 bp, probe
aactcaccaacattattcatagttt

SEQ ID NO: 152046 - DNA, 25 bp, probe
aactcaccaacattattcatagttt

SEQ ID NO: 152047 - DNA, 25 bp, probe
aactcagtcccaaactacagttctt

SEQ ID NO: 152048 - DNA, 25 bp, probe
aactattccacaagatcgacatgct

SEQ ID NO: 152049 - DNA, 25 bp, probe
aactattccacaagatcgacatgct

SEQ ID NO: 152050 - DNA, 25 bp, probe
aactccaccataaagcaactgctgg

SEQ ID NO: 152051 - DNA, 25 bp, probe
aactccaccataaagcaactgctgg

SEQ ID NO: 152052 - DNA, 25 bp, probe
aaccacccggggctgctgctgatgg

SEQ ID NO: 152053 - DNA, 25 bp, probe
aacccaacggatggtctgtgctggc

SEQ ID NO: 152054 - DNA, 25 bp, probe
aacggatcacgaggagccggcagtc

SEQ ID NO: 152055 - DNA, 25 bp, probe
aactcttcctggaagccgtcagctc

SEQ ID NO: 152056 - DNA, 25 bp, probe
aactctttgctgttgacccaactac

SEQ ID NO: 152057 - DNA, 25 bp, probe
aactctttgctgttgacccaactac

SEQ ID NO: 152058 - DNA, 25 bp, probe
aacctgttctttgtcacaaccagca

SEQ ID NO: 152059 - DNA, 25 bp, probe
aacctgttctttgtcacaaccagca

SEQ ID NO: 152060 - DNA, 25 bp, probe
aacccttctttaccacaagctatgg

SEQ ID NO: 152061 - DNA, 25 bp, probe
aaccctccttgtagagttggttgtg

SEQ ID NO: 152062 - DNA, 25 bp, probe
aaccctccttgtagagttggttgtg

SEQ ID NO: 152063 - DNA, 25 bp, probe
aactgcctccatctgtggggcagct

SEQ ID NO: 152064 - DNA, 25 bp, probe
aacgtcatccacctggagggtgtcg

SEQ ID NO: 152065 - DNA, 25 bp, probe
aactgtcaccactgctaagggactc

SEQ ID NO: 152066 - DNA, 25 bp, probe
aactgtcaccactgctaagggactc

SEQ ID NO: 152067 - DNA, 25 bp, probe
aactggccagactgtaaggtccgag

SEQ ID NO: 152068 - DNA, 25 bp, probe
aacgggcgttagcagataagccaga

SEQ ID NO: 152069 - DNA, 25 bp, probe
aactgggggctctgtatatagctat

SEQ ID NO: 152070 - DNA, 25 bp, probe
aactgggaggcttatctcactgagt

SEQ ID NO: 152071 - DNA, 25 bp, probe
aactggggcgtatctgacagcgtta

SEQ ID NO: 152072 - DNA, 25 bp, probe
aacgaggccaaatgtgtcaccttca

SEQ ID NO: 152073 - DNA, 25 bp, probe
aagggtcacaaagtgttcttcctca

SEQ ID NO: 152074 - DNA, 25 bp, probe
aacgtgtgaaaactccctattctct

SEQ ID NO: 152075 - DNA, 25 bp, probe
aacgtggacaagactcgcagatttt

SEQ ID NO: 152076 - DNA, 25 bp, probe
aactgtgagtcatgcccaagaattg

SEQ ID NO: 152077 - DNA, 25 bp, probe
aactctgtgcaattgtccaaaacgc

SEQ ID NO: 152078 - DNA, 25 bp, probe
aactctatcaggtcccaaaaggcct

SEQ ID NO: 152079 - DNA, 25 bp, probe
aacgtcatcgttgccaacacaatgc

SEQ ID NO: 152080 - DNA, 25 bp, probe
aactgtaccttggctaacacaaact

SEQ ID NO: 152081 - DNA, 25 bp, probe
aacgtcaccttggtcacagcagtaa

SEQ ID NO: 152082 - DNA, 25 bp, probe
aacgtcaccttggtcacagcagtaa

SEQ ID NO: 152083 - DNA, 25 bp, probe
aacgtatcctctgtattcagtaaac

SEQ ID NO: 152084 - DNA, 25 bp, probe
aacgtattttgatcagtattacaag

SEQ ID NO: 152085 - DNA, 25 bp, probe
aacgtattttgatcagtattacaag

SEQ ID NO: 152086 - DNA, 25 bp, probe
aacctttgggaatggatatcagaag

SEQ ID NO: 152087 - DNA, 25 bp, probe
aacccttgttcttaggatcacagaa

SEQ ID NO: 152088 - DNA, 25 bp, probe
aactctcatttgactgtgagaactc

SEQ ID NO: 152089 - DNA, 25 bp, probe
aactgctcattgcctgtgtggcaca

SEQ ID NO: 152090 - DNA, 25 bp, probe
aactgctattctcgggtcatcaata

SEQ ID NO: 152091 - DNA, 25 bp, probe
aactctgcttcggtgtcgaaatgag

SEQ ID NO: 152092 - DNA, 25 bp, probe
aactgctcttcgtattaagaagact

SEQ ID NO: 152093 - DNA, 25 bp, probe
aactctcattcgtgcactaaggacc

SEQ ID NO: 152094 - DNA, 25 bp, probe
aactcttctctgtatgcactaatga

SEQ ID NO: 152095 - DNA, 25 bp, probe
aactcattccatatgcatctgtgtg

SEQ ID NO: 152096 - DNA, 25 bp, probe
aactcattccatatgcatctgtgtg

SEQ ID NO: 152097 - DNA, 25 bp, probe
aactcagatctcaaagctctgcttg

SEQ ID NO: 152098 - DNA, 25 bp, probe
aactcagatctcaaagctctgcttg

SEQ ID NO: 152099 - DNA, 25 bp, probe
aactcatgttcattcagcgtgcttg

SEQ ID NO: 152100 - DNA, 25 bp, probe
aactctgcactctacttgtgctgtg

SEQ ID NO: 152101 - DNA, 25 bp, probe
aactcagccatcccaagctggttaa

SEQ ID NO: 152102 - DNA, 25 bp, probe
aactcagccatcccaagctggttaa

SEQ ID NO: 152103 - DNA, 25 bp, probe
aactcagtgaggcaggcgtcttaga

SEQ ID NO: 152104 - DNA, 25 bp, probe
aactcagtggtgcatacagtgttga

SEQ ID NO: 152105 - DNA, 25 bp, probe
aactcagcatgacgcttgggtgttt

SEQ ID NO: 152106 - DNA, 25 bp, probe
aactgtcaagcctgtggatgatttt

SEQ ID NO: 152107 - DNA, 25 bp, probe
aactgtcagagcttttaattatatt

SEQ ID NO: 152108 - DNA, 25 bp, probe
aacccagagtttgtcattaatgtgt

SEQ ID NO: 152109 - DNA, 25 bp, probe
aacccagagtttgtcattaatgtgt

SEQ ID NO: 152110 - DNA, 25 bp, probe
aacccaattttcttatgaacagata

SEQ ID NO: 152111 - DNA, 25 bp, probe
aactctagttttttcaatatggtat

SEQ ID NO: 152112 - DNA, 25 bp, probe
aactctagttttttcaatatggtat

SEQ ID NO: 152113 - DNA, 25 bp, probe
aactcattttcaaagtgaatttgtt

SEQ ID NO: 152114 - DNA, 25 bp, probe
aactcatttcctatgtaactgcatt

SEQ ID NO: 152115 - DNA, 25 bp, probe
aactcttttcatactgtgaggatga

SEQ ID NO: 152116 - DNA, 25 bp, probe
aacgtgatgttcccgatgggcgaca

SEQ ID NO: 152117 - DNA, 25 bp, probe
aacgtcatggtcctggtgaacacct

SEQ ID NO: 152118 - DNA, 25 bp, probe
aactcatcgaaactggggaaccatg

SEQ ID NO: 152119 - DNA, 25 bp, probe
aactgacaaatactggggtgtcctc

SEQ ID NO: 152120 - DNA, 25 bp, probe
aactgacaactctttgtagtcctcc

SEQ ID NO: 152121 - DNA, 25 bp, probe
aactcgaaccaaagtcgtcactcca

SEQ ID NO: 152122 - DNA, 25 bp, probe
aaccagactcactaaatcctttcca

SEQ ID NO: 152123 - DNA, 25 bp, probe
aactctcactagaaaatcttttgaa

SEQ ID NO: 152124 - DNA, 25 bp, probe
aactgccagttgcaaatttgatagg

SEQ ID NO: 152125 - DNA, 25 bp, probe
aactccatgtctctgagcattagat

SEQ ID NO: 152126 - DNA, 25 bp, probe
aaccctgtttagcattcactaagcc

SEQ ID NO: 152127 - DNA, 25 bp, probe
cttcctgggccatggttaccaagtc

SEQ ID NO: 152128 - DNA, 25 bp, probe
ctaagctggggacaggaaccaagtc

SEQ ID NO: 152129 - DNA, 25 bp, probe
gtaagggggaccagagaggcgggct

SEQ ID NO: 152130 - DNA, 25 bp, probe
cacccagggagtgacgaagggggct

SEQ ID NO: 152131 - DNA, 25 bp, probe
caccctggggaacaagggggctgtg

SEQ ID NO: 152132 - DNA, 25 bp, probe
caccctggggaacaagggggctgtg

SEQ ID NO: 152133 - DNA, 25 bp, probe
caccctgggctgggcccaggtgcgc

SEQ ID NO: 152134 - DNA, 25 bp, probe
aactctggagtgagcctcaggggcc

SEQ ID NO: 152135 - DNA, 25 bp, probe
aactctggggcagggctgcgggaga

SEQ ID NO: 152136 - DNA, 25 bp, probe
aactgcatcaggcgtggcaggcggt

SEQ ID NO: 152137 - DNA, 25 bp, probe
aacgaagtcgagttgcggcggacgc

SEQ ID NO: 152138 - DNA, 25 bp, probe
aacgaagtcgagttgcggcggacgc

SEQ ID NO: 152139 - DNA, 25 bp, probe
aacgaagcttcgttcctgaggaaga

SEQ ID NO: 152140 - DNA, 25 bp, probe
aacgggcagccgggcttcaaaagca

SEQ ID NO: 152141 - DNA, 25 bp, probe
aacggggctctcgacttgaattatc

SEQ ID NO: 152142 - DNA, 25 bp, probe
aactcaaggttttcattgacaatat

SEQ ID NO: 152143 - DNA, 25 bp, probe
aactccacatgtaatccgttaatat

SEQ ID NO: 152144 - DNA, 25 bp, probe
aactctcactttagtggatgtaaat

SEQ ID NO: 152145 - DNA, 25 bp, probe
aactcaagtttcatgtttcaatgcc

SEQ ID NO: 152146 - DNA, 25 bp, probe
aactcaagtttcatgtttcaatgcc

SEQ ID NO: 152147 - DNA, 25 bp, probe
aactcaattttcgtgctatttctat

SEQ ID NO: 152148 - DNA, 25 bp, probe
aactcctttattgtacttatcattt

SEQ ID NO: 152149 - DNA, 25 bp, probe
aacccctgccttgtacataatacta

SEQ ID NO: 152150 - DNA, 25 bp, probe
aactcccacacattcttaaggaact

SEQ ID NO: 152151 - DNA, 25 bp, probe
aactcctatacttttgacattactg

SEQ ID NO: 152152 - DNA, 25 bp, probe
aactctaaaccatctgaattggctc

SEQ ID NO: 152153 - DNA, 25 bp, probe
aactcttaaccatcagtttgtgaca

SEQ ID NO: 152154 - DNA, 25 bp, probe
aactcctataccactgtcaagtata

SEQ ID NO: 152155 - DNA, 25 bp, probe
aacccttaatgcactgttatctcct

SEQ ID NO: 152156 - DNA, 25 bp, probe
aactgctgcttatgtttggaatgac

SEQ ID NO: 152157 - DNA, 25 bp, probe
aactgctgcttatgtttggaatgac

SEQ ID NO: 152158 - DNA, 25 bp, probe
aactgctcttgaacctgctggaaat

SEQ ID NO: 152159 - DNA, 25 bp, probe
aactgtcacgacattctgcagagat

SEQ ID NO: 152160 - DNA, 25 bp, probe
aactccacgatcttcctgaagaaga

SEQ ID NO: 152161 - DNA, 25 bp, probe
aactccaagacctggaagtcacaca

SEQ ID NO: 152162 - DNA, 25 bp, probe
aactccacggctttgtgaagataaa

SEQ ID NO: 152163 - DNA, 25 bp, probe
aactccacggctttgtgaagataaa

SEQ ID NO: 152164 - DNA, 25 bp, probe
aactcacctttctgtgaagaacgca

SEQ ID NO: 152165 - DNA, 25 bp, probe
aacccactcatttagtaatgtacct

SEQ ID NO: 152166 - DNA, 25 bp, probe
aacctcccataatttttgtcattct

SEQ ID NO: 152167 - DNA, 25 bp, probe
aaccttgctaaatgttcctcatcat

SEQ ID NO: 152168 - DNA, 25 bp, probe
aagcactggaaaaactgtgcccgta

SEQ ID NO: 152169 - DNA, 25 bp, probe
aagcactggaaaaactgtgcccgta

SEQ ID NO: 152170 - DNA, 25 bp, probe
aactcaagaaaatctgatgctcact

SEQ ID NO: 152171 - DNA, 25 bp, probe
aactcagtcatatatagtgaacagt

SEQ ID NO: 152172 - DNA, 25 bp, probe
aactcaatgcaatctttaacatgtt

SEQ ID NO: 152173 - DNA, 25 bp, probe
aactcagccatctctatatattctt

SEQ ID NO: 152174 - DNA, 25 bp, probe
aactcaggatgggatatagacttct

SEQ ID NO: 152175 - DNA, 25 bp, probe
aactcaggatgtgtttacagtcatt

SEQ ID NO: 152176 - DNA, 25 bp, probe
aactcaggatgtgtttacagtcatt

SEQ ID NO: 152177 - DNA, 25 bp, probe
aactcatcgattgatttacggcgct

SEQ ID NO: 152178 - DNA, 25 bp, probe
aactctcctttgatattatgtggct

SEQ ID NO: 152179 - DNA, 25 bp, probe
aactgcccttttaaatggcatgaca

SEQ ID NO: 152180 - DNA, 25 bp, probe
aactgcccttttaaatggcatgaca

SEQ ID NO: 152181 - DNA, 25 bp, probe
aactcccttggctataagcatctaa

SEQ ID NO: 152182 - DNA, 25 bp, probe
aactcttccatggccaaacatatga

SEQ ID NO: 152183 - DNA, 25 bp, probe
aactcactcccctacaaaagatgga

SEQ ID NO: 152184 - DNA, 25 bp, probe
cacaccctccgaggcaaagggcagg

SEQ ID NO: 152185 - DNA, 25 bp, probe
aactccatcggaagcagaggattgc

SEQ ID NO: 152186 - DNA, 25 bp, probe
aactctactggcagattggcattga

SEQ ID NO: 152187 - DNA, 25 bp, probe
aactccagccgcggaatgacattag

SEQ ID NO: 152188 - DNA, 25 bp, probe
aacggcagcgtgcagatcaacttct

SEQ ID NO: 152189 - DNA, 25 bp, probe
aactgagcaaggaagatcccaacac

SEQ ID NO: 152190 - DNA, 25 bp, probe
aactcacaaggaggcttccaactga

SEQ ID NO: 152191 - DNA, 25 bp, probe
caacccaaatgtctaccaactgatg

SEQ ID NO: 152192 - DNA, 25 bp, probe
aatcccgagttgtgtccaacgattc

SEQ ID NO: 152193 - DNA, 25 bp, probe
aaccctggtgagtcgaatcacggac

SEQ ID NO: 152194 - DNA, 25 bp, probe
aacccagttagatgcaatttggtca

SEQ ID NO: 152195 - DNA, 25 bp, probe
aacccagttagatgcaatttggtca

SEQ ID NO: 152196 - DNA, 25 bp, probe
aaccgaattagccgagttagaagca

SEQ ID NO: 152197 - DNA, 25 bp, probe
aaccgaattagccgagttagaagca

SEQ ID NO: 152198 - DNA, 25 bp, probe
aacccattgtgacgatgagttagaa

SEQ ID NO: 152199 - DNA, 25 bp, probe
aacccagcaggaaaacctagaagag

SEQ ID NO: 152200 - DNA, 25 bp, probe
aataaatgcggagaccctcgtgggc

SEQ ID NO: 152201 - DNA, 25 bp, probe
aataaagcaggacccgcctagtggc

SEQ ID NO: 152202 - DNA, 25 bp, probe
aacgaactgaactaggcctggtgga

SEQ ID NO: 152203 - DNA, 25 bp, probe
aacgaactgaactaggcctggtgga

SEQ ID NO: 152204 - DNA, 25 bp, probe
aacgaactgaactaggcctggtgga

SEQ ID NO: 152205 - DNA, 25 bp, probe
aacgaacagactcaggcgatgtgct

SEQ ID NO: 152206 - DNA, 25 bp, probe
aactgaaatcactcacacgatctct

SEQ ID NO: 152207 - DNA, 25 bp, probe
aactgacacagatttacaagagctt

SEQ ID NO: 152208 - DNA, 25 bp, probe
aactgacacagatttacaagagctt

SEQ ID NO: 152209 - DNA, 25 bp, probe
aactctgcaggactcatatccaggc

SEQ ID NO: 152210 - DNA, 25 bp, probe
aactcatcagggacatgtcagggaa

SEQ ID NO: 152211 - DNA, 25 bp, probe
aactgtcagtcgaacaagtcatgaa

SEQ ID NO: 152212 - DNA, 25 bp, probe
aactggcccagcagtatgtcatgac

SEQ ID NO: 152213 - DNA, 25 bp, probe
aactgccctagccaggtactgaggg

SEQ ID NO: 152214 - DNA, 25 bp, probe
aactgccctagccaggtactgaggg

SEQ ID NO: 152215 - DNA, 25 bp, probe
aactcctatgcagtgagtgtgtgga

SEQ ID NO: 152216 - DNA, 25 bp, probe
aactcctatgcagtgagtgtgtgga

SEQ ID NO: 152217 - DNA, 25 bp, probe
aactctcaatctatttgctggagtc

SEQ ID NO: 152218 - DNA, 25 bp, probe
aactccaacttctggctgtagagca

SEQ ID NO: 152219 - DNA, 25 bp, probe
aactccaaaatcttgctggtactct

SEQ ID NO: 152220 - DNA, 25 bp, probe
aactcctaggagttgctttactctg

SEQ ID NO: 152221 - DNA, 25 bp, probe
aactctctagggacacctgtaccag

SEQ ID NO: 152222 - DNA, 25 bp, probe
aacccaggcaagaacgtgtagcaat

SEQ ID NO: 152223 - DNA, 25 bp, probe
aacccacctactatgttgacacatt

SEQ ID NO: 152224 - DNA, 25 bp, probe
aaccccttcattatgtggtcatcat

SEQ ID NO: 152225 - DNA, 25 bp, probe
aaccccaacttcatcttgtcagaag

SEQ ID NO: 152226 - DNA, 25 bp, probe
aacccggaggccattatgctatgta

SEQ ID NO: 152227 - DNA, 25 bp, probe
caaaccggggcctactagagtctga

SEQ ID NO: 152228 - DNA, 25 bp, probe
caaaccggggcctactagagtctga

SEQ ID NO: 152229 - DNA, 25 bp, probe
aacccagaggacgccaagagcactg

SEQ ID NO: 152230 - DNA, 25 bp, probe
aactcccggacatcacatgagaggt

SEQ ID NO: 152231 - DNA, 25 bp, probe
aactccacggaaaaatcagaagctc

SEQ ID NO: 152232 - DNA, 25 bp, probe
caagcccaatggcatgaaacggtcc

SEQ ID NO: 152233 - DNA, 25 bp, probe
aacgctcaattggaaaagaggtcct

SEQ ID NO: 152234 - DNA, 25 bp, probe
aacgctcaattggaaaagaggtcct

SEQ ID NO: 152235 - DNA, 25 bp, probe
aactccaattaaactcatatggtcc

SEQ ID NO: 152236 - DNA, 25 bp, probe
aactcccttcaaacacaaagattgc

SEQ ID NO: 152237 - DNA, 25 bp, probe
aactccactatagttcatcaagact

SEQ ID NO: 152238 - DNA, 25 bp, probe
aactgcccttgcatggaaaactgtt

SEQ ID NO: 152239 - DNA, 25 bp, probe
aactccttctcaaggaatctcactc

SEQ ID NO: 152240 - DNA, 25 bp, probe
aacccctgccaatgtatctcagcag

SEQ ID NO: 152241 - DNA, 25 bp, probe
aactcccagcagacaagttctctgc

SEQ ID NO: 152242 - DNA, 25 bp, probe
aactccaaagagcacttgcctctgc

SEQ ID NO: 152243 - DNA, 25 bp, probe
aactccaaaagttcatggctcatgg

SEQ ID NO: 152244 - DNA, 25 bp, probe
aactccaaaagttcatggctcatgg

SEQ ID NO: 152245 - DNA, 25 bp, probe
aactctcaaataattggtcacagca

SEQ ID NO: 152246 - DNA, 25 bp, probe
aactctcatcacagagctagtccag

SEQ ID NO: 152247 - DNA, 25 bp, probe
aactctcagcatatggacggccagc

SEQ ID NO: 152248 - DNA, 25 bp, probe
aactgctgcgatatgaccaccagtc

SEQ ID NO: 152249 - DNA, 25 bp, probe
aactctggacagcaggcatcacagc

SEQ ID NO: 152250 - DNA, 25 bp, probe
aactctggaatgcaggctgccagat

SEQ ID NO: 152251 - DNA, 25 bp, probe
aactgctgccttcgaagtgtgcgaa

SEQ ID NO: 152252 - DNA, 25 bp, probe
aactcatctttacagtgttgatcaa

SEQ ID NO: 152253 - DNA, 25 bp, probe
aactcctgttgatggtgttattgca

SEQ ID NO: 152254 - DNA, 25 bp, probe
aaccttattaagctcgtcactgcag

SEQ ID NO: 152255 - DNA, 25 bp, probe
aaccctgatgtaaagatcagtccca

SEQ ID NO: 152256 - DNA, 25 bp, probe
aaccctctgctttacacagttgcaa

SEQ ID NO: 152257 - DNA, 25 bp, probe
aaccctctgctttacacagttgcaa

SEQ ID NO: 152258 - DNA, 25 bp, probe
aaccccaccatatgaattgtacaga

SEQ ID NO: 152259 - DNA, 25 bp, probe
aacccaagacattaaatctgccatc

SEQ ID NO: 152260 - DNA, 25 bp, probe
aacccaagacattaaatctgccatc

SEQ ID NO: 152261 - DNA, 25 bp, probe
aacctagaggcacaatcttgacttg

SEQ ID NO: 152262 - DNA, 25 bp, probe
aacctagaggcacaatcttgacttg

SEQ ID NO: 152263 - DNA, 25 bp, probe
aacctcaggtcatagatcatttttt

SEQ ID NO: 152264 - DNA, 25 bp, probe
aacgccgagatctacgactatttaa

SEQ ID NO: 152265 - DNA, 25 bp, probe
caacctgtaactgcccttttaaatg

SEQ ID NO: 152266 - DNA, 25 bp, probe
caacctgtaactgcccttttaaatg

SEQ ID NO: 152267 - DNA, 25 bp, probe
aagcacctgaactccacggaaaaat

SEQ ID NO: 152268 - DNA, 25 bp, probe
aacccaagaccgctcgggaaatgca

SEQ ID NO: 152269 - DNA, 25 bp, probe
aacccaagaccgctcgggaaatgca

SEQ ID NO: 152270 - DNA, 25 bp, probe
aactctgtaaactctcgggaaagca

SEQ ID NO: 152271 - DNA, 25 bp, probe
aactctgtaaactctcgggaaagca

SEQ ID NO: 152272 - DNA, 25 bp, probe
aacctgctaagtgacacggaagaag

SEQ ID NO: 152273 - DNA, 25 bp, probe
aacctgctaagtgacacggaagaag

SEQ ID NO: 152274 - DNA, 25 bp, probe
aacccaccatgttaccgtgaagaag

SEQ ID NO: 152275 - DNA, 25 bp, probe
aacccaccatgttaccgtgaagaag

SEQ ID NO: 152276 - DNA, 25 bp, probe
aactccagcacagaagcctgcgagg

SEQ ID NO: 152277 - DNA, 25 bp, probe
aacccagatgcagcaacgcagaaca

SEQ ID NO: 152278 - DNA, 25 bp, probe
aacgccacagcatcaaggatgtgca

SEQ ID NO: 152279 - DNA, 25 bp, probe
aactcctatgcataaagctgctgga

SEQ ID NO: 152280 - DNA, 25 bp, probe
aactctctggcagccataaatggag

SEQ ID NO: 152281 - DNA, 25 bp, probe
aactccatgtccccagaaatgatgg

SEQ ID NO: 152282 - DNA, 25 bp, probe
aaccgcatgactcctgcagaaactg

SEQ ID NO: 152283 - DNA, 25 bp, probe
aactctgagagtctgcaggcggctc

SEQ ID NO: 152284 - DNA, 25 bp, probe
aactctgagagtctgcaggcggctc

SEQ ID NO: 152285 - DNA, 25 bp, probe
aactctggagtcctctgagagagcc

SEQ ID NO: 152286 - DNA, 25 bp, probe
aactctggcgctgatggggcagagc

SEQ ID NO: 152287 - DNA, 25 bp, probe
aactgctgggattacaggcgtgagc

SEQ ID NO: 152288 - DNA, 25 bp, probe
aactctgtgtgaaggcaggttgcaa

SEQ ID NO: 152289 - DNA, 25 bp, probe
aactctgtgtgaaggcaggttgcaa

SEQ ID NO: 152290 - DNA, 25 bp, probe
aactctgctagaatgataaatgtca

SEQ ID NO: 152291 - DNA, 25 bp, probe
aactctgctgtgctggagatcatct

SEQ ID NO: 152292 - DNA, 25 bp, probe
aactctgctgtgctggagatcatct

SEQ ID NO: 152293 - DNA, 25 bp, probe
aactctgcttgaagagatgactctt

SEQ ID NO: 152294 - DNA, 25 bp, probe
aactctgcatagacaaaggccttaa

SEQ ID NO: 152295 - DNA, 25 bp, probe
aaccattagaaagggctcattaagc

SEQ ID NO: 152296 - DNA, 25 bp, probe
aaccattagaaagggctcattaagc

SEQ ID NO: 152297 - DNA, 25 bp, probe
aaccattggccttggtacttatggc

SEQ ID NO: 152298 - DNA, 25 bp, probe
aaccattggccttggtacttatggc

SEQ ID NO: 152299 - DNA, 25 bp, probe
aatgccaaggccagtcagacggggc

SEQ ID NO: 152300 - DNA, 25 bp, probe
aaccaaagatttaagacgggctgct

SEQ ID NO: 152301 - DNA, 25 bp, probe
aacgtgaaattgtctagtccttcgt

SEQ ID NO: 152302 - DNA, 25 bp, probe
aacgtattattgctatgtcatttcc

SEQ ID NO: 152303 - DNA, 25 bp, probe
aacgattttctgtatgatgttactt

SEQ ID NO: 152304 - DNA, 25 bp, probe
aacgttattcatcaattcttctgtg

SEQ ID NO: 152305 - DNA, 25 bp, probe
aactgcttattcaaaagttgacgga

SEQ ID NO: 152306 - DNA, 25 bp, probe
aactgctattgtaataagtgtcatc

SEQ ID NO: 152307 - DNA, 25 bp, probe
aactgctattgtaataagtgtcatc

SEQ ID NO: 152308 - DNA, 25 bp, probe
aactgctattggttatattctcaaa

SEQ ID NO: 152309 - DNA, 25 bp, probe
aactgctattggttatattctcaaa

SEQ ID NO: 152310 - DNA, 25 bp, probe
aactgtgttttttatcttcatacat

SEQ ID NO: 152311 - DNA, 25 bp, probe
aactggtttttactactgatgactt

SEQ ID NO: 152312 - DNA, 25 bp, probe
aactgtgatcactttattactctga

SEQ ID NO: 152313 - DNA, 25 bp, probe
aactgtgatcactttattactctga

SEQ ID NO: 152314 - DNA, 25 bp, probe
aacgagactcaattcctattcatga

SEQ ID NO: 152315 - DNA, 25 bp, probe
aactgagtcttgataccatattggt

SEQ ID NO: 152316 - DNA, 25 bp, probe
aactgactcttgataccatatttgt

SEQ ID NO: 152317 - DNA, 25 bp, probe
aaccctttaatagcagatttggttg

SEQ ID NO: 152318 - DNA, 25 bp, probe
aaccagttgtacagcctgatgtagg

SEQ ID NO: 152319 - DNA, 25 bp, probe
aactgcgttaataagagcaagctac

SEQ ID NO: 152320 - DNA, 25 bp, probe
aactgcgttaataagagcaagctac

SEQ ID NO: 152321 - DNA, 25 bp, probe
aactggttccatcaagactgtgcac

SEQ ID NO: 152322 - DNA, 25 bp, probe
aactggttccatcaagactgtgcac

SEQ ID NO: 152323 - DNA, 25 bp, probe
aactgattgctcaaccaggatttca

SEQ ID NO: 152324 - DNA, 25 bp, probe
aactgcatggtgtcccaggacttca

SEQ ID NO: 152325 - DNA, 25 bp, probe
aactctggtgtcgacagatccctgg

SEQ ID NO: 152326 - DNA, 25 bp, probe
aactcggctgtattaatcacgcgat

SEQ ID NO: 152327 - DNA, 25 bp, probe
aactctgtgtactgaccactgagat

SEQ ID NO: 152328 - DNA, 25 bp, probe
aacctatgtcactgactcagatgca

SEQ ID NO: 152329 - DNA, 25 bp, probe
aactctgtgtcttcatgactgttgc

SEQ ID NO: 152330 - DNA, 25 bp, probe
aactgctttggaagatctggtgtag

SEQ ID NO: 152331 - DNA, 25 bp, probe
aactgcttctagagatgggattgtg

SEQ ID NO: 152332 - DNA, 25 bp, probe
aacctgtcagggcagtacaatgtga

SEQ ID NO: 152333 - DNA, 25 bp, probe
aacgtgaaggggatggcgagctgca

SEQ ID NO: 152334 - DNA, 25 bp, probe
aacggtggcaggtttggcgagcacg

SEQ ID NO: 152335 - DNA, 25 bp, probe
aacgagtgggaggttcaaacaagag

SEQ ID NO: 152336 - DNA, 25 bp, probe
aacgggaggatggcttcacagcaga

SEQ ID NO: 152337 - DNA, 25 bp, probe
aacgggaggaggagcagcccagctg

SEQ ID NO: 152338 - DNA, 25 bp, probe
aacgtagagtgaccatatgacccag

SEQ ID NO: 152339 - DNA, 25 bp, probe
aactgtaggtaattatgcctatgca

SEQ ID NO: 152340 - DNA, 25 bp, probe
aactgtaggtaattatgcctatgca

SEQ ID NO: 152341 - DNA, 25 bp, probe
aacgtcggtaacttgagcagtccct

SEQ ID NO: 152342 - DNA, 25 bp, probe
aactgtccctgaccagggcacatcc

SEQ ID NO: 152343 - DNA, 25 bp, probe
aactgtccctgaccagggcacatcc

SEQ ID NO: 152344 - DNA, 25 bp, probe
aactgtgcatctgaacaggtgacat

SEQ ID NO: 152345 - DNA, 25 bp, probe
aactgctacatccacagatggctga

SEQ ID NO: 152346 - DNA, 25 bp, probe
aactgctacatccacagatggctga

SEQ ID NO: 152347 - DNA, 25 bp, probe
aacctgcagcatgagcacattgtca

SEQ ID NO: 152348 - DNA, 25 bp, probe
aacgctgatgcagactttggcacaa

SEQ ID NO: 152349 - DNA, 25 bp, probe
aactgtagctgtattagcagcaaaa

SEQ ID NO: 152350 - DNA, 25 bp, probe
aactgtactgtgtttcgcattaagc

SEQ ID NO: 152351 - DNA, 25 bp, probe
aactgtccgtgaactccttagagaa

SEQ ID NO: 152352 - DNA, 25 bp, probe
aactggctgagaattctcctttaga

SEQ ID NO: 152353 - DNA, 25 bp, probe
aactgagctataatatggagctttc

SEQ ID NO: 152354 - DNA, 25 bp, probe
aactgaggcatctaaggactatgta

SEQ ID NO: 152355 - DNA, 25 bp, probe
aactgaggcatctaaggactatgta

SEQ ID NO: 152356 - DNA, 25 bp, probe
aactgtggcacttaggggagatgac

SEQ ID NO: 152357 - DNA, 25 bp, probe
aactgtgggctatggggacatgaag

SEQ ID NO: 152358 - DNA, 25 bp, probe
aactgtaggctatggggacatgtgc

SEQ ID NO: 152359 - DNA, 25 bp, probe
aactgacaggtgaccgatgtacagg

SEQ ID NO: 152360 - DNA, 25 bp, probe
aacctgtttgagcctgaagacacag

SEQ ID NO: 152361 - DNA, 25 bp, probe
aacgtgttgtacctaaggccatact

SEQ ID NO: 152362 - DNA, 25 bp, probe
aactggtggtgaactcactggcctg

SEQ ID NO: 152363 - DNA, 25 bp, probe
aacccatggtgaaatagctgaacgg

SEQ ID NO: 152364 - DNA, 25 bp, probe
aacccatggtgaaatagctgaacgg

SEQ ID NO: 152365 - DNA, 25 bp, probe
aactgtgtggtacatcgcgatatca

SEQ ID NO: 152366 - DNA, 25 bp, probe
aacgtggggcacctgagcagaatct

SEQ ID NO: 152367 - DNA, 25 bp, probe
aacgatgggcagtttcacagttcat

SEQ ID NO: 152368 - DNA, 25 bp, probe
aacgggcatgacttccagatgttct

SEQ ID NO: 152369 - DNA, 25 bp, probe
aactgccctagctgccagatattta

SEQ ID NO: 152370 - DNA, 25 bp, probe
aacgccaaaatgaccaatattgaga

SEQ ID NO: 152371 - DNA, 25 bp, probe
aactccaaaagggcttcaatgcgaa

SEQ ID NO: 152372 - DNA, 25 bp, probe
aactccaaacagggcttgcgatgta

SEQ ID NO: 152373 - DNA, 25 bp, probe
aactgcccagtggagtgttcagtct

SEQ ID NO: 152374 - DNA, 25 bp, probe
aactgcccagtggagtgttcagtct

SEQ ID NO: 152375 - DNA, 25 bp, probe
aactgcccagaggagctctacaaca

SEQ ID NO: 152376 - DNA, 25 bp, probe
aactgccgcactcaggtgaaagctc

SEQ ID NO: 152377 - DNA, 25 bp, probe
aactccagacatcactggcagaagt

SEQ ID NO: 152378 - DNA, 25 bp, probe
aactccagacatcactggcagaagt

SEQ ID NO: 152379 - DNA, 25 bp, probe
aaccctgaatgcaacttctgtgcct

SEQ ID NO: 152380 - DNA, 25 bp, probe
aacccttgcatccattgttgtgtct

SEQ ID NO: 152381 - DNA, 25 bp, probe
aacccttgcatccattgttgtgtct

SEQ ID NO: 152382 - DNA, 25 bp, probe
aacccattcatctatggctttctca

SEQ ID NO: 152383 - DNA, 25 bp, probe
aaccctgccacatgttcatatatcc

SEQ ID NO: 152384 - DNA, 25 bp, probe
aagccacccagatactgcagaacac

SEQ ID NO: 152385 - DNA, 25 bp, probe
aacctgctccaaaacgaaacaagag

SEQ ID NO: 152386 - DNA, 25 bp, probe
aacccctacatcccattaacaagat

SEQ ID NO: 152387 - DNA, 25 bp, probe
aacccctacatcccattaacaagat

SEQ ID NO: 152388 - DNA, 25 bp, probe
aaccactctaatcagtaaacaggaa

SEQ ID NO: 152389 - DNA, 25 bp, probe
aaccatttcaatgagtttgcaggcg

SEQ ID NO: 152390 - DNA, 25 bp, probe
aaccctgtcatatatgctttcagaa

SEQ ID NO: 152391 - DNA, 25 bp, probe
aaccctgtcatatatgctttcagaa

SEQ ID NO: 152392 - DNA, 25 bp, probe
aacccatgtcataaccttgttgcaa

SEQ ID NO: 152393 - DNA, 25 bp, probe
aactgaagtctgaaatttggtcaaa

SEQ ID NO: 152394 - DNA, 25 bp, probe
aactgaagtctgcactagaagtaca

SEQ ID NO: 152395 - DNA, 25 bp, probe
aactgaagtctgcactagaagtaca

SEQ ID NO: 152396 - DNA, 25 bp, probe
aacggcagattcaactagagagtca

SEQ ID NO: 152397 - DNA, 25 bp, probe
aactggagaccatgcaaacagctga

SEQ ID NO: 152398 - DNA, 25 bp, probe
aactggaacctgcctgaggacaggc

SEQ ID NO: 152399 - DNA, 25 bp, probe
aacggcaacattatgctggacaaga

SEQ ID NO: 152400 - DNA, 25 bp, probe
aactggaacagaacctggtcaggtg

SEQ ID NO: 152401 - DNA, 25 bp, probe
aacgtgatgctggattccgaggggc

SEQ ID NO: 152402 - DNA, 25 bp, probe
aactgtatgggctaccggatggggg

SEQ ID NO: 152403 - DNA, 25 bp, probe
aacctgatgggctcctacaggtcgg

SEQ ID NO: 152404 - DNA, 25 bp, probe
aacggtgttgcatcgatacaggcag

SEQ ID NO: 152405 - DNA, 25 bp, probe
aactggatgcatttcagccataccc

SEQ ID NO: 152406 - DNA, 25 bp, probe
aactggatgcatttcagccataccc

SEQ ID NO: 152407 - DNA, 25 bp, probe
aactggatgtgctatccaattccct

SEQ ID NO: 152408 - DNA, 25 bp, probe
aactgtgtgtgaatctgcttttcct

SEQ ID NO: 152409 - DNA, 25 bp, probe
aactgtgatgtactgttctgagatc

SEQ ID NO: 152410 - DNA, 25 bp, probe
aacgggaagctcactggcatggcct

SEQ ID NO: 152411 - DNA, 25 bp, probe
aacggcagaatgcctaccgtgctgc

SEQ ID NO: 152412 - DNA, 25 bp, probe
aactgcgagagcttgctgaggggtg

SEQ ID NO: 152413 - DNA, 25 bp, probe
aactgggcaggtggagagtgtggtc

SEQ ID NO: 152414 - DNA, 25 bp, probe
aacgagctgcatggggagaagctgg

SEQ ID NO: 152415 - DNA, 25 bp, probe
aacgacatgggggagaccctgctgc

SEQ ID NO: 152416 - DNA, 25 bp, probe
aaccctgtggtatacaccctgagaa

SEQ ID NO: 152417 - DNA, 25 bp, probe
aaccctgtctaatgaaacctgtgtc

SEQ ID NO: 152418 - DNA, 25 bp, probe
aacccagcctctgagaaaccatttc

SEQ ID NO: 152419 - DNA, 25 bp, probe
aacgtactcttggcagaaaggattt

SEQ ID NO: 152420 - DNA, 25 bp, probe
aactgtgactttccaaatgagcctt

SEQ ID NO: 152421 - DNA, 25 bp, probe
aatcttaacttgaaggagtccttgc

SEQ ID NO: 152422 - DNA, 25 bp, probe
aactgggacttggtggaatcctaga

SEQ ID NO: 152423 - DNA, 25 bp, probe
aactgggacttggtggaatcctaga

SEQ ID NO: 152424 - DNA, 25 bp, probe
aacgaggaatgaggggcttcacgag

SEQ ID NO: 152425 - DNA, 25 bp, probe
aaccctaagagcagccttcagtgag

SEQ ID NO: 152426 - DNA, 25 bp, probe
aaccctaagagcagccttcagtgag

SEQ ID NO: 152427 - DNA, 25 bp, probe
aaccctgaagactccacatactatt

SEQ ID NO: 152428 - DNA, 25 bp, probe
aaccctgagaagttacttcacattt

SEQ ID NO: 152429 - DNA, 25 bp, probe
aaccgtggaagatgaactgcactta

SEQ ID NO: 152430 - DNA, 25 bp, probe
aacctatggaaatggagatccccaa

SEQ ID NO: 152431 - DNA, 25 bp, probe
aacctcagtgggattgaaacccagg

SEQ ID NO: 152432 - DNA, 25 bp, probe
aacgctggtgaaatttataaccaca

SEQ ID NO: 152433 - DNA, 25 bp, probe
aacgctggtgaaatttataaccaca

SEQ ID NO: 152434 - DNA, 25 bp, probe
aacgctgtgtgaggattgtcaacat

SEQ ID NO: 152435 - DNA, 25 bp, probe
aacgctgagtcaggctgagtggact

SEQ ID NO: 152436 - DNA, 25 bp, probe
aacgggtggcgctagaggccatgga

SEQ ID NO: 152437 - DNA, 25 bp, probe
aacgtgcgtggtgaggacagcggcc

SEQ ID NO: 152438 - DNA, 25 bp, probe
aactgggtgaagaagaacggggctg

SEQ ID NO: 152439 - DNA, 25 bp, probe
aactgggtgaagaagaacggggctg

SEQ ID NO: 152440 - DNA, 25 bp, probe
aactgggatgacgacagcctagggc

SEQ ID NO: 152441 - DNA, 25 bp, probe
aactgaagagactaggcgctggggc

SEQ ID NO: 152442 - DNA, 25 bp, probe
aagtatggataggctgggcctgggc

SEQ ID NO: 152443 - DNA, 25 bp, probe
aagtatggataggctgggcctgggc

SEQ ID NO: 152444 - DNA, 25 bp, probe
aagttagtagttgagcctgaccatg

SEQ ID NO: 152445 - DNA, 25 bp, probe
aagttagtagttgagcctgaccatg

SEQ ID NO: 152446 - DNA, 25 bp, probe
aagacaccttttgtccagacagctc

SEQ ID NO: 152447 - DNA, 25 bp, probe
aagaacgttcccaggcagaactccg

SEQ ID NO: 152448 - DNA, 25 bp, probe
aagaacgttcccaggcagaactccg

SEQ ID NO: 152449 - DNA, 25 bp, probe
aagaacgttcccaggcagaactccg

SEQ ID NO: 152450 - DNA, 25 bp, probe
aagagggaacccatgggactctctg

SEQ ID NO: 152451 - DNA, 25 bp, probe
aagaggtgacgtccgtgggacctag

SEQ ID NO: 152452 - DNA, 25 bp, probe
aacgcctctcgttctgggaggctta

SEQ ID NO: 152453 - DNA, 25 bp, probe
aatctgccaccgtgggggaactgac

SEQ ID NO: 152454 - DNA, 25 bp, probe
aactgtccaggtcggagggatcacg

SEQ ID NO: 152455 - DNA, 25 bp, probe
aactgtgtcaggattgaggatgaac

SEQ ID NO: 152456 - DNA, 25 bp, probe
aatcagcttgcaaggagataggagc

SEQ ID NO: 152457 - DNA, 25 bp, probe
aactgcatgctggacgagtcattca

SEQ ID NO: 152458 - DNA, 25 bp, probe
aactgagagcaccggtgctatcaca

SEQ ID NO: 152459 - DNA, 25 bp, probe
aactggcccatgctgtgaatgcctg

SEQ ID NO: 152460 - DNA, 25 bp, probe
aactgagcctagatatggaccattt

SEQ ID NO: 152461 - DNA, 25 bp, probe
aactgagcctagatatggaccattt

SEQ ID NO: 152462 - DNA, 25 bp, probe
aactgagcagttaggatgtaaatat

SEQ ID NO: 152463 - DNA, 25 bp, probe
aactgaacttgaggcatctcaaaga

SEQ ID NO: 152464 - DNA, 25 bp, probe
aactgaagcatttcaattcacttga

SEQ ID NO: 152465 - DNA, 25 bp, probe
aactgaggactaaagtcactgatga

SEQ ID NO: 152466 - DNA, 25 bp, probe
aactgaatgagcaaggcctcttgga

SEQ ID NO: 152467 - DNA, 25 bp, probe
aactgcacagagggctacttcatgg

SEQ ID NO: 152468 - DNA, 25 bp, probe
aactgcattgagggacattttgatc

SEQ ID NO: 152469 - DNA, 25 bp, probe
aactgtgtatattgactttcatgtc

SEQ ID NO: 152470 - DNA, 25 bp, probe
aacctgtttaggattcttccaaatg

SEQ ID NO: 152471 - DNA, 25 bp, probe
aaccagtttcagatgtcctgtcctc

SEQ ID NO: 152472 - DNA, 25 bp, probe
aaccagtttcagatgtcctgtcctc

SEQ ID NO: 152473 - DNA, 25 bp, probe
aaccagggccagatattcgaagctt

SEQ ID NO: 152474 - DNA, 25 bp, probe
aaccagggccagatattcgaagctt

SEQ ID NO: 152475 - DNA, 25 bp, probe
aaccggtggagcagtgatgagtgtc

SEQ ID NO: 152476 - DNA, 25 bp, probe
aaccacgaggagctggagaggtctc

SEQ ID NO: 152477 - DNA, 25 bp, probe
aaccccaacagcttgaagaggacag

SEQ ID NO: 152478 - DNA, 25 bp, probe
aacccgcacacacagcaggaggggc

SEQ ID NO: 152479 - DNA, 25 bp, probe
aacctcgaaacgtcttgcgggtgtg

SEQ ID NO: 152480 - DNA, 25 bp, probe
aaccccatattcttttacatggctt

SEQ ID NO: 152481 - DNA, 25 bp, probe
aaccccatattcttttacatggctt

SEQ ID NO: 152482 - DNA, 25 bp, probe
aaccggcatattattccatatcttt

SEQ ID NO: 152483 - DNA, 25 bp, probe
aacgaggaactaagactcaaaatct

SEQ ID NO: 152484 - DNA, 25 bp, probe
aacgaggaactaagactcaaaatct

SEQ ID NO: 152485 - DNA, 25 bp, probe
aagcggaaaataaactccaagcagc

SEQ ID NO: 152486 - DNA, 25 bp, probe
aactgggactatctagtcaacagat

SEQ ID NO: 152487 - DNA, 25 bp, probe
aactgggactatctagtcaacagat

SEQ ID NO: 152488 - DNA, 25 bp, probe
aactgggaggacattctgctaagat

SEQ ID NO: 152489 - DNA, 25 bp, probe
aactgggcaacaatttgctgtaaaa

SEQ ID NO: 152490 - DNA, 25 bp, probe
caactaggaaaaatcttggacgtga

SEQ ID NO: 152491 - DNA, 25 bp, probe
aactgaggacccaatattggcctgt

SEQ ID NO: 152492 - DNA, 25 bp, probe
aactgtgggcaataatatggcattt

SEQ ID NO: 152493 - DNA, 25 bp, probe
aacgaggccaagttcattggcttca

SEQ ID NO: 152494 - DNA, 25 bp, probe
aactgaagacaaagttcgggtcatg

SEQ ID NO: 152495 - DNA, 25 bp, probe
aacctcatgaacaggatctgggatc

SEQ ID NO: 152496 - DNA, 25 bp, probe
aaccgataccatgagatgctgaata

SEQ ID NO: 152497 - DNA, 25 bp, probe
aaccgcaagccggagaggatttggt

SEQ ID NO: 152498 - DNA, 25 bp, probe
aacccacacgtgcacgtcattggag

SEQ ID NO: 152499 - DNA, 25 bp, probe
aacccacacgtgcacgtcattggag

SEQ ID NO: 152500 - DNA, 25 bp, probe
aacccacacgtgcacgtcattggag

SEQ ID NO: 152501 - DNA, 25 bp, probe
aacccacacgtgcacgtcattggag

SEQ ID NO: 152502 - DNA, 25 bp, probe
aacccacacgtgcacgtcattggag

SEQ ID NO: 152503 - DNA, 25 bp, probe
aacccagagggccaggatttgaggc

SEQ ID NO: 152504 - DNA, 25 bp, probe
aaccaatggagagctgaatgttgat

SEQ ID NO: 152505 - DNA, 25 bp, probe
aacccagtaactcgtcatttgattt

SEQ ID NO: 152506 - DNA, 25 bp, probe
aaccctgaagccaggaactatgtct

SEQ ID NO: 152507 - DNA, 25 bp, probe
aaccactggaacagttcagccattt

SEQ ID NO: 152508 - DNA, 25 bp, probe
aatccctaagacagatcttgccgtg

SEQ ID NO: 152509 - DNA, 25 bp, probe
aagccaaagagcccgttggccgtgg

SEQ ID NO: 152510 - DNA, 25 bp, probe
aaccatatcgatgaggtctggccca

SEQ ID NO: 152511 - DNA, 25 bp, probe
aacggacagatgtgtgagtggcccc

SEQ ID NO: 152512 - DNA, 25 bp, probe
aacgaagccatacggacatcgaccc

SEQ ID NO: 152513 - DNA, 25 bp, probe
aacgggcttatgcagaccagcaagc

SEQ ID NO: 152514 - DNA, 25 bp, probe
aactgggacctgaagccgcagaaca

SEQ ID NO: 152515 - DNA, 25 bp, probe
aacgtgggcctgatgcaacagcaga

SEQ ID NO: 152516 - DNA, 25 bp, probe
aacgtgtggcggaagaacctgcagg

SEQ ID NO: 152517 - DNA, 25 bp, probe
aaccatggggtgtgcaaccacaagc

SEQ ID NO: 152518 - DNA, 25 bp, probe
aaccaggcgggctgtgaaccagccc

SEQ ID NO: 152519 - DNA, 25 bp, probe
aaccagagcctctaattaaccacgc

SEQ ID NO: 152520 - DNA, 25 bp, probe
aaccagagcctctaattaaccacgc

SEQ ID NO: 152521 - DNA, 25 bp, probe
aaccaggcgttgaactccaccaacg

SEQ ID NO: 152522 - DNA, 25 bp, probe
aaccagtgagttcctatccaaatac

SEQ ID NO: 152523 - DNA, 25 bp, probe
aaccgtgatagtccttgcaagtaag

SEQ ID NO: 152524 - DNA, 25 bp, probe
aacccagtagtcattgtttacagca

SEQ ID NO: 152525 - DNA, 25 bp, probe
aactgtttagtcatgtgttttcatc

SEQ ID NO: 152526 - DNA, 25 bp, probe
aactgttattgaacttggctatctc

SEQ ID NO: 152527 - DNA, 25 bp, probe
aacgatctatggatccaggttatcc

SEQ ID NO: 152528 - DNA, 25 bp, probe
caacggacggattggctggtttcct

SEQ ID NO: 152529 - DNA, 25 bp, probe
aacccctggcaaccaggaatccact

SEQ ID NO: 152530 - DNA, 25 bp, probe
aagccaacgggatcagaggaccatc

SEQ ID NO: 152531 - DNA, 25 bp, probe
aaccagagggtacctaggtctcagg

SEQ ID NO: 152532 - DNA, 25 bp, probe
aacctgcaggcgaaccatatttacc

SEQ ID NO: 152533 - DNA, 25 bp, probe
aacctgaggagagcctgttggaccc

SEQ ID NO: 152534 - DNA, 25 bp, probe
aacgtggtgatatactttgcaactg

SEQ ID NO: 152535 - DNA, 25 bp, probe
aaccaggagcattaagttctgaaat

SEQ ID NO: 152536 - DNA, 25 bp, probe
aacgggagatatgagggctcaagtc

SEQ ID NO: 152537 - DNA, 25 bp, probe
aacgccgaatatccagggccaactc

SEQ ID NO: 152538 - DNA, 25 bp, probe
aaccaagatatcccaggacgtttgc

SEQ ID NO: 152539 - DNA, 25 bp, probe
aaccaagacagcacagtgcccctgt

SEQ ID NO: 152540 - DNA, 25 bp, probe
aagcctggatccaagggacccattt

SEQ ID NO: 152541 - DNA, 25 bp, probe
aaccaggtcatcagggacccattgt

SEQ ID NO: 152542 - DNA, 25 bp, probe
aaccagtagctcatggggccttgga

SEQ ID NO: 152543 - DNA, 25 bp, probe
aaccaaactcttattctcagtggaa

SEQ ID NO: 152544 - DNA, 25 bp, probe
aacccaaatattattcagctggtac

SEQ ID NO: 152545 - DNA, 25 bp, probe
gaaatccaactgaattacccggtag

SEQ ID NO: 152546 - DNA, 25 bp, probe
aagataaatctgcctaaccctggga

SEQ ID NO: 152547 - DNA, 25 bp, probe
aagaaggacttctacgacctggcag

SEQ ID NO: 152548 - DNA, 25 bp, probe
aagaccataaactggactctgctgg

SEQ ID NO: 152549 - DNA, 25 bp, probe
aagaactacaactgggccatcacca

SEQ ID NO: 152550 - DNA, 25 bp, probe
aagaaaattcctctggcaataccat

SEQ ID NO: 152551 - DNA, 25 bp, probe
aagaaccaccctgaggtttccatgc

SEQ ID NO: 152552 - DNA, 25 bp, probe
aagacggactttgaggtcctcacca

SEQ ID NO: 152553 - DNA, 25 bp, probe
aagacggactttgaggtcctcacca

SEQ ID NO: 152554 - DNA, 25 bp, probe
aaccagagggttgctggtcctgcac

SEQ ID NO: 152555 - DNA, 25 bp, probe
aacctggcctttgtgaattcatgca

SEQ ID NO: 152556 - DNA, 25 bp, probe
aacctggcctttgtgaattcatgca

SEQ ID NO: 152557 - DNA, 25 bp, probe
aacctaggaagtgtaatgtatgcat

SEQ ID NO: 152558 - DNA, 25 bp, probe
aacctcctaagtatcaagtatagaa

SEQ ID NO: 152559 - DNA, 25 bp, probe
aacctcgtttttggcaagtctacag

SEQ ID NO: 152560 - DNA, 25 bp, probe
aacctcgtttttggcaagtctacag

SEQ ID NO: 152561 - DNA, 25 bp, probe
aaccatcagtttgtgacaatgactc

SEQ ID NO: 152562 - DNA, 25 bp, probe
aaccatcagtttgtgacaatgactc

SEQ ID NO: 152563 - DNA, 25 bp, probe
aaccattcgtctgatatctatcccc

SEQ ID NO: 152564 - DNA, 25 bp, probe
aagccttggtcactactttagagcc

SEQ ID NO: 152565 - DNA, 25 bp, probe
aagccggactatgacatccgggccg

SEQ ID NO: 152566 - DNA, 25 bp, probe
aacctggactatatcatccgcagcc

SEQ ID NO: 152567 - DNA, 25 bp, probe
aacctggactatatcatccgcagcc

SEQ ID NO: 152568 - DNA, 25 bp, probe
aagactgatgacaggccatccttcc

SEQ ID NO: 152569 - DNA, 25 bp, probe
aacctatgcacatcccttgcatttt

SEQ ID NO: 152570 - DNA, 25 bp, probe
aacctcatgaagaccctgcagcatg

SEQ ID NO: 152571 - DNA, 25 bp, probe
aaccacatgtactcctgcagattta

SEQ ID NO: 152572 - DNA, 25 bp, probe
aacctttcaaacagagcattgtgat

SEQ ID NO: 152573 - DNA, 25 bp, probe
aacccattaaacaacactgttctgt

SEQ ID NO: 152574 - DNA, 25 bp, probe
aacccatgattattttcctgttgtg

SEQ ID NO: 152575 - DNA, 25 bp, probe
aaccctgttacacatggcgtgtgcg

SEQ ID NO: 152576 - DNA, 25 bp, probe
aaccctgcttacctctgatggatat

SEQ ID NO: 152577 - DNA, 25 bp, probe
aacgacatcatgctactgcagctgg

SEQ ID NO: 152578 - DNA, 25 bp, probe
aacgacatccaattgtcatgctgca

SEQ ID NO: 152579 - DNA, 25 bp, probe
aacgacacacactactgcaatgata

SEQ ID NO: 152580 - DNA, 25 bp, probe
aacgacacacactactgcaatgata

SEQ ID NO: 152581 - DNA, 25 bp, probe
aacgacatcaccgaggagtgtaggc

SEQ ID NO: 152582 - DNA, 25 bp, probe
aaccaaaccaagccctgttgtgctc

SEQ ID NO: 152583 - DNA, 25 bp, probe
aacccttggaaatctgtgtgtgtgc

SEQ ID NO: 152584 - DNA, 25 bp, probe
aacctttggaggccgttgatgtggt

SEQ ID NO: 152585 - DNA, 25 bp, probe
aaccttatcaaggattttcatgttg

SEQ ID NO: 152586 - DNA, 25 bp, probe
aaccttcgcgtggcattttcacatt

SEQ ID NO: 152587 - DNA, 25 bp, probe
aaccattacagcctgtatttgccaa

SEQ ID NO: 152588 - DNA, 25 bp, probe
aagccataaactgtctcacctaaac

SEQ ID NO: 152589 - DNA, 25 bp, probe
aagccataaactgtctcacctaaac

SEQ ID NO: 152590 - DNA, 25 bp, probe
aaccatgaatgggcacccccatact

SEQ ID NO: 152591 - DNA, 25 bp, probe
aaccaatatgcctaccttccaaagg

SEQ ID NO: 152592 - DNA, 25 bp, probe
aaccaatatttcactgtcgacaaga

SEQ ID NO: 152593 - DNA, 25 bp, probe
aaccaaatcttctctgtttcagaag

SEQ ID NO: 152594 - DNA, 25 bp, probe
aacccatattatttgcgtgtacgaa

SEQ ID NO: 152595 - DNA, 25 bp, probe
aagccattcattttggggaacagaa

SEQ ID NO: 152596 - DNA, 25 bp, probe
aagccacctactgccaggaattgga

SEQ ID NO: 152597 - DNA, 25 bp, probe
aaccccaggtacccatgaatgtgag

SEQ ID NO: 152598 - DNA, 25 bp, probe
aaccccaggtacccatgaatgtgag

SEQ ID NO: 152599 - DNA, 25 bp, probe
aaccattcgtgtgcacctaattgtg

SEQ ID NO: 152600 - DNA, 25 bp, probe
aaccttctgtgaactccatgagctg

SEQ ID NO: 152601 - DNA, 25 bp, probe
aaccgtctgttgaatacacagcatt

SEQ ID NO: 152602 - DNA, 25 bp, probe
aaccttttgtgttgtcagactttgg

SEQ ID NO: 152603 - DNA, 25 bp, probe
aacctctaacagaaatatactttgg

SEQ ID NO: 152604 - DNA, 25 bp, probe
aaccttaatcacccaaacattatag

SEQ ID NO: 152605 - DNA, 25 bp, probe
aaccttacccagccatgaacatgtt

SEQ ID NO: 152606 - DNA, 25 bp, probe
aacgttaccagcagctgaaaccaat

SEQ ID NO: 152607 - DNA, 25 bp, probe
aacgcttaccagagcaagatcaaga

SEQ ID NO: 152608 - DNA, 25 bp, probe
aacgattccgaaacataatatcaat

SEQ ID NO: 152609 - DNA, 25 bp, probe
aacgcagctccaacttatataaaat

SEQ ID NO: 152610 - DNA, 25 bp, probe
aacgccatctctactaaaaatataa

SEQ ID NO: 152611 - DNA, 25 bp, probe
aacgccgactacaggaagaagcaga

SEQ ID NO: 152612 - DNA, 25 bp, probe
aacccagactgtctgctacagcaac

SEQ ID NO: 152613 - DNA, 25 bp, probe
aacccagccattccgcatggctggt

SEQ ID NO: 152614 - DNA, 25 bp, probe
aaccacccatatctatcctggattc

SEQ ID NO: 152615 - DNA, 25 bp, probe
aaccctccaagggatctgcttgata

SEQ ID NO: 152616 - DNA, 25 bp, probe
aaccttcaaaactatctcatctgtc

SEQ ID NO: 152617 - DNA, 25 bp, probe
aaccttaatagttctgcctgcttgc

SEQ ID NO: 152618 - DNA, 25 bp, probe
aactggtcagcatgtgcatctgccc

SEQ ID NO: 152619 - DNA, 25 bp, probe
aagctggtcagatagttctccgatt

SEQ ID NO: 152620 - DNA, 25 bp, probe
aagaggtcacttggtttgggcttca

SEQ ID NO: 152621 - DNA, 25 bp, probe
aagcggatcactgtgtagggggaca

SEQ ID NO: 152622 - DNA, 25 bp, probe
aagcggatcactgtgtagggggaca

SEQ ID NO: 152623 - DNA, 25 bp, probe
aacgtgtgcctgctggaggcgtaca

SEQ ID NO: 152624 - DNA, 25 bp, probe
aagcctgatactctccaggctgaag

SEQ ID NO: 152625 - DNA, 25 bp, probe
aacctgatcacagtcacactggtga

SEQ ID NO: 152626 - DNA, 25 bp, probe
aacgtgatcatcaccactgacagat

SEQ ID NO: 152627 - DNA, 25 bp, probe
aacgtgcatattgccttgcaaagaa

SEQ ID NO: 152628 - DNA, 25 bp, probe
aacgttatgatgacctggcaacaaa

SEQ ID NO: 152629 - DNA, 25 bp, probe
aacgcttaaacaagtgcacacaaaa

SEQ ID NO: 152630 - DNA, 25 bp, probe
aaccctacaaaattgactcaaagca

SEQ ID NO: 152631 - DNA, 25 bp, probe
aagcccgaaaatatagtgctatacc

SEQ ID NO: 152632 - DNA, 25 bp, probe
aagctgccaaaactttaggaatagt

SEQ ID NO: 152633 - DNA, 25 bp, probe
aaccccaaaccatgcggagaattag

SEQ ID NO: 152634 - DNA, 25 bp, probe
aaccccaaaccatgcggagaattag

SEQ ID NO: 152635 - DNA, 25 bp, probe
aaccccaggcacgaatgggcggatt

SEQ ID NO: 152636 - DNA, 25 bp, probe
aacctcagcgtgaatttgggggatt

SEQ ID NO: 152637 - DNA, 25 bp, probe
aaccaagtttcaggggacatgagtt

SEQ ID NO: 152638 - DNA, 25 bp, probe
aaccagacttgggtgagtgaattta

SEQ ID NO: 152639 - DNA, 25 bp, probe
aacgaattgtgggaggaaagcgagc

SEQ ID NO: 152640 - DNA, 25 bp, probe
aatcgtattgtgtggaggaaatggc

SEQ ID NO: 152641 - DNA, 25 bp, probe
aatctgtatttgtggaggaaagtcc

SEQ ID NO: 152642 - DNA, 25 bp, probe
aacgtattcttcgagggcattcagt

SEQ ID NO: 152643 - DNA, 25 bp, probe
aacgtattcttcgagggcattcagt

SEQ ID NO: 152644 - DNA, 25 bp, probe
aacctgaactgtgaggcgggcagtc

SEQ ID NO: 152645 - DNA, 25 bp, probe
aatgtatgaccactggggccggagt

SEQ ID NO: 152646 - DNA, 25 bp, probe
aagcttatcccactgggttgggatt

SEQ ID NO: 152647 - DNA, 25 bp, probe
aacctattctcactaagatggggtt

SEQ ID NO: 152648 - DNA, 25 bp, probe
aagcctgacttacaatatgcctgtt

SEQ ID NO: 152649 - DNA, 25 bp, probe
aacgcagactttgaaatcgtggtca

SEQ ID NO: 152650 - DNA, 25 bp, probe
aacgcagactttgaaatcgtggtca

SEQ ID NO: 152651 - DNA, 25 bp, probe
aaccatacttttaagattatttcag

SEQ ID NO: 152652 - DNA, 25 bp, probe
aaccatcctcatatcatcagtattt

SEQ ID NO: 152653 - DNA, 25 bp, probe
aacctcctaacttcactgtattctt

SEQ ID NO: 152654 - DNA, 25 bp, probe
aacctcactcgactgacattttttt

SEQ ID NO: 152655 - DNA, 25 bp, probe
aagcctgccatcaaggacatttctt

SEQ ID NO: 152656 - DNA, 25 bp, probe
aagctaattggaaacatttcttgca

SEQ ID NO: 152657 - DNA, 25 bp, probe
aagctaattggaaacatttcttgca

SEQ ID NO: 152658 - DNA, 25 bp, probe
aacgcacagcggaaacatattcttg

SEQ ID NO: 152659 - DNA, 25 bp, probe
aacgacgaggtaatgctgaggctat

SEQ ID NO: 152660 - DNA, 25 bp, probe
aacgacgaggtaatgctgaggctat

SEQ ID NO: 152661 - DNA, 25 bp, probe
aacggggagctgaatgcggacgacc

SEQ ID NO: 152662 - DNA, 25 bp, probe
aagccgtcgactatggagacagagg

SEQ ID NO: 152663 - DNA, 25 bp, probe
aacctgtctcccagggagcagggga

SEQ ID NO: 152664 - DNA, 25 bp, probe
aaccactgcttcttgggaggagtgg

SEQ ID NO: 152665 - DNA, 25 bp, probe
aaccctctgctgctgaagaggcgga

SEQ ID NO: 152666 - DNA, 25 bp, probe
aagccttgtcatttgacaaccgagg

SEQ ID NO: 152667 - DNA, 25 bp, probe
aagcgtgttacttacaaagaggtgc

SEQ ID NO: 152668 - DNA, 25 bp, probe
aaccttctcctcgacaaggacttca

SEQ ID NO: 152669 - DNA, 25 bp, probe
aacgctatatgcctccagaagtgtt

SEQ ID NO: 152670 - DNA, 25 bp, probe
aacgttgctaccgagagatggttat

SEQ ID NO: 152671 - DNA, 25 bp, probe
aacgtgctgctctcggagcagggtg

SEQ ID NO: 152672 - DNA, 25 bp, probe
aacgtgctgctctcggagcagggtg

SEQ ID NO: 152673 - DNA, 25 bp, probe
aacgtcttcagacagatgcagcaag

SEQ ID NO: 152674 - DNA, 25 bp, probe
aacgtcgtgtgactcagtgcagaga

SEQ ID NO: 152675 - DNA, 25 bp, probe
aactggcatgaatgtctggcagaga

SEQ ID NO: 152676 - DNA, 25 bp, probe
aactggcatgaatgtctggcagaga

SEQ ID NO: 152677 - DNA, 25 bp, probe
aacgtgatgaaggctctgcagcacg

SEQ ID NO: 152678 - DNA, 25 bp, probe
aagctatgatcatgccactgcactc

SEQ ID NO: 152679 - DNA, 25 bp, probe
aagctgaattttaatgaccaacggg

SEQ ID NO: 152680 - DNA, 25 bp, probe
aagctaacctagaggccaccgagaa

SEQ ID NO: 152681 - DNA, 25 bp, probe
aagctaacctagaggccaccgagaa

SEQ ID NO: 152682 - DNA, 25 bp, probe
gacggaaaaggatcctcactcgaca

SEQ ID NO: 152683 - DNA, 25 bp, probe
aacgaggacggattcctactctgct

SEQ ID NO: 152684 - DNA, 25 bp, probe
aacggaacagacatctccgcttctt

SEQ ID NO: 152685 - DNA, 25 bp, probe
aacgcagaacaggcgattccagttc

SEQ ID NO: 152686 - DNA, 25 bp, probe
aacgaggactcggatcatgcctgta

SEQ ID NO: 152687 - DNA, 25 bp, probe
aacgtggaacaggagcaggctctga

SEQ ID NO: 152688 - DNA, 25 bp, probe
aagctgtggaaaggacctgccccac

SEQ ID NO: 152689 - DNA, 25 bp, probe
aagctgtaaaatgatcaccctgaac

SEQ ID NO: 152690 - DNA, 25 bp, probe
aacccaataggttccagcctgaact

SEQ ID NO: 152691 - DNA, 25 bp, probe
aacccaagaggtccaaggctgcagt

SEQ ID NO: 152692 - DNA, 25 bp, probe
aacgtgcagagggtggactcgccag

SEQ ID NO: 152693 - DNA, 25 bp, probe
aacgtgtcagtggtggacctgacct

SEQ ID NO: 152694 - DNA, 25 bp, probe
aacctgtcattgggggtcagacctc

SEQ ID NO: 152695 - DNA, 25 bp, probe
aaccggatatgaagccccgagtctc

SEQ ID NO: 152696 - DNA, 25 bp, probe
aacctggacagacagccaaagcttc

SEQ ID NO: 152697 - DNA, 25 bp, probe
aacctgacacagccaattatacatc

SEQ ID NO: 152698 - DNA, 25 bp, probe
aacctcctatccttggagagcagct

SEQ ID NO: 152699 - DNA, 25 bp, probe
aaccattcttacttggtggccatgt

SEQ ID NO: 152700 - DNA, 25 bp, probe
aaccttctgcttgtggtgcattatt

SEQ ID NO: 152701 - DNA, 25 bp, probe
aacctgcatctgctggagggtggta

SEQ ID NO: 152702 - DNA, 25 bp, probe
aagcttcctggtggagggcaggttt

SEQ ID NO: 152703 - DNA, 25 bp, probe
aagttcacaatgtggccgaggactt

SEQ ID NO: 152704 - DNA, 25 bp, probe
aagcttcacaaggggacggccctgc

SEQ ID NO: 152705 - DNA, 25 bp, probe
aagcttcacaaggggacggccctgc

SEQ ID NO: 152706 - DNA, 25 bp, probe
aatgcgtagatagaagaagccccac

SEQ ID NO: 152707 - DNA, 25 bp, probe
aatagtagacatgaaaactactttg

SEQ ID NO: 152708 - DNA, 25 bp, probe
aagctgtagactgtaaactcctcgt

SEQ ID NO: 152709 - DNA, 25 bp, probe
aagcttatggccctaaagtcgacat

SEQ ID NO: 152710 - DNA, 25 bp, probe
aagttaggcacgtagaaccgcatcc

SEQ ID NO: 152711 - DNA, 25 bp, probe
aatgtgaaagccgtcaagttcccca

SEQ ID NO: 152712 - DNA, 25 bp, probe
aaggcaagacacgcttacacggcca

SEQ ID NO: 152713 - DNA, 25 bp, probe
aagctggaaagggcctaaaggctga

SEQ ID NO: 152714 - DNA, 25 bp, probe
aagctggaaagggacgaactggtgt

SEQ ID NO: 152715 - DNA, 25 bp, probe
aacccaaagatgccacggactggtg

SEQ ID NO: 152716 - DNA, 25 bp, probe
aacccataagatgatctgtgccggc

SEQ ID NO: 152717 - DNA, 25 bp, probe
aacccataagatgatctgtgccggc

SEQ ID NO: 152718 - DNA, 25 bp, probe
aacgacgaggtcatgcaaccaggca

SEQ ID NO: 152719 - DNA, 25 bp, probe
aacgaccatgtgattgacgcgacgc

SEQ ID NO: 152720 - DNA, 25 bp, probe
aacgaaggctgacttgattgtgcca

SEQ ID NO: 152721 - DNA, 25 bp, probe
aacgcacaggctattagtcatgata

SEQ ID NO: 152722 - DNA, 25 bp, probe
aaccacatggattttcagtttccct

SEQ ID NO: 152723 - DNA, 25 bp, probe
aacccgtgattccaagtgcttatcc

SEQ ID NO: 152724 - DNA, 25 bp, probe
aacccgtgattccaagtgcttatcc

SEQ ID NO: 152725 - DNA, 25 bp, probe
aacccttttgtgaagatcttgacca

SEQ ID NO: 152726 - DNA, 25 bp, probe
aacctcttgtctaagagacctacct

SEQ ID NO: 152727 - DNA, 25 bp, probe
aacgtttgattcagataccttcaac

SEQ ID NO: 152728 - DNA, 25 bp, probe
aacgtttgtagaagatactagttga

SEQ ID NO: 152729 - DNA, 25 bp, probe
aacgcttctgcaaatgctgttctat

SEQ ID NO: 152730 - DNA, 25 bp, probe
aacccatctgatgtctgaatctgaa

SEQ ID NO: 152731 - DNA, 25 bp, probe
aacctcctcatagctgacattgaac

SEQ ID NO: 152732 - DNA, 25 bp, probe
aacctcagcatctacctgaacatcc

SEQ ID NO: 152733 - DNA, 25 bp, probe
aacctcagcatctacctgaacatcc

SEQ ID NO: 152734 - DNA, 25 bp, probe
aacctcgctatgggcatatgaccct

SEQ ID NO: 152735 - DNA, 25 bp, probe
aacctcgctatgggcatatgaccct

SEQ ID NO: 152736 - DNA, 25 bp, probe
aaccatcgatgaaggaatatctctt

SEQ ID NO: 152737 - DNA, 25 bp, probe
aacgctggtgcaatgttttcttgtt

SEQ ID NO: 152738 - DNA, 25 bp, probe
aacgtggtcaggttgtttgatgtgt

SEQ ID NO: 152739 - DNA, 25 bp, probe
aagcgagctgacgctggttttgtgt

SEQ ID NO: 152740 - DNA, 25 bp, probe
aacgagctgacatctattctgttgg

SEQ ID NO: 152741 - DNA, 25 bp, probe
aacgcgttcgcagttgcagcgattg

SEQ ID NO: 152742 - DNA, 25 bp, probe
aacgcagcttccgtaagcatgtgtg

SEQ ID NO: 152743 - DNA, 25 bp, probe
aacgcagcttccgtaagcatgtgtg

SEQ ID NO: 152744 - DNA, 25 bp, probe
aaccaggcaccgaaaatgctgatgt

SEQ ID NO: 152745 - DNA, 25 bp, probe
aaccgcccaggatcagattgcatgt

SEQ ID NO: 152746 - DNA, 25 bp, probe
aaccgcccaggatcagattgcatgt

SEQ ID NO: 152747 - DNA, 25 bp, probe
aacccccatgtatgcctatatgtgt

SEQ ID NO: 152748 - DNA, 25 bp, probe
aaccatactcatcaccattataggt

SEQ ID NO: 152749 - DNA, 25 bp, probe
aaccatggtgtctaaagatatagga

SEQ ID NO: 152750 - DNA, 25 bp, probe
aaccatgtggtttgaacttgaagaa

SEQ ID NO: 152751 - DNA, 25 bp, probe
aaccatgtggtttgaacttgaagaa

SEQ ID NO: 152752 - DNA, 25 bp, probe
aaccaggttttgtgaggaatgcatt

SEQ ID NO: 152753 - DNA, 25 bp, probe
aaccagatttctttagggcacaatt

SEQ ID NO: 152754 - DNA, 25 bp, probe
aacgagagtgctatgtgaggggcct

SEQ ID NO: 152755 - DNA, 25 bp, probe
aacgagagtgctatgtgaggggcct

SEQ ID NO: 152756 - DNA, 25 bp, probe
aacgcagacatgttctggaagttcc

SEQ ID NO: 152757 - DNA, 25 bp, probe
aacccaatattgctgatagtatgct

SEQ ID NO: 152758 - DNA, 25 bp, probe
aacccaatattgctgatagtatgct

SEQ ID NO: 152759 - DNA, 25 bp, probe
aaccagcactttctgtggtactcct

SEQ ID NO: 152760 - DNA, 25 bp, probe
aaccagcaaatttgagttccaatcc

SEQ ID NO: 152761 - DNA, 25 bp, probe
aacccaagctgatgagtttccttcc

SEQ ID NO: 152762 - DNA, 25 bp, probe
aagcccaggctgaagagtttaactt

SEQ ID NO: 152763 - DNA, 25 bp, probe
aagcccaggctgaagagtttaactt

SEQ ID NO: 152764 - DNA, 25 bp, probe
aacccagtgtcagaattcaaacttc

SEQ ID NO: 152765 - DNA, 25 bp, probe
aacccctgagaggacaacaacagtt

SEQ ID NO: 152766 - DNA, 25 bp, probe
aaccacctgggggacatgaccagtg

SEQ ID NO: 152767 - DNA, 25 bp, probe
aaccgcgggggctgtgagcagcggt

SEQ ID NO: 152768 - DNA, 25 bp, probe
aacctggggatctctggagcagggc

SEQ ID NO: 152769 - DNA, 25 bp, probe
aatctaggaggctcctggcggaagc

SEQ ID NO: 152770 - DNA, 25 bp, probe
aatctaggaggctcctggcggaagc

SEQ ID NO: 152771 - DNA, 25 bp, probe
aacgagctggaggccagcgtggtgg

SEQ ID NO: 152772 - DNA, 25 bp, probe
aacgcaaggatgtcgcactgctggt

SEQ ID NO: 152773 - DNA, 25 bp, probe
aacgcagggtcacgcgcatggtggt

SEQ ID NO: 152774 - DNA, 25 bp, probe
aacgcagggtcacgcgcatggtggt

SEQ ID NO: 152775 - DNA, 25 bp, probe
aacgagttctctagcgctagtgatg

SEQ ID NO: 152776 - DNA, 25 bp, probe
aagctagacttcaaggcgggatgaa

SEQ ID NO: 152777 - DNA, 25 bp, probe
aagctagacttcaaggcgggatgaa

SEQ ID NO: 152778 - DNA, 25 bp, probe
aaccaggctctttggggctagacag

SEQ ID NO: 152779 - DNA, 25 bp, probe
aaccagtgcctttaggtgagattca

SEQ ID NO: 152780 - DNA, 25 bp, probe
aaccaatgaccttatggctgagagt

SEQ ID NO: 152781 - DNA, 25 bp, probe
aacccagacttaatcttgaatgata

SEQ ID NO: 152782 - DNA, 25 bp, probe
aacctgagcctatttctagtataag

SEQ ID NO: 152783 - DNA, 25 bp, probe
aatgtctagttttatttgtatagga

SEQ ID NO: 152784 - DNA, 25 bp, probe
aagccaagatttcatctattgaatt

SEQ ID NO: 152785 - DNA, 25 bp, probe
aagccaagatttcatctattgaatt

SEQ ID NO: 152786 - DNA, 25 bp, probe
aagccagaaaatctcatcctagatc

SEQ ID NO: 152787 - DNA, 25 bp, probe
aaccaacgtcatcgttgccaacaca

SEQ ID NO: 152788 - DNA, 25 bp, probe
aaccaccagatctgcttcaaggaaa

SEQ ID NO: 152789 - DNA, 25 bp, probe
aagccaccaatccctgaaagattaa

SEQ ID NO: 152790 - DNA, 25 bp, probe
aagccccatatctggccaagttcaa

SEQ ID NO: 152791 - DNA, 25 bp, probe
aacctccatatcctggcggttgaaa

SEQ ID NO: 152792 - DNA, 25 bp, probe
aacccttacactttggctatgaaca

SEQ ID NO: 152793 - DNA, 25 bp, probe
aaccctctaactaatggtatctaca

SEQ ID NO: 152794 - DNA, 25 bp, probe
aaccgcaagaagcccgggatctaca

SEQ ID NO: 152795 - DNA, 25 bp, probe
aacccaaacacatgcagtggcttac

SEQ ID NO: 152796 - DNA, 25 bp, probe
aacgccaagaactgctggccgtagc

SEQ ID NO: 152797 - DNA, 25 bp, probe
aacgccaagaactgctggccgtagc

SEQ ID NO: 152798 - DNA, 25 bp, probe
aacccagagacttcagtgtcctgaa

SEQ ID NO: 152799 - DNA, 25 bp, probe
aacccggacctgaatgtaatgcaag

SEQ ID NO: 152800 - DNA, 25 bp, probe
aaccttggccgaattgtcacaatag

SEQ ID NO: 152801 - DNA, 25 bp, probe
aaccttggccgaattgtcacaatag

SEQ ID NO: 152802 - DNA, 25 bp, probe
aaccttgccttgaaatttacacagt

SEQ ID NO: 152803 - DNA, 25 bp, probe
aaccttgcctccagattatgaacca

SEQ ID NO: 152804 - DNA, 25 bp, probe
aaccttgcctcatagcttaaagtat

SEQ ID NO: 152805 - DNA, 25 bp, probe
aaccttcatctaaagtgatataaat

SEQ ID NO: 152806 - DNA, 25 bp, probe
aaccttgatgataaccagtggaaat

SEQ ID NO: 152807 - DNA, 25 bp, probe
aagcctgcgaggaagcctatggaat

SEQ ID NO: 152808 - DNA, 25 bp, probe
aagccatggggaacccagacatctt

SEQ ID NO: 152809 - DNA, 25 bp, probe
aagccatggggaacccagacatctt

SEQ ID NO: 152810 - DNA, 25 bp, probe
aaccagagaaagatgcaagacatgt

SEQ ID NO: 152811 - DNA, 25 bp, probe
aaccaaacacagctaatgctatggg

SEQ ID NO: 152812 - DNA, 25 bp, probe
aacccaagcacgactggacgaggtc

SEQ ID NO: 152813 - DNA, 25 bp, probe
aacccagagctcaaccagaagggat

SEQ ID NO: 152814 - DNA, 25 bp, probe
aacctgaagctagacgagcaggctt

SEQ ID NO: 152815 - DNA, 25 bp, probe
aaccatgggctggacttacggcttg

SEQ ID NO: 152816 - DNA, 25 bp, probe
aaccgtagtggggtggaggctgctg

SEQ ID NO: 152817 - DNA, 25 bp, probe
aaccctactggcgtgtggggctgat

SEQ ID NO: 152818 - DNA, 25 bp, probe
aaccctgacatgtattgcgggcgct

SEQ ID NO: 152819 - DNA, 25 bp, probe
aaccctacagaggtggtgagcatgt

SEQ ID NO: 152820 - DNA, 25 bp, probe
aaccgcttcatgccactgaatacgt

SEQ ID NO: 152821 - DNA, 25 bp, probe
aaccacttatctcccatatgagagt

SEQ ID NO: 152822 - DNA, 25 bp, probe
aaccactgcgaccacaagaaggatg

SEQ ID NO: 152823 - DNA, 25 bp, probe
aacccagcagaataaggagctgcag

SEQ ID NO: 152824 - DNA, 25 bp, probe
aacccagcagaataaggagctgcag

SEQ ID NO: 152825 - DNA, 25 bp, probe
aacccaggccagtggatagtgacca

SEQ ID NO: 152826 - DNA, 25 bp, probe
aacccaggacagtaaagatctgtct

SEQ ID NO: 152827 - DNA, 25 bp, probe
aacgcacaaacgtcacaagacatgc

SEQ ID NO: 152828 - DNA, 25 bp, probe
aagcccgaagggtatgaaatctgtc

SEQ ID NO: 152829 - DNA, 25 bp, probe
aagctcccagggaactgaactcttg

SEQ ID NO: 152830 - DNA, 25 bp, probe
aaccccactgagaactaaatgctgt

SEQ ID NO: 152831 - DNA, 25 bp, probe
aacccgcctcacaagtgcgaagtct

SEQ ID NO: 152832 - DNA, 25 bp, probe
aacccgcctcacaagtgcgaagtct

SEQ ID NO: 152833 - DNA, 25 bp, probe
aacccagctcctagggtacagtcta

SEQ ID NO: 152834 - DNA, 25 bp, probe
aacctcagcccgaggaaacatgctc

SEQ ID NO: 152835 - DNA, 25 bp, probe
aacccagccctggggtatgagctgc

SEQ ID NO: 152836 - DNA, 25 bp, probe
aacccagtactggaggtcaagatgg

SEQ ID NO: 152837 - DNA, 25 bp, probe
aacccagtactggaggtcaagatgg

SEQ ID NO: 152838 - DNA, 25 bp, probe
aacccagacactgacctctactggt

SEQ ID NO: 152839 - DNA, 25 bp, probe
aacccagacactgacctctactggt

SEQ ID NO: 152840 - DNA, 25 bp, probe
aaccaaatcactgaactttgctgag

SEQ ID NO: 152841 - DNA, 25 bp, probe
aagctacctcctaaactatagtggc

SEQ ID NO: 152842 - DNA, 25 bp, probe
aacccactatgctataagttaggcc

SEQ ID NO: 152843 - DNA, 25 bp, probe
aacctagtgagctaaaggctttgtc

SEQ ID NO: 152844 - DNA, 25 bp, probe
aacgcttttctgtacagagtcttac

SEQ ID NO: 152845 - DNA, 25 bp, probe
aaccaatatttttcaggatgctgta

SEQ ID NO: 152846 - DNA, 25 bp, probe
aaccaatatttttcaggatgctgta

SEQ ID NO: 152847 - DNA, 25 bp, probe
aaccagcaattgcccatcgagatct

SEQ ID NO: 152848 - DNA, 25 bp, probe
aacgcacacaggcctatctggagga

SEQ ID NO: 152849 - DNA, 25 bp, probe
aaccccatggcctacgtcatggaga

SEQ ID NO: 152850 - DNA, 25 bp, probe
aaccccatgctctatgtcttcatgg

SEQ ID NO: 152851 - DNA, 25 bp, probe
aaccctcatgctaaactgtctgatt

SEQ ID NO: 152852 - DNA, 25 bp, probe
aaccccaatccaagcgactatgtgc

SEQ ID NO: 152853 - DNA, 25 bp, probe
aaccctgaagcctggcacgatgtct

SEQ ID NO: 152854 - DNA, 25 bp, probe
aacccagagacgggcgagcagattc

SEQ ID NO: 152855 - DNA, 25 bp, probe
aacctgcatgaggctgagggcaaga

SEQ ID NO: 152856 - DNA, 25 bp, probe
aagccctgatcctgggcatctacaa

SEQ ID NO: 152857 - DNA, 25 bp, probe
aagccctgggtggtgaggctcacag

SEQ ID NO: 152858 - DNA, 25 bp, probe
aaccacgggtgtaagtgccatctgg

SEQ ID NO: 152859 - DNA, 25 bp, probe
aaccactaggcttgcaagtctaccg

SEQ ID NO: 152860 - DNA, 25 bp, probe
aaccactaggcttgcaagtctaccg

SEQ ID NO: 152861 - DNA, 25 bp, probe
aacgcctaggctttgtggatgtcca

SEQ ID NO: 152862 - DNA, 25 bp, probe
aaccctttcttctatggatgtctca

SEQ ID NO: 152863 - DNA, 25 bp, probe
aaccgtgcttctttcatgtcaggcg

SEQ ID NO: 152864 - DNA, 25 bp, probe
aacctgtgtttcctggcgcaggaga

SEQ ID NO: 152865 - DNA, 25 bp, probe
aacctggccagcgctaccaggagtt

SEQ ID NO: 152866 - DNA, 25 bp, probe
aacctggccagcgctaccaggagtt

SEQ ID NO: 152867 - DNA, 25 bp, probe
aaccggcgaggacacacgcagagtg

SEQ ID NO: 152868 - DNA, 25 bp, probe
aacctggctgagaccaaaacaactg

SEQ ID NO: 152869 - DNA, 25 bp, probe
aagccagtctaggaaagagacgact

SEQ ID NO: 152870 - DNA, 25 bp, probe
aagccagtctaggaaagagacgact

SEQ ID NO: 152871 - DNA, 25 bp, probe
aaccacattctggggaagactattc

SEQ ID NO: 152872 - DNA, 25 bp, probe
aacccgcctgcagtggaaagtgtat

SEQ ID NO: 152873 - DNA, 25 bp, probe
aacccgcctgcagtggaaagtgtat

SEQ ID NO: 152874 - DNA, 25 bp, probe
aaccaccctctttacggtgtgtgat

SEQ ID NO: 152875 - DNA, 25 bp, probe
aacccacagcattttcaagattttg

SEQ ID NO: 152876 - DNA, 25 bp, probe
aacccacagcattttcaagattttg

SEQ ID NO: 152877 - DNA, 25 bp, probe
aacctcaagcttttcaggcatcctc

SEQ ID NO: 152878 - DNA, 25 bp, probe
aacccactgttgtacatggtcacca

SEQ ID NO: 152879 - DNA, 25 bp, probe
aacccacatgttcagttatccatgc

SEQ ID NO: 152880 - DNA, 25 bp, probe
aaccccattctgtatgttttcatgg

SEQ ID NO: 152881 - DNA, 25 bp, probe
aaccccatcatttacttcttcatgg

SEQ ID NO: 152882 - DNA, 25 bp, probe
aaccccatgatttacagcctaagga

SEQ ID NO: 152883 - DNA, 25 bp, probe
aaccccatattggatggcacctgag

SEQ ID NO: 152884 - DNA, 25 bp, probe
aacccaaatgtgacaggacctgctg

SEQ ID NO: 152885 - DNA, 25 bp, probe
aacccaaatgtgacaggacctgctg

SEQ ID NO: 152886 - DNA, 25 bp, probe
aacccaaatgcagcagatgcacggc

SEQ ID NO: 152887 - DNA, 25 bp, probe
aacctcagcaatcagcagacacggg

SEQ ID NO: 152888 - DNA, 25 bp, probe
aacgctcacagatgggctccagcgt

SEQ ID NO: 152889 - DNA, 25 bp, probe
aaccatgcaagtggcgactgcacag

SEQ ID NO: 152890 - DNA, 25 bp, probe
aaccatgagagtcgccagatcacgc

SEQ ID NO: 152891 - DNA, 25 bp, probe
aaccagatcgtgcacagagacataa

SEQ ID NO: 152892 - DNA, 25 bp, probe
aacctgattgtggaaagcacatctg

SEQ ID NO: 152893 - DNA, 25 bp, probe
aacctgcttgggtatgcagcagcct

SEQ ID NO: 152894 - DNA, 25 bp, probe
aacctgcttgggtatgcagcagcct

SEQ ID NO: 152895 - DNA, 25 bp, probe
aaccctgctgggtatccggcagaat

SEQ ID NO: 152896 - DNA, 25 bp, probe
aacccgatcgaatactgagcataat

SEQ ID NO: 152897 - DNA, 25 bp, probe
aagccactaaaatcctgggcatcat

SEQ ID NO: 152898 - DNA, 25 bp, probe
aagccactagaaccaaggcccagct

SEQ ID NO: 152899 - DNA, 25 bp, probe
aaccctggagactaagaactcttat

SEQ ID NO: 152900 - DNA, 25 bp, probe
aacccagggaaaagagctctcaatt

SEQ ID NO: 152901 - DNA, 25 bp, probe
aaccacaggtgaaattgctcttgaa

SEQ ID NO: 152902 - DNA, 25 bp, probe
aaccacaggtgaaattgctcttgaa

SEQ ID NO: 152903 - DNA, 25 bp, probe
aagccatcaagtgctttctttccaa

SEQ ID NO: 152904 - DNA, 25 bp, probe
aaccattgtgtgtttcctctttgaa

SEQ ID NO: 152905 - DNA, 25 bp, probe
aagccactttgcttacaccttaagt

SEQ ID NO: 152906 - DNA, 25 bp, probe
aaccactattccatgcttttaagta

SEQ ID NO: 152907 - DNA, 25 bp, probe
aaccattatgatttatgctacttaa

SEQ ID NO: 152908 - DNA, 25 bp, probe
aaccaatcagaaaactccttgagca

SEQ ID NO: 152909 - DNA, 25 bp, probe
aacctatgacaccagcttcctggac

SEQ ID NO: 152910 - DNA, 25 bp, probe
aacctgatggaccagtacagcgagg

SEQ ID NO: 152911 - DNA, 25 bp, probe
aacctcatccagacagaacgacaga

SEQ ID NO: 152912 - DNA, 25 bp, probe
aaccacactcaaagagacagagaag

SEQ ID NO: 152913 - DNA, 25 bp, probe
aaccacaatatgtatagcacatgga

SEQ ID NO: 152914 - DNA, 25 bp, probe
aaccacaatatgtatagcacatgga

SEQ ID NO: 152915 - DNA, 25 bp, probe
aaccatgcacatagaatacggcaca

SEQ ID NO: 152916 - DNA, 25 bp, probe
aaccatcaatggaaacagggcagtg

SEQ ID NO: 152917 - DNA, 25 bp, probe
aaccatcaatggaaacagggcagtg

SEQ ID NO: 152918 - DNA, 25 bp, probe
aagcctcagtcggcaaaaggcgcgg

SEQ ID NO: 152919 - DNA, 25 bp, probe
aagcctctctcagcaaaaagccagt

SEQ ID NO: 152920 - DNA, 25 bp, probe
aagccttacctaggaagacgcaggg

SEQ ID NO: 152921 - DNA, 25 bp, probe
aagcgttacctggtgggcacagtga

SEQ ID NO: 152922 - DNA, 25 bp, probe
aacctgacactctcaggagacatta

SEQ ID NO: 152923 - DNA, 25 bp, probe
aacctgacactctcaggagacatta

SEQ ID NO: 152924 - DNA, 25 bp, probe
aacccaagctctgcggaaatcaaca

SEQ ID NO: 152925 - DNA, 25 bp, probe
aaccgcaaatatgcccattatccca

SEQ ID NO: 152926 - DNA, 25 bp, probe
aaccagaccatcaatggccacttcc

SEQ ID NO: 152927 - DNA, 25 bp, probe
aaccgtgccatcttgcaaactacac

SEQ ID NO: 152928 - DNA, 25 bp, probe
aacctgtcctaaatcaattcctcaa

SEQ ID NO: 152929 - DNA, 25 bp, probe
aaccatttgaaagtatatatcccag

SEQ ID NO: 152930 - DNA, 25 bp, probe
aaccactatgtaaatattcagacca

SEQ ID NO: 152931 - DNA, 25 bp, probe
aaccacctgtgaatcagatccatgt

SEQ ID NO: 152932 - DNA, 25 bp, probe
aaccacctgtgaatcagatccatgt

SEQ ID NO: 152933 - DNA, 25 bp, probe
aaccatgctgtttacaacctgtacg

SEQ ID NO: 152934 - DNA, 25 bp, probe
aaccatcaagttccaaccattaagg

SEQ ID NO: 152935 - DNA, 25 bp, probe
aaccagaagggatacagtgtgaagt

SEQ ID NO: 152936 - DNA, 25 bp, probe
aaccgaggtgttgccagtgctaagc

SEQ ID NO: 152937 - DNA, 25 bp, probe
aaccggccttggcccaaggatagct

SEQ ID NO: 152938 - DNA, 25 bp, probe
aaccagtagtttccacacaggtggc

SEQ ID NO: 152939 - DNA, 25 bp, probe
aagacggagtttcaccatgttggcc

SEQ ID NO: 152940 - DNA, 25 bp, probe
aagacaatggcctttaccattatgc

SEQ ID NO: 152941 - DNA, 25 bp, probe
aagaaacggctgactacatttcaag

SEQ ID NO: 152942 - DNA, 25 bp, probe
aatattcctggcatacctttaaggt

SEQ ID NO: 152943 - DNA, 25 bp, probe
aatgttaggtcctcctttggaggtg

SEQ ID NO: 152944 - DNA, 25 bp, probe
aatcccaggtccatactctaggttt

SEQ ID NO: 152945 - DNA, 25 bp, probe
aaccacagttctgatacttcacgtt

SEQ ID NO: 152946 - DNA, 25 bp, probe
aacctgcgtgtctaaaaccacgtga

SEQ ID NO: 152947 - DNA, 25 bp, probe
aacctgcgtgctttataagcctctc

SEQ ID NO: 152948 - DNA, 25 bp, probe
aaccttgatgtgttaaactatgtgc

SEQ ID NO: 152949 - DNA, 25 bp, probe
aaccctacttgcaaaatctgcagcg

SEQ ID NO: 152950 - DNA, 25 bp, probe
aaccctacttgcaaaatctgcagcg

SEQ ID NO: 152951 - DNA, 25 bp, probe
aaccgctacactacagagtctgatg

SEQ ID NO: 152952 - DNA, 25 bp, probe
aaccagttgcactacataatctctg

SEQ ID NO: 152953 - DNA, 25 bp, probe
aaccagtatcgctcatagatcagca

SEQ ID NO: 152954 - DNA, 25 bp, probe
aaccatgtattctactcatgttgcc

SEQ ID NO: 152955 - DNA, 25 bp, probe
aacctgaattctttcagagctgact

SEQ ID NO: 152956 - DNA, 25 bp, probe
aaccagtatctccttggaattcatc

SEQ ID NO: 152957 - DNA, 25 bp, probe
aaccagttcagactttgtactctca

SEQ ID NO: 152958 - DNA, 25 bp, probe
aacctgcttagtattgacactctct

SEQ ID NO: 152959 - DNA, 25 bp, probe
aaccgcttattgacacagaattttc

SEQ ID NO: 152960 - DNA, 25 bp, probe
caaccggctggtaaagcaattcctc

SEQ ID NO: 152961 - DNA, 25 bp, probe
caaccacctgagcaaacacttactg

SEQ ID NO: 152962 - DNA, 25 bp, probe
caaccacctgagcaaacacttactg

SEQ ID NO: 152963 - DNA, 25 bp, probe
aaccagtctcagcaagacatcctac

SEQ ID NO: 152964 - DNA, 25 bp, probe
aacctgatgccgaacagagaccttc

SEQ ID NO: 152965 - DNA, 25 bp, probe
aacctcattctatccatgactttgc

SEQ ID NO: 152966 - DNA, 25 bp, probe
aacctcattctatccatgactttgc

SEQ ID NO: 152967 - DNA, 25 bp, probe
aaccaatttacaatctgactgtctc

SEQ ID NO: 152968 - DNA, 25 bp, probe
aagcctctttaaatcggtgtatcct

SEQ ID NO: 152969 - DNA, 25 bp, probe
aagccttttcataatcaagtttgct

SEQ ID NO: 152970 - DNA, 25 bp, probe
aaccttgtcctaatacgctatgtgc

SEQ ID NO: 152971 - DNA, 25 bp, probe
aacctgaagcacaagttcccatggc

SEQ ID NO: 152972 - DNA, 25 bp, probe
aacctgaagcacaagttcccatggc

SEQ ID NO: 152973 - DNA, 25 bp, probe
aaccgtagaagggtgcccagcacag

SEQ ID NO: 152974 - DNA, 25 bp, probe
aaccgcgagaagatgacccagatca

SEQ ID NO: 152975 - DNA, 25 bp, probe
aaccggaggagagactcaccatcga

SEQ ID NO: 152976 - DNA, 25 bp, probe
aaccaggagaacgccatcatccagg

SEQ ID NO: 152977 - DNA, 25 bp, probe
aaccgcgagatagggcagatcactc

SEQ ID NO: 152978 - DNA, 25 bp, probe
aaccaaggatcaatgaaatgcacat

SEQ ID NO: 152979 - DNA, 25 bp, probe
aaccaaggatcaatgaaatgcacat

SEQ ID NO: 152980 - DNA, 25 bp, probe
aagctgaagatgagatagaggacat

SEQ ID NO: 152981 - DNA, 25 bp, probe
aagctgaaatatggccagactatca

SEQ ID NO: 152982 - DNA, 25 bp, probe
aagctgagcacaccccagaagaaac

SEQ ID NO: 152983 - DNA, 25 bp, probe
aagcagtggaccccattaataatcc

SEQ ID NO: 152984 - DNA, 25 bp, probe
aagcagtggaccccattaataatcc

SEQ ID NO: 152985 - DNA, 25 bp, probe
aagcctagcatcccatgtcaaaaac

SEQ ID NO: 152986 - DNA, 25 bp, probe
aagcctagcatcccatgtcaaaaac

SEQ ID NO: 152987 - DNA, 25 bp, probe
aagcctagcatcccatgtcaaaaac

SEQ ID NO: 152988 - DNA, 25 bp, probe
aacctctagcatcgattcaaagcag

SEQ ID NO: 152989 - DNA, 25 bp, probe
aacctgctaagtttccaagcagtaa

SEQ ID NO: 152990 - DNA, 25 bp, probe
aacctgcatagagtttgcaaagatt

SEQ ID NO: 152991 - DNA, 25 bp, probe
aaccatgaagaaattcgaatctccc

SEQ ID NO: 152992 - DNA, 25 bp, probe
aacctgcaataaactcgctgttcct

SEQ ID NO: 152993 - DNA, 25 bp, probe
aagcttggtcaaactttttccagca

SEQ ID NO: 152994 - DNA, 25 bp, probe
aagcgatgggaacgctttgtccaca

SEQ ID NO: 152995 - DNA, 25 bp, probe
aagcgattggcttcgtcatggtacc

SEQ ID NO: 152996 - DNA, 25 bp, probe
aagctatgctgggcaattctggcaa

SEQ ID NO: 152997 - DNA, 25 bp, probe
aagcttcggcaggcggtgacagagc

SEQ ID NO: 152998 - DNA, 25 bp, probe
aagagacgacttgggacgcaacgac

SEQ ID NO: 152999 - DNA, 25 bp, probe
aagaggagcttcaggacgccctgac

SEQ ID NO: 153000 - DNA, 25 bp, probe
aagggatgcttgagtacgaaccggc

SEQ ID NO: 153001 - DNA, 25 bp, probe
aagcggatctctgtagacgaagctc

SEQ ID NO: 153002 - DNA, 25 bp, probe
aagccagtatctgtcatatgctgaa

SEQ ID NO: 153003 - DNA, 25 bp, probe
aagccagtagtaacacctgaagcaa

SEQ ID NO: 153004 - DNA, 25 bp, probe
aaccggcagtgacctcactgaagac

SEQ ID NO: 153005 - DNA, 25 bp, probe
aaccggcagtgacctcactgaagac

SEQ ID NO: 153006 - DNA, 25 bp, probe
aagccaggatggcccgaggaagagg

SEQ ID NO: 153007 - DNA, 25 bp, probe
aagccacagaagccatgggataaag

SEQ ID NO: 153008 - DNA, 25 bp, probe
aagcccaagatgctgggtatcgaat

SEQ ID NO: 153009 - DNA, 25 bp, probe
aagcccaacatctgggacttggagc

SEQ ID NO: 153010 - DNA, 25 bp, probe
aagcccaaatcacctgtacttggtc

SEQ ID NO: 153011 - DNA, 25 bp, probe
aagcccaaatcacctgtacttggtc

SEQ ID NO: 153012 - DNA, 25 bp, probe
aaccaaagtcacagctaaggattca

SEQ ID NO: 153013 - DNA, 25 bp, probe
aaccacgagacagacaacatgaacc

SEQ ID NO: 153014 - DNA, 25 bp, probe
aacctggacatcgccaaagagacca

SEQ ID NO: 153015 - DNA, 25 bp, probe
aacctgaggatcgacctaacacatc

SEQ ID NO: 153016 - DNA, 25 bp, probe
aaccacatgagggaccagaacaatt

SEQ ID NO: 153017 - DNA, 25 bp, probe
aaccctaggtattgcatattccatt

SEQ ID NO: 153018 - DNA, 25 bp, probe
aaccacatcaggattgccatttcac

SEQ ID NO: 153019 - DNA, 25 bp, probe
caacctgggatgaaatctccccacg

SEQ ID NO: 153020 - DNA, 25 bp, probe
aaccagacacgaattgtttgccacc

SEQ ID NO: 153021 - DNA, 25 bp, probe
aaccagcaccgcgtgtgctttgagc

SEQ ID NO: 153022 - DNA, 25 bp, probe
aagccagccccagtactggtagaga

SEQ ID NO: 153023 - DNA, 25 bp, probe
aagcctggcccataatgtgaacata

SEQ ID NO: 153024 - DNA, 25 bp, probe
aagcctggcccataatgtgaacata

SEQ ID NO: 153025 - DNA, 25 bp, probe
aagccatagcaggagttattaacca

SEQ ID NO: 153026 - DNA, 25 bp, probe
aagactagctattgctttaaaggag

SEQ ID NO: 153027 - DNA, 25 bp, probe
aagccatagtacccctacaagtggt

SEQ ID NO: 153028 - DNA, 25 bp, probe
aaccataccatctcccaggagtgca

SEQ ID NO: 153029 - DNA, 25 bp, probe
aagccaagacatctgcccaaagtga

SEQ ID NO: 153030 - DNA, 25 bp, probe
aaccacggagttcacaacacagcag

SEQ ID NO: 153031 - DNA, 25 bp, probe
aaccccagagttctcagaggcactt

SEQ ID NO: 153032 - DNA, 25 bp, probe
aaccccagagttctcagaggcactt

SEQ ID NO: 153033 - DNA, 25 bp, probe
aaccaccagttacttgagtgtcact

SEQ ID NO: 153034 - DNA, 25 bp, probe
aagtaacgtttgtagaagatactag

SEQ ID NO: 153035 - DNA, 25 bp, probe
aagtaaattaagcagatagtcaaag

SEQ ID NO: 153036 - DNA, 25 bp, probe
aagtggaaccggcgaaacgacatgg

SEQ ID NO: 153037 - DNA, 25 bp, probe
aagctggaacactggctggagaccc

SEQ ID NO: 153038 - DNA, 25 bp, probe
aagcagaaacactcctgtggatggt

SEQ ID NO: 153039 - DNA, 25 bp, probe
aagcggtacctcgccgagggtgaga

SEQ ID NO: 153040 - DNA, 25 bp, probe
aagcggtacctcgccgagggtgaga

SEQ ID NO: 153041 - DNA, 25 bp, probe
aagccgtgagtcaggcctgggttgg

SEQ ID NO: 153042 - DNA, 25 bp, probe
aaccgctggacgagggcggcttgcg

SEQ ID NO: 153043 - DNA, 25 bp, probe
aaccgctggacgagggcggcttgcg

SEQ ID NO: 153044 - DNA, 25 bp, probe
cactgccttgggtggaccaggcttc

SEQ ID NO: 153045 - DNA, 25 bp, probe
aagcacctgggtgtgctccaggctt

SEQ ID NO: 153046 - DNA, 25 bp, probe
aagcattcagtattgctgtccgctt

SEQ ID NO: 153047 - DNA, 25 bp, probe
aagcattcagtattgctgtccgctt

SEQ ID NO: 153048 - DNA, 25 bp, probe
aagcattcagtattgctgtccgctt

SEQ ID NO: 153049 - DNA, 25 bp, probe
aagctggcgacaggcagtccatgat

SEQ ID NO: 153050 - DNA, 25 bp, probe
aagctgctgttagatgccgatgtgt

SEQ ID NO: 153051 - DNA, 25 bp, probe
aagctgttcttgtgctcaattgaaa

SEQ ID NO: 153052 - DNA, 25 bp, probe
aagctgttcctgtgatgaacttaga

SEQ ID NO: 153053 - DNA, 25 bp, probe
aagctgttccggcattactatgtca

SEQ ID NO: 153054 - DNA, 25 bp, probe
aaccttccatgtcaagattcagcta

SEQ ID NO: 153055 - DNA, 25 bp, probe
aacctctgttggtaagtatacatga

SEQ ID NO: 153056 - DNA, 25 bp, probe
aagccctgactttaaggatacatga

SEQ ID NO: 153057 - DNA, 25 bp, probe
aagccacactttgaaggtaataaat

SEQ ID NO: 153058 - DNA, 25 bp, probe
aaccacctcttgacaatgggaaact

SEQ ID NO: 153059 - DNA, 25 bp, probe
aagcccctcttgaaggtgtgttctc

SEQ ID NO: 153060 - DNA, 25 bp, probe
aagctggggttgaggatccattatc

SEQ ID NO: 153061 - DNA, 25 bp, probe
aagcccggaagcaggagatcattaa

SEQ ID NO: 153062 - DNA, 25 bp, probe
aagcccggaagcaggagatcattaa

SEQ ID NO: 153063 - DNA, 25 bp, probe
aagcccggaagcaggagatcattaa

SEQ ID NO: 153064 - DNA, 25 bp, probe
aaccccgcagagagagcagatttga

SEQ ID NO: 153065 - DNA, 25 bp, probe
aagcccccaagtaagaagtctgagt

SEQ ID NO: 153066 - DNA, 25 bp, probe
aagcccccaagttgatatttctatt

SEQ ID NO: 153067 - DNA, 25 bp, probe
aagcctcctaagacgagaaccttct

SEQ ID NO: 153068 - DNA, 25 bp, probe
aaccatcgccaaatagaaccgcctt

SEQ ID NO: 153069 - DNA, 25 bp, probe
aaccactcacgttagcatagggctc

SEQ ID NO: 153070 - DNA, 25 bp, probe
aagcgcactgctgttcagatagggg

SEQ ID NO: 153071 - DNA, 25 bp, probe
aaccactgtgacatggctagcaccc

SEQ ID NO: 153072 - DNA, 25 bp, probe
aaccactgtgacatggctagcaccc

SEQ ID NO: 153073 - DNA, 25 bp, probe
aaccacaggactttgggaggccaag

SEQ ID NO: 153074 - DNA, 25 bp, probe
aaccagggagctgtgggaagccaca

SEQ ID NO: 153075 - DNA, 25 bp, probe
cacccaggaagctgtgtccaagtcc

SEQ ID NO: 153076 - DNA, 25 bp, probe
aaccagtgacacagctaccaattct

SEQ ID NO: 153077 - DNA, 25 bp, probe
aaccggcatgagatgctgaccctgg

SEQ ID NO: 153078 - DNA, 25 bp, probe
aaccggcatgagatgctgaccctgg

SEQ ID NO: 153079 - DNA, 25 bp, probe
aagcgctacgagacgctggaggtgg

SEQ ID NO: 153080 - DNA, 25 bp, probe
aagcactatgagatactcgaggtgg

SEQ ID NO: 153081 - DNA, 25 bp, probe
aagctgtgagagtgcaggcgggggg

SEQ ID NO: 153082 - DNA, 25 bp, probe
aagctggaggcatatctacttgggg

SEQ ID NO: 153083 - DNA, 25 bp, probe
aagctggaggcatatctacttgggg

SEQ ID NO: 153084 - DNA, 25 bp, probe
aagctgggccgcacaattggagagg

SEQ ID NO: 153085 - DNA, 25 bp, probe
aagctggctactgaagatatccgag

SEQ ID NO: 153086 - DNA, 25 bp, probe
aagcgtcggccggagatgagccgag

SEQ ID NO: 153087 - DNA, 25 bp, probe
aagaatcgtggctctgatgcccagg

SEQ ID NO: 153088 - DNA, 25 bp, probe
aagaacgtcgatgctgggaaagtga

SEQ ID NO: 153089 - DNA, 25 bp, probe
aagaacgtcgatgctgggaaagtga

SEQ ID NO: 153090 - DNA, 25 bp, probe
aagccggtggacagcggaacatatg

SEQ ID NO: 153091 - DNA, 25 bp, probe
gaacctacggacaggtgtacaaggg

SEQ ID NO: 153092 - DNA, 25 bp, probe
aagtcaacgcccaggactacaaggg

SEQ ID NO: 153093 - DNA, 25 bp, probe
aatctggtcgcctgggaaacaagcc

SEQ ID NO: 153094 - DNA, 25 bp, probe
aagctgcttcggggggtgagcaaac

SEQ ID NO: 153095 - DNA, 25 bp, probe
aagctttcgggagtggtcagactgt

SEQ ID NO: 153096 - DNA, 25 bp, probe
aagcttaatgggctggccaggctgt

SEQ ID NO: 153097 - DNA, 25 bp, probe
aagcttatccggaatcccggcagcc

SEQ ID NO: 153098 - DNA, 25 bp, probe
aacctttcgagactcctcaagcatg

SEQ ID NO: 153099 - DNA, 25 bp, probe
aaccgctatagagtattccataatt

SEQ ID NO: 153100 - DNA, 25 bp, probe
aaccacttatggcactgtatatatt

SEQ ID NO: 153101 - DNA, 25 bp, probe
aaccacacttagtcctgatgtactt

SEQ ID NO: 153102 - DNA, 25 bp, probe
aaccacactctactcagcatgtgga

SEQ ID NO: 153103 - DNA, 25 bp, probe
aaccaccatgtcttcagtgattgaa

SEQ ID NO: 153104 - DNA, 25 bp, probe
aagccccagaagccgtggtgggagg

SEQ ID NO: 153105 - DNA, 25 bp, probe
aagccgaggacgtgcttggggagct

SEQ ID NO: 153106 - DNA, 25 bp, probe
aagccggagcacgaggatcaggggc

SEQ ID NO: 153107 - DNA, 25 bp, probe
aacctggatcatggtgttctggtgg

SEQ ID NO: 153108 - DNA, 25 bp, probe
aagcctccattgggttatttgtgcc

SEQ ID NO: 153109 - DNA, 25 bp, probe
aagactctcaaggagtactttcttc

SEQ ID NO: 153110 - DNA, 25 bp, probe
aagccatgtcaaggttaagtctttc

SEQ ID NO: 153111 - DNA, 25 bp, probe
aaccttcaatttatggtcttctgtt

SEQ ID NO: 153112 - DNA, 25 bp, probe
aaccattcccatgttgttaactatt

SEQ ID NO: 153113 - DNA, 25 bp, probe
aaccaattccaggtgttggtacata

SEQ ID NO: 153114 - DNA, 25 bp, probe
aaccaaatctgggtgtcagaggcca

SEQ ID NO: 153115 - DNA, 25 bp, probe
aaccaagtcgcagctgagcgtgtcc

SEQ ID NO: 153116 - DNA, 25 bp, probe
aaccaagtcgcagctgagcgtgtcc

SEQ ID NO: 153117 - DNA, 25 bp, probe
aaccaagaagacggctgcggagcct

SEQ ID NO: 153118 - DNA, 25 bp, probe
aacctagaagctttgctgcaggatc

SEQ ID NO: 153119 - DNA, 25 bp, probe
aaccacacacactgttgctggatct

SEQ ID NO: 153120 - DNA, 25 bp, probe
aaccacagcctgtttctgctgagtt

SEQ ID NO: 153121 - DNA, 25 bp, probe
aaccagccatctacttcttggctgg

SEQ ID NO: 153122 - DNA, 25 bp, probe
aaccaccaatccatcccagatgtgg

SEQ ID NO: 153123 - DNA, 25 bp, probe
aagagtccaaacataacgggctgca

SEQ ID NO: 153124 - DNA, 25 bp, probe
aagaattccaaagaacggcctacat

SEQ ID NO: 153125 - DNA, 25 bp, probe
aataaaaccatgtgcaactacccca

SEQ ID NO: 153126 - DNA, 25 bp, probe
aagaagctcaccaagtcaactaaac

SEQ ID NO: 153127 - DNA, 25 bp, probe
caaaagtctccaagtgtttaccact

SEQ ID NO: 153128 - DNA, 25 bp, probe
ctcgaaagccctatacttagcgttt

SEQ ID NO: 153129 - DNA, 25 bp, probe
cacgaaatgaccaactaccgccgtg

SEQ ID NO: 153130 - DNA, 25 bp, probe
aagaaggtccttaacacagtcgtga

SEQ ID NO: 153131 - DNA, 25 bp, probe
aaggacgcctcgctaaagtcttatg

SEQ ID NO: 153132 - DNA, 25 bp, probe
aagtaagccatacgtattttcttag

SEQ ID NO: 153133 - DNA, 25 bp, probe
aagccaaacaccggcattttatgta

SEQ ID NO: 153134 - DNA, 25 bp, probe
aacctaatcctgaagcataatttta

SEQ ID NO: 153135 - DNA, 25 bp, probe
aacctaatcctgaagcataatttta

SEQ ID NO: 153136 - DNA, 25 bp, probe
aagcctcagtgtcatactgtatttc

SEQ ID NO: 153137 - DNA, 25 bp, probe
aagcctcagtgtcatactgtatttc

SEQ ID NO: 153138 - DNA, 25 bp, probe
aagcgacgggtaatgcggcattgat

SEQ ID NO: 153139 - DNA, 25 bp, probe
aagcgggcctggaaggagcattgca

SEQ ID NO: 153140 - DNA, 25 bp, probe
aagcggccaatggtggtagacatgt

SEQ ID NO: 153141 - DNA, 25 bp, probe
aagcggcagaggaaggatacaatga

SEQ ID NO: 153142 - DNA, 25 bp, probe
aagcctggatagaagtgtttatgca

SEQ ID NO: 153143 - DNA, 25 bp, probe
aagctcattaagacggtgtttgcat

SEQ ID NO: 153144 - DNA, 25 bp, probe
aagctcaaaatctagaagagtctat

SEQ ID NO: 153145 - DNA, 25 bp, probe
aagccaaagcttagaaataccaatt

SEQ ID NO: 153146 - DNA, 25 bp, probe
aaccaaagatttaaattgcctagat

SEQ ID NO: 153147 - DNA, 25 bp, probe
aaccaagaatttagtttgccaatga

SEQ ID NO: 153148 - DNA, 25 bp, probe
aaccaagaatttagtttgccaatga

SEQ ID NO: 153149 - DNA, 25 bp, probe
aagccacagaatatggcttggccta

SEQ ID NO: 153150 - DNA, 25 bp, probe
aagcgcatcatggaagtggtgggca

SEQ ID NO: 153151 - DNA, 25 bp, probe
aagccgcagttaagggggcacaggc

SEQ ID NO: 153152 - DNA, 25 bp, probe
aaccaggtgattggcaggtggacac

SEQ ID NO: 153153 - DNA, 25 bp, probe
aagctcggtgtaccgcgggacaaat

SEQ ID NO: 153154 - DNA, 25 bp, probe
aagcggtagaggcccgggaagccat

SEQ ID NO: 153155 - DNA, 25 bp, probe
aagcggtagaggcccgggaagccat

SEQ ID NO: 153156 - DNA, 25 bp, probe
aagcggtagaggcccgggaagccat

SEQ ID NO: 153157 - DNA, 25 bp, probe
ctagccggaaggtccgtggaaccag

SEQ ID NO: 153158 - DNA, 25 bp, probe
aagtcacgaacgatggtgaaaccgt

SEQ ID NO: 153159 - DNA, 25 bp, probe
aaccaggcatccaatttgtaaacca

SEQ ID NO: 153160 - DNA, 25 bp, probe
aaccacccaatcattctaaagcagc

SEQ ID NO: 153161 - DNA, 25 bp, probe
aagccacaaaacatcctactggatg

SEQ ID NO: 153162 - DNA, 25 bp, probe
aaggccagaaactccttttgctgtc

SEQ ID NO: 153163 - DNA, 25 bp, probe
aagaagaaggcctcacttttgctgc

SEQ ID NO: 153164 - DNA, 25 bp, probe
aagcagaaactgttccctttctctt

SEQ ID NO: 153165 - DNA, 25 bp, probe
aagcaaatgaagtgccttttcccga

SEQ ID NO: 153166 - DNA, 25 bp, probe
aagttgagggaagcttttctgaaga

SEQ ID NO: 153167 - DNA, 25 bp, probe
aagtcccagggagcttggatggaag

SEQ ID NO: 153168 - DNA, 25 bp, probe
aagtcccagggagcttggatggaag

SEQ ID NO: 153169 - DNA, 25 bp, probe
aagactccgggagcctgagaaacag

SEQ ID NO: 153170 - DNA, 25 bp, probe
aacctagaggccaccgagaaacatg

SEQ ID NO: 153171 - DNA, 25 bp, probe
aacctagaggccaccgagaaacatg

SEQ ID NO: 153172 - DNA, 25 bp, probe
aagctctaggtcctacctcagaaaa

SEQ ID NO: 153173 - DNA, 25 bp, probe
aagctctaggtcctacctcagaaaa

SEQ ID NO: 153174 - DNA, 25 bp, probe
aagtcagagacagatacctacaacc

SEQ ID NO: 153175 - DNA, 25 bp, probe
aagttaacaactacgagctcaacct

SEQ ID NO: 153176 - DNA, 25 bp, probe
aagaataaacccagagctcaaccag

SEQ ID NO: 153177 - DNA, 25 bp, probe
aagtaaaagccccgacatacattgg

SEQ ID NO: 153178 - DNA, 25 bp, probe
aagaaaacgcgtctgactaccttgc

SEQ ID NO: 153179 - DNA, 25 bp, probe
aagaaaacgcgtctgactaccttgc

SEQ ID NO: 153180 - DNA, 25 bp, probe
gaataaacccggaggccattatgct

SEQ ID NO: 153181 - DNA, 25 bp, probe
aagaaccttttgagtgccttacaca

SEQ ID NO: 153182 - DNA, 25 bp, probe
aagaaccttttgagtgccttacaca

SEQ ID NO: 153183 - DNA, 25 bp, probe
aagaaccatttacatgcaccttata

SEQ ID NO: 153184 - DNA, 25 bp, probe
aagaacaagttgtggctcacccaac

SEQ ID NO: 153185 - DNA, 25 bp, probe
aagaaagaccagtgaacactcacag

SEQ ID NO: 153186 - DNA, 25 bp, probe
aagacaatcaaataaacctcatcaa

SEQ ID NO: 153187 - DNA, 25 bp, probe
aaccaattcaattaatgtcttcata

SEQ ID NO: 153188 - DNA, 25 bp, probe
aaccatgattgatgatgaagcctta

SEQ ID NO: 153189 - DNA, 25 bp, probe
aaccataatgagccatgggctctgc

SEQ ID NO: 153190 - DNA, 25 bp, probe
aaccaacaaggatggcttccgcagc

SEQ ID NO: 153191 - DNA, 25 bp, probe
aacctaacaaataggcctgcctaca

SEQ ID NO: 153192 - DNA, 25 bp, probe
aaccaataaaatcacgtgctccaca

SEQ ID NO: 153193 - DNA, 25 bp, probe
aaccaagaagattcaaagattgcca

SEQ ID NO: 153194 - DNA, 25 bp, probe
aaccacagcagttgaaaagactcca

SEQ ID NO: 153195 - DNA, 25 bp, probe
aaccaaggctagaaccacctgccta

SEQ ID NO: 153196 - DNA, 25 bp, probe
aaccaaggaattctacctgcaggaa

SEQ ID NO: 153197 - DNA, 25 bp, probe
aagcctaggaaagataccgaagatt

SEQ ID NO: 153198 - DNA, 25 bp, probe
aatgccaaataatcttccaggtagt

SEQ ID NO: 153199 - DNA, 25 bp, probe
aacctcttatactatcatccaggtg

SEQ ID NO: 153200 - DNA, 25 bp, probe
aagcctcgtaccaatcatcttggga

SEQ ID NO: 153201 - DNA, 25 bp, probe
aagctgtcctgctcagatatcttcc

SEQ ID NO: 153202 - DNA, 25 bp, probe
aagcgtttgcatacatgtcttcctg

SEQ ID NO: 153203 - DNA, 25 bp, probe
aagctgtgttcatattctgtctagt

SEQ ID NO: 153204 - DNA, 25 bp, probe
aagctgttgacttatctgcgcttgt

SEQ ID NO: 153205 - DNA, 25 bp, probe
aagcccacagtcttctgagttgtgc

SEQ ID NO: 153206 - DNA, 25 bp, probe
aagcctacagcttgggagacttgcc

SEQ ID NO: 153207 - DNA, 25 bp, probe
aagccatagagttggggcctctgac

SEQ ID NO: 153208 - DNA, 25 bp, probe
aaccaagatgattgttgctgcttct

SEQ ID NO: 153209 - DNA, 25 bp, probe
aaccaatagcattagctgtgcaatt

SEQ ID NO: 153210 - DNA, 25 bp, probe
aaccatcggcaatgtgccaattaca

SEQ ID NO: 153211 - DNA, 25 bp, probe
aacctcagccagagtgtcaatttct

SEQ ID NO: 153212 - DNA, 25 bp, probe
aagcttcagaagtttggcaatagtt

SEQ ID NO: 153213 - DNA, 25 bp, probe
aagcgccataagtcagttgagtatt

SEQ ID NO: 153214 - DNA, 25 bp, probe
aagccctcaagacgttaggcatcat

SEQ ID NO: 153215 - DNA, 25 bp, probe
aagctccctagaatctcctggaatg

SEQ ID NO: 153216 - DNA, 25 bp, probe
aagctccagggcattcttgcaggag

SEQ ID NO: 153217 - DNA, 25 bp, probe
aagcctcacaccatgacaatgcagc

SEQ ID NO: 153218 - DNA, 25 bp, probe
aagcctcacaccatgacaatgcagc

SEQ ID NO: 153219 - DNA, 25 bp, probe
aagcgacatcccatgaaaacctctg

SEQ ID NO: 153220 - DNA, 25 bp, probe
aagctgccacccaaggggaagcttc

SEQ ID NO: 153221 - DNA, 25 bp, probe
aagcccacagagaagtcggatgtgt

SEQ ID NO: 153222 - DNA, 25 bp, probe
aagcccacagagaagtcggatgtgt

SEQ ID NO: 153223 - DNA, 25 bp, probe
aagccaacgctgagtcaggctgagt

SEQ ID NO: 153224 - DNA, 25 bp, probe
aagccagggctgggacaatggcagt

SEQ ID NO: 153225 - DNA, 25 bp, probe
aaccaggagctgcggattgtcatca

SEQ ID NO: 153226 - DNA, 25 bp, probe
aagcgactagaccggagtgtctcct

SEQ ID NO: 153227 - DNA, 25 bp, probe
aagccaaagaggctacactgctcct

SEQ ID NO: 153228 - DNA, 25 bp, probe
aagccaaagaggctacactgctcct

SEQ ID NO: 153229 - DNA, 25 bp, probe
aagcacacacacatggtccgtgcca

SEQ ID NO: 153230 - DNA, 25 bp, probe
aagaaatagaatacccggccactat

SEQ ID NO: 153231 - DNA, 25 bp, probe
aagaaatagaatacccggccactat

SEQ ID NO: 153232 - DNA, 25 bp, probe
aagcattaagaagcccagtgccctc

SEQ ID NO: 153233 - DNA, 25 bp, probe
aagattacagtatgtggggacaccc

SEQ ID NO: 153234 - DNA, 25 bp, probe
aagaatacaactctggggatgacct

SEQ ID NO: 153235 - DNA, 25 bp, probe
aatcaaacaattcagggagtgggct

SEQ ID NO: 153236 - DNA, 25 bp, probe
aacctcaccttggacggaatgggat

SEQ ID NO: 153237 - DNA, 25 bp, probe
aaccttcttctggaccaaagcaatg

SEQ ID NO: 153238 - DNA, 25 bp, probe
aaccttctctccagcacaaaggcat

SEQ ID NO: 153239 - DNA, 25 bp, probe
aaccttctgttcaatgacaacactg

SEQ ID NO: 153240 - DNA, 25 bp, probe
aaccttctgttcaatgacaacactg

SEQ ID NO: 153241 - DNA, 25 bp, probe
aacctttgtatattggagacttcag

SEQ ID NO: 153242 - DNA, 25 bp, probe
aagccttaggttctgatgacctagt

SEQ ID NO: 153243 - DNA, 25 bp, probe
aagccttagaccagatgaagactcc

SEQ ID NO: 153244 - DNA, 25 bp, probe
aagccattaactacgggacattcac

SEQ ID NO: 153245 - DNA, 25 bp, probe
aagctgcatttctttccaaaatcta

SEQ ID NO: 153246 - DNA, 25 bp, probe
aaccttccaatgtccaaaactgcta

SEQ ID NO: 153247 - DNA, 25 bp, probe
aagcctgatctcctgtaaaaacatc

SEQ ID NO: 153248 - DNA, 25 bp, probe
aagcctgatctcctgtaaaaacatc

SEQ ID NO: 153249 - DNA, 25 bp, probe
aagcccctctgcaggatacaaatgc

SEQ ID NO: 153250 - DNA, 25 bp, probe
aagcccctctgcaggatacaaatgc

SEQ ID NO: 153251 - DNA, 25 bp, probe
aagccctctctgtggaagcaaatga

SEQ ID NO: 153252 - DNA, 25 bp, probe
aaccattctgcttggttccacaatc

SEQ ID NO: 153253 - DNA, 25 bp, probe
aagcccaccattggttagcacactc

SEQ ID NO: 153254 - DNA, 25 bp, probe
aagccacatttagggctatcacctc

SEQ ID NO: 153255 - DNA, 25 bp, probe
aagcctattgacagggatcacactg

SEQ ID NO: 153256 - DNA, 25 bp, probe
aagccttggacttggctgtgatctt

SEQ ID NO: 153257 - DNA, 25 bp, probe
aagctctgcatagtccaggtggact

SEQ ID NO: 153258 - DNA, 25 bp, probe
aagcatctaagcccaggacatgagt

SEQ ID NO: 153259 - DNA, 25 bp, probe
aagacgaagccatcgacgaatagag

SEQ ID NO: 153260 - DNA, 25 bp, probe
aagaggacacgcacgaggaaagact

SEQ ID NO: 153261 - DNA, 25 bp, probe
aagaagacggctgcggagcctagca

SEQ ID NO: 153262 - DNA, 25 bp, probe
aagaaatcgggatgccgcggagcac

SEQ ID NO: 153263 - DNA, 25 bp, probe
aagaaatcgggatgccgcggagcac

SEQ ID NO: 153264 - DNA, 25 bp, probe
aagcacccagggaagcgcctgggct

SEQ ID NO: 153265 - DNA, 25 bp, probe
aagcggtagaggaaggctatcgtct

SEQ ID NO: 153266 - DNA, 25 bp, probe
aagcggcaggatcgacgcgcttctg

SEQ ID NO: 153267 - DNA, 25 bp, probe
aagcgccagtgaggactgctggccc

SEQ ID NO: 153268 - DNA, 25 bp, probe
aagagtcagaaatgtgtggcctata

SEQ ID NO: 153269 - DNA, 25 bp, probe
aagagtcagaaatgtgtggcctata

SEQ ID NO: 153270 - DNA, 25 bp, probe
aagcttaagcaatgatgatacctct

SEQ ID NO: 153271 - DNA, 25 bp, probe
aagcctacactatctgtggcactct

SEQ ID NO: 153272 - DNA, 25 bp, probe
aagcctacactatctgtggcactct

SEQ ID NO: 153273 - DNA, 25 bp, probe
aagccatagacagcctgcgagacct

SEQ ID NO: 153274 - DNA, 25 bp, probe
aagcactaggatgttcaggcaggcc

SEQ ID NO: 153275 - DNA, 25 bp, probe
aagccatgagtttcttgggcaggtt

SEQ ID NO: 153276 - DNA, 25 bp, probe
cacccagtttccttgggagttgtca

SEQ ID NO: 153277 - DNA, 25 bp, probe
cacccagtttccttgggagttgtca

SEQ ID NO: 153278 - DNA, 25 bp, probe
aagccagttgtagtacggagttgtc

SEQ ID NO: 153279 - DNA, 25 bp, probe
aagtcagatttgtataaggaaagcc

SEQ ID NO: 153280 - DNA, 25 bp, probe
aagtcagatttgtataaggaaagcc

SEQ ID NO: 153281 - DNA, 25 bp, probe
caatgtctattggtaaaggaaagtt

SEQ ID NO: 153282 - DNA, 25 bp, probe
aatccgattcacgtagggaaatgtt

SEQ ID NO: 153283 - DNA, 25 bp, probe
aagccgtccactgaagaaaagttga

SEQ ID NO: 153284 - DNA, 25 bp, probe
aagcaacccctccaagaaaagatct

SEQ ID NO: 153285 - DNA, 25 bp, probe
aagctcacccctggacaaaggtgtt

SEQ ID NO: 153286 - DNA, 25 bp, probe
aagccgacgccacagagcaaggggc

SEQ ID NO: 153287 - DNA, 25 bp, probe
aagcgcagccgcaaggagagctact

SEQ ID NO: 153288 - DNA, 25 bp, probe
aagctggcctgcatggagtacagca

SEQ ID NO: 153289 - DNA, 25 bp, probe
aagctggagctaatgttgatgccca

SEQ ID NO: 153290 - DNA, 25 bp, probe
aagcctgcatctacagcatcgcagc

SEQ ID NO: 153291 - DNA, 25 bp, probe
aagcctgcatctacagcatcgcagc

SEQ ID NO: 153292 - DNA, 25 bp, probe
aagctgatgctcagctgctggagaa

SEQ ID NO: 153293 - DNA, 25 bp, probe
aagctgttcattctggcaatgattt

SEQ ID NO: 153294 - DNA, 25 bp, probe
aagctgttcattctggcaatgattt

SEQ ID NO: 153295 - DNA, 25 bp, probe
aagctgggactgaggcagtgccttg

SEQ ID NO: 153296 - DNA, 25 bp, probe
aagcagggcctgagagatggagctg

SEQ ID NO: 153297 - DNA, 25 bp, probe
aagcgtaggtacgatgtgggcatca

SEQ ID NO: 153298 - DNA, 25 bp, probe
aagcgctggcgtaagcatggggtct

SEQ ID NO: 153299 - DNA, 25 bp, probe
aagccgagcggttgatggaagttga

SEQ ID NO: 153300 - DNA, 25 bp, probe
aagccaggagccgagatggaaattt

SEQ ID NO: 153301 - DNA, 25 bp, probe
aaccaggaaccatgtgccaagttgc

SEQ ID NO: 153302 - DNA, 25 bp, probe
aagcgggaagccttgctcaaagtcc

SEQ ID NO: 153303 - DNA, 25 bp, probe
aagccttccggcgcataaagtcagc

SEQ ID NO: 153304 - DNA, 25 bp, probe
aagctttctaaggacattaaacagt

SEQ ID NO: 153305 - DNA, 25 bp, probe
aagcttctaaattgatcatttaaac

SEQ ID NO: 153306 - DNA, 25 bp, probe
aagctgattatcattactttcaaat

SEQ ID NO: 153307 - DNA, 25 bp, probe
aagcatgaagatcatcaggtttcag

SEQ ID NO: 153308 - DNA, 25 bp, probe
aagcaataggagtcaagttactggt

SEQ ID NO: 153309 - DNA, 25 bp, probe
aagcctacatgacacagttggattt

SEQ ID NO: 153310 - DNA, 25 bp, probe
aagctgtcctacaaagttgagcttt

SEQ ID NO: 153311 - DNA, 25 bp, probe
aagctgttggaatgagtatgtgatt

SEQ ID NO: 153312 - DNA, 25 bp, probe
aagctgtagggactcatcttgcatg

SEQ ID NO: 153313 - DNA, 25 bp, probe
aagctgtgggagtcttgaaatgtca

SEQ ID NO: 153314 - DNA, 25 bp, probe
aagctgagacggatgataatatgga

SEQ ID NO: 153315 - DNA, 25 bp, probe
aagctgtacaatcgtttcatcattc

SEQ ID NO: 153316 - DNA, 25 bp, probe
aagctgtgagcaatctgcagtctac

SEQ ID NO: 153317 - DNA, 25 bp, probe
aagctgctgaagtgcagttcccacc

SEQ ID NO: 153318 - DNA, 25 bp, probe
aagctagaaccatggtcgccactgt

SEQ ID NO: 153319 - DNA, 25 bp, probe
aagctagaaccatggtcgccactgt

SEQ ID NO: 153320 - DNA, 25 bp, probe
aagtcaaacgactaacctatctatg

SEQ ID NO: 153321 - DNA, 25 bp, probe
aagctcaaacgacatcttgctctct

SEQ ID NO: 153322 - DNA, 25 bp, probe
aagctcaaacgacatcttgctctct

SEQ ID NO: 153323 - DNA, 25 bp, probe
aagctgctaaagtgatcttcatcat

SEQ ID NO: 153324 - DNA, 25 bp, probe
aagctgataactactgacttcactg

SEQ ID NO: 153325 - DNA, 25 bp, probe
aagcgaacagtcctgatctccagta

SEQ ID NO: 153326 - DNA, 25 bp, probe
aagctggtcatggtgctgttccagt

SEQ ID NO: 153327 - DNA, 25 bp, probe
aagctaatcatgctctctaccaact

SEQ ID NO: 153328 - DNA, 25 bp, probe
aaccaacatggcagctaacacatga

SEQ ID NO: 153329 - DNA, 25 bp, probe
aagccaagcagggggccacagggtg

SEQ ID NO: 153330 - DNA, 25 bp, probe
aagccagaacgcagactgcaggggc

SEQ ID NO: 153331 - DNA, 25 bp, probe
aagccagataccctgcaggctggcg

SEQ ID NO: 153332 - DNA, 25 bp, probe
aaccagatcataagggagctgcagg

SEQ ID NO: 153333 - DNA, 25 bp, probe
aagccaggcataaccacagccaagc

SEQ ID NO: 153334 - DNA, 25 bp, probe
aagctatggcaagggcagacaaggc

SEQ ID NO: 153335 - DNA, 25 bp, probe
aagcctggacaggatcttcacagcg

SEQ ID NO: 153336 - DNA, 25 bp, probe
aagcgcattatccaattatagaggt

SEQ ID NO: 153337 - DNA, 25 bp, probe
aagctattcttatgctgtaacagtt

SEQ ID NO: 153338 - DNA, 25 bp, probe
aagctcatttcctggtatgacaacg

SEQ ID NO: 153339 - DNA, 25 bp, probe
aagctctgtgtgcctgggtcaaaaa

SEQ ID NO: 153340 - DNA, 25 bp, probe
aagccatgctggcggagaatcatag

SEQ ID NO: 153341 - DNA, 25 bp, probe
aagccactgtcaatgattagatcgg

SEQ ID NO: 153342 - DNA, 25 bp, probe
aaccactgctaccagtagtgggcac

SEQ ID NO: 153343 - DNA, 25 bp, probe
aagccctgtccggtgagggggcaga

SEQ ID NO: 153344 - DNA, 25 bp, probe
aagccttgtctatgtggggggcggg

SEQ ID NO: 153345 - DNA, 25 bp, probe
aagtctttccggaggtcagtggtgg

SEQ ID NO: 153346 - DNA, 25 bp, probe
aagcatcatgtaccggaagttcact

SEQ ID NO: 153347 - DNA, 25 bp, probe
aagcattttgacccagagttcaccc

SEQ ID NO: 153348 - DNA, 25 bp, probe
aagcattttgacccagagttcaccc

SEQ ID NO: 153349 - DNA, 25 bp, probe
aagcaaaggcacctgatacttcccc

SEQ ID NO: 153350 - DNA, 25 bp, probe
aagcaaaggcacctgatacttcccc

SEQ ID NO: 153351 - DNA, 25 bp, probe
aagcagggatcagagcaactccccg

SEQ ID NO: 153352 - DNA, 25 bp, probe
aagcttggagccaaaacccagcacc

SEQ ID NO: 153353 - DNA, 25 bp, probe
aatgctccatggatgaaacccaccc

SEQ ID NO: 153354 - DNA, 25 bp, probe
aagctctgcggaaatcaacagcccc

SEQ ID NO: 153355 - DNA, 25 bp, probe
aagctccaagaattcaatgcccggc

SEQ ID NO: 153356 - DNA, 25 bp, probe
aaccactagcaatcaagccacaggc

SEQ ID NO: 153357 - DNA, 25 bp, probe
aaccaccagtgttcatactgactgg

SEQ ID NO: 153358 - DNA, 25 bp, probe
aaccaggtgttatttgctgactcac

SEQ ID NO: 153359 - DNA, 25 bp, probe
aaccagggatctttaatgcctctcc

SEQ ID NO: 153360 - DNA, 25 bp, probe
aagcacaggagagaccagtccttcc

SEQ ID NO: 153361 - DNA, 25 bp, probe
aagcactcagaaggcagccatccct

SEQ ID NO: 153362 - DNA, 25 bp, probe
aagccatatggagcatctacccaga

SEQ ID NO: 153363 - DNA, 25 bp, probe
aagccttttggctataaccagtctc

SEQ ID NO: 153364 - DNA, 25 bp, probe
aagacttttggtgaacacgttcatt

SEQ ID NO: 153365 - DNA, 25 bp, probe
aagacttttggtgaacacgttcatt

SEQ ID NO: 153366 - DNA, 25 bp, probe
aagactgcatttttaaacaagttag

SEQ ID NO: 153367 - DNA, 25 bp, probe
aagcattttcttgattacaataata

SEQ ID NO: 153368 - DNA, 25 bp, probe
aagcaggctctctggcttaagttta

SEQ ID NO: 153369 - DNA, 25 bp, probe
aagcattgcctctaggggagagtca

SEQ ID NO: 153370 - DNA, 25 bp, probe
aagctcagctcctatgttggtatta

SEQ ID NO: 153371 - DNA, 25 bp, probe
aagccacatgtctgtgtgtgtgcat

SEQ ID NO: 153372 - DNA, 25 bp, probe
aagcctctgtgttggtgtggatcct

SEQ ID NO: 153373 - DNA, 25 bp, probe
aagctactggtgagctggcagacct

SEQ ID NO: 153374 - DNA, 25 bp, probe
aagctactggtgagctggcagacct

SEQ ID NO: 153375 - DNA, 25 bp, probe
aagcaggctgggaccttgatgacaa

SEQ ID NO: 153376 - DNA, 25 bp, probe
aagaatgctgtgaatcaataaacat

SEQ ID NO: 153377 - DNA, 25 bp, probe
aagaatgagagactacaggcattgc

SEQ ID NO: 153378 - DNA, 25 bp, probe
aagcaagggcaaacagtcatttgga

SEQ ID NO: 153379 - DNA, 25 bp, probe
aagcaaattcgtgaccatattgtga

SEQ ID NO: 153380 - DNA, 25 bp, probe
aatgttaatagatacctttggaaag

SEQ ID NO: 153381 - DNA, 25 bp, probe
aaggtgttggaatccctgggcaaag

SEQ ID NO: 153382 - DNA, 25 bp, probe
aagggtgggaatgtccactggaaag

SEQ ID NO: 153383 - DNA, 25 bp, probe
aagaggtgtcggaggccgtggagaa

SEQ ID NO: 153384 - DNA, 25 bp, probe
aagatgggtccgaggcgggggacag

SEQ ID NO: 153385 - DNA, 25 bp, probe
aagaccctacagagcctgaggggca

SEQ ID NO: 153386 - DNA, 25 bp, probe
aagacaccatgaggggactgaaggt

SEQ ID NO: 153387 - DNA, 25 bp, probe
aaccacttgcagagtggctaaggaa

SEQ ID NO: 153388 - DNA, 25 bp, probe
aaccacattaaggtgctcacaaaaa

SEQ ID NO: 153389 - DNA, 25 bp, probe
aagctcagcttagaagttcgaaaac

SEQ ID NO: 153390 - DNA, 25 bp, probe
aaccagcatttctgtgtttgagaga

SEQ ID NO: 153391 - DNA, 25 bp, probe
aaccactttttgttgggcaatatga

SEQ ID NO: 153392 - DNA, 25 bp, probe
aaccacttttatgggatgcagaaat

SEQ ID NO: 153393 - DNA, 25 bp, probe
aaccacttttatgggatgcagaaat

SEQ ID NO: 153394 - DNA, 25 bp, probe
aaccacctgaaagggatgattgcca

SEQ ID NO: 153395 - DNA, 25 bp, probe
aagccacctgagcagctgggattgc

SEQ ID NO: 153396 - DNA, 25 bp, probe
aagccacacaatcagtggggcagcc

SEQ ID NO: 153397 - DNA, 25 bp, probe
aagccaagcgggaggggagctgcgc

SEQ ID NO: 153398 - DNA, 25 bp, probe
aagccaagcgggaggggagctgcgc

SEQ ID NO: 153399 - DNA, 25 bp, probe
aagccaagcgggaggggagctgcgc

SEQ ID NO: 153400 - DNA, 25 bp, probe
aagcgaaagcggcaggatcgacgcg

SEQ ID NO: 153401 - DNA, 25 bp, probe
aagctaaagcatggcggccatcccc

SEQ ID NO: 153402 - DNA, 25 bp, probe
aagcagaaggtggccctatgcaccc

SEQ ID NO: 153403 - DNA, 25 bp, probe
caagaaacgtgtgaaaactccctat

SEQ ID NO: 153404 - DNA, 25 bp, probe
aagaaggggtgtcagggcccagtga

SEQ ID NO: 153405 - DNA, 25 bp, probe
aagaagaataggcggggcacggtgg

SEQ ID NO: 153406 - DNA, 25 bp, probe
aagaggggtggcgcagaagggttgg

SEQ ID NO: 153407 - DNA, 25 bp, probe
aagcagggggccacagggtgggctg

SEQ ID NO: 153408 - DNA, 25 bp, probe
aagcgggggtcccaggtgtgaagct

SEQ ID NO: 153409 - DNA, 25 bp, probe
aagcgggggtcccaggtgtgaagct

SEQ ID NO: 153410 - DNA, 25 bp, probe
aagctgttgggacccagagcaatga

SEQ ID NO: 153411 - DNA, 25 bp, probe
aagctgttgggacccagagcaatga

SEQ ID NO: 153412 - DNA, 25 bp, probe
aagctgtcggtgatccacagagatg

SEQ ID NO: 153413 - DNA, 25 bp, probe
aagctgtgtgcccattaccagcaat

SEQ ID NO: 153414 - DNA, 25 bp, probe
aagctggtggccatcaaatgcattg

SEQ ID NO: 153415 - DNA, 25 bp, probe
aagctgctgattccattagatacat

SEQ ID NO: 153416 - DNA, 25 bp, probe
aagcgcatcacgacaaggatatgat

SEQ ID NO: 153417 - DNA, 25 bp, probe
aagccaaagtcccagagatattgtg

SEQ ID NO: 153418 - DNA, 25 bp, probe
aagaaatactcatgtgcaataggtg

SEQ ID NO: 153419 - DNA, 25 bp, probe
aagacctaccaaccatgtaggatta

SEQ ID NO: 153420 - DNA, 25 bp, probe
aagcaccgacaatctttgattactg

SEQ ID NO: 153421 - DNA, 25 bp, probe
aagcgtgaacccatattgataagtg

SEQ ID NO: 153422 - DNA, 25 bp, probe
aagcgtgaacccatattgataagtg

SEQ ID NO: 153423 - DNA, 25 bp, probe
aagctggaagccgtccttcttagtt

SEQ ID NO: 153424 - DNA, 25 bp, probe
aagctaaatgccctccaacttagtg

SEQ ID NO: 153425 - DNA, 25 bp, probe
aagctgaaactaagccctctctagg

SEQ ID NO: 153426 - DNA, 25 bp, probe
aagctgaaactaagccctctctagg

SEQ ID NO: 153427 - DNA, 25 bp, probe
aagtgagtaaaatcccctagagcag

SEQ ID NO: 153428 - DNA, 25 bp, probe
aagctgatttagtgtcccttataca

SEQ ID NO: 153429 - DNA, 25 bp, probe
aagctgatttagtgtcccttataca

SEQ ID NO: 153430 - DNA, 25 bp, probe
aagtttgcattatgactcctgtaaa

SEQ ID NO: 153431 - DNA, 25 bp, probe
aagctttctgtttgtgttccataaa

SEQ ID NO: 153432 - DNA, 25 bp, probe
aagctctatgttttcgttaataaag

SEQ ID NO: 153433 - DNA, 25 bp, probe
aagctataggctcttgttggataaa

SEQ ID NO: 153434 - DNA, 25 bp, probe
aagctatggtgacttttagggagca

SEQ ID NO: 153435 - DNA, 25 bp, probe
aagcaatgactgttcttgcggggga

SEQ ID NO: 153436 - DNA, 25 bp, probe
aagaagaggccctctgggtgatgaa

SEQ ID NO: 153437 - DNA, 25 bp, probe
aagaggggacctgctgggaatgggg

SEQ ID NO: 153438 - DNA, 25 bp, probe
aagagaaggaactgcggtgttggga

SEQ ID NO: 153439 - DNA, 25 bp, probe
aagctattaaagtttgtgtgttgtg

SEQ ID NO: 153440 - DNA, 25 bp, probe
aagccttacaaccataggatttgga

SEQ ID NO: 153441 - DNA, 25 bp, probe
aagccttcatcatccaaacattgtt

SEQ ID NO: 153442 - DNA, 25 bp, probe
aagccttatccagcagccataattt

SEQ ID NO: 153443 - DNA, 25 bp, probe
aagcctcgattctcacgcaacaggc

SEQ ID NO: 153444 - DNA, 25 bp, probe
aagcctcgattctcacgcaacaggc

SEQ ID NO: 153445 - DNA, 25 bp, probe
aagcctggtgtctacacgaaagtct

SEQ ID NO: 153446 - DNA, 25 bp, probe
aagcctggtgtctataccaaagtct

SEQ ID NO: 153447 - DNA, 25 bp, probe
aagcctggtgtctatgttcgtgttt

SEQ ID NO: 153448 - DNA, 25 bp, probe
aagccggtcaagttccaggttgata

SEQ ID NO: 153449 - DNA, 25 bp, probe
aagcccgtcaccctaagtatggata

SEQ ID NO: 153450 - DNA, 25 bp, probe
aagcccgtcaccctaagtatggata

SEQ ID NO: 153451 - DNA, 25 bp, probe
aagccggtgcgctgctgaaaacgat

SEQ ID NO: 153452 - DNA, 25 bp, probe
aagcctaactcaactaaaacgatct

SEQ ID NO: 153453 - DNA, 25 bp, probe
caaacttggctctcaataaactttt

SEQ ID NO: 153454 - DNA, 25 bp, probe
aataccgttttcatgaaagttctca

SEQ ID NO: 153455 - DNA, 25 bp, probe
aatcatcccaatgttgtaaagtttt

SEQ ID NO: 153456 - DNA, 25 bp, probe
aatcatcccaatgttgtaaagtttt

SEQ ID NO: 153457 - DNA, 25 bp, probe
aagctcctcaatgacgtgtacagtt

SEQ ID NO: 153458 - DNA, 25 bp, probe
aagcgcctggaggacgggacagatg

SEQ ID NO: 153459 - DNA, 25 bp, probe
aagcccttgacgacccagatcaaga

SEQ ID NO: 153460 - DNA, 25 bp, probe
aagcccttgacgacccagatcaaga

SEQ ID NO: 153461 - DNA, 25 bp, probe
aagcctgccgaaaacaggagcaaat

SEQ ID NO: 153462 - DNA, 25 bp, probe
aagagtcacgaaaactgtaatcaga

SEQ ID NO: 153463 - DNA, 25 bp, probe
aagactgcatgtccaaacgaagtaa

SEQ ID NO: 153464 - DNA, 25 bp, probe
aagccatctacctagcaaaattaac

SEQ ID NO: 153465 - DNA, 25 bp, probe
aagccatcaacatcacaaataatga

SEQ ID NO: 153466 - DNA, 25 bp, probe
aagccatcaacatcacaaataatga

SEQ ID NO: 153467 - DNA, 25 bp, probe
aagccatgaaaggaaagatcagtga

SEQ ID NO: 153468 - DNA, 25 bp, probe
aagcctatgatgtaaaatgaaatgc

SEQ ID NO: 153469 - DNA, 25 bp, probe
aagcctatgatgtaaaatgaaatgc

SEQ ID NO: 153470 - DNA, 25 bp, probe
aagctgctgaagtatgtttgaactc

SEQ ID NO: 153471 - DNA, 25 bp, probe
aagcttgcaagccatggggaaccca

SEQ ID NO: 153472 - DNA, 25 bp, probe
aagcttgcaagccatggggaaccca

SEQ ID NO: 153473 - DNA, 25 bp, probe
aagctgagcacgctcgtggaaacca

SEQ ID NO: 153474 - DNA, 25 bp, probe
aagctgatggtgcacctggtggagc

SEQ ID NO: 153475 - DNA, 25 bp, probe
aagctgatggtgcacctggtggagc

SEQ ID NO: 153476 - DNA, 25 bp, probe
aagctgagggagaagcatgagaaag

SEQ ID NO: 153477 - DNA, 25 bp, probe
aagctcatgggaaaattgtgatcaa

SEQ ID NO: 153478 - DNA, 25 bp, probe
aagccaggaactatgtctgtgcaag

SEQ ID NO: 153479 - DNA, 25 bp, probe
aagcaggcgtttatttctgcagggc

SEQ ID NO: 153480 - DNA, 25 bp, probe
aagcgggtagtgacagcttccaggg

SEQ ID NO: 153481 - DNA, 25 bp, probe
aagcggtggaggccgtggctatggt

SEQ ID NO: 153482 - DNA, 25 bp, probe
aagcctttgaggaatgtactagagt

SEQ ID NO: 153483 - DNA, 25 bp, probe
aagccttttggatgctaatctggat

SEQ ID NO: 153484 - DNA, 25 bp, probe
aagccattgttttgtgccattcagg

SEQ ID NO: 153485 - DNA, 25 bp, probe
aagccaggctttggtggcagcatgg

SEQ ID NO: 153486 - DNA, 25 bp, probe
aagccagagattgcgggcagcaaga

SEQ ID NO: 153487 - DNA, 25 bp, probe
aagccagagattgcgggcagcaaga

SEQ ID NO: 153488 - DNA, 25 bp, probe
aagctctggattactgccacagcaa

SEQ ID NO: 153489 - DNA, 25 bp, probe
aagctcagttctagagacatactat

SEQ ID NO: 153490 - DNA, 25 bp, probe
aagctcactggcatggccttccgtg

SEQ ID NO: 153491 - DNA, 25 bp, probe
aagctcactggcatggccttccgtg

SEQ ID NO: 153492 - DNA, 25 bp, probe
aagcaacatggaaggccaggcacgg

SEQ ID NO: 153493 - DNA, 25 bp, probe
aagcgcagcaggtgcatcgccagca

SEQ ID NO: 153494 - DNA, 25 bp, probe
aagccagcagatcacatcattgcct

SEQ ID NO: 153495 - DNA, 25 bp, probe
aagccatagagtacatcgatgccgt

SEQ ID NO: 153496 - DNA, 25 bp, probe
aagccatagagtacatcgatgccgt

SEQ ID NO: 153497 - DNA, 25 bp, probe
aagccatgggataaagatgcctggg

SEQ ID NO: 153498 - DNA, 25 bp, probe
aagccaggagattagcagaggcatt

SEQ ID NO: 153499 - DNA, 25 bp, probe
aagctgttgcagctcagcagcagga

SEQ ID NO: 153500 - DNA, 25 bp, probe
aagctgccatggacatctcagaggg

SEQ ID NO: 153501 - DNA, 25 bp, probe
aagctccgcttcacatgcagaagtg

SEQ ID NO: 153502 - DNA, 25 bp, probe
aagctccagctgtttgtcaaggcga

SEQ ID NO: 153503 - DNA, 25 bp, probe
aagcccagccaattaaaggagccag

SEQ ID NO: 153504 - DNA, 25 bp, probe
aagccaagcgctttaacaggagagc

SEQ ID NO: 153505 - DNA, 25 bp, probe
aagccaagcgctttaacaggagagc

SEQ ID NO: 153506 - DNA, 25 bp, probe
aagccaagtggtaaagcgagcaatt

SEQ ID NO: 153507 - DNA, 25 bp, probe
aagccaagtggtaaagcgagcaatt

SEQ ID NO: 153508 - DNA, 25 bp, probe
aagcacagatggcaaaagctgcagc

SEQ ID NO: 153509 - DNA, 25 bp, probe
aagccacagtggaaagcatatgatg

SEQ ID NO: 153510 - DNA, 25 bp, probe
aagcgacgtggtgaagatctgtgac

SEQ ID NO: 153511 - DNA, 25 bp, probe
aagccggctgtgaccacaaggtgac

SEQ ID NO: 153512 - DNA, 25 bp, probe
aagaaggttcactacaacggtgcct

SEQ ID NO: 153513 - DNA, 25 bp, probe
aagcaccgtgtctgaaccgttgctt

SEQ ID NO: 153514 - DNA, 25 bp, probe
aagccctttattgacatggttctat

SEQ ID NO: 153515 - DNA, 25 bp, probe
aagcgccttaatatatccctttgtg

SEQ ID NO: 153516 - DNA, 25 bp, probe
aagccctctgaaagaatctacattc

SEQ ID NO: 153517 - DNA, 25 bp, probe
aagccaactaatagactctcagcca

SEQ ID NO: 153518 - DNA, 25 bp, probe
aagccaactcgaagtcatccatgga

SEQ ID NO: 153519 - DNA, 25 bp, probe
aagccagccattaaaatcactgcgc

SEQ ID NO: 153520 - DNA, 25 bp, probe
aagctgactcatatgaaaagctgga

SEQ ID NO: 153521 - DNA, 25 bp, probe
aagctgactcatatgaaaagctgga

SEQ ID NO: 153522 - DNA, 25 bp, probe
aagcgccactgaatgaaactggaga

SEQ ID NO: 153523 - DNA, 25 bp, probe
aagcagcccgcatattaggcgcaga

SEQ ID NO: 153524 - DNA, 25 bp, probe
aagcgccgctcatgactatacgcta

SEQ ID NO: 153525 - DNA, 25 bp, probe
aagcctcagtcatgacgcaactgcg

SEQ ID NO: 153526 - DNA, 25 bp, probe
aagcctctttgagggtactgcagca

SEQ ID NO: 153527 - DNA, 25 bp, probe
aagccattttgttcagttgctcatc

SEQ ID NO: 153528 - DNA, 25 bp, probe
aagcctgcttgtagccagtgatgcc

SEQ ID NO: 153529 - DNA, 25 bp, probe
aagcctgcttgtagccagtgatgcc

SEQ ID NO: 153530 - DNA, 25 bp, probe
aagcctgttgctgccaggagacttg

SEQ ID NO: 153531 - DNA, 25 bp, probe
aagccgtgatgtgcaatgaagcatc

SEQ ID NO: 153532 - DNA, 25 bp, probe
aagccagtgcgtggagtgcagctgc

SEQ ID NO: 153533 - DNA, 25 bp, probe
aagccagctgcggagtcttctggct

SEQ ID NO: 153534 - DNA, 25 bp, probe
aagccagttggaagcattgctagct

SEQ ID NO: 153535 - DNA, 25 bp, probe
aagccctacataggattctcagtgc

SEQ ID NO: 153536 - DNA, 25 bp, probe
aagccctacaaggcaggcgcgggca

SEQ ID NO: 153537 - DNA, 25 bp, probe
aagccctacaaccagaagagtgaca

SEQ ID NO: 153538 - DNA, 25 bp, probe
aagcgacccagaaatggcagggaca

SEQ ID NO: 153539 - DNA, 25 bp, probe
aagctgaccgtctttgaaagcgaca

SEQ ID NO: 153540 - DNA, 25 bp, probe
aagaaccgttctttctatgcgaaca

SEQ ID NO: 153541 - DNA, 25 bp, probe
aagaaccttaccttcaaggagcaag

SEQ ID NO: 153542 - DNA, 25 bp, probe
aagaaatttaatagtgccaaggaag

SEQ ID NO: 153543 - DNA, 25 bp, probe
aagcaactttagtttcaaagatact

SEQ ID NO: 153544 - DNA, 25 bp, probe
aagcagcactttctgttgataatgg

SEQ ID NO: 153545 - DNA, 25 bp, probe
aagccatattattttctgatttatt

SEQ ID NO: 153546 - DNA, 25 bp, probe
aagccagagaacttacttcttggat

SEQ ID NO: 153547 - DNA, 25 bp, probe
aagccggaaaacatcctctgtgagc

SEQ ID NO: 153548 - DNA, 25 bp, probe
aagctgcgggagaagttcccgtgca

SEQ ID NO: 153549 - DNA, 25 bp, probe
aagcgcagggagacgctgctccctg

SEQ ID NO: 153550 - DNA, 25 bp, probe
aagccatgatggaaaatgccccttc

SEQ ID NO: 153551 - DNA, 25 bp, probe
aagcctgaggtaaagcccagcatcc

SEQ ID NO: 153552 - DNA, 25 bp, probe
aagcctattggaaggccacacaccc

SEQ ID NO: 153553 - DNA, 25 bp, probe
aagcctattggaaggccacacaccc

SEQ ID NO: 153554 - DNA, 25 bp, probe
aagactttgcgtaaccacgcctggt

SEQ ID NO: 153555 - DNA, 25 bp, probe
aagacgtgttggaacacctcatttt

SEQ ID NO: 153556 - DNA, 25 bp, probe
aagcaattggatcacaacctcacct

SEQ ID NO: 153557 - DNA, 25 bp, probe
aagcgtctggaaaaagccctcaggc

SEQ ID NO: 153558 - DNA, 25 bp, probe
aagcagttcacttaaaggccatgag

SEQ ID NO: 153559 - DNA, 25 bp, probe
aagagtaatttggaagagtcagatg

SEQ ID NO: 153560 - DNA, 25 bp, probe
aagagtgggttccaagacacctgcc

SEQ ID NO: 153561 - DNA, 25 bp, probe
aagagtgggttccaagacacctgcc

SEQ ID NO: 153562 - DNA, 25 bp, probe
aagagtgggttccaagacacctgcc

SEQ ID NO: 153563 - DNA, 25 bp, probe
caaatatagcgttcccaacaacccg

SEQ ID NO: 153564 - DNA, 25 bp, probe
aagaaggcagtatgtccaaaggcac

SEQ ID NO: 153565 - DNA, 25 bp, probe
aagactgtgcgtatgtagcaaaacc

SEQ ID NO: 153566 - DNA, 25 bp, probe
aagacgctggctgatgtactggtac

SEQ ID NO: 153567 - DNA, 25 bp, probe
aagacccgagctttgattgactccg

SEQ ID NO: 153568 - DNA, 25 bp, probe
aagcaccctaatgtgattgcattgc

SEQ ID NO: 153569 - DNA, 25 bp, probe
aagcaccctaatgtgattgcattgc

SEQ ID NO: 153570 - DNA, 25 bp, probe
aagcccacatattgtctgactgcat

SEQ ID NO: 153571 - DNA, 25 bp, probe
aagcatctgaatcatgtccactctc

SEQ ID NO: 153572 - DNA, 25 bp, probe
aagcatgctagagtatgaaccagct

SEQ ID NO: 153573 - DNA, 25 bp, probe
aagctgtgactgagtaccctgatgc

SEQ ID NO: 153574 - DNA, 25 bp, probe
aagcattactggttcacatcctggc

SEQ ID NO: 153575 - DNA, 25 bp, probe
aagctccctgaggagcacgccaggt

SEQ ID NO: 153576 - DNA, 25 bp, probe
aagctcagaaagatgactgccatga

SEQ ID NO: 153577 - DNA, 25 bp, probe
aagctgcagtaacctgtcttcagtt

SEQ ID NO: 153578 - DNA, 25 bp, probe
aagctgcagtaacctgtcttcagtt

SEQ ID NO: 153579 - DNA, 25 bp, probe
aagcatatgatctctttattagtga

SEQ ID NO: 153580 - DNA, 25 bp, probe
aagcatatgatctctttattagtga

SEQ ID NO: 153581 - DNA, 25 bp, probe
aagctgtagttgcatccttagtggc

SEQ ID NO: 153582 - DNA, 25 bp, probe
aagctgtagtagccctttctgtgtg

SEQ ID NO: 153583 - DNA, 25 bp, probe
aagcccagattgcacattttactgt

SEQ ID NO: 153584 - DNA, 25 bp, probe
aagcctctgttaaagtcattgactt

SEQ ID NO: 153585 - DNA, 25 bp, probe
aagcctcagtgctaaagtactactg

SEQ ID NO: 153586 - DNA, 25 bp, probe
aagccatattctaaattcactgttg

SEQ ID NO: 153587 - DNA, 25 bp, probe
aagccatattctaaattcactgttg

SEQ ID NO: 153588 - DNA, 25 bp, probe
aagccatattcatcttgatcctagg

SEQ ID NO: 153589 - DNA, 25 bp, probe
aagccatattcatcttgatcctagg

SEQ ID NO: 153590 - DNA, 25 bp, probe
aagactttgaagcctacctatcgca

SEQ ID NO: 153591 - DNA, 25 bp, probe
aagaatttacagctcagactattac

SEQ ID NO: 153592 - DNA, 25 bp, probe
aagcctgtgtagcagtgagacatca

SEQ ID NO: 153593 - DNA, 25 bp, probe
aagcctggataccaatgaggtgacc

SEQ ID NO: 153594 - DNA, 25 bp, probe
aagccgcaaaggcagcaggctaccg

SEQ ID NO: 153595 - DNA, 25 bp, probe
aagcggttgagcctggcagagtacc

SEQ ID NO: 153596 - DNA, 25 bp, probe
aagcgtgttggagtacggcgccttg

SEQ ID NO: 153597 - DNA, 25 bp, probe
aagcgtctctgagtgtagcagggcc

SEQ ID NO: 153598 - DNA, 25 bp, probe
aagcgtatcagcgtaagaggtggct

SEQ ID NO: 153599 - DNA, 25 bp, probe
aagcctcccagctaagaggtcactt

SEQ ID NO: 153600 - DNA, 25 bp, probe
aagcactaccagacaaagcgtatta

SEQ ID NO: 153601 - DNA, 25 bp, probe
aagcacataccactaagcggccaat

SEQ ID NO: 153602 - DNA, 25 bp, probe
aagcacataccactaagcggccaat

SEQ ID NO: 153603 - DNA, 25 bp, probe
aagcacataccactaagcggccaat

SEQ ID NO: 153604 - DNA, 25 bp, probe
aagcataagaaggaggcggaactga

SEQ ID NO: 153605 - DNA, 25 bp, probe
aagctcaagagcgaaggcaagaagg

SEQ ID NO: 153606 - DNA, 25 bp, probe
aagctctcaggcaaatgagaattaa

SEQ ID NO: 153607 - DNA, 25 bp, probe
aagcttaagccataaaatagattag

SEQ ID NO: 153608 - DNA, 25 bp, probe
aagccttacccatcacagttgatta

SEQ ID NO: 153609 - DNA, 25 bp, probe
aagatcatgtacccaatcaccttgt

SEQ ID NO: 153610 - DNA, 25 bp, probe
aagccttagttctttcatctagatg

SEQ ID NO: 153611 - DNA, 25 bp, probe
aagcactacagagtcagaactccag

SEQ ID NO: 153612 - DNA, 25 bp, probe
aagcagatgacatccagtacccgtc

SEQ ID NO: 153613 - DNA, 25 bp, probe
aagcagaacagtgattaccagggac

SEQ ID NO: 153614 - DNA, 25 bp, probe
aagcagggcaggaaacgccaagaac

SEQ ID NO: 153615 - DNA, 25 bp, probe
aagcagacgaggactacagccacga

SEQ ID NO: 153616 - DNA, 25 bp, probe
aagcaactgttgacttcagcctgtt

SEQ ID NO: 153617 - DNA, 25 bp, probe
aagctactttgttgagagtctcatt

SEQ ID NO: 153618 - DNA, 25 bp, probe
aagcactttttggctgacttcatct

SEQ ID NO: 153619 - DNA, 25 bp, probe
aagcaagttcttagtgcatcttcat

SEQ ID NO: 153620 - DNA, 25 bp, probe
aagccctccaatatgctagtaaaca

SEQ ID NO: 153621 - DNA, 25 bp, probe
aagccctgtcagattttgagaaaaa

SEQ ID NO: 153622 - DNA, 25 bp, probe
aagcatgagcgatatttttaaaaat

SEQ ID NO: 153623 - DNA, 25 bp, probe
aagctgaggagaatatgcctcaaaa

SEQ ID NO: 153624 - DNA, 25 bp, probe
aagctgcaggagttctgtaacagca

SEQ ID NO: 153625 - DNA, 25 bp, probe
aagcatgggatgctcatgtgacagc

SEQ ID NO: 153626 - DNA, 25 bp, probe
aagctgaggctgtacattgagcaga

SEQ ID NO: 153627 - DNA, 25 bp, probe
aagctggtggactttggcatggctg

SEQ ID NO: 153628 - DNA, 25 bp, probe
aagcggagcagacttctgacggtcc

SEQ ID NO: 153629 - DNA, 25 bp, probe
aagcacgagaacgtcatcgggcttc

SEQ ID NO: 153630 - DNA, 25 bp, probe
aagcatctaaactcatcttctttca

SEQ ID NO: 153631 - DNA, 25 bp, probe
aagctttacacagctgtccttactt

SEQ ID NO: 153632 - DNA, 25 bp, probe
aagcattaccactcaggcatttgac

SEQ ID NO: 153633 - DNA, 25 bp, probe
aagctatcaatcaccttgcatttca

SEQ ID NO: 153634 - DNA, 25 bp, probe
aagctactgagctcatttcacttac

SEQ ID NO: 153635 - DNA, 25 bp, probe
aagctacatatggccatcttgacag

SEQ ID NO: 153636 - DNA, 25 bp, probe
aagaagggccatatcatccacatcg

SEQ ID NO: 153637 - DNA, 25 bp, probe
aagcactgagcttctatatacccac

SEQ ID NO: 153638 - DNA, 25 bp, probe
aagggcagcatgtttaacccaggtg

SEQ ID NO: 153639 - DNA, 25 bp, probe
aagtggggctttatgcccgcactga

SEQ ID NO: 153640 - DNA, 25 bp, probe
aagaataactctttgtccttcacta

SEQ ID NO: 153641 - DNA, 25 bp, probe
aagtaaactgcttatcccgagcctt

SEQ ID NO: 153642 - DNA, 25 bp, probe
aagaagaccttttctacatgcgcct

SEQ ID NO: 153643 - DNA, 25 bp, probe
aagcaggaagttatctagcaagccg

SEQ ID NO: 153644 - DNA, 25 bp, probe
gaagtccaagttcttggaggccctg

SEQ ID NO: 153645 - DNA, 25 bp, probe
aagcagccaagctccttgggaggcc

SEQ ID NO: 153646 - DNA, 25 bp, probe
aagcacaaagcatcttccttaaagc

SEQ ID NO: 153647 - DNA, 25 bp, probe
aagcagctcaaatctagccctaatt

SEQ ID NO: 153648 - DNA, 25 bp, probe
aagagcgaaatagcaggcccaagtt

SEQ ID NO: 153649 - DNA, 25 bp, probe
aagagaaaggcagctggttaagttt

SEQ ID NO: 153650 - DNA, 25 bp, probe
aagagaaagaccagtggggatttgt

SEQ ID NO: 153651 - DNA, 25 bp, probe
aataactggaccagggggagctgct

SEQ ID NO: 153652 - DNA, 25 bp, probe
aagacagttacctggcagggacgct

SEQ ID NO: 153653 - DNA, 25 bp, probe
aagcagcaggtcacagggaagccca

SEQ ID NO: 153654 - DNA, 25 bp, probe
aagcaggagtccgaggatacagcca

SEQ ID NO: 153655 - DNA, 25 bp, probe
aagcatggggagtgatgtacatcca

SEQ ID NO: 153656 - DNA, 25 bp, probe
aagcagaggaggagcgtgatctctc

SEQ ID NO: 153657 - DNA, 25 bp, probe
aagcatgaaagcgcgcttcactgcc

SEQ ID NO: 153658 - DNA, 25 bp, probe
aagcagaaacatgctttcctagctg

SEQ ID NO: 153659 - DNA, 25 bp, probe
aagcagaaagcgttctccacttgtg

SEQ ID NO: 153660 - DNA, 25 bp, probe
aagctaccaggatttcagactttgg

SEQ ID NO: 153661 - DNA, 25 bp, probe
aagctaccaagatcctgaatgtcag

SEQ ID NO: 153662 - DNA, 25 bp, probe
aagaaggccacatggctgacattag

SEQ ID NO: 153663 - DNA, 25 bp, probe
aagaatcggcacgaggattattcaa

SEQ ID NO: 153664 - DNA, 25 bp, probe
aagaattggatctggatcatttgga

SEQ ID NO: 153665 - DNA, 25 bp, probe
aagacattaaatctgccatctcagg

SEQ ID NO: 153666 - DNA, 25 bp, probe
aagacataatatttctccacctggc

SEQ ID NO: 153667 - DNA, 25 bp, probe
aagacagaatcatctccttcacagg

SEQ ID NO: 153668 - DNA, 25 bp, probe
aagaagagctgctctggtctccatc

SEQ ID NO: 153669 - DNA, 25 bp, probe
aagtaagtgtaaggtccacatcctt

SEQ ID NO: 153670 - DNA, 25 bp, probe
aagccctttagggctacagtctctt

SEQ ID NO: 153671 - DNA, 25 bp, probe
aagcccttgttgctgtagatgtgcg

SEQ ID NO: 153672 - DNA, 25 bp, probe
aagctcaacgttctggagtggctgc

SEQ ID NO: 153673 - DNA, 25 bp, probe
aagctcaaacttcctggtaactcaa

SEQ ID NO: 153674 - DNA, 25 bp, probe
aagctcaaacttcctggtaactcaa

SEQ ID NO: 153675 - DNA, 25 bp, probe
aagctcaaacttcctggtaactcaa

SEQ ID NO: 153676 - DNA, 25 bp, probe
aagcagcaaacccctggatagcctt

SEQ ID NO: 153677 - DNA, 25 bp, probe
aagagcaagttctcgggagcggttc

SEQ ID NO: 153678 - DNA, 25 bp, probe
aagagcaagttctcgggagcggttc

SEQ ID NO: 153679 - DNA, 25 bp, probe
aagactgagttattagtcgatcgag

SEQ ID NO: 153680 - DNA, 25 bp, probe
aagacgaggtaaggtgcaagtgcag

SEQ ID NO: 153681 - DNA, 25 bp, probe
aagacggggattgtgagcggcttcg

SEQ ID NO: 153682 - DNA, 25 bp, probe
aagcagaggggattttggatgtctt

SEQ ID NO: 153683 - DNA, 25 bp, probe
aagaatctggggtttgccagtcagt

SEQ ID NO: 153684 - DNA, 25 bp, probe
aagaagtgtggggcttccttcagct

SEQ ID NO: 153685 - DNA, 25 bp, probe
aagaaggtacccatgttctcgatag

SEQ ID NO: 153686 - DNA, 25 bp, probe
aagaagaaagccttttgttccatag

SEQ ID NO: 153687 - DNA, 25 bp, probe
aagaggacacggctggttttcattg

SEQ ID NO: 153688 - DNA, 25 bp, probe
aagcagcagactgtaaggtctttag

SEQ ID NO: 153689 - DNA, 25 bp, probe
aagcagcagactgtaaggtctttag

SEQ ID NO: 153690 - DNA, 25 bp, probe
aagcagaatgcacaaatggacatgt

SEQ ID NO: 153691 - DNA, 25 bp, probe
aagagctatccccgatgatgacttg

SEQ ID NO: 153692 - DNA, 25 bp, probe
aagagctaccttcagctattatgcc

SEQ ID NO: 153693 - DNA, 25 bp, probe
aagactgaccttaccaactactagc

SEQ ID NO: 153694 - DNA, 25 bp, probe
aagacttccttagaaattcatattt

SEQ ID NO: 153695 - DNA, 25 bp, probe
aagaatcctcttttgaagaatcaaa

SEQ ID NO: 153696 - DNA, 25 bp, probe
aagaatcccttctagaaagcatttt

SEQ ID NO: 153697 - DNA, 25 bp, probe
aagaatcccttctagaaagcatttt

SEQ ID NO: 153698 - DNA, 25 bp, probe
aagcttcaccttggagaatttttct

SEQ ID NO: 153699 - DNA, 25 bp, probe
aagcgacccattcagagactgtccc

SEQ ID NO: 153700 - DNA, 25 bp, probe
aagcgagcacaactgggagacctcc

SEQ ID NO: 153701 - DNA, 25 bp, probe
aagcgtgatcagccgtggaacaccc

SEQ ID NO: 153702 - DNA, 25 bp, probe
aagctgatccagctgggaatcaccc

SEQ ID NO: 153703 - DNA, 25 bp, probe
aagctgatccagctgggaatcaccc

SEQ ID NO: 153704 - DNA, 25 bp, probe
aagctgatccagctgggaatcaccc

SEQ ID NO: 153705 - DNA, 25 bp, probe
aagctgatccagctgggaatcaccc

SEQ ID NO: 153706 - DNA, 25 bp, probe
aagctgatccagctgggaatcaccc

SEQ ID NO: 153707 - DNA, 25 bp, probe
aagcatttcgcgatggacagactca

SEQ ID NO: 153708 - DNA, 25 bp, probe
aagagttgctggtggaaggcgtcgg

SEQ ID NO: 153709 - DNA, 25 bp, probe
aagagttgctggtggaaggcgtcgg

SEQ ID NO: 153710 - DNA, 25 bp, probe
aagcaccttgaatggaaggtccgag

SEQ ID NO: 153711 - DNA, 25 bp, probe
aagactgcaggaacggaggggtcct

SEQ ID NO: 153712 - DNA, 25 bp, probe
aagcacagggagagtgggaaccact

SEQ ID NO: 153713 - DNA, 25 bp, probe
aagcagggtagacgtggccaagtcg

SEQ ID NO: 153714 - DNA, 25 bp, probe
aagcagaagttcaagtggacaaatt

SEQ ID NO: 153715 - DNA, 25 bp, probe
aagcaacagttggaggctgccaaag

SEQ ID NO: 153716 - DNA, 25 bp, probe
aagaagctggtgatggcccagaagc

SEQ ID NO: 153717 - DNA, 25 bp, probe
aagaacgggatttccaggcataaag

SEQ ID NO: 153718 - DNA, 25 bp, probe
aagaacgggatttccaggcataaag

SEQ ID NO: 153719 - DNA, 25 bp, probe
aagaagggtgtattccagaaggaga

SEQ ID NO: 153720 - DNA, 25 bp, probe
aagaaggaggcggaactgacggaga

SEQ ID NO: 153721 - DNA, 25 bp, probe
aagaagggggaatgctgtcgggact

SEQ ID NO: 153722 - DNA, 25 bp, probe
aagacggaagggacgtggcggctgc

SEQ ID NO: 153723 - DNA, 25 bp, probe
aagctcgtagttggatcttgggagc

SEQ ID NO: 153724 - DNA, 25 bp, probe
aagcgcagcttcaaggaactggggc

SEQ ID NO: 153725 - DNA, 25 bp, probe
aagcacagatgtacaggtatcaggg

SEQ ID NO: 153726 - DNA, 25 bp, probe
aagcacctgctcgggtgattctggg

SEQ ID NO: 153727 - DNA, 25 bp, probe
aagcaactgctctaagttttacgga

SEQ ID NO: 153728 - DNA, 25 bp, probe
aagcaatccatgctttgtttaggga

SEQ ID NO: 153729 - DNA, 25 bp, probe
aatgctagaatccaccttttaggta

SEQ ID NO: 153730 - DNA, 25 bp, probe
aagtaacccacattctgttcaggat

SEQ ID NO: 153731 - DNA, 25 bp, probe
aagcatttcccagctgtgtaaaaac

SEQ ID NO: 153732 - DNA, 25 bp, probe
aagctcttcaccaactgtcagaagg

SEQ ID NO: 153733 - DNA, 25 bp, probe
aagcatttcccacttggcgaaggac

SEQ ID NO: 153734 - DNA, 25 bp, probe
aagcttgaccgcattggcaaaggct

SEQ ID NO: 153735 - DNA, 25 bp, probe
aagtctggccgaattcctcaaggct

SEQ ID NO: 153736 - DNA, 25 bp, probe
aagtctggccgaattcctcaaggct

SEQ ID NO: 153737 - DNA, 25 bp, probe
aaggcgcccagaatcttgtcatggc

SEQ ID NO: 153738 - DNA, 25 bp, probe
aagcagccctatgacttgtatgaca

SEQ ID NO: 153739 - DNA, 25 bp, probe
aagcatcctcaaaactgtgggtcag

SEQ ID NO: 153740 - DNA, 25 bp, probe
aagctcagccagaaactgcgggaac

SEQ ID NO: 153741 - DNA, 25 bp, probe
aagcatccacagtacaagccttgaa

SEQ ID NO: 153742 - DNA, 25 bp, probe
aagacagccaatagcacccattaaa

SEQ ID NO: 153743 - DNA, 25 bp, probe
aagctagaagtcccccttgaatgac

SEQ ID NO: 153744 - DNA, 25 bp, probe
aagcgaaagagccggcctgtgagtg

SEQ ID NO: 153745 - DNA, 25 bp, probe
aagcgacggatacgtcctagtgctg

SEQ ID NO: 153746 - DNA, 25 bp, probe
aagcaaaggatcagtttggctgcct

SEQ ID NO: 153747 - DNA, 25 bp, probe
aagcacttggaattgtactgggttt

SEQ ID NO: 153748 - DNA, 25 bp, probe
aatggcttccaatgttaggtttgct

SEQ ID NO: 153749 - DNA, 25 bp, probe
aatggcttccaatgttaggtttgct

SEQ ID NO: 153750 - DNA, 25 bp, probe
aagactttaatgatttggaatacta

SEQ ID NO: 153751 - DNA, 25 bp, probe
aagacctgctccgtattggggtcac

SEQ ID NO: 153752 - DNA, 25 bp, probe
aagcaccaaccccataaagtgacac

SEQ ID NO: 153753 - DNA, 25 bp, probe
aagcagccaggacactcaaaaacac

SEQ ID NO: 153754 - DNA, 25 bp, probe
aagcagccactaccctgggattaat

SEQ ID NO: 153755 - DNA, 25 bp, probe
aagcagccactaccctgggattaat

SEQ ID NO: 153756 - DNA, 25 bp, probe
aagcgcacacaaccattcaggcttt

SEQ ID NO: 153757 - DNA, 25 bp, probe
aagcgcacacaaccattcaggcttt

SEQ ID NO: 153758 - DNA, 25 bp, probe
aagcatgcccaatcttagagactct

SEQ ID NO: 153759 - DNA, 25 bp, probe
aagctctgccacatttcttaatctg

SEQ ID NO: 153760 - DNA, 25 bp, probe
aagctctgccacatttcttaatctg

SEQ ID NO: 153761 - DNA, 25 bp, probe
aagcagtcccagatctcagtagact

SEQ ID NO: 153762 - DNA, 25 bp, probe
aagcagtcccagatctcagtagact

SEQ ID NO: 153763 - DNA, 25 bp, probe
aagatacccagattccaaggacctc

SEQ ID NO: 153764 - DNA, 25 bp, probe
aagatacccagattccaaggacctc

SEQ ID NO: 153765 - DNA, 25 bp, probe
aagaacttcaggtgtctggaccctt

SEQ ID NO: 153766 - DNA, 25 bp, probe
caagaattcccctgaaggacgtcgt

SEQ ID NO: 153767 - DNA, 25 bp, probe
caagaattcccctgaaggacgtcgt

SEQ ID NO: 153768 - DNA, 25 bp, probe
caagaattcccctgaaggacgtcgt

SEQ ID NO: 153769 - DNA, 25 bp, probe
aagaacaacaccatgaagtacttca

SEQ ID NO: 153770 - DNA, 25 bp, probe
aagaaccatcaagttccaaccatta

SEQ ID NO: 153771 - DNA, 25 bp, probe
aagaacagcagtattcctaccagga

SEQ ID NO: 153772 - DNA, 25 bp, probe
aagacataggtagccgtagttggac

SEQ ID NO: 153773 - DNA, 25 bp, probe
caaagtagattcgtagttagtttag

SEQ ID NO: 153774 - DNA, 25 bp, probe
aagcattatttggtagtttattata

SEQ ID NO: 153775 - DNA, 25 bp, probe
aagcttctactggcacaatttatta

SEQ ID NO: 153776 - DNA, 25 bp, probe
aagaactactgaaatattacactat

SEQ ID NO: 153777 - DNA, 25 bp, probe
aagaagtactactgtgataccaaga

SEQ ID NO: 153778 - DNA, 25 bp, probe
aagaagtatgtcctttgtatctcta

SEQ ID NO: 153779 - DNA, 25 bp, probe
aagaagcaattgattttattgactg

SEQ ID NO: 153780 - DNA, 25 bp, probe
aagaatgagtatggttgcttttgcc

SEQ ID NO: 153781 - DNA, 25 bp, probe
aagaatgagtatggttgcttttgcc

SEQ ID NO: 153782 - DNA, 25 bp, probe
aagctgcatggcaagttctgtggtt

SEQ ID NO: 153783 - DNA, 25 bp, probe
aagctatgcttagtgccaatagtaa

SEQ ID NO: 153784 - DNA, 25 bp, probe
aagcttcactcactgtcaatgatta

SEQ ID NO: 153785 - DNA, 25 bp, probe
aagtgctcaacaatgtgcaatgatt

SEQ ID NO: 153786 - DNA, 25 bp, probe
aagctggcagactttgcgctgctgt

SEQ ID NO: 153787 - DNA, 25 bp, probe
aagctggaagaagtggatgttgaag

SEQ ID NO: 153788 - DNA, 25 bp, probe
aagctggaagaagtggatgttgaag

SEQ ID NO: 153789 - DNA, 25 bp, probe
aagaggaaaccatgagtgtgctagc

SEQ ID NO: 153790 - DNA, 25 bp, probe
aagcagcgcaaatctgaggtttccc

SEQ ID NO: 153791 - DNA, 25 bp, probe
aagcagctggtgtggaggtctttcc

SEQ ID NO: 153792 - DNA, 25 bp, probe
aagacagggtattgccgtgttggcc

SEQ ID NO: 153793 - DNA, 25 bp, probe
aagaactgccctgggcctgtatacc

SEQ ID NO: 153794 - DNA, 25 bp, probe
aagaactgccctgggcctgtatacc

SEQ ID NO: 153795 - DNA, 25 bp, probe
aagagggcctgtgcccttatactct

SEQ ID NO: 153796 - DNA, 25 bp, probe
aagatgggctttgcggtactactag

SEQ ID NO: 153797 - DNA, 25 bp, probe
aagaggacgtcttctctttctacta

SEQ ID NO: 153798 - DNA, 25 bp, probe
aagaaccccatattcttttacatgg

SEQ ID NO: 153799 - DNA, 25 bp, probe
aagaaccccatattcttttacatgg

SEQ ID NO: 153800 - DNA, 25 bp, probe
aagaaagccgaatctatctaccgcc

SEQ ID NO: 153801 - DNA, 25 bp, probe
aagaaagccgaatctatctaccgcc

SEQ ID NO: 153802 - DNA, 25 bp, probe
aagaaattcgaatctcccaacatcc

SEQ ID NO: 153803 - DNA, 25 bp, probe
aagagaaccaacgcttgccaaatcc

SEQ ID NO: 153804 - DNA, 25 bp, probe
aagtggacctatagcctttgcccac

SEQ ID NO: 153805 - DNA, 25 bp, probe
aagtggacctatagcctttgcccac

SEQ ID NO: 153806 - DNA, 25 bp, probe
aagaaacactaagctctctgggcct

SEQ ID NO: 153807 - DNA, 25 bp, probe
aagaattcagctaacgcttccagac

SEQ ID NO: 153808 - DNA, 25 bp, probe
aagcagcttcacactctgcattaca

SEQ ID NO: 153809 - DNA, 25 bp, probe
aagcagtagcatcaccatctgtaaa

SEQ ID NO: 153810 - DNA, 25 bp, probe
aagcaaatcatccccattaaaaagc

SEQ ID NO: 153811 - DNA, 25 bp, probe
aagcaatttcctgcaaccagtaagg

SEQ ID NO: 153812 - DNA, 25 bp, probe
aagaagtatcctcacctcagatgaa

SEQ ID NO: 153813 - DNA, 25 bp, probe
aagatatgtactgcaggcccagata

SEQ ID NO: 153814 - DNA, 25 bp, probe
aagcaaggacatgcggcctgcatgg

SEQ ID NO: 153815 - DNA, 25 bp, probe
aagcaatggagagcggcgagcatgc

SEQ ID NO: 153816 - DNA, 25 bp, probe
aagaagcagcgggcaggtgtgatgc

SEQ ID NO: 153817 - DNA, 25 bp, probe
aagaagacgatggggcgtctccctg

SEQ ID NO: 153818 - DNA, 25 bp, probe
aagaaacgactgggttgtcatcctc

SEQ ID NO: 153819 - DNA, 25 bp, probe
aagaaacgttttcatgcttctggcc

SEQ ID NO: 153820 - DNA, 25 bp, probe
aagcacaactctatttcatgctttc

SEQ ID NO: 153821 - DNA, 25 bp, probe
aagacacagtgcttacttaccttac

SEQ ID NO: 153822 - DNA, 25 bp, probe
aagaaccatgtattcttcagcccca

SEQ ID NO: 153823 - DNA, 25 bp, probe
aagagtccaaagtcagtagcgccac

SEQ ID NO: 153824 - DNA, 25 bp, probe
aagcagcctcaaagaattacccctc

SEQ ID NO: 153825 - DNA, 25 bp, probe
aagcatttgaaaaacttcactgccc

SEQ ID NO: 153826 - DNA, 25 bp, probe
aagcagtgttaaaagcttccctgcc

SEQ ID NO: 153827 - DNA, 25 bp, probe
aagaggtggacgagtgctctcggcc

SEQ ID NO: 153828 - DNA, 25 bp, probe
aagaggtggacgagtgctctcggcc

SEQ ID NO: 153829 - DNA, 25 bp, probe
aagacttggaagaggtcaccatgca

SEQ ID NO: 153830 - DNA, 25 bp, probe
aagacggagaagaggctgtgcaaga

SEQ ID NO: 153831 - DNA, 25 bp, probe
aagacggagaagaggctgtgcaaga

SEQ ID NO: 153832 - DNA, 25 bp, probe
aagaaggaccagatcgtggtgcaga

SEQ ID NO: 153833 - DNA, 25 bp, probe
aagaaaggcaaggtcctggtccact

SEQ ID NO: 153834 - DNA, 25 bp, probe
aagaaagccacatttagggctatca

SEQ ID NO: 153835 - DNA, 25 bp, probe
aagaaaggccaagatttgcagaact

SEQ ID NO: 153836 - DNA, 25 bp, probe
aagaaagtccagacctcggagaagc

SEQ ID NO: 153837 - DNA, 25 bp, probe
aagaatttcaggacatctcggagga

SEQ ID NO: 153838 - DNA, 25 bp, probe
aagaatatgctaggctgcactctgc

SEQ ID NO: 153839 - DNA, 25 bp, probe
aagctatactagctcacatctgaag

SEQ ID NO: 153840 - DNA, 25 bp, probe
aagcattgtgcacttggacctgaag

SEQ ID NO: 153841 - DNA, 25 bp, probe
aagcttgtcatcaatggaaatccca

SEQ ID NO: 153842 - DNA, 25 bp, probe
aatgctggtatcaaaatccatccgc

SEQ ID NO: 153843 - DNA, 25 bp, probe
aagaggctgctgaaaaccatctggc

SEQ ID NO: 153844 - DNA, 25 bp, probe
aagaggcgtgagggcaaatctggct

SEQ ID NO: 153845 - DNA, 25 bp, probe
aagaggaggaggcccagaccatgtt

SEQ ID NO: 153846 - DNA, 25 bp, probe
aagaaacgcagtcctgctgacacct

SEQ ID NO: 153847 - DNA, 25 bp, probe
aagctagatcagcattctctaactt

SEQ ID NO: 153848 - DNA, 25 bp, probe
aagctgactgccgagtactgaacat

SEQ ID NO: 153849 - DNA, 25 bp, probe
aagctgaatgccgagaagccacact

SEQ ID NO: 153850 - DNA, 25 bp, probe
aagcatctctgcagaaagccaacag

SEQ ID NO: 153851 - DNA, 25 bp, probe
aagcagccatgcagaggtgacaaca

SEQ ID NO: 153852 - DNA, 25 bp, probe
aagcagccatgcagaggtgacaaca

SEQ ID NO: 153853 - DNA, 25 bp, probe
aagctgccagtcaagtggacagccc

SEQ ID NO: 153854 - DNA, 25 bp, probe
aatgcagccagtgttcacagggccg

SEQ ID NO: 153855 - DNA, 25 bp, probe
aagcagcaagatgttcaaactccat

SEQ ID NO: 153856 - DNA, 25 bp, probe
aagacactgggcttcaaatctcccc

SEQ ID NO: 153857 - DNA, 25 bp, probe
aagaagcatccctcaagtaagccct

SEQ ID NO: 153858 - DNA, 25 bp, probe
aagaccatcctccgaagtaagagct

SEQ ID NO: 153859 - DNA, 25 bp, probe
aagaaatgattccaaagtaacatgt

SEQ ID NO: 153860 - DNA, 25 bp, probe
aagacaagatgggacacgtgggatt

SEQ ID NO: 153861 - DNA, 25 bp, probe
aagacaatgtgtgggacactggact

SEQ ID NO: 153862 - DNA, 25 bp, probe
aagcagctggtggaggacctggacc

SEQ ID NO: 153863 - DNA, 25 bp, probe
aagcagtgagtcggggacagtcacc

SEQ ID NO: 153864 - DNA, 25 bp, probe
aagaggataccggatgtcagctccc

SEQ ID NO: 153865 - DNA, 25 bp, probe
aagaagatcacgaccttcgatcgcc

SEQ ID NO: 153866 - DNA, 25 bp, probe
aagacaacctggttatcgctctgca

SEQ ID NO: 153867 - DNA, 25 bp, probe
aagacaacctggttatcgctctgca

SEQ ID NO: 153868 - DNA, 25 bp, probe
aagacaccttcacttagcagttctg

SEQ ID NO: 153869 - DNA, 25 bp, probe
aagactacttcactgctacagagcc

SEQ ID NO: 153870 - DNA, 25 bp, probe
aagactacttcactgctacagagcc

SEQ ID NO: 153871 - DNA, 25 bp, probe
aagaatatctctgtgtcaaggccat

SEQ ID NO: 153872 - DNA, 25 bp, probe
aagcatatgatgatgtcttcagagg

SEQ ID NO: 153873 - DNA, 25 bp, probe
aagcatgaatgcaatggtgtagagt

SEQ ID NO: 153874 - DNA, 25 bp, probe
aagcatgaagctttgtgtgggttgg

SEQ ID NO: 153875 - DNA, 25 bp, probe
aagacttcatgctgttggcagtagg

SEQ ID NO: 153876 - DNA, 25 bp, probe
aagcttgtctgctctatagaaatga

SEQ ID NO: 153877 - DNA, 25 bp, probe
aagcttgctctgccaaaaggaatca

SEQ ID NO: 153878 - DNA, 25 bp, probe
aagcttctggtctaatatgtactcg

SEQ ID NO: 153879 - DNA, 25 bp, probe
aagcatttggttcttatgaccagac

SEQ ID NO: 153880 - DNA, 25 bp, probe
aagcatttggttcttatgaccagac

SEQ ID NO: 153881 - DNA, 25 bp, probe
aagcaattggcttccttagagtcca

SEQ ID NO: 153882 - DNA, 25 bp, probe
aagcaattggcttccttagagtcca

SEQ ID NO: 153883 - DNA, 25 bp, probe
aagcatttcagttccaggagaataa

SEQ ID NO: 153884 - DNA, 25 bp, probe
aagctcaatcagatacaaaaacagg

SEQ ID NO: 153885 - DNA, 25 bp, probe
aagatcaaagttctaagaagctggt

SEQ ID NO: 153886 - DNA, 25 bp, probe
aagagaaagcttccacagaaactga

SEQ ID NO: 153887 - DNA, 25 bp, probe
aagaactactgctcaaaattcatga

SEQ ID NO: 153888 - DNA, 25 bp, probe
aagaactcgctgggaaaatcagaga

SEQ ID NO: 153889 - DNA, 25 bp, probe
aagctcttcgtgcgagaacctgaga

SEQ ID NO: 153890 - DNA, 25 bp, probe
aagctcattcgccaggtggacaagt

SEQ ID NO: 153891 - DNA, 25 bp, probe
aagcatgcaccccagggtagtgcct

SEQ ID NO: 153892 - DNA, 25 bp, probe
aagcatgcaccccagggtagtgcct

SEQ ID NO: 153893 - DNA, 25 bp, probe
aagcatcctctccaaagttggagct

SEQ ID NO: 153894 - DNA, 25 bp, probe
aagcattatctttgccagttggagt

SEQ ID NO: 153895 - DNA, 25 bp, probe
aagcatttttctggggggatgtcca

SEQ ID NO: 153896 - DNA, 25 bp, probe
aagatttttttgtagagatgaggtc

SEQ ID NO: 153897 - DNA, 25 bp, probe
aagactttctaactgggatgtggta

SEQ ID NO: 153898 - DNA, 25 bp, probe
aagaccttctcgctggtcaaggaga

SEQ ID NO: 153899 - DNA, 25 bp, probe
aagaacacttgcactggtcacagga

SEQ ID NO: 153900 - DNA, 25 bp, probe
aagaacacttgcactggtcacagga

SEQ ID NO: 153901 - DNA, 25 bp, probe
aagaagacggcctggtccagttgga

SEQ ID NO: 153902 - DNA, 25 bp, probe
aagaaggcggcctggtccaggtgga

SEQ ID NO: 153903 - DNA, 25 bp, probe
aagaagtgcctcggggttgcagggc

SEQ ID NO: 153904 - DNA, 25 bp, probe
aagcaagtgtctttggtgttggagg

SEQ ID NO: 153905 - DNA, 25 bp, probe
aagagtgaggctcagctctggctgg

SEQ ID NO: 153906 - DNA, 25 bp, probe
aagactggtatcactctgtctggca

SEQ ID NO: 153907 - DNA, 25 bp, probe
aagactggtatcactctgtctggca

SEQ ID NO: 153908 - DNA, 25 bp, probe
aagcactttagcatctgttcaggta

SEQ ID NO: 153909 - DNA, 25 bp, probe
aagcactataatattgttcccatat

SEQ ID NO: 153910 - DNA, 25 bp, probe
aagacttaaatctctctcctatctg

SEQ ID NO: 153911 - DNA, 25 bp, probe
aagcactggaacacgatcctctttc

SEQ ID NO: 153912 - DNA, 25 bp, probe
aagagctggtacacgcaggtttccc

SEQ ID NO: 153913 - DNA, 25 bp, probe
aagagctggtacacgcaggtttccc

SEQ ID NO: 153914 - DNA, 25 bp, probe
aatccgttaatatatggtttcttct

SEQ ID NO: 153915 - DNA, 25 bp, probe
aatccaattctatatgggtttctta

SEQ ID NO: 153916 - DNA, 25 bp, probe
aatccaattctatatgggtttctta

SEQ ID NO: 153917 - DNA, 25 bp, probe
aagcatatcgtttattgaggttttt

SEQ ID NO: 153918 - DNA, 25 bp, probe
aagctcatatttttctcagttttta

SEQ ID NO: 153919 - DNA, 25 bp, probe
aagctcttggttgcacatgttatga

SEQ ID NO: 153920 - DNA, 25 bp, probe
aagcacattttcagactgcaatata

SEQ ID NO: 153921 - DNA, 25 bp, probe
aagcaccgctcacaactatatgcta

SEQ ID NO: 153922 - DNA, 25 bp, probe
aagcaccttcactaaagtcttattt

SEQ ID NO: 153923 - DNA, 25 bp, probe
aatgatccctactcaaaatttattt

SEQ ID NO: 153924 - DNA, 25 bp, probe
caggaccccaatgcgacaagtagtt

SEQ ID NO: 153925 - DNA, 25 bp, probe
aagacgcccattgagacactgatca

SEQ ID NO: 153926 - DNA, 25 bp, probe
aagcacacggttaaaatcatgacag

SEQ ID NO: 153927 - DNA, 25 bp, probe
aagcagaaggcattatatatactac

SEQ ID NO: 153928 - DNA, 25 bp, probe
aagcagaaggcattatatatactac

SEQ ID NO: 153929 - DNA, 25 bp, probe
aagcaaagccatatggagcatctac

SEQ ID NO: 153930 - DNA, 25 bp, probe
aagcaacagcaaagtcggacagtcc

SEQ ID NO: 153931 - DNA, 25 bp, probe
aagctaccttttgggatgattgctc

SEQ ID NO: 153932 - DNA, 25 bp, probe
aagctaccttttgggatgattgctc

SEQ ID NO: 153933 - DNA, 25 bp, probe
aagcatatgcctacttgtaatttct

SEQ ID NO: 153934 - DNA, 25 bp, probe
aagcagtgcctgcctatgaaatttc

SEQ ID NO: 153935 - DNA, 25 bp, probe
aagcaccactggactacacattctt

SEQ ID NO: 153936 - DNA, 25 bp, probe
aagacgagcgcgggaaatctcttcg

SEQ ID NO: 153937 - DNA, 25 bp, probe
aagaaagagccttgaagaccttcag

SEQ ID NO: 153938 - DNA, 25 bp, probe
aagaaagagccgaaagcaccactgc

SEQ ID NO: 153939 - DNA, 25 bp, probe
aagaaaggccagcaggctcaactcc

SEQ ID NO: 153940 - DNA, 25 bp, probe
aagaagaaaccaggaccaagctgca

SEQ ID NO: 153941 - DNA, 25 bp, probe
aagagccaggactctgatccagggc

SEQ ID NO: 153942 - DNA, 25 bp, probe
aagcttgtgaactctgtccagaaga

SEQ ID NO: 153943 - DNA, 25 bp, probe
aagcatgttgattctaggttgaaaa

SEQ ID NO: 153944 - DNA, 25 bp, probe
aagcatttatcattcttgttgccac

SEQ ID NO: 153945 - DNA, 25 bp, probe
aagcattatatctcagtgtatcgga

SEQ ID NO: 153946 - DNA, 25 bp, probe
aagcattcaagtacatagtgtcagg

SEQ ID NO: 153947 - DNA, 25 bp, probe
aagcagtgcacaattccgtggcagc

SEQ ID NO: 153948 - DNA, 25 bp, probe
aagcaagctctcttgccgaggagcc

SEQ ID NO: 153949 - DNA, 25 bp, probe
aagcagttctattgacaaggatgtc

SEQ ID NO: 153950 - DNA, 25 bp, probe
aagcagtcaccaagataatctgagg

SEQ ID NO: 153951 - DNA, 25 bp, probe
aagcagagagcggaaaatcaatggc

SEQ ID NO: 153952 - DNA, 25 bp, probe
aagcagagagcggaaaatcaatggc

SEQ ID NO: 153953 - DNA, 25 bp, probe
aagcagagagcagatttaatatagt

SEQ ID NO: 153954 - DNA, 25 bp, probe
aagcagagagatgcggccaagatag

SEQ ID NO: 153955 - DNA, 25 bp, probe
aagcagctaatgaggctacagaaac

SEQ ID NO: 153956 - DNA, 25 bp, probe
aagcagccaatgacgagttcggacg

SEQ ID NO: 153957 - DNA, 25 bp, probe
aagcagccaaagcagtgtcgacctg

SEQ ID NO: 153958 - DNA, 25 bp, probe
aagaccaaagggatcctgcgcttga

SEQ ID NO: 153959 - DNA, 25 bp, probe
aagaccaagaccagctttgctgcct

SEQ ID NO: 153960 - DNA, 25 bp, probe
aagacataagactaaattacacctt

SEQ ID NO: 153961 - DNA, 25 bp, probe
aagactaaagcttcactataacgtg

SEQ ID NO: 153962 - DNA, 25 bp, probe
aagaaaaacttcattgctgtcagcg

SEQ ID NO: 153963 - DNA, 25 bp, probe
aagaaacaggatggctttctgtagc

SEQ ID NO: 153964 - DNA, 25 bp, probe
aagtacaatgagagcttccagttca

SEQ ID NO: 153965 - DNA, 25 bp, probe
aagtacaatgagagcttccagttca

SEQ ID NO: 153966 - DNA, 25 bp, probe
aagctataaggaagccacacacata

SEQ ID NO: 153967 - DNA, 25 bp, probe
aagctataaggaagccacacacata

SEQ ID NO: 153968 - DNA, 25 bp, probe
aagcatgcataataagtcacagcca

SEQ ID NO: 153969 - DNA, 25 bp, probe
aagcattacaggatgacagcagccg

SEQ ID NO: 153970 - DNA, 25 bp, probe
aagcagcgacagcagtgacagcagc

SEQ ID NO: 153971 - DNA, 25 bp, probe
aagcacgagcagtgtgagagccagc

SEQ ID NO: 153972 - DNA, 25 bp, probe
aagactggcaccatgaggccatccc

SEQ ID NO: 153973 - DNA, 25 bp, probe
aagcactgtccagatactgctcagc

SEQ ID NO: 153974 - DNA, 25 bp, probe
aagacatcttcaggttcatgctcat

SEQ ID NO: 153975 - DNA, 25 bp, probe
aagcatgtattccagacttgtcact

SEQ ID NO: 153976 - DNA, 25 bp, probe
aagctatgttcaaaggtatccttca

SEQ ID NO: 153977 - DNA, 25 bp, probe
aagcatactgatgaagagttcctta

SEQ ID NO: 153978 - DNA, 25 bp, probe
aagcattctggtgtgaattgccatt

SEQ ID NO: 153979 - DNA, 25 bp, probe
aagcagtctggtgtagagatggaca

SEQ ID NO: 153980 - DNA, 25 bp, probe
aagcagatccggctgcaggtggagc

SEQ ID NO: 153981 - DNA, 25 bp, probe
aagagtgccgggctgagagcgtggg

SEQ ID NO: 153982 - DNA, 25 bp, probe
aagagtgttggtcttcaggagggga

SEQ ID NO: 153983 - DNA, 25 bp, probe
aagagtgttggtcttcaggagggga

SEQ ID NO: 153984 - DNA, 25 bp, probe
aagagtcatttgtatttcggaaggt

SEQ ID NO: 153985 - DNA, 25 bp, probe
aagaatcttttcattccatgcaaga

SEQ ID NO: 153986 - DNA, 25 bp, probe
aagaatcttcttgatagctctccca

SEQ ID NO: 153987 - DNA, 25 bp, probe
aagaactactgggcatgtgctttgg

SEQ ID NO: 153988 - DNA, 25 bp, probe
aagaagctggcttgacatgctgtat

SEQ ID NO: 153989 - DNA, 25 bp, probe
aagagcagctgagcacatcatttca

SEQ ID NO: 153990 - DNA, 25 bp, probe
aagaagctgagtcgcacttctccag

SEQ ID NO: 153991 - DNA, 25 bp, probe
aagaagctgagtcgcacttctccag

SEQ ID NO: 153992 - DNA, 25 bp, probe
aagaggctgtgcaagatgttctacg

SEQ ID NO: 153993 - DNA, 25 bp, probe
aagaggctgtgcaagatgttctacg

SEQ ID NO: 153994 - DNA, 25 bp, probe
aagactcattgcttaattctaagac

SEQ ID NO: 153995 - DNA, 25 bp, probe
aagaaccaaaacattacagagcatt

SEQ ID NO: 153996 - DNA, 25 bp, probe
aagcaagctcacaaaccttgaccct

SEQ ID NO: 153997 - DNA, 25 bp, probe
aagggctaattatattacatcccaa

SEQ ID NO: 153998 - DNA, 25 bp, probe
aagcaactaactttattcctccaca

SEQ ID NO: 153999 - DNA, 25 bp, probe
aagaattgtactcttctgccatacc

SEQ ID NO: 154000 - DNA, 25 bp, probe
aagaaattcaccatgtcagcaatat

SEQ ID NO: 154001 - DNA, 25 bp, probe
aagacacttaccaaggaagatatca

SEQ ID NO: 154002 - DNA, 25 bp, probe
aagacacttaccaaggaagatatca

SEQ ID NO: 154003 - DNA, 25 bp, probe
aagacacttacctaacaagtactgc

SEQ ID NO: 154004 - DNA, 25 bp, probe
aagactttccgcttacaatttgtag

SEQ ID NO: 154005 - DNA, 25 bp, probe
aagcagcttttagttcagacttagt

SEQ ID NO: 154006 - DNA, 25 bp, probe
aagcagcttttagttcagacttagt

SEQ ID NO: 154007 - DNA, 25 bp, probe
aagcattcatcattactgtggacat

SEQ ID NO: 154008 - DNA, 25 bp, probe
aagcattcatcattactgtggacat

SEQ ID NO: 154009 - DNA, 25 bp, probe
aagcagtcattctctgggtatataa

SEQ ID NO: 154010 - DNA, 25 bp, probe
aagcagcaattctgtggtacatgca

SEQ ID NO: 154011 - DNA, 25 bp, probe
aagcaagcattgtctgtgccataac

SEQ ID NO: 154012 - DNA, 25 bp, probe
aagcagaatgctttctgcctaccca

SEQ ID NO: 154013 - DNA, 25 bp, probe
aagcattctgtttatcgctcactct

SEQ ID NO: 154014 - DNA, 25 bp, probe
aagcattctgcttacagctacagtc

SEQ ID NO: 154015 - DNA, 25 bp, probe
aagcatatggctaagactgtatgtg

SEQ ID NO: 154016 - DNA, 25 bp, probe
aagcaagcgtaatcttcaggataat

SEQ ID NO: 154017 - DNA, 25 bp, probe
aagcaataactctctacaggaatat

SEQ ID NO: 154018 - DNA, 25 bp, probe
aagcaataatcctactcctcaaaat

SEQ ID NO: 154019 - DNA, 25 bp, probe
aagcaataatcctactcctcaaaat

SEQ ID NO: 154020 - DNA, 25 bp, probe
aagaataagccgtccactgaagaaa

SEQ ID NO: 154021 - DNA, 25 bp, probe
aagaatgaggcctccaaacaaacac

SEQ ID NO: 154022 - DNA, 25 bp, probe
aagaaggaccctgatgaaagaccaa

SEQ ID NO: 154023 - DNA, 25 bp, probe
aagaagccaacctcatgaagaccct

SEQ ID NO: 154024 - DNA, 25 bp, probe
aagaagccaacctcatgaagaccct

SEQ ID NO: 154025 - DNA, 25 bp, probe
aagaccctagccttagataaaactg

SEQ ID NO: 154026 - DNA, 25 bp, probe
aagaactttgccttatcataaacag

SEQ ID NO: 154027 - DNA, 25 bp, probe
aagcaatcttggcagactaaaacaa

SEQ ID NO: 154028 - DNA, 25 bp, probe
aagaatctatggcagtgtttgaaca

SEQ ID NO: 154029 - DNA, 25 bp, probe
aaggaccgcagtccttcagtaacac

SEQ ID NO: 154030 - DNA, 25 bp, probe
aagaagcctcaggtcgtggagaaca

SEQ ID NO: 154031 - DNA, 25 bp, probe
aagaaattctcttcagtgggccaca

SEQ ID NO: 154032 - DNA, 25 bp, probe
aagaagatcagcagctcgggggcac

SEQ ID NO: 154033 - DNA, 25 bp, probe
aagcaagatcacagtctggagacca

SEQ ID NO: 154034 - DNA, 25 bp, probe
aagcaagatcacagtctggagacca

SEQ ID NO: 154035 - DNA, 25 bp, probe
aagcaagtagcctccgagatgcgct

SEQ ID NO: 154036 - DNA, 25 bp, probe
aagcaagtagcctccgagatgcgct

SEQ ID NO: 154037 - DNA, 25 bp, probe
aagcaatatgggttcggcagatggt

SEQ ID NO: 154038 - DNA, 25 bp, probe
aagcattatgtgctgtgcgtggtga

SEQ ID NO: 154039 - DNA, 25 bp, probe
aagcaatcatgagtgcgtggctggg

SEQ ID NO: 154040 - DNA, 25 bp, probe
aagcagacagatcctgggcatgcgc

SEQ ID NO: 154041 - DNA, 25 bp, probe
aagcaaagagggcaatcgcctcctt

SEQ ID NO: 154042 - DNA, 25 bp, probe
aagaaggagggctgcaccatcctct

SEQ ID NO: 154043 - DNA, 25 bp, probe
aagaagtacagagcggcggccttta

SEQ ID NO: 154044 - DNA, 25 bp, probe
aagaagtacagagcggcggccttta

SEQ ID NO: 154045 - DNA, 25 bp, probe
aagcatgaggagaaccaccggcctt

SEQ ID NO: 154046 - DNA, 25 bp, probe
aagcatgaggagaaccaccggcctt

SEQ ID NO: 154047 - DNA, 25 bp, probe
aagcaggacaaatcccggctgaatg

SEQ ID NO: 154048 - DNA, 25 bp, probe
aagagcgaaagcaaccgggtggatg

SEQ ID NO: 154049 - DNA, 25 bp, probe
aagagcaaaggctccaatggtcagt

SEQ ID NO: 154050 - DNA, 25 bp, probe
aagcagacaaaatcaacatggtcat

SEQ ID NO: 154051 - DNA, 25 bp, probe
aagcagcagcagcagcaacacatcg

SEQ ID NO: 154052 - DNA, 25 bp, probe
aagcacacgagatcagagcatctga

SEQ ID NO: 154053 - DNA, 25 bp, probe
aagcactggatccaaagcatgtctg

SEQ ID NO: 154054 - DNA, 25 bp, probe
aagcagcttctgcagcaaattctga

SEQ ID NO: 154055 - DNA, 25 bp, probe
aagcacattcaatccaatttggact

SEQ ID NO: 154056 - DNA, 25 bp, probe
aagaatatcagctgccatattacga

SEQ ID NO: 154057 - DNA, 25 bp, probe
aagacatcaagctcaaagacattga

SEQ ID NO: 154058 - DNA, 25 bp, probe
aagcaaccatgcaaaagaaattaat

SEQ ID NO: 154059 - DNA, 25 bp, probe
aagcaaccatgcaaaagaaattaat

SEQ ID NO: 154060 - DNA, 25 bp, probe
aagcaatctcatccagagatagtga

SEQ ID NO: 154061 - DNA, 25 bp, probe
aagcaagtcatggagcacatctgga

SEQ ID NO: 154062 - DNA, 25 bp, probe
aagcaagtgctgtcagcaatatcct

SEQ ID NO: 154063 - DNA, 25 bp, probe
aagcagatgtcttcagctatgctct

SEQ ID NO: 154064 - DNA, 25 bp, probe
aagagaggtccagtatgcttcctac

SEQ ID NO: 154065 - DNA, 25 bp, probe
aagacaggacgcagatctctcctaa

SEQ ID NO: 154066 - DNA, 25 bp, probe
aatgacagcatatcaaacttcctat

SEQ ID NO: 154067 - DNA, 25 bp, probe
aatgcaagataaaaacccgtatagc

SEQ ID NO: 154068 - DNA, 25 bp, probe
caagaattcaatgcccggcgtaagc

SEQ ID NO: 154069 - DNA, 25 bp, probe
aagaatctgaatgcctttgcgtgag

SEQ ID NO: 154070 - DNA, 25 bp, probe
aagcagagtattgccttctggtgtc

SEQ ID NO: 154071 - DNA, 25 bp, probe
aagcagagtattgccttctggtgtc

SEQ ID NO: 154072 - DNA, 25 bp, probe
aagcaagatgtgttccttattgtga

SEQ ID NO: 154073 - DNA, 25 bp, probe
aagcaagactgatttcttctgtggt

SEQ ID NO: 154074 - DNA, 25 bp, probe
aagcagagagtgatgcttctgtgga

SEQ ID NO: 154075 - DNA, 25 bp, probe
aagcaagaggtgcctcatgatgggc

SEQ ID NO: 154076 - DNA, 25 bp, probe
aagaaaggatctctggggcttccgg

SEQ ID NO: 154077 - DNA, 25 bp, probe
aagaaagaattctggggtcatcctg

SEQ ID NO: 154078 - DNA, 25 bp, probe
aagaacgacattcagtgcagtctct

SEQ ID NO: 154079 - DNA, 25 bp, probe
aagacattacacccagacagactgt

SEQ ID NO: 154080 - DNA, 25 bp, probe
aagaatgtacagttgagctcaggtt

SEQ ID NO: 154081 - DNA, 25 bp, probe
aagagcatgtgaagttacaatgagg

SEQ ID NO: 154082 - DNA, 25 bp, probe
aagactgtgtaggcccagaagtgga

SEQ ID NO: 154083 - DNA, 25 bp, probe
aagaacgttcaggctcacaagcttg

SEQ ID NO: 154084 - DNA, 25 bp, probe
aagataggaaccattcaacttagtt

SEQ ID NO: 154085 - DNA, 25 bp, probe
aagaccggaaagatttgcattttat

SEQ ID NO: 154086 - DNA, 25 bp, probe
aaggcctggaaacgattttctgtat

SEQ ID NO: 154087 - DNA, 25 bp, probe
aagagcctgcgaaagccttttggtg

SEQ ID NO: 154088 - DNA, 25 bp, probe
aagagccattaaaatctctttggtt

SEQ ID NO: 154089 - DNA, 25 bp, probe
aagaccatgttcacattctttctaa

SEQ ID NO: 154090 - DNA, 25 bp, probe
aagaccatcctcactgactatgtgc

SEQ ID NO: 154091 - DNA, 25 bp, probe
aagagccaagccacaggctttccat

SEQ ID NO: 154092 - DNA, 25 bp, probe
aagaccaggctacaaggtgtttttg

SEQ ID NO: 154093 - DNA, 25 bp, probe
aatccaagcggatgaagggtttttg

SEQ ID NO: 154094 - DNA, 25 bp, probe
gaattaaggtaagaggtgtggcttt

SEQ ID NO: 154095 - DNA, 25 bp, probe
aattgtatggaaaaagggctgtgtt

SEQ ID NO: 154096 - DNA, 25 bp, probe
aatgttgtaattaaaggcgattttg

SEQ ID NO: 154097 - DNA, 25 bp, probe
aagttggaactgatcacccttttgt

SEQ ID NO: 154098 - DNA, 25 bp, probe
aagttcggacttcactacagagtag

SEQ ID NO: 154099 - DNA, 25 bp, probe
aagttcggacttcactacagagtag

SEQ ID NO: 154100 - DNA, 25 bp, probe
aagaggctggacaccctacagatgt

SEQ ID NO: 154101 - DNA, 25 bp, probe
aagaggagggcatccagtgacggca

SEQ ID NO: 154102 - DNA, 25 bp, probe
aagaaaagcgcatcaagtgtctgga

SEQ ID NO: 154103 - DNA, 25 bp, probe
aagagaagaagaggacaggattgtc

SEQ ID NO: 154104 - DNA, 25 bp, probe
aagcagttacagaaacagaattgat

SEQ ID NO: 154105 - DNA, 25 bp, probe
aagaggttaggagtagatattgatt

SEQ ID NO: 154106 - DNA, 25 bp, probe
aagtccttaggagtcttaacattgg

SEQ ID NO: 154107 - DNA, 25 bp, probe
aagtcagtgtaaaccacttagatag

SEQ ID NO: 154108 - DNA, 25 bp, probe
aagaccagaagaaccactcaagcag

SEQ ID NO: 154109 - DNA, 25 bp, probe
aagagcaagggttccctcaagagga

SEQ ID NO: 154110 - DNA, 25 bp, probe
aagacaaggggcttctgaaatggga

SEQ ID NO: 154111 - DNA, 25 bp, probe
aagaacacaggccttggaacaagga

SEQ ID NO: 154112 - DNA, 25 bp, probe
aagaacaagtcccgggacaacagca

SEQ ID NO: 154113 - DNA, 25 bp, probe
aagacagggtacaagtgggaacaca

SEQ ID NO: 154114 - DNA, 25 bp, probe
aagaagggtgcaagatggaaaatca

SEQ ID NO: 154115 - DNA, 25 bp, probe
aagaagggcgcgctgcgcaaacaca

SEQ ID NO: 154116 - DNA, 25 bp, probe
aagacaggcagcagggataagaagc

SEQ ID NO: 154117 - DNA, 25 bp, probe
aagactggagggttgagaccaggcc

SEQ ID NO: 154118 - DNA, 25 bp, probe
aagaagggggctttcagccaggctc

SEQ ID NO: 154119 - DNA, 25 bp, probe
aagaacagggcgggctagcctggct

SEQ ID NO: 154120 - DNA, 25 bp, probe
aagaacagggcgggctagcctggct

SEQ ID NO: 154121 - DNA, 25 bp, probe
aagaacttggcgagctacgacgtct

SEQ ID NO: 154122 - DNA, 25 bp, probe
aagaacttggcgagaagctcagcaa

SEQ ID NO: 154123 - DNA, 25 bp, probe
aagaagattcggaaacagcagcagc

SEQ ID NO: 154124 - DNA, 25 bp, probe
aagaagatcctgtatgccacatcag

SEQ ID NO: 154125 - DNA, 25 bp, probe
aagacagattctacatgcgcacaaa

SEQ ID NO: 154126 - DNA, 25 bp, probe
aagaatgtatcttgcatccctgtat

SEQ ID NO: 154127 - DNA, 25 bp, probe
aagaagttgctgtcacacattgtgt

SEQ ID NO: 154128 - DNA, 25 bp, probe
aagaagttgctgtcacacattgtgt

SEQ ID NO: 154129 - DNA, 25 bp, probe
aagaatagctgcaatctccatggcc

SEQ ID NO: 154130 - DNA, 25 bp, probe
aagaaaggaactgcagcgccgattt

SEQ ID NO: 154131 - DNA, 25 bp, probe
aagagaaggacattgcagcagctgc

SEQ ID NO: 154132 - DNA, 25 bp, probe
aagcagaatgtatcatcagagcgcc

SEQ ID NO: 154133 - DNA, 25 bp, probe
aagcaagtattgcataggcacctga

SEQ ID NO: 154134 - DNA, 25 bp, probe
aagcaattgattttattgactgcgt

SEQ ID NO: 154135 - DNA, 25 bp, probe
aagagaggttccacatgagcatgac

SEQ ID NO: 154136 - DNA, 25 bp, probe
aagcacgtgtttgagcaggcatcca

SEQ ID NO: 154137 - DNA, 25 bp, probe
aagcagctatttgtcagcaggcagc

SEQ ID NO: 154138 - DNA, 25 bp, probe
aagcagctatttgtcagcaggcagc

SEQ ID NO: 154139 - DNA, 25 bp, probe
aagagctagttttgctgatggagcg

SEQ ID NO: 154140 - DNA, 25 bp, probe
aagagccaggttgctgtgttgcagt

SEQ ID NO: 154141 - DNA, 25 bp, probe
aagagccagatggacctgagtgtcg

SEQ ID NO: 154142 - DNA, 25 bp, probe
aagagcaagggacctagtctcaggg

SEQ ID NO: 154143 - DNA, 25 bp, probe
caacccgggaacaaatccgagagat

SEQ ID NO: 154144 - DNA, 25 bp, probe
caacccgggaacaaatccgagagat

SEQ ID NO: 154145 - DNA, 25 bp, probe
caagcctcgggagaagctaaaggtg

SEQ ID NO: 154146 - DNA, 25 bp, probe
caagcctcgggagaagctaaaggtg

SEQ ID NO: 154147 - DNA, 25 bp, probe
aagaccagtggggatttgtaagact

SEQ ID NO: 154148 - DNA, 25 bp, probe
aagagccctggaggacgttggagac

SEQ ID NO: 154149 - DNA, 25 bp, probe
aagactgcctggtgaactgtatgaa

SEQ ID NO: 154150 - DNA, 25 bp, probe
aagaatgccttccaggagcttcagc

SEQ ID NO: 154151 - DNA, 25 bp, probe
aagaatcctgtgacaagcacttact

SEQ ID NO: 154152 - DNA, 25 bp, probe
aagacctcttgacagacctgattaa

SEQ ID NO: 154153 - DNA, 25 bp, probe
aagaccatctttcatggactacttt

SEQ ID NO: 154154 - DNA, 25 bp, probe
aagcaccactgctttacagaaacat

SEQ ID NO: 154155 - DNA, 25 bp, probe
aagcaccagcttttcacacaaggag

SEQ ID NO: 154156 - DNA, 25 bp, probe
aagcagccaattttgtacacatgga

SEQ ID NO: 154157 - DNA, 25 bp, probe
aagaccttaattaaaagcgcacaca

SEQ ID NO: 154158 - DNA, 25 bp, probe
aagacacttattcatacatcaggaa

SEQ ID NO: 154159 - DNA, 25 bp, probe
aagaccgctcgggaaatgcaggaag

SEQ ID NO: 154160 - DNA, 25 bp, probe
aagaccagcctgggcaacatgttga

SEQ ID NO: 154161 - DNA, 25 bp, probe
aagaccagcctggccaacatggtga

SEQ ID NO: 154162 - DNA, 25 bp, probe
aagcagcggtcagcagacaaggaga

SEQ ID NO: 154163 - DNA, 25 bp, probe
aagactggcttcaggcatagctgga

SEQ ID NO: 154164 - DNA, 25 bp, probe
aagactctgttacggcatggtgcaa

SEQ ID NO: 154165 - DNA, 25 bp, probe
aagagcatattttagagcacagtaa

SEQ ID NO: 154166 - DNA, 25 bp, probe
aagacatctctaataacgagtactt

SEQ ID NO: 154167 - DNA, 25 bp, probe
aagaattatgactcatcggtcagca

SEQ ID NO: 154168 - DNA, 25 bp, probe
aagattttgcccaactggtcggctt

SEQ ID NO: 154169 - DNA, 25 bp, probe
aagaaatttccactcaggtctgttt

SEQ ID NO: 154170 - DNA, 25 bp, probe
aagaaatttccactcaggtctgttt

SEQ ID NO: 154171 - DNA, 25 bp, probe
aagaagtcgttcctactgacattgt

SEQ ID NO: 154172 - DNA, 25 bp, probe
aagaggtttaactctgagattctgt

SEQ ID NO: 154173 - DNA, 25 bp, probe
aagaagtttcagtctttaatgtctg

SEQ ID NO: 154174 - DNA, 25 bp, probe
aagaggcttaagtatgttcattttt

SEQ ID NO: 154175 - DNA, 25 bp, probe
aagaggattaattggctgacagttt

SEQ ID NO: 154176 - DNA, 25 bp, probe
aagaactccagcaggtacagtgcct

SEQ ID NO: 154177 - DNA, 25 bp, probe
aagaactcaagaaagcacagatggc

SEQ ID NO: 154178 - DNA, 25 bp, probe
aagaactcaagaaagcacagatggc

SEQ ID NO: 154179 - DNA, 25 bp, probe
aagaagctctcggaaggagatggcg

SEQ ID NO: 154180 - DNA, 25 bp, probe
aagaactcttattatgtgatgatgg

SEQ ID NO: 154181 - DNA, 25 bp, probe
aagaacctttcaaggcagctggcac

SEQ ID NO: 154182 - DNA, 25 bp, probe
aagaacatcttctggtgacttcaaa

SEQ ID NO: 154183 - DNA, 25 bp, probe
aagaaatttcacagcagtttattaa

SEQ ID NO: 154184 - DNA, 25 bp, probe
aagaatcacaccaagactttattgt

SEQ ID NO: 154185 - DNA, 25 bp, probe
aagcaataactgacaactctttgta

SEQ ID NO: 154186 - DNA, 25 bp, probe
aagaaatcaatggaacccttgcaca

SEQ ID NO: 154187 - DNA, 25 bp, probe
aagagaggcaatggagcacccctat

SEQ ID NO: 154188 - DNA, 25 bp, probe
aagaaggacagtacatctactgctt

SEQ ID NO: 154189 - DNA, 25 bp, probe
aagaggggcagtgccgacagcttgg

SEQ ID NO: 154190 - DNA, 25 bp, probe
aagaaggcagaggcgccaacgcttg

SEQ ID NO: 154191 - DNA, 25 bp, probe
aagcacatttgagcctccaggcttc

SEQ ID NO: 154192 - DNA, 25 bp, probe
aagcacatttgagcctccaggcttc

SEQ ID NO: 154193 - DNA, 25 bp, probe
aagaattgatgggccacccgttcat

SEQ ID NO: 154194 - DNA, 25 bp, probe
aagaattgatgggccacccgttcat

SEQ ID NO: 154195 - DNA, 25 bp, probe
aagaatctgatgaaccaactttaga

SEQ ID NO: 154196 - DNA, 25 bp, probe
aagagaccatgaaagccggtatcag

SEQ ID NO: 154197 - DNA, 25 bp, probe
aagaacctgacctgcgagtgcaagg

SEQ ID NO: 154198 - DNA, 25 bp, probe
aagaacctgacagacgagtgcaagg

SEQ ID NO: 154199 - DNA, 25 bp, probe
aagaagggacagcaaggctggtggc

SEQ ID NO: 154200 - DNA, 25 bp, probe
aagaggggaagcaactccgtgtgcc

SEQ ID NO: 154201 - DNA, 25 bp, probe
aagattgggaactgcccattctccc

SEQ ID NO: 154202 - DNA, 25 bp, probe
aagattgggaactgcccattctccc

SEQ ID NO: 154203 - DNA, 25 bp, probe
aagatgagggttttgcacctggacc

SEQ ID NO: 154204 - DNA, 25 bp, probe
aagaacatggtttccaccaagatcc

SEQ ID NO: 154205 - DNA, 25 bp, probe
aatgacactcgtttccccagtgtca

SEQ ID NO: 154206 - DNA, 25 bp, probe
aatgacactcgtttccccagtgtca

SEQ ID NO: 154207 - DNA, 25 bp, probe
aagacaccagtaaccttcatttcac

SEQ ID NO: 154208 - DNA, 25 bp, probe
aagacccagataaagactccactcc

SEQ ID NO: 154209 - DNA, 25 bp, probe
aagacatcaaaaatggcactgtccc

SEQ ID NO: 154210 - DNA, 25 bp, probe
aagactagaactacagcatcagctc

SEQ ID NO: 154211 - DNA, 25 bp, probe
aagcacaagttcatcacacgctaca

SEQ ID NO: 154212 - DNA, 25 bp, probe
aagaaattgatcatgaatctctaat

SEQ ID NO: 154213 - DNA, 25 bp, probe
aagacaatgctggctggacgccttt

SEQ ID NO: 154214 - DNA, 25 bp, probe
aagacacgtgcaacagactgcctta

SEQ ID NO: 154215 - DNA, 25 bp, probe
aagacacgtgcaacagactgcctta

SEQ ID NO: 154216 - DNA, 25 bp, probe
aagaagctaagcctgatctcctgta

SEQ ID NO: 154217 - DNA, 25 bp, probe
aagaagctaagcctgatctcctgta

SEQ ID NO: 154218 - DNA, 25 bp, probe
aagcaacaaactcctatcattgata

SEQ ID NO: 154219 - DNA, 25 bp, probe
aagcaacaaagtcccgagcaatgaa

SEQ ID NO: 154220 - DNA, 25 bp, probe
aagagaaaatctcccccaggatcaa

SEQ ID NO: 154221 - DNA, 25 bp, probe
aagaacacaacgaccagctatggta

SEQ ID NO: 154222 - DNA, 25 bp, probe
aagacaaatactgcctgatttcatt

SEQ ID NO: 154223 - DNA, 25 bp, probe
aagacaactcactcaggcatcttct

SEQ ID NO: 154224 - DNA, 25 bp, probe
aagaacacagacttatggatcgtta

SEQ ID NO: 154225 - DNA, 25 bp, probe
aagaacactgtgcacatggtcagtt

SEQ ID NO: 154226 - DNA, 25 bp, probe
aagtgacaatggtacatgcccaggt

SEQ ID NO: 154227 - DNA, 25 bp, probe
aagaactgtacaagctgccctagtg

SEQ ID NO: 154228 - DNA, 25 bp, probe
aagaaatgtacaccactcctcatgt

SEQ ID NO: 154229 - DNA, 25 bp, probe
caagaaactaagccgtccttttcag

SEQ ID NO: 154230 - DNA, 25 bp, probe
aagagaaatgagcttgacctttaag

SEQ ID NO: 154231 - DNA, 25 bp, probe
aagaaagcattgctgctacaaatat

SEQ ID NO: 154232 - DNA, 25 bp, probe
aagaagagccagctgctaagtacca

SEQ ID NO: 154233 - DNA, 25 bp, probe
aagatggaacagctgtcaaggccac

SEQ ID NO: 154234 - DNA, 25 bp, probe
aagagatgaaggagtccgctgcccg

SEQ ID NO: 154235 - DNA, 25 bp, probe
aagagagagaggggtcttggcactc

SEQ ID NO: 154236 - DNA, 25 bp, probe
aagttgaggtctgttctgtcctcca

SEQ ID NO: 154237 - DNA, 25 bp, probe
aagttgtggaattttctcagcccct

SEQ ID NO: 154238 - DNA, 25 bp, probe
aagatttggtaatttcagagctcaa

SEQ ID NO: 154239 - DNA, 25 bp, probe
aagatttggtaatttcagagctcaa

SEQ ID NO: 154240 - DNA, 25 bp, probe
aagagatcgtgttacagtcacaatc

SEQ ID NO: 154241 - DNA, 25 bp, probe
aagaatctgttattactagcaaatt

SEQ ID NO: 154242 - DNA, 25 bp, probe
aagaattgattcttagtgacacaga

SEQ ID NO: 154243 - DNA, 25 bp, probe
aagaatagacccaagcgcatcacga

SEQ ID NO: 154244 - DNA, 25 bp, probe
aagagataagcttcgtggatccaga

SEQ ID NO: 154245 - DNA, 25 bp, probe
aagagataagcttcgtggatccaga

SEQ ID NO: 154246 - DNA, 25 bp, probe
aagaggagacttttgccatgcctga

SEQ ID NO: 154247 - DNA, 25 bp, probe
aagaagtagtgtttccatgctctgt

SEQ ID NO: 154248 - DNA, 25 bp, probe
aagaagtagtgtttccatgctctgt

SEQ ID NO: 154249 - DNA, 25 bp, probe
aagacgaagtctaatgacctctgat

SEQ ID NO: 154250 - DNA, 25 bp, probe
aagatggaacgccatgtggcccgtc

SEQ ID NO: 154251 - DNA, 25 bp, probe
aagatgatgaaccgcttcatgccac

SEQ ID NO: 154252 - DNA, 25 bp, probe
aagagcaggctcagttgctccacgt

SEQ ID NO: 154253 - DNA, 25 bp, probe
aagacaggcacttttggcgcaaatc

SEQ ID NO: 154254 - DNA, 25 bp, probe
aagaagcagcactttctgttgataa

SEQ ID NO: 154255 - DNA, 25 bp, probe
aagaacatcacgtgcatttgctatg

SEQ ID NO: 154256 - DNA, 25 bp, probe
aagaagatctaatgcatcctatatc

SEQ ID NO: 154257 - DNA, 25 bp, probe
aagaagatttattcctctatgatgg

SEQ ID NO: 154258 - DNA, 25 bp, probe
aagcaatttatatctttatgcaaaa

SEQ ID NO: 154259 - DNA, 25 bp, probe
aagcaatttatatctttatgcaaaa

SEQ ID NO: 154260 - DNA, 25 bp, probe
aagaacaaatattcctcgtgctaaa

SEQ ID NO: 154261 - DNA, 25 bp, probe
aagaaaaattgtacatccattaaat

SEQ ID NO: 154262 - DNA, 25 bp, probe
aagaggaaattaactatctgtactt

SEQ ID NO: 154263 - DNA, 25 bp, probe
aagggaatagcgacttagtgttcta

SEQ ID NO: 154264 - DNA, 25 bp, probe
aagagagaaactcctatgcagtgag

SEQ ID NO: 154265 - DNA, 25 bp, probe
aagagagagaccctcactgctgggg

SEQ ID NO: 154266 - DNA, 25 bp, probe
aagacagacacgctgcagatcgagg

SEQ ID NO: 154267 - DNA, 25 bp, probe
aagacagccatccatgtgcatgagc

SEQ ID NO: 154268 - DNA, 25 bp, probe
aagacagccatccatgtgcatgagc

SEQ ID NO: 154269 - DNA, 25 bp, probe
aagatcattgctcctcctgagcgca

SEQ ID NO: 154270 - DNA, 25 bp, probe
aagatcattgctcctcctgagcgca

SEQ ID NO: 154271 - DNA, 25 bp, probe
aagcaatagatatcctatcatcagt

SEQ ID NO: 154272 - DNA, 25 bp, probe
aagtaaagcatcccttcatcgtgga

SEQ ID NO: 154273 - DNA, 25 bp, probe
aagtaaagcatcccttcatcgtgga

SEQ ID NO: 154274 - DNA, 25 bp, probe
aagaatgtgcctttcatttctggct

SEQ ID NO: 154275 - DNA, 25 bp, probe
aagaatgaccaaatttacgccatga

SEQ ID NO: 154276 - DNA, 25 bp, probe
aagagatgggcattgtttcccctat

SEQ ID NO: 154277 - DNA, 25 bp, probe
aagagatgggcattgtttcccctat

SEQ ID NO: 154278 - DNA, 25 bp, probe
aagagagcaacattttacccacaca

SEQ ID NO: 154279 - DNA, 25 bp, probe
aagagagcaacattttacccacaca

SEQ ID NO: 154280 - DNA, 25 bp, probe
aagacagcaagcttatattcctact

SEQ ID NO: 154281 - DNA, 25 bp, probe
aagaaaaggtttaccagatgctcca

SEQ ID NO: 154282 - DNA, 25 bp, probe
aagaaaaggtttaccagatgctcca

SEQ ID NO: 154283 - DNA, 25 bp, probe
aagaccacgcgtctgaaggagtaca

SEQ ID NO: 154284 - DNA, 25 bp, probe
aagaccaaggtcagtatagattaga

SEQ ID NO: 154285 - DNA, 25 bp, probe
aagaccaaggtcagtatagattaga

SEQ ID NO: 154286 - DNA, 25 bp, probe
aagactgaagaaatttcacagcagt

SEQ ID NO: 154287 - DNA, 25 bp, probe
aagacttactaacgcatatcaaata

SEQ ID NO: 154288 - DNA, 25 bp, probe
aagaaccaccaaagatctcaaataa

SEQ ID NO: 154289 - DNA, 25 bp, probe
aagaccctgacattcatgatccaaa

SEQ ID NO: 154290 - DNA, 25 bp, probe
aagaagattgaccagcttgctagaa

SEQ ID NO: 154291 - DNA, 25 bp, probe
aagaaatgtggccatgctttaaacc

SEQ ID NO: 154292 - DNA, 25 bp, probe
aagaagatatccgtgtctctataac

SEQ ID NO: 154293 - DNA, 25 bp, probe
aagaagcagatcgacgtggccatca

SEQ ID NO: 154294 - DNA, 25 bp, probe
aagaagcgagatgtgtggcctgcct

SEQ ID NO: 154295 - DNA, 25 bp, probe
aagaagctgagattcctgtgcaccc

SEQ ID NO: 154296 - DNA, 25 bp, probe
aagaagctgagattcctgtgcaccc

SEQ ID NO: 154297 - DNA, 25 bp, probe
aagaagcgagaattctgagatcctc

SEQ ID NO: 154298 - DNA, 25 bp, probe
aagaatcgagagctccagatcatga

SEQ ID NO: 154299 - DNA, 25 bp, probe
aagtagtggcagccatccagcactg

SEQ ID NO: 154300 - DNA, 25 bp, probe
aagaggtgcacagatgctcagattg

SEQ ID NO: 154301 - DNA, 25 bp, probe
aagatgttggacttctgcaatagat

SEQ ID NO: 154302 - DNA, 25 bp, probe
aagagctgggatccaggcactatgt

SEQ ID NO: 154303 - DNA, 25 bp, probe
aagacggtgcagtcggctgcatact

SEQ ID NO: 154304 - DNA, 25 bp, probe
aagacggtcaacgagtcagccagtc

SEQ ID NO: 154305 - DNA, 25 bp, probe
aagacggtcaacgagtcagccagtc

SEQ ID NO: 154306 - DNA, 25 bp, probe
aagactgatgtcagaggccccatgg

SEQ ID NO: 154307 - DNA, 25 bp, probe
aagacagagtgaagcagggcccagc

SEQ ID NO: 154308 - DNA, 25 bp, probe
aagacatggtgttgagggaagcact

SEQ ID NO: 154309 - DNA, 25 bp, probe
aagacatgtctatggtagctgagcc

SEQ ID NO: 154310 - DNA, 25 bp, probe
aagatagtcatcttggggctggtcc

SEQ ID NO: 154311 - DNA, 25 bp, probe
aagagaacatattcggggagagccg

SEQ ID NO: 154312 - DNA, 25 bp, probe
aagagagactgcagcagaggcgaga

SEQ ID NO: 154313 - DNA, 25 bp, probe
aagacaaatctcttgaggcagatga

SEQ ID NO: 154314 - DNA, 25 bp, probe
aagacagaatcctatggtgacatga

SEQ ID NO: 154315 - DNA, 25 bp, probe
aagaggccatcctttgtgaagctgg

SEQ ID NO: 154316 - DNA, 25 bp, probe
aagtacacattctctgtggactggt

SEQ ID NO: 154317 - DNA, 25 bp, probe
aagacagatcttgccgtggactagc

SEQ ID NO: 154318 - DNA, 25 bp, probe
aagactggctggaccgatatgaaag

SEQ ID NO: 154319 - DNA, 25 bp, probe
aagactggctggaccgatatgaaag

SEQ ID NO: 154320 - DNA, 25 bp, probe
aagacggatggcgtttgtgaatgga

SEQ ID NO: 154321 - DNA, 25 bp, probe
aagacggcggttgttattggtggtg

SEQ ID NO: 154322 - DNA, 25 bp, probe
aagaagtcggggctttctgatgtca

SEQ ID NO: 154323 - DNA, 25 bp, probe
aagaagtactgcccttttgtgtgtt

SEQ ID NO: 154324 - DNA, 25 bp, probe
aagattggactccctggtggttgag

SEQ ID NO: 154325 - DNA, 25 bp, probe
aagtcgacatctaacgttttatcat

SEQ ID NO: 154326 - DNA, 25 bp, probe
aagtccagactatggatgtgttctc

SEQ ID NO: 154327 - DNA, 25 bp, probe
aagacaccacaataattattgcctg

SEQ ID NO: 154328 - DNA, 25 bp, probe
aagaaccgcaaatagtcatctctct

SEQ ID NO: 154329 - DNA, 25 bp, probe
aagaggcacctaaacagattcttct

SEQ ID NO: 154330 - DNA, 25 bp, probe
aagatgctgatgactatgaataata

SEQ ID NO: 154331 - DNA, 25 bp, probe
aagagctggagctatgccacaagct

SEQ ID NO: 154332 - DNA, 25 bp, probe
aagactggtgcatttacagctgtta

SEQ ID NO: 154333 - DNA, 25 bp, probe
aagactggtgcatttacagctgtta

SEQ ID NO: 154334 - DNA, 25 bp, probe
aagagatggagtttggagttgtata

SEQ ID NO: 154335 - DNA, 25 bp, probe
aagagggcctttgatttgattaatt

SEQ ID NO: 154336 - DNA, 25 bp, probe
aagttgacctttgcactggcattaa

SEQ ID NO: 154337 - DNA, 25 bp, probe
aagatgtgccctggtaactggcttt

SEQ ID NO: 154338 - DNA, 25 bp, probe
aagagcatcccagctataaggctct

SEQ ID NO: 154339 - DNA, 25 bp, probe
aagactcaatgagctgttatgttgt

SEQ ID NO: 154340 - DNA, 25 bp, probe
aagactctagacgtttactttgtag

SEQ ID NO: 154341 - DNA, 25 bp, probe
aagtcctttctttatactgttgtgg

SEQ ID NO: 154342 - DNA, 25 bp, probe
aagtttgtacttctaagtctgatct

SEQ ID NO: 154343 - DNA, 25 bp, probe
aagtttgctaaatctaaacagcaga

SEQ ID NO: 154344 - DNA, 25 bp, probe
aagtattcaaaaaactccaggctgg

SEQ ID NO: 154345 - DNA, 25 bp, probe
aagatgataccttaaactcccactg

SEQ ID NO: 154346 - DNA, 25 bp, probe
aagatgcttcccaagaactttcaag

SEQ ID NO: 154347 - DNA, 25 bp, probe
aagatgcttcccaagaactttcaag

SEQ ID NO: 154348 - DNA, 25 bp, probe
aagacctcaccaaaaggtgtcgaga

SEQ ID NO: 154349 - DNA, 25 bp, probe
aagagcctcgacagagaaggaaaga

SEQ ID NO: 154350 - DNA, 25 bp, probe
aagacctggacaccaatgcggacac

SEQ ID NO: 154351 - DNA, 25 bp, probe
aagacgtggtcaggcatgctggtag

SEQ ID NO: 154352 - DNA, 25 bp, probe
aagacacggctgggttggatatgcc

SEQ ID NO: 154353 - DNA, 25 bp, probe
aagacagccctgtgattgttatgat

SEQ ID NO: 154354 - DNA, 25 bp, probe
aagaagttctgttatctgtgtatat

SEQ ID NO: 154355 - DNA, 25 bp, probe
aagaagctatctgctgagtgtgcta

SEQ ID NO: 154356 - DNA, 25 bp, probe
aagacatcttggcctgatttgctgc

SEQ ID NO: 154357 - DNA, 25 bp, probe
aagaactgtggaccatgccagtccc

SEQ ID NO: 154358 - DNA, 25 bp, probe
aagatacggtggacagccagccagc

SEQ ID NO: 154359 - DNA, 25 bp, probe
aagaagctggaggtcctgcagtcgc

SEQ ID NO: 154360 - DNA, 25 bp, probe
aagacagtggtggtccggtggaggg

SEQ ID NO: 154361 - DNA, 25 bp, probe
aagacagtggtggtccggtggaggg

SEQ ID NO: 154362 - DNA, 25 bp, probe
aagacagtggtggtccggtggaggg

SEQ ID NO: 154363 - DNA, 25 bp, probe
aagtcagatggggattacggggaag

SEQ ID NO: 154364 - DNA, 25 bp, probe
aagagactgtatccttcacagggga

SEQ ID NO: 154365 - DNA, 25 bp, probe
aagaacctgtacgtccattatggag

SEQ ID NO: 154366 - DNA, 25 bp, probe
aagaacctgtacgtccattatggag

SEQ ID NO: 154367 - DNA, 25 bp, probe
aagtacactgaacttccttatggga

SEQ ID NO: 154368 - DNA, 25 bp, probe
aagtacactgaacttccttatggga

SEQ ID NO: 154369 - DNA, 25 bp, probe
aagaaccaccagatctgcttcaagg

SEQ ID NO: 154370 - DNA, 25 bp, probe
aagaaaagccagattcctcagcaga

SEQ ID NO: 154371 - DNA, 25 bp, probe
aagtaatcccagatgacaaccagac

SEQ ID NO: 154372 - DNA, 25 bp, probe
aagatgttttggattaaccggctgc

SEQ ID NO: 154373 - DNA, 25 bp, probe
aagggtattgccctttacacgtgtg

SEQ ID NO: 154374 - DNA, 25 bp, probe
aagagttttgcatggtctaaattgt

SEQ ID NO: 154375 - DNA, 25 bp, probe
aagagctttgcaggggtcttttgta

SEQ ID NO: 154376 - DNA, 25 bp, probe
aagagctattgcaaggtgcttctgt

SEQ ID NO: 154377 - DNA, 25 bp, probe
aagagttttcgagtgttgcaggctc

SEQ ID NO: 154378 - DNA, 25 bp, probe
aagaggcttgtccatttgtgggccg

SEQ ID NO: 154379 - DNA, 25 bp, probe
caagccgctcttagaattggcctgt

SEQ ID NO: 154380 - DNA, 25 bp, probe
aagtcgtctttgacactggttcgtc

SEQ ID NO: 154381 - DNA, 25 bp, probe
aagtacgttggtaccgcttgtgctc

SEQ ID NO: 154382 - DNA, 25 bp, probe
aagtacgttggtaccgcttgtgctc

SEQ ID NO: 154383 - DNA, 25 bp, probe
aagaacagtattaatccctttgaga

SEQ ID NO: 154384 - DNA, 25 bp, probe
aagaacactatttaccctcagctat

SEQ ID NO: 154385 - DNA, 25 bp, probe
aagaacaaattatcatccatgactt

SEQ ID NO: 154386 - DNA, 25 bp, probe
aagatagattttatcttctactttt

SEQ ID NO: 154387 - DNA, 25 bp, probe
aagacgtttttgctttattctgcaa

SEQ ID NO: 154388 - DNA, 25 bp, probe
aagatctatgatagttttttttcca

SEQ ID NO: 154389 - DNA, 25 bp, probe
aagagcaagcgccgcttctttttcc

SEQ ID NO: 154390 - DNA, 25 bp, probe
aagagcaagcgccgcttctttttcc

SEQ ID NO: 154391 - DNA, 25 bp, probe
aagaaagcgccgctcatgactatac

SEQ ID NO: 154392 - DNA, 25 bp, probe
aagatacaggggatcatgttaaaaa

SEQ ID NO: 154393 - DNA, 25 bp, probe
aagaccagatgtgatttgttaaaaa

SEQ ID NO: 154394 - DNA, 25 bp, probe
aagacaggattttttgtgctaccaa

SEQ ID NO: 154395 - DNA, 25 bp, probe
aagacaggattttttgtgctaccaa

SEQ ID NO: 154396 - DNA, 25 bp, probe
aagaacagttactttggcatcattc

SEQ ID NO: 154397 - DNA, 25 bp, probe
aagaaatttctcttcaagcatcatc

SEQ ID NO: 154398 - DNA, 25 bp, probe
aagaacactgtttatcaatgtcatt

SEQ ID NO: 154399 - DNA, 25 bp, probe
aagagaactgtttaatatgctgatt

SEQ ID NO: 154400 - DNA, 25 bp, probe
aagaactgttgtgcaagtgtgacca

SEQ ID NO: 154401 - DNA, 25 bp, probe
aagagactttgggaaatgagaacca

SEQ ID NO: 154402 - DNA, 25 bp, probe
aagggagtaggtgaaatagcccaat

SEQ ID NO: 154403 - DNA, 25 bp, probe
aagggcaaaggagagcaaacaactt

SEQ ID NO: 154404 - DNA, 25 bp, probe
aaggacctcaggggacaggtacctg

SEQ ID NO: 154405 - DNA, 25 bp, probe
aaggacctcaggggacaggtacctg

SEQ ID NO: 154406 - DNA, 25 bp, probe
aagtaccgcctgggacggaagatcg

SEQ ID NO: 154407 - DNA, 25 bp, probe
aagaaacacactgaggcaggaactc

SEQ ID NO: 154408 - DNA, 25 bp, probe
aagaacagcaagcctatccatacca

SEQ ID NO: 154409 - DNA, 25 bp, probe
aagatcatcagcaatgcctcctgca

SEQ ID NO: 154410 - DNA, 25 bp, probe
aagatcatcagcaatgcctcctgca

SEQ ID NO: 154411 - DNA, 25 bp, probe
aagacatcctatctagctgcaaggt

SEQ ID NO: 154412 - DNA, 25 bp, probe
aagactcttaggcagctatgggttt

SEQ ID NO: 154413 - DNA, 25 bp, probe
aagagtctattgtctccttggttat

SEQ ID NO: 154414 - DNA, 25 bp, probe
aagacttatcagtctttatggagga

SEQ ID NO: 154415 - DNA, 25 bp, probe
aagacttgaccacttacttggataa

SEQ ID NO: 154416 - DNA, 25 bp, probe
aagacttcaaagttttctgctgtaa

SEQ ID NO: 154417 - DNA, 25 bp, probe
aagactgtcagagcttcttctgctg

SEQ ID NO: 154418 - DNA, 25 bp, probe
aagacagagcagatcagtctttgtc

SEQ ID NO: 154419 - DNA, 25 bp, probe
aagacaggatcattcttctttcttt

SEQ ID NO: 154420 - DNA, 25 bp, probe
aagacgacatgcttcatctgtggtc

SEQ ID NO: 154421 - DNA, 25 bp, probe
aagacagagtctcgctctgttgccc

SEQ ID NO: 154422 - DNA, 25 bp, probe
aagagcagcttcactctgatcatgg

SEQ ID NO: 154423 - DNA, 25 bp, probe
aagagcagcttcactctgatcatgg

SEQ ID NO: 154424 - DNA, 25 bp, probe
aagagcagcttcttctcgttgagaa

SEQ ID NO: 154425 - DNA, 25 bp, probe
aagaggcttccactggggagaagtc

SEQ ID NO: 154426 - DNA, 25 bp, probe
aagacgctgcactcgtggaggaagt

SEQ ID NO: 154427 - DNA, 25 bp, probe
aagacgtgatcaaggctgtggagga

SEQ ID NO: 154428 - DNA, 25 bp, probe
aagagcgtgtgaaccttttgtgttg

SEQ ID NO: 154429 - DNA, 25 bp, probe
aagagggcgatagtcgttttcttgc

SEQ ID NO: 154430 - DNA, 25 bp, probe
aagaggaagtgagcggtgctgtcct

SEQ ID NO: 154431 - DNA, 25 bp, probe
aagatgggcaggtggtgtctggccc

SEQ ID NO: 154432 - DNA, 25 bp, probe
aagatgggcaggtggtgtctggccc

SEQ ID NO: 154433 - DNA, 25 bp, probe
aagtcggacagtccatggttggcct

SEQ ID NO: 154434 - DNA, 25 bp, probe
aagacggaactttgtgctgacggct

SEQ ID NO: 154435 - DNA, 25 bp, probe
gacttcgttactgatgccgatcgtc

SEQ ID NO: 154436 - DNA, 25 bp, probe
gactgggtctacagacctgaccctg

SEQ ID NO: 154437 - DNA, 25 bp, probe
aagaggtgctactgactttctcagc

SEQ ID NO: 154438 - DNA, 25 bp, probe
aagagtgatgtacagtctattccat

SEQ ID NO: 154439 - DNA, 25 bp, probe
aagactcatggacatttcatacctg

SEQ ID NO: 154440 - DNA, 25 bp, probe
aagacccaacagattcataccagaa

SEQ ID NO: 154441 - DNA, 25 bp, probe
aagaaacagaagattacaaaagcaa

SEQ ID NO: 154442 - DNA, 25 bp, probe
aagaaacagatatatgctataaaat

SEQ ID NO: 154443 - DNA, 25 bp, probe
aagaggaacatatgcctgagaacct

SEQ ID NO: 154444 - DNA, 25 bp, probe
aagggctaattacctaaccagcttg

SEQ ID NO: 154445 - DNA, 25 bp, probe
caagggctaattacctaaccagctt

SEQ ID NO: 154446 - DNA, 25 bp, probe
aagttgtagtcaatgcctatgaaca

SEQ ID NO: 154447 - DNA, 25 bp, probe
aagatgagatagaggacattcaaca

SEQ ID NO: 154448 - DNA, 25 bp, probe
aagaacacatttagacattacagag

SEQ ID NO: 154449 - DNA, 25 bp, probe
aagaacattcagttggattccatcg

SEQ ID NO: 154450 - DNA, 25 bp, probe
aagaacttcgaccagaggccaagaa

SEQ ID NO: 154451 - DNA, 25 bp, probe
aagactctactatcgggagaagaaa

SEQ ID NO: 154452 - DNA, 25 bp, probe
aagactctactatcgggagaagaaa

SEQ ID NO: 154453 - DNA, 25 bp, probe
aagagttccataccgggctacaatt

SEQ ID NO: 154454 - DNA, 25 bp, probe
aagtaataaatgcttggtgagaatt

SEQ ID NO: 154455 - DNA, 25 bp, probe
aatgtacttaggcttggctgccctg

SEQ ID NO: 154456 - DNA, 25 bp, probe
aatgtacattacctggtttcctggg

SEQ ID NO: 154457 - DNA, 25 bp, probe
aagagacattaacttccttcctagg

SEQ ID NO: 154458 - DNA, 25 bp, probe
aagaacatccgagtttcttctctac

SEQ ID NO: 154459 - DNA, 25 bp, probe
aagacactgcctgcttttacttggc

SEQ ID NO: 154460 - DNA, 25 bp, probe
aagacctgattggcactttcactga

SEQ ID NO: 154461 - DNA, 25 bp, probe
aagacctgattggcactttcactga

SEQ ID NO: 154462 - DNA, 25 bp, probe
aagacctcatctgcactaatgcctt

SEQ ID NO: 154463 - DNA, 25 bp, probe
aagaggctcattccaggtttcattc

SEQ ID NO: 154464 - DNA, 25 bp, probe
aagatgttgcaacccagtttctctg

SEQ ID NO: 154465 - DNA, 25 bp, probe
aagagtcttacggcagggatcattg

SEQ ID NO: 154466 - DNA, 25 bp, probe
aagagtcttacggcagggatcattg

SEQ ID NO: 154467 - DNA, 25 bp, probe
aagactttactgccaaaatatctga

SEQ ID NO: 154468 - DNA, 25 bp, probe
aagacctgtacgccaacacagtgct

SEQ ID NO: 154469 - DNA, 25 bp, probe
aagagccgaaagcaccactgcttta

SEQ ID NO: 154470 - DNA, 25 bp, probe
aagacaggaagcccacctggcattt

SEQ ID NO: 154471 - DNA, 25 bp, probe
aagagagacggcacacctggtgccc

SEQ ID NO: 154472 - DNA, 25 bp, probe
aagtaagcggcaacaagggtccgtg

SEQ ID NO: 154473 - DNA, 25 bp, probe
aagacaagcaggcggcgggcatgcc

SEQ ID NO: 154474 - DNA, 25 bp, probe
aagacaagcaggcggcgggcatgcc

SEQ ID NO: 154475 - DNA, 25 bp, probe
aagtcaagcgggccaccgagaggtt

SEQ ID NO: 154476 - DNA, 25 bp, probe
aagataacacgacgacctgaggatt

SEQ ID NO: 154477 - DNA, 25 bp, probe
aagtacatcgcagagaccatgaagt

SEQ ID NO: 154478 - DNA, 25 bp, probe
aagtacatcgcagagaccatgaagt

SEQ ID NO: 154479 - DNA, 25 bp, probe
aagtggatcgaggacaccatagcgg

SEQ ID NO: 154480 - DNA, 25 bp, probe
aagatggtcaagcaagtgactggga

SEQ ID NO: 154481 - DNA, 25 bp, probe
aagagggacagatgaatgccgtgga

SEQ ID NO: 154482 - DNA, 25 bp, probe
aagagggacagatgccccagacgag

SEQ ID NO: 154483 - DNA, 25 bp, probe
aagagggacagatgccccagacgag

SEQ ID NO: 154484 - DNA, 25 bp, probe
aagaaagtcagaggccatcctgcac

SEQ ID NO: 154485 - DNA, 25 bp, probe
aagaaatatctatgcttctctcact

SEQ ID NO: 154486 - DNA, 25 bp, probe
aagacaatactcttgtgttacatca

SEQ ID NO: 154487 - DNA, 25 bp, probe
aagacaacatcgttactacatccag

SEQ ID NO: 154488 - DNA, 25 bp, probe
aagacaacatcgttactacatccag

SEQ ID NO: 154489 - DNA, 25 bp, probe
aagatccaccgagatatcaaagctg

SEQ ID NO: 154490 - DNA, 25 bp, probe
aagatccaccgagatatcaaagctg

SEQ ID NO: 154491 - DNA, 25 bp, probe
aagtccattagaaagtcagccctta

SEQ ID NO: 154492 - DNA, 25 bp, probe
aagagccagtagtgaatcccctcat

SEQ ID NO: 154493 - DNA, 25 bp, probe
aagagcaccaagttgtgccccactt

SEQ ID NO: 154494 - DNA, 25 bp, probe
aagacagctcaaaatatccacacct

SEQ ID NO: 154495 - DNA, 25 bp, probe
aagacatcctacaagagaatactat

SEQ ID NO: 154496 - DNA, 25 bp, probe
aagactccatatctacagaacattt

SEQ ID NO: 154497 - DNA, 25 bp, probe
aagtctaatatttaagatcactgtt

SEQ ID NO: 154498 - DNA, 25 bp, probe
aagtctttcactaaggttctcttgc

SEQ ID NO: 154499 - DNA, 25 bp, probe
aagtcactttatctgggtgtctcgc

SEQ ID NO: 154500 - DNA, 25 bp, probe
aagacagctttctttgggaactctg

SEQ ID NO: 154501 - DNA, 25 bp, probe
aagacagtgtgtgcggcaagaacgc

SEQ ID NO: 154502 - DNA, 25 bp, probe
aagacagtgtgtgctcggagatgct

SEQ ID NO: 154503 - DNA, 25 bp, probe
aagagatgttggttatgggtctggg

SEQ ID NO: 154504 - DNA, 25 bp, probe
aagagcggcggattaaggcttgggc

SEQ ID NO: 154505 - DNA, 25 bp, probe
aaggtggctgtgaaaaccctgaagc

SEQ ID NO: 154506 - DNA, 25 bp, probe
aagagtcctctgaatgaaccttctg

SEQ ID NO: 154507 - DNA, 25 bp, probe
aaggtcacttttcacatccttgact

SEQ ID NO: 154508 - DNA, 25 bp, probe
aaggtacttttggagctggccttct

SEQ ID NO: 154509 - DNA, 25 bp, probe
aagttacagtttacgcaggacattc

SEQ ID NO: 154510 - DNA, 25 bp, probe
aagatacaagtttcaggcagggtct

SEQ ID NO: 154511 - DNA, 25 bp, probe
aagagcaaaggtggggcagggtgca

SEQ ID NO: 154512 - DNA, 25 bp, probe
aagagaagtggtggcgtgggaatgg

SEQ ID NO: 154513 - DNA, 25 bp, probe
aagagaagatggagtgcgagggcag

SEQ ID NO: 154514 - DNA, 25 bp, probe
aagactcgcagattttcttgggaga

SEQ ID NO: 154515 - DNA, 25 bp, probe
aagacgctcaagaatcctctggggt

SEQ ID NO: 154516 - DNA, 25 bp, probe
aagagcccaagaagacactggtgtg

SEQ ID NO: 154517 - DNA, 25 bp, probe
aagaccacggagcagctcatcgagg

SEQ ID NO: 154518 - DNA, 25 bp, probe
aagaccagctgggtagtcaggagag

SEQ ID NO: 154519 - DNA, 25 bp, probe
aagacacggaatggttcagacagag

SEQ ID NO: 154520 - DNA, 25 bp, probe
aagagcaggaggtgcctgaaagctg

SEQ ID NO: 154521 - DNA, 25 bp, probe
aagagtgcggagaggcgaaactgag

SEQ ID NO: 154522 - DNA, 25 bp, probe
aagaggcgctggaagaaaaacttca

SEQ ID NO: 154523 - DNA, 25 bp, probe
aagagcttgtggaaaagaaagtttg

SEQ ID NO: 154524 - DNA, 25 bp, probe
aaggcttaggacttcaaaaggtgat

SEQ ID NO: 154525 - DNA, 25 bp, probe
aaggcttaggacttcaaaaggtgat

SEQ ID NO: 154526 - DNA, 25 bp, probe
aagagtgctaggtaccaaattgtga

SEQ ID NO: 154527 - DNA, 25 bp, probe
aagagcttggtgtagggcaattgga

SEQ ID NO: 154528 - DNA, 25 bp, probe
aagagcttggtgtagggcaattgga

SEQ ID NO: 154529 - DNA, 25 bp, probe
aagactctgttgatgtgataatttg

SEQ ID NO: 154530 - DNA, 25 bp, probe
aagaccccttcaggcatcaagttga

SEQ ID NO: 154531 - DNA, 25 bp, probe
aagaccccttcaggcatcaagttga

SEQ ID NO: 154532 - DNA, 25 bp, probe
aagaccccttcaggcatcaagttga

SEQ ID NO: 154533 - DNA, 25 bp, probe
aagacctacttctgaagtgtttgac

SEQ ID NO: 154534 - DNA, 25 bp, probe
aagtttcctatgtgaaggctcttga

SEQ ID NO: 154535 - DNA, 25 bp, probe
aagattttattctggaagttgatga

SEQ ID NO: 154536 - DNA, 25 bp, probe
aagactttgttctgtgtgtttcaag

SEQ ID NO: 154537 - DNA, 25 bp, probe
aagtgtggtttctgttatttgaatg

SEQ ID NO: 154538 - DNA, 25 bp, probe
aagtgtggtttctgttatttgaatg

SEQ ID NO: 154539 - DNA, 25 bp, probe
aagttggcatttcttgtttggaata

SEQ ID NO: 154540 - DNA, 25 bp, probe
aagttggcttctctattgctacgat

SEQ ID NO: 154541 - DNA, 25 bp, probe
aagttagtatacaatattggggaca

SEQ ID NO: 154542 - DNA, 25 bp, probe
aagatgtggttactgagatttggga

SEQ ID NO: 154543 - DNA, 25 bp, probe
aagatgggcccagtggataagcgga

SEQ ID NO: 154544 - DNA, 25 bp, probe
aagaggatccggggcaatacagacc

SEQ ID NO: 154545 - DNA, 25 bp, probe
aagacgacgaggactgctatggcaa

SEQ ID NO: 154546 - DNA, 25 bp, probe
aagacagactgaatttgcgatgaaa

SEQ ID NO: 154547 - DNA, 25 bp, probe
aagacagcacttatattgtacaata

SEQ ID NO: 154548 - DNA, 25 bp, probe
aagacatgtttaatactgtacaatt

SEQ ID NO: 154549 - DNA, 25 bp, probe
aagactgttatgatcgctttgattt

SEQ ID NO: 154550 - DNA, 25 bp, probe
aagacctctatatttgctcttttat

SEQ ID NO: 154551 - DNA, 25 bp, probe
aagatggttgtattcctcactttga

SEQ ID NO: 154552 - DNA, 25 bp, probe
aagtacattgtttccacttcttgat

SEQ ID NO: 154553 - DNA, 25 bp, probe
aagagacaactaagcctttcgtgtt

SEQ ID NO: 154554 - DNA, 25 bp, probe
aagatcaaattaacctgcttttttg

SEQ ID NO: 154555 - DNA, 25 bp, probe
aagatcaaattaacctgcttttttg

SEQ ID NO: 154556 - DNA, 25 bp, probe
aagattatttagtcacctttctcct

SEQ ID NO: 154557 - DNA, 25 bp, probe
aagagttttgaccacattgttgatc

SEQ ID NO: 154558 - DNA, 25 bp, probe
aagatattttccggctttatgtcag

SEQ ID NO: 154559 - DNA, 25 bp, probe
aagattcttcatccacgtttgtgga

SEQ ID NO: 154560 - DNA, 25 bp, probe
aagattcttcatccacgtttgtgga

SEQ ID NO: 154561 - DNA, 25 bp, probe
aagttgcctcatctacaatttgaga

SEQ ID NO: 154562 - DNA, 25 bp, probe
aagttgttcatttaactggtagaat

SEQ ID NO: 154563 - DNA, 25 bp, probe
aagactgtatcaaaaagtggataga

SEQ ID NO: 154564 - DNA, 25 bp, probe
aagactgatggctcaaagggtgtga

SEQ ID NO: 154565 - DNA, 25 bp, probe
aagactgatattcaaatgctgtagt

SEQ ID NO: 154566 - DNA, 25 bp, probe
aagactgcaaagcctaatgatgata

SEQ ID NO: 154567 - DNA, 25 bp, probe
aagactgcaaagcctaatgatgata

SEQ ID NO: 154568 - DNA, 25 bp, probe
aagagccgcagacctactaaaacat

SEQ ID NO: 154569 - DNA, 25 bp, probe
aagagcccaaatgaccaaatccatg

SEQ ID NO: 154570 - DNA, 25 bp, probe
aagacccaaatatcgtcatagccaa

SEQ ID NO: 154571 - DNA, 25 bp, probe
aagtcccgaggaaagtctcagtcca

SEQ ID NO: 154572 - DNA, 25 bp, probe
aagaccctgcagcatgacaagctcg

SEQ ID NO: 154573 - DNA, 25 bp, probe
aagaccctgcagaaaatcagtcaac

SEQ ID NO: 154574 - DNA, 25 bp, probe
aagaccctgcagaaaatcagtcaac

SEQ ID NO: 154575 - DNA, 25 bp, probe
aagagcatcctctttattcagtata

SEQ ID NO: 154576 - DNA, 25 bp, probe
aagacctgtctagtatctcctatga

SEQ ID NO: 154577 - DNA, 25 bp, probe
aagacagctggccaggatgtccgag

SEQ ID NO: 154578 - DNA, 25 bp, probe
aagagaggaaagcagcccagacact

SEQ ID NO: 154579 - DNA, 25 bp, probe
aagagtggtagagcagagcctgacc

SEQ ID NO: 154580 - DNA, 25 bp, probe
aagagtgggacaaatgcagccgggc

SEQ ID NO: 154581 - DNA, 25 bp, probe
aagagggcgacaattaggagagcca

SEQ ID NO: 154582 - DNA, 25 bp, probe
aagaccctaaatctgaggaatcaac

SEQ ID NO: 154583 - DNA, 25 bp, probe
aagactctctaagtgaagaggttca

SEQ ID NO: 154584 - DNA, 25 bp, probe
aagactgtatatttgaggggtttca

SEQ ID NO: 154585 - DNA, 25 bp, probe
aagactgtaatgtacctgaagtttc

SEQ ID NO: 154586 - DNA, 25 bp, probe
aagacgtagatccatccaagacttg

SEQ ID NO: 154587 - DNA, 25 bp, probe
aagagtccaatccaccgaactctgt

SEQ ID NO: 154588 - DNA, 25 bp, probe
aagagtccactgccaaaagagtagt

SEQ ID NO: 154589 - DNA, 25 bp, probe
aagagacccggtaagaggacagaga

SEQ ID NO: 154590 - DNA, 25 bp, probe
aagagacccggtaagaggacagaga

SEQ ID NO: 154591 - DNA, 25 bp, probe
aagatatcccgttagaagaaccaga

SEQ ID NO: 154592 - DNA, 25 bp, probe
aagagaccctgcacaagcagtacca

SEQ ID NO: 154593 - DNA, 25 bp, probe
aagagaccctgcacaagcagtacca

SEQ ID NO: 154594 - DNA, 25 bp, probe
aagattacctggaccagctgaccca

SEQ ID NO: 154595 - DNA, 25 bp, probe
aagagataaatgaccgaagagcccg

SEQ ID NO: 154596 - DNA, 25 bp, probe
aatgacataaatacgtaaacctata

SEQ ID NO: 154597 - DNA, 25 bp, probe
aagactaagtgccttttcatccaaa

SEQ ID NO: 154598 - DNA, 25 bp, probe
aagacttcgtgatttttaacagaga

SEQ ID NO: 154599 - DNA, 25 bp, probe
aagatttctggatatctgtgaaaat

SEQ ID NO: 154600 - DNA, 25 bp, probe
aagttctgataatctaggaaaatct

SEQ ID NO: 154601 - DNA, 25 bp, probe
aagattctaaggcctagtagtattt

SEQ ID NO: 154602 - DNA, 25 bp, probe
aagtttgtaggtgtgtgcagttgtt

SEQ ID NO: 154603 - DNA, 25 bp, probe
aagtttgtaggtgtgtgcagttgtt

SEQ ID NO: 154604 - DNA, 25 bp, probe
aagttttggcctaaatgagtcgtat

SEQ ID NO: 154605 - DNA, 25 bp, probe
aagttgatgtgcccttgaataccag

SEQ ID NO: 154606 - DNA, 25 bp, probe
aagtaagtcctcatgaagccctttc

SEQ ID NO: 154607 - DNA, 25 bp, probe
aagatggtgccttcgtgaaggcttt

SEQ ID NO: 154608 - DNA, 25 bp, probe
aagagcctcacctgggggcattttg

SEQ ID NO: 154609 - DNA, 25 bp, probe
aagagcctcacctgggggcattttg

SEQ ID NO: 154610 - DNA, 25 bp, probe
aagacctcacacttggcaagcgcat

SEQ ID NO: 154611 - DNA, 25 bp, probe
aagacctcacacttggcaagcgcat

SEQ ID NO: 154612 - DNA, 25 bp, probe
aagaccttcagcaatggcactggta

SEQ ID NO: 154613 - DNA, 25 bp, probe
aagagccttcagaatgctcctgagt

SEQ ID NO: 154614 - DNA, 25 bp, probe
aagagccttcagaatgctcctgagt

SEQ ID NO: 154615 - DNA, 25 bp, probe
aagacgctgtacatgctgggcagcc

SEQ ID NO: 154616 - DNA, 25 bp, probe
aagaggtgcctcatgatgggcccat

SEQ ID NO: 154617 - DNA, 25 bp, probe
aagaggtgcctcatgatgggcccat

SEQ ID NO: 154618 - DNA, 25 bp, probe
aagaccatcgtggtggtggcagcct

SEQ ID NO: 154619 - DNA, 25 bp, probe
aagaccattggcaggggcgtgttcg

SEQ ID NO: 154620 - DNA, 25 bp, probe
aagactatcttgaaggtgggctgtt

SEQ ID NO: 154621 - DNA, 25 bp, probe
aagactatcttgaaggtgggctgtt

SEQ ID NO: 154622 - DNA, 25 bp, probe
aagagatttcagcaggctggtttta

SEQ ID NO: 154623 - DNA, 25 bp, probe
aagagatccatctcacagggttatt

SEQ ID NO: 154624 - DNA, 25 bp, probe
aagatgaccatctccatggctgact

SEQ ID NO: 154625 - DNA, 25 bp, probe
aagatgtgatcctgccagagtacta

SEQ ID NO: 154626 - DNA, 25 bp, probe
aagatgatcttctgcagcaggtact

SEQ ID NO: 154627 - DNA, 25 bp, probe
aagatgatcttctgcagcaggtact

SEQ ID NO: 154628 - DNA, 25 bp, probe
aagagcattctacaccagctcacag

SEQ ID NO: 154629 - DNA, 25 bp, probe
aagagatggccacggctgcttccag

SEQ ID NO: 154630 - DNA, 25 bp, probe
aagagtgtgcaaacctttcgagact

SEQ ID NO: 154631 - DNA, 25 bp, probe
aagatctgtctgaagcagcttcaca

SEQ ID NO: 154632 - DNA, 25 bp, probe
aagagctgattgaggctgccaagag

SEQ ID NO: 154633 - DNA, 25 bp, probe
aagagtgcctgaagagcctcgacag

SEQ ID NO: 154634 - DNA, 25 bp, probe
aagattgccttacgctcgtgagcgt

SEQ ID NO: 154635 - DNA, 25 bp, probe
aagatgagactatcgctgttgaatc

SEQ ID NO: 154636 - DNA, 25 bp, probe
aagagttccacaagcagattactgc

SEQ ID NO: 154637 - DNA, 25 bp, probe
aagactttccagggattgactcaaa

SEQ ID NO: 154638 - DNA, 25 bp, probe
aagtttccaacgcagtgtctcaaat

SEQ ID NO: 154639 - DNA, 25 bp, probe
aagttcccagaccaatatacattaa

SEQ ID NO: 154640 - DNA, 25 bp, probe
aagatttcatcatcggatgcaaaaa

SEQ ID NO: 154641 - DNA, 25 bp, probe
aagagcccatcacaggccaacaaaa

SEQ ID NO: 154642 - DNA, 25 bp, probe
aagatgccgcacacaaacaatgcaa

SEQ ID NO: 154643 - DNA, 25 bp, probe
aagagacgcacttcttcacaatcta

SEQ ID NO: 154644 - DNA, 25 bp, probe
aagagcccatctttgtcagtttaca

SEQ ID NO: 154645 - DNA, 25 bp, probe
aagatgactaccagctggttcgaaa

SEQ ID NO: 154646 - DNA, 25 bp, probe
aagatgactaccagctggttcgaaa

SEQ ID NO: 154647 - DNA, 25 bp, probe
aagagatctcgaagtgttttctaca

SEQ ID NO: 154648 - DNA, 25 bp, probe
aagagatctcgaagtgttttctaca

SEQ ID NO: 154649 - DNA, 25 bp, probe
aagagatctgtgtactgtttacttc

SEQ ID NO: 154650 - DNA, 25 bp, probe
aagagatggtgatttgctctgaagc

SEQ ID NO: 154651 - DNA, 25 bp, probe
aagagattgatatcgcagcgaccct

SEQ ID NO: 154652 - DNA, 25 bp, probe
aagagattgatatcgcagcgaccct

SEQ ID NO: 154653 - DNA, 25 bp, probe
aagagattaatggcagagtgcctca

SEQ ID NO: 154654 - DNA, 25 bp, probe
aagagactgatcatccaggcctcag

SEQ ID NO: 154655 - DNA, 25 bp, probe
aagagattatcattccatggcacca

SEQ ID NO: 154656 - DNA, 25 bp, probe
aagagattatcattccatggcacca

SEQ ID NO: 154657 - DNA, 25 bp, probe
aagatgaattcattgaagaagccaa

SEQ ID NO: 154658 - DNA, 25 bp, probe
aagatgacttcgtagcagcacctac

SEQ ID NO: 154659 - DNA, 25 bp, probe
aagattcttggtgccaccattgaga

SEQ ID NO: 154660 - DNA, 25 bp, probe
aagttttagtgcttcaggaggagaa

SEQ ID NO: 154661 - DNA, 25 bp, probe
aagtttatggcctggagagcgtgag

SEQ ID NO: 154662 - DNA, 25 bp, probe
aagttggaatcctgtgagaagcgca

SEQ ID NO: 154663 - DNA, 25 bp, probe
aagttggaatcctgtgagaagcgca

SEQ ID NO: 154664 - DNA, 25 bp, probe
aagttcgaaaactcagcaatggcag

SEQ ID NO: 154665 - DNA, 25 bp, probe
aagattctggagaaccttcgtggtg

SEQ ID NO: 154666 - DNA, 25 bp, probe
aagattctacaaagctcttttgagc

SEQ ID NO: 154667 - DNA, 25 bp, probe
aagacctagcagaacttattagaga

SEQ ID NO: 154668 - DNA, 25 bp, probe
aagatcctcaccaagttcaaacagt

SEQ ID NO: 154669 - DNA, 25 bp, probe
aagataaccacaaggccgacatcag

SEQ ID NO: 154670 - DNA, 25 bp, probe
aagataaccacaaggccgacatcag

SEQ ID NO: 154671 - DNA, 25 bp, probe
aagataagctcgagctgactcccac

SEQ ID NO: 154672 - DNA, 25 bp, probe
aagataagctcgagctgactcccac

SEQ ID NO: 154673 - DNA, 25 bp, probe
aagtagagtctgcgctgtgaccttc

SEQ ID NO: 154674 - DNA, 25 bp, probe
aagatgcccctgggctatgaccact

SEQ ID NO: 154675 - DNA, 25 bp, probe
aagatgattcgcaagcctgatactc

SEQ ID NO: 154676 - DNA, 25 bp, probe
aagagcctgcgcaaatgctgtcacc

SEQ ID NO: 154677 - DNA, 25 bp, probe
aagagcctgctggctcatggtggcc

SEQ ID NO: 154678 - DNA, 25 bp, probe
aagatccagatggccatggtgcatg

SEQ ID NO: 154679 - DNA, 25 bp, probe
aagtccagatgccaagatcctgcct

SEQ ID NO: 154680 - DNA, 25 bp, probe
aagatcctgtgggagatcacccgct

SEQ ID NO: 154681 - DNA, 25 bp, probe
aagatcctgtatgccacatcagacc

SEQ ID NO: 154682 - DNA, 25 bp, probe
aagtagttagccaatatgcaatcac

SEQ ID NO: 154683 - DNA, 25 bp, probe
aagtagttagccaatatgcaatcac

SEQ ID NO: 154684 - DNA, 25 bp, probe
aagagagtttgcgtagcagccctca

SEQ ID NO: 154685 - DNA, 25 bp, probe
aagagaacattcctctgcagcactt

SEQ ID NO: 154686 - DNA, 25 bp, probe
aagaggccatgtgtctcagagctgt

SEQ ID NO: 154687 - DNA, 25 bp, probe
aagagagcgagaaaccagaggtggt

SEQ ID NO: 154688 - DNA, 25 bp, probe
aagagagcgagaaaccagaggtggt

SEQ ID NO: 154689 - DNA, 25 bp, probe
aagatgagggacaagcataagaagg

SEQ ID NO: 154690 - DNA, 25 bp, probe
aagatgtcagcgtaagatgattgaa

SEQ ID NO: 154691 - DNA, 25 bp, probe
aagatgtcagcgtaagatgattgaa

SEQ ID NO: 154692 - DNA, 25 bp, probe
aagatgtcacgatggcactattgaa

SEQ ID NO: 154693 - DNA, 25 bp, probe
aagttccagaagccttcctgaaggt

SEQ ID NO: 154694 - DNA, 25 bp, probe
aagataccgaagattagtggagctc

SEQ ID NO: 154695 - DNA, 25 bp, probe
aagagaacgaagaccacagcaagaa

SEQ ID NO: 154696 - DNA, 25 bp, probe
aagataatccctaccaagtgaaaat

SEQ ID NO: 154697 - DNA, 25 bp, probe
aagataagccccaaaagtgatgttt

SEQ ID NO: 154698 - DNA, 25 bp, probe
aagataccaaccatcacggcagttt

SEQ ID NO: 154699 - DNA, 25 bp, probe
aagatttaaccaacatcaacaaaat

SEQ ID NO: 154700 - DNA, 25 bp, probe
aagtatgtagagcaatcaaacaatt

SEQ ID NO: 154701 - DNA, 25 bp, probe
aagtagatatttccatcaaagccaa

SEQ ID NO: 154702 - DNA, 25 bp, probe
aagatgtggatttccataacccaag

SEQ ID NO: 154703 - DNA, 25 bp, probe
aagatgagtttgtgtactggccaag

SEQ ID NO: 154704 - DNA, 25 bp, probe
aagagcagcttagaggatctcccaa

SEQ ID NO: 154705 - DNA, 25 bp, probe
aagacctttcaaccagtcctagagc

SEQ ID NO: 154706 - DNA, 25 bp, probe
aagaccttacaaccacatttctggc

SEQ ID NO: 154707 - DNA, 25 bp, probe
aagagcccaatgcattccatttctg

SEQ ID NO: 154708 - DNA, 25 bp, probe
aagaggatcgaccagtcagagttcg

SEQ ID NO: 154709 - DNA, 25 bp, probe
aagatggtcaactacctggtcatct

SEQ ID NO: 154710 - DNA, 25 bp, probe
aagatggtcatattattcttcttct

SEQ ID NO: 154711 - DNA, 25 bp, probe
aagaggatcaatcacattagctcct

SEQ ID NO: 154712 - DNA, 25 bp, probe
aagatgtgaattgccttgaaccatg

SEQ ID NO: 154713 - DNA, 25 bp, probe
aagatgtgaattgccttgaaccatg

SEQ ID NO: 154714 - DNA, 25 bp, probe
aagatctaatctgccgtgggcctgt

SEQ ID NO: 154715 - DNA, 25 bp, probe
aagtcaaatgggaggaggtcgatca

SEQ ID NO: 154716 - DNA, 25 bp, probe
aagtcaaaggggatgaagcctggaa

SEQ ID NO: 154717 - DNA, 25 bp, probe
aagtcaacaggcaaggtaatcttca

SEQ ID NO: 154718 - DNA, 25 bp, probe
aagtcaggaactaggcaagtggtca

SEQ ID NO: 154719 - DNA, 25 bp, probe
aagttggtagctctgaaggtgatca

SEQ ID NO: 154720 - DNA, 25 bp, probe
aagttggtagctctgaaggtgatca

SEQ ID NO: 154721 - DNA, 25 bp, probe
aagatgaggttctctacaagtgtag

SEQ ID NO: 154722 - DNA, 25 bp, probe
aagatgaggttctctacaagtgtag

SEQ ID NO: 154723 - DNA, 25 bp, probe
aagagaggtcctgcgaaggctgggc

SEQ ID NO: 154724 - DNA, 25 bp, probe
aagggctgtcccacaatgggaggaa

SEQ ID NO: 154725 - DNA, 25 bp, probe
aagggtttcttgacaatggggtcag

SEQ ID NO: 154726 - DNA, 25 bp, probe
aagaggtctttaagattggctcgta

SEQ ID NO: 154727 - DNA, 25 bp, probe
aagaggtgagttccagcatctggcc

SEQ ID NO: 154728 - DNA, 25 bp, probe
aagatgccgacctcagcatcggcat

SEQ ID NO: 154729 - DNA, 25 bp, probe
aagatgtcagacccatcaacgtctc

SEQ ID NO: 154730 - DNA, 25 bp, probe
aagagacacagtctagaggtcctga

SEQ ID NO: 154731 - DNA, 25 bp, probe
aagagaccggccagattgttgctat

SEQ ID NO: 154732 - DNA, 25 bp, probe
aagtgtccggccagagtggcttaca

SEQ ID NO: 154733 - DNA, 25 bp, probe
aagagtgccaagtgcgagggggaca

SEQ ID NO: 154734 - DNA, 25 bp, probe
aagagtgaaatgtaggggaggagac

SEQ ID NO: 154735 - DNA, 25 bp, probe
aagttgaacaggtgctggagtcggc

SEQ ID NO: 154736 - DNA, 25 bp, probe
aagatttacaggtgcagtcaccgaa

SEQ ID NO: 154737 - DNA, 25 bp, probe
aagtttgtcagtgaccatcccgagc

SEQ ID NO: 154738 - DNA, 25 bp, probe
aagagtgcttgcatctacaatccca

SEQ ID NO: 154739 - DNA, 25 bp, probe
aagagtgcttgcatctacaatccca

SEQ ID NO: 154740 - DNA, 25 bp, probe
aagagacttgccatgaagcagtcca

SEQ ID NO: 154741 - DNA, 25 bp, probe
aagatgactggaaatacgtggccat

SEQ ID NO: 154742 - DNA, 25 bp, probe
aagatgactggaaatacgtggccat

SEQ ID NO: 154743 - DNA, 25 bp, probe
aagtccttgaggaaagtggctatta

SEQ ID NO: 154744 - DNA, 25 bp, probe
aagtccttagctgcggtgctatatg

SEQ ID NO: 154745 - DNA, 25 bp, probe
aagtaccatagcacagcactgctaa

SEQ ID NO: 154746 - DNA, 25 bp, probe
aagtttaagatccacacgtactcca

SEQ ID NO: 154747 - DNA, 25 bp, probe
aagtttatggctacccaaattgcct

SEQ ID NO: 154748 - DNA, 25 bp, probe
aagtgctctggggcacaccaaaatc

SEQ ID NO: 154749 - DNA, 25 bp, probe
aagtggacggcaccgctaagaagaa

SEQ ID NO: 154750 - DNA, 25 bp, probe
aagtggacggcaccgctaagaagaa

SEQ ID NO: 154751 - DNA, 25 bp, probe
aagtggggcagcccagtgatgtcaa

SEQ ID NO: 154752 - DNA, 25 bp, probe
aagagggctcagaagcagctagtaa

SEQ ID NO: 154753 - DNA, 25 bp, probe
aagagagtgccagagtctatgaaaa

SEQ ID NO: 154754 - DNA, 25 bp, probe
aagagagcgcctatctcattcagaa

SEQ ID NO: 154755 - DNA, 25 bp, probe
aagatcgcgccggattattgctgca

SEQ ID NO: 154756 - DNA, 25 bp, probe
aagatgaggcctcaaatgctgccat

SEQ ID NO: 154757 - DNA, 25 bp, probe
caagatcggagaaaaaccactttga

SEQ ID NO: 154758 - DNA, 25 bp, probe
aagggtggtagataatacttctgag

SEQ ID NO: 154759 - DNA, 25 bp, probe
aatggggttggctcaagtctttatt

SEQ ID NO: 154760 - DNA, 25 bp, probe
aagaggtgctcagcttcaagcctcc

SEQ ID NO: 154761 - DNA, 25 bp, probe
aagaggtgctcagcttcaagcctcc

SEQ ID NO: 154762 - DNA, 25 bp, probe
aagaggagcctggactaggactccc

SEQ ID NO: 154763 - DNA, 25 bp, probe
aagagagaccttctacaggatctcc

SEQ ID NO: 154764 - DNA, 25 bp, probe
aagagatgatccttgccaaacgttt

SEQ ID NO: 154765 - DNA, 25 bp, probe
aagagatgatccttgccaaacgttt

SEQ ID NO: 154766 - DNA, 25 bp, probe
aagagagttttaagacactgttctg

SEQ ID NO: 154767 - DNA, 25 bp, probe
aagatgcaatctgatttgtcctttt

SEQ ID NO: 154768 - DNA, 25 bp, probe
aagatgcaaatcaactctctcctgg

SEQ ID NO: 154769 - DNA, 25 bp, probe
aagatgcaaatcaactctctcctgg

SEQ ID NO: 154770 - DNA, 25 bp, probe
aagatgccagtgaacttgtaaggaa

SEQ ID NO: 154771 - DNA, 25 bp, probe
aagatgcctgttaaatggatcgcca

SEQ ID NO: 154772 - DNA, 25 bp, probe
aagagttgattcatatggacagtat

SEQ ID NO: 154773 - DNA, 25 bp, probe
aagattgaggttcctggacagatca

SEQ ID NO: 154774 - DNA, 25 bp, probe
aagatggggtttatgtcagtcattt

SEQ ID NO: 154775 - DNA, 25 bp, probe
aaggggcttttcagaaggtcattct

SEQ ID NO: 154776 - DNA, 25 bp, probe
aagaggagctatttccgaatctata

SEQ ID NO: 154777 - DNA, 25 bp, probe
aagagcaagctactgaccgatgttt

SEQ ID NO: 154778 - DNA, 25 bp, probe
aagagcaagctactgaccgatgttt

SEQ ID NO: 154779 - DNA, 25 bp, probe
aagatgcgattacgcttcagagata

SEQ ID NO: 154780 - DNA, 25 bp, probe
aagtgcgttcagctgctggggcagt

SEQ ID NO: 154781 - DNA, 25 bp, probe
aagtctggtcgcagcttcaatctat

SEQ ID NO: 154782 - DNA, 25 bp, probe
aagtcttgctccaatatcttcatcc

SEQ ID NO: 154783 - DNA, 25 bp, probe
aagtcttgctccaatatcttcatcc

SEQ ID NO: 154784 - DNA, 25 bp, probe
aagtcttgcggcacaagtacctcat

SEQ ID NO: 154785 - DNA, 25 bp, probe
aagtcttggacgccgtgtactatct

SEQ ID NO: 154786 - DNA, 25 bp, probe
aagtctggtgggtggtcagctgaca

SEQ ID NO: 154787 - DNA, 25 bp, probe
aagttggtgtaatcagctggggagt

SEQ ID NO: 154788 - DNA, 25 bp, probe
aagttggtgtaatcagctggggagt

SEQ ID NO: 154789 - DNA, 25 bp, probe
aagttggtgaaaaggcttggcgctg

SEQ ID NO: 154790 - DNA, 25 bp, probe
aagttttggacacggctggatcatc

SEQ ID NO: 154791 - DNA, 25 bp, probe
aagtctctcaaattaggccagattc

SEQ ID NO: 154792 - DNA, 25 bp, probe
aagttacaaacatacagccatctgg

SEQ ID NO: 154793 - DNA, 25 bp, probe
aagagctcactatcatcaagagaaa

SEQ ID NO: 154794 - DNA, 25 bp, probe
aagagctcacatctttaacagaaga

SEQ ID NO: 154795 - DNA, 25 bp, probe
aagaggactttcataccgacaacat

SEQ ID NO: 154796 - DNA, 25 bp, probe
aagaggcaatttctaccagaacact

SEQ ID NO: 154797 - DNA, 25 bp, probe
aagaggcaatttctaccagaacact

SEQ ID NO: 154798 - DNA, 25 bp, probe
aagaggaagttatgccaaagtactg

SEQ ID NO: 154799 - DNA, 25 bp, probe
aagagtcaatctgcaagccatttta

SEQ ID NO: 154800 - DNA, 25 bp, probe
aagagatcatatcctcagaccaggt

SEQ ID NO: 154801 - DNA, 25 bp, probe
aagatgtattgcccgatgcaatgag

SEQ ID NO: 154802 - DNA, 25 bp, probe
aagagctttgttggatgagatggaa

SEQ ID NO: 154803 - DNA, 25 bp, probe
aagagcttgttaatgatgatgagga

SEQ ID NO: 154804 - DNA, 25 bp, probe
aagagctggtgcatgatgacgagga

SEQ ID NO: 154805 - DNA, 25 bp, probe
aagagagagttttaccgtgacaaga

SEQ ID NO: 154806 - DNA, 25 bp, probe
aagatcatttttcacctgtacaagg

SEQ ID NO: 154807 - DNA, 25 bp, probe
aagattttttcattctcgtgacatt

SEQ ID NO: 154808 - DNA, 25 bp, probe
aagatatatgtacagacttgtattt

SEQ ID NO: 154809 - DNA, 25 bp, probe
aagtcagttacttgttgatgttttc

SEQ ID NO: 154810 - DNA, 25 bp, probe
aagtcagcttggaacttttttcctg

SEQ ID NO: 154811 - DNA, 25 bp, probe
aagatagttgctaatccttatttct

SEQ ID NO: 154812 - DNA, 25 bp, probe
aagtagtccttcagatctttctttg

SEQ ID NO: 154813 - DNA, 25 bp, probe
aagtaattcctctgattctgttttc

SEQ ID NO: 154814 - DNA, 25 bp, probe
aatgttcctaatgggttcgtttcag

SEQ ID NO: 154815 - DNA, 25 bp, probe
aagtccttatgctgtgttagtttcg

SEQ ID NO: 154816 - DNA, 25 bp, probe
aagatctctaatctgttttgagtct

SEQ ID NO: 154817 - DNA, 25 bp, probe
aagatccatttgcctttctgggagc

SEQ ID NO: 154818 - DNA, 25 bp, probe
aagatgccatttggttgggtgaagt

SEQ ID NO: 154819 - DNA, 25 bp, probe
aagtgtcatcttgtgggcattatac

SEQ ID NO: 154820 - DNA, 25 bp, probe
aagtgtcatcttgtgggcattatac

SEQ ID NO: 154821 - DNA, 25 bp, probe
aagatgttcttcatggtgtttttaa

SEQ ID NO: 154822 - DNA, 25 bp, probe
aagagagtcttcaggatgtctttat

SEQ ID NO: 154823 - DNA, 25 bp, probe
aagatgaggatttgggttttctata

SEQ ID NO: 154824 - DNA, 25 bp, probe
aagaggctttggagtatttcatgaa

SEQ ID NO: 154825 - DNA, 25 bp, probe
aagaggctttggaaagtccttgata

SEQ ID NO: 154826 - DNA, 25 bp, probe
aagagggtatgccaattacacttac

SEQ ID NO: 154827 - DNA, 25 bp, probe
aagaggaattgatcagtatcacttt

SEQ ID NO: 154828 - DNA, 25 bp, probe
aagatggaagagtggtacagttttc

SEQ ID NO: 154829 - DNA, 25 bp, probe
aagatgccagagacgcggaacaatt

SEQ ID NO: 154830 - DNA, 25 bp, probe
aagtcacatatgagcaagatcagaa

SEQ ID NO: 154831 - DNA, 25 bp, probe
aagtatgaatttcctgacaaagact

SEQ ID NO: 154832 - DNA, 25 bp, probe
aagtaagattatcccacttgccctt

SEQ ID NO: 154833 - DNA, 25 bp, probe
aagtaagattatcccacttgccctt

SEQ ID NO: 154834 - DNA, 25 bp, probe
aagtcaacaataccattcttcaccc

SEQ ID NO: 154835 - DNA, 25 bp, probe
aagtcatattaacattctctccgtg

SEQ ID NO: 154836 - DNA, 25 bp, probe
aagtcttcttaggatctgatcccag

SEQ ID NO: 154837 - DNA, 25 bp, probe
aagtctggtaaggacgaagcggaga

SEQ ID NO: 154838 - DNA, 25 bp, probe
aagtctggtaaggacgaagcggaga

SEQ ID NO: 154839 - DNA, 25 bp, probe
aagatctcaggtacaagagaacgga

SEQ ID NO: 154840 - DNA, 25 bp, probe
aagtccagagagaaagatgaatgtt

SEQ ID NO: 154841 - DNA, 25 bp, probe
aagataagaggacgcagaagctggt

SEQ ID NO: 154842 - DNA, 25 bp, probe
aagtcaagggatcacagacttgtga

SEQ ID NO: 154843 - DNA, 25 bp, probe
aagtcaagggatcacagacttgtga

SEQ ID NO: 154844 - DNA, 25 bp, probe
aagtcagtggtacacagacattctg

SEQ ID NO: 154845 - DNA, 25 bp, probe
aagataggaggaaccacaatgtttc

SEQ ID NO: 154846 - DNA, 25 bp, probe
aagagtgtatggaaacacttctttc

SEQ ID NO: 154847 - DNA, 25 bp, probe
aagagtatcatgtactacacttctg

SEQ ID NO: 154848 - DNA, 25 bp, probe
aagagttcagacttatcaccattct

SEQ ID NO: 154849 - DNA, 25 bp, probe
aagagattcgatttcaacctaatga

SEQ ID NO: 154850 - DNA, 25 bp, probe
aagagataagatttaaccaacatca

SEQ ID NO: 154851 - DNA, 25 bp, probe
aagatgctagtgattgacccagcaa

SEQ ID NO: 154852 - DNA, 25 bp, probe
aagatctcagatctgcagacccaaa

SEQ ID NO: 154853 - DNA, 25 bp, probe
aagatccactgcttggacatccttt

SEQ ID NO: 154854 - DNA, 25 bp, probe
aagatggcacagtatgtggtccaga

SEQ ID NO: 154855 - DNA, 25 bp, probe
aagatggcacagtatgtggtccaga

SEQ ID NO: 154856 - DNA, 25 bp, probe
aagaggatcagccgggtgcaatgac

SEQ ID NO: 154857 - DNA, 25 bp, probe
aagagaacaaggtgctgaagataga

SEQ ID NO: 154858 - DNA, 25 bp, probe
aaggaagcttggtgcagacgatgta

SEQ ID NO: 154859 - DNA, 25 bp, probe
aagatacagcaaaaccagtctatta

SEQ ID NO: 154860 - DNA, 25 bp, probe
aagtatcagatcaaccctgatgctt

SEQ ID NO: 154861 - DNA, 25 bp, probe
aagtgaaatgctttaatgatcttaa

SEQ ID NO: 154862 - DNA, 25 bp, probe
aagtgaatctcctaacagactttca

SEQ ID NO: 154863 - DNA, 25 bp, probe
aagtgccttcatgcagacagactgt

SEQ ID NO: 154864 - DNA, 25 bp, probe
aatgtgactatccacaaccgctgta

SEQ ID NO: 154865 - DNA, 25 bp, probe
aagaggcctccagtacctctaagga

SEQ ID NO: 154866 - DNA, 25 bp, probe
aagaggctacaagagccctccaaga

SEQ ID NO: 154867 - DNA, 25 bp, probe
aagaggtcaagggcgccctgaaaag

SEQ ID NO: 154868 - DNA, 25 bp, probe
aagagtgacacaggggaagctgata

SEQ ID NO: 154869 - DNA, 25 bp, probe
aagagtgacacaggggaagctgata

SEQ ID NO: 154870 - DNA, 25 bp, probe
aagaggaaagggcatgaatatataa

SEQ ID NO: 154871 - DNA, 25 bp, probe
aagaggaatagcagtttcatacaac

SEQ ID NO: 154872 - DNA, 25 bp, probe
aagaggaatcgcagatcccaatcaa

SEQ ID NO: 154873 - DNA, 25 bp, probe
aagaggacacgccagagcttcagtg

SEQ ID NO: 154874 - DNA, 25 bp, probe
aatgttggcctgtcagagcttgatt

SEQ ID NO: 154875 - DNA, 25 bp, probe
aagtctgaggagtggcctgactgga

SEQ ID NO: 154876 - DNA, 25 bp, probe
aagtcagctggatggactctggcca

SEQ ID NO: 154877 - DNA, 25 bp, probe
aagttctggagacaatcgggaaggg

SEQ ID NO: 154878 - DNA, 25 bp, probe
aagagttggagagcagactgggcaa

SEQ ID NO: 154879 - DNA, 25 bp, probe
aagaggctgggagtgaccggaaaca

SEQ ID NO: 154880 - DNA, 25 bp, probe
aagatcggggacttcgggatgactc

SEQ ID NO: 154881 - DNA, 25 bp, probe
aagatggtgtggtctacgaggtcag

SEQ ID NO: 154882 - DNA, 25 bp, probe
aagatgtgtgagcgcactcgtttca

SEQ ID NO: 154883 - DNA, 25 bp, probe
aagatgcagtagccacatctgtgtt

SEQ ID NO: 154884 - DNA, 25 bp, probe
aagaggtaggaccagtgcttttttg

SEQ ID NO: 154885 - DNA, 25 bp, probe
aagagaggagattctatgtgctttt

SEQ ID NO: 154886 - DNA, 25 bp, probe
aagagaggagattctatgtgctttt

SEQ ID NO: 154887 - DNA, 25 bp, probe
aagaggagcagtcctatgcttttat

SEQ ID NO: 154888 - DNA, 25 bp, probe
aagatggagaatattcttctagatg

SEQ ID NO: 154889 - DNA, 25 bp, probe
aagaggaacgacttctgtaagctcc

SEQ ID NO: 154890 - DNA, 25 bp, probe
aagtgggatccatttctgtgaactc

SEQ ID NO: 154891 - DNA, 25 bp, probe
aagtgggatccatttctgtgaactc

SEQ ID NO: 154892 - DNA, 25 bp, probe
aagtctggagataattttgcaactc

SEQ ID NO: 154893 - DNA, 25 bp, probe
aagattgatcagtctgaatttgaag

SEQ ID NO: 154894 - DNA, 25 bp, probe
aagattgatcagcttgtgtatggtt

SEQ ID NO: 154895 - DNA, 25 bp, probe
aagtatgaagaaagtctgtacatgt

SEQ ID NO: 154896 - DNA, 25 bp, probe
aagttatatattttgtctacgatgg

SEQ ID NO: 154897 - DNA, 25 bp, probe
aagttttcattttgccttgaatgga

SEQ ID NO: 154898 - DNA, 25 bp, probe
aagtcctatttttcacctaagtcat

SEQ ID NO: 154899 - DNA, 25 bp, probe
aagtcccatttcttggtcataaata

SEQ ID NO: 154900 - DNA, 25 bp, probe
aagtactcatttgcctttgaactga

SEQ ID NO: 154901 - DNA, 25 bp, probe
aagtactcatttgcctttgaactga

SEQ ID NO: 154902 - DNA, 25 bp, probe
aagtcctgctttgctgatcttggat

SEQ ID NO: 154903 - DNA, 25 bp, probe
aagatagctctctgactgctttgga

SEQ ID NO: 154904 - DNA, 25 bp, probe
aagatgacccagatcatgtttgaga

SEQ ID NO: 154905 - DNA, 25 bp, probe
aagtcatggcaggtacagtaggata

SEQ ID NO: 154906 - DNA, 25 bp, probe
aagtctgcacacgtctcatgaatgc

SEQ ID NO: 154907 - DNA, 25 bp, probe
aagtctgcacacgtctcatgaatgc

SEQ ID NO: 154908 - DNA, 25 bp, probe
aagtctcagctggatgcagtgaacc

SEQ ID NO: 154909 - DNA, 25 bp, probe
aagatgacagatgatgctgtcaagc

SEQ ID NO: 154910 - DNA, 25 bp, probe
aagatgacaatcatgttgcagcaat

SEQ ID NO: 154911 - DNA, 25 bp, probe
aagtcatcaatgagtctggctatgg

SEQ ID NO: 154912 - DNA, 25 bp, probe
aagtcctttctttatactgttgtgg

SEQ ID NO: 154913 - DNA, 25 bp, probe
aagtcctttctttatactgttgtgg

SEQ ID NO: 154914 - DNA, 25 bp, probe
aaggcctttgcatacacctttatga

SEQ ID NO: 154915 - DNA, 25 bp, probe
aagtggtttcatgaaatgttctaat

SEQ ID NO: 154916 - DNA, 25 bp, probe
aagatggctttcgacagagatggtg

SEQ ID NO: 154917 - DNA, 25 bp, probe
aagatgagtttgtatcatggaggag

SEQ ID NO: 154918 - DNA, 25 bp, probe
aagagtgtctgcaaatcatgtggag

SEQ ID NO: 154919 - DNA, 25 bp, probe
aagagtgttgatgtcttgtgaacag

SEQ ID NO: 154920 - DNA, 25 bp, probe
aagagatttgtgactttgtcaatca

SEQ ID NO: 154921 - DNA, 25 bp, probe
aagagtaagctctattatgaaatac

SEQ ID NO: 154922 - DNA, 25 bp, probe
aagattaatcctatatgtaatgatc

SEQ ID NO: 154923 - DNA, 25 bp, probe
aagttcaatactcttgaaatgtaga

SEQ ID NO: 154924 - DNA, 25 bp, probe
aagttactaattttccagcagtaca

SEQ ID NO: 154925 - DNA, 25 bp, probe
aagttacttggttcccataatagct

SEQ ID NO: 154926 - DNA, 25 bp, probe
aagttaataataatgactctaaaga

SEQ ID NO: 154927 - DNA, 25 bp, probe
aagttcacaaccaaatccaaaagca

SEQ ID NO: 154928 - DNA, 25 bp, probe
aagttcactacagcatcaatagaaa

SEQ ID NO: 154929 - DNA, 25 bp, probe
aagttctccgcgttcatcaagaacc

SEQ ID NO: 154930 - DNA, 25 bp, probe
aagtagcttccagcttacagcagcc

SEQ ID NO: 154931 - DNA, 25 bp, probe
aagtgcctctccagtttctgaggcc

SEQ ID NO: 154932 - DNA, 25 bp, probe
aagtcacttccagtgttggctgtgt

SEQ ID NO: 154933 - DNA, 25 bp, probe
aagttctatggagtgtgcggcgatg

SEQ ID NO: 154934 - DNA, 25 bp, probe
aagtcctaggagctgcagccagctg

SEQ ID NO: 154935 - DNA, 25 bp, probe
aagatccgggccatgcagaagctga

SEQ ID NO: 154936 - DNA, 25 bp, probe
aagtgcctgagcggatccgaaggag

SEQ ID NO: 154937 - DNA, 25 bp, probe
aagtggctgtcagaccgagagtagc

SEQ ID NO: 154938 - DNA, 25 bp, probe
aagaggctgataattccagtggtcc

SEQ ID NO: 154939 - DNA, 25 bp, probe
aagggcttcaatgcgaaggacgcgc

SEQ ID NO: 154940 - DNA, 25 bp, probe
aagtggtgtatgtggaaggtcggag

SEQ ID NO: 154941 - DNA, 25 bp, probe
aagtcatttagaaggtcagggggat

SEQ ID NO: 154942 - DNA, 25 bp, probe
aagtatctacaattggtagccgctg

SEQ ID NO: 154943 - DNA, 25 bp, probe
aagattttagtctgtatgcttgtgc

SEQ ID NO: 154944 - DNA, 25 bp, probe
aagatttgtgatccaggcctcactt

SEQ ID NO: 154945 - DNA, 25 bp, probe
aagatctctggacaggtcccttcag

SEQ ID NO: 154946 - DNA, 25 bp, probe
aagatgatggcaggaaggtctcctt

SEQ ID NO: 154947 - DNA, 25 bp, probe
aagaggtcagcattgaggtcacctg

SEQ ID NO: 154948 - DNA, 25 bp, probe
aagaggctcacagagtggcacctgc

SEQ ID NO: 154949 - DNA, 25 bp, probe
aagtgggcatgctaagggcaaggct

SEQ ID NO: 154950 - DNA, 25 bp, probe
aagttggcctgtgggagcaagacat

SEQ ID NO: 154951 - DNA, 25 bp, probe
aagttcagcatcgcggatgaagacg

SEQ ID NO: 154952 - DNA, 25 bp, probe
aagttcagcatcgcggatgaagacg

SEQ ID NO: 154953 - DNA, 25 bp, probe
aagttgccatctaccttgggatcaa

SEQ ID NO: 154954 - DNA, 25 bp, probe
aagttgccatctaccttgggatcaa

SEQ ID NO: 154955 - DNA, 25 bp, probe
aagttgccatctaccttgggatcaa

SEQ ID NO: 154956 - DNA, 25 bp, probe
aagattgccagcaatcccttcgcga

SEQ ID NO: 154957 - DNA, 25 bp, probe
aagatctaatgcatcctatatccag

SEQ ID NO: 154958 - DNA, 25 bp, probe
aagttggagcttctattgccatgaa

SEQ ID NO: 154959 - DNA, 25 bp, probe
aagtctggcgtgtgtttgttattgt

SEQ ID NO: 154960 - DNA, 25 bp, probe
aagtctggcgtgtgtttgttattgt

SEQ ID NO: 154961 - DNA, 25 bp, probe
aagtcatggttctctggtggtttgt

SEQ ID NO: 154962 - DNA, 25 bp, probe
aagtcatggttctctggtggtttgt

SEQ ID NO: 154963 - DNA, 25 bp, probe
aagtcggatgtctggagttttgggg

SEQ ID NO: 154964 - DNA, 25 bp, probe
aagttgagcatttctggagtatatt

SEQ ID NO: 154965 - DNA, 25 bp, probe
aagtcatgcctttctggatctgtgt

SEQ ID NO: 154966 - DNA, 25 bp, probe
aagatagccccacgaagcatgttca

SEQ ID NO: 154967 - DNA, 25 bp, probe
aagatagccccacgaagcatgttca

SEQ ID NO: 154968 - DNA, 25 bp, probe
aagtagccccattcataagatgtct

SEQ ID NO: 154969 - DNA, 25 bp, probe
aagatcagcaaccattcaaatgaat

SEQ ID NO: 154970 - DNA, 25 bp, probe
aagtcaatcccaacaaagacatact

SEQ ID NO: 154971 - DNA, 25 bp, probe
aagttgtccaaggcaagaagatagt

SEQ ID NO: 154972 - DNA, 25 bp, probe
aagttgtccaaggcaagaagatagt

SEQ ID NO: 154973 - DNA, 25 bp, probe
aattcttcgatcacaaaaatggaac

SEQ ID NO: 154974 - DNA, 25 bp, probe
aattgcttctggggtaaattccaag

SEQ ID NO: 154975 - DNA, 25 bp, probe
aagtcttctggaggttctatttacg

SEQ ID NO: 154976 - DNA, 25 bp, probe
aagtagccccagatttagcttactg

SEQ ID NO: 154977 - DNA, 25 bp, probe
aagatatcccaggacgtttgcttac

SEQ ID NO: 154978 - DNA, 25 bp, probe
aagttcatcctggaagttcagttga

SEQ ID NO: 154979 - DNA, 25 bp, probe
aagttcttagtgcatcttcatggtg

SEQ ID NO: 154980 - DNA, 25 bp, probe
aagttcttactccatcatacatatt

SEQ ID NO: 154981 - DNA, 25 bp, probe
aagttcatccaaggaataatactgg

SEQ ID NO: 154982 - DNA, 25 bp, probe
aaggtggccaaccacaacaactcgg

SEQ ID NO: 154983 - DNA, 25 bp, probe
aaggtggccaaccacaacaactcgg

SEQ ID NO: 154984 - DNA, 25 bp, probe
aagagggacacaggatggacaagcc

SEQ ID NO: 154985 - DNA, 25 bp, probe
aagggtcgcacagaggtcaaccagt

SEQ ID NO: 154986 - DNA, 25 bp, probe
aagggtcgcacagaggtcaaccagt

SEQ ID NO: 154987 - DNA, 25 bp, probe
aagtcttcccccatgaagaccagac

SEQ ID NO: 154988 - DNA, 25 bp, probe
aagtcttcccccatgaagaccagac

SEQ ID NO: 154989 - DNA, 25 bp, probe
aagtttggctcccttgaaaagcatt

SEQ ID NO: 154990 - DNA, 25 bp, probe
aagtttggctcccttgaaaagcatt

SEQ ID NO: 154991 - DNA, 25 bp, probe
aagttctttctgccttataaggcta

SEQ ID NO: 154992 - DNA, 25 bp, probe
aagtttttgggacatgcacagatgt

SEQ ID NO: 154993 - DNA, 25 bp, probe
aagtttctgatgctgactggcacct

SEQ ID NO: 154994 - DNA, 25 bp, probe
aagataatctgaggtttggcatgtc

SEQ ID NO: 154995 - DNA, 25 bp, probe
aagataaccagcctcattttctcag

SEQ ID NO: 154996 - DNA, 25 bp, probe
aagtggagcgaggatgatttcacta

SEQ ID NO: 154997 - DNA, 25 bp, probe
aagatgagtagggagatgctgcctt

SEQ ID NO: 154998 - DNA, 25 bp, probe
aagtgcgtcagatcagtgatcctat

SEQ ID NO: 154999 - DNA, 25 bp, probe
aagtcatgtacaccgtgggctacag

SEQ ID NO: 155000 - DNA, 25 bp, probe
aagtcagtgaggcccttggccaagg

SEQ ID NO: 155001 - DNA, 25 bp, probe
aagtgaaaggcccttgggaatgaag

SEQ ID NO: 155002 - DNA, 25 bp, probe
aagatgagcagggcccttgcggagt

SEQ ID NO: 155003 - DNA, 25 bp, probe
aatgggatgggggcttcggtgccca

SEQ ID NO: 155004 - DNA, 25 bp, probe
aatgggatgggggcttcggtgccca

SEQ ID NO: 155005 - DNA, 25 bp, probe
aagttgtggtggaaacgtttgccat

SEQ ID NO: 155006 - DNA, 25 bp, probe
aagtggcttaggtagcccttttcat

SEQ ID NO: 155007 - DNA, 25 bp, probe
aagtatcttcatgtatccctgttac

SEQ ID NO: 155008 - DNA, 25 bp, probe
aagtgacgttgagatcctcggctac

SEQ ID NO: 155009 - DNA, 25 bp, probe
aagtacagggcagaaccaagaacat

SEQ ID NO: 155010 - DNA, 25 bp, probe
aagtactgggttgactcagagagtc

SEQ ID NO: 155011 - DNA, 25 bp, probe
aagtttattgttgcttcgcaggggg

SEQ ID NO: 155012 - DNA, 25 bp, probe
aagtttgatatgagcagttagaagt

SEQ ID NO: 155013 - DNA, 25 bp, probe
aagatttgtgtgagatgttgggaaa

SEQ ID NO: 155014 - DNA, 25 bp, probe
aagatctgggatatgtgttggaaaa

SEQ ID NO: 155015 - DNA, 25 bp, probe
aagttgggtgatatgttggtagatt

SEQ ID NO: 155016 - DNA, 25 bp, probe
aagatgtggtgcttttcttggttgt

SEQ ID NO: 155017 - DNA, 25 bp, probe
aagtatggctgtaagtctcatggtt

SEQ ID NO: 155018 - DNA, 25 bp, probe
aagttcctgtgtgtcttgatgtctg

SEQ ID NO: 155019 - DNA, 25 bp, probe
aagttactggctctttgtgtgtctc

SEQ ID NO: 155020 - DNA, 25 bp, probe
aagttactggctctttgtgtgtctc

SEQ ID NO: 155021 - DNA, 25 bp, probe
aagttacatgacctatatcttttcc

SEQ ID NO: 155022 - DNA, 25 bp, probe
aagtgactcataggtaatttctgtg

SEQ ID NO: 155023 - DNA, 25 bp, probe
aagtaccacagatacaaccatgttt

SEQ ID NO: 155024 - DNA, 25 bp, probe
aagtaccacagatacaaccatgttt

SEQ ID NO: 155025 - DNA, 25 bp, probe
aagttctgaatgttaaactactctt

SEQ ID NO: 155026 - DNA, 25 bp, probe
aagttctgaggtttcaggtccctgt

SEQ ID NO: 155027 - DNA, 25 bp, probe
aagttctgaggtttcaggtccctgt

SEQ ID NO: 155028 - DNA, 25 bp, probe
aagttgcatcaagtgttcgagtccc

SEQ ID NO: 155029 - DNA, 25 bp, probe
aagattgtggactttggcagtgccc

SEQ ID NO: 155030 - DNA, 25 bp, probe
aagttttgcacacgtgaggtccctt

SEQ ID NO: 155031 - DNA, 25 bp, probe
aagtctttcaacgtgatgttcccga

SEQ ID NO: 155032 - DNA, 25 bp, probe
aagtttccatatgttatgtcaacag

SEQ ID NO: 155033 - DNA, 25 bp, probe
aagttgtcctatttttgtcattact

SEQ ID NO: 155034 - DNA, 25 bp, probe
aagttggtgtattgcatttgtcatt

SEQ ID NO: 155035 - DNA, 25 bp, probe
aagttggtgtattgcatttgtcatt

SEQ ID NO: 155036 - DNA, 25 bp, probe
aagttgatggtattcattaggtttt

SEQ ID NO: 155037 - DNA, 25 bp, probe
aagttattgtaagttatctgtattt

SEQ ID NO: 155038 - DNA, 25 bp, probe
aagttttgtacctaagtggatatag

SEQ ID NO: 155039 - DNA, 25 bp, probe
aagttattgttgccaaagagatgta

SEQ ID NO: 155040 - DNA, 25 bp, probe
aagttattgttgccaaagagatgta

SEQ ID NO: 155041 - DNA, 25 bp, probe
aagtgtgaagacccaaaacagcttt

SEQ ID NO: 155042 - DNA, 25 bp, probe
aagtggatagaacgcaaacaacttg

SEQ ID NO: 155043 - DNA, 25 bp, probe
aagggaagaatcagaatggcaatat

SEQ ID NO: 155044 - DNA, 25 bp, probe
aagaggaccctcaggcaggtacatc

SEQ ID NO: 155045 - DNA, 25 bp, probe
aagaggaccctcaggcaggtacatc

SEQ ID NO: 155046 - DNA, 25 bp, probe
aagaggaataagaatggagcagtac

SEQ ID NO: 155047 - DNA, 25 bp, probe
aagggaatatcaccagaagcagcga

SEQ ID NO: 155048 - DNA, 25 bp, probe
aaggtgagtatactaagggagttca

SEQ ID NO: 155049 - DNA, 25 bp, probe
aagttgatgtgtggtcggtgggtgt

SEQ ID NO: 155050 - DNA, 25 bp, probe
aagtgatgtttggtccttaggatgt

SEQ ID NO: 155051 - DNA, 25 bp, probe
aagtgatgtttggtccttaggatgt

SEQ ID NO: 155052 - DNA, 25 bp, probe
aagtctgttctggcggcattgtggg

SEQ ID NO: 155053 - DNA, 25 bp, probe
aagatttcatccggcacttgatgga

SEQ ID NO: 155054 - DNA, 25 bp, probe
aagatctagtccggacttgctgtgt

SEQ ID NO: 155055 - DNA, 25 bp, probe
aagtcatagaccgattcttcatgtg

SEQ ID NO: 155056 - DNA, 25 bp, probe
aagtatcagactgaccctcatgcct

SEQ ID NO: 155057 - DNA, 25 bp, probe
aagatatcagactttggctttgcca

SEQ ID NO: 155058 - DNA, 25 bp, probe
aagtaagaagtagtgtttccatgct

SEQ ID NO: 155059 - DNA, 25 bp, probe
aagttcgacgtggctgattggctgg

SEQ ID NO: 155060 - DNA, 25 bp, probe
aagttcgacgtggctgattggctgg

SEQ ID NO: 155061 - DNA, 25 bp, probe
aagatggcagacttcggtgtggctg

SEQ ID NO: 155062 - DNA, 25 bp, probe
aagatggcagacttcggtgtggctg

SEQ ID NO: 155063 - DNA, 25 bp, probe
aagtcgcagctctggtgggaggaag

SEQ ID NO: 155064 - DNA, 25 bp, probe
aagtacctcggggggctgagagagc

SEQ ID NO: 155065 - DNA, 25 bp, probe
aagtacaatcagggtgtggtagaac

SEQ ID NO: 155066 - DNA, 25 bp, probe
aagtacacatatggcccgggagcta

SEQ ID NO: 155067 - DNA, 25 bp, probe
aagttctcaatggctacgtgtgact

SEQ ID NO: 155068 - DNA, 25 bp, probe
aaggtgccaatatgaagggagcgat

SEQ ID NO: 155069 - DNA, 25 bp, probe
aaggacatgacactggaaggtgacg

SEQ ID NO: 155070 - DNA, 25 bp, probe
aagggagagattgaagtgtggcacc

SEQ ID NO: 155071 - DNA, 25 bp, probe
aagttagtattaatgcgttggccca

SEQ ID NO: 155072 - DNA, 25 bp, probe
aagattggttctaacgctttgcgta

SEQ ID NO: 155073 - DNA, 25 bp, probe
aagttcttgttttctgtttcctatg

SEQ ID NO: 155074 - DNA, 25 bp, probe
aagtgttatttggactataccctga

SEQ ID NO: 155075 - DNA, 25 bp, probe
aagtgttatttggactataccctga

SEQ ID NO: 155076 - DNA, 25 bp, probe
aagtattttttgactagaccattca

SEQ ID NO: 155077 - DNA, 25 bp, probe
aagtgtttttctgctagtgacttgc

SEQ ID NO: 155078 - DNA, 25 bp, probe
aagtcttttatcattattacctcaa

SEQ ID NO: 155079 - DNA, 25 bp, probe
aagtttccttattttcataattcat

SEQ ID NO: 155080 - DNA, 25 bp, probe
aagttttataattgcttccaaacag

SEQ ID NO: 155081 - DNA, 25 bp, probe
aagttattgaacagcttggaacacc

SEQ ID NO: 155082 - DNA, 25 bp, probe
aagttattgaacagcttggaacacc

SEQ ID NO: 155083 - DNA, 25 bp, probe
aaggaatgtttccctgggcgacaca

SEQ ID NO: 155084 - DNA, 25 bp, probe
aagtatcttttctctgtcagcgaac

SEQ ID NO: 155085 - DNA, 25 bp, probe
aagtttgcagttgacttcaagacgc

SEQ ID NO: 155086 - DNA, 25 bp, probe
aagtttgagtttgctgtgaagttca

SEQ ID NO: 155087 - DNA, 25 bp, probe
aagttccaggttgatatcacctaca

SEQ ID NO: 155088 - DNA, 25 bp, probe
aagttctctggttcaaacaaatgga

SEQ ID NO: 155089 - DNA, 25 bp, probe
aagttctctggttcaaacaaatgga

SEQ ID NO: 155090 - DNA, 25 bp, probe
aaggctctacgtgcaagtcaacaag

SEQ ID NO: 155091 - DNA, 25 bp, probe
aaggattacggccaggagatacaac

SEQ ID NO: 155092 - DNA, 25 bp, probe
aaggtttgacattcagggtacaaca

SEQ ID NO: 155093 - DNA, 25 bp, probe
aagttttgacaagtggacgactaag

SEQ ID NO: 155094 - DNA, 25 bp, probe
aagttttgacaagtggacgactaag

SEQ ID NO: 155095 - DNA, 25 bp, probe
aagtctcctaaacagacaggctacg

SEQ ID NO: 155096 - DNA, 25 bp, probe
aagtcaacaaaacagccagcgggcg

SEQ ID NO: 155097 - DNA, 25 bp, probe
aattcaggcaacaggagcgacgggc

SEQ ID NO: 155098 - DNA, 25 bp, probe
aaggaggaacaattaggacgtggca

SEQ ID NO: 155099 - DNA, 25 bp, probe
aagtacgaccctaaggacgtcatcg

SEQ ID NO: 155100 - DNA, 25 bp, probe
aagattctgcacctcaaaggggatc

SEQ ID NO: 155101 - DNA, 25 bp, probe
aagttgccacattcaaaggatggat

SEQ ID NO: 155102 - DNA, 25 bp, probe
aagattctctcatcaaatctatcca

SEQ ID NO: 155103 - DNA, 25 bp, probe
aagatcttgtctgctacagcttcca

SEQ ID NO: 155104 - DNA, 25 bp, probe
aagatgctgtgagtctttggttcta

SEQ ID NO: 155105 - DNA, 25 bp, probe
aagatgctgtgagtctttggttcta

SEQ ID NO: 155106 - DNA, 25 bp, probe
aagtcttggactggtggcatcatgt

SEQ ID NO: 155107 - DNA, 25 bp, probe
aagtcttggactggtggcatcatgt

SEQ ID NO: 155108 - DNA, 25 bp, probe
aagttctgaactggggctgtatttc

SEQ ID NO: 155109 - DNA, 25 bp, probe
aagttctaacagtagcctgtgcttt

SEQ ID NO: 155110 - DNA, 25 bp, probe
aagttcttatcagcaagatggtccc

SEQ ID NO: 155111 - DNA, 25 bp, probe
aagttcagccattaccaggtattcc

SEQ ID NO: 155112 - DNA, 25 bp, probe
aagtaaacacaagctggctgcttcc

SEQ ID NO: 155113 - DNA, 25 bp, probe
aagtcacagaaagcatcgcactctt

SEQ ID NO: 155114 - DNA, 25 bp, probe
aagatgaaacagggcaccccagctg

SEQ ID NO: 155115 - DNA, 25 bp, probe
aagatcacaacattcgtgcccaaga

SEQ ID NO: 155116 - DNA, 25 bp, probe
aagattgcaaatactgcccgcaaag

SEQ ID NO: 155117 - DNA, 25 bp, probe
aagtgtgacgtggacatccgcaaag

SEQ ID NO: 155118 - DNA, 25 bp, probe
aagtctgacgatgacacctccaatt

SEQ ID NO: 155119 - DNA, 25 bp, probe
aatggtggttggacagccccacttt

SEQ ID NO: 155120 - DNA, 25 bp, probe
aatggatggcaattgaatccctttt

SEQ ID NO: 155121 - DNA, 25 bp, probe
aaggggcacaggcatgccaaatttg

SEQ ID NO: 155122 - DNA, 25 bp, probe
aagtgggatcaactgtacgcctttg

SEQ ID NO: 155123 - DNA, 25 bp, probe
aagtgaatgtcatctttttctttta

SEQ ID NO: 155124 - DNA, 25 bp, probe
aagtgcatctgttttgtttttccct

SEQ ID NO: 155125 - DNA, 25 bp, probe
aagtagggacttctgtcttcacaac

SEQ ID NO: 155126 - DNA, 25 bp, probe
aagtaactaattatccttacacaca

SEQ ID NO: 155127 - DNA, 25 bp, probe
aagatcccttttatgcacctagaat

SEQ ID NO: 155128 - DNA, 25 bp, probe
aagatacacctttctcacaaataaa

SEQ ID NO: 155129 - DNA, 25 bp, probe
aagtccagcttgaacatctagaatt

SEQ ID NO: 155130 - DNA, 25 bp, probe
aagtccagcttgaacatctagaatt

SEQ ID NO: 155131 - DNA, 25 bp, probe
aagtgcctgctacacatacaacact

SEQ ID NO: 155132 - DNA, 25 bp, probe
aagtcatgcgtaaatgtcacaacca

SEQ ID NO: 155133 - DNA, 25 bp, probe
aagatccacttattgtaacaccaga

SEQ ID NO: 155134 - DNA, 25 bp, probe
aagatagtagtattattacacaaga

SEQ ID NO: 155135 - DNA, 25 bp, probe
aagtcgtattatacagtacatctac

SEQ ID NO: 155136 - DNA, 25 bp, probe
aagatttaccataagggactgtgcc

SEQ ID NO: 155137 - DNA, 25 bp, probe
aagatttgtgacttcgggtttgcac

SEQ ID NO: 155138 - DNA, 25 bp, probe
aagatcggtgacatctgggctttca

SEQ ID NO: 155139 - DNA, 25 bp, probe
aagatcctgagaacttggaattcct

SEQ ID NO: 155140 - DNA, 25 bp, probe
aagtcttgtgacatgggcaactcca

SEQ ID NO: 155141 - DNA, 25 bp, probe
aagttcgggtcatggcagactctat

SEQ ID NO: 155142 - DNA, 25 bp, probe
aagattcgctggaacggaggctgcc

SEQ ID NO: 155143 - DNA, 25 bp, probe
aagtagcagctgctaacccttgcac

SEQ ID NO: 155144 - DNA, 25 bp, probe
gaagtacaccttcaggcttaggtcc

SEQ ID NO: 155145 - DNA, 25 bp, probe
aagtacctctctgagcggttggtgc

SEQ ID NO: 155146 - DNA, 25 bp, probe
aagtaccttctgtgaagtttcactg

SEQ ID NO: 155147 - DNA, 25 bp, probe
aagttcagttcttggtgagttctcc

SEQ ID NO: 155148 - DNA, 25 bp, probe
aagtacgttgcaatggtgatggacc

SEQ ID NO: 155149 - DNA, 25 bp, probe
aagtaggattgcaaaggaggaggtg

SEQ ID NO: 155150 - DNA, 25 bp, probe
aagtaggattgcaaaggaggaggtg

SEQ ID NO: 155151 - DNA, 25 bp, probe
aagtaggtgtgtggctgcggtgagg

SEQ ID NO: 155152 - DNA, 25 bp, probe
aagtataggattttgcacattgagg

SEQ ID NO: 155153 - DNA, 25 bp, probe
aagattgagcatttagtcacatttg

SEQ ID NO: 155154 - DNA, 25 bp, probe
aagattccaactttgccagcttgat

SEQ ID NO: 155155 - DNA, 25 bp, probe
aagtcctaattgttggagctcagta

SEQ ID NO: 155156 - DNA, 25 bp, probe
aagtcccagtttagtcagatggcca

SEQ ID NO: 155157 - DNA, 25 bp, probe
aagtcccgagttactcagagcaact

SEQ ID NO: 155158 - DNA, 25 bp, probe
aagatcccggtcaagtggacagcgc

SEQ ID NO: 155159 - DNA, 25 bp, probe
aagatcccggtcaagtggacagcgc

SEQ ID NO: 155160 - DNA, 25 bp, probe
aagatcccggtcaagtggacagcgc

SEQ ID NO: 155161 - DNA, 25 bp, probe
aaggactgtggtcatgtaacaggta

SEQ ID NO: 155162 - DNA, 25 bp, probe
aaggactgtggtcatgtaacaggta

SEQ ID NO: 155163 - DNA, 25 bp, probe
aagtgccttttcatccaaatggaat

SEQ ID NO: 155164 - DNA, 25 bp, probe
aagtcttttgtcatcaaggaggcaa

SEQ ID NO: 155165 - DNA, 25 bp, probe
aagtcttgttttcagaacatggaga

SEQ ID NO: 155166 - DNA, 25 bp, probe
aagttctgattcatagagtattgga

SEQ ID NO: 155167 - DNA, 25 bp, probe
aagttctgattcatagagtattgga

SEQ ID NO: 155168 - DNA, 25 bp, probe
aagtcatgctgactctatgagatgg

SEQ ID NO: 155169 - DNA, 25 bp, probe
aagtcatggatgtctaagcaccgta

SEQ ID NO: 155170 - DNA, 25 bp, probe
aagtgctggaattaccgccgtgagc

SEQ ID NO: 155171 - DNA, 25 bp, probe
aagttggaagatctgctgtgcttcc

SEQ ID NO: 155172 - DNA, 25 bp, probe
aagttacaatacagcagtttcctac

SEQ ID NO: 155173 - DNA, 25 bp, probe
aagattatctacaccgtgggccata

SEQ ID NO: 155174 - DNA, 25 bp, probe
aagttatctagcaagccgctggggc

SEQ ID NO: 155175 - DNA, 25 bp, probe
aagtgttgtctgagacctgggtcgc

SEQ ID NO: 155176 - DNA, 25 bp, probe
aagtgtctctggggacctgaagccc

SEQ ID NO: 155177 - DNA, 25 bp, probe
aagttggtggggtcacagaagcagc

SEQ ID NO: 155178 - DNA, 25 bp, probe
aagttggtggggtcacagaagcagc

SEQ ID NO: 155179 - DNA, 25 bp, probe
aagttggcgtgagctacagagggca

SEQ ID NO: 155180 - DNA, 25 bp, probe
aagttggcgtgagctacagagggca

SEQ ID NO: 155181 - DNA, 25 bp, probe
aagtgtggcctagccaagacgtggc

SEQ ID NO: 155182 - DNA, 25 bp, probe
aagtgtggcctagccaagacgtggc

SEQ ID NO: 155183 - DNA, 25 bp, probe
aagtgatgacacccctcgaaggggc

SEQ ID NO: 155184 - DNA, 25 bp, probe
aagatatgtcttcctccagagagaa

SEQ ID NO: 155185 - DNA, 25 bp, probe
aagtatggctggccccatgaagatg

SEQ ID NO: 155186 - DNA, 25 bp, probe
aagttgctgctgtgaatctgaaaga

SEQ ID NO: 155187 - DNA, 25 bp, probe
aagttctcagttatctaaagctttt

SEQ ID NO: 155188 - DNA, 25 bp, probe
aagttctactcattttcacttcttt

SEQ ID NO: 155189 - DNA, 25 bp, probe
aagtcctcagtattttagctttgtg

SEQ ID NO: 155190 - DNA, 25 bp, probe
aagttctagttttctatgttctgat

SEQ ID NO: 155191 - DNA, 25 bp, probe
aagttctagtattctggatcaccgt

SEQ ID NO: 155192 - DNA, 25 bp, probe
aagttctagtattctggatcaccgt

SEQ ID NO: 155193 - DNA, 25 bp, probe
aagtctgcattgaatccgctgatct

SEQ ID NO: 155194 - DNA, 25 bp, probe
aagttgcgttgaggccgcatctttc

SEQ ID NO: 155195 - DNA, 25 bp, probe
aagttgcgttgaggccgcatctttc

SEQ ID NO: 155196 - DNA, 25 bp, probe
aagttgcgttacctgtcactattgt

SEQ ID NO: 155197 - DNA, 25 bp, probe
aagttgcgttacctgtcactattgt

SEQ ID NO: 155198 - DNA, 25 bp, probe
aagttctgttatctgtgtatattgt

SEQ ID NO: 155199 - DNA, 25 bp, probe
aagtaattgagattgttgtctttgc

SEQ ID NO: 155200 - DNA, 25 bp, probe
aagatatgaggaaggtagtctgtgt

SEQ ID NO: 155201 - DNA, 25 bp, probe
aagtggaaggggcagtatgatgttg

SEQ ID NO: 155202 - DNA, 25 bp, probe
aatgaggagtgggggggagtgctac

SEQ ID NO: 155203 - DNA, 25 bp, probe
aagttgagtgtcaggggacatgatg

SEQ ID NO: 155204 - DNA, 25 bp, probe
aagtaagcaactagctgggcacagt

SEQ ID NO: 155205 - DNA, 25 bp, probe
aagtggatacctctagtgcaattta

SEQ ID NO: 155206 - DNA, 25 bp, probe
aatgggcgacctcgaagtaactctt

SEQ ID NO: 155207 - DNA, 25 bp, probe
aatgggcgacctcgaagtaactctt

SEQ ID NO: 155208 - DNA, 25 bp, probe
aagggcgccaacaacagtaacacca

SEQ ID NO: 155209 - DNA, 25 bp, probe
aagggcgccaacaacagtaacacca

SEQ ID NO: 155210 - DNA, 25 bp, probe
aagtcgggctacacggagaagcagc

SEQ ID NO: 155211 - DNA, 25 bp, probe
aagtgaaggttcccgaggacatgag

SEQ ID NO: 155212 - DNA, 25 bp, probe
aagtttgagtgtaccaggaacagaa

SEQ ID NO: 155213 - DNA, 25 bp, probe
aagttgtgcggtttctagataagaa

SEQ ID NO: 155214 - DNA, 25 bp, probe
aagtcagggtgttatgtcctgaaaa

SEQ ID NO: 155215 - DNA, 25 bp, probe
aagtcagggtgttatgtcctgaaaa

SEQ ID NO: 155216 - DNA, 25 bp, probe
aagtgaggaccttgagtggagaaat

SEQ ID NO: 155217 - DNA, 25 bp, probe
caaggggtactgcaggggaagggct

SEQ ID NO: 155218 - DNA, 25 bp, probe
aagggggactgcaagggacagggat

SEQ ID NO: 155219 - DNA, 25 bp, probe
aagtggcaggattttcggaagctgg

SEQ ID NO: 155220 - DNA, 25 bp, probe
aagggatggtgaaaccgaagctcga

SEQ ID NO: 155221 - DNA, 25 bp, probe
aagggctactaggcaacgacgccgc

SEQ ID NO: 155222 - DNA, 25 bp, probe
aagtcagtgaaagccacgatccttg

SEQ ID NO: 155223 - DNA, 25 bp, probe
aagttgtgaagcactccgagtcatg

SEQ ID NO: 155224 - DNA, 25 bp, probe
aagttgtgaagcactccgagtcatg

SEQ ID NO: 155225 - DNA, 25 bp, probe
aagttgtggctcacccaactatgct

SEQ ID NO: 155226 - DNA, 25 bp, probe
aagattgacttgagactaactagca

SEQ ID NO: 155227 - DNA, 25 bp, probe
aagttgtctataatgagccgttaag

SEQ ID NO: 155228 - DNA, 25 bp, probe
aaggtcctatacaagtcagttaagg

SEQ ID NO: 155229 - DNA, 25 bp, probe
aagtttccagacaagaagcctaagg

SEQ ID NO: 155230 - DNA, 25 bp, probe
aagttgccgatgatgaggaccgaag

SEQ ID NO: 155231 - DNA, 25 bp, probe
aagtcagtccatctgaggaaagcca

SEQ ID NO: 155232 - DNA, 25 bp, probe
aagtagatcctgctcacagaatcac

SEQ ID NO: 155233 - DNA, 25 bp, probe
aagtaagcatctctgcagaaagcca

SEQ ID NO: 155234 - DNA, 25 bp, probe
aagatagcacttttggcaaactctt

SEQ ID NO: 155235 - DNA, 25 bp, probe
aagatagcacttttggcaaactctt

SEQ ID NO: 155236 - DNA, 25 bp, probe
aagtaactataatgaaatctgctgc

SEQ ID NO: 155237 - DNA, 25 bp, probe
aagtaccttatatagaacagcatca

SEQ ID NO: 155238 - DNA, 25 bp, probe
aagtacagtttcaaggatgaagatg

SEQ ID NO: 155239 - DNA, 25 bp, probe
aagtccctcatggcacaggagaagg

SEQ ID NO: 155240 - DNA, 25 bp, probe
aagtccctcatggcacaggagaagg

SEQ ID NO: 155241 - DNA, 25 bp, probe
aagtcgcagtgcgcactggaggagt

SEQ ID NO: 155242 - DNA, 25 bp, probe
aagtcataggtggccttaggcatct

SEQ ID NO: 155243 - DNA, 25 bp, probe
aagtgaatgccatcctcaaggccct

SEQ ID NO: 155244 - DNA, 25 bp, probe
aaggaagttgtctataatgagccgt

SEQ ID NO: 155245 - DNA, 25 bp, probe
aagtgacctatgacaaaacgccgct

SEQ ID NO: 155246 - DNA, 25 bp, probe
aagtccctcgaaaatacgctatgtt

SEQ ID NO: 155247 - DNA, 25 bp, probe
aagtcgccctaggaacaccagattt

SEQ ID NO: 155248 - DNA, 25 bp, probe
aagtgctctgaaaaagacaccgttt

SEQ ID NO: 155249 - DNA, 25 bp, probe
aagtgctctgaaaaagacaccgttt

SEQ ID NO: 155250 - DNA, 25 bp, probe
aagatttattatgaaccgcaatatg

SEQ ID NO: 155251 - DNA, 25 bp, probe
aagtatttaatatagctctcttatg

SEQ ID NO: 155252 - DNA, 25 bp, probe
aagtatttaattgcccatgatatgt

SEQ ID NO: 155253 - DNA, 25 bp, probe
aagtattgctgtttacagatcagac

SEQ ID NO: 155254 - DNA, 25 bp, probe
aagttatgcctaatagcaggcaaga

SEQ ID NO: 155255 - DNA, 25 bp, probe
aagttatgactaatgatatgcctag

SEQ ID NO: 155256 - DNA, 25 bp, probe
aagattattctcacatacctgaggc

SEQ ID NO: 155257 - DNA, 25 bp, probe
aagtaaatttggacgcagctggagc

SEQ ID NO: 155258 - DNA, 25 bp, probe
aagtaatttttgactcccagatcag

SEQ ID NO: 155259 - DNA, 25 bp, probe
aagtatgtcttgtttgtagccaata

SEQ ID NO: 155260 - DNA, 25 bp, probe
aagttgtgtctgattggagcttcat

SEQ ID NO: 155261 - DNA, 25 bp, probe
aaggcattgggtatggggccaggcc

SEQ ID NO: 155262 - DNA, 25 bp, probe
aagttgtcacttatgggcgggtgcc

SEQ ID NO: 155263 - DNA, 25 bp, probe
aagtttcactttgggtagatggata

SEQ ID NO: 155264 - DNA, 25 bp, probe
aagtttcactttgggtagatggata

SEQ ID NO: 155265 - DNA, 25 bp, probe
aagtgtttctagggtgtagctgggt

SEQ ID NO: 155266 - DNA, 25 bp, probe
aaggttccgaagccgatactggtct

SEQ ID NO: 155267 - DNA, 25 bp, probe
aaggtggaagatgcgtttctggtcc

SEQ ID NO: 155268 - DNA, 25 bp, probe
aaggatggcatcaccgttgtggact

SEQ ID NO: 155269 - DNA, 25 bp, probe
aagttggagaacctgttgctggaca

SEQ ID NO: 155270 - DNA, 25 bp, probe
aagattgagcggagtgcctcggaac

SEQ ID NO: 155271 - DNA, 25 bp, probe
aagttgagctgtagtgcctgctggg

SEQ ID NO: 155272 - DNA, 25 bp, probe
aagttggcttctggctgtgatgggt

SEQ ID NO: 155273 - DNA, 25 bp, probe
aagtatactctcaaatgtatgaagc

SEQ ID NO: 155274 - DNA, 25 bp, probe
aagtatcctgcagtttgtacacatg

SEQ ID NO: 155275 - DNA, 25 bp, probe
aagattacacagattatacagctct

SEQ ID NO: 155276 - DNA, 25 bp, probe
aagttcaccagcaagtcggatgtct

SEQ ID NO: 155277 - DNA, 25 bp, probe
aagattcatccaggtgtaaattatt

SEQ ID NO: 155278 - DNA, 25 bp, probe
aagattcatccaggtgtaaattatt

SEQ ID NO: 155279 - DNA, 25 bp, probe
aagtcagtccaggatgctaacatct

SEQ ID NO: 155280 - DNA, 25 bp, probe
aagtccaccagcgatctatatgatc

SEQ ID NO: 155281 - DNA, 25 bp, probe
aagtgcctacagattatatggtgaa

SEQ ID NO: 155282 - DNA, 25 bp, probe
aagtgcctacagattatatggtgaa

SEQ ID NO: 155283 - DNA, 25 bp, probe
aagtgccttggaacaatattgaatt

SEQ ID NO: 155284 - DNA, 25 bp, probe
aagtactagcaataagttgaatgat

SEQ ID NO: 155285 - DNA, 25 bp, probe
aagtacacacgatgatagcttcaag

SEQ ID NO: 155286 - DNA, 25 bp, probe
aagtcaagccagagatctgttatca

SEQ ID NO: 155287 - DNA, 25 bp, probe
aagtcaactgcacgtgttttatatt

SEQ ID NO: 155288 - DNA, 25 bp, probe
aagggactgaagtatacatttagtt

SEQ ID NO: 155289 - DNA, 25 bp, probe
aagtggttaaacaaactctcatttg

SEQ ID NO: 155290 - DNA, 25 bp, probe
aagtttcacatctagcaaactcctt

SEQ ID NO: 155291 - DNA, 25 bp, probe
aatgtcattacatagaacacttcag

SEQ ID NO: 155292 - DNA, 25 bp, probe
aagtcacaaaagcaacactcgatga

SEQ ID NO: 155293 - DNA, 25 bp, probe
aatgtccaaatagcggcctcggaaa

SEQ ID NO: 155294 - DNA, 25 bp, probe
aaggcaaaagactgagcccccaagg

SEQ ID NO: 155295 - DNA, 25 bp, probe
aagtcaccacagacaagatggccca

SEQ ID NO: 155296 - DNA, 25 bp, probe
aagtacgaccgcgagatggtgcagc

SEQ ID NO: 155297 - DNA, 25 bp, probe
aagttcatccctgcaaggatctgca

SEQ ID NO: 155298 - DNA, 25 bp, probe
aagttcatccctgcaaggatctgca

SEQ ID NO: 155299 - DNA, 25 bp, probe
aagtctaacactcctgggagctcag

SEQ ID NO: 155300 - DNA, 25 bp, probe
aagtctcaagactgtggcaaccatc

SEQ ID NO: 155301 - DNA, 25 bp, probe
aagggccagatcggggcgcccatgc

SEQ ID NO: 155302 - DNA, 25 bp, probe
aagttgaaacaggggcccatcatca

SEQ ID NO: 155303 - DNA, 25 bp, probe
aagttaaacatgtacctaccatatg

SEQ ID NO: 155304 - DNA, 25 bp, probe
aagtatctaattcaccttaacatgt

SEQ ID NO: 155305 - DNA, 25 bp, probe
aagtctctaattctattaaagtgct

SEQ ID NO: 155306 - DNA, 25 bp, probe
aagtctctaattctattaaagtgct

SEQ ID NO: 155307 - DNA, 25 bp, probe
aagtcctttgggggtcaaatggcat

SEQ ID NO: 155308 - DNA, 25 bp, probe
aagtgcctgcaccaggggtgcacaa

SEQ ID NO: 155309 - DNA, 25 bp, probe
aagtgcctgcaccaggggtgcacaa

SEQ ID NO: 155310 - DNA, 25 bp, probe
aagggcgcgcagtggatgaagcaaa

SEQ ID NO: 155311 - DNA, 25 bp, probe
aagtgaggccggggcgagacaacat

SEQ ID NO: 155312 - DNA, 25 bp, probe
aagtgccacctgattgagaccaaca

SEQ ID NO: 155313 - DNA, 25 bp, probe
aagtcaagggtgaataatctcaaca

SEQ ID NO: 155314 - DNA, 25 bp, probe
aagtccctgggactgtttcagactt

SEQ ID NO: 155315 - DNA, 25 bp, probe
aagttctctgcagagtttgttgact

SEQ ID NO: 155316 - DNA, 25 bp, probe
aagtatctcattcagtatttagcaa

SEQ ID NO: 155317 - DNA, 25 bp, probe
aagtctgctcttgacatcttttcca

SEQ ID NO: 155318 - DNA, 25 bp, probe
aagttcctgtggaatcagacctcca

SEQ ID NO: 155319 - DNA, 25 bp, probe
aagttctcatggtgcacgagtcctc

SEQ ID NO: 155320 - DNA, 25 bp, probe
aagttttgtgcttccaaatcacttt

SEQ ID NO: 155321 - DNA, 25 bp, probe
aagttgttgatctctagaaccgatt

SEQ ID NO: 155322 - DNA, 25 bp, probe
aagttgttgatcttgaaatatctca

SEQ ID NO: 155323 - DNA, 25 bp, probe
aagttgttgatcttgaaatatctca

SEQ ID NO: 155324 - DNA, 25 bp, probe
aagttattgtgattgaaggcattcc

SEQ ID NO: 155325 - DNA, 25 bp, probe
aagttgaagttctaatggcatctct

SEQ ID NO: 155326 - DNA, 25 bp, probe
aagtaggacttgtagtagagctgct

SEQ ID NO: 155327 - DNA, 25 bp, probe
aagtggcgactgcacagaatggctg

SEQ ID NO: 155328 - DNA, 25 bp, probe
aagtttgcactgtaacatatgccat

SEQ ID NO: 155329 - DNA, 25 bp, probe
aagtattgcctggtgtcatcgacac

SEQ ID NO: 155330 - DNA, 25 bp, probe
aagtttgccagaagtttgtcaagtc

SEQ ID NO: 155331 - DNA, 25 bp, probe
aagttcccagaggcttctgtacagt

SEQ ID NO: 155332 - DNA, 25 bp, probe
aagtcacactaagtcttctggaggt

SEQ ID NO: 155333 - DNA, 25 bp, probe
aagtgccagggagccctgcatgagg

SEQ ID NO: 155334 - DNA, 25 bp, probe
aagtcatccatggacccctgatgat

SEQ ID NO: 155335 - DNA, 25 bp, probe
aagtagcacagaccccattatattt

SEQ ID NO: 155336 - DNA, 25 bp, probe
aagtacaatgagccttactgtattt

SEQ ID NO: 155337 - DNA, 25 bp, probe
aatgattccaaagtaacatgtaatt

SEQ ID NO: 155338 - DNA, 25 bp, probe
aagtttagagagctaagattatctg

SEQ ID NO: 155339 - DNA, 25 bp, probe
aagtattggcgtataacattatttt

SEQ ID NO: 155340 - DNA, 25 bp, probe
aagtgattgtggactgtcaatctta

SEQ ID NO: 155341 - DNA, 25 bp, probe
aagtgaagtatggctgtaagtctca

SEQ ID NO: 155342 - DNA, 25 bp, probe
aagtgaagcttgggattcactccct

SEQ ID NO: 155343 - DNA, 25 bp, probe
aagttacttcacatttctcatcctt

SEQ ID NO: 155344 - DNA, 25 bp, probe
aagttatcttacgctatttctgttg

SEQ ID NO: 155345 - DNA, 25 bp, probe
aagtgtacagaaaactcattttgtt

SEQ ID NO: 155346 - DNA, 25 bp, probe
aagttatgccaaagtactgttggtt

SEQ ID NO: 155347 - DNA, 25 bp, probe
aagtcttcctcaatgtattttgctc

SEQ ID NO: 155348 - DNA, 25 bp, probe
aagtttctcattactgtctgtggct

SEQ ID NO: 155349 - DNA, 25 bp, probe
aagtttctcattactgtctgtggct

SEQ ID NO: 155350 - DNA, 25 bp, probe
aagttacatttcctgacagatggct

SEQ ID NO: 155351 - DNA, 25 bp, probe
aagttaccattcagaggtgcagtga

SEQ ID NO: 155352 - DNA, 25 bp, probe
aagttatccttcaagagcttcagcg

SEQ ID NO: 155353 - DNA, 25 bp, probe
aagtctgacgtgtggagtttcggaa

SEQ ID NO: 155354 - DNA, 25 bp, probe
aagtctgaagagcgtgaagtttgga

SEQ ID NO: 155355 - DNA, 25 bp, probe
aagtgcgagccacaggaaaaatgta

SEQ ID NO: 155356 - DNA, 25 bp, probe
aagtcgaggcaatggaaaagctcat

SEQ ID NO: 155357 - DNA, 25 bp, probe
aagtaacaaaaggaagcaggctctc

SEQ ID NO: 155358 - DNA, 25 bp, probe
aagtagccaacagcgaagccagtcc

SEQ ID NO: 155359 - DNA, 25 bp, probe
aagtagccaacagcgaagccagtcc

SEQ ID NO: 155360 - DNA, 25 bp, probe
aatgaagggtgcacgaatcccccac

SEQ ID NO: 155361 - DNA, 25 bp, probe
aatgaagggtgcacgaatcccccac

SEQ ID NO: 155362 - DNA, 25 bp, probe
aatgaagggtgcacgaatcccccac

SEQ ID NO: 155363 - DNA, 25 bp, probe
aatgaagggtgcacgaatcccccac

SEQ ID NO: 155364 - DNA, 25 bp, probe
aaggggctgaggacgagacccccat

SEQ ID NO: 155365 - DNA, 25 bp, probe
aaggggctgaggacgagacccccat

SEQ ID NO: 155366 - DNA, 25 bp, probe
aagtgggccagatgcaacacctgac

SEQ ID NO: 155367 - DNA, 25 bp, probe
aagtctggtcaataaatcactgcac

SEQ ID NO: 155368 - DNA, 25 bp, probe
aagtctcctcaatttttgtctcaga

SEQ ID NO: 155369 - DNA, 25 bp, probe
aagtgctcgtatttgtattctccat

SEQ ID NO: 155370 - DNA, 25 bp, probe
aagtttgaacttattctctcattag

SEQ ID NO: 155371 - DNA, 25 bp, probe
aaggttcaggataaattccgcttag

SEQ ID NO: 155372 - DNA, 25 bp, probe
aaggtcaaggaagacctgccccaca

SEQ ID NO: 155373 - DNA, 25 bp, probe
aaggtcaatgcacagagaccccggg

SEQ ID NO: 155374 - DNA, 25 bp, probe
aaggtatacctcagttccacggttg

SEQ ID NO: 155375 - DNA, 25 bp, probe
aagttatacctcatctctaacctgc

SEQ ID NO: 155376 - DNA, 25 bp, probe
aagttatttctcaacctggcaacgc

SEQ ID NO: 155377 - DNA, 25 bp, probe
aagttatttctcaacctggcaacgc

SEQ ID NO: 155378 - DNA, 25 bp, probe
aagttattcctatcctgtggactgg

SEQ ID NO: 155379 - DNA, 25 bp, probe
aagtaattcatacacaagggacggt

SEQ ID NO: 155380 - DNA, 25 bp, probe
aagtaattcatacacaagggacggt

SEQ ID NO: 155381 - DNA, 25 bp, probe
caggtaatacaacacgccggactga

SEQ ID NO: 155382 - DNA, 25 bp, probe
cagggaacaagacacggctgggttg

SEQ ID NO: 155383 - DNA, 25 bp, probe
aaggaccagaggcagcggctgggct

SEQ ID NO: 155384 - DNA, 25 bp, probe
aaggggcgcaggcagagcgaggacc

SEQ ID NO: 155385 - DNA, 25 bp, probe
aagtgctatgggaggagcggaacac

SEQ ID NO: 155386 - DNA, 25 bp, probe
aaggctctgggcaagaacagtacaa

SEQ ID NO: 155387 - DNA, 25 bp, probe
aatgacgcggctcaaaaggaaacca

SEQ ID NO: 155388 - DNA, 25 bp, probe
aattccgagtgcagaaaagaaaccg

SEQ ID NO: 155389 - DNA, 25 bp, probe
aattccgagtgcagaaaagaaaccg

SEQ ID NO: 155390 - DNA, 25 bp, probe
aattccgagtgcagaaaagaaaccg

SEQ ID NO: 155391 - DNA, 25 bp, probe
aatcgccgcatacagctaacaaaac

SEQ ID NO: 155392 - DNA, 25 bp, probe
aagtcgtgaagttgccactcaaaaa

SEQ ID NO: 155393 - DNA, 25 bp, probe
aagtagccatcacaccattaaaaag

SEQ ID NO: 155394 - DNA, 25 bp, probe
aatgtaggccttacttgtatataag

SEQ ID NO: 155395 - DNA, 25 bp, probe
aagggagggtgaaagtgattatggg

SEQ ID NO: 155396 - DNA, 25 bp, probe
aagggccgagtaaagtgtgatcatt

SEQ ID NO: 155397 - DNA, 25 bp, probe
aaggggctgtggaggttgatattat

SEQ ID NO: 155398 - DNA, 25 bp, probe
aaggggttaggggacatggctgtgt

SEQ ID NO: 155399 - DNA, 25 bp, probe
aagggtttcagctgaagaggccatg

SEQ ID NO: 155400 - DNA, 25 bp, probe
aaggaccttaactggaggcagctgg

SEQ ID NO: 155401 - DNA, 25 bp, probe
aaggaccttaactggaggcagctgg

SEQ ID NO: 155402 - DNA, 25 bp, probe
aaggaagccttataccagtgcagtg

SEQ ID NO: 155403 - DNA, 25 bp, probe
aagggaccttggaacaatggattga

SEQ ID NO: 155404 - DNA, 25 bp, probe
aagtcgttcctactgacattgtatt

SEQ ID NO: 155405 - DNA, 25 bp, probe
aagtcagtcaccaacggcaatggca

SEQ ID NO: 155406 - DNA, 25 bp, probe
aagtctgccactacttggagtggat

SEQ ID NO: 155407 - DNA, 25 bp, probe
aagtgctcaactacgtggactggat

SEQ ID NO: 155408 - DNA, 25 bp, probe
aagtctcaagctttgtacactggat

SEQ ID NO: 155409 - DNA, 25 bp, probe
aagtcattgactttggatcaagctg

SEQ ID NO: 155410 - DNA, 25 bp, probe
aagtccagacctcggagaagctgaa

SEQ ID NO: 155411 - DNA, 25 bp, probe
aagtcataccttcgaggtggtagca

SEQ ID NO: 155412 - DNA, 25 bp, probe
aagtgagactttgagggtgtatatt

SEQ ID NO: 155413 - DNA, 25 bp, probe
aagtgagactttgagggtgtatatt

SEQ ID NO: 155414 - DNA, 25 bp, probe
aatgtaactttgtgggaacactgat

SEQ ID NO: 155415 - DNA, 25 bp, probe
aagtaagaagtcggggctttctgat

SEQ ID NO: 155416 - DNA, 25 bp, probe
aaggccgaagtcagcgagttttatt

SEQ ID NO: 155417 - DNA, 25 bp, probe
aagtgcctcatagttaggaaagttt

SEQ ID NO: 155418 - DNA, 25 bp, probe
aagtgcctcatagttaggaaagttt

SEQ ID NO: 155419 - DNA, 25 bp, probe
aagtctgcctatttcaaaagtattt

SEQ ID NO: 155420 - DNA, 25 bp, probe
aagtcactgattttcagaacattat

SEQ ID NO: 155421 - DNA, 25 bp, probe
aagtcttgatgttttccatctcttc

SEQ ID NO: 155422 - DNA, 25 bp, probe
aatgtttggtggctccatttaccag

SEQ ID NO: 155423 - DNA, 25 bp, probe
aagtctcgggagatctttctcagcc

SEQ ID NO: 155424 - DNA, 25 bp, probe
aagtctcgggagatctttctcagcc

SEQ ID NO: 155425 - DNA, 25 bp, probe
aagtacgggcagttcagtggcctga

SEQ ID NO: 155426 - DNA, 25 bp, probe
aagtagctgggactacaggtgcccg

SEQ ID NO: 155427 - DNA, 25 bp, probe
aagtagctgcggattttgtctcctg

SEQ ID NO: 155428 - DNA, 25 bp, probe
aagtcagtcggtatgctctggcatc

SEQ ID NO: 155429 - DNA, 25 bp, probe
aagtctgtcagagttatgcgttctt

SEQ ID NO: 155430 - DNA, 25 bp, probe
aagtttagcaatatgacattcttgg

SEQ ID NO: 155431 - DNA, 25 bp, probe
aagtctttaatcatacagctaagga

SEQ ID NO: 155432 - DNA, 25 bp, probe
aaggctttactcatcagtcttaagt

SEQ ID NO: 155433 - DNA, 25 bp, probe
aagtgtacaaccctagcctgatagg

SEQ ID NO: 155434 - DNA, 25 bp, probe
aagtggaaacttctcccaagtgaag

SEQ ID NO: 155435 - DNA, 25 bp, probe
aagggcaactttttctcagccagga

SEQ ID NO: 155436 - DNA, 25 bp, probe
aaggaagacttcaagtcccaaagct

SEQ ID NO: 155437 - DNA, 25 bp, probe
aaggatgaactaaaactcaaacagt

SEQ ID NO: 155438 - DNA, 25 bp, probe
aagtgataacttcgaagccataggg

SEQ ID NO: 155439 - DNA, 25 bp, probe
aagtgtaacgtcaaggccaagagca

SEQ ID NO: 155440 - DNA, 25 bp, probe
aaggtcagggtcacccaagcaacaa

SEQ ID NO: 155441 - DNA, 25 bp, probe
aaggtcgatgtgtctaccaggcagc

SEQ ID NO: 155442 - DNA, 25 bp, probe
aaggtcgatgtgtctaccaggcagc

SEQ ID NO: 155443 - DNA, 25 bp, probe
aaggaggagttccaccatgagctca

SEQ ID NO: 155444 - DNA, 25 bp, probe
aagtagtgtttccatgctctgtgta

SEQ ID NO: 155445 - DNA, 25 bp, probe
aagtagtgtttccatgctctgtgta

SEQ ID NO: 155446 - DNA, 25 bp, probe
aagtgagttcagtccatctctataa

SEQ ID NO: 155447 - DNA, 25 bp, probe
aagtgagttcagtccatctctataa

SEQ ID NO: 155448 - DNA, 25 bp, probe
aagtgagttcagtccatctctataa

SEQ ID NO: 155449 - DNA, 25 bp, probe
aagtgagttcagtccatctctataa

SEQ ID NO: 155450 - DNA, 25 bp, probe
aagtgagttcagtccatctctataa

SEQ ID NO: 155451 - DNA, 25 bp, probe
aagtagtccaccttcatttaactct

SEQ ID NO: 155452 - DNA, 25 bp, probe
aagtttctgacctgtcgtacatttg

SEQ ID NO: 155453 - DNA, 25 bp, probe
aagtcttgcagaccgagtctacaca

SEQ ID NO: 155454 - DNA, 25 bp, probe
aagtcttgcaatcccatttgcagga

SEQ ID NO: 155455 - DNA, 25 bp, probe
aagtcctgaatcccttgcaggtatg

SEQ ID NO: 155456 - DNA, 25 bp, probe
aagtgcttgcagatgctttcggtag

SEQ ID NO: 155457 - DNA, 25 bp, probe
aagtttgcagttggctaagagaggt

SEQ ID NO: 155458 - DNA, 25 bp, probe
aagtttgcagcttatgtaatagcag

SEQ ID NO: 155459 - DNA, 25 bp, probe
aaggttagacagatgcagatacagc

SEQ ID NO: 155460 - DNA, 25 bp, probe
aagtaataactgatgagatacattt

SEQ ID NO: 155461 - DNA, 25 bp, probe
aaggtataattgatggattcttcca

SEQ ID NO: 155462 - DNA, 25 bp, probe
aaggtactcttgggcatattttcca

SEQ ID NO: 155463 - DNA, 25 bp, probe
aagggactttggaattctgcttctc

SEQ ID NO: 155464 - DNA, 25 bp, probe
aagggcggggagagtgccattgcct

SEQ ID NO: 155465 - DNA, 25 bp, probe
aaggggagggactcatcatttccat

SEQ ID NO: 155466 - DNA, 25 bp, probe
aaggggagagtaaccctgtctaatg

SEQ ID NO: 155467 - DNA, 25 bp, probe
aaggaggaggcaaggtcctagtcca

SEQ ID NO: 155468 - DNA, 25 bp, probe
aagtgcgcgatgccgggatcaaagt

SEQ ID NO: 155469 - DNA, 25 bp, probe
aagtgaggggcttgtgaaacagatt

SEQ ID NO: 155470 - DNA, 25 bp, probe
aagtttcagtctttaatgtctgaga

SEQ ID NO: 155471 - DNA, 25 bp, probe
aagtatccagtatatggtgtccagt

SEQ ID NO: 155472 - DNA, 25 bp, probe
aagtttctgttccatggattccgct

SEQ ID NO: 155473 - DNA, 25 bp, probe
aaggctatcgttcagaagctccgct

SEQ ID NO: 155474 - DNA, 25 bp, probe
aaggctaccaagtgaagcttgcagg

SEQ ID NO: 155475 - DNA, 25 bp, probe
aaggccccaggtggaagcaggcgga

SEQ ID NO: 155476 - DNA, 25 bp, probe
caagtcccgggacaacagcagggac

SEQ ID NO: 155477 - DNA, 25 bp, probe
aagtcccgggacaacagcagggaca

SEQ ID NO: 155478 - DNA, 25 bp, probe
aagtcctcaatggtaacaaggtggc

SEQ ID NO: 155479 - DNA, 25 bp, probe
aagtcactaagtcgcatcacagaga

SEQ ID NO: 155480 - DNA, 25 bp, probe
aagtcagagtatgggatgaagatga

SEQ ID NO: 155481 - DNA, 25 bp, probe
aagtgagatgtctggagatcatatt

SEQ ID NO: 155482 - DNA, 25 bp, probe
aagtatctgctatgggactattgct

SEQ ID NO: 155483 - DNA, 25 bp, probe
aagtatgtgaatgtgcgcattttgc

SEQ ID NO: 155484 - DNA, 25 bp, probe
aagtcatgagaaagatgagattctt

SEQ ID NO: 155485 - DNA, 25 bp, probe
aagtatatgctgtgaaggtcttaaa

SEQ ID NO: 155486 - DNA, 25 bp, probe
aagtgcatgatgggaaaggtattag

SEQ ID NO: 155487 - DNA, 25 bp, probe
aagtgtgtatcaaaagagactaatg

SEQ ID NO: 155488 - DNA, 25 bp, probe
aagtgatataaatcagattcttctc

SEQ ID NO: 155489 - DNA, 25 bp, probe
aagtgcctataaccatgttctatat

SEQ ID NO: 155490 - DNA, 25 bp, probe
aagtccatgcaatcgattccttgca

SEQ ID NO: 155491 - DNA, 25 bp, probe
aagtgcctacatggtgattctcttg

SEQ ID NO: 155492 - DNA, 25 bp, probe
aagtgcctacatggtgattctcttg

SEQ ID NO: 155493 - DNA, 25 bp, probe
aagtgactatattgtgatgcccaga

SEQ ID NO: 155494 - DNA, 25 bp, probe
aaggatgccatatgctgttgccaac

SEQ ID NO: 155495 - DNA, 25 bp, probe
aagggagtagccttgtccagacgaa

SEQ ID NO: 155496 - DNA, 25 bp, probe
aagggctcggccttaaggagctgaa

SEQ ID NO: 155497 - DNA, 25 bp, probe
aaggggcgcgaggtcgattgggaag

SEQ ID NO: 155498 - DNA, 25 bp, probe
aaggaggactacgtcgatctaggtg

SEQ ID NO: 155499 - DNA, 25 bp, probe
aagtgattaaacgtgcagactatgc

SEQ ID NO: 155500 - DNA, 25 bp, probe
aagtatttgaagccatcaacatcac

SEQ ID NO: 155501 - DNA, 25 bp, probe
aagtgttcttaccatatacatatac

SEQ ID NO: 155502 - DNA, 25 bp, probe
cactgttttgtacaaccttactgca

SEQ ID NO: 155503 - DNA, 25 bp, probe
cacggtttaagcaccactggactac

SEQ ID NO: 155504 - DNA, 25 bp, probe
cacggagttcaagttccctcagatt

SEQ ID NO: 155505 - DNA, 25 bp, probe
aaggagtcaacagtgtaactaaatt

SEQ ID NO: 155506 - DNA, 25 bp, probe
aagggactagcagttcagccgtttt

SEQ ID NO: 155507 - DNA, 25 bp, probe
aagggcaatggcgagtccctgtggc

SEQ ID NO: 155508 - DNA, 25 bp, probe
aaggaaagcagcgatggcgcccatg

SEQ ID NO: 155509 - DNA, 25 bp, probe
aagggaagcatccaggttccggact

SEQ ID NO: 155510 - DNA, 25 bp, probe
aagtgagaacactgtattcctacaa

SEQ ID NO: 155511 - DNA, 25 bp, probe
aagggaagcagccaaactttgatta

SEQ ID NO: 155512 - DNA, 25 bp, probe
aaggggcagcccaagacatgcttta

SEQ ID NO: 155513 - DNA, 25 bp, probe
aagtctgcgaccatcgtcatgttaa

SEQ ID NO: 155514 - DNA, 25 bp, probe
aagtatgtcgccattgttgtacaac

SEQ ID NO: 155515 - DNA, 25 bp, probe
aagtatgtcgccattgttgtacaac

SEQ ID NO: 155516 - DNA, 25 bp, probe
aagtcatcctgggtatgggctacaa

SEQ ID NO: 155517 - DNA, 25 bp, probe
aagtgcccatggtggcggcgaagaa

SEQ ID NO: 155518 - DNA, 25 bp, probe
aaggccgtggagcttggggagaaag

SEQ ID NO: 155519 - DNA, 25 bp, probe
aagtaagtggagcatttggaaggaa

SEQ ID NO: 155520 - DNA, 25 bp, probe
aagtaagtggagcatttggaaggaa

SEQ ID NO: 155521 - DNA, 25 bp, probe
aagtaggaggatcatttatgcttgg

SEQ ID NO: 155522 - DNA, 25 bp, probe
aagtagcttcgggtcttgatgcttg

SEQ ID NO: 155523 - DNA, 25 bp, probe
aagtgagttctgctatctctacatt

SEQ ID NO: 155524 - DNA, 25 bp, probe
aagtggtggctgccaatgacctcaa

SEQ ID NO: 155525 - DNA, 25 bp, probe
aagtggacagcgccagaagccatta

SEQ ID NO: 155526 - DNA, 25 bp, probe
aagtggcaggtccaatcccatttaa

SEQ ID NO: 155527 - DNA, 25 bp, probe
aagtgcgctggctcacattatttat

SEQ ID NO: 155528 - DNA, 25 bp, probe
aagtgcgctggctcacattatttat

SEQ ID NO: 155529 - DNA, 25 bp, probe
aagtcagtagcgccacatctggttt

SEQ ID NO: 155530 - DNA, 25 bp, probe
aagtcagatagtcttctgctgctgg

SEQ ID NO: 155531 - DNA, 25 bp, probe
aagtcagatagtcttctgctgctgg

SEQ ID NO: 155532 - DNA, 25 bp, probe
aagtggattggctttgtgcttgggg

SEQ ID NO: 155533 - DNA, 25 bp, probe
aagtcagatctgatttgcttacggc

SEQ ID NO: 155534 - DNA, 25 bp, probe
aagtcagatctgatttgcttacggc

SEQ ID NO: 155535 - DNA, 25 bp, probe
aagtacatctgtacatgactgtata

SEQ ID NO: 155536 - DNA, 25 bp, probe
aagtgagcattttctagttcatatg

SEQ ID NO: 155537 - DNA, 25 bp, probe
aagtgtgcaatcgctatgagtttct

SEQ ID NO: 155538 - DNA, 25 bp, probe
aagtggcagacagcgggtatgttcc

SEQ ID NO: 155539 - DNA, 25 bp, probe
aagtgatgcagtttcagggtatgaa

SEQ ID NO: 155540 - DNA, 25 bp, probe
aagtgatgcagtttcagggtatgaa

SEQ ID NO: 155541 - DNA, 25 bp, probe
aagtgatgcgtatttctgagttatg

SEQ ID NO: 155542 - DNA, 25 bp, probe
aagtgacaatgcaatttgaattaga

SEQ ID NO: 155543 - DNA, 25 bp, probe
aagtcccagctacttgcaaggctga

SEQ ID NO: 155544 - DNA, 25 bp, probe
aagtccacagtgagagaagcgctga

SEQ ID NO: 155545 - DNA, 25 bp, probe
aagtggcacttcaatgagacggtgc

SEQ ID NO: 155546 - DNA, 25 bp, probe
aagtgtgatcattactggccagcgg

SEQ ID NO: 155547 - DNA, 25 bp, probe
aagtgtgcatgcaagaggtggcagg

SEQ ID NO: 155548 - DNA, 25 bp, probe
aagtgcaggcgactggaggcaggac

SEQ ID NO: 155549 - DNA, 25 bp, probe
aaggcagtcagattccaggctggag

SEQ ID NO: 155550 - DNA, 25 bp, probe
aagggtgtgtgcagcattgttggct

SEQ ID NO: 155551 - DNA, 25 bp, probe
aagtgcgggtcataagcttgcgttg

SEQ ID NO: 155552 - DNA, 25 bp, probe
aagtgcgggtcataagcttgcgttg

SEQ ID NO: 155553 - DNA, 25 bp, probe
aagtcgtttcattcaagttggtgta

SEQ ID NO: 155554 - DNA, 25 bp, probe
aagtggttcttacagtgctggtgtt

SEQ ID NO: 155555 - DNA, 25 bp, probe
aaggtgttgctaaaagtctgaggat

SEQ ID NO: 155556 - DNA, 25 bp, probe
aagtcttggctgaagaacttggcca

SEQ ID NO: 155557 - DNA, 25 bp, probe
aagtcctggctgggagaattgagct

SEQ ID NO: 155558 - DNA, 25 bp, probe
aagtactgcgtggtgtatgataaca

SEQ ID NO: 155559 - DNA, 25 bp, probe
aagtgccctgtgctaatgatgagac

SEQ ID NO: 155560 - DNA, 25 bp, probe
aagggcctggtcactgtagaagatg

SEQ ID NO: 155561 - DNA, 25 bp, probe
aagggcctggtcactgtagaagatg

SEQ ID NO: 155562 - DNA, 25 bp, probe
aagggccgtgatgacctgagacaag

SEQ ID NO: 155563 - DNA, 25 bp, probe
caaggtcctgggaactccaacaagg

SEQ ID NO: 155564 - DNA, 25 bp, probe
aaggtaccaaatttcccatcaagtg

SEQ ID NO: 155565 - DNA, 25 bp, probe
aagggaatcatactttccaaagatt

SEQ ID NO: 155566 - DNA, 25 bp, probe
aagggaatcatactttccaaagatt

SEQ ID NO: 155567 - DNA, 25 bp, probe
aagtggcctctttgtctaaaacaat

SEQ ID NO: 155568 - DNA, 25 bp, probe
aagtggcctctttgtctaaaacaat

SEQ ID NO: 155569 - DNA, 25 bp, probe
aagtccagctcccttgctaaaaata

SEQ ID NO: 155570 - DNA, 25 bp, probe
aaggccccctgtctgaagaaacaga

SEQ ID NO: 155571 - DNA, 25 bp, probe
aagtcccagatcttgcttaagaaat

SEQ ID NO: 155572 - DNA, 25 bp, probe
aagtccatcgagttcatcgataaag

SEQ ID NO: 155573 - DNA, 25 bp, probe
aagtcaattcagttctagaaataga

SEQ ID NO: 155574 - DNA, 25 bp, probe
aagtcaattcattaataaagccaaa

SEQ ID NO: 155575 - DNA, 25 bp, probe
aagggcttcatatacaatcaggaga

SEQ ID NO: 155576 - DNA, 25 bp, probe
aagggcgaattccagcacactggcg

SEQ ID NO: 155577 - DNA, 25 bp, probe
aagggggcattacgcaacttggtga

SEQ ID NO: 155578 - DNA, 25 bp, probe
aaggtggatctctggagccttggag

SEQ ID NO: 155579 - DNA, 25 bp, probe
aagtgtgtatccatggggcggggaa

SEQ ID NO: 155580 - DNA, 25 bp, probe
aagtgtgtatccatggggcggggaa

SEQ ID NO: 155581 - DNA, 25 bp, probe
aaggttattttgttggcattggtca

SEQ ID NO: 155582 - DNA, 25 bp, probe
aagggctataatttatgtcatttta

SEQ ID NO: 155583 - DNA, 25 bp, probe
aagtgtctaacttctgtgcctgtta

SEQ ID NO: 155584 - DNA, 25 bp, probe
aagtgtatggatccacagtcacgtg

SEQ ID NO: 155585 - DNA, 25 bp, probe
aaggagatggcagctcagatccgtg

SEQ ID NO: 155586 - DNA, 25 bp, probe
aaggtgctggacgcgaacagctgcc

SEQ ID NO: 155587 - DNA, 25 bp, probe
ccgggccgacgtggagaaggtcaga

SEQ ID NO: 155588 - DNA, 25 bp, probe
aaggacccaccatgcagaagtgtca

SEQ ID NO: 155589 - DNA, 25 bp, probe
aagggactaacatcgaagcatctga

SEQ ID NO: 155590 - DNA, 25 bp, probe
aaggtcctagccctcagaaactgta

SEQ ID NO: 155591 - DNA, 25 bp, probe
aaggtcctagccctcagaaactgta

SEQ ID NO: 155592 - DNA, 25 bp, probe
aaggcccagacccatggaaagtggc

SEQ ID NO: 155593 - DNA, 25 bp, probe
aagtcacccacccatatggaaattg

SEQ ID NO: 155594 - DNA, 25 bp, probe
aagtcagcccttagattcagataga

SEQ ID NO: 155595 - DNA, 25 bp, probe
aagtcacagctaaggattcaaagat

SEQ ID NO: 155596 - DNA, 25 bp, probe
aagtcaccattaggtcactcaagaa

SEQ ID NO: 155597 - DNA, 25 bp, probe
aagtgcagcctttgttattgcatac

SEQ ID NO: 155598 - DNA, 25 bp, probe
aagtgcaacttgcttcagtcatcct

SEQ ID NO: 155599 - DNA, 25 bp, probe
aagtcgactatgccttagacacatc

SEQ ID NO: 155600 - DNA, 25 bp, probe
aagtcagcattatctctgagtccac

SEQ ID NO: 155601 - DNA, 25 bp, probe
aagtcacagtgatgctgctgagcat

SEQ ID NO: 155602 - DNA, 25 bp, probe
aagtcatcagtccctctgaagacag

SEQ ID NO: 155603 - DNA, 25 bp, probe
aagtctcagtggcttcatctgtcaa

SEQ ID NO: 155604 - DNA, 25 bp, probe
aaggcatcggtgccacgcatcttca

SEQ ID NO: 155605 - DNA, 25 bp, probe
aagtcatgtgggccacacaagtgca

SEQ ID NO: 155606 - DNA, 25 bp, probe
aagtgacatgggccatatccgtgct

SEQ ID NO: 155607 - DNA, 25 bp, probe
aagtaaaggctattcatgaggatga

SEQ ID NO: 155608 - DNA, 25 bp, probe
aagtaaaggctattcatgaggatga

SEQ ID NO: 155609 - DNA, 25 bp, probe
aagtgattatgggaatcatagggaa

SEQ ID NO: 155610 - DNA, 25 bp, probe
aagtgtggcaggggccatgtggtaa

SEQ ID NO: 155611 - DNA, 25 bp, probe
aagtgctacagaaaccataagataa

SEQ ID NO: 155612 - DNA, 25 bp, probe
aagtgctacagaaaccataagataa

SEQ ID NO: 155613 - DNA, 25 bp, probe
aagtctcctgttcgctcataaagaa

SEQ ID NO: 155614 - DNA, 25 bp, probe
aagtgtcacagcctggttggaaaac

SEQ ID NO: 155615 - DNA, 25 bp, probe
aagtgctcagaccttgtctagttat

SEQ ID NO: 155616 - DNA, 25 bp, probe
aagtaatcactaatgctcaacaatt

SEQ ID NO: 155617 - DNA, 25 bp, probe
aagtaatcactaatgctcaacaatt

SEQ ID NO: 155618 - DNA, 25 bp, probe
aagtcaataagcttgccaacataat

SEQ ID NO: 155619 - DNA, 25 bp, probe
aagtggataagattacacagattat

SEQ ID NO: 155620 - DNA, 25 bp, probe
aagtgagaaaagttcaatactcttg

SEQ ID NO: 155621 - DNA, 25 bp, probe
aaggacaatgtacccaatcactctc

SEQ ID NO: 155622 - DNA, 25 bp, probe
aagtggaagtgcaaccaaccatcgc

SEQ ID NO: 155623 - DNA, 25 bp, probe
aaggagataggagctcatatctgac

SEQ ID NO: 155624 - DNA, 25 bp, probe
aagggaaagcccatatgctaccacc

SEQ ID NO: 155625 - DNA, 25 bp, probe
aagggaaagcccatatgctaccacc

SEQ ID NO: 155626 - DNA, 25 bp, probe
aagtgatgaacgctcgtaagacccc

SEQ ID NO: 155627 - DNA, 25 bp, probe
aagtgatgaacgctcgtaagacccc

SEQ ID NO: 155628 - DNA, 25 bp, probe
aaggtttgcctgtgtacagacctcc

SEQ ID NO: 155629 - DNA, 25 bp, probe
aagtgttggccatgaaccaaactca

SEQ ID NO: 155630 - DNA, 25 bp, probe
aatggttggcctgagcaacctagta

SEQ ID NO: 155631 - DNA, 25 bp, probe
aaggctttggcttatcaagcctagt

SEQ ID NO: 155632 - DNA, 25 bp, probe
aaggtgcatcgacattaacccactc

SEQ ID NO: 155633 - DNA, 25 bp, probe
aaggtcactgagacttttgcctcac

SEQ ID NO: 155634 - DNA, 25 bp, probe
aaggtcactgagacttttgcctcac

SEQ ID NO: 155635 - DNA, 25 bp, probe
aatctattggacaagttatgcctaa

SEQ ID NO: 155636 - DNA, 25 bp, probe
aagtcactgtgacagttctccagga

SEQ ID NO: 155637 - DNA, 25 bp, probe
aagtcactaatcacctgatcatagg

SEQ ID NO: 155638 - DNA, 25 bp, probe
aagtcactaatcacctgatcatagg

SEQ ID NO: 155639 - DNA, 25 bp, probe
aagtcaggaaatggggtatgcaggg

SEQ ID NO: 155640 - DNA, 25 bp, probe
aagtgaggaagggctggtgcaggga

SEQ ID NO: 155641 - DNA, 25 bp, probe
aaggatgagggggctcagcggggga

SEQ ID NO: 155642 - DNA, 25 bp, probe
aagggggatggccaaggggtgacat

SEQ ID NO: 155643 - DNA, 25 bp, probe
aagtggtcaaggcaacggcttccat

SEQ ID NO: 155644 - DNA, 25 bp, probe
aagtggtcaaggcaacggccttcca

SEQ ID NO: 155645 - DNA, 25 bp, probe
aagggccaaagctcaaatgcccacc

SEQ ID NO: 155646 - DNA, 25 bp, probe
aaggagggaagataattatgccacc

SEQ ID NO: 155647 - DNA, 25 bp, probe
aatggatgggggttacctagccctg

SEQ ID NO: 155648 - DNA, 25 bp, probe
aaggacgatgggttcctcaacggct

SEQ ID NO: 155649 - DNA, 25 bp, probe
aaggattaattcttcctctaccagc

SEQ ID NO: 155650 - DNA, 25 bp, probe
aaggtttttatgctttcaccagcca

SEQ ID NO: 155651 - DNA, 25 bp, probe
aaggtttttatgctttcaccagcca

SEQ ID NO: 155652 - DNA, 25 bp, probe
aagtcattttgtttgtgtccacaga

SEQ ID NO: 155653 - DNA, 25 bp, probe
aagtcttttgtttgtgaacactgat

SEQ ID NO: 155654 - DNA, 25 bp, probe
aagtctgtttttatcaatatgatgt

SEQ ID NO: 155655 - DNA, 25 bp, probe
aagtggttgttagttatagatgtct

SEQ ID NO: 155656 - DNA, 25 bp, probe
aagtggctatttgtaaagcagtgtt

SEQ ID NO: 155657 - DNA, 25 bp, probe
aagggctttatgttacaatattctt

SEQ ID NO: 155658 - DNA, 25 bp, probe
aaggagcttttgcagcatccatttt

SEQ ID NO: 155659 - DNA, 25 bp, probe
taaggaaatttgtagcatcaactag

SEQ ID NO: 155660 - DNA, 25 bp, probe
aaggaaatttgtagcatcaactaga

SEQ ID NO: 155661 - DNA, 25 bp, probe
caaagaaatttaatagtgccaagga

SEQ ID NO: 155662 - DNA, 25 bp, probe
aaggagcacattaaaattctcagag

SEQ ID NO: 155663 - DNA, 25 bp, probe
aagggcatcattaagtagaccaggt

SEQ ID NO: 155664 - DNA, 25 bp, probe
aattgtgaatttatggaaaggttgt

SEQ ID NO: 155665 - DNA, 25 bp, probe
aaggaggagttacgtagagagggtg

SEQ ID NO: 155666 - DNA, 25 bp, probe
aagtgagggccgagtgagagcgtgc

SEQ ID NO: 155667 - DNA, 25 bp, probe
aagtgagggccgagtgagagcgtgc

SEQ ID NO: 155668 - DNA, 25 bp, probe
aagtgagggtctgcggaggcttgca

SEQ ID NO: 155669 - DNA, 25 bp, probe
aagtgcagtctgatccaggaggccg

SEQ ID NO: 155670 - DNA, 25 bp, probe
aaggcagtccattcagggaattctg

SEQ ID NO: 155671 - DNA, 25 bp, probe
aaggcagtccattcagggaattctg

SEQ ID NO: 155672 - DNA, 25 bp, probe
aaggcattcactaaggttaattttg

SEQ ID NO: 155673 - DNA, 25 bp, probe
aaggctcctctatggttgtaatgtt

SEQ ID NO: 155674 - DNA, 25 bp, probe
aagtgccttctaggtgcttggtggt

SEQ ID NO: 155675 - DNA, 25 bp, probe
aagtgccttctaggtgcttggtggt

SEQ ID NO: 155676 - DNA, 25 bp, probe
caagctcctttaggactgggtggat

SEQ ID NO: 155677 - DNA, 25 bp, probe
aagtcctttgatgaaagcactgcta

SEQ ID NO: 155678 - DNA, 25 bp, probe
aagtcctttgatgaaagcactgcta

SEQ ID NO: 155679 - DNA, 25 bp, probe
aagtcttttaagtacatgagtgctt

SEQ ID NO: 155680 - DNA, 25 bp, probe
aagtcatttatgagacagctcatgg

SEQ ID NO: 155681 - DNA, 25 bp, probe
aagtcttctgagagctcctgaggaa

SEQ ID NO: 155682 - DNA, 25 bp, probe
aagtgcttcaagaccccaggtgaaa

SEQ ID NO: 155683 - DNA, 25 bp, probe
aaggaggccaactccaaggaaagct

SEQ ID NO: 155684 - DNA, 25 bp, probe
aagggaccagaagccaaggaatgtg

SEQ ID NO: 155685 - DNA, 25 bp, probe
aagggaccagaagccaaggaatgtg

SEQ ID NO: 155686 - DNA, 25 bp, probe
aagggacaccctaataaagcaatcg

SEQ ID NO: 155687 - DNA, 25 bp, probe
aagggatgacccatttaaggacagc

SEQ ID NO: 155688 - DNA, 25 bp, probe
aaggattaccccatatacatgtgac

SEQ ID NO: 155689 - DNA, 25 bp, probe
aaggagttgacccatataaattatc

SEQ ID NO: 155690 - DNA, 25 bp, probe
aaggagcttggcctgaaacttccac

SEQ ID NO: 155691 - DNA, 25 bp, probe
caacggggagccccaaatgtccacg

SEQ ID NO: 155692 - DNA, 25 bp, probe
aaggaagtgatccccgaagtctacg

SEQ ID NO: 155693 - DNA, 25 bp, probe
aaggaatggaccacttcttgtacgg

SEQ ID NO: 155694 - DNA, 25 bp, probe
aaggacaaaggcaacttcctgaccg

SEQ ID NO: 155695 - DNA, 25 bp, probe
aaggctaaagaggagcagtcctatg

SEQ ID NO: 155696 - DNA, 25 bp, probe
aagtgcaaaaatgtggtcccagtgt

SEQ ID NO: 155697 - DNA, 25 bp, probe
aagtggagaagagctatccccgatg

SEQ ID NO: 155698 - DNA, 25 bp, probe
aagtgaagaagcactatcgccgcgc

SEQ ID NO: 155699 - DNA, 25 bp, probe
aagtgaagaagcactatcgccgcgc

SEQ ID NO: 155700 - DNA, 25 bp, probe
aaggagaaagccttcattgccacgc

SEQ ID NO: 155701 - DNA, 25 bp, probe
aagtggaaagccttctccacctgtg

SEQ ID NO: 155702 - DNA, 25 bp, probe
aaggtgacgacctcatcctggagat

SEQ ID NO: 155703 - DNA, 25 bp, probe
aatggtacaacctctttagaagaca

SEQ ID NO: 155704 - DNA, 25 bp, probe
aatggtacaacctctttagaagaca

SEQ ID NO: 155705 - DNA, 25 bp, probe
aagggccaagcctctgttaaagtca

SEQ ID NO: 155706 - DNA, 25 bp, probe
aaggactcaaacgcgtggaaaatat

SEQ ID NO: 155707 - DNA, 25 bp, probe
aaggaccaccttgtgggatcacctt

SEQ ID NO: 155708 - DNA, 25 bp, probe
aagggcttctttgagctgttccctt

SEQ ID NO: 155709 - DNA, 25 bp, probe
aagtgttttcatattgcttctccct

SEQ ID NO: 155710 - DNA, 25 bp, probe
aagtgtattctcttgttctgtcagc

SEQ ID NO: 155711 - DNA, 25 bp, probe
aaggttttcctaatcgatcgcttct

SEQ ID NO: 155712 - DNA, 25 bp, probe
aaggttttcctaatcgatcgcttct

SEQ ID NO: 155713 - DNA, 25 bp, probe
aatgcttattagcctaaaatggcct

SEQ ID NO: 155714 - DNA, 25 bp, probe
aatgggttcgtttcagaagtgcctc

SEQ ID NO: 155715 - DNA, 25 bp, probe
aaggaggcttttgagaggctcctgc

SEQ ID NO: 155716 - DNA, 25 bp, probe
aaggggttatccctgaaacctgcat

SEQ ID NO: 155717 - DNA, 25 bp, probe
aagggtgtttatcgtaacagttcat

SEQ ID NO: 155718 - DNA, 25 bp, probe
aagggtgtatagtgttcacaaactg

SEQ ID NO: 155719 - DNA, 25 bp, probe
aagtggatgtatattgctttaagca

SEQ ID NO: 155720 - DNA, 25 bp, probe
aagtgtgatgtgagttgttgttaag

SEQ ID NO: 155721 - DNA, 25 bp, probe
aagtgatgtgtgggcatttggcgtg

SEQ ID NO: 155722 - DNA, 25 bp, probe
aagtgattctgatgatactgctagg

SEQ ID NO: 155723 - DNA, 25 bp, probe
aagtgattctgatgatactgctagg

SEQ ID NO: 155724 - DNA, 25 bp, probe
aagtgctttgcattgaatttgggat

SEQ ID NO: 155725 - DNA, 25 bp, probe
aatgtcttccactacttgatggcgt

SEQ ID NO: 155726 - DNA, 25 bp, probe
aagtgtccgcactgtaaagcagatg

SEQ ID NO: 155727 - DNA, 25 bp, probe
aaggacccagtaataaccaggagag

SEQ ID NO: 155728 - DNA, 25 bp, probe
aaggacccagtaataaccaggagag

SEQ ID NO: 155729 - DNA, 25 bp, probe
aaggaccaagagatccaccttcaga

SEQ ID NO: 155730 - DNA, 25 bp, probe
aaggagccttcgaatccaggttcaa

SEQ ID NO: 155731 - DNA, 25 bp, probe
aaggagccttcgaatccaggttcaa

SEQ ID NO: 155732 - DNA, 25 bp, probe
aaggagccttcgaatccaggttcaa

SEQ ID NO: 155733 - DNA, 25 bp, probe
aaggggttcgagtgcaagcctcact

SEQ ID NO: 155734 - DNA, 25 bp, probe
aaggagatgatgggaaggaacccca

SEQ ID NO: 155735 - DNA, 25 bp, probe
aaggtgtgaccacaggaatcctgga

SEQ ID NO: 155736 - DNA, 25 bp, probe
aagggctggtcacagaaggctctgg

SEQ ID NO: 155737 - DNA, 25 bp, probe
aagggctggtctctgctgaaggttg

SEQ ID NO: 155738 - DNA, 25 bp, probe
aagggccagtctgtgctggggttgt

SEQ ID NO: 155739 - DNA, 25 bp, probe
aagtgagccctctggaggtagttgg

SEQ ID NO: 155740 - DNA, 25 bp, probe
aagtgactgtgctaaaagtgttttg

SEQ ID NO: 155741 - DNA, 25 bp, probe
aagtgacgctcaatctacagtttat

SEQ ID NO: 155742 - DNA, 25 bp, probe
aagtgacgctcaatctacagtttat

SEQ ID NO: 155743 - DNA, 25 bp, probe
aagtgctgtcttactaagtcttgtt

SEQ ID NO: 155744 - DNA, 25 bp, probe
aagtctttatccaggtgaatgtgct

SEQ ID NO: 155745 - DNA, 25 bp, probe
aaggttgataccagcttcagtctct

SEQ ID NO: 155746 - DNA, 25 bp, probe
aaggtggaaccaggtggcaccctgc

SEQ ID NO: 155747 - DNA, 25 bp, probe
aaggatgtgaacaaggtcgcctact

SEQ ID NO: 155748 - DNA, 25 bp, probe
aatgtattgtacactgacgcgtccc

SEQ ID NO: 155749 - DNA, 25 bp, probe
aatgtattgtacactgacgcgtccc

SEQ ID NO: 155750 - DNA, 25 bp, probe
aagtgatattacagccacctcattc

SEQ ID NO: 155751 - DNA, 25 bp, probe
aagtgaagatacaggccactcttcc

SEQ ID NO: 155752 - DNA, 25 bp, probe
aaggaaaacttagctcctgcttttg

SEQ ID NO: 155753 - DNA, 25 bp, probe
aaggacagaacattgccttcctcgt

SEQ ID NO: 155754 - DNA, 25 bp, probe
aagtggcagacttctggcatcttcc

SEQ ID NO: 155755 - DNA, 25 bp, probe
aagtggcagacttctggcatcttcc

SEQ ID NO: 155756 - DNA, 25 bp, probe
aagtggcagactcaaccttcactgt

SEQ ID NO: 155757 - DNA, 25 bp, probe
aagtgcgagggggacatcttcacct

SEQ ID NO: 155758 - DNA, 25 bp, probe
aaggggaagggagtcgtctgccatt

SEQ ID NO: 155759 - DNA, 25 bp, probe
aaggggaaatgggctggtgggagtg

SEQ ID NO: 155760 - DNA, 25 bp, probe
aaggttaacagatacagctcggagt

SEQ ID NO: 155761 - DNA, 25 bp, probe
aaggttgacaagtgaagtttctcta

SEQ ID NO: 155762 - DNA, 25 bp, probe
aaggtctgtaactatggacttacct

SEQ ID NO: 155763 - DNA, 25 bp, probe
aaggtgccaatatcttccttacctc

SEQ ID NO: 155764 - DNA, 25 bp, probe
aaggtgccaatatcttccttacctc

SEQ ID NO: 155765 - DNA, 25 bp, probe
aagtgtccattatttaccttgaaca

SEQ ID NO: 155766 - DNA, 25 bp, probe
aagtgtccattatttaccttgaaca

SEQ ID NO: 155767 - DNA, 25 bp, probe
aaggtcatcatcgattctactttag

SEQ ID NO: 155768 - DNA, 25 bp, probe
aaggtcgctggatgctgatctaatc

SEQ ID NO: 155769 - DNA, 25 bp, probe
aagtgcctgctgcaagcacctattc

SEQ ID NO: 155770 - DNA, 25 bp, probe
aatgtccactacgagaactatggaa

SEQ ID NO: 155771 - DNA, 25 bp, probe
aagtcccgagcaatgaagtcatcca

SEQ ID NO: 155772 - DNA, 25 bp, probe
aagtcgccagcatttataactcacc

SEQ ID NO: 155773 - DNA, 25 bp, probe
aagtggtagctattcttcagtctcc

SEQ ID NO: 155774 - DNA, 25 bp, probe
aagtgcttatccaactctgaatctt

SEQ ID NO: 155775 - DNA, 25 bp, probe
aagtgcttatccaactctgaatctt

SEQ ID NO: 155776 - DNA, 25 bp, probe
aagtgcctgtccaatactgggttca

SEQ ID NO: 155777 - DNA, 25 bp, probe
aaggccttcatcctacaaggtcatc

SEQ ID NO: 155778 - DNA, 25 bp, probe
aagtgtttctgcatggtaatgtcat

SEQ ID NO: 155779 - DNA, 25 bp, probe
aagtgtgctgtggttcggaagtcta

SEQ ID NO: 155780 - DNA, 25 bp, probe
aagtgtgctgtggttcggaagtcta

SEQ ID NO: 155781 - DNA, 25 bp, probe
aagggcatgctggttcctaatccct

SEQ ID NO: 155782 - DNA, 25 bp, probe
aaggtcatgcagcttagctaatgcc

SEQ ID NO: 155783 - DNA, 25 bp, probe
aaggtcatccctgagctgaacggga

SEQ ID NO: 155784 - DNA, 25 bp, probe
aagggtccctgaggctaagtggcag

SEQ ID NO: 155785 - DNA, 25 bp, probe
aagggtatcctgtgctatgctggac

SEQ ID NO: 155786 - DNA, 25 bp, probe
aagggtatcctgtgctatgctggac

SEQ ID NO: 155787 - DNA, 25 bp, probe
aagggtaggatgttgcttctgaatc

SEQ ID NO: 155788 - DNA, 25 bp, probe
aaggtggaggctatgctttgggggg

SEQ ID NO: 155789 - DNA, 25 bp, probe
aaggggaggctgctgcattgtgggt

SEQ ID NO: 155790 - DNA, 25 bp, probe
aagggaggagcatttcatttggagt

SEQ ID NO: 155791 - DNA, 25 bp, probe
aagtgggaacacatcaatctgggct

SEQ ID NO: 155792 - DNA, 25 bp, probe
aagtgggagatagatccatctgagt

SEQ ID NO: 155793 - DNA, 25 bp, probe
aagtgggagatagatccatctgagt

SEQ ID NO: 155794 - DNA, 25 bp, probe
aagtgaggaagctttgccattagat

SEQ ID NO: 155795 - DNA, 25 bp, probe
aagtgaggcctgcttcacaacagac

SEQ ID NO: 155796 - DNA, 25 bp, probe
aagtggaaggcgatgcacaacagat

SEQ ID NO: 155797 - DNA, 25 bp, probe
aagtgtcaaggtctgatctgccagt

SEQ ID NO: 155798 - DNA, 25 bp, probe
aagtgtcccagtcatgatgctacca

SEQ ID NO: 155799 - DNA, 25 bp, probe
aagtgacacgaacgatctttgccat

SEQ ID NO: 155800 - DNA, 25 bp, probe
aagtgacagctgagcggctgagtcc

SEQ ID NO: 155801 - DNA, 25 bp, probe
aaggaagttacggctgctgtccgga

SEQ ID NO: 155802 - DNA, 25 bp, probe
aagtgcattttcactcagttccgga

SEQ ID NO: 155803 - DNA, 25 bp, probe
aagtgccttcttctcatattacgga

SEQ ID NO: 155804 - DNA, 25 bp, probe
aagtgccttcttctcatattacgga

SEQ ID NO: 155805 - DNA, 25 bp, probe
aagtgcctgtttgagtttactgaaa

SEQ ID NO: 155806 - DNA, 25 bp, probe
aaggcagctggttaagtttagctga

SEQ ID NO: 155807 - DNA, 25 bp, probe
aaggaggggacatgtctcccgattc

SEQ ID NO: 155808 - DNA, 25 bp, probe
aaggggagatactctccctgacatt

SEQ ID NO: 155809 - DNA, 25 bp, probe
aaggggagatactctccctgacatt

SEQ ID NO: 155810 - DNA, 25 bp, probe
aagtgtgcgcaaactaatcctcttc

SEQ ID NO: 155811 - DNA, 25 bp, probe
aagtgctgagagttctaacttcatt

SEQ ID NO: 155812 - DNA, 25 bp, probe
aagtgctgacacatcattcccagca

SEQ ID NO: 155813 - DNA, 25 bp, probe
aagggcatgatcagcatcatcgccg

SEQ ID NO: 155814 - DNA, 25 bp, probe
caacgtagatgcagtgcaccctggc

SEQ ID NO: 155815 - DNA, 25 bp, probe
aagtgaagcatcagctgcaccactg

SEQ ID NO: 155816 - DNA, 25 bp, probe
aagtgaagcagatgcgtgcacggag

SEQ ID NO: 155817 - DNA, 25 bp, probe
aagtgaagcgcatgcgcagcgggtg

SEQ ID NO: 155818 - DNA, 25 bp, probe
aagtgacgcgcatggtggtggtgat

SEQ ID NO: 155819 - DNA, 25 bp, probe
aagtgcctggcggtgggcatggtga

SEQ ID NO: 155820 - DNA, 25 bp, probe
aagtgcttcatctgtggaatcggca

SEQ ID NO: 155821 - DNA, 25 bp, probe
aaggcatccatgcgggagttggggt

SEQ ID NO: 155822 - DNA, 25 bp, probe
aaggtcttggggtagatggtgtgtg

SEQ ID NO: 155823 - DNA, 25 bp, probe
aaggtatgttaggaagaagctggct

SEQ ID NO: 155824 - DNA, 25 bp, probe
aaggttgtatgtgatcagaagctgc

SEQ ID NO: 155825 - DNA, 25 bp, probe
aaggttcctgtgtattgcaaggtac

SEQ ID NO: 155826 - DNA, 25 bp, probe
aaggtcccgtcgtagcaattatatt

SEQ ID NO: 155827 - DNA, 25 bp, probe
aaggacccgtgtcacatcgtgaata

SEQ ID NO: 155828 - DNA, 25 bp, probe
aaggatctccagtccacaagttgaa

SEQ ID NO: 155829 - DNA, 25 bp, probe
aatggatcgccatagaaagtcttgc

SEQ ID NO: 155830 - DNA, 25 bp, probe
aagggctgcgcttaaaacaccgctc

SEQ ID NO: 155831 - DNA, 25 bp, probe
aagggctgcgcttaaaacaccgctc

SEQ ID NO: 155832 - DNA, 25 bp, probe
aagtggctggtaacaacagcacttt

SEQ ID NO: 155833 - DNA, 25 bp, probe
aagggcagcctggacaacatgacct

SEQ ID NO: 155834 - DNA, 25 bp, probe
aagggcacctgtgctggttgcactt

SEQ ID NO: 155835 - DNA, 25 bp, probe
aagggcaggtgtcctacgatgacgt

SEQ ID NO: 155836 - DNA, 25 bp, probe
aagggcaggtagctgatgctaagtt

SEQ ID NO: 155837 - DNA, 25 bp, probe
aagggggtgagtggtgccagttgcc

SEQ ID NO: 155838 - DNA, 25 bp, probe
aagtgggggcaaggcagtagtggac

SEQ ID NO: 155839 - DNA, 25 bp, probe
caagggtcgagctggggcagtggag

SEQ ID NO: 155840 - DNA, 25 bp, probe
caagggtcgagctggggcagtggag

SEQ ID NO: 155841 - DNA, 25 bp, probe
aagtggagcttctgagggatgcagg

SEQ ID NO: 155842 - DNA, 25 bp, probe
aagtgaacagtctgaggagccgcga

SEQ ID NO: 155843 - DNA, 25 bp, probe
aagtggaagtagtggagcccctgct

SEQ ID NO: 155844 - DNA, 25 bp, probe
aagggagattcgggaggccctctgt

SEQ ID NO: 155845 - DNA, 25 bp, probe
aagggagattcgggaggccctctgt

SEQ ID NO: 155846 - DNA, 25 bp, probe
aagggaaatgcaggcacggcctcca

SEQ ID NO: 155847 - DNA, 25 bp, probe
aaggggagcatgaaacccaccactg

SEQ ID NO: 155848 - DNA, 25 bp, probe
aagtgctggacgaaagcctgaacaa

SEQ ID NO: 155849 - DNA, 25 bp, probe
aaggaagacgtgatgccaggaccag

SEQ ID NO: 155850 - DNA, 25 bp, probe
aaggaagactgcatgtccaaacgaa

SEQ ID NO: 155851 - DNA, 25 bp, probe
aatggaagcgggagactaacagaaa

SEQ ID NO: 155852 - DNA, 25 bp, probe
aatggaagcgtgttacttacaaaga

SEQ ID NO: 155853 - DNA, 25 bp, probe
aatggaagcgtgttacttacaaaga

SEQ ID NO: 155854 - DNA, 25 bp, probe
aatggaggggaatgctcagaaagga

SEQ ID NO: 155855 - DNA, 25 bp, probe
aaggagaagagttggcgaataagtg

SEQ ID NO: 155856 - DNA, 25 bp, probe
aagggaagagattagcatgaaaggt

SEQ ID NO: 155857 - DNA, 25 bp, probe
aagggaagagattagcatgaaaggt

SEQ ID NO: 155858 - DNA, 25 bp, probe
aagggcaaggattctctgtacgccc

SEQ ID NO: 155859 - DNA, 25 bp, probe
aagggaactgtgacatttcaagctc

SEQ ID NO: 155860 - DNA, 25 bp, probe
aagggaaaatgaagtcagcacactt

SEQ ID NO: 155861 - DNA, 25 bp, probe
aaggagaggttgacagtcatccaca

SEQ ID NO: 155862 - DNA, 25 bp, probe
aagggagcgattaccttgaccatcc

SEQ ID NO: 155863 - DNA, 25 bp, probe
aagtgagagcagatccctaaccatg

SEQ ID NO: 155864 - DNA, 25 bp, probe
aagggcagctattccttagaccagc

SEQ ID NO: 155865 - DNA, 25 bp, probe
aagggactctatccattgagcacat

SEQ ID NO: 155866 - DNA, 25 bp, probe
aagggactctatccattgagcacat

SEQ ID NO: 155867 - DNA, 25 bp, probe
aagtgaccctgacatgtgacatcta

SEQ ID NO: 155868 - DNA, 25 bp, probe
aagtggtgccgatatgtgagacgaa

SEQ ID NO: 155869 - DNA, 25 bp, probe
aaggcagtcaagttaagacactaac

SEQ ID NO: 155870 - DNA, 25 bp, probe
aaggcaccaattccaagaatccctc

SEQ ID NO: 155871 - DNA, 25 bp, probe
aaggaacagcaaccaagtaccctgc

SEQ ID NO: 155872 - DNA, 25 bp, probe
aaggaccgaaccaagtgagcctgcc

SEQ ID NO: 155873 - DNA, 25 bp, probe
aaggactttaccagcattcctgctg

SEQ ID NO: 155874 - DNA, 25 bp, probe
aaggactttaccagcattcctgctg

SEQ ID NO: 155875 - DNA, 25 bp, probe
aatggactgattaacggcaaagcta

SEQ ID NO: 155876 - DNA, 25 bp, probe
aaggacagacacaacggcaacatta

SEQ ID NO: 155877 - DNA, 25 bp, probe
aagtgactacacaaggactcctcga

SEQ ID NO: 155878 - DNA, 25 bp, probe
aagtgacatcaactcagagcctcct

SEQ ID NO: 155879 - DNA, 25 bp, probe
aagtgcacaagagcacgcaggcgct

SEQ ID NO: 155880 - DNA, 25 bp, probe
aagtgcacaagagcacgcaggcgct

SEQ ID NO: 155881 - DNA, 25 bp, probe
aagtgatgaagcgaatccagagcct

SEQ ID NO: 155882 - DNA, 25 bp, probe
aaggtgagactctctcatgtggcta

SEQ ID NO: 155883 - DNA, 25 bp, probe
aaggtggacatgtcctgaaggacaa

SEQ ID NO: 155884 - DNA, 25 bp, probe
aatgaggaactttcgaactgcaaat

SEQ ID NO: 155885 - DNA, 25 bp, probe
aatgaggaactttcgaactgcaaat

SEQ ID NO: 155886 - DNA, 25 bp, probe
aatgaaaagatctacgaactgcgtg

SEQ ID NO: 155887 - DNA, 25 bp, probe
aaggggagatggacgacacggtggg

SEQ ID NO: 155888 - DNA, 25 bp, probe
aagggttgtgtgaagacagcggatt

SEQ ID NO: 155889 - DNA, 25 bp, probe
aagggttttgattatatgcttcttg

SEQ ID NO: 155890 - DNA, 25 bp, probe
aaggtttatatttcatcttaattct

SEQ ID NO: 155891 - DNA, 25 bp, probe
aagtgctgcttcattccacttacaa

SEQ ID NO: 155892 - DNA, 25 bp, probe
aagtgtcttttgctgaccgcatgaa

SEQ ID NO: 155893 - DNA, 25 bp, probe
aagtgaattttgtgaccgatatcaa

SEQ ID NO: 155894 - DNA, 25 bp, probe
aagtgaatttcaaatgacctgatta

SEQ ID NO: 155895 - DNA, 25 bp, probe
aagtgagatatttttacctgcctaa

SEQ ID NO: 155896 - DNA, 25 bp, probe
aagtgagatatttttacctgcctaa

SEQ ID NO: 155897 - DNA, 25 bp, probe
aagtggttcgatttgagacggtcaa

SEQ ID NO: 155898 - DNA, 25 bp, probe
aagtggttcgatttgagacggtcaa

SEQ ID NO: 155899 - DNA, 25 bp, probe
aagtgtctcctgttgtgaggggctc

SEQ ID NO: 155900 - DNA, 25 bp, probe
aagtggtgacttttgagagaggaca

SEQ ID NO: 155901 - DNA, 25 bp, probe
aaggttcagttcacagagattgagg

SEQ ID NO: 155902 - DNA, 25 bp, probe
aaggccaccttaatatggaatggaa

SEQ ID NO: 155903 - DNA, 25 bp, probe
aaggaccctctgatgggacggtact

SEQ ID NO: 155904 - DNA, 25 bp, probe
aaggagtcgtgtatggtagggtaag

SEQ ID NO: 155905 - DNA, 25 bp, probe
aaggagatcaagaggcttgggggta

SEQ ID NO: 155906 - DNA, 25 bp, probe
aaggaccagtggttttggcgagtga

SEQ ID NO: 155907 - DNA, 25 bp, probe
aaggagtcagatgattttctgggac

SEQ ID NO: 155908 - DNA, 25 bp, probe
aagggacagatgagcttccggagac

SEQ ID NO: 155909 - DNA, 25 bp, probe
aagggactgtgccagatgttaggag

SEQ ID NO: 155910 - DNA, 25 bp, probe
aagggcacattgcccatggctggga

SEQ ID NO: 155911 - DNA, 25 bp, probe
aaggggcattctctggttggaggac

SEQ ID NO: 155912 - DNA, 25 bp, probe
aaggggcatagccattgtgtccgtc

SEQ ID NO: 155913 - DNA, 25 bp, probe
aagtgtggacagcttggacattgct

SEQ ID NO: 155914 - DNA, 25 bp, probe
aagtgtggccagaagtggaatcttt

SEQ ID NO: 155915 - DNA, 25 bp, probe
aagggctgtcaggatgggataattt

SEQ ID NO: 155916 - DNA, 25 bp, probe
aagggctgtcaggatgggataattt

SEQ ID NO: 155917 - DNA, 25 bp, probe
aagtgagctgaagcgcaggtcaatt

SEQ ID NO: 155918 - DNA, 25 bp, probe
aaggagctaagccatgcaaatcaaa

SEQ ID NO: 155919 - DNA, 25 bp, probe
aaggagctaagccatgcaaatcaaa

SEQ ID NO: 155920 - DNA, 25 bp, probe
aagggctcaggcaagtatcagatgg

SEQ ID NO: 155921 - DNA, 25 bp, probe
aagggctcaggcaagtatcagatgg

SEQ ID NO: 155922 - DNA, 25 bp, probe
aagggctgcatcactgttatagggg

SEQ ID NO: 155923 - DNA, 25 bp, probe
aagggctcaagactttctaactggg

SEQ ID NO: 155924 - DNA, 25 bp, probe
aagggcaaggagtttattacaatgt

SEQ ID NO: 155925 - DNA, 25 bp, probe
aagggcaaggagtttattacaatgt

SEQ ID NO: 155926 - DNA, 25 bp, probe
aagggacggtgagttcaattcactt

SEQ ID NO: 155927 - DNA, 25 bp, probe
aagggacggtgagttcaattcactt

SEQ ID NO: 155928 - DNA, 25 bp, probe
aagggacccatagatcacagctact

SEQ ID NO: 155929 - DNA, 25 bp, probe
aagggctatgcctaggcaaactact

SEQ ID NO: 155930 - DNA, 25 bp, probe
aataggtgacaacggcaaaccatcc

SEQ ID NO: 155931 - DNA, 25 bp, probe
aatgatggtgacagcctgcagtaca

SEQ ID NO: 155932 - DNA, 25 bp, probe
aagggatgaagacctgcagtgagcc

SEQ ID NO: 155933 - DNA, 25 bp, probe
aagtggtcaaggagctgtggccaca

SEQ ID NO: 155934 - DNA, 25 bp, probe
aagtggacagcgcctgaggcggcca

SEQ ID NO: 155935 - DNA, 25 bp, probe
aagggaacgacattgccctgctcaa

SEQ ID NO: 155936 - DNA, 25 bp, probe
caaggtcaaccagtacccttacata

SEQ ID NO: 155937 - DNA, 25 bp, probe
aaggtcaaccagtacccttacatat

SEQ ID NO: 155938 - DNA, 25 bp, probe
aaggaaatacaatccctctgaagaa

SEQ ID NO: 155939 - DNA, 25 bp, probe
aaggaactccaagggccacaggagc

SEQ ID NO: 155940 - DNA, 25 bp, probe
aaggaattccaagggccacatgcga

SEQ ID NO: 155941 - DNA, 25 bp, probe
aaggtcatagccaaggtaactgcaa

SEQ ID NO: 155942 - DNA, 25 bp, probe
gaatgagattttagggtacccaaca

SEQ ID NO: 155943 - DNA, 25 bp, probe
gaatgagattttagggtacccaaca

SEQ ID NO: 155944 - DNA, 25 bp, probe
aagtgtattttgaatattcccaatt

SEQ ID NO: 155945 - DNA, 25 bp, probe
aagtgtattctaactgttccaataa

SEQ ID NO: 155946 - DNA, 25 bp, probe
aagggttctaacgagctcacactct

SEQ ID NO: 155947 - DNA, 25 bp, probe
aagggccctgaggaaggcacacttg

SEQ ID NO: 155948 - DNA, 25 bp, probe
aaggagccactggaaatggcccggc

SEQ ID NO: 155949 - DNA, 25 bp, probe
aaggagaacggcatctactccgtca

SEQ ID NO: 155950 - DNA, 25 bp, probe
aaggcagaactgtatttactccaca

SEQ ID NO: 155951 - DNA, 25 bp, probe
aaggtggagctgtttcatcactaaa

SEQ ID NO: 155952 - DNA, 25 bp, probe
aaggagggtaggtctgcattataac

SEQ ID NO: 155953 - DNA, 25 bp, probe
aaggggcccagaccatgattgaaca

SEQ ID NO: 155954 - DNA, 25 bp, probe
aaggatgcagctgagaaagttctaa

SEQ ID NO: 155955 - DNA, 25 bp, probe
aaggtcctgtgcaaatagtgtcaaa

SEQ ID NO: 155956 - DNA, 25 bp, probe
aaggtcctgtgcaaatagtgtcaaa

SEQ ID NO: 155957 - DNA, 25 bp, probe
aaggtcctgtgcaaatagtgtcaaa

SEQ ID NO: 155958 - DNA, 25 bp, probe
aaggtgcctatggagaagttcaact

SEQ ID NO: 155959 - DNA, 25 bp, probe
aaggtcactgtcagtctttgcacct

SEQ ID NO: 155960 - DNA, 25 bp, probe
aaggtcacgtgcggttcattgacta

SEQ ID NO: 155961 - DNA, 25 bp, probe
aagtgtaggtgatgtgccattccat

SEQ ID NO: 155962 - DNA, 25 bp, probe
aaggtagggctgcagcactgatgcc

SEQ ID NO: 155963 - DNA, 25 bp, probe
aaggtaggagtgtagctagcagcgt

SEQ ID NO: 155964 - DNA, 25 bp, probe
aagggatgccagtaagtctgcaggt

SEQ ID NO: 155965 - DNA, 25 bp, probe
aaggggacaggattgtctgctgcct

SEQ ID NO: 155966 - DNA, 25 bp, probe
aaggaggagcgctgtgatcgccatc

SEQ ID NO: 155967 - DNA, 25 bp, probe
aaggaggagcgctgtgatcgccatc

SEQ ID NO: 155968 - DNA, 25 bp, probe
aagggaggcagacttacctccctca

SEQ ID NO: 155969 - DNA, 25 bp, probe
aagtgggccaggttacctacatgaa

SEQ ID NO: 155970 - DNA, 25 bp, probe
aaggtattagatttactgctaatga

SEQ ID NO: 155971 - DNA, 25 bp, probe
aaggacagtacatctactgcttatg

SEQ ID NO: 155972 - DNA, 25 bp, probe
aagggcaagtatcctaagttagcac

SEQ ID NO: 155973 - DNA, 25 bp, probe
ctaggaaagataccgaagattagtg

SEQ ID NO: 155974 - DNA, 25 bp, probe
aaggagaaagcaccgacaatctttg

SEQ ID NO: 155975 - DNA, 25 bp, probe
aagtgtcaaacacagtcagattttg

SEQ ID NO: 155976 - DNA, 25 bp, probe
aaggattaccatcgaccttctgttg

SEQ ID NO: 155977 - DNA, 25 bp, probe
aaggagtagctcagacctgttttta

SEQ ID NO: 155978 - DNA, 25 bp, probe
aagtggaacatttagcctgttcatt

SEQ ID NO: 155979 - DNA, 25 bp, probe
aaggtggcacaggggcctgttcaac

SEQ ID NO: 155980 - DNA, 25 bp, probe
aaggaagctgccgaggctttcctag

SEQ ID NO: 155981 - DNA, 25 bp, probe
aaggagagctccaatgactccacct

SEQ ID NO: 155982 - DNA, 25 bp, probe
aaggaagacttatctcctgcctttg

SEQ ID NO: 155983 - DNA, 25 bp, probe
aaggataactgagagcaccggtgct

SEQ ID NO: 155984 - DNA, 25 bp, probe
aattgtaacaatctcactggaggcc

SEQ ID NO: 155985 - DNA, 25 bp, probe
aaggtacccatgttctcgataggcc

SEQ ID NO: 155986 - DNA, 25 bp, probe
aatgttgactttgtttcatactgcc

SEQ ID NO: 155987 - DNA, 25 bp, probe
aatgttactgtgtcacttttccctc

SEQ ID NO: 155988 - DNA, 25 bp, probe
aatgaggacatggatcctacctcct

SEQ ID NO: 155989 - DNA, 25 bp, probe
aagtggacactgtccacagctgctc

SEQ ID NO: 155990 - DNA, 25 bp, probe
aagtggacactgtccacagctgctc

SEQ ID NO: 155991 - DNA, 25 bp, probe
aaggtgtacatgtaccagctcttcc

SEQ ID NO: 155992 - DNA, 25 bp, probe
aaggctgtgaaagccactctggtgc

SEQ ID NO: 155993 - DNA, 25 bp, probe
aaggttacaagtggcacttcaatga

SEQ ID NO: 155994 - DNA, 25 bp, probe
aagggtgaaagtggtttagtgctag

SEQ ID NO: 155995 - DNA, 25 bp, probe
aaggagctgaacgtgtttggaccta

SEQ ID NO: 155996 - DNA, 25 bp, probe
aagggtggaggtgatatggcattct

SEQ ID NO: 155997 - DNA, 25 bp, probe
aaggcggaacaataagcagcatatc

SEQ ID NO: 155998 - DNA, 25 bp, probe
aagggcggcaagtgaggatgcagtc

SEQ ID NO: 155999 - DNA, 25 bp, probe
aatgggggcaactgtggaaccaggg

SEQ ID NO: 156000 - DNA, 25 bp, probe
taacggggacaacgggaccatctag

SEQ ID NO: 156001 - DNA, 25 bp, probe
aaggtgaggacatctgggtctcatt

SEQ ID NO: 156002 - DNA, 25 bp, probe
aaggtgaggacatctgggtctcatt

SEQ ID NO: 156003 - DNA, 25 bp, probe
aaggtgatagaagtcgggccctgaa

SEQ ID NO: 156004 - DNA, 25 bp, probe
aaggtgcatacattcagagggccac

SEQ ID NO: 156005 - DNA, 25 bp, probe
aaggctgcaacaaagcaagtcaaca

SEQ ID NO: 156006 - DNA, 25 bp, probe
aaggctccagaatcgtgtaccaggc

SEQ ID NO: 156007 - DNA, 25 bp, probe
aaggctccagaatcgtgtaccaggc

SEQ ID NO: 156008 - DNA, 25 bp, probe
aaggtacaaaatcgtgaatctcagt

SEQ ID NO: 156009 - DNA, 25 bp, probe
aaggtactaatttgtagctgctctg

SEQ ID NO: 156010 - DNA, 25 bp, probe
aaggtcagaaaacatatgctccatc

SEQ ID NO: 156011 - DNA, 25 bp, probe
aaggtcagaaaacatatgctccatc

SEQ ID NO: 156012 - DNA, 25 bp, probe
aaggcaaaccagcaattgcccatcg

SEQ ID NO: 156013 - DNA, 25 bp, probe
aaggatgaactcctaatgccctctg

SEQ ID NO: 156014 - DNA, 25 bp, probe
aagggaagtaatcagcccatctgtt

SEQ ID NO: 156015 - DNA, 25 bp, probe
aagtgtgaacaaatcaatgccagat

SEQ ID NO: 156016 - DNA, 25 bp, probe
aaggttctcttcaagtcgcagatag

SEQ ID NO: 156017 - DNA, 25 bp, probe
aaggttgtgcctacgttgcagggaa

SEQ ID NO: 156018 - DNA, 25 bp, probe
aaggattggcttgaattccatggaa

SEQ ID NO: 156019 - DNA, 25 bp, probe
aaggtatcgttggcagttctcgggt

SEQ ID NO: 156020 - DNA, 25 bp, probe
aaggttcgtgtggagttgtgtgtgg

SEQ ID NO: 156021 - DNA, 25 bp, probe
aaggttctggaggcccatttgggag

SEQ ID NO: 156022 - DNA, 25 bp, probe
aaggggctagaggcctgatggttag

SEQ ID NO: 156023 - DNA, 25 bp, probe
aagggagaacatggccaatagtcat

SEQ ID NO: 156024 - DNA, 25 bp, probe
aaggggaaatcagcaaagttatcag

SEQ ID NO: 156025 - DNA, 25 bp, probe
aagtgggaacttagagataattata

SEQ ID NO: 156026 - DNA, 25 bp, probe
aaggcttaattgtggaaagctaagt

SEQ ID NO: 156027 - DNA, 25 bp, probe
aaggcttaattgtggaaagctaagt

SEQ ID NO: 156028 - DNA, 25 bp, probe
taaccctaggcgtggaagagaaaat

SEQ ID NO: 156029 - DNA, 25 bp, probe
aatcacgccaggtggccacaaaaca

SEQ ID NO: 156030 - DNA, 25 bp, probe
aatcacgccaggtggccacaaaaca

SEQ ID NO: 156031 - DNA, 25 bp, probe
aataacagaaaacccagcaaacact

SEQ ID NO: 156032 - DNA, 25 bp, probe
aatagaagtctatcgatccaaaagt

SEQ ID NO: 156033 - DNA, 25 bp, probe
aatagaagtctatcgatccaaaagt

SEQ ID NO: 156034 - DNA, 25 bp, probe
aaggaggcttgctggacctaaaatc

SEQ ID NO: 156035 - DNA, 25 bp, probe
aagggtcttcttggcagcttaacat

SEQ ID NO: 156036 - DNA, 25 bp, probe
aatctggtgcttcctgaccaaaaag

SEQ ID NO: 156037 - DNA, 25 bp, probe
aagggatgattgccaacaggaaaag

SEQ ID NO: 156038 - DNA, 25 bp, probe
aagggcaatcgggaaggagcacaag

SEQ ID NO: 156039 - DNA, 25 bp, probe
aaggtgccacgttacaagaggcaag

SEQ ID NO: 156040 - DNA, 25 bp, probe
aaggtgccacgttacaagaggcaag

SEQ ID NO: 156041 - DNA, 25 bp, probe
aagggcaccgtttcaaggtggatgt

SEQ ID NO: 156042 - DNA, 25 bp, probe
cttggtaccgtatcaagctctttcc

SEQ ID NO: 156043 - DNA, 25 bp, probe
gctttaaccggatcgacattccacc

SEQ ID NO: 156044 - DNA, 25 bp, probe
gttccaaaagggtgacagtgtggcc

SEQ ID NO: 156045 - DNA, 25 bp, probe
cttcctaaaactctatcaggtccca

SEQ ID NO: 156046 - DNA, 25 bp, probe
ttttcaaggaactccaagggccaca

SEQ ID NO: 156047 - DNA, 25 bp, probe
tttaaagggactcaaggtgcctgcc

SEQ ID NO: 156048 - DNA, 25 bp, probe
cttcaaagacgaggtaaggtgcaag

SEQ ID NO: 156049 - DNA, 25 bp, probe
cttgaaagactgtgtaggcccagaa

SEQ ID NO: 156050 - DNA, 25 bp, probe
aatcaaatcctgctttggcgacaaa

SEQ ID NO: 156051 - DNA, 25 bp, probe
aatggagacctgattcgggagatct

SEQ ID NO: 156052 - DNA, 25 bp, probe
aatgtttctcggaacgggaggctag

SEQ ID NO: 156053 - DNA, 25 bp, probe
ccagtttggagctcctggaaggtaa

SEQ ID NO: 156054 - DNA, 25 bp, probe
ccagttcgagggggcggaggaatat

SEQ ID NO: 156055 - DNA, 25 bp, probe
cactgcctaaacgggggaggacgca

SEQ ID NO: 156056 - DNA, 25 bp, probe
aaggtcaaaccggaggagagactca

SEQ ID NO: 156057 - DNA, 25 bp, probe
aatgtgtgcaaaagcccaaaggttc

SEQ ID NO: 156058 - DNA, 25 bp, probe
aatgattcgaaacccaaatagtctg

SEQ ID NO: 156059 - DNA, 25 bp, probe
aatgcattgtcatcatcccgaacgg

SEQ ID NO: 156060 - DNA, 25 bp, probe
aatgttagtactgcccatgactagt

SEQ ID NO: 156061 - DNA, 25 bp, probe
aatgtccgttgtatcacaaatcagt

SEQ ID NO: 156062 - DNA, 25 bp, probe
aaggccggtgtttgcggacatcagc

SEQ ID NO: 156063 - DNA, 25 bp, probe
aaggcccggagttagggctgagcca

SEQ ID NO: 156064 - DNA, 25 bp, probe
aatactgccctggtctagtgggagc

SEQ ID NO: 156065 - DNA, 25 bp, probe
aatactgccctggtctagtgggagc

SEQ ID NO: 156066 - DNA, 25 bp, probe
aatacgacagccgaactctgggcca

SEQ ID NO: 156067 - DNA, 25 bp, probe
aataagtagccctcactttcatgcc

SEQ ID NO: 156068 - DNA, 25 bp, probe
aataagtagccctcactttcatgcc

SEQ ID NO: 156069 - DNA, 25 bp, probe
cacaacgtttcctatccaaaatcct

SEQ ID NO: 156070 - DNA, 25 bp, probe
caacgtttcctatccaaaatccttg

SEQ ID NO: 156071 - DNA, 25 bp, probe
aaggtttacttctcagatgaacagt

SEQ ID NO: 156072 - DNA, 25 bp, probe
aaggtttacttctcagatgaacagt

SEQ ID NO: 156073 - DNA, 25 bp, probe
aagggtatatttaatgagcgaacag

SEQ ID NO: 156074 - DNA, 25 bp, probe
aatgaggacatttactataaaagca

SEQ ID NO: 156075 - DNA, 25 bp, probe
aatgattacattctcccttaagcag

SEQ ID NO: 156076 - DNA, 25 bp, probe
aatgattacattctcccttaagcag

SEQ ID NO: 156077 - DNA, 25 bp, probe
aatagaagacatttccggttgagag

SEQ ID NO: 156078 - DNA, 25 bp, probe
aaggagagggtttcggatgtgcaga

SEQ ID NO: 156079 - DNA, 25 bp, probe
aagggcaggtggttcagcgagccac

SEQ ID NO: 156080 - DNA, 25 bp, probe
aagggcaggtggttcagcgagccac

SEQ ID NO: 156081 - DNA, 25 bp, probe
aaggagcagcgggaacggagcttcg

SEQ ID NO: 156082 - DNA, 25 bp, probe
aaggccacggacgtgcggcagatat

SEQ ID NO: 156083 - DNA, 25 bp, probe
aaggcagcaaggtcgtagctgtgtt

SEQ ID NO: 156084 - DNA, 25 bp, probe
aagggcatgaggtcagaccaggatt

SEQ ID NO: 156085 - DNA, 25 bp, probe
aagggatgagtgaagaagctggctt

SEQ ID NO: 156086 - DNA, 25 bp, probe
aagggacatgtgggacgtgagccgg

SEQ ID NO: 156087 - DNA, 25 bp, probe
aatggcgaagtccggcaaggccagg

SEQ ID NO: 156088 - DNA, 25 bp, probe
aaggagggtcaccgcatggacaagc

SEQ ID NO: 156089 - DNA, 25 bp, probe
aaggagggctccatgtcagaagatg

SEQ ID NO: 156090 - DNA, 25 bp, probe
aaggagggctccatgtcagaagatg

SEQ ID NO: 156091 - DNA, 25 bp, probe
aaggatgagtgggccattgagaaga

SEQ ID NO: 156092 - DNA, 25 bp, probe
aagtggcagctgctctatttaatga

SEQ ID NO: 156093 - DNA, 25 bp, probe
aatggtgcaggcacttttttggcgg

SEQ ID NO: 156094 - DNA, 25 bp, probe
aatggtgcaggcacttttttggcgg

SEQ ID NO: 156095 - DNA, 25 bp, probe
aaggctaggtttatttgggcagtat

SEQ ID NO: 156096 - DNA, 25 bp, probe
aatggttggttatattctggggctt

SEQ ID NO: 156097 - DNA, 25 bp, probe
aatggtgtggatatggttctgagtt

SEQ ID NO: 156098 - DNA, 25 bp, probe
aaggcctgtgacagaattcgctgtt

SEQ ID NO: 156099 - DNA, 25 bp, probe
aaggcttggagaggtatgtgcccct

SEQ ID NO: 156100 - DNA, 25 bp, probe
aaggctaggagccgaatgtgcccca

SEQ ID NO: 156101 - DNA, 25 bp, probe
aagggccggaggtcatggccttcat

SEQ ID NO: 156102 - DNA, 25 bp, probe
aagggccggaggtcatggccttcat

SEQ ID NO: 156103 - DNA, 25 bp, probe
aagggtgagggtgtggccttcacca

SEQ ID NO: 156104 - DNA, 25 bp, probe
aagggttggtgtgctggctttagac

SEQ ID NO: 156105 - DNA, 25 bp, probe
aagggttggtgtgctggctttagac

SEQ ID NO: 156106 - DNA, 25 bp, probe
aagggattgtttggcgccatcattg

SEQ ID NO: 156107 - DNA, 25 bp, probe
aagggagggcttggagaatatttct

SEQ ID NO: 156108 - DNA, 25 bp, probe
aaggtgaaacttgagagatctatat

SEQ ID NO: 156109 - DNA, 25 bp, probe
aaggtgaaacttgagagatctatat

SEQ ID NO: 156110 - DNA, 25 bp, probe
aaggctacaagctctaacacttctt

SEQ ID NO: 156111 - DNA, 25 bp, probe
aaggctacaagctctaacacttctt

SEQ ID NO: 156112 - DNA, 25 bp, probe
aaggtcacaaggccgaacattttca

SEQ ID NO: 156113 - DNA, 25 bp, probe
aaggtcacaaggccgaacattttca

SEQ ID NO: 156114 - DNA, 25 bp, probe
aaggctccagggatacagagttgtc

SEQ ID NO: 156115 - DNA, 25 bp, probe
agaaagccctaaaaagctgttgact

SEQ ID NO: 156116 - DNA, 25 bp, probe
aaggccctattttaacagttgatgt

SEQ ID NO: 156117 - DNA, 25 bp, probe
aaggcttccattgcaaatcgggtgt

SEQ ID NO: 156118 - DNA, 25 bp, probe
aaggttccatcagaacttggtttag

SEQ ID NO: 156119 - DNA, 25 bp, probe
aaggtcatccatgacaactttggta

SEQ ID NO: 156120 - DNA, 25 bp, probe
aaggatgccgcagaccattatctgg

SEQ ID NO: 156121 - DNA, 25 bp, probe
aaggtgctaaagagattgatatcgc

SEQ ID NO: 156122 - DNA, 25 bp, probe
aaggtgctaatctttgctgtcttca

SEQ ID NO: 156123 - DNA, 25 bp, probe
aaggatgatggcaaattggacctca

SEQ ID NO: 156124 - DNA, 25 bp, probe
aaggtgatcctaatagtgaagacat

SEQ ID NO: 156125 - DNA, 25 bp, probe
aaggtgatcctaatagtgaagacat

SEQ ID NO: 156126 - DNA, 25 bp, probe
aaggtgactcacattgttacacatg

SEQ ID NO: 156127 - DNA, 25 bp, probe
aaggtgatctcaagtctaataacat

SEQ ID NO: 156128 - DNA, 25 bp, probe
aaggatgatcgcccgataaagacgg

SEQ ID NO: 156129 - DNA, 25 bp, probe
aaggttgcagcctgcacaccatagc

SEQ ID NO: 156130 - DNA, 25 bp, probe
aagggtgacatctgtcctgtgagct

SEQ ID NO: 156131 - DNA, 25 bp, probe
aagggtacactgacttcagctactt

SEQ ID NO: 156132 - DNA, 25 bp, probe
aaggagctgacagtgcttctacaca

SEQ ID NO: 156133 - DNA, 25 bp, probe
aaggagtcagaccatttcagcacag

SEQ ID NO: 156134 - DNA, 25 bp, probe
aaggaggcgactcctagatccaggg

SEQ ID NO: 156135 - DNA, 25 bp, probe
aaggaggcgactcctagatccaggg

SEQ ID NO: 156136 - DNA, 25 bp, probe
aaggggcaggatctaagccaggcct

SEQ ID NO: 156137 - DNA, 25 bp, probe
aaggggcaggatctaagccaggcct

SEQ ID NO: 156138 - DNA, 25 bp, probe
aatgggtcggacaacaagctcaaga

SEQ ID NO: 156139 - DNA, 25 bp, probe
aaggtggtgtcagcaaactcaagtc

SEQ ID NO: 156140 - DNA, 25 bp, probe
aaggggttcctagtactgcaattcg

SEQ ID NO: 156141 - DNA, 25 bp, probe
aaggggttcctagtactgcaattcg

SEQ ID NO: 156142 - DNA, 25 bp, probe
aagggcatttttatactcagaactg

SEQ ID NO: 156143 - DNA, 25 bp, probe
aaggagcattcaactttgaccagga

SEQ ID NO: 156144 - DNA, 25 bp, probe
aaggaattaccttcagctgctagga

SEQ ID NO: 156145 - DNA, 25 bp, probe
aaggaattaccttcagctgctagga

SEQ ID NO: 156146 - DNA, 25 bp, probe
aaggaaaaccatacagcgccacaaa

SEQ ID NO: 156147 - DNA, 25 bp, probe
aaggagaagaccattgcggccaagc

SEQ ID NO: 156148 - DNA, 25 bp, probe
aaggaagatccctttgtccacaagt

SEQ ID NO: 156149 - DNA, 25 bp, probe
aagggatgtgcccttctcgtaaagt

SEQ ID NO: 156150 - DNA, 25 bp, probe
aaggtgaaccctactcagtgtgaag

SEQ ID NO: 156151 - DNA, 25 bp, probe
aaggtgaaccacttcttctgtgaca

SEQ ID NO: 156152 - DNA, 25 bp, probe
aaggagaaggcctttgctgcctgaa

SEQ ID NO: 156153 - DNA, 25 bp, probe
aagggacatgtctttggcttcagaa

SEQ ID NO: 156154 - DNA, 25 bp, probe
aaggggtggcaagtggcctcagaga

SEQ ID NO: 156155 - DNA, 25 bp, probe
aaggcggggaagtacagctcagagt

SEQ ID NO: 156156 - DNA, 25 bp, probe
aaggcgctgggaagggacatagggg

SEQ ID NO: 156157 - DNA, 25 bp, probe
aaggcgtgaggatgggaaggaggga

SEQ ID NO: 156158 - DNA, 25 bp, probe
aaggttggtgattatgtagggcagg

SEQ ID NO: 156159 - DNA, 25 bp, probe
aaggttgtggtgtagttggtctgta

SEQ ID NO: 156160 - DNA, 25 bp, probe
aagggttcattgtgttagcctgttc

SEQ ID NO: 156161 - DNA, 25 bp, probe
aatggagatttttttgtaccagctt

SEQ ID NO: 156162 - DNA, 25 bp, probe
aatgtttgacttcgtattgaccctt

SEQ ID NO: 156163 - DNA, 25 bp, probe
aatgtttaattgtttggatctgcac

SEQ ID NO: 156164 - DNA, 25 bp, probe
aaggatgggacttttgtcatttcaa

SEQ ID NO: 156165 - DNA, 25 bp, probe
aaggtgctggcacttattgcaattt

SEQ ID NO: 156166 - DNA, 25 bp, probe
aaggtgctgcctttttggatttata

SEQ ID NO: 156167 - DNA, 25 bp, probe
aaggagctgccgcaggtgtgtgttg

SEQ ID NO: 156168 - DNA, 25 bp, probe
aaggtatggctgctgtttgattatg

SEQ ID NO: 156169 - DNA, 25 bp, probe
aaggtatggctgctgtttgattatg

SEQ ID NO: 156170 - DNA, 25 bp, probe
aaggtgtctgtgctatttctgtaca

SEQ ID NO: 156171 - DNA, 25 bp, probe
aaggtgatcgtattcttccagtgaa

SEQ ID NO: 156172 - DNA, 25 bp, probe
aaggttttatattgtcatagtggtt

SEQ ID NO: 156173 - DNA, 25 bp, probe
aatggtattttttgtgaatggttgc

SEQ ID NO: 156174 - DNA, 25 bp, probe
aaggttgtgtagctgtgtcatgtat

SEQ ID NO: 156175 - DNA, 25 bp, probe
aaggtatgcttatttgagtttatca

SEQ ID NO: 156176 - DNA, 25 bp, probe
aaggtatgttgccagaagtatttcc

SEQ ID NO: 156177 - DNA, 25 bp, probe
aaggtatgttgccagaagtatttcc

SEQ ID NO: 156178 - DNA, 25 bp, probe
aaggtcatgttggcagaactcaagg

SEQ ID NO: 156179 - DNA, 25 bp, probe
aaggtctgtgtaagcagcagtctca

SEQ ID NO: 156180 - DNA, 25 bp, probe
aaggatgctgtgtagataagtaaga

SEQ ID NO: 156181 - DNA, 25 bp, probe
aaggattgctgctctccattaggag

SEQ ID NO: 156182 - DNA, 25 bp, probe
aaggatactttcggaagaggagcag

SEQ ID NO: 156183 - DNA, 25 bp, probe
aatggaacctacggacaggtgtaca

SEQ ID NO: 156184 - DNA, 25 bp, probe
aaggttcttcttgctcaggattaca

SEQ ID NO: 156185 - DNA, 25 bp, probe
aaggtgcacattttccacggaaaca

SEQ ID NO: 156186 - DNA, 25 bp, probe
aatggtgccattttcgaaggagcag

SEQ ID NO: 156187 - DNA, 25 bp, probe
aatggcagtagttctcaaatgggct

SEQ ID NO: 156188 - DNA, 25 bp, probe
aaggagaggttgacagtcatccaca

SEQ ID NO: 156189 - DNA, 25 bp, probe
aaggtgcaatttatgactccagaag

SEQ ID NO: 156190 - DNA, 25 bp, probe
aaggtgaagcttatcccactgggtt

SEQ ID NO: 156191 - DNA, 25 bp, probe
aaggtaatgaatctctccatctggg

SEQ ID NO: 156192 - DNA, 25 bp, probe
aagggattgtagcacaccagggagt

SEQ ID NO: 156193 - DNA, 25 bp, probe
aatggtgttcaagaaacgtgacagt

SEQ ID NO: 156194 - DNA, 25 bp, probe
cacagaccccgagaaactgatccag

SEQ ID NO: 156195 - DNA, 25 bp, probe
cacagaccccgagaaactgatccag

SEQ ID NO: 156196 - DNA, 25 bp, probe
aatgacccttgaagatattcagacc

SEQ ID NO: 156197 - DNA, 25 bp, probe
aaggttttgagtatatcaatcctct

SEQ ID NO: 156198 - DNA, 25 bp, probe
aaggttatctggaagttcagtcttt

SEQ ID NO: 156199 - DNA, 25 bp, probe
taaggtcttgggaggctttcaattg

SEQ ID NO: 156200 - DNA, 25 bp, probe
aaggactggggcagtttgctcaaga

SEQ ID NO: 156201 - DNA, 25 bp, probe
aaggcctggggaagttcctcataca

SEQ ID NO: 156202 - DNA, 25 bp, probe
aaggcttgtaaatttacccaatgca

SEQ ID NO: 156203 - DNA, 25 bp, probe
cacaggttgttatgtttggtcaaca

SEQ ID NO: 156204 - DNA, 25 bp, probe
aagggagttcattgatttggttgat

SEQ ID NO: 156205 - DNA, 25 bp, probe
aagggagtgtaattttgagcatatg

SEQ ID NO: 156206 - DNA, 25 bp, probe
aaggggtggattatatacattcaaa

SEQ ID NO: 156207 - DNA, 25 bp, probe
aatgggagttcctgagatacaacaa

SEQ ID NO: 156208 - DNA, 25 bp, probe
aatggctgccccgaggaagacaaca

SEQ ID NO: 156209 - DNA, 25 bp, probe
aaggtgctctccagtaactaactaa

SEQ ID NO: 156210 - DNA, 25 bp, probe
aaggataccccgagaatgaactgaa

SEQ ID NO: 156211 - DNA, 25 bp, probe
caagaaaatcccctggaagtactgg

SEQ ID NO: 156212 - DNA, 25 bp, probe
aaggaaagcaacatggaaaacagcc

SEQ ID NO: 156213 - DNA, 25 bp, probe
aaggctctacaacttggacaaacag

SEQ ID NO: 156214 - DNA, 25 bp, probe
aaggtcttcatccagatgccaaata

SEQ ID NO: 156215 - DNA, 25 bp, probe
aaggtggtatcttggccaacaaaca

SEQ ID NO: 156216 - DNA, 25 bp, probe
aaggggtcatcaatgctggcaagag

SEQ ID NO: 156217 - DNA, 25 bp, probe
aaggtgagtatgaggctgcacaggg

SEQ ID NO: 156218 - DNA, 25 bp, probe
aaggtgtgtttgcagtggatgggga

SEQ ID NO: 156219 - DNA, 25 bp, probe
aagggtactatatgtgggtagtatt

SEQ ID NO: 156220 - DNA, 25 bp, probe
aatagccaactatgggtttagttca

SEQ ID NO: 156221 - DNA, 25 bp, probe
aatgtgtcaaaatgggttaactgtg

SEQ ID NO: 156222 - DNA, 25 bp, probe
aaggtgataaattgggtcacagagg

SEQ ID NO: 156223 - DNA, 25 bp, probe
aaggaaggacaaggttcaaggctgt

SEQ ID NO: 156224 - DNA, 25 bp, probe
aaggacgagcccagtgtagttgtgt

SEQ ID NO: 156225 - DNA, 25 bp, probe
aaggaggacctgcgggaggtgctga

SEQ ID NO: 156226 - DNA, 25 bp, probe
aaggggaagcttcggagcctgtgta

SEQ ID NO: 156227 - DNA, 25 bp, probe
aaggggtgtttacgagcagctgtga

SEQ ID NO: 156228 - DNA, 25 bp, probe
aaggtggttatattggcaacctatt

SEQ ID NO: 156229 - DNA, 25 bp, probe
aagggggatgacatgtgactcctat

SEQ ID NO: 156230 - DNA, 25 bp, probe
aatgggggacctatgcagaagctat

SEQ ID NO: 156231 - DNA, 25 bp, probe
aaggcagggccacttttgaagtctt

SEQ ID NO: 156232 - DNA, 25 bp, probe
aaggcaggcatgctgattcctgaag

SEQ ID NO: 156233 - DNA, 25 bp, probe
aaggcagagcagggtacaccacggt

SEQ ID NO: 156234 - DNA, 25 bp, probe
aaggccaagtacacagcccagatgt

SEQ ID NO: 156235 - DNA, 25 bp, probe
aaggcgcagagcaactatcagggca

SEQ ID NO: 156236 - DNA, 25 bp, probe
aaggtggcagatgctaggaccaagg

SEQ ID NO: 156237 - DNA, 25 bp, probe
aagggggtggcttggtcacaacagc

SEQ ID NO: 156238 - DNA, 25 bp, probe
aaggctggggagagcttcacagagc

SEQ ID NO: 156239 - DNA, 25 bp, probe
aaggatgggaagggcgccagataca

SEQ ID NO: 156240 - DNA, 25 bp, probe
aaggatagacatacggagcagaata

SEQ ID NO: 156241 - DNA, 25 bp, probe
aaggctgtcatcactcgagcagaaa

SEQ ID NO: 156242 - DNA, 25 bp, probe
aaggatgctgtcaagcacctgcatg

SEQ ID NO: 156243 - DNA, 25 bp, probe
aaggttgtcatggcatctcttgcac

SEQ ID NO: 156244 - DNA, 25 bp, probe
aaggttgtcatggcatctcttgcac

SEQ ID NO: 156245 - DNA, 25 bp, probe
aaggctatgacagtctgctacgcaa

SEQ ID NO: 156246 - DNA, 25 bp, probe
aaggctcatcaagtcccgaggaaag

SEQ ID NO: 156247 - DNA, 25 bp, probe
aaggctctgaaacccgaggatgcca

SEQ ID NO: 156248 - DNA, 25 bp, probe
aaggtcaggactcatctgggcatgc

SEQ ID NO: 156249 - DNA, 25 bp, probe
aaggtcaggactcatctgggcatgc

SEQ ID NO: 156250 - DNA, 25 bp, probe
aaggtcaaggccaactgagaagcat

SEQ ID NO: 156251 - DNA, 25 bp, probe
aaggtcacatggtttcagagaaatt

SEQ ID NO: 156252 - DNA, 25 bp, probe
aaggtcagaagtaatcctgagaaat

SEQ ID NO: 156253 - DNA, 25 bp, probe
aatgctgtagaagtgagtttgtaaa

SEQ ID NO: 156254 - DNA, 25 bp, probe
aaggtgaaattccttggtcacaaga

SEQ ID NO: 156255 - DNA, 25 bp, probe
aaggatgcaaatatcttagtgacat

SEQ ID NO: 156256 - DNA, 25 bp, probe
aaggagcaatacatcgaagcatgtc

SEQ ID NO: 156257 - DNA, 25 bp, probe
aaggatagtagaatcgccactgtct

SEQ ID NO: 156258 - DNA, 25 bp, probe
aaggacgcgcaaatgcagcaagatg

SEQ ID NO: 156259 - DNA, 25 bp, probe
aaggagcccaagaatgcacaaagac

SEQ ID NO: 156260 - DNA, 25 bp, probe
aaggagctacggaagcacctcaacc

SEQ ID NO: 156261 - DNA, 25 bp, probe
aaggagcatcagccatgtagaccac

SEQ ID NO: 156262 - DNA, 25 bp, probe
aaggagcatcagccatgtagaccac

SEQ ID NO: 156263 - DNA, 25 bp, probe
aaggactcatgaccacagtccatgc

SEQ ID NO: 156264 - DNA, 25 bp, probe
aaggattgcataaagaatgccagat

SEQ ID NO: 156265 - DNA, 25 bp, probe
aaggcttatacagaggacatgatga

SEQ ID NO: 156266 - DNA, 25 bp, probe
aaggctttatcgggctgaactcagt

SEQ ID NO: 156267 - DNA, 25 bp, probe
aatgggtaacaggcctcaagcaagt

SEQ ID NO: 156268 - DNA, 25 bp, probe
aaggagggtcatggattcaagaaat

SEQ ID NO: 156269 - DNA, 25 bp, probe
aaggagttgccttgattacagagag

SEQ ID NO: 156270 - DNA, 25 bp, probe
aaggagttacatcttaacacaggca

SEQ ID NO: 156271 - DNA, 25 bp, probe
aaggtctatcctcttatcaaccgaa

SEQ ID NO: 156272 - DNA, 25 bp, probe
aatggtctatttgttcaggcaccga

SEQ ID NO: 156273 - DNA, 25 bp, probe
aaggtctgagttattacgctacatg

SEQ ID NO: 156274 - DNA, 25 bp, probe
aaggctttgagtatatcaacccatt

SEQ ID NO: 156275 - DNA, 25 bp, probe
aaggatttattgacttcatcggcca

SEQ ID NO: 156276 - DNA, 25 bp, probe
gattccgtttctactcctctgacga

SEQ ID NO: 156277 - DNA, 25 bp, probe
gaaccaggttcttgcgcgtctatcg

SEQ ID NO: 156278 - DNA, 25 bp, probe
aatgcctggttctgcggatccagga

SEQ ID NO: 156279 - DNA, 25 bp, probe
aatgctgtgggtttccaaccagggg

SEQ ID NO: 156280 - DNA, 25 bp, probe
aatttgggtgactagaacaacttga

SEQ ID NO: 156281 - DNA, 25 bp, probe
caatatcgagttccggaaagccttc

SEQ ID NO: 156282 - DNA, 25 bp, probe
aatgatccagcagttggtggcggcc

SEQ ID NO: 156283 - DNA, 25 bp, probe
aatacatgccgacgggcgctgaccc

SEQ ID NO: 156284 - DNA, 25 bp, probe
cagatgaagactccagccatgacct

SEQ ID NO: 156285 - DNA, 25 bp, probe
taattcgattgggggcccatcccga

SEQ ID NO: 156286 - DNA, 25 bp, probe
aattcaattgtggaccccaaagtga

SEQ ID NO: 156287 - DNA, 25 bp, probe
aaggacttgattacctccattcgga

SEQ ID NO: 156288 - DNA, 25 bp, probe
aaggtttgtgtagcttcatgaccaa

SEQ ID NO: 156289 - DNA, 25 bp, probe
aaggtttgtgtagcttcatgaccaa

SEQ ID NO: 156290 - DNA, 25 bp, probe
aaggcttattttgcttcacagtaaa

SEQ ID NO: 156291 - DNA, 25 bp, probe
aaggcttattttgcttcacagtaaa

SEQ ID NO: 156292 - DNA, 25 bp, probe
aaggctctagttgggctgaacatgt

SEQ ID NO: 156293 - DNA, 25 bp, probe
aaggattcagctttgttgcaacttc

SEQ ID NO: 156294 - DNA, 25 bp, probe
aaggatgtcttctagtaacactgtt

SEQ ID NO: 156295 - DNA, 25 bp, probe
aatgttctttcaagtgcaaagtaat

SEQ ID NO: 156296 - DNA, 25 bp, probe
aaggctcgtctcaaagatatcagta

SEQ ID NO: 156297 - DNA, 25 bp, probe
aaggtctcattggcaatatacgaat

SEQ ID NO: 156298 - DNA, 25 bp, probe
aaggcctcttgggatgtcagaaatc

SEQ ID NO: 156299 - DNA, 25 bp, probe
aaggacctgtgggtggagaccagcg

SEQ ID NO: 156300 - DNA, 25 bp, probe
aatggtgactttgtggaccgaggct

SEQ ID NO: 156301 - DNA, 25 bp, probe
aatggttctttgtggacctaggcag

SEQ ID NO: 156302 - DNA, 25 bp, probe
aataattttatgctggactctggac

SEQ ID NO: 156303 - DNA, 25 bp, probe
aaggattgcttaaggtactctggac

SEQ ID NO: 156304 - DNA, 25 bp, probe
aaggattgcttaaggtactctggac

SEQ ID NO: 156305 - DNA, 25 bp, probe
aatggctatttcaggattcttcgag

SEQ ID NO: 156306 - DNA, 25 bp, probe
aatggattctggcacgatggttcga

SEQ ID NO: 156307 - DNA, 25 bp, probe
aaggcagtagtggacagggttggaa

SEQ ID NO: 156308 - DNA, 25 bp, probe
aaggcatcattttcgagggtctaaa

SEQ ID NO: 156309 - DNA, 25 bp, probe
aaggctgttatatggaatgtctgta

SEQ ID NO: 156310 - DNA, 25 bp, probe
aaggcgatacacaagggatggattt

SEQ ID NO: 156311 - DNA, 25 bp, probe
aaggcccacaaaagccaggactctc

SEQ ID NO: 156312 - DNA, 25 bp, probe
aaggccattaaagctcaaggtgcat

SEQ ID NO: 156313 - DNA, 25 bp, probe
aaggcctgttcaactacaagcggct

SEQ ID NO: 156314 - DNA, 25 bp, probe
aatgtccttatcaacaaggagggcc

SEQ ID NO: 156315 - DNA, 25 bp, probe
aatgtgtttccgacataggagagtc

SEQ ID NO: 156316 - DNA, 25 bp, probe
aatggtctctacctaatggacctcc

SEQ ID NO: 156317 - DNA, 25 bp, probe
aatgaatttataccacattaccttc

SEQ ID NO: 156318 - DNA, 25 bp, probe
aatgtttgtctactgcacaagcctc

SEQ ID NO: 156319 - DNA, 25 bp, probe
aatgtgtatgccactgtcagtcctt

SEQ ID NO: 156320 - DNA, 25 bp, probe
aatgatgcttttgtgtgcacttgtt

SEQ ID NO: 156321 - DNA, 25 bp, probe
aaggatttgtcttctgccttgtgaa

SEQ ID NO: 156322 - DNA, 25 bp, probe
aaggcatatctgacaatccactcgt

SEQ ID NO: 156323 - DNA, 25 bp, probe
aaggcagactggtacctcgttaaga

SEQ ID NO: 156324 - DNA, 25 bp, probe
caaggcagactggtacctcgttaag

SEQ ID NO: 156325 - DNA, 25 bp, probe
aaggagacgctgacacttgtgtttg

SEQ ID NO: 156326 - DNA, 25 bp, probe
aaggagacgctgacacttgtgtttg

SEQ ID NO: 156327 - DNA, 25 bp, probe
caagtggtcaggagttgtttctgac

SEQ ID NO: 156328 - DNA, 25 bp, probe
aaggagctagagagtatattttata

SEQ ID NO: 156329 - DNA, 25 bp, probe
aatgggagcagacagtaatattacc

SEQ ID NO: 156330 - DNA, 25 bp, probe
aatgggagcagacagtaatattacc

SEQ ID NO: 156331 - DNA, 25 bp, probe
aatggaaaaccacatttgtgacgca

SEQ ID NO: 156332 - DNA, 25 bp, probe
aaggaacatagccctagtttaagag

SEQ ID NO: 156333 - DNA, 25 bp, probe
aatgtgactcaaggcctgctgttta

SEQ ID NO: 156334 - DNA, 25 bp, probe
aatggactcaaccctgtatggccag

SEQ ID NO: 156335 - DNA, 25 bp, probe
aaggaccagatccagcggctggtgc

SEQ ID NO: 156336 - DNA, 25 bp, probe
aaggaccagatcactgatgtgcact

SEQ ID NO: 156337 - DNA, 25 bp, probe
aaggaccagagaagctctcgcatcc

SEQ ID NO: 156338 - DNA, 25 bp, probe
aaggaccagagaagctctcgcatcc

SEQ ID NO: 156339 - DNA, 25 bp, probe
aaggaccagagaagctctcgcatcc

SEQ ID NO: 156340 - DNA, 25 bp, probe
aaggaccagagaagctctcgcatcc

SEQ ID NO: 156341 - DNA, 25 bp, probe
aaggagctcagaagatttccatcta

SEQ ID NO: 156342 - DNA, 25 bp, probe
aatggagcctcaagattcttcttta

SEQ ID NO: 156343 - DNA, 25 bp, probe
aaggtcctccagtgcttgaatatca

SEQ ID NO: 156344 - DNA, 25 bp, probe
aaggttctcaggtgttgccaaatat

SEQ ID NO: 156345 - DNA, 25 bp, probe
aaggacctcacgatggtgctgaaaa

SEQ ID NO: 156346 - DNA, 25 bp, probe
aatggaacttgctcgggttcaatta

SEQ ID NO: 156347 - DNA, 25 bp, probe
aaggaattctgctttcgtgtttttg

SEQ ID NO: 156348 - DNA, 25 bp, probe
aaggaattctgctttcgtgtttttg

SEQ ID NO: 156349 - DNA, 25 bp, probe
aaggcatttctctatatacatgttt

SEQ ID NO: 156350 - DNA, 25 bp, probe
aaggcttcttcattggtgctgttat

SEQ ID NO: 156351 - DNA, 25 bp, probe
aatgacttttactaggagattcagc

SEQ ID NO: 156352 - DNA, 25 bp, probe
aaggacttgtactagcagagagtcc

SEQ ID NO: 156353 - DNA, 25 bp, probe
aaggagcaagggcgcacagagcccc

SEQ ID NO: 156354 - DNA, 25 bp, probe
aaggagcaagggcgcacagagcccc

SEQ ID NO: 156355 - DNA, 25 bp, probe
aaggagcaagggcgcacagagcccc

SEQ ID NO: 156356 - DNA, 25 bp, probe
aaggagagtgggggccatgccccgc

SEQ ID NO: 156357 - DNA, 25 bp, probe
aaggagagggtggcggttccatcct

SEQ ID NO: 156358 - DNA, 25 bp, probe
aaggatgagggggttgtccagcaac

SEQ ID NO: 156359 - DNA, 25 bp, probe
aaggatgagggggttgtccagcaac

SEQ ID NO: 156360 - DNA, 25 bp, probe
aaggcatattgacggttctctcagc

SEQ ID NO: 156361 - DNA, 25 bp, probe
aaggatagcagatggttttcagtta

SEQ ID NO: 156362 - DNA, 25 bp, probe
aaggataaaacttctgttgctgtta

SEQ ID NO: 156363 - DNA, 25 bp, probe
aaggctaaaatgtttgtgtgcttta

SEQ ID NO: 156364 - DNA, 25 bp, probe
aaggtagaaatggtctctggcattg

SEQ ID NO: 156365 - DNA, 25 bp, probe
aatggtaatccagctcctggcgata

SEQ ID NO: 156366 - DNA, 25 bp, probe
aaggttacccacgacatgaggcagg

SEQ ID NO: 156367 - DNA, 25 bp, probe
aaggactcgctggacgacagcggca

SEQ ID NO: 156368 - DNA, 25 bp, probe
aaggacatcttctgccatgtcaggc

SEQ ID NO: 156369 - DNA, 25 bp, probe
aaggagactgtctgcagcttagggc

SEQ ID NO: 156370 - DNA, 25 bp, probe
aaggaggcatatcaacttgaggcca

SEQ ID NO: 156371 - DNA, 25 bp, probe
aaggaggcatatcaacttgaggcca

SEQ ID NO: 156372 - DNA, 25 bp, probe
aaggcggcttgaaaggtgcactgca

SEQ ID NO: 156373 - DNA, 25 bp, probe
aaggctgacataattcatggatcac

SEQ ID NO: 156374 - DNA, 25 bp, probe
aaggctgaatcatgtcagggagatt

SEQ ID NO: 156375 - DNA, 25 bp, probe
aaggagagttctgcagctggagact

SEQ ID NO: 156376 - DNA, 25 bp, probe
aaggaggtggagcagctggggctgg

SEQ ID NO: 156377 - DNA, 25 bp, probe
aatctgagcctgcagtgggggccga

SEQ ID NO: 156378 - DNA, 25 bp, probe
aatgtatgcctgcaaaaagctacaa

SEQ ID NO: 156379 - DNA, 25 bp, probe
aatggagagctatgtaacagataca

SEQ ID NO: 156380 - DNA, 25 bp, probe
aaggcacactgttgctatacagtta

SEQ ID NO: 156381 - DNA, 25 bp, probe
aaggcacactgttgctatacagtta

SEQ ID NO: 156382 - DNA, 25 bp, probe
aatgtaaatgtacatgtgcagatat

SEQ ID NO: 156383 - DNA, 25 bp, probe
aaggacatatggccaatgtgcatgt

SEQ ID NO: 156384 - DNA, 25 bp, probe
aaggatatgatgtccgctctgatgt

SEQ ID NO: 156385 - DNA, 25 bp, probe
aaggatggtgaccctgcttgtattt

SEQ ID NO: 156386 - DNA, 25 bp, probe
aaggctagtacctgctttgttgggg

SEQ ID NO: 156387 - DNA, 25 bp, probe
aaggcgaggacggtgtgtgggtggc

SEQ ID NO: 156388 - DNA, 25 bp, probe
aatggagaggccagtacgacgtggc

SEQ ID NO: 156389 - DNA, 25 bp, probe
aaggacagaggctgttccctatggc

SEQ ID NO: 156390 - DNA, 25 bp, probe
aaggaagggcatccttctgcctttt

SEQ ID NO: 156391 - DNA, 25 bp, probe
aaggaaaggacagtccaggcattgt

SEQ ID NO: 156392 - DNA, 25 bp, probe
aaggaaaagccatagcaggagttat

SEQ ID NO: 156393 - DNA, 25 bp, probe
aaggaggacccagcaaggattcatt

SEQ ID NO: 156394 - DNA, 25 bp, probe
aaggcaagaaccgcaaatagtcatc

SEQ ID NO: 156395 - DNA, 25 bp, probe
aaggcaagaacctctttagcatcca

SEQ ID NO: 156396 - DNA, 25 bp, probe
aaggagatgaacggccgggtcagcc

SEQ ID NO: 156397 - DNA, 25 bp, probe
caacgagtacacggctcgggaaggg

SEQ ID NO: 156398 - DNA, 25 bp, probe
caacgagtacacagccagggagggg

SEQ ID NO: 156399 - DNA, 25 bp, probe
caactactcaccagaagggggctta

SEQ ID NO: 156400 - DNA, 25 bp, probe
aaggcacttcgcaaggagaagggtt

SEQ ID NO: 156401 - DNA, 25 bp, probe
cacagccccctgagggaagggacgc

SEQ ID NO: 156402 - DNA, 25 bp, probe
aaggcatcccagaggcaaggggacc

SEQ ID NO: 156403 - DNA, 25 bp, probe
aaggatgcccaaagatgcagccggt

SEQ ID NO: 156404 - DNA, 25 bp, probe
aaggacattcaaagtgccctgtgca

SEQ ID NO: 156405 - DNA, 25 bp, probe
aaggacattcaaagtgccctgtgca

SEQ ID NO: 156406 - DNA, 25 bp, probe
aaggcctgatcatagtattctgtca

SEQ ID NO: 156407 - DNA, 25 bp, probe
aaggctcagatggaaagttctacat

SEQ ID NO: 156408 - DNA, 25 bp, probe
aaggcagcaatccaagagacttgaa

SEQ ID NO: 156409 - DNA, 25 bp, probe
aaggcaccgctaagcaagcattgtc

SEQ ID NO: 156410 - DNA, 25 bp, probe
aaggaccagcaaaatacatctcgcc

SEQ ID NO: 156411 - DNA, 25 bp, probe
aaggactacatgatcaccatcaccc

SEQ ID NO: 156412 - DNA, 25 bp, probe
aaggactacatgatcaccatcaccc

SEQ ID NO: 156413 - DNA, 25 bp, probe
aaggatttgctttcccatatgcttc

SEQ ID NO: 156414 - DNA, 25 bp, probe
aaggatttctatttgctgtcagtta

SEQ ID NO: 156415 - DNA, 25 bp, probe
aaggcatttctagagaacagattca

SEQ ID NO: 156416 - DNA, 25 bp, probe
aaggcatttctagagaacagattca

SEQ ID NO: 156417 - DNA, 25 bp, probe
aaggatattctttagcaagagaaaa

SEQ ID NO: 156418 - DNA, 25 bp, probe
aaggcaattcctcagatatcaacta

SEQ ID NO: 156419 - DNA, 25 bp, probe
aaggcatagcctccaagtatactct

SEQ ID NO: 156420 - DNA, 25 bp, probe
aaggcatagcctccaagtatactct

SEQ ID NO: 156421 - DNA, 25 bp, probe
aaggacatgtcttaatgcttattgt

SEQ ID NO: 156422 - DNA, 25 bp, probe
aaggccatctttattttctataact

SEQ ID NO: 156423 - DNA, 25 bp, probe
aaggccactttggagttgtctacca

SEQ ID NO: 156424 - DNA, 25 bp, probe
aaggcccttatgacatggtgttcca

SEQ ID NO: 156425 - DNA, 25 bp, probe
aaggccaaatagactgtatggacca

SEQ ID NO: 156426 - DNA, 25 bp, probe
aatggccatgaacgcctttggagac

SEQ ID NO: 156427 - DNA, 25 bp, probe
aaggatctgcagttactttgaagac

SEQ ID NO: 156428 - DNA, 25 bp, probe
aaggcattgagaatgtacctgaaga

SEQ ID NO: 156429 - DNA, 25 bp, probe
aaggcagtgaaatggcagttagacc

SEQ ID NO: 156430 - DNA, 25 bp, probe
aaggcaggaatttgagagttcacag

SEQ ID NO: 156431 - DNA, 25 bp, probe
aaggaaggtttccacgtcagcatgc

SEQ ID NO: 156432 - DNA, 25 bp, probe
aaggagacaatattccctgctcaca

SEQ ID NO: 156433 - DNA, 25 bp, probe
aaggaaggtatttcagctcccaagt

SEQ ID NO: 156434 - DNA, 25 bp, probe
aatggaaggaggtacacacctcaaa

SEQ ID NO: 156435 - DNA, 25 bp, probe
aaggatcagatactggagccccaca

SEQ ID NO: 156436 - DNA, 25 bp, probe
aaggcatccatcagagcagacgccc

SEQ ID NO: 156437 - DNA, 25 bp, probe
aaggcactgcaggaggagaaccgcg

SEQ ID NO: 156438 - DNA, 25 bp, probe
aaggaggaggcgggcatcatccgga

SEQ ID NO: 156439 - DNA, 25 bp, probe
aaggctgtgggcaaggtcatccctg

SEQ ID NO: 156440 - DNA, 25 bp, probe
aaggctgaggaggccggctgcagcc

SEQ ID NO: 156441 - DNA, 25 bp, probe
aaggatgcaacggatcgctgctgtg

SEQ ID NO: 156442 - DNA, 25 bp, probe
aaggagattcaggcagactggtggc

SEQ ID NO: 156443 - DNA, 25 bp, probe
aaggatgtgtcaaaacatgtatgga

SEQ ID NO: 156444 - DNA, 25 bp, probe
aaggatgtgtcaaaacatgtatgga

SEQ ID NO: 156445 - DNA, 25 bp, probe
aaggaaggccaaaattgtgcgcaat

SEQ ID NO: 156446 - DNA, 25 bp, probe
aaggaaggccaaaattgtgcgcaat

SEQ ID NO: 156447 - DNA, 25 bp, probe
aaggagtacaccatcaagtcgcact

SEQ ID NO: 156448 - DNA, 25 bp, probe
aaggagaataccacagagctccagt

SEQ ID NO: 156449 - DNA, 25 bp, probe
aaggaaaaatctcagagtcacatag

SEQ ID NO: 156450 - DNA, 25 bp, probe
aaggaaaaatctcagagtcacatag

SEQ ID NO: 156451 - DNA, 25 bp, probe
aaggcaaattcaggcgaattccata

SEQ ID NO: 156452 - DNA, 25 bp, probe
aaggaagatatcatcaaattctaca

SEQ ID NO: 156453 - DNA, 25 bp, probe
aaggaagatatcatcaaattctaca

SEQ ID NO: 156454 - DNA, 25 bp, probe
aaggcaagagatgataagctgttta

SEQ ID NO: 156455 - DNA, 25 bp, probe
aaggctccagggaatcctgcattct

SEQ ID NO: 156456 - DNA, 25 bp, probe
aaggctcagctggggatggtgtttg

SEQ ID NO: 156457 - DNA, 25 bp, probe
aaggctgtgcgaggtgaggttgtca

SEQ ID NO: 156458 - DNA, 25 bp, probe
aaggctgtgcgaggtgaggttgtca

SEQ ID NO: 156459 - DNA, 25 bp, probe
aaggagctgctggttgactgttaca

SEQ ID NO: 156460 - DNA, 25 bp, probe
aaggatcttatgctacagtatacaa

SEQ ID NO: 156461 - DNA, 25 bp, probe
aaggatcttatgctacagtatacaa

SEQ ID NO: 156462 - DNA, 25 bp, probe
aatggtgttactaaagtcacatata

SEQ ID NO: 156463 - DNA, 25 bp, probe
aatggctttattgcagcgattaata

SEQ ID NO: 156464 - DNA, 25 bp, probe
aaggctttacaggaagattctgaaa

SEQ ID NO: 156465 - DNA, 25 bp, probe
aaggaactgcctgagaatttgaaag

SEQ ID NO: 156466 - DNA, 25 bp, probe
aatggaacttctgcaaggcagtaat

SEQ ID NO: 156467 - DNA, 25 bp, probe
aatggacgtacttgagggcttgaat

SEQ ID NO: 156468 - DNA, 25 bp, probe
aaggagctggtccgagggctcctga

SEQ ID NO: 156469 - DNA, 25 bp, probe
aaggaggcgtccgagagtgctcggc

SEQ ID NO: 156470 - DNA, 25 bp, probe
aaggagagcgaagtcaaggccctgt

SEQ ID NO: 156471 - DNA, 25 bp, probe
aatgggagccatttgcaaggatgca

SEQ ID NO: 156472 - DNA, 25 bp, probe
aatgggagccatttgcaaggatgca

SEQ ID NO: 156473 - DNA, 25 bp, probe
aatgctgggaagtgctaggcagggc

SEQ ID NO: 156474 - DNA, 25 bp, probe
aaggcgggatgtgtagctcaggtct

SEQ ID NO: 156475 - DNA, 25 bp, probe
aatggtcgggtggtcagccatgact

SEQ ID NO: 156476 - DNA, 25 bp, probe
aaggccagggtaccatggagaaaat

SEQ ID NO: 156477 - DNA, 25 bp, probe
aatggaatgggtcctatgggaacag

SEQ ID NO: 156478 - DNA, 25 bp, probe
aatgacttggagaacttgggtgaga

SEQ ID NO: 156479 - DNA, 25 bp, probe
aatactgaggggtctccaggaggag

SEQ ID NO: 156480 - DNA, 25 bp, probe
aaggctaatgtgctgactgaggagg

SEQ ID NO: 156481 - DNA, 25 bp, probe
aaggctgattgacatgtcggcgcag

SEQ ID NO: 156482 - DNA, 25 bp, probe
aatgagtgatcaggcaattcggtca

SEQ ID NO: 156483 - DNA, 25 bp, probe
aatgaggacattcgtccggaaaagg

SEQ ID NO: 156484 - DNA, 25 bp, probe
aatgggacaagctccagagatccaa

SEQ ID NO: 156485 - DNA, 25 bp, probe
aatggtggaagtttagctgatgcta

SEQ ID NO: 156486 - DNA, 25 bp, probe
aaggctacacctttgactatgccta

SEQ ID NO: 156487 - DNA, 25 bp, probe
aaggaacaattggtactcacctcag

SEQ ID NO: 156488 - DNA, 25 bp, probe
aaggaacaattggtactcacctcag

SEQ ID NO: 156489 - DNA, 25 bp, probe
aatgagaaacgtgtttagtatcaaa

SEQ ID NO: 156490 - DNA, 25 bp, probe
aatggaaacttgaggtcacttacta

SEQ ID NO: 156491 - DNA, 25 bp, probe
aatgggaacaatgacgtgcctacct

SEQ ID NO: 156492 - DNA, 25 bp, probe
aatgggaacaatgacgtgcctacct

SEQ ID NO: 156493 - DNA, 25 bp, probe
aatggggacaagatgcggccctggt

SEQ ID NO: 156494 - DNA, 25 bp, probe
aattggaagccgagatggaccgcag

SEQ ID NO: 156495 - DNA, 25 bp, probe
aatgttgaagctcggtgtaccgcgg

SEQ ID NO: 156496 - DNA, 25 bp, probe
aatgaaaacggtctgcaccgctgcg

SEQ ID NO: 156497 - DNA, 25 bp, probe
aatgaaaacagagcttcccgtgcaa

SEQ ID NO: 156498 - DNA, 25 bp, probe
aatctatcctaaatgttcccttgaa

SEQ ID NO: 156499 - DNA, 25 bp, probe
aatctgagtttagattcccttgaag

SEQ ID NO: 156500 - DNA, 25 bp, probe
aatagcagattttggattgtcccga

SEQ ID NO: 156501 - DNA, 25 bp, probe
aatgatggatttaggcttacggtag

SEQ ID NO: 156502 - DNA, 25 bp, probe
aatgaatgcatttcggttaaaggaa

SEQ ID NO: 156503 - DNA, 25 bp, probe
aatgaccccgctcttaaagatgagt

SEQ ID NO: 156504 - DNA, 25 bp, probe
caatgaccccttcattgacctcaac

SEQ ID NO: 156505 - DNA, 25 bp, probe
aatgagttcctcaaattgaccaata

SEQ ID NO: 156506 - DNA, 25 bp, probe
aatgtcttcctaacaagaacaaaca

SEQ ID NO: 156507 - DNA, 25 bp, probe
aatgtcttcctaacaagaacaaaca

SEQ ID NO: 156508 - DNA, 25 bp, probe
aatgtgtacctaatgaaaagatctc

SEQ ID NO: 156509 - DNA, 25 bp, probe
aatgtttcgatagacagcataatcc

SEQ ID NO: 156510 - DNA, 25 bp, probe
aatgttctcgagaaattcagactga

SEQ ID NO: 156511 - DNA, 25 bp, probe
aatgtcatctattccttatcaacca

SEQ ID NO: 156512 - DNA, 25 bp, probe
aatgtatctcttgcctaaaggacta

SEQ ID NO: 156513 - DNA, 25 bp, probe
aaggactctcatgcacttatcgaga

SEQ ID NO: 156514 - DNA, 25 bp, probe
aaggactctcttgcattagggaaga

SEQ ID NO: 156515 - DNA, 25 bp, probe
aaggactttttggatagcaagaaca

SEQ ID NO: 156516 - DNA, 25 bp, probe
aatgtactttttgaactataaatct

SEQ ID NO: 156517 - DNA, 25 bp, probe
aatgtactttttgaactataaatct

SEQ ID NO: 156518 - DNA, 25 bp, probe
aatggacagttaatgcccactgaaa

SEQ ID NO: 156519 - DNA, 25 bp, probe
aatgtgcgcaatcttgccgacgcat

SEQ ID NO: 156520 - DNA, 25 bp, probe
aatggataagccagccaactgcacc

SEQ ID NO: 156521 - DNA, 25 bp, probe
aaggcaatggctgtgtcagactcaa

SEQ ID NO: 156522 - DNA, 25 bp, probe
aaggctgagacagtcgtgcgactcc

SEQ ID NO: 156523 - DNA, 25 bp, probe
aatggcagaagccagctgcggagtc

SEQ ID NO: 156524 - DNA, 25 bp, probe
aatgtatgaagcaactggggtgggc

SEQ ID NO: 156525 - DNA, 25 bp, probe
aatgtatgaagcaactggggtgggc

SEQ ID NO: 156526 - DNA, 25 bp, probe
aattagccgggcatgatggtggtgg

SEQ ID NO: 156527 - DNA, 25 bp, probe
aaggagactttgttcatggctgggg

SEQ ID NO: 156528 - DNA, 25 bp, probe
aaggagattatttgctgccgtggtt

SEQ ID NO: 156529 - DNA, 25 bp, probe
aaggcatttctttcgcaagtgaact

SEQ ID NO: 156530 - DNA, 25 bp, probe
aaggcatcttctaccgcaagaagct

SEQ ID NO: 156531 - DNA, 25 bp, probe
aatgtctattcttccaaagaagcat

SEQ ID NO: 156532 - DNA, 25 bp, probe
aatgtgctttggtgcaaggtacaag

SEQ ID NO: 156533 - DNA, 25 bp, probe
aatggatttgtgtgcctggtgtgcc

SEQ ID NO: 156534 - DNA, 25 bp, probe
aatggatgattttggtgccgtgccc

SEQ ID NO: 156535 - DNA, 25 bp, probe
aatgatgtgcttcaagtggggctcc

SEQ ID NO: 156536 - DNA, 25 bp, probe
aatgatgtgcttcaagtggggctcc

SEQ ID NO: 156537 - DNA, 25 bp, probe
aatgtcttcgagttggagcggctcc

SEQ ID NO: 156538 - DNA, 25 bp, probe
aatctgagtcagcttagaagagtac

SEQ ID NO: 156539 - DNA, 25 bp, probe
aataagtcagtttcgagggatatct

SEQ ID NO: 156540 - DNA, 25 bp, probe
aataagtcagtttcgagggatatct

SEQ ID NO: 156541 - DNA, 25 bp, probe
aatgaagtttatctggggatcgtca

SEQ ID NO: 156542 - DNA, 25 bp, probe
aatgaagatcgttttgggatgtgga

SEQ ID NO: 156543 - DNA, 25 bp, probe
aatgaagatcggtgcttcagggtgg

SEQ ID NO: 156544 - DNA, 25 bp, probe
aaggaatcagcctgtgtggggtgga

SEQ ID NO: 156545 - DNA, 25 bp, probe
aaggagccacaatgtgatagaggtg

SEQ ID NO: 156546 - DNA, 25 bp, probe
aaggacacagaatggataagccagc

SEQ ID NO: 156547 - DNA, 25 bp, probe
aaggaagcgacccagaaatggcagg

SEQ ID NO: 156548 - DNA, 25 bp, probe
aaggcagcaggctaccggacggcag

SEQ ID NO: 156549 - DNA, 25 bp, probe
aaggaagacttcatgctgttggcag

SEQ ID NO: 156550 - DNA, 25 bp, probe
aaggacaggtggaagtgtggcaggg

SEQ ID NO: 156551 - DNA, 25 bp, probe
aaggacatgcggcctgcatggtggg

SEQ ID NO: 156552 - DNA, 25 bp, probe
aatggcagccggggcttttgctgca

SEQ ID NO: 156553 - DNA, 25 bp, probe
aatgtggccgaggactttgattgca

SEQ ID NO: 156554 - DNA, 25 bp, probe
aaggagagccaggagcatttaaaaa

SEQ ID NO: 156555 - DNA, 25 bp, probe
aaggcgagtcagggagttaaacagc

SEQ ID NO: 156556 - DNA, 25 bp, probe
aaggctgcaaagggttcttcaagag

SEQ ID NO: 156557 - DNA, 25 bp, probe
aaggctgctaaggatgtcttcaaca

SEQ ID NO: 156558 - DNA, 25 bp, probe
aaggagcatggagattatacagaca

SEQ ID NO: 156559 - DNA, 25 bp, probe
aaggagctgaggaatttgcaacgag

SEQ ID NO: 156560 - DNA, 25 bp, probe
aaggagctactgacattcctaagag

SEQ ID NO: 156561 - DNA, 25 bp, probe
aatggcctcctaatagcctaacagg

SEQ ID NO: 156562 - DNA, 25 bp, probe
aaggcctatgctgaggtctaaacct

SEQ ID NO: 156563 - DNA, 25 bp, probe
aaggcactgagggggattacaagct

SEQ ID NO: 156564 - DNA, 25 bp, probe
aaggcactgagggggattacaagct

SEQ ID NO: 156565 - DNA, 25 bp, probe
aatgtccagaggatgtgggaaagct

SEQ ID NO: 156566 - DNA, 25 bp, probe
aatgaccaacgtactgggggactca

SEQ ID NO: 156567 - DNA, 25 bp, probe
aatgaccaacgtactgggggactca

SEQ ID NO: 156568 - DNA, 25 bp, probe
aatgacaaagttacgcgcgtccacc

SEQ ID NO: 156569 - DNA, 25 bp, probe
aaggcaaatctttgggatgcgcccc

SEQ ID NO: 156570 - DNA, 25 bp, probe
aaggcaaatctttgggatgcgcccc

SEQ ID NO: 156571 - DNA, 25 bp, probe
aaggccctgagttggcagtggccca

SEQ ID NO: 156572 - DNA, 25 bp, probe
aaggccacatggctgacattagctc

SEQ ID NO: 156573 - DNA, 25 bp, probe
aaggcacagatggagttgcaggact

SEQ ID NO: 156574 - DNA, 25 bp, probe
aaggccaagcgccagtgaggactgc

SEQ ID NO: 156575 - DNA, 25 bp, probe
aaggctcattgccacagtacaagct

SEQ ID NO: 156576 - DNA, 25 bp, probe
aaggcagcatgaaaagataactcta

SEQ ID NO: 156577 - DNA, 25 bp, probe
aaggacagcatgagaggtgactctg

SEQ ID NO: 156578 - DNA, 25 bp, probe
aatggcagtgatacggggccagctg

SEQ ID NO: 156579 - DNA, 25 bp, probe
aatggctgtgagactggctgtgaga

SEQ ID NO: 156580 - DNA, 25 bp, probe
aatgcgttggcccacgtagcaaaaa

SEQ ID NO: 156581 - DNA, 25 bp, probe
aatgcgttggcccacgtagcaaaaa

SEQ ID NO: 156582 - DNA, 25 bp, probe
aattttatcagagagttgcaaaaaa

SEQ ID NO: 156583 - DNA, 25 bp, probe
aatgtttgttaatgtctactaaaat

SEQ ID NO: 156584 - DNA, 25 bp, probe
aatgtttcttggagacatcccacaa

SEQ ID NO: 156585 - DNA, 25 bp, probe
aatgggtcttattcagaccccagat

SEQ ID NO: 156586 - DNA, 25 bp, probe
aatgtgtggcctataagttccgatt

SEQ ID NO: 156587 - DNA, 25 bp, probe
aatgtgtggcctataagttccgatt

SEQ ID NO: 156588 - DNA, 25 bp, probe
aatggttccctttatgattatctga

SEQ ID NO: 156589 - DNA, 25 bp, probe
aatggttccctttatgattatctga

SEQ ID NO: 156590 - DNA, 25 bp, probe
aataggtttcctgatgaattctgaa

SEQ ID NO: 156591 - DNA, 25 bp, probe
aatgagggcccctgattatactaca

SEQ ID NO: 156592 - DNA, 25 bp, probe
aatgaaaccaccagtgttatcaact

SEQ ID NO: 156593 - DNA, 25 bp, probe
aatgattactacctcaggaccaacc

SEQ ID NO: 156594 - DNA, 25 bp, probe
aaggaagctggcataggccacaccc

SEQ ID NO: 156595 - DNA, 25 bp, probe
aaggcaagggaattcccacagccct

SEQ ID NO: 156596 - DNA, 25 bp, probe
aaggcaagttaagagccaatcactg

SEQ ID NO: 156597 - DNA, 25 bp, probe
aaggctgggtaagactcctctatgt

SEQ ID NO: 156598 - DNA, 25 bp, probe
aaggctgggtgaagtccccatctaa

SEQ ID NO: 156599 - DNA, 25 bp, probe
aaggcgggatgaagggctgcgctta

SEQ ID NO: 156600 - DNA, 25 bp, probe
aaggcgggatgaagggctgcgctta

SEQ ID NO: 156601 - DNA, 25 bp, probe
aaggcatggcgtagagggtgctgcc

SEQ ID NO: 156602 - DNA, 25 bp, probe
aatggcatgtgtgaaggtgtgtgtc

SEQ ID NO: 156603 - DNA, 25 bp, probe
aaggcatgtgtgcggcacagcggcc

SEQ ID NO: 156604 - DNA, 25 bp, probe
aaggcagatgcccaggagagccgcc

SEQ ID NO: 156605 - DNA, 25 bp, probe
aaggcagatgcccaggagagccgcc

SEQ ID NO: 156606 - DNA, 25 bp, probe
aaggctgatgcttggggagaacccc

SEQ ID NO: 156607 - DNA, 25 bp, probe
caagggagtaggtgaaatagcccaa

SEQ ID NO: 156608 - DNA, 25 bp, probe
aatggaggggatttgaagtttcaca

SEQ ID NO: 156609 - DNA, 25 bp, probe
aatgagagggagaccggcatgcttt

SEQ ID NO: 156610 - DNA, 25 bp, probe
aaggcactgggcagctgccaatttc

SEQ ID NO: 156611 - DNA, 25 bp, probe
aaggcacaagaggccctagatttct

SEQ ID NO: 156612 - DNA, 25 bp, probe
aaggcaatgaaagttttgatatctt

SEQ ID NO: 156613 - DNA, 25 bp, probe
aaggcaatgaaagttttgatatctt

SEQ ID NO: 156614 - DNA, 25 bp, probe
aatggacctgattctagtttattct

SEQ ID NO: 156615 - DNA, 25 bp, probe
aatggcacctcatttggctttgtga

SEQ ID NO: 156616 - DNA, 25 bp, probe
aatggcacctcatttggctttgtga

SEQ ID NO: 156617 - DNA, 25 bp, probe
aatggcacccacagtgacatgctta

SEQ ID NO: 156618 - DNA, 25 bp, probe
aaggcagtcccagatgagcctctat

SEQ ID NO: 156619 - DNA, 25 bp, probe
aaggaagccaaggatgcccgctata

SEQ ID NO: 156620 - DNA, 25 bp, probe
aaggaaggcaatgcagcccatccct

SEQ ID NO: 156621 - DNA, 25 bp, probe
aatggataaaacagcacctctggct

SEQ ID NO: 156622 - DNA, 25 bp, probe
aatggatacccaatacctcctggat

SEQ ID NO: 156623 - DNA, 25 bp, probe
aatggctacgtcaagttctcaatgg

SEQ ID NO: 156624 - DNA, 25 bp, probe
aatgtgaatcctacagtttccaggt

SEQ ID NO: 156625 - DNA, 25 bp, probe
aatgtggacttgagctttgccatcc

SEQ ID NO: 156626 - DNA, 25 bp, probe
aatggttctagttgcttcatggact

SEQ ID NO: 156627 - DNA, 25 bp, probe
aatggttctagttgcttcatggact

SEQ ID NO: 156628 - DNA, 25 bp, probe
aaggcgtctatgaatgaccagtgtt

SEQ ID NO: 156629 - DNA, 25 bp, probe
aatagtgattagaagacgaccattc

SEQ ID NO: 156630 - DNA, 25 bp, probe
aatggtgtgacgaccaccacgttct

SEQ ID NO: 156631 - DNA, 25 bp, probe
aatggattacgagcctcaatgttgg

SEQ ID NO: 156632 - DNA, 25 bp, probe
aatggagtatgaaaccctttctaag

SEQ ID NO: 156633 - DNA, 25 bp, probe
aatggagaaaacccctgtgactcca

SEQ ID NO: 156634 - DNA, 25 bp, probe
aatggaaaagctgccttggccctgc

SEQ ID NO: 156635 - DNA, 25 bp, probe
aaggaagaagactgctcagcgccac

SEQ ID NO: 156636 - DNA, 25 bp, probe
aaggcaaggatagggctgcaggacc

SEQ ID NO: 156637 - DNA, 25 bp, probe
aaggcaaggatagggctgcaggacc

SEQ ID NO: 156638 - DNA, 25 bp, probe
aaggaaggaccaggctggggccagg

SEQ ID NO: 156639 - DNA, 25 bp, probe
aaggaaggaccaggctggggccagg

SEQ ID NO: 156640 - DNA, 25 bp, probe
aaggaagcagaaacggggcgaatga

SEQ ID NO: 156641 - DNA, 25 bp, probe
aaggaaggattacggccaggagata

SEQ ID NO: 156642 - DNA, 25 bp, probe
aaggaaggcagcaggcgcgcaaatt

SEQ ID NO: 156643 - DNA, 25 bp, probe
aaggccagtcagacggggcagacag

SEQ ID NO: 156644 - DNA, 25 bp, probe
aaggcgcagaagaaggacggcagga

SEQ ID NO: 156645 - DNA, 25 bp, probe
aaggcgatcaggaaggaggccgttt

SEQ ID NO: 156646 - DNA, 25 bp, probe
aaggcgctatggtcaggagaccctt

SEQ ID NO: 156647 - DNA, 25 bp, probe
aaggcacctggatggtgaccctggg

SEQ ID NO: 156648 - DNA, 25 bp, probe
aaggacacttgaaggtactcaggtt

SEQ ID NO: 156649 - DNA, 25 bp, probe
aaggccacatagagtgtttgcagtg

SEQ ID NO: 156650 - DNA, 25 bp, probe
aaggccacatagagtgtttgcagtg

SEQ ID NO: 156651 - DNA, 25 bp, probe
aaggccaagaaattattgtgcctga

SEQ ID NO: 156652 - DNA, 25 bp, probe
aatgggaaagaatactggcttgtga

SEQ ID NO: 156653 - DNA, 25 bp, probe
aatgtggtaaattaattcgagagga

SEQ ID NO: 156654 - DNA, 25 bp, probe
aatggctataaactgaattaggcag

SEQ ID NO: 156655 - DNA, 25 bp, probe
aatgttatgcacgttggcttgagga

SEQ ID NO: 156656 - DNA, 25 bp, probe
aatgttctgggactagttgagttgt

SEQ ID NO: 156657 - DNA, 25 bp, probe
aatgctttggttcactctgaatctg

SEQ ID NO: 156658 - DNA, 25 bp, probe
aatgctttggttcactctgaatctg

SEQ ID NO: 156659 - DNA, 25 bp, probe
aatgtgaattttccctatgtattgg

SEQ ID NO: 156660 - DNA, 25 bp, probe
aatgcttttagtccaagatggaatg

SEQ ID NO: 156661 - DNA, 25 bp, probe
aatgatgttaacccaagaagtagac

SEQ ID NO: 156662 - DNA, 25 bp, probe
aatgtaggaacccaaaatgcttatt

SEQ ID NO: 156663 - DNA, 25 bp, probe
caatgtaggaacccaaaatgcttat

SEQ ID NO: 156664 - DNA, 25 bp, probe
caaggggaaatcagcaaagttatca

SEQ ID NO: 156665 - DNA, 25 bp, probe
aaggcaagaaacacgaaggatcatg

SEQ ID NO: 156666 - DNA, 25 bp, probe
tcaacgaaaaccaccatgggaaaca

SEQ ID NO: 156667 - DNA, 25 bp, probe
aatcaaacctcagcccgaggaaaca

SEQ ID NO: 156668 - DNA, 25 bp, probe
aatcaacaagaaccccaagtataag

SEQ ID NO: 156669 - DNA, 25 bp, probe
aatcaacaagaaccccaagtataag

SEQ ID NO: 156670 - DNA, 25 bp, probe
aatcatactttaacccaagtaacat

SEQ ID NO: 156671 - DNA, 25 bp, probe
aatgaacctacaacaccagggagaa

SEQ ID NO: 156672 - DNA, 25 bp, probe
aatgaagccttcacaacagttgaag

SEQ ID NO: 156673 - DNA, 25 bp, probe
aatgaagttattgaacagttagagt

SEQ ID NO: 156674 - DNA, 25 bp, probe
aatgaagttgacataccacctaaca

SEQ ID NO: 156675 - DNA, 25 bp, probe
aatgaactggaccaaatctcaaaaa

SEQ ID NO: 156676 - DNA, 25 bp, probe
aatgaatttgggatactaaagtagt

SEQ ID NO: 156677 - DNA, 25 bp, probe
aatggctttcccaaaatcaaagtag

SEQ ID NO: 156678 - DNA, 25 bp, probe
aatagcagccccttaaaaactgtgg

SEQ ID NO: 156679 - DNA, 25 bp, probe
aatagcagccccttaaaaactgtgg

SEQ ID NO: 156680 - DNA, 25 bp, probe
aatgaggcctccaaacaaacactgg

SEQ ID NO: 156681 - DNA, 25 bp, probe
aatggaaccctgaacaaacactctg

SEQ ID NO: 156682 - DNA, 25 bp, probe
aaggcacatccttggactaaggtct

SEQ ID NO: 156683 - DNA, 25 bp, probe
aaggcacatccttggactaaggtct

SEQ ID NO: 156684 - DNA, 25 bp, probe
aatgtgcctttaactctagggacct

SEQ ID NO: 156685 - DNA, 25 bp, probe
caatggccttgtcatttgggtagtt

SEQ ID NO: 156686 - DNA, 25 bp, probe
aatttcaatgtagttggggtagatt

SEQ ID NO: 156687 - DNA, 25 bp, probe
aatgaccacaaagtttgtgcctcag

SEQ ID NO: 156688 - DNA, 25 bp, probe
aatgattcaccaatttcttgcatta

SEQ ID NO: 156689 - DNA, 25 bp, probe
aatgtccacctactttcagtgacaa

SEQ ID NO: 156690 - DNA, 25 bp, probe
aattccaccgaggccctggataatg

SEQ ID NO: 156691 - DNA, 25 bp, probe
aatgtcccaagaagctctcggaagg

SEQ ID NO: 156692 - DNA, 25 bp, probe
aatgattagatcgggtctcggaagg

SEQ ID NO: 156693 - DNA, 25 bp, probe
aatgttcaggcctatccctggaagg

SEQ ID NO: 156694 - DNA, 25 bp, probe
aatggtcaacgccatgcaccagaaa

SEQ ID NO: 156695 - DNA, 25 bp, probe
aatgcttgttcaggcacgccagaag

SEQ ID NO: 156696 - DNA, 25 bp, probe
aatgctaatgtcaacctcaaaaacc

SEQ ID NO: 156697 - DNA, 25 bp, probe
aatgtttgttacctccaacagaact

SEQ ID NO: 156698 - DNA, 25 bp, probe
aatgttcgtgtagcctcaaggtact

SEQ ID NO: 156699 - DNA, 25 bp, probe
aatcttccttatgtgtaacgtttga

SEQ ID NO: 156700 - DNA, 25 bp, probe
aatccccttatctgtagtcttagga

SEQ ID NO: 156701 - DNA, 25 bp, probe
aatcccaaataatgtcggcttacaa

SEQ ID NO: 156702 - DNA, 25 bp, probe
aatcaccgaaaacggcgtgcatggc

SEQ ID NO: 156703 - DNA, 25 bp, probe
aatgatccgccaccctgagggtggt

SEQ ID NO: 156704 - DNA, 25 bp, probe
aatcccagccagcggattgggggtg

SEQ ID NO: 156705 - DNA, 25 bp, probe
aatccaaccagggaatcttcccctg

SEQ ID NO: 156706 - DNA, 25 bp, probe
aatacttccagaaaactttggctct

SEQ ID NO: 156707 - DNA, 25 bp, probe
aatgttttccatatactttgtcttg

SEQ ID NO: 156708 - DNA, 25 bp, probe
aatgtatttcctatcaccatacttt

SEQ ID NO: 156709 - DNA, 25 bp, probe
aatgtattttccatactgagtttaa

SEQ ID NO: 156710 - DNA, 25 bp, probe
aatgtatttatattcacctgagttt

SEQ ID NO: 156711 - DNA, 25 bp, probe
aatcgtcttatattagggaattagg

SEQ ID NO: 156712 - DNA, 25 bp, probe
aatcctaataactggagaattcata

SEQ ID NO: 156713 - DNA, 25 bp, probe
aatgttcaaaacactggaattacaa

SEQ ID NO: 156714 - DNA, 25 bp, probe
aatgttattgaagccatttataaaa

SEQ ID NO: 156715 - DNA, 25 bp, probe
aatgctaactgatagacgtgttaaa

SEQ ID NO: 156716 - DNA, 25 bp, probe
aatgaaacggactctgctttgacat

SEQ ID NO: 156717 - DNA, 25 bp, probe
aatgggagggtctggcttcagctat

SEQ ID NO: 156718 - DNA, 25 bp, probe
aatgaacagggtaaagttgcatcta

SEQ ID NO: 156719 - DNA, 25 bp, probe
aatgaacagggtaaagttgcatcta

SEQ ID NO: 156720 - DNA, 25 bp, probe
aatgagacggtgctcactgtgtggt

SEQ ID NO: 156721 - DNA, 25 bp, probe
aaggcgcagacctcaatgcgtgagt

SEQ ID NO: 156722 - DNA, 25 bp, probe
aaggcactgggctacaatgcggagt

SEQ ID NO: 156723 - DNA, 25 bp, probe
aaggcactgtcagagaatctggagt

SEQ ID NO: 156724 - DNA, 25 bp, probe
aaggcatcatctacagagacttgaa

SEQ ID NO: 156725 - DNA, 25 bp, probe
aatggccacatctgaggctgtgatg

SEQ ID NO: 156726 - DNA, 25 bp, probe
aatggactcatatgcaagattgctg

SEQ ID NO: 156727 - DNA, 25 bp, probe
aatggactcatatgcaagattgctg

SEQ ID NO: 156728 - DNA, 25 bp, probe
aatggcaccgagacaatgatatgca

SEQ ID NO: 156729 - DNA, 25 bp, probe
aaggccgagcgttatatagcaagta

SEQ ID NO: 156730 - DNA, 25 bp, probe
aaggcaaggctgtcaattacaggaa

SEQ ID NO: 156731 - DNA, 25 bp, probe
aatggcagagtgcctcaaaaagaaa

SEQ ID NO: 156732 - DNA, 25 bp, probe
aatctcagctgggtcaataagggca

SEQ ID NO: 156733 - DNA, 25 bp, probe
aatcctcgtctgaatcatccgaggc

SEQ ID NO: 156734 - DNA, 25 bp, probe
aatgactcatgcctgtaatcccagc

SEQ ID NO: 156735 - DNA, 25 bp, probe
aaggcactggtgatgtcccaggagg

SEQ ID NO: 156736 - DNA, 25 bp, probe
aaggcactgtggaattcttcttgat

SEQ ID NO: 156737 - DNA, 25 bp, probe
aatggcactgaatcatccatatttt

SEQ ID NO: 156738 - DNA, 25 bp, probe
aatggcatcgtacataatttttcaa

SEQ ID NO: 156739 - DNA, 25 bp, probe
aatgttctgccccataagactttca

SEQ ID NO: 156740 - DNA, 25 bp, probe
aatgtaccaagttagatgactttga

SEQ ID NO: 156741 - DNA, 25 bp, probe
aatgtaccaagttagatgactttga

SEQ ID NO: 156742 - DNA, 25 bp, probe
aaggccaagatttgcagaacttgtg

SEQ ID NO: 156743 - DNA, 25 bp, probe
aaggctgaagatattctactttagt

SEQ ID NO: 156744 - DNA, 25 bp, probe
aaggctagttttagcttcctttgtg

SEQ ID NO: 156745 - DNA, 25 bp, probe
aatagggtttttcatcttgctgggt

SEQ ID NO: 156746 - DNA, 25 bp, probe
aatgagggctttagtttcctgggca

SEQ ID NO: 156747 - DNA, 25 bp, probe
aatgaggacctttttgggcttgtgc

SEQ ID NO: 156748 - DNA, 25 bp, probe
aatggtgtaattttgtcctctctgt

SEQ ID NO: 156749 - DNA, 25 bp, probe
aatggcttcaagcaggtacttctct

SEQ ID NO: 156750 - DNA, 25 bp, probe
aatggcttcaacgagaagcaggttt

SEQ ID NO: 156751 - DNA, 25 bp, probe
aatggctgacttgaagagcaacatc

SEQ ID NO: 156752 - DNA, 25 bp, probe
aatggtgcagcattgcctgatggaa

SEQ ID NO: 156753 - DNA, 25 bp, probe
aaggctgtgatgtcgctgtcaggat

SEQ ID NO: 156754 - DNA, 25 bp, probe
aaggctcttgcactgtgacagagct

SEQ ID NO: 156755 - DNA, 25 bp, probe
aatgagttggcactgctatccactg

SEQ ID NO: 156756 - DNA, 25 bp, probe
aatgcagtttgaccacaatgccggc

SEQ ID NO: 156757 - DNA, 25 bp, probe
tacggggctaccactgtggtgcgtg

SEQ ID NO: 156758 - DNA, 25 bp, probe
aatgggatccccacattgttgagtg

SEQ ID NO: 156759 - DNA, 25 bp, probe
aatgtgtgtctcctgtatttgttgg

SEQ ID NO: 156760 - DNA, 25 bp, probe
aatgattgtatcagtttatttctag

SEQ ID NO: 156761 - DNA, 25 bp, probe
aatgattgtatcagtttatttctag

SEQ ID NO: 156762 - DNA, 25 bp, probe
aatgtagtactgcctctataaaaac

SEQ ID NO: 156763 - DNA, 25 bp, probe
aatgtagtactgcctctataaaaac

SEQ ID NO: 156764 - DNA, 25 bp, probe
aattggtcacagcatttgaaaactg

SEQ ID NO: 156765 - DNA, 25 bp, probe
aatcgatgtacatagtttaacacgt

SEQ ID NO: 156766 - DNA, 25 bp, probe
aatggatgtcgctaatcataataaa

SEQ ID NO: 156767 - DNA, 25 bp, probe
aatgaagttgccctcacaagcaaag

SEQ ID NO: 156768 - DNA, 25 bp, probe
aatgattttgtcacagcaactgaag

SEQ ID NO: 156769 - DNA, 25 bp, probe
aatggtgttgccgcgccatctgcca

SEQ ID NO: 156770 - DNA, 25 bp, probe
aatggtgctcacatgagcctccttc

SEQ ID NO: 156771 - DNA, 25 bp, probe
aatgtgtctctgaagaggctcgctc

SEQ ID NO: 156772 - DNA, 25 bp, probe
aatggccctggatcgctatgtggcc

SEQ ID NO: 156773 - DNA, 25 bp, probe
aatgttcctgagtcacgctgaggag

SEQ ID NO: 156774 - DNA, 25 bp, probe
aatgtacacagcgaaccacaggatg

SEQ ID NO: 156775 - DNA, 25 bp, probe
aatgtgatagaggtggctacagacg

SEQ ID NO: 156776 - DNA, 25 bp, probe
aatgtcagcacatgttgctaatgac

SEQ ID NO: 156777 - DNA, 25 bp, probe
aaggcagccaggcgtgagcagcagc

SEQ ID NO: 156778 - DNA, 25 bp, probe
aaggcctgtgagtgtgacaagcaat

SEQ ID NO: 156779 - DNA, 25 bp, probe
aaggcctgctgtttaatcacagata

SEQ ID NO: 156780 - DNA, 25 bp, probe
aaggcctggattatctgcactcaga

SEQ ID NO: 156781 - DNA, 25 bp, probe
aaggcctggattatctgcactcaga

SEQ ID NO: 156782 - DNA, 25 bp, probe
aaggcttcagttggatctgcttcta

SEQ ID NO: 156783 - DNA, 25 bp, probe
aaggcttcagttggatctgcttcta

SEQ ID NO: 156784 - DNA, 25 bp, probe
aatgccttcgttatcgttattgtac

SEQ ID NO: 156785 - DNA, 25 bp, probe
aatgactggcgtatcttggtcctgt

SEQ ID NO: 156786 - DNA, 25 bp, probe
aaggcatggtggagctggttcctgc

SEQ ID NO: 156787 - DNA, 25 bp, probe
aaggcattggccattggttgccatg

SEQ ID NO: 156788 - DNA, 25 bp, probe
aatggctaacaccttcagtagcgtg

SEQ ID NO: 156789 - DNA, 25 bp, probe
aatggctaatccttttctagtgtga

SEQ ID NO: 156790 - DNA, 25 bp, probe
aatggctaatccttttctagtgtga

SEQ ID NO: 156791 - DNA, 25 bp, probe
aaggctgagagtgcttccttcttga

SEQ ID NO: 156792 - DNA, 25 bp, probe
aaggccactgtggttgaattgggag

SEQ ID NO: 156793 - DNA, 25 bp, probe
aatggcctttggatcactgggggca

SEQ ID NO: 156794 - DNA, 25 bp, probe
aatggcctttgcatggcacagagga

SEQ ID NO: 156795 - DNA, 25 bp, probe
aatggcgcggtgaggcaaggtgacg

SEQ ID NO: 156796 - DNA, 25 bp, probe
aaggccgtgtgtatgaacggcacag

SEQ ID NO: 156797 - DNA, 25 bp, probe
aaggctgttcctagaagagggcata

SEQ ID NO: 156798 - DNA, 25 bp, probe
aatggtttcctgcttgaggctgcag

SEQ ID NO: 156799 - DNA, 25 bp, probe
aatgtgttttcttgtctggagtctg

SEQ ID NO: 156800 - DNA, 25 bp, probe
aatggcttcgttaattaatgtcatg

SEQ ID NO: 156801 - DNA, 25 bp, probe
aatgtgcttcagagattataaatac

SEQ ID NO: 156802 - DNA, 25 bp, probe
aatgtctgtcagatagttagaattg

SEQ ID NO: 156803 - DNA, 25 bp, probe
aatgttgtgcagagttgctggactt

SEQ ID NO: 156804 - DNA, 25 bp, probe
aatgttgtgcagagttgctggactt

SEQ ID NO: 156805 - DNA, 25 bp, probe
aatgtagctggggcattttccattt

SEQ ID NO: 156806 - DNA, 25 bp, probe
aatgatgtgtgggaggttacctttc

SEQ ID NO: 156807 - DNA, 25 bp, probe
aatggtatgctggagagttactctg

SEQ ID NO: 156808 - DNA, 25 bp, probe
aatgggcatcgattgcttttctctg

SEQ ID NO: 156809 - DNA, 25 bp, probe
aatgggcatcgattgcttttctctg

SEQ ID NO: 156810 - DNA, 25 bp, probe
aatggagcatctactgttgtcacgg

SEQ ID NO: 156811 - DNA, 25 bp, probe
aatggacattttcatatgcaatgga

SEQ ID NO: 156812 - DNA, 25 bp, probe
aatggacattttcatatgcaatgga

SEQ ID NO: 156813 - DNA, 25 bp, probe
aatggacattttctggcttgtcatt

SEQ ID NO: 156814 - DNA, 25 bp, probe
aatgggtctttcagtcttggcattt

SEQ ID NO: 156815 - DNA, 25 bp, probe
aatggcttctttaaactgtgagcac

SEQ ID NO: 156816 - DNA, 25 bp, probe
aaggcttgtattagtcccaagccac

SEQ ID NO: 156817 - DNA, 25 bp, probe
aatggttgatgatacttcccacacc

SEQ ID NO: 156818 - DNA, 25 bp, probe
aatggcttcgagatttgcccaatcc

SEQ ID NO: 156819 - DNA, 25 bp, probe
aatgagattcggattctccaggaca

SEQ ID NO: 156820 - DNA, 25 bp, probe
aaggcattccacacctaagaactag

SEQ ID NO: 156821 - DNA, 25 bp, probe
aatggaaccacacctccaagaaaag

SEQ ID NO: 156822 - DNA, 25 bp, probe
aatggaacccttgcacaaaaaagtg

SEQ ID NO: 156823 - DNA, 25 bp, probe
aatgcgctacccaccaataatgaaa

SEQ ID NO: 156824 - DNA, 25 bp, probe
aatggctacccaaagaagaagatga

SEQ ID NO: 156825 - DNA, 25 bp, probe
aatggcaacagcgacaagaagaaga

SEQ ID NO: 156826 - DNA, 25 bp, probe
aaggcctgtgagtgtgacaagcaat

SEQ ID NO: 156827 - DNA, 25 bp, probe
aaggccattgaggggcacaccaagt

SEQ ID NO: 156828 - DNA, 25 bp, probe
aaggccattgacgtggcctgcgatc

SEQ ID NO: 156829 - DNA, 25 bp, probe
aaggccattgaagtgcgctctttgc

SEQ ID NO: 156830 - DNA, 25 bp, probe
aaggccattgaagtgcgctctttgc

SEQ ID NO: 156831 - DNA, 25 bp, probe
aatggcagattatcgacatctttga

SEQ ID NO: 156832 - DNA, 25 bp, probe
aatgactatatcaacgctagtttga

SEQ ID NO: 156833 - DNA, 25 bp, probe
caatcccagtcaaagaagttatgct

SEQ ID NO: 156834 - DNA, 25 bp, probe
aatgcacccctaaaagtcttgctcc

SEQ ID NO: 156835 - DNA, 25 bp, probe
aatgcacccctaaaagtcttgctcc

SEQ ID NO: 156836 - DNA, 25 bp, probe
aatggacttctcttaactccatgct

SEQ ID NO: 156837 - DNA, 25 bp, probe
aatgtgcctattgctagagctcctc

SEQ ID NO: 156838 - DNA, 25 bp, probe
aatgtgcctattgctagagctcctc

SEQ ID NO: 156839 - DNA, 25 bp, probe
aaggccgcattgctaagatgcctgt

SEQ ID NO: 156840 - DNA, 25 bp, probe
aatgagcccatcactaatatccagt

SEQ ID NO: 156841 - DNA, 25 bp, probe
aatggtccatctattaacgcactaa

SEQ ID NO: 156842 - DNA, 25 bp, probe
aataccaattttagaccctctacat

SEQ ID NO: 156843 - DNA, 25 bp, probe
aatgaccaatcaaatttcgccttac

SEQ ID NO: 156844 - DNA, 25 bp, probe
aatgacggttgcatttgccacttca

SEQ ID NO: 156845 - DNA, 25 bp, probe
aatggtggctgtgttttacaccaca

SEQ ID NO: 156846 - DNA, 25 bp, probe
aatggtgcacctgctttgaaaaaca

SEQ ID NO: 156847 - DNA, 25 bp, probe
aatgggcacccctataacagaacaa

SEQ ID NO: 156848 - DNA, 25 bp, probe
aatggagacctccaaaccagtatct

SEQ ID NO: 156849 - DNA, 25 bp, probe
aatgacagacctcagacagattgtc

SEQ ID NO: 156850 - DNA, 25 bp, probe
aatgactacactcaaggatgtgaac

SEQ ID NO: 156851 - DNA, 25 bp, probe
aaggctaaaggctatgcgatatgaa

SEQ ID NO: 156852 - DNA, 25 bp, probe
aaggctaaaggctatgcgatatgaa

SEQ ID NO: 156853 - DNA, 25 bp, probe
caatgctgctgagagggaaacgaac

SEQ ID NO: 156854 - DNA, 25 bp, probe
aatgatggaaagcgaacaaggagta

SEQ ID NO: 156855 - DNA, 25 bp, probe
aatgggagacgggggcagagaggga

SEQ ID NO: 156856 - DNA, 25 bp, probe
aatgatgtgaggtgacgggcggggc

SEQ ID NO: 156857 - DNA, 25 bp, probe
aatgagttaaagaagaggcgtggga

SEQ ID NO: 156858 - DNA, 25 bp, probe
aatagtttagaacgggctgtggact

SEQ ID NO: 156859 - DNA, 25 bp, probe
aattttgctacatggggtctgggtg

SEQ ID NO: 156860 - DNA, 25 bp, probe
caatttgtgaagatcgtggacgagg

SEQ ID NO: 156861 - DNA, 25 bp, probe
caagtggcaaacacgtggcctacgt

SEQ ID NO: 156862 - DNA, 25 bp, probe
caagtggcaaacacgtggcctacgt

SEQ ID NO: 156863 - DNA, 25 bp, probe
caagggggacttgtggacatgactg

SEQ ID NO: 156864 - DNA, 25 bp, probe
aaggctgggacttcaggaacatgtg

SEQ ID NO: 156865 - DNA, 25 bp, probe
aaggctgggacttcaggaacatgtg

SEQ ID NO: 156866 - DNA, 25 bp, probe
aatgagctgcaataacaggaacatg

SEQ ID NO: 156867 - DNA, 25 bp, probe
aatggctgcaaaaccggcaacctgt

SEQ ID NO: 156868 - DNA, 25 bp, probe
aatggctgcaaaaccggcaacctgt

SEQ ID NO: 156869 - DNA, 25 bp, probe
aatgggatacgaagtggatacctct

SEQ ID NO: 156870 - DNA, 25 bp, probe
aatggaatcctctgtggatgacggc

SEQ ID NO: 156871 - DNA, 25 bp, probe
aatggaaacatctgtcacgagcggt

SEQ ID NO: 156872 - DNA, 25 bp, probe
aatgagcagaacttcttccagcggg

SEQ ID NO: 156873 - DNA, 25 bp, probe
aatgagcagaacttcttccagcggg

SEQ ID NO: 156874 - DNA, 25 bp, probe
aatgagcagaacttcttccagcggg

SEQ ID NO: 156875 - DNA, 25 bp, probe
aatggcaagagatcatatcctcaga

SEQ ID NO: 156876 - DNA, 25 bp, probe
aatgtctgagaaagactctctaagt

SEQ ID NO: 156877 - DNA, 25 bp, probe
aatgtatgaggaatggccccaacgc

SEQ ID NO: 156878 - DNA, 25 bp, probe
aatgtaagcaaacccatccaaccaa

SEQ ID NO: 156879 - DNA, 25 bp, probe
aatgttagaccaccctcacataatc

SEQ ID NO: 156880 - DNA, 25 bp, probe
caagttagtcgctccttgctaaccg

SEQ ID NO: 156881 - DNA, 25 bp, probe
aatgtttggagcttgccttgtaatc

SEQ ID NO: 156882 - DNA, 25 bp, probe
aatgtttggagcttgccttgtaatc

SEQ ID NO: 156883 - DNA, 25 bp, probe
aatggcttggatttgctctcgaaaa

SEQ ID NO: 156884 - DNA, 25 bp, probe
aatggcttggatttgctctcgaaaa

SEQ ID NO: 156885 - DNA, 25 bp, probe
aatggcttggatttgctctcgaaaa

SEQ ID NO: 156886 - DNA, 25 bp, probe
aatggcttggatttgctctcgaaaa

SEQ ID NO: 156887 - DNA, 25 bp, probe
aatggtcatcgattgtctcacgtat

SEQ ID NO: 156888 - DNA, 25 bp, probe
aatggaaggcaaagcatcacatgta

SEQ ID NO: 156889 - DNA, 25 bp, probe
aatgacaaatggaggcagcattaac

SEQ ID NO: 156890 - DNA, 25 bp, probe
aatggctaagtgaagatgacaatca

SEQ ID NO: 156891 - DNA, 25 bp, probe
aatgtgcattcaggtgaattttcag

SEQ ID NO: 156892 - DNA, 25 bp, probe
aatggatctgaattatattgaatga

SEQ ID NO: 156893 - DNA, 25 bp, probe
aatggtggatgtgatctttgctgat

SEQ ID NO: 156894 - DNA, 25 bp, probe
aatggtgctgttcttattgcagatg

SEQ ID NO: 156895 - DNA, 25 bp, probe
aatgttgttatcattccctgatgtg

SEQ ID NO: 156896 - DNA, 25 bp, probe
aatgtttcttcatttctctgcatgg

SEQ ID NO: 156897 - DNA, 25 bp, probe
aatggaacaccagattcagctgcgg

SEQ ID NO: 156898 - DNA, 25 bp, probe
aatggaaaccaggaagcctagcatc

SEQ ID NO: 156899 - DNA, 25 bp, probe
aatgaggaagcccggacctatgtcc

SEQ ID NO: 156900 - DNA, 25 bp, probe
aatgggaggaaccaggccacattcc

SEQ ID NO: 156901 - DNA, 25 bp, probe
aatggctgagtgagccagactgcac

SEQ ID NO: 156902 - DNA, 25 bp, probe
aatgtctggcagagagcagggcaat

SEQ ID NO: 156903 - DNA, 25 bp, probe
aatgtctggcagagagcagggcaat

SEQ ID NO: 156904 - DNA, 25 bp, probe
aatgatcattagtggcagagaattt

SEQ ID NO: 156905 - DNA, 25 bp, probe
aatgctcctagaagtcttaattgtg

SEQ ID NO: 156906 - DNA, 25 bp, probe
aatgtcattgaaagccttattacgc

SEQ ID NO: 156907 - DNA, 25 bp, probe
aatgatcattccacgttttgtagcc

SEQ ID NO: 156908 - DNA, 25 bp, probe
aatgatcagtttttttttatacact

SEQ ID NO: 156909 - DNA, 25 bp, probe
aatgatcagtttttttttatacact

SEQ ID NO: 156910 - DNA, 25 bp, probe
aatgacaatcttatttcaaataggc

SEQ ID NO: 156911 - DNA, 25 bp, probe
aatgacacgattctttaccaaattg

SEQ ID NO: 156912 - DNA, 25 bp, probe
aatgccacgtctgtttaaattattt

SEQ ID NO: 156913 - DNA, 25 bp, probe
aatggactgatctctttgacaataa

SEQ ID NO: 156914 - DNA, 25 bp, probe
aatggaatcatgtactctgtgaaaa

SEQ ID NO: 156915 - DNA, 25 bp, probe
aatggcatcaggtttctgcatgaaa

SEQ ID NO: 156916 - DNA, 25 bp, probe
aatcctgagagcatctcgaatatca

SEQ ID NO: 156917 - DNA, 25 bp, probe
aatcctgagagcatctcgaatatca

SEQ ID NO: 156918 - DNA, 25 bp, probe
aatcctgagctcgccaataagcttc

SEQ ID NO: 156919 - DNA, 25 bp, probe
aatctcgatcttgccataactttac

SEQ ID NO: 156920 - DNA, 25 bp, probe
aatgctccaagtctatgaactgtta

SEQ ID NO: 156921 - DNA, 25 bp, probe
aatgcaacaagtcctgaatcccttg

SEQ ID NO: 156922 - DNA, 25 bp, probe
aataaaaggacgatctgcccctgga

SEQ ID NO: 156923 - DNA, 25 bp, probe
aatataaaggactcaaacgcgtgga

SEQ ID NO: 156924 - DNA, 25 bp, probe
aattaataggataaaccaggttgcg

SEQ ID NO: 156925 - DNA, 25 bp, probe
aatccaattggatacgacaacttgc

SEQ ID NO: 156926 - DNA, 25 bp, probe
aatccaattggatacgacaacttgc

SEQ ID NO: 156927 - DNA, 25 bp, probe
aatgctagtataaacaaacaaatta

SEQ ID NO: 156928 - DNA, 25 bp, probe
aatgtcattcatccaacaaacaaat

SEQ ID NO: 156929 - DNA, 25 bp, probe
aatgtcattcatccaacaaacaaat

SEQ ID NO: 156930 - DNA, 25 bp, probe
aatgtttcatatgcagcgacaaaga

SEQ ID NO: 156931 - DNA, 25 bp, probe
aatgagattcttgcagtaaattgat

SEQ ID NO: 156932 - DNA, 25 bp, probe
aatgagattcttgcagtaaattgat

SEQ ID NO: 156933 - DNA, 25 bp, probe
aatgatatctcttggaataatctgt

SEQ ID NO: 156934 - DNA, 25 bp, probe
aatgtcactctttcaaaatctataa

SEQ ID NO: 156935 - DNA, 25 bp, probe
aatgtacatgccaacataaatatgg

SEQ ID NO: 156936 - DNA, 25 bp, probe
aatgaagtgtcatcaaggatataga

SEQ ID NO: 156937 - DNA, 25 bp, probe
aatcaacatgctggtgaaggtgaaa

SEQ ID NO: 156938 - DNA, 25 bp, probe
aatgatatagtgggacaggcagaac

SEQ ID NO: 156939 - DNA, 25 bp, probe
aatggcttgtcccatcagcagatga

SEQ ID NO: 156940 - DNA, 25 bp, probe
aatggtcatgctgccgcaggatgat

SEQ ID NO: 156941 - DNA, 25 bp, probe
aaggccagctggcagcagagtgtgg

SEQ ID NO: 156942 - DNA, 25 bp, probe
aaggccactacattgaggagggggg

SEQ ID NO: 156943 - DNA, 25 bp, probe
aatcccagtacttgggaggccaagg

SEQ ID NO: 156944 - DNA, 25 bp, probe
aatcccttattgagggcccagacag

SEQ ID NO: 156945 - DNA, 25 bp, probe
gtttgaggaactgaatgaccccaac

SEQ ID NO: 156946 - DNA, 25 bp, probe
aaggccttgagaaagcgaagcagga

SEQ ID NO: 156947 - DNA, 25 bp, probe
aaggccttggcaaaggaatcgtgat

SEQ ID NO: 156948 - DNA, 25 bp, probe
aatggccagtgggcagggaatcctg

SEQ ID NO: 156949 - DNA, 25 bp, probe
aatggcccatggtagggttcctgct

SEQ ID NO: 156950 - DNA, 25 bp, probe
aatgacccccaaggtggtcactctc

SEQ ID NO: 156951 - DNA, 25 bp, probe
aataggccaggcacagtggctcacg

SEQ ID NO: 156952 - DNA, 25 bp, probe
aatatggccccaaagtggatgtctg

SEQ ID NO: 156953 - DNA, 25 bp, probe
aatgatgagcacacagagaggcgat

SEQ ID NO: 156954 - DNA, 25 bp, probe
aatatgcagactgcagggcttgaaa

SEQ ID NO: 156955 - DNA, 25 bp, probe
aatgatcaatcttatgaggcctgga

SEQ ID NO: 156956 - DNA, 25 bp, probe
aatgtatcatcagagcgccgaggag

SEQ ID NO: 156957 - DNA, 25 bp, probe
aatgtaacactcctgccatgaagca

SEQ ID NO: 156958 - DNA, 25 bp, probe
aatgatacaaccctgaccaagctaa

SEQ ID NO: 156959 - DNA, 25 bp, probe
aatgataatggcctcagccctatct

SEQ ID NO: 156960 - DNA, 25 bp, probe
aatgtaagtgcctataaccatgttc

SEQ ID NO: 156961 - DNA, 25 bp, probe
aatggaagagcttacaacctgcctt

SEQ ID NO: 156962 - DNA, 25 bp, probe
aatggaaatgcttacactgggtgtt

SEQ ID NO: 156963 - DNA, 25 bp, probe
aatgtacacattaaaaggccttgct

SEQ ID NO: 156964 - DNA, 25 bp, probe
aatgtccaattttttggcatggctt

SEQ ID NO: 156965 - DNA, 25 bp, probe
aatggccaagttattgtgattgaag

SEQ ID NO: 156966 - DNA, 25 bp, probe
aatgggcacagggtttatgtttagg

SEQ ID NO: 156967 - DNA, 25 bp, probe
aatggtgccgggagtacttgggcgg

SEQ ID NO: 156968 - DNA, 25 bp, probe
aatgggaggggatgctactgatggg

SEQ ID NO: 156969 - DNA, 25 bp, probe
aatgagcgggggtgtttgtgcctgt

SEQ ID NO: 156970 - DNA, 25 bp, probe
aatgcaggaaggccgggttgtgagg

SEQ ID NO: 156971 - DNA, 25 bp, probe
aatgttgactggtgggctcttggag

SEQ ID NO: 156972 - DNA, 25 bp, probe
aatgtctaggactgtgtgtgttcgg

SEQ ID NO: 156973 - DNA, 25 bp, probe
aatggaagcaaagagttgttgggca

SEQ ID NO: 156974 - DNA, 25 bp, probe
aatggaagcaaagagttgttgggca

SEQ ID NO: 156975 - DNA, 25 bp, probe
aatggccaaaagagttgttgctgaa

SEQ ID NO: 156976 - DNA, 25 bp, probe
aatcctaaaagagatctgggcatta

SEQ ID NO: 156977 - DNA, 25 bp, probe
aatgactagagggagccaagaggat

SEQ ID NO: 156978 - DNA, 25 bp, probe
aatgtctccaggaagcctacagtct

SEQ ID NO: 156979 - DNA, 25 bp, probe
aatggcaccttgaacttaagcctac

SEQ ID NO: 156980 - DNA, 25 bp, probe
aatgtgaccttaaatgtgtcaccaa

SEQ ID NO: 156981 - DNA, 25 bp, probe
aatgatgactttatcgattccacac

SEQ ID NO: 156982 - DNA, 25 bp, probe
aatgtgatcttcctaggagtcccgg

SEQ ID NO: 156983 - DNA, 25 bp, probe
aatgtgacttcactttggtgccaat

SEQ ID NO: 156984 - DNA, 25 bp, probe
aatgtggttcagtacggctgtacca

SEQ ID NO: 156985 - DNA, 25 bp, probe
aatgaggtacaagcaggttatccaa

SEQ ID NO: 156986 - DNA, 25 bp, probe
aatgaggaaactgcactgttttatt

SEQ ID NO: 156987 - DNA, 25 bp, probe
aatgggtgaacaacactgctggttt

SEQ ID NO: 156988 - DNA, 25 bp, probe
aatgggtgaacaacactgctggttt

SEQ ID NO: 156989 - DNA, 25 bp, probe
aatgggttgaaccaatgcagaaatt

SEQ ID NO: 156990 - DNA, 25 bp, probe
aatgggttgaaccaatgcagaaatt

SEQ ID NO: 156991 - DNA, 25 bp, probe
aatggggtgaacggtgctggcagtt

SEQ ID NO: 156992 - DNA, 25 bp, probe
aatggggtgaacggtgctggcagtt

SEQ ID NO: 156993 - DNA, 25 bp, probe
aatggtggtagacatgtgcatcagg

SEQ ID NO: 156994 - DNA, 25 bp, probe
aatcggggcgacaatagctcactgc

SEQ ID NO: 156995 - DNA, 25 bp, probe
aatccggtgtaggcacagctctcct

SEQ ID NO: 156996 - DNA, 25 bp, probe
aatgttggtggggatacctgccttg

SEQ ID NO: 156997 - DNA, 25 bp, probe
aatgttggtggggatacctgccttg

SEQ ID NO: 156998 - DNA, 25 bp, probe
aattctggttgtggttgtggccttt

SEQ ID NO: 156999 - DNA, 25 bp, probe
aatggggtctatgtttgccgtcatt

SEQ ID NO: 157000 - DNA, 25 bp, probe
aatggtggactatccttatgcctct

SEQ ID NO: 157001 - DNA, 25 bp, probe
aatggatgtactacactttatccat

SEQ ID NO: 157002 - DNA, 25 bp, probe
aatgagcttagcaatccatgtttga

SEQ ID NO: 157003 - DNA, 25 bp, probe
aatggatgaaagccacatgtctgtg

SEQ ID NO: 157004 - DNA, 25 bp, probe
aatggataatccgcatgacagataa

SEQ ID NO: 157005 - DNA, 25 bp, probe
aatggatcccggggacatgatgcgg

SEQ ID NO: 157006 - DNA, 25 bp, probe
aatggatcccggggacatgatgcgg

SEQ ID NO: 157007 - DNA, 25 bp, probe
aatggatcccggggacatgatgcgg

SEQ ID NO: 157008 - DNA, 25 bp, probe
aatggatggcagggggatcggtggc

SEQ ID NO: 157009 - DNA, 25 bp, probe
aatggagagcggcgagcatgctggg

SEQ ID NO: 157010 - DNA, 25 bp, probe
aatggagagcggcgagcatgctggg

SEQ ID NO: 157011 - DNA, 25 bp, probe
aatggcatgacaaggtgtgcagtgg

SEQ ID NO: 157012 - DNA, 25 bp, probe
aatgtgtgacttgctgtggtcagat

SEQ ID NO: 157013 - DNA, 25 bp, probe
aatgctggcctgactggttgtcaga

SEQ ID NO: 157014 - DNA, 25 bp, probe
aatgcggcactgacgggcaagtgac

SEQ ID NO: 157015 - DNA, 25 bp, probe
aatgctgacccatgggcaggagact

SEQ ID NO: 157016 - DNA, 25 bp, probe
aatgctgcctctgaagaaggagacg

SEQ ID NO: 157017 - DNA, 25 bp, probe
aatgtgtgccggaatatcagcaggc

SEQ ID NO: 157018 - DNA, 25 bp, probe
aatgttgattgggatatgatggagc

SEQ ID NO: 157019 - DNA, 25 bp, probe
aatgatcgactgactgcttgttgcc

SEQ ID NO: 157020 - DNA, 25 bp, probe
aatgtcacaatcattcattgctcca

SEQ ID NO: 157021 - DNA, 25 bp, probe
aatgttcatttgtatctggatctct

SEQ ID NO: 157022 - DNA, 25 bp, probe
caagtgtcagtttcttagttctcat

SEQ ID NO: 157023 - DNA, 25 bp, probe
aatgtgtggtaaattgcatttctct

SEQ ID NO: 157024 - DNA, 25 bp, probe
aatgtgtggtaaattgcatttctct

SEQ ID NO: 157025 - DNA, 25 bp, probe
aattggcagggtggtgttttctgtc

SEQ ID NO: 157026 - DNA, 25 bp, probe
aatgtgaagggtggggttttatgtg

SEQ ID NO: 157027 - DNA, 25 bp, probe
aatgtgaagggtggggttttatgtg

SEQ ID NO: 157028 - DNA, 25 bp, probe
aatgtaatgaggtggtactatgatt

SEQ ID NO: 157029 - DNA, 25 bp, probe
aatgtaacaggtcttattggaattg

SEQ ID NO: 157030 - DNA, 25 bp, probe
aatggaaaggctgttatatggaatg

SEQ ID NO: 157031 - DNA, 25 bp, probe
aatggcaaaggtgtatatagtatat

SEQ ID NO: 157032 - DNA, 25 bp, probe
aatggcacaaagtcttagaatatta

SEQ ID NO: 157033 - DNA, 25 bp, probe
aatggcaacatatcttcgttatgta

SEQ ID NO: 157034 - DNA, 25 bp, probe
aatgtggaaatttttgctcatttac

SEQ ID NO: 157035 - DNA, 25 bp, probe
aatgggataactgctatcctttacc

SEQ ID NO: 157036 - DNA, 25 bp, probe
aatgataattcagtccttgcctttg

SEQ ID NO: 157037 - DNA, 25 bp, probe
aatctagaacgtggattccttcttt

SEQ ID NO: 157038 - DNA, 25 bp, probe
aatctgcagcaaaggggtctcactc

SEQ ID NO: 157039 - DNA, 25 bp, probe
aatgccacagggagggatctgctgc

SEQ ID NO: 157040 - DNA, 25 bp, probe
aatgccttgccgtagggatgtctcg

SEQ ID NO: 157041 - DNA, 25 bp, probe
aatgcagtgccaagttgggttcctt

SEQ ID NO: 157042 - DNA, 25 bp, probe
aatgcaagcccattggtggatgttt

SEQ ID NO: 157043 - DNA, 25 bp, probe
aatgcatgacctttggtacatgcct

SEQ ID NO: 157044 - DNA, 25 bp, probe
aatgacggcatctgtgtgaacgtga

SEQ ID NO: 157045 - DNA, 25 bp, probe
aatgactctgtcttgtgggtgtctg

SEQ ID NO: 157046 - DNA, 25 bp, probe
aatgaccttatggctgagagttgaa

SEQ ID NO: 157047 - DNA, 25 bp, probe
aatgaccttatggctgagagttgaa

SEQ ID NO: 157048 - DNA, 25 bp, probe
aatgaccaaatttacgccatgaaag

SEQ ID NO: 157049 - DNA, 25 bp, probe
aatgaaccaagtttcgccatgctgg

SEQ ID NO: 157050 - DNA, 25 bp, probe
aatgaaccctgtcatctacagcatc

SEQ ID NO: 157051 - DNA, 25 bp, probe
aatgagatcccggactgctatacct

SEQ ID NO: 157052 - DNA, 25 bp, probe
aatgcagtcccgaggctatgaaatt

SEQ ID NO: 157053 - DNA, 25 bp, probe
aatggaacacagaggataaaatcag

SEQ ID NO: 157054 - DNA, 25 bp, probe
aatgtaaagccatgctggaaaataa

SEQ ID NO: 157055 - DNA, 25 bp, probe
aatgtaaatgccttctcaaatgaca

SEQ ID NO: 157056 - DNA, 25 bp, probe
aatgtacaaatctttcatccatacc

SEQ ID NO: 157057 - DNA, 25 bp, probe
aatgtacaaatctttcatccatacc

SEQ ID NO: 157058 - DNA, 25 bp, probe
aatgtgacaacatctttatcaccgg

SEQ ID NO: 157059 - DNA, 25 bp, probe
aatgtgacagtcagttttatagtgt

SEQ ID NO: 157060 - DNA, 25 bp, probe
aatgatgaatgtgggattattgaat

SEQ ID NO: 157061 - DNA, 25 bp, probe
aatgtgtggtgactgctttgtagtg

SEQ ID NO: 157062 - DNA, 25 bp, probe
aatgatgtggatcctgcccagttgt

SEQ ID NO: 157063 - DNA, 25 bp, probe
aatgggcaatcgacgcacagctaat

SEQ ID NO: 157064 - DNA, 25 bp, probe
aatgggcaatcgacgcacagctaat

SEQ ID NO: 157065 - DNA, 25 bp, probe
aatggatcatcaagtccaactacca

SEQ ID NO: 157066 - DNA, 25 bp, probe
aatgtgcatagaatgtccacctact

SEQ ID NO: 157067 - DNA, 25 bp, probe
aatgctcatagaggttgacccccac

SEQ ID NO: 157068 - DNA, 25 bp, probe
aatctcagagtaccgaggctccaag

SEQ ID NO: 157069 - DNA, 25 bp, probe
aatgtatcagggaccatggcccgag

SEQ ID NO: 157070 - DNA, 25 bp, probe
aatgttgcaaatatcaggctcccag

SEQ ID NO: 157071 - DNA, 25 bp, probe
aatgtgacaagtatgacgcccaggc

SEQ ID NO: 157072 - DNA, 25 bp, probe
aatgggcaagcaaggagccccccaa

SEQ ID NO: 157073 - DNA, 25 bp, probe
aatggagacagatggagacaccaaa

SEQ ID NO: 157074 - DNA, 25 bp, probe
aatggagatcaatggcatgaaatca

SEQ ID NO: 157075 - DNA, 25 bp, probe
aatgcagcagatgcacggcagaatg

SEQ ID NO: 157076 - DNA, 25 bp, probe
aatctgcagatggaatccgagcagg

SEQ ID NO: 157077 - DNA, 25 bp, probe
aatgcgcgttgactacgagcagatc

SEQ ID NO: 157078 - DNA, 25 bp, probe
aatgcgcgttgactacgagcagatc

SEQ ID NO: 157079 - DNA, 25 bp, probe
aatggtgtgccagagcaggcgctgc

SEQ ID NO: 157080 - DNA, 25 bp, probe
aatggatgttcatctgcattggctg

SEQ ID NO: 157081 - DNA, 25 bp, probe
aatgagtggctgttggttggcttga

SEQ ID NO: 157082 - DNA, 25 bp, probe
aatgagatgggttgagtttgctgta

SEQ ID NO: 157083 - DNA, 25 bp, probe
aatgagagggtgtatctgtggggca

SEQ ID NO: 157084 - DNA, 25 bp, probe
aatgtgggattattgaatgggtgaa

SEQ ID NO: 157085 - DNA, 25 bp, probe
aatgttggtatttgagaggttagtt

SEQ ID NO: 157086 - DNA, 25 bp, probe
aatggggtatgcagggtctggaagt

SEQ ID NO: 157087 - DNA, 25 bp, probe
aatgtgaaggaaatggtgtctggaa

SEQ ID NO: 157088 - DNA, 25 bp, probe
aatgtaagccagttgggctgtgtta

SEQ ID NO: 157089 - DNA, 25 bp, probe
aatgccaaccaaagcagtcatttta

SEQ ID NO: 157090 - DNA, 25 bp, probe
aatgctcccacctgaatttgtatat

SEQ ID NO: 157091 - DNA, 25 bp, probe
aatgtacaaactagaattttaatat

SEQ ID NO: 157092 - DNA, 25 bp, probe
aatggaggagacctaatgtttcata

SEQ ID NO: 157093 - DNA, 25 bp, probe
aatggaggcagcattaacagttcta

SEQ ID NO: 157094 - DNA, 25 bp, probe
aatgctaggtgcattcccattttcc

SEQ ID NO: 157095 - DNA, 25 bp, probe
aatgcgcagggcagtctgtgttcgt

SEQ ID NO: 157096 - DNA, 25 bp, probe
aatctcaggcttctggtgtatcggt

SEQ ID NO: 157097 - DNA, 25 bp, probe
aatctcaggcttctggtgtatcggt

SEQ ID NO: 157098 - DNA, 25 bp, probe
aatgtcacctgtgtgggtattttat

SEQ ID NO: 157099 - DNA, 25 bp, probe
aatgtcaccgtggtgaccttcttct

SEQ ID NO: 157100 - DNA, 25 bp, probe
aatgtttgcctgttgaacttctttc

SEQ ID NO: 157101 - DNA, 25 bp, probe
aatgtttcatcttgctcaactttct

SEQ ID NO: 157102 - DNA, 25 bp, probe
aatgtttcatgcatccatacttctg

SEQ ID NO: 157103 - DNA, 25 bp, probe
aatgtttcatgcatccatacttctg

SEQ ID NO: 157104 - DNA, 25 bp, probe
aatggttgcatcaaccctgtgctct

SEQ ID NO: 157105 - DNA, 25 bp, probe
aatgtattgcataatcaatgctggc

SEQ ID NO: 157106 - DNA, 25 bp, probe
aatgtggtgcatatgaaggactttt

SEQ ID NO: 157107 - DNA, 25 bp, probe
aatgttggtgatcataggaccgatg

SEQ ID NO: 157108 - DNA, 25 bp, probe
aatatgtggcgagagggaccctttc

SEQ ID NO: 157109 - DNA, 25 bp, probe
aatgagtggcagaggctggcccgtt

SEQ ID NO: 157110 - DNA, 25 bp, probe
aatgaggagcagaggcatggaggag

SEQ ID NO: 157111 - DNA, 25 bp, probe
aatgaagtgcacaagagcacgcagg

SEQ ID NO: 157112 - DNA, 25 bp, probe
aatgctcaggaacagaagcgagtgt

SEQ ID NO: 157113 - DNA, 25 bp, probe
aatgccttgaagacagtaccatggg

SEQ ID NO: 157114 - DNA, 25 bp, probe
aatgaccacaggacatgcaaccaga

SEQ ID NO: 157115 - DNA, 25 bp, probe
aatgccgcctggtgatacagcatga

SEQ ID NO: 157116 - DNA, 25 bp, probe
aatgacgtggactttagcatgcaga

SEQ ID NO: 157117 - DNA, 25 bp, probe
aatcacgcgatgttgactgcacagg

SEQ ID NO: 157118 - DNA, 25 bp, probe
aatgatatgcgatttgacagaagcg

SEQ ID NO: 157119 - DNA, 25 bp, probe
aatgatctggaggagtccaggcagc

SEQ ID NO: 157120 - DNA, 25 bp, probe
aatgagcgaacaggtcacagtgacc

SEQ ID NO: 157121 - DNA, 25 bp, probe
aatgagcgaacaggtcacagtgacc

SEQ ID NO: 157122 - DNA, 25 bp, probe
aatgaccccagtgccagtgagcaca

SEQ ID NO: 157123 - DNA, 25 bp, probe
aatgaccccagtgccagtgagcaca

SEQ ID NO: 157124 - DNA, 25 bp, probe
aatttaccggctgagagatgctcac

SEQ ID NO: 157125 - DNA, 25 bp, probe
aatcataaacggcgaggactgcagc

SEQ ID NO: 157126 - DNA, 25 bp, probe
aatagaaaagtgcgaggacatcctc

SEQ ID NO: 157127 - DNA, 25 bp, probe
aatagaaaagtgcgaggacatcctc

SEQ ID NO: 157128 - DNA, 25 bp, probe
aatccaaaactggcaaggacgcttc

SEQ ID NO: 157129 - DNA, 25 bp, probe
aatcctaaaatcctcgtaccattct

SEQ ID NO: 157130 - DNA, 25 bp, probe
aatcctaaaatcctcgtaccattct

SEQ ID NO: 157131 - DNA, 25 bp, probe
aatccttgcaaattacctgacctga

SEQ ID NO: 157132 - DNA, 25 bp, probe
aatgtctgtaaattctaatacttga

SEQ ID NO: 157133 - DNA, 25 bp, probe
aatgtctgggaagttactctcatgg

SEQ ID NO: 157134 - DNA, 25 bp, probe
aatgactggacaacttagctctaag

SEQ ID NO: 157135 - DNA, 25 bp, probe
aatgactggacaacttagctctaag

SEQ ID NO: 157136 - DNA, 25 bp, probe
aatgacacgttaatatccctagcag

SEQ ID NO: 157137 - DNA, 25 bp, probe
aatgtacatgtgcagatattcctaa

SEQ ID NO: 157138 - DNA, 25 bp, probe
aatgacagattccagttcccattca

SEQ ID NO: 157139 - DNA, 25 bp, probe
aatgtcatgttgcttgtcgctttct

SEQ ID NO: 157140 - DNA, 25 bp, probe
aatgtcatatatgcttgatcatttt

SEQ ID NO: 157141 - DNA, 25 bp, probe
aatgatcgatcatctatagcaaata

SEQ ID NO: 157142 - DNA, 25 bp, probe
aatcatctgcattcctgatgaccaa

SEQ ID NO: 157143 - DNA, 25 bp, probe
aatgatgctgagacgctgaacaaca

SEQ ID NO: 157144 - DNA, 25 bp, probe
aatgatggcagggataacacacaat

SEQ ID NO: 157145 - DNA, 25 bp, probe
aatgtctgaatgcttacacaaataa

SEQ ID NO: 157146 - DNA, 25 bp, probe
aatgttcttcacttgaactaatcaa

SEQ ID NO: 157147 - DNA, 25 bp, probe
aatgtatccaacagacactcaataa

SEQ ID NO: 157148 - DNA, 25 bp, probe
aatgtcccaagctgagaagaatgca

SEQ ID NO: 157149 - DNA, 25 bp, probe
aatgtcctccaacaataaagagctc

SEQ ID NO: 157150 - DNA, 25 bp, probe
aatgtttgccaaaaacaacagccaa

SEQ ID NO: 157151 - DNA, 25 bp, probe
aatgttctcccaaaaccagagttga

SEQ ID NO: 157152 - DNA, 25 bp, probe
aattgcctccaaattaccggaagag

SEQ ID NO: 157153 - DNA, 25 bp, probe
aatccattggaagtcccctgaaagg

SEQ ID NO: 157154 - DNA, 25 bp, probe
caatccattggaagtcccctgaaag

SEQ ID NO: 157155 - DNA, 25 bp, probe
aatcctcgaatgttccacacgtgga

SEQ ID NO: 157156 - DNA, 25 bp, probe
aatcctcgaatgttccacacgtgga

SEQ ID NO: 157157 - DNA, 25 bp, probe
caatacaggtagttccaaggattca

SEQ ID NO: 157158 - DNA, 25 bp, probe
aatgacaaatggcctccaaggattt

SEQ ID NO: 157159 - DNA, 25 bp, probe
aatgaacaacagcattcagttattt

SEQ ID NO: 157160 - DNA, 25 bp, probe
aatgttcaaactttgcaggcatttt

SEQ ID NO: 157161 - DNA, 25 bp, probe
aatgttaccaactgctgagattttt

SEQ ID NO: 157162 - DNA, 25 bp, probe
aatgttaccaactgctgagattttt

SEQ ID NO: 157163 - DNA, 25 bp, probe
aatttgacctacttgctggggtaca

SEQ ID NO: 157164 - DNA, 25 bp, probe
aatgttcccttcttgtagagagatg

SEQ ID NO: 157165 - DNA, 25 bp, probe
aattctgtcctcactgataggggtt

SEQ ID NO: 157166 - DNA, 25 bp, probe
aatctattacttatggagggtgtgt

SEQ ID NO: 157167 - DNA, 25 bp, probe
caacccttcttgcctgggtaggaga

SEQ ID NO: 157168 - DNA, 25 bp, probe
aatgccaccatctccgtggaaggaa

SEQ ID NO: 157169 - DNA, 25 bp, probe
aatgtcagatatcctccgggagctg

SEQ ID NO: 157170 - DNA, 25 bp, probe
aattcagtatccactgggtgccttg

SEQ ID NO: 157171 - DNA, 25 bp, probe
aatgcgcaggatgcggatggggcca

SEQ ID NO: 157172 - DNA, 25 bp, probe
aatgagagaagagagtgccagagtc

SEQ ID NO: 157173 - DNA, 25 bp, probe
aatgagcgggaccggatcagcactc

SEQ ID NO: 157174 - DNA, 25 bp, probe
aatcggggattggtgagccagctgc

SEQ ID NO: 157175 - DNA, 25 bp, probe
aatcttgtggacatggcagcacagg

SEQ ID NO: 157176 - DNA, 25 bp, probe
aatcttgtggacatggcagcacagg

SEQ ID NO: 157177 - DNA, 25 bp, probe
aatgaagtccacaactggacagagt

SEQ ID NO: 157178 - DNA, 25 bp, probe
aatgaagtccacaactggacagagt

SEQ ID NO: 157179 - DNA, 25 bp, probe
aatgaggctccaatacatgggaagc

SEQ ID NO: 157180 - DNA, 25 bp, probe
aatgatgagtcctctctggtcagac

SEQ ID NO: 157181 - DNA, 25 bp, probe
aatgctgaatgtttcttgatgccaa

SEQ ID NO: 157182 - DNA, 25 bp, probe
aatgtgatactgtctctttgaagca

SEQ ID NO: 157183 - DNA, 25 bp, probe
aatgctgaagctcttcttgaatggg

SEQ ID NO: 157184 - DNA, 25 bp, probe
aatgtgaagcatccggttactgggc

SEQ ID NO: 157185 - DNA, 25 bp, probe
aatgctgaagagagtgttgatgggg

SEQ ID NO: 157186 - DNA, 25 bp, probe
aatcgaacagtcgctgaacggcgtg

SEQ ID NO: 157187 - DNA, 25 bp, probe
aatgagaatatccccgagttggcgg

SEQ ID NO: 157188 - DNA, 25 bp, probe
aatgagaagacggctcggtgagggg

SEQ ID NO: 157189 - DNA, 25 bp, probe
aatgagaagacggctcggtgagggg

SEQ ID NO: 157190 - DNA, 25 bp, probe
aatgaggaccaggcttgctgtgaag

SEQ ID NO: 157191 - DNA, 25 bp, probe
aatcatggacgcacctgtggggagc

SEQ ID NO: 157192 - DNA, 25 bp, probe
aatctcaggcgcagcgcctcgcgaa

SEQ ID NO: 157193 - DNA, 25 bp, probe
aatccagggcgggatcctgaacctg

SEQ ID NO: 157194 - DNA, 25 bp, probe
aatctcagaaggtcctcctgaaccg

SEQ ID NO: 157195 - DNA, 25 bp, probe
aatgtgtgtaggtctcactgtaaca

SEQ ID NO: 157196 - DNA, 25 bp, probe
aatgttggtgccttttgtgccacaa

SEQ ID NO: 157197 - DNA, 25 bp, probe
aatgtgtggtggttgtattggagca

SEQ ID NO: 157198 - DNA, 25 bp, probe
aatgtgtggcagatttagtgaaagc

SEQ ID NO: 157199 - DNA, 25 bp, probe
aatgcgtatcgcaattatagttata

SEQ ID NO: 157200 - DNA, 25 bp, probe
aatcgccatcgcaaccggaaagatg

SEQ ID NO: 157201 - DNA, 25 bp, probe
aatcgactgcatcacgcagggacgt

SEQ ID NO: 157202 - DNA, 25 bp, probe
aatgcaactgcaagtaggttactgt

SEQ ID NO: 157203 - DNA, 25 bp, probe
aatgccctcaagattgtggactttg

SEQ ID NO: 157204 - DNA, 25 bp, probe
aatgccctatagcaagctcatgttt

SEQ ID NO: 157205 - DNA, 25 bp, probe
aatgacaatgaagtgacactttgac

SEQ ID NO: 157206 - DNA, 25 bp, probe
aatgacagtgaattgacccatgttc

SEQ ID NO: 157207 - DNA, 25 bp, probe
aatgatcatggtcgtgaccgctgcc

SEQ ID NO: 157208 - DNA, 25 bp, probe
aatgacattgtcgtgaaggtgctga

SEQ ID NO: 157209 - DNA, 25 bp, probe
aatgtgctctgttgtcacaggatgt

SEQ ID NO: 157210 - DNA, 25 bp, probe
aatgctccattgcctacagatatca

SEQ ID NO: 157211 - DNA, 25 bp, probe
aatgccttagcagaagataaatcct

SEQ ID NO: 157212 - DNA, 25 bp, probe
aatgcctttgggcagaaagtcctag

SEQ ID NO: 157213 - DNA, 25 bp, probe
aatgcctttgggcagaaagtcctag

SEQ ID NO: 157214 - DNA, 25 bp, probe
aatcctgtgggacaaatttactgta

SEQ ID NO: 157215 - DNA, 25 bp, probe
aatccccagtttgtatttagctgcc

SEQ ID NO: 157216 - DNA, 25 bp, probe
aatgtcctgctgtggcgttttatgt

SEQ ID NO: 157217 - DNA, 25 bp, probe
aatgcatcctctttgggttaatggc

SEQ ID NO: 157218 - DNA, 25 bp, probe
aatgactcgagttgtggattgcaag

SEQ ID NO: 157219 - DNA, 25 bp, probe
aatgcggctgcactggtggaagaag

SEQ ID NO: 157220 - DNA, 25 bp, probe
aatgcttccgggctggcatgaagaa

SEQ ID NO: 157221 - DNA, 25 bp, probe
aatgtgttttggcatcagctactga

SEQ ID NO: 157222 - DNA, 25 bp, probe
aatgtgtcttgtccaacctacaaaa

SEQ ID NO: 157223 - DNA, 25 bp, probe
aatgtgtcttgtccaacctacaaaa

SEQ ID NO: 157224 - DNA, 25 bp, probe
aatgtctgttggaaccttacccagc

SEQ ID NO: 157225 - DNA, 25 bp, probe
aatgttgttggttactgttgctccc

SEQ ID NO: 157226 - DNA, 25 bp, probe
aatgtttatggcacctgacttgtaa

SEQ ID NO: 157227 - DNA, 25 bp, probe
cactacattattccacctactttga

SEQ ID NO: 157228 - DNA, 25 bp, probe
cactacattattccacctactttga

SEQ ID NO: 157229 - DNA, 25 bp, probe
caatgactttaccagctgctgacta

SEQ ID NO: 157230 - DNA, 25 bp, probe
aatgatccttcacgcagtgtttcag

SEQ ID NO: 157231 - DNA, 25 bp, probe
aattccattagctctgttgtatccc

SEQ ID NO: 157232 - DNA, 25 bp, probe
aattcaactgagtaagtctgaacct

SEQ ID NO: 157233 - DNA, 25 bp, probe
aatgatccctggcaacggacagcca

SEQ ID NO: 157234 - DNA, 25 bp, probe
aatgacatccgtcattccaaacctc

SEQ ID NO: 157235 - DNA, 25 bp, probe
aatgacccagtggttcctaatcctc

SEQ ID NO: 157236 - DNA, 25 bp, probe
aatgacctgggttatcacttttcct

SEQ ID NO: 157237 - DNA, 25 bp, probe
aatgtcttgtgtcataaatatattc

SEQ ID NO: 157238 - DNA, 25 bp, probe
aatgctcttttgcacaaggaaataa

SEQ ID NO: 157239 - DNA, 25 bp, probe
aatgactgcgttggagagggtaaaa

SEQ ID NO: 157240 - DNA, 25 bp, probe
aatgactgttcttgcgggggataaa

SEQ ID NO: 157241 - DNA, 25 bp, probe
aatgcctcctgctggaggggaaatc

SEQ ID NO: 157242 - DNA, 25 bp, probe
aatcagcctgtgtggggtggagcca

SEQ ID NO: 157243 - DNA, 25 bp, probe
aatcggtattggtggagcggctccc

SEQ ID NO: 157244 - DNA, 25 bp, probe
aatccttcctggagtagaggccctc

SEQ ID NO: 157245 - DNA, 25 bp, probe
gaatacgttaggagccagtacccca

SEQ ID NO: 157246 - DNA, 25 bp, probe
gaagacggggacaccagtggagccc

SEQ ID NO: 157247 - DNA, 25 bp, probe
aatcaagagggaacccatgggactc

SEQ ID NO: 157248 - DNA, 25 bp, probe
aatgccacagtggatacgccagcag

SEQ ID NO: 157249 - DNA, 25 bp, probe
aatgccacagtggatacgccagcag

SEQ ID NO: 157250 - DNA, 25 bp, probe
aatgtctctatggattctgacagag

SEQ ID NO: 157251 - DNA, 25 bp, probe
aatgctgtctgaaacactatcgaac

SEQ ID NO: 157252 - DNA, 25 bp, probe
aatgtgcttatgaccacttagaagt

SEQ ID NO: 157253 - DNA, 25 bp, probe
aatgttattttccttctgaagtctg

SEQ ID NO: 157254 - DNA, 25 bp, probe
aatgtgcgcattttgcattccatat

SEQ ID NO: 157255 - DNA, 25 bp, probe
caattccttttcacatattcctttc

SEQ ID NO: 157256 - DNA, 25 bp, probe
aatccagttaccacatattcacgtt

SEQ ID NO: 157257 - DNA, 25 bp, probe
aatccagagtcaagcaacatttcaa

SEQ ID NO: 157258 - DNA, 25 bp, probe
aatgccgtggcaaagagctcagaaa

SEQ ID NO: 157259 - DNA, 25 bp, probe
aatgttggagtatgatccagccaaa

SEQ ID NO: 157260 - DNA, 25 bp, probe
aatgttaatctatgatccagccaaa

SEQ ID NO: 157261 - DNA, 25 bp, probe
aatgctaataaaagtgacgctcaat

SEQ ID NO: 157262 - DNA, 25 bp, probe
aatgctaataaaagtgacgctcaat

SEQ ID NO: 157263 - DNA, 25 bp, probe
aatgctaccattgagatccctaatt

SEQ ID NO: 157264 - DNA, 25 bp, probe
aatgctaccattgagatccctaatt

SEQ ID NO: 157265 - DNA, 25 bp, probe
aatgtaccattggactctcagtctg

SEQ ID NO: 157266 - DNA, 25 bp, probe
aatgccactcttgggccaaggctgt

SEQ ID NO: 157267 - DNA, 25 bp, probe
aatgatctttctggagctaaacttc

SEQ ID NO: 157268 - DNA, 25 bp, probe
aatgatctttctggagctaaacttc

SEQ ID NO: 157269 - DNA, 25 bp, probe
aatgagcttagtacctccaacttcc

SEQ ID NO: 157270 - DNA, 25 bp, probe
aatgaataagtagccctcactttca

SEQ ID NO: 157271 - DNA, 25 bp, probe
aatgaataagtagccctcactttca

SEQ ID NO: 157272 - DNA, 25 bp, probe
aatctaatattagccttgtctttga

SEQ ID NO: 157273 - DNA, 25 bp, probe
aatccaaatctgtcctctgtagtat

SEQ ID NO: 157274 - DNA, 25 bp, probe
aatgccatcaactatgccctgggca

SEQ ID NO: 157275 - DNA, 25 bp, probe
aatgcccagaccatgcctggtgaag

SEQ ID NO: 157276 - DNA, 25 bp, probe
aatgccacagaacctgcggtagtac

SEQ ID NO: 157277 - DNA, 25 bp, probe
aatgccacagaacctgcggtagtac

SEQ ID NO: 157278 - DNA, 25 bp, probe
aatgaaagcacacttcgggatgacc

SEQ ID NO: 157279 - DNA, 25 bp, probe
aatgaaagccagtgcgtggagtgca

SEQ ID NO: 157280 - DNA, 25 bp, probe
aatccaagcaagcggctgggctgca

SEQ ID NO: 157281 - DNA, 25 bp, probe
aatcccagcactttgagaggccaag

SEQ ID NO: 157282 - DNA, 25 bp, probe
aatcccagcaccttgggagggtgag

SEQ ID NO: 157283 - DNA, 25 bp, probe
aatcccagcactttgggaggccgag

SEQ ID NO: 157284 - DNA, 25 bp, probe
aatcccagcacgttgggaggccaag

SEQ ID NO: 157285 - DNA, 25 bp, probe
aattcaaggcgatggggcccaagcc

SEQ ID NO: 157286 - DNA, 25 bp, probe
aatgaaatcctgtggggccaccgct

SEQ ID NO: 157287 - DNA, 25 bp, probe
aataaccctgaagactccacatact

SEQ ID NO: 157288 - DNA, 25 bp, probe
aatgaagccggaccttttcacatac

SEQ ID NO: 157289 - DNA, 25 bp, probe
aatgaagccggaccttttcacatac

SEQ ID NO: 157290 - DNA, 25 bp, probe
aataagtataggattttgcacattg

SEQ ID NO: 157291 - DNA, 25 bp, probe
aatgtagcaataatgtcttttgaat

SEQ ID NO: 157292 - DNA, 25 bp, probe
aatgtaatatacactgattgctggg

SEQ ID NO: 157293 - DNA, 25 bp, probe
aatgtaatatacactgattgctggg

SEQ ID NO: 157294 - DNA, 25 bp, probe
aatgtatttctttctgatgtttggt

SEQ ID NO: 157295 - DNA, 25 bp, probe
aatgcagactctgctaccattttgg

SEQ ID NO: 157296 - DNA, 25 bp, probe
aatgcatagtgcattgccccttggg

SEQ ID NO: 157297 - DNA, 25 bp, probe
aatgaaactttgacctttgaggatg

SEQ ID NO: 157298 - DNA, 25 bp, probe
aatgaaccatggcacctttgagaga

SEQ ID NO: 157299 - DNA, 25 bp, probe
aatgagaccacggagacccagagga

SEQ ID NO: 157300 - DNA, 25 bp, probe
aatgagatgcgggcactaacccagg

SEQ ID NO: 157301 - DNA, 25 bp, probe
aatgaggtgttagaagccatcgttc

SEQ ID NO: 157302 - DNA, 25 bp, probe
aatcagggtgtggtagaacactttc

SEQ ID NO: 157303 - DNA, 25 bp, probe
aatcacaaggacatagatacctatc

SEQ ID NO: 157304 - DNA, 25 bp, probe
aatcccagaactcaggactggagcc

SEQ ID NO: 157305 - DNA, 25 bp, probe
aatcccaggcattgctaaggttggc

SEQ ID NO: 157306 - DNA, 25 bp, probe
aatcccttgaggaagaggctcgcct

SEQ ID NO: 157307 - DNA, 25 bp, probe
aatgcaccttagcagaaggtcgatg

SEQ ID NO: 157308 - DNA, 25 bp, probe
aatcaccttgagtgactgggcagca

SEQ ID NO: 157309 - DNA, 25 bp, probe
aataccttggggacgaagcgtatca

SEQ ID NO: 157310 - DNA, 25 bp, probe
aatagcttgggagactggacattaa

SEQ ID NO: 157311 - DNA, 25 bp, probe
aatactgttcgacatagtgacggaa

SEQ ID NO: 157312 - DNA, 25 bp, probe
aatacagctttgagctcagcatgac

SEQ ID NO: 157313 - DNA, 25 bp, probe
aatgatactttagctcaatattcaa

SEQ ID NO: 157314 - DNA, 25 bp, probe
aatgatactttagctcaatattcaa

SEQ ID NO: 157315 - DNA, 25 bp, probe
aatgcacctttataaatcacatgaa

SEQ ID NO: 157316 - DNA, 25 bp, probe
aatgcacactttatagtttcaagat

SEQ ID NO: 157317 - DNA, 25 bp, probe
aatgtacgttacagctttcacagag

SEQ ID NO: 157318 - DNA, 25 bp, probe
aatgagccgttaagtcttttctgat

SEQ ID NO: 157319 - DNA, 25 bp, probe
aatcccgttttgacatgttcactgt

SEQ ID NO: 157320 - DNA, 25 bp, probe
aatgctgaccctaggattttccttc

SEQ ID NO: 157321 - DNA, 25 bp, probe
aatgctgaccctaggattttccttc

SEQ ID NO: 157322 - DNA, 25 bp, probe
aatgctgaccctaggattttccttc

SEQ ID NO: 157323 - DNA, 25 bp, probe
aatgtttctgctattttctcacttt

SEQ ID NO: 157324 - DNA, 25 bp, probe
aatgttttgctactcttgtcagaca

SEQ ID NO: 157325 - DNA, 25 bp, probe
aatgtttattagttctgtatacagt

SEQ ID NO: 157326 - DNA, 25 bp, probe
aatgtttgacatcatcctggatgag

SEQ ID NO: 157327 - DNA, 25 bp, probe
aatgatatgcatcaccaccttgtag

SEQ ID NO: 157328 - DNA, 25 bp, probe
aatgatatgcatcaccaccttgtag

SEQ ID NO: 157329 - DNA, 25 bp, probe
aatgattgtaacagcctgcagtaca

SEQ ID NO: 157330 - DNA, 25 bp, probe
aatcaggaaagctcaatcagataca

SEQ ID NO: 157331 - DNA, 25 bp, probe
aatcagtacaatcacacaaggagga

SEQ ID NO: 157332 - DNA, 25 bp, probe
aatgctgtaccacagagccgggtgt

SEQ ID NO: 157333 - DNA, 25 bp, probe
aatgctgtaccacagagccgggtgt

SEQ ID NO: 157334 - DNA, 25 bp, probe
aatctggaccacacagacgacgact

SEQ ID NO: 157335 - DNA, 25 bp, probe
aatctgggctttgagacgtcagcct

SEQ ID NO: 157336 - DNA, 25 bp, probe
aatgcggagttacactcccgactaa

SEQ ID NO: 157337 - DNA, 25 bp, probe
aatcagtttccacatcctatgtact

SEQ ID NO: 157338 - DNA, 25 bp, probe
aatccttccacatactgttaagatg

SEQ ID NO: 157339 - DNA, 25 bp, probe
aatcccaaatcaagatctatgtaga

SEQ ID NO: 157340 - DNA, 25 bp, probe
aatcccaaatcaagatctatgtaga

SEQ ID NO: 157341 - DNA, 25 bp, probe
aatgcccagtaaaatttcaggatta

SEQ ID NO: 157342 - DNA, 25 bp, probe
aatgcacggctaaactattcagagt

SEQ ID NO: 157343 - DNA, 25 bp, probe
aatgcaagcccaaatttataggaca

SEQ ID NO: 157344 - DNA, 25 bp, probe
aatgcaacatccatttttcacccta

SEQ ID NO: 157345 - DNA, 25 bp, probe
aataacatggtcatttccggagtac

SEQ ID NO: 157346 - DNA, 25 bp, probe
aataactgttctttcccagtagtgt

SEQ ID NO: 157347 - DNA, 25 bp, probe
aatccatgctttgtttagggagtga

SEQ ID NO: 157348 - DNA, 25 bp, probe
aatgccatcttcagttttggttttc

SEQ ID NO: 157349 - DNA, 25 bp, probe
aatgccactccaggggtacagtttt

SEQ ID NO: 157350 - DNA, 25 bp, probe
caatgccagcatgaaggaagaactt

SEQ ID NO: 157351 - DNA, 25 bp, probe
aatgccagaccagtatggatgaact

SEQ ID NO: 157352 - DNA, 25 bp, probe
aatgctctacggaaacatattctag

SEQ ID NO: 157353 - DNA, 25 bp, probe
aatgcctagcagagaactgccttaa

SEQ ID NO: 157354 - DNA, 25 bp, probe
aatgcctagcagagaactgccttaa

SEQ ID NO: 157355 - DNA, 25 bp, probe
aatgccatagatcaaaggcctcaga

SEQ ID NO: 157356 - DNA, 25 bp, probe
aatgaaacatatttagagcacttaa

SEQ ID NO: 157357 - DNA, 25 bp, probe
aatgcaaaatctctactgctttgga

SEQ ID NO: 157358 - DNA, 25 bp, probe
aatgcaaagctctttacctcttgct

SEQ ID NO: 157359 - DNA, 25 bp, probe
aatgagcaagccgcagaactcttcg

SEQ ID NO: 157360 - DNA, 25 bp, probe
aatgagcaggtccaagacacttatt

SEQ ID NO: 157361 - DNA, 25 bp, probe
aatgcatgcagcccaacaacatcat

SEQ ID NO: 157362 - DNA, 25 bp, probe
aatgctgcaagccaagcagacttga

SEQ ID NO: 157363 - DNA, 25 bp, probe
aatgctgaacgccaggaagtgtcct

SEQ ID NO: 157364 - DNA, 25 bp, probe
aatgctgtccagcaggaagatctgt

SEQ ID NO: 157365 - DNA, 25 bp, probe
aatgccaatcatagagggtactgta

SEQ ID NO: 157366 - DNA, 25 bp, probe
aatccatactgggggcagacactat

SEQ ID NO: 157367 - DNA, 25 bp, probe
aatcctcctgtaatggaacctgtgg

SEQ ID NO: 157368 - DNA, 25 bp, probe
aatcccggctgaatgagaccacgga

SEQ ID NO: 157369 - DNA, 25 bp, probe
aatccatgggtgaaaagtagccaga

SEQ ID NO: 157370 - DNA, 25 bp, probe
aatccatgggtgaaaagtagccaga

SEQ ID NO: 157371 - DNA, 25 bp, probe
aatcctgtgtgtgattactagtagg

SEQ ID NO: 157372 - DNA, 25 bp, probe
aatcctgtgtgtgattactagtagg

SEQ ID NO: 157373 - DNA, 25 bp, probe
aatgctcgtgtgatttcctacagaa

SEQ ID NO: 157374 - DNA, 25 bp, probe
aatccaagatggttggctctacaaa

SEQ ID NO: 157375 - DNA, 25 bp, probe
aatccacgatgaagggatgctttac

SEQ ID NO: 157376 - DNA, 25 bp, probe
aatccacgatgaagggatgctttac

SEQ ID NO: 157377 - DNA, 25 bp, probe
aatgccttagcactggagagctttt

SEQ ID NO: 157378 - DNA, 25 bp, probe
aatgttttctagcagatgcctcttg

SEQ ID NO: 157379 - DNA, 25 bp, probe
aatgttctaggaaggcatgtctatt

SEQ ID NO: 157380 - DNA, 25 bp, probe
aatgttcatatgggtagcagatttt

SEQ ID NO: 157381 - DNA, 25 bp, probe
aatgttcattaagttctgaatgtta

SEQ ID NO: 157382 - DNA, 25 bp, probe
aatgcttattaccttctgggcattt

SEQ ID NO: 157383 - DNA, 25 bp, probe
aatgactattccctgacagttattt

SEQ ID NO: 157384 - DNA, 25 bp, probe
aatgaagagtttcggcaagcttttc

SEQ ID NO: 157385 - DNA, 25 bp, probe
aatgcaatactttgggttggtttct

SEQ ID NO: 157386 - DNA, 25 bp, probe
aatgaaatcatattaagttgttttt

SEQ ID NO: 157387 - DNA, 25 bp, probe
aatgatattgaacaggctttttgtt

SEQ ID NO: 157388 - DNA, 25 bp, probe
aatgatcttcaatcagacatcagtt

SEQ ID NO: 157389 - DNA, 25 bp, probe
aatcctgtgcaatagacacatacat

SEQ ID NO: 157390 - DNA, 25 bp, probe
aatcctgcatcaaggctgacagccc

SEQ ID NO: 157391 - DNA, 25 bp, probe
aatctccagcatggaaaagctgcac

SEQ ID NO: 157392 - DNA, 25 bp, probe
aatctatcagatcatgctggactgc

SEQ ID NO: 157393 - DNA, 25 bp, probe
aatgcttcagatgggctgtgcacac

SEQ ID NO: 157394 - DNA, 25 bp, probe
aatgcattatgtggactgaaccgac

SEQ ID NO: 157395 - DNA, 25 bp, probe
aatgatttgtcgcctgtctgactga

SEQ ID NO: 157396 - DNA, 25 bp, probe
aatgatggtgtacctggtgattgta

SEQ ID NO: 157397 - DNA, 25 bp, probe
aatgagatgatcgaatctgggtgtt

SEQ ID NO: 157398 - DNA, 25 bp, probe
aatgaggtcaccatcatggtgtcta

SEQ ID NO: 157399 - DNA, 25 bp, probe
aatgatgtgtagtttatttgtgctt

SEQ ID NO: 157400 - DNA, 25 bp, probe
aatgatgttatatttctctggagaa

SEQ ID NO: 157401 - DNA, 25 bp, probe
aatgctattgaaattactgaaaaca

SEQ ID NO: 157402 - DNA, 25 bp, probe
aatgctattgaaattactgaaaaca

SEQ ID NO: 157403 - DNA, 25 bp, probe
aatgctttagaaggatctgttaatc

SEQ ID NO: 157404 - DNA, 25 bp, probe
aatgcatttgcccaatattttacat

SEQ ID NO: 157405 - DNA, 25 bp, probe
aatcatgttgcagcaattcactgta

SEQ ID NO: 157406 - DNA, 25 bp, probe
aatgcatttgatggccaccagcttc

SEQ ID NO: 157407 - DNA, 25 bp, probe
aatgcatttgatggccaccagcttc

SEQ ID NO: 157408 - DNA, 25 bp, probe
aatgatgtgtgcaagtacgacttcg

SEQ ID NO: 157409 - DNA, 25 bp, probe
aatgagtgtgcatggaggccctcct

SEQ ID NO: 157410 - DNA, 25 bp, probe
aatgatgctggatgggactctacac

SEQ ID NO: 157411 - DNA, 25 bp, probe
aatgatgtgtcatatgagtcctcaa

SEQ ID NO: 157412 - DNA, 25 bp, probe
aatgatggacattcagactcctgaa

SEQ ID NO: 157413 - DNA, 25 bp, probe
aatgatgtgatgggcagcagcatcc

SEQ ID NO: 157414 - DNA, 25 bp, probe
aatgcatatgtgatgcatcatctta

SEQ ID NO: 157415 - DNA, 25 bp, probe
aatgatatggcagcttctacatacg

SEQ ID NO: 157416 - DNA, 25 bp, probe
aatgcaattgcagcccagataaagt

SEQ ID NO: 157417 - DNA, 25 bp, probe
aatgcaaatggagctcagtctaata

SEQ ID NO: 157418 - DNA, 25 bp, probe
aatgcataaggaattaatcttcata

SEQ ID NO: 157419 - DNA, 25 bp, probe
aatgcataaggaattaatcttcata

SEQ ID NO: 157420 - DNA, 25 bp, probe
aatgctgaaggaaccaacagtccac

SEQ ID NO: 157421 - DNA, 25 bp, probe
aatgccttcagtaccgacgtacact

SEQ ID NO: 157422 - DNA, 25 bp, probe
aatgccttcagtaccgacgtacact

SEQ ID NO: 157423 - DNA, 25 bp, probe
aatccgctggtgaccggttacttgg

SEQ ID NO: 157424 - DNA, 25 bp, probe
aatccgctggtgaccggttacttgg

SEQ ID NO: 157425 - DNA, 25 bp, probe
aatagctttggttcggttccttgtg

SEQ ID NO: 157426 - DNA, 25 bp, probe
aatacgattttctgttgcaccttgt

SEQ ID NO: 157427 - DNA, 25 bp, probe
caatacgattttctgttgcaccttg

SEQ ID NO: 157428 - DNA, 25 bp, probe
aatacaagttagctgtggagtttgg

SEQ ID NO: 157429 - DNA, 25 bp, probe
aatccagaggctagcagttcaactt

SEQ ID NO: 157430 - DNA, 25 bp, probe
aatccagtggtgccttacatggtgt

SEQ ID NO: 157431 - DNA, 25 bp, probe
aatctaggtttgttactggcttcag

SEQ ID NO: 157432 - DNA, 25 bp, probe
aatctaggtttgttactggcttcag

SEQ ID NO: 157433 - DNA, 25 bp, probe
aatcctgggtgtttatcacgttcag

SEQ ID NO: 157434 - DNA, 25 bp, probe
aatcctgggtgtttatcacgttcag

SEQ ID NO: 157435 - DNA, 25 bp, probe
aatcctggggttgactgtgtccatt

SEQ ID NO: 157436 - DNA, 25 bp, probe
caatcccgttttgacatgttcactg

SEQ ID NO: 157437 - DNA, 25 bp, probe
aatccttatttttcatcatggcctc

SEQ ID NO: 157438 - DNA, 25 bp, probe
aatccttgcatttttgtaacactga

SEQ ID NO: 157439 - DNA, 25 bp, probe
aatctgttattactagcaaattcta

SEQ ID NO: 157440 - DNA, 25 bp, probe
aatgcttccatttgtaatcaagtta

SEQ ID NO: 157441 - DNA, 25 bp, probe
aatgagctcgcatttgtcaatgaca

SEQ ID NO: 157442 - DNA, 25 bp, probe
aatgagctcgcatttgtcaatgaca

SEQ ID NO: 157443 - DNA, 25 bp, probe
aatgaatctgattgttgtcaacaca

SEQ ID NO: 157444 - DNA, 25 bp, probe
aatgagttcatccatttgacaatga

SEQ ID NO: 157445 - DNA, 25 bp, probe
aatgagttcatccatttgacaatga

SEQ ID NO: 157446 - DNA, 25 bp, probe
aatgaatctctccatctgggaatga

SEQ ID NO: 157447 - DNA, 25 bp, probe
aatgaatcatcggcttggtactgaa

SEQ ID NO: 157448 - DNA, 25 bp, probe
aatgaatcatcggcttggtactgaa

SEQ ID NO: 157449 - DNA, 25 bp, probe
aatgacaatcttttgaatagtgcaa

SEQ ID NO: 157450 - DNA, 25 bp, probe
aatgaattgcctttgataattctta

SEQ ID NO: 157451 - DNA, 25 bp, probe
aatccaatgcttctgcatactgtgt

SEQ ID NO: 157452 - DNA, 25 bp, probe
aatccaactcatttatacttttatt

SEQ ID NO: 157453 - DNA, 25 bp, probe
aatccacacttaatataattcgcca

SEQ ID NO: 157454 - DNA, 25 bp, probe
gagacgactgttgtaacttaccctt

SEQ ID NO: 157455 - DNA, 25 bp, probe
caaggtgcttctgtacttttccagc

SEQ ID NO: 157456 - DNA, 25 bp, probe
aatgagtgtattcttctcttctccg

SEQ ID NO: 157457 - DNA, 25 bp, probe
aatgaatgactgccgttgcttttcc

SEQ ID NO: 157458 - DNA, 25 bp, probe
aatgacaccggctttgtggacatcc

SEQ ID NO: 157459 - DNA, 25 bp, probe
aatgacacgaggctagtccaagtgc

SEQ ID NO: 157460 - DNA, 25 bp, probe
aatgcaaccttgcatcagtaaggtg

SEQ ID NO: 157461 - DNA, 25 bp, probe
aatacagcacccccatggaagtggt

SEQ ID NO: 157462 - DNA, 25 bp, probe
aatacaaccccaatgatgaagaaga

SEQ ID NO: 157463 - DNA, 25 bp, probe
aatgagcaaggcctcttggacaaat

SEQ ID NO: 157464 - DNA, 25 bp, probe
aatgcagtcgatacaatgcgtagat

SEQ ID NO: 157465 - DNA, 25 bp, probe
aatgcagtccaaacatgaaaggaaa

SEQ ID NO: 157466 - DNA, 25 bp, probe
aatgatgtacaaactaaggactatt

SEQ ID NO: 157467 - DNA, 25 bp, probe
aatagttaaactctatgattatttc

SEQ ID NO: 157468 - DNA, 25 bp, probe
aatgagtttaagctctattctgtct

SEQ ID NO: 157469 - DNA, 25 bp, probe
aatgagccttactgtatttagtgtg

SEQ ID NO: 157470 - DNA, 25 bp, probe
aatcggttgaccctactgtggattg

SEQ ID NO: 157471 - DNA, 25 bp, probe
aatcggttgaccctactgtggattg

SEQ ID NO: 157472 - DNA, 25 bp, probe
aatcctgaccaggtgtacttggtag

SEQ ID NO: 157473 - DNA, 25 bp, probe
aatccccagagcttggagtctgggc

SEQ ID NO: 157474 - DNA, 25 bp, probe
aataccagcaggaggttctgggcct

SEQ ID NO: 157475 - DNA, 25 bp, probe
aatgcccatcaagcatggtttttgc

SEQ ID NO: 157476 - DNA, 25 bp, probe
aatgcttctgcatactgtgttatgt

SEQ ID NO: 157477 - DNA, 25 bp, probe
aatgcttctgcatactgtgttatgt

SEQ ID NO: 157478 - DNA, 25 bp, probe
aatgacctgcatcaagtcttctgat

SEQ ID NO: 157479 - DNA, 25 bp, probe
aatgaccacatttgtattactgatg

SEQ ID NO: 157480 - DNA, 25 bp, probe
aatgacctatgtttagtcacatatt

SEQ ID NO: 157481 - DNA, 25 bp, probe
aatgacctatgtttagtcacatatt

SEQ ID NO: 157482 - DNA, 25 bp, probe
aatgactcctttaagtacactttgt

SEQ ID NO: 157483 - DNA, 25 bp, probe
aatgagattattttggtacaccttt

SEQ ID NO: 157484 - DNA, 25 bp, probe
aatgagattcttttgtgtgactttg

SEQ ID NO: 157485 - DNA, 25 bp, probe
aatgaatcctggggttgactgtgtc

SEQ ID NO: 157486 - DNA, 25 bp, probe
aatgcgagccgggtgttccaggctc

SEQ ID NO: 157487 - DNA, 25 bp, probe
aatgcgagccgggtgttccaggctc

SEQ ID NO: 157488 - DNA, 25 bp, probe
aatagcaggcaagaggatccaggtc

SEQ ID NO: 157489 - DNA, 25 bp, probe
caatacgaatacgaggtccgaatgc

SEQ ID NO: 157490 - DNA, 25 bp, probe
aatgactgaagtgatgatgcccgaa

SEQ ID NO: 157491 - DNA, 25 bp, probe
aatgactgaagtgatgatgcccgaa

SEQ ID NO: 157492 - DNA, 25 bp, probe
aatgaggaagcttgcaacatgccca

SEQ ID NO: 157493 - DNA, 25 bp, probe
aatgctggcaattcagcaaagaaca

SEQ ID NO: 157494 - DNA, 25 bp, probe
aatgctggagtctgtgaaaacgtgg

SEQ ID NO: 157495 - DNA, 25 bp, probe
aatcgtagtgcttgtacttacctcg

SEQ ID NO: 157496 - DNA, 25 bp, probe
aatagttggggtgttgactcctgtg

SEQ ID NO: 157497 - DNA, 25 bp, probe
aattttgtgggtgtgtggtggtgtg

SEQ ID NO: 157498 - DNA, 25 bp, probe
aatgcttttgggagctgtgggcgca

SEQ ID NO: 157499 - DNA, 25 bp, probe
aatgcttaatggacctttccagcac

SEQ ID NO: 157500 - DNA, 25 bp, probe
aatgctgagaatgatccctactcaa

SEQ ID NO: 157501 - DNA, 25 bp, probe
aatgctgagttgaatgccctggcta

SEQ ID NO: 157502 - DNA, 25 bp, probe
aatgccgtggattgcacgtggcctc

SEQ ID NO: 157503 - DNA, 25 bp, probe
aatgctctggaacgacatgtggcgc

SEQ ID NO: 157504 - DNA, 25 bp, probe
aatctgcagcgatgtacaatcccat

SEQ ID NO: 157505 - DNA, 25 bp, probe
aatccagccaagcacagtctactgt

SEQ ID NO: 157506 - DNA, 25 bp, probe
aatccagccaagcacagtctactgt

SEQ ID NO: 157507 - DNA, 25 bp, probe
aatgccagtagaaaattcataacgt

SEQ ID NO: 157508 - DNA, 25 bp, probe
aatgctattcaaagcagttaaactg

SEQ ID NO: 157509 - DNA, 25 bp, probe
aatgctattcaaagcagttaaactg

SEQ ID NO: 157510 - DNA, 25 bp, probe
aatctgaatcaaagcagttttattt

SEQ ID NO: 157511 - DNA, 25 bp, probe
aatctagagcattgagcactttatc

SEQ ID NO: 157512 - DNA, 25 bp, probe
aatgctcagagatcttttttcactg

SEQ ID NO: 157513 - DNA, 25 bp, probe
aatgaagaaatctttctctctgact

SEQ ID NO: 157514 - DNA, 25 bp, probe
aatgagatggcagctccactgctct

SEQ ID NO: 157515 - DNA, 25 bp, probe
aatgctgaggcagctgagatcgccc

SEQ ID NO: 157516 - DNA, 25 bp, probe
aatgctgaacttcagctctgccact

SEQ ID NO: 157517 - DNA, 25 bp, probe
aatctgagatttcactgacaacttt

SEQ ID NO: 157518 - DNA, 25 bp, probe
aatgctggatttgtccatcaacttc

SEQ ID NO: 157519 - DNA, 25 bp, probe
aatgctgcagtcctgcagtcaccta

SEQ ID NO: 157520 - DNA, 25 bp, probe
aatgctgattggtcagtcgcctttc

SEQ ID NO: 157521 - DNA, 25 bp, probe
aatctgtctatcttggatgcctgct

SEQ ID NO: 157522 - DNA, 25 bp, probe
aatgctgtttcactggttatgcggc

SEQ ID NO: 157523 - DNA, 25 bp, probe
aatgctgtttcagggctggatgccc

SEQ ID NO: 157524 - DNA, 25 bp, probe
aatgctgtggttgtgctcaatgtct

SEQ ID NO: 157525 - DNA, 25 bp, probe
aatgcttcagtatttgtaatttttc

SEQ ID NO: 157526 - DNA, 25 bp, probe
aatgcttcagtatttgtaatttttc

SEQ ID NO: 157527 - DNA, 25 bp, probe
aatgcactcgatcttgtcatttttt

SEQ ID NO: 157528 - DNA, 25 bp, probe
aatcctatatgtaatgatcattatc

SEQ ID NO: 157529 - DNA, 25 bp, probe
aatgctcatttaatagatattcact

SEQ ID NO: 157530 - DNA, 25 bp, probe
aatgcatttataacaattacatgtg

SEQ ID NO: 157531 - DNA, 25 bp, probe
aatgctcgctggagaattgccatgg

SEQ ID NO: 157532 - DNA, 25 bp, probe
aatgccgctgcaggcaagttccagg

SEQ ID NO: 157533 - DNA, 25 bp, probe
aatgctgtgtgctgcaattgtccag

SEQ ID NO: 157534 - DNA, 25 bp, probe
aatgcttctatgaatatttccatgt

SEQ ID NO: 157535 - DNA, 25 bp, probe
aatgcattccaggtaagtccagatg

SEQ ID NO: 157536 - DNA, 25 bp, probe
aatgcatctacctgagaggctcctg

SEQ ID NO: 157537 - DNA, 25 bp, probe
aatgcatgctgaaaagaccactctt

SEQ ID NO: 157538 - DNA, 25 bp, probe
aatgctggacaaagatggccacata

SEQ ID NO: 157539 - DNA, 25 bp, probe
aatgagctgagcttagctctgccct

SEQ ID NO: 157540 - DNA, 25 bp, probe
aatgagctgagcttagctctgccct

SEQ ID NO: 157541 - DNA, 25 bp, probe
aatgacaagcaatgtctgatgcctt

SEQ ID NO: 157542 - DNA, 25 bp, probe
aatgacaagcaatgtctgatgcctt

SEQ ID NO: 157543 - DNA, 25 bp, probe
aatccatcagcaagaattaccattc

SEQ ID NO: 157544 - DNA, 25 bp, probe
aatcctagaaagctaccaatccctc

SEQ ID NO: 157545 - DNA, 25 bp, probe
aatcctagaaagctaccaatccctc

SEQ ID NO: 157546 - DNA, 25 bp, probe
aatcctaagaacttctccaacgaca

SEQ ID NO: 157547 - DNA, 25 bp, probe
aatctcataagggctttcgaacaac

SEQ ID NO: 157548 - DNA, 25 bp, probe
aatccaagctgggtttcatcaactg

SEQ ID NO: 157549 - DNA, 25 bp, probe
aatccaagctgggtttcatcaactg

SEQ ID NO: 157550 - DNA, 25 bp, probe
aatccaagctgggtttcatcaactg

SEQ ID NO: 157551 - DNA, 25 bp, probe
aatccaagctgggtttcatcaactg

SEQ ID NO: 157552 - DNA, 25 bp, probe
aatgccaagctgatttgtagctcgt

SEQ ID NO: 157553 - DNA, 25 bp, probe
aatctcacaggacctcttagtctct

SEQ ID NO: 157554 - DNA, 25 bp, probe
aatccatacaattctcttcagttag

SEQ ID NO: 157555 - DNA, 25 bp, probe
aatgcagccaaatcctgccatgctc

SEQ ID NO: 157556 - DNA, 25 bp, probe
aatgcagccaaatcctgccatgctc

SEQ ID NO: 157557 - DNA, 25 bp, probe
aatcagtcatgatacctacacttcc

SEQ ID NO: 157558 - DNA, 25 bp, probe
aatcatgatctatacgcaaccggaa

SEQ ID NO: 157559 - DNA, 25 bp, probe
aatctccagagggccatatcccgaa

SEQ ID NO: 157560 - DNA, 25 bp, probe
aatctcacaggggtctactccctgc

SEQ ID NO: 157561 - DNA, 25 bp, probe
aatgaccaaggactgctacacctct

SEQ ID NO: 157562 - DNA, 25 bp, probe
aatgaccaaggactgctacacctct

SEQ ID NO: 157563 - DNA, 25 bp, probe
aatgaccagagacatctatgaaacg

SEQ ID NO: 157564 - DNA, 25 bp, probe
aatcaccagtggaactaaacagttg

SEQ ID NO: 157565 - DNA, 25 bp, probe
aatcgccactggagatatcccgttt

SEQ ID NO: 157566 - DNA, 25 bp, probe
aatcgccactggagatatcccgttt

SEQ ID NO: 157567 - DNA, 25 bp, probe
aatcgaagcaggaattccccacttt

SEQ ID NO: 157568 - DNA, 25 bp, probe
aatctgggaccaaaacatcaacttt

SEQ ID NO: 157569 - DNA, 25 bp, probe
aatctctgtaccaaatagtaattta

SEQ ID NO: 157570 - DNA, 25 bp, probe
aatcctgttctctaaatgtcaaata

SEQ ID NO: 157571 - DNA, 25 bp, probe
aatccagcttcataatttccatgat

SEQ ID NO: 157572 - DNA, 25 bp, probe
aatgcaccttgctgaatgcgtccat

SEQ ID NO: 157573 - DNA, 25 bp, probe
aatgaaatctgctgcaaaatctctc

SEQ ID NO: 157574 - DNA, 25 bp, probe
aatgacctgctctgcaagaatatca

SEQ ID NO: 157575 - DNA, 25 bp, probe
aatgcatatccctgaaactgacaca

SEQ ID NO: 157576 - DNA, 25 bp, probe
aatgcatatccctgaaactgacaca

SEQ ID NO: 157577 - DNA, 25 bp, probe
aatgcaaattctcaagccgcatccc

SEQ ID NO: 157578 - DNA, 25 bp, probe
aatgcaaattctcaagccgcatccc

SEQ ID NO: 157579 - DNA, 25 bp, probe
aatgaaatgtctcgtgccatctgtc

SEQ ID NO: 157580 - DNA, 25 bp, probe
caacaataattgctgcatttgatac

SEQ ID NO: 157581 - DNA, 25 bp, probe
aatcgatcgcttctctttgaaaaag

SEQ ID NO: 157582 - DNA, 25 bp, probe
aatcgatcgcttctctttgaaaaag

SEQ ID NO: 157583 - DNA, 25 bp, probe
aatcgtctgcttcgaatttggaatg

SEQ ID NO: 157584 - DNA, 25 bp, probe
aatgcgttgattcaagacttggagt

SEQ ID NO: 157585 - DNA, 25 bp, probe
aatgcgttgattcaagacttggagt

SEQ ID NO: 157586 - DNA, 25 bp, probe
aatcaggctattcaggcactacgag

SEQ ID NO: 157587 - DNA, 25 bp, probe
aatagcctaggaagtgccctcgagc

SEQ ID NO: 157588 - DNA, 25 bp, probe
aatagccgggcatggtggcgcaagc

SEQ ID NO: 157589 - DNA, 25 bp, probe
aatcagcacggacagttgggcacca

SEQ ID NO: 157590 - DNA, 25 bp, probe
aatcaacgtgcctatggcgggacca

SEQ ID NO: 157591 - DNA, 25 bp, probe
aatgaagcatctcaattgctggagg

SEQ ID NO: 157592 - DNA, 25 bp, probe
aatgaaatatgtggactgctctagc

SEQ ID NO: 157593 - DNA, 25 bp, probe
aatgacattcattcgagatgctctc

SEQ ID NO: 157594 - DNA, 25 bp, probe
aatgcaatatactgtgatgccttcc

SEQ ID NO: 157595 - DNA, 25 bp, probe
aatgcgaaccaagttgtcttccttg

SEQ ID NO: 157596 - DNA, 25 bp, probe
aatcgaagcccagttcttagctctg

SEQ ID NO: 157597 - DNA, 25 bp, probe
aatccaagcgactatgtgcttttgg

SEQ ID NO: 157598 - DNA, 25 bp, probe
aatgcataatggcctttgttttgca

SEQ ID NO: 157599 - DNA, 25 bp, probe
aatgcaaatgagccatatgaaaatt

SEQ ID NO: 157600 - DNA, 25 bp, probe
aatgaagatatgcacatccagatca

SEQ ID NO: 157601 - DNA, 25 bp, probe
aatgaagactgatcccaggcctgat

SEQ ID NO: 157602 - DNA, 25 bp, probe
aatgaacctttcctagggctgtgga

SEQ ID NO: 157603 - DNA, 25 bp, probe
aatctccctttttcgggtgtgtatg

SEQ ID NO: 157604 - DNA, 25 bp, probe
caaccccgttatctatgtctttatg

SEQ ID NO: 157605 - DNA, 25 bp, probe
caaccccgttatctatgtctttatg

SEQ ID NO: 157606 - DNA, 25 bp, probe
cacacttttggctctttttggtata

SEQ ID NO: 157607 - DNA, 25 bp, probe
cacacttttggctctttttggtata

SEQ ID NO: 157608 - DNA, 25 bp, probe
aatgccttaggactttgtttgtgtt

SEQ ID NO: 157609 - DNA, 25 bp, probe
aatgccttaggactttgtttgtgtt

SEQ ID NO: 157610 - DNA, 25 bp, probe
aatcctacaggggattgtgttttgt

SEQ ID NO: 157611 - DNA, 25 bp, probe
aatcgtgccagggaaggtcttcgtt

SEQ ID NO: 157612 - DNA, 25 bp, probe
aatcgtgccagggaaggtcttcgtt

SEQ ID NO: 157613 - DNA, 25 bp, probe
aatcgtgccagggaaggtcttcgtt

SEQ ID NO: 157614 - DNA, 25 bp, probe
aatcccaaacaagggacttcactgg

SEQ ID NO: 157615 - DNA, 25 bp, probe
aatccaagactctccagatttccga

SEQ ID NO: 157616 - DNA, 25 bp, probe
aatctaccattgctacgatactccg

SEQ ID NO: 157617 - DNA, 25 bp, probe
aatctgtcacatcgtactcaatacc

SEQ ID NO: 157618 - DNA, 25 bp, probe
aatgcttcaagtcactaatcacctg

SEQ ID NO: 157619 - DNA, 25 bp, probe
aatgctgaaagacatctatggaaat

SEQ ID NO: 157620 - DNA, 25 bp, probe
aatgcgaaaggttgtatgtgatcag

SEQ ID NO: 157621 - DNA, 25 bp, probe
aatgcatggcaactgttaatgtcat

SEQ ID NO: 157622 - DNA, 25 bp, probe
aatgctgtcgggactgagcaggcaa

SEQ ID NO: 157623 - DNA, 25 bp, probe
aatcttgggacactgaattgaacac

SEQ ID NO: 157624 - DNA, 25 bp, probe
aatcttgctcagaagctcaatatgc

SEQ ID NO: 157625 - DNA, 25 bp, probe
aatgctagctctgagccagttcagt

SEQ ID NO: 157626 - DNA, 25 bp, probe
aatctgttgccacccaggtgatgtt

SEQ ID NO: 157627 - DNA, 25 bp, probe
aatctgattcctccagtgtgtgaac

SEQ ID NO: 157628 - DNA, 25 bp, probe
aatcaggcttatccgatgtgctaca

SEQ ID NO: 157629 - DNA, 25 bp, probe
aatcacctgtacttggtcatgcagc

SEQ ID NO: 157630 - DNA, 25 bp, probe
aatcacctgtacttggtcatgcagc

SEQ ID NO: 157631 - DNA, 25 bp, probe
aatgaaggtgatggcaggccatggg

SEQ ID NO: 157632 - DNA, 25 bp, probe
aatgcataggtgatctgggagagga

SEQ ID NO: 157633 - DNA, 25 bp, probe
aatgctgggattacagatggatgtg

SEQ ID NO: 157634 - DNA, 25 bp, probe
aatgctacatttacatggaactggc

SEQ ID NO: 157635 - DNA, 25 bp, probe
aatgctactttgtctaacctgctgt

SEQ ID NO: 157636 - DNA, 25 bp, probe
aatgcaacttcttcttaatagctgt

SEQ ID NO: 157637 - DNA, 25 bp, probe
aatgcaacttcttcttaatagctgt

SEQ ID NO: 157638 - DNA, 25 bp, probe
aatgaatgtgcctctctttcagtct

SEQ ID NO: 157639 - DNA, 25 bp, probe
aatgaatgtgcctctctttcagtct

SEQ ID NO: 157640 - DNA, 25 bp, probe
aatgaagatgactacctgtctgatg

SEQ ID NO: 157641 - DNA, 25 bp, probe
aatgaattgaattcctgatgggata

SEQ ID NO: 157642 - DNA, 25 bp, probe
aatgaattgaattcctgatgggata

SEQ ID NO: 157643 - DNA, 25 bp, probe
aatgaatagccaggcctgacctcaa

SEQ ID NO: 157644 - DNA, 25 bp, probe
aatgaagaaagtccagacctcggag

SEQ ID NO: 157645 - DNA, 25 bp, probe
aatgaagaacaacaactctcagtgg

SEQ ID NO: 157646 - DNA, 25 bp, probe
aatgcaggactcaacgatactctgg

SEQ ID NO: 157647 - DNA, 25 bp, probe
aatgcaggactcaacgatactctgg

SEQ ID NO: 157648 - DNA, 25 bp, probe
aatcgcagactttggcatgagccgg

SEQ ID NO: 157649 - DNA, 25 bp, probe
aatgccagcaatcaggcagcaccca

SEQ ID NO: 157650 - DNA, 25 bp, probe
aatgcactaatgcctggcactccta

SEQ ID NO: 157651 - DNA, 25 bp, probe
aatacctatgtggagcacttcagac

SEQ ID NO: 157652 - DNA, 25 bp, probe
aatacctatgtggagcacttcagac

SEQ ID NO: 157653 - DNA, 25 bp, probe
aatccctcagctgacactgaagacg

SEQ ID NO: 157654 - DNA, 25 bp, probe
aatgctcctcctgataatgtagacc

SEQ ID NO: 157655 - DNA, 25 bp, probe
aatgctcctcctgataatgtagacc

SEQ ID NO: 157656 - DNA, 25 bp, probe
aatgcatctgatgtcgacaatgtga

SEQ ID NO: 157657 - DNA, 25 bp, probe
aatgcatcacatttctgtcatatgg

SEQ ID NO: 157658 - DNA, 25 bp, probe
aatgcatcacatttctgtcatatgg

SEQ ID NO: 157659 - DNA, 25 bp, probe
aatgctgcagatttgtgtagagttc

SEQ ID NO: 157660 - DNA, 25 bp, probe
aatgctgctgaaattgtagagagta

SEQ ID NO: 157661 - DNA, 25 bp, probe
aatgcctgtcagtcgtgatagaaca

SEQ ID NO: 157662 - DNA, 25 bp, probe
aatgcagctggtgctgttcagattc

SEQ ID NO: 157663 - DNA, 25 bp, probe
aatcagctgtgtcgcacttaaactg

SEQ ID NO: 157664 - DNA, 25 bp, probe
aatgcgctgatgtgatctatgaaga

SEQ ID NO: 157665 - DNA, 25 bp, probe
aatgctgtcatgttgtgggaagatg

SEQ ID NO: 157666 - DNA, 25 bp, probe
aatgctgcacaatttggtgaagtat

SEQ ID NO: 157667 - DNA, 25 bp, probe
aatgctcacaattgatgcagataag

SEQ ID NO: 157668 - DNA, 25 bp, probe
aatgctcacaattgatgcagataag

SEQ ID NO: 157669 - DNA, 25 bp, probe
aatgcacaaacaatgcaatcaacag

SEQ ID NO: 157670 - DNA, 25 bp, probe
aatgccaccacaaaatgcaaaggga

SEQ ID NO: 157671 - DNA, 25 bp, probe
aatctcaacaaacagcaaatagcaa

SEQ ID NO: 157672 - DNA, 25 bp, probe
aatgctagaaactgagccagtagag

SEQ ID NO: 157673 - DNA, 25 bp, probe
aatctagataacttggctcagctgt

SEQ ID NO: 157674 - DNA, 25 bp, probe
aatctagataacttggctcagctgt

SEQ ID NO: 157675 - DNA, 25 bp, probe
aatctcaaagcacaggtcctgctgt

SEQ ID NO: 157676 - DNA, 25 bp, probe
aatctcaaagcacaggtcctgctgt

SEQ ID NO: 157677 - DNA, 25 bp, probe
aatccatcaacgaagccatacggac

SEQ ID NO: 157678 - DNA, 25 bp, probe
caacacccatccaaggaatggccac

SEQ ID NO: 157679 - DNA, 25 bp, probe
aatcacccacgttgtgaatgccgct

SEQ ID NO: 157680 - DNA, 25 bp, probe
aatcacccacgttgtgaatgccgct

SEQ ID NO: 157681 - DNA, 25 bp, probe
aatcagctgcgctggatggacaccg

SEQ ID NO: 157682 - DNA, 25 bp, probe
aatccaggcatatgtggagcaagag

SEQ ID NO: 157683 - DNA, 25 bp, probe
aatccctgctgattgtgcagaacaa

SEQ ID NO: 157684 - DNA, 25 bp, probe
aatcctgcctaatgatgagtgcaaa

SEQ ID NO: 157685 - DNA, 25 bp, probe
aatgccctccaacttagtgatgaag

SEQ ID NO: 157686 - DNA, 25 bp, probe
aatgccatctctttttagttgaagg

SEQ ID NO: 157687 - DNA, 25 bp, probe
aatcaactcaagatgtacacgaagg

SEQ ID NO: 157688 - DNA, 25 bp, probe
aataaccaagactcgaaatgagatt

SEQ ID NO: 157689 - DNA, 25 bp, probe
aataagccaggaataaatacataat

SEQ ID NO: 157690 - DNA, 25 bp, probe
aataagccaggaataaatacataat

SEQ ID NO: 157691 - DNA, 25 bp, probe
aatctaccgagaagtacaaataatg

SEQ ID NO: 157692 - DNA, 25 bp, probe
aatgccaccgacagtcctaagagct

SEQ ID NO: 157693 - DNA, 25 bp, probe
aatcctcccatcatgaaacaaactc

SEQ ID NO: 157694 - DNA, 25 bp, probe
aatcctatccatatgaggcaacaga

SEQ ID NO: 157695 - DNA, 25 bp, probe
aatgccaaacatgttgtcacacaca

SEQ ID NO: 157696 - DNA, 25 bp, probe
aatgccaaacatgttgtcacacaca

SEQ ID NO: 157697 - DNA, 25 bp, probe
aatgctaaatatggtcgttactatt

SEQ ID NO: 157698 - DNA, 25 bp, probe
aatgcatgataatgagttttacatt

SEQ ID NO: 157699 - DNA, 25 bp, probe
aatgctgatggataacctatatgat

SEQ ID NO: 157700 - DNA, 25 bp, probe
aatgcagtggacatggcctttgttc

SEQ ID NO: 157701 - DNA, 25 bp, probe
aatgctgtggacaggcaccaatttc

SEQ ID NO: 157702 - DNA, 25 bp, probe
aatgctgcagaaattccactgattt

SEQ ID NO: 157703 - DNA, 25 bp, probe
aatgctgcaagtaatctctttttta

SEQ ID NO: 157704 - DNA, 25 bp, probe
aatgctgaagttagcctactcttct

SEQ ID NO: 157705 - DNA, 25 bp, probe
aatctatattagttatccctcctgc

SEQ ID NO: 157706 - DNA, 25 bp, probe
aatctagaagagtctattgtctcct

SEQ ID NO: 157707 - DNA, 25 bp, probe
aataatgcgtgagtgttggtatgcc

SEQ ID NO: 157708 - DNA, 25 bp, probe
aataatgcgtgagtgttggtatgcc

SEQ ID NO: 157709 - DNA, 25 bp, probe
aatagtcatgtgtttcatttatccc

SEQ ID NO: 157710 - DNA, 25 bp, probe
aatagtcttgttggcatcatgctag

SEQ ID NO: 157711 - DNA, 25 bp, probe
aataatcgataagtctcagctggat

SEQ ID NO: 157712 - DNA, 25 bp, probe
aatgcactaagatatctcaatgaga

SEQ ID NO: 157713 - DNA, 25 bp, probe
aatgcaccataatcgctgtatgaaa

SEQ ID NO: 157714 - DNA, 25 bp, probe
aatgcaccataatcgctgtatgaaa

SEQ ID NO: 157715 - DNA, 25 bp, probe
aatgcatcctatatccagtaagtag

SEQ ID NO: 157716 - DNA, 25 bp, probe
aatgcactgttattgccatgtgaag

SEQ ID NO: 157717 - DNA, 25 bp, probe
aatcagcatgtttgcccatgtcctg

SEQ ID NO: 157718 - DNA, 25 bp, probe
aatcagcatgtttgcccatgtcctg

SEQ ID NO: 157719 - DNA, 25 bp, probe
aatcagcatgatgggacgcgtggtc

SEQ ID NO: 157720 - DNA, 25 bp, probe
aatctgtgctggacaagctgtggga

SEQ ID NO: 157721 - DNA, 25 bp, probe
aatctgtgctggacatacgatgtgg

SEQ ID NO: 157722 - DNA, 25 bp, probe
aatccagctatgaatatagagggct

SEQ ID NO: 157723 - DNA, 25 bp, probe
aatccatgttcaattcaaggttatc

SEQ ID NO: 157724 - DNA, 25 bp, probe
aatcctgttcattttagtgttcaat

SEQ ID NO: 157725 - DNA, 25 bp, probe
aatgcatttattttattttgtcaaa

SEQ ID NO: 157726 - DNA, 25 bp, probe
aatgcctacaggtttttcttcacat

SEQ ID NO: 157727 - DNA, 25 bp, probe
aatcctcagaagtttctcttacctc

SEQ ID NO: 157728 - DNA, 25 bp, probe
aatttcgaatgtcactcttgtcgcc

SEQ ID NO: 157729 - DNA, 25 bp, probe
aatgcttcagatattattgctttat

SEQ ID NO: 157730 - DNA, 25 bp, probe
aatgctgtgttaactattctttgga

SEQ ID NO: 157731 - DNA, 25 bp, probe
aatcgaatgtctgctaatgctttgg

SEQ ID NO: 157732 - DNA, 25 bp, probe
aatcgatggtgttcctaccttggtc

SEQ ID NO: 157733 - DNA, 25 bp, probe
caaggacggttcttacacaggcttc

SEQ ID NO: 157734 - DNA, 25 bp, probe
caactaccgtttcacaaggattgaa

SEQ ID NO: 157735 - DNA, 25 bp, probe
caacttgctcatgaccgacaagggt

SEQ ID NO: 157736 - DNA, 25 bp, probe
caccagtgttgctcccaaagtggct

SEQ ID NO: 157737 - DNA, 25 bp, probe
cacgcaggtttcccaaaactagctg

SEQ ID NO: 157738 - DNA, 25 bp, probe
caacggttgctccaaaagtcaaaag

SEQ ID NO: 157739 - DNA, 25 bp, probe
caaaccttgccttgaaatttacaca

SEQ ID NO: 157740 - DNA, 25 bp, probe
taaaccttactgtgaatttaggcat

SEQ ID NO: 157741 - DNA, 25 bp, probe
aatacggcgattcaaagttagtcag

SEQ ID NO: 157742 - DNA, 25 bp, probe
aatacggcgattcaaagttagtcag

SEQ ID NO: 157743 - DNA, 25 bp, probe
aataagggtactatatgtgggtagt

SEQ ID NO: 157744 - DNA, 25 bp, probe
aatagggagttgtctaattggtata

SEQ ID NO: 157745 - DNA, 25 bp, probe
aatcagtgtagagaaaaccgtgaag

SEQ ID NO: 157746 - DNA, 25 bp, probe
aatcagttaaacacaccggagaaga

SEQ ID NO: 157747 - DNA, 25 bp, probe
aatcaggtccaaaactcctggggag

SEQ ID NO: 157748 - DNA, 25 bp, probe
aatcacgtcttattttcctgaggtt

SEQ ID NO: 157749 - DNA, 25 bp, probe
aatcacagtgcacaatattcttaaa

SEQ ID NO: 157750 - DNA, 25 bp, probe
aatcaagcatgaaaaaactgtaggt

SEQ ID NO: 157751 - DNA, 25 bp, probe
aatcaagcatgaaaaaactgtaggt

SEQ ID NO: 157752 - DNA, 25 bp, probe
aatactcataagccacctctgtaat

SEQ ID NO: 157753 - DNA, 25 bp, probe
aatcacagtaaacctcctgtgactc

SEQ ID NO: 157754 - DNA, 25 bp, probe
caaacattaaaatatctcgacccct

SEQ ID NO: 157755 - DNA, 25 bp, probe
aataatgtaaatcaacgcccctcct

SEQ ID NO: 157756 - DNA, 25 bp, probe
caataatgtaaatcaacgcccctcc

SEQ ID NO: 157757 - DNA, 25 bp, probe
aatcaagaaaatgcttgccgccccc

SEQ ID NO: 157758 - DNA, 25 bp, probe
aatcaagaaaatgcttgccgccccc

SEQ ID NO: 157759 - DNA, 25 bp, probe
aatagagcaagagttccggctgccc

SEQ ID NO: 157760 - DNA, 25 bp, probe
aatcgataagtctcagctggatgca

SEQ ID NO: 157761 - DNA, 25 bp, probe
aatcaaagatcagccagcgtgatga

SEQ ID NO: 157762 - DNA, 25 bp, probe
aatgcgaaggacgcgcaaatgcagc

SEQ ID NO: 157763 - DNA, 25 bp, probe
cataagaaggaggcggaactgacgg

SEQ ID NO: 157764 - DNA, 25 bp, probe
aatagaaatgggggaactactgctg

SEQ ID NO: 157765 - DNA, 25 bp, probe
caatagataatgcgaagacttcctt

SEQ ID NO: 157766 - DNA, 25 bp, probe
aataaaatgcgtggaattacacttt

SEQ ID NO: 157767 - DNA, 25 bp, probe
aatcaccacagccgggtttacttca

SEQ ID NO: 157768 - DNA, 25 bp, probe
aatcaagaatagtggtatttttcat

SEQ ID NO: 157769 - DNA, 25 bp, probe
aatcaaaaacaaacgatattcttct

SEQ ID NO: 157770 - DNA, 25 bp, probe
aataaaaaaaccttcagctgtgcta

SEQ ID NO: 157771 - DNA, 25 bp, probe
aatttacccacacgtgtcctgaaga

SEQ ID NO: 157772 - DNA, 25 bp, probe
aataaaacccagcatgtacaaaagt

SEQ ID NO: 157773 - DNA, 25 bp, probe
aataaagagctcaagtggtcaccgt

SEQ ID NO: 157774 - DNA, 25 bp, probe
aatcacaagccaaggtctgaaccct

SEQ ID NO: 157775 - DNA, 25 bp, probe
caatccctgaaagattaagccctga

SEQ ID NO: 157776 - DNA, 25 bp, probe
aatccctgaaagattaagccctgaa

SEQ ID NO: 157777 - DNA, 25 bp, probe
aatccttgttagagttatccctgca

SEQ ID NO: 157778 - DNA, 25 bp, probe
aatatatggtttcttctatccctgg

SEQ ID NO: 157779 - DNA, 25 bp, probe
aataaaatctgtccattcctacctg

SEQ ID NO: 157780 - DNA, 25 bp, probe
aatagacaactatattccaaagtca

SEQ ID NO: 157781 - DNA, 25 bp, probe
aatagacaactatattccaaagtca

SEQ ID NO: 157782 - DNA, 25 bp, probe
aatcagagaaatgaacccaaactac

SEQ ID NO: 157783 - DNA, 25 bp, probe
aatccgacatcaaaacacgaaaatc

SEQ ID NO: 157784 - DNA, 25 bp, probe
aatccaactatgtagtactgaaaac

SEQ ID NO: 157785 - DNA, 25 bp, probe
aatccagtaatctgtatctgatcca

SEQ ID NO: 157786 - DNA, 25 bp, probe
aattagtaacaggaactgaggcgat

SEQ ID NO: 157787 - DNA, 25 bp, probe
aattactcacaagaaccaagcgccc

SEQ ID NO: 157788 - DNA, 25 bp, probe
aatccccaaatggagccaagacttc

SEQ ID NO: 157789 - DNA, 25 bp, probe
aatccccaaatggagccaagacttc

SEQ ID NO: 157790 - DNA, 25 bp, probe
aattccattaattaccaagccctca

SEQ ID NO: 157791 - DNA, 25 bp, probe
aatttttggcaacagcaacctcttg

SEQ ID NO: 157792 - DNA, 25 bp, probe
aatcctttgaagtaacaaacattgt

SEQ ID NO: 157793 - DNA, 25 bp, probe
aatcctttcatatattaagattggg

SEQ ID NO: 157794 - DNA, 25 bp, probe
aatcctttccaataattgactggtg

SEQ ID NO: 157795 - DNA, 25 bp, probe
aatcctgtttttggaagcgactagg

SEQ ID NO: 157796 - DNA, 25 bp, probe
caaccgctttgtgcataaggacttg

SEQ ID NO: 157797 - DNA, 25 bp, probe
aataagcttgccaacataatggact

SEQ ID NO: 157798 - DNA, 25 bp, probe
aataataacctggaaagagcactgg

SEQ ID NO: 157799 - DNA, 25 bp, probe
aatacattactgcagagaaacacgg

SEQ ID NO: 157800 - DNA, 25 bp, probe
aatcctgacttccgagaaatccgct

SEQ ID NO: 157801 - DNA, 25 bp, probe
aatcctgacctcagatgatccaccc

SEQ ID NO: 157802 - DNA, 25 bp, probe
aatccattctcttggtgtcactacc

SEQ ID NO: 157803 - DNA, 25 bp, probe
aatcgaatccaatgtgccatcaagt

SEQ ID NO: 157804 - DNA, 25 bp, probe
aatccaaccatatttcacaagaggg

SEQ ID NO: 157805 - DNA, 25 bp, probe
aataccccaagactcccatgaggga

SEQ ID NO: 157806 - DNA, 25 bp, probe
caatgaccccgctcttaaagatgag

SEQ ID NO: 157807 - DNA, 25 bp, probe
caaggaccgcagtccttcagtaaca

SEQ ID NO: 157808 - DNA, 25 bp, probe
aataagtcacagtcctgttgtcaaa

SEQ ID NO: 157809 - DNA, 25 bp, probe
aataatggacgccgctggcagtcca

SEQ ID NO: 157810 - DNA, 25 bp, probe
aatcagatcgagtccaaggcagcct

SEQ ID NO: 157811 - DNA, 25 bp, probe
aatcagatcaagtcgggaactccat

SEQ ID NO: 157812 - DNA, 25 bp, probe
aatcagtgatttcaggaacactcat

SEQ ID NO: 157813 - DNA, 25 bp, probe
aatcccatttgcaggatccgtctgt

SEQ ID NO: 157814 - DNA, 25 bp, probe
aatccctgtatcgtggaccttttgt

SEQ ID NO: 157815 - DNA, 25 bp, probe
aatccctggtagagccattatgttg

SEQ ID NO: 157816 - DNA, 25 bp, probe
aatcccagcgatggactggattctg

SEQ ID NO: 157817 - DNA, 25 bp, probe
aatcgctctctagacatgtggtctg

SEQ ID NO: 157818 - DNA, 25 bp, probe
aatcggtctcagtgcatgctgtgct

SEQ ID NO: 157819 - DNA, 25 bp, probe
aatctggtatcacctcgtgtgttct

SEQ ID NO: 157820 - DNA, 25 bp, probe
aatgcccttcatccaatgggtatct

SEQ ID NO: 157821 - DNA, 25 bp, probe
caatgccatctgtctgccgaaggct

SEQ ID NO: 157822 - DNA, 25 bp, probe
aatacatcatctggccaggcatggt

SEQ ID NO: 157823 - DNA, 25 bp, probe
aatcaagcatgcatccatgactggg

SEQ ID NO: 157824 - DNA, 25 bp, probe
aatcaacatcgtctaccaggagctc

SEQ ID NO: 157825 - DNA, 25 bp, probe
aatcaacaactcagcaccgtgactt

SEQ ID NO: 157826 - DNA, 25 bp, probe
aatacacaacttagccagtcttgtt

SEQ ID NO: 157827 - DNA, 25 bp, probe
aatccgcagcaaactgccgtgctgg

SEQ ID NO: 157828 - DNA, 25 bp, probe
caatcggaacacattcagctgctgg

SEQ ID NO: 157829 - DNA, 25 bp, probe
aatcggaacacattcagctgctggg

SEQ ID NO: 157830 - DNA, 25 bp, probe
aatccagcagtcattacttgtgatg

SEQ ID NO: 157831 - DNA, 25 bp, probe
aatcctctcatttttcttgtgatgt

SEQ ID NO: 157832 - DNA, 25 bp, probe
aatctgctgcaaaatctctcttgga

SEQ ID NO: 157833 - DNA, 25 bp, probe
aatctgctgcaaaatctctcttgga

SEQ ID NO: 157834 - DNA, 25 bp, probe
aatctgctgcaaaatctctcttgga

SEQ ID NO: 157835 - DNA, 25 bp, probe
aatgctgatattgatttcactggtc

SEQ ID NO: 157836 - DNA, 25 bp, probe
aatgctgagaatgattatattaatg

SEQ ID NO: 157837 - DNA, 25 bp, probe
aatgctgagaatgattatattaatg

SEQ ID NO: 157838 - DNA, 25 bp, probe
aatctgaagatgtcattcttataaa

SEQ ID NO: 157839 - DNA, 25 bp, probe
aatccaacatgttactgttactgat

SEQ ID NO: 157840 - DNA, 25 bp, probe
aatgcctccatttacagcttttagc

SEQ ID NO: 157841 - DNA, 25 bp, probe
aatcccatcatttaccaagttattg

SEQ ID NO: 157842 - DNA, 25 bp, probe
aatcccatcatttaccaagttattg

SEQ ID NO: 157843 - DNA, 25 bp, probe
aatccactgatttacacaatcttta

SEQ ID NO: 157844 - DNA, 25 bp, probe
aatctcatgttatcacacgtgcttt

SEQ ID NO: 157845 - DNA, 25 bp, probe
aatcctgtggatggccacggactcc

SEQ ID NO: 157846 - DNA, 25 bp, probe
aatactcgggcaccagcggtgcctc

SEQ ID NO: 157847 - DNA, 25 bp, probe
aatacgctggagtccacgtgaggcc

SEQ ID NO: 157848 - DNA, 25 bp, probe
aatccaggctgggaacatgctaggc

SEQ ID NO: 157849 - DNA, 25 bp, probe
aatccaatagttcacagctgagctg

SEQ ID NO: 157850 - DNA, 25 bp, probe
aatgccttagctgggacgcatagct

SEQ ID NO: 157851 - DNA, 25 bp, probe
aatccttctctgggatcccagtgga

SEQ ID NO: 157852 - DNA, 25 bp, probe
aatcctgctttggcgacaaaaagga

SEQ ID NO: 157853 - DNA, 25 bp, probe
aatccgtccttccttagaaagctga

SEQ ID NO: 157854 - DNA, 25 bp, probe
caatccgtccttccttagaaagctg

SEQ ID NO: 157855 - DNA, 25 bp, probe
caatccccttttggtagaattgcca

SEQ ID NO: 157856 - DNA, 25 bp, probe
aatcctccatgctttggggaaggcc

SEQ ID NO: 157857 - DNA, 25 bp, probe
aatcctccatgctttggggaaggcc

SEQ ID NO: 157858 - DNA, 25 bp, probe
aatcctccatgctttggggaaggcc

SEQ ID NO: 157859 - DNA, 25 bp, probe
aatacttctgagttggggaatgttt

SEQ ID NO: 157860 - DNA, 25 bp, probe
aatactttagagaggatgacagatc

SEQ ID NO: 157861 - DNA, 25 bp, probe
aatctcattgcttacaagcctaaga

SEQ ID NO: 157862 - DNA, 25 bp, probe
aatcttgttttaccctatacatcca

SEQ ID NO: 157863 - DNA, 25 bp, probe
aatcttgacttgtcaattactaccc

SEQ ID NO: 157864 - DNA, 25 bp, probe
aatcttggctattctgttggctttc

SEQ ID NO: 157865 - DNA, 25 bp, probe
aatccattgctttttgtggctttgc

SEQ ID NO: 157866 - DNA, 25 bp, probe
aatccttttctagtgtgagtttcag

SEQ ID NO: 157867 - DNA, 25 bp, probe
aatccttttctagtgtgagtttcag

SEQ ID NO: 157868 - DNA, 25 bp, probe
aatgcctttcagggtgtggtctact

SEQ ID NO: 157869 - DNA, 25 bp, probe
aatcccctcagcagagtgtgtttaa

SEQ ID NO: 157870 - DNA, 25 bp, probe
aatgcccactagaagcagtgtactt

SEQ ID NO: 157871 - DNA, 25 bp, probe
aatatgccactacagctcgtaactc

SEQ ID NO: 157872 - DNA, 25 bp, probe
aatatgccactacagctcgtaactc

SEQ ID NO: 157873 - DNA, 25 bp, probe
aatcgccctaagttcagtgaacttc

SEQ ID NO: 157874 - DNA, 25 bp, probe
aatcccctggaaatcattataccac

SEQ ID NO: 157875 - DNA, 25 bp, probe
aatccctgtggaaatctacatttga

SEQ ID NO: 157876 - DNA, 25 bp, probe
aatccctatgtgccaaaagtagtga

SEQ ID NO: 157877 - DNA, 25 bp, probe
aatccattcatggccaagaagaaaa

SEQ ID NO: 157878 - DNA, 25 bp, probe
aatccattttcctgcggcagagcag

SEQ ID NO: 157879 - DNA, 25 bp, probe
aatcctgttactagagctgggatgt

SEQ ID NO: 157880 - DNA, 25 bp, probe
aatgcctggtaccagaggatggtga

SEQ ID NO: 157881 - DNA, 25 bp, probe
aatcacagtgttgagatgtatgaag

SEQ ID NO: 157882 - DNA, 25 bp, probe
aatcatcggcttggtactgaaaccc

SEQ ID NO: 157883 - DNA, 25 bp, probe
aatcatcggcttggtactgaaaccc

SEQ ID NO: 157884 - DNA, 25 bp, probe
caagttggccccaactgaggaccca

SEQ ID NO: 157885 - DNA, 25 bp, probe
aattttccgactgctaggaactcca

SEQ ID NO: 157886 - DNA, 25 bp, probe
aatctttccaactctacggatttgc

SEQ ID NO: 157887 - DNA, 25 bp, probe
aattctattaaagtgctaaggttct

SEQ ID NO: 157888 - DNA, 25 bp, probe
aattctattaaagtgctaaggttct

SEQ ID NO: 157889 - DNA, 25 bp, probe
aatcgtatttcagcttcaaggttca

SEQ ID NO: 157890 - DNA, 25 bp, probe
aatcgtatttcagcttcaaggttca

SEQ ID NO: 157891 - DNA, 25 bp, probe
aatagttttctcattgctacagtgt

SEQ ID NO: 157892 - DNA, 25 bp, probe
aatcctcttttgatgtctgcagaag

SEQ ID NO: 157893 - DNA, 25 bp, probe
aataaattatagactgcttgaacag

SEQ ID NO: 157894 - DNA, 25 bp, probe
aatctcagttcaaatctctttcacc

SEQ ID NO: 157895 - DNA, 25 bp, probe
aatctcagttcaaatctctttcacc

SEQ ID NO: 157896 - DNA, 25 bp, probe
aatctagtgccaagtcctaaatcat

SEQ ID NO: 157897 - DNA, 25 bp, probe
aatctagtgccaagtcctaaatcat

SEQ ID NO: 157898 - DNA, 25 bp, probe
aatctaaccatgagcttcagcaatc

SEQ ID NO: 157899 - DNA, 25 bp, probe
aatctaaactgtagctgtattagca

SEQ ID NO: 157900 - DNA, 25 bp, probe
aatctttagtgcactttctcagctt

SEQ ID NO: 157901 - DNA, 25 bp, probe
aatctctgtttaggtgcctctactt

SEQ ID NO: 157902 - DNA, 25 bp, probe
aatctcatgcctttggcaccttggt

SEQ ID NO: 157903 - DNA, 25 bp, probe
aatctcatcctagatcaccgaggtt

SEQ ID NO: 157904 - DNA, 25 bp, probe
aatgccaactacatccggggctatg

SEQ ID NO: 157905 - DNA, 25 bp, probe
aatcccagctactcgggaggctgag

SEQ ID NO: 157906 - DNA, 25 bp, probe
aatgccttacactctgtggaggtgg

SEQ ID NO: 157907 - DNA, 25 bp, probe
aatccttagcaatgccttagctggg

SEQ ID NO: 157908 - DNA, 25 bp, probe
aatgccttgaaatgctgctgtcctc

SEQ ID NO: 157909 - DNA, 25 bp, probe
aatgccattgaaaccgctagtctta

SEQ ID NO: 157910 - DNA, 25 bp, probe
aatgccattgaaaccgctagtctta

SEQ ID NO: 157911 - DNA, 25 bp, probe
aatccatggaatccctgctgattgt

SEQ ID NO: 157912 - DNA, 25 bp, probe
aatcctgcagattgtactctagtta

SEQ ID NO: 157913 - DNA, 25 bp, probe
aatagctggcaagatttgagttaaa

SEQ ID NO: 157914 - DNA, 25 bp, probe
aatcaatggaacccttgcacaaaaa

SEQ ID NO: 157915 - DNA, 25 bp, probe
aatcctggaaatctgttctccagaa

SEQ ID NO: 157916 - DNA, 25 bp, probe
aatctctaaattcttgtgtctgcca

SEQ ID NO: 157917 - DNA, 25 bp, probe
aatcctaaatgtgtggtgactgctt

SEQ ID NO: 157918 - DNA, 25 bp, probe
aatcctaaatgtgtggtgactgctt

SEQ ID NO: 157919 - DNA, 25 bp, probe
aattctgaagttctgggcctttctc

SEQ ID NO: 157920 - DNA, 25 bp, probe
aattggtgagttcagtagctttggt

SEQ ID NO: 157921 - DNA, 25 bp, probe
aatcatgggagtacaattcaagatg

SEQ ID NO: 157922 - DNA, 25 bp, probe
aatcaaacagttggattcagaacca

SEQ ID NO: 157923 - DNA, 25 bp, probe
aatcactacaggaattttacaccag

SEQ ID NO: 157924 - DNA, 25 bp, probe
aatcactacaggaattttacaccag

SEQ ID NO: 157925 - DNA, 25 bp, probe
aatccttcgtgaaatttatacaagt

SEQ ID NO: 157926 - DNA, 25 bp, probe
aatccttcgtgaaatttatacaagt

SEQ ID NO: 157927 - DNA, 25 bp, probe
caaccaccatggatttttacaagat

SEQ ID NO: 157928 - DNA, 25 bp, probe
aattcaacgggtgctttacataatg

SEQ ID NO: 157929 - DNA, 25 bp, probe
aatttaaaggtgtgtataactcatg

SEQ ID NO: 157930 - DNA, 25 bp, probe
aattaaaacctttggatcagtgtct

SEQ ID NO: 157931 - DNA, 25 bp, probe
aatctgtgatgatcctcatatggcc

SEQ ID NO: 157932 - DNA, 25 bp, probe
aatcatgttcccttctatgactgga

SEQ ID NO: 157933 - DNA, 25 bp, probe
aatcatatttccttccatgaatgga

SEQ ID NO: 157934 - DNA, 25 bp, probe
aataatgatccctggcaacggacag

SEQ ID NO: 157935 - DNA, 25 bp, probe
aataaacccatcacatttggaacat

SEQ ID NO: 157936 - DNA, 25 bp, probe
aataaacggatcacagtggaggaag

SEQ ID NO: 157937 - DNA, 25 bp, probe
aataataccaacaactggagggaga

SEQ ID NO: 157938 - DNA, 25 bp, probe
aataaaaccacttgtgcccactgaa

SEQ ID NO: 157939 - DNA, 25 bp, probe
aataaattccatgcatgggccgctg

SEQ ID NO: 157940 - DNA, 25 bp, probe
aatcagaaccctgcttacctctgat

SEQ ID NO: 157941 - DNA, 25 bp, probe
aatcagaaccctgcttacctctgat

SEQ ID NO: 157942 - DNA, 25 bp, probe
aatcaaacccatctgtaatttcgag

SEQ ID NO: 157943 - DNA, 25 bp, probe
gaatacaaactccgtaccttacagg

SEQ ID NO: 157944 - DNA, 25 bp, probe
aataataccatcactgacacttacc

SEQ ID NO: 157945 - DNA, 25 bp, probe
aatcaaaccaggaataacctatgct

SEQ ID NO: 157946 - DNA, 25 bp, probe
aataaaccacacttagtcctgatgt

SEQ ID NO: 157947 - DNA, 25 bp, probe
aataacccagacttaatcttgaatg

SEQ ID NO: 157948 - DNA, 25 bp, probe
aatcaacccaactgaagcatttcaa

SEQ ID NO: 157949 - DNA, 25 bp, probe
aatagccaacgagctgaagctttaa

SEQ ID NO: 157950 - DNA, 25 bp, probe
aatacgacactgtagcgactgatgt

SEQ ID NO: 157951 - DNA, 25 bp, probe
aatacgacactgtagcgactgatgt

SEQ ID NO: 157952 - DNA, 25 bp, probe
caatagttactatgccctgatgctg

SEQ ID NO: 157953 - DNA, 25 bp, probe
aatcaggaatcttaacttcatgtga

SEQ ID NO: 157954 - DNA, 25 bp, probe
aataagcatgatggtagagtccttg

SEQ ID NO: 157955 - DNA, 25 bp, probe
aattcagctagtacaggtcctaaaa

SEQ ID NO: 157956 - DNA, 25 bp, probe
aatagcctagtttgcttccaataga

SEQ ID NO: 157957 - DNA, 25 bp, probe
aataccaagtgttgcatcacccaca

SEQ ID NO: 157958 - DNA, 25 bp, probe
aataccgagggatcaatctgcaaaa

SEQ ID NO: 157959 - DNA, 25 bp, probe
aatccctgccgttagcgactgcgac

SEQ ID NO: 157960 - DNA, 25 bp, probe
aatcgcctccttggaggctctggag

SEQ ID NO: 157961 - DNA, 25 bp, probe
aatcttctccgtgcaacctggaaag

SEQ ID NO: 157962 - DNA, 25 bp, probe
aatctatgatccagccaaacgaatt

SEQ ID NO: 157963 - DNA, 25 bp, probe
aatctagtcctggaacaattgcaca

SEQ ID NO: 157964 - DNA, 25 bp, probe
aatctatttgctggagtctaggaat

SEQ ID NO: 157965 - DNA, 25 bp, probe
aatcaagatagctgactttggaatg

SEQ ID NO: 157966 - DNA, 25 bp, probe
aatcatggacaaaacctgctggaat

SEQ ID NO: 157967 - DNA, 25 bp, probe
aatctttcagcagcaacctgagaac

SEQ ID NO: 157968 - DNA, 25 bp, probe
aatccgctctgaggaaagcgtaagc

SEQ ID NO: 157969 - DNA, 25 bp, probe
aatccgctctgataaaagaatagtc

SEQ ID NO: 157970 - DNA, 25 bp, probe
aatccgctctgataaaagaatagtc

SEQ ID NO: 157971 - DNA, 25 bp, probe
aatctgtttatggaatcaaggaagt

SEQ ID NO: 157972 - DNA, 25 bp, probe
aatattgtatatgttgaaggaggta

SEQ ID NO: 157973 - DNA, 25 bp, probe
aataggttttgctctaggcagacta

SEQ ID NO: 157974 - DNA, 25 bp, probe
aataggttttgctctaggcagacta

SEQ ID NO: 157975 - DNA, 25 bp, probe
aatatggttctcctactaactagct

SEQ ID NO: 157976 - DNA, 25 bp, probe
aatatttcctcactattgaaccagg

SEQ ID NO: 157977 - DNA, 25 bp, probe
aatctatggcagtgtttgaacagca

SEQ ID NO: 157978 - DNA, 25 bp, probe
aatcgtgagcgtttgttgaacaaga

SEQ ID NO: 157979 - DNA, 25 bp, probe
aatcggcacgaggattattcaagaa

SEQ ID NO: 157980 - DNA, 25 bp, probe
aatcacaagcaaaattattccagaa

SEQ ID NO: 157981 - DNA, 25 bp, probe
aatcacaagcaaaattattccagaa

SEQ ID NO: 157982 - DNA, 25 bp, probe
aatacaagaacgatttccctgcata

SEQ ID NO: 157983 - DNA, 25 bp, probe
aatactatgtgggattcaccctctt

SEQ ID NO: 157984 - DNA, 25 bp, probe
aattcggttgtgaatcccttcatct

SEQ ID NO: 157985 - DNA, 25 bp, probe
aatcctgtgtttcattacttgaatg

SEQ ID NO: 157986 - DNA, 25 bp, probe
aatcctgctttacaggatcatgtaa

SEQ ID NO: 157987 - DNA, 25 bp, probe
aatccttcaaacgtgctgacatcta

SEQ ID NO: 157988 - DNA, 25 bp, probe
aatcccacccacatgtgacacatat

SEQ ID NO: 157989 - DNA, 25 bp, probe
aatcccacccacatgtgacacatat

SEQ ID NO: 157990 - DNA, 25 bp, probe
aatcgctgcagcgacacaagtgacc

SEQ ID NO: 157991 - DNA, 25 bp, probe
aatagctgcaaaccaagcatcagtc

SEQ ID NO: 157992 - DNA, 25 bp, probe
aatactgcccgcaaagctcgcgcta

SEQ ID NO: 157993 - DNA, 25 bp, probe
aatcctaatgcaacaagtcctgaat

SEQ ID NO: 157994 - DNA, 25 bp, probe
aatacatatagtcaagtactgcaaa

SEQ ID NO: 157995 - DNA, 25 bp, probe
aatagaactgcagataccactgaaa

SEQ ID NO: 157996 - DNA, 25 bp, probe
aatagacacatcaaatgccccgaat

SEQ ID NO: 157997 - DNA, 25 bp, probe
aatagacacatcaaatgccccgaat

SEQ ID NO: 157998 - DNA, 25 bp, probe
aatcagaagctcaaacttcctggta

SEQ ID NO: 157999 - DNA, 25 bp, probe
aatcagacatgtgagcactacgggt

SEQ ID NO: 158000 - DNA, 25 bp, probe
caatgcgaaggacgcgcaaatgcag

SEQ ID NO: 158001 - DNA, 25 bp, probe
aatcgatactgctggccaatcagtg

SEQ ID NO: 158002 - DNA, 25 bp, probe
aatcgctcacgaatgccaaatctga

SEQ ID NO: 158003 - DNA, 25 bp, probe
aatcctgcactgaagaaaactgaga

SEQ ID NO: 158004 - DNA, 25 bp, probe
aatcccaggaagacaaaatctgcat

SEQ ID NO: 158005 - DNA, 25 bp, probe
aatcccaagacatcaatcaatcttt

SEQ ID NO: 158006 - DNA, 25 bp, probe
cgaagaggaactttactcctcctgt

SEQ ID NO: 158007 - DNA, 25 bp, probe
aatcccaagacatcaatcaatcttt

SEQ ID NO: 158008 - DNA, 25 bp, probe
aatcacccaagcactttatgcatat

SEQ ID NO: 158009 - DNA, 25 bp, probe
aatcacaccatgccatgttttcctt

SEQ ID NO: 158010 - DNA, 25 bp, probe
aatccattatgactgttgttcttat

SEQ ID NO: 158011 - DNA, 25 bp, probe
aatccattatgactgttgttcttat

SEQ ID NO: 158012 - DNA, 25 bp, probe
aatcctttgagatatgcttccattt

SEQ ID NO: 158013 - DNA, 25 bp, probe
aatcacctgaaacagcttccagagt

SEQ ID NO: 158014 - DNA, 25 bp, probe
aatccccatgaacttgtttcagatt

SEQ ID NO: 158015 - DNA, 25 bp, probe
aatccccatcaggtagctgtctaac

SEQ ID NO: 158016 - DNA, 25 bp, probe
aatcttactcacagagctggtcacc

SEQ ID NO: 158017 - DNA, 25 bp, probe
aatctccctccaagacggatactct

SEQ ID NO: 158018 - DNA, 25 bp, probe
aatcctcactttgacagaaactcat

SEQ ID NO: 158019 - DNA, 25 bp, probe
aatcctcactttgacagaaactcat

SEQ ID NO: 158020 - DNA, 25 bp, probe
aatcctattctcgggctgagaaccc

SEQ ID NO: 158021 - DNA, 25 bp, probe
aatacaattccctgtgatctattcc

SEQ ID NO: 158022 - DNA, 25 bp, probe
aatagaatacccggccactatttct

SEQ ID NO: 158023 - DNA, 25 bp, probe
aatagaatacccggccactatttct

SEQ ID NO: 158024 - DNA, 25 bp, probe
aatcagaaaaccatgcccttggctt

SEQ ID NO: 158025 - DNA, 25 bp, probe
aatcagaaaaccatgcccttggctt

SEQ ID NO: 158026 - DNA, 25 bp, probe
aatcattgaaaccattagcctattt

SEQ ID NO: 158027 - DNA, 25 bp, probe
aatcttaaaattcatcccatgtgtg

SEQ ID NO: 158028 - DNA, 25 bp, probe
aatcttcatatatattatcatccct

SEQ ID NO: 158029 - DNA, 25 bp, probe
aatcttcatatatattatcatccct

SEQ ID NO: 158030 - DNA, 25 bp, probe
aatcttgaatgatacgattatgccc

SEQ ID NO: 158031 - DNA, 25 bp, probe
aatcccaacaaagacatactccaat

SEQ ID NO: 158032 - DNA, 25 bp, probe
aatacgaccaaagaccactctcaga

SEQ ID NO: 158033 - DNA, 25 bp, probe
aatatccaccactttaaccttagag

SEQ ID NO: 158034 - DNA, 25 bp, probe
aatattttcaccacgatcgattaga

SEQ ID NO: 158035 - DNA, 25 bp, probe
aataatcactacttaagctaattaa

SEQ ID NO: 158036 - DNA, 25 bp, probe
aataatcactacttaagctaattaa

SEQ ID NO: 158037 - DNA, 25 bp, probe
aatagatgccaaattagatggacat

SEQ ID NO: 158038 - DNA, 25 bp, probe
aatagatgccaaattagatggacat

SEQ ID NO: 158039 - DNA, 25 bp, probe
aataatccttgttagagttatccct

SEQ ID NO: 158040 - DNA, 25 bp, probe
aatcatatccagtttaatcttcaca

SEQ ID NO: 158041 - DNA, 25 bp, probe
aatctagtagattagccatctttca

SEQ ID NO: 158042 - DNA, 25 bp, probe
aatctagtagattagccatctttca

SEQ ID NO: 158043 - DNA, 25 bp, probe
aatcatatttaatgccattgacact

SEQ ID NO: 158044 - DNA, 25 bp, probe
aataattatgagtcagcccgaaagg

SEQ ID NO: 158045 - DNA, 25 bp, probe
aataattatgagtcagcccgaaagg

SEQ ID NO: 158046 - DNA, 25 bp, probe
aatatattacagtcaccccataaaa

SEQ ID NO: 158047 - DNA, 25 bp, probe
aatatattacagtcaccccataaaa

SEQ ID NO: 158048 - DNA, 25 bp, probe
aatatgtgaaagttcccaccaacca

SEQ ID NO: 158049 - DNA, 25 bp, probe
aatatgtgaaagttcccaccaacca

SEQ ID NO: 158050 - DNA, 25 bp, probe
aatattagcaagcgccccaaactgg

SEQ ID NO: 158051 - DNA, 25 bp, probe
aatattagcaagcgccccaaactgg

SEQ ID NO: 158052 - DNA, 25 bp, probe
aatcagatgagctgcagctcccaaa

SEQ ID NO: 158053 - DNA, 25 bp, probe
aatcagaacacttcttccagaaggg

SEQ ID NO: 158054 - DNA, 25 bp, probe
caaaaacacccatccaggcaggggg

SEQ ID NO: 158055 - DNA, 25 bp, probe
cacaaataccccaccagaatgtcac

SEQ ID NO: 158056 - DNA, 25 bp, probe
aataaagcgtcctctcagtaatgaa

SEQ ID NO: 158057 - DNA, 25 bp, probe
aattaaggtgcctttcagcccatct

SEQ ID NO: 158058 - DNA, 25 bp, probe
aattaaggtgcctttcagcccatct

SEQ ID NO: 158059 - DNA, 25 bp, probe
aatctaagtctgatttagtttcatc

SEQ ID NO: 158060 - DNA, 25 bp, probe
aatcatgtacttcgcttaagtttct

SEQ ID NO: 158061 - DNA, 25 bp, probe
aatcatgtcagtctgcttagaaata

SEQ ID NO: 158062 - DNA, 25 bp, probe
aatcaacacaggccgctaggaagca

SEQ ID NO: 158063 - DNA, 25 bp, probe
aataatcaaggtcctgggaactcca

SEQ ID NO: 158064 - DNA, 25 bp, probe
aatagtcaaggtttgggccacacaa

SEQ ID NO: 158065 - DNA, 25 bp, probe
aataggcatcaccttggcaggccat

SEQ ID NO: 158066 - DNA, 25 bp, probe
aataccagtgtgatgtcaggccatt

SEQ ID NO: 158067 - DNA, 25 bp, probe
caataacaggtctgtgatgccctta

SEQ ID NO: 158068 - DNA, 25 bp, probe
aatatactggtctattttctcctag

SEQ ID NO: 158069 - DNA, 25 bp, probe
aatatactggtctattttctcctag

SEQ ID NO: 158070 - DNA, 25 bp, probe
aatatggtgctgttttctacccttg

SEQ ID NO: 158071 - DNA, 25 bp, probe
aattcggtacgcactagccacatgt

SEQ ID NO: 158072 - DNA, 25 bp, probe
aatttggtcctacccagcaatggct

SEQ ID NO: 158073 - DNA, 25 bp, probe
aataattttattcccagcacagtca

SEQ ID NO: 158074 - DNA, 25 bp, probe
aatacccttcttttatgagcagaag

SEQ ID NO: 158075 - DNA, 25 bp, probe
aatacccttttttcagagcaaacat

SEQ ID NO: 158076 - DNA, 25 bp, probe
aatccctgtttttgtccatgaacta

SEQ ID NO: 158077 - DNA, 25 bp, probe
aatcccatcttgatatactatgaat

SEQ ID NO: 158078 - DNA, 25 bp, probe
aatcccattattgatatgtttattt

SEQ ID NO: 158079 - DNA, 25 bp, probe
aatcaccatatttggcaatgtgtcc

SEQ ID NO: 158080 - DNA, 25 bp, probe
aatcacttctattgtgcagatcccc

SEQ ID NO: 158081 - DNA, 25 bp, probe
aatcacttctattgtgcagatcccc

SEQ ID NO: 158082 - DNA, 25 bp, probe
caatatatcatcctttggcatccca

SEQ ID NO: 158083 - DNA, 25 bp, probe
aatctatgcatttttgccaagccat

SEQ ID NO: 158084 - DNA, 25 bp, probe
aatctatgttttaccatacaataag

SEQ ID NO: 158085 - DNA, 25 bp, probe
cagcattttcttcacgaaacaaatc

SEQ ID NO: 158086 - DNA, 25 bp, probe
aattatgcttccacaggcaaaactc

SEQ ID NO: 158087 - DNA, 25 bp, probe
aatatacgttcttcagggtcaaaat

SEQ ID NO: 158088 - DNA, 25 bp, probe
aatataccccaaattgtgtatatat

SEQ ID NO: 158089 - DNA, 25 bp, probe
aatataccaccatttcatctggcta

SEQ ID NO: 158090 - DNA, 25 bp, probe
aataaaaccatgtctatagctgtag

SEQ ID NO: 158091 - DNA, 25 bp, probe
aataaactcttttcatactgtgagg

SEQ ID NO: 158092 - DNA, 25 bp, probe
aatcagaatttcaatccacattaga

SEQ ID NO: 158093 - DNA, 25 bp, probe
aatcaacatctcacacaacttcagc

SEQ ID NO: 158094 - DNA, 25 bp, probe
aataatcatctcattgactttgtcc

SEQ ID NO: 158095 - DNA, 25 bp, probe
aatctgatcttggtatttttgtctc

SEQ ID NO: 158096 - DNA, 25 bp, probe
aatctacttgacatcattttactct

SEQ ID NO: 158097 - DNA, 25 bp, probe
aatcaatcttggctcactacaacct

SEQ ID NO: 158098 - DNA, 25 bp, probe
aatcaatcttggctcactacaacct

SEQ ID NO: 158099 - DNA, 25 bp, probe
aatactgcattgagccctcagaatg

SEQ ID NO: 158100 - DNA, 25 bp, probe
aatactggccatgcctggagacata

SEQ ID NO: 158101 - DNA, 25 bp, probe
aatacaaggctcgtctcaaagatat

SEQ ID NO: 158102 - DNA, 25 bp, probe
aataaattatagactgcttgaacag

SEQ ID NO: 158103 - DNA, 25 bp, probe
aatattcctaagtagcaatggggtt

SEQ ID NO: 158104 - DNA, 25 bp, probe
aatagtacttactgcaatgctcgct

SEQ ID NO: 158105 - DNA, 25 bp, probe
aatagtactgaacccagatgtttat

SEQ ID NO: 158106 - DNA, 25 bp, probe
aatagtggtgaaaccagaacaatat

SEQ ID NO: 158107 - DNA, 25 bp, probe
aatacgtggaaggtacgctcactgg

SEQ ID NO: 158108 - DNA, 25 bp, probe
aatacagtgtgacgtgtactgtcaa

SEQ ID NO: 158109 - DNA, 25 bp, probe
aatacagtgtgacgtgtactgtcaa

SEQ ID NO: 158110 - DNA, 25 bp, probe
aataggtggcagcttcactccatgt

SEQ ID NO: 158111 - DNA, 25 bp, probe
aatagggcatgcgtgtgaacttcgg

SEQ ID NO: 158112 - DNA, 25 bp, probe
aatacgcagcggtgaacttcgtctc

SEQ ID NO: 158113 - DNA, 25 bp, probe
aatacgcagcggtgaacttcgtctc

SEQ ID NO: 158114 - DNA, 25 bp, probe
aatagcgacgggaattttgtgttct

SEQ ID NO: 158115 - DNA, 25 bp, probe
aataccatacgtatgttatgatgtt

SEQ ID NO: 158116 - DNA, 25 bp, probe
aataccatacgtatgttatgatgtt

SEQ ID NO: 158117 - DNA, 25 bp, probe
aatcaaatatcgctttacatgttct

SEQ ID NO: 158118 - DNA, 25 bp, probe
aatcatggtcatagctgtttcctgt

SEQ ID NO: 158119 - DNA, 25 bp, probe
aatctgaggtttggcatgtcctgtt

SEQ ID NO: 158120 - DNA, 25 bp, probe
aatcgtgggtcttcataggcatgtt

SEQ ID NO: 158121 - DNA, 25 bp, probe
aatagtgttacttcattcagagtgt

SEQ ID NO: 158122 - DNA, 25 bp, probe
aatagtcattccaaatatgagatgc

SEQ ID NO: 158123 - DNA, 25 bp, probe
aatcgatcagatcaacaaagtgttc

SEQ ID NO: 158124 - DNA, 25 bp, probe
aatctgcacacacaacgaacagttg

SEQ ID NO: 158125 - DNA, 25 bp, probe
aattaccactcctgatacagggctt

SEQ ID NO: 158126 - DNA, 25 bp, probe
aattttactccataaacagactgtt

SEQ ID NO: 158127 - DNA, 25 bp, probe
aatcttttaccagaacctgtgcatt

SEQ ID NO: 158128 - DNA, 25 bp, probe
aatatttttgaggcgaaggcgtctg

SEQ ID NO: 158129 - DNA, 25 bp, probe
aataatgtttcggagtccaggactg

SEQ ID NO: 158130 - DNA, 25 bp, probe
aatcaagttcttgaccctattcggc

SEQ ID NO: 158131 - DNA, 25 bp, probe
aatcgcgcttcttgaagacctatgt

SEQ ID NO: 158132 - DNA, 25 bp, probe
aatcggttcattcgatgagacctgt

SEQ ID NO: 158133 - DNA, 25 bp, probe
aatcgtttcatcattcggcgtgcga

SEQ ID NO: 158134 - DNA, 25 bp, probe
aatcgtttcatcattcggcgtgcga

SEQ ID NO: 158135 - DNA, 25 bp, probe
aatcgtaaagcgagctgacgctggt

SEQ ID NO: 158136 - DNA, 25 bp, probe
aatcgttagaggagcaacaggagat

SEQ ID NO: 158137 - DNA, 25 bp, probe
aattatattaggggctacagtggca

SEQ ID NO: 158138 - DNA, 25 bp, probe
aatttctaggtgtgccactgctcaa

SEQ ID NO: 158139 - DNA, 25 bp, probe
aatttgaaggttttgagtatatcaa

SEQ ID NO: 158140 - DNA, 25 bp, probe
aatcttaacttcatgtgagctattg

SEQ ID NO: 158141 - DNA, 25 bp, probe
aatcttgccaaaacttactcattgc

SEQ ID NO: 158142 - DNA, 25 bp, probe
aatcttgccaaaacttactcattgc

SEQ ID NO: 158143 - DNA, 25 bp, probe
aataacgcaaatggcttcctctttc

SEQ ID NO: 158144 - DNA, 25 bp, probe
aataacgcaaatggcttcctctttc

SEQ ID NO: 158145 - DNA, 25 bp, probe
aataagcttcttggttctacttctc

SEQ ID NO: 158146 - DNA, 25 bp, probe
aataacttgggccatcctatcatct

SEQ ID NO: 158147 - DNA, 25 bp, probe
aatctacctggacattcttggctag

SEQ ID NO: 158148 - DNA, 25 bp, probe
aatctacactcttgcattcttaggc

SEQ ID NO: 158149 - DNA, 25 bp, probe
aatctacactcttgcattcttaggc

SEQ ID NO: 158150 - DNA, 25 bp, probe
aatcatcaaatctcatcatctccat

SEQ ID NO: 158151 - DNA, 25 bp, probe
aatcataaaatccaatgcttctgca

SEQ ID NO: 158152 - DNA, 25 bp, probe
aatcataaaatccaatgcttctgca

SEQ ID NO: 158153 - DNA, 25 bp, probe
aatctgtattatcaatttctcatag

SEQ ID NO: 158154 - DNA, 25 bp, probe
aatctggcaccacaccttctacaat

SEQ ID NO: 158155 - DNA, 25 bp, probe
aattggggcatcaccccaacatcat

SEQ ID NO: 158156 - DNA, 25 bp, probe
aatatgtaggtgctccactaatatc

SEQ ID NO: 158157 - DNA, 25 bp, probe
aatcagaggggccacctctaactcc

SEQ ID NO: 158158 - DNA, 25 bp, probe
aatcagatgtggaccaactttatct

SEQ ID NO: 158159 - DNA, 25 bp, probe
aatcgtggactttggctttagcatg

SEQ ID NO: 158160 - DNA, 25 bp, probe
aatcagtttattgggttctagggct

SEQ ID NO: 158161 - DNA, 25 bp, probe
aatcagtttattgggttctagggct

SEQ ID NO: 158162 - DNA, 25 bp, probe
aatatgcttttctggtttataacta

SEQ ID NO: 158163 - DNA, 25 bp, probe
aatacttatttcagttccattacgg

SEQ ID NO: 158164 - DNA, 25 bp, probe
aatcattcttggtctgcagttcctt

SEQ ID NO: 158165 - DNA, 25 bp, probe
aatcaggcttggttcattttaatga

SEQ ID NO: 158166 - DNA, 25 bp, probe
aatctgttttgagtctttacaaaat

SEQ ID NO: 158167 - DNA, 25 bp, probe
aatctgatttgtccttttgatgcaa

SEQ ID NO: 158168 - DNA, 25 bp, probe
aatattgtggatcctttcatagact

SEQ ID NO: 158169 - DNA, 25 bp, probe
aatcatcttggccactttaatagtt

SEQ ID NO: 158170 - DNA, 25 bp, probe
aatcatcttggccactttaatagtt

SEQ ID NO: 158171 - DNA, 25 bp, probe
aatcttaggcgcttcaggcggagtt

SEQ ID NO: 158172 - DNA, 25 bp, probe
aatcttcatagacgacagtgggaga

SEQ ID NO: 158173 - DNA, 25 bp, probe
aatcttcatagacgacagtgggaga

SEQ ID NO: 158174 - DNA, 25 bp, probe
aatctctgattctgtcaatgtcttg

SEQ ID NO: 158175 - DNA, 25 bp, probe
aatcacagtctcacatactgtcttg

SEQ ID NO: 158176 - DNA, 25 bp, probe
aatctcactcttacttgcaatctga

SEQ ID NO: 158177 - DNA, 25 bp, probe
aatcttttgatgacattgcatacat

SEQ ID NO: 158178 - DNA, 25 bp, probe
aatctgtctagaatcctgctttaca

SEQ ID NO: 158179 - DNA, 25 bp, probe
aatagtctaataattgtttaagatc

SEQ ID NO: 158180 - DNA, 25 bp, probe
caaatgctaaatatggtcgttacta

SEQ ID NO: 158181 - DNA, 25 bp, probe
aatagatgacactgatggttttact

SEQ ID NO: 158182 - DNA, 25 bp, probe
aatacttcaaggtgttgcttatctc

SEQ ID NO: 158183 - DNA, 25 bp, probe
aatattaataggttttgctctaggc

SEQ ID NO: 158184 - DNA, 25 bp, probe
aataccgaatgggtcttattcagac

SEQ ID NO: 158185 - DNA, 25 bp, probe
gaatcccaaatgcattttttaacta

SEQ ID NO: 158186 - DNA, 25 bp, probe
aatcaatcaattcatatctatttat

SEQ ID NO: 158187 - DNA, 25 bp, probe
aatcaattgcttctgtcttgttttg

SEQ ID NO: 158188 - DNA, 25 bp, probe
aataaatgcttggcttctgtgtatc

SEQ ID NO: 158189 - DNA, 25 bp, probe
aataacacctgcttgttcttcatcc

SEQ ID NO: 158190 - DNA, 25 bp, probe
aataacatctctttcatctagctcc

SEQ ID NO: 158191 - DNA, 25 bp, probe
aatatggccctatctgaatgcctct

SEQ ID NO: 158192 - DNA, 25 bp, probe
aatcgtggccatttttatggctatg

SEQ ID NO: 158193 - DNA, 25 bp, probe
aatactgtgccaactttatgtgggg

SEQ ID NO: 158194 - DNA, 25 bp, probe
aatatcgctaaaccttactgtgaat

SEQ ID NO: 158195 - DNA, 25 bp, probe
aatcatcctatatggctaacattgt

SEQ ID NO: 158196 - DNA, 25 bp, probe
aatcactcattaccaccaatctgtg

SEQ ID NO: 158197 - DNA, 25 bp, probe
caatactgaaagactgcaagacctg

SEQ ID NO: 158198 - DNA, 25 bp, probe
aatatccagagagctccagtcctgc

SEQ ID NO: 158199 - DNA, 25 bp, probe
aatcagcaagaacatcgccatcctc

SEQ ID NO: 158200 - DNA, 25 bp, probe
aatagcaaaagttgttgcactcctg

SEQ ID NO: 158201 - DNA, 25 bp, probe
aatctcacaaagtgcggcaagccca

SEQ ID NO: 158202 - DNA, 25 bp, probe
aatctgccaaagttctagagaccct

SEQ ID NO: 158203 - DNA, 25 bp, probe
aatttaatagtgccaaggaagcctt

SEQ ID NO: 158204 - DNA, 25 bp, probe
aatcttacttctccacagtgaagat

SEQ ID NO: 158205 - DNA, 25 bp, probe
aatctacacttctttgcaccagagt

SEQ ID NO: 158206 - DNA, 25 bp, probe
aattatacattctcgactttgggga

SEQ ID NO: 158207 - DNA, 25 bp, probe
aattcaaactcatccagttaaccaa

SEQ ID NO: 158208 - DNA, 25 bp, probe
aattgcaaatccgctagaaaaagaa

SEQ ID NO: 158209 - DNA, 25 bp, probe
aattaggccgaggtaaatacagtga

SEQ ID NO: 158210 - DNA, 25 bp, probe
aatatctccgaagttaaaatctgta

SEQ ID NO: 158211 - DNA, 25 bp, probe
aatactaaagaatacaacctgctaa

SEQ ID NO: 158212 - DNA, 25 bp, probe
cagaaccaagaacataaaccctcca

SEQ ID NO: 158213 - DNA, 25 bp, probe
aatattcgaaggcatcaaacacccc

SEQ ID NO: 158214 - DNA, 25 bp, probe
aataactcacagggatattaaacca

SEQ ID NO: 158215 - DNA, 25 bp, probe
aataaagaagcacgttgatttcacc

SEQ ID NO: 158216 - DNA, 25 bp, probe
aataaagacaccattggcctgacgc

SEQ ID NO: 158217 - DNA, 25 bp, probe
aataaatgagccgcgtttgctcctc

SEQ ID NO: 158218 - DNA, 25 bp, probe
aatcaaaaccaggcgtattctcatt

SEQ ID NO: 158219 - DNA, 25 bp, probe
aatcaagccacaggccttatttcat

SEQ ID NO: 158220 - DNA, 25 bp, probe
aatacagctcagtgtcattttccta

SEQ ID NO: 158221 - DNA, 25 bp, probe
aataagcatcagtttgttgttttta

SEQ ID NO: 158222 - DNA, 25 bp, probe
aataagcaggtttaatgactgtatt

SEQ ID NO: 158223 - DNA, 25 bp, probe
aatagtgggtttacatactcaactc

SEQ ID NO: 158224 - DNA, 25 bp, probe
aatcaggtggttagctcaaccaatg

SEQ ID NO: 158225 - DNA, 25 bp, probe
caatcaggggttgtacctccataaa

SEQ ID NO: 158226 - DNA, 25 bp, probe
aatcatgggggtatgactgcctctc

SEQ ID NO: 158227 - DNA, 25 bp, probe
aatatcaggatgctgagggcccacc

SEQ ID NO: 158228 - DNA, 25 bp, probe
aatatcaggatgctgagggcccacc

SEQ ID NO: 158229 - DNA, 25 bp, probe
aatacgctgaggacatggggccagg

SEQ ID NO: 158230 - DNA, 25 bp, probe
aatacgctatgtgcttggcgtgtgg

SEQ ID NO: 158231 - DNA, 25 bp, probe
aatacctgcatgacctgggcattgt

SEQ ID NO: 158232 - DNA, 25 bp, probe
aatcactttaccagctgcatattgc

SEQ ID NO: 158233 - DNA, 25 bp, probe
aatatgtattacccgtctgaagctt

SEQ ID NO: 158234 - DNA, 25 bp, probe
aattggaggactcctttgaggccct

SEQ ID NO: 158235 - DNA, 25 bp, probe
aatttcaggacatctcggaggaggc

SEQ ID NO: 158236 - DNA, 25 bp, probe
aatcatttgggagccccagtagagc

SEQ ID NO: 158237 - DNA, 25 bp, probe
aatcatttgggagatggctcgtcgt

SEQ ID NO: 158238 - DNA, 25 bp, probe
aatatttgggaccacagtatgtcgc

SEQ ID NO: 158239 - DNA, 25 bp, probe
aatatttgggaccacagtatgtcgc

SEQ ID NO: 158240 - DNA, 25 bp, probe
aatatagtcagtcttcaggatgtgc

SEQ ID NO: 158241 - DNA, 25 bp, probe
aatcatgcaatagctgttcggattg

SEQ ID NO: 158242 - DNA, 25 bp, probe
aatcatgcctagttattcattgtta

SEQ ID NO: 158243 - DNA, 25 bp, probe
aatcacctcgtttgagttttatctg

SEQ ID NO: 158244 - DNA, 25 bp, probe
aatcacctcgtttgagttttatctg

SEQ ID NO: 158245 - DNA, 25 bp, probe
aatttgtaatcatggttttactgaa

SEQ ID NO: 158246 - DNA, 25 bp, probe
cactttcaaactgtgtattttctta

SEQ ID NO: 158247 - DNA, 25 bp, probe
aatttattggtcagtgttttcctag

SEQ ID NO: 158248 - DNA, 25 bp, probe
aatttagtagtcactgtttattgag

SEQ ID NO: 158249 - DNA, 25 bp, probe
aatcttacccgcaggttttcagatc

SEQ ID NO: 158250 - DNA, 25 bp, probe
aatttacctcttcagtttgtcacta

SEQ ID NO: 158251 - DNA, 25 bp, probe
aatttgtcaacttttgtcttccatt

SEQ ID NO: 158252 - DNA, 25 bp, probe
aatttgtcaacttttgtcttccatt

SEQ ID NO: 158253 - DNA, 25 bp, probe
aatttgtaccttaagcatttcccag

SEQ ID NO: 158254 - DNA, 25 bp, probe
aatttgttctcgtgagcttctcagc

SEQ ID NO: 158255 - DNA, 25 bp, probe
aatcttaattggttggtttgctctc

SEQ ID NO: 158256 - DNA, 25 bp, probe
aatcattaaagtgcatagatttcta

SEQ ID NO: 158257 - DNA, 25 bp, probe
caatcattaaagtgcatagatttct

SEQ ID NO: 158258 - DNA, 25 bp, probe
caagaccaacagtgtaatttccttc

SEQ ID NO: 158259 - DNA, 25 bp, probe
aatatgccaaggtgaagcttatccc

SEQ ID NO: 158260 - DNA, 25 bp, probe
aatagcgagggtcgtgagctttggc

SEQ ID NO: 158261 - DNA, 25 bp, probe
aatagcgacgcgctggcgttacagc

SEQ ID NO: 158262 - DNA, 25 bp, probe
aatcatcacctctgtctagttacag

SEQ ID NO: 158263 - DNA, 25 bp, probe
aatctatctctctggcaggttgtgg

SEQ ID NO: 158264 - DNA, 25 bp, probe
aatcttcatcattcctactgtagtt

SEQ ID NO: 158265 - DNA, 25 bp, probe
aatctttctaacattaagctaccaa

SEQ ID NO: 158266 - DNA, 25 bp, probe
aatcttttatatctgttgcctagtt

SEQ ID NO: 158267 - DNA, 25 bp, probe
aatcttttatatctgttgcctagtt

SEQ ID NO: 158268 - DNA, 25 bp, probe
cactcattcttaacttttcgcaaac

SEQ ID NO: 158269 - DNA, 25 bp, probe
aatactgcggcagcattcttcgaaa

SEQ ID NO: 158270 - DNA, 25 bp, probe
aattctggggtcatcctgagaaggt

SEQ ID NO: 158271 - DNA, 25 bp, probe
aatttggagtgtcagcagctatagt

SEQ ID NO: 158272 - DNA, 25 bp, probe
aatttgaccttctaagatcaagtaa

SEQ ID NO: 158273 - DNA, 25 bp, probe
aatttgaccttctaagatcaagtaa

SEQ ID NO: 158274 - DNA, 25 bp, probe
aattatccattcttataagaaggaa

SEQ ID NO: 158275 - DNA, 25 bp, probe
aatacatctttccctaaagaagata

SEQ ID NO: 158276 - DNA, 25 bp, probe
aataactccagcctctaagaaaata

SEQ ID NO: 158277 - DNA, 25 bp, probe
aataatctgaactctttgacaaatt

SEQ ID NO: 158278 - DNA, 25 bp, probe
aatctactgagattcctttgccacc

SEQ ID NO: 158279 - DNA, 25 bp, probe
aatctactgagattcctttgccacc

SEQ ID NO: 158280 - DNA, 25 bp, probe
aatcatttggaaactgatgctgcca

SEQ ID NO: 158281 - DNA, 25 bp, probe
aatcaattggctgggctactccaac

SEQ ID NO: 158282 - DNA, 25 bp, probe
aataagtatgcagcagaactccaac

SEQ ID NO: 158283 - DNA, 25 bp, probe
aataacccaaaggcatgctccagac

SEQ ID NO: 158284 - DNA, 25 bp, probe
aataaactcaaagccagccaagcca

SEQ ID NO: 158285 - DNA, 25 bp, probe
aataaactccaagcagccagtagcc

SEQ ID NO: 158286 - DNA, 25 bp, probe
aatataattcagctctaccaggcag

SEQ ID NO: 158287 - DNA, 25 bp, probe
aataataactggacttccagctgtg

SEQ ID NO: 158288 - DNA, 25 bp, probe
aatcattaaattgtgtccctgtatt

SEQ ID NO: 158289 - DNA, 25 bp, probe
aatttaatattcctggcataccttt

SEQ ID NO: 158290 - DNA, 25 bp, probe
aataaagtaacactgtgtcatcttc

SEQ ID NO: 158291 - DNA, 25 bp, probe
aataactgctaatttgtgatccaac

SEQ ID NO: 158292 - DNA, 25 bp, probe
aataccttacacttgaagtcattct

SEQ ID NO: 158293 - DNA, 25 bp, probe
aattccctcaaattaaggcacatcc

SEQ ID NO: 158294 - DNA, 25 bp, probe
aattccctcaaattaaggcacatcc

SEQ ID NO: 158295 - DNA, 25 bp, probe
aattccccactattagcaggctttg

SEQ ID NO: 158296 - DNA, 25 bp, probe
aatcaatacctcaaaagcaggcttt

SEQ ID NO: 158297 - DNA, 25 bp, probe
aatcactaacacatatagggcttcc

SEQ ID NO: 158298 - DNA, 25 bp, probe
aattctaatacttgaagtggaccca

SEQ ID NO: 158299 - DNA, 25 bp, probe
cacaccctaactaaaggaagtccag

SEQ ID NO: 158300 - DNA, 25 bp, probe
caaccctgtactgatagtacttccc

SEQ ID NO: 158301 - DNA, 25 bp, probe
aatacctgcctttaaggacttcctg

SEQ ID NO: 158302 - DNA, 25 bp, probe
aatacctggagtcaaagcagttcct

SEQ ID NO: 158303 - DNA, 25 bp, probe
aataccggagatcatgcaagctggt

SEQ ID NO: 158304 - DNA, 25 bp, probe
aatatcctgtaactacaatgatggt

SEQ ID NO: 158305 - DNA, 25 bp, probe
aatatcctgtaactacaatgatggt

SEQ ID NO: 158306 - DNA, 25 bp, probe
aatcatcatcgcccaggaagagaga

SEQ ID NO: 158307 - DNA, 25 bp, probe
aatcacactcagtctgaggagaata

SEQ ID NO: 158308 - DNA, 25 bp, probe
aatcacactcagtctgaggagaata

SEQ ID NO: 158309 - DNA, 25 bp, probe
aatatcctgctgctgggaaaaccac

SEQ ID NO: 158310 - DNA, 25 bp, probe
aatcacctgccaaggaaaaatgcaa

SEQ ID NO: 158311 - DNA, 25 bp, probe
aatatcctcatcacgaaacattccg

SEQ ID NO: 158312 - DNA, 25 bp, probe
aatacctgatccagaatgtttccgt

SEQ ID NO: 158313 - DNA, 25 bp, probe
aatactcagcccaagaatttgtcag

SEQ ID NO: 158314 - DNA, 25 bp, probe
aatcatcatactctagaatcttgtc

SEQ ID NO: 158315 - DNA, 25 bp, probe
aatcatcatactctagaatcttgtc

SEQ ID NO: 158316 - DNA, 25 bp, probe
aatcaatcagtgtatcagtgcatct

SEQ ID NO: 158317 - DNA, 25 bp, probe
aatcagtctcataaagctatttttg

SEQ ID NO: 158318 - DNA, 25 bp, probe
aatcagtctagttctgttatctgtt

SEQ ID NO: 158319 - DNA, 25 bp, probe
aatagctgctaatctgtcaacctgt

SEQ ID NO: 158320 - DNA, 25 bp, probe
aataggcataattgctggcaccatt

SEQ ID NO: 158321 - DNA, 25 bp, probe
aataggcataattgctggcaccatt

SEQ ID NO: 158322 - DNA, 25 bp, probe
aatcagtcagtatctgcagaacagt

SEQ ID NO: 158323 - DNA, 25 bp, probe
aatcactatctttctgataacagaa

SEQ ID NO: 158324 - DNA, 25 bp, probe
aatcactatctttctgataacagaa

SEQ ID NO: 158325 - DNA, 25 bp, probe
aatcatactctttgctataacaatt

SEQ ID NO: 158326 - DNA, 25 bp, probe
aatcttcctggagaatacaatgaac

SEQ ID NO: 158327 - DNA, 25 bp, probe
aatcttccatcctcagtaattaaga

SEQ ID NO: 158328 - DNA, 25 bp, probe
aatcattccaccaagttatttaaca

SEQ ID NO: 158329 - DNA, 25 bp, probe
aatcattccaccaagttatttaaca

SEQ ID NO: 158330 - DNA, 25 bp, probe
aatcacacctgccttgtttttgaaa

SEQ ID NO: 158331 - DNA, 25 bp, probe
aatcatccctctattattcttaaat

SEQ ID NO: 158332 - DNA, 25 bp, probe
aatacctcctcagtaatttataatg

SEQ ID NO: 158333 - DNA, 25 bp, probe
aatacccactttaatgactatcata

SEQ ID NO: 158334 - DNA, 25 bp, probe
aatacccactttaatgactatcata

SEQ ID NO: 158335 - DNA, 25 bp, probe
aatacccatcttcattaaagtatat

SEQ ID NO: 158336 - DNA, 25 bp, probe
aatacacagcacttgattacaaaat

SEQ ID NO: 158337 - DNA, 25 bp, probe
aataaggacaagtattccagtatct

SEQ ID NO: 158338 - DNA, 25 bp, probe
gaataaggacggtaatctgcatttt

SEQ ID NO: 158339 - DNA, 25 bp, probe
gaataatggactcaatccagtttac

SEQ ID NO: 158340 - DNA, 25 bp, probe
aataatggactatgctatgaattta

SEQ ID NO: 158341 - DNA, 25 bp, probe
aattgatggtttctagattatctag

SEQ ID NO: 158342 - DNA, 25 bp, probe
aattgatggtttctagattatctag

SEQ ID NO: 158343 - DNA, 25 bp, probe
aattgggtatagtatggtatttgaa

SEQ ID NO: 158344 - DNA, 25 bp, probe
aattgtgaaaactattgttgttaca

SEQ ID NO: 158345 - DNA, 25 bp, probe
aattgtgaaaactattgttgttaca

SEQ ID NO: 158346 - DNA, 25 bp, probe
aatactgaaaacttggtgctgaaga

SEQ ID NO: 158347 - DNA, 25 bp, probe
aatacatgggaagctttgctgaaaa

SEQ ID NO: 158348 - DNA, 25 bp, probe
aatacagctcttacagctttggaaa

SEQ ID NO: 158349 - DNA, 25 bp, probe
aatacagctcttacagctttggaaa

SEQ ID NO: 158350 - DNA, 25 bp, probe
aatatcatgttttactgtgcgagaa

SEQ ID NO: 158351 - DNA, 25 bp, probe
aatcacttgatgtaacctggaaact

SEQ ID NO: 158352 - DNA, 25 bp, probe
aatactaaatgaacagcggatgaaa

SEQ ID NO: 158353 - DNA, 25 bp, probe
aatacaaattgttcctgtgatgcaa

SEQ ID NO: 158354 - DNA, 25 bp, probe
aatcagctatgaattactctatata

SEQ ID NO: 158355 - DNA, 25 bp, probe
aatcacaatattaactgtttaatta

SEQ ID NO: 158356 - DNA, 25 bp, probe
aataagtatgtggcactgtttttat

SEQ ID NO: 158357 - DNA, 25 bp, probe
aataatgtgtgtgtggttttccttt

SEQ ID NO: 158358 - DNA, 25 bp, probe
aatcaagtgtattgctggttctgct

SEQ ID NO: 158359 - DNA, 25 bp, probe
aatcagagcgtcctgtgcggtgagt

SEQ ID NO: 158360 - DNA, 25 bp, probe
aatcagagcgtcctgtgcggtgagt

SEQ ID NO: 158361 - DNA, 25 bp, probe
aatcaagagatccatctcacagggt

SEQ ID NO: 158362 - DNA, 25 bp, probe
aatcaagatgactaccagctggttc

SEQ ID NO: 158363 - DNA, 25 bp, probe
aatcatggtgcctaccagttcttca

SEQ ID NO: 158364 - DNA, 25 bp, probe
aatcatgttacatcactgttttgca

SEQ ID NO: 158365 - DNA, 25 bp, probe
aattattagcgtggcttttacactt

SEQ ID NO: 158366 - DNA, 25 bp, probe
aatttccactgtggttcttgccacc

SEQ ID NO: 158367 - DNA, 25 bp, probe
aatttccactcaggtctgttttccg

SEQ ID NO: 158368 - DNA, 25 bp, probe
aatttactgtaccttactattcctg

SEQ ID NO: 158369 - DNA, 25 bp, probe
aattaatctttccctgttaggctga

SEQ ID NO: 158370 - DNA, 25 bp, probe
aataagttgttatgcactttgggat

SEQ ID NO: 158371 - DNA, 25 bp, probe
aataagttgttatgcactttgggat

SEQ ID NO: 158372 - DNA, 25 bp, probe
aataacattttatacaatttccata

SEQ ID NO: 158373 - DNA, 25 bp, probe
aataacattttgacccagtttctgg

SEQ ID NO: 158374 - DNA, 25 bp, probe
aattacatctttgtccacgtttaat

SEQ ID NO: 158375 - DNA, 25 bp, probe
aataggatctttgaccagcactgtt

SEQ ID NO: 158376 - DNA, 25 bp, probe
aataggatctttgaccagcactgtt

SEQ ID NO: 158377 - DNA, 25 bp, probe
caatacgtttgtgcagaatctctat

SEQ ID NO: 158378 - DNA, 25 bp, probe
aatacgtttgtgcagaatctctatg

SEQ ID NO: 158379 - DNA, 25 bp, probe
aatatttttctgccaaactccatca

SEQ ID NO: 158380 - DNA, 25 bp, probe
aatttttctaagcatattcaaaagg

SEQ ID NO: 158381 - DNA, 25 bp, probe
aattttttaatgtgttggtgatgaa

SEQ ID NO: 158382 - DNA, 25 bp, probe
aatttttttagtatagcgtatcgca

SEQ ID NO: 158383 - DNA, 25 bp, probe
caatgttttgttttgtttcgttctg

SEQ ID NO: 158384 - DNA, 25 bp, probe
aataggtttatgtgtactggtttgc

SEQ ID NO: 158385 - DNA, 25 bp, probe
aataggtttatgtgtactggtttgc

SEQ ID NO: 158386 - DNA, 25 bp, probe
aataagtcttattcagtcatcggtg

SEQ ID NO: 158387 - DNA, 25 bp, probe
aataagtcttattcagtcatcggtg

SEQ ID NO: 158388 - DNA, 25 bp, probe
aataaattcttccaactcatgggat

SEQ ID NO: 158389 - DNA, 25 bp, probe
aataaattcttccaactcatgggat

SEQ ID NO: 158390 - DNA, 25 bp, probe
aatactattcttaaagctgctgaag

SEQ ID NO: 158391 - DNA, 25 bp, probe
aatatctttccaagaagttgaatca

SEQ ID NO: 158392 - DNA, 25 bp, probe
aataatttctatatacttacatcta

SEQ ID NO: 158393 - DNA, 25 bp, probe
aatattctttaatacttcacacaga

SEQ ID NO: 158394 - DNA, 25 bp, probe
aattacgtaaaaacatctatcgcat

SEQ ID NO: 158395 - DNA, 25 bp, probe
aattacgtaaaaacatctatcgcat

SEQ ID NO: 158396 - DNA, 25 bp, probe
caatctacgtgaaagaccccacacc

SEQ ID NO: 158397 - DNA, 25 bp, probe
aatataccatattagctacccacca

SEQ ID NO: 158398 - DNA, 25 bp, probe
aatagcacgatgttggaatccgact

SEQ ID NO: 158399 - DNA, 25 bp, probe
aatacacagtattcagagtctctga

SEQ ID NO: 158400 - DNA, 25 bp, probe
aataccagttgaagatgctcatcag

SEQ ID NO: 158401 - DNA, 25 bp, probe
aatacagatgattagatttcatagt

SEQ ID NO: 158402 - DNA, 25 bp, probe
aatacagatgattagatttcatagt

SEQ ID NO: 158403 - DNA, 25 bp, probe
aatacaggcatagagttcagacttt

SEQ ID NO: 158404 - DNA, 25 bp, probe
aataagcatccacagtacaagcctt

SEQ ID NO: 158405 - DNA, 25 bp, probe
aataagcaaagagggcaatcgcctc

SEQ ID NO: 158406 - DNA, 25 bp, probe
aatacacaaagaactggatcacccc

SEQ ID NO: 158407 - DNA, 25 bp, probe
aatacacaaaaactgcagatacttc

SEQ ID NO: 158408 - DNA, 25 bp, probe
aatacacaaaaactgcagatacttc

SEQ ID NO: 158409 - DNA, 25 bp, probe
aataccaacatatgggccccatctg

SEQ ID NO: 158410 - DNA, 25 bp, probe
aataacagatcacgggtgtacccag

SEQ ID NO: 158411 - DNA, 25 bp, probe
aattacaaccagcatgcgtatccca

SEQ ID NO: 158412 - DNA, 25 bp, probe
aattacaaccagcatgcgtatccca

SEQ ID NO: 158413 - DNA, 25 bp, probe
aattatacaggagagccttggccaa

SEQ ID NO: 158414 - DNA, 25 bp, probe
aattcaaaattgagctctaggccca

SEQ ID NO: 158415 - DNA, 25 bp, probe
aattataaatagattccccacgcag

SEQ ID NO: 158416 - DNA, 25 bp, probe
aatttcaactatttctaccaccgag

SEQ ID NO: 158417 - DNA, 25 bp, probe
aatttcaactatttctaccaccgag

SEQ ID NO: 158418 - DNA, 25 bp, probe
aattatacctactttacccatgatg

SEQ ID NO: 158419 - DNA, 25 bp, probe
aattacaccttagacctgacatctg

SEQ ID NO: 158420 - DNA, 25 bp, probe
aattagaagcctcgtaccaatcatc

SEQ ID NO: 158421 - DNA, 25 bp, probe
aatatgagacatactgttactaaac

SEQ ID NO: 158422 - DNA, 25 bp, probe
aattaactatctgtacttataaggt

SEQ ID NO: 158423 - DNA, 25 bp, probe
aattcagtccttgcctttgaagggt

SEQ ID NO: 158424 - DNA, 25 bp, probe
aattcgattcgagcccacgaaggcc

SEQ ID NO: 158425 - DNA, 25 bp, probe
aattatccttacacacaaaaggctc

SEQ ID NO: 158426 - DNA, 25 bp, probe
aatttgtctaacacatttcaaggat

SEQ ID NO: 158427 - DNA, 25 bp, probe
aattttgcacagtaaactaatagtt

SEQ ID NO: 158428 - DNA, 25 bp, probe
aattttgccaggaacagtaccctca

SEQ ID NO: 158429 - DNA, 25 bp, probe
aattttgtaggcatcaataagttat

SEQ ID NO: 158430 - DNA, 25 bp, probe
aattttgtaggcatcaataagttat

SEQ ID NO: 158431 - DNA, 25 bp, probe
aatatcatttatggcctcactgtgg

SEQ ID NO: 158432 - DNA, 25 bp, probe
caatactttcaacccaagtagccct

SEQ ID NO: 158433 - DNA, 25 bp, probe
aatactgttctatacgagtgaccga

SEQ ID NO: 158434 - DNA, 25 bp, probe
aatactgttctatacgagtgaccga

SEQ ID NO: 158435 - DNA, 25 bp, probe
aatacctgatctaaccgatgtgaat

SEQ ID NO: 158436 - DNA, 25 bp, probe
aatacctactgctccaagtcagatg

SEQ ID NO: 158437 - DNA, 25 bp, probe
aataccataccttgctggaaacagt

SEQ ID NO: 158438 - DNA, 25 bp, probe
aataccataccttgctggaaacagt

SEQ ID NO: 158439 - DNA, 25 bp, probe
aatacacaactcttggatagatccc

SEQ ID NO: 158440 - DNA, 25 bp, probe
aatatacagctttggaatcgtcctc

SEQ ID NO: 158441 - DNA, 25 bp, probe
aattaagtgggggcaaggcagtagt

SEQ ID NO: 158442 - DNA, 25 bp, probe
aataaagctctgtgtgcctgggtca

SEQ ID NO: 158443 - DNA, 25 bp, probe
aataatcatgctaggggccgggtgc

SEQ ID NO: 158444 - DNA, 25 bp, probe
aataatcacgtattgtggggagggg

SEQ ID NO: 158445 - DNA, 25 bp, probe
aattatacagccaggtgggaagcag

SEQ ID NO: 158446 - DNA, 25 bp, probe
aattgaaaatgcattagggaaaact

SEQ ID NO: 158447 - DNA, 25 bp, probe
aataaacaagatcgtcaggaccaaa

SEQ ID NO: 158448 - DNA, 25 bp, probe
aataaacaacacacgcatacagaaa

SEQ ID NO: 158449 - DNA, 25 bp, probe
aataaacccagagctcaaccagaag

SEQ ID NO: 158450 - DNA, 25 bp, probe
aataaatgtatctagcctacccaaa

SEQ ID NO: 158451 - DNA, 25 bp, probe
aataaatgtatctagcctacccaaa

SEQ ID NO: 158452 - DNA, 25 bp, probe
aataaatatatctgccattaataaa

SEQ ID NO: 158453 - DNA, 25 bp, probe
aataaatatttgtccaactattcaa

SEQ ID NO: 158454 - DNA, 25 bp, probe
aataaattattgaccgagttctgta

SEQ ID NO: 158455 - DNA, 25 bp, probe
aattatgatctacacccgtttctta

SEQ ID NO: 158456 - DNA, 25 bp, probe
aattagctgtcaaacctcctaactt

SEQ ID NO: 158457 - DNA, 25 bp, probe
aattggatatctgtcccttcagaca

SEQ ID NO: 158458 - DNA, 25 bp, probe
aattagtcagctgatttgattacaa

SEQ ID NO: 158459 - DNA, 25 bp, probe
caatccccagtttgtatttagctgc

SEQ ID NO: 158460 - DNA, 25 bp, probe
aatacacccttattatttagctgtt

SEQ ID NO: 158461 - DNA, 25 bp, probe
aataatgccatcttcagttttggtt

SEQ ID NO: 158462 - DNA, 25 bp, probe
aataacattcttcgatctctgggat

SEQ ID NO: 158463 - DNA, 25 bp, probe
aataagattcagagcacttgggatt

SEQ ID NO: 158464 - DNA, 25 bp, probe
aatatagaattgtgatcgttggaat

SEQ ID NO: 158465 - DNA, 25 bp, probe
aataagaggatcagccgggtgcaat

SEQ ID NO: 158466 - DNA, 25 bp, probe
aataagaggatcagccgggtgcaat

SEQ ID NO: 158467 - DNA, 25 bp, probe
aataatgacagaatggagtggggta

SEQ ID NO: 158468 - DNA, 25 bp, probe
aatatcatcaccaggaggagtgttt

SEQ ID NO: 158469 - DNA, 25 bp, probe
aatattactcttcgtcgggtatgta

SEQ ID NO: 158470 - DNA, 25 bp, probe
aatattactcttcgtcgggtatgta

SEQ ID NO: 158471 - DNA, 25 bp, probe
aatacaggctctgagtctggtgtag

SEQ ID NO: 158472 - DNA, 25 bp, probe
aatagcaggttatcatcatatgtaa

SEQ ID NO: 158473 - DNA, 25 bp, probe
aatagtggttattggtctgatatat

SEQ ID NO: 158474 - DNA, 25 bp, probe
aatagtggttattggtctgatatat

SEQ ID NO: 158475 - DNA, 25 bp, probe
aatatgtgcagtatacgttgaatgt

SEQ ID NO: 158476 - DNA, 25 bp, probe
aataatcttgacaatgctgtataat

SEQ ID NO: 158477 - DNA, 25 bp, probe
aataatcttgacaatgctgtataat

SEQ ID NO: 158478 - DNA, 25 bp, probe
aataatctgaacaatcagccatttc

SEQ ID NO: 158479 - DNA, 25 bp, probe
aataactgatgagatacatttgatc

SEQ ID NO: 158480 - DNA, 25 bp, probe
aataagtatgaaaacagttctctgt

SEQ ID NO: 158481 - DNA, 25 bp, probe
aataagtatgaaaacagttctctgt

SEQ ID NO: 158482 - DNA, 25 bp, probe
aataaattcaatacacagttcagtg

SEQ ID NO: 158483 - DNA, 25 bp, probe
aataatctatatcacacagcttcct

SEQ ID NO: 158484 - DNA, 25 bp, probe
aataactggacttccagctgtggat

SEQ ID NO: 158485 - DNA, 25 bp, probe
aataactggacttccagctgtggat

SEQ ID NO: 158486 - DNA, 25 bp, probe
aatatgactgtgactgaccctgagg

SEQ ID NO: 158487 - DNA, 25 bp, probe
aatttcgtgcatcgagacctggctg

SEQ ID NO: 158488 - DNA, 25 bp, probe
aatttcgtgcatcgagacctggctg

SEQ ID NO: 158489 - DNA, 25 bp, probe
aatttcgtgcatcgagacctggctg

SEQ ID NO: 158490 - DNA, 25 bp, probe
aatatctccattccagacacagtag

SEQ ID NO: 158491 - DNA, 25 bp, probe
aatatttcactgtcgacaagaggac

SEQ ID NO: 158492 - DNA, 25 bp, probe
aatatgatgtcctcatagaaggtga

SEQ ID NO: 158493 - DNA, 25 bp, probe
aatagtttccaaagccagtctgatg

SEQ ID NO: 158494 - DNA, 25 bp, probe
aatagccttccaattggccttgtgc

SEQ ID NO: 158495 - DNA, 25 bp, probe
aatatgcctgttatctgtggcgttt

SEQ ID NO: 158496 - DNA, 25 bp, probe
aatatctcgttatttattggaggta

SEQ ID NO: 158497 - DNA, 25 bp, probe
aatatctcgttatttattggaggta

SEQ ID NO: 158498 - DNA, 25 bp, probe
aatactttgtaatttatgatagtgt

SEQ ID NO: 158499 - DNA, 25 bp, probe
aattctccttactgggatagtcagg

SEQ ID NO: 158500 - DNA, 25 bp, probe
aatttaatttgctcctgtagctgca

SEQ ID NO: 158501 - DNA, 25 bp, probe
aatttcctttgatgacatgtcctgc

SEQ ID NO: 158502 - DNA, 25 bp, probe
aattactagttgctagcatgttatg

SEQ ID NO: 158503 - DNA, 25 bp, probe
aattacattatgcccttgagtctag

SEQ ID NO: 158504 - DNA, 25 bp, probe
aatattcttctgacttaggattggc

SEQ ID NO: 158505 - DNA, 25 bp, probe
aattgtttttatggaggctttgcat

SEQ ID NO: 158506 - DNA, 25 bp, probe
aatttgtcatggatggagggtatct

SEQ ID NO: 158507 - DNA, 25 bp, probe
aattggccatacagggaggttcatt

SEQ ID NO: 158508 - DNA, 25 bp, probe
aattgacactattaggggtgtccgt

SEQ ID NO: 158509 - DNA, 25 bp, probe
aattcgcacgagtagtgggtcgtct

SEQ ID NO: 158510 - DNA, 25 bp, probe
aattcgcacgagtagtgggtcgtct

SEQ ID NO: 158511 - DNA, 25 bp, probe
aatacccgaaatgatgtactggatg

SEQ ID NO: 158512 - DNA, 25 bp, probe
caatacccgaaatgatgtactggat

SEQ ID NO: 158513 - DNA, 25 bp, probe
aattcctgggcatggactaccagat

SEQ ID NO: 158514 - DNA, 25 bp, probe
aatttctgggcctgaggtgctcaga

SEQ ID NO: 158515 - DNA, 25 bp, probe
aattttggccacttgtaggtatcag

SEQ ID NO: 158516 - DNA, 25 bp, probe
aattttgttgcctgttgaggagcca

SEQ ID NO: 158517 - DNA, 25 bp, probe
aatttcgttgctgtcggtggaagat

SEQ ID NO: 158518 - DNA, 25 bp, probe
aataatcgtgagcgtttgttgaaca

SEQ ID NO: 158519 - DNA, 25 bp, probe
aatattggatacgttctttatggaa

SEQ ID NO: 158520 - DNA, 25 bp, probe
aatagtggactctcactgtctagga

SEQ ID NO: 158521 - DNA, 25 bp, probe
aatagaggcactttagcttccactt

SEQ ID NO: 158522 - DNA, 25 bp, probe
aatatcgtgactttgacattccagc

SEQ ID NO: 158523 - DNA, 25 bp, probe
aatatcgtgactttgacattccagc

SEQ ID NO: 158524 - DNA, 25 bp, probe
aattttgcacatttacttctagaaa

SEQ ID NO: 158525 - DNA, 25 bp, probe
caagtttgcgaccaaatccaagaac

SEQ ID NO: 158526 - DNA, 25 bp, probe
caagtttgcgaccaaatccaagaac

SEQ ID NO: 158527 - DNA, 25 bp, probe
aattaaaatccagcatcccaagatc

SEQ ID NO: 158528 - DNA, 25 bp, probe
aataagaaatcttccccagtggatc

SEQ ID NO: 158529 - DNA, 25 bp, probe
aatactactatttcttccaaggatc

SEQ ID NO: 158530 - DNA, 25 bp, probe
aatttcctattcttccaaatgagat

SEQ ID NO: 158531 - DNA, 25 bp, probe
aatattacttttggccgagcatggt

SEQ ID NO: 158532 - DNA, 25 bp, probe
aataccacttgtggacctggctgta

SEQ ID NO: 158533 - DNA, 25 bp, probe
aatacaacattttgcagttccttcc

SEQ ID NO: 158534 - DNA, 25 bp, probe
aatacaacattttgcagttccttcc

SEQ ID NO: 158535 - DNA, 25 bp, probe
aataaagctttctgtttgtgttcca

SEQ ID NO: 158536 - DNA, 25 bp, probe
aatattagccttgtctttgatttta

SEQ ID NO: 158537 - DNA, 25 bp, probe
aatatgaagcactttctcttaactt

SEQ ID NO: 158538 - DNA, 25 bp, probe
aatatgaagcactttctcttaactt

SEQ ID NO: 158539 - DNA, 25 bp, probe
aattgtgatcctacctttgaacttg

SEQ ID NO: 158540 - DNA, 25 bp, probe
aatactgtattatgcacttaacatt

SEQ ID NO: 158541 - DNA, 25 bp, probe
aatacttagatcctccttatactct

SEQ ID NO: 158542 - DNA, 25 bp, probe
aatactagagaatccttgttcattg

SEQ ID NO: 158543 - DNA, 25 bp, probe
aatactagagaatccttgttcattg

SEQ ID NO: 158544 - DNA, 25 bp, probe
aatactatcaagtcccttttctctt

SEQ ID NO: 158545 - DNA, 25 bp, probe
aatatggctaaaccctttcctgatt

SEQ ID NO: 158546 - DNA, 25 bp, probe
aatagcctaacagggctgtgtttat

SEQ ID NO: 158547 - DNA, 25 bp, probe
aatacatgtaaaggtctgttgttga

SEQ ID NO: 158548 - DNA, 25 bp, probe
aatacatgtaaaggtctgttgttga

SEQ ID NO: 158549 - DNA, 25 bp, probe
aatactgtacaatttctgaagatgg

SEQ ID NO: 158550 - DNA, 25 bp, probe
aatactgtgtggaagattgcaagtg

SEQ ID NO: 158551 - DNA, 25 bp, probe
aatactgtgtggaagattgcaagtg

SEQ ID NO: 158552 - DNA, 25 bp, probe
aatactggggtgtcctcaagaccca

SEQ ID NO: 158553 - DNA, 25 bp, probe
aatactggagagttcttccgagacc

SEQ ID NO: 158554 - DNA, 25 bp, probe
aatagtgaagactttattcgtggtc

SEQ ID NO: 158555 - DNA, 25 bp, probe
aatagattagatgttttccttggga

SEQ ID NO: 158556 - DNA, 25 bp, probe
aattcttagagacatttccggttgt

SEQ ID NO: 158557 - DNA, 25 bp, probe
aattttagaccctctacattgttct

SEQ ID NO: 158558 - DNA, 25 bp, probe
aattttaaggccacggcttgtgtct

SEQ ID NO: 158559 - DNA, 25 bp, probe
aatatgttagattgccaaccagttc

SEQ ID NO: 158560 - DNA, 25 bp, probe
aatatgttagattgccaaccagttc

SEQ ID NO: 158561 - DNA, 25 bp, probe
aatatgcaagactctcaaggagtac

SEQ ID NO: 158562 - DNA, 25 bp, probe
aatatcaaactttctaggtgttaag

SEQ ID NO: 158563 - DNA, 25 bp, probe
aattcataacgtgtatctttaagaa

SEQ ID NO: 158564 - DNA, 25 bp, probe
aattgtgtccctgtattaccaaaat

SEQ ID NO: 158565 - DNA, 25 bp, probe
aattgtgtccctgtattaccaaaat

SEQ ID NO: 158566 - DNA, 25 bp, probe
aattctaccactgtattaacaccac

SEQ ID NO: 158567 - DNA, 25 bp, probe
aatttacaactgttacttacactga

SEQ ID NO: 158568 - DNA, 25 bp, probe
aatttaaactgcttataataatcca

SEQ ID NO: 158569 - DNA, 25 bp, probe
aatttggagtcccttgaatcaacca

SEQ ID NO: 158570 - DNA, 25 bp, probe
aattctggttcctctgaaagtccca

SEQ ID NO: 158571 - DNA, 25 bp, probe
aattctggttcctctgaaagtccca

SEQ ID NO: 158572 - DNA, 25 bp, probe
caatcttgagtaactgggaaagtct

SEQ ID NO: 158573 - DNA, 25 bp, probe
aatatgagaggaacgggagatatga

SEQ ID NO: 158574 - DNA, 25 bp, probe
aatatggaggtcctgagcatgggga

SEQ ID NO: 158575 - DNA, 25 bp, probe
aatatatggaccatgatctgatggg

SEQ ID NO: 158576 - DNA, 25 bp, probe
aatagtgtacacagactgacgaaac

SEQ ID NO: 158577 - DNA, 25 bp, probe
aatacttgaacacgactgagcaggt

SEQ ID NO: 158578 - DNA, 25 bp, probe
aatacttgaacacgactgagcaggt

SEQ ID NO: 158579 - DNA, 25 bp, probe
aatactattccatccacacagtttc

SEQ ID NO: 158580 - DNA, 25 bp, probe
aatactttcctattcatactttcca

SEQ ID NO: 158581 - DNA, 25 bp, probe
aatatttaccatataatcttggaat

SEQ ID NO: 158582 - DNA, 25 bp, probe
aatatttctccagcaaatttgagga

SEQ ID NO: 158583 - DNA, 25 bp, probe
caatcatctattgagtgtacattta

SEQ ID NO: 158584 - DNA, 25 bp, probe
caagaccataaactggactctgctg

SEQ ID NO: 158585 - DNA, 25 bp, probe
caacctcaaaagcctgactttggtt

SEQ ID NO: 158586 - DNA, 25 bp, probe
aatactaaagatgggcccagtggat

SEQ ID NO: 158587 - DNA, 25 bp, probe
aatagctaaagtgaggcctgcttca

SEQ ID NO: 158588 - DNA, 25 bp, probe
aataccagcaagtctaggcctgctc

SEQ ID NO: 158589 - DNA, 25 bp, probe
aatatcgaaagcttcagacacatgc

SEQ ID NO: 158590 - DNA, 25 bp, probe
aatactgtcaaattgccacgatctc

SEQ ID NO: 158591 - DNA, 25 bp, probe
aatacgttaatacgcaggcatctga

SEQ ID NO: 158592 - DNA, 25 bp, probe
aatactgtaataaagctgtcatctc

SEQ ID NO: 158593 - DNA, 25 bp, probe
aatatcagctgccatattacgactt

SEQ ID NO: 158594 - DNA, 25 bp, probe
aattagcttgtgttcagccacataa

SEQ ID NO: 158595 - DNA, 25 bp, probe
aattagcttgtgttcagccacataa

SEQ ID NO: 158596 - DNA, 25 bp, probe
aatactcttgtgttacatcatctca

SEQ ID NO: 158597 - DNA, 25 bp, probe
aatactcttgtgttacatcatctca

SEQ ID NO: 158598 - DNA, 25 bp, probe
aatacattctttcacatcttgaatt

SEQ ID NO: 158599 - DNA, 25 bp, probe
aattattttctgagacttggattaa

SEQ ID NO: 158600 - DNA, 25 bp, probe
aattgtttggcaagaacactgtgca

SEQ ID NO: 158601 - DNA, 25 bp, probe
aattattctgctaatatacctagat

SEQ ID NO: 158602 - DNA, 25 bp, probe
aatttcccatgcatttactagattc

SEQ ID NO: 158603 - DNA, 25 bp, probe
aatatttccatatgttagccatttc

SEQ ID NO: 158604 - DNA, 25 bp, probe
aatataccaatctcctgaggcttgt

SEQ ID NO: 158605 - DNA, 25 bp, probe
aatatattcagagtaacacaggatt

SEQ ID NO: 158606 - DNA, 25 bp, probe
aatacttcatgattagaacaaatat

SEQ ID NO: 158607 - DNA, 25 bp, probe
aatacttcatgattagaacaaatat

SEQ ID NO: 158608 - DNA, 25 bp, probe
aatactgctgagatacatacagaat

SEQ ID NO: 158609 - DNA, 25 bp, probe
aatttgtgaatttgcaacagtaatc

SEQ ID NO: 158610 - DNA, 25 bp, probe
aattcagtaatatctcagcagtcag

SEQ ID NO: 158611 - DNA, 25 bp, probe
aattcaggcgaattccataccgtta

SEQ ID NO: 158612 - DNA, 25 bp, probe
aattccctggtagatcacctgtgaa

SEQ ID NO: 158613 - DNA, 25 bp, probe
aattccctggtagatcacctgtgaa

SEQ ID NO: 158614 - DNA, 25 bp, probe
aattctaccgtggaatgtccctgga

SEQ ID NO: 158615 - DNA, 25 bp, probe
aatttaggcgtgcgggcgcctgcaa

SEQ ID NO: 158616 - DNA, 25 bp, probe
aatttcagccaataggagccagcca

SEQ ID NO: 158617 - DNA, 25 bp, probe
aatactcccaggaaatagcgcagga

SEQ ID NO: 158618 - DNA, 25 bp, probe
aatacacccagccagttatgcagct

SEQ ID NO: 158619 - DNA, 25 bp, probe
aatacatcgaagcatgtctcagcca

SEQ ID NO: 158620 - DNA, 25 bp, probe
caatacttgaaccttctcccaggta

SEQ ID NO: 158621 - DNA, 25 bp, probe
aatacttgaaatattgccactgtgc

SEQ ID NO: 158622 - DNA, 25 bp, probe
aatatcttcataattaatgcccttc

SEQ ID NO: 158623 - DNA, 25 bp, probe
aatattactcttccatattccttct

SEQ ID NO: 158624 - DNA, 25 bp, probe
aatatcgactcttgtattacgattc

SEQ ID NO: 158625 - DNA, 25 bp, probe
aatacatggccaactttatcctatc

SEQ ID NO: 158626 - DNA, 25 bp, probe
aatacatggccaactttatcctatc

SEQ ID NO: 158627 - DNA, 25 bp, probe
aatactggcctgatgagtatgctct

SEQ ID NO: 158628 - DNA, 25 bp, probe
aatactggtctgaagaggatgctct

SEQ ID NO: 158629 - DNA, 25 bp, probe
aatactactcgtaagcagtggctca

SEQ ID NO: 158630 - DNA, 25 bp, probe
aatactactcgtaagcagtggctca

SEQ ID NO: 158631 - DNA, 25 bp, probe
aatttagctaggcatggcggcgcat

SEQ ID NO: 158632 - DNA, 25 bp, probe
aatatattgcttggagatgaggggc

SEQ ID NO: 158633 - DNA, 25 bp, probe
aatatcattctcaaatgcggcttcg

SEQ ID NO: 158634 - DNA, 25 bp, probe
aatagattgctcaaatcaggttttc

SEQ ID NO: 158635 - DNA, 25 bp, probe
aatagaacactgcctctgagttttg

SEQ ID NO: 158636 - DNA, 25 bp, probe
aatagatacctgtttgactttgagg

SEQ ID NO: 158637 - DNA, 25 bp, probe
aatagactccttcgtgatctgggga

SEQ ID NO: 158638 - DNA, 25 bp, probe
aattgcaaccatagccttatgggga

SEQ ID NO: 158639 - DNA, 25 bp, probe
aatagcaaccataactgccactgtg

SEQ ID NO: 158640 - DNA, 25 bp, probe
aatacatgacacaagagcattccta

SEQ ID NO: 158641 - DNA, 25 bp, probe
aatactgtacatagatgtatcatta

SEQ ID NO: 158642 - DNA, 25 bp, probe
aatactgtaataatatcaaaagcac

SEQ ID NO: 158643 - DNA, 25 bp, probe
aatactcaactaaatgcacaaagta

SEQ ID NO: 158644 - DNA, 25 bp, probe
caatttcaacctgtacgaagtactg

SEQ ID NO: 158645 - DNA, 25 bp, probe
aattccaacaacataaacaaatctg

SEQ ID NO: 158646 - DNA, 25 bp, probe
aattccaacaacataaacaaatctg

SEQ ID NO: 158647 - DNA, 25 bp, probe
aatacaaactacattttcaagatta

SEQ ID NO: 158648 - DNA, 25 bp, probe
aatagcaactattcatttgttcaca

SEQ ID NO: 158649 - DNA, 25 bp, probe
aatagaattcatttgattatttctt

SEQ ID NO: 158650 - DNA, 25 bp, probe
aatagctattctcaatacatctgtt

SEQ ID NO: 158651 - DNA, 25 bp, probe
aatagcttattatagaattgcacat

SEQ ID NO: 158652 - DNA, 25 bp, probe
aatagcgtcataactagaactgaat

SEQ ID NO: 158653 - DNA, 25 bp, probe
aatagcgtcataactagaactgaat

SEQ ID NO: 158654 - DNA, 25 bp, probe
caatcactgaaaactatgcaagaga

SEQ ID NO: 158655 - DNA, 25 bp, probe
caatagctggctcctctataggaga

SEQ ID NO: 158656 - DNA, 25 bp, probe
caatcgctctgtctcttctaaaagc

SEQ ID NO: 158657 - DNA, 25 bp, probe
caatcgctctgtctcttctaaaagc

SEQ ID NO: 158658 - DNA, 25 bp, probe
aatagatctatcgtgtttaaaacca

SEQ ID NO: 158659 - DNA, 25 bp, probe
aatagcttatttgaataaactacaa

SEQ ID NO: 158660 - DNA, 25 bp, probe
aatagctatcttccttaaagatttc

SEQ ID NO: 158661 - DNA, 25 bp, probe
aatagtcactagtattgctaatttt

SEQ ID NO: 158662 - DNA, 25 bp, probe
aatacatacaacctatgtaattttt

SEQ ID NO: 158663 - DNA, 25 bp, probe
aatattacaacgcggcagcattatg

SEQ ID NO: 158664 - DNA, 25 bp, probe
aattgtaaacatcaggcactttggt

SEQ ID NO: 158665 - DNA, 25 bp, probe
aattgtaaacatcaggcactttggt

SEQ ID NO: 158666 - DNA, 25 bp, probe
aattggaacatcactggaatggggt

SEQ ID NO: 158667 - DNA, 25 bp, probe
aatttaaccctgcctctcagagggt

SEQ ID NO: 158668 - DNA, 25 bp, probe
aattttatgttcacttgatggggaa

SEQ ID NO: 158669 - DNA, 25 bp, probe
aattgtgtaaacacctctggggata

SEQ ID NO: 158670 - DNA, 25 bp, probe
aattggatacgacaacttgcacgta

SEQ ID NO: 158671 - DNA, 25 bp, probe
aattcgagcaaacaactttctggaa

SEQ ID NO: 158672 - DNA, 25 bp, probe
aattcttaaaccagtctttcgacat

SEQ ID NO: 158673 - DNA, 25 bp, probe
aattttaagcagctggtttccagaa

SEQ ID NO: 158674 - DNA, 25 bp, probe
caatcttacccgcaggttttcagat

SEQ ID NO: 158675 - DNA, 25 bp, probe
aattataccaggcaatgggatacga

SEQ ID NO: 158676 - DNA, 25 bp, probe
aattataccaggcaatgggatacga

SEQ ID NO: 158677 - DNA, 25 bp, probe
aattacctaggaaatctgtagcagc

SEQ ID NO: 158678 - DNA, 25 bp, probe
aatattttaggaaactctccatgat

SEQ ID NO: 158679 - DNA, 25 bp, probe
aatattttaggaaactctccatgat

SEQ ID NO: 158680 - DNA, 25 bp, probe
aattagtaataaaacccagcatgta

SEQ ID NO: 158681 - DNA, 25 bp, probe
aatttgaattagaagtgtgccagct

SEQ ID NO: 158682 - DNA, 25 bp, probe
aatttagttgaaagtgcattgagaa

SEQ ID NO: 158683 - DNA, 25 bp, probe
aatttcaattatccattcttataag

SEQ ID NO: 158684 - DNA, 25 bp, probe
aatttctctgttccatagttaaaga

SEQ ID NO: 158685 - DNA, 25 bp, probe
aattgttgatgtagccaagttcaca

SEQ ID NO: 158686 - DNA, 25 bp, probe
aatatgttcatcaccaacaatcagc

SEQ ID NO: 158687 - DNA, 25 bp, probe
aatagaggcagtgcaccacagaccc

SEQ ID NO: 158688 - DNA, 25 bp, probe
aatagaagctaggatcgccgcaacc

SEQ ID NO: 158689 - DNA, 25 bp, probe
aatagaagctaggatcgccgcaacc

SEQ ID NO: 158690 - DNA, 25 bp, probe
caattgcacagcagaatgttccaga

SEQ ID NO: 158691 - DNA, 25 bp, probe
caattactaccctttcacaagctac

SEQ ID NO: 158692 - DNA, 25 bp, probe
caattactaccctttcacaagctac

SEQ ID NO: 158693 - DNA, 25 bp, probe
caatttccaacctgacaaatccgcc

SEQ ID NO: 158694 - DNA, 25 bp, probe
aatttatcaaccaccacaatccatt

SEQ ID NO: 158695 - DNA, 25 bp, probe
aattttatatccactccagtgagat

SEQ ID NO: 158696 - DNA, 25 bp, probe
aattatcgtgtcttctcccagaagt

SEQ ID NO: 158697 - DNA, 25 bp, probe
aattatcgtgtcttctcccagaagt

SEQ ID NO: 158698 - DNA, 25 bp, probe
caatttcctgtctttcaagtaagtt

SEQ ID NO: 158699 - DNA, 25 bp, probe
caatttcctgtctttcaagtaagtt

SEQ ID NO: 158700 - DNA, 25 bp, probe
ttgacttccggctttctaagggtga

SEQ ID NO: 158701 - DNA, 25 bp, probe
cggccaacggcgagctagaggtgaa

SEQ ID NO: 158702 - DNA, 25 bp, probe
cagtaccctgggaggcataggagaa

SEQ ID NO: 158703 - DNA, 25 bp, probe
cagtaggccttcctgggtggaagac

SEQ ID NO: 158704 - DNA, 25 bp, probe
aataggcaagtcgaggcaatggaaa

SEQ ID NO: 158705 - DNA, 25 bp, probe
aatacctcatgaagaggcgctggaa

SEQ ID NO: 158706 - DNA, 25 bp, probe
aatactctcataaagcatgtgccaa

SEQ ID NO: 158707 - DNA, 25 bp, probe
aattatctgatccttgtggcacaca

SEQ ID NO: 158708 - DNA, 25 bp, probe
aattatctgatccttgtggcacaca

SEQ ID NO: 158709 - DNA, 25 bp, probe
aatactctgtcttttcagaggcaaa

SEQ ID NO: 158710 - DNA, 25 bp, probe
aattctaggttcacagaggtatgag

SEQ ID NO: 158711 - DNA, 25 bp, probe
aattcatagtgtttacgccactaag

SEQ ID NO: 158712 - DNA, 25 bp, probe
aattcatagtgtttacgccactaag

SEQ ID NO: 158713 - DNA, 25 bp, probe
aattcacttttttcatgacctagaa

SEQ ID NO: 158714 - DNA, 25 bp, probe
aattagctttttctcagatgttgaa

SEQ ID NO: 158715 - DNA, 25 bp, probe
aatattctttttcactgttgtagta

SEQ ID NO: 158716 - DNA, 25 bp, probe
aatatttcacttaaactttgtcact

SEQ ID NO: 158717 - DNA, 25 bp, probe
aattttgtgcttccaacgtggcctt

SEQ ID NO: 158718 - DNA, 25 bp, probe
aattttgtgcttccaacgtggcctt

SEQ ID NO: 158719 - DNA, 25 bp, probe
aatttttttgacacattgccttcta

SEQ ID NO: 158720 - DNA, 25 bp, probe
aattttttgatgtcagccttgcatc

SEQ ID NO: 158721 - DNA, 25 bp, probe
aattattttaagccttatccagcag

SEQ ID NO: 158722 - DNA, 25 bp, probe
aattattttaagccttatccagcag

SEQ ID NO: 158723 - DNA, 25 bp, probe
aattattttgaaggtggcacgaatg

SEQ ID NO: 158724 - DNA, 25 bp, probe
aattatgtttcctttgaccaacatc

SEQ ID NO: 158725 - DNA, 25 bp, probe
aattctgttttatggaacaatcatt

SEQ ID NO: 158726 - DNA, 25 bp, probe
aattctttttattggtgcctatatt

SEQ ID NO: 158727 - DNA, 25 bp, probe
aattttatattgatgtgtgtttaca

SEQ ID NO: 158728 - DNA, 25 bp, probe
aatatagttttgaagttgcttgaac

SEQ ID NO: 158729 - DNA, 25 bp, probe
aatatagttttgaagttgcttgaac

SEQ ID NO: 158730 - DNA, 25 bp, probe
aatagaattttttgagatgtgtgca

SEQ ID NO: 158731 - DNA, 25 bp, probe
caactagaggtcatcagaagtcagc

SEQ ID NO: 158732 - DNA, 25 bp, probe
aattcatgaggtgtcaactgttagc

SEQ ID NO: 158733 - DNA, 25 bp, probe
aattattgttatacacagctttatg

SEQ ID NO: 158734 - DNA, 25 bp, probe
aatagtttatgattccacctacatg

SEQ ID NO: 158735 - DNA, 25 bp, probe
aatagtttcaataatcctccaagac

SEQ ID NO: 158736 - DNA, 25 bp, probe
aatagtcttcaagtttccaacgcag

SEQ ID NO: 158737 - DNA, 25 bp, probe
aatatggcattctctcagtccaacc

SEQ ID NO: 158738 - DNA, 25 bp, probe
aatagcgatcgctgccaggatatac

SEQ ID NO: 158739 - DNA, 25 bp, probe
aatatgctaggctgcactctgctaa

SEQ ID NO: 158740 - DNA, 25 bp, probe
aatagacttcattgactgtgtcaga

SEQ ID NO: 158741 - DNA, 25 bp, probe
aattatctaaaatctgctagggaat

SEQ ID NO: 158742 - DNA, 25 bp, probe
aattgtcaaataacacgaaagtggt

SEQ ID NO: 158743 - DNA, 25 bp, probe
aattgataattccctcgacaaattg

SEQ ID NO: 158744 - DNA, 25 bp, probe
aatagtcaatattctccaaaaaatg

SEQ ID NO: 158745 - DNA, 25 bp, probe
caataatcctactcctcaaaataga

SEQ ID NO: 158746 - DNA, 25 bp, probe
caataatcctactcctcaaaataga

SEQ ID NO: 158747 - DNA, 25 bp, probe
ctatagtggcaacattttaaaagct

SEQ ID NO: 158748 - DNA, 25 bp, probe
aatagtgaggcagactttcaataag

SEQ ID NO: 158749 - DNA, 25 bp, probe
aataggatggatgtgttctctcaaa

SEQ ID NO: 158750 - DNA, 25 bp, probe
aatacgcaggcatctgatttgcata

SEQ ID NO: 158751 - DNA, 25 bp, probe
aatagcagtgcggagtcttcatgca

SEQ ID NO: 158752 - DNA, 25 bp, probe
aataggcagctgtagatcttgatct

SEQ ID NO: 158753 - DNA, 25 bp, probe
aatatgttctgagggttgttttgtc

SEQ ID NO: 158754 - DNA, 25 bp, probe
aatagctgttgacgtttgctcattt

SEQ ID NO: 158755 - DNA, 25 bp, probe
aatatggatgtttctttgtattata

SEQ ID NO: 158756 - DNA, 25 bp, probe
aataggaatcattcttctcttgctg

SEQ ID NO: 158757 - DNA, 25 bp, probe
aatatctaatattgcctgcctgtct

SEQ ID NO: 158758 - DNA, 25 bp, probe
aatatctagttctcagagcatttgg

SEQ ID NO: 158759 - DNA, 25 bp, probe
aatatctatgatttacagagtaagt

SEQ ID NO: 158760 - DNA, 25 bp, probe
aatatgttacgctaagagaaagtta

SEQ ID NO: 158761 - DNA, 25 bp, probe
aatagtcaactgtaagaacacattt

SEQ ID NO: 158762 - DNA, 25 bp, probe
aatagtcaactgtaagaacacattt

SEQ ID NO: 158763 - DNA, 25 bp, probe
aatatctaactatggaatcctgtat

SEQ ID NO: 158764 - DNA, 25 bp, probe
aattttcctagacgaacctgttgtg

SEQ ID NO: 158765 - DNA, 25 bp, probe
aattttcctagacgaacctgttgtg

SEQ ID NO: 158766 - DNA, 25 bp, probe
gaattttagtcctgaacgctacggg

SEQ ID NO: 158767 - DNA, 25 bp, probe
aattttatgttctgtactgtactgt

SEQ ID NO: 158768 - DNA, 25 bp, probe
aattttatgttctgtactgtactgt

SEQ ID NO: 158769 - DNA, 25 bp, probe
aatttggattcctgacactttcttc

SEQ ID NO: 158770 - DNA, 25 bp, probe
aattggtattcaggtaactcattta

SEQ ID NO: 158771 - DNA, 25 bp, probe
aattttattcaagaatgccagtaga

SEQ ID NO: 158772 - DNA, 25 bp, probe
aattttttctgtgagatgccagcat

SEQ ID NO: 158773 - DNA, 25 bp, probe
aatttctcttgcatggagactccta

SEQ ID NO: 158774 - DNA, 25 bp, probe
aattgtgcttggctgccaacctcaa

SEQ ID NO: 158775 - DNA, 25 bp, probe
aattctgttggacactcacttccac

SEQ ID NO: 158776 - DNA, 25 bp, probe
aattacattgggaaccactgtgcct

SEQ ID NO: 158777 - DNA, 25 bp, probe
aattacaggggattcgacattggaa

SEQ ID NO: 158778 - DNA, 25 bp, probe
aattccaaggtgcatcgacattaac

SEQ ID NO: 158779 - DNA, 25 bp, probe
aattccataagtgactgtgctaaaa

SEQ ID NO: 158780 - DNA, 25 bp, probe
aattccaaacataagtggcacagga

SEQ ID NO: 158781 - DNA, 25 bp, probe
aattaccaaatcttgtggacatggc

SEQ ID NO: 158782 - DNA, 25 bp, probe
aattaccaaatcttgtggacatggc

SEQ ID NO: 158783 - DNA, 25 bp, probe
aattcactacatcatcttcaacttc

SEQ ID NO: 158784 - DNA, 25 bp, probe
aatatgcagtttatgtgtcatcaat

SEQ ID NO: 158785 - DNA, 25 bp, probe
aattagttgtattttgtgcaagcta

SEQ ID NO: 158786 - DNA, 25 bp, probe
aattgactcgtttcttacacagcac

SEQ ID NO: 158787 - DNA, 25 bp, probe
aattaccttaatatgcaagactctc

SEQ ID NO: 158788 - DNA, 25 bp, probe
aatttactatcaattatcagagccc

SEQ ID NO: 158789 - DNA, 25 bp, probe
aatatctcctgctgtttcacagcct

SEQ ID NO: 158790 - DNA, 25 bp, probe
aatataagccataggttcacaccat

SEQ ID NO: 158791 - DNA, 25 bp, probe
aatataatccatacaattctcttca

SEQ ID NO: 158792 - DNA, 25 bp, probe
aatatggtcgttactattttcagtt

SEQ ID NO: 158793 - DNA, 25 bp, probe
aatatgggtattacctttgtctctt

SEQ ID NO: 158794 - DNA, 25 bp, probe
aattttcttcttgccaattttgttg

SEQ ID NO: 158795 - DNA, 25 bp, probe
aatttagcttctaggatccaagttt

SEQ ID NO: 158796 - DNA, 25 bp, probe
aattgtgggtctatttctagttatt

SEQ ID NO: 158797 - DNA, 25 bp, probe
aattgtgggtctatttctagttatt

SEQ ID NO: 158798 - DNA, 25 bp, probe
aattgtgggtctatttctagttatt

SEQ ID NO: 158799 - DNA, 25 bp, probe
gacatttgggactcgtttttacctg

SEQ ID NO: 158800 - DNA, 25 bp, probe
aattcttaactatcattatttacct

SEQ ID NO: 158801 - DNA, 25 bp, probe
aatattttatcctgtattcttgttt

SEQ ID NO: 158802 - DNA, 25 bp, probe
aatatgttattgtctagaattttgt

SEQ ID NO: 158803 - DNA, 25 bp, probe
aatatggtagcgttttgttgttgtt

SEQ ID NO: 158804 - DNA, 25 bp, probe
aatagtgctatttttcagcttaagt

SEQ ID NO: 158805 - DNA, 25 bp, probe
aatatgatctatgattttgcttcat

SEQ ID NO: 158806 - DNA, 25 bp, probe
aatagactacttactactcagcaat

SEQ ID NO: 158807 - DNA, 25 bp, probe
aatagacgagtttcttctcagcagt

SEQ ID NO: 158808 - DNA, 25 bp, probe
aattcacgtggttttctcacatttt

SEQ ID NO: 158809 - DNA, 25 bp, probe
aatttcctggctcaggctactttcc

SEQ ID NO: 158810 - DNA, 25 bp, probe
aatttcacggcagctggctacaatt

SEQ ID NO: 158811 - DNA, 25 bp, probe
aatttgcacagggattggaacatga

SEQ ID NO: 158812 - DNA, 25 bp, probe
aatttgctatgcgttatggaattga

SEQ ID NO: 158813 - DNA, 25 bp, probe
aatattgtcagctttcagtgtagtg

SEQ ID NO: 158814 - DNA, 25 bp, probe
aatagtgctcgctttctatgtagtt

SEQ ID NO: 158815 - DNA, 25 bp, probe
aatttgctcctgtagctgcattatt

SEQ ID NO: 158816 - DNA, 25 bp, probe
aattcttactgttctgaaattagga

SEQ ID NO: 158817 - DNA, 25 bp, probe
aattgtccctgtttcaaactgagta

SEQ ID NO: 158818 - DNA, 25 bp, probe
aatatgcccgttggtctatgattga

SEQ ID NO: 158819 - DNA, 25 bp, probe
aatagctcagtcctgcagtttgact

SEQ ID NO: 158820 - DNA, 25 bp, probe
aatagcagcagaagtcaatgtggac

SEQ ID NO: 158821 - DNA, 25 bp, probe
aatatcagcaagggcatgctgggca

SEQ ID NO: 158822 - DNA, 25 bp, probe
aatatcagaaatggttggcctgagc

SEQ ID NO: 158823 - DNA, 25 bp, probe
aattcagaacattttgagggtgaga

SEQ ID NO: 158824 - DNA, 25 bp, probe
aattcatgaattttcgggtcaacat

SEQ ID NO: 158825 - DNA, 25 bp, probe
aatattgcctgttttgggatcacaa

SEQ ID NO: 158826 - DNA, 25 bp, probe
aatattccattgctctgtagttcaa

SEQ ID NO: 158827 - DNA, 25 bp, probe
aatttcaccagcgttgtagtacaga

SEQ ID NO: 158828 - DNA, 25 bp, probe
aattatctccaggtatcttctctgc

SEQ ID NO: 158829 - DNA, 25 bp, probe
aattatcctcttaatgcctgttctg

SEQ ID NO: 158830 - DNA, 25 bp, probe
aattagctgcttctatgtttcatag

SEQ ID NO: 158831 - DNA, 25 bp, probe
aattcagtgttgtgtatgtgtctgg

SEQ ID NO: 158832 - DNA, 25 bp, probe
aatagcagctgtaggtggttttgcc

SEQ ID NO: 158833 - DNA, 25 bp, probe
aattcacttgagaggtattttagtc

SEQ ID NO: 158834 - DNA, 25 bp, probe
caatacactggaacgcctcatcttt

SEQ ID NO: 158835 - DNA, 25 bp, probe
aatatcctggcactgaggtcactct

SEQ ID NO: 158836 - DNA, 25 bp, probe
aatatcaaggaccagtgcagaatct

SEQ ID NO: 158837 - DNA, 25 bp, probe
aatatcaaggaccagtgcagaatct

SEQ ID NO: 158838 - DNA, 25 bp, probe
aatatcaatggactgagtctgattc

SEQ ID NO: 158839 - DNA, 25 bp, probe
aatatgcatcaggagaacaagagta

SEQ ID NO: 158840 - DNA, 25 bp, probe
aatatgctagtaaacacaagaggac

SEQ ID NO: 158841 - DNA, 25 bp, probe
aattgcgactacgaacagcgggaaa

SEQ ID NO: 158842 - DNA, 25 bp, probe
aatttcactacgtacatgtggtaca

SEQ ID NO: 158843 - DNA, 25 bp, probe
aattaccttcgaagcatgcgcagaa

SEQ ID NO: 158844 - DNA, 25 bp, probe
aattaacttcaaaactcacaaggag

SEQ ID NO: 158845 - DNA, 25 bp, probe
aattatacccatctaccaaaagcag

SEQ ID NO: 158846 - DNA, 25 bp, probe
caattaactccgtttccaaatacat

SEQ ID NO: 158847 - DNA, 25 bp, probe
aattacaccgctctttcaaaaatat

SEQ ID NO: 158848 - DNA, 25 bp, probe
aattcacaccctctatcataaacat

SEQ ID NO: 158849 - DNA, 25 bp, probe
aattcagaccctgcaaaaccacatt

SEQ ID NO: 158850 - DNA, 25 bp, probe
aattcaccgcagtgcatcagaaccc

SEQ ID NO: 158851 - DNA, 25 bp, probe
aattcaccgcagtgcatcagaaccc

SEQ ID NO: 158852 - DNA, 25 bp, probe
aattcaccacagtgcatcaaaaccc

SEQ ID NO: 158853 - DNA, 25 bp, probe
aatataccatcggccatgcttggac

SEQ ID NO: 158854 - DNA, 25 bp, probe
aattaggcatccttctttgccagat

SEQ ID NO: 158855 - DNA, 25 bp, probe
aatagagagagggtctttggctgca

SEQ ID NO: 158856 - DNA, 25 bp, probe
aatatcagcaggcggctattggtaa

SEQ ID NO: 158857 - DNA, 25 bp, probe
caattgtgccagcctggtttggtaa

SEQ ID NO: 158858 - DNA, 25 bp, probe
caatactgctcactgcagcctttac

SEQ ID NO: 158859 - DNA, 25 bp, probe
caatcaccacagccgggtttacttc

SEQ ID NO: 158860 - DNA, 25 bp, probe
caatcaccacagccgggtttacttc

SEQ ID NO: 158861 - DNA, 25 bp, probe
gaatccttaggctacgttttcatgt

SEQ ID NO: 158862 - DNA, 25 bp, probe
aattctgtgggtccgataatatctt

SEQ ID NO: 158863 - DNA, 25 bp, probe
aatatctggggtactgacctttatg

SEQ ID NO: 158864 - DNA, 25 bp, probe
aatatctggggtactgacctttatg

SEQ ID NO: 158865 - DNA, 25 bp, probe
aatatcggggtcattgccaatgata

SEQ ID NO: 158866 - DNA, 25 bp, probe
aatattggggacaccaactgtcttc

SEQ ID NO: 158867 - DNA, 25 bp, probe
caatattggggacaccaactgtctt

SEQ ID NO: 158868 - DNA, 25 bp, probe
aatttgggaggcttctcattctggc

SEQ ID NO: 158869 - DNA, 25 bp, probe
aatttgtggaccaggcttgtggccc

SEQ ID NO: 158870 - DNA, 25 bp, probe
aatttgtggaccaggcttgtggccc

SEQ ID NO: 158871 - DNA, 25 bp, probe
aattttgtacacatggataccgctc

SEQ ID NO: 158872 - DNA, 25 bp, probe
aatttctgtatagttttcacctctg

SEQ ID NO: 158873 - DNA, 25 bp, probe
aattttgtgcacagattcccgactg

SEQ ID NO: 158874 - DNA, 25 bp, probe
aattttgtgcacagagatctggctg

SEQ ID NO: 158875 - DNA, 25 bp, probe
aatagttgatgaatttgctatgcgt

SEQ ID NO: 158876 - DNA, 25 bp, probe
aattgttggagattttgacttcacc

SEQ ID NO: 158877 - DNA, 25 bp, probe
aatttgggcagattgtcaacatgtt

SEQ ID NO: 158878 - DNA, 25 bp, probe
aatatattggccttctacagctatt

SEQ ID NO: 158879 - DNA, 25 bp, probe
aatatcctactcttcatgggctatt

SEQ ID NO: 158880 - DNA, 25 bp, probe
aatatccatcttttccatgatgctt

SEQ ID NO: 158881 - DNA, 25 bp, probe
aatatggcttctacacacatgtgtt

SEQ ID NO: 158882 - DNA, 25 bp, probe
aatttcttcattgacatttgtctct

SEQ ID NO: 158883 - DNA, 25 bp, probe
caattaagtcatggtacgtttccta

SEQ ID NO: 158884 - DNA, 25 bp, probe
aattaaatactgtggttgcctctat

SEQ ID NO: 158885 - DNA, 25 bp, probe
aatttattactttgtttctactgat

SEQ ID NO: 158886 - DNA, 25 bp, probe
aattgttaatttttcctatattgca

SEQ ID NO: 158887 - DNA, 25 bp, probe
aattatttttgtttctctttgcaga

SEQ ID NO: 158888 - DNA, 25 bp, probe
aatattttgttttacttatgtggca

SEQ ID NO: 158889 - DNA, 25 bp, probe
aatattaagttttcctctgtgcaaa

SEQ ID NO: 158890 - DNA, 25 bp, probe
aattaagagcttctggtgctgtcca

SEQ ID NO: 158891 - DNA, 25 bp, probe
caagtaagaagtctgagtccctgag

SEQ ID NO: 158892 - DNA, 25 bp, probe
cactgtaaactggccgacttcggaa

SEQ ID NO: 158893 - DNA, 25 bp, probe
caaccaaacttcggttacggcatag

SEQ ID NO: 158894 - DNA, 25 bp, probe
caaccaaacttcggttacggcatag

SEQ ID NO: 158895 - DNA, 25 bp, probe
caacgaataagttcagttccgggca

SEQ ID NO: 158896 - DNA, 25 bp, probe
caagggaacagcaggttaccaggac

SEQ ID NO: 158897 - DNA, 25 bp, probe
caagggaacagagagggacctgggg

SEQ ID NO: 158898 - DNA, 25 bp, probe
caaggagttcaagcgcgctttcgtg

SEQ ID NO: 158899 - DNA, 25 bp, probe
caaggttctggaggcccatttggga

SEQ ID NO: 158900 - DNA, 25 bp, probe
caatgcaatacgggggcctctatga

SEQ ID NO: 158901 - DNA, 25 bp, probe
aattattctgaagggccgtgatgac

SEQ ID NO: 158902 - DNA, 25 bp, probe
aatattatctgaactggactagtga

SEQ ID NO: 158903 - DNA, 25 bp, probe
aatattgtcatgaactatatccgta

SEQ ID NO: 158904 - DNA, 25 bp, probe
aatatttataaccttgtcctatgtc

SEQ ID NO: 158905 - DNA, 25 bp, probe
aatattttataacttgtccatacag

SEQ ID NO: 158906 - DNA, 25 bp, probe
aatatctttcattatgctttacaaa

SEQ ID NO: 158907 - DNA, 25 bp, probe
caattatggatactgttcttacaaa

SEQ ID NO: 158908 - DNA, 25 bp, probe
aattcatggtattttctgtaacgtt

SEQ ID NO: 158909 - DNA, 25 bp, probe
aattcagaaatggattcgtacccgt

SEQ ID NO: 158910 - DNA, 25 bp, probe
aattccaagttcaacattcactctc

SEQ ID NO: 158911 - DNA, 25 bp, probe
aattccaagttcaacattcactctc

SEQ ID NO: 158912 - DNA, 25 bp, probe
caattccgagatctaatctccccct

SEQ ID NO: 158913 - DNA, 25 bp, probe
aattacacagattctcaacgaccca

SEQ ID NO: 158914 - DNA, 25 bp, probe
aattaagcagatagtcaaagaactg

SEQ ID NO: 158915 - DNA, 25 bp, probe
aattaagacatgcatctctaaaggt

SEQ ID NO: 158916 - DNA, 25 bp, probe
aattaagacatgcatctctaaaggt

SEQ ID NO: 158917 - DNA, 25 bp, probe
aattcaagaagactcgctaccaggc

SEQ ID NO: 158918 - DNA, 25 bp, probe
aattcataatcacccagaagccaga

SEQ ID NO: 158919 - DNA, 25 bp, probe
aatatctagtactgcaactgccaga

SEQ ID NO: 158920 - DNA, 25 bp, probe
aatatagatgaagcagcaactacaa

SEQ ID NO: 158921 - DNA, 25 bp, probe
aatattatcagaaagcacagccaac

SEQ ID NO: 158922 - DNA, 25 bp, probe
aatttaagcatctaatcagctcaaa

SEQ ID NO: 158923 - DNA, 25 bp, probe
aatttaagcatctaatcagctcaaa

SEQ ID NO: 158924 - DNA, 25 bp, probe
aatttacctatccatatgcatcaga

SEQ ID NO: 158925 - DNA, 25 bp, probe
aatatgtacctcatactcatcatgt

SEQ ID NO: 158926 - DNA, 25 bp, probe
aatttggatctgactctgccactgt

SEQ ID NO: 158927 - DNA, 25 bp, probe
aattttgatatgtctgcatgcagca

SEQ ID NO: 158928 - DNA, 25 bp, probe
aatattgctgcaatgacatcaggta

SEQ ID NO: 158929 - DNA, 25 bp, probe
aattccgcatgaacatcagggccca

SEQ ID NO: 158930 - DNA, 25 bp, probe
aattactcagatactcgtggctttg

SEQ ID NO: 158931 - DNA, 25 bp, probe
aatatgaccgtcagcgtggtcatct

SEQ ID NO: 158932 - DNA, 25 bp, probe
aatattctcgaaggcagtgcagtca

SEQ ID NO: 158933 - DNA, 25 bp, probe
aatattccgaatgtttggccttctg

SEQ ID NO: 158934 - DNA, 25 bp, probe
aattaaccacatgttgtagtaactg

SEQ ID NO: 158935 - DNA, 25 bp, probe
aattaaccacatgttgtagtaactg

SEQ ID NO: 158936 - DNA, 25 bp, probe
aatttttcagctatttagtgatata

SEQ ID NO: 158937 - DNA, 25 bp, probe
aatttcacagcagtttattaatgta

SEQ ID NO: 158938 - DNA, 25 bp, probe
aatttctacactggaattactaaat

SEQ ID NO: 158939 - DNA, 25 bp, probe
aatttctacactggaattactaaat

SEQ ID NO: 158940 - DNA, 25 bp, probe
aattcctaatcttgagcaaattgaa

SEQ ID NO: 158941 - DNA, 25 bp, probe
aattcagttacaggagcgagagcga

SEQ ID NO: 158942 - DNA, 25 bp, probe
aattcacttgggcagcgaggatatc

SEQ ID NO: 158943 - DNA, 25 bp, probe
aattcacttgggcagcgaggatatc

SEQ ID NO: 158944 - DNA, 25 bp, probe
aatttcctaatgcatctgagagata

SEQ ID NO: 158945 - DNA, 25 bp, probe
aatatcccattttgactgagaatat

SEQ ID NO: 158946 - DNA, 25 bp, probe
aatatactcatcatagaaaacttga

SEQ ID NO: 158947 - DNA, 25 bp, probe
aatatttgcttggcaacacgacttg

SEQ ID NO: 158948 - DNA, 25 bp, probe
aatatttgcttggcaacacgacttg

SEQ ID NO: 158949 - DNA, 25 bp, probe
aatatctgcatcttgtaagcctttt

SEQ ID NO: 158950 - DNA, 25 bp, probe
aattcaatgtgggcaaggcatatgt

SEQ ID NO: 158951 - DNA, 25 bp, probe
aattaagtgatccaaagctgctgaa

SEQ ID NO: 158952 - DNA, 25 bp, probe
aattggggattacagctgtcatgaa

SEQ ID NO: 158953 - DNA, 25 bp, probe
aattatgcggcttaaagctgtctga

SEQ ID NO: 158954 - DNA, 25 bp, probe
aattcatgaggcgacaggtcttcaa

SEQ ID NO: 158955 - DNA, 25 bp, probe
aatatatgccatgaaagtcctaagg

SEQ ID NO: 158956 - DNA, 25 bp, probe
aatatatgccatgaaagtcctaagg

SEQ ID NO: 158957 - DNA, 25 bp, probe
aatttgccgtcagcacaccaaagag

SEQ ID NO: 158958 - DNA, 25 bp, probe
aatttgacctcagtgatcacgagaa

SEQ ID NO: 158959 - DNA, 25 bp, probe
aatatgaagccatctacctagcaaa

SEQ ID NO: 158960 - DNA, 25 bp, probe
aattgataacaacatcactacaagt

SEQ ID NO: 158961 - DNA, 25 bp, probe
aattgatccaaaggacctgaccttc

SEQ ID NO: 158962 - DNA, 25 bp, probe
aattttcaagaggaacatatgcctg

SEQ ID NO: 158963 - DNA, 25 bp, probe
aattcttctgaacaacactcattgc

SEQ ID NO: 158964 - DNA, 25 bp, probe
aatttttgccataaacacaattgca

SEQ ID NO: 158965 - DNA, 25 bp, probe
aattttagtctaaacagacatctaa

SEQ ID NO: 158966 - DNA, 25 bp, probe
aattttgagattaagaatgccagga

SEQ ID NO: 158967 - DNA, 25 bp, probe
aattttgagattaagaatgccagga

SEQ ID NO: 158968 - DNA, 25 bp, probe
aatttctggattccagcttgtcttt

SEQ ID NO: 158969 - DNA, 25 bp, probe
aatattccagattgtcatcatcttc

SEQ ID NO: 158970 - DNA, 25 bp, probe
aatttacagacaccatatttgttct

SEQ ID NO: 158971 - DNA, 25 bp, probe
aattctaccaatcaaatgttatatg

SEQ ID NO: 158972 - DNA, 25 bp, probe
aattctgcccaatagggtatacaga

SEQ ID NO: 158973 - DNA, 25 bp, probe
aatattcccaattttcgaagtcagt

SEQ ID NO: 158974 - DNA, 25 bp, probe
tattatcgcatcatcatacctgtcc

SEQ ID NO: 158975 - DNA, 25 bp, probe
aatttactcacattcacacgcgatt

SEQ ID NO: 158976 - DNA, 25 bp, probe
aatatatgaccacgctcacccgcat

SEQ ID NO: 158977 - DNA, 25 bp, probe
aatattgcgaagcacatgccccatc

SEQ ID NO: 158978 - DNA, 25 bp, probe
aatatacagactcggcatcacacca

SEQ ID NO: 158979 - DNA, 25 bp, probe
aatattagtcattcagagcaactca

SEQ ID NO: 158980 - DNA, 25 bp, probe
aatttgcagtaattacagcattgca

SEQ ID NO: 158981 - DNA, 25 bp, probe
aatttgggatgattcaggctctgac

SEQ ID NO: 158982 - DNA, 25 bp, probe
aatttggtatatgcttgcttatctt

SEQ ID NO: 158983 - DNA, 25 bp, probe
caaggggtgacatcttaattcctaa

SEQ ID NO: 158984 - DNA, 25 bp, probe
caaggggcttacctggaaatcaaca

SEQ ID NO: 158985 - DNA, 25 bp, probe
caaggggcttacctggaaatcaaca

SEQ ID NO: 158986 - DNA, 25 bp, probe
caaccgacctcccagggacagaaga

SEQ ID NO: 158987 - DNA, 25 bp, probe
aattcaacgtccactggaggaagag

SEQ ID NO: 158988 - DNA, 25 bp, probe
aattcaacgtccactggaggaagag

SEQ ID NO: 158989 - DNA, 25 bp, probe
aattcaaggttatctggaagttcag

SEQ ID NO: 158990 - DNA, 25 bp, probe
ggtaaagtttcacctggaacggcag

SEQ ID NO: 158991 - DNA, 25 bp, probe
ggtaaagtttcacctggaacggcag

SEQ ID NO: 158992 - DNA, 25 bp, probe
cgaagggtttatctgcgttcgtctc

SEQ ID NO: 158993 - DNA, 25 bp, probe
caattggttttacatctttcttgct

SEQ ID NO: 158994 - DNA, 25 bp, probe
aattggttttaggtcttgcatatca

SEQ ID NO: 158995 - DNA, 25 bp, probe
aattggtttcctgtggtcatgatca

SEQ ID NO: 158996 - DNA, 25 bp, probe
aattgcagattttgggtggtcagta

SEQ ID NO: 158997 - DNA, 25 bp, probe
aattagacgagcgtggtggtggaca

SEQ ID NO: 158998 - DNA, 25 bp, probe
aatatatgtctgtgtgtgtgtgtgt

SEQ ID NO: 158999 - DNA, 25 bp, probe
aatatatctctgcctttggttttat

SEQ ID NO: 159000 - DNA, 25 bp, probe
aatatatctctgcctttggttttat

SEQ ID NO: 159001 - DNA, 25 bp, probe
caatcaattcatatctatttattaa

SEQ ID NO: 159002 - DNA, 25 bp, probe
aatatcttgtctacattcttttaag

SEQ ID NO: 159003 - DNA, 25 bp, probe
aattcacattccctgactttgtaac

SEQ ID NO: 159004 - DNA, 25 bp, probe
aattaagtctcactgaacatttcaa

SEQ ID NO: 159005 - DNA, 25 bp, probe
aattacctgctacgagaacttcacc

SEQ ID NO: 159006 - DNA, 25 bp, probe
aattacctgctacgagaacttcacc

SEQ ID NO: 159007 - DNA, 25 bp, probe
aattcacctgcatcgaggtaaagtt

SEQ ID NO: 159008 - DNA, 25 bp, probe
aattcacttgaatgagaaacgtgtt

SEQ ID NO: 159009 - DNA, 25 bp, probe
aattcacttgaatgagaaacgtgtt

SEQ ID NO: 159010 - DNA, 25 bp, probe
aattccttcataataacagcctgat

SEQ ID NO: 159011 - DNA, 25 bp, probe
aattcacagtcctcagaagcctatt

SEQ ID NO: 159012 - DNA, 25 bp, probe
caattcaccttctaaaaactcatgt

SEQ ID NO: 159013 - DNA, 25 bp, probe
caattcccttataaatccactgatt

SEQ ID NO: 159014 - DNA, 25 bp, probe
caattcccttataaatccactgatt

SEQ ID NO: 159015 - DNA, 25 bp, probe
aatttgcacttattaaccgtctgtt

SEQ ID NO: 159016 - DNA, 25 bp, probe
aatttgcacttattaaccgtctgtt

SEQ ID NO: 159017 - DNA, 25 bp, probe
aatattacctattacgactccatgg

SEQ ID NO: 159018 - DNA, 25 bp, probe
aattttactgattgaggactcctgg

SEQ ID NO: 159019 - DNA, 25 bp, probe
caattttggcttcatggaccagctc

SEQ ID NO: 159020 - DNA, 25 bp, probe
caattttggcttcatggaccagctc

SEQ ID NO: 159021 - DNA, 25 bp, probe
aattttgcatgctcgattattccct

SEQ ID NO: 159022 - DNA, 25 bp, probe
aattatgtcaggttggcttgtccct

SEQ ID NO: 159023 - DNA, 25 bp, probe
aattggctgattttggcctggctcg

SEQ ID NO: 159024 - DNA, 25 bp, probe
aatttatgcttttcagactggtgga

SEQ ID NO: 159025 - DNA, 25 bp, probe
aatttatgcttttcagactggtgga

SEQ ID NO: 159026 - DNA, 25 bp, probe
aattctacctgtgctacataggaga

SEQ ID NO: 159027 - DNA, 25 bp, probe
aattcttacttgatgacaacagcga

SEQ ID NO: 159028 - DNA, 25 bp, probe
aatatattactctttccaagagaat

SEQ ID NO: 159029 - DNA, 25 bp, probe
aattcatgtaccattctcataagat

SEQ ID NO: 159030 - DNA, 25 bp, probe
aattgatggattcttccatcctgcc

SEQ ID NO: 159031 - DNA, 25 bp, probe
aatattgtcattcctgtattcaccc

SEQ ID NO: 159032 - DNA, 25 bp, probe
caatactcttgtgttacatcatctc

SEQ ID NO: 159033 - DNA, 25 bp, probe
caataacttgaaaatcacagcctca

SEQ ID NO: 159034 - DNA, 25 bp, probe
caataacttgaaaatcacagcctca

SEQ ID NO: 159035 - DNA, 25 bp, probe
aattacgattatagtaccactgcac

SEQ ID NO: 159036 - DNA, 25 bp, probe
aattgaagataatgagtacacagca

SEQ ID NO: 159037 - DNA, 25 bp, probe
cacttacaataagggtactatatgt

SEQ ID NO: 159038 - DNA, 25 bp, probe
cactatcaccttgtgttcctaatct

SEQ ID NO: 159039 - DNA, 25 bp, probe
aattcagtgaatgctgttactaatc

SEQ ID NO: 159040 - DNA, 25 bp, probe
aattcaatattgctgttgatctcaa

SEQ ID NO: 159041 - DNA, 25 bp, probe
aattcaatattgctgttgatctcaa

SEQ ID NO: 159042 - DNA, 25 bp, probe
aattctcatcatctctgttatacac

SEQ ID NO: 159043 - DNA, 25 bp, probe
caatcttctgcatatcagtaaatac

SEQ ID NO: 159044 - DNA, 25 bp, probe
caatcttctgcatatcagtaaatac

SEQ ID NO: 159045 - DNA, 25 bp, probe
caatgcttccacagcgtaaatacac

SEQ ID NO: 159046 - DNA, 25 bp, probe
caatcctcgtatagcgtatgacaag

SEQ ID NO: 159047 - DNA, 25 bp, probe
caacctcagaaaagccaactcgaag

SEQ ID NO: 159048 - DNA, 25 bp, probe
caatcccaacaaagacatactccaa

SEQ ID NO: 159049 - DNA, 25 bp, probe
aatttacagctcagactattacaat

SEQ ID NO: 159050 - DNA, 25 bp, probe
aatttctcagccatcattttaatat

SEQ ID NO: 159051 - DNA, 25 bp, probe
aatttctcagccatcattttaatat

SEQ ID NO: 159052 - DNA, 25 bp, probe
aatattctttattcctatctagtat

SEQ ID NO: 159053 - DNA, 25 bp, probe
aatattgcttatgtctctacatggt

SEQ ID NO: 159054 - DNA, 25 bp, probe
aatattgctgttgatctcaaattca

SEQ ID NO: 159055 - DNA, 25 bp, probe
aattctgttctattcctcagtatcc

SEQ ID NO: 159056 - DNA, 25 bp, probe
aattttctctagagtcagtcattat

SEQ ID NO: 159057 - DNA, 25 bp, probe
aattttttatgcagccagtatcttc

SEQ ID NO: 159058 - DNA, 25 bp, probe
aatatttttcatcatgcacgaatta

SEQ ID NO: 159059 - DNA, 25 bp, probe
aatatttttcatcatgcacgaatta

SEQ ID NO: 159060 - DNA, 25 bp, probe
aatattagttcataacagatcagaa

SEQ ID NO: 159061 - DNA, 25 bp, probe
aatttggctttcggatcagctagga

SEQ ID NO: 159062 - DNA, 25 bp, probe
aattttgtttctcgtcagcataaag

SEQ ID NO: 159063 - DNA, 25 bp, probe
aattatgactcatcggtcagcagaa

SEQ ID NO: 159064 - DNA, 25 bp, probe
caatctatgacttgactggtattaa

SEQ ID NO: 159065 - DNA, 25 bp, probe
aatttgatcttgctctgattataat

SEQ ID NO: 159066 - DNA, 25 bp, probe
aatttgttcatggttattctacatt

SEQ ID NO: 159067 - DNA, 25 bp, probe
aatttgttcatggttattctacatt

SEQ ID NO: 159068 - DNA, 25 bp, probe
aattttgtccgttcatacgagtgct

SEQ ID NO: 159069 - DNA, 25 bp, probe
aattcatttcatctactacagggtg

SEQ ID NO: 159070 - DNA, 25 bp, probe
aattcacttcactaactactctggc

SEQ ID NO: 159071 - DNA, 25 bp, probe
caatctttgcatcaaactacctgct

SEQ ID NO: 159072 - DNA, 25 bp, probe
aattttcacaggaagctaccacgcc

SEQ ID NO: 159073 - DNA, 25 bp, probe
aatttgtcacaagcaccagccttgc

SEQ ID NO: 159074 - DNA, 25 bp, probe
aattcttcatcctccaagacttttg

SEQ ID NO: 159075 - DNA, 25 bp, probe
aattgtgctccctccacaaagttta

SEQ ID NO: 159076 - DNA, 25 bp, probe
aattgttctgcctgggcaagaaatt

SEQ ID NO: 159077 - DNA, 25 bp, probe
aatttcatctctccggtaagatttt

SEQ ID NO: 159078 - DNA, 25 bp, probe
aattacatgctcctggaaattttaa

SEQ ID NO: 159079 - DNA, 25 bp, probe
aattcaatgcccggcgtaagcttaa

SEQ ID NO: 159080 - DNA, 25 bp, probe
aattcatatgtccctcgtgaggctg

SEQ ID NO: 159081 - DNA, 25 bp, probe
aattcctgcttgtccggcaggtgct

SEQ ID NO: 159082 - DNA, 25 bp, probe
aatttctggtacgtgctggtgatga

SEQ ID NO: 159083 - DNA, 25 bp, probe
aattttcagctgaggctctgagaac

SEQ ID NO: 159084 - DNA, 25 bp, probe
aattaggcaatttatgtctgtgata

SEQ ID NO: 159085 - DNA, 25 bp, probe
aattgaccaatagctgctgctttca

SEQ ID NO: 159086 - DNA, 25 bp, probe
caagattccaacagcctgtattacg

SEQ ID NO: 159087 - DNA, 25 bp, probe
aatattgagcccagcctatattgcc

SEQ ID NO: 159088 - DNA, 25 bp, probe
aatattgatatgcccagcctgataa

SEQ ID NO: 159089 - DNA, 25 bp, probe
aattcgtgcaggaagccatgaaagg

SEQ ID NO: 159090 - DNA, 25 bp, probe
aattcgtgagtcacctggaggccaa

SEQ ID NO: 159091 - DNA, 25 bp, probe
aattttatgtagagagggcgccaca

SEQ ID NO: 159092 - DNA, 25 bp, probe
aattattgagggtgcggacgcgtca

SEQ ID NO: 159093 - DNA, 25 bp, probe
aattattagaccccggggcagtcag

SEQ ID NO: 159094 - DNA, 25 bp, probe
aattatgtgaggccacttggtagca

SEQ ID NO: 159095 - DNA, 25 bp, probe
aattttatgatgccaccgtggagaa

SEQ ID NO: 159096 - DNA, 25 bp, probe
aatttgtagcatcaactagaataat

SEQ ID NO: 159097 - DNA, 25 bp, probe
aatttgtcacctcacttgcagaata

SEQ ID NO: 159098 - DNA, 25 bp, probe
aatttctaccactacttctacatgg

SEQ ID NO: 159099 - DNA, 25 bp, probe
aatttctacacctgtgtctagtcct

SEQ ID NO: 159100 - DNA, 25 bp, probe
aattcctcatcagaagtactggctt

SEQ ID NO: 159101 - DNA, 25 bp, probe
aattcctcatcagaagtactggctt

SEQ ID NO: 159102 - DNA, 25 bp, probe
aattctccattatgttcgtggtgta

SEQ ID NO: 159103 - DNA, 25 bp, probe
aattctccattatgttcgtggtgta

SEQ ID NO: 159104 - DNA, 25 bp, probe
aatattgaattctcttagcttgtgt

SEQ ID NO: 159105 - DNA, 25 bp, probe
aatattgagatttccgatgagttcc

SEQ ID NO: 159106 - DNA, 25 bp, probe
aatattgagatttccgatgagttcc

SEQ ID NO: 159107 - DNA, 25 bp, probe
aattttgttcaccgagatctggcca

SEQ ID NO: 159108 - DNA, 25 bp, probe
aattgatggttagcgaggccgtgca

SEQ ID NO: 159109 - DNA, 25 bp, probe
aattgaagtctgcagccaggccttg

SEQ ID NO: 159110 - DNA, 25 bp, probe
aattgaagtctgcagccaggccttg

SEQ ID NO: 159111 - DNA, 25 bp, probe
aatttatgtctggagcctggctact

SEQ ID NO: 159112 - DNA, 25 bp, probe
aattgtgtggctgaagtggtgactt

SEQ ID NO: 159113 - DNA, 25 bp, probe
aattgtggccataaagaagttctta

SEQ ID NO: 159114 - DNA, 25 bp, probe
aattctgcgtcactaggaagctata

SEQ ID NO: 159115 - DNA, 25 bp, probe
aattatctctcgaagagcaacttac

SEQ ID NO: 159116 - DNA, 25 bp, probe
aattcatcttcaaagcacaactcta

SEQ ID NO: 159117 - DNA, 25 bp, probe
aatttcaggcatttctgctttgtga

SEQ ID NO: 159118 - DNA, 25 bp, probe
aattctatagcatatcctttggctt

SEQ ID NO: 159119 - DNA, 25 bp, probe
aattctatagcatatcctttggctt

SEQ ID NO: 159120 - DNA, 25 bp, probe
caatctaaacaaatccctcggttct

SEQ ID NO: 159121 - DNA, 25 bp, probe
caaggtcaccaaacaacttggttgt

SEQ ID NO: 159122 - DNA, 25 bp, probe
caaaaccctccttgaattgggctgg

SEQ ID NO: 159123 - DNA, 25 bp, probe
ctaaagccagccccagtactggtag

SEQ ID NO: 159124 - DNA, 25 bp, probe
ctagcaaggcccccaaagggccctg

SEQ ID NO: 159125 - DNA, 25 bp, probe
caattacgtccaccaaagacccgtg

SEQ ID NO: 159126 - DNA, 25 bp, probe
aattacatgttgcttccagacatac

SEQ ID NO: 159127 - DNA, 25 bp, probe
aattatagttcggctcttgactgag

SEQ ID NO: 159128 - DNA, 25 bp, probe
aattgctcgtatggccctagcatta

SEQ ID NO: 159129 - DNA, 25 bp, probe
aattgcattggaacttcttgattca

SEQ ID NO: 159130 - DNA, 25 bp, probe
aattgcattggaacttcttgattca

SEQ ID NO: 159131 - DNA, 25 bp, probe
aattgcatgacagagatttactatc

SEQ ID NO: 159132 - DNA, 25 bp, probe
aattgagaagtaattcctctgattc

SEQ ID NO: 159133 - DNA, 25 bp, probe
caattctgaagttcccttctgttca

SEQ ID NO: 159134 - DNA, 25 bp, probe
caattctgaagttcccttctgttca

SEQ ID NO: 159135 - DNA, 25 bp, probe
aattgttgagtacctgttctgggca

SEQ ID NO: 159136 - DNA, 25 bp, probe
aattcttgagaacgcattccaggag

SEQ ID NO: 159137 - DNA, 25 bp, probe
aattccggaacattttcaagcagat

SEQ ID NO: 159138 - DNA, 25 bp, probe
aattctattaacatttccgcagaag

SEQ ID NO: 159139 - DNA, 25 bp, probe
aatttactaactaccagcattgaga

SEQ ID NO: 159140 - DNA, 25 bp, probe
aattctggaatatgcaccacttgga

SEQ ID NO: 159141 - DNA, 25 bp, probe
aattatgtgaaatgcttatgcttgt

SEQ ID NO: 159142 - DNA, 25 bp, probe
aatttctctcaatgttagatttaat

SEQ ID NO: 159143 - DNA, 25 bp, probe
aatttctctactgtctcagtttaca

SEQ ID NO: 159144 - DNA, 25 bp, probe
caatattcttttgacctgattaatc

SEQ ID NO: 159145 - DNA, 25 bp, probe
aatttctttatttctgatgattata

SEQ ID NO: 159146 - DNA, 25 bp, probe
aattgtgctacttatactggttcat

SEQ ID NO: 159147 - DNA, 25 bp, probe
aatttgcctgcattaccggtcgatg

SEQ ID NO: 159148 - DNA, 25 bp, probe
aatttgcacagaggaaagcgggtgc

SEQ ID NO: 159149 - DNA, 25 bp, probe
aatttcctgacaaagactgggcaca

SEQ ID NO: 159150 - DNA, 25 bp, probe
caatttcctgcaaccagtaaggaca

SEQ ID NO: 159151 - DNA, 25 bp, probe
aattcatccttaagctaaaggagca

SEQ ID NO: 159152 - DNA, 25 bp, probe
aattcttcttatccagagacaggac

SEQ ID NO: 159153 - DNA, 25 bp, probe
aatttttccagcccgaaggatctgt

SEQ ID NO: 159154 - DNA, 25 bp, probe
caactttttcctgaatgagtatctg

SEQ ID NO: 159155 - DNA, 25 bp, probe
caatttttctttcaacagtgacatg

SEQ ID NO: 159156 - DNA, 25 bp, probe
aatttctcttggctttagatgacat

SEQ ID NO: 159157 - DNA, 25 bp, probe
aattattttgtgcctatttatgaat

SEQ ID NO: 159158 - DNA, 25 bp, probe
aattctgtttgcccttttatggatg

SEQ ID NO: 159159 - DNA, 25 bp, probe
caattcagtggtcttatttttgggt

SEQ ID NO: 159160 - DNA, 25 bp, probe
aattcagtggtcttatttttgggtg

SEQ ID NO: 159161 - DNA, 25 bp, probe
aattcagtgacatttggttctggga

SEQ ID NO: 159162 - DNA, 25 bp, probe
aattcagtgacatttggttctggga

SEQ ID NO: 159163 - DNA, 25 bp, probe
aattcattacatttggcatgctcat

SEQ ID NO: 159164 - DNA, 25 bp, probe
aattcttcaatcgcagagctctgga

SEQ ID NO: 159165 - DNA, 25 bp, probe
aatttacaagctcagactctgccaa

SEQ ID NO: 159166 - DNA, 25 bp, probe
aatttaacacctaggcctgcaaatt

SEQ ID NO: 159167 - DNA, 25 bp, probe
cagatattaaactcttccggaaata

SEQ ID NO: 159168 - DNA, 25 bp, probe
caatttcgaattgttcttggagatt

SEQ ID NO: 159169 - DNA, 25 bp, probe
aattgctactttttcactttggatt

SEQ ID NO: 159170 - DNA, 25 bp, probe
aatttacttgtagtcttttatgatt

SEQ ID NO: 159171 - DNA, 25 bp, probe
aattgtgacattgttcttacttgat

SEQ ID NO: 159172 - DNA, 25 bp, probe
aattgtgacattgttcttacttgat

SEQ ID NO: 159173 - DNA, 25 bp, probe
aatttaccttcattgattatctact

SEQ ID NO: 159174 - DNA, 25 bp, probe
aatttactatacttattgtctatta

SEQ ID NO: 159175 - DNA, 25 bp, probe
aattttcaaaattatgtctccatat

SEQ ID NO: 159176 - DNA, 25 bp, probe
aattctacaaggatatgtacctgtt

SEQ ID NO: 159177 - DNA, 25 bp, probe
aattgtgatcaataatagtaccttt

SEQ ID NO: 159178 - DNA, 25 bp, probe
aattttcgtcgaattctaccgtgct

SEQ ID NO: 159179 - DNA, 25 bp, probe
aattttagatctgatttattcttct

SEQ ID NO: 159180 - DNA, 25 bp, probe
aattctgtaaatgtgtgtaggtctc

SEQ ID NO: 159181 - DNA, 25 bp, probe
aattctattaatatgttagcttgcc

SEQ ID NO: 159182 - DNA, 25 bp, probe
aattataaagtcatctcttctctgc

SEQ ID NO: 159183 - DNA, 25 bp, probe
aattctgaacaagcctctcatcact

SEQ ID NO: 159184 - DNA, 25 bp, probe
aattctttcagagctgactctcctc

SEQ ID NO: 159185 - DNA, 25 bp, probe
aattctttcagagctgactctcctc

SEQ ID NO: 159186 - DNA, 25 bp, probe
aattatttcagacctgcatctccca

SEQ ID NO: 159187 - DNA, 25 bp, probe
caattttccaagctgcatgtccgag

SEQ ID NO: 159188 - DNA, 25 bp, probe
aattctggcggagggcatgagcctg

SEQ ID NO: 159189 - DNA, 25 bp, probe
aattctggggctagtgagacacata

SEQ ID NO: 159190 - DNA, 25 bp, probe
caatttggggtagtgaagtatggga

SEQ ID NO: 159191 - DNA, 25 bp, probe
caatcctggggagtcgaacaatgcg

SEQ ID NO: 159192 - DNA, 25 bp, probe
caacaaggtggagtcttacctggtt

SEQ ID NO: 159193 - DNA, 25 bp, probe
caacaatcctagtgctttccttttt

SEQ ID NO: 159194 - DNA, 25 bp, probe
caatatatcaaatactttccttccc

SEQ ID NO: 159195 - DNA, 25 bp, probe
aattaaaatcatatttccttccatg

SEQ ID NO: 159196 - DNA, 25 bp, probe
aattcaataaagctttctgtttgtg

SEQ ID NO: 159197 - DNA, 25 bp, probe
aattcacataacactactgcttttg

SEQ ID NO: 159198 - DNA, 25 bp, probe
aattattatgacacgcacttttcta

SEQ ID NO: 159199 - DNA, 25 bp, probe
aattagaatacacagccctgtatct

SEQ ID NO: 159200 - DNA, 25 bp, probe
caatgatggaaatgccgccgtggtg

SEQ ID NO: 159201 - DNA, 25 bp, probe
aattgagaatcatcagccacgtgta

SEQ ID NO: 159202 - DNA, 25 bp, probe
aattgatgactcagaccctgaaact

SEQ ID NO: 159203 - DNA, 25 bp, probe
aattgatcctgctgacaggatatca

SEQ ID NO: 159204 - DNA, 25 bp, probe
aattcatctcgaatgactggcttaa

SEQ ID NO: 159205 - DNA, 25 bp, probe
aattcatctcgaatgactggcttaa

SEQ ID NO: 159206 - DNA, 25 bp, probe
aattgccttgaaccatggttaataa

SEQ ID NO: 159207 - DNA, 25 bp, probe
aattttctgcaatattgttcttaaa

SEQ ID NO: 159208 - DNA, 25 bp, probe
aattttcatgttactcttttatcag

SEQ ID NO: 159209 - DNA, 25 bp, probe
aatttatggtcttctgttttgaagc

SEQ ID NO: 159210 - DNA, 25 bp, probe
aattccaggtgttggtacatatgat

SEQ ID NO: 159211 - DNA, 25 bp, probe
caatataatttttgagccagttaat

SEQ ID NO: 159212 - DNA, 25 bp, probe
aatttactgattccagcaagaccaa

SEQ ID NO: 159213 - DNA, 25 bp, probe
cactgtcttcagtctccacagaaac

SEQ ID NO: 159214 - DNA, 25 bp, probe
cactgtcttcagtctccacagaaac

SEQ ID NO: 159215 - DNA, 25 bp, probe
cactgtcttcagtctccacagaaac

SEQ ID NO: 159216 - DNA, 25 bp, probe
aattcttcagccagacgagcgagct

SEQ ID NO: 159217 - DNA, 25 bp, probe
aattcttcagccagacgagcgagct

SEQ ID NO: 159218 - DNA, 25 bp, probe
cagaacttcgccagtcaactacgcg

SEQ ID NO: 159219 - DNA, 25 bp, probe
cacaacttagccagtcttgttggcg

SEQ ID NO: 159220 - DNA, 25 bp, probe
cacaacttagccagtcttgttggcg

SEQ ID NO: 159221 - DNA, 25 bp, probe
caacctggtccggtattttggcgtg

SEQ ID NO: 159222 - DNA, 25 bp, probe
caaccttgacaagagatttctacct

SEQ ID NO: 159223 - DNA, 25 bp, probe
caatcctacaaaggagccttcctcc

SEQ ID NO: 159224 - DNA, 25 bp, probe
aattcatacaccgggacttggctgc

SEQ ID NO: 159225 - DNA, 25 bp, probe
caaccccaatgcgcagggcagtctg

SEQ ID NO: 159226 - DNA, 25 bp, probe
caaccaagatatcccaggacgtttg

SEQ ID NO: 159227 - DNA, 25 bp, probe
caatcccagaactcaggactggagc

SEQ ID NO: 159228 - DNA, 25 bp, probe
caatcgggccaatccgaagtcagca

SEQ ID NO: 159229 - DNA, 25 bp, probe
caatcgggccaatccgaagtcagca

SEQ ID NO: 159230 - DNA, 25 bp, probe
caatccaggacaaaagtgacgctaa

SEQ ID NO: 159231 - DNA, 25 bp, probe
aattcaggaattacaatgatgcgga

SEQ ID NO: 159232 - DNA, 25 bp, probe
aattcaggaattacaatgatgcgga

SEQ ID NO: 159233 - DNA, 25 bp, probe
aattctgggaatccacagctctggc

SEQ ID NO: 159234 - DNA, 25 bp, probe
caattagggatgacataagctggcc

SEQ ID NO: 159235 - DNA, 25 bp, probe
aattggtcatgtgatgcaagccagc

SEQ ID NO: 159236 - DNA, 25 bp, probe
aattctggctgtggatctacccaaa

SEQ ID NO: 159237 - DNA, 25 bp, probe
aattcaggcgtcgaggacctggtgt

SEQ ID NO: 159238 - DNA, 25 bp, probe
aattctagcgggggacctgggagat

SEQ ID NO: 159239 - DNA, 25 bp, probe
aattaactgggatgatctcattaat

SEQ ID NO: 159240 - DNA, 25 bp, probe
aattacttattggatattcattctt

SEQ ID NO: 159241 - DNA, 25 bp, probe
aattcctcaaagtatttgtcatttc

SEQ ID NO: 159242 - DNA, 25 bp, probe
aattccatgcagtgtcttgctggca

SEQ ID NO: 159243 - DNA, 25 bp, probe
caatatccatggagtctcttctgag

SEQ ID NO: 159244 - DNA, 25 bp, probe
aattctcaggggacatctcccacag

SEQ ID NO: 159245 - DNA, 25 bp, probe
aattctagagctaatacatgccgac

SEQ ID NO: 159246 - DNA, 25 bp, probe
aattctagagctaatacatgccgac

SEQ ID NO: 159247 - DNA, 25 bp, probe
aattctgcaagatatcaatgcttac

SEQ ID NO: 159248 - DNA, 25 bp, probe
aattctgtgacatacatattatctc

SEQ ID NO: 159249 - DNA, 25 bp, probe
aattcagctgcacaaaataatctat

SEQ ID NO: 159250 - DNA, 25 bp, probe
aattacgagcagaaagatccatctt

SEQ ID NO: 159251 - DNA, 25 bp, probe
aattcctgaaggaggcacatctgat

SEQ ID NO: 159252 - DNA, 25 bp, probe
aattcttcagggagtgtcacctcaa

SEQ ID NO: 159253 - DNA, 25 bp, probe
aattcttcagggagtgtcacctcaa

SEQ ID NO: 159254 - DNA, 25 bp, probe
aattcctaggaaactgtccagcctc

SEQ ID NO: 159255 - DNA, 25 bp, probe
aattttagcaaaacagtccaggcca

SEQ ID NO: 159256 - DNA, 25 bp, probe
caattaccgaaaacaccacgtgaca

SEQ ID NO: 159257 - DNA, 25 bp, probe
caatgtgaccgatatgttcccggac

SEQ ID NO: 159258 - DNA, 25 bp, probe
caatgtgaccgatatgttcccggac

SEQ ID NO: 159259 - DNA, 25 bp, probe
aattcaggcgagttttgcccaggcc

SEQ ID NO: 159260 - DNA, 25 bp, probe
aattcatgcgctcgatgtaagccat

SEQ ID NO: 159261 - DNA, 25 bp, probe
aattcatgcgctcgatgtaagccat

SEQ ID NO: 159262 - DNA, 25 bp, probe
aattcaggatgctgtgatacactga

SEQ ID NO: 159263 - DNA, 25 bp, probe
aattgataatcttgatgtgaacaga

SEQ ID NO: 159264 - DNA, 25 bp, probe
aattgataatcttgatgtgaacaga

SEQ ID NO: 159265 - DNA, 25 bp, probe
aattactgattgtatgtgacctgaa

SEQ ID NO: 159266 - DNA, 25 bp, probe
aattattgcctgtatgtcaattatt

SEQ ID NO: 159267 - DNA, 25 bp, probe
aattattctcattcttaggtgcatt

SEQ ID NO: 159268 - DNA, 25 bp, probe
aattgaatctagtatatgcgggatg

SEQ ID NO: 159269 - DNA, 25 bp, probe
caatgacaatctggagaagggactc

SEQ ID NO: 159270 - DNA, 25 bp, probe
caatgacaatctggagaagggactc

SEQ ID NO: 159271 - DNA, 25 bp, probe
caataaattccatgcatgggccgct

SEQ ID NO: 159272 - DNA, 25 bp, probe
caataacatttttctggtggcccct

SEQ ID NO: 159273 - DNA, 25 bp, probe
caatgaacctttcctagggctgtgg

SEQ ID NO: 159274 - DNA, 25 bp, probe
caataagacattttctagctacttc

SEQ ID NO: 159275 - DNA, 25 bp, probe
aattaacttcattgccgctggattc

SEQ ID NO: 159276 - DNA, 25 bp, probe
aattcaaatcgcttttctggctgac

SEQ ID NO: 159277 - DNA, 25 bp, probe
aattcaatacacagttcagtgcatg

SEQ ID NO: 159278 - DNA, 25 bp, probe
caattcaagacctgaccgctagtag

SEQ ID NO: 159279 - DNA, 25 bp, probe
aattgagatactttaccagctacta

SEQ ID NO: 159280 - DNA, 25 bp, probe
aattgaatccatttatcaagctatg

SEQ ID NO: 159281 - DNA, 25 bp, probe
aattctcacctctattaagctgctg

SEQ ID NO: 159282 - DNA, 25 bp, probe
aattcactccctcgtaagcattgga

SEQ ID NO: 159283 - DNA, 25 bp, probe
aattcctcccagtgacaatatggaa

SEQ ID NO: 159284 - DNA, 25 bp, probe
aattccataccgttactctgatgaa

SEQ ID NO: 159285 - DNA, 25 bp, probe
aattcacataggcaatatctttaat

SEQ ID NO: 159286 - DNA, 25 bp, probe
aattcacataggcaatatctttaat

SEQ ID NO: 159287 - DNA, 25 bp, probe
aattatcacaggattttgttatgtt

SEQ ID NO: 159288 - DNA, 25 bp, probe
caaggccacgagcttgttctttgtt

SEQ ID NO: 159289 - DNA, 25 bp, probe
caaggccacgagcttgttctttgtt

SEQ ID NO: 159290 - DNA, 25 bp, probe
caatcaagtctgacgtgtggtcttt

SEQ ID NO: 159291 - DNA, 25 bp, probe
caatcaagtctgacgtgtggtcttt

SEQ ID NO: 159292 - DNA, 25 bp, probe
caatcagggtgtggtagaacacttt

SEQ ID NO: 159293 - DNA, 25 bp, probe
caatcagctgtgtcgcacttaaact

SEQ ID NO: 159294 - DNA, 25 bp, probe
caaatggaggcagcattaacagttc

SEQ ID NO: 159295 - DNA, 25 bp, probe
caaggagaggcagattcaccagaag

SEQ ID NO: 159296 - DNA, 25 bp, probe
caagggagacttgtaataaagcctt

SEQ ID NO: 159297 - DNA, 25 bp, probe
aattgttccttctgaataaacagtt

SEQ ID NO: 159298 - DNA, 25 bp, probe
aattgtgctcttttctaatccaaag

SEQ ID NO: 159299 - DNA, 25 bp, probe
aattatgtctatttggattttaaat

SEQ ID NO: 159300 - DNA, 25 bp, probe
aattatgtctatttggattttaaat

SEQ ID NO: 159301 - DNA, 25 bp, probe
caaggaggcttgctggacctaaaat

SEQ ID NO: 159302 - DNA, 25 bp, probe
caatggtgtacaaatagacctagtg

SEQ ID NO: 159303 - DNA, 25 bp, probe
caatggtgtacaaatagacctagtg

SEQ ID NO: 159304 - DNA, 25 bp, probe
aattgtgatcaaaagggctatggga

SEQ ID NO: 159305 - DNA, 25 bp, probe
aattgtacaacactgtgatgctgag

SEQ ID NO: 159306 - DNA, 25 bp, probe
aattctaataagaggatcagccggg

SEQ ID NO: 159307 - DNA, 25 bp, probe
aattctgtgataaagggaccttgga

SEQ ID NO: 159308 - DNA, 25 bp, probe
aattcattgttatgtaatctttgta

SEQ ID NO: 159309 - DNA, 25 bp, probe
aattcattgttatgtaatctttgta

SEQ ID NO: 159310 - DNA, 25 bp, probe
aattcattgttacgtcacttttcta

SEQ ID NO: 159311 - DNA, 25 bp, probe
aattcttgatttcatttttctctgg

SEQ ID NO: 159312 - DNA, 25 bp, probe
aattgcgagtccatgagtttatttt

SEQ ID NO: 159313 - DNA, 25 bp, probe
aattcatagcccaggttcttgatcg

SEQ ID NO: 159314 - DNA, 25 bp, probe
aattaaacctgggcatttcatggga

SEQ ID NO: 159315 - DNA, 25 bp, probe
caattaaaacggactcatctctggc

SEQ ID NO: 159316 - DNA, 25 bp, probe
caataagaaacccagccattccgca

SEQ ID NO: 159317 - DNA, 25 bp, probe
cagtaagtttccaaacgctgccagc

SEQ ID NO: 159318 - DNA, 25 bp, probe
cagataagtcagtcaccaacggcaa

SEQ ID NO: 159319 - DNA, 25 bp, probe
aattagatacatacatcaatgggaa

SEQ ID NO: 159320 - DNA, 25 bp, probe
aattagatacatacatcaatgggaa

SEQ ID NO: 159321 - DNA, 25 bp, probe
aattcttccaactcatgggataaag

SEQ ID NO: 159322 - DNA, 25 bp, probe
aattcattccaacccaggagacaca

SEQ ID NO: 159323 - DNA, 25 bp, probe
aattatttcacgtactgaagacaat

SEQ ID NO: 159324 - DNA, 25 bp, probe
aattcatttccacactgatgacaca

SEQ ID NO: 159325 - DNA, 25 bp, probe
aattgaggataccccgagactacca

SEQ ID NO: 159326 - DNA, 25 bp, probe
aattgaggataccccgagactacca

SEQ ID NO: 159327 - DNA, 25 bp, probe
caattgaggataccccgagactacc

SEQ ID NO: 159328 - DNA, 25 bp, probe
caactgcggcatagcaacctggtgc

SEQ ID NO: 159329 - DNA, 25 bp, probe
aattcgacagcctcctggagttggt

SEQ ID NO: 159330 - DNA, 25 bp, probe
aattggacagctctctcgaagagat

SEQ ID NO: 159331 - DNA, 25 bp, probe
aattctggcaatcattaaagtgcat

SEQ ID NO: 159332 - DNA, 25 bp, probe
aattctgacaaatgaacaagacatc

SEQ ID NO: 159333 - DNA, 25 bp, probe
caatggctaaacagtatcaagtact

SEQ ID NO: 159334 - DNA, 25 bp, probe
caaggcttggagaggtatgtgcccc

SEQ ID NO: 159335 - DNA, 25 bp, probe
cagaggcaagggaggttggaaaatg

SEQ ID NO: 159336 - DNA, 25 bp, probe
catgacttagggaggtgggacccac

SEQ ID NO: 159337 - DNA, 25 bp, probe
catggttacgtcagtcgtgtgcagc

SEQ ID NO: 159338 - DNA, 25 bp, probe
catggttacgtcagtcgtgtgcagc

SEQ ID NO: 159339 - DNA, 25 bp, probe
cagggatcggtctgagcctggggac

SEQ ID NO: 159340 - DNA, 25 bp, probe
cagttggccttgtggcctcagggaa

SEQ ID NO: 159341 - DNA, 25 bp, probe
cagttggccttgtggcctcagggaa

SEQ ID NO: 159342 - DNA, 25 bp, probe
catagggcaatttggggctcaaagt

SEQ ID NO: 159343 - DNA, 25 bp, probe
caagggaacttgagcgtgaatctgt

SEQ ID NO: 159344 - DNA, 25 bp, probe
caaggttatctggaagttcagtctt

SEQ ID NO: 159345 - DNA, 25 bp, probe
caagtttgactgggaggtcaccttt

SEQ ID NO: 159346 - DNA, 25 bp, probe
caattttgcactgtgtggctacgcc

SEQ ID NO: 159347 - DNA, 25 bp, probe
caataaatgcctcatcaagaaccca

SEQ ID NO: 159348 - DNA, 25 bp, probe
caataaaacttgtacgatccacgaa

SEQ ID NO: 159349 - DNA, 25 bp, probe
aattgactattttgacgtccaggac

SEQ ID NO: 159350 - DNA, 25 bp, probe
aattgattttattgactgcgtcagg

SEQ ID NO: 159351 - DNA, 25 bp, probe
caattgattttattgactgcgtcag

SEQ ID NO: 159352 - DNA, 25 bp, probe
caaatgtgtttgtgtccttaggcaa

SEQ ID NO: 159353 - DNA, 25 bp, probe
caaatgtgtttgtgtccttaggcaa

SEQ ID NO: 159354 - DNA, 25 bp, probe
caaatggacctcagaccttgggatt

SEQ ID NO: 159355 - DNA, 25 bp, probe
caagagggccgaaactcttcacctt

SEQ ID NO: 159356 - DNA, 25 bp, probe
caagagggccgaaactcttcacctt

SEQ ID NO: 159357 - DNA, 25 bp, probe
caacggggtgaaacctgtctctact

SEQ ID NO: 159358 - DNA, 25 bp, probe
caatccgtggtgtatactctgtgat

SEQ ID NO: 159359 - DNA, 25 bp, probe
caatcgtggtgcctagactttgcat

SEQ ID NO: 159360 - DNA, 25 bp, probe
aattgttgtctgaagcctgtctgag

SEQ ID NO: 159361 - DNA, 25 bp, probe
aattcactgttgaatgcctgtccca

SEQ ID NO: 159362 - DNA, 25 bp, probe
caattagctgtgtatcgctcttccc

SEQ ID NO: 159363 - DNA, 25 bp, probe
aattcagtgcatttcctcttgattt

SEQ ID NO: 159364 - DNA, 25 bp, probe
aattcagactcttacattgttctct

SEQ ID NO: 159365 - DNA, 25 bp, probe
aattcagactcttacattgttctct

SEQ ID NO: 159366 - DNA, 25 bp, probe
aattgcaatctataatatttgtgtg

SEQ ID NO: 159367 - DNA, 25 bp, probe
aattggtttgctctgatcattgctg

SEQ ID NO: 159368 - DNA, 25 bp, probe
aattgagctttctagaatatttgcc

SEQ ID NO: 159369 - DNA, 25 bp, probe
caatttatgttctgcaatatcctgc

SEQ ID NO: 159370 - DNA, 25 bp, probe
caatatgctagtaaacacaagagga

SEQ ID NO: 159371 - DNA, 25 bp, probe
aattgaggattttacaagatcagat

SEQ ID NO: 159372 - DNA, 25 bp, probe
aattggattttgtcgcagtcacgat

SEQ ID NO: 159373 - DNA, 25 bp, probe
aattggattttgtcacagtcacaat

SEQ ID NO: 159374 - DNA, 25 bp, probe
aattgatgatccattaagtaaacaa

SEQ ID NO: 159375 - DNA, 25 bp, probe
aattgcacaccagcaaaggcaactc

SEQ ID NO: 159376 - DNA, 25 bp, probe
caattgcacaccagcaaaggcaact

SEQ ID NO: 159377 - DNA, 25 bp, probe
aattcacacagcaagacatcgacga

SEQ ID NO: 159378 - DNA, 25 bp, probe
aattcaatcatatctgtgaacagac

SEQ ID NO: 159379 - DNA, 25 bp, probe
aattcctcataaaacctgcagcagc

SEQ ID NO: 159380 - DNA, 25 bp, probe
caattcatcacaactaactccatcg

SEQ ID NO: 159381 - DNA, 25 bp, probe
caatatctagtactgcaactgccag

SEQ ID NO: 159382 - DNA, 25 bp, probe
caatactatcattgtcaggactatg

SEQ ID NO: 159383 - DNA, 25 bp, probe
caatacattatcctggaactgatgg

SEQ ID NO: 159384 - DNA, 25 bp, probe
caataattcaccagaccagaagcca

SEQ ID NO: 159385 - DNA, 25 bp, probe
caataattgactggtggaaggaaaa

SEQ ID NO: 159386 - DNA, 25 bp, probe
caataattcccttgttagagaagaa

SEQ ID NO: 159387 - DNA, 25 bp, probe
caataattcccttgttagagaagaa

SEQ ID NO: 159388 - DNA, 25 bp, probe
caataatctcgccaatgctgtcatt

SEQ ID NO: 159389 - DNA, 25 bp, probe
caatagccaggccaggctgtcatcc

SEQ ID NO: 159390 - DNA, 25 bp, probe
caagaggcactgccagtcgtagcac

SEQ ID NO: 159391 - DNA, 25 bp, probe
caatagacatcatcgtttggccctc

SEQ ID NO: 159392 - DNA, 25 bp, probe
caataagtataggattttgcacatt

SEQ ID NO: 159393 - DNA, 25 bp, probe
caagaagcaattgattttattgact

SEQ ID NO: 159394 - DNA, 25 bp, probe
caaggtgactgtgcttgtcgggacc

SEQ ID NO: 159395 - DNA, 25 bp, probe
caagtcgactatgccttagacacat

SEQ ID NO: 159396 - DNA, 25 bp, probe
caagtcctgaatcccttgcaggtat

SEQ ID NO: 159397 - DNA, 25 bp, probe
aattgcctgaatcctcttttttatg

SEQ ID NO: 159398 - DNA, 25 bp, probe
aattggagaaacgtgttaattgtgt

SEQ ID NO: 159399 - DNA, 25 bp, probe
aattgatgcaaatctttattcactt

SEQ ID NO: 159400 - DNA, 25 bp, probe
aattgatcatttaaactatttcttt

SEQ ID NO: 159401 - DNA, 25 bp, probe
aattgaaatatcgaactgcttactt

SEQ ID NO: 159402 - DNA, 25 bp, probe
aattgtaaatcctgtgtttcattac

SEQ ID NO: 159403 - DNA, 25 bp, probe
aattgctaacaatgggctcctttaa

SEQ ID NO: 159404 - DNA, 25 bp, probe
caatctagaacgtggattccttctt

SEQ ID NO: 159405 - DNA, 25 bp, probe
caattagaagcctcgtaccaatcat

SEQ ID NO: 159406 - DNA, 25 bp, probe
aattcaagcgtctggatgactactt

SEQ ID NO: 159407 - DNA, 25 bp, probe
aattcaagcgtctggatgactactt

SEQ ID NO: 159408 - DNA, 25 bp, probe
aattcagacgtactggcttctgttt

SEQ ID NO: 159409 - DNA, 25 bp, probe
caattgaactgttaccattgccttt

SEQ ID NO: 159410 - DNA, 25 bp, probe
aattgccacattttcttatggcatt

SEQ ID NO: 159411 - DNA, 25 bp, probe
aattgccacattttcttatggcatt

SEQ ID NO: 159412 - DNA, 25 bp, probe
aattgctcactttttctgtgacatc

SEQ ID NO: 159413 - DNA, 25 bp, probe
aattcatgcactagtctccatttct

SEQ ID NO: 159414 - DNA, 25 bp, probe
aattcatgcactagtctccatttct

SEQ ID NO: 159415 - DNA, 25 bp, probe
aattctgcacatactattctgtagt

SEQ ID NO: 159416 - DNA, 25 bp, probe
aattggcctttaatatttgtatctc

SEQ ID NO: 159417 - DNA, 25 bp, probe
aattgtgcttttaattccatttcac

SEQ ID NO: 159418 - DNA, 25 bp, probe
aattgtcattatatatggccagttg

SEQ ID NO: 159419 - DNA, 25 bp, probe
aattgattacaaatctggaagtgtg

SEQ ID NO: 159420 - DNA, 25 bp, probe
aattcactcaaaattgataatcttg

SEQ ID NO: 159421 - DNA, 25 bp, probe
aattcactcaaaattgataatcttg

SEQ ID NO: 159422 - DNA, 25 bp, probe
aattgcacatagttctgcccaaatt

SEQ ID NO: 159423 - DNA, 25 bp, probe
aattgaacgactacccagaagtgtt

SEQ ID NO: 159424 - DNA, 25 bp, probe
aattgaagctgcttatctccaaagc

SEQ ID NO: 159425 - DNA, 25 bp, probe
aattgtattgtaattccatgaccca

SEQ ID NO: 159426 - DNA, 25 bp, probe
aattgcattgttattacagagaaag

SEQ ID NO: 159427 - DNA, 25 bp, probe
aattgccttctgactgtgcaaaggt

SEQ ID NO: 159428 - DNA, 25 bp, probe
aattggagtcatactgtaaacagtt

SEQ ID NO: 159429 - DNA, 25 bp, probe
caatgatggcagtcatctccatcat

SEQ ID NO: 159430 - DNA, 25 bp, probe
cagaatggatgtactacactttatc

SEQ ID NO: 159431 - DNA, 25 bp, probe
caatatgggtattacctttgtctct

SEQ ID NO: 159432 - DNA, 25 bp, probe
caatagttgctttaatcccttcctt

SEQ ID NO: 159433 - DNA, 25 bp, probe
caattcttgtgtcaacccatttgct

SEQ ID NO: 159434 - DNA, 25 bp, probe
caatccctttcataccacaaagcca

SEQ ID NO: 159435 - DNA, 25 bp, probe
caacgtcttgtctccgcatacaagt

SEQ ID NO: 159436 - DNA, 25 bp, probe
caatttgtggtctaccttcagcaag

SEQ ID NO: 159437 - DNA, 25 bp, probe
caatctattggacaagttatgccta

SEQ ID NO: 159438 - DNA, 25 bp, probe
aattcttggatattacttatgtcta

SEQ ID NO: 159439 - DNA, 25 bp, probe
aattgcttggctgtagctttctctc

SEQ ID NO: 159440 - DNA, 25 bp, probe
caatctttgactgctttttatgtgc

SEQ ID NO: 159441 - DNA, 25 bp, probe
caatctggttcggtattttggtgtg

SEQ ID NO: 159442 - DNA, 25 bp, probe
aattgtttcgcataattctgaatgt

SEQ ID NO: 159443 - DNA, 25 bp, probe
aattgctgttccttaatttgattaa

SEQ ID NO: 159444 - DNA, 25 bp, probe
aattctctgcatgttggtcttttaa

SEQ ID NO: 159445 - DNA, 25 bp, probe
aattgtccggtttgtcttggatata

SEQ ID NO: 159446 - DNA, 25 bp, probe
aattggttggtttgctctccagata

SEQ ID NO: 159447 - DNA, 25 bp, probe
aattgctggctggtgggttgcaaga

SEQ ID NO: 159448 - DNA, 25 bp, probe
aattctggcttgggatgctgatgaa

SEQ ID NO: 159449 - DNA, 25 bp, probe
aattcttgcttcctatgctagtatt

SEQ ID NO: 159450 - DNA, 25 bp, probe
caatgcctttgtgtggtagttctaa

SEQ ID NO: 159451 - DNA, 25 bp, probe
caaccttctggaccagtaggtttca

SEQ ID NO: 159452 - DNA, 25 bp, probe
aattgcttccaaacagctgggttta

SEQ ID NO: 159453 - DNA, 25 bp, probe
aattgcttccaaacagctgggttta

SEQ ID NO: 159454 - DNA, 25 bp, probe
aattcttgccaaccaggaggtgccg

SEQ ID NO: 159455 - DNA, 25 bp, probe
aattcggcacgagctgaaggctagc

SEQ ID NO: 159456 - DNA, 25 bp, probe
aattcagcgtcgacctcatgagtta

SEQ ID NO: 159457 - DNA, 25 bp, probe
caatgtcaactgctgcctggatgtt

SEQ ID NO: 159458 - DNA, 25 bp, probe
caatgtcaactgctgcctggatgtt

SEQ ID NO: 159459 - DNA, 25 bp, probe
aattgatattgcctgctttgagcag

SEQ ID NO: 159460 - DNA, 25 bp, probe
aattgcaggtgccagtttgctgatg

SEQ ID NO: 159461 - DNA, 25 bp, probe
aattgaggatgacgctgatgtggag

SEQ ID NO: 159462 - DNA, 25 bp, probe
aattgcggagcgtctgggatgcaca

SEQ ID NO: 159463 - DNA, 25 bp, probe
aattcatgccaattagggatgacat

SEQ ID NO: 159464 - DNA, 25 bp, probe
aattgctgatcatgggcggcaggat

SEQ ID NO: 159465 - DNA, 25 bp, probe
aattccaccaggccattaatgatgc

SEQ ID NO: 159466 - DNA, 25 bp, probe
aattccaccaggccattaatgatgc

SEQ ID NO: 159467 - DNA, 25 bp, probe
aattctcactcagtggtggttactg

SEQ ID NO: 159468 - DNA, 25 bp, probe
aattgcaactccagtgttgataatt

SEQ ID NO: 159469 - DNA, 25 bp, probe
aattcatcactgtgatgtttgtatt

SEQ ID NO: 159470 - DNA, 25 bp, probe
aattcacctgtggatgtttttgagt

SEQ ID NO: 159471 - DNA, 25 bp, probe
aattcagttgttagtgtgtcttagt

SEQ ID NO: 159472 - DNA, 25 bp, probe
aattccgatactagtttgctttgct

SEQ ID NO: 159473 - DNA, 25 bp, probe
aattccgatactagtttgctttgct

SEQ ID NO: 159474 - DNA, 25 bp, probe
caatgcactcgatcttgtcattttt

SEQ ID NO: 159475 - DNA, 25 bp, probe
caatgtcatgaatatcaggcagttt

SEQ ID NO: 159476 - DNA, 25 bp, probe
caatgacatgtgtgctagagcttac

SEQ ID NO: 159477 - DNA, 25 bp, probe
cacggcagatgctgcaaaatgggac

SEQ ID NO: 159478 - DNA, 25 bp, probe
caagtaagcggcaacaagggtccgt

SEQ ID NO: 159479 - DNA, 25 bp, probe
caaccacctagtacacgtgggccct

SEQ ID NO: 159480 - DNA, 25 bp, probe
caatcgaccgaaagcaagaggtgcc

SEQ ID NO: 159481 - DNA, 25 bp, probe
caattacccaaaggctgcacctgcc

SEQ ID NO: 159482 - DNA, 25 bp, probe
caatagcaaccataactgccactgt

SEQ ID NO: 159483 - DNA, 25 bp, probe
caatatcatcaccacacgcacttat

SEQ ID NO: 159484 - DNA, 25 bp, probe
caatcaatcagtcagtctttactga

SEQ ID NO: 159485 - DNA, 25 bp, probe
caatagctcagtcctgcagtttgac

SEQ ID NO: 159486 - DNA, 25 bp, probe
caatcgcagagctctggatcctgaa

SEQ ID NO: 159487 - DNA, 25 bp, probe
caatcagagcgtcctgtgcactgag

SEQ ID NO: 159488 - DNA, 25 bp, probe
caacaacgtcattgggcaaggtctg

SEQ ID NO: 159489 - DNA, 25 bp, probe
caactaccactaccgagacgacggc

SEQ ID NO: 159490 - DNA, 25 bp, probe
caatgcaaccctgggcgggaaggcc

SEQ ID NO: 159491 - DNA, 25 bp, probe
caatcaacacaggccgctaggaagc

SEQ ID NO: 159492 - DNA, 25 bp, probe
caatcaaatcctgctttggcgacaa

SEQ ID NO: 159493 - DNA, 25 bp, probe
caatcaacatgctggtgaaggtgaa

SEQ ID NO: 159494 - DNA, 25 bp, probe
caatcatgagtgcgtggctggggac

SEQ ID NO: 159495 - DNA, 25 bp, probe
caatatctgcagcgttgcttggtgc

SEQ ID NO: 159496 - DNA, 25 bp, probe
caatacgaagaccctctgagatgct

SEQ ID NO: 159497 - DNA, 25 bp, probe
caatcacagcaacagactctcctgc

SEQ ID NO: 159498 - DNA, 25 bp, probe
caatcaaaagggcctgacccgcgtc

SEQ ID NO: 159499 - DNA, 25 bp, probe
cacaaaatggagccacgttcccgtc

SEQ ID NO: 159500 - DNA, 25 bp, probe
caaaagggcatgctggttcctaatc

SEQ ID NO: 159501 - DNA, 25 bp, probe
caagctgggcaactttttcctgaat

SEQ ID NO: 159502 - DNA, 25 bp, probe
caatatggagaggattgcttccctg

SEQ ID NO: 159503 - DNA, 25 bp, probe
caatatggagaggattgcttccctg

SEQ ID NO: 159504 - DNA, 25 bp, probe
caatagagcaggtatcttcaccccc

SEQ ID NO: 159505 - DNA, 25 bp, probe
caatagagcaagagttccggctgcc

SEQ ID NO: 159506 - DNA, 25 bp, probe
caataggaatcattcttctcttgct

SEQ ID NO: 159507 - DNA, 25 bp, probe
aattgtatgatatgttccttttttc

SEQ ID NO: 159508 - DNA, 25 bp, probe
aattgtctagtccttcgttatgttc

SEQ ID NO: 159509 - DNA, 25 bp, probe
aattgtctagtccttcgttatgttc

SEQ ID NO: 159510 - DNA, 25 bp, probe
aattctgtgagtcttggctttgctt

SEQ ID NO: 159511 - DNA, 25 bp, probe
aattcttgatgacttggagctcttt

SEQ ID NO: 159512 - DNA, 25 bp, probe
aattgtttgcacttgtgcctgtttt

SEQ ID NO: 159513 - DNA, 25 bp, probe
aattgtatggactcagctagctgtt

SEQ ID NO: 159514 - DNA, 25 bp, probe
aattgtcaggagtgcacctctctac

SEQ ID NO: 159515 - DNA, 25 bp, probe
aattgtcaggagtgcacctctctac

SEQ ID NO: 159516 - DNA, 25 bp, probe
caactgagtaagtctgaacctctaa

SEQ ID NO: 159517 - DNA, 25 bp, probe
caaggaatactaatggatcgtctta

SEQ ID NO: 159518 - DNA, 25 bp, probe
caatggaacctacggacaggtgtac

SEQ ID NO: 159519 - DNA, 25 bp, probe
aattggcacctacgtagaggtggat

SEQ ID NO: 159520 - DNA, 25 bp, probe
aattccatggcaccgtcaaggctga

SEQ ID NO: 159521 - DNA, 25 bp, probe
caatctccagggctccaaatctgcc

SEQ ID NO: 159522 - DNA, 25 bp, probe
caatctgagcacgctaccaaatctc

SEQ ID NO: 159523 - DNA, 25 bp, probe
caatctggaccacacagacgacgac

SEQ ID NO: 159524 - DNA, 25 bp, probe
aattctcactctcacaaccaatgag

SEQ ID NO: 159525 - DNA, 25 bp, probe
aattccagcttagcaacgcagaaga

SEQ ID NO: 159526 - DNA, 25 bp, probe
aattctcagtgtttcaaatgcaaat

SEQ ID NO: 159527 - DNA, 25 bp, probe
aattctcaagcttctcatttctaag

SEQ ID NO: 159528 - DNA, 25 bp, probe
aattgccaagcaagacagtttgttg

SEQ ID NO: 159529 - DNA, 25 bp, probe
caatggccaaaagagttgttgctga

SEQ ID NO: 159530 - DNA, 25 bp, probe
caaggaaatacatcagatttttgag

SEQ ID NO: 159531 - DNA, 25 bp, probe
caaggaaatacccttcttttatgag

SEQ ID NO: 159532 - DNA, 25 bp, probe
caacgaaattcactgctccttttgt

SEQ ID NO: 159533 - DNA, 25 bp, probe
caatggaaatcccatcaccatcttc

SEQ ID NO: 159534 - DNA, 25 bp, probe
caatgcggccaagatcatccgccac

SEQ ID NO: 159535 - DNA, 25 bp, probe
caaggacgatgagtacaacccctgc

SEQ ID NO: 159536 - DNA, 25 bp, probe
caagcggaaaataaactccaagcag

SEQ ID NO: 159537 - DNA, 25 bp, probe
caagggccaaacagccatccatgag

SEQ ID NO: 159538 - DNA, 25 bp, probe
caagggccacatgcgagtattaata

SEQ ID NO: 159539 - DNA, 25 bp, probe
caaggcggaatatgagtttgactct

SEQ ID NO: 159540 - DNA, 25 bp, probe
aattgggagatactgatacttgttt

SEQ ID NO: 159541 - DNA, 25 bp, probe
aattgtgagtgctattgtacatggc

SEQ ID NO: 159542 - DNA, 25 bp, probe
aattctagtgcattatccagattct

SEQ ID NO: 159543 - DNA, 25 bp, probe
caatctctagtattataaaccgttt

SEQ ID NO: 159544 - DNA, 25 bp, probe
caaagccgtattagaaaacgcactt

SEQ ID NO: 159545 - DNA, 25 bp, probe
caaacccaagctatcaaacgcctcg

SEQ ID NO: 159546 - DNA, 25 bp, probe
cacaccgaaggtatcgaacggcgtg

SEQ ID NO: 159547 - DNA, 25 bp, probe
cacaccgaaggtatcgaacggcgtg

SEQ ID NO: 159548 - DNA, 25 bp, probe
cacggatacggtcactgaagtggtt

SEQ ID NO: 159549 - DNA, 25 bp, probe
cacggatacggtcactgaagtggtt

SEQ ID NO: 159550 - DNA, 25 bp, probe
cacggatcgaatggtacttacaggt

SEQ ID NO: 159551 - DNA, 25 bp, probe
cacggatcgaatggtacttacaggt

SEQ ID NO: 159552 - DNA, 25 bp, probe
cacggacaggtaggcacgagacggt

SEQ ID NO: 159553 - DNA, 25 bp, probe
caagaccgaaaagctggagcggctc

SEQ ID NO: 159554 - DNA, 25 bp, probe
caagccggactatgacatccgggcc

SEQ ID NO: 159555 - DNA, 25 bp, probe
caaccgaggagaggagcaccgggca

SEQ ID NO: 159556 - DNA, 25 bp, probe
cacagccggaaagacctccggggat

SEQ ID NO: 159557 - DNA, 25 bp, probe
catcgtgggtaacagccttggggag

SEQ ID NO: 159558 - DNA, 25 bp, probe
caaggaagtcaccaactttggaaag

SEQ ID NO: 159559 - DNA, 25 bp, probe
caatatgtgatctccaagtttaaaa

SEQ ID NO: 159560 - DNA, 25 bp, probe
aattgttatgcaccagagattaaaa

SEQ ID NO: 159561 - DNA, 25 bp, probe
aattgcctctgaaagacataacata

SEQ ID NO: 159562 - DNA, 25 bp, probe
aattgctccattacatacaaagaca

SEQ ID NO: 159563 - DNA, 25 bp, probe
aattctcacctttcacagacagaca

SEQ ID NO: 159564 - DNA, 25 bp, probe
aattgctctctttaccagacaggca

SEQ ID NO: 159565 - DNA, 25 bp, probe
caattgctcgctggacaacggcggc

SEQ ID NO: 159566 - DNA, 25 bp, probe
aattgtccatggaccacgtgtgcct

SEQ ID NO: 159567 - DNA, 25 bp, probe
aattgtccatggaccacgtgtgcct

SEQ ID NO: 159568 - DNA, 25 bp, probe
aattgccaaggcagcgggatctcgt

SEQ ID NO: 159569 - DNA, 25 bp, probe
aattgccaaggcagcgggatctcgt

SEQ ID NO: 159570 - DNA, 25 bp, probe
caatattcagggagcagcggattgc

SEQ ID NO: 159571 - DNA, 25 bp, probe
aattgtaggtgtttcgtgtgctgct

SEQ ID NO: 159572 - DNA, 25 bp, probe
aattgtaggcgtttctgctgagcag

SEQ ID NO: 159573 - DNA, 25 bp, probe
aattgcaagccacacttctagagat

SEQ ID NO: 159574 - DNA, 25 bp, probe
aattctggccattacttccaatgtg

SEQ ID NO: 159575 - DNA, 25 bp, probe
aattctccactaagtctgacgtgtg

SEQ ID NO: 159576 - DNA, 25 bp, probe
aattctccactaagtctgacgtgtg

SEQ ID NO: 159577 - DNA, 25 bp, probe
aattcctcactctgacatgacagta

SEQ ID NO: 159578 - DNA, 25 bp, probe
aattcctcactctgacatgacagta

SEQ ID NO: 159579 - DNA, 25 bp, probe
caattctctattttactgaagctat

SEQ ID NO: 159580 - DNA, 25 bp, probe
aattgccttgtaattcgacagctct

SEQ ID NO: 159581 - DNA, 25 bp, probe
aattgccttgtaattcgacagctct

SEQ ID NO: 159582 - DNA, 25 bp, probe
caattgccatatgatttctagctgc

SEQ ID NO: 159583 - DNA, 25 bp, probe
caatgatgccgagtttgccttgctc

SEQ ID NO: 159584 - DNA, 25 bp, probe
caatgacacgatcttggctcactgc

SEQ ID NO: 159585 - DNA, 25 bp, probe
caatacatcgaagcatgtctcagcc

SEQ ID NO: 159586 - DNA, 25 bp, probe
caataccagccagcatacatccagc

SEQ ID NO: 159587 - DNA, 25 bp, probe
caatgactcatgcctgtaatcccag

SEQ ID NO: 159588 - DNA, 25 bp, probe
caatgtctcagctgtcatcaacctt

SEQ ID NO: 159589 - DNA, 25 bp, probe
aattgtcactgtcatcagaatctgt

SEQ ID NO: 159590 - DNA, 25 bp, probe
aattggcctggtatggctgcagtcc

SEQ ID NO: 159591 - DNA, 25 bp, probe
aattgtgcgctgtattttgcagatt

SEQ ID NO: 159592 - DNA, 25 bp, probe
caatggagagctgaatgttgatgat

SEQ ID NO: 159593 - DNA, 25 bp, probe
caaggacctcacgatggtgctgaaa

SEQ ID NO: 159594 - DNA, 25 bp, probe
caatgtgtgccctcagagggcaata

SEQ ID NO: 159595 - DNA, 25 bp, probe
caatctgtgcctgcaagaacagcaa

SEQ ID NO: 159596 - DNA, 25 bp, probe
caatcttgcctcacagtgactgcag

SEQ ID NO: 159597 - DNA, 25 bp, probe
caatcattacgcactgcagtgctgg

SEQ ID NO: 159598 - DNA, 25 bp, probe
caatagagacgctccagtcttttgg

SEQ ID NO: 159599 - DNA, 25 bp, probe
caattaccgtggcacactttctggt

SEQ ID NO: 159600 - DNA, 25 bp, probe
caattaccgtggcacactttctggt

SEQ ID NO: 159601 - DNA, 25 bp, probe
caattaccgtggcacactttctggt

SEQ ID NO: 159602 - DNA, 25 bp, probe
caattacttgagcgagcacttcctg

SEQ ID NO: 159603 - DNA, 25 bp, probe
caatgtactgtatcaaactatttta

SEQ ID NO: 159604 - DNA, 25 bp, probe
caatttcttaacatgagctccagtt

SEQ ID NO: 159605 - DNA, 25 bp, probe
caatttaaacaaatggtccatgggg

SEQ ID NO: 159606 - DNA, 25 bp, probe
caatttacaatctgactgtctcttg

SEQ ID NO: 159607 - DNA, 25 bp, probe
caatgtttcgtatatctgttctcgg

SEQ ID NO: 159608 - DNA, 25 bp, probe
caatcctgccagaaattcatttcct

SEQ ID NO: 159609 - DNA, 25 bp, probe
caaccccaacaatcattgcttcacc

SEQ ID NO: 159610 - DNA, 25 bp, probe
caatatctgccctaactcaggcttc

SEQ ID NO: 159611 - DNA, 25 bp, probe
caatatctgccctaactcaggcttc

SEQ ID NO: 159612 - DNA, 25 bp, probe
caatatctgccctaactcaggcttc

SEQ ID NO: 159613 - DNA, 25 bp, probe
caatatctgccctaactcaggcttc

SEQ ID NO: 159614 - DNA, 25 bp, probe
caatatctgccctaactcaggcttc

SEQ ID NO: 159615 - DNA, 25 bp, probe
caatatctgccctaactcaggcttc

SEQ ID NO: 159616 - DNA, 25 bp, probe
caatgcttccctggacatagacctc

SEQ ID NO: 159617 - DNA, 25 bp, probe
caatgcttccctggacatagacctc

SEQ ID NO: 159618 - DNA, 25 bp, probe
caagttcctccacaagcacgacttg

SEQ ID NO: 159619 - DNA, 25 bp, probe
caatttgggcaacgagaccgatcct

SEQ ID NO: 159620 - DNA, 25 bp, probe
caattcggtaagtttctccacatct

SEQ ID NO: 159621 - DNA, 25 bp, probe
caaccagggaatcttcccctgtgga

SEQ ID NO: 159622 - DNA, 25 bp, probe
caaccaggagaacgccatcatccag

SEQ ID NO: 159623 - DNA, 25 bp, probe
caaggaggactacgtcgatctaggt

SEQ ID NO: 159624 - DNA, 25 bp, probe
caatggggccgacgaggcctagggc

SEQ ID NO: 159625 - DNA, 25 bp, probe
caatagcgagggtcgtgagctttgg

SEQ ID NO: 159626 - DNA, 25 bp, probe
caatagcgacgcgctggcgttacag

SEQ ID NO: 159627 - DNA, 25 bp, probe
caatgacgagaggccctggtgctac

SEQ ID NO: 159628 - DNA, 25 bp, probe
caaggccagaatgacgggaacacag

SEQ ID NO: 159629 - DNA, 25 bp, probe
caagcataagaaggaggcggaactg

SEQ ID NO: 159630 - DNA, 25 bp, probe
caataactggaccagggggagctgc

SEQ ID NO: 159631 - DNA, 25 bp, probe
caaaaggaattctcaggggctctgt

SEQ ID NO: 159632 - DNA, 25 bp, probe
caataagggtactatatgtgggtag

SEQ ID NO: 159633 - DNA, 25 bp, probe
caaaaaggtacatatgggttcacat

SEQ ID NO: 159634 - DNA, 25 bp, probe
caaacaaattaatgttgttctaaag

SEQ ID NO: 159635 - DNA, 25 bp, probe
caaaaactgtactgtgtttcgcatt

SEQ ID NO: 159636 - DNA, 25 bp, probe
caaggtggctgactttggtttggcc

SEQ ID NO: 159637 - DNA, 25 bp, probe
caatgactggcgtatcttggtcctg

SEQ ID NO: 159638 - DNA, 25 bp, probe
caatgcagagctggttcgggtcctt

SEQ ID NO: 159639 - DNA, 25 bp, probe
caatgcagagctggttcgggtcctt

SEQ ID NO: 159640 - DNA, 25 bp, probe
caatcaggctctcacagttgtttct

SEQ ID NO: 159641 - DNA, 25 bp, probe
caatcacaccatgccatgttttcct

SEQ ID NO: 159642 - DNA, 25 bp, probe
caatgagcaccagcatctctatgcc

SEQ ID NO: 159643 - DNA, 25 bp, probe
caatgagcaccagcatctctatgcc

SEQ ID NO: 159644 - DNA, 25 bp, probe
caacgaccgccagtatgactcgcgt

SEQ ID NO: 159645 - DNA, 25 bp, probe
caatcgcctccttggaggctctgga

SEQ ID NO: 159646 - DNA, 25 bp, probe
caattcaggacatggagactgtgga

SEQ ID NO: 159647 - DNA, 25 bp, probe
caatgtcactagtaagagaggtggt

SEQ ID NO: 159648 - DNA, 25 bp, probe
caatgtccttaagagggtgttcggg

SEQ ID NO: 159649 - DNA, 25 bp, probe
caatgcccgtaagatggcttatttg

SEQ ID NO: 159650 - DNA, 25 bp, probe
caatggccgtacacagacttcaagc

SEQ ID NO: 159651 - DNA, 25 bp, probe
caaggcctgggatcaacctgggctg

SEQ ID NO: 159652 - DNA, 25 bp, probe
caaggctgggattaattcacgtggt

SEQ ID NO: 159653 - DNA, 25 bp, probe
caaggctgaaggttaagagcgtgtg

SEQ ID NO: 159654 - DNA, 25 bp, probe
cacacagctgagttgttaaccagtc

SEQ ID NO: 159655 - DNA, 25 bp, probe
caatggctaagtgaagatgacaatc

SEQ ID NO: 159656 - DNA, 25 bp, probe
caacgattactcgaagatgactgca

SEQ ID NO: 159657 - DNA, 25 bp, probe
caatctgcttagcccgagtgacagc

SEQ ID NO: 159658 - DNA, 25 bp, probe
caattattgagggtgcggacgcgtc

SEQ ID NO: 159659 - DNA, 25 bp, probe
caaggggagcaagtggaaccggcga

SEQ ID NO: 159660 - DNA, 25 bp, probe
caaggggcagtgtggtaccccaagc

SEQ ID NO: 159661 - DNA, 25 bp, probe
cacagggctaggtgggagagcccaa

SEQ ID NO: 159662 - DNA, 25 bp, probe
caacgtctggtatgacccagccgaa

SEQ ID NO: 159663 - DNA, 25 bp, probe
caactgtagttgcaaacccaggcca

SEQ ID NO: 159664 - DNA, 25 bp, probe
caacttagttcccaaaatgagccta

SEQ ID NO: 159665 - DNA, 25 bp, probe
caactttgttttttctagagccagg

SEQ ID NO: 159666 - DNA, 25 bp, probe
caattttgtccttttcattagtatt

SEQ ID NO: 159667 - DNA, 25 bp, probe
caattttgtccttttcattagtatt

SEQ ID NO: 159668 - DNA, 25 bp, probe
aattgttcctgttttcatctagtca

SEQ ID NO: 159669 - DNA, 25 bp, probe
caattttcactgcattttgcatggg

SEQ ID NO: 159670 - DNA, 25 bp, probe
caatactttgtaatttatgatagtg

SEQ ID NO: 159671 - DNA, 25 bp, probe
caatggcctttaccattatgctgta

SEQ ID NO: 159672 - DNA, 25 bp, probe
caagttttacaggttgagcttcaag

SEQ ID NO: 159673 - DNA, 25 bp, probe
caaggcactttaagggatcttcaag

SEQ ID NO: 159674 - DNA, 25 bp, probe
caaggcactttaagggatcttcaag

SEQ ID NO: 159675 - DNA, 25 bp, probe
caagaactttcaagccaacaaatga

SEQ ID NO: 159676 - DNA, 25 bp, probe
caagaactttcaagccaacaaatga

SEQ ID NO: 159677 - DNA, 25 bp, probe
caagacctagttacccagacagtga

SEQ ID NO: 159678 - DNA, 25 bp, probe
caatacctactgctccaagtcagat

SEQ ID NO: 159679 - DNA, 25 bp, probe
caataacacaaaggccaatgtcaca

SEQ ID NO: 159680 - DNA, 25 bp, probe
caattccaccgaggccctggataat

SEQ ID NO: 159681 - DNA, 25 bp, probe
caatctagaacgctacacaagaaat

SEQ ID NO: 159682 - DNA, 25 bp, probe
aattgcaccactgctaaccaaaact

SEQ ID NO: 159683 - DNA, 25 bp, probe
aattgcaccactgctaaccaaaact

SEQ ID NO: 159684 - DNA, 25 bp, probe
caatcgccgcatacagctaacaaaa

SEQ ID NO: 159685 - DNA, 25 bp, probe
caatcgccgcatacagctaacaaaa

SEQ ID NO: 159686 - DNA, 25 bp, probe
caataacatcacaagctaaaagcca

SEQ ID NO: 159687 - DNA, 25 bp, probe
caatgtacatgccaacataaatatg

SEQ ID NO: 159688 - DNA, 25 bp, probe
caagtactgcagaatttatcactga

SEQ ID NO: 159689 - DNA, 25 bp, probe
caatgtaacaggtcttattggaatt

SEQ ID NO: 159690 - DNA, 25 bp, probe
caatggaaaggctgttatatggaat

SEQ ID NO: 159691 - DNA, 25 bp, probe
caaggagataggagctcatatctga

SEQ ID NO: 159692 - DNA, 25 bp, probe
caaggagttcatctctaagcttctg

SEQ ID NO: 159693 - DNA, 25 bp, probe
caacctgcctctatgctacaagatt

SEQ ID NO: 159694 - DNA, 25 bp, probe
caatcacttgtcattttgcataatt

SEQ ID NO: 159695 - DNA, 25 bp, probe
caatttctgtttgttcatcacattt

SEQ ID NO: 159696 - DNA, 25 bp, probe
caattaattgattcctcgcgacatc

SEQ ID NO: 159697 - DNA, 25 bp, probe
caatgaacattgtccctcggacaaa

SEQ ID NO: 159698 - DNA, 25 bp, probe
caatgaacattgtccctcggacaaa

SEQ ID NO: 159699 - DNA, 25 bp, probe
caagactctctccccagggaagaat

SEQ ID NO: 159700 - DNA, 25 bp, probe
caatgactgttcttgcgggggataa

SEQ ID NO: 159701 - DNA, 25 bp, probe
caatggtgtcacctgctggggtatt

SEQ ID NO: 159702 - DNA, 25 bp, probe
caatgcggccatcagcttgggctat

SEQ ID NO: 159703 - DNA, 25 bp, probe
caatcgctctctagacatgtggtct

SEQ ID NO: 159704 - DNA, 25 bp, probe
caatctatgcttcagctgtctttgg

SEQ ID NO: 159705 - DNA, 25 bp, probe
caattcatgcttcttgtggtctgga

SEQ ID NO: 159706 - DNA, 25 bp, probe
caagtgctttccagggattgggttc

SEQ ID NO: 159707 - DNA, 25 bp, probe
caagcttttccagaccagctggggt

SEQ ID NO: 159708 - DNA, 25 bp, probe
caaattttaatttctcctggcgtgg

SEQ ID NO: 159709 - DNA, 25 bp, probe
caatctttataatagtcctgtgagg

SEQ ID NO: 159710 - DNA, 25 bp, probe
caactttatcagccagactgccggg

SEQ ID NO: 159711 - DNA, 25 bp, probe
caactttatcagccagactgccggg

SEQ ID NO: 159712 - DNA, 25 bp, probe
caatcgtttcatcattcggcgtgcg

SEQ ID NO: 159713 - DNA, 25 bp, probe
aattgtgcttgtctttgtgggctgt

SEQ ID NO: 159714 - DNA, 25 bp, probe
aattgtctgtgtatttggaactgca

SEQ ID NO: 159715 - DNA, 25 bp, probe
aattgtcctgatgatctgtggaatt

SEQ ID NO: 159716 - DNA, 25 bp, probe
caatgtggccgaggactttgattgc

SEQ ID NO: 159717 - DNA, 25 bp, probe
caatgagccttactgtatttagtgt

SEQ ID NO: 159718 - DNA, 25 bp, probe
caactccatgtatttattcaagtgc

SEQ ID NO: 159719 - DNA, 25 bp, probe
caactccatgtatttattcaagtgc

SEQ ID NO: 159720 - DNA, 25 bp, probe
caatcttctggctctcattcgagat

SEQ ID NO: 159721 - DNA, 25 bp, probe
caatctttcagcagcaacctgagaa

SEQ ID NO: 159722 - DNA, 25 bp, probe
caatctttcagcagcaacctgagaa

SEQ ID NO: 159723 - DNA, 25 bp, probe
caatatcaccagagcaagccataga

SEQ ID NO: 159724 - DNA, 25 bp, probe
caataactcagaaccatccagaatg

SEQ ID NO: 159725 - DNA, 25 bp, probe
caataaagtcatacgctccaactga

SEQ ID NO: 159726 - DNA, 25 bp, probe
caataaactgtgaatcccaatggta

SEQ ID NO: 159727 - DNA, 25 bp, probe
aattggctctggggcccaagggatt

SEQ ID NO: 159728 - DNA, 25 bp, probe
caattggctctggggcccaagggat

SEQ ID NO: 159729 - DNA, 25 bp, probe
ctgaatgacttcgggggccaggtac

SEQ ID NO: 159730 - DNA, 25 bp, probe
ctgaatgacttcgggggccaggtac

SEQ ID NO: 159731 - DNA, 25 bp, probe
caaggcacttgagggggaaggattc

SEQ ID NO: 159732 - DNA, 25 bp, probe
caaccactgcgaccacaagaaggat

SEQ ID NO: 159733 - DNA, 25 bp, probe
caatacgctggagtccacgtgaggc

SEQ ID NO: 159734 - DNA, 25 bp, probe
caatatcgttcagtacctgggctct

SEQ ID NO: 159735 - DNA, 25 bp, probe
caatatcgttcagtacctgggctct

SEQ ID NO: 159736 - DNA, 25 bp, probe
caattggtagccgctgcggagcctg

SEQ ID NO: 159737 - DNA, 25 bp, probe
aattgtgtactcccttgtacttgtc

SEQ ID NO: 159738 - DNA, 25 bp, probe
aattgttcatcctaattgttcctgt

SEQ ID NO: 159739 - DNA, 25 bp, probe
caatttctacacgagatcctctctc

SEQ ID NO: 159740 - DNA, 25 bp, probe
caattcggtcaattgtcactgtcat

SEQ ID NO: 159741 - DNA, 25 bp, probe
caatatgcctgttatctgtggcgtt

SEQ ID NO: 159742 - DNA, 25 bp, probe
caatattggatctctgtgtgtgtct

SEQ ID NO: 159743 - DNA, 25 bp, probe
caatgattaaccaggatgagtttag

SEQ ID NO: 159744 - DNA, 25 bp, probe
caatatataacccgcctgcagtgga

SEQ ID NO: 159745 - DNA, 25 bp, probe
caatatataacccgcctgcagtgga

SEQ ID NO: 159746 - DNA, 25 bp, probe
aattgttgcctcggcagctggtgcg

SEQ ID NO: 159747 - DNA, 25 bp, probe
cagaagttgcccccaggtggtgggg

SEQ ID NO: 159748 - DNA, 25 bp, probe
caatggtagctctgaagggagggga

SEQ ID NO: 159749 - DNA, 25 bp, probe
caatggtagtcagcacgtggcgcga

SEQ ID NO: 159750 - DNA, 25 bp, probe
caatgggaggctccacgctgtttgt

SEQ ID NO: 159751 - DNA, 25 bp, probe
caatgtggtggcccacgggtttgcc

SEQ ID NO: 159752 - DNA, 25 bp, probe
caatgcgcgttgactacgagcagat

SEQ ID NO: 159753 - DNA, 25 bp, probe
caatgtttcgatagacagcataatc

SEQ ID NO: 159754 - DNA, 25 bp, probe
caattcatcttcaaagcacaactct

SEQ ID NO: 159755 - DNA, 25 bp, probe
caattgcactgtgtagccgtctgct

SEQ ID NO: 159756 - DNA, 25 bp, probe
caattacatgagcgagcacttgctg

SEQ ID NO: 159757 - DNA, 25 bp, probe
caagatactttgcagccttttttcc

SEQ ID NO: 159758 - DNA, 25 bp, probe
caagtgcaattgacttccctttttt

SEQ ID NO: 159759 - DNA, 25 bp, probe
caagtgcaattgacttccctttttt

SEQ ID NO: 159760 - DNA, 25 bp, probe
caatccaataatctacactgtgttt

SEQ ID NO: 159761 - DNA, 25 bp, probe
caaaatgtgaccataactgtttagg

SEQ ID NO: 159762 - DNA, 25 bp, probe
ctagagttgcccataactacctaag

SEQ ID NO: 159763 - DNA, 25 bp, probe
cacaggttggccagaaaaccctggt

SEQ ID NO: 159764 - DNA, 25 bp, probe
caaggtgctgggaacaccaacccgg

SEQ ID NO: 159765 - DNA, 25 bp, probe
caaggttgtgacctccacagacgtg

SEQ ID NO: 159766 - DNA, 25 bp, probe
aattgtatataccctcatcaccaag

SEQ ID NO: 159767 - DNA, 25 bp, probe
caattgtatataccctcatcaccaa

SEQ ID NO: 159768 - DNA, 25 bp, probe
caattgttatgatctactcatttgc

SEQ ID NO: 159769 - DNA, 25 bp, probe
caatgatgtgtgcaagtacgacttc

SEQ ID NO: 159770 - DNA, 25 bp, probe
caagtatgttgccagctacgtcctg

SEQ ID NO: 159771 - DNA, 25 bp, probe
caaggccgaggagtacttcctgctc

SEQ ID NO: 159772 - DNA, 25 bp, probe
caaggccgaggagtacttcctgctc

SEQ ID NO: 159773 - DNA, 25 bp, probe
caaggcaaggagggcgcttcactga

SEQ ID NO: 159774 - DNA, 25 bp, probe
caaggctgtggaggatggcttccgg

SEQ ID NO: 159775 - DNA, 25 bp, probe
caaccgcaggtcgaattgttcgtga

SEQ ID NO: 159776 - DNA, 25 bp, probe
caaggcgggacgtgtgttcctgaag

SEQ ID NO: 159777 - DNA, 25 bp, probe
caagtcgggaactccataccgaact

SEQ ID NO: 159778 - DNA, 25 bp, probe
caaggtgggagagccctacggtatc

SEQ ID NO: 159779 - DNA, 25 bp, probe
caaggtgggagagccctacggtatc

SEQ ID NO: 159780 - DNA, 25 bp, probe
caatagggccccgccataggaagac

SEQ ID NO: 159781 - DNA, 25 bp, probe
tcaaaggtccccactactggataac

SEQ ID NO: 159782 - DNA, 25 bp, probe
caaagttccccatcaagtggacggc

SEQ ID NO: 159783 - DNA, 25 bp, probe
cacgggaagccctcaaggtgaaagc

SEQ ID NO: 159784 - DNA, 25 bp, probe
caaggtgaaccctactcagtgtgaa

SEQ ID NO: 159785 - DNA, 25 bp, probe
caaggtgaagcttatcccactgggt

SEQ ID NO: 159786 - DNA, 25 bp, probe
caaggatgagacagaacacacgggt

SEQ ID NO: 159787 - DNA, 25 bp, probe
caaggacctgaagacacacgggttc

SEQ ID NO: 159788 - DNA, 25 bp, probe
caacgccctacagcaagacggaaac

SEQ ID NO: 159789 - DNA, 25 bp, probe
caaggacgcttcacaggacaggaaa

SEQ ID NO: 159790 - DNA, 25 bp, probe
caatggagacttttcagcaaatgga

SEQ ID NO: 159791 - DNA, 25 bp, probe
caattcctcccagtgacaatatgga

SEQ ID NO: 159792 - DNA, 25 bp, probe
caagttgcctcatctacaatttgag

SEQ ID NO: 159793 - DNA, 25 bp, probe
aattgtggatcttctagaatcttac

SEQ ID NO: 159794 - DNA, 25 bp, probe
aattgtggacagaatgggatttgca

SEQ ID NO: 159795 - DNA, 25 bp, probe
caaggtgaagcgatgtggagttagt

SEQ ID NO: 159796 - DNA, 25 bp, probe
caacacttacttttggtttcaatgg

SEQ ID NO: 159797 - DNA, 25 bp, probe
catgaaccagatctacggtttcgag

SEQ ID NO: 159798 - DNA, 25 bp, probe
caatccctgctgcctaaggttttgg

SEQ ID NO: 159799 - DNA, 25 bp, probe
caatcttttcctttgatcttgtggc

SEQ ID NO: 159800 - DNA, 25 bp, probe
caatctttatctctgtgcattcttc

SEQ ID NO: 159801 - DNA, 25 bp, probe
caatctttatctctgtgcattcttc

SEQ ID NO: 159802 - DNA, 25 bp, probe
caatcttatgaggcctggagtattc

SEQ ID NO: 159803 - DNA, 25 bp, probe
caatctcctgaggcttgtggatttc

SEQ ID NO: 159804 - DNA, 25 bp, probe
caatctctgagaagcctgcatggca

SEQ ID NO: 159805 - DNA, 25 bp, probe
caatctctgagaagcctgcatggca

SEQ ID NO: 159806 - DNA, 25 bp, probe
caatctgtgagaacttttgaatttt

SEQ ID NO: 159807 - DNA, 25 bp, probe
caatctggataattccatttctttt

SEQ ID NO: 159808 - DNA, 25 bp, probe
caatgggataactgctatcctttac

SEQ ID NO: 159809 - DNA, 25 bp, probe
caattggccaacttctttgccttca

SEQ ID NO: 159810 - DNA, 25 bp, probe
caattggccaacttctttgccttca

SEQ ID NO: 159811 - DNA, 25 bp, probe
caatctggacaaaagtgttcacatc

SEQ ID NO: 159812 - DNA, 25 bp, probe
caatgcttacattagtttctcacta

SEQ ID NO: 159813 - DNA, 25 bp, probe
caatgttgcaaatatcaggctccca

SEQ ID NO: 159814 - DNA, 25 bp, probe
caaggtgatagaagtcgggccctga

SEQ ID NO: 159815 - DNA, 25 bp, probe
caaggtgcatacattcagagggcca

SEQ ID NO: 159816 - DNA, 25 bp, probe
caagttatactcttatttggaaggc

SEQ ID NO: 159817 - DNA, 25 bp, probe
caaggtatacctcagttccacggtt

SEQ ID NO: 159818 - DNA, 25 bp, probe
caaggttgacaaaatttcccgcatc

SEQ ID NO: 159819 - DNA, 25 bp, probe
caagagttaaatcttttcttcctgt

SEQ ID NO: 159820 - DNA, 25 bp, probe
caaggattaattcttcctctaccag

SEQ ID NO: 159821 - DNA, 25 bp, probe
ctagggaaagtggcttcctgcccaa

SEQ ID NO: 159822 - DNA, 25 bp, probe
caaggtgaaaatcatgccctgcccc

SEQ ID NO: 159823 - DNA, 25 bp, probe
caaggtgaagaactggaaccccagc

SEQ ID NO: 159824 - DNA, 25 bp, probe
gcagattggacgggggaactttggc

SEQ ID NO: 159825 - DNA, 25 bp, probe
caagtggacggggtgactcctttgc

SEQ ID NO: 159826 - DNA, 25 bp, probe
cacttgttcggatttgactgcctgt

SEQ ID NO: 159827 - DNA, 25 bp, probe
caatgtttgcggattacacgttgaa

SEQ ID NO: 159828 - DNA, 25 bp, probe
caatgtatttgctttaaaccgtgaa

SEQ ID NO: 159829 - DNA, 25 bp, probe
caatcatttttcttaaggcctggaa

SEQ ID NO: 159830 - DNA, 25 bp, probe
caatgctgttttttggggagtggtt

SEQ ID NO: 159831 - DNA, 25 bp, probe
caaggctggcttctgggaggagttt

SEQ ID NO: 159832 - DNA, 25 bp, probe
caatgtgaagcttttgtttgggttt

SEQ ID NO: 159833 - DNA, 25 bp, probe
caagtgaagaactctgtcgaaggat

SEQ ID NO: 159834 - DNA, 25 bp, probe
caagaacaaagccactgactgagat

SEQ ID NO: 159835 - DNA, 25 bp, probe
caagaacaaagccactgactgagat

SEQ ID NO: 159836 - DNA, 25 bp, probe
caatgtatccaacagacactcaata

SEQ ID NO: 159837 - DNA, 25 bp, probe
caattacaacagcagaccctctatc

SEQ ID NO: 159838 - DNA, 25 bp, probe
caagggcagacaaggcccgttacga

SEQ ID NO: 159839 - DNA, 25 bp, probe
caaggaggatgaaacgccggaacaa

SEQ ID NO: 159840 - DNA, 25 bp, probe
caaggcgagtgaggacggggagagc

SEQ ID NO: 159841 - DNA, 25 bp, probe
caaggctagcgcagacggtcatgac

SEQ ID NO: 159842 - DNA, 25 bp, probe
caatgtatgatctattacggtcaga

SEQ ID NO: 159843 - DNA, 25 bp, probe
caatagacttcattgactgtgtcag

SEQ ID NO: 159844 - DNA, 25 bp, probe
caaggactctcatgcacttatcgag

SEQ ID NO: 159845 - DNA, 25 bp, probe
caataggctctcaacaaatgtgtgg

SEQ ID NO: 159846 - DNA, 25 bp, probe
caatagctgctgctttcatattttg

SEQ ID NO: 159847 - DNA, 25 bp, probe
caatttatggtcttctgttttgaag

SEQ ID NO: 159848 - DNA, 25 bp, probe
caattccaggtgttggtacatatga

SEQ ID NO: 159849 - DNA, 25 bp, probe
caatctgaagtttatggctacccaa

SEQ ID NO: 159850 - DNA, 25 bp, probe
caatctgaagtttatggctacccaa

SEQ ID NO: 159851 - DNA, 25 bp, probe
caactgcaactttgcaagctcccaa

SEQ ID NO: 159852 - DNA, 25 bp, probe
caagtctgacgatgacacctccaat

SEQ ID NO: 159853 - DNA, 25 bp, probe
caatgaaacagatgacaccaaaatg

SEQ ID NO: 159854 - DNA, 25 bp, probe
caaccaaagggatccacaaagcatt

SEQ ID NO: 159855 - DNA, 25 bp, probe
caaccagaggcccaacgactaagcc

SEQ ID NO: 159856 - DNA, 25 bp, probe
caacacgacccatatcaagctacag

SEQ ID NO: 159857 - DNA, 25 bp, probe
caacacgacccatatcaagctacag

SEQ ID NO: 159858 - DNA, 25 bp, probe
caacctgacccgggaagtcaggcca

SEQ ID NO: 159859 - DNA, 25 bp, probe
caacctgacccgggaagtcaggcca

SEQ ID NO: 159860 - DNA, 25 bp, probe
caacgctaccacgaagacattttcg

SEQ ID NO: 159861 - DNA, 25 bp, probe
caaggctgacccgggtcattggtgg

SEQ ID NO: 159862 - DNA, 25 bp, probe
caattcatacaccgggacttggctg

SEQ ID NO: 159863 - DNA, 25 bp, probe
caataccacttgtggacctggctgt

SEQ ID NO: 159864 - DNA, 25 bp, probe
caaagacagtggtggtccggtggag

SEQ ID NO: 159865 - DNA, 25 bp, probe
caaggacgggcagattggggaggga

SEQ ID NO: 159866 - DNA, 25 bp, probe
caatggggcggagcctgagctaggg

SEQ ID NO: 159867 - DNA, 25 bp, probe
caatggggcggagcctgagctaggg

SEQ ID NO: 159868 - DNA, 25 bp, probe
caatgggaggggatgctactgatgg

SEQ ID NO: 159869 - DNA, 25 bp, probe
caagaagggggaatgctgtcgggac

SEQ ID NO: 159870 - DNA, 25 bp, probe
caaccacggtggagcggcggaggaa

SEQ ID NO: 159871 - DNA, 25 bp, probe
caatcgggaaggagcacaaggggaa

SEQ ID NO: 159872 - DNA, 25 bp, probe
caactgggatgacgacagcctaggg

SEQ ID NO: 159873 - DNA, 25 bp, probe
caagcggagacgcaaggcctgtcag

SEQ ID NO: 159874 - DNA, 25 bp, probe
caagcagtggacctgacattgccca

SEQ ID NO: 159875 - DNA, 25 bp, probe
caatgagctgcgtgtggctcccgag

SEQ ID NO: 159876 - DNA, 25 bp, probe
caatgcctgagagggcggtcctggg

SEQ ID NO: 159877 - DNA, 25 bp, probe
caatcgcgagtgcgcaggaccagtg

SEQ ID NO: 159878 - DNA, 25 bp, probe
caaggtcatgttggcagaactcaag

SEQ ID NO: 159879 - DNA, 25 bp, probe
caaggtgctggcacttattgcaatt

SEQ ID NO: 159880 - DNA, 25 bp, probe
caagggcaggtagctgatgctaagt

SEQ ID NO: 159881 - DNA, 25 bp, probe
caagtaagtgtcttatctgtacaga

SEQ ID NO: 159882 - DNA, 25 bp, probe
caagtaagtgtcttatctgtacaga

SEQ ID NO: 159883 - DNA, 25 bp, probe
caatgtactgtaataatcgcaaagg

SEQ ID NO: 159884 - DNA, 25 bp, probe
caatggactgagtctgattcagaaa

SEQ ID NO: 159885 - DNA, 25 bp, probe
caatctccatggcctctaagataac

SEQ ID NO: 159886 - DNA, 25 bp, probe
caatctatcatgagtattattaact

SEQ ID NO: 159887 - DNA, 25 bp, probe
caatctcaaatcctaagtgtataat

SEQ ID NO: 159888 - DNA, 25 bp, probe
caatccccatcaggtagctgtctaa

SEQ ID NO: 159889 - DNA, 25 bp, probe
caatggcctcacgttggtgtctaga

SEQ ID NO: 159890 - DNA, 25 bp, probe
caagtctccaggtgggtctcgtaag

SEQ ID NO: 159891 - DNA, 25 bp, probe
caagttctcgggagcggttctcaac

SEQ ID NO: 159892 - DNA, 25 bp, probe
caagttctcgggagcggttctcaac

SEQ ID NO: 159893 - DNA, 25 bp, probe
caagctcttcgatgcttcggattcc

SEQ ID NO: 159894 - DNA, 25 bp, probe
caagctctgtgactttggggtcagc

SEQ ID NO: 159895 - DNA, 25 bp, probe
caagatttgcagaacttgtggaaaa

SEQ ID NO: 159896 - DNA, 25 bp, probe
caagacgtggtgatttggaaatact

SEQ ID NO: 159897 - DNA, 25 bp, probe
caagtcagggatgtgtctggtttcc

SEQ ID NO: 159898 - DNA, 25 bp, probe
caatgtcaccgtggtgaccttcttc

SEQ ID NO: 159899 - DNA, 25 bp, probe
caatgacctctggggaccaagttca

SEQ ID NO: 159900 - DNA, 25 bp, probe
caatgccagtcgggcagcccaggat

SEQ ID NO: 159901 - DNA, 25 bp, probe
caatctagtcctggaacaattgcac

SEQ ID NO: 159902 - DNA, 25 bp, probe
caatctccaccatgaaagtgatgca

SEQ ID NO: 159903 - DNA, 25 bp, probe
caatacccacagtgctgaggagcaa

SEQ ID NO: 159904 - DNA, 25 bp, probe
caatccatcccagatgtgggccagc

SEQ ID NO: 159905 - DNA, 25 bp, probe
caatctcttcattgaatggatggca

SEQ ID NO: 159906 - DNA, 25 bp, probe
caatcatgttgcagcaattcactgt

SEQ ID NO: 159907 - DNA, 25 bp, probe
caatgctcgctggagaattgccatg

SEQ ID NO: 159908 - DNA, 25 bp, probe
caatgctggcgggagaagccttatg

SEQ ID NO: 159909 - DNA, 25 bp, probe
caagtggcagactcaaccttcactg

SEQ ID NO: 159910 - DNA, 25 bp, probe
caagagaaattccaaccgtcctgac

SEQ ID NO: 159911 - DNA, 25 bp, probe
caagagaaattccaaccgtcctgac

SEQ ID NO: 159912 - DNA, 25 bp, probe
caagagaaattctatggcctaccat

SEQ ID NO: 159913 - DNA, 25 bp, probe
cacagaataatttcgccctgggtta

SEQ ID NO: 159914 - DNA, 25 bp, probe
caataacattcttcgatctctggga

SEQ ID NO: 159915 - DNA, 25 bp, probe
caatggcagattatcgacatctttg

SEQ ID NO: 159916 - DNA, 25 bp, probe
caatgactattccctgacagttatt

SEQ ID NO: 159917 - DNA, 25 bp, probe
caagagcattacccagcttggcttt

SEQ ID NO: 159918 - DNA, 25 bp, probe
caaagagaactgcacgggcgtccag

SEQ ID NO: 159919 - DNA, 25 bp, probe
caagaacagttgcaactggcagccc

SEQ ID NO: 159920 - DNA, 25 bp, probe
caatgacgagttcggacgggattcg

SEQ ID NO: 159921 - DNA, 25 bp, probe
caagactgtctctgaacggggtccg

SEQ ID NO: 159922 - DNA, 25 bp, probe
caagactgtctctgaacggggtccg

SEQ ID NO: 159923 - DNA, 25 bp, probe
caatacgacagccgaactctgggcc

SEQ ID NO: 159924 - DNA, 25 bp, probe
caatactcagcccaagaatttgtca

SEQ ID NO: 159925 - DNA, 25 bp, probe
caataatcatctcattgactttgtc

SEQ ID NO: 159926 - DNA, 25 bp, probe
caatgagacctgctgtgacttcttc

SEQ ID NO: 159927 - DNA, 25 bp, probe
caatggccctggatcgctatgtggc

SEQ ID NO: 159928 - DNA, 25 bp, probe
caaggaccaggcatggaaatggcct

SEQ ID NO: 159929 - DNA, 25 bp, probe
caagtacggccttgggtatcagctc

SEQ ID NO: 159930 - DNA, 25 bp, probe
caatctggtcgcctgggaaacaagc

SEQ ID NO: 159931 - DNA, 25 bp, probe
caacgccaccctgtgcagaaatgag

SEQ ID NO: 159932 - DNA, 25 bp, probe
caaggccaaccgcgagaagatgacc

SEQ ID NO: 159933 - DNA, 25 bp, probe
caaggaagaccctaagaaagagccg

SEQ ID NO: 159934 - DNA, 25 bp, probe
caaggagagcaccttccggaagacc

SEQ ID NO: 159935 - DNA, 25 bp, probe
caaggagtcccttgcgggaagactg

SEQ ID NO: 159936 - DNA, 25 bp, probe
caagaggcttccactggggagaagt

SEQ ID NO: 159937 - DNA, 25 bp, probe
caaaagcctccctgggagcaccagt

SEQ ID NO: 159938 - DNA, 25 bp, probe
caaaatcctttgtgagtaaccatac

SEQ ID NO: 159939 - DNA, 25 bp, probe
caaaggccctggtggtttccacatt

SEQ ID NO: 159940 - DNA, 25 bp, probe
caaaggccctggtggtttccacatt

SEQ ID NO: 159941 - DNA, 25 bp, probe
caaggtgcccggagagtcttacaag

SEQ ID NO: 159942 - DNA, 25 bp, probe
caagtagcccagggcatggccttcc

SEQ ID NO: 159943 - DNA, 25 bp, probe
caagttgcacaggcagtgcagcagc

SEQ ID NO: 159944 - DNA, 25 bp, probe
caagcttcacaaggggacggccctg

SEQ ID NO: 159945 - DNA, 25 bp, probe
caagaacgcaagggggcaagtccca

SEQ ID NO: 159946 - DNA, 25 bp, probe
caagaacgcaagggggcaagtccca

SEQ ID NO: 159947 - DNA, 25 bp, probe
caataaacaagatcgtcaggaccaa

SEQ ID NO: 159948 - DNA, 25 bp, probe
caatgaaactaaaccctgtgattct

SEQ ID NO: 159949 - DNA, 25 bp, probe
caatgacattcttttcttttctcct

SEQ ID NO: 159950 - DNA, 25 bp, probe
cacagagcagggcttttcttaccat

SEQ ID NO: 159951 - DNA, 25 bp, probe
caagagcaagcgccgcttctttttc

SEQ ID NO: 159952 - DNA, 25 bp, probe
caagcatgaaagctggatcttttgg

SEQ ID NO: 159953 - DNA, 25 bp, probe
caagatgcaatacctgcaggtcccg

SEQ ID NO: 159954 - DNA, 25 bp, probe
caagatgcaatacctgcaggtcccg

SEQ ID NO: 159955 - DNA, 25 bp, probe
caatgagaatcagatcgagtccaag

SEQ ID NO: 159956 - DNA, 25 bp, probe
caatcgactgcatcacgcagggacg

SEQ ID NO: 159957 - DNA, 25 bp, probe
caatctgactcaactgccaggtgaa

SEQ ID NO: 159958 - DNA, 25 bp, probe
caatcatagctcactgcagcctgga

SEQ ID NO: 159959 - DNA, 25 bp, probe
caatgatatctcacgacagcttccc

SEQ ID NO: 159960 - DNA, 25 bp, probe
caatgacattgcgctgctgcagctg

SEQ ID NO: 159961 - DNA, 25 bp, probe
caagaaatccaccagccatgacctg

SEQ ID NO: 159962 - DNA, 25 bp, probe
caagatgattcgcaagcctgatact

SEQ ID NO: 159963 - DNA, 25 bp, probe
caagtattgagggacctggagcgga

SEQ ID NO: 159964 - DNA, 25 bp, probe
caagtattgagggacctggagcgga

SEQ ID NO: 159965 - DNA, 25 bp, probe
caacaagctgggttccggggatgac

SEQ ID NO: 159966 - DNA, 25 bp, probe
caacgtgatgctggattccgagggg

SEQ ID NO: 159967 - DNA, 25 bp, probe
catgtttgaccgctccgaggtctat

SEQ ID NO: 159968 - DNA, 25 bp, probe
ctactgtaggcctcctaagtctaat

SEQ ID NO: 159969 - DNA, 25 bp, probe
cagaattccgcctcttaagggacac

SEQ ID NO: 159970 - DNA, 25 bp, probe
caagttccaaccattaaggtccaca

SEQ ID NO: 159971 - DNA, 25 bp, probe
caagttcaaccactgttaagacctc

SEQ ID NO: 159972 - DNA, 25 bp, probe
caagtacaatcaggggttgtacctc

SEQ ID NO: 159973 - DNA, 25 bp, probe
caagtacaatcagggtgtggtagaa

SEQ ID NO: 159974 - DNA, 25 bp, probe
caatgattagatcgggtctcggaag

SEQ ID NO: 159975 - DNA, 25 bp, probe
caagattgagcggagtgcctcggaa

SEQ ID NO: 159976 - DNA, 25 bp, probe
caatgttgactggtgggctcttgga

SEQ ID NO: 159977 - DNA, 25 bp, probe
caagcttaggctggggattctggat

SEQ ID NO: 159978 - DNA, 25 bp, probe
gaagttagtatacaatattggggac

SEQ ID NO: 159979 - DNA, 25 bp, probe
cagagtggtttacaaatccgacgac

SEQ ID NO: 159980 - DNA, 25 bp, probe
caagtccctctttaagaccaggctg

SEQ ID NO: 159981 - DNA, 25 bp, probe
cacagggaccttgtagactacctgg

SEQ ID NO: 159982 - DNA, 25 bp, probe
caaggggagccttgtggactacctg

SEQ ID NO: 159983 - DNA, 25 bp, probe
caaggggagccttgtggactacctg

SEQ ID NO: 159984 - DNA, 25 bp, probe
caaggggagccttgtggactacctg

SEQ ID NO: 159985 - DNA, 25 bp, probe
caatgagggcaggggaagaccacct

SEQ ID NO: 159986 - DNA, 25 bp, probe
caatgaagtgcaggagttcaacctc

SEQ ID NO: 159987 - DNA, 25 bp, probe
caaggaggcaaattgtctccccaag

SEQ ID NO: 159988 - DNA, 25 bp, probe
caaggaaggtatttcagctcccaag

SEQ ID NO: 159989 - DNA, 25 bp, probe
caagtattttaattgcaccttaatg

SEQ ID NO: 159990 - DNA, 25 bp, probe
caagtggtattgaaagccgcactga

SEQ ID NO: 159991 - DNA, 25 bp, probe
caagggattgtttggcgccatcatt

SEQ ID NO: 159992 - DNA, 25 bp, probe
caaggagttgttaaagtatctgatt

SEQ ID NO: 159993 - DNA, 25 bp, probe
caaggttcagttcacagagattgag

SEQ ID NO: 159994 - DNA, 25 bp, probe
caaggatctccagtccacaagttga

SEQ ID NO: 159995 - DNA, 25 bp, probe
caatggattctcgacttcaaaggat

SEQ ID NO: 159996 - DNA, 25 bp, probe
caatccgtgcactgcttcaaagaga

SEQ ID NO: 159997 - DNA, 25 bp, probe
caatgcgggcacacgctcttacagt

SEQ ID NO: 159998 - DNA, 25 bp, probe
caatgcgggcacacgctcttacagt

SEQ ID NO: 159999 - DNA, 25 bp, probe
caatgctgaaccccatgatttacag

SEQ ID NO: 160000 - DNA, 25 bp, probe
caatgtacataccttgttatatgca

SEQ ID NO: 160001 - DNA, 25 bp, probe
caatctcagccagcctgtggtgtga

SEQ ID NO: 160002 - DNA, 25 bp, probe
caatccgcctgatctgcatggtggc

SEQ ID NO: 160003 - DNA, 25 bp, probe
caatcatccctgtccatcaggtcat

SEQ ID NO: 160004 - DNA, 25 bp, probe
caagtccatcgacatctggtctgtg

SEQ ID NO: 160005 - DNA, 25 bp, probe
caagtccatgcaatcgattccttgc

SEQ ID NO: 160006 - DNA, 25 bp, probe
caaggtcatgcttgcgattcttctg

SEQ ID NO: 160007 - DNA, 25 bp, probe
caatggtatgctggagagttactct

SEQ ID NO: 160008 - DNA, 25 bp, probe
caatggtcagtggatgactctgcaa

SEQ ID NO: 160009 - DNA, 25 bp, probe
caatgttcacatctgcactcaaggt

SEQ ID NO: 160010 - DNA, 25 bp, probe
caatgtgccatcaagtcactaagtc

SEQ ID NO: 160011 - DNA, 25 bp, probe
caagaggatcaatcacattagctcc

SEQ ID NO: 160012 - DNA, 25 bp, probe
caagggatccatttctggaccactc

SEQ ID NO: 160013 - DNA, 25 bp, probe
ctacggtcagggtctggaggacttg

SEQ ID NO: 160014 - DNA, 25 bp, probe
caaggagtcacttcttggggtcttg

SEQ ID NO: 160015 - DNA, 25 bp, probe
caagaagatcagcagctcgggggca

SEQ ID NO: 160016 - DNA, 25 bp, probe
caatgacaatataatgcttcgaagc

SEQ ID NO: 160017 - DNA, 25 bp, probe
caatgacaatataatgcttcgaagc

SEQ ID NO: 160018 - DNA, 25 bp, probe
caatgcacaactattgcccacagca

SEQ ID NO: 160019 - DNA, 25 bp, probe
caatgatcaacagttcactccagga

SEQ ID NO: 160020 - DNA, 25 bp, probe
caatgatacaacttctcttcatgta

SEQ ID NO: 160021 - DNA, 25 bp, probe
caatgtgatagaggtggctacagac

SEQ ID NO: 160022 - DNA, 25 bp, probe
caaggcgatgcaggtccatcctgac

SEQ ID NO: 160023 - DNA, 25 bp, probe
caaggatatgatgtccgctctgatg

SEQ ID NO: 160024 - DNA, 25 bp, probe
caaggcatatgtgtaaatttcactt

SEQ ID NO: 160025 - DNA, 25 bp, probe
caaggatgctgtgtagataagtaag

SEQ ID NO: 160026 - DNA, 25 bp, probe
caaggtgagtacaagagataatttc

SEQ ID NO: 160027 - DNA, 25 bp, probe
caaggtataattgatggattcttcc

SEQ ID NO: 160028 - DNA, 25 bp, probe
caaggtcacaaggccgaacattttc

SEQ ID NO: 160029 - DNA, 25 bp, probe
caaggagcaatacatcgaagcatgt

SEQ ID NO: 160030 - DNA, 25 bp, probe
caagggaatagcgacttagtgttct

SEQ ID NO: 160031 - DNA, 25 bp, probe
caaggcagaacccattcttgggtcc

SEQ ID NO: 160032 - DNA, 25 bp, probe
caaggcagaacccattcttgggtcc

SEQ ID NO: 160033 - DNA, 25 bp, probe
caaggcgaacaccgtcttcgagatg

SEQ ID NO: 160034 - DNA, 25 bp, probe
caaggcgaacaccgtcttcgagatg

SEQ ID NO: 160035 - DNA, 25 bp, probe
caatggccatgaacgcctttggaga

SEQ ID NO: 160036 - DNA, 25 bp, probe
caaggcaagaacctctttagcatcc

SEQ ID NO: 160037 - DNA, 25 bp, probe
caacctcagaacctttggaatccca

SEQ ID NO: 160038 - DNA, 25 bp, probe
caacccaaactaactgattttgcca

SEQ ID NO: 160039 - DNA, 25 bp, probe
caatcaaaaacaaacgatattcttc

SEQ ID NO: 160040 - DNA, 25 bp, probe
caacagaaaaaatcgtctctccctc

SEQ ID NO: 160041 - DNA, 25 bp, probe
ctctttacctaatggtctctaccta

SEQ ID NO: 160042 - DNA, 25 bp, probe
catattcgagctcaacggtttaccc

SEQ ID NO: 160043 - DNA, 25 bp, probe
caagtcgacatctaacgttttatca

SEQ ID NO: 160044 - DNA, 25 bp, probe
caagatgtacacgaaggttttttag

SEQ ID NO: 160045 - DNA, 25 bp, probe
caagaccgcctcaaggtgtttaacg

SEQ ID NO: 160046 - DNA, 25 bp, probe
caagcacgagctgcaagcgcttcta

SEQ ID NO: 160047 - DNA, 25 bp, probe
caagaagacatttcagccactgtca

SEQ ID NO: 160048 - DNA, 25 bp, probe
caaggcacacctatgccacttatcc

SEQ ID NO: 160049 - DNA, 25 bp, probe
caaggcatcgctattgtctgtaatg

SEQ ID NO: 160050 - DNA, 25 bp, probe
caaggtcagcatcatttgctctcct

SEQ ID NO: 160051 - DNA, 25 bp, probe
caaggctgacatcgtgcacgccttc

SEQ ID NO: 160052 - DNA, 25 bp, probe
caaggctgacatcgtgcacgccttc

SEQ ID NO: 160053 - DNA, 25 bp, probe
caaggtcacaggcatccatgtgtgc

SEQ ID NO: 160054 - DNA, 25 bp, probe
caagggcaaggccttgcagctcttc

SEQ ID NO: 160055 - DNA, 25 bp, probe
caagggcaaggccttgcagctcttc

SEQ ID NO: 160056 - DNA, 25 bp, probe
caagggcaaggccttgcagctcttc

SEQ ID NO: 160057 - DNA, 25 bp, probe
caaggacaagatgcttgtggctgtg

SEQ ID NO: 160058 - DNA, 25 bp, probe
caaggccatcaaaccttcttctgga

SEQ ID NO: 160059 - DNA, 25 bp, probe
caatggactcaaaattgatatttgc

SEQ ID NO: 160060 - DNA, 25 bp, probe
caatggctataaactgaattaggca

SEQ ID NO: 160061 - DNA, 25 bp, probe
caatggctatcaacagctgctaata

SEQ ID NO: 160062 - DNA, 25 bp, probe
caagcagattcgactgcatgctaca

SEQ ID NO: 160063 - DNA, 25 bp, probe
caatgcacatcttggtattgagcag

SEQ ID NO: 160064 - DNA, 25 bp, probe
caatgctctctacttattactgtat

SEQ ID NO: 160065 - DNA, 25 bp, probe
caatctggcttctgcattactatta

SEQ ID NO: 160066 - DNA, 25 bp, probe
caaggccattgctgctgtaataaga

SEQ ID NO: 160067 - DNA, 25 bp, probe
caaggccatcctggttctatactgt

SEQ ID NO: 160068 - DNA, 25 bp, probe
caaggccactgtcattgctgaagtt

SEQ ID NO: 160069 - DNA, 25 bp, probe
caatgaagcatctcaattgctggag

SEQ ID NO: 160070 - DNA, 25 bp, probe
caatgagagcttccagttcacgctg

SEQ ID NO: 160071 - DNA, 25 bp, probe
caatgtatgttgggtccacctcagt

SEQ ID NO: 160072 - DNA, 25 bp, probe
caatgcattttgggacccctacagc

SEQ ID NO: 160073 - DNA, 25 bp, probe
caagattcttggtgccaccattgag

SEQ ID NO: 160074 - DNA, 25 bp, probe
catagaggttgacccccacagggtc

SEQ ID NO: 160075 - DNA, 25 bp, probe
cacaggtttagccccaacatgactg

SEQ ID NO: 160076 - DNA, 25 bp, probe
cacaggtttagccccaacatgactg

SEQ ID NO: 160077 - DNA, 25 bp, probe
caaggtttctgccagcccactgttg

SEQ ID NO: 160078 - DNA, 25 bp, probe
caaggtttgctgctgcctattgtag

SEQ ID NO: 160079 - DNA, 25 bp, probe
caatctgttttggctttatgtgcaa

SEQ ID NO: 160080 - DNA, 25 bp, probe
caatctgttttggctttatgtgcaa

SEQ ID NO: 160081 - DNA, 25 bp, probe
caatctgatttgtccttttgatgca

SEQ ID NO: 160082 - DNA, 25 bp, probe
caatgccagattcctgttttgcgca

SEQ ID NO: 160083 - DNA, 25 bp, probe
caatcctcttttgatgtctgcagaa

SEQ ID NO: 160084 - DNA, 25 bp, probe
caatcctcttttgatgtctgcagaa

SEQ ID NO: 160085 - DNA, 25 bp, probe
caatgcctttgaaaatgtggatgag

SEQ ID NO: 160086 - DNA, 25 bp, probe
caatggcttatcttacactggatca

SEQ ID NO: 160087 - DNA, 25 bp, probe
caatgtctttggttcacatggatat

SEQ ID NO: 160088 - DNA, 25 bp, probe
caatgctgctttggttaatctcttc

SEQ ID NO: 160089 - DNA, 25 bp, probe
caatgctgctttggttaatctcttc

SEQ ID NO: 160090 - DNA, 25 bp, probe
caatgctcttgggtgcaaacttgtt

SEQ ID NO: 160091 - DNA, 25 bp, probe
caatcctctggaacgacttggtgct

SEQ ID NO: 160092 - DNA, 25 bp, probe
caaggctctgaaacccgaggatgcc

SEQ ID NO: 160093 - DNA, 25 bp, probe
caatgctgggtgcagcccaaggcac

SEQ ID NO: 160094 - DNA, 25 bp, probe
caatgtgaggggtcctagcagccac

SEQ ID NO: 160095 - DNA, 25 bp, probe
caatgtgaggggtcctagcagccac

SEQ ID NO: 160096 - DNA, 25 bp, probe
caaggaggaggaccatcgagctaaa

SEQ ID NO: 160097 - DNA, 25 bp, probe
caaggtgagttacctgctgagccca

SEQ ID NO: 160098 - DNA, 25 bp, probe
caaggctgctgtgacagccctggcc

SEQ ID NO: 160099 - DNA, 25 bp, probe
caatggctgtgagactggctgtgag

SEQ ID NO: 160100 - DNA, 25 bp, probe
caatggcagtcagcatgcggccgag

SEQ ID NO: 160101 - DNA, 25 bp, probe
caatgtctgatcacaggggcgccat

SEQ ID NO: 160102 - DNA, 25 bp, probe
caatgtcttcgagttggagcggctc

SEQ ID NO: 160103 - DNA, 25 bp, probe
caatgatcttgccattccgagtgaa

SEQ ID NO: 160104 - DNA, 25 bp, probe
caatgaccccagtgccagtgagcac

SEQ ID NO: 160105 - DNA, 25 bp, probe
caatgaccccagtgccagtgagcac

SEQ ID NO: 160106 - DNA, 25 bp, probe
caagaccgctcgggaaatgcaggaa

SEQ ID NO: 160107 - DNA, 25 bp, probe
cacgatctccacctcgaagtagtgg

SEQ ID NO: 160108 - DNA, 25 bp, probe
cacgatctccacctcgaagtagtgg

SEQ ID NO: 160109 - DNA, 25 bp, probe
caagtgataacttcgaagccatagg

SEQ ID NO: 160110 - DNA, 25 bp, probe
caactgcaaactgctggtccataag

SEQ ID NO: 160111 - DNA, 25 bp, probe
caagtgcgagccacaggaaaaatgt

SEQ ID NO: 160112 - DNA, 25 bp, probe
caagctccagaacagtaaccaagtg

SEQ ID NO: 160113 - DNA, 25 bp, probe
caagtcagaaatcagttcactccct

SEQ ID NO: 160114 - DNA, 25 bp, probe
caagaagaaatctgagtcagcacag

SEQ ID NO: 160115 - DNA, 25 bp, probe
caagacgaggtcaaattccagcatg

SEQ ID NO: 160116 - DNA, 25 bp, probe
caagacgaggtcaaattccagcatg

SEQ ID NO: 160117 - DNA, 25 bp, probe
caagatgccctcataaaccaatgtg

SEQ ID NO: 160118 - DNA, 25 bp, probe
caaggccaccttaatatggaatgga

SEQ ID NO: 160119 - DNA, 25 bp, probe
caagggacctagtctcagggatgga

SEQ ID NO: 160120 - DNA, 25 bp, probe
caacaaaccaagcatcagggggaag

SEQ ID NO: 160121 - DNA, 25 bp, probe
caatgccaacgcatccatctggtgg

SEQ ID NO: 160122 - DNA, 25 bp, probe
caatccaaaaaccagtcggcagacc

SEQ ID NO: 160123 - DNA, 25 bp, probe
caatgcccagaaccggctgggggcc

SEQ ID NO: 160124 - DNA, 25 bp, probe
caacagaagcccgggtgctgggccc

SEQ ID NO: 160125 - DNA, 25 bp, probe
caagcagaggcttggtggggggccc

SEQ ID NO: 160126 - DNA, 25 bp, probe
caagcagaggcttggtggggggccc

SEQ ID NO: 160127 - DNA, 25 bp, probe
caaggactcgctggacgacagcggc

SEQ ID NO: 160128 - DNA, 25 bp, probe
caaggcatcccagaggcaaggggac

SEQ ID NO: 160129 - DNA, 25 bp, probe
caaggcccgcgacttgaagaacgga

SEQ ID NO: 160130 - DNA, 25 bp, probe
caaggcaattggtttgaggcaaaaa

SEQ ID NO: 160131 - DNA, 25 bp, probe
caaggcaattggtttgaggcaaaaa

SEQ ID NO: 160132 - DNA, 25 bp, probe
caaggcagtgtccattcatgagtgt

SEQ ID NO: 160133 - DNA, 25 bp, probe
caagtgcgtgactgtatgtgtgtgt

SEQ ID NO: 160134 - DNA, 25 bp, probe
caagctgcatggcaagttctgtggt

SEQ ID NO: 160135 - DNA, 25 bp, probe
caatgctgcagtcctgcagtcacct

SEQ ID NO: 160136 - DNA, 25 bp, probe
caatgagcagagccaagcagcacag

SEQ ID NO: 160137 - DNA, 25 bp, probe
caatggagagcggcgagcatgctgg

SEQ ID NO: 160138 - DNA, 25 bp, probe
caaggagagcagagtgacttgctgt

SEQ ID NO: 160139 - DNA, 25 bp, probe
caaggagagcagagtgacttgctgt

SEQ ID NO: 160140 - DNA, 25 bp, probe
caatggctacgtgtgactagtgctt

SEQ ID NO: 160141 - DNA, 25 bp, probe
caaggctacaggtgcatcaactgca

SEQ ID NO: 160142 - DNA, 25 bp, probe
caagagtcttggtctgatccacgct

SEQ ID NO: 160143 - DNA, 25 bp, probe
caaggactagtggagtcctgagtca

SEQ ID NO: 160144 - DNA, 25 bp, probe
caaggacaagaagctcctggccacc

SEQ ID NO: 160145 - DNA, 25 bp, probe
caaggacaagaagctcctggccacc

SEQ ID NO: 160146 - DNA, 25 bp, probe
caaggactagattcctcctcaaacc

SEQ ID NO: 160147 - DNA, 25 bp, probe
caagtttaatgatctcttcctccct

SEQ ID NO: 160148 - DNA, 25 bp, probe
caagtttaatgatctcttcctccct

SEQ ID NO: 160149 - DNA, 25 bp, probe
caagtttattgatcacatatcctgt

SEQ ID NO: 160150 - DNA, 25 bp, probe
caagacttttgactgccattttgtt

SEQ ID NO: 160151 - DNA, 25 bp, probe
caaggacttggacccatgactctgt

SEQ ID NO: 160152 - DNA, 25 bp, probe
caaggactgagactgacctcctctg

SEQ ID NO: 160153 - DNA, 25 bp, probe
caatgtttggagaccaccagcctgt

SEQ ID NO: 160154 - DNA, 25 bp, probe
caagtgtgggggccaaagcctgtgt

SEQ ID NO: 160155 - DNA, 25 bp, probe
caagtgtgggggccaaagcctgtgt

SEQ ID NO: 160156 - DNA, 25 bp, probe
caagaggggcgggctcagagctttg

SEQ ID NO: 160157 - DNA, 25 bp, probe
caagggagcgctggtgtacggcttg

SEQ ID NO: 160158 - DNA, 25 bp, probe
caagggagcgctggtgtacggcttg

SEQ ID NO: 160159 - DNA, 25 bp, probe
caaggcggccacctggaaggtgctg

SEQ ID NO: 160160 - DNA, 25 bp, probe
caatggtgcgcctgctggaagatgc

SEQ ID NO: 160161 - DNA, 25 bp, probe
caagtggcgactgcacagaatggct

SEQ ID NO: 160162 - DNA, 25 bp, probe
caaggccgcattgctaagatgcctg

SEQ ID NO: 160163 - DNA, 25 bp, probe
caagtgcctgctacacatacaacac

SEQ ID NO: 160164 - DNA, 25 bp, probe
caagtgcctgctacacatacaacac

SEQ ID NO: 160165 - DNA, 25 bp, probe
caagagccgcagacctactaaaaca

SEQ ID NO: 160166 - DNA, 25 bp, probe
caaggccaaactgtctcaaagagca

SEQ ID NO: 160167 - DNA, 25 bp, probe
caaggctccatagctttgccaaatg

SEQ ID NO: 160168 - DNA, 25 bp, probe
caaggctgtcatcactcgagcagaa

SEQ ID NO: 160169 - DNA, 25 bp, probe
caaggcttccccagcaaagattagg

SEQ ID NO: 160170 - DNA, 25 bp, probe
caaggattcctgggtgctcaagttc

SEQ ID NO: 160171 - DNA, 25 bp, probe
caaggcaaatcgggtccagaggctg

SEQ ID NO: 160172 - DNA, 25 bp, probe
caatgggaaggctcccagtgcgctg

SEQ ID NO: 160173 - DNA, 25 bp, probe
caaggaaagactgccctggctgtgg

SEQ ID NO: 160174 - DNA, 25 bp, probe
caaggacacggagcagccaggggag

SEQ ID NO: 160175 - DNA, 25 bp, probe
caatgtgacaagtatgacgcccagg

SEQ ID NO: 160176 - DNA, 25 bp, probe
caatgtccaaatagcggcctcggaa

SEQ ID NO: 160177 - DNA, 25 bp, probe
caaggccgacaaggagccactggaa

SEQ ID NO: 160178 - DNA, 25 bp, probe
caaccacgagacagacaacatgaac

SEQ ID NO: 160179 - DNA, 25 bp, probe
caagcgatgagcaacctgaaagtga

SEQ ID NO: 160180 - DNA, 25 bp, probe
caagcaaagccatatggagcatcta

SEQ ID NO: 160181 - DNA, 25 bp, probe
caagtgctagccacagtgacactcc

SEQ ID NO: 160182 - DNA, 25 bp, probe
caagttggtcataattaacacacat

SEQ ID NO: 160183 - DNA, 25 bp, probe
caagttggtcataattaacacacat

SEQ ID NO: 160184 - DNA, 25 bp, probe
caaactggtggtttgaaagcaacca

SEQ ID NO: 160185 - DNA, 25 bp, probe
caactcgggcgtattcaacaaccag

SEQ ID NO: 160186 - DNA, 25 bp, probe
caactgggaggaacttgaacggaag

SEQ ID NO: 160187 - DNA, 25 bp, probe
cacacggggtattttaggcagggat

SEQ ID NO: 160188 - DNA, 25 bp, probe
caaggaggagttacgtagagagggt

SEQ ID NO: 160189 - DNA, 25 bp, probe
caaggggacttactgagtgggggtg

SEQ ID NO: 160190 - DNA, 25 bp, probe
caaggcgcagggaagtcggggggct

SEQ ID NO: 160191 - DNA, 25 bp, probe
caaggccgagggctacgaggtggct

SEQ ID NO: 160192 - DNA, 25 bp, probe
caaggccgagggctacgaggtggct

SEQ ID NO: 160193 - DNA, 25 bp, probe
caagaaggggaacgacgggctctgc

SEQ ID NO: 160194 - DNA, 25 bp, probe
caagcaagggggtgacattcgccgg

SEQ ID NO: 160195 - DNA, 25 bp, probe
caagcaagggggtgacattcgccgg

SEQ ID NO: 160196 - DNA, 25 bp, probe
caagaagaggacgttcctgcggcca

SEQ ID NO: 160197 - DNA, 25 bp, probe
caagggtgacatctgtcctgtgagc

SEQ ID NO: 160198 - DNA, 25 bp, probe
caaggaggtgcatcaggcacttcgg

SEQ ID NO: 160199 - DNA, 25 bp, probe
caagtggaggattcatggcttatgc

SEQ ID NO: 160200 - DNA, 25 bp, probe
caaggacagtgtcatggccgtgctg

SEQ ID NO: 160201 - DNA, 25 bp, probe
caaggacattcaaagtgccctgtgc

SEQ ID NO: 160202 - DNA, 25 bp, probe
caaggacatctacagctcctttggc

SEQ ID NO: 160203 - DNA, 25 bp, probe
caaggactgctacacctctgattac

SEQ ID NO: 160204 - DNA, 25 bp, probe
caaggactgctacacctctgattac

SEQ ID NO: 160205 - DNA, 25 bp, probe
caaggatctgcagttactttgaaga

SEQ ID NO: 160206 - DNA, 25 bp, probe
caaggcattgagaatgtacctgaag

SEQ ID NO: 160207 - DNA, 25 bp, probe
caaagacgaggtaaggtgcaagtgc

SEQ ID NO: 160208 - DNA, 25 bp, probe
caaggacggcgtagaggatagatcg

SEQ ID NO: 160209 - DNA, 25 bp, probe
caagaggctggcttcttggtcaatc

SEQ ID NO: 160210 - DNA, 25 bp, probe
caagaggcatggcttttctacacac

SEQ ID NO: 160211 - DNA, 25 bp, probe
caagggagcactcattgtctacaca

SEQ ID NO: 160212 - DNA, 25 bp, probe
caagcttgaccgcattggcaaaggc

SEQ ID NO: 160213 - DNA, 25 bp, probe
caatgttcccatcactcgaactggc

SEQ ID NO: 160214 - DNA, 25 bp, probe
caatgttcccatcactcgaactggc

SEQ ID NO: 160215 - DNA, 25 bp, probe
caatgttctcctccatacagagtct

SEQ ID NO: 160216 - DNA, 25 bp, probe
caagttcaaacagtcgagagctatg

SEQ ID NO: 160217 - DNA, 25 bp, probe
caagtttatggcctggagagcgtga

SEQ ID NO: 160218 - DNA, 25 bp, probe
caagatcatttcaggtgagcagtta

SEQ ID NO: 160219 - DNA, 25 bp, probe
caatgtctttcgcagatcgcagacc

SEQ ID NO: 160220 - DNA, 25 bp, probe
caatgtctttcgcagatcgcagacc

SEQ ID NO: 160221 - DNA, 25 bp, probe
caatgatctcagggctcagtggcag

SEQ ID NO: 160222 - DNA, 25 bp, probe
caagatccagatggccatggtgcat

SEQ ID NO: 160223 - DNA, 25 bp, probe
caagtcacagtgatgctgctgagca

SEQ ID NO: 160224 - DNA, 25 bp, probe
caatgggcgtgttgctctatgagat

SEQ ID NO: 160225 - DNA, 25 bp, probe
caatgagacggtgctcactgtgtgg

SEQ ID NO: 160226 - DNA, 25 bp, probe
caatgagacggtgctcactgtgtgg

SEQ ID NO: 160227 - DNA, 25 bp, probe
caagaacctgatcctccagatgcta

SEQ ID NO: 160228 - DNA, 25 bp, probe
caagcgactagaccggagtgtctcc

SEQ ID NO: 160229 - DNA, 25 bp, probe
caagcgactagaccggagtgtctcc

SEQ ID NO: 160230 - DNA, 25 bp, probe
caagagacgcgagagacgtgcttcc

SEQ ID NO: 160231 - DNA, 25 bp, probe
caagctgacggatgagatggtgatg

SEQ ID NO: 160232 - DNA, 25 bp, probe
caagctgacggatgagatggtgatg

SEQ ID NO: 160233 - DNA, 25 bp, probe
caagctatcggtgagtttctgcatt

SEQ ID NO: 160234 - DNA, 25 bp, probe
caagtatgtttggtgagtcacagat

SEQ ID NO: 160235 - DNA, 25 bp, probe
caaggtggtgctgatgcagtgcaac

SEQ ID NO: 160236 - DNA, 25 bp, probe
caagagatcgtgttacagtcacaat

SEQ ID NO: 160237 - DNA, 25 bp, probe
caatggatcctgtccacaacaagcc

SEQ ID NO: 160238 - DNA, 25 bp, probe
caaggtcctgtgcaaatagtgtcaa

SEQ ID NO: 160239 - DNA, 25 bp, probe
caagttctctgcagagtttgttgac

SEQ ID NO: 160240 - DNA, 25 bp, probe
caaggatcttccgagtgcttggggc

SEQ ID NO: 160241 - DNA, 25 bp, probe
caatggtcatgtggccaagattggg

SEQ ID NO: 160242 - DNA, 25 bp, probe
caaggcctgtgacagaattcgctgt

SEQ ID NO: 160243 - DNA, 25 bp, probe
caaggatgtgaacaaggtcgcctac

SEQ ID NO: 160244 - DNA, 25 bp, probe
caatggttgcaacatactctgccct

SEQ ID NO: 160245 - DNA, 25 bp, probe
caatgtattgcataatcaatgctgg

SEQ ID NO: 160246 - DNA, 25 bp, probe
caagtatggagagatgcctgtggac

SEQ ID NO: 160247 - DNA, 25 bp, probe
caagcggagaatgaccattgcccag

SEQ ID NO: 160248 - DNA, 25 bp, probe
caatggatcagataactccatccca

SEQ ID NO: 160249 - DNA, 25 bp, probe
caaggctcaaaattctcatcatctc

SEQ ID NO: 160250 - DNA, 25 bp, probe
caagacattaaatctgccatctcag

SEQ ID NO: 160251 - DNA, 25 bp, probe
caagacattaaatctgccatctcag

SEQ ID NO: 160252 - DNA, 25 bp, probe
caaggctatgacagtctgctacgca

SEQ ID NO: 160253 - DNA, 25 bp, probe
caaggctgagacagtcgtgcgactc

SEQ ID NO: 160254 - DNA, 25 bp, probe
caaggccaggcggaaggtgaccgtc

SEQ ID NO: 160255 - DNA, 25 bp, probe
caaggtcaggccttcaaggcacccg

SEQ ID NO: 160256 - DNA, 25 bp, probe
caaggtcaggccttcaaggcacccg

SEQ ID NO: 160257 - DNA, 25 bp, probe
caaggtcaggagatcaaggccatcc

SEQ ID NO: 160258 - DNA, 25 bp, probe
caagggggtgatgtagcccatcctt

SEQ ID NO: 160259 - DNA, 25 bp, probe
caagagggggatgtcagcctcaccc

SEQ ID NO: 160260 - DNA, 25 bp, probe
caaggtggggatgggacacaagcca

SEQ ID NO: 160261 - DNA, 25 bp, probe
caacgggatcagaggaccatcagca

SEQ ID NO: 160262 - DNA, 25 bp, probe
caacgggatcagaggaccatcagca

SEQ ID NO: 160263 - DNA, 25 bp, probe
caagggagatgaggcaggccccagc

SEQ ID NO: 160264 - DNA, 25 bp, probe
caagaagtcagcacaggccagcgac

SEQ ID NO: 160265 - DNA, 25 bp, probe
caagaagtcagcacaggccagcgac

SEQ ID NO: 160266 - DNA, 25 bp, probe
caaggacaactaagggcaggaccca

SEQ ID NO: 160267 - DNA, 25 bp, probe
caaggacaactaagggcaggaccca

SEQ ID NO: 160268 - DNA, 25 bp, probe
caaagaccaccgaggagaggccgag

SEQ ID NO: 160269 - DNA, 25 bp, probe
caaagaacccgaaagacaagtccag

SEQ ID NO: 160270 - DNA, 25 bp, probe
tcaaaaaaacgaaagtcaatccaag

SEQ ID NO: 160271 - DNA, 25 bp, probe
caaaaacctaatcattccaccaagt

SEQ ID NO: 160272 - DNA, 25 bp, probe
caaaaacctaatcattccaccaagt

SEQ ID NO: 160273 - DNA, 25 bp, probe
ctaaaactctatcaggtcccaaaag

SEQ ID NO: 160274 - DNA, 25 bp, probe
cacaaaatccattccaggtagctcg

SEQ ID NO: 160275 - DNA, 25 bp, probe
caaggaacagcaaccaagtaccctg

SEQ ID NO: 160276 - DNA, 25 bp, probe
caaggagaactctgcggtaccagtg

SEQ ID NO: 160277 - DNA, 25 bp, probe
caaggagggtcacctggtgtgccgg

SEQ ID NO: 160278 - DNA, 25 bp, probe
caaggaatttccctgtgtggatgct

SEQ ID NO: 160279 - DNA, 25 bp, probe
caaggagatactgcagtgagtttct

SEQ ID NO: 160280 - DNA, 25 bp, probe
caaggcaatcaggccagtggctgtt

SEQ ID NO: 160281 - DNA, 25 bp, probe
caaggccaagcgccagtgaggactg

SEQ ID NO: 160282 - DNA, 25 bp, probe
caaggaccaggccaggagtggcata

SEQ ID NO: 160283 - DNA, 25 bp, probe
caaggaccagatccagcggctggtg

SEQ ID NO: 160284 - DNA, 25 bp, probe
caaggcgggatgaagggctgcgctt

SEQ ID NO: 160285 - DNA, 25 bp, probe
caaggcgggatgaagggctgcgctt

SEQ ID NO: 160286 - DNA, 25 bp, probe
caaggcatggcgtagagggtgctgc

SEQ ID NO: 160287 - DNA, 25 bp, probe
caagacggagaagaggctgtgcaag

SEQ ID NO: 160288 - DNA, 25 bp, probe
caagacggagaagaggctgtgcaag

SEQ ID NO: 160289 - DNA, 25 bp, probe
caagactggatggagccaagtggtc

SEQ ID NO: 160290 - DNA, 25 bp, probe
caagggtgatgccaactctgaagtc

SEQ ID NO: 160291 - DNA, 25 bp, probe
caaggcgcagagcaactatcagggc

SEQ ID NO: 160292 - DNA, 25 bp, probe
caagcaggaagttatctagcaagcc

SEQ ID NO: 160293 - DNA, 25 bp, probe
caagaagaagtcgtcggcagctccc

SEQ ID NO: 160294 - DNA, 25 bp, probe
caagaagaagtcgtcggcagctccc

SEQ ID NO: 160295 - DNA, 25 bp, probe
caagaagtagtgtgccgcagtgccc

SEQ ID NO: 160296 - DNA, 25 bp, probe
caagaaggagtgcacgtgggccatc

SEQ ID NO: 160297 - DNA, 25 bp, probe
caaggtgggggcaagctgggccctg

SEQ ID NO: 160298 - DNA, 25 bp, probe
caagggcggcaagacgggcccagag

SEQ ID NO: 160299 - DNA, 25 bp, probe
caaagtgtggaagccagggcccagg

SEQ ID NO: 160300 - DNA, 25 bp, probe
caaggtgttctaaaacggcagcgag

SEQ ID NO: 160301 - DNA, 25 bp, probe
caaggtgttctaaaacggcagcgag

SEQ ID NO: 160302 - DNA, 25 bp, probe
caagctgtgtgtggaggaacgtggc

SEQ ID NO: 160303 - DNA, 25 bp, probe
caagtgggtggactattcggacaag

SEQ ID NO: 160304 - DNA, 25 bp, probe
caagggagtagccttgtccagacga

SEQ ID NO: 160305 - DNA, 25 bp, probe
caagggacagagcacttccagtcga

SEQ ID NO: 160306 - DNA, 25 bp, probe
caagggactgtgtgttgccacagga

SEQ ID NO: 160307 - DNA, 25 bp, probe
caaggtgatcgtattcttccagtga

SEQ ID NO: 160308 - DNA, 25 bp, probe
caaaagtgcttcatttttcgtgccc

SEQ ID NO: 160309 - DNA, 25 bp, probe
caagacgtttggtttcatttgtcac

SEQ ID NO: 160310 - DNA, 25 bp, probe
caagttgttaagtttcctctggaag

SEQ ID NO: 160311 - DNA, 25 bp, probe
caagttacttacattcctataatag

SEQ ID NO: 160312 - DNA, 25 bp, probe
caacttatttttatctttaatcctg

SEQ ID NO: 160313 - DNA, 25 bp, probe
caactttcttatccaactttttcat

SEQ ID NO: 160314 - DNA, 25 bp, probe
caaaagtcctactacctcattttat

SEQ ID NO: 160315 - DNA, 25 bp, probe
caaattggccgttagccacctgggt

SEQ ID NO: 160316 - DNA, 25 bp, probe
cacaagtccacggacctcaccgtgg

SEQ ID NO: 160317 - DNA, 25 bp, probe
caaaattccgaagtaatgccctggg

SEQ ID NO: 160318 - DNA, 25 bp, probe
caaaaccctgaagcctggcacgatg

SEQ ID NO: 160319 - DNA, 25 bp, probe
caaaaatccgatcacctcgaagatt

SEQ ID NO: 160320 - DNA, 25 bp, probe
caagaaatcccatttgccctgaaaa

SEQ ID NO: 160321 - DNA, 25 bp, probe
caaggcaacggccttccatctgaaa

SEQ ID NO: 160322 - DNA, 25 bp, probe
caaggagccttcctcattcaggaaa

SEQ ID NO: 160323 - DNA, 25 bp, probe
caaggtgcacattttccacggaaac

SEQ ID NO: 160324 - DNA, 25 bp, probe
caagggcacattgcccatggctggg

SEQ ID NO: 160325 - DNA, 25 bp, probe
caagggaatcatgcacagggatgtg

SEQ ID NO: 160326 - DNA, 25 bp, probe
caaggcttatgtggtcaggactgag

SEQ ID NO: 160327 - DNA, 25 bp, probe
caaggctaatgtgctgactgaggag

SEQ ID NO: 160328 - DNA, 25 bp, probe
caaggatgagtgggccattgagaag

SEQ ID NO: 160329 - DNA, 25 bp, probe
caaggacagtgagcgctatgcccag

SEQ ID NO: 160330 - DNA, 25 bp, probe
caaggagtggcaggctctgtgcgcc

SEQ ID NO: 160331 - DNA, 25 bp, probe
caaggcagccgatgtctggagcctg

SEQ ID NO: 160332 - DNA, 25 bp, probe
caaggatcctgttgtgcggtgcagt

SEQ ID NO: 160333 - DNA, 25 bp, probe
cacacttcctttgtggtagtttgat

SEQ ID NO: 160334 - DNA, 25 bp, probe
cactattccatgcttttaagtagtt

SEQ ID NO: 160335 - DNA, 25 bp, probe
cacatttaatggagctgtacaaagt

SEQ ID NO: 160336 - DNA, 25 bp, probe
caaaatgttggctgcgtactccact

SEQ ID NO: 160337 - DNA, 25 bp, probe
caagtattttgatgcggccaccact

SEQ ID NO: 160338 - DNA, 25 bp, probe
caaggttcagattgaggggcccact

SEQ ID NO: 160339 - DNA, 25 bp, probe
caaggtatcacatcatggggccctg

SEQ ID NO: 160340 - DNA, 25 bp, probe
caagcgttacctggtgggcacagtg

SEQ ID NO: 160341 - DNA, 25 bp, probe
caacctcgtccatgtggtgtcaggt

SEQ ID NO: 160342 - DNA, 25 bp, probe
caacctcgtccatgtggtgtcaggt

SEQ ID NO: 160343 - DNA, 25 bp, probe
caaggcatctgttgctttgggtcct

SEQ ID NO: 160344 - DNA, 25 bp, probe
caagacatcatctgtcatcatgggt

SEQ ID NO: 160345 - DNA, 25 bp, probe
caagcatccatctgactaaggcaca

SEQ ID NO: 160346 - DNA, 25 bp, probe
caagcagacgaggactacagccacg

SEQ ID NO: 160347 - DNA, 25 bp, probe
caagagatcatatcctcagaccagg

SEQ ID NO: 160348 - DNA, 25 bp, probe
caagctgactcatcctaactaacag

SEQ ID NO: 160349 - DNA, 25 bp, probe
caaggcattataccaaagctattga

SEQ ID NO: 160350 - DNA, 25 bp, probe
caagcctgtatagacagcacttggc

SEQ ID NO: 160351 - DNA, 25 bp, probe
caagactgttgtcatcatcctgggg

SEQ ID NO: 160352 - DNA, 25 bp, probe
caagtggatttccatcaccgaggcc

SEQ ID NO: 160353 - DNA, 25 bp, probe
caaggatcacttgagcccagaagct

SEQ ID NO: 160354 - DNA, 25 bp, probe
caagtggcgactggaccggaagctg

SEQ ID NO: 160355 - DNA, 25 bp, probe
caaggacagacacaacggcaacatt

SEQ ID NO: 160356 - DNA, 25 bp, probe
caaggacagacacaacggcaacatt

SEQ ID NO: 160357 - DNA, 25 bp, probe
caagaagatcaacaaacagaacttg

SEQ ID NO: 160358 - DNA, 25 bp, probe
caagttcatgagcctggaaagaatc

SEQ ID NO: 160359 - DNA, 25 bp, probe
caactggattgactggattaagaag

SEQ ID NO: 160360 - DNA, 25 bp, probe
caaggagaagcactggatccaaagc

SEQ ID NO: 160361 - DNA, 25 bp, probe
caagtgcacaacagcttccagaacc

SEQ ID NO: 160362 - DNA, 25 bp, probe
caagtgcacaacagcttccagaacc

SEQ ID NO: 160363 - DNA, 25 bp, probe
caagaaccatcaagttccaaccatt

SEQ ID NO: 160364 - DNA, 25 bp, probe
caagacaccttttgtccagacagct

SEQ ID NO: 160365 - DNA, 25 bp, probe
caagatccaccgagatatcaaagct

SEQ ID NO: 160366 - DNA, 25 bp, probe
caagacttccagagcctcaaatgag

SEQ ID NO: 160367 - DNA, 25 bp, probe
caagagcctccagtagacgacaaga

SEQ ID NO: 160368 - DNA, 25 bp, probe
caagagcctccagtagacgacaaga

SEQ ID NO: 160369 - DNA, 25 bp, probe
caagaggctagaagaagcgcaaagt

SEQ ID NO: 160370 - DNA, 25 bp, probe
caacatgagggaaataagcaaagag

SEQ ID NO: 160371 - DNA, 25 bp, probe
caagcaagtctgaaacccaagagag

SEQ ID NO: 160372 - DNA, 25 bp, probe
caagctgttatgaacaccagaaagg

SEQ ID NO: 160373 - DNA, 25 bp, probe
caagctgtttccacatcagaactcc

SEQ ID NO: 160374 - DNA, 25 bp, probe
caagctgtttccacatcagaactcc

SEQ ID NO: 160375 - DNA, 25 bp, probe
caagtgcttatccaactctgaatct

SEQ ID NO: 160376 - DNA, 25 bp, probe
caagtgcttatccaactctgaatct

SEQ ID NO: 160377 - DNA, 25 bp, probe
caagtcattacccagtctcatctgt

SEQ ID NO: 160378 - DNA, 25 bp, probe
caactcaagcatcccaaccttgtta

SEQ ID NO: 160379 - DNA, 25 bp, probe
caactatccagaccagtacgttcga

SEQ ID NO: 160380 - DNA, 25 bp, probe
caacttgaagcaccgctacgagctg

SEQ ID NO: 160381 - DNA, 25 bp, probe
caagcatctaagcccaggacatgag

SEQ ID NO: 160382 - DNA, 25 bp, probe
caagcagtactgccgcgagagcggt

SEQ ID NO: 160383 - DNA, 25 bp, probe
caaggaacatgtcgggaggggggtg

SEQ ID NO: 160384 - DNA, 25 bp, probe
caaggagagcttcgtcagtgcgggg

SEQ ID NO: 160385 - DNA, 25 bp, probe
caaggtgagcggcacagatgatggg

SEQ ID NO: 160386 - DNA, 25 bp, probe
caagtgtgcggagacaggcggctga

SEQ ID NO: 160387 - DNA, 25 bp, probe
caagtgtgcggagacaggcggctga

SEQ ID NO: 160388 - DNA, 25 bp, probe
caaggtgctgaagatagagctggag

SEQ ID NO: 160389 - DNA, 25 bp, probe
caagcagcagctggaggaggagcag

SEQ ID NO: 160390 - DNA, 25 bp, probe
caagcagcacattctcaagagcaca

SEQ ID NO: 160391 - DNA, 25 bp, probe
caagcactacctggatcagctcaac

SEQ ID NO: 160392 - DNA, 25 bp, probe
caagtccttcatgatcagcgcagac

SEQ ID NO: 160393 - DNA, 25 bp, probe
caagtccttcatgatcagcgcagac

SEQ ID NO: 160394 - DNA, 25 bp, probe
caagtccacagtggaaccagcccag

SEQ ID NO: 160395 - DNA, 25 bp, probe
caagatcccttggaattgcatccca

SEQ ID NO: 160396 - DNA, 25 bp, probe
caagtcttcttaggatctgatccca

SEQ ID NO: 160397 - DNA, 25 bp, probe
caagtgcaacttgcttcagtcatcc

SEQ ID NO: 160398 - DNA, 25 bp, probe
caaggattcattgtacgtgtcctct

SEQ ID NO: 160399 - DNA, 25 bp, probe
caagtattcttgatcctgtgtttca

SEQ ID NO: 160400 - DNA, 25 bp, probe
caagttgtcctatttttgtcattac

SEQ ID NO: 160401 - DNA, 25 bp, probe
caagttgaggtctgttctgtcctcc

SEQ ID NO: 160402 - DNA, 25 bp, probe
caagtgcgagggggacatcttcacc

SEQ ID NO: 160403 - DNA, 25 bp, probe
caaggtagggctgcagcactgatgc

SEQ ID NO: 160404 - DNA, 25 bp, probe
caagggatgaagacctgcagtgagc

SEQ ID NO: 160405 - DNA, 25 bp, probe
caaggtgcagcatgacctcaactcg

SEQ ID NO: 160406 - DNA, 25 bp, probe
caaggtgcagcatgacctcaactcg

SEQ ID NO: 160407 - DNA, 25 bp, probe
cacatggatggcaaacctaatctta

SEQ ID NO: 160408 - DNA, 25 bp, probe
caaggtgtccaaggctgagtcgatg

SEQ ID NO: 160409 - DNA, 25 bp, probe
caagtgttccagactgcatggccag

SEQ ID NO: 160410 - DNA, 25 bp, probe
caaggttcaaggctgtcatcactcg

SEQ ID NO: 160411 - DNA, 25 bp, probe
caaggttcaaggctgtcatcactcg

SEQ ID NO: 160412 - DNA, 25 bp, probe
caaggtgctgaagcaggtccacccc

SEQ ID NO: 160413 - DNA, 25 bp, probe
caagcagccaaagcagtgtcgacct

SEQ ID NO: 160414 - DNA, 25 bp, probe
caagccgcaaaggcagcaggctacc

SEQ ID NO: 160415 - DNA, 25 bp, probe
caagccgggcctgagactcccggct

SEQ ID NO: 160416 - DNA, 25 bp, probe
caagggtgaggcagagacccgcgtg

SEQ ID NO: 160417 - DNA, 25 bp, probe
caagggtgaggcagagacccgcgtg

SEQ ID NO: 160418 - DNA, 25 bp, probe
caagtggaggactgatgacgccccg

SEQ ID NO: 160419 - DNA, 25 bp, probe
caaggtgcatcgacattaacccact

SEQ ID NO: 160420 - DNA, 25 bp, probe
caagggtcgcattataacagtcgtg

SEQ ID NO: 160421 - DNA, 25 bp, probe
caaggggcagcccaagacatgcttt

SEQ ID NO: 160422 - DNA, 25 bp, probe
caaggtggcacaggggcctgttcaa

SEQ ID NO: 160423 - DNA, 25 bp, probe
caagctggtggctggaccaatgtaa

SEQ ID NO: 160424 - DNA, 25 bp, probe
caagggatggtcccaccattgttca

SEQ ID NO: 160425 - DNA, 25 bp, probe
caagggccattaccacacacttgta

SEQ ID NO: 160426 - DNA, 25 bp, probe
caaggagccttcgaatccaggttca

SEQ ID NO: 160427 - DNA, 25 bp, probe
caaggagtttcatacagcggtgtct

SEQ ID NO: 160428 - DNA, 25 bp, probe
caaggagtttcatacagcggtgtct

SEQ ID NO: 160429 - DNA, 25 bp, probe
caagtgcctgtccaatactgggttc

SEQ ID NO: 160430 - DNA, 25 bp, probe
caagctgacgtcggtaaggcctggc

SEQ ID NO: 160431 - DNA, 25 bp, probe
caagtaggactggaaggtccttgcc

SEQ ID NO: 160432 - DNA, 25 bp, probe
caacagggagctgagggactgcttc

SEQ ID NO: 160433 - DNA, 25 bp, probe
caacagggagctgagggactgcttc

SEQ ID NO: 160434 - DNA, 25 bp, probe
caaccagtagctcatggggccttgg

SEQ ID NO: 160435 - DNA, 25 bp, probe
caagtcggatgtctggagttttggg

SEQ ID NO: 160436 - DNA, 25 bp, probe
caagcccattggtggatgtttttgt

SEQ ID NO: 160437 - DNA, 25 bp, probe
caagtcttgtagtggagtggaattt

SEQ ID NO: 160438 - DNA, 25 bp, probe
caactctcgtagtggaactaatatg

SEQ ID NO: 160439 - DNA, 25 bp, probe
caactccacttctggaactacttta

SEQ ID NO: 160440 - DNA, 25 bp, probe
caactcttaccagggatttacttct

SEQ ID NO: 160441 - DNA, 25 bp, probe
caagctcctaaagggttcatttggc

SEQ ID NO: 160442 - DNA, 25 bp, probe
caagtgcctacatggtgattctctt

SEQ ID NO: 160443 - DNA, 25 bp, probe
caagtgaatactactgctctcatcc

SEQ ID NO: 160444 - DNA, 25 bp, probe
ctacgaaactttctccagctttcgt

SEQ ID NO: 160445 - DNA, 25 bp, probe
caacggaagcttggttccggtgccg

SEQ ID NO: 160446 - DNA, 25 bp, probe
caagaggtacttttacctggctcca

SEQ ID NO: 160447 - DNA, 25 bp, probe
caagaggcctttttgaactttgcca

SEQ ID NO: 160448 - DNA, 25 bp, probe
caagaggcctttttgaactttgcca

SEQ ID NO: 160449 - DNA, 25 bp, probe
caagtggcctttcatgaccactcac

SEQ ID NO: 160450 - DNA, 25 bp, probe
caactggccttacatgtccatccag

SEQ ID NO: 160451 - DNA, 25 bp, probe
caaggtacttcaaaggctcatcaag

SEQ ID NO: 160452 - DNA, 25 bp, probe
caacgggcttatgcagaccagcaag

SEQ ID NO: 160453 - DNA, 25 bp, probe
caacgtagtattgaacagagcaagt

SEQ ID NO: 160454 - DNA, 25 bp, probe
caacgaatttggctacagcaacagg

SEQ ID NO: 160455 - DNA, 25 bp, probe
caagcggtccgaggtggaagaagtg

SEQ ID NO: 160456 - DNA, 25 bp, probe
caagcggtccgaggtggaagaagtg

SEQ ID NO: 160457 - DNA, 25 bp, probe
caacaggcccgtgggaccatgactt

SEQ ID NO: 160458 - DNA, 25 bp, probe
caacgtgacggtggtgacgtccctc

SEQ ID NO: 160459 - DNA, 25 bp, probe
caacgtgacggtggtgacgtccctc

SEQ ID NO: 160460 - DNA, 25 bp, probe
caagacgacggtgtaatctcccatc

SEQ ID NO: 160461 - DNA, 25 bp, probe
caagacgacggtgtaatctcccatc

SEQ ID NO: 160462 - DNA, 25 bp, probe
caaaccggaggagagactcaccatc

SEQ ID NO: 160463 - DNA, 25 bp, probe
caagtcccgaggaaagtctcagtcc

SEQ ID NO: 160464 - DNA, 25 bp, probe
caacctctcggtagtagatctcctc

SEQ ID NO: 160465 - DNA, 25 bp, probe
caacctctcggtagtagatctcctc

SEQ ID NO: 160466 - DNA, 25 bp, probe
caagcctattgacagggatcacact

SEQ ID NO: 160467 - DNA, 25 bp, probe
caagcctattgtgtgaaaccatctc

SEQ ID NO: 160468 - DNA, 25 bp, probe
caagcggatttcggccaaggcagcc

SEQ ID NO: 160469 - DNA, 25 bp, probe
caagggagtgtcagccttgggctct

SEQ ID NO: 160470 - DNA, 25 bp, probe
caaccacaggtttcgctctgggttc

SEQ ID NO: 160471 - DNA, 25 bp, probe
caaccacaggtttcgctctgggttc

SEQ ID NO: 160472 - DNA, 25 bp, probe
caacacacaattaactccgtttcca

SEQ ID NO: 160473 - DNA, 25 bp, probe
cacagcccaagtaactgacgtttcc

SEQ ID NO: 160474 - DNA, 25 bp, probe
caagtccagcttgaagacgctcttc

SEQ ID NO: 160475 - DNA, 25 bp, probe
caagtcctgtgtggcaaaactgcct

SEQ ID NO: 160476 - DNA, 25 bp, probe
caagtgcctggggtgtaatgagctc

SEQ ID NO: 160477 - DNA, 25 bp, probe
caagtcagctggatggactctggcc

SEQ ID NO: 160478 - DNA, 25 bp, probe
caagggcatgaggtcagaccaggat

SEQ ID NO: 160479 - DNA, 25 bp, probe
caagggcatgatccgcaaacagtag

SEQ ID NO: 160480 - DNA, 25 bp, probe
caagggtgccctgcagaagaagccg

SEQ ID NO: 160481 - DNA, 25 bp, probe
caagggcgcgcagtggatgaagcaa

SEQ ID NO: 160482 - DNA, 25 bp, probe
caagggatgccagtaagtctgcagg

SEQ ID NO: 160483 - DNA, 25 bp, probe
caagatgaggcctcaaatgctgcca

SEQ ID NO: 160484 - DNA, 25 bp, probe
caagatgctgggtatcgaatgtaca

SEQ ID NO: 160485 - DNA, 25 bp, probe
caagattaggccataatgtatattt

SEQ ID NO: 160486 - DNA, 25 bp, probe
caaggtcaagccatgtgtctgatga

SEQ ID NO: 160487 - DNA, 25 bp, probe
caagcaacaagtatctgttatgaaa

SEQ ID NO: 160488 - DNA, 25 bp, probe
caagatggtgttatcttttgaattc

SEQ ID NO: 160489 - DNA, 25 bp, probe
caagtggtttccacatgctctgaga

SEQ ID NO: 160490 - DNA, 25 bp, probe
caagggatttccctgtctcagagca

SEQ ID NO: 160491 - DNA, 25 bp, probe
caagaaatttctcttcaagcatcat

SEQ ID NO: 160492 - DNA, 25 bp, probe
caagtcaatcccaacaaagacatac

SEQ ID NO: 160493 - DNA, 25 bp, probe
caactgagtcgcgagaacatacaat

SEQ ID NO: 160494 - DNA, 25 bp, probe
caagctgaatgccgagaagccacac

SEQ ID NO: 160495 - DNA, 25 bp, probe
caagcagccatactgatgaccacag

SEQ ID NO: 160496 - DNA, 25 bp, probe
caaccctactaagatcataaaccct

SEQ ID NO: 160497 - DNA, 25 bp, probe
caaccagtacccttacatataaaca

SEQ ID NO: 160498 - DNA, 25 bp, probe
caagtagtccaccttcatttaactc

SEQ ID NO: 160499 - DNA, 25 bp, probe
caagttgttcagcttcttgtaaatg

SEQ ID NO: 160500 - DNA, 25 bp, probe
caagatttgaagcttttgtgattga

SEQ ID NO: 160501 - DNA, 25 bp, probe
caagacttatcagtctttatggagg

SEQ ID NO: 160502 - DNA, 25 bp, probe
caaacccatctgtaatttcgagtgg

SEQ ID NO: 160503 - DNA, 25 bp, probe
caaacacagacccatctttaggggt

SEQ ID NO: 160504 - DNA, 25 bp, probe
caacaacaagctgggttccggggat

SEQ ID NO: 160505 - DNA, 25 bp, probe
caaaaacagtttatccacagggatc

SEQ ID NO: 160506 - DNA, 25 bp, probe
caagaagaagtttgtggaccgggca

SEQ ID NO: 160507 - DNA, 25 bp, probe
caagagcaaaggtggggcagggtgc

SEQ ID NO: 160508 - DNA, 25 bp, probe
caactgaaggcatggcggcggggtg

SEQ ID NO: 160509 - DNA, 25 bp, probe
caactgaaggcatggcggcggggtg

SEQ ID NO: 160510 - DNA, 25 bp, probe
caactacagggtcctagctgggggc

SEQ ID NO: 160511 - DNA, 25 bp, probe
caagtacggctcggtgactgtgtgg

SEQ ID NO: 160512 - DNA, 25 bp, probe
caagttcgacgtggctgattggctg

SEQ ID NO: 160513 - DNA, 25 bp, probe
caagttcgacgtggctgattggctg

SEQ ID NO: 160514 - DNA, 25 bp, probe
caagtaagacgtgtgtgtgtgtgtg

SEQ ID NO: 160515 - DNA, 25 bp, probe
caagtgccagaggtgggcaggtggt

SEQ ID NO: 160516 - DNA, 25 bp, probe
caagtccagggcagaagcgaagaga

SEQ ID NO: 160517 - DNA, 25 bp, probe
caagtcgggctacacggagaagcag

SEQ ID NO: 160518 - DNA, 25 bp, probe
caacgtacgtagaagaggagggcat

SEQ ID NO: 160519 - DNA, 25 bp, probe
caacgcaacgtctaactggacttcc

SEQ ID NO: 160520 - DNA, 25 bp, probe
caagtgtgactgactaccttgactt

SEQ ID NO: 160521 - DNA, 25 bp, probe
caagctgtgagcaatctgcagtcta

SEQ ID NO: 160522 - DNA, 25 bp, probe
caagatgattgttgctgcttctaaa

SEQ ID NO: 160523 - DNA, 25 bp, probe
caacatcatgatgcgctgctggaaa

SEQ ID NO: 160524 - DNA, 25 bp, probe
caagcactggggcctgtacgaggta

SEQ ID NO: 160525 - DNA, 25 bp, probe
caagcctgaaggcctgaactatgcc

SEQ ID NO: 160526 - DNA, 25 bp, probe
cagacctgtacaccaaacttccagg

SEQ ID NO: 160527 - DNA, 25 bp, probe
caagcctgtgaccccaagattcaga

SEQ ID NO: 160528 - DNA, 25 bp, probe
caagcctgtgaccccaagattcaga

SEQ ID NO: 160529 - DNA, 25 bp, probe
caagcctgtgaccccaagattcaga

SEQ ID NO: 160530 - DNA, 25 bp, probe
caacctggatgacactgaagtagcc

SEQ ID NO: 160531 - DNA, 25 bp, probe
caagccggagaggatttggtccctc

SEQ ID NO: 160532 - DNA, 25 bp, probe
caagcttgtaggtgttggcatcccc

SEQ ID NO: 160533 - DNA, 25 bp, probe
caagaggattggggtgcggctgccc

SEQ ID NO: 160534 - DNA, 25 bp, probe
caagaggatggggtgggggccaggg

SEQ ID NO: 160535 - DNA, 25 bp, probe
caagaggtgcctcatgatgggccca

SEQ ID NO: 160536 - DNA, 25 bp, probe
caagatggctctgtgtagggcctga

SEQ ID NO: 160537 - DNA, 25 bp, probe
caagaggctgctgagtaggaaggag

SEQ ID NO: 160538 - DNA, 25 bp, probe
caagtcgcctgccatggggcgagga

SEQ ID NO: 160539 - DNA, 25 bp, probe
caagtcctcccagggaggtacacca

SEQ ID NO: 160540 - DNA, 25 bp, probe
caagtgcctgcaccaggggtgcaca

SEQ ID NO: 160541 - DNA, 25 bp, probe
caagtcccaaagctggagacaggga

SEQ ID NO: 160542 - DNA, 25 bp, probe
caagtcccgcatccaggtgagactg

SEQ ID NO: 160543 - DNA, 25 bp, probe
caagtcccgcatccaggtgagactg

SEQ ID NO: 160544 - DNA, 25 bp, probe
caagtttccccaagagcggcggatt

SEQ ID NO: 160545 - DNA, 25 bp, probe
caagattctgcacctcaaaggggat

SEQ ID NO: 160546 - DNA, 25 bp, probe
caagcaggctgcacaacaagggtgt

SEQ ID NO: 160547 - DNA, 25 bp, probe
caagtggcacttcaatgagacggtg

SEQ ID NO: 160548 - DNA, 25 bp, probe
caagctagacttcaaggcgggatga

SEQ ID NO: 160549 - DNA, 25 bp, probe
caagctagacttcaaggcgggatga

SEQ ID NO: 160550 - DNA, 25 bp, probe
caagaagtgcttccgggtgggcatg

SEQ ID NO: 160551 - DNA, 25 bp, probe
caagaaatgcttccgggctggcatg

SEQ ID NO: 160552 - DNA, 25 bp, probe
caaaacagcttggatgaactgtatg

SEQ ID NO: 160553 - DNA, 25 bp, probe
caagacctcttgacagacctgatta

SEQ ID NO: 160554 - DNA, 25 bp, probe
caagaccctctacgaacattctttg

SEQ ID NO: 160555 - DNA, 25 bp, probe
caagacctctatatttgctctttta

SEQ ID NO: 160556 - DNA, 25 bp, probe
caaaacgtttccagcatctttcaga

SEQ ID NO: 160557 - DNA, 25 bp, probe
caagagaactatcttccttctccag

SEQ ID NO: 160558 - DNA, 25 bp, probe
cagaggtaaatgagtccctgtcccc

SEQ ID NO: 160559 - DNA, 25 bp, probe
cagaggtaaatgagtccctgtcccc

SEQ ID NO: 160560 - DNA, 25 bp, probe
caagtttaagatccacacgtactcc

SEQ ID NO: 160561 - DNA, 25 bp, probe
caactctctagggacacctgtacca

SEQ ID NO: 160562 - DNA, 25 bp, probe
caacctccagggaactcgaggcctg

SEQ ID NO: 160563 - DNA, 25 bp, probe
caagccttcggcgccttaaggatgt

SEQ ID NO: 160564 - DNA, 25 bp, probe
caagagcgactgccttgccattaag

SEQ ID NO: 160565 - DNA, 25 bp, probe
caagacgcactgacctggaacaacg

SEQ ID NO: 160566 - DNA, 25 bp, probe
caagctgagcacgctcgtggaaacc

SEQ ID NO: 160567 - DNA, 25 bp, probe
caagtaccgcgctgagtgcaaactg

SEQ ID NO: 160568 - DNA, 25 bp, probe
caagttccaggttgatatcacctac

SEQ ID NO: 160569 - DNA, 25 bp, probe
caagttcagcactgtgctagcctct

SEQ ID NO: 160570 - DNA, 25 bp, probe
caagtttcataagctcaccctatac

SEQ ID NO: 160571 - DNA, 25 bp, probe
caagtaccttaagcaccgcaatatc

SEQ ID NO: 160572 - DNA, 25 bp, probe
caagtaccttaagcaccgcaatatc

SEQ ID NO: 160573 - DNA, 25 bp, probe
caagtaccgcctgggacggaagatc

SEQ ID NO: 160574 - DNA, 25 bp, probe
caagtactccttccggaggcttgac

SEQ ID NO: 160575 - DNA, 25 bp, probe
caagtccccgtgaagtggaccgcac

SEQ ID NO: 160576 - DNA, 25 bp, probe
caagtccccgtgaagtggaccgcac

SEQ ID NO: 160577 - DNA, 25 bp, probe
caacccccgacatggaacccatgat

SEQ ID NO: 160578 - DNA, 25 bp, probe
caacttccgctgaggggtctcggat

SEQ ID NO: 160579 - DNA, 25 bp, probe
caactgctcccgtggaagattaaag

SEQ ID NO: 160580 - DNA, 25 bp, probe
caagtgtccctgtggctggacttca

SEQ ID NO: 160581 - DNA, 25 bp, probe
caagtgtccctccttggtgaatttg

SEQ ID NO: 160582 - DNA, 25 bp, probe
caacttcaaccacctagtacacgtg

SEQ ID NO: 160583 - DNA, 25 bp, probe
caacttcaagtaagcggcaacaagg

SEQ ID NO: 160584 - DNA, 25 bp, probe
caacccaagctctgcggaaatcaac

SEQ ID NO: 160585 - DNA, 25 bp, probe
caagagaaacctacggagctacaac

SEQ ID NO: 160586 - DNA, 25 bp, probe
caagaagaacctctcaggcttctcc

SEQ ID NO: 160587 - DNA, 25 bp, probe
caagtattacctttaacttgcctct

SEQ ID NO: 160588 - DNA, 25 bp, probe
caagtattgccctttaacaagactt

SEQ ID NO: 160589 - DNA, 25 bp, probe
caagacgtaggctttaaaatcctgt

SEQ ID NO: 160590 - DNA, 25 bp, probe
caaatagctaggtttggtttcctgt

SEQ ID NO: 160591 - DNA, 25 bp, probe
caagaaaaggcctggtttctggtgg

SEQ ID NO: 160592 - DNA, 25 bp, probe
caagaggaactcttggagttggctg

SEQ ID NO: 160593 - DNA, 25 bp, probe
caagagggcactggtggcccgacag

SEQ ID NO: 160594 - DNA, 25 bp, probe
caagagaggcaatggagcaccccta

SEQ ID NO: 160595 - DNA, 25 bp, probe
caagagcatgatcatcagcgccacc

SEQ ID NO: 160596 - DNA, 25 bp, probe
caagagcatgatcatcagcgccacc

SEQ ID NO: 160597 - DNA, 25 bp, probe
caagatgacatctgagctcacactc

SEQ ID NO: 160598 - DNA, 25 bp, probe
caagaatatgctaggctgcactctg

SEQ ID NO: 160599 - DNA, 25 bp, probe
caagtgatctgcttggtgctcatgg

SEQ ID NO: 160600 - DNA, 25 bp, probe
caagattctgcatttagtcatggca

SEQ ID NO: 160601 - DNA, 25 bp, probe
caagattctgcatttagtcatggca

SEQ ID NO: 160602 - DNA, 25 bp, probe
caagttatgcctaatagcaggcaag

SEQ ID NO: 160603 - DNA, 25 bp, probe
caagtgcagagtcaaggcagggaga

SEQ ID NO: 160604 - DNA, 25 bp, probe
caagctgattctcagtggctgggag

SEQ ID NO: 160605 - DNA, 25 bp, probe
caagttgagctgtagtgcctgctgg

SEQ ID NO: 160606 - DNA, 25 bp, probe
caagtctggtgccagcagccgcggt

SEQ ID NO: 160607 - DNA, 25 bp, probe
caagtgaggatgcagtccagccgtg

SEQ ID NO: 160608 - DNA, 25 bp, probe
caagcgggagaagttctacgatggg

SEQ ID NO: 160609 - DNA, 25 bp, probe
caagctggttaaattctatggagtg

SEQ ID NO: 160610 - DNA, 25 bp, probe
caagctggttaaattctatggagtg

SEQ ID NO: 160611 - DNA, 25 bp, probe
caactacttcaaggtttcgagagtt

SEQ ID NO: 160612 - DNA, 25 bp, probe
caaacacttcaagctcttaatttct

SEQ ID NO: 160613 - DNA, 25 bp, probe
caagaactctcaggtctttagaaac

SEQ ID NO: 160614 - DNA, 25 bp, probe
caagatatcccaggacgtttgctta

SEQ ID NO: 160615 - DNA, 25 bp, probe
caagtatgggtggtcgtttgccttc

SEQ ID NO: 160616 - DNA, 25 bp, probe
caagtatgggtggtcgtttgccttc

SEQ ID NO: 160617 - DNA, 25 bp, probe
caagtgtggttagtccttgctctgc

SEQ ID NO: 160618 - DNA, 25 bp, probe
caagatgtgcctcataaaactctgc

SEQ ID NO: 160619 - DNA, 25 bp, probe
caagatgtgcctcataaaactctgc

SEQ ID NO: 160620 - DNA, 25 bp, probe
caagattgacagacacctaatattc

SEQ ID NO: 160621 - DNA, 25 bp, probe
caagaggaaagggcatgaatatata

SEQ ID NO: 160622 - DNA, 25 bp, probe
caagagaacaaggtgctgaagatag

SEQ ID NO: 160623 - DNA, 25 bp, probe
caagagaacaaggtgctgaagatag

SEQ ID NO: 160624 - DNA, 25 bp, probe
caagacaacctggttatcgctctgc

SEQ ID NO: 160625 - DNA, 25 bp, probe
caagcacaaccggttcacaaaggag

SEQ ID NO: 160626 - DNA, 25 bp, probe
caagatacccttagtgaccaacgaa

SEQ ID NO: 160627 - DNA, 25 bp, probe
caagtacattctaattaccagtata

SEQ ID NO: 160628 - DNA, 25 bp, probe
caagttttgcttattccagtctgaa

SEQ ID NO: 160629 - DNA, 25 bp, probe
caagttttgcttattccagtctgaa

SEQ ID NO: 160630 - DNA, 25 bp, probe
caagctattctgttttgtgtcaatt

SEQ ID NO: 160631 - DNA, 25 bp, probe
caagtttgccctgtgctgtagagtc

SEQ ID NO: 160632 - DNA, 25 bp, probe
caacttccccatgtgtgctggggac

SEQ ID NO: 160633 - DNA, 25 bp, probe
caagtgcctctccagtttctgaggc

SEQ ID NO: 160634 - DNA, 25 bp, probe
caacgcctctcgttctgggaggctt

SEQ ID NO: 160635 - DNA, 25 bp, probe
caacggctccggcatgtgcaaggcc

SEQ ID NO: 160636 - DNA, 25 bp, probe
caactgagtcgcgaggcatttggag

SEQ ID NO: 160637 - DNA, 25 bp, probe
caactacatccggggctatggtggg

SEQ ID NO: 160638 - DNA, 25 bp, probe
caagtagatccgcggctcattgatg

SEQ ID NO: 160639 - DNA, 25 bp, probe
caagcaagaggccgtggctgctgtg

SEQ ID NO: 160640 - DNA, 25 bp, probe
caagcattatgtgctgtgcgtggtg

SEQ ID NO: 160641 - DNA, 25 bp, probe
caacattctgatcctgtcagtcagg

SEQ ID NO: 160642 - DNA, 25 bp, probe
caagagccgtgcctacagtgtggaa

SEQ ID NO: 160643 - DNA, 25 bp, probe
caagagcctgcggctacagaggcca

SEQ ID NO: 160644 - DNA, 25 bp, probe
caagagacgctggcgcaagatcccc

SEQ ID NO: 160645 - DNA, 25 bp, probe
caagagacgctggcgcaagatcccc

SEQ ID NO: 160646 - DNA, 25 bp, probe
caagcaatgcgtcatcaatgtcccc

SEQ ID NO: 160647 - DNA, 25 bp, probe
caagctatgtgagctcaccagtccc

SEQ ID NO: 160648 - DNA, 25 bp, probe
caagcaagtagcctccgagatgcgc

SEQ ID NO: 160649 - DNA, 25 bp, probe
caagatggtgcaggacccagagccc

SEQ ID NO: 160650 - DNA, 25 bp, probe
caagatggctcacacctgtgatccc

SEQ ID NO: 160651 - DNA, 25 bp, probe
caagctcactcagagcagcgtatcg

SEQ ID NO: 160652 - DNA, 25 bp, probe
caagatgactaccagctggttcgaa

SEQ ID NO: 160653 - DNA, 25 bp, probe
cacaaacgactacggtctggacaac

SEQ ID NO: 160654 - DNA, 25 bp, probe
caagtagtagtgtcctcctagtata

SEQ ID NO: 160655 - DNA, 25 bp, probe
caagtatgaatttcctgacaaagac

SEQ ID NO: 160656 - DNA, 25 bp, probe
caggtcaaagattttgcccaactgg

SEQ ID NO: 160657 - DNA, 25 bp, probe
caagtcaacaagtttgccctgggtc

SEQ ID NO: 160658 - DNA, 25 bp, probe
caagtccagaagactctcctctgac

SEQ ID NO: 160659 - DNA, 25 bp, probe
caagtatcagactgaccctcatgcc

SEQ ID NO: 160660 - DNA, 25 bp, probe
caagctattcaagtattcctatgcc

SEQ ID NO: 160661 - DNA, 25 bp, probe
caagaacatcacgtgcatttgctat

SEQ ID NO: 160662 - DNA, 25 bp, probe
caagatgagcattctgtcaggtgtc

SEQ ID NO: 160663 - DNA, 25 bp, probe
caagctgagctgtcatctcgagtga

SEQ ID NO: 160664 - DNA, 25 bp, probe
caagccagcttacctgcagtcaatt

SEQ ID NO: 160665 - DNA, 25 bp, probe
caagtcttctgatctcagataactc

SEQ ID NO: 160666 - DNA, 25 bp, probe
caagtttcacatctagcaaactcct

SEQ ID NO: 160667 - DNA, 25 bp, probe
caagctttacatgaacacgcaccct

SEQ ID NO: 160668 - DNA, 25 bp, probe
caagctttacacagctgtccttact

SEQ ID NO: 160669 - DNA, 25 bp, probe
caacaataacactgtctcctttctc

SEQ ID NO: 160670 - DNA, 25 bp, probe
caagaaaagatcttgccctcctctt

SEQ ID NO: 160671 - DNA, 25 bp, probe
caagaaggtcagcagcacccactat

SEQ ID NO: 160672 - DNA, 25 bp, probe
caagaaactccacgaccacattgag

SEQ ID NO: 160673 - DNA, 25 bp, probe
caagaaccttaccttcaaggagcaa

SEQ ID NO: 160674 - DNA, 25 bp, probe
caacagaacgtccacttcaaggaag

SEQ ID NO: 160675 - DNA, 25 bp, probe
caagcggaactgcgcttaaaacagc

SEQ ID NO: 160676 - DNA, 25 bp, probe
caagctggaaagggcctaaaggctg

SEQ ID NO: 160677 - DNA, 25 bp, probe
caagaggaacatatgcctgagaacc

SEQ ID NO: 160678 - DNA, 25 bp, probe
caagaggaacgacttctgtaagctc

SEQ ID NO: 160679 - DNA, 25 bp, probe
caagcagtacccaggctttgcagac

SEQ ID NO: 160680 - DNA, 25 bp, probe
caagattaccttcctgttttagcct

SEQ ID NO: 160681 - DNA, 25 bp, probe
caagattaccttcctgttttagcct

SEQ ID NO: 160682 - DNA, 25 bp, probe
caagttcacctccaagtttgtacgc

SEQ ID NO: 160683 - DNA, 25 bp, probe
caagttcacctccaagtttgtacgc

SEQ ID NO: 160684 - DNA, 25 bp, probe
caagttcatccacacaagtctggcc

SEQ ID NO: 160685 - DNA, 25 bp, probe
caagtcagactacagccaacgaccc

SEQ ID NO: 160686 - DNA, 25 bp, probe
caactgaaccagtatgccaaaacca

SEQ ID NO: 160687 - DNA, 25 bp, probe
caacggcaacattatgctggacaag

SEQ ID NO: 160688 - DNA, 25 bp, probe
caacgacatcatgttgctgcgccta

SEQ ID NO: 160689 - DNA, 25 bp, probe
caacgacatcatgttgctgcgccta

SEQ ID NO: 160690 - DNA, 25 bp, probe
caagagctatctgttccagctgctc

SEQ ID NO: 160691 - DNA, 25 bp, probe
caagaagcagctggtgctccggatc

SEQ ID NO: 160692 - DNA, 25 bp, probe
caagaagcagcttggccctgatggc

SEQ ID NO: 160693 - DNA, 25 bp, probe
caagacagcacagtgcccctgtgcg

SEQ ID NO: 160694 - DNA, 25 bp, probe
caagacagcacagtgcccctgtgcg

SEQ ID NO: 160695 - DNA, 25 bp, probe
caagatcaaatctctcctggctgta

SEQ ID NO: 160696 - DNA, 25 bp, probe
caagacaacatcatctctgttttct

SEQ ID NO: 160697 - DNA, 25 bp, probe
caagtttctcattactgtctgtggc

SEQ ID NO: 160698 - DNA, 25 bp, probe
caagttttcatcgtctgctcaatac

SEQ ID NO: 160699 - DNA, 25 bp, probe
caagttctccgcgttcatcaagaac

SEQ ID NO: 160700 - DNA, 25 bp, probe
caactttcagtgctggccaaaacct

SEQ ID NO: 160701 - DNA, 25 bp, probe
caagctcttcggcatggccaagatt

SEQ ID NO: 160702 - DNA, 25 bp, probe
caagctcttcgtacaggacgaaaaa

SEQ ID NO: 160703 - DNA, 25 bp, probe
caagctcagcttagaagttcgaaaa

SEQ ID NO: 160704 - DNA, 25 bp, probe
caagacgctgtaaacctctgaagga

SEQ ID NO: 160705 - DNA, 25 bp, probe
caagcagccagtcaacctctgcaaa

SEQ ID NO: 160706 - DNA, 25 bp, probe
caaccgcatcatcgaacggctaaat

SEQ ID NO: 160707 - DNA, 25 bp, probe
caacctgctcatcgaaatgctgcaa

SEQ ID NO: 160708 - DNA, 25 bp, probe
caagactcatcgccaaagcatcctg

SEQ ID NO: 160709 - DNA, 25 bp, probe
caagatatcatcaacggagccctgc

SEQ ID NO: 160710 - DNA, 25 bp, probe
caagatatcatcaacggagccctgc

SEQ ID NO: 160711 - DNA, 25 bp, probe
caagatgatcaaagaaggctccatg

SEQ ID NO: 160712 - DNA, 25 bp, probe
caagcgagactagcagtcatccaga

SEQ ID NO: 160713 - DNA, 25 bp, probe
caacgtactactggaccacgaaggc

SEQ ID NO: 160714 - DNA, 25 bp, probe
caacgtactactggaccacgaaggc

SEQ ID NO: 160715 - DNA, 25 bp, probe
caacgttctatctggcaactggtac

SEQ ID NO: 160716 - DNA, 25 bp, probe
caagcgttggaggtagcagactttt

SEQ ID NO: 160717 - DNA, 25 bp, probe
caagcgttggaggtagcagactttt

SEQ ID NO: 160718 - DNA, 25 bp, probe
caagctcctggagtctgatgctttt

SEQ ID NO: 160719 - DNA, 25 bp, probe
cacatccacggacctgagtttactt

SEQ ID NO: 160720 - DNA, 25 bp, probe
caaccacattgaccagttttactgt

SEQ ID NO: 160721 - DNA, 25 bp, probe
caaccacattgaccagttttactgt

SEQ ID NO: 160722 - DNA, 25 bp, probe
caactacatgtgtccttagtcaact

SEQ ID NO: 160723 - DNA, 25 bp, probe
caactgacttgtcattaaaacctgg

SEQ ID NO: 160724 - DNA, 25 bp, probe
caactgcctggtcaggggacggggg

SEQ ID NO: 160725 - DNA, 25 bp, probe
caactgctctttcaacggaccaggg

SEQ ID NO: 160726 - DNA, 25 bp, probe
caactttttcaaagaggtggacgag

SEQ ID NO: 160727 - DNA, 25 bp, probe
caactttttcacagcagattaccat

SEQ ID NO: 160728 - DNA, 25 bp, probe
caactttccctcagctattatgcaa

SEQ ID NO: 160729 - DNA, 25 bp, probe
caagatattttccggctttatgtca

SEQ ID NO: 160730 - DNA, 25 bp, probe
caagactttctccacttgtgtatcc

SEQ ID NO: 160731 - DNA, 25 bp, probe
caagactttctaactgggatgtggt

SEQ ID NO: 160732 - DNA, 25 bp, probe
caagatccccgacttgactgatgtg

SEQ ID NO: 160733 - DNA, 25 bp, probe
caagattccgtgtcactgtggagct

SEQ ID NO: 160734 - DNA, 25 bp, probe
caagttccaggagctggtgctgccc

SEQ ID NO: 160735 - DNA, 25 bp, probe
caagttggccgaggtgggcagccac

SEQ ID NO: 160736 - DNA, 25 bp, probe
caagatagcccgcgaaggcgacacc

SEQ ID NO: 160737 - DNA, 25 bp, probe
caagatcccggtcaagtggacagcg

SEQ ID NO: 160738 - DNA, 25 bp, probe
caagatcgacacctgccagggagac

SEQ ID NO: 160739 - DNA, 25 bp, probe
caagactgaagactgcacaggtgac

SEQ ID NO: 160740 - DNA, 25 bp, probe
caagatgctgaccagccagggggct

SEQ ID NO: 160741 - DNA, 25 bp, probe
caagatccacgaggagaaggacttc

SEQ ID NO: 160742 - DNA, 25 bp, probe
caagaacacagccggaaagacctcc

SEQ ID NO: 160743 - DNA, 25 bp, probe
ctaggccccagggaaagagccccat

SEQ ID NO: 160744 - DNA, 25 bp, probe
caagagcatcccagctataaggctc

SEQ ID NO: 160745 - DNA, 25 bp, probe
caagaccagcctggccaacatggtg

SEQ ID NO: 160746 - DNA, 25 bp, probe
caacatcacgccgcgcgaaggtgat

SEQ ID NO: 160747 - DNA, 25 bp, probe
caactcagccatctggcacagggga

SEQ ID NO: 160748 - DNA, 25 bp, probe
caaccaccagcatttcactacagga

SEQ ID NO: 160749 - DNA, 25 bp, probe
caacgaccagctatggtacagacag

SEQ ID NO: 160750 - DNA, 25 bp, probe
caaccatcgagtttgttacccagcg

SEQ ID NO: 160751 - DNA, 25 bp, probe
caagaaccagatggtgttccccgcg

SEQ ID NO: 160752 - DNA, 25 bp, probe
caagaaacgtgcaatgttcccttcg

SEQ ID NO: 160753 - DNA, 25 bp, probe
caagcactacggccagttcacgtgc

SEQ ID NO: 160754 - DNA, 25 bp, probe
caagcactacggccagttcacgtgc

SEQ ID NO: 160755 - DNA, 25 bp, probe
caagccccgaaacacagcagagctc

SEQ ID NO: 160756 - DNA, 25 bp, probe
caacctcaccacaagtacaaagacc

SEQ ID NO: 160757 - DNA, 25 bp, probe
caagcaccaaccccataaagtgaca

SEQ ID NO: 160758 - DNA, 25 bp, probe
caacaccaccgggcatttggtgaag

SEQ ID NO: 160759 - DNA, 25 bp, probe
caaccaaccatcgcattctgggtct

SEQ ID NO: 160760 - DNA, 25 bp, probe
caaccaaccatcgcattctgggtct

SEQ ID NO: 160761 - DNA, 25 bp, probe
caaccgcaagaagcccgggatctac

SEQ ID NO: 160762 - DNA, 25 bp, probe
caactggcgggagaacctggaccgg

SEQ ID NO: 160763 - DNA, 25 bp, probe
cacacgggaagtgaaggggccctgg

SEQ ID NO: 160764 - DNA, 25 bp, probe
cacacgggaagtgaaggggccctgg

SEQ ID NO: 160765 - DNA, 25 bp, probe
cacaaggtgatagaagtcgggccct

SEQ ID NO: 160766 - DNA, 25 bp, probe
caacagcttccagaacctggggcct

SEQ ID NO: 160767 - DNA, 25 bp, probe
caacctgccctggaaccaggggcaa

SEQ ID NO: 160768 - DNA, 25 bp, probe
caaccccagggaaacagggccagca

SEQ ID NO: 160769 - DNA, 25 bp, probe
caagacccgggaaaaggagaagatg

SEQ ID NO: 160770 - DNA, 25 bp, probe
cacagcccgggtgagaagtaaaagc

SEQ ID NO: 160771 - DNA, 25 bp, probe
cacacgggggctcaacggaacagac

SEQ ID NO: 160772 - DNA, 25 bp, probe
caacggggagctgaatgcggacgac

SEQ ID NO: 160773 - DNA, 25 bp, probe
caactagggctgcgaatctagagga

SEQ ID NO: 160774 - DNA, 25 bp, probe
caacaggagggcggaagtagagtcc

SEQ ID NO: 160775 - DNA, 25 bp, probe
caagcggcaggcgcaggaggaggcc

SEQ ID NO: 160776 - DNA, 25 bp, probe
caagctggtgtgttcaaggcgagga

SEQ ID NO: 160777 - DNA, 25 bp, probe
caagctgaggctgtacattgagcag

SEQ ID NO: 160778 - DNA, 25 bp, probe
caagcgctggcgtaagcatggggtc

SEQ ID NO: 160779 - DNA, 25 bp, probe
caagctgctgccaatgcaagtggat

SEQ ID NO: 160780 - DNA, 25 bp, probe
caagctgtcatcggacgtgctgacg

SEQ ID NO: 160781 - DNA, 25 bp, probe
caactgctcattgcctgtgtggcac

SEQ ID NO: 160782 - DNA, 25 bp, probe
caacaggtcttccagatgtgtaata

SEQ ID NO: 160783 - DNA, 25 bp, probe
caagaacactgtgcacatggtcagt

SEQ ID NO: 160784 - DNA, 25 bp, probe
caagcaatccgtgcactgcttcaaa

SEQ ID NO: 160785 - DNA, 25 bp, probe
caagacagccagggcacttcgcatt

SEQ ID NO: 160786 - DNA, 25 bp, probe
caagacagccagggcacttcgcatt

SEQ ID NO: 160787 - DNA, 25 bp, probe
caagatgctccagaacactgcctgt

SEQ ID NO: 160788 - DNA, 25 bp, probe
caagacccggaatgtgcctgttcgg

SEQ ID NO: 160789 - DNA, 25 bp, probe
caagcacccagggaagcgcctgggc

SEQ ID NO: 160790 - DNA, 25 bp, probe
caagagacgaggaccggcctatgtc

SEQ ID NO: 160791 - DNA, 25 bp, probe
caagatagcggactttggcctggct

SEQ ID NO: 160792 - DNA, 25 bp, probe
caagatagcggactttggcctggct

SEQ ID NO: 160793 - DNA, 25 bp, probe
caagatggcggacctggaggcggtg

SEQ ID NO: 160794 - DNA, 25 bp, probe
caagatggaggacccgggcagtgtg

SEQ ID NO: 160795 - DNA, 25 bp, probe
caagagggcgaccactgttactggg

SEQ ID NO: 160796 - DNA, 25 bp, probe
cacaggggacccgttgatatctggt

SEQ ID NO: 160797 - DNA, 25 bp, probe
caagagggcacctgaggagactttg

SEQ ID NO: 160798 - DNA, 25 bp, probe
caagcgggccaccgagaggttttct

SEQ ID NO: 160799 - DNA, 25 bp, probe
caagcgggccaccgagaggttttct

SEQ ID NO: 160800 - DNA, 25 bp, probe
caactgggagcctgaagtccttttc

SEQ ID NO: 160801 - DNA, 25 bp, probe
caagccgaggcagagatcagcttca

SEQ ID NO: 160802 - DNA, 25 bp, probe
caagacagaggagcacaccaccatc

SEQ ID NO: 160803 - DNA, 25 bp, probe
caagacagaggagcacaccaccatc

SEQ ID NO: 160804 - DNA, 25 bp, probe
caagaacagcaagccaatccacacg

SEQ ID NO: 160805 - DNA, 25 bp, probe
caagaacagcaagcctatccatacc

SEQ ID NO: 160806 - DNA, 25 bp, probe
caagacaagatccacctgatcaata

SEQ ID NO: 160807 - DNA, 25 bp, probe
caactccatgtccccagaaatgatg

SEQ ID NO: 160808 - DNA, 25 bp, probe
caaccaatgctgtgcctcaaagatg

SEQ ID NO: 160809 - DNA, 25 bp, probe
caaccaacatggcagctaacacatg

SEQ ID NO: 160810 - DNA, 25 bp, probe
caacctacatcaaactgggccagtg

SEQ ID NO: 160811 - DNA, 25 bp, probe
caagcgctacgagacgctggaggtg

SEQ ID NO: 160812 - DNA, 25 bp, probe
caacgctatcgcccagggcggggag

SEQ ID NO: 160813 - DNA, 25 bp, probe
caacgccacagcatcaaggatgtgc

SEQ ID NO: 160814 - DNA, 25 bp, probe
caacgtcattgggcaaggtctggtc

SEQ ID NO: 160815 - DNA, 25 bp, probe
caacgtcttgaacaggcgctgatga

SEQ ID NO: 160816 - DNA, 25 bp, probe
caacctaatgaccataagactatca

SEQ ID NO: 160817 - DNA, 25 bp, probe
caaccatgattgatgatgaagcctt

SEQ ID NO: 160818 - DNA, 25 bp, probe
caaccatgattgatgatgaagcctt

SEQ ID NO: 160819 - DNA, 25 bp, probe
caagccatagagttggggcctctga

SEQ ID NO: 160820 - DNA, 25 bp, probe
caagccatagagttggggcctctga

SEQ ID NO: 160821 - DNA, 25 bp, probe
caagagctgtgacttgtggtcccta

SEQ ID NO: 160822 - DNA, 25 bp, probe
caagaaggatctagtctgcccacta

SEQ ID NO: 160823 - DNA, 25 bp, probe
caagacggagccatttccactgatg

SEQ ID NO: 160824 - DNA, 25 bp, probe
caagcacggaacaagctgagacgga

SEQ ID NO: 160825 - DNA, 25 bp, probe
caacctcagcaatcagcagacacgg

SEQ ID NO: 160826 - DNA, 25 bp, probe
caacgctacagatgggatcaagggc

SEQ ID NO: 160827 - DNA, 25 bp, probe
caactgaatatgagaggaacgggag

SEQ ID NO: 160828 - DNA, 25 bp, probe
cagaaggacagcaggaaagggggct

SEQ ID NO: 160829 - DNA, 25 bp, probe
caagagtgggctggagccaagggaa

SEQ ID NO: 160830 - DNA, 25 bp, probe
caagcgcctacagcagctcatagag

SEQ ID NO: 160831 - DNA, 25 bp, probe
caagccctacagcaagaaggactat

SEQ ID NO: 160832 - DNA, 25 bp, probe
caagcacctcaccgaaaagttctac

SEQ ID NO: 160833 - DNA, 25 bp, probe
caagcaaatagctgaagactttcca

SEQ ID NO: 160834 - DNA, 25 bp, probe
caagccatcaagtgctttctttcca

SEQ ID NO: 160835 - DNA, 25 bp, probe
caagcccaagatgttctgtgctggc

SEQ ID NO: 160836 - DNA, 25 bp, probe
caagaccaagaccagctttgctgcc

SEQ ID NO: 160837 - DNA, 25 bp, probe
caagacgacgacagctgttgctcac

SEQ ID NO: 160838 - DNA, 25 bp, probe
caagcacgagctcacggactgtgcc

SEQ ID NO: 160839 - DNA, 25 bp, probe
caagacgacttcgtgctgacagctg

SEQ ID NO: 160840 - DNA, 25 bp, probe
caagcacagatgtacaggtatcagg

SEQ ID NO: 160841 - DNA, 25 bp, probe
caagacgctggctgatgtactggta

SEQ ID NO: 160842 - DNA, 25 bp, probe
caacagcggctctgaggtctggtac

SEQ ID NO: 160843 - DNA, 25 bp, probe
caacagcggctctgaggtctggtac

SEQ ID NO: 160844 - DNA, 25 bp, probe
caaccatcgcattctgggtctgcaa

SEQ ID NO: 160845 - DNA, 25 bp, probe
caaccatcgcattctgggtctgcaa

SEQ ID NO: 160846 - DNA, 25 bp, probe
caagcacacgcattgttggaggaac

SEQ ID NO: 160847 - DNA, 25 bp, probe
caagacgctgcactcgtggaggaag

SEQ ID NO: 160848 - DNA, 25 bp, probe
caagacagcggcaggcctgggatgg

SEQ ID NO: 160849 - DNA, 25 bp, probe
caagacacggctgggttggatatgc

SEQ ID NO: 160850 - DNA, 25 bp, probe
caagacacggctgggttggatatgc

SEQ ID NO: 160851 - DNA, 25 bp, probe
caagagctccgtggaggtgtatgcc

SEQ ID NO: 160852 - DNA, 25 bp, probe
caagactccctccagtgaggagctg

SEQ ID NO: 160853 - DNA, 25 bp, probe
caacctccctaatgcaggtctcaga

SEQ ID NO: 160854 - DNA, 25 bp, probe
caacctccatatcctggcggttgaa

SEQ ID NO: 160855 - DNA, 25 bp, probe
caacctgcctgaactggccatggtg

SEQ ID NO: 160856 - DNA, 25 bp, probe
caagcatccacttgtctgtgtctgg

SEQ ID NO: 160857 - DNA, 25 bp, probe
caagagccaggactctgatccaggg

SEQ ID NO: 160858 - DNA, 25 bp, probe
caagcgccagtgaggactgctggcc

SEQ ID NO: 160859 - DNA, 25 bp, probe
caacccagtcattgtcagtggccgg

SEQ ID NO: 160860 - DNA, 25 bp, probe
caagagcaagttctcgggagcggtt

SEQ ID NO: 160861 - DNA, 25 bp, probe
caagaacgcttcgctgagaggccag

SEQ ID NO: 160862 - DNA, 25 bp, probe
caagaagctgcttatcctcaggggc

SEQ ID NO: 160863 - DNA, 25 bp, probe
caagacacttattcatacatcagga

SEQ ID NO: 160864 - DNA, 25 bp, probe
caagacatcgtcttccacaaggaaa

SEQ ID NO: 160865 - DNA, 25 bp, probe
caagactccatatctacagaacatt

SEQ ID NO: 160866 - DNA, 25 bp, probe
caagagcccaatgcattccatttct

SEQ ID NO: 160867 - DNA, 25 bp, probe
caagactctcaaggagtactttctt

SEQ ID NO: 160868 - DNA, 25 bp, probe
caagaagtcacagagcccgttctgc

SEQ ID NO: 160869 - DNA, 25 bp, probe
cacagtttgctagacccaggtcact

SEQ ID NO: 160870 - DNA, 25 bp, probe
caactttgcaaaagcccagtctccg

SEQ ID NO: 160871 - DNA, 25 bp, probe
caacattcggaaagccttgtcattt

SEQ ID NO: 160872 - DNA, 25 bp, probe
caacatttgtcataggtattactta

SEQ ID NO: 160873 - DNA, 25 bp, probe
caagcctctgttaaagtcattgact

SEQ ID NO: 160874 - DNA, 25 bp, probe
caagcctgcgtgtcataaactgaac

SEQ ID NO: 160875 - DNA, 25 bp, probe
caagctctgcggaaatcaacagccc

SEQ ID NO: 160876 - DNA, 25 bp, probe
caagctgtcggtgatccacagagat

SEQ ID NO: 160877 - DNA, 25 bp, probe
caactgtctagtgggccagggactg

SEQ ID NO: 160878 - DNA, 25 bp, probe
caacttctatcgggccattgagagc

SEQ ID NO: 160879 - DNA, 25 bp, probe
caacttttggatccaagctggagtg

SEQ ID NO: 160880 - DNA, 25 bp, probe
caactcctatgcataaagctgctgg

SEQ ID NO: 160881 - DNA, 25 bp, probe
caaccatctacagaacagctgctgg

SEQ ID NO: 160882 - DNA, 25 bp, probe
caaccatctacagaacagctgctgg

SEQ ID NO: 160883 - DNA, 25 bp, probe
caagccttcaacagaagctgtgctg

SEQ ID NO: 160884 - DNA, 25 bp, probe
caagccattgcagcggcatttggtc

SEQ ID NO: 160885 - DNA, 25 bp, probe
caagcctgagaacatattgtgtgtc

SEQ ID NO: 160886 - DNA, 25 bp, probe
caagcctgagaacatattgtgtgtc

SEQ ID NO: 160887 - DNA, 25 bp, probe
caacctagaagctttgctgcaggat

SEQ ID NO: 160888 - DNA, 25 bp, probe
caactctcaatctatttgctggagt

SEQ ID NO: 160889 - DNA, 25 bp, probe
caagcactatgagatactcgaggtg

SEQ ID NO: 160890 - DNA, 25 bp, probe
caagccatagacagcctgcgagacc

SEQ ID NO: 160891 - DNA, 25 bp, probe
caagcctgttgctgccaggagactt

SEQ ID NO: 160892 - DNA, 25 bp, probe
caagcggggcgtgagctgtcagttt

SEQ ID NO: 160893 - DNA, 25 bp, probe
caagctggtggcctatatgatctgc

SEQ ID NO: 160894 - DNA, 25 bp, probe
caactgtgggcaataatatggcatt

SEQ ID NO: 160895 - DNA, 25 bp, probe
caagcctgcccaatgatgaaggcat

SEQ ID NO: 160896 - DNA, 25 bp, probe
caacctgtccctagaaggcatcgca

SEQ ID NO: 160897 - DNA, 25 bp, probe
caagccaatcccttaatgtcattcc

SEQ ID NO: 160898 - DNA, 25 bp, probe
caactggtcggcttcagagtttcca

SEQ ID NO: 160899 - DNA, 25 bp, probe
caaccagtggagattgcagccttcc

SEQ ID NO: 160900 - DNA, 25 bp, probe
caaccaggtggtatcaggcccctga

SEQ ID NO: 160901 - DNA, 25 bp, probe
caagcccgagaggaagggccccgag

SEQ ID NO: 160902 - DNA, 25 bp, probe
caagcacctagcatgacaatggccc

SEQ ID NO: 160903 - DNA, 25 bp, probe
caagacctatgttacagcatccaac

SEQ ID NO: 160904 - DNA, 25 bp, probe
caagcaaatatttatgacctcaaca

SEQ ID NO: 160905 - DNA, 25 bp, probe
caagcaaatatttatgacctcaaca

SEQ ID NO: 160906 - DNA, 25 bp, probe
caaaaatattgagacccccaagacg

SEQ ID NO: 160907 - DNA, 25 bp, probe
caagaaattcgacagcctcctggag

SEQ ID NO: 160908 - DNA, 25 bp, probe
caaaaatgacgacactgtaagtagc

SEQ ID NO: 160909 - DNA, 25 bp, probe
caaaagtacaggctttttcttcatt

SEQ ID NO: 160910 - DNA, 25 bp, probe
caagaacatccgagtttcttctcta

SEQ ID NO: 160911 - DNA, 25 bp, probe
caagaactctttgctgttgacccaa

SEQ ID NO: 160912 - DNA, 25 bp, probe
caagaactctttgctgttgacccaa

SEQ ID NO: 160913 - DNA, 25 bp, probe
caaaaactcttgcctaataccctga

SEQ ID NO: 160914 - DNA, 25 bp, probe
caacatgaagtttcctacttccttg

SEQ ID NO: 160915 - DNA, 25 bp, probe
caagcaaaggtggcttccttcctga

SEQ ID NO: 160916 - DNA, 25 bp, probe
caagcaaatcgtgcatttttgtcta

SEQ ID NO: 160917 - DNA, 25 bp, probe
caaaaatcccatggttgttgttagg

SEQ ID NO: 160918 - DNA, 25 bp, probe
caacgtgtcccatgtcgtgggctat

SEQ ID NO: 160919 - DNA, 25 bp, probe
caacctgaactgtgaggcgggcagt

SEQ ID NO: 160920 - DNA, 25 bp, probe
caacttggacaaacggcggagcctg

SEQ ID NO: 160921 - DNA, 25 bp, probe
caactgttgacatgaccagaaagcc

SEQ ID NO: 160922 - DNA, 25 bp, probe
caaccattaaggtccacaccatctc

SEQ ID NO: 160923 - DNA, 25 bp, probe
caccctgtaaggtccaaggccttga

SEQ ID NO: 160924 - DNA, 25 bp, probe
caacctggaaaggccatcggctttg

SEQ ID NO: 160925 - DNA, 25 bp, probe
caacccaaagatgccacggactggt

SEQ ID NO: 160926 - DNA, 25 bp, probe
caaaccaaagacccacaaggtgagg

SEQ ID NO: 160927 - DNA, 25 bp, probe
caaactgaaaagcacaagacctatg

SEQ ID NO: 160928 - DNA, 25 bp, probe
catcaacctaacccagaaactctgg

SEQ ID NO: 160929 - DNA, 25 bp, probe
caagcacctgaagcacgagaacgtc

SEQ ID NO: 160930 - DNA, 25 bp, probe
catatgcagcgacaaagaaaacttc

SEQ ID NO: 160931 - DNA, 25 bp, probe
caagcagaagccaacagagaaacct

SEQ ID NO: 160932 - DNA, 25 bp, probe
caaccaggaccatgagaaacttttt

SEQ ID NO: 160933 - DNA, 25 bp, probe
caaaatggagtatgaaaccctttct

SEQ ID NO: 160934 - DNA, 25 bp, probe
caaaatggagtatgaaaccctttct

SEQ ID NO: 160935 - DNA, 25 bp, probe
caaaagatggtgttagtccccttct

SEQ ID NO: 160936 - DNA, 25 bp, probe
caaaatggggggctccccaagcttg

SEQ ID NO: 160937 - DNA, 25 bp, probe
caaaagggagaacatggccaatagt

SEQ ID NO: 160938 - DNA, 25 bp, probe
caaaagttccatatagacaccaagg

SEQ ID NO: 160939 - DNA, 25 bp, probe
caaagggtccctgaggctaagtggc

SEQ ID NO: 160940 - DNA, 25 bp, probe
caaagtttcccagagatgcatgaat

SEQ ID NO: 160941 - DNA, 25 bp, probe
caaattttgcgctcggtgcgatact

SEQ ID NO: 160942 - DNA, 25 bp, probe
cagaaatgtacgttccttcgctagc

SEQ ID NO: 160943 - DNA, 25 bp, probe
cagaaatgtacgttccttcgctagc

SEQ ID NO: 160944 - DNA, 25 bp, probe
caagaagtcaagatctccatcttgg

SEQ ID NO: 160945 - DNA, 25 bp, probe
caagcaagtagctttccacatttgt

SEQ ID NO: 160946 - DNA, 25 bp, probe
caacaggtactcttctgtttgtggg

SEQ ID NO: 160947 - DNA, 25 bp, probe
caacaggctgactgggtgttagtgg

SEQ ID NO: 160948 - DNA, 25 bp, probe
caactggtgatggaaggttacaagt

SEQ ID NO: 160949 - DNA, 25 bp, probe
caagctggtggaagacgtcacaaat

SEQ ID NO: 160950 - DNA, 25 bp, probe
caagctttggatttcctgcactcaa

SEQ ID NO: 160951 - DNA, 25 bp, probe
caagaattggtatcacagccatcac

SEQ ID NO: 160952 - DNA, 25 bp, probe
caagaatgtgtctcacaggcttcct

SEQ ID NO: 160953 - DNA, 25 bp, probe
caagaatgggcagcacagactctct

SEQ ID NO: 160954 - DNA, 25 bp, probe
caagaatggcctgaggtcccgatgg

SEQ ID NO: 160955 - DNA, 25 bp, probe
caagaagtgcctgaggactcacgcc

SEQ ID NO: 160956 - DNA, 25 bp, probe
caagaaagcctcagccattcactgc

SEQ ID NO: 160957 - DNA, 25 bp, probe
caagaaagcctcagccattcactgc

SEQ ID NO: 160958 - DNA, 25 bp, probe
caaaatagtgacactgcattccagc

SEQ ID NO: 160959 - DNA, 25 bp, probe
caagaatcaatactttcaacccaag

SEQ ID NO: 160960 - DNA, 25 bp, probe
cgacaatcaagttttacaccaaaca

SEQ ID NO: 160961 - DNA, 25 bp, probe
caagcaataactctctacaggaata

SEQ ID NO: 160962 - DNA, 25 bp, probe
caagcctgatactctccaggctgaa

SEQ ID NO: 160963 - DNA, 25 bp, probe
caagcaggaagctcagactggttga

SEQ ID NO: 160964 - DNA, 25 bp, probe
caagcagtcaagaccagctgggtag

SEQ ID NO: 160965 - DNA, 25 bp, probe
cacaatatttgtgcggggtatgggg

SEQ ID NO: 160966 - DNA, 25 bp, probe
cagaatatttttgaggcgaaggcgt

SEQ ID NO: 160967 - DNA, 25 bp, probe
caacatacttttagtgaccacgggc

SEQ ID NO: 160968 - DNA, 25 bp, probe
caactgcacgctattgctgtgccgc

SEQ ID NO: 160969 - DNA, 25 bp, probe
caactgcacgctattgctgtgccgc

SEQ ID NO: 160970 - DNA, 25 bp, probe
caactgcacgctattgctgtgccgc

SEQ ID NO: 160971 - DNA, 25 bp, probe
caactgctggcattttgctggtcag

SEQ ID NO: 160972 - DNA, 25 bp, probe
caactgttgtcttgctcttgataga

SEQ ID NO: 160973 - DNA, 25 bp, probe
caagctcatagcacatgttttacaa

SEQ ID NO: 160974 - DNA, 25 bp, probe
caagctcatagcacatgttttacaa

SEQ ID NO: 160975 - DNA, 25 bp, probe
caagctctactgcaatttggacaag

SEQ ID NO: 160976 - DNA, 25 bp, probe
caagctctactgcaatttggacaag

SEQ ID NO: 160977 - DNA, 25 bp, probe
cataggtagccgtagttggactgac

SEQ ID NO: 160978 - DNA, 25 bp, probe
caactgtacgcctttggtatctgac

SEQ ID NO: 160979 - DNA, 25 bp, probe
caacttcaccactcaagaactgtca

SEQ ID NO: 160980 - DNA, 25 bp, probe
caacttcagtcctgggagacccatg

SEQ ID NO: 160981 - DNA, 25 bp, probe
cacaattatgtccaccgggacctgg

SEQ ID NO: 160982 - DNA, 25 bp, probe
caagaattgcatccaccgggacgtg

SEQ ID NO: 160983 - DNA, 25 bp, probe
caagaactcgaacccggacgaggtg

SEQ ID NO: 160984 - DNA, 25 bp, probe
caagaacataaaccctccaagggat

SEQ ID NO: 160985 - DNA, 25 bp, probe
caagaactacaactttccaaaatat

SEQ ID NO: 160986 - DNA, 25 bp, probe
caagaactacaactttccaaaatat

SEQ ID NO: 160987 - DNA, 25 bp, probe
caagaactacaacagcgccttcaag

SEQ ID NO: 160988 - DNA, 25 bp, probe
caagaactacaacagcgccttcaag

SEQ ID NO: 160989 - DNA, 25 bp, probe
caagaatttattcaccagttcctct

SEQ ID NO: 160990 - DNA, 25 bp, probe
caaattttgttgcaccagaggtttt

SEQ ID NO: 160991 - DNA, 25 bp, probe
caaaatgtatgtcaaccaagtgttt

SEQ ID NO: 160992 - DNA, 25 bp, probe
caaagtccagtaaaccaaagctcct

SEQ ID NO: 160993 - DNA, 25 bp, probe
caaaactagtaatccttatcaccat

SEQ ID NO: 160994 - DNA, 25 bp, probe
gcaaaacccgaaaccgttacatctg

SEQ ID NO: 160995 - DNA, 25 bp, probe
caaaagcaccagcaggcacgttaac

SEQ ID NO: 160996 - DNA, 25 bp, probe
caagaatcggcacgaggattattca

SEQ ID NO: 160997 - DNA, 25 bp, probe
caaaagtggagcgaggatgatttca

SEQ ID NO: 160998 - DNA, 25 bp, probe
caaccaatggagagctgaatgttga

SEQ ID NO: 160999 - DNA, 25 bp, probe
caaccagaagggatacagtgtgaag

SEQ ID NO: 161000 - DNA, 25 bp, probe
caaccaccaggtgtcaaatgagaaa

SEQ ID NO: 161001 - DNA, 25 bp, probe
caactaccacttgccagcaacaaaa

SEQ ID NO: 161002 - DNA, 25 bp, probe
caactaccacttgccagcaacaaaa

SEQ ID NO: 161003 - DNA, 25 bp, probe
caagcccaccagataccagaaaatc

SEQ ID NO: 161004 - DNA, 25 bp, probe
aacatattctagaggacagaaaggc

SEQ ID NO: 161005 - DNA, 25 bp, probe
caacctcctagaacatcacgcaaat

SEQ ID NO: 161006 - DNA, 25 bp, probe
caacgtcctacaaactcgcaagtat

SEQ ID NO: 161007 - DNA, 25 bp, probe
caacagtcccaaccagtcgaattag

SEQ ID NO: 161008 - DNA, 25 bp, probe
caacatccacactaggcaggaatat

SEQ ID NO: 161009 - DNA, 25 bp, probe
caagcaacacgacgacacgaaatca

SEQ ID NO: 161010 - DNA, 25 bp, probe
caagcaacaaagtcccgagcaatga

SEQ ID NO: 161011 - DNA, 25 bp, probe
caagcaacaaagtcccgagcaatga

SEQ ID NO: 161012 - DNA, 25 bp, probe
caagcagattaaccccaggcagacc

SEQ ID NO: 161013 - DNA, 25 bp, probe
caaagttcaagttcaaagctgttca

SEQ ID NO: 161014 - DNA, 25 bp, probe
caaatttctctgttccatagttaaa

SEQ ID NO: 161015 - DNA, 25 bp, probe
caactcttcaggttccacatggtat

SEQ ID NO: 161016 - DNA, 25 bp, probe
caacctggctgtttcccagtttcag

SEQ ID NO: 161017 - DNA, 25 bp, probe
caacttctgtaacaccagatgttag

SEQ ID NO: 161018 - DNA, 25 bp, probe
caacattttacccacacacagataa

SEQ ID NO: 161019 - DNA, 25 bp, probe
caaatgtttacccaaacacttctca

SEQ ID NO: 161020 - DNA, 25 bp, probe
caaagggatccacaaagcattgtcc

SEQ ID NO: 161021 - DNA, 25 bp, probe
caacaggagtcttcgaaaccgtgga

SEQ ID NO: 161022 - DNA, 25 bp, probe
caacaaggctctgaaacccgaggat

SEQ ID NO: 161023 - DNA, 25 bp, probe
caaccatgacctgaaacctcagcgt

SEQ ID NO: 161024 - DNA, 25 bp, probe
caacctcatccagacagaacgacag

SEQ ID NO: 161025 - DNA, 25 bp, probe
caacttctccactcatgacaaatca

SEQ ID NO: 161026 - DNA, 25 bp, probe
caacgtgctccaccgagatctaaag

SEQ ID NO: 161027 - DNA, 25 bp, probe
caagcgcatcacgacaaggatatga

SEQ ID NO: 161028 - DNA, 25 bp, probe
caagcagcagtcgacatgtaaatga

SEQ ID NO: 161029 - DNA, 25 bp, probe
caacagcagcctgcagctggattac

SEQ ID NO: 161030 - DNA, 25 bp, probe
caaccagcactttctgtggtactcc

SEQ ID NO: 161031 - DNA, 25 bp, probe
caaccagcagttcctggcaggcact

SEQ ID NO: 161032 - DNA, 25 bp, probe
caactcgaagtcatccatggacccc

SEQ ID NO: 161033 - DNA, 25 bp, probe
caactcgaagtcatccatggacccc

SEQ ID NO: 161034 - DNA, 25 bp, probe
cagtccttggataacctgtaccgac

SEQ ID NO: 161035 - DNA, 25 bp, probe
cagtaccgagtaccagtgtatccca

SEQ ID NO: 161036 - DNA, 25 bp, probe
caaacaggtgctaacactgttccca

SEQ ID NO: 161037 - DNA, 25 bp, probe
cgactagaccggagtgtctcctacc

SEQ ID NO: 161038 - DNA, 25 bp, probe
cgactagaccggagtgtctcctacc

SEQ ID NO: 161039 - DNA, 25 bp, probe
caagctcaagaccgaggtgtcctct

SEQ ID NO: 161040 - DNA, 25 bp, probe
caagctgctgaaggagggtcaccgc

SEQ ID NO: 161041 - DNA, 25 bp, probe
caagctgtgagagtgcaggcggggg

SEQ ID NO: 161042 - DNA, 25 bp, probe
caagcagaggggttgctggaggtga

SEQ ID NO: 161043 - DNA, 25 bp, probe
caagcagaggagcggctgcaggccc

SEQ ID NO: 161044 - DNA, 25 bp, probe
caagcaatggagagcggcgagcatg

SEQ ID NO: 161045 - DNA, 25 bp, probe
caagcagctggacttccagagacat

SEQ ID NO: 161046 - DNA, 25 bp, probe
caagcagatctactactcggacaag

SEQ ID NO: 161047 - DNA, 25 bp, probe
caagcttctgcacatccggatagaa

SEQ ID NO: 161048 - DNA, 25 bp, probe
caagcttctgcacatccggatagaa

SEQ ID NO: 161049 - DNA, 25 bp, probe
caagcttctgcacatccggatagaa

SEQ ID NO: 161050 - DNA, 25 bp, probe
caagcttctgcacatccggatagaa

SEQ ID NO: 161051 - DNA, 25 bp, probe
caagcccatatcatctctgctgata

SEQ ID NO: 161052 - DNA, 25 bp, probe
caagccagacaacctgctgctggcc

SEQ ID NO: 161053 - DNA, 25 bp, probe
caagccagataccctgcaggctggc

SEQ ID NO: 161054 - DNA, 25 bp, probe
caagccagaggccagtcagatgccc

SEQ ID NO: 161055 - DNA, 25 bp, probe
caagcctgggaggtcatgagcaccc

SEQ ID NO: 161056 - DNA, 25 bp, probe
caacttgagtgatctgagctgaatt

SEQ ID NO: 161057 - DNA, 25 bp, probe
caagcagtatggaaaaccccgcacc

SEQ ID NO: 161058 - DNA, 25 bp, probe
caaagctattgaactactaacgtca

SEQ ID NO: 161059 - DNA, 25 bp, probe
caacatgttggacaagctgatacgt

SEQ ID NO: 161060 - DNA, 25 bp, probe
caacgatctctacacactctttgat

SEQ ID NO: 161061 - DNA, 25 bp, probe
caaccaattgatcacaatcatttaa

SEQ ID NO: 161062 - DNA, 25 bp, probe
caactccatctgtaatcccattgtc

SEQ ID NO: 161063 - DNA, 25 bp, probe
caactccatgatcaatcccatcatc

SEQ ID NO: 161064 - DNA, 25 bp, probe
caacatgcattcactacagctcacc

SEQ ID NO: 161065 - DNA, 25 bp, probe
caagcagatacaacatcatagcact

SEQ ID NO: 161066 - DNA, 25 bp, probe
caacagacactcaataaactttttg

SEQ ID NO: 161067 - DNA, 25 bp, probe
caagcagccatgtgtctaattttct

SEQ ID NO: 161068 - DNA, 25 bp, probe
caagccacaggccttatttcatatg

SEQ ID NO: 161069 - DNA, 25 bp, probe
cacagccaaggcctaactatgcctc

SEQ ID NO: 161070 - DNA, 25 bp, probe
caacccaggctttaggcagcagctt

SEQ ID NO: 161071 - DNA, 25 bp, probe
caagcaccattattaagccactttg

SEQ ID NO: 161072 - DNA, 25 bp, probe
caacaaggtttgctgctgcctattg

SEQ ID NO: 161073 - DNA, 25 bp, probe
caacaaggtttgctgctgcctattg

SEQ ID NO: 161074 - DNA, 25 bp, probe
caagccgactttcatgagctgctga

SEQ ID NO: 161075 - DNA, 25 bp, probe
caagccaggctttggtggcagcatg

SEQ ID NO: 161076 - DNA, 25 bp, probe
caacatggactttgtcatggcactc

SEQ ID NO: 161077 - DNA, 25 bp, probe
caagcatgcccaatcttagagactc

SEQ ID NO: 161078 - DNA, 25 bp, probe
caagctggtcccatggatgatcctg

SEQ ID NO: 161079 - DNA, 25 bp, probe
caagctgccctagtgggtatctctt

SEQ ID NO: 161080 - DNA, 25 bp, probe
caagctgccctagtgggtatctctt

SEQ ID NO: 161081 - DNA, 25 bp, probe
caagccctataattagcttctcatt

SEQ ID NO: 161082 - DNA, 25 bp, probe
caagctgataactactgacttcact

SEQ ID NO: 161083 - DNA, 25 bp, probe
caagctgtaactaatgtctcctccg

SEQ ID NO: 161084 - DNA, 25 bp, probe
caacattccattcagtgctgccttc

SEQ ID NO: 161085 - DNA, 25 bp, probe
caacggccactgtgtgtggctgctc

SEQ ID NO: 161086 - DNA, 25 bp, probe
caacgaccactttgtcaagctcatt

SEQ ID NO: 161087 - DNA, 25 bp, probe
caagctaccatctcagatatatata

SEQ ID NO: 161088 - DNA, 25 bp, probe
caagctgtcctgctcagatatcttc

SEQ ID NO: 161089 - DNA, 25 bp, probe
caagcagtcggcctacgacttcaag

SEQ ID NO: 161090 - DNA, 25 bp, probe
caaaacgggctacaccaatagaagt

SEQ ID NO: 161091 - DNA, 25 bp, probe
caaaaagtggatagaacgcaaacaa

SEQ ID NO: 161092 - DNA, 25 bp, probe
caaaaatttgatgataccatggcct

SEQ ID NO: 161093 - DNA, 25 bp, probe
caaaaatttggagtgtcagcagcta

SEQ ID NO: 161094 - DNA, 25 bp, probe
caaaattggggcgctcagagaagga

SEQ ID NO: 161095 - DNA, 25 bp, probe
caacaaggaagaccctaagaaagag

SEQ ID NO: 161096 - DNA, 25 bp, probe
caacctgtttgagcctgaagacaca

SEQ ID NO: 161097 - DNA, 25 bp, probe
caaccttttgtgtcacgagatccaa

SEQ ID NO: 161098 - DNA, 25 bp, probe
caacaatttcgtgcatcgagacctg

SEQ ID NO: 161099 - DNA, 25 bp, probe
caacttgcttcagtcatcctgaacc

SEQ ID NO: 161100 - DNA, 25 bp, probe
caacgtgcctgagcaccgaactggc

SEQ ID NO: 161101 - DNA, 25 bp, probe
caacgtcactctgaacgactctggc

SEQ ID NO: 161102 - DNA, 25 bp, probe
caacgtcactctgaacgactctggc

SEQ ID NO: 161103 - DNA, 25 bp, probe
cacaagatccatcgggacgacctgc

SEQ ID NO: 161104 - DNA, 25 bp, probe
caagcctcaagtggggctgacctcc

SEQ ID NO: 161105 - DNA, 25 bp, probe
caacctctattactgggaccaggac

SEQ ID NO: 161106 - DNA, 25 bp, probe
caaccttattaagctcgtcactgca

SEQ ID NO: 161107 - DNA, 25 bp, probe
caactctttatacggttggctctca

SEQ ID NO: 161108 - DNA, 25 bp, probe
catacacttttactttaggactcca

SEQ ID NO: 161109 - DNA, 25 bp, probe
caacctggtgaactttctgcggacc

SEQ ID NO: 161110 - DNA, 25 bp, probe
caacctgggcattgtgtttgggccg

SEQ ID NO: 161111 - DNA, 25 bp, probe
caaccgctggtatcaaatgggcatc

SEQ ID NO: 161112 - DNA, 25 bp, probe
caacccgtgattccaagtgcttatc

SEQ ID NO: 161113 - DNA, 25 bp, probe
caacccgtgattccaagtgcttatc

SEQ ID NO: 161114 - DNA, 25 bp, probe
caaccacgggtgtaagtgccatctg

SEQ ID NO: 161115 - DNA, 25 bp, probe
caaccgcgggggctgtgagcagcgg

SEQ ID NO: 161116 - DNA, 25 bp, probe
caaccgcgggggctgtgagcagcgg

SEQ ID NO: 161117 - DNA, 25 bp, probe
caagccggagcacgaggatcagggg

SEQ ID NO: 161118 - DNA, 25 bp, probe
caaccggacctgttgctagcaggca

SEQ ID NO: 161119 - DNA, 25 bp, probe
caaccggacctgttgctagcaggca

SEQ ID NO: 161120 - DNA, 25 bp, probe
caacgaggccctcttggaggaggcg

SEQ ID NO: 161121 - DNA, 25 bp, probe
caacgggactgctgggagaggaggg

SEQ ID NO: 161122 - DNA, 25 bp, probe
caacgaggacccgggcaagaatgag

SEQ ID NO: 161123 - DNA, 25 bp, probe
caactgggcccccaagtacaatgag

SEQ ID NO: 161124 - DNA, 25 bp, probe
caagctggggcttctagagttcaag

SEQ ID NO: 161125 - DNA, 25 bp, probe
caactacatggtttacatgttccaa

SEQ ID NO: 161126 - DNA, 25 bp, probe
caaccagcggtactattttaataag

SEQ ID NO: 161127 - DNA, 25 bp, probe
caaccaggatttcactcttcaaagc

SEQ ID NO: 161128 - DNA, 25 bp, probe
caaccaggatttcactcttcaaagc

SEQ ID NO: 161129 - DNA, 25 bp, probe
cagccaaaatttgagttagcaacac

SEQ ID NO: 161130 - DNA, 25 bp, probe
cacctaacctgtgtggtaagacctt

SEQ ID NO: 161131 - DNA, 25 bp, probe
cacagcaaagcgggcccgtaacagc

SEQ ID NO: 161132 - DNA, 25 bp, probe
caagctgaagcgtgtccgaatctcc

SEQ ID NO: 161133 - DNA, 25 bp, probe
caagctgaagcgtgtccgaatctcc

SEQ ID NO: 161134 - DNA, 25 bp, probe
caagccaagcgtatgtatcaattct

SEQ ID NO: 161135 - DNA, 25 bp, probe
caacccggtgatttacaatctcatg

SEQ ID NO: 161136 - DNA, 25 bp, probe
caacctgggtcagatcacaaccatc

SEQ ID NO: 161137 - DNA, 25 bp, probe
caacctgggtcagatcacaaccatc

SEQ ID NO: 161138 - DNA, 25 bp, probe
caacctggagaagacctgagacatc

SEQ ID NO: 161139 - DNA, 25 bp, probe
caaccagaagaagtatttgatgtct

SEQ ID NO: 161140 - DNA, 25 bp, probe
caaccagccatctacttcttggctg

SEQ ID NO: 161141 - DNA, 25 bp, probe
caaccacaattcttccatgctgggg

SEQ ID NO: 161142 - DNA, 25 bp, probe
cacacacaaaatgtaattccggtta

SEQ ID NO: 161143 - DNA, 25 bp, probe
cacacacaaaatgtaattccggtta

SEQ ID NO: 161144 - DNA, 25 bp, probe
caaacaaaacccagctcctgagtct

SEQ ID NO: 161145 - DNA, 25 bp, probe
caaacaaaacccagctcctgagtct

SEQ ID NO: 161146 - DNA, 25 bp, probe
caaacaatgcaaacggggcaggggc

SEQ ID NO: 161147 - DNA, 25 bp, probe
caaaaatgactcagggccaagtttc

SEQ ID NO: 161148 - DNA, 25 bp, probe
caaaaaagtgggccgccgagactct

SEQ ID NO: 161149 - DNA, 25 bp, probe
caagcgaaaggcacgcagcgggagc

SEQ ID NO: 161150 - DNA, 25 bp, probe
caacgaagcgtgatcagccgtggaa

SEQ ID NO: 161151 - DNA, 25 bp, probe
caacgacgaggagtcagacgatgag

SEQ ID NO: 161152 - DNA, 25 bp, probe
caagcgccgggcgctgtggatggtg

SEQ ID NO: 161153 - DNA, 25 bp, probe
caagcgccgggcgctgtggatggtg

SEQ ID NO: 161154 - DNA, 25 bp, probe
caagcgcctggaggacgggacagat

SEQ ID NO: 161155 - DNA, 25 bp, probe
caacgccgagctggaaaggaagacg

SEQ ID NO: 161156 - DNA, 25 bp, probe
caactgcccaccgtagggaagcagc

SEQ ID NO: 161157 - DNA, 25 bp, probe
caactttctccagatgaggaaacta

SEQ ID NO: 161158 - DNA, 25 bp, probe
caacttccctgatctttaagacttt

SEQ ID NO: 161159 - DNA, 25 bp, probe
caacttccctgatctttaagacttt

SEQ ID NO: 161160 - DNA, 25 bp, probe
caactgatcccgcttttattaattt

SEQ ID NO: 161161 - DNA, 25 bp, probe
caaatcatccccattaaaaagcttt

SEQ ID NO: 161162 - DNA, 25 bp, probe
caacatcatccgcctttacgaagtg

SEQ ID NO: 161163 - DNA, 25 bp, probe
caacatgcacacatttaacgacaga

SEQ ID NO: 161164 - DNA, 25 bp, probe
caacatgcacacatttaacgacaga

SEQ ID NO: 161165 - DNA, 25 bp, probe
caacatgtcacaacaataacctcca

SEQ ID NO: 161166 - DNA, 25 bp, probe
caacaacacagtgataagatcatcc

SEQ ID NO: 161167 - DNA, 25 bp, probe
caacttccacggtcacatgtgcatc

SEQ ID NO: 161168 - DNA, 25 bp, probe
caaccattcatcagactcagtacaa

SEQ ID NO: 161169 - DNA, 25 bp, probe
caacacagtgataagatcatccgac

SEQ ID NO: 161170 - DNA, 25 bp, probe
caagcctgtgatagcaaagagtgac

SEQ ID NO: 161171 - DNA, 25 bp, probe
caagcctgtgatagcaaagagtgac

SEQ ID NO: 161172 - DNA, 25 bp, probe
caacgggcacacgaaggtggcggtg

SEQ ID NO: 161173 - DNA, 25 bp, probe
caaccggcagatccggggggagctc

SEQ ID NO: 161174 - DNA, 25 bp, probe
caaccactgcttcttgggaggagtg

SEQ ID NO: 161175 - DNA, 25 bp, probe
caaccactgcttcttgggaggagtg

SEQ ID NO: 161176 - DNA, 25 bp, probe
caaccactgcttcttgggaggagtg

SEQ ID NO: 161177 - DNA, 25 bp, probe
caaccactgctaccagtagtgggca

SEQ ID NO: 161178 - DNA, 25 bp, probe
caagccacacaatcagtggggcagc

SEQ ID NO: 161179 - DNA, 25 bp, probe
caagccccgagaaatgcgagccatg

SEQ ID NO: 161180 - DNA, 25 bp, probe
caagccgcaccagagatggctgcct

SEQ ID NO: 161181 - DNA, 25 bp, probe
caagccgcaccagagatggctgcct

SEQ ID NO: 161182 - DNA, 25 bp, probe
caagcccatcctggtgagggccgtg

SEQ ID NO: 161183 - DNA, 25 bp, probe
caacctgcatctgctggagggtggt

SEQ ID NO: 161184 - DNA, 25 bp, probe
caacctggcctgctgcagtgggtga

SEQ ID NO: 161185 - DNA, 25 bp, probe
caaccattcctgaaggctgagggaa

SEQ ID NO: 161186 - DNA, 25 bp, probe
caacccctcctactgtggagaatca

SEQ ID NO: 161187 - DNA, 25 bp, probe
caaccactctcctaatgattggaac

SEQ ID NO: 161188 - DNA, 25 bp, probe
caaccccttgagaatgagattgaag

SEQ ID NO: 161189 - DNA, 25 bp, probe
caactctcactttagtggatgtaaa

SEQ ID NO: 161190 - DNA, 25 bp, probe
caaagcagactttcttgagattaag

SEQ ID NO: 161191 - DNA, 25 bp, probe
caaagcagactttcttgagattaag

SEQ ID NO: 161192 - DNA, 25 bp, probe
caaagactcattgcttaattctaag

SEQ ID NO: 161193 - DNA, 25 bp, probe
caaaatcctttttcgatcattcaat

SEQ ID NO: 161194 - DNA, 25 bp, probe
caaacttgttttctatctccataga

SEQ ID NO: 161195 - DNA, 25 bp, probe
caacacaggttatgtagattccaag

SEQ ID NO: 161196 - DNA, 25 bp, probe
caacaaggtatacctcagttccacg

SEQ ID NO: 161197 - DNA, 25 bp, probe
caacagtagtttctcagggtcactg

SEQ ID NO: 161198 - DNA, 25 bp, probe
caaaaatgtggtcccagtgtatgac

SEQ ID NO: 161199 - DNA, 25 bp, probe
caaacttcggttacggcatagccta

SEQ ID NO: 161200 - DNA, 25 bp, probe
caaacttcggttacggcatagccta

SEQ ID NO: 161201 - DNA, 25 bp, probe
caaacctcaggtcacgtccgaggtc

SEQ ID NO: 161202 - DNA, 25 bp, probe
caacgtcacgggcatcgtacaggtg

SEQ ID NO: 161203 - DNA, 25 bp, probe
caacaatccgctctgaggaaagcgt

SEQ ID NO: 161204 - DNA, 25 bp, probe
caacaatccgctctgaggaaagcgt

SEQ ID NO: 161205 - DNA, 25 bp, probe
caaacctcagcccgaggaaacatgc

SEQ ID NO: 161206 - DNA, 25 bp, probe
caacctcggcgccagaaagacaatt

SEQ ID NO: 161207 - DNA, 25 bp, probe
caaccatctgccagagaactcctat

SEQ ID NO: 161208 - DNA, 25 bp, probe
cagaatgactcagaaaactcctttt

SEQ ID NO: 161209 - DNA, 25 bp, probe
caacaaccaggagaacgccatcatc

SEQ ID NO: 161210 - DNA, 25 bp, probe
caacaaccaggagaacgccatcatc

SEQ ID NO: 161211 - DNA, 25 bp, probe
caaacccaggcaagaacgtgtagca

SEQ ID NO: 161212 - DNA, 25 bp, probe
caaaacccagtttaggatgtagcac

SEQ ID NO: 161213 - DNA, 25 bp, probe
caaaacccagtttaggatgtagcac

SEQ ID NO: 161214 - DNA, 25 bp, probe
cataattaccgcttcaaagattctg

SEQ ID NO: 161215 - DNA, 25 bp, probe
caacattgaccttctcaaaaccatc

SEQ ID NO: 161216 - DNA, 25 bp, probe
caacattaatctttggggagacacc

SEQ ID NO: 161217 - DNA, 25 bp, probe
caacttcaacccatggagaacaagc

SEQ ID NO: 161218 - DNA, 25 bp, probe
caactgtatccagaaggagaacaag

SEQ ID NO: 161219 - DNA, 25 bp, probe
caaagtcaacaggcaaggtaatctt

SEQ ID NO: 161220 - DNA, 25 bp, probe
caaaccagacaagcggctaccagtc

SEQ ID NO: 161221 - DNA, 25 bp, probe
caaacacacacaaaagggaacccag

SEQ ID NO: 161222 - DNA, 25 bp, probe
caaacaccatccaaaggacaacctt

SEQ ID NO: 161223 - DNA, 25 bp, probe
caaaatcttccttatgtgtaacgtt

SEQ ID NO: 161224 - DNA, 25 bp, probe
caacaacggcttttgggaacagctc

SEQ ID NO: 161225 - DNA, 25 bp, probe
caaactgcccttgcatggaaaactg

SEQ ID NO: 161226 - DNA, 25 bp, probe
caaatagcggcctcggaaaagctgg

SEQ ID NO: 161227 - DNA, 25 bp, probe
caaaaggcgcggtgtggcaaaggag

SEQ ID NO: 161228 - DNA, 25 bp, probe
caaaaccaaggacggcgtagaggat

SEQ ID NO: 161229 - DNA, 25 bp, probe
caaagaccgagcacggttcacgcct

SEQ ID NO: 161230 - DNA, 25 bp, probe
caaagacggcccgtggtctgggaat

SEQ ID NO: 161231 - DNA, 25 bp, probe
caaaagggccaagcctctgttaaag

SEQ ID NO: 161232 - DNA, 25 bp, probe
caaaggaacatagccctagtttaag

SEQ ID NO: 161233 - DNA, 25 bp, probe
gccaatagctaaagcccccagtatc

SEQ ID NO: 161234 - DNA, 25 bp, probe
gaaaagctgtttgtccctttactgg

SEQ ID NO: 161235 - DNA, 25 bp, probe
caaaagccatttgttaccaaactgg

SEQ ID NO: 161236 - DNA, 25 bp, probe
caaccagctctttctgtatgacaca

SEQ ID NO: 161237 - DNA, 25 bp, probe
caaccacttcttctgtgacatctct

SEQ ID NO: 161238 - DNA, 25 bp, probe
caacttttctatctgagcgcatcta

SEQ ID NO: 161239 - DNA, 25 bp, probe
caacttttctatctgagcgcatcta

SEQ ID NO: 161240 - DNA, 25 bp, probe
caaccttcttatcatggccacagtt

SEQ ID NO: 161241 - DNA, 25 bp, probe
caacctcatcgtcaaggaccagagg

SEQ ID NO: 161242 - DNA, 25 bp, probe
caacgcctctgacaaggacctggcc

SEQ ID NO: 161243 - DNA, 25 bp, probe
caacctcttacgtgcgcctttctgc

SEQ ID NO: 161244 - DNA, 25 bp, probe
ctaacttcatgatgaccccttacgt

SEQ ID NO: 161245 - DNA, 25 bp, probe
ctagagtcagtgaagcaccccttta

SEQ ID NO: 161246 - DNA, 25 bp, probe
caaaatggtgaaaccccatctctac

SEQ ID NO: 161247 - DNA, 25 bp, probe
cagaaatccgaatccgactcctaaa

SEQ ID NO: 161248 - DNA, 25 bp, probe
caaaatttaacacctaggcctgcaa

SEQ ID NO: 161249 - DNA, 25 bp, probe
caaaatttaacacctaggcctgcaa

SEQ ID NO: 161250 - DNA, 25 bp, probe
caaaatttaaccgctgcgcaccagc

SEQ ID NO: 161251 - DNA, 25 bp, probe
caaaatgtcaaaccagcttcccgac

SEQ ID NO: 161252 - DNA, 25 bp, probe
caaactcttaaccagttctccatac

SEQ ID NO: 161253 - DNA, 25 bp, probe
caaagcctttggcacttgtagctcc

SEQ ID NO: 161254 - DNA, 25 bp, probe
caaaggttatcgtcgtattcctctg

SEQ ID NO: 161255 - DNA, 25 bp, probe
caaagagttacagcgcttcatcacc

SEQ ID NO: 161256 - DNA, 25 bp, probe
caaatacttccaaagagtcatcatg

SEQ ID NO: 161257 - DNA, 25 bp, probe
caaatacttccaaagagtcatcatg

SEQ ID NO: 161258 - DNA, 25 bp, probe
caactattccctcctggacatgagg

SEQ ID NO: 161259 - DNA, 25 bp, probe
caacctattctcactaagatggggt

SEQ ID NO: 161260 - DNA, 25 bp, probe
caacctattctctcttaagagtgct

SEQ ID NO: 161261 - DNA, 25 bp, probe
caagccaattcttctgctgtaggag

SEQ ID NO: 161262 - DNA, 25 bp, probe
caagccaatcctatcttgggaccca

SEQ ID NO: 161263 - DNA, 25 bp, probe
caaccagatccgatttccagcagga

SEQ ID NO: 161264 - DNA, 25 bp, probe
caacccgacaactgtccagagagag

SEQ ID NO: 161265 - DNA, 25 bp, probe
caactactacaagttctccagcaaa

SEQ ID NO: 161266 - DNA, 25 bp, probe
caacttcaaggtttctgccagccca

SEQ ID NO: 161267 - DNA, 25 bp, probe
caactctgaatcttttttcaccgct

SEQ ID NO: 161268 - DNA, 25 bp, probe
caactctgaatcttttttcaccgct

SEQ ID NO: 161269 - DNA, 25 bp, probe
caactgctcccttatttccagttgc

SEQ ID NO: 161270 - DNA, 25 bp, probe
caacagcccactttttctttggctt

SEQ ID NO: 161271 - DNA, 25 bp, probe
caacgcctcgtttcaggcttgtgac

SEQ ID NO: 161272 - DNA, 25 bp, probe
caaccctcttattcatggctttttt

SEQ ID NO: 161273 - DNA, 25 bp, probe
caacccattcatctatggctttctc

SEQ ID NO: 161274 - DNA, 25 bp, probe
caacctatcagcaaatagtcttttt

SEQ ID NO: 161275 - DNA, 25 bp, probe
caaaatctagaagagtctattgtct

SEQ ID NO: 161276 - DNA, 25 bp, probe
cacctactccaagagtaagttctgc

SEQ ID NO: 161277 - DNA, 25 bp, probe
caaaatccgccgtggacagttctgc

SEQ ID NO: 161278 - DNA, 25 bp, probe
caaattctaccgtggaatgtccctg

SEQ ID NO: 161279 - DNA, 25 bp, probe
caacactgggccttaggagaccccg

SEQ ID NO: 161280 - DNA, 25 bp, probe
caacactgggccttaggagaccccg

SEQ ID NO: 161281 - DNA, 25 bp, probe
caaacggggctcaaggaaccacatt

SEQ ID NO: 161282 - DNA, 25 bp, probe
caaaaggtgtcgagaaccctgctgt

SEQ ID NO: 161283 - DNA, 25 bp, probe
caaaagggattgaggatccctcgag

SEQ ID NO: 161284 - DNA, 25 bp, probe
caaaagccgaagaggcagcccaaga

SEQ ID NO: 161285 - DNA, 25 bp, probe
caacgattcggactcggacctagag

SEQ ID NO: 161286 - DNA, 25 bp, probe
caacaactcggagcggtccatggca

SEQ ID NO: 161287 - DNA, 25 bp, probe
caacaactcggagcggtccatggca

SEQ ID NO: 161288 - DNA, 25 bp, probe
caacatgacctgcatcctggtctgc

SEQ ID NO: 161289 - DNA, 25 bp, probe
caacagcaagtgccacagtttctgc

SEQ ID NO: 161290 - DNA, 25 bp, probe
caacaccgtggatgatttctggcag

SEQ ID NO: 161291 - DNA, 25 bp, probe
caaacacgggaagttcaccagcaag

SEQ ID NO: 161292 - DNA, 25 bp, probe
caaaatgtactgaactggaaggaag

SEQ ID NO: 161293 - DNA, 25 bp, probe
caaaatgtatcattcgataaagtga

SEQ ID NO: 161294 - DNA, 25 bp, probe
caaccagtcaaaatatacaagtgtg

SEQ ID NO: 161295 - DNA, 25 bp, probe
caactcggcaaaatggacactgtca

SEQ ID NO: 161296 - DNA, 25 bp, probe
caactgccagaacttggtattgtag

SEQ ID NO: 161297 - DNA, 25 bp, probe
caacatccaagcatgtggccattac

SEQ ID NO: 161298 - DNA, 25 bp, probe
caaccctgccacatgttcatatatc

SEQ ID NO: 161299 - DNA, 25 bp, probe
caaccctgccacatgttcatatatc

SEQ ID NO: 161300 - DNA, 25 bp, probe
caacgaggccaaatgtgtcaccttc

SEQ ID NO: 161301 - DNA, 25 bp, probe
caacgtggccatagcagctgcacat

SEQ ID NO: 161302 - DNA, 25 bp, probe
caacatggcagctaacacatgaatg

SEQ ID NO: 161303 - DNA, 25 bp, probe
caacctgcagcatgagcacattgtc

SEQ ID NO: 161304 - DNA, 25 bp, probe
caacctgctggatgacaatggccac

SEQ ID NO: 161305 - DNA, 25 bp, probe
caacctgtgacaggatcaagcaccc

SEQ ID NO: 161306 - DNA, 25 bp, probe
caaccattaatggatccacacatgt

SEQ ID NO: 161307 - DNA, 25 bp, probe
caaaattcatgaggtgtcaactgtt

SEQ ID NO: 161308 - DNA, 25 bp, probe
caaacatttatcgagtgcctctgtt

SEQ ID NO: 161309 - DNA, 25 bp, probe
caaaatcttgctggtactcttctat

SEQ ID NO: 161310 - DNA, 25 bp, probe
caaaaactcaaggactgctattctc

SEQ ID NO: 161311 - DNA, 25 bp, probe
caaaaacatccacgagtccgtcagc

SEQ ID NO: 161312 - DNA, 25 bp, probe
gaataaacccagagctcaaccagaa

SEQ ID NO: 161313 - DNA, 25 bp, probe
caaaagcaccctgaacatacctact

SEQ ID NO: 161314 - DNA, 25 bp, probe
gtaggatacggtgacatgtaccctg

SEQ ID NO: 161315 - DNA, 25 bp, probe
ccaggctacagacacgtgtacctag

SEQ ID NO: 161316 - DNA, 25 bp, probe
cacagggaacaacccgtacctgcag

SEQ ID NO: 161317 - DNA, 25 bp, probe
caacgtgaacatcttcgacgccatc

SEQ ID NO: 161318 - DNA, 25 bp, probe
caactgagaaatctactgcctcgcc

SEQ ID NO: 161319 - DNA, 25 bp, probe
caactgatgaaccagaatccttgga

SEQ ID NO: 161320 - DNA, 25 bp, probe
caactgatgaaccagaatccttgga

SEQ ID NO: 161321 - DNA, 25 bp, probe
cacacttcaacgatatcctgggaca

SEQ ID NO: 161322 - DNA, 25 bp, probe
caacattcacggaaacgctgggaaa

SEQ ID NO: 161323 - DNA, 25 bp, probe
caactacgcgaggcagaggctcgga

SEQ ID NO: 161324 - DNA, 25 bp, probe
caactacagcaagagcaccaccgac

SEQ ID NO: 161325 - DNA, 25 bp, probe
caactcaacaaccgcaacatggatg

SEQ ID NO: 161326 - DNA, 25 bp, probe
caactcattcgtgggaacagcgcag

SEQ ID NO: 161327 - DNA, 25 bp, probe
cagactctttttgtacctggtgacc

SEQ ID NO: 161328 - DNA, 25 bp, probe
caacatctttttctactcgagttac

SEQ ID NO: 161329 - DNA, 25 bp, probe
caacatcttttattaagttcagtta

SEQ ID NO: 161330 - DNA, 25 bp, probe
caacctgaattctataagttcttgt

SEQ ID NO: 161331 - DNA, 25 bp, probe
caaactcaactctcaatctatttgc

SEQ ID NO: 161332 - DNA, 25 bp, probe
caaaacaatccccatcaggtagctg

SEQ ID NO: 161333 - DNA, 25 bp, probe
caaactaagcccccgctgtaatgaa

SEQ ID NO: 161334 - DNA, 25 bp, probe
caaacatacagccatctggggtcca

SEQ ID NO: 161335 - DNA, 25 bp, probe
caaacaatggcttcgagatttgccc

SEQ ID NO: 161336 - DNA, 25 bp, probe
cacaatctattggacaagttatgcc

SEQ ID NO: 161337 - DNA, 25 bp, probe
caacattatctgaccaatagtacac

SEQ ID NO: 161338 - DNA, 25 bp, probe
caacatctactgagctaatagccac

SEQ ID NO: 161339 - DNA, 25 bp, probe
caacagtcactgagtaaaaattgga

SEQ ID NO: 161340 - DNA, 25 bp, probe
caacgtcatcgttgccaacacaatg

SEQ ID NO: 161341 - DNA, 25 bp, probe
caacacgcatcttggcaaagagcaa

SEQ ID NO: 161342 - DNA, 25 bp, probe
cacaatgcgcgttgactacgagcag

SEQ ID NO: 161343 - DNA, 25 bp, probe
cacaatgcgcgttgactacgagcag

SEQ ID NO: 161344 - DNA, 25 bp, probe
caaacagcagctagaatacgccctg

SEQ ID NO: 161345 - DNA, 25 bp, probe
caaacagcagctagaatacgccctg

SEQ ID NO: 161346 - DNA, 25 bp, probe
caacaaacttaaagccagtcaggca

SEQ ID NO: 161347 - DNA, 25 bp, probe
caacaaacttaaagccagtcaggca

SEQ ID NO: 161348 - DNA, 25 bp, probe
caaaatccattccaggtagctcggc

SEQ ID NO: 161349 - DNA, 25 bp, probe
caaatccactttcggttcatcggca

SEQ ID NO: 161350 - DNA, 25 bp, probe
caaagacatcttcaggttcatgctc

SEQ ID NO: 161351 - DNA, 25 bp, probe
caaagagattgactgggtgctcctg

SEQ ID NO: 161352 - DNA, 25 bp, probe
caacaggcattgctgaggtctgagc

SEQ ID NO: 161353 - DNA, 25 bp, probe
caacgtgctgctctcggagcagggt

SEQ ID NO: 161354 - DNA, 25 bp, probe
caacgtgctgctctcggagcagggt

SEQ ID NO: 161355 - DNA, 25 bp, probe
caacgtcatccacctggagggtgtc

SEQ ID NO: 161356 - DNA, 25 bp, probe
caacagatcctttctggtgtggatt

SEQ ID NO: 161357 - DNA, 25 bp, probe
caaatgatccttcctactttgcttc

SEQ ID NO: 161358 - DNA, 25 bp, probe
caaagtaatcccagcttgtctgcca

SEQ ID NO: 161359 - DNA, 25 bp, probe
caaaattacctcattcttcctaaca

SEQ ID NO: 161360 - DNA, 25 bp, probe
caaaattacctcattcttcctaaca

SEQ ID NO: 161361 - DNA, 25 bp, probe
caaaacttactcattgcttcaccag

SEQ ID NO: 161362 - DNA, 25 bp, probe
caaaacttactcattgcttcaccag

SEQ ID NO: 161363 - DNA, 25 bp, probe
caaacctgatacaatttgcccaagg

SEQ ID NO: 161364 - DNA, 25 bp, probe
caaaccttccaaatctggaggaggg

SEQ ID NO: 161365 - DNA, 25 bp, probe
caaacaccccaatctggttcggtat

SEQ ID NO: 161366 - DNA, 25 bp, probe
cagaacacccctcagttttactaat

SEQ ID NO: 161367 - DNA, 25 bp, probe
caaactctcctcacgttttagcaaa

SEQ ID NO: 161368 - DNA, 25 bp, probe
caaacgtaatttgttatatcagcag

SEQ ID NO: 161369 - DNA, 25 bp, probe
caacccctatatatttaatggtgac

SEQ ID NO: 161370 - DNA, 25 bp, probe
caacccccatgtatgcctatatgtg

SEQ ID NO: 161371 - DNA, 25 bp, probe
caacccccatgtatgcctatatgtg

SEQ ID NO: 161372 - DNA, 25 bp, probe
caactctacggatttgcctgttctg

SEQ ID NO: 161373 - DNA, 25 bp, probe
caacctgtggactgtggcattcctg

SEQ ID NO: 161374 - DNA, 25 bp, probe
caacacaaggacatggtgcgcatcc

SEQ ID NO: 161375 - DNA, 25 bp, probe
caacaccagggtaagatgggtcgtg

SEQ ID NO: 161376 - DNA, 25 bp, probe
caactggaggggcaggaggctcggc

SEQ ID NO: 161377 - DNA, 25 bp, probe
caaaggtggtggccatggtaccggg

SEQ ID NO: 161378 - DNA, 25 bp, probe
caaacagtggatatctggtccgtgg

SEQ ID NO: 161379 - DNA, 25 bp, probe
caaaatgctggtcaatttcctctcg

SEQ ID NO: 161380 - DNA, 25 bp, probe
caacagagtgagaccctatcacccc

SEQ ID NO: 161381 - DNA, 25 bp, probe
caaaggtcgtacttgataaccccat

SEQ ID NO: 161382 - DNA, 25 bp, probe
caaaggtcgtacttgataaccccat

SEQ ID NO: 161383 - DNA, 25 bp, probe
caacagcaacgtcttgaacaggcgc

SEQ ID NO: 161384 - DNA, 25 bp, probe
caacaaccgctttgtgcataaggac

SEQ ID NO: 161385 - DNA, 25 bp, probe
caaaagccgtgatgtgcaatgaagc

SEQ ID NO: 161386 - DNA, 25 bp, probe
caacatggccggttatgcacatcat

SEQ ID NO: 161387 - DNA, 25 bp, probe
caacaggcaaggtaatcttcacacc

SEQ ID NO: 161388 - DNA, 25 bp, probe
caacccagaggctactcttgactta

SEQ ID NO: 161389 - DNA, 25 bp, probe
caaaactctggctgtcttactttga

SEQ ID NO: 161390 - DNA, 25 bp, probe
cataaactacgtattccctcttgac

SEQ ID NO: 161391 - DNA, 25 bp, probe
caaactttgcaggacttcccttata

SEQ ID NO: 161392 - DNA, 25 bp, probe
caaactttgcaggacttcccttata

SEQ ID NO: 161393 - DNA, 25 bp, probe
caaacatctggaaattaccttaata

SEQ ID NO: 161394 - DNA, 25 bp, probe
cagaacctaactctacctggacaca

SEQ ID NO: 161395 - DNA, 25 bp, probe
caaactcttgatagttaccggaacg

SEQ ID NO: 161396 - DNA, 25 bp, probe
caaactcttctgcttggttggaatt

SEQ ID NO: 161397 - DNA, 25 bp, probe
caaaccatccaccctggtgttgact

SEQ ID NO: 161398 - DNA, 25 bp, probe
caactgcacagaaccctgggatgga

SEQ ID NO: 161399 - DNA, 25 bp, probe
caactctcaaacacggaggtcattg

SEQ ID NO: 161400 - DNA, 25 bp, probe
caactacaaatcactaccgctttgc

SEQ ID NO: 161401 - DNA, 25 bp, probe
caacatgaaccagatctacggtttc

SEQ ID NO: 161402 - DNA, 25 bp, probe
caaagagaccatgaaagccggtatc

SEQ ID NO: 161403 - DNA, 25 bp, probe
caaagatgacaagaaggcccgggcc

SEQ ID NO: 161404 - DNA, 25 bp, probe
caaaggacacagagaccccaggacc

SEQ ID NO: 161405 - DNA, 25 bp, probe
caaaccccataggaaccgaggatca

SEQ ID NO: 161406 - DNA, 25 bp, probe
caacagctcctgcagcagtaccgag

SEQ ID NO: 161407 - DNA, 25 bp, probe
caacgtctgcatgggagaccacaag

SEQ ID NO: 161408 - DNA, 25 bp, probe
caacgccgaggcgaagcgcaagatg

SEQ ID NO: 161409 - DNA, 25 bp, probe
caacccagagacgggcgagcagatt

SEQ ID NO: 161410 - DNA, 25 bp, probe
cataccaaagactggaccgacattc

SEQ ID NO: 161411 - DNA, 25 bp, probe
caaacaaacactggagatcaaaaaa

SEQ ID NO: 161412 - DNA, 25 bp, probe
cacaagcaaaccgtgaaaatgctgg

SEQ ID NO: 161413 - DNA, 25 bp, probe
caacacgccaccgggagagatgctg

SEQ ID NO: 161414 - DNA, 25 bp, probe
caactctggcctgagtgacagcctg

SEQ ID NO: 161415 - DNA, 25 bp, probe
caactgtggtcccagctacagggga

SEQ ID NO: 161416 - DNA, 25 bp, probe
caactctggctccaggcagaaggag

SEQ ID NO: 161417 - DNA, 25 bp, probe
caaactggctagagcagaaaatctg

SEQ ID NO: 161418 - DNA, 25 bp, probe
caacatctcctaccgcagggagtct

SEQ ID NO: 161419 - DNA, 25 bp, probe
caacatctactccctcaggatgagc

SEQ ID NO: 161420 - DNA, 25 bp, probe
caacagccctctctagtgaacagat

SEQ ID NO: 161421 - DNA, 25 bp, probe
cacacagggcttcatcgtaactgct

SEQ ID NO: 161422 - DNA, 25 bp, probe
cacacagggcttcatcgtaactgct

SEQ ID NO: 161423 - DNA, 25 bp, probe
caacagggcagcagatctgtatatt

SEQ ID NO: 161424 - DNA, 25 bp, probe
caacggccacattattctgaattcc

SEQ ID NO: 161425 - DNA, 25 bp, probe
caactccaccatgaagctggtgtcc

SEQ ID NO: 161426 - DNA, 25 bp, probe
caactcgccctgaactgcagattgt

SEQ ID NO: 161427 - DNA, 25 bp, probe
caacatcgtcatggtgacccagtgt

SEQ ID NO: 161428 - DNA, 25 bp, probe
caacaatgcttggctgaccgagtct

SEQ ID NO: 161429 - DNA, 25 bp, probe
caacgatgcctatgacctggtcaag

SEQ ID NO: 161430 - DNA, 25 bp, probe
caacggaccagggcctggtgcagtg

SEQ ID NO: 161431 - DNA, 25 bp, probe
caacaggatcacagacctgggcctg

SEQ ID NO: 161432 - DNA, 25 bp, probe
caacatgtgtccaaatcggggattg

SEQ ID NO: 161433 - DNA, 25 bp, probe
caactggccccaatttgagtatgtt

SEQ ID NO: 161434 - DNA, 25 bp, probe
caactggccccaatttgagtatgtt

SEQ ID NO: 161435 - DNA, 25 bp, probe
caactggccccaatttgagtatgtt

SEQ ID NO: 161436 - DNA, 25 bp, probe
caaagggcccacagtgacttttgct

SEQ ID NO: 161437 - DNA, 25 bp, probe
caacagggaccagataatttttatg

SEQ ID NO: 161438 - DNA, 25 bp, probe
caacagggaccagataatttttatg

SEQ ID NO: 161439 - DNA, 25 bp, probe
caacgtgggacattgtttgtttctt

SEQ ID NO: 161440 - DNA, 25 bp, probe
caacgtaccaacactttctgatttc

SEQ ID NO: 161441 - DNA, 25 bp, probe
caacgagactcaattcctattcatg

SEQ ID NO: 161442 - DNA, 25 bp, probe
caactgagaagcatggcctagatag

SEQ ID NO: 161443 - DNA, 25 bp, probe
caactggaatattctcactagataa

SEQ ID NO: 161444 - DNA, 25 bp, probe
caacacaattgcatcccaaatacaa

SEQ ID NO: 161445 - DNA, 25 bp, probe
caacacagcagacaccaaaaaccag

SEQ ID NO: 161446 - DNA, 25 bp, probe
caaagccatcatcttctttgaccca

SEQ ID NO: 161447 - DNA, 25 bp, probe
caacagctactggttcttgagcatt

SEQ ID NO: 161448 - DNA, 25 bp, probe
caacgtcattgatcactttgcatgt

SEQ ID NO: 161449 - DNA, 25 bp, probe
caacgtcattgatcactttgcatgt

SEQ ID NO: 161450 - DNA, 25 bp, probe
caacgtatctgattcactgctgctg

SEQ ID NO: 161451 - DNA, 25 bp, probe
caacgacatcatgctactgcagctg

SEQ ID NO: 161452 - DNA, 25 bp, probe
caacatgaccatggaagctgagagg

SEQ ID NO: 161453 - DNA, 25 bp, probe
caacatgtgccccagatctggaagg

SEQ ID NO: 161454 - DNA, 25 bp, probe
caacatggggctagtgggatcacag

SEQ ID NO: 161455 - DNA, 25 bp, probe
caacgtgggcttccagagacagctc

SEQ ID NO: 161456 - DNA, 25 bp, probe
caacgtgggcttccagagacagctc

SEQ ID NO: 161457 - DNA, 25 bp, probe
caacgtgggcttccagagacagctc

SEQ ID NO: 161458 - DNA, 25 bp, probe
caacgtggggcacctgagcagaatc

SEQ ID NO: 161459 - DNA, 25 bp, probe
caacgaggaggattctagagtgaac

SEQ ID NO: 161460 - DNA, 25 bp, probe
caaagcaggaggtcttgggctaaaa

SEQ ID NO: 161461 - DNA, 25 bp, probe
caaaaggtactctttgccaagaaga

SEQ ID NO: 161462 - DNA, 25 bp, probe
caaaaggtactctttgccaagaaga

SEQ ID NO: 161463 - DNA, 25 bp, probe
cagattctggtacaggtcaaagagg

SEQ ID NO: 161464 - DNA, 25 bp, probe
caacatgctggtgaaggtgaaaggc

SEQ ID NO: 161465 - DNA, 25 bp, probe
caaactgctctcctagggaatgggg

SEQ ID NO: 161466 - DNA, 25 bp, probe
caaaggactctgagccacaagggga

SEQ ID NO: 161467 - DNA, 25 bp, probe
caaagtgtcctcaccaaaggtactc

SEQ ID NO: 161468 - DNA, 25 bp, probe
caaagcctcccagctaagaggtcac

SEQ ID NO: 161469 - DNA, 25 bp, probe
caggaccgttcacatacaaagaaaa

SEQ ID NO: 161470 - DNA, 25 bp, probe
caaaatccttgccttcaaacgaaat

SEQ ID NO: 161471 - DNA, 25 bp, probe
caaaccctggggacaaacgacatga

SEQ ID NO: 161472 - DNA, 25 bp, probe
caaactcctgggctcaagcaatcct

SEQ ID NO: 161473 - DNA, 25 bp, probe
caaaccacggagttcacaacacagc

SEQ ID NO: 161474 - DNA, 25 bp, probe
caaaccacggagttcacaacacagc

SEQ ID NO: 161475 - DNA, 25 bp, probe
caaaaacagaagtcttaccagtgct

SEQ ID NO: 161476 - DNA, 25 bp, probe
caacaaacagaacttgatcctgcgt

SEQ ID NO: 161477 - DNA, 25 bp, probe
caacaccacataacgtgtcctggag

SEQ ID NO: 161478 - DNA, 25 bp, probe
caaaagctataatgtgccactggag

SEQ ID NO: 161479 - DNA, 25 bp, probe
caaaagctataatgtgccactggag

SEQ ID NO: 161480 - DNA, 25 bp, probe
cattaccttcaatggccactttgtc

SEQ ID NO: 161481 - DNA, 25 bp, probe
caaacctcctaacttcactgtattc

SEQ ID NO: 161482 - DNA, 25 bp, probe
caaacttgatcaaaggtccgcttct

SEQ ID NO: 161483 - DNA, 25 bp, probe
caacaattaatgagtggctcctctc

SEQ ID NO: 161484 - DNA, 25 bp, probe
caaaatttatttcagcactcagctc

SEQ ID NO: 161485 - DNA, 25 bp, probe
caaaagtggtttagagagatcgtaa

SEQ ID NO: 161486 - DNA, 25 bp, probe
caaaagtggtttagagagatcgtaa

SEQ ID NO: 161487 - DNA, 25 bp, probe
caaaagggcttcaatgcgaaggacg

SEQ ID NO: 161488 - DNA, 25 bp, probe
caaaaggccttagtgagcgagtcat

SEQ ID NO: 161489 - DNA, 25 bp, probe
caacacagtgcccgacagtgctggc

SEQ ID NO: 161490 - DNA, 25 bp, probe
caacacagtgcccgacagtgctggc

SEQ ID NO: 161491 - DNA, 25 bp, probe
caacatgcattccgagaagctgctg

SEQ ID NO: 161492 - DNA, 25 bp, probe
caacagtgtcgccactgacagctgg

SEQ ID NO: 161493 - DNA, 25 bp, probe
caaactccatcgttgagcctggggt

SEQ ID NO: 161494 - DNA, 25 bp, probe
caaactccatcgttgagcctggggt

SEQ ID NO: 161495 - DNA, 25 bp, probe
caaactccatcgttgagcctggggt

SEQ ID NO: 161496 - DNA, 25 bp, probe
caacacgccggactgactctggcgg

SEQ ID NO: 161497 - DNA, 25 bp, probe
caacactgcctgtggactggacggt

SEQ ID NO: 161498 - DNA, 25 bp, probe
caacaccgtgtgcttcgtgacggtc

SEQ ID NO: 161499 - DNA, 25 bp, probe
caacaacggtgactttgaggcctac

SEQ ID NO: 161500 - DNA, 25 bp, probe
caaaatctgttccttcgggatctga

SEQ ID NO: 161501 - DNA, 25 bp, probe
caaaggctgtacacactggaactgc

SEQ ID NO: 161502 - DNA, 25 bp, probe
caaagtcagtaagccaagaaaaaca

SEQ ID NO: 161503 - DNA, 25 bp, probe
caaactactacagccaactcaaaag

SEQ ID NO: 161504 - DNA, 25 bp, probe
caaattgaccacacattaatgataa

SEQ ID NO: 161505 - DNA, 25 bp, probe
cacaattcccaaactcattttatga

SEQ ID NO: 161506 - DNA, 25 bp, probe
cactggcctcaataccttgtttagg

SEQ ID NO: 161507 - DNA, 25 bp, probe
cactggcctcaataccttgtttagg

SEQ ID NO: 161508 - DNA, 25 bp, probe
cacggtagcacttgaccttttcgac

SEQ ID NO: 161509 - DNA, 25 bp, probe
cacgagtagtgggtcgtcttgtttc

SEQ ID NO: 161510 - DNA, 25 bp, probe
cacagaaggctggtgggtttttgat

SEQ ID NO: 161511 - DNA, 25 bp, probe
cacaatcaggggagtgtttttcact

SEQ ID NO: 161512 - DNA, 25 bp, probe
cacaatcaggggagtgtttttcact

SEQ ID NO: 161513 - DNA, 25 bp, probe
caacatcacgaggtgtaatttttaa

SEQ ID NO: 161514 - DNA, 25 bp, probe
caactgcacgtgttttatattttta

SEQ ID NO: 161515 - DNA, 25 bp, probe
caactcctgagttttgctatactta

SEQ ID NO: 161516 - DNA, 25 bp, probe
caactttgatatgtgcagttcaagt

SEQ ID NO: 161517 - DNA, 25 bp, probe
caactttcgatggtagtcgccgtgc

SEQ ID NO: 161518 - DNA, 25 bp, probe
caactttgaatccttgtcagcctgg

SEQ ID NO: 161519 - DNA, 25 bp, probe
cacacttgtaaccacaggactttgg

SEQ ID NO: 161520 - DNA, 25 bp, probe
cacacttgtaaccacaggactttgg

SEQ ID NO: 161521 - DNA, 25 bp, probe
caacttgtttctaaagagctatctt

SEQ ID NO: 161522 - DNA, 25 bp, probe
caacttgtgttctcagtgcagttct

SEQ ID NO: 161523 - DNA, 25 bp, probe
caacttgattatttaggaattcctc

SEQ ID NO: 161524 - DNA, 25 bp, probe
gttttttagccatagaatcttctag

SEQ ID NO: 161525 - DNA, 25 bp, probe
caacttgagtgatctgagctgaatt

SEQ ID NO: 161526 - DNA, 25 bp, probe
caactgtacagatttgtttgttgta

SEQ ID NO: 161527 - DNA, 25 bp, probe
cagacttatggatcgttatggagta

SEQ ID NO: 161528 - DNA, 25 bp, probe
caactttagtacttgcttgagcagt

SEQ ID NO: 161529 - DNA, 25 bp, probe
caactcattagctcctgggcagcat

SEQ ID NO: 161530 - DNA, 25 bp, probe
caactgttggagacttctggcagat

SEQ ID NO: 161531 - DNA, 25 bp, probe
caacagtgtgggttcctgtcctgtt

SEQ ID NO: 161532 - DNA, 25 bp, probe
caacagtgtgggttcctgtcctgtt

SEQ ID NO: 161533 - DNA, 25 bp, probe
caaaggatttgattacttactaaag

SEQ ID NO: 161534 - DNA, 25 bp, probe
caaagatacttttaagcttctaaat

SEQ ID NO: 161535 - DNA, 25 bp, probe
caaagatacttttaagcttctaaat

SEQ ID NO: 161536 - DNA, 25 bp, probe
caaagtatctaattcaccttaacat

SEQ ID NO: 161537 - DNA, 25 bp, probe
caaagaactggatcaccccagaata

SEQ ID NO: 161538 - DNA, 25 bp, probe
cagaagggtggataccccacaagta

SEQ ID NO: 161539 - DNA, 25 bp, probe
caaagtggagaagagctatccccga

SEQ ID NO: 161540 - DNA, 25 bp, probe
caaacttgagaaccacatctcccct

SEQ ID NO: 161541 - DNA, 25 bp, probe
caaaaaatgcaaccagcaggcctgc

SEQ ID NO: 161542 - DNA, 25 bp, probe
caaaataacacagcaccgtgcatgt

SEQ ID NO: 161543 - DNA, 25 bp, probe
caacaaagggaccaccgtcctgtgc

SEQ ID NO: 161544 - DNA, 25 bp, probe
caacaaagggaccaccgtcctgtgc

SEQ ID NO: 161545 - DNA, 25 bp, probe
caaaaaatggcagacctccggcagc

SEQ ID NO: 161546 - DNA, 25 bp, probe
caaaaaatggcagacctccggcagc

SEQ ID NO: 161547 - DNA, 25 bp, probe
caaaaaagagacgcacttcttcaca

SEQ ID NO: 161548 - DNA, 25 bp, probe
cacaagccaaggtctgaacccttcc

SEQ ID NO: 161549 - DNA, 25 bp, probe
gaaagcctacgggatccgctttgac

SEQ ID NO: 161550 - DNA, 25 bp, probe
caaacagaacttgatcctgcgtaac

SEQ ID NO: 161551 - DNA, 25 bp, probe
caaaaaatttcctaatgcatctgag

SEQ ID NO: 161552 - DNA, 25 bp, probe
caaaaatgtcttccactacttgatg

SEQ ID NO: 161553 - DNA, 25 bp, probe
caaaacgtcctttgcattatctgat

SEQ ID NO: 161554 - DNA, 25 bp, probe
caaaattgcagcccttgtcttctat

SEQ ID NO: 161555 - DNA, 25 bp, probe
caaaatatcgccgttgttccttctg

SEQ ID NO: 161556 - DNA, 25 bp, probe
caaaaaccctggttagccatctcat

SEQ ID NO: 161557 - DNA, 25 bp, probe
caaactgacccgaagttgccatcta

SEQ ID NO: 161558 - DNA, 25 bp, probe
caaaatgagccttttgtggccaccc

SEQ ID NO: 161559 - DNA, 25 bp, probe
caaatggaacttctctgatctcccc

SEQ ID NO: 161560 - DNA, 25 bp, probe
caaatggaacttctctgatctcccc

SEQ ID NO: 161561 - DNA, 25 bp, probe
caaaggtcaccttcttgactccttt

SEQ ID NO: 161562 - DNA, 25 bp, probe
caaagctgccacaagttcgaccttt

SEQ ID NO: 161563 - DNA, 25 bp, probe
caacactccacatgtccacaggtgt

SEQ ID NO: 161564 - DNA, 25 bp, probe
caaactctacagttccaacgtgctg

SEQ ID NO: 161565 - DNA, 25 bp, probe
cacaactacaaatcactaccgcttt

SEQ ID NO: 161566 - DNA, 25 bp, probe
caaacaaaaagcctaatccctctat

SEQ ID NO: 161567 - DNA, 25 bp, probe
caacaacaaaagacagaaccacact

SEQ ID NO: 161568 - DNA, 25 bp, probe
caacaaaatgaaacgcaaccaccac

SEQ ID NO: 161569 - DNA, 25 bp, probe
caacaaaatgaacctacaacaccag

SEQ ID NO: 161570 - DNA, 25 bp, probe
caacaacagatcaagccgtcatcac

SEQ ID NO: 161571 - DNA, 25 bp, probe
caacatcatattcagcccatcacgc

SEQ ID NO: 161572 - DNA, 25 bp, probe
caaaattattacccatacgtctttg

SEQ ID NO: 161573 - DNA, 25 bp, probe
caacaagtttactctccgtcttgtg

SEQ ID NO: 161574 - DNA, 25 bp, probe
caaaagggatcgggctccttttgtg

SEQ ID NO: 161575 - DNA, 25 bp, probe
caaaagggatcgggctccttttgtg

SEQ ID NO: 161576 - DNA, 25 bp, probe
caaaagggcaagtgcctctccagtt

SEQ ID NO: 161577 - DNA, 25 bp, probe
caaagagggcaatcgcctccttgga

SEQ ID NO: 161578 - DNA, 25 bp, probe
caaaggggcgcgaggtcgattggga

SEQ ID NO: 161579 - DNA, 25 bp, probe
caaaggcgctgggaagggacatagg

SEQ ID NO: 161580 - DNA, 25 bp, probe
caaaatcggggagcgctacatcacc

SEQ ID NO: 161581 - DNA, 25 bp, probe
caaagatcatggtagtacttactag

SEQ ID NO: 161582 - DNA, 25 bp, probe
caaacatcatggatccgctctactg

SEQ ID NO: 161583 - DNA, 25 bp, probe
caaacatcatggatccgctctactg

SEQ ID NO: 161584 - DNA, 25 bp, probe
caaacatcatggatccgctctactg

SEQ ID NO: 161585 - DNA, 25 bp, probe
caaagtcatgccaggccgtactctc

SEQ ID NO: 161586 - DNA, 25 bp, probe
caaactgctgaccacgccgaatccg

SEQ ID NO: 161587 - DNA, 25 bp, probe
caacactgggctgatcctgaatggc

SEQ ID NO: 161588 - DNA, 25 bp, probe
caacactgggctgatcctgaatggc

SEQ ID NO: 161589 - DNA, 25 bp, probe
caacaatcaggctctcacagttgtt

SEQ ID NO: 161590 - DNA, 25 bp, probe
caacaacagagctctcagctgcacg

SEQ ID NO: 161591 - DNA, 25 bp, probe
caaaagcagagctcccatcttgact

SEQ ID NO: 161592 - DNA, 25 bp, probe
caaaagcagagctcccatcttgact

SEQ ID NO: 161593 - DNA, 25 bp, probe
caaagggactaacatcgaagcatct

SEQ ID NO: 161594 - DNA, 25 bp, probe
caaagtggtcttgcaccgaagcatt

SEQ ID NO: 161595 - DNA, 25 bp, probe
caacatgtggctctgtacctggagc

SEQ ID NO: 161596 - DNA, 25 bp, probe
caaagtggctgtgtgttccgagccg

SEQ ID NO: 161597 - DNA, 25 bp, probe
caaagtgcctgagcggatccgaagg

SEQ ID NO: 161598 - DNA, 25 bp, probe
caaagtgcctgagcggatccgaagg

SEQ ID NO: 161599 - DNA, 25 bp, probe
cacacaaatcaatgggacctgaagg

SEQ ID NO: 161600 - DNA, 25 bp, probe
caaaagaaaggccagcacctgaaga

SEQ ID NO: 161601 - DNA, 25 bp, probe
caaaagaaaggccaagatttgcaga

SEQ ID NO: 161602 - DNA, 25 bp, probe
caaattgcaaatccgctagaaaaag

SEQ ID NO: 161603 - DNA, 25 bp, probe
caaattaaaactgagacacattggc

SEQ ID NO: 161604 - DNA, 25 bp, probe
caaagttaattcacccacactgagc

SEQ ID NO: 161605 - DNA, 25 bp, probe
caacactttttcagactaaaggcca

SEQ ID NO: 161606 - DNA, 25 bp, probe
caaaccttcttctggaccaaagcaa

SEQ ID NO: 161607 - DNA, 25 bp, probe
cagaatcctaaagtgggaaccaaga

SEQ ID NO: 161608 - DNA, 25 bp, probe
cagaatcctaaagtgggaaccaaga

SEQ ID NO: 161609 - DNA, 25 bp, probe
caaatgcggcgctctgggaacaagg

SEQ ID NO: 161610 - DNA, 25 bp, probe
caaatgggctgctgcttagcttgca

SEQ ID NO: 161611 - DNA, 25 bp, probe
caacagaagctgtgctgccacggca

SEQ ID NO: 161612 - DNA, 25 bp, probe
caacatgaagcgtttcccagaactt

SEQ ID NO: 161613 - DNA, 25 bp, probe
caacaaagggcttctcgccaagctt

SEQ ID NO: 161614 - DNA, 25 bp, probe
caacaaagggcttctcgccaagctt

SEQ ID NO: 161615 - DNA, 25 bp, probe
caactatcagggcagctctgcctcc

SEQ ID NO: 161616 - DNA, 25 bp, probe
caacttaggcggattgggtctctct

SEQ ID NO: 161617 - DNA, 25 bp, probe
caaagtcgggggagggcttcatcga

SEQ ID NO: 161618 - DNA, 25 bp, probe
caaaatctgggcgaggcggagcttt

SEQ ID NO: 161619 - DNA, 25 bp, probe
caaaatgcagtgccaagttgggttc

SEQ ID NO: 161620 - DNA, 25 bp, probe
caaactcagcgctcagttgctaagt

SEQ ID NO: 161621 - DNA, 25 bp, probe
caacatcctgcgtatatttgggatt

SEQ ID NO: 161622 - DNA, 25 bp, probe
caacatctagcaaatgttatgcata

SEQ ID NO: 161623 - DNA, 25 bp, probe
caacactcatcacacttcattgtaa

SEQ ID NO: 161624 - DNA, 25 bp, probe
caaacatgaatgtacattttctaac

SEQ ID NO: 161625 - DNA, 25 bp, probe
caaaatgcaagattttccacaagat

SEQ ID NO: 161626 - DNA, 25 bp, probe
cagggtccagacaggccacaagaag

SEQ ID NO: 161627 - DNA, 25 bp, probe
cggggcctactagagtctgaacagc

SEQ ID NO: 161628 - DNA, 25 bp, probe
caggggtttctcaaaggcaatccag

SEQ ID NO: 161629 - DNA, 25 bp, probe
cagagggtcttcctgacaaggttcc

SEQ ID NO: 161630 - DNA, 25 bp, probe
cagagggtcttcctgacaaggttcc

SEQ ID NO: 161631 - DNA, 25 bp, probe
cagagaactttccaaacaagtacct

SEQ ID NO: 161632 - DNA, 25 bp, probe
cagagaactttccaaacaagtacct

SEQ ID NO: 161633 - DNA, 25 bp, probe
catagacctccccaaaagttaactg

SEQ ID NO: 161634 - DNA, 25 bp, probe
caaaccagacacctaaattatacgt

SEQ ID NO: 161635 - DNA, 25 bp, probe
caaactcgaaccaaagtcgtcactc

SEQ ID NO: 161636 - DNA, 25 bp, probe
caacatggaaactaaggctttactc

SEQ ID NO: 161637 - DNA, 25 bp, probe
caacaaaaaaactctcttacagaat

SEQ ID NO: 161638 - DNA, 25 bp, probe
cacacaattaactccgtttccaaat

SEQ ID NO: 161639 - DNA, 25 bp, probe
cacaattaattgtccctgtttcaaa

SEQ ID NO: 161640 - DNA, 25 bp, probe
cacaattaattgtccctgtttcaaa

SEQ ID NO: 161641 - DNA, 25 bp, probe
caaagaaatttctctcaattacaga

SEQ ID NO: 161642 - DNA, 25 bp, probe
caaagaacacttccctttagccgat

SEQ ID NO: 161643 - DNA, 25 bp, probe
caaaagacctataccttctaggtct

SEQ ID NO: 161644 - DNA, 25 bp, probe
caaaagacctataccttctaggtct

SEQ ID NO: 161645 - DNA, 25 bp, probe
cacaagatacccacttttcaggatg

SEQ ID NO: 161646 - DNA, 25 bp, probe
caaagtaacacttcttttcaaggat

SEQ ID NO: 161647 - DNA, 25 bp, probe
caaaatacctccttcattataaaat

SEQ ID NO: 161648 - DNA, 25 bp, probe
caaaatacctccttcattataaaat

SEQ ID NO: 161649 - DNA, 25 bp, probe
caaaacaggctggtctcgtggtaaa

SEQ ID NO: 161650 - DNA, 25 bp, probe
caaagatgaagtgtgccagctggtt

SEQ ID NO: 161651 - DNA, 25 bp, probe
caaagatgaagtgtgccagctggtt

SEQ ID NO: 161652 - DNA, 25 bp, probe
caaaatatcgtgctgccacatgttc

SEQ ID NO: 161653 - DNA, 25 bp, probe
caaaatatcgtgctgccacatgttc

SEQ ID NO: 161654 - DNA, 25 bp, probe
caaacaagtgtcagccacactgtgc

SEQ ID NO: 161655 - DNA, 25 bp, probe
caacactagttacctcagaatttgg

SEQ ID NO: 161656 - DNA, 25 bp, probe
caaactcttccacatagactttgga

SEQ ID NO: 161657 - DNA, 25 bp, probe
caaacttgtccggaggagcgtaaga

SEQ ID NO: 161658 - DNA, 25 bp, probe
caaactgattaccaagaacttccaa

SEQ ID NO: 161659 - DNA, 25 bp, probe
caacatccttcatcaatactttcct

SEQ ID NO: 161660 - DNA, 25 bp, probe
caaacgtttacttatcttatgccac

SEQ ID NO: 161661 - DNA, 25 bp, probe
caaacagtcttaggaatcgtgcagg

SEQ ID NO: 161662 - DNA, 25 bp, probe
caacaagtcctgaatcccttgcagg

SEQ ID NO: 161663 - DNA, 25 bp, probe
caaagttgcctgattccgcgcaggt

SEQ ID NO: 161664 - DNA, 25 bp, probe
caaacttcctggtaactcaaggcta

SEQ ID NO: 161665 - DNA, 25 bp, probe
caaacctgccagaaaacacactggt

SEQ ID NO: 161666 - DNA, 25 bp, probe
caaatctgggcccaaacagcctcag

SEQ ID NO: 161667 - DNA, 25 bp, probe
caaattcaggcgaattccataccgt

SEQ ID NO: 161668 - DNA, 25 bp, probe
cacacatcacaggctgatttccaca

SEQ ID NO: 161669 - DNA, 25 bp, probe
caaacacatgcagtggcttacagca

SEQ ID NO: 161670 - DNA, 25 bp, probe
caacatcatgcatgtggcttacagc

SEQ ID NO: 161671 - DNA, 25 bp, probe
caacatcagcattatctcggacaca

SEQ ID NO: 161672 - DNA, 25 bp, probe
caacacagcaggaatcagtcagtat

SEQ ID NO: 161673 - DNA, 25 bp, probe
caacatgagcgcctcggccatgttg

SEQ ID NO: 161674 - DNA, 25 bp, probe
caaatcgctatgtggccagtatgcc

SEQ ID NO: 161675 - DNA, 25 bp, probe
caacatcgtcaacgtggtgtgccca

SEQ ID NO: 161676 - DNA, 25 bp, probe
caacatcgtcaacgtggtgtgccca

SEQ ID NO: 161677 - DNA, 25 bp, probe
cacttcgaagtggaggtctgccagc

SEQ ID NO: 161678 - DNA, 25 bp, probe
cacttcgaagtggaggtctgccagc

SEQ ID NO: 161679 - DNA, 25 bp, probe
cacttcgaagtggaggtctgccagc

SEQ ID NO: 161680 - DNA, 25 bp, probe
caaatcggggattggtgagccagct

SEQ ID NO: 161681 - DNA, 25 bp, probe
caacatcctggttggggagcggctg

SEQ ID NO: 161682 - DNA, 25 bp, probe
caacacctgctgaagagtggagcgg

SEQ ID NO: 161683 - DNA, 25 bp, probe
caacagcctctgtgagagatgcccc

SEQ ID NO: 161684 - DNA, 25 bp, probe
caacactgctggtttgagacctatt

SEQ ID NO: 161685 - DNA, 25 bp, probe
caacactgctggtttgagacctatt

SEQ ID NO: 161686 - DNA, 25 bp, probe
caacactctgagttctggtgccgac

SEQ ID NO: 161687 - DNA, 25 bp, probe
caacagcattcagttatttgcagaa

SEQ ID NO: 161688 - DNA, 25 bp, probe
caacatcgtcaggatcctaatgaca

SEQ ID NO: 161689 - DNA, 25 bp, probe
caacaggtcatcgtctcctatgaag

SEQ ID NO: 161690 - DNA, 25 bp, probe
caacagagtagggtgcactgacaaa

SEQ ID NO: 161691 - DNA, 25 bp, probe
caaacagttggattcagaaccaaga

SEQ ID NO: 161692 - DNA, 25 bp, probe
caaaatttgccgtcagcacaccaaa

SEQ ID NO: 161693 - DNA, 25 bp, probe
caaacttctgcgatacgaccatcaa

SEQ ID NO: 161694 - DNA, 25 bp, probe
caaacttctgcgatacgaccatcaa

SEQ ID NO: 161695 - DNA, 25 bp, probe
caaatttctggcaaacgcagcctga

SEQ ID NO: 161696 - DNA, 25 bp, probe
caaagcccaggctatactgcctctg

SEQ ID NO: 161697 - DNA, 25 bp, probe
caaagccacagtgacactggccgcc

SEQ ID NO: 161698 - DNA, 25 bp, probe
caaacagatcgtcacagctgtctat

SEQ ID NO: 161699 - DNA, 25 bp, probe
caaacagatcgtcacagctgtctat

SEQ ID NO: 161700 - DNA, 25 bp, probe
caaacaatgctctaatcacaatatt

SEQ ID NO: 161701 - DNA, 25 bp, probe
caacagcagtgtcaatcccatcatt

SEQ ID NO: 161702 - DNA, 25 bp, probe
caacagcatggtcattcacatccct

SEQ ID NO: 161703 - DNA, 25 bp, probe
caacagcatggtcattcacatccct

SEQ ID NO: 161704 - DNA, 25 bp, probe
caacagatgccatagagcaattcct

SEQ ID NO: 161705 - DNA, 25 bp, probe
caacagtgtaactaaatttctctag

SEQ ID NO: 161706 - DNA, 25 bp, probe
cacacttgggagcaaaagattctac

SEQ ID NO: 161707 - DNA, 25 bp, probe
cacaatcaggagctaaataaattac

SEQ ID NO: 161708 - DNA, 25 bp, probe
cacaactatatgctaagagaactta

SEQ ID NO: 161709 - DNA, 25 bp, probe
caaatgcctatgaaattaaactata

SEQ ID NO: 161710 - DNA, 25 bp, probe
caaaactcatgaaattctacaagta

SEQ ID NO: 161711 - DNA, 25 bp, probe
caaaactctgtcaactccaaattcc

SEQ ID NO: 161712 - DNA, 25 bp, probe
caaaagcatcttccctagaaatttt

SEQ ID NO: 161713 - DNA, 25 bp, probe
caaaagactgcccctcgagattttg

SEQ ID NO: 161714 - DNA, 25 bp, probe
caaaagactgcccctcgagattttg

SEQ ID NO: 161715 - DNA, 25 bp, probe
caaaaacagccttctagcacacttt

SEQ ID NO: 161716 - DNA, 25 bp, probe
caacaatgaccacttccaacacttt

SEQ ID NO: 161717 - DNA, 25 bp, probe
caacacaggccacaggaacaccttc

SEQ ID NO: 161718 - DNA, 25 bp, probe
caacagccgacacggtgagaccacc

SEQ ID NO: 161719 - DNA, 25 bp, probe
caacagcctccaaggcttcttcatc

SEQ ID NO: 161720 - DNA, 25 bp, probe
caacagcctccaaggcttcttcatc

SEQ ID NO: 161721 - DNA, 25 bp, probe
caacatggtgaaacgccatctctac

SEQ ID NO: 161722 - DNA, 25 bp, probe
caacatggcgaccatcagtcctttc

SEQ ID NO: 161723 - DNA, 25 bp, probe
caacatggtaccgagtgatccgtca

SEQ ID NO: 161724 - DNA, 25 bp, probe
caaatggcatacggcagtcacctat

SEQ ID NO: 161725 - DNA, 25 bp, probe
caaaatgctgaaagagtatgcctct

SEQ ID NO: 161726 - DNA, 25 bp, probe
caacacatctgtaggaacaatctct

SEQ ID NO: 161727 - DNA, 25 bp, probe
caacagcctgatgtgtatctttctg

SEQ ID NO: 161728 - DNA, 25 bp, probe
caacacctgtccttactgtgtgaaa

SEQ ID NO: 161729 - DNA, 25 bp, probe
caaagccgctgccattttattaaag

SEQ ID NO: 161730 - DNA, 25 bp, probe
caaaccattcgtctgatatctatcc

SEQ ID NO: 161731 - DNA, 25 bp, probe
caacaacttcggcatgtactactcc

SEQ ID NO: 161732 - DNA, 25 bp, probe
caacaaggtgggctggacacccgcc

SEQ ID NO: 161733 - DNA, 25 bp, probe
caacaaggtgggctggacacccgcc

SEQ ID NO: 161734 - DNA, 25 bp, probe
caacaaggtgggctggacacccgcc

SEQ ID NO: 161735 - DNA, 25 bp, probe
caaaacgtacggagacaacaggaca

SEQ ID NO: 161736 - DNA, 25 bp, probe
caacaacctactggacgacaacggc

SEQ ID NO: 161737 - DNA, 25 bp, probe
caaagtcctacaggaagagcccccg

SEQ ID NO: 161738 - DNA, 25 bp, probe
caaagtcctacaggaagagcccccg

SEQ ID NO: 161739 - DNA, 25 bp, probe
caaagtcctacaggaagagcccccg

SEQ ID NO: 161740 - DNA, 25 bp, probe
cagacaaccttccgaaggcccatac

SEQ ID NO: 161741 - DNA, 25 bp, probe
cacaaaccaggctggaacccaagcc

SEQ ID NO: 161742 - DNA, 25 bp, probe
caacaaacagtctgggtccccagct

SEQ ID NO: 161743 - DNA, 25 bp, probe
caaagactactacgtggtccgcgag

SEQ ID NO: 161744 - DNA, 25 bp, probe
caaagatgctagtgattgacccagc

SEQ ID NO: 161745 - DNA, 25 bp, probe
caaaatgtttggataccgcccattg

SEQ ID NO: 161746 - DNA, 25 bp, probe
caaaatgtttgggtcacgttcctct

SEQ ID NO: 161747 - DNA, 25 bp, probe
caaactgggtgggttctgtgtcaat

SEQ ID NO: 161748 - DNA, 25 bp, probe
caaactgggtgggttctgtgtcaat

SEQ ID NO: 161749 - DNA, 25 bp, probe
caacactctggttaccttggtcagt

SEQ ID NO: 161750 - DNA, 25 bp, probe
caacactctggttaccttggtcagt

SEQ ID NO: 161751 - DNA, 25 bp, probe
caacagcctgtattacggtggaaga

SEQ ID NO: 161752 - DNA, 25 bp, probe
cagtcgccggaattcgcggtacaga

SEQ ID NO: 161753 - DNA, 25 bp, probe
caaagccggtggacagcggaacata

SEQ ID NO: 161754 - DNA, 25 bp, probe
caaaccggtggagcagtgatgagtg

SEQ ID NO: 161755 - DNA, 25 bp, probe
caaagtaggtgaaggaagggagaag

SEQ ID NO: 161756 - DNA, 25 bp, probe
caaaagggctatgggaagggcagac

SEQ ID NO: 161757 - DNA, 25 bp, probe
caaagggcaatcgggaaggagcaca

SEQ ID NO: 161758 - DNA, 25 bp, probe
cagaaaggcccggggaggatgacgg

SEQ ID NO: 161759 - DNA, 25 bp, probe
cagaaaggcccggggaggatgacgg

SEQ ID NO: 161760 - DNA, 25 bp, probe
caaatggaccctgtggggtatagcc

SEQ ID NO: 161761 - DNA, 25 bp, probe
caaaggtcacgtgcggttcattgac

SEQ ID NO: 161762 - DNA, 25 bp, probe
caaagggccaggccgagctgacctg

SEQ ID NO: 161763 - DNA, 25 bp, probe
caaaggacaaaaacagtgcaccaga

SEQ ID NO: 161764 - DNA, 25 bp, probe
caacaccacaacaggagtcttcgaa

SEQ ID NO: 161765 - DNA, 25 bp, probe
caaagcccacagaggagttaaaagt

SEQ ID NO: 161766 - DNA, 25 bp, probe
caaacccagtgtcagaattcaaact

SEQ ID NO: 161767 - DNA, 25 bp, probe
caaatttagtcccagaaataaactg

SEQ ID NO: 161768 - DNA, 25 bp, probe
caaatatgtcctggggtataaaact

SEQ ID NO: 161769 - DNA, 25 bp, probe
caaaaggaggcgctcttaataactc

SEQ ID NO: 161770 - DNA, 25 bp, probe
caaaaggaggcgctcttaataactc

SEQ ID NO: 161771 - DNA, 25 bp, probe
caaagaatgaggcctccaaacaaac

SEQ ID NO: 161772 - DNA, 25 bp, probe
caaaaagggcctgagacattccacc

SEQ ID NO: 161773 - DNA, 25 bp, probe
caaaaagggcctggtcactgtagaa

SEQ ID NO: 161774 - DNA, 25 bp, probe
caaaaagggcctggtcactgtagaa

SEQ ID NO: 161775 - DNA, 25 bp, probe
caacaactgggcccccaagtacaat

SEQ ID NO: 161776 - DNA, 25 bp, probe
caaaacagggctcaccaagctcatc

SEQ ID NO: 161777 - DNA, 25 bp, probe
caaaagatagccccacgaagcatgt

SEQ ID NO: 161778 - DNA, 25 bp, probe
caacaaagatgcccttctgaactgg

SEQ ID NO: 161779 - DNA, 25 bp, probe
caaacaactgccatctctgggctgt

SEQ ID NO: 161780 - DNA, 25 bp, probe
caaatctttccaactctacggattt

SEQ ID NO: 161781 - DNA, 25 bp, probe
caaatcgtcttatattagggaatta

SEQ ID NO: 161782 - DNA, 25 bp, probe
caaacaacattatgttgggggataa

SEQ ID NO: 161783 - DNA, 25 bp, probe
gataaaaaagggcttgggagattca

SEQ ID NO: 161784 - DNA, 25 bp, probe
caaaaccaagggctctggcgtctta

SEQ ID NO: 161785 - DNA, 25 bp, probe
caaaaccaagtcgcagctgagcgtg

SEQ ID NO: 161786 - DNA, 25 bp, probe
caaaaccaagaagccagactatccc

SEQ ID NO: 161787 - DNA, 25 bp, probe
caaaaatagcaatgcctccctatcc

SEQ ID NO: 161788 - DNA, 25 bp, probe
caaaagaagaggtctccctcaatcc

SEQ ID NO: 161789 - DNA, 25 bp, probe
caaacaccagggttaccttgatctc

SEQ ID NO: 161790 - DNA, 25 bp, probe
caaatacctggactttggcttcagc

SEQ ID NO: 161791 - DNA, 25 bp, probe
caacaacctgggcattgtgtttggg

SEQ ID NO: 161792 - DNA, 25 bp, probe
cacagcggcctgcaggttgtaagtg

SEQ ID NO: 161793 - DNA, 25 bp, probe
cacagctggttccggaagaaacatc

SEQ ID NO: 161794 - DNA, 25 bp, probe
cacactgggatccggatttaagaag

SEQ ID NO: 161795 - DNA, 25 bp, probe
caacactggtcacgtttggaaagaa

SEQ ID NO: 161796 - DNA, 25 bp, probe
cacggcatcgtctcctatggaaagt

SEQ ID NO: 161797 - DNA, 25 bp, probe
caaagtcgtagggcttataaagtgg

SEQ ID NO: 161798 - DNA, 25 bp, probe
caaagcaggaagcccatttaccatt

SEQ ID NO: 161799 - DNA, 25 bp, probe
caaatcagggactgctactccacag

SEQ ID NO: 161800 - DNA, 25 bp, probe
caaatcagaacacttcttccagaag

SEQ ID NO: 161801 - DNA, 25 bp, probe
caaatcaaacagttggattcagaac

SEQ ID NO: 161802 - DNA, 25 bp, probe
caacaacctatgtcactgactcaga

SEQ ID NO: 161803 - DNA, 25 bp, probe
caacaagctcaaaatctgcagtctg

SEQ ID NO: 161804 - DNA, 25 bp, probe
caacaacattgtgcatcgagatctg

SEQ ID NO: 161805 - DNA, 25 bp, probe
caacaacgtggccatagcagctgca

SEQ ID NO: 161806 - DNA, 25 bp, probe
caaaagctcatgcgctcagagccac

SEQ ID NO: 161807 - DNA, 25 bp, probe
caaaatctcatttgctaggcagcaa

SEQ ID NO: 161808 - DNA, 25 bp, probe
caaaatgctgctgagcaaaatgcaa

SEQ ID NO: 161809 - DNA, 25 bp, probe
caacaatggctgtcacaaggtgaaa

SEQ ID NO: 161810 - DNA, 25 bp, probe
caacaatggctgtcacaaggtgaaa

SEQ ID NO: 161811 - DNA, 25 bp, probe
caacacaggtgacccgagtgacaag

SEQ ID NO: 161812 - DNA, 25 bp, probe
caaacgcctgacctcaggtgatccg

SEQ ID NO: 161813 - DNA, 25 bp, probe
caaacaccttcagtgctggtggccc

SEQ ID NO: 161814 - DNA, 25 bp, probe
caaacaccttcagtgctggtggccc

SEQ ID NO: 161815 - DNA, 25 bp, probe
caaaccgctaagtctggaggacacg

SEQ ID NO: 161816 - DNA, 25 bp, probe
caaaccgctaagtctggaggacacg

SEQ ID NO: 161817 - DNA, 25 bp, probe
caaacacggaggtcattgagtgcat

SEQ ID NO: 161818 - DNA, 25 bp, probe
caaaatcctgcctaatgatgagtgc

SEQ ID NO: 161819 - DNA, 25 bp, probe
caaatactggcctgatgagtatgct

SEQ ID NO: 161820 - DNA, 25 bp, probe
caaaacattctctgatgagcccttg

SEQ ID NO: 161821 - DNA, 25 bp, probe
caaagtctgttctggcggcattgtg

SEQ ID NO: 161822 - DNA, 25 bp, probe
caaagattgtttgcactggcgtgtg

SEQ ID NO: 161823 - DNA, 25 bp, probe
caaacatttttgaactagttgctga

SEQ ID NO: 161824 - DNA, 25 bp, probe
caaacacttcttatcatctggagga

SEQ ID NO: 161825 - DNA, 25 bp, probe
caaaggctttaaacatgtggggcaa

SEQ ID NO: 161826 - DNA, 25 bp, probe
caaacgtcttaacgcgtatagagag

SEQ ID NO: 161827 - DNA, 25 bp, probe
caaatctgtttatggaatcaaggaa

SEQ ID NO: 161828 - DNA, 25 bp, probe
caaatcctgctttggcgacaaaaag

SEQ ID NO: 161829 - DNA, 25 bp, probe
caaattgccttcagccctaacatag

SEQ ID NO: 161830 - DNA, 25 bp, probe
caaagggcttttccattgatagaag

SEQ ID NO: 161831 - DNA, 25 bp, probe
caaagcatgtcagtttccttaataa

SEQ ID NO: 161832 - DNA, 25 bp, probe
cacaagcgtacctcctattttatga

SEQ ID NO: 161833 - DNA, 25 bp, probe
cacataggtaactcttcattttagg

SEQ ID NO: 161834 - DNA, 25 bp, probe
cacactgagggttttttttattgcg

SEQ ID NO: 161835 - DNA, 25 bp, probe
caaagacgtttttgctttattctgc

SEQ ID NO: 161836 - DNA, 25 bp, probe
caaagacttttgagaatgtgtatgg

SEQ ID NO: 161837 - DNA, 25 bp, probe
caaagacttttgagaatgtgtatgg

SEQ ID NO: 161838 - DNA, 25 bp, probe
caaagatcttttttcaggtggattt

SEQ ID NO: 161839 - DNA, 25 bp, probe
caaaattggaggttcgtctggcttt

SEQ ID NO: 161840 - DNA, 25 bp, probe
caacaatgtgaggggtcctagcagc

SEQ ID NO: 161841 - DNA, 25 bp, probe
caaaatattgcttatgtctctacat

SEQ ID NO: 161842 - DNA, 25 bp, probe
caaaatatgttatgtctccagagct

SEQ ID NO: 161843 - DNA, 25 bp, probe
caaattcatttggtgtactaacatc

SEQ ID NO: 161844 - DNA, 25 bp, probe
caaatcttcaaggtgtaaaatatct

SEQ ID NO: 161845 - DNA, 25 bp, probe
caaacttctcagcgtaaagcaatcc

SEQ ID NO: 161846 - DNA, 25 bp, probe
caaatttccaacttaccactacctg

SEQ ID NO: 161847 - DNA, 25 bp, probe
caaatttcaaattttggcacgatga

SEQ ID NO: 161848 - DNA, 25 bp, probe
caaatattaccatgttgagcaatta

SEQ ID NO: 161849 - DNA, 25 bp, probe
cagaaactacctcttagtcttcttc

SEQ ID NO: 161850 - DNA, 25 bp, probe
caaaactacatctacttcttccagt

SEQ ID NO: 161851 - DNA, 25 bp, probe
caaaactgcttctaaagttgccaga

SEQ ID NO: 161852 - DNA, 25 bp, probe
caaaaatgactctaaatagcccaga

SEQ ID NO: 161853 - DNA, 25 bp, probe
caaaacatcctactcaatgaggaag

SEQ ID NO: 161854 - DNA, 25 bp, probe
caaaggccctaccagagggaacacg

SEQ ID NO: 161855 - DNA, 25 bp, probe
caaagatggcccacacagggaccac

SEQ ID NO: 161856 - DNA, 25 bp, probe
caaagatggcccacacagggaccac

SEQ ID NO: 161857 - DNA, 25 bp, probe
cacacaggtcccaaacaggaaacgg

SEQ ID NO: 161858 - DNA, 25 bp, probe
cacaagccaccaatcccggaaaggc

SEQ ID NO: 161859 - DNA, 25 bp, probe
cacacggcagacgccggtggacagt

SEQ ID NO: 161860 - DNA, 25 bp, probe
cacacttaacactcgcatggggatg

SEQ ID NO: 161861 - DNA, 25 bp, probe
caaaaacactgctctgcattgggca

SEQ ID NO: 161862 - DNA, 25 bp, probe
caacaaccagtagctcatggggcct

SEQ ID NO: 161863 - DNA, 25 bp, probe
cacaacccagtcattgtcagtggcc

SEQ ID NO: 161864 - DNA, 25 bp, probe
cataaacaagtcctcagtggttggc

SEQ ID NO: 161865 - DNA, 25 bp, probe
cagaaacggacgccggtgcttggag

SEQ ID NO: 161866 - DNA, 25 bp, probe
caaaacccagcaccggctgctggtg

SEQ ID NO: 161867 - DNA, 25 bp, probe
caaagtgccctgtgcaggctgcatg

SEQ ID NO: 161868 - DNA, 25 bp, probe
caaagtgcccatggtggcggcgaag

SEQ ID NO: 161869 - DNA, 25 bp, probe
caaagtgcccagcttcactggagaa

SEQ ID NO: 161870 - DNA, 25 bp, probe
caaaggctcatcaagtcccgaggaa

SEQ ID NO: 161871 - DNA, 25 bp, probe
caaaggctcatcaagtcccgaggaa

SEQ ID NO: 161872 - DNA, 25 bp, probe
caaaagtcttatccccagagagcaa

SEQ ID NO: 161873 - DNA, 25 bp, probe
caaaaccagaatccctcagctgaca

SEQ ID NO: 161874 - DNA, 25 bp, probe
caaaatctgcagatggaatccgagc

SEQ ID NO: 161875 - DNA, 25 bp, probe
caaaatctgcactgggctcttcagc

SEQ ID NO: 161876 - DNA, 25 bp, probe
caaacttgagctccaggctcttctc

SEQ ID NO: 161877 - DNA, 25 bp, probe
caaacctagctaactgccttctatg

SEQ ID NO: 161878 - DNA, 25 bp, probe
caaacttgctttatgccttcttatt

SEQ ID NO: 161879 - DNA, 25 bp, probe
caaacttgctttatgccttcttatt

SEQ ID NO: 161880 - DNA, 25 bp, probe
caaagcttttaaacctccttgctct

SEQ ID NO: 161881 - DNA, 25 bp, probe
cacaagtttaagatccacacgtact

SEQ ID NO: 161882 - DNA, 25 bp, probe
caaattcaaaagactgcccctcgag

SEQ ID NO: 161883 - DNA, 25 bp, probe
caaattcaaaagactgcccctcgag

SEQ ID NO: 161884 - DNA, 25 bp, probe
caaaactcaaagatgctccccgagc

SEQ ID NO: 161885 - DNA, 25 bp, probe
caaaaccaatatttcattctacgaa

SEQ ID NO: 161886 - DNA, 25 bp, probe
caacaattgcacatcttcattctcc

SEQ ID NO: 161887 - DNA, 25 bp, probe
caacaattgcacatcttcattctcc

SEQ ID NO: 161888 - DNA, 25 bp, probe
caaaattatttccatcttctatgcc

SEQ ID NO: 161889 - DNA, 25 bp, probe
caaaattatttccatcttctatgcc

SEQ ID NO: 161890 - DNA, 25 bp, probe
caaattctttatcattgtctttctt

SEQ ID NO: 161891 - DNA, 25 bp, probe
caaagctctttacctcttgctattt

SEQ ID NO: 161892 - DNA, 25 bp, probe
caaatgttttcacccaatctcttgc

SEQ ID NO: 161893 - DNA, 25 bp, probe
caaatgttttcacccaatctcttgc

SEQ ID NO: 161894 - DNA, 25 bp, probe
cacaaggtttcatagccctgtctca

SEQ ID NO: 161895 - DNA, 25 bp, probe
cacaaggtttcatagccctgtctca

SEQ ID NO: 161896 - DNA, 25 bp, probe
caaacttaactccagccctgaacag

SEQ ID NO: 161897 - DNA, 25 bp, probe
caaattcaagaagactcgctaccag

SEQ ID NO: 161898 - DNA, 25 bp, probe
caaaaatgagcacgctttcctaccg

SEQ ID NO: 161899 - DNA, 25 bp, probe
caaaaatgagcacgctttcctaccg

SEQ ID NO: 161900 - DNA, 25 bp, probe
caaaatgatggcttcttcgccgtcc

SEQ ID NO: 161901 - DNA, 25 bp, probe
caaaatgatggcttcttcgccgtcc

SEQ ID NO: 161902 - DNA, 25 bp, probe
caaaagagaacattctggcctgtcc

SEQ ID NO: 161903 - DNA, 25 bp, probe
caaaaaaaccatcggcaatgtgcca

SEQ ID NO: 161904 - DNA, 25 bp, probe
caaagacaaacctctgagctccatc

SEQ ID NO: 161905 - DNA, 25 bp, probe
caaatacgaatccttctatcccact

SEQ ID NO: 161906 - DNA, 25 bp, probe
caaatatgacatccgtctttcccac

SEQ ID NO: 161907 - DNA, 25 bp, probe
caaatcgaagcaggaattccccact

SEQ ID NO: 161908 - DNA, 25 bp, probe
caaactgaacgacattctcctcatc

SEQ ID NO: 161909 - DNA, 25 bp, probe
caaactgtcacaagttgttatgtcc

SEQ ID NO: 161910 - DNA, 25 bp, probe
caaactgtcacaagttgttatgtcc

SEQ ID NO: 161911 - DNA, 25 bp, probe
caaactcccatatatttgcttcccc

SEQ ID NO: 161912 - DNA, 25 bp, probe
caaactaccaatttctcgttcctga

SEQ ID NO: 161913 - DNA, 25 bp, probe
caaatccaccaaatacttttgtcta

SEQ ID NO: 161914 - DNA, 25 bp, probe
caaatccaccaaatacttttgtcta

SEQ ID NO: 161915 - DNA, 25 bp, probe
caaatcccctcagcagagtgtgttt

SEQ ID NO: 161916 - DNA, 25 bp, probe
caaatcctacaggggattgtgtttt

SEQ ID NO: 161917 - DNA, 25 bp, probe
caaacctgccagggatgttttcacc

SEQ ID NO: 161918 - DNA, 25 bp, probe
caaacagccccagatggtgttcacg

SEQ ID NO: 161919 - DNA, 25 bp, probe
caaaggggcacctgaggttcacgct

SEQ ID NO: 161920 - DNA, 25 bp, probe
caaagggaccgacgagactccccat

SEQ ID NO: 161921 - DNA, 25 bp, probe
caaagggaacgacattgccctgctc

SEQ ID NO: 161922 - DNA, 25 bp, probe
caaagggaatagagattctccagga

SEQ ID NO: 161923 - DNA, 25 bp, probe
cacggggcagggatacatctcgagg

SEQ ID NO: 161924 - DNA, 25 bp, probe
cacagggtgcaggtaacccttggtc

SEQ ID NO: 161925 - DNA, 25 bp, probe
caaagagtgggaaattccactgggc

SEQ ID NO: 161926 - DNA, 25 bp, probe
caaaggttggatccatcttctctcc

SEQ ID NO: 161927 - DNA, 25 bp, probe
caaaggatgggacttttgtcatttc

SEQ ID NO: 161928 - DNA, 25 bp, probe
caaaggcagggccacttttgaagtc

SEQ ID NO: 161929 - DNA, 25 bp, probe
caaaacaggcgacctttcagcagag

SEQ ID NO: 161930 - DNA, 25 bp, probe
caaacactagctgttctgctcatat

SEQ ID NO: 161931 - DNA, 25 bp, probe
caaaatgctacttgttacctctatt

SEQ ID NO: 161932 - DNA, 25 bp, probe
caaaatgatcaaattctacttctga

SEQ ID NO: 161933 - DNA, 25 bp, probe
caaaatgatcaaattctacttctga

SEQ ID NO: 161934 - DNA, 25 bp, probe
caaaaatgaatgtctgtcatatatt

SEQ ID NO: 161935 - DNA, 25 bp, probe
caaacaccagtgttggatattctgt

SEQ ID NO: 161936 - DNA, 25 bp, probe
caaacaccagtgttggatattctgt

SEQ ID NO: 161937 - DNA, 25 bp, probe
cacaaccggatgtcttgattgattt

SEQ ID NO: 161938 - DNA, 25 bp, probe
cacagcccggtaatatgtctcatcc

SEQ ID NO: 161939 - DNA, 25 bp, probe
caaactctgcctacatgttatctcc

SEQ ID NO: 161940 - DNA, 25 bp, probe
caaactctgcctacatgttatctcc

SEQ ID NO: 161941 - DNA, 25 bp, probe
cacaacgtctgcagcatttatctgt

SEQ ID NO: 161942 - DNA, 25 bp, probe
caaactttgcaggcattttgacatt

SEQ ID NO: 161943 - DNA, 25 bp, probe
caaagtggtgccgatatgtgagacg

SEQ ID NO: 161944 - DNA, 25 bp, probe
caaagatggccacattgatatcaat

SEQ ID NO: 161945 - DNA, 25 bp, probe
caaaatggtcattgtgtgcctcatc

SEQ ID NO: 161946 - DNA, 25 bp, probe
caaaatggtcattgtgtgcctcatc

SEQ ID NO: 161947 - DNA, 25 bp, probe
caaatatggctatgtatccgatccc

SEQ ID NO: 161948 - DNA, 25 bp, probe
caaatcactcttggtgaccgagctg

SEQ ID NO: 161949 - DNA, 25 bp, probe
caaacaatcccagtggctcaatgtc

SEQ ID NO: 161950 - DNA, 25 bp, probe
caaacaatcccagtggctcaatgtc

SEQ ID NO: 161951 - DNA, 25 bp, probe
caaaaacccactgggcacagccaac

SEQ ID NO: 161952 - DNA, 25 bp, probe
caaaaaccagtcggcagaccacagg

SEQ ID NO: 161953 - DNA, 25 bp, probe
caaagaacggcctacatacccagag

SEQ ID NO: 161954 - DNA, 25 bp, probe
caaagaacaggagccgacccagcag

SEQ ID NO: 161955 - DNA, 25 bp, probe
caaaccaagggtacagatccccagc

SEQ ID NO: 161956 - DNA, 25 bp, probe
caaacacaagtttaagatccacacg

SEQ ID NO: 161957 - DNA, 25 bp, probe
caaacaaagccagaagctgagcacc

SEQ ID NO: 161958 - DNA, 25 bp, probe
caaataaactcaaaagctgtctccc

SEQ ID NO: 161959 - DNA, 25 bp, probe
cacaacaacctatgtcactgactca

SEQ ID NO: 161960 - DNA, 25 bp, probe
caaaagacaggcaagctcactacta

SEQ ID NO: 161961 - DNA, 25 bp, probe
caaaagacaggcaagctcactacta

SEQ ID NO: 161962 - DNA, 25 bp, probe
caaaccaaatgcaaccagatacaac

SEQ ID NO: 161963 - DNA, 25 bp, probe
caaacagagaagcacatcaacacag

SEQ ID NO: 161964 - DNA, 25 bp, probe
caaacatgttgtcacacacacacac

SEQ ID NO: 161965 - DNA, 25 bp, probe
caaatatttgcttggcaacacgact

SEQ ID NO: 161966 - DNA, 25 bp, probe
caaatatttgcttggcaacacgact

SEQ ID NO: 161967 - DNA, 25 bp, probe
caaaagtaccatagcacagcactgc

SEQ ID NO: 161968 - DNA, 25 bp, probe
caaaagagactaatggatgaagcta

SEQ ID NO: 161969 - DNA, 25 bp, probe
caaacaaatccaactatgtagtact

SEQ ID NO: 161970 - DNA, 25 bp, probe
caaacccacctactatgttgacaca

SEQ ID NO: 161971 - DNA, 25 bp, probe
caaaccaaatcttctctgtttcaga

SEQ ID NO: 161972 - DNA, 25 bp, probe
cagaagctcaaacttcctggtaact

SEQ ID NO: 161973 - DNA, 25 bp, probe
cacaagtctgggtcactttgtaact

SEQ ID NO: 161974 - DNA, 25 bp, probe
cacactttctggtcactttgtacaa

SEQ ID NO: 161975 - DNA, 25 bp, probe
caaacttctagttcgttgagactta

SEQ ID NO: 161976 - DNA, 25 bp, probe
caaagttcgggtcatggcagactct

SEQ ID NO: 161977 - DNA, 25 bp, probe
caaagtcccgagcaatgaagtcatc

SEQ ID NO: 161978 - DNA, 25 bp, probe
caaaggcacctacggcaaagtcaag

SEQ ID NO: 161979 - DNA, 25 bp, probe
caaactccttccagctgaaatcaag

SEQ ID NO: 161980 - DNA, 25 bp, probe
caggacccgtcctcaataacaatcc

SEQ ID NO: 161981 - DNA, 25 bp, probe
cacaaccggttcacaaaggagacct

SEQ ID NO: 161982 - DNA, 25 bp, probe
caaactcggtgagaacaatgctgag

SEQ ID NO: 161983 - DNA, 25 bp, probe
caaactgctggtccataagcgctgc

SEQ ID NO: 161984 - DNA, 25 bp, probe
caaactgctggtccataagcgctgc

SEQ ID NO: 161985 - DNA, 25 bp, probe
caaactctgtgtactgaccactgag

SEQ ID NO: 161986 - DNA, 25 bp, probe
caaactgctgcgatatgaccaccag

SEQ ID NO: 161987 - DNA, 25 bp, probe
cacaatcctcgtctgaatcatccga

SEQ ID NO: 161988 - DNA, 25 bp, probe
cacaatgggcaattctgacttctcc

SEQ ID NO: 161989 - DNA, 25 bp, probe
caaagcaggtagagactcctgccag

SEQ ID NO: 161990 - DNA, 25 bp, probe
caaagaggtggacgagtgctctcgg

SEQ ID NO: 161991 - DNA, 25 bp, probe
caaaagcttgtgcgatgtcgatgtt

SEQ ID NO: 161992 - DNA, 25 bp, probe
caaaagcttgtgcgatgtcgatgtt

SEQ ID NO: 161993 - DNA, 25 bp, probe
caaagtgctcagaccttgtctagtt

SEQ ID NO: 161994 - DNA, 25 bp, probe
caaagtcacagaccttgcctcagaa

SEQ ID NO: 161995 - DNA, 25 bp, probe
caaagtctaattcagcacatatgca

SEQ ID NO: 161996 - DNA, 25 bp, probe
caaagtctaattcagcacatatgca

SEQ ID NO: 161997 - DNA, 25 bp, probe
caaatttcatacctatcatcttaag

SEQ ID NO: 161998 - DNA, 25 bp, probe
caaatctggctactataacatgggg

SEQ ID NO: 161999 - DNA, 25 bp, probe
caaatccctagttgatagggtttgg

SEQ ID NO: 162000 - DNA, 25 bp, probe
caaacacctagtcaatacagatttg

SEQ ID NO: 162001 - DNA, 25 bp, probe
caaacagtctcaggaaatcaaatat

SEQ ID NO: 162002 - DNA, 25 bp, probe
caaacacctcaatgtccaaatagcg

SEQ ID NO: 162003 - DNA, 25 bp, probe
caaaagccaaaagtctctgagaacg

SEQ ID NO: 162004 - DNA, 25 bp, probe
caaaagccaaaagtctctgagaacg

SEQ ID NO: 162005 - DNA, 25 bp, probe
caaacactcaactccatcgaatagc

SEQ ID NO: 162006 - DNA, 25 bp, probe
caaacactcaactccatcgaatagc

SEQ ID NO: 162007 - DNA, 25 bp, probe
caaacacttggctcctagagacctg

SEQ ID NO: 162008 - DNA, 25 bp, probe
caaacaccggcattttatgtacttt

SEQ ID NO: 162009 - DNA, 25 bp, probe
caaaaccagcaattgtaaatacttt

SEQ ID NO: 162010 - DNA, 25 bp, probe
caaaacaagagatgcccattactgt

SEQ ID NO: 162011 - DNA, 25 bp, probe
caaaagcaggaaggggcatccactg

SEQ ID NO: 162012 - DNA, 25 bp, probe
caaaacaggtcaggctgcatgcccc

SEQ ID NO: 162013 - DNA, 25 bp, probe
caaaagcaggtacctgctcacgccc

SEQ ID NO: 162014 - DNA, 25 bp, probe
caaacaaggtagtatccgggcgcgc

SEQ ID NO: 162015 - DNA, 25 bp, probe
caaatgcaaggttactggctgggga

SEQ ID NO: 162016 - DNA, 25 bp, probe
caaatatctacttgacttgggggta

SEQ ID NO: 162017 - DNA, 25 bp, probe
caaagatgccacggactggtgctgc

SEQ ID NO: 162018 - DNA, 25 bp, probe
caaagtgaagcccatcagcctggca

SEQ ID NO: 162019 - DNA, 25 bp, probe
caaaggcaggcaggatcctcaggcc

SEQ ID NO: 162020 - DNA, 25 bp, probe
caaagtgggatcaactgtacgcctt

SEQ ID NO: 162021 - DNA, 25 bp, probe
caaagttttctattaacgctgcccg

SEQ ID NO: 162022 - DNA, 25 bp, probe
caaaactgtttcatcaactgcttcc

SEQ ID NO: 162023 - DNA, 25 bp, probe
cagaaaggtgttactaaccagtctt

SEQ ID NO: 162024 - DNA, 25 bp, probe
cagaagcaccgtgtctgaaccgttg

SEQ ID NO: 162025 - DNA, 25 bp, probe
caaagacctgtacgccaacacagtg

SEQ ID NO: 162026 - DNA, 25 bp, probe
caaagccagcgtgaccatcgaggat

SEQ ID NO: 162027 - DNA, 25 bp, probe
caaatctcagggcttcatgggaatt

SEQ ID NO: 162028 - DNA, 25 bp, probe
caaatgtcagggttctgctcggctt

SEQ ID NO: 162029 - DNA, 25 bp, probe
caaatgtcagggttctgctcggctt

SEQ ID NO: 162030 - DNA, 25 bp, probe
caaatgtcagggttctgctcggctt

SEQ ID NO: 162031 - DNA, 25 bp, probe
caaagtcatggttctctggtggttt

SEQ ID NO: 162032 - DNA, 25 bp, probe
caaagttgagacttctgaacgtggc

SEQ ID NO: 162033 - DNA, 25 bp, probe
caaagctgatgggcgtggagacggt

SEQ ID NO: 162034 - DNA, 25 bp, probe
caaagcaatgcttccttatgagggc

SEQ ID NO: 162035 - DNA, 25 bp, probe
caaacacagctaatgctatggggtg

SEQ ID NO: 162036 - DNA, 25 bp, probe
caaacagcagtgatggctggggaac

SEQ ID NO: 162037 - DNA, 25 bp, probe
cacagcctgggcattctgtggggag

SEQ ID NO: 162038 - DNA, 25 bp, probe
caccctgggactcagctcgggtggc

SEQ ID NO: 162039 - DNA, 25 bp, probe
cacacttcttgaaacagcctgggtg

SEQ ID NO: 162040 - DNA, 25 bp, probe
cacactcctcaaaaaggccaacaaa

SEQ ID NO: 162041 - DNA, 25 bp, probe
cactacccaagaaaccaaagaaatg

SEQ ID NO: 162042 - DNA, 25 bp, probe
tactgagggaaatagccaaaaaggc

SEQ ID NO: 162043 - DNA, 25 bp, probe
cacagaggcgtataatcccaaaata

SEQ ID NO: 162044 - DNA, 25 bp, probe
caaaggcattaaagcatttctggaa

SEQ ID NO: 162045 - DNA, 25 bp, probe
caaagactgaagaaatttcacagca

SEQ ID NO: 162046 - DNA, 25 bp, probe
caaagcatcaaagagatttagctca

SEQ ID NO: 162047 - DNA, 25 bp, probe
caaaccagaaccaatatgtgactac

SEQ ID NO: 162048 - DNA, 25 bp, probe
cacaacggcaacattatgctggaca

SEQ ID NO: 162049 - DNA, 25 bp, probe
cacaagcgttacctggtgggcacag

SEQ ID NO: 162050 - DNA, 25 bp, probe
cacaacctgaacctaggagtgcccc

SEQ ID NO: 162051 - DNA, 25 bp, probe
cacaacctgaacctaggagtgcccc

SEQ ID NO: 162052 - DNA, 25 bp, probe
cacaaatcgaagcaggaattcccca

SEQ ID NO: 162053 - DNA, 25 bp, probe
cacaataggctacggggagtccccg

SEQ ID NO: 162054 - DNA, 25 bp, probe
caaatgtggtatctggggctggcgg

SEQ ID NO: 162055 - DNA, 25 bp, probe
caaagtgtttctagggtgtagctgg

SEQ ID NO: 162056 - DNA, 25 bp, probe
caaagtgttgatgagccactgtacc

SEQ ID NO: 162057 - DNA, 25 bp, probe
caaacttctgtgcacaaagtgctcc

SEQ ID NO: 162058 - DNA, 25 bp, probe
caaattcttctgaacaacactcatt

SEQ ID NO: 162059 - DNA, 25 bp, probe
caaagccctctgaaaaacagccttt

SEQ ID NO: 162060 - DNA, 25 bp, probe
caaactcctcaaatcaaaagccttc

SEQ ID NO: 162061 - DNA, 25 bp, probe
caaagcccacttagcaaaagccacc

SEQ ID NO: 162062 - DNA, 25 bp, probe
caaatgccccgaatttagtcacacc

SEQ ID NO: 162063 - DNA, 25 bp, probe
caaatgccccgaatttagtcacacc

SEQ ID NO: 162064 - DNA, 25 bp, probe
caaaccctcgtttctgattaatgct

SEQ ID NO: 162065 - DNA, 25 bp, probe
caaaccctcgtttctgattaatgct

SEQ ID NO: 162066 - DNA, 25 bp, probe
caaaccccctattatacattatgat

SEQ ID NO: 162067 - DNA, 25 bp, probe
caaaccccactcagaaacagagaaa

SEQ ID NO: 162068 - DNA, 25 bp, probe
caaaccccactcagaaacagagaaa

SEQ ID NO: 162069 - DNA, 25 bp, probe
gcaaaggtccccagaaccaagaagc

SEQ ID NO: 162070 - DNA, 25 bp, probe
gaaacgacaccgtgaacgacgagaa

SEQ ID NO: 162071 - DNA, 25 bp, probe
gaccgtacgacgtgaaggacgtcat

SEQ ID NO: 162072 - DNA, 25 bp, probe
gaccgtacgacgtgaaggacgtcat

SEQ ID NO: 162073 - DNA, 25 bp, probe
cagaagtacgaccctaaggacgtca

SEQ ID NO: 162074 - DNA, 25 bp, probe
caaattacgacctgaaaatggctga

SEQ ID NO: 162075 - DNA, 25 bp, probe
caaatttacgccatgaaagtggtga

SEQ ID NO: 162076 - DNA, 25 bp, probe
cagcaatggtaagcgtaaagttttt

SEQ ID NO: 162077 - DNA, 25 bp, probe
cacactggtaaatgttacctctatt

SEQ ID NO: 162078 - DNA, 25 bp, probe
catagtttaacacgtggtccttttg

SEQ ID NO: 162079 - DNA, 25 bp, probe
caaatctattaatggaatccttttc

SEQ ID NO: 162080 - DNA, 25 bp, probe
caaagaattggatctggatcatttg

SEQ ID NO: 162081 - DNA, 25 bp, probe
caaatgatggatcaccattatattt

SEQ ID NO: 162082 - DNA, 25 bp, probe
caaagatgagactatcgctgttgaa

SEQ ID NO: 162083 - DNA, 25 bp, probe
caaagctgtgcagcatcagcaaaaa

SEQ ID NO: 162084 - DNA, 25 bp, probe
caaagactgcagtatccataacccc

SEQ ID NO: 162085 - DNA, 25 bp, probe
caaagcctgacttacaatatgcctg

SEQ ID NO: 162086 - DNA, 25 bp, probe
caaacttcatcggaaatatcgggac

SEQ ID NO: 162087 - DNA, 25 bp, probe
caaactggatgggacacgtggggag

SEQ ID NO: 162088 - DNA, 25 bp, probe
caaatcatggacgcacctgtgggga

SEQ ID NO: 162089 - DNA, 25 bp, probe
caaacactgaaggcatccatgcggg

SEQ ID NO: 162090 - DNA, 25 bp, probe
caaactctatcggctgatgcagcgc

SEQ ID NO: 162091 - DNA, 25 bp, probe
caaactctatcggctgatgcagcgc

SEQ ID NO: 162092 - DNA, 25 bp, probe
cacaacatcgtcatggtgacccagt

SEQ ID NO: 162093 - DNA, 25 bp, probe
cactaatttggtcctacccagcaat

SEQ ID NO: 162094 - DNA, 25 bp, probe
cactaagttggtgtactgcctcgac

SEQ ID NO: 162095 - DNA, 25 bp, probe
cacataatttttgtacatcccaaag

SEQ ID NO: 162096 - DNA, 25 bp, probe
cacatggtttttgaatcacactgca

SEQ ID NO: 162097 - DNA, 25 bp, probe
cacaggttattgtcccacacgtgaa

SEQ ID NO: 162098 - DNA, 25 bp, probe
caaagcaggttgtcccacatgtata

SEQ ID NO: 162099 - DNA, 25 bp, probe
caaagggtatatttgcagcatgctt

SEQ ID NO: 162100 - DNA, 25 bp, probe
caaagacgaattcatgctgtctgtg

SEQ ID NO: 162101 - DNA, 25 bp, probe
caaatgatagaaacagactgcctga

SEQ ID NO: 162102 - DNA, 25 bp, probe
caaatgatagaaacagactgcctga

SEQ ID NO: 162103 - DNA, 25 bp, probe
caaagcattctcatcagtcgcaatg

SEQ ID NO: 162104 - DNA, 25 bp, probe
cacacctgttctgaatccagcatgg

SEQ ID NO: 162105 - DNA, 25 bp, probe
cacaactgtcacgacattctgcaga

SEQ ID NO: 162106 - DNA, 25 bp, probe
caaagtcatgctgactctatgagat

SEQ ID NO: 162107 - DNA, 25 bp, probe
caaaccagtatcgctcatagatcag

SEQ ID NO: 162108 - DNA, 25 bp, probe
caaacgctatatgcctccagaagtg

SEQ ID NO: 162109 - DNA, 25 bp, probe
caaacctttgtaccacagaatgttc

SEQ ID NO: 162110 - DNA, 25 bp, probe
caaacctgttaccacagactatttt

SEQ ID NO: 162111 - DNA, 25 bp, probe
caaacactctaaaatctgacttctg

SEQ ID NO: 162112 - DNA, 25 bp, probe
caaagccctacaactctgtactctt

SEQ ID NO: 162113 - DNA, 25 bp, probe
caaagccttttgatcatgtacattt

SEQ ID NO: 162114 - DNA, 25 bp, probe
caaaccctattttcagctactattt

SEQ ID NO: 162115 - DNA, 25 bp, probe
caaatcgcttttctggctgactatt

SEQ ID NO: 162116 - DNA, 25 bp, probe
caaaggactttgctgaccactgcat

SEQ ID NO: 162117 - DNA, 25 bp, probe
caaagagaattgtgccccactctac

SEQ ID NO: 162118 - DNA, 25 bp, probe
caaaggtttgaagacacagcctccc

SEQ ID NO: 162119 - DNA, 25 bp, probe
caaaggccttaagtacatccactct

SEQ ID NO: 162120 - DNA, 25 bp, probe
caaaccctgaagtgatccgagctct

SEQ ID NO: 162121 - DNA, 25 bp, probe
caaagaccaaagggatcctgcgctt

SEQ ID NO: 162122 - DNA, 25 bp, probe
cactaacacatatagggcttccttt

SEQ ID NO: 162123 - DNA, 25 bp, probe
cactaagtcttctggaggttctatt

SEQ ID NO: 162124 - DNA, 25 bp, probe
cactaagtcttctggaggttctatt

SEQ ID NO: 162125 - DNA, 25 bp, probe
cactaagacattccaaagagatttc

SEQ ID NO: 162126 - DNA, 25 bp, probe
cactaagccctacataggattctca

SEQ ID NO: 162127 - DNA, 25 bp, probe
cactcaaccctaagagcagccttca

SEQ ID NO: 162128 - DNA, 25 bp, probe
cactgctaaccaaaactgcgttaat

SEQ ID NO: 162129 - DNA, 25 bp, probe
cactgctaaccaaaactgcgttaat

SEQ ID NO: 162130 - DNA, 25 bp, probe
caaattgaccaatagctgctgcttt

SEQ ID NO: 162131 - DNA, 25 bp, probe
caaattgcctctttaatgctccatt

SEQ ID NO: 162132 - DNA, 25 bp, probe
caaattcactatgactatgttcagt

SEQ ID NO: 162133 - DNA, 25 bp, probe
caaattcactatgactatgttcagt

SEQ ID NO: 162134 - DNA, 25 bp, probe
caaatatcgctaaaccttactgtga

SEQ ID NO: 162135 - DNA, 25 bp, probe
caaatatcgctaaaccttactgtga

SEQ ID NO: 162136 - DNA, 25 bp, probe
cacaaatctttccaactctacggat

SEQ ID NO: 162137 - DNA, 25 bp, probe
cacaaatcaatgggacctgaaggtt

SEQ ID NO: 162138 - DNA, 25 bp, probe
caaattcctgcttgtccggcaggtg

SEQ ID NO: 162139 - DNA, 25 bp, probe
caaacccattcagccgtgcaaatgc

SEQ ID NO: 162140 - DNA, 25 bp, probe
caaacccattcagccgtgcaaatgc

SEQ ID NO: 162141 - DNA, 25 bp, probe
caaactcctataccactgtcaagta

SEQ ID NO: 162142 - DNA, 25 bp, probe
caaatccccaccatttgagagctca

SEQ ID NO: 162143 - DNA, 25 bp, probe
caaattctcacctctattaagctgc

SEQ ID NO: 162144 - DNA, 25 bp, probe
caaatcactaccgctttgcaatcac

SEQ ID NO: 162145 - DNA, 25 bp, probe
cacagtcactatcttcatttcctat

SEQ ID NO: 162146 - DNA, 25 bp, probe
cacagtgcttacttaccttactaac

SEQ ID NO: 162147 - DNA, 25 bp, probe
cacaggctttccatcacttattaca

SEQ ID NO: 162148 - DNA, 25 bp, probe
cacagccaaatgcttccatttgtaa

SEQ ID NO: 162149 - DNA, 25 bp, probe
cacacgaaactgtttagtgggtaag

SEQ ID NO: 162150 - DNA, 25 bp, probe
caccccaacgtggtcaggttgtttg

SEQ ID NO: 162151 - DNA, 25 bp, probe
caccacgcccggctaatttttgtat

SEQ ID NO: 162152 - DNA, 25 bp, probe
caccgcaccctgctaattttttgta

SEQ ID NO: 162153 - DNA, 25 bp, probe
catcttcccattcttttacttagtg

SEQ ID NO: 162154 - DNA, 25 bp, probe
cacttacacactctttttgattgaa

SEQ ID NO: 162155 - DNA, 25 bp, probe
cagcttactactctggatacagtta

SEQ ID NO: 162156 - DNA, 25 bp, probe
gccactaagtctgtggtaacttcct

SEQ ID NO: 162157 - DNA, 25 bp, probe
gccactaagtctgtggtaacttcct

SEQ ID NO: 162158 - DNA, 25 bp, probe
cacacttagtcctgatgtactttaa

SEQ ID NO: 162159 - DNA, 25 bp, probe
caaagtagtctataatgactgttca

SEQ ID NO: 162160 - DNA, 25 bp, probe
caaagtagactaaagcagccatctt

SEQ ID NO: 162161 - DNA, 25 bp, probe
caaagtagactaaagcagccatctt

SEQ ID NO: 162162 - DNA, 25 bp, probe
cacacttaatataattcgccacttc

SEQ ID NO: 162163 - DNA, 25 bp, probe
cacacctggataactgttacacttt

SEQ ID NO: 162164 - DNA, 25 bp, probe
cacacctggctaattttttgtattt

SEQ ID NO: 162165 - DNA, 25 bp, probe
cacacggactaatctttctgaactg

SEQ ID NO: 162166 - DNA, 25 bp, probe
cacacttgtaaacctcttttgcact

SEQ ID NO: 162167 - DNA, 25 bp, probe
cacccattgaagtctccttgggcca

SEQ ID NO: 162168 - DNA, 25 bp, probe
cacggcctgaagacttcatgcggcc

SEQ ID NO: 162169 - DNA, 25 bp, probe
cacggcctgaagacttcatgcggcc

SEQ ID NO: 162170 - DNA, 25 bp, probe
cacaggcactgaggacccaggcctt

SEQ ID NO: 162171 - DNA, 25 bp, probe
cacaggagagaccagtccttccttg

SEQ ID NO: 162172 - DNA, 25 bp, probe
cacaggacaggggttccttctgggc

SEQ ID NO: 162173 - DNA, 25 bp, probe
cacagaaaagtcttacgaatgggga

SEQ ID NO: 162174 - DNA, 25 bp, probe
cacacaaacgtttacttatcttatg

SEQ ID NO: 162175 - DNA, 25 bp, probe
caaaggggccttatcaacattctga

SEQ ID NO: 162176 - DNA, 25 bp, probe
caaactggggctaaatccgcagcaa

SEQ ID NO: 162177 - DNA, 25 bp, probe
caaactgaggactaatttggcgcag

SEQ ID NO: 162178 - DNA, 25 bp, probe
cacacacgggtagattgctggcctg

SEQ ID NO: 162179 - DNA, 25 bp, probe
cacaagggagtagccttgtccagac

SEQ ID NO: 162180 - DNA, 25 bp, probe
caaaggaagaagcccggtggcgcct

SEQ ID NO: 162181 - DNA, 25 bp, probe
caaagcgaggtagccggtgtgcggt

SEQ ID NO: 162182 - DNA, 25 bp, probe
caaagcgaggtagccggtgtgcggt

SEQ ID NO: 162183 - DNA, 25 bp, probe
cacagggaacaagacacggctgggt

SEQ ID NO: 162184 - DNA, 25 bp, probe
caaatggataaaacagcacctctgg

SEQ ID NO: 162185 - DNA, 25 bp, probe
caaatggataaaacagcacctctgg

SEQ ID NO: 162186 - DNA, 25 bp, probe
caaaggagaggatcagactatctga

SEQ ID NO: 162187 - DNA, 25 bp, probe
caaagcagacatcgtccatgccttt

SEQ ID NO: 162188 - DNA, 25 bp, probe
caaagcagacatcgtccatgccttt

SEQ ID NO: 162189 - DNA, 25 bp, probe
caaagcagacatcgtccatgccttt

SEQ ID NO: 162190 - DNA, 25 bp, probe
caaagagagtgtgactcccttgcca

SEQ ID NO: 162191 - DNA, 25 bp, probe
caaagaagttgctgtcacacattgt

SEQ ID NO: 162192 - DNA, 25 bp, probe
caaagatggttgtattcctcacttt

SEQ ID NO: 162193 - DNA, 25 bp, probe
caaagtgtgattgcattactcagca

SEQ ID NO: 162194 - DNA, 25 bp, probe
cacaaggatgctggctttcaaagca

SEQ ID NO: 162195 - DNA, 25 bp, probe
cacaaggagctcttgttcttcaggg

SEQ ID NO: 162196 - DNA, 25 bp, probe
caaagatgagtttgtatcatggagg

SEQ ID NO: 162197 - DNA, 25 bp, probe
cacagcaagagcatcgtgcaccggg

SEQ ID NO: 162198 - DNA, 25 bp, probe
cacagttagtgctgtgcatcacagc

SEQ ID NO: 162199 - DNA, 25 bp, probe
catagcgtacaatgactacgtccat

SEQ ID NO: 162200 - DNA, 25 bp, probe
cacacactccttggaatgggtcctg

SEQ ID NO: 162201 - DNA, 25 bp, probe
caaactctcatttgactgtgagaac

SEQ ID NO: 162202 - DNA, 25 bp, probe
caaagccaaatattcctacagcatc

SEQ ID NO: 162203 - DNA, 25 bp, probe
caaagccaaagcaatccatacacca

SEQ ID NO: 162204 - DNA, 25 bp, probe
cacaacaataacctccatagcacct

SEQ ID NO: 162205 - DNA, 25 bp, probe
cacaacaataacctccatagcacct

SEQ ID NO: 162206 - DNA, 25 bp, probe
caaatgcaaaaccttgcagaacaga

SEQ ID NO: 162207 - DNA, 25 bp, probe
caaatgcaaatgagccatatgaaaa

SEQ ID NO: 162208 - DNA, 25 bp, probe
caaagaaagcgccgctcatgactat

SEQ ID NO: 162209 - DNA, 25 bp, probe
caaagagagatcccctcatctcatg

SEQ ID NO: 162210 - DNA, 25 bp, probe
cacaagccatttaatctcactcagc

SEQ ID NO: 162211 - DNA, 25 bp, probe
caaagccatatggagcatctaccca

SEQ ID NO: 162212 - DNA, 25 bp, probe
caaagcactgctgatgaagtccccg

SEQ ID NO: 162213 - DNA, 25 bp, probe
caaatagtctgaaaactcccctggg

SEQ ID NO: 162214 - DNA, 25 bp, probe
caaatagcctaggaagtgccctcga

SEQ ID NO: 162215 - DNA, 25 bp, probe
caaatacctcatgacgctcatcgtg

SEQ ID NO: 162216 - DNA, 25 bp, probe
caaatgccctctctggtgacgtttg

SEQ ID NO: 162217 - DNA, 25 bp, probe
caaagacccacaaggtgaggatggt

SEQ ID NO: 162218 - DNA, 25 bp, probe
caaagacgccgtgcggaggacgctg

SEQ ID NO: 162219 - DNA, 25 bp, probe
caaagcactgggtgccgacgacagc

SEQ ID NO: 162220 - DNA, 25 bp, probe
caaagcactgtgggtcttgggaagt

SEQ ID NO: 162221 - DNA, 25 bp, probe
caaagccatgagtttcttgggcagg

SEQ ID NO: 162222 - DNA, 25 bp, probe
caaagccagaaatgctctctccagg

SEQ ID NO: 162223 - DNA, 25 bp, probe
caaaggatgagattacacctacagt

SEQ ID NO: 162224 - DNA, 25 bp, probe
caaaggcaggcgacagcatcctgac

SEQ ID NO: 162225 - DNA, 25 bp, probe
caaagaggtgctcagcttcaagcct

SEQ ID NO: 162226 - DNA, 25 bp, probe
caaacgtgctgacatctatgcaatg

SEQ ID NO: 162227 - DNA, 25 bp, probe
caaacgtgctgacatctatgcaatg

SEQ ID NO: 162228 - DNA, 25 bp, probe
caaatcggtgcactgatcgctgcca

SEQ ID NO: 162229 - DNA, 25 bp, probe
caaagcgtggaattgctgccctgtg

SEQ ID NO: 162230 - DNA, 25 bp, probe
caaaggaagcacatgcctctctcag

SEQ ID NO: 162231 - DNA, 25 bp, probe
cagaaaggtcacctgccttctaggc

SEQ ID NO: 162232 - DNA, 25 bp, probe
caaagaggtttgcccatttggcagc

SEQ ID NO: 162233 - DNA, 25 bp, probe
caaagaggtttgcccatttggcagc

SEQ ID NO: 162234 - DNA, 25 bp, probe
cacaagggctgtcccacaatgggag

SEQ ID NO: 162235 - DNA, 25 bp, probe
caaaggccttgagaaagcgaagcag

SEQ ID NO: 162236 - DNA, 25 bp, probe
caaagtggctacagacgaagcaaag

SEQ ID NO: 162237 - DNA, 25 bp, probe
cacacttggcagatggaggaagcat

SEQ ID NO: 162238 - DNA, 25 bp, probe
cagagtcggaacggagaaaggtgga

SEQ ID NO: 162239 - DNA, 25 bp, probe
caaagcgaaagcggcaggatcgacg

SEQ ID NO: 162240 - DNA, 25 bp, probe
cacaccatgacaatgcagccaaatc

SEQ ID NO: 162241 - DNA, 25 bp, probe
cacactcacatttagcccatgtcat

SEQ ID NO: 162242 - DNA, 25 bp, probe
cagaatactaaagcacctcaaaaaa

SEQ ID NO: 162243 - DNA, 25 bp, probe
cacactgacttatttccctaaacta

SEQ ID NO: 162244 - DNA, 25 bp, probe
cacacatcacatttttctggaaaac

SEQ ID NO: 162245 - DNA, 25 bp, probe
cacacatcctaaactgaaaacaaca

SEQ ID NO: 162246 - DNA, 25 bp, probe
cacacatcctaaactgaaaacaaca

SEQ ID NO: 162247 - DNA, 25 bp, probe
cacactcctacaacgaaggacaaac

SEQ ID NO: 162248 - DNA, 25 bp, probe
cacatcctgctaagacgtttaaaac

SEQ ID NO: 162249 - DNA, 25 bp, probe
caccgtgcaaggctctttacaaacg

SEQ ID NO: 162250 - DNA, 25 bp, probe
cacctggctaggctatttaaactcc

SEQ ID NO: 162251 - DNA, 25 bp, probe
cacttggtggggtcaccaactactc

SEQ ID NO: 162252 - DNA, 25 bp, probe
cagcttaagtggagcatcccctttc

SEQ ID NO: 162253 - DNA, 25 bp, probe
cagcttaagtggagcatcccctttc

SEQ ID NO: 162254 - DNA, 25 bp, probe
cacttacgaagtgtgccagcctttt

SEQ ID NO: 162255 - DNA, 25 bp, probe
cagttagagtaggttgctatggttt

SEQ ID NO: 162256 - DNA, 25 bp, probe
cactaatcgaatgtctgctaatgct

SEQ ID NO: 162257 - DNA, 25 bp, probe
caaagatgccttgtgcttggtgctc

SEQ ID NO: 162258 - DNA, 25 bp, probe
caaagctggctgagactctgtgatc

SEQ ID NO: 162259 - DNA, 25 bp, probe
cacacatcagtggaacttctgtact

SEQ ID NO: 162260 - DNA, 25 bp, probe
cacacacagtcattcatttctgtcc

SEQ ID NO: 162261 - DNA, 25 bp, probe
cacgatattcagatttcggccttag

SEQ ID NO: 162262 - DNA, 25 bp, probe
cacagtgataagatcatccgacttt

SEQ ID NO: 162263 - DNA, 25 bp, probe
cacggaaagcatcctctccaaagtt

SEQ ID NO: 162264 - DNA, 25 bp, probe
cacgggaagttcaccagcaagtcgg

SEQ ID NO: 162265 - DNA, 25 bp, probe
cacgggaattctacgcaccagaact

SEQ ID NO: 162266 - DNA, 25 bp, probe
cacgcggaaactctacgtggactga

SEQ ID NO: 162267 - DNA, 25 bp, probe
cacgcggaaactctacgtggactga

SEQ ID NO: 162268 - DNA, 25 bp, probe
cagcgggagaagcttacctttctgg

SEQ ID NO: 162269 - DNA, 25 bp, probe
cacgacgaaggccgtcgtccttcgt

SEQ ID NO: 162270 - DNA, 25 bp, probe
cacagggagagtgggaaccactacg

SEQ ID NO: 162271 - DNA, 25 bp, probe
ccggggaggcggaggttacagtgag

SEQ ID NO: 162272 - DNA, 25 bp, probe
cctgacggggggtgaagaaagtgca

SEQ ID NO: 162273 - DNA, 25 bp, probe
cactactcggtgtgaatgaagaaag

SEQ ID NO: 162274 - DNA, 25 bp, probe
caaaccagaggctaagatgaatgag

SEQ ID NO: 162275 - DNA, 25 bp, probe
caaagagcaaagccggagagatgat

SEQ ID NO: 162276 - DNA, 25 bp, probe
caccaagaaacccgacggcttccat

SEQ ID NO: 162277 - DNA, 25 bp, probe
cacttaacaaaccctcgtttctgat

SEQ ID NO: 162278 - DNA, 25 bp, probe
cacttaacaaaccctcgtttctgat

SEQ ID NO: 162279 - DNA, 25 bp, probe
cacaggaaaaaccaccagttacttg

SEQ ID NO: 162280 - DNA, 25 bp, probe
cacaggaagcaaacccagctcctag

SEQ ID NO: 162281 - DNA, 25 bp, probe
cacaagaaccaagcgcccatgatga

SEQ ID NO: 162282 - DNA, 25 bp, probe
caaagcaacaaactcctatcattga

SEQ ID NO: 162283 - DNA, 25 bp, probe
cacagaaaaaagccacttaaggtgt

SEQ ID NO: 162284 - DNA, 25 bp, probe
cacacacaaaagtcgtttaaggtct

SEQ ID NO: 162285 - DNA, 25 bp, probe
cacaaatatccaccactttaacctt

SEQ ID NO: 162286 - DNA, 25 bp, probe
cacaaatatccaccactttaacctt

SEQ ID NO: 162287 - DNA, 25 bp, probe
cacaattttcaccatttaaacacaa

SEQ ID NO: 162288 - DNA, 25 bp, probe
caaattcatgtaccattctcataag

SEQ ID NO: 162289 - DNA, 25 bp, probe
caaagtcatggaccttcttcctgtc

SEQ ID NO: 162290 - DNA, 25 bp, probe
caaagttggagcttctattgccatg

SEQ ID NO: 162291 - DNA, 25 bp, probe
caaaccaagtgccttgagctgcctg

SEQ ID NO: 162292 - DNA, 25 bp, probe
caaagccaagctggggatgccgcag

SEQ ID NO: 162293 - DNA, 25 bp, probe
caaagcacaagctgggaccgcgagc

SEQ ID NO: 162294 - DNA, 25 bp, probe
caaagagagctcaagggacccatag

SEQ ID NO: 162295 - DNA, 25 bp, probe
caaagaggtcaagggcgccctgaaa

SEQ ID NO: 162296 - DNA, 25 bp, probe
caaagagggcactgggcacttctca

SEQ ID NO: 162297 - DNA, 25 bp, probe
caaatagcccaaaatggacttccaa

SEQ ID NO: 162298 - DNA, 25 bp, probe
caaatatgtcctaaaaaccaccaag

SEQ ID NO: 162299 - DNA, 25 bp, probe
caaaggtctcttgaggagctgccgc

SEQ ID NO: 162300 - DNA, 25 bp, probe
caaaggtctcttgaggagctgccgc

SEQ ID NO: 162301 - DNA, 25 bp, probe
caaaggtctcttgaggagctgccgc

SEQ ID NO: 162302 - DNA, 25 bp, probe
caaatactgcccgcaaagctcgcgc

SEQ ID NO: 162303 - DNA, 25 bp, probe
caaagacagcgctcaaaactcggtg

SEQ ID NO: 162304 - DNA, 25 bp, probe
caaatgagcaggtccaagacactta

SEQ ID NO: 162305 - DNA, 25 bp, probe
cattgttcagggtaaaggctgtaga

SEQ ID NO: 162306 - DNA, 25 bp, probe
cacttacaggcgtttcgagctgatc

SEQ ID NO: 162307 - DNA, 25 bp, probe
cacttagccgctgtctcgccgtgtc

SEQ ID NO: 162308 - DNA, 25 bp, probe
cacttcattcgtggtctcagcggat

SEQ ID NO: 162309 - DNA, 25 bp, probe
cacatatcacaaacgactacggtct

SEQ ID NO: 162310 - DNA, 25 bp, probe
cacactcacacagttgactatctga

SEQ ID NO: 162311 - DNA, 25 bp, probe
cacactcacacagttgactatctga

SEQ ID NO: 162312 - DNA, 25 bp, probe
cacaatcctagtcagctttgaacgc

SEQ ID NO: 162313 - DNA, 25 bp, probe
cacaggtctacgtgtttgcaacgct

SEQ ID NO: 162314 - DNA, 25 bp, probe
cacaggttagggtgtgtgccacacc

SEQ ID NO: 162315 - DNA, 25 bp, probe
cacatctgaaacctgtaggtccccc

SEQ ID NO: 162316 - DNA, 25 bp, probe
cacactgtgagcatgcagtacggcc

SEQ ID NO: 162317 - DNA, 25 bp, probe
cacatgtgtatcagcctgtcctggc

SEQ ID NO: 162318 - DNA, 25 bp, probe
cacatgtgtatcagcctgtcctggc

SEQ ID NO: 162319 - DNA, 25 bp, probe
cacacattctctccatggtgactgg

SEQ ID NO: 162320 - DNA, 25 bp, probe
caaatctcttgaggcagatgaaggg

SEQ ID NO: 162321 - DNA, 25 bp, probe
cacaaggattgaaagatgaggttct

SEQ ID NO: 162322 - DNA, 25 bp, probe
caaagagattagtcacagatgtatt

SEQ ID NO: 162323 - DNA, 25 bp, probe
caaagtgtacactactgatgctgtt

SEQ ID NO: 162324 - DNA, 25 bp, probe
caaatgttagacttgtgtgcatgga

SEQ ID NO: 162325 - DNA, 25 bp, probe
caaatgttcaaactttgcaggcatt

SEQ ID NO: 162326 - DNA, 25 bp, probe
caaatggccagactatttcattaat

SEQ ID NO: 162327 - DNA, 25 bp, probe
caaaggccgagcgttatatagcaag

SEQ ID NO: 162328 - DNA, 25 bp, probe
caaaggctctacgtgcaagtcaaca

SEQ ID NO: 162329 - DNA, 25 bp, probe
caaaggctctacgtgcaagtcaaca

SEQ ID NO: 162330 - DNA, 25 bp, probe
cataacagcatctcggaggccaaga

SEQ ID NO: 162331 - DNA, 25 bp, probe
cacaatatcaccagagcaagccata

SEQ ID NO: 162332 - DNA, 25 bp, probe
caaatctagccttggaacaaaccaa

SEQ ID NO: 162333 - DNA, 25 bp, probe
cacaaattcttctgaacaacactca

SEQ ID NO: 162334 - DNA, 25 bp, probe
caaattccttcataataacagcctg

SEQ ID NO: 162335 - DNA, 25 bp, probe
cacatgtccacccaaactaaagact

SEQ ID NO: 162336 - DNA, 25 bp, probe
cacattggctaaaacctaaaggtgg

SEQ ID NO: 162337 - DNA, 25 bp, probe
cacaatggctatcaacagctgctaa

SEQ ID NO: 162338 - DNA, 25 bp, probe
caaagatgacatcacatgtggtaaa

SEQ ID NO: 162339 - DNA, 25 bp, probe
cacaatgtgatagaggtggctacag

SEQ ID NO: 162340 - DNA, 25 bp, probe
caaagttcacaatgtggccgaggac

SEQ ID NO: 162341 - DNA, 25 bp, probe
cacaggtgccaaattctaccgtgga

SEQ ID NO: 162342 - DNA, 25 bp, probe
caaatggccaatctagaacgtggat

SEQ ID NO: 162343 - DNA, 25 bp, probe
caaagttatcagctaaaccttttca

SEQ ID NO: 162344 - DNA, 25 bp, probe
cagaagttcaagctaaatattgttt

SEQ ID NO: 162345 - DNA, 25 bp, probe
cacaggcttcagggttaagattgct

SEQ ID NO: 162346 - DNA, 25 bp, probe
cacagtcctgagcttgtaagatggt

SEQ ID NO: 162347 - DNA, 25 bp, probe
cacaggttatgtagattccaaggat

SEQ ID NO: 162348 - DNA, 25 bp, probe
cacagagatccagtctattcaaggc

SEQ ID NO: 162349 - DNA, 25 bp, probe
caaagacctgatctccaggctgctg

SEQ ID NO: 162350 - DNA, 25 bp, probe
caaatacctgatctgcaagatgctg

SEQ ID NO: 162351 - DNA, 25 bp, probe
caaataccgagggatcaatctgcaa

SEQ ID NO: 162352 - DNA, 25 bp, probe
caaatgcacctgtgcagctgcacct

SEQ ID NO: 162353 - DNA, 25 bp, probe
cacaatcacagcaacagactctcct

SEQ ID NO: 162354 - DNA, 25 bp, probe
cacactatgtgcaaaaatcaactca

SEQ ID NO: 162355 - DNA, 25 bp, probe
cacactcaggacagagccaaccctg

SEQ ID NO: 162356 - DNA, 25 bp, probe
cagctccatggtaggagtcaatctg

SEQ ID NO: 162357 - DNA, 25 bp, probe
caccgccggaaactgcaagttccga

SEQ ID NO: 162358 - DNA, 25 bp, probe
catccagccggctggcaatacttct

SEQ ID NO: 162359 - DNA, 25 bp, probe
cagctaggccgcatgctggaagcca

SEQ ID NO: 162360 - DNA, 25 bp, probe
cacagcgtccctagcagtgaactat

SEQ ID NO: 162361 - DNA, 25 bp, probe
cacacgcttcaattcaagacctgac

SEQ ID NO: 162362 - DNA, 25 bp, probe
cacagcctgatattccagaacctgg

SEQ ID NO: 162363 - DNA, 25 bp, probe
cacagccgcatacgtgaggatcctg

SEQ ID NO: 162364 - DNA, 25 bp, probe
cacagccagccttgggaatctcgtt

SEQ ID NO: 162365 - DNA, 25 bp, probe
cacaccacgatctggatttcttaat

SEQ ID NO: 162366 - DNA, 25 bp, probe
cacacaacctccctgattttaaagg

SEQ ID NO: 162367 - DNA, 25 bp, probe
cacaacctccctgattttaaaggct

SEQ ID NO: 162368 - DNA, 25 bp, probe
cacctctcccaaggtacttcaaagg

SEQ ID NO: 162369 - DNA, 25 bp, probe
cacctcccctaagttcttaaggcag

SEQ ID NO: 162370 - DNA, 25 bp, probe
cactcccacctgcaggacattaaaa

SEQ ID NO: 162371 - DNA, 25 bp, probe
cactgcgtactggaagggcttcaag

SEQ ID NO: 162372 - DNA, 25 bp, probe
cacacgctgactggttgggtctgac

SEQ ID NO: 162373 - DNA, 25 bp, probe
cacactggacagtagatgggccgac

SEQ ID NO: 162374 - DNA, 25 bp, probe
cacactggacaagcttcggcaggcg

SEQ ID NO: 162375 - DNA, 25 bp, probe
cacacatgtgcacacacattgcccc

SEQ ID NO: 162376 - DNA, 25 bp, probe
cacacatgtgcaaacatagccactt

SEQ ID NO: 162377 - DNA, 25 bp, probe
cacactgctctccagtagcacagat

SEQ ID NO: 162378 - DNA, 25 bp, probe
cacacgacctgtacatgatcatgcg

SEQ ID NO: 162379 - DNA, 25 bp, probe
cacacgacctgtacatgatcatgcg

SEQ ID NO: 162380 - DNA, 25 bp, probe
cacactgaagcagtagcttctgggc

SEQ ID NO: 162381 - DNA, 25 bp, probe
cacacgactttagtttggccaggta

SEQ ID NO: 162382 - DNA, 25 bp, probe
cacacagacacaaagtttaactggt

SEQ ID NO: 162383 - DNA, 25 bp, probe
cacagaaaataaactctacctggtt

SEQ ID NO: 162384 - DNA, 25 bp, probe
cacagaatggataagccagccaact

SEQ ID NO: 162385 - DNA, 25 bp, probe
cacagacaggtaagcgctgaacaga

SEQ ID NO: 162386 - DNA, 25 bp, probe
cacaagcagcggaagcctgaccggc

SEQ ID NO: 162387 - DNA, 25 bp, probe
caaagtgctggtcgaggcaggcgcc

SEQ ID NO: 162388 - DNA, 25 bp, probe
caaagtgctggtcgaggcaggcgcc

SEQ ID NO: 162389 - DNA, 25 bp, probe
caaagtgctggtcgaggcaggcgcc

SEQ ID NO: 162390 - DNA, 25 bp, probe
cagcgagctgctgccaagctgcagc

SEQ ID NO: 162391 - DNA, 25 bp, probe
cacaagctgtgagcaatctgcagtc

SEQ ID NO: 162392 - DNA, 25 bp, probe
cacaacttggaatttcagtatgagt

SEQ ID NO: 162393 - DNA, 25 bp, probe
cacaacttggaatttcagtatgagt

SEQ ID NO: 162394 - DNA, 25 bp, probe
cacaaggaggagttacgtagagagg

SEQ ID NO: 162395 - DNA, 25 bp, probe
cacacagggaggctgtagccaggaa

SEQ ID NO: 162396 - DNA, 25 bp, probe
caaagggacacctacggcagagaac

SEQ ID NO: 162397 - DNA, 25 bp, probe
cacaaaggaagcccatgggaaggca

SEQ ID NO: 162398 - DNA, 25 bp, probe
cacaacgagcactttctgcggaacc

SEQ ID NO: 162399 - DNA, 25 bp, probe
caaatgggcatcgtctcatggggtg

SEQ ID NO: 162400 - DNA, 25 bp, probe
caaagtctgcatgtccgaggacggc

SEQ ID NO: 162401 - DNA, 25 bp, probe
caaaggcagcaggctaccggacggc

SEQ ID NO: 162402 - DNA, 25 bp, probe
cacaagccagggctgggacaatggc

SEQ ID NO: 162403 - DNA, 25 bp, probe
cacaacgctacagatgggatcaagg

SEQ ID NO: 162404 - DNA, 25 bp, probe
caaaggatactttggtgatgagcag

SEQ ID NO: 162405 - DNA, 25 bp, probe
cacaactaactccatcggaagcaga

SEQ ID NO: 162406 - DNA, 25 bp, probe
cacaacgaccagctatggtacagac

SEQ ID NO: 162407 - DNA, 25 bp, probe
ccaaccccaggtattaattctcgct

SEQ ID NO: 162408 - DNA, 25 bp, probe
ccttacccagggatgtcaaaccctg

SEQ ID NO: 162409 - DNA, 25 bp, probe
cacttttccatggggattcagaaat

SEQ ID NO: 162410 - DNA, 25 bp, probe
cactgatttcgaccaggttcgttca

SEQ ID NO: 162411 - DNA, 25 bp, probe
cactgtttggagaggatggtattca

SEQ ID NO: 162412 - DNA, 25 bp, probe
cacttcctgtggaggtggctttcag

SEQ ID NO: 162413 - DNA, 25 bp, probe
cactttctgttgataatggttgttc

SEQ ID NO: 162414 - DNA, 25 bp, probe
tcaatttagggtgaggagacttttt

SEQ ID NO: 162415 - DNA, 25 bp, probe
caaatgatgatggggtgggagactt

SEQ ID NO: 162416 - DNA, 25 bp, probe
caaatacatgaactctggtggtctc

SEQ ID NO: 162417 - DNA, 25 bp, probe
caaatcactgaactttgctgagcct

SEQ ID NO: 162418 - DNA, 25 bp, probe
caaatcatctgcattcctgatgacc

SEQ ID NO: 162419 - DNA, 25 bp, probe
caaatatgtctccctgcatgtcagg

SEQ ID NO: 162420 - DNA, 25 bp, probe
cactatatatctttatgcagtcaga

SEQ ID NO: 162421 - DNA, 25 bp, probe
cactcaatacgctggagtccacgtg

SEQ ID NO: 162422 - DNA, 25 bp, probe
cactaagccagatggcagccccgat

SEQ ID NO: 162423 - DNA, 25 bp, probe
cacagaaccaggcgccctgaggatg

SEQ ID NO: 162424 - DNA, 25 bp, probe
cacagaaccaggcgccctgaggatg

SEQ ID NO: 162425 - DNA, 25 bp, probe
cacagagattgcggaaacctggtga

SEQ ID NO: 162426 - DNA, 25 bp, probe
cacaaagtgcggcaagcccagctgg

SEQ ID NO: 162427 - DNA, 25 bp, probe
cacacaaagtgggacaccccgtggc

SEQ ID NO: 162428 - DNA, 25 bp, probe
cacacagaaggggacctgattgggt

SEQ ID NO: 162429 - DNA, 25 bp, probe
cacacgggctgtggactggtggggg

SEQ ID NO: 162430 - DNA, 25 bp, probe
cacacggaggtcagctgagtccgag

SEQ ID NO: 162431 - DNA, 25 bp, probe
cacatagggtttttggtcactcaca

SEQ ID NO: 162432 - DNA, 25 bp, probe
cactgcctggttgagtggtcttgcc

SEQ ID NO: 162433 - DNA, 25 bp, probe
cacatccggatagaagattccccgg

SEQ ID NO: 162434 - DNA, 25 bp, probe
cactccatggattaaccaggaaggg

SEQ ID NO: 162435 - DNA, 25 bp, probe
cactcctggaagccccttaccagga

SEQ ID NO: 162436 - DNA, 25 bp, probe
cactcctggaagccccttaccagga

SEQ ID NO: 162437 - DNA, 25 bp, probe
cacaacttgaagcaccgctacgagc

SEQ ID NO: 162438 - DNA, 25 bp, probe
cagattttgaaggccgagtacgagt

SEQ ID NO: 162439 - DNA, 25 bp, probe
cagcttttggccatctgactaaact

SEQ ID NO: 162440 - DNA, 25 bp, probe
cagcttttggccatctgactaaact

SEQ ID NO: 162441 - DNA, 25 bp, probe
cacaagctttgcgttctgactataa

SEQ ID NO: 162442 - DNA, 25 bp, probe
caaatgtcattgtctactcctagaa

SEQ ID NO: 162443 - DNA, 25 bp, probe
cacactgactctgctactttaggat

SEQ ID NO: 162444 - DNA, 25 bp, probe
cacaaactcttggtcattatagtat

SEQ ID NO: 162445 - DNA, 25 bp, probe
cacaaactcttggtcattatagtat

SEQ ID NO: 162446 - DNA, 25 bp, probe
cacaaacacttggctcctagagacc

SEQ ID NO: 162447 - DNA, 25 bp, probe
cacaaggccattgctgctgtaataa

SEQ ID NO: 162448 - DNA, 25 bp, probe
cacagtagcccttctggtagtactt

SEQ ID NO: 162449 - DNA, 25 bp, probe
cagcatataccctctcggggacatt

SEQ ID NO: 162450 - DNA, 25 bp, probe
cacatcaacctctttcaagtgctgc

SEQ ID NO: 162451 - DNA, 25 bp, probe
cacatacagccctattctagaggat

SEQ ID NO: 162452 - DNA, 25 bp, probe
cactgaagcggcttatccacaggac

SEQ ID NO: 162453 - DNA, 25 bp, probe
cacagcaaggatgctatccagaggg

SEQ ID NO: 162454 - DNA, 25 bp, probe
cacaccaggatgacgcaccaagggc

SEQ ID NO: 162455 - DNA, 25 bp, probe
cacacgcaggggccactagatggga

SEQ ID NO: 162456 - DNA, 25 bp, probe
cacacacacactggacagtagatgg

SEQ ID NO: 162457 - DNA, 25 bp, probe
cacagcatacactggaacaggagct

SEQ ID NO: 162458 - DNA, 25 bp, probe
cacagttacacggaaagcatggttc

SEQ ID NO: 162459 - DNA, 25 bp, probe
cacaattgcatcccaaatacaaatt

SEQ ID NO: 162460 - DNA, 25 bp, probe
caaattgtcttcctaaaatattagc

SEQ ID NO: 162461 - DNA, 25 bp, probe
caaattgtattgcttattcattata

SEQ ID NO: 162462 - DNA, 25 bp, probe
caaattggtgtcataatattgtgta

SEQ ID NO: 162463 - DNA, 25 bp, probe
caaattggtgtcataatattgtgta

SEQ ID NO: 162464 - DNA, 25 bp, probe
caaataggcatttcaagttggtgta

SEQ ID NO: 162465 - DNA, 25 bp, probe
caaatatcgctttacatgttcttgc

SEQ ID NO: 162466 - DNA, 25 bp, probe
cacaatgatccttcacgcagtgttt

SEQ ID NO: 162467 - DNA, 25 bp, probe
cacagttgactatctgaatcatttt

SEQ ID NO: 162468 - DNA, 25 bp, probe
cacagttgactatctgaatcatttt

SEQ ID NO: 162469 - DNA, 25 bp, probe
cacaagctaccatctcagatatata

SEQ ID NO: 162470 - DNA, 25 bp, probe
caccagtcatactctattactaaag

SEQ ID NO: 162471 - DNA, 25 bp, probe
cacaagtcaacttgcttctccttta

SEQ ID NO: 162472 - DNA, 25 bp, probe
cacaaggagatttcttttctctttc

SEQ ID NO: 162473 - DNA, 25 bp, probe
cacaaacgtttacttatcttatgcc

SEQ ID NO: 162474 - DNA, 25 bp, probe
cacaaccctgttttatactgtactt

SEQ ID NO: 162475 - DNA, 25 bp, probe
cacaacacctgtccttactgtgtga

SEQ ID NO: 162476 - DNA, 25 bp, probe
cacagccaagttcattgcttgtggt

SEQ ID NO: 162477 - DNA, 25 bp, probe
cacagcctctgcaggggctttgagc

SEQ ID NO: 162478 - DNA, 25 bp, probe
cacagcctctgcaggggctttgagc

SEQ ID NO: 162479 - DNA, 25 bp, probe
cacacaattcttgatgacttggagc

SEQ ID NO: 162480 - DNA, 25 bp, probe
cacaacacttgtgaatcatgggagt

SEQ ID NO: 162481 - DNA, 25 bp, probe
cacaacctctctgatcttgtgctca

SEQ ID NO: 162482 - DNA, 25 bp, probe
cacaacttacattactattccataa

SEQ ID NO: 162483 - DNA, 25 bp, probe
cacaacttacattactattccataa

SEQ ID NO: 162484 - DNA, 25 bp, probe
cacagtttcctaagctggtcagata

SEQ ID NO: 162485 - DNA, 25 bp, probe
cacattttgcctttctcgtggtaga

SEQ ID NO: 162486 - DNA, 25 bp, probe
caaatattcacttttctggatgtat

SEQ ID NO: 162487 - DNA, 25 bp, probe
cacgaagctaccttttgggatgatt

SEQ ID NO: 162488 - DNA, 25 bp, probe
cacgaagctaccttttgggatgatt

SEQ ID NO: 162489 - DNA, 25 bp, probe
cacagaggacctctttggggcaaga

SEQ ID NO: 162490 - DNA, 25 bp, probe
cacagcgaaccacaggatggggcca

SEQ ID NO: 162491 - DNA, 25 bp, probe
cacacaaacgaggaatgaggggctt

SEQ ID NO: 162492 - DNA, 25 bp, probe
cacaagcaaagaggaagacgacagt

SEQ ID NO: 162493 - DNA, 25 bp, probe
cacaatagccaagatttccacagat

SEQ ID NO: 162494 - DNA, 25 bp, probe
cacaaagaactggatcaccccagaa

SEQ ID NO: 162495 - DNA, 25 bp, probe
cacaaagccacagtgacactggccg

SEQ ID NO: 162496 - DNA, 25 bp, probe
cacaagggcacattgcccatggctg

SEQ ID NO: 162497 - DNA, 25 bp, probe
caaaggcagtcagtgcctgtgctct

SEQ ID NO: 162498 - DNA, 25 bp, probe
cacaagggtgacatctgtcctgtga

SEQ ID NO: 162499 - DNA, 25 bp, probe
cacagatggaattaacttcatggtg

SEQ ID NO: 162500 - DNA, 25 bp, probe
cacgatgtgccagtcattcctttgg

SEQ ID NO: 162501 - DNA, 25 bp, probe
cagctgtggccaggtataactttgc

SEQ ID NO: 162502 - DNA, 25 bp, probe
cacagctctcctattgaaacttgcc

SEQ ID NO: 162503 - DNA, 25 bp, probe
cacaccctctatcataaacatatgc

SEQ ID NO: 162504 - DNA, 25 bp, probe
cacaacacccatccaaggaatggcc

SEQ ID NO: 162505 - DNA, 25 bp, probe
cacagaatcccagtagcacaaattg

SEQ ID NO: 162506 - DNA, 25 bp, probe
cacaaacccatctagtcatagagga

SEQ ID NO: 162507 - DNA, 25 bp, probe
cacaaacactgcagagaccaggtga

SEQ ID NO: 162508 - DNA, 25 bp, probe
cacaagccacctgaggccaggatcc

SEQ ID NO: 162509 - DNA, 25 bp, probe
cacacctccctggatgatccaagat

SEQ ID NO: 162510 - DNA, 25 bp, probe
cacactactttgaacatgccagaat

SEQ ID NO: 162511 - DNA, 25 bp, probe
cacactacttcgatctcacaattat

SEQ ID NO: 162512 - DNA, 25 bp, probe
cacatttctaaatcccatcttgata

SEQ ID NO: 162513 - DNA, 25 bp, probe
cacaatggccatgaacgcctttgga

SEQ ID NO: 162514 - DNA, 25 bp, probe
cactccctattcaaggcctgttgga

SEQ ID NO: 162515 - DNA, 25 bp, probe
cactccatcgatgttcttcttcgga

SEQ ID NO: 162516 - DNA, 25 bp, probe
cacacacgtgtgtttttctttgcaa

SEQ ID NO: 162517 - DNA, 25 bp, probe
caaattgttttgtttctgtgtccct

SEQ ID NO: 162518 - DNA, 25 bp, probe
cacacagctgtaatcgtttgcttgt

SEQ ID NO: 162519 - DNA, 25 bp, probe
cacatggcttttctttcaatcttag

SEQ ID NO: 162520 - DNA, 25 bp, probe
cacagggtctgcactctaaccctag

SEQ ID NO: 162521 - DNA, 25 bp, probe
cacttggtgtgaatccttaccctgg

SEQ ID NO: 162522 - DNA, 25 bp, probe
cagctggttcgaaaattaggccgag

SEQ ID NO: 162523 - DNA, 25 bp, probe
cagctggttcgaaaattaggccgag

SEQ ID NO: 162524 - DNA, 25 bp, probe
cacctttagaggaatttcgtcagaa

SEQ ID NO: 162525 - DNA, 25 bp, probe
cacacatgttagagcccttctgaaa

SEQ ID NO: 162526 - DNA, 25 bp, probe
cacactttgtctagctcactttaaa

SEQ ID NO: 162527 - DNA, 25 bp, probe
cacaaattgcaaatccgctagaaaa

SEQ ID NO: 162528 - DNA, 25 bp, probe
cacacaatctgcttagcccgagtga

SEQ ID NO: 162529 - DNA, 25 bp, probe
cacagaaatggttccctgagctgcc

SEQ ID NO: 162530 - DNA, 25 bp, probe
cacatgcaggtggtacgcaagacca

SEQ ID NO: 162531 - DNA, 25 bp, probe
cacatgcaggtggtacgcaagacca

SEQ ID NO: 162532 - DNA, 25 bp, probe
cagcagcaattgcctctgaaagaca

SEQ ID NO: 162533 - DNA, 25 bp, probe
cacagagaccctaaacaacgttcta

SEQ ID NO: 162534 - DNA, 25 bp, probe
cacaagtaccttaagcaccgcaata

SEQ ID NO: 162535 - DNA, 25 bp, probe
cacagttaattatatgccaccagaa

SEQ ID NO: 162536 - DNA, 25 bp, probe
cacagttaattatatgccaccagaa

SEQ ID NO: 162537 - DNA, 25 bp, probe
cacagttatcaagaatgggtcagga

SEQ ID NO: 162538 - DNA, 25 bp, probe
cacgtgtactaatgatggggtctga

SEQ ID NO: 162539 - DNA, 25 bp, probe
cacgttgactaccattgggttcggg

SEQ ID NO: 162540 - DNA, 25 bp, probe
cacgttgactaccattgggttcggg

SEQ ID NO: 162541 - DNA, 25 bp, probe
cacgtacgctgatcttggcaaatct

SEQ ID NO: 162542 - DNA, 25 bp, probe
cacatgcagacgtaagcttacaaat

SEQ ID NO: 162543 - DNA, 25 bp, probe
cacatgcagacgtaagcttacaaat

SEQ ID NO: 162544 - DNA, 25 bp, probe
cacacatgccgttgtgttatgccca

SEQ ID NO: 162545 - DNA, 25 bp, probe
cacagcactgtttgagatctacgcc

SEQ ID NO: 162546 - DNA, 25 bp, probe
cacagcactgtttgagatctacgcc

SEQ ID NO: 162547 - DNA, 25 bp, probe
cactatcatgttggacacgggcctg

SEQ ID NO: 162548 - DNA, 25 bp, probe
cacaatctgcttagcccgagtgaca

SEQ ID NO: 162549 - DNA, 25 bp, probe
caaatccttatcctcagctgtgaag

SEQ ID NO: 162550 - DNA, 25 bp, probe
cacttccaccactttgtggagcagt

SEQ ID NO: 162551 - DNA, 25 bp, probe
cacttccaccactttgtggagcagt

SEQ ID NO: 162552 - DNA, 25 bp, probe
cacatttcagcctatttgcttagtg

SEQ ID NO: 162553 - DNA, 25 bp, probe
caaatgctcagccctgctgttgtaa

SEQ ID NO: 162554 - DNA, 25 bp, probe
caaatgccgagcctgtggagtgaac

SEQ ID NO: 162555 - DNA, 25 bp, probe
caaatcccggctgaatgagaccacg

SEQ ID NO: 162556 - DNA, 25 bp, probe
gaagttccccatgagggtccaatgt

SEQ ID NO: 162557 - DNA, 25 bp, probe
cacagagtcccctggggctagaggt

SEQ ID NO: 162558 - DNA, 25 bp, probe
cacaggacccactgaggagatccgg

SEQ ID NO: 162559 - DNA, 25 bp, probe
cacagtggtgtcagggggacggggc

SEQ ID NO: 162560 - DNA, 25 bp, probe
cacagtgggcaatgggctggtgctg

SEQ ID NO: 162561 - DNA, 25 bp, probe
cacgggccctagaggggctacggct

SEQ ID NO: 162562 - DNA, 25 bp, probe
cacggaaagcttatggccctaaagt

SEQ ID NO: 162563 - DNA, 25 bp, probe
cacaggacggtttatgagcacacaa

SEQ ID NO: 162564 - DNA, 25 bp, probe
cacacagaaatctttagtactcaag

SEQ ID NO: 162565 - DNA, 25 bp, probe
ccaatcagaaatactagtttaaaat

SEQ ID NO: 162566 - DNA, 25 bp, probe
cacaataagtataggattttgcaca

SEQ ID NO: 162567 - DNA, 25 bp, probe
cacagacaagtgtgccatttgacca

SEQ ID NO: 162568 - DNA, 25 bp, probe
cacagtcactatcttcatttcctat

SEQ ID NO: 162569 - DNA, 25 bp, probe
caaattgtttttgcacatatctgat

SEQ ID NO: 162570 - DNA, 25 bp, probe
caaattgtttttgcacatatctgat

SEQ ID NO: 162571 - DNA, 25 bp, probe
cacatgattgtcatttccatttctt

SEQ ID NO: 162572 - DNA, 25 bp, probe
cacatgattgtcatttccatttctt

SEQ ID NO: 162573 - DNA, 25 bp, probe
cacaattctcgtggctactttcact

SEQ ID NO: 162574 - DNA, 25 bp, probe
cacagtacagtgggttatttctctt

SEQ ID NO: 162575 - DNA, 25 bp, probe
cacgctgaaggggcttggtgtttgt

SEQ ID NO: 162576 - DNA, 25 bp, probe
cacactgcacacggtgtctgtttat

SEQ ID NO: 162577 - DNA, 25 bp, probe
cacactctctgtggtatgcattttt

SEQ ID NO: 162578 - DNA, 25 bp, probe
cacagcattctttgattgtcatctt

SEQ ID NO: 162579 - DNA, 25 bp, probe
cacagattctgtttctggcgtctgc

SEQ ID NO: 162580 - DNA, 25 bp, probe
cacaaatctaaccatgagcttcagc

SEQ ID NO: 162581 - DNA, 25 bp, probe
cacaaatctaaccatgagcttcagc

SEQ ID NO: 162582 - DNA, 25 bp, probe
cacaaatccaggcatatgtggagca

SEQ ID NO: 162583 - DNA, 25 bp, probe
cacactaccagtgttgtgggcacat

SEQ ID NO: 162584 - DNA, 25 bp, probe
cacactaccagtgttgtgggcacat

SEQ ID NO: 162585 - DNA, 25 bp, probe
caaatacgctgaggacatggggcca

SEQ ID NO: 162586 - DNA, 25 bp, probe
caaatactcagcgggcaccatggac

SEQ ID NO: 162587 - DNA, 25 bp, probe
caaatactcagcgggcaccatggac

SEQ ID NO: 162588 - DNA, 25 bp, probe
cacaaaccagtatcgctcatagatc

SEQ ID NO: 162589 - DNA, 25 bp, probe
cacacaaaccagtatcgctcataga

SEQ ID NO: 162590 - DNA, 25 bp, probe
caaatatgcccattatcccaacaag

SEQ ID NO: 162591 - DNA, 25 bp, probe
caaatatccaagtatcctcagcaca

SEQ ID NO: 162592 - DNA, 25 bp, probe
caaatctacagcatatctctcacct

SEQ ID NO: 162593 - DNA, 25 bp, probe
cacaattacagtttataatcatctg

SEQ ID NO: 162594 - DNA, 25 bp, probe
cacaatttatgttctgcaatatcct

SEQ ID NO: 162595 - DNA, 25 bp, probe
cacaatatctagtactgcaactgcc

SEQ ID NO: 162596 - DNA, 25 bp, probe
cacatagcattgatcattgaactgc

SEQ ID NO: 162597 - DNA, 25 bp, probe
cacacagttgactatctgaatcatt

SEQ ID NO: 162598 - DNA, 25 bp, probe
cacacagttgactatctgaatcatt

SEQ ID NO: 162599 - DNA, 25 bp, probe
cacacgtctcatgaatgcatcacat

SEQ ID NO: 162600 - DNA, 25 bp, probe
cacacgcccatcattgtcatgatca

SEQ ID NO: 162601 - DNA, 25 bp, probe
cacagcccagtttgttcatgtcagt

SEQ ID NO: 162602 - DNA, 25 bp, probe
cacagcccaagattatttggcagcc

SEQ ID NO: 162603 - DNA, 25 bp, probe
cacagtccaacttcatatctctgcc

SEQ ID NO: 162604 - DNA, 25 bp, probe
cacattcttacattgcagcatcacc

SEQ ID NO: 162605 - DNA, 25 bp, probe
cacaatgctgtggacaggcaccaat

SEQ ID NO: 162606 - DNA, 25 bp, probe
cacagctccatggtaggagtcaatc

SEQ ID NO: 162607 - DNA, 25 bp, probe
cacacctatcacgtggagctcaagc

SEQ ID NO: 162608 - DNA, 25 bp, probe
cacagccctccagtgtactgagggt

SEQ ID NO: 162609 - DNA, 25 bp, probe
cacacaccatcatggtcctggtgag

SEQ ID NO: 162610 - DNA, 25 bp, probe
cacagactacaagttccggctggcc

SEQ ID NO: 162611 - DNA, 25 bp, probe
cacgagcgtcgagctcacaggggac

SEQ ID NO: 162612 - DNA, 25 bp, probe
cactggttcgtggccaagctttaca

SEQ ID NO: 162613 - DNA, 25 bp, probe
cacgtgtttggtcagattgtgtcaa

SEQ ID NO: 162614 - DNA, 25 bp, probe
gtcgaaccggtgtgttggtcactat

SEQ ID NO: 162615 - DNA, 25 bp, probe
ccgacttccaggagtttgtcaataa

SEQ ID NO: 162616 - DNA, 25 bp, probe
cacagagccccaggcaagcttttaa

SEQ ID NO: 162617 - DNA, 25 bp, probe
cacagaccccagcaagcattatatc

SEQ ID NO: 162618 - DNA, 25 bp, probe
cacaactcccagcagacaagttctc

SEQ ID NO: 162619 - DNA, 25 bp, probe
cacagaccggagcagccataaggac

SEQ ID NO: 162620 - DNA, 25 bp, probe
cacagtccagagggacccaaggacc

SEQ ID NO: 162621 - DNA, 25 bp, probe
cacagtccagagggacccaaggacc

SEQ ID NO: 162622 - DNA, 25 bp, probe
cacattccagtgggacggccacggg

SEQ ID NO: 162623 - DNA, 25 bp, probe
cacttacaatgctgagcggtcccgg

SEQ ID NO: 162624 - DNA, 25 bp, probe
cacttctgctaaggagggacccgtg

SEQ ID NO: 162625 - DNA, 25 bp, probe
cacttctccaagggcaacatcgccg

SEQ ID NO: 162626 - DNA, 25 bp, probe
ccatttggcaagaggttgtccgaaa

SEQ ID NO: 162627 - DNA, 25 bp, probe
ccatttggcaagaggttgtccgaaa

SEQ ID NO: 162628 - DNA, 25 bp, probe
cacattctggggaagactattccag

SEQ ID NO: 162629 - DNA, 25 bp, probe
cacaaagtggagaagagctatcccc

SEQ ID NO: 162630 - DNA, 25 bp, probe
cacaaggcagggcagtgctcacgcc

SEQ ID NO: 162631 - DNA, 25 bp, probe
cacaggtgctggacaagttcattca

SEQ ID NO: 162632 - DNA, 25 bp, probe
cacaggccgaatccaggctctatca

SEQ ID NO: 162633 - DNA, 25 bp, probe
cacaggccgaatccaggctctatca

SEQ ID NO: 162634 - DNA, 25 bp, probe
cacagaggtcaaccagtgcagcatt

SEQ ID NO: 162635 - DNA, 25 bp, probe
cacagaggtcaaccagtgcagcatt

SEQ ID NO: 162636 - DNA, 25 bp, probe
cacaatgtggaggccaccagcatgt

SEQ ID NO: 162637 - DNA, 25 bp, probe
cacacatgggtggtcccacagcatg

SEQ ID NO: 162638 - DNA, 25 bp, probe
cacacatgggtggtcccacagcatg

SEQ ID NO: 162639 - DNA, 25 bp, probe
cacactgggtgcccaagctcagaag

SEQ ID NO: 162640 - DNA, 25 bp, probe
cacagctccctggagcactgctgga

SEQ ID NO: 162641 - DNA, 25 bp, probe
cacagctccctggagcactgctgga

SEQ ID NO: 162642 - DNA, 25 bp, probe
cacaattcttgatgacttggagctc

SEQ ID NO: 162643 - DNA, 25 bp, probe
gactattttgacgtccaggactaag

SEQ ID NO: 162644 - DNA, 25 bp, probe
cacagcattttcactccagagacaa

SEQ ID NO: 162645 - DNA, 25 bp, probe
cacagctttatgatatcaaagactc

SEQ ID NO: 162646 - DNA, 25 bp, probe
cacagctgagttgttaaccagtcgg

SEQ ID NO: 162647 - DNA, 25 bp, probe
cacgctggcgcctttagaagttcag

SEQ ID NO: 162648 - DNA, 25 bp, probe
cacacgacgggaagacaagttcatg

SEQ ID NO: 162649 - DNA, 25 bp, probe
cacacacacgggctgagcggaacat

SEQ ID NO: 162650 - DNA, 25 bp, probe
cacacacacgggctgagcggaacat

SEQ ID NO: 162651 - DNA, 25 bp, probe
cacacaacagtgtagtgctggagag

SEQ ID NO: 162652 - DNA, 25 bp, probe
cacacaacagtgtagtgctggagag

SEQ ID NO: 162653 - DNA, 25 bp, probe
cacagaattgtgttgactgggggag

SEQ ID NO: 162654 - DNA, 25 bp, probe
cacagaattgtgttgactgggggag

SEQ ID NO: 162655 - DNA, 25 bp, probe
cacaaagggaagtcgggcatggtgg

SEQ ID NO: 162656 - DNA, 25 bp, probe
cacacggaggattaccggctgcgac

SEQ ID NO: 162657 - DNA, 25 bp, probe
cacagctgccagcaaacctgaggga

SEQ ID NO: 162658 - DNA, 25 bp, probe
cacactgcaaggaaatcttcacggg

SEQ ID NO: 162659 - DNA, 25 bp, probe
cacagatcaggcccaatcattacgc

SEQ ID NO: 162660 - DNA, 25 bp, probe
cacactactgtgcaagcattgacac

SEQ ID NO: 162661 - DNA, 25 bp, probe
cacactactgtgcaagcattgacac

SEQ ID NO: 162662 - DNA, 25 bp, probe
cacaatgacctgctctgcaagaata

SEQ ID NO: 162663 - DNA, 25 bp, probe
cacacagacactaacgaaatatcaa

SEQ ID NO: 162664 - DNA, 25 bp, probe
cacacttcagcttccgaacaacaga

SEQ ID NO: 162665 - DNA, 25 bp, probe
cacacttcagcttccgaacaacaga

SEQ ID NO: 162666 - DNA, 25 bp, probe
cacactgctcagtgactcgagcaag

SEQ ID NO: 162667 - DNA, 25 bp, probe
cacactgctcagtgactcgagcaag

SEQ ID NO: 162668 - DNA, 25 bp, probe
cactctgtgcacggagttggcatgg

SEQ ID NO: 162669 - DNA, 25 bp, probe
cacacaggcagagtgccttggcagg

SEQ ID NO: 162670 - DNA, 25 bp, probe
cacacagagtcagcactggggaggg

SEQ ID NO: 162671 - DNA, 25 bp, probe
cacaagcatgcaccccagggtagtg

SEQ ID NO: 162672 - DNA, 25 bp, probe
cacaagcatgcaccccagggtagtg

SEQ ID NO: 162673 - DNA, 25 bp, probe
cacaagcagagcggcgggagcgtgg

SEQ ID NO: 162674 - DNA, 25 bp, probe
cacaagcagagcggcgggagcgtgg

SEQ ID NO: 162675 - DNA, 25 bp, probe
cacacgcagagtgccgactggtggt

SEQ ID NO: 162676 - DNA, 25 bp, probe
cacatcatgcgggtgctcaacgtgg

SEQ ID NO: 162677 - DNA, 25 bp, probe
cacacgcgggtgcaccgcgagtgga

SEQ ID NO: 162678 - DNA, 25 bp, probe
cacagccggactatcccaaaggata

SEQ ID NO: 162679 - DNA, 25 bp, probe
cactgccttgagagtgacccaaaga

SEQ ID NO: 162680 - DNA, 25 bp, probe
cacagcagttgaaaagactccaaag

SEQ ID NO: 162681 - DNA, 25 bp, probe
cacagcaggtgaaaaatttaactga

SEQ ID NO: 162682 - DNA, 25 bp, probe
cacagcagtttattaatgtatataa

SEQ ID NO: 162683 - DNA, 25 bp, probe
cacaatgtattgcataatcaatgct

SEQ ID NO: 162684 - DNA, 25 bp, probe
cacacactactgcaatgatatctgc

SEQ ID NO: 162685 - DNA, 25 bp, probe
cacagcacatctgcccagattctga

SEQ ID NO: 162686 - DNA, 25 bp, probe
cacacacactgttgctggatcttga

SEQ ID NO: 162687 - DNA, 25 bp, probe
cacacactgttgctggatcttgagt

SEQ ID NO: 162688 - DNA, 25 bp, probe
cacagcctggagatggtgcttattg

SEQ ID NO: 162689 - DNA, 25 bp, probe
cacacctgtgaggcgtgatgattgt

SEQ ID NO: 162690 - DNA, 25 bp, probe
cacatctttggctgatgttcttagc

SEQ ID NO: 162691 - DNA, 25 bp, probe
cactctagttgtggacttttcccca

SEQ ID NO: 162692 - DNA, 25 bp, probe
cactttgatttgggttcattttttg

SEQ ID NO: 162693 - DNA, 25 bp, probe
cacagttaattcggggatcctcttt

SEQ ID NO: 162694 - DNA, 25 bp, probe
cacagacttttccagggtggtcctt

SEQ ID NO: 162695 - DNA, 25 bp, probe
cacgcactttatgagggagaccccg

SEQ ID NO: 162696 - DNA, 25 bp, probe
cacagctatttatagtagcagacac

SEQ ID NO: 162697 - DNA, 25 bp, probe
cacagtgtccaatattcatcagcag

SEQ ID NO: 162698 - DNA, 25 bp, probe
cacaggcatgccaaatttgcatcac

SEQ ID NO: 162699 - DNA, 25 bp, probe
cacaggcatgacaatgctgctacaa

SEQ ID NO: 162700 - DNA, 25 bp, probe
cacaatgcaacaagctcagaaacac

SEQ ID NO: 162701 - DNA, 25 bp, probe
cacaatgcaacaagctcagaaacac

SEQ ID NO: 162702 - DNA, 25 bp, probe
cacaataatccccatgctgaatcct

SEQ ID NO: 162703 - DNA, 25 bp, probe
cactaaatcctttccaataattgac

SEQ ID NO: 162704 - DNA, 25 bp, probe
cacatccccctgtctaaaaattcag

SEQ ID NO: 162705 - DNA, 25 bp, probe
cacacccacaccgtagaacatatat

SEQ ID NO: 162706 - DNA, 25 bp, probe
cacagccaacatcacgaggtgtaat

SEQ ID NO: 162707 - DNA, 25 bp, probe
cacacgcaactgtctagtgggccag

SEQ ID NO: 162708 - DNA, 25 bp, probe
cacaacaagttcaaggatggccaaa

SEQ ID NO: 162709 - DNA, 25 bp, probe
cacaacaagttcaaggatggccaaa

SEQ ID NO: 162710 - DNA, 25 bp, probe
cacaactcagttcaagaggctgaaa

SEQ ID NO: 162711 - DNA, 25 bp, probe
cacacattcactagtaataggctac

SEQ ID NO: 162712 - DNA, 25 bp, probe
cacagatgtacaggtatcagggaac

SEQ ID NO: 162713 - DNA, 25 bp, probe
cacaatgttgagggtctgtggggca

SEQ ID NO: 162714 - DNA, 25 bp, probe
cacactttagggggttggtatctcg

SEQ ID NO: 162715 - DNA, 25 bp, probe
catccttctgagagggttcctttct

SEQ ID NO: 162716 - DNA, 25 bp, probe
cactccttggaatgggtcctgttat

SEQ ID NO: 162717 - DNA, 25 bp, probe
cacactccttggaatgggtcctgtt

SEQ ID NO: 162718 - DNA, 25 bp, probe
cacacatccttggcaattcagctgc

SEQ ID NO: 162719 - DNA, 25 bp, probe
cacacatccttggcaattcagctgc

SEQ ID NO: 162720 - DNA, 25 bp, probe
cacaaggtgctggcacttattgcaa

SEQ ID NO: 162721 - DNA, 25 bp, probe
cacagacttatggatcgttatggag

SEQ ID NO: 162722 - DNA, 25 bp, probe
cacaggcctgataactctgtacgag

SEQ ID NO: 162723 - DNA, 25 bp, probe
cacaagcctgtcagctcagtgtttg

SEQ ID NO: 162724 - DNA, 25 bp, probe
cacaaacatgtcctgtgcttgtcgc

SEQ ID NO: 162725 - DNA, 25 bp, probe
cacaaacatgtcctgtgcttgtcgc

SEQ ID NO: 162726 - DNA, 25 bp, probe
cacaacctgcgcaagcgcgatggcc

SEQ ID NO: 162727 - DNA, 25 bp, probe
cacacacactggacagtagatgggc

SEQ ID NO: 162728 - DNA, 25 bp, probe
cacaaaggcatcaaggaagaggctc

SEQ ID NO: 162729 - DNA, 25 bp, probe
cacaacgccctgctgcagagagacc

SEQ ID NO: 162730 - DNA, 25 bp, probe
cacaacggcgctggtggaggacaca

SEQ ID NO: 162731 - DNA, 25 bp, probe
cacaccgtgcacgaagggggcacag

SEQ ID NO: 162732 - DNA, 25 bp, probe
cacactttggcccagggtggccaca

SEQ ID NO: 162733 - DNA, 25 bp, probe
cacagtgtctgggctgactgggacc

SEQ ID NO: 162734 - DNA, 25 bp, probe
cacagtgtctgggctgactgggacc

SEQ ID NO: 162735 - DNA, 25 bp, probe
cacagcggttgaggtctctggagct

SEQ ID NO: 162736 - DNA, 25 bp, probe
cacagcggttgaggtctctggagct

SEQ ID NO: 162737 - DNA, 25 bp, probe
cacagtggtatgtgctgctggtgct

SEQ ID NO: 162738 - DNA, 25 bp, probe
cacagagtttgctgcgagctctctt

SEQ ID NO: 162739 - DNA, 25 bp, probe
cacaagaatatgctaggctgcactc

SEQ ID NO: 162740 - DNA, 25 bp, probe
cacaagaaacttggtctgcagtctg

SEQ ID NO: 162741 - DNA, 25 bp, probe
cacaaaaacactgctctgcattggg

SEQ ID NO: 162742 - DNA, 25 bp, probe
cacagcaaagacaccatggccatgg

SEQ ID NO: 162743 - DNA, 25 bp, probe
cacacaatccatcaacatggcattg

SEQ ID NO: 162744 - DNA, 25 bp, probe
cacacacatattcacaagagttgct

SEQ ID NO: 162745 - DNA, 25 bp, probe
cacacctttctttagcatgctacag

SEQ ID NO: 162746 - DNA, 25 bp, probe
cacatccctgtagtgccaactgaag

SEQ ID NO: 162747 - DNA, 25 bp, probe
cacacacctgtagtcccagatactt

SEQ ID NO: 162748 - DNA, 25 bp, probe
cacagaccttgatgccacagttcat

SEQ ID NO: 162749 - DNA, 25 bp, probe
cacagcactctgaaatgctccagtc

SEQ ID NO: 162750 - DNA, 25 bp, probe
cacacacctgaaacatgttctccgg

SEQ ID NO: 162751 - DNA, 25 bp, probe
cacaaccaggcaagtgtacctctag

SEQ ID NO: 162752 - DNA, 25 bp, probe
cacaaccaggcaagtgtacctctag

SEQ ID NO: 162753 - DNA, 25 bp, probe
cacaaccaaatgtgttgccctatga

SEQ ID NO: 162754 - DNA, 25 bp, probe
cacaaatcaaatgagcttgccacaa

SEQ ID NO: 162755 - DNA, 25 bp, probe
cacaaatcaaatgagcttgccacaa

SEQ ID NO: 162756 - DNA, 25 bp, probe
cacagaatactaaagcacctcaaaa

SEQ ID NO: 162757 - DNA, 25 bp, probe
cacagggactgaaaacctctcctca

SEQ ID NO: 162758 - DNA, 25 bp, probe
cacagggactgaaaacctctcctca

SEQ ID NO: 162759 - DNA, 25 bp, probe
cacaggtcctgagttgacctctggt

SEQ ID NO: 162760 - DNA, 25 bp, probe
cacattgtccgatttatcactgcca

SEQ ID NO: 162761 - DNA, 25 bp, probe
cacatgatcctgcaattccacttat

SEQ ID NO: 162762 - DNA, 25 bp, probe
cacatgatcctgcaattccacttat

SEQ ID NO: 162763 - DNA, 25 bp, probe
cacttccttaactgcacgatattca

SEQ ID NO: 162764 - DNA, 25 bp, probe
cacttattgtaacaccagattgcca

SEQ ID NO: 162765 - DNA, 25 bp, probe
cactattttagattcctggcattcg

SEQ ID NO: 162766 - DNA, 25 bp, probe
cacttaatataattcgccacttctc

SEQ ID NO: 162767 - DNA, 25 bp, probe
cacttacatacttgtccctctaagt

SEQ ID NO: 162768 - DNA, 25 bp, probe
cacttacaaattcatctctaaagca

SEQ ID NO: 162769 - DNA, 25 bp, probe
cacttttacattcatggtccaacag

SEQ ID NO: 162770 - DNA, 25 bp, probe
cacgttaactcgaattctcacaagg

SEQ ID NO: 162771 - DNA, 25 bp, probe
cacacatccagacctaaagctacaa

SEQ ID NO: 162772 - DNA, 25 bp, probe
cacacatccagagctaaagccacaa

SEQ ID NO: 162773 - DNA, 25 bp, probe
cacacatcaagagaaagttaccatt

SEQ ID NO: 162774 - DNA, 25 bp, probe
cacacatccatcctaaactatacta

SEQ ID NO: 162775 - DNA, 25 bp, probe
cacacatatcccttcaaaaactttt

SEQ ID NO: 162776 - DNA, 25 bp, probe
cacaccattcgctcgcaaagacttg

SEQ ID NO: 162777 - DNA, 25 bp, probe
cacaccattcgctcgcaaagacttg

SEQ ID NO: 162778 - DNA, 25 bp, probe
cacactcacctgtggcacggaatga

SEQ ID NO: 162779 - DNA, 25 bp, probe
cacactcacctgtggcacggaatga

SEQ ID NO: 162780 - DNA, 25 bp, probe
cacactcacccaggtgtgtcgacat

SEQ ID NO: 162781 - DNA, 25 bp, probe
cacacacctcaatgaggtcataatc

SEQ ID NO: 162782 - DNA, 25 bp, probe
cacacacacacaaatggaggaaatc

SEQ ID NO: 162783 - DNA, 25 bp, probe
cacactccatcagcttaggggctgc

SEQ ID NO: 162784 - DNA, 25 bp, probe
cacacctcaggctcgtggtggtgca

SEQ ID NO: 162785 - DNA, 25 bp, probe
cacaggctagagaggtgagcttgga

SEQ ID NO: 162786 - DNA, 25 bp, probe
cacagcccaaattctgaagttgtct

SEQ ID NO: 162787 - DNA, 25 bp, probe
cacaccacaaatgggacacatggtc

SEQ ID NO: 162788 - DNA, 25 bp, probe
cacaccagcaaaggcaactctgggg

SEQ ID NO: 162789 - DNA, 25 bp, probe
cacagccaaccagaccatcaatggc

SEQ ID NO: 162790 - DNA, 25 bp, probe
cacacacgacctgtacatgatcatg

SEQ ID NO: 162791 - DNA, 25 bp, probe
cacactccctcttcatagtgttgtg

SEQ ID NO: 162792 - DNA, 25 bp, probe
cactaccgctttgcaatcactgtgg

SEQ ID NO: 162793 - DNA, 25 bp, probe
cactatccgatgcaccaaactaata

SEQ ID NO: 162794 - DNA, 25 bp, probe
cactataacgtgactacaactagat

SEQ ID NO: 162795 - DNA, 25 bp, probe
cacatcaaatgccccgaatttagtc

SEQ ID NO: 162796 - DNA, 25 bp, probe
cacaaagccgctgccattttattaa

SEQ ID NO: 162797 - DNA, 25 bp, probe
cacatatagggcttcctttggtatc

SEQ ID NO: 162798 - DNA, 25 bp, probe
cacaaatagtgctcgctttctatgt

SEQ ID NO: 162799 - DNA, 25 bp, probe
cacaaatagtgctcgctttctatgt

SEQ ID NO: 162800 - DNA, 25 bp, probe
cacagaaagagctcttcctgccatg

SEQ ID NO: 162801 - DNA, 25 bp, probe
cacagtgaaggatgcttccgtcagg

SEQ ID NO: 162802 - DNA, 25 bp, probe
cacacagagggacctacgggcagct

SEQ ID NO: 162803 - DNA, 25 bp, probe
cacagcggaaacatattcttgcagc

SEQ ID NO: 162804 - DNA, 25 bp, probe
cacagctgtggagactttgctctca

SEQ ID NO: 162805 - DNA, 25 bp, probe
cacagctgtgattcaaccactgtct

SEQ ID NO: 162806 - DNA, 25 bp, probe
cacagcatgatgggcaagatccctg

SEQ ID NO: 162807 - DNA, 25 bp, probe
cacagagatatgcacacaccgatgt

SEQ ID NO: 162808 - DNA, 25 bp, probe
cacagaagcatgaacaccatcctgg

SEQ ID NO: 162809 - DNA, 25 bp, probe
cacacaagcagaaacactcctgtgg

SEQ ID NO: 162810 - DNA, 25 bp, probe
cacataacaaagcactcccttaggc

SEQ ID NO: 162811 - DNA, 25 bp, probe
cacagataaagttttcccttgagga

SEQ ID NO: 162812 - DNA, 25 bp, probe
caccaaccagttatactccttgagt

SEQ ID NO: 162813 - DNA, 25 bp, probe
cacacggggacttttccacattgtg

SEQ ID NO: 162814 - DNA, 25 bp, probe
cacacggggacttttccacattgtg

SEQ ID NO: 162815 - DNA, 25 bp, probe
caccgtggtgatcgtcttctacggg

SEQ ID NO: 162816 - DNA, 25 bp, probe
cacactggcggccgttactagtgga

SEQ ID NO: 162817 - DNA, 25 bp, probe
cagctagggggcgttatttatggac

SEQ ID NO: 162818 - DNA, 25 bp, probe
cactcgctgggggtgtttgtttgcc

SEQ ID NO: 162819 - DNA, 25 bp, probe
cactcgctgggggtgtttgtttgcc

SEQ ID NO: 162820 - DNA, 25 bp, probe
cacacgtggaggatcttgcgtctgc

SEQ ID NO: 162821 - DNA, 25 bp, probe
cacaggtgggcccatattctggtgc

SEQ ID NO: 162822 - DNA, 25 bp, probe
cacaggatggggcaagctctggcac

SEQ ID NO: 162823 - DNA, 25 bp, probe
cacaggaaaaccagcctgagctgcc

SEQ ID NO: 162824 - DNA, 25 bp, probe
cacaggaaaaccagcctgagctgcc

SEQ ID NO: 162825 - DNA, 25 bp, probe
cacagtgaaaatcagcaccttgtca

SEQ ID NO: 162826 - DNA, 25 bp, probe
cacagctatcacatggatatccttt

SEQ ID NO: 162827 - DNA, 25 bp, probe
cacagctatcacatggatatccttt

SEQ ID NO: 162828 - DNA, 25 bp, probe
cacagacaacttcatcagcacctgt

SEQ ID NO: 162829 - DNA, 25 bp, probe
cacagacaggtaaaagctccaggtg

SEQ ID NO: 162830 - DNA, 25 bp, probe
cacagacaggtaatagccctagcca

SEQ ID NO: 162831 - DNA, 25 bp, probe
cacagggctgcaacaaccagtagct

SEQ ID NO: 162832 - DNA, 25 bp, probe
cacacagtgacacatctccagtacg

SEQ ID NO: 162833 - DNA, 25 bp, probe
cacaggtcacaggactcatcgtagc

SEQ ID NO: 162834 - DNA, 25 bp, probe
cactgagtcctgacagctaaggatg

SEQ ID NO: 162835 - DNA, 25 bp, probe
cactgagtcctgacagctaaggatg

SEQ ID NO: 162836 - DNA, 25 bp, probe
cacagagctagtccaggagacagag

SEQ ID NO: 162837 - DNA, 25 bp, probe
cacaggtatgtaaaagacaatactc

SEQ ID NO: 162838 - DNA, 25 bp, probe
cacagtctactgttgcaatgaaaac

SEQ ID NO: 162839 - DNA, 25 bp, probe
cacagtctactgttgcaatgaaaac

SEQ ID NO: 162840 - DNA, 25 bp, probe
cacagtcacaatgtattgcataatc

SEQ ID NO: 162841 - DNA, 25 bp, probe
cacagagaagtcggatgtgtacagc

SEQ ID NO: 162842 - DNA, 25 bp, probe
cacagagaagtcggatgtgtacagc

SEQ ID NO: 162843 - DNA, 25 bp, probe
cacagtaattcctatgttgaatccc

SEQ ID NO: 162844 - DNA, 25 bp, probe
cacagtaattggtcatgtgatgcaa

SEQ ID NO: 162845 - DNA, 25 bp, probe
cacactgaaagctctgttgcaatta

SEQ ID NO: 162846 - DNA, 25 bp, probe
cacactgaaagctctgttgcaatta

SEQ ID NO: 162847 - DNA, 25 bp, probe
cacactggaagcgagccttcaatgc

SEQ ID NO: 162848 - DNA, 25 bp, probe
cacactggatactgcctactgacaa

SEQ ID NO: 162849 - DNA, 25 bp, probe
cacagccaatgatgtgccttctcca

SEQ ID NO: 162850 - DNA, 25 bp, probe
cacagccagaattccctgtgacctc

SEQ ID NO: 162851 - DNA, 25 bp, probe
cacagccagaattccctgtgacctc

SEQ ID NO: 162852 - DNA, 25 bp, probe
cacagtgacacatctccagtacgtc

SEQ ID NO: 162853 - DNA, 25 bp, probe
cacagctgaacatgccgctgtccga

SEQ ID NO: 162854 - DNA, 25 bp, probe
cacagcatgacctcctgaagtcgag

SEQ ID NO: 162855 - DNA, 25 bp, probe
cacagcatgacctcctgaagtcgag

SEQ ID NO: 162856 - DNA, 25 bp, probe
cacacgactgctcatacaagcggag

SEQ ID NO: 162857 - DNA, 25 bp, probe
cacacgcactttatgagggagaccc

SEQ ID NO: 162858 - DNA, 25 bp, probe
cacacccattacattgtgggaatgg

SEQ ID NO: 162859 - DNA, 25 bp, probe
cacacccattacattgtgggaatgg

SEQ ID NO: 162860 - DNA, 25 bp, probe
cactcgccttggggttctgcgagtg

SEQ ID NO: 162861 - DNA, 25 bp, probe
cacacacgcgggtgcaccgcgagtg

SEQ ID NO: 162862 - DNA, 25 bp, probe
cacacacgcgggtgcaccgcgagtg

SEQ ID NO: 162863 - DNA, 25 bp, probe
cacacagcaggaggggcctgcccag

SEQ ID NO: 162864 - DNA, 25 bp, probe
cacacagcggagagcgaacgcctgg

SEQ ID NO: 162865 - DNA, 25 bp, probe
cacatccagggcagtgagcagccct

SEQ ID NO: 162866 - DNA, 25 bp, probe
cacagccagcaggagagtcgagcct

SEQ ID NO: 162867 - DNA, 25 bp, probe
cacacgggtagattgctggcctgtt

SEQ ID NO: 162868 - DNA, 25 bp, probe
cacacgggcccaggatgtggctgat

SEQ ID NO: 162869 - DNA, 25 bp, probe
cacacggtggctcagatgttctgct

SEQ ID NO: 162870 - DNA, 25 bp, probe
cacatctggtgcgaggactttctgg

SEQ ID NO: 162871 - DNA, 25 bp, probe
cacatcagggcctgagcgacatccg

SEQ ID NO: 162872 - DNA, 25 bp, probe
cacagagaggctgagccagcacccg

SEQ ID NO: 162873 - DNA, 25 bp, probe
cacagagagccagtaccaacagcag

SEQ ID NO: 162874 - DNA, 25 bp, probe
cacagggtctgttccataatgatgg

SEQ ID NO: 162875 - DNA, 25 bp, probe
cacagttgtcagatacatggagagg

SEQ ID NO: 162876 - DNA, 25 bp, probe
cacagttgtcagatacatggagagg

SEQ ID NO: 162877 - DNA, 25 bp, probe
cacagtagaagcacacaggcagaac

SEQ ID NO: 162878 - DNA, 25 bp, probe
cacacttgacagtaccaggagacaa

SEQ ID NO: 162879 - DNA, 25 bp, probe
cacatctagcaccaagccaggtttt

SEQ ID NO: 162880 - DNA, 25 bp, probe
cacagctgactccaagctgcatggc

SEQ ID NO: 162881 - DNA, 25 bp, probe
cacagcattgctgacacatgagact

SEQ ID NO: 162882 - DNA, 25 bp, probe
cacactctgcattacagtctgaatt

SEQ ID NO: 162883 - DNA, 25 bp, probe
cacacatgatcttcagagtgctgga

SEQ ID NO: 162884 - DNA, 25 bp, probe
cacacagctgctgcaggtgctggcc

SEQ ID NO: 162885 - DNA, 25 bp, probe
cacactgcagctgccaggggcaaat

SEQ ID NO: 162886 - DNA, 25 bp, probe
cacagctgccttcagtgggtagaat

SEQ ID NO: 162887 - DNA, 25 bp, probe
cacagctgccttcagtgggtagaat

SEQ ID NO: 162888 - DNA, 25 bp, probe
cactgtggttgctgtggttggaatt

SEQ ID NO: 162889 - DNA, 25 bp, probe
cacagtgaacgaggatttgggatac

SEQ ID NO: 162890 - DNA, 25 bp, probe
cacagtgaacgacttttggcggatg

SEQ ID NO: 162891 - DNA, 25 bp, probe
cgcgtaacgtgctgttgaccaatgg

SEQ ID NO: 162892 - DNA, 25 bp, probe
cacttaactttctttgactgcactg

SEQ ID NO: 162893 - DNA, 25 bp, probe
cacttcagagtgtcatgtttattga

SEQ ID NO: 162894 - DNA, 25 bp, probe
cactaaatgatgaatgtgggattat

SEQ ID NO: 162895 - DNA, 25 bp, probe
cactacatggtgtttgccgtgtttc

SEQ ID NO: 162896 - DNA, 25 bp, probe
cactacatggtgtttgccgtgtttc

SEQ ID NO: 162897 - DNA, 25 bp, probe
cacatacgtattttccgtagtgctc

SEQ ID NO: 162898 - DNA, 25 bp, probe
cactgaagtagccctccttcaggcc

SEQ ID NO: 162899 - DNA, 25 bp, probe
cacgagattggccattccttaggtc

SEQ ID NO: 162900 - DNA, 25 bp, probe
cacagaatatggcttggcctatggc

SEQ ID NO: 162901 - DNA, 25 bp, probe
cacaggtgatggcaactccctggaa

SEQ ID NO: 162902 - DNA, 25 bp, probe
cacagcggagagcgaacgcctggag

SEQ ID NO: 162903 - DNA, 25 bp, probe
cacagtcgatgactttgaaatcggg

SEQ ID NO: 162904 - DNA, 25 bp, probe
cacagtggtactatgaggtcggggc

SEQ ID NO: 162905 - DNA, 25 bp, probe
cacagtggaaatctggagactggtc

SEQ ID NO: 162906 - DNA, 25 bp, probe
cacaggtagcaagaggtacttttac

SEQ ID NO: 162907 - DNA, 25 bp, probe
caccctacaatgtggctatccttct

SEQ ID NO: 162908 - DNA, 25 bp, probe
cacactgccacaatgcaggtgtacc

SEQ ID NO: 162909 - DNA, 25 bp, probe
cacggtgcacatgctggcattcaac

SEQ ID NO: 162910 - DNA, 25 bp, probe
cacaggctgagagctcagatttaga

SEQ ID NO: 162911 - DNA, 25 bp, probe
cacacctcggcaacagtctaagatg

SEQ ID NO: 162912 - DNA, 25 bp, probe
cacactccggaggcaggtggtgcag

SEQ ID NO: 162913 - DNA, 25 bp, probe
cacagagcagctggatgccggggtg

SEQ ID NO: 162914 - DNA, 25 bp, probe
cacatactgtacgcggtggtggcct

SEQ ID NO: 162915 - DNA, 25 bp, probe
cactagggtcaggcggggtgctgtg

SEQ ID NO: 162916 - DNA, 25 bp, probe
cactcagcatattaccaggggtttg

SEQ ID NO: 162917 - DNA, 25 bp, probe
cacagcaaaaaccaggcgttgaact

SEQ ID NO: 162918 - DNA, 25 bp, probe
cacaggaacaactgccggtgatact

SEQ ID NO: 162919 - DNA, 25 bp, probe
cacaggaacaccttccgctgtgaaa

SEQ ID NO: 162920 - DNA, 25 bp, probe
cacaggcaaccagttggcctcatcc

SEQ ID NO: 162921 - DNA, 25 bp, probe
cacagacctacgggatggcatcatc

SEQ ID NO: 162922 - DNA, 25 bp, probe
cacagcctctaagcgtgctgacatc

SEQ ID NO: 162923 - DNA, 25 bp, probe
cacattcttaacattgcagcaatca

SEQ ID NO: 162924 - DNA, 25 bp, probe
cacatgtttatcgaccggcacaaac

SEQ ID NO: 162925 - DNA, 25 bp, probe
cacatgtttatcgaccggcacaaac

SEQ ID NO: 162926 - DNA, 25 bp, probe
cacagtatgctgtgctcggtgcagg

SEQ ID NO: 162927 - DNA, 25 bp, probe
cacatggatctgttcggtgggtccc

SEQ ID NO: 162928 - DNA, 25 bp, probe
cacaggtttaaggctgaggctgccc

SEQ ID NO: 162929 - DNA, 25 bp, probe
cacagtgacaggaaggtatggctgc

SEQ ID NO: 162930 - DNA, 25 bp, probe
cacaggcctgtgagaactggctccg

SEQ ID NO: 162931 - DNA, 25 bp, probe
cacaggccttccgaaaatgcgcggc

SEQ ID NO: 162932 - DNA, 25 bp, probe
cacatggagtccggaacaaggcccc

SEQ ID NO: 162933 - DNA, 25 bp, probe
cacaggagctccaagggctcaggcc

SEQ ID NO: 162934 - DNA, 25 bp, probe
cacaggagctccaagggctcaggcc

SEQ ID NO: 162935 - DNA, 25 bp, probe
cacaggagagactggttcggctcta

SEQ ID NO: 162936 - DNA, 25 bp, probe
cacagataagcctgaaacagcctct

SEQ ID NO: 162937 - DNA, 25 bp, probe
cacgatgaagactggaaagcgacgg

SEQ ID NO: 162938 - DNA, 25 bp, probe
cactcaaaaacacaaaggccggaag

SEQ ID NO: 162939 - DNA, 25 bp, probe
catcctaactaacagtcacgccgtg

SEQ ID NO: 162940 - DNA, 25 bp, probe
caccatacacgcaaaagacaccggg

SEQ ID NO: 162941 - DNA, 25 bp, probe
cacatgcatgcccacagcaaagaca

SEQ ID NO: 162942 - DNA, 25 bp, probe
cacatgcatgcccacagcaaagaca

SEQ ID NO: 162943 - DNA, 25 bp, probe
cacatatgcgctcaataaacgtgtt

SEQ ID NO: 162944 - DNA, 25 bp, probe
cacatttggtagacaacagggttta

SEQ ID NO: 162945 - DNA, 25 bp, probe
cacatgtgtgtgacgtttcgggttt

SEQ ID NO: 162946 - DNA, 25 bp, probe
cacatgtgtgtgacgtttcgggttt

SEQ ID NO: 162947 - DNA, 25 bp, probe
cacatgtgtgtgacgtttcgggttt

SEQ ID NO: 162948 - DNA, 25 bp, probe
cacactgctggacatggacatggag

SEQ ID NO: 162949 - DNA, 25 bp, probe
cacactgctggacatggacatggag

SEQ ID NO: 162950 - DNA, 25 bp, probe
cacaccgatgcacacgcacatagag

SEQ ID NO: 162951 - DNA, 25 bp, probe
cacactcgatacacgctgcaggtga

SEQ ID NO: 162952 - DNA, 25 bp, probe
cacagtggatacgccagcaggccac

SEQ ID NO: 162953 - DNA, 25 bp, probe
cacagtagaagcggtagaggcccgg

SEQ ID NO: 162954 - DNA, 25 bp, probe
cacagaggaaagcgggtgcccggca

SEQ ID NO: 162955 - DNA, 25 bp, probe
cacagaccaaagacatgggtgccca

SEQ ID NO: 162956 - DNA, 25 bp, probe
cacagcagccagtgttggggctgct

SEQ ID NO: 162957 - DNA, 25 bp, probe
cacagcgcctgcagaggtggaggtg

SEQ ID NO: 162958 - DNA, 25 bp, probe
cacacgcgcttcaagcaggagggtg

SEQ ID NO: 162959 - DNA, 25 bp, probe
cacacgcgcttcaagcaggagggtg

SEQ ID NO: 162960 - DNA, 25 bp, probe
cacacgcacttatcaggaacgcctc

SEQ ID NO: 162961 - DNA, 25 bp, probe
cacagggcttcatcgtaactgcttc

SEQ ID NO: 162962 - DNA, 25 bp, probe
cacgggtgtcacaatgttgagggtc

SEQ ID NO: 162963 - DNA, 25 bp, probe
cacagctgtggctcgtttgagggat

SEQ ID NO: 162964 - DNA, 25 bp, probe
cactgttgtgaaggttgtagacgtt

SEQ ID NO: 162965 - DNA, 25 bp, probe
cacaggggacaggcttgctggacgg

SEQ ID NO: 162966 - DNA, 25 bp, probe
cacagagggagggctttggagcgac

SEQ ID NO: 162967 - DNA, 25 bp, probe
cacagatgggcacattcttgtggca

SEQ ID NO: 162968 - DNA, 25 bp, probe
cacagcatgggcacttatgaggaca

SEQ ID NO: 162969 - DNA, 25 bp, probe
cacagaccccagatgatcaggatca

SEQ ID NO: 162970 - DNA, 25 bp, probe
cacagaccccagatgatcaggatca

SEQ ID NO: 162971 - DNA, 25 bp, probe
cacagataccaatggatcagataac

SEQ ID NO: 162972 - DNA, 25 bp, probe
cacagtaccagccaggagaaaattt

SEQ ID NO: 162973 - DNA, 25 bp, probe
cacagtaccagccaggagaaaattt

SEQ ID NO: 162974 - DNA, 25 bp, probe
cacaggagcctttgaagtaaatttt

SEQ ID NO: 162975 - DNA, 25 bp, probe
cacagtgaccagtaaagtccaatta

SEQ ID NO: 162976 - DNA, 25 bp, probe
cacagaggcaactcaggagtaagat

SEQ ID NO: 162977 - DNA, 25 bp, probe
cacgagagtcaacaggtgtcacact

SEQ ID NO: 162978 - DNA, 25 bp, probe
cacgagagtcaacaggtgtcacact

SEQ ID NO: 162979 - DNA, 25 bp, probe
cacagcagaggcaaggggtgccagg

SEQ ID NO: 162980 - DNA, 25 bp, probe
cacagcggccaatgtctggcagtgg

SEQ ID NO: 162981 - DNA, 25 bp, probe
cacatccccagctgtatgaggagag

SEQ ID NO: 162982 - DNA, 25 bp, probe
cacatgcggtcacttttgggagatg

SEQ ID NO: 162983 - DNA, 25 bp, probe
cacaggcctagagtctgagggaggg

SEQ ID NO: 162984 - DNA, 25 bp, probe
cacagtctctatggtgctgaggaag

SEQ ID NO: 162985 - DNA, 25 bp, probe
cacacctcaatggagcagaagagag

SEQ ID NO: 162986 - DNA, 25 bp, probe
cacaccatcgagaacaacactgaga

SEQ ID NO: 162987 - DNA, 25 bp, probe
cacaccatcgagaacaacactgaga

SEQ ID NO: 162988 - DNA, 25 bp, probe
cacacccagggatgccctggaccta

SEQ ID NO: 162989 - DNA, 25 bp, probe
cacacccagctggtgacccagctga

SEQ ID NO: 162990 - DNA, 25 bp, probe
cacacccagctggtgacccagctga

SEQ ID NO: 162991 - DNA, 25 bp, probe
cacagcatcaaggatgtgcacgccc

SEQ ID NO: 162992 - DNA, 25 bp, probe
cactgctgtatggactcatccacca

SEQ ID NO: 162993 - DNA, 25 bp, probe
cacagctaaggagcatgcccatcag

SEQ ID NO: 162994 - DNA, 25 bp, probe
cactctcaagaaggaccagatcgtg

SEQ ID NO: 162995 - DNA, 25 bp, probe
cacttcacaggataaaattgtccat

SEQ ID NO: 162996 - DNA, 25 bp, probe
cacttcacaggataaaattgtccat

SEQ ID NO: 162997 - DNA, 25 bp, probe
cactttccccaatgaatgtcaccat

SEQ ID NO: 162998 - DNA, 25 bp, probe
cacttacctttattaattagcttct

SEQ ID NO: 162999 - DNA, 25 bp, probe
cacttcttctagagtaattatctgt

SEQ ID NO: 163000 - DNA, 25 bp, probe
cactttgggcagactgaaattgtgg

SEQ ID NO: 163001 - DNA, 25 bp, probe
cacttcatagacttgctggaagggt

SEQ ID NO: 163002 - DNA, 25 bp, probe
cacaccaggtcttccgatcagtggt

SEQ ID NO: 163003 - DNA, 25 bp, probe
cacatccgagacaatccagtacagg

SEQ ID NO: 163004 - DNA, 25 bp, probe
cacatcactgagtcagtcaactcca

SEQ ID NO: 163005 - DNA, 25 bp, probe
cacatactgagacctccagatgcac

SEQ ID NO: 163006 - DNA, 25 bp, probe
cacacctgtagtcccagatacttgg

SEQ ID NO: 163007 - DNA, 25 bp, probe
cacaccgtttcctgattgctcaggg

SEQ ID NO: 163008 - DNA, 25 bp, probe
cacacctggccagaggtttcgggaa

SEQ ID NO: 163009 - DNA, 25 bp, probe
cacacctggccagaggtttcgggaa

SEQ ID NO: 163010 - DNA, 25 bp, probe
cacacctcgaactggttgtagtggg

SEQ ID NO: 163011 - DNA, 25 bp, probe
cacctgaaacactggacctgggggt

SEQ ID NO: 163012 - DNA, 25 bp, probe
caccagtgaaacttgaaccgggaag

SEQ ID NO: 163013 - DNA, 25 bp, probe
catccggatagaagattccccggaa

SEQ ID NO: 163014 - DNA, 25 bp, probe
catccccagaaaactcaccacggga

SEQ ID NO: 163015 - DNA, 25 bp, probe
catcctgcctaagaggcactactac

SEQ ID NO: 163016 - DNA, 25 bp, probe
cacttgcactggtcacaggaaaacc

SEQ ID NO: 163017 - DNA, 25 bp, probe
cacttgcactggtcacaggaaaacc

SEQ ID NO: 163018 - DNA, 25 bp, probe
cactttgtgcgctgcattaaaccca

SEQ ID NO: 163019 - DNA, 25 bp, probe
cacatccagtccttgttagaacaaa

SEQ ID NO: 163020 - DNA, 25 bp, probe
cacaccagtggagtcttcgagactt

SEQ ID NO: 163021 - DNA, 25 bp, probe
cacagcaagttagtagttgagcctg

SEQ ID NO: 163022 - DNA, 25 bp, probe
cacagcaagttagtagttgagcctg

SEQ ID NO: 163023 - DNA, 25 bp, probe
cacagggtgggctgtggagctctca

SEQ ID NO: 163024 - DNA, 25 bp, probe
cacagacgggtacctgaagcgctgc

SEQ ID NO: 163025 - DNA, 25 bp, probe
cacagtccttgtgctctgagatggc

SEQ ID NO: 163026 - DNA, 25 bp, probe
cacagtgcccgtgtcggagccgcgc

SEQ ID NO: 163027 - DNA, 25 bp, probe
cacagtggccggggctgaagccaca

SEQ ID NO: 163028 - DNA, 25 bp, probe
cacgaggccatcgaggccaactctc

SEQ ID NO: 163029 - DNA, 25 bp, probe
cactgcgcgtctgaggctcagaccc

SEQ ID NO: 163030 - DNA, 25 bp, probe
cacagtgctgtctggcggcaccacc

SEQ ID NO: 163031 - DNA, 25 bp, probe
cacagtgctgtgggacggggagagc

SEQ ID NO: 163032 - DNA, 25 bp, probe
cacagtgctgtgggacggggagagc

SEQ ID NO: 163033 - DNA, 25 bp, probe
cacagctcgggggccagagatcagg

SEQ ID NO: 163034 - DNA, 25 bp, probe
cacagggaggccacgtatcagggaa

SEQ ID NO: 163035 - DNA, 25 bp, probe
cacgggggctcaacggaacagacat

SEQ ID NO: 163036 - DNA, 25 bp, probe
cacagtggggtctctcggaagccac

SEQ ID NO: 163037 - DNA, 25 bp, probe
cacagtgggggtgctctggagaggc

SEQ ID NO: 163038 - DNA, 25 bp, probe
cacagtgggggtgctctggagaggc

SEQ ID NO: 163039 - DNA, 25 bp, probe
cacatgggccaggtccagggtgggc

SEQ ID NO: 163040 - DNA, 25 bp, probe
cacatgggccaggtccagggtgggc

SEQ ID NO: 163041 - DNA, 25 bp, probe
cacagggctgcagcccggagaggag

SEQ ID NO: 163042 - DNA, 25 bp, probe
cacagaggtggctgtgcgaagaggg

SEQ ID NO: 163043 - DNA, 25 bp, probe
cacaggtcctgctgtgcagcaaagc

SEQ ID NO: 163044 - DNA, 25 bp, probe
cacgaacatctctggagggacacct

SEQ ID NO: 163045 - DNA, 25 bp, probe
cacttccagctcaggttggaaccat

SEQ ID NO: 163046 - DNA, 25 bp, probe
cacttccagctcaggttggaaccat

SEQ ID NO: 163047 - DNA, 25 bp, probe
cactcatccaggaactggggaacac

SEQ ID NO: 163048 - DNA, 25 bp, probe
cactaccagttcctgttggacctgg

SEQ ID NO: 163049 - DNA, 25 bp, probe
cactaatcattcaagcttcgcagcc

SEQ ID NO: 163050 - DNA, 25 bp, probe
cactaacttcatgatgaccccttac

SEQ ID NO: 163051 - DNA, 25 bp, probe
cacttccttcatgtaagactttggc

SEQ ID NO: 163052 - DNA, 25 bp, probe
cacttccagatcagtaaccctgaat

SEQ ID NO: 163053 - DNA, 25 bp, probe
cacttgtcagaggtggaaacactac

SEQ ID NO: 163054 - DNA, 25 bp, probe
cactttatgagggagaccccgacag

SEQ ID NO: 163055 - DNA, 25 bp, probe
cagccttagggttgggccctgaggc

SEQ ID NO: 163056 - DNA, 25 bp, probe
caggtttgggatctggaccggggag

SEQ ID NO: 163057 - DNA, 25 bp, probe
cacgttgctgtcgattaagaccgga

SEQ ID NO: 163058 - DNA, 25 bp, probe
cacttattgcaatttaacaccagag

SEQ ID NO: 163059 - DNA, 25 bp, probe
caccaaaaaatggaacaccgacaat

SEQ ID NO: 163060 - DNA, 25 bp, probe
caccaaaggtttgcaccctgatcaa

SEQ ID NO: 163061 - DNA, 25 bp, probe
caccgaaggtatcgaacggcgtgcc

SEQ ID NO: 163062 - DNA, 25 bp, probe
cactgagaagggctgcccgggtcac

SEQ ID NO: 163063 - DNA, 25 bp, probe
cacagaggaggaactgcccagtggt

SEQ ID NO: 163064 - DNA, 25 bp, probe
cacagcatcaagcagacggccgctg

SEQ ID NO: 163065 - DNA, 25 bp, probe
cacagctaatggcacaggaggccgg

SEQ ID NO: 163066 - DNA, 25 bp, probe
cacagtactggccaacagatgacca

SEQ ID NO: 163067 - DNA, 25 bp, probe
cacagccacatgctgcagaaggtcc

SEQ ID NO: 163068 - DNA, 25 bp, probe
cactcaaaggacccaggatgcaccc

SEQ ID NO: 163069 - DNA, 25 bp, probe
cactcaaaggacccaggatgcaccc

SEQ ID NO: 163070 - DNA, 25 bp, probe
cactctgggtgaccagatggccccc

SEQ ID NO: 163071 - DNA, 25 bp, probe
cactctgggtgaccagatggccccc

SEQ ID NO: 163072 - DNA, 25 bp, probe
cacttaggtgtgcattcggctgcaa

SEQ ID NO: 163073 - DNA, 25 bp, probe
cacttaggtgtgcattcggctgcaa

SEQ ID NO: 163074 - DNA, 25 bp, probe
cacttcggaagattctctgtatcaa

SEQ ID NO: 163075 - DNA, 25 bp, probe
cacttctggaactactttatctacg

SEQ ID NO: 163076 - DNA, 25 bp, probe
cactgtcctaaaacgttaccagcag

SEQ ID NO: 163077 - DNA, 25 bp, probe
cacttttgcagattgggtaacacag

SEQ ID NO: 163078 - DNA, 25 bp, probe
cacattccctgactttgtaacagag

SEQ ID NO: 163079 - DNA, 25 bp, probe
cacttccctcctaagtcaaagacca

SEQ ID NO: 163080 - DNA, 25 bp, probe
cacttccctgtttatccaaacatct

SEQ ID NO: 163081 - DNA, 25 bp, probe
cacttagccttcttaggcaaacgcc

SEQ ID NO: 163082 - DNA, 25 bp, probe
cactgtcccttctacaagcagtacc

SEQ ID NO: 163083 - DNA, 25 bp, probe
cactgtcaccacgtacttggtagac

SEQ ID NO: 163084 - DNA, 25 bp, probe
gactcaactcaagccttggtaacct

SEQ ID NO: 163085 - DNA, 25 bp, probe
gactcaactcaagccttggtaacct

SEQ ID NO: 163086 - DNA, 25 bp, probe
cactacactccagcctgggtgacag

SEQ ID NO: 163087 - DNA, 25 bp, probe
cactacactccagcctgggtgacag

SEQ ID NO: 163088 - DNA, 25 bp, probe
cacttcatcatccagtccttggata

SEQ ID NO: 163089 - DNA, 25 bp, probe
cacatgatccaccgtaccaggaagc

SEQ ID NO: 163090 - DNA, 25 bp, probe
cacattcacctgctgtccaaagatg

SEQ ID NO: 163091 - DNA, 25 bp, probe
cacattgcccatggctgggaacatg

SEQ ID NO: 163092 - DNA, 25 bp, probe
cacagcatgcaccattctgggtaca

SEQ ID NO: 163093 - DNA, 25 bp, probe
cacagcacacacacgggctgagcgg

SEQ ID NO: 163094 - DNA, 25 bp, probe
cacagcacacacacgggctgagcgg

SEQ ID NO: 163095 - DNA, 25 bp, probe
cacatgtcagacagcgttgcagagg

SEQ ID NO: 163096 - DNA, 25 bp, probe
cacatgtcagacagcgttgcagagg

SEQ ID NO: 163097 - DNA, 25 bp, probe
cacagtcagcacggggatcacagac

SEQ ID NO: 163098 - DNA, 25 bp, probe
cacagcaagctgtcggtgatccaca

SEQ ID NO: 163099 - DNA, 25 bp, probe
cacatcaactgatgctatgtgctaa

SEQ ID NO: 163100 - DNA, 25 bp, probe
cacagaactcatttcatgagtgttt

SEQ ID NO: 163101 - DNA, 25 bp, probe
cacagacactgcgtgcaatgttgtt

SEQ ID NO: 163102 - DNA, 25 bp, probe
cacagcatcctgagcaagatggtgc

SEQ ID NO: 163103 - DNA, 25 bp, probe
cagcagccatcgaccatggatggtt

SEQ ID NO: 163104 - DNA, 25 bp, probe
cagcagccatcgaccatggatggtt

SEQ ID NO: 163105 - DNA, 25 bp, probe
cacatgctaaagccaggattgtgtt

SEQ ID NO: 163106 - DNA, 25 bp, probe
cacatgctggtaaatgccatttttc

SEQ ID NO: 163107 - DNA, 25 bp, probe
cacaggccttatttcatatgtttcc

SEQ ID NO: 163108 - DNA, 25 bp, probe
cacaggtctaaactcagcatgcttt

SEQ ID NO: 163109 - DNA, 25 bp, probe
cacaggtgctaccagacctctgtgt

SEQ ID NO: 163110 - DNA, 25 bp, probe
cacaggtgggtgtcatgccctggtt

SEQ ID NO: 163111 - DNA, 25 bp, probe
cacagaagtagtcatgcccttttgt

SEQ ID NO: 163112 - DNA, 25 bp, probe
cactacagctcgtaactcctttatt

SEQ ID NO: 163113 - DNA, 25 bp, probe
cactacagctcgtaactcctttatt

SEQ ID NO: 163114 - DNA, 25 bp, probe
cactaagccttagttctttcatcta

SEQ ID NO: 163115 - DNA, 25 bp, probe
cagatattcctaaagttttattgac

SEQ ID NO: 163116 - DNA, 25 bp, probe
cacagatcaccataaggaggtagtg

SEQ ID NO: 163117 - DNA, 25 bp, probe
cacagaacccatagggaatggagga

SEQ ID NO: 163118 - DNA, 25 bp, probe
cacaggcactcctggagatatgaag

SEQ ID NO: 163119 - DNA, 25 bp, probe
cacattgccttctagtgagttccag

SEQ ID NO: 163120 - DNA, 25 bp, probe
cacatggctcttcagttttccattc

SEQ ID NO: 163121 - DNA, 25 bp, probe
cacagcagattaccatttattacat

SEQ ID NO: 163122 - DNA, 25 bp, probe
cacagcagactaaaattacttcagc

SEQ ID NO: 163123 - DNA, 25 bp, probe
cacagcttctggtaacaaatatcgc

SEQ ID NO: 163124 - DNA, 25 bp, probe
cacagcttctggtaacaaatatcgc

SEQ ID NO: 163125 - DNA, 25 bp, probe
cactcctatggtcacagacttctgg

SEQ ID NO: 163126 - DNA, 25 bp, probe
cacttgaatgagaaacgtgtttagt

SEQ ID NO: 163127 - DNA, 25 bp, probe
cacttgaaggtactcaggtttcaga

SEQ ID NO: 163128 - DNA, 25 bp, probe
cacttaaggctccacagtggcttac

SEQ ID NO: 163129 - DNA, 25 bp, probe
cacttaacactcgcatggggatgca

SEQ ID NO: 163130 - DNA, 25 bp, probe
cactgtaaagctggaaagggacgaa

SEQ ID NO: 163131 - DNA, 25 bp, probe
cactatactactgaaattgaaaaca

SEQ ID NO: 163132 - DNA, 25 bp, probe
cactacactactcacaatggtaggg

SEQ ID NO: 163133 - DNA, 25 bp, probe
cacagaactcctcacactggtgaac

SEQ ID NO: 163134 - DNA, 25 bp, probe
cacagaagtgcctgagacgcggaga

SEQ ID NO: 163135 - DNA, 25 bp, probe
cacagaggtgcccatggagcgcgtg

SEQ ID NO: 163136 - DNA, 25 bp, probe
cacagcatgggaccaggctggcctg

SEQ ID NO: 163137 - DNA, 25 bp, probe
cacagcaggaatcagtcagtatctg

SEQ ID NO: 163138 - DNA, 25 bp, probe
cacagcagaaatcatgtacgactgg

SEQ ID NO: 163139 - DNA, 25 bp, probe
cactcagcaacactggtcacgtttg

SEQ ID NO: 163140 - DNA, 25 bp, probe
cactgccattcaaagtcagcccttg

SEQ ID NO: 163141 - DNA, 25 bp, probe
cacattcaccattagtaccactctc

SEQ ID NO: 163142 - DNA, 25 bp, probe
cacttacctaacaagtactgctcat

SEQ ID NO: 163143 - DNA, 25 bp, probe
cacttctcccagtctggtatattat

SEQ ID NO: 163144 - DNA, 25 bp, probe
cactatccctaattacatgtatttt

SEQ ID NO: 163145 - DNA, 25 bp, probe
cactatccctaattacatgtatttt

SEQ ID NO: 163146 - DNA, 25 bp, probe
cactaccagtaccaatgattaccat

SEQ ID NO: 163147 - DNA, 25 bp, probe
cactacccaaccataatgagccatg

SEQ ID NO: 163148 - DNA, 25 bp, probe
cacttgggccccatacaatgtcatg

SEQ ID NO: 163149 - DNA, 25 bp, probe
cacttacttccctcacaatgatgat

SEQ ID NO: 163150 - DNA, 25 bp, probe
cacttacttccctcacaatgatgat

SEQ ID NO: 163151 - DNA, 25 bp, probe
cactccactacccaaccataatgag

SEQ ID NO: 163152 - DNA, 25 bp, probe
cactccactacccaaccataatgag

SEQ ID NO: 163153 - DNA, 25 bp, probe
cactcccaccaactactcttaggga

SEQ ID NO: 163154 - DNA, 25 bp, probe
cactcctagctctttaactgtagga

SEQ ID NO: 163155 - DNA, 25 bp, probe
cactctctgtttcaattctggggag

SEQ ID NO: 163156 - DNA, 25 bp, probe
cactccatgttatattctggggaaa

SEQ ID NO: 163157 - DNA, 25 bp, probe
cacagactattttttgatggaagaa

SEQ ID NO: 163158 - DNA, 25 bp, probe
cacagagacttttactgagctccga

SEQ ID NO: 163159 - DNA, 25 bp, probe
cacagaagatcttctcctggctctt

SEQ ID NO: 163160 - DNA, 25 bp, probe
cacaggtgtcttcctgtggcttctt

SEQ ID NO: 163161 - DNA, 25 bp, probe
cacaggttctatgatttgtagctct

SEQ ID NO: 163162 - DNA, 25 bp, probe
cacctggccagatctttgtatgtct

SEQ ID NO: 163163 - DNA, 25 bp, probe
cacctgtttaactttgactgctata

SEQ ID NO: 163164 - DNA, 25 bp, probe
cacgattttccagtcttattgtatt

SEQ ID NO: 163165 - DNA, 25 bp, probe
cacagattatacagctctaaggata

SEQ ID NO: 163166 - DNA, 25 bp, probe
cacagttatacatcttcaggatgat

SEQ ID NO: 163167 - DNA, 25 bp, probe
cacatgttagagcccttctgaaaaa

SEQ ID NO: 163168 - DNA, 25 bp, probe
cactgacttgagaccagttgaataa

SEQ ID NO: 163169 - DNA, 25 bp, probe
cacatgaatgtgttactgtatacaa

SEQ ID NO: 163170 - DNA, 25 bp, probe
cactgaagtggttgtgccattcaac

SEQ ID NO: 163171 - DNA, 25 bp, probe
cactgtggggcttagacatgatgaa

SEQ ID NO: 163172 - DNA, 25 bp, probe
cacttgtggatgtttagtgcagcca

SEQ ID NO: 163173 - DNA, 25 bp, probe
cacttgtggatgtttagtgcagcca

SEQ ID NO: 163174 - DNA, 25 bp, probe
cactattgattgtattatgctgctc

SEQ ID NO: 163175 - DNA, 25 bp, probe
cacatgtcaattccaaatcatcctg

SEQ ID NO: 163176 - DNA, 25 bp, probe
cacatgcatcagatgtacattctcc

SEQ ID NO: 163177 - DNA, 25 bp, probe
cacatctcagctggagccattgacc

SEQ ID NO: 163178 - DNA, 25 bp, probe
cacccgctctacgatatgagcctcc

SEQ ID NO: 163179 - DNA, 25 bp, probe
cacccatccaaggaatggccactgc

SEQ ID NO: 163180 - DNA, 25 bp, probe
cacaggccgctaggaagcagccaat

SEQ ID NO: 163181 - DNA, 25 bp, probe
cacaggccagcgacgcaatcagaaa

SEQ ID NO: 163182 - DNA, 25 bp, probe
cacaggccagcgacgcaatcagaaa

SEQ ID NO: 163183 - DNA, 25 bp, probe
tgccgcactggaaggagacgcaccg

SEQ ID NO: 163184 - DNA, 25 bp, probe
cacagatctgtttcgtgcattggaa

SEQ ID NO: 163185 - DNA, 25 bp, probe
cactagctgttctgctcatatatga

SEQ ID NO: 163186 - DNA, 25 bp, probe
cacatagcttacaagccagctggag

SEQ ID NO: 163187 - DNA, 25 bp, probe
cacagtgactattagccactgccag

SEQ ID NO: 163188 - DNA, 25 bp, probe
cacagtgcctgtgcaccattcgaga

SEQ ID NO: 163189 - DNA, 25 bp, probe
cacttgctcgtccatccctcaagag

SEQ ID NO: 163190 - DNA, 25 bp, probe
cacattcctgaccatcggctatggt

SEQ ID NO: 163191 - DNA, 25 bp, probe
cacatgctgccatttctggcttatg

SEQ ID NO: 163192 - DNA, 25 bp, probe
cacagtgcctgtcgctggtgcactg

SEQ ID NO: 163193 - DNA, 25 bp, probe
cacagtggcagcgtgttggagcgcg

SEQ ID NO: 163194 - DNA, 25 bp, probe
cacagggcacctaatgggggctttt

SEQ ID NO: 163195 - DNA, 25 bp, probe
cacagggacctgaaggtcagtatat

SEQ ID NO: 163196 - DNA, 25 bp, probe
cacatggagacctaaagccacaaaa

SEQ ID NO: 163197 - DNA, 25 bp, probe
cacaggaggctcgggagcccacaag

SEQ ID NO: 163198 - DNA, 25 bp, probe
cacaggaggccagtgggcgggccat

SEQ ID NO: 163199 - DNA, 25 bp, probe
cacagggggccaggggcatggccac

SEQ ID NO: 163200 - DNA, 25 bp, probe
cacaggaggacctcggcagagccaa

SEQ ID NO: 163201 - DNA, 25 bp, probe
cacaggaggacctcggcagagccaa

SEQ ID NO: 163202 - DNA, 25 bp, probe
cactggaaggccttcggcctacaat

SEQ ID NO: 163203 - DNA, 25 bp, probe
cacttaatggtctctgttttcaata

SEQ ID NO: 163204 - DNA, 25 bp, probe
cacttacaggtaccatttatttcaa

SEQ ID NO: 163205 - DNA, 25 bp, probe
cacatacacagagactctttcattt

SEQ ID NO: 163206 - DNA, 25 bp, probe
cacagatgaaacaaggatcttccga

SEQ ID NO: 163207 - DNA, 25 bp, probe
cacattgaaacatggagctctaaat

SEQ ID NO: 163208 - DNA, 25 bp, probe
cacattgaattcttggatgcagtgg

SEQ ID NO: 163209 - DNA, 25 bp, probe
cacaggactcatttgtgtgctttgc

SEQ ID NO: 163210 - DNA, 25 bp, probe
cacagagttcactcttctattcgcc

SEQ ID NO: 163211 - DNA, 25 bp, probe
cacagagttcactcttctattcgcc

SEQ ID NO: 163212 - DNA, 25 bp, probe
cacagatatccatgcctgttttaca

SEQ ID NO: 163213 - DNA, 25 bp, probe
cacagtcaatgctgccttgtgatta

SEQ ID NO: 163214 - DNA, 25 bp, probe
cacagtcaatgctgccttgtgatta

SEQ ID NO: 163215 - DNA, 25 bp, probe
cacattctgagctatgctttgtgtt

SEQ ID NO: 163216 - DNA, 25 bp, probe
cacatacgtaagatggtgcttgctc

SEQ ID NO: 163217 - DNA, 25 bp, probe
cacatacgtaagatggtgcttgctc

SEQ ID NO: 163218 - DNA, 25 bp, probe
cacagatcctaactttgggtcccat

SEQ ID NO: 163219 - DNA, 25 bp, probe
cacaggcggaagctgcgggccgcct

SEQ ID NO: 163220 - DNA, 25 bp, probe
cacatccggaagctggggcagatcc

SEQ ID NO: 163221 - DNA, 25 bp, probe
cacaggtgccaactgaggtgggacc

SEQ ID NO: 163222 - DNA, 25 bp, probe
cactgtcagccaatgtggggggtcc

SEQ ID NO: 163223 - DNA, 25 bp, probe
cactgtcgtgcaaccagtggggcct

SEQ ID NO: 163224 - DNA, 25 bp, probe
cacttcctgctacaggaggggtctc

SEQ ID NO: 163225 - DNA, 25 bp, probe
cactctgtctcctgatgaacgggtt

SEQ ID NO: 163226 - DNA, 25 bp, probe
cactcgtgcccaaagaaagggccat

SEQ ID NO: 163227 - DNA, 25 bp, probe
cactcgtgccggaggcaaaggtcct

SEQ ID NO: 163228 - DNA, 25 bp, probe
cacttgtgtccgaggagcgaggagc

SEQ ID NO: 163229 - DNA, 25 bp, probe
cacttttacaagccgcaaaggcagc

SEQ ID NO: 163230 - DNA, 25 bp, probe
cacttctaagcacaaccagaggccc

SEQ ID NO: 163231 - DNA, 25 bp, probe
tagaatattattatgtgccccgtgt

SEQ ID NO: 163232 - DNA, 25 bp, probe
cacttaaacgtgtcccatgaatctt

SEQ ID NO: 163233 - DNA, 25 bp, probe
cactttaacccagtctctgttgctg

SEQ ID NO: 163234 - DNA, 25 bp, probe
cacttctaatcctgtactcactgtg

SEQ ID NO: 163235 - DNA, 25 bp, probe
cactttttggctgacttcatctggg

SEQ ID NO: 163236 - DNA, 25 bp, probe
cactagtgtattttacatcctctgg

SEQ ID NO: 163237 - DNA, 25 bp, probe
cacttgtgtccatggagcatccttc

SEQ ID NO: 163238 - DNA, 25 bp, probe
cactgttgtacatggtcaccatgtc

SEQ ID NO: 163239 - DNA, 25 bp, probe
caccgtcttcagggtcaacatgtcc

SEQ ID NO: 163240 - DNA, 25 bp, probe
cacgcgtctgaaggagtacaccatc

SEQ ID NO: 163241 - DNA, 25 bp, probe
cacagtgcttgattccaaccagaca

SEQ ID NO: 163242 - DNA, 25 bp, probe
cacagtcttaacgatgaccacccag

SEQ ID NO: 163243 - DNA, 25 bp, probe
cacttcttctacgatgtcaagccgc

SEQ ID NO: 163244 - DNA, 25 bp, probe
cactttatctgggtgtctcgcacca

SEQ ID NO: 163245 - DNA, 25 bp, probe
cactgattacttcatgactgccacg

SEQ ID NO: 163246 - DNA, 25 bp, probe
cactttcctgagacatgactgccag

SEQ ID NO: 163247 - DNA, 25 bp, probe
cactttcctgagatgcacttacttc

SEQ ID NO: 163248 - DNA, 25 bp, probe
cacggtgacctgaagccttttgtcg

SEQ ID NO: 163249 - DNA, 25 bp, probe
cactggcggccgttactagtggatc

SEQ ID NO: 163250 - DNA, 25 bp, probe
cactgggtccgaatcagtaggtgac

SEQ ID NO: 163251 - DNA, 25 bp, probe
cactggttacctacgaaggctccaa

SEQ ID NO: 163252 - DNA, 25 bp, probe
cactgacaaagtatagaaggttcta

SEQ ID NO: 163253 - DNA, 25 bp, probe
cttgcagtaagtaatagtttttgta

SEQ ID NO: 163254 - DNA, 25 bp, probe
ggccagccctggataggtttttatg

SEQ ID NO: 163255 - DNA, 25 bp, probe
cagcggcttcggtgggtattttctg

SEQ ID NO: 163256 - DNA, 25 bp, probe
cacctcttccgaatgggttttctat

SEQ ID NO: 163257 - DNA, 25 bp, probe
cactctttcctaatctggttgtcat

SEQ ID NO: 163258 - DNA, 25 bp, probe
cactctgcattacagtctgaattga

SEQ ID NO: 163259 - DNA, 25 bp, probe
cacggcttcagctactatctaatca

SEQ ID NO: 163260 - DNA, 25 bp, probe
cactgtctatcagtacgtcggcaat

SEQ ID NO: 163261 - DNA, 25 bp, probe
cactgctatacctccttagcactga

SEQ ID NO: 163262 - DNA, 25 bp, probe
cacatgttcatatatcctaaatcta

SEQ ID NO: 163263 - DNA, 25 bp, probe
cacatttccatggcatgcactacag

SEQ ID NO: 163264 - DNA, 25 bp, probe
cacatttccatggcatgcactacag

SEQ ID NO: 163265 - DNA, 25 bp, probe
cacatggtccagactgagtgtcagt

SEQ ID NO: 163266 - DNA, 25 bp, probe
cacatggctgacattagctctcact

SEQ ID NO: 163267 - DNA, 25 bp, probe
cacatggctagggatactgctcact

SEQ ID NO: 163268 - DNA, 25 bp, probe
cactgagtcagtcaactccatccgt

SEQ ID NO: 163269 - DNA, 25 bp, probe
caccagcttgtggaacccaacgtac

SEQ ID NO: 163270 - DNA, 25 bp, probe
caccagcttgtggaacccaacgtac

SEQ ID NO: 163271 - DNA, 25 bp, probe
cactttctgtggtactcctaattac

SEQ ID NO: 163272 - DNA, 25 bp, probe
cactgattttggtctgtccaagatt

SEQ ID NO: 163273 - DNA, 25 bp, probe
cacgtttctggagggcaacacggtg

SEQ ID NO: 163274 - DNA, 25 bp, probe
cacgtccctgcatgaggcccacgag

SEQ ID NO: 163275 - DNA, 25 bp, probe
cacttccgctgctgcggcagcatat

SEQ ID NO: 163276 - DNA, 25 bp, probe
cacttccgctgctgcggcagcatat

SEQ ID NO: 163277 - DNA, 25 bp, probe
cacatcttggtctacagagaaatct

SEQ ID NO: 163278 - DNA, 25 bp, probe
cacatcctgcctaagaggcactact

SEQ ID NO: 163279 - DNA, 25 bp, probe
cacatggccctgaagaccagtgacc

SEQ ID NO: 163280 - DNA, 25 bp, probe
cacatgttcctgatggccaggcttc

SEQ ID NO: 163281 - DNA, 25 bp, probe
cactttgcactgatatatcatgagt

SEQ ID NO: 163282 - DNA, 25 bp, probe
cactgaacagctatgaacgaggcca

SEQ ID NO: 163283 - DNA, 25 bp, probe
cactgagagttgagtcatctgggct

SEQ ID NO: 163284 - DNA, 25 bp, probe
cacatggtggtgactgtcacccgct

SEQ ID NO: 163285 - DNA, 25 bp, probe
cactgcattgggacgtctgcacttg

SEQ ID NO: 163286 - DNA, 25 bp, probe
cactctggggtcagccagcagtgtg

SEQ ID NO: 163287 - DNA, 25 bp, probe
cactcttgggccaaggctgtggtcc

SEQ ID NO: 163288 - DNA, 25 bp, probe
cactaagcggccaatggtggtagac

SEQ ID NO: 163289 - DNA, 25 bp, probe
cactatagtggtggtgaaagtcata

SEQ ID NO: 163290 - DNA, 25 bp, probe
cacatgtactaaggtgagtatacta

SEQ ID NO: 163291 - DNA, 25 bp, probe
cacattcactagtaataggctacga

SEQ ID NO: 163292 - DNA, 25 bp, probe
cactccatctggtagaagggaaagc

SEQ ID NO: 163293 - DNA, 25 bp, probe
cactccatctggtagaagggaaagc

SEQ ID NO: 163294 - DNA, 25 bp, probe
cacatcctcaggctcagaagggaat

SEQ ID NO: 163295 - DNA, 25 bp, probe
cacatggctcccgtgaggaggtgaa

SEQ ID NO: 163296 - DNA, 25 bp, probe
cactggtccggtttgtggtggaaga

SEQ ID NO: 163297 - DNA, 25 bp, probe
cactgactacggcatgtgtaaggaa

SEQ ID NO: 163298 - DNA, 25 bp, probe
caccaaagccggtggacagcggaac

SEQ ID NO: 163299 - DNA, 25 bp, probe
cagcaaaatgggagggacgggctcc

SEQ ID NO: 163300 - DNA, 25 bp, probe
caccgtagtggtgggtgactggcct

SEQ ID NO: 163301 - DNA, 25 bp, probe
cactcgctactggctgtgttgacgg

SEQ ID NO: 163302 - DNA, 25 bp, probe
cactccatacttcggtagcagtcga

SEQ ID NO: 163303 - DNA, 25 bp, probe
cacatgccatacttccggaagcgga

SEQ ID NO: 163304 - DNA, 25 bp, probe
cacatcctcactggtcgggagaggt

SEQ ID NO: 163305 - DNA, 25 bp, probe
cacatcctgcaaggcctgtcagatg

SEQ ID NO: 163306 - DNA, 25 bp, probe
cacatcaggcctggccagctggatg

SEQ ID NO: 163307 - DNA, 25 bp, probe
cacatgaggccatctcaggagatgg

SEQ ID NO: 163308 - DNA, 25 bp, probe
cacatgcgtgccccaaggatgaggg

SEQ ID NO: 163309 - DNA, 25 bp, probe
cacatgcgtgccccaaggatgaggg

SEQ ID NO: 163310 - DNA, 25 bp, probe
cacaggctcagggcaaagaagtggc

SEQ ID NO: 163311 - DNA, 25 bp, probe
cacaggacatgcaaccagagatcgt

SEQ ID NO: 163312 - DNA, 25 bp, probe
cacaggaatcatcaaaacgctgctg

SEQ ID NO: 163313 - DNA, 25 bp, probe
cacaggagactccaaggagctactg

SEQ ID NO: 163314 - DNA, 25 bp, probe
cacatggagtgcctgtacaagctga

SEQ ID NO: 163315 - DNA, 25 bp, probe
cacatggagtgcctgtacaagctga

SEQ ID NO: 163316 - DNA, 25 bp, probe
cacatgggtggtcccacagcatggg

SEQ ID NO: 163317 - DNA, 25 bp, probe
cacatggaggacccaacaggaggcc

SEQ ID NO: 163318 - DNA, 25 bp, probe
cacatgagggaccagaacaattaca

SEQ ID NO: 163319 - DNA, 25 bp, probe
cacttggtttggaaaatcacacagt

SEQ ID NO: 163320 - DNA, 25 bp, probe
cactcagtgtatgcgaaaacagcca

SEQ ID NO: 163321 - DNA, 25 bp, probe
cactcgagttggcaccaaacgctat

SEQ ID NO: 163322 - DNA, 25 bp, probe
catccttgttggagtaagacagtaa

SEQ ID NO: 163323 - DNA, 25 bp, probe
cacctttttccgacagatgtcgtcg

SEQ ID NO: 163324 - DNA, 25 bp, probe
cacttaattttcccaatgatcttgc

SEQ ID NO: 163325 - DNA, 25 bp, probe
cactcttgtttttcacagtaatttt

SEQ ID NO: 163326 - DNA, 25 bp, probe
cacttcttttcaaggattaattctt

SEQ ID NO: 163327 - DNA, 25 bp, probe
cacttcttgggcatgtggttccctt

SEQ ID NO: 163328 - DNA, 25 bp, probe
cacttcatgaggagggacattccct

SEQ ID NO: 163329 - DNA, 25 bp, probe
cactatcatttgagagccctacctt

SEQ ID NO: 163330 - DNA, 25 bp, probe
cagctctactttatgtcctgaagct

SEQ ID NO: 163331 - DNA, 25 bp, probe
cactttctggctagtgggcagacgc

SEQ ID NO: 163332 - DNA, 25 bp, probe
cacttgccgcctctgagaagaagct

SEQ ID NO: 163333 - DNA, 25 bp, probe
cactctgcccgagggcaggagtagg

SEQ ID NO: 163334 - DNA, 25 bp, probe
cacatctggttagggggcagatttt

SEQ ID NO: 163335 - DNA, 25 bp, probe
cacttgtgctgtgcaccaggcagat

SEQ ID NO: 163336 - DNA, 25 bp, probe
cacatggtgtgtgcttagcgcaaat

SEQ ID NO: 163337 - DNA, 25 bp, probe
cacaggcagagtgccttggcaggtt

SEQ ID NO: 163338 - DNA, 25 bp, probe
cacaggctgattacctaggatttat

SEQ ID NO: 163339 - DNA, 25 bp, probe
cacgaggattattcaagaattctac

SEQ ID NO: 163340 - DNA, 25 bp, probe
cacctaaaaatgtctgaatgcttac

SEQ ID NO: 163341 - DNA, 25 bp, probe
cacttaaactcattccatatgcatc

SEQ ID NO: 163342 - DNA, 25 bp, probe
cacttaaacagcctccagtcataaa

SEQ ID NO: 163343 - DNA, 25 bp, probe
cacttaaacagcctccagtcataaa

SEQ ID NO: 163344 - DNA, 25 bp, probe
cacttaagcaagacccttctgaaat

SEQ ID NO: 163345 - DNA, 25 bp, probe
cactgtaacatagtccgattgcgtt

SEQ ID NO: 163346 - DNA, 25 bp, probe
cactatgacccagccgagctgttta

SEQ ID NO: 163347 - DNA, 25 bp, probe
cactgatgctgagcagccctacgtt

SEQ ID NO: 163348 - DNA, 25 bp, probe
cactatgtgaccacccggaaagggg

SEQ ID NO: 163349 - DNA, 25 bp, probe
cactcattaccaccaatctgtgaaa

SEQ ID NO: 163350 - DNA, 25 bp, probe
cactcattaccaccaatctgtgaaa

SEQ ID NO: 163351 - DNA, 25 bp, probe
cagctattaccacacttggggttta

SEQ ID NO: 163352 - DNA, 25 bp, probe
cactttagcttccacttggtgggta

SEQ ID NO: 163353 - DNA, 25 bp, probe
cacttttgttgaagtttatcgcgtc

SEQ ID NO: 163354 - DNA, 25 bp, probe
cacttttgttgaagtttatcgcgtc

SEQ ID NO: 163355 - DNA, 25 bp, probe
cacttatttgcttagtttccgtttg

SEQ ID NO: 163356 - DNA, 25 bp, probe
cactccacttcaaaatttacaggtt

SEQ ID NO: 163357 - DNA, 25 bp, probe
cactccacttcaaaatttacaggtt

SEQ ID NO: 163358 - DNA, 25 bp, probe
gacttggttcctcttgtcaaggttt

SEQ ID NO: 163359 - DNA, 25 bp, probe
cactgggcaacctggttgaagggat

SEQ ID NO: 163360 - DNA, 25 bp, probe
cacatggaaatccaaatgtctgggg

SEQ ID NO: 163361 - DNA, 25 bp, probe
cacatagaatacggcacagtctggt

SEQ ID NO: 163362 - DNA, 25 bp, probe
cactcacaatgatggtgcagtctgc

SEQ ID NO: 163363 - DNA, 25 bp, probe
cacatcacagcatcagggggctcag

SEQ ID NO: 163364 - DNA, 25 bp, probe
cacatcacagcatcagggggctcag

SEQ ID NO: 163365 - DNA, 25 bp, probe
cacatcatcagcgcgcaagagggca

SEQ ID NO: 163366 - DNA, 25 bp, probe
cacatcgcatgcactcagagcacag

SEQ ID NO: 163367 - DNA, 25 bp, probe
cacatctgcgcttcgagatcagcag

SEQ ID NO: 163368 - DNA, 25 bp, probe
cacattgccgactgatgaagacagc

SEQ ID NO: 163369 - DNA, 25 bp, probe
cacatcgcctgagattgacaacgcc

SEQ ID NO: 163370 - DNA, 25 bp, probe
cacatcgtatggggtgacaccgcct

SEQ ID NO: 163371 - DNA, 25 bp, probe
cacaggctgtggggtgagaggcccc

SEQ ID NO: 163372 - DNA, 25 bp, probe
cacaggctgtgagctctgtgggccc

SEQ ID NO: 163373 - DNA, 25 bp, probe
cacaggcttcatgggctgtggcctc

SEQ ID NO: 163374 - DNA, 25 bp, probe
cacatggtgtctgggcttgctacag

SEQ ID NO: 163375 - DNA, 25 bp, probe
cacatggtgtctgggcttgctacag

SEQ ID NO: 163376 - DNA, 25 bp, probe
cactgagtgtctggccagactccat

SEQ ID NO: 163377 - DNA, 25 bp, probe
cactgagtgtctggccagactccat

SEQ ID NO: 163378 - DNA, 25 bp, probe
cactttgttgtggcgagcctcatgt

SEQ ID NO: 163379 - DNA, 25 bp, probe
cacatttaactctggcgctgatggg

SEQ ID NO: 163380 - DNA, 25 bp, probe
cactatctaacatctggctgttgag

SEQ ID NO: 163381 - DNA, 25 bp, probe
cactgttaagacctcctattgagtt

SEQ ID NO: 163382 - DNA, 25 bp, probe
cactttcaagggagatgtgtggctt

SEQ ID NO: 163383 - DNA, 25 bp, probe
cactttcaagtggaacagccatcac

SEQ ID NO: 163384 - DNA, 25 bp, probe
cacatgttgccccaaatacaagcac

SEQ ID NO: 163385 - DNA, 25 bp, probe
cacatgaagttacaaacatacagcc

SEQ ID NO: 163386 - DNA, 25 bp, probe
cacgcactttaagaacatccccatc

SEQ ID NO: 163387 - DNA, 25 bp, probe
cacgcactttaagaacatccccatc

SEQ ID NO: 163388 - DNA, 25 bp, probe
catcagccttagaacaagaacctta

SEQ ID NO: 163389 - DNA, 25 bp, probe
catagccctgcttactaaaagtatt

SEQ ID NO: 163390 - DNA, 25 bp, probe
cacgctcaatgcccagtaaaatttc

SEQ ID NO: 163391 - DNA, 25 bp, probe
cacgtcactcacaagtttctgttta

SEQ ID NO: 163392 - DNA, 25 bp, probe
cacatgtattaaattcttctgtcta

SEQ ID NO: 163393 - DNA, 25 bp, probe
cacttattgataccttaccatctaa

SEQ ID NO: 163394 - DNA, 25 bp, probe
cactttttctactatccttgctaag

SEQ ID NO: 163395 - DNA, 25 bp, probe
cactattattctaaaccctcatgta

SEQ ID NO: 163396 - DNA, 25 bp, probe
cactataattttaaccctgtgattg

SEQ ID NO: 163397 - DNA, 25 bp, probe
cactcccatattttgacccggaagt

SEQ ID NO: 163398 - DNA, 25 bp, probe
cactttcagcttttgacaccaacaa

SEQ ID NO: 163399 - DNA, 25 bp, probe
cactttcactggtgcacactgaaat

SEQ ID NO: 163400 - DNA, 25 bp, probe
cactttgcctccagacagctaatac

SEQ ID NO: 163401 - DNA, 25 bp, probe
cactttgcactctgatgacctcaaa

SEQ ID NO: 163402 - DNA, 25 bp, probe
cactttgtgtgctgaatccttgaat

SEQ ID NO: 163403 - DNA, 25 bp, probe
cactttgtggcaagattttcatgac

SEQ ID NO: 163404 - DNA, 25 bp, probe
cacttattacaattttctctgcccc

SEQ ID NO: 163405 - DNA, 25 bp, probe
cactgctttacaatattgtcatgtc

SEQ ID NO: 163406 - DNA, 25 bp, probe
cacgtttgagacgactgttgtaact

SEQ ID NO: 163407 - DNA, 25 bp, probe
cactttctggtcactttgtacaatg

SEQ ID NO: 163408 - DNA, 25 bp, probe
cacttttcagccatttattaatatg

SEQ ID NO: 163409 - DNA, 25 bp, probe
cactttgatcaggcaccatgttctg

SEQ ID NO: 163410 - DNA, 25 bp, probe
cactcattatcaccccagtttgtgt

SEQ ID NO: 163411 - DNA, 25 bp, probe
cactcattatcaccccagtttgtgt

SEQ ID NO: 163412 - DNA, 25 bp, probe
cacttctacagctgcctttttatga

SEQ ID NO: 163413 - DNA, 25 bp, probe
cacattggaagctgcgctcgattct

SEQ ID NO: 163414 - DNA, 25 bp, probe
cacctggaagcagggcaccagctgc

SEQ ID NO: 163415 - DNA, 25 bp, probe
cactcggtacaccatcaaagcagat

SEQ ID NO: 163416 - DNA, 25 bp, probe
cactccctaaccaaaggaataggag

SEQ ID NO: 163417 - DNA, 25 bp, probe
cactcatccttatgtgctagggata

SEQ ID NO: 163418 - DNA, 25 bp, probe
cactcatccttatgtgctagggata

SEQ ID NO: 163419 - DNA, 25 bp, probe
cactaggctaaactcaagatttgac

SEQ ID NO: 163420 - DNA, 25 bp, probe
cacatcgccgataaccaggatttac

SEQ ID NO: 163421 - DNA, 25 bp, probe
cacatcccagacattaggagttcat

SEQ ID NO: 163422 - DNA, 25 bp, probe
cacatcccagacatcatcaaggtgg

SEQ ID NO: 163423 - DNA, 25 bp, probe
cactcgcaaagcattgtgcacttgg

SEQ ID NO: 163424 - DNA, 25 bp, probe
ctgcccaaactaaagctttcgggag

SEQ ID NO: 163425 - DNA, 25 bp, probe
cactggcagaagtaaactttcggaa

SEQ ID NO: 163426 - DNA, 25 bp, probe
cactggcagaagtaaactttcggaa

SEQ ID NO: 163427 - DNA, 25 bp, probe
cactcagagaccctaaattttgcag

SEQ ID NO: 163428 - DNA, 25 bp, probe
cagctgatcagacctcaataatttt

SEQ ID NO: 163429 - DNA, 25 bp, probe
cagctgatcagacctcaataatttt

SEQ ID NO: 163430 - DNA, 25 bp, probe
cactgataatgcttattaccttctg

SEQ ID NO: 163431 - DNA, 25 bp, probe
cacatgaattgggacgaccttctgg

SEQ ID NO: 163432 - DNA, 25 bp, probe
cactgtttgagatctacgccatcgt

SEQ ID NO: 163433 - DNA, 25 bp, probe
cacggttcagagcgacgtctggtcc

SEQ ID NO: 163434 - DNA, 25 bp, probe
cacgggaagggccactgcttgatgg

SEQ ID NO: 163435 - DNA, 25 bp, probe
cacggggaggaggcggtggtgtcag

SEQ ID NO: 163436 - DNA, 25 bp, probe
cacggggaggaggcggtggtgtcag

SEQ ID NO: 163437 - DNA, 25 bp, probe
caccgacgagtacctggacctgtcg

SEQ ID NO: 163438 - DNA, 25 bp, probe
cacccagggatgccctggacctaag

SEQ ID NO: 163439 - DNA, 25 bp, probe
cactctatgggaagcgcttcaccac

SEQ ID NO: 163440 - DNA, 25 bp, probe
cactgctggggagtccctgccacac

SEQ ID NO: 163441 - DNA, 25 bp, probe
cactggaagcgagccttcaatgcca

SEQ ID NO: 163442 - DNA, 25 bp, probe
cactcttcacaatcactgtttccaa

SEQ ID NO: 163443 - DNA, 25 bp, probe
cactgctacaaaacctgttacctca

SEQ ID NO: 163444 - DNA, 25 bp, probe
cactttcaaaattcttctgagcaat

SEQ ID NO: 163445 - DNA, 25 bp, probe
cactatgatcaacatcggctctggc

SEQ ID NO: 163446 - DNA, 25 bp, probe
cactatgatcaacatcggctctggc

SEQ ID NO: 163447 - DNA, 25 bp, probe
cactcaacaaccaagcgcctggagg

SEQ ID NO: 163448 - DNA, 25 bp, probe
cactcccaaatggaccctgtggggt

SEQ ID NO: 163449 - DNA, 25 bp, probe
cactctctaaatcttccttgtgagg

SEQ ID NO: 163450 - DNA, 25 bp, probe
cactgatcccagtttatcctttgag

SEQ ID NO: 163451 - DNA, 25 bp, probe
cacattctgttgttcagttcctctg

SEQ ID NO: 163452 - DNA, 25 bp, probe
cacattctgttgttcagttcctctg

SEQ ID NO: 163453 - DNA, 25 bp, probe
cacttctggatgttggttctctttg

SEQ ID NO: 163454 - DNA, 25 bp, probe
cacggctgggttggatatgcctttg

SEQ ID NO: 163455 - DNA, 25 bp, probe
cacgagctggggcgaaggctgtgct

SEQ ID NO: 163456 - DNA, 25 bp, probe
cacgagctggggcgaaggctgtgct

SEQ ID NO: 163457 - DNA, 25 bp, probe
cacgatctgggggggggatcctgtc

SEQ ID NO: 163458 - DNA, 25 bp, probe
cacgggggtgtgggagcagaccgtc

SEQ ID NO: 163459 - DNA, 25 bp, probe
cacggggaccctgaggaccgtgcag

SEQ ID NO: 163460 - DNA, 25 bp, probe
cacggaggggcagagaccccggagc

SEQ ID NO: 163461 - DNA, 25 bp, probe
cacgggagtaccagaacacccagct

SEQ ID NO: 163462 - DNA, 25 bp, probe
cacgttcaattcctggtttaccagc

SEQ ID NO: 163463 - DNA, 25 bp, probe
catgctttaaatgtggttcccggac

SEQ ID NO: 163464 - DNA, 25 bp, probe
cactttcattctggggttcctggta

SEQ ID NO: 163465 - DNA, 25 bp, probe
cagcatattaccaggggtttggcca

SEQ ID NO: 163466 - DNA, 25 bp, probe
cagtaaactcttttggatttgccaa

SEQ ID NO: 163467 - DNA, 25 bp, probe
cacttaggactttctggatccggac

SEQ ID NO: 163468 - DNA, 25 bp, probe
cactgagcaggctttatctggaacg

SEQ ID NO: 163469 - DNA, 25 bp, probe
cactcagagcagcgtatcggtagct

SEQ ID NO: 163470 - DNA, 25 bp, probe
cacattggctccatcactggtgact

SEQ ID NO: 163471 - DNA, 25 bp, probe
cactggtgctagctgcaccgtgacc

SEQ ID NO: 163472 - DNA, 25 bp, probe
cactggtgctagctgcaccgtgacc

SEQ ID NO: 163473 - DNA, 25 bp, probe
cacttctgctagtgatgtctggagc

SEQ ID NO: 163474 - DNA, 25 bp, probe
cacttccatatgtgaatgtaagctc

SEQ ID NO: 163475 - DNA, 25 bp, probe
cacttgccagtttaattccagcctt

SEQ ID NO: 163476 - DNA, 25 bp, probe
cactgttcagtttagcattaaaata

SEQ ID NO: 163477 - DNA, 25 bp, probe
cactgcctcttagcagcctaaagca

SEQ ID NO: 163478 - DNA, 25 bp, probe
cactgccatcatctaaccattacag

SEQ ID NO: 163479 - DNA, 25 bp, probe
cactgtctacaacaccaacatcgac

SEQ ID NO: 163480 - DNA, 25 bp, probe
cactgtgaagggcgtcaatctggac

SEQ ID NO: 163481 - DNA, 25 bp, probe
cacttcaatgagacggtgctcactg

SEQ ID NO: 163482 - DNA, 25 bp, probe
cacttgggaggggctgcatgcacag

SEQ ID NO: 163483 - DNA, 25 bp, probe
cacttggcacagttggctgtgtaga

SEQ ID NO: 163484 - DNA, 25 bp, probe
cacgttcacagcagctctttcaagc

SEQ ID NO: 163485 - DNA, 25 bp, probe
cacgttcacagcagctctttcaagc

SEQ ID NO: 163486 - DNA, 25 bp, probe
cacgtgtatcagagcctgtacatga

SEQ ID NO: 163487 - DNA, 25 bp, probe
cactgtaatgaaccgctgaatatga

SEQ ID NO: 163488 - DNA, 25 bp, probe
cactgtaatgaaccgctgaatatga

SEQ ID NO: 163489 - DNA, 25 bp, probe
cacttcaagatcccacagaccaatg

SEQ ID NO: 163490 - DNA, 25 bp, probe
cactgctacagagccacagtaccag

SEQ ID NO: 163491 - DNA, 25 bp, probe
cactgctacagagccacagtaccag

SEQ ID NO: 163492 - DNA, 25 bp, probe
cactgctgatcacaccaacgacagg

SEQ ID NO: 163493 - DNA, 25 bp, probe
cagctgtgtcgcacttaaactggag

SEQ ID NO: 163494 - DNA, 25 bp, probe
cactggtcacatgttccacattgat

SEQ ID NO: 163495 - DNA, 25 bp, probe
cactctgtcatcttttaccattgac

SEQ ID NO: 163496 - DNA, 25 bp, probe
cactctgtcatcttttaccattgac

SEQ ID NO: 163497 - DNA, 25 bp, probe
cacttgctatccattaagaagacat

SEQ ID NO: 163498 - DNA, 25 bp, probe
cacttggtgggtaaggcctgatcat

SEQ ID NO: 163499 - DNA, 25 bp, probe
cagaaggggtgaaagggttgcaggt

SEQ ID NO: 163500 - DNA, 25 bp, probe
cactaggagggaaagctgtgcttgg

SEQ ID NO: 163501 - DNA, 25 bp, probe
cactaattgcattggaacttcttga

SEQ ID NO: 163502 - DNA, 25 bp, probe
cactaattgcattggaacttcttga

SEQ ID NO: 163503 - DNA, 25 bp, probe
cactaactgggaggacattctgcta

SEQ ID NO: 163504 - DNA, 25 bp, probe
cactatgcactgggaaagtatctga

SEQ ID NO: 163505 - DNA, 25 bp, probe
cactgcatatgcgaagaacaaactg

SEQ ID NO: 163506 - DNA, 25 bp, probe
cactaatggaactccagagctccag

SEQ ID NO: 163507 - DNA, 25 bp, probe
cactaatgggtgtcatcttggccca

SEQ ID NO: 163508 - DNA, 25 bp, probe
cactcacatgtgcgcacacgtgtgc

SEQ ID NO: 163509 - DNA, 25 bp, probe
cactaagtcgcatcacagagatgca

SEQ ID NO: 163510 - DNA, 25 bp, probe
cacatatagtgtacagccagaccag

SEQ ID NO: 163511 - DNA, 25 bp, probe
cacatactgtgatgaccgactcagc

SEQ ID NO: 163512 - DNA, 25 bp, probe
cacatatcctgtgaactcctagctg

SEQ ID NO: 163513 - DNA, 25 bp, probe
cacattccagttgatgccttgcagg

SEQ ID NO: 163514 - DNA, 25 bp, probe
cacttccagtcttacatcatggctg

SEQ ID NO: 163515 - DNA, 25 bp, probe
cacttctcagaaaatgcagcagact

SEQ ID NO: 163516 - DNA, 25 bp, probe
cactttccagcaagcacagatgtac

SEQ ID NO: 163517 - DNA, 25 bp, probe
cactttccagcaagatgggtcctga

SEQ ID NO: 163518 - DNA, 25 bp, probe
cactttccagcaagatgggtcctga

SEQ ID NO: 163519 - DNA, 25 bp, probe
cactatgtcacatgcacatgggtcc

SEQ ID NO: 163520 - DNA, 25 bp, probe
cactcagctcaaagcaaccagctcc

SEQ ID NO: 163521 - DNA, 25 bp, probe
cactcagccacatcatggcacagcc

SEQ ID NO: 163522 - DNA, 25 bp, probe
cactcagccacatcatggcacagcc

SEQ ID NO: 163523 - DNA, 25 bp, probe
cacttggcacagcatgacgcagccc

SEQ ID NO: 163524 - DNA, 25 bp, probe
cactgggctgatcctgaatggcaca

SEQ ID NO: 163525 - DNA, 25 bp, probe
cactagcatctacctggaggccaag

SEQ ID NO: 163526 - DNA, 25 bp, probe
cactgggtgccttggaacgcaagtt

SEQ ID NO: 163527 - DNA, 25 bp, probe
caccgagaccttaaacctcagaatc

SEQ ID NO: 163528 - DNA, 25 bp, probe
cacccagaccctggaaggggactca

SEQ ID NO: 163529 - DNA, 25 bp, probe
cacctgaactccacggaaaaatcag

SEQ ID NO: 163530 - DNA, 25 bp, probe
catgcccaacgatccggagaaaaac

SEQ ID NO: 163531 - DNA, 25 bp, probe
ccgcgcactgcgtggcgaatgtaaa

SEQ ID NO: 163532 - DNA, 25 bp, probe
ccgcgcactgcgtggcgaatgtaaa

SEQ ID NO: 163533 - DNA, 25 bp, probe
cactcctgtggatggtattgtagca

SEQ ID NO: 163534 - DNA, 25 bp, probe
cactgcggggaactttgtgtaccaa

SEQ ID NO: 163535 - DNA, 25 bp, probe
cactgcacacggtgtctgtttatcc

SEQ ID NO: 163536 - DNA, 25 bp, probe
cactcaccagagtgacgtctggtcc

SEQ ID NO: 163537 - DNA, 25 bp, probe
cactcaggcatgctggtattctggg

SEQ ID NO: 163538 - DNA, 25 bp, probe
caccaagagggtttttagtggcttg

SEQ ID NO: 163539 - DNA, 25 bp, probe
cacctgggggttccccagagactag

SEQ ID NO: 163540 - DNA, 25 bp, probe
caccgggaggagagccgggactgga

SEQ ID NO: 163541 - DNA, 25 bp, probe
cctcggagattgtggggggccggcg

SEQ ID NO: 163542 - DNA, 25 bp, probe
caccatggtactgtggggggccagg

SEQ ID NO: 163543 - DNA, 25 bp, probe
cactggccaacgatgggggcagccg

SEQ ID NO: 163544 - DNA, 25 bp, probe
cacgggacaatgagggggccacggc

SEQ ID NO: 163545 - DNA, 25 bp, probe
cacgggacaatgagggggccacggc

SEQ ID NO: 163546 - DNA, 25 bp, probe
cacggccacattctgtggcacgcca

SEQ ID NO: 163547 - DNA, 25 bp, probe
cactgtggacacccagttcatcgac

SEQ ID NO: 163548 - DNA, 25 bp, probe
cactggagatatcccgtttcaaggc

SEQ ID NO: 163549 - DNA, 25 bp, probe
cactgtagtggtcctgttctatggg

SEQ ID NO: 163550 - DNA, 25 bp, probe
cactgattggggcctggggcagggg

SEQ ID NO: 163551 - DNA, 25 bp, probe
cactgattggggcctggggcagggg

SEQ ID NO: 163552 - DNA, 25 bp, probe
cactcactgggcggcttggagtggc

SEQ ID NO: 163553 - DNA, 25 bp, probe
cactcagcgatgacctgtggggtgg

SEQ ID NO: 163554 - DNA, 25 bp, probe
cactatgagatactcgaggtggatg

SEQ ID NO: 163555 - DNA, 25 bp, probe
cacttgggatcccggatgtcatcat

SEQ ID NO: 163556 - DNA, 25 bp, probe
cacttgctggacagtgccagttcca

SEQ ID NO: 163557 - DNA, 25 bp, probe
cactggaggagccagtgccctctca

SEQ ID NO: 163558 - DNA, 25 bp, probe
cactggaggagccagtgccctctca

SEQ ID NO: 163559 - DNA, 25 bp, probe
cactggaggagccagtgccctctca

SEQ ID NO: 163560 - DNA, 25 bp, probe
cactctgagtgagcgggcctcacgg

SEQ ID NO: 163561 - DNA, 25 bp, probe
cacttgatgtaacctggaaactatg

SEQ ID NO: 163562 - DNA, 25 bp, probe
cactctagtccaggtgccaagaatt

SEQ ID NO: 163563 - DNA, 25 bp, probe
cactcttgtgaccgtgccaagaaaa

SEQ ID NO: 163564 - DNA, 25 bp, probe
cactcttgctgcagaggaagcagga

SEQ ID NO: 163565 - DNA, 25 bp, probe
cactctatctgtaatccaagatggt

SEQ ID NO: 163566 - DNA, 25 bp, probe
cactttctgtgcacgcatttgctgt

SEQ ID NO: 163567 - DNA, 25 bp, probe
cactttctgtgcacgcatttgctgt

SEQ ID NO: 163568 - DNA, 25 bp, probe
cacttacctgcttgagctttctgtg

SEQ ID NO: 163569 - DNA, 25 bp, probe
cacttcagccagcgacgtttggagc

SEQ ID NO: 163570 - DNA, 25 bp, probe
cacttcaggccgctggtttgtcagc

SEQ ID NO: 163571 - DNA, 25 bp, probe
cacttcatccacagggatattgccg

SEQ ID NO: 163572 - DNA, 25 bp, probe
cacttctctctaaggagaatggccc

SEQ ID NO: 163573 - DNA, 25 bp, probe
cacttgccaaaatgtcagagtccca

SEQ ID NO: 163574 - DNA, 25 bp, probe
cacggtcaaaagggcaagtgcctct

SEQ ID NO: 163575 - DNA, 25 bp, probe
cactggaaagaagggacacccacgg

SEQ ID NO: 163576 - DNA, 25 bp, probe
cactggaaagaagggacacccacgg

SEQ ID NO: 163577 - DNA, 25 bp, probe
cactgctaccagtagtgggcactca

SEQ ID NO: 163578 - DNA, 25 bp, probe
cactgctaccagtagtgggcactca

SEQ ID NO: 163579 - DNA, 25 bp, probe
cactctatccgggagatggcctgca

SEQ ID NO: 163580 - DNA, 25 bp, probe
cactctatccgggagatggcctgca

SEQ ID NO: 163581 - DNA, 25 bp, probe
cacttgacctgacagtgctcgctga

SEQ ID NO: 163582 - DNA, 25 bp, probe
cacgggcccaggatgtggctgattt

SEQ ID NO: 163583 - DNA, 25 bp, probe
cacggccttcatggatggtgccttg

SEQ ID NO: 163584 - DNA, 25 bp, probe
cactgtctctgttggtggtacatct

SEQ ID NO: 163585 - DNA, 25 bp, probe
cactgtgtattctcttggagccttg

SEQ ID NO: 163586 - DNA, 25 bp, probe
cacttcttatcatctggaggaaatg

SEQ ID NO: 163587 - DNA, 25 bp, probe
cacttcttctcaggaggggagctat

SEQ ID NO: 163588 - DNA, 25 bp, probe
cacttgctaccagagaggacagctc

SEQ ID NO: 163589 - DNA, 25 bp, probe
cacttctatgccatggatgagaccc

SEQ ID NO: 163590 - DNA, 25 bp, probe
cagctgttaaagtgatgaacgctcg

SEQ ID NO: 163591 - DNA, 25 bp, probe
cagctgttaaagtgatgaacgctcg

SEQ ID NO: 163592 - DNA, 25 bp, probe
cactgtccaaaatgtagtcccgggg

SEQ ID NO: 163593 - DNA, 25 bp, probe
cactgtccaaaatgtagtcccgggg

SEQ ID NO: 163594 - DNA, 25 bp, probe
cacttcacaaatttgaattcctgct

SEQ ID NO: 163595 - DNA, 25 bp, probe
cacgtccattgctggcaactgactt

SEQ ID NO: 163596 - DNA, 25 bp, probe
cactgaccaggctgtacctgaccat

SEQ ID NO: 163597 - DNA, 25 bp, probe
cactaccaagccggagcacgaggat

SEQ ID NO: 163598 - DNA, 25 bp, probe
cactcccgcacaaggtacgagcgaa

SEQ ID NO: 163599 - DNA, 25 bp, probe
cactgtcctccaaggctacaggacc

SEQ ID NO: 163600 - DNA, 25 bp, probe
cactgatcgctgccaatgcactcga

SEQ ID NO: 163601 - DNA, 25 bp, probe
cactgatggcagccgtgacctacat

SEQ ID NO: 163602 - DNA, 25 bp, probe
cactatctggcacatatgcgctcaa

SEQ ID NO: 163603 - DNA, 25 bp, probe
cacttctggggatggtacagggtgt

SEQ ID NO: 163604 - DNA, 25 bp, probe
cagccacttgggttggttaaggtgg

SEQ ID NO: 163605 - DNA, 25 bp, probe
cagccagttccttttgttctttaag

SEQ ID NO: 163606 - DNA, 25 bp, probe
catccagctttttttgttagcaaaa

SEQ ID NO: 163607 - DNA, 25 bp, probe
catccagctttttttgttagcaaaa

SEQ ID NO: 163608 - DNA, 25 bp, probe
cactcagctccttgatattttagaa

SEQ ID NO: 163609 - DNA, 25 bp, probe
cactactccgagaagaagcttgaag

SEQ ID NO: 163610 - DNA, 25 bp, probe
cactggtccgagaagggacatgtgg

SEQ ID NO: 163611 - DNA, 25 bp, probe
cactcggcccagaaggacacagttg

SEQ ID NO: 163612 - DNA, 25 bp, probe
cactcagaccgtaaagccaagtatc

SEQ ID NO: 163613 - DNA, 25 bp, probe
cactcagaccgtaaagccaagtatc

SEQ ID NO: 163614 - DNA, 25 bp, probe
cagcattgacaggtaagggccggac

SEQ ID NO: 163615 - DNA, 25 bp, probe
cagcattgacaggtaagggccggac

SEQ ID NO: 163616 - DNA, 25 bp, probe
cactggacagtagatgggccgacac

SEQ ID NO: 163617 - DNA, 25 bp, probe
cactggacagtagatgggccgacac

SEQ ID NO: 163618 - DNA, 25 bp, probe
cactgtgagcatgcagtacggcctg

SEQ ID NO: 163619 - DNA, 25 bp, probe
cactctagctattcttcgtcgtgag

SEQ ID NO: 163620 - DNA, 25 bp, probe
cactgtacacatttttatgcgagag

SEQ ID NO: 163621 - DNA, 25 bp, probe
cactatgcacacagactccaagagg

SEQ ID NO: 163622 - DNA, 25 bp, probe
cactcatgatccaggacgccagaac

SEQ ID NO: 163623 - DNA, 25 bp, probe
cactcatgatccaggacgccagaac

SEQ ID NO: 163624 - DNA, 25 bp, probe
cactaagccaagtgtgtcagagaca

SEQ ID NO: 163625 - DNA, 25 bp, probe
cactcacccaggtgtgtcgacatca

SEQ ID NO: 163626 - DNA, 25 bp, probe
cactcaacacggtgtgaatcacaca

SEQ ID NO: 163627 - DNA, 25 bp, probe
cactaacctgcttgggtatgcagca

SEQ ID NO: 163628 - DNA, 25 bp, probe
cactaacctgcttgggtatgcagca

SEQ ID NO: 163629 - DNA, 25 bp, probe
cactccctgccattgatggtctgga

SEQ ID NO: 163630 - DNA, 25 bp, probe
cactggcctcctagaggcttagaaa

SEQ ID NO: 163631 - DNA, 25 bp, probe
cactggtcacgtttggaaagaatat

SEQ ID NO: 163632 - DNA, 25 bp, probe
cactcgtacctgtccggatatattt

SEQ ID NO: 163633 - DNA, 25 bp, probe
cactcgtacctgtccggatatattt

SEQ ID NO: 163634 - DNA, 25 bp, probe
caccttcaggtagcggttgagtgcg

SEQ ID NO: 163635 - DNA, 25 bp, probe
cacctatccctaacaggctgtagat

SEQ ID NO: 163636 - DNA, 25 bp, probe
cactttcctcctggcagaatgctag

SEQ ID NO: 163637 - DNA, 25 bp, probe
cactttcctcctggcagaatgctag

SEQ ID NO: 163638 - DNA, 25 bp, probe
cactttcctcctggcagaatgctag

SEQ ID NO: 163639 - DNA, 25 bp, probe
cacttatctcccatatgagagtgtg

SEQ ID NO: 163640 - DNA, 25 bp, probe
cacttaacttgcatgtgcacagctt

SEQ ID NO: 163641 - DNA, 25 bp, probe
cactagaggcctgtgcgcacagctt

SEQ ID NO: 163642 - DNA, 25 bp, probe
cactgagctgagatcgtgccactgc

SEQ ID NO: 163643 - DNA, 25 bp, probe
cactacgagaactatggaagcagaa

SEQ ID NO: 163644 - DNA, 25 bp, probe
cagctcctggttcatggaagccata

SEQ ID NO: 163645 - DNA, 25 bp, probe
cagctcctggttcatggaagccata

SEQ ID NO: 163646 - DNA, 25 bp, probe
cagctttcgaatcagacctgccaag

SEQ ID NO: 163647 - DNA, 25 bp, probe
cagctttcgaatcagacctgccaag

SEQ ID NO: 163648 - DNA, 25 bp, probe
caccctggaatcagaactgcacaat

SEQ ID NO: 163649 - DNA, 25 bp, probe
cactcgggaccagaaccagcagtgc

SEQ ID NO: 163650 - DNA, 25 bp, probe
ctccggaatccggattgcccagggt

SEQ ID NO: 163651 - DNA, 25 bp, probe
ctccggaatccggattgcccagggt

SEQ ID NO: 163652 - DNA, 25 bp, probe
ctccggaatccggattgcccagggt

SEQ ID NO: 163653 - DNA, 25 bp, probe
catccaggaaccgtgacgtccaagg

SEQ ID NO: 163654 - DNA, 25 bp, probe
caccaggacccctaagaccaagtga

SEQ ID NO: 163655 - DNA, 25 bp, probe
caccggaacccagaaaactgcaagt

SEQ ID NO: 163656 - DNA, 25 bp, probe
caccggaacccagaaaactgcaagt

SEQ ID NO: 163657 - DNA, 25 bp, probe
cagccggggcttgtacaaccgaaat

SEQ ID NO: 163658 - DNA, 25 bp, probe
cagccggggcttgtacaaccgaaat

SEQ ID NO: 163659 - DNA, 25 bp, probe
cacctggagggtgtcgtgaccaaga

SEQ ID NO: 163660 - DNA, 25 bp, probe
caccgagaggttttctggccgagtg

SEQ ID NO: 163661 - DNA, 25 bp, probe
taccgggccagttattaccgcaggg

SEQ ID NO: 163662 - DNA, 25 bp, probe
caccaaggtggtgcattaccggaag

SEQ ID NO: 163663 - DNA, 25 bp, probe
cactctgggtggttctaagccagga

SEQ ID NO: 163664 - DNA, 25 bp, probe
cactgtccctggtctcttaaaagaa

SEQ ID NO: 163665 - DNA, 25 bp, probe
cactgtccctggtctcttaaaagaa

SEQ ID NO: 163666 - DNA, 25 bp, probe
cactgacacttacctttattaatta

SEQ ID NO: 163667 - DNA, 25 bp, probe
cactgcaagctgtaaatttttgcca

SEQ ID NO: 163668 - DNA, 25 bp, probe
cactgttgctggatcttgagtccca

SEQ ID NO: 163669 - DNA, 25 bp, probe
cacggcagtgtttttggtctgccac

SEQ ID NO: 163670 - DNA, 25 bp, probe
cactgggtgtagtgtgaagcaggca

SEQ ID NO: 163671 - DNA, 25 bp, probe
cactgcgggggatgtgatgctcggc

SEQ ID NO: 163672 - DNA, 25 bp, probe
cacgctggggaaacggataggcttc

SEQ ID NO: 163673 - DNA, 25 bp, probe
cacgcagcgggagaagcttaccttt

SEQ ID NO: 163674 - DNA, 25 bp, probe
cactgcaggaggagaaccgcgacct

SEQ ID NO: 163675 - DNA, 25 bp, probe
cactcaggagggttccttggtcctc

SEQ ID NO: 163676 - DNA, 25 bp, probe
catccggaggtgcatttgtggtatc

SEQ ID NO: 163677 - DNA, 25 bp, probe
cactgtggtggtgcttacggtcatc

SEQ ID NO: 163678 - DNA, 25 bp, probe
cactgtggtggtgcttacggtcatc

SEQ ID NO: 163679 - DNA, 25 bp, probe
cagcttggggccaactgacgagttc

SEQ ID NO: 163680 - DNA, 25 bp, probe
cactagggagccaatctgagcccgc

SEQ ID NO: 163681 - DNA, 25 bp, probe
cactaggcttgcaagtctaccggca

SEQ ID NO: 163682 - DNA, 25 bp, probe
cactaggcttgcaagtctaccggca

SEQ ID NO: 163683 - DNA, 25 bp, probe
cactaggcactgagattaccatgaa

SEQ ID NO: 163684 - DNA, 25 bp, probe
cactaatcacctgatcataggaaag

SEQ ID NO: 163685 - DNA, 25 bp, probe
cactcaaccagtgatgattagaaca

SEQ ID NO: 163686 - DNA, 25 bp, probe
cactcaccactgaggttagagccat

SEQ ID NO: 163687 - DNA, 25 bp, probe
cactttcactatacggtgtggccag

SEQ ID NO: 163688 - DNA, 25 bp, probe
cactttcattatactacctggccag

SEQ ID NO: 163689 - DNA, 25 bp, probe
cacttttattcttaagcatttcagg

SEQ ID NO: 163690 - DNA, 25 bp, probe
cactttatatgtgatttgtttcagt

SEQ ID NO: 163691 - DNA, 25 bp, probe
cactttcaatcaacactttttcaga

SEQ ID NO: 163692 - DNA, 25 bp, probe
cagcttctagaagacccattacaga

SEQ ID NO: 163693 - DNA, 25 bp, probe
cacgcctaacaggacgtattatctg

SEQ ID NO: 163694 - DNA, 25 bp, probe
cactgcttcccggagcggaaccggg

SEQ ID NO: 163695 - DNA, 25 bp, probe
cacggcttcccaggggaacgaggag

SEQ ID NO: 163696 - DNA, 25 bp, probe
ccggtttccagaccaaacagaggct

SEQ ID NO: 163697 - DNA, 25 bp, probe
caccccttccaaccagaatgtatac

SEQ ID NO: 163698 - DNA, 25 bp, probe
cactccctatcatattaactttatt

SEQ ID NO: 163699 - DNA, 25 bp, probe
cactcgcacttatcaaacgtgttat

SEQ ID NO: 163700 - DNA, 25 bp, probe
cactcgcacttatcaaacgtgttat

SEQ ID NO: 163701 - DNA, 25 bp, probe
cacggcctttaccaccgtggatgac

SEQ ID NO: 163702 - DNA, 25 bp, probe
cactgaactttgctgagcctgtaaa

SEQ ID NO: 163703 - DNA, 25 bp, probe
cactgaactgcaactgtggcagatg

SEQ ID NO: 163704 - DNA, 25 bp, probe
cactgagcactggccgaggtgatgc

SEQ ID NO: 163705 - DNA, 25 bp, probe
cactgagcactggccgaggtgatgc

SEQ ID NO: 163706 - DNA, 25 bp, probe
cactggacgcagccctgggctgcag

SEQ ID NO: 163707 - DNA, 25 bp, probe
cactgagatagaagccctggtcagc

SEQ ID NO: 163708 - DNA, 25 bp, probe
cactcagctgagttaccagagccac

SEQ ID NO: 163709 - DNA, 25 bp, probe
cactctcgagttctgagaccaccaa

SEQ ID NO: 163710 - DNA, 25 bp, probe
cactgaaatttcctaactacatcta

SEQ ID NO: 163711 - DNA, 25 bp, probe
cctacaagttaaccagttgcactac

SEQ ID NO: 163712 - DNA, 25 bp, probe
cactccagggatcagtagttcctac

SEQ ID NO: 163713 - DNA, 25 bp, probe
cacctggggacatgggctatcttcc

SEQ ID NO: 163714 - DNA, 25 bp, probe
caccaggtggtctcctctgacttca

SEQ ID NO: 163715 - DNA, 25 bp, probe
cacgaggtggtagctctgagccctc

SEQ ID NO: 163716 - DNA, 25 bp, probe
cacggtgtggaagggtccacctcct

SEQ ID NO: 163717 - DNA, 25 bp, probe
cagaggcgttaatggccaactccgg

SEQ ID NO: 163718 - DNA, 25 bp, probe
cactgtggttttaggcgcacactct

SEQ ID NO: 163719 - DNA, 25 bp, probe
cactaggcatgtcttgggaattgct

SEQ ID NO: 163720 - DNA, 25 bp, probe
cactaccctgtgatcgtgaactctc

SEQ ID NO: 163721 - DNA, 25 bp, probe
cactgcccaaggaccagtatttgtc

SEQ ID NO: 163722 - DNA, 25 bp, probe
cactcccagatgaaggttttgttgc

SEQ ID NO: 163723 - DNA, 25 bp, probe
cactcccagatgaaggttttgttgc

SEQ ID NO: 163724 - DNA, 25 bp, probe
cactcctagtaaccttctgcttgtg

SEQ ID NO: 163725 - DNA, 25 bp, probe
cactcctttcttctgattctaggaa

SEQ ID NO: 163726 - DNA, 25 bp, probe
cactcctttcttctgattctaggaa

SEQ ID NO: 163727 - DNA, 25 bp, probe
cactactttagagccactcaaggaa

SEQ ID NO: 163728 - DNA, 25 bp, probe
cactgaggttagagccatctggaaa

SEQ ID NO: 163729 - DNA, 25 bp, probe
cactggagtatgcttcacctagaaa

SEQ ID NO: 163730 - DNA, 25 bp, probe
cactacactatgatcctgactagaa

SEQ ID NO: 163731 - DNA, 25 bp, probe
cactacactatgatcctgactagaa

SEQ ID NO: 163732 - DNA, 25 bp, probe
cactaccagatgatccagcgggagg

SEQ ID NO: 163733 - DNA, 25 bp, probe
cactgactcagctagacccgtaagc

SEQ ID NO: 163734 - DNA, 25 bp, probe
cactggctcagtggacccaaaccag

SEQ ID NO: 163735 - DNA, 25 bp, probe
cactggctcagtggacccaaaccag

SEQ ID NO: 163736 - DNA, 25 bp, probe
cactccgagctggacgtgcgaacgg

SEQ ID NO: 163737 - DNA, 25 bp, probe
cactcacacagttgactatctgaat

SEQ ID NO: 163738 - DNA, 25 bp, probe
cactgctaatgtggatgtatgttca

SEQ ID NO: 163739 - DNA, 25 bp, probe
cactgctaatgtggatgtatgttca

SEQ ID NO: 163740 - DNA, 25 bp, probe
cactgtaatgtgactatgtattgct

SEQ ID NO: 163741 - DNA, 25 bp, probe
cactaaatattcagctgattgtatt

SEQ ID NO: 163742 - DNA, 25 bp, probe
cactccaatcatcttgctttgatat

SEQ ID NO: 163743 - DNA, 25 bp, probe
cactcagaagcatgttcatttatgt

SEQ ID NO: 163744 - DNA, 25 bp, probe
cactcagaagcatgttcatttatgt

SEQ ID NO: 163745 - DNA, 25 bp, probe
cactctgacatgacagtattttttc

SEQ ID NO: 163746 - DNA, 25 bp, probe
cactggactacacattcttctgtgg

SEQ ID NO: 163747 - DNA, 25 bp, probe
cactggctatacagattttctcttt

SEQ ID NO: 163748 - DNA, 25 bp, probe
cactgggttgggattatgctgctgt

SEQ ID NO: 163749 - DNA, 25 bp, probe
cacgagggtttcgttttcatgcttt

SEQ ID NO: 163750 - DNA, 25 bp, probe
cactctaagtttggagctatttctt

SEQ ID NO: 163751 - DNA, 25 bp, probe
cactcgccttcttagagttttattc

SEQ ID NO: 163752 - DNA, 25 bp, probe
cactcttacttatttctctgttttc

SEQ ID NO: 163753 - DNA, 25 bp, probe
cagttttcttcatctgtccagttgg

SEQ ID NO: 163754 - DNA, 25 bp, probe
cactgtattctttactttaggtgtt

SEQ ID NO: 163755 - DNA, 25 bp, probe
cacgactttagtttggccaggtatt

SEQ ID NO: 163756 - DNA, 25 bp, probe
cactgactttccttctggagcaggt

SEQ ID NO: 163757 - DNA, 25 bp, probe
cactactgcctgtagtctgatgacg

SEQ ID NO: 163758 - DNA, 25 bp, probe
cactgactggctcagcgtgtgccta

SEQ ID NO: 163759 - DNA, 25 bp, probe
cacgacattctgcagagattcccaa

SEQ ID NO: 163760 - DNA, 25 bp, probe
cacgatcacaatctgcagtacctgc

SEQ ID NO: 163761 - DNA, 25 bp, probe
cactgacctgaacgcagtcatccgg

SEQ ID NO: 163762 - DNA, 25 bp, probe
cactgcctgctagggaataccagcg

SEQ ID NO: 163763 - DNA, 25 bp, probe
cactcgctgctttgagcattacgag

SEQ ID NO: 163764 - DNA, 25 bp, probe
cactccatgttgtcagctttgtact

SEQ ID NO: 163765 - DNA, 25 bp, probe
cactcactgttgtagcttctgttgt

SEQ ID NO: 163766 - DNA, 25 bp, probe
cactcagctatgctagggcttggct

SEQ ID NO: 163767 - DNA, 25 bp, probe
cactccatcagcttaggggctgctg

SEQ ID NO: 163768 - DNA, 25 bp, probe
cactactgcaggagaggagcttggc

SEQ ID NO: 163769 - DNA, 25 bp, probe
cactagtgtctgtccatggagttag

SEQ ID NO: 163770 - DNA, 25 bp, probe
cactgaggtctgttctaatggttcc

SEQ ID NO: 163771 - DNA, 25 bp, probe
cactgcagtttttcacaatggtggc

SEQ ID NO: 163772 - DNA, 25 bp, probe
cactgctgtggttgcagccacaggg

SEQ ID NO: 163773 - DNA, 25 bp, probe
cactgcctgtgttgaggcagccgcg

SEQ ID NO: 163774 - DNA, 25 bp, probe
cactgccattggccatggccatggc

SEQ ID NO: 163775 - DNA, 25 bp, probe
cactctgatagcctgctacatcatg

SEQ ID NO: 163776 - DNA, 25 bp, probe
cactggtgatcgcatacatcatgac

SEQ ID NO: 163777 - DNA, 25 bp, probe
cactctgatatactggcttctgact

SEQ ID NO: 163778 - DNA, 25 bp, probe
cactggatccaaagcatgtctgcaa

SEQ ID NO: 163779 - DNA, 25 bp, probe
cactgcgaccacaagaaggatgatt

SEQ ID NO: 163780 - DNA, 25 bp, probe
cactcaacctcaaaagcctgacttt

SEQ ID NO: 163781 - DNA, 25 bp, probe
cacctacctagcaaggctcaacttt

SEQ ID NO: 163782 - DNA, 25 bp, probe
cacctacctagcaaggctcaacttt

SEQ ID NO: 163783 - DNA, 25 bp, probe
cacctgacctcaaggccaagtttct

SEQ ID NO: 163784 - DNA, 25 bp, probe
cactgatgaccctgagaaagtttac

SEQ ID NO: 163785 - DNA, 25 bp, probe
cactcatactcctccaaaagtcata

SEQ ID NO: 163786 - DNA, 25 bp, probe
cactcatactcctccaaaagtcata

SEQ ID NO: 163787 - DNA, 25 bp, probe
cactcatgttcctccacgaaaaagg

SEQ ID NO: 163788 - DNA, 25 bp, probe
cactcatgttcctccacgaaaaagg

SEQ ID NO: 163789 - DNA, 25 bp, probe
cagcatcattgtcacccaggaaagg

SEQ ID NO: 163790 - DNA, 25 bp, probe
cagcatcattgtcacccaggaaagg

SEQ ID NO: 163791 - DNA, 25 bp, probe
cacctcgtctccacagggtagtggt

SEQ ID NO: 163792 - DNA, 25 bp, probe
cactgttactccacagcggaggaga

SEQ ID NO: 163793 - DNA, 25 bp, probe
cactgttactccacagcggaggaga

SEQ ID NO: 163794 - DNA, 25 bp, probe
cacctttctgccaccggaagcagat

SEQ ID NO: 163795 - DNA, 25 bp, probe
caccctttgtttcgggagatcaact

SEQ ID NO: 163796 - DNA, 25 bp, probe
cacccctggttacaggagtaccaga

SEQ ID NO: 163797 - DNA, 25 bp, probe
caccaaccggctcaaggagttcctg

SEQ ID NO: 163798 - DNA, 25 bp, probe
caccaaccggctcaaggagttcctg

SEQ ID NO: 163799 - DNA, 25 bp, probe
cactgccccgtgtgaatgtagcttc

SEQ ID NO: 163800 - DNA, 25 bp, probe
cactcccaaggctgattgacatgtc

SEQ ID NO: 163801 - DNA, 25 bp, probe
cactctcctatagagattgtgtgtg

SEQ ID NO: 163802 - DNA, 25 bp, probe
cactcccatactaatattggatctt

SEQ ID NO: 163803 - DNA, 25 bp, probe
cactcccatactaatattggatctt

SEQ ID NO: 163804 - DNA, 25 bp, probe
cactcacttcacaaatttgaattcc

SEQ ID NO: 163805 - DNA, 25 bp, probe
cactgtttccccttgtgaaaccaca

SEQ ID NO: 163806 - DNA, 25 bp, probe
cactgtttccccttgtgaaaccaca

SEQ ID NO: 163807 - DNA, 25 bp, probe
cactctttcttctttgtaaaccatg

SEQ ID NO: 163808 - DNA, 25 bp, probe
cactcttttgggatctaactgttgt

SEQ ID NO: 163809 - DNA, 25 bp, probe
cactctaaagggaactgtgacattt

SEQ ID NO: 163810 - DNA, 25 bp, probe
cactgtgtgaaactgtatctgccac

SEQ ID NO: 163811 - DNA, 25 bp, probe
cactgcagtggattttttgcctcta

SEQ ID NO: 163812 - DNA, 25 bp, probe
cactcagatgtatttcttcttcttt

SEQ ID NO: 163813 - DNA, 25 bp, probe
caccgatgattcctttccttggtgg

SEQ ID NO: 163814 - DNA, 25 bp, probe
cacccaaaccatgcttatttgtgtg

SEQ ID NO: 163815 - DNA, 25 bp, probe
cactgccacaatgcaggtgtacctg

SEQ ID NO: 163816 - DNA, 25 bp, probe
cactgccacattccagtgggacggc

SEQ ID NO: 163817 - DNA, 25 bp, probe
cactccacgatgccaaggcagaacc

SEQ ID NO: 163818 - DNA, 25 bp, probe
cactccacgatgccaaggcagaacc

SEQ ID NO: 163819 - DNA, 25 bp, probe
cactcacctgtggcacggaatgaaa

SEQ ID NO: 163820 - DNA, 25 bp, probe
cactccatctggacatttaatgaaa

SEQ ID NO: 163821 - DNA, 25 bp, probe
cactgccacataaagcccaagaaat

SEQ ID NO: 163822 - DNA, 25 bp, probe
cactgtccgatatgccagcatcaat

SEQ ID NO: 163823 - DNA, 25 bp, probe
cactgtgctccatatgccatcaaat

SEQ ID NO: 163824 - DNA, 25 bp, probe
cactgatctctactaccacaaggaa

SEQ ID NO: 163825 - DNA, 25 bp, probe
cactctttcagctcacagcacagtg

SEQ ID NO: 163826 - DNA, 25 bp, probe
cacgcccaagctgcagcatggagct

SEQ ID NO: 163827 - DNA, 25 bp, probe
cactgaccggctgcgcaaatggatg

SEQ ID NO: 163828 - DNA, 25 bp, probe
cactgatccggggcaaccatgagag

SEQ ID NO: 163829 - DNA, 25 bp, probe
cacgacctgttatttccatgactgc

SEQ ID NO: 163830 - DNA, 25 bp, probe
cacgcccagtggatgatcctactgc

SEQ ID NO: 163831 - DNA, 25 bp, probe
cacgactcagtgaagtttctccagt

SEQ ID NO: 163832 - DNA, 25 bp, probe
cacgaccacgacatcatctggacag

SEQ ID NO: 163833 - DNA, 25 bp, probe
cacgaggacttcgtgcagtgggaga

SEQ ID NO: 163834 - DNA, 25 bp, probe
cacgtgctgaaagccgaggtagaga

SEQ ID NO: 163835 - DNA, 25 bp, probe
cacccagaaaccaatgccgtagatg

SEQ ID NO: 163836 - DNA, 25 bp, probe
cacccggaagcggcaccaagacatg

SEQ ID NO: 163837 - DNA, 25 bp, probe
cagtacggaggagtaccaccacagg

SEQ ID NO: 163838 - DNA, 25 bp, probe
cacggggagagagaccacacgcagt

SEQ ID NO: 163839 - DNA, 25 bp, probe
cacggggagagagaccacacgcagt

SEQ ID NO: 163840 - DNA, 25 bp, probe
cactggggagagctacacactgagg

SEQ ID NO: 163841 - DNA, 25 bp, probe
cactctaaggagatcatctacaggg

SEQ ID NO: 163842 - DNA, 25 bp, probe
cactgctaagggactctatccattg

SEQ ID NO: 163843 - DNA, 25 bp, probe
cactgctaagggactctatccattg

SEQ ID NO: 163844 - DNA, 25 bp, probe
cactcacacagttgactatctgaat

SEQ ID NO: 163845 - DNA, 25 bp, probe
cactcacagcaaggatggagctgaa

SEQ ID NO: 163846 - DNA, 25 bp, probe
cactctgcaagaggtgaagctgaga

SEQ ID NO: 163847 - DNA, 25 bp, probe
cactgctaaatactgtacatagatg

SEQ ID NO: 163848 - DNA, 25 bp, probe
cactgctgacctttgcaaaggctgc

SEQ ID NO: 163849 - DNA, 25 bp, probe
cactcttgctctttcattagatttg

SEQ ID NO: 163850 - DNA, 25 bp, probe
cactcattgtcatgttgacgactct

SEQ ID NO: 163851 - DNA, 25 bp, probe
cactcactgataatgcttattacct

SEQ ID NO: 163852 - DNA, 25 bp, probe
cactcactgtcaatgattattttca

SEQ ID NO: 163853 - DNA, 25 bp, probe
cactcctgagcatgtgtttattcat

SEQ ID NO: 163854 - DNA, 25 bp, probe
cactctgctctgctgtgtttgtgat

SEQ ID NO: 163855 - DNA, 25 bp, probe
cactcagctctggctggaagtgctt

SEQ ID NO: 163856 - DNA, 25 bp, probe
cactgcaccatcagtgcactgtctt

SEQ ID NO: 163857 - DNA, 25 bp, probe
cactgctcacttaggactttctgga

SEQ ID NO: 163858 - DNA, 25 bp, probe
cactgctcctggagttctcatctga

SEQ ID NO: 163859 - DNA, 25 bp, probe
cactggccggtggaccagactgact

SEQ ID NO: 163860 - DNA, 25 bp, probe
cactggggcctgtacgaggtactca

SEQ ID NO: 163861 - DNA, 25 bp, probe
cactgggccacggaggagggatgct

SEQ ID NO: 163862 - DNA, 25 bp, probe
cactgtgtggcagggggatggcagg

SEQ ID NO: 163863 - DNA, 25 bp, probe
caccttggacggaatgggatggggg

SEQ ID NO: 163864 - DNA, 25 bp, probe
cactcctgggtctatgatggtgggg

SEQ ID NO: 163865 - DNA, 25 bp, probe
cactcgcccagttgtgtgtgtgggg

SEQ ID NO: 163866 - DNA, 25 bp, probe
cactcccgactaagcgtgcgagggc

SEQ ID NO: 163867 - DNA, 25 bp, probe
cactcttataccaagggcaagcggc

SEQ ID NO: 163868 - DNA, 25 bp, probe
cactgcttgaacgggggaggccgca

SEQ ID NO: 163869 - DNA, 25 bp, probe
cactctcgaaagcgatgggaacgct

SEQ ID NO: 163870 - DNA, 25 bp, probe
cactctcaaaaactgcacggacata

SEQ ID NO: 163871 - DNA, 25 bp, probe
cactctcaaaaactgcacggacata

SEQ ID NO: 163872 - DNA, 25 bp, probe
cactctgctaatcatgtgggtgagc

SEQ ID NO: 163873 - DNA, 25 bp, probe
cactctctttgcctaaggtgactca

SEQ ID NO: 163874 - DNA, 25 bp, probe
cacgactttctgaacagtgcgcccg

SEQ ID NO: 163875 - DNA, 25 bp, probe
cacgactttctgaacagtgcgcccg

SEQ ID NO: 163876 - DNA, 25 bp, probe
cactgactcttcaaggacgtgccct

SEQ ID NO: 163877 - DNA, 25 bp, probe
cactgactcttcaaggacgtgccct

SEQ ID NO: 163878 - DNA, 25 bp, probe
cacgcacttatcaggaacgcctcga

SEQ ID NO: 163879 - DNA, 25 bp, probe
cacggcttaaagcccaagctctgaa

SEQ ID NO: 163880 - DNA, 25 bp, probe
cacccctaaaagtcttgctccaata

SEQ ID NO: 163881 - DNA, 25 bp, probe
cacccctaaaagtcttgctccaata

SEQ ID NO: 163882 - DNA, 25 bp, probe
cactctcctaagaggttctctccaa

SEQ ID NO: 163883 - DNA, 25 bp, probe
cacctttaaacggatcttcctcaag

SEQ ID NO: 163884 - DNA, 25 bp, probe
cactcttttacacaatcatcacacc

SEQ ID NO: 163885 - DNA, 25 bp, probe
cactctttttgattgaactatccca

SEQ ID NO: 163886 - DNA, 25 bp, probe
cactgctggtttgagacctattctg

SEQ ID NO: 163887 - DNA, 25 bp, probe
cactgctggtttgagacctattctg

SEQ ID NO: 163888 - DNA, 25 bp, probe
cacggtgttatcaatcactttgtct

SEQ ID NO: 163889 - DNA, 25 bp, probe
cacgggttgaattcacattccctga

SEQ ID NO: 163890 - DNA, 25 bp, probe
cacgcaagcatggttaacgtcccta

SEQ ID NO: 163891 - DNA, 25 bp, probe
caccaattggttaatctttcctgat

SEQ ID NO: 163892 - DNA, 25 bp, probe
caccagacggttagacatgttttac

SEQ ID NO: 163893 - DNA, 25 bp, probe
caccagacggttagacatgttttac

SEQ ID NO: 163894 - DNA, 25 bp, probe
caccaactggtgatggaaggttaca

SEQ ID NO: 163895 - DNA, 25 bp, probe
cactccctggctctcagaaggtatt

SEQ ID NO: 163896 - DNA, 25 bp, probe
cactccagtgagattatgatttgta

SEQ ID NO: 163897 - DNA, 25 bp, probe
cactgcagcgtggctgattttttta

SEQ ID NO: 163898 - DNA, 25 bp, probe
cactgattgctggctttgtttgacg

SEQ ID NO: 163899 - DNA, 25 bp, probe
cactgattgctggctttgtttgacg

SEQ ID NO: 163900 - DNA, 25 bp, probe
cactgaatcatccatattttaatga

SEQ ID NO: 163901 - DNA, 25 bp, probe
cactgcaccctggatttgcatacat

SEQ ID NO: 163902 - DNA, 25 bp, probe
cactgaatcgctggactgtgaagtc

SEQ ID NO: 163903 - DNA, 25 bp, probe
cactctcatctcggacgagaagaac

SEQ ID NO: 163904 - DNA, 25 bp, probe
cactccagcgccccaggaaaaagag

SEQ ID NO: 163905 - DNA, 25 bp, probe
cactcccgggacaggatgcaaaaga

SEQ ID NO: 163906 - DNA, 25 bp, probe
caccccgtgttcaaggacatcaact

SEQ ID NO: 163907 - DNA, 25 bp, probe
caccccgtgttcaaggacatcaact

SEQ ID NO: 163908 - DNA, 25 bp, probe
cacccctatttctgtgagtccagat

SEQ ID NO: 163909 - DNA, 25 bp, probe
cactctcttcttacttaaaccagtc

SEQ ID NO: 163910 - DNA, 25 bp, probe
cactgttttattctagcaatgaatt

SEQ ID NO: 163911 - DNA, 25 bp, probe
cactgatatttgtcctggaggaaat

SEQ ID NO: 163912 - DNA, 25 bp, probe
cactgcactccagcctgggcgacag

SEQ ID NO: 163913 - DNA, 25 bp, probe
cactgcaatccagcctaggcaacag

SEQ ID NO: 163914 - DNA, 25 bp, probe
cactgcactccagtctgggacaaca

SEQ ID NO: 163915 - DNA, 25 bp, probe
caccctcacctgatgcaggaacata

SEQ ID NO: 163916 - DNA, 25 bp, probe
caccctcactctatgggaagcgctt

SEQ ID NO: 163917 - DNA, 25 bp, probe
cactctctagctttaggggaccatg

SEQ ID NO: 163918 - DNA, 25 bp, probe
cactgcctctgccttagaggagccc

SEQ ID NO: 163919 - DNA, 25 bp, probe
cactcctgcgctcatacatgcagag

SEQ ID NO: 163920 - DNA, 25 bp, probe
cactgcacacgtgtacagcggagta

SEQ ID NO: 163921 - DNA, 25 bp, probe
cactgccacgtgtgttctggctgta

SEQ ID NO: 163922 - DNA, 25 bp, probe
cactgccacgtgtgttctggctgta

SEQ ID NO: 163923 - DNA, 25 bp, probe
cactgccacgtgtgttctggctgta

SEQ ID NO: 163924 - DNA, 25 bp, probe
cactccgcgagctgtatcgggtggt

SEQ ID NO: 163925 - DNA, 25 bp, probe
cactcctgcacctggtgcgggaggt

SEQ ID NO: 163926 - DNA, 25 bp, probe
cactccagggcacggcgtgggaggg

SEQ ID NO: 163927 - DNA, 25 bp, probe
cactgctcagtgactcgagcaaggg

SEQ ID NO: 163928 - DNA, 25 bp, probe
cactgctcagtgactcgagcaaggg

SEQ ID NO: 163929 - DNA, 25 bp, probe
cactgtcaatgattagatcgggtct

SEQ ID NO: 163930 - DNA, 25 bp, probe
cactgctcaacctactgcaggggct

SEQ ID NO: 163931 - DNA, 25 bp, probe
cacccaactgaaggcatggcggcgg

SEQ ID NO: 163932 - DNA, 25 bp, probe
cacccaggctggaatgcagtggcac

SEQ ID NO: 163933 - DNA, 25 bp, probe
cacggccgctggaacgtggacactg

SEQ ID NO: 163934 - DNA, 25 bp, probe
cacggccgtggacatgtggtcagtg

SEQ ID NO: 163935 - DNA, 25 bp, probe
cactgagccggggagagtggggatg

SEQ ID NO: 163936 - DNA, 25 bp, probe
cactgagccggggagagtggggatg

SEQ ID NO: 163937 - DNA, 25 bp, probe
cactgggtgtggacggtgtggggca

SEQ ID NO: 163938 - DNA, 25 bp, probe
cactgcatgggtggtcgtgaggtga

SEQ ID NO: 163939 - DNA, 25 bp, probe
cactgaggaatttctggcaggctgg

SEQ ID NO: 163940 - DNA, 25 bp, probe
cacggtgacatgtttacagctgggt

SEQ ID NO: 163941 - DNA, 25 bp, probe
cactgaaatcactttacctgcaggc

SEQ ID NO: 163942 - DNA, 25 bp, probe
cacgcagaatacctcgaaccaggcg

SEQ ID NO: 163943 - DNA, 25 bp, probe
caccgcatgaacatcgaccgggctc

SEQ ID NO: 163944 - DNA, 25 bp, probe
cacccaaactacttctggatggtca

SEQ ID NO: 163945 - DNA, 25 bp, probe
cactcccaacaatactgtgtggaag

SEQ ID NO: 163946 - DNA, 25 bp, probe
cactcccaacaatactgtgtggaag

SEQ ID NO: 163947 - DNA, 25 bp, probe
cactgtccttaagacggcaggaagc

SEQ ID NO: 163948 - DNA, 25 bp, probe
cactcccagtcagctgcaaggggaa

SEQ ID NO: 163949 - DNA, 25 bp, probe
cacggaactcatgcgcaaggggaac

SEQ ID NO: 163950 - DNA, 25 bp, probe
cacgtgaacttgagcactgtgggga

SEQ ID NO: 163951 - DNA, 25 bp, probe
cacgtgaactcgagaccgtgctgca

SEQ ID NO: 163952 - DNA, 25 bp, probe
cacgtatttcacagagcacgcctgc

SEQ ID NO: 163953 - DNA, 25 bp, probe
cacggagtgtagggagcacccctct

SEQ ID NO: 163954 - DNA, 25 bp, probe
cactgcagggcttgctggagaggcc

SEQ ID NO: 163955 - DNA, 25 bp, probe
cactgcggactaggtggcagaggcc

SEQ ID NO: 163956 - DNA, 25 bp, probe
cactggagcagaaggggagatggac

SEQ ID NO: 163957 - DNA, 25 bp, probe
cactggagcagaaggggagatggac

SEQ ID NO: 163958 - DNA, 25 bp, probe
cactgcagtgatggtgcggggagga

SEQ ID NO: 163959 - DNA, 25 bp, probe
cacggtgttggagtccgcagagcac

SEQ ID NO: 163960 - DNA, 25 bp, probe
cacggtgttgtgagtccacatgagc

SEQ ID NO: 163961 - DNA, 25 bp, probe
cactggtttctcaggtactgatccc

SEQ ID NO: 163962 - DNA, 25 bp, probe
cactggttttgccggtagagcagcc

SEQ ID NO: 163963 - DNA, 25 bp, probe
cacggtatttaagagagaactatat

SEQ ID NO: 163964 - DNA, 25 bp, probe
cactgacttatttccctaaactatt

SEQ ID NO: 163965 - DNA, 25 bp, probe
cactgactgtgaaacctttaccttt

SEQ ID NO: 163966 - DNA, 25 bp, probe
cactgcttggacatcctttttgctt

SEQ ID NO: 163967 - DNA, 25 bp, probe
cactgtcatgaagatgccttccact

SEQ ID NO: 163968 - DNA, 25 bp, probe
cactgtcagtccttttgtgctactc

SEQ ID NO: 163969 - DNA, 25 bp, probe
cactgtcagtccttttgtgctactc

SEQ ID NO: 163970 - DNA, 25 bp, probe
cactgtgagccctttggtgctaata

SEQ ID NO: 163971 - DNA, 25 bp, probe
cacgtgccaccatgtctggctaatt

SEQ ID NO: 163972 - DNA, 25 bp, probe
cacctcaacccagaggctactcttg

SEQ ID NO: 163973 - DNA, 25 bp, probe
cactccagagtcccgaagcaaatct

SEQ ID NO: 163974 - DNA, 25 bp, probe
cactccagagtcccgaagcaaatct

SEQ ID NO: 163975 - DNA, 25 bp, probe
cactcccatggtcctgcagaggaac

SEQ ID NO: 163976 - DNA, 25 bp, probe
cacggccatgattcctagcagggaa

SEQ ID NO: 163977 - DNA, 25 bp, probe
cacggccaccatgaagtctggcaac

SEQ ID NO: 163978 - DNA, 25 bp, probe
cacggcagcacgatgaagactggaa

SEQ ID NO: 163979 - DNA, 25 bp, probe
cactgccaacagctgaagccgagca

SEQ ID NO: 163980 - DNA, 25 bp, probe
cacccaacacggtcaccatggaaat

SEQ ID NO: 163981 - DNA, 25 bp, probe
cactgaaaccgagtcacctgtgggc

SEQ ID NO: 163982 - DNA, 25 bp, probe
cacggactccagtgccactgtgagg

SEQ ID NO: 163983 - DNA, 25 bp, probe
cacggactcaagtgggctggtgacc

SEQ ID NO: 163984 - DNA, 25 bp, probe
cacgttctacgataagcattgtgac

SEQ ID NO: 163985 - DNA, 25 bp, probe
cacgtttacaggaaagtgttctcct

SEQ ID NO: 163986 - DNA, 25 bp, probe
cacgtggaacagtgcgagtgcttcg

SEQ ID NO: 163987 - DNA, 25 bp, probe
cacggaaacagaactcgatgcactg

SEQ ID NO: 163988 - DNA, 25 bp, probe
cactgcgaaaagacagcccattctg

SEQ ID NO: 163989 - DNA, 25 bp, probe
cactgcagagaaatggctcccacct

SEQ ID NO: 163990 - DNA, 25 bp, probe
cactgcagaagcaggacctccggag

SEQ ID NO: 163991 - DNA, 25 bp, probe
cacgcacgtcagcgatgttccaggg

SEQ ID NO: 163992 - DNA, 25 bp, probe
cactgacttcagctactttagggga

SEQ ID NO: 163993 - DNA, 25 bp, probe
cccacttccttactttagcgggctg

SEQ ID NO: 163994 - DNA, 25 bp, probe
cacccgcattttcttctacgtgcgg

SEQ ID NO: 163995 - DNA, 25 bp, probe
cacccgcattttcttctacgtgcgg

SEQ ID NO: 163996 - DNA, 25 bp, probe
caccctgattttctcttttgcagtt

SEQ ID NO: 163997 - DNA, 25 bp, probe
cacgggaacctcatcttcttagtgt

SEQ ID NO: 163998 - DNA, 25 bp, probe
cacgggagagcagtctcgtctcctg

SEQ ID NO: 163999 - DNA, 25 bp, probe
cacgctggaaatgctctttcctagc

SEQ ID NO: 164000 - DNA, 25 bp, probe
cactgggaaaacgtctcaggtggcc

SEQ ID NO: 164001 - DNA, 25 bp, probe
cacggagaacgagctgcatggggag

SEQ ID NO: 164002 - DNA, 25 bp, probe
cactggaggccaaacaggaatggag

SEQ ID NO: 164003 - DNA, 25 bp, probe
cactgcagcgccggggcaggaagga

SEQ ID NO: 164004 - DNA, 25 bp, probe
cactccagcctgggcaaacagaggg

SEQ ID NO: 164005 - DNA, 25 bp, probe
cactccagcttgggcaacgagcaaa

SEQ ID NO: 164006 - DNA, 25 bp, probe
cactccagcctgggcaacagagcta

SEQ ID NO: 164007 - DNA, 25 bp, probe
cactccagcctgggcgacagagcga

SEQ ID NO: 164008 - DNA, 25 bp, probe
cactgcgcgaagctgctgactgagg

SEQ ID NO: 164009 - DNA, 25 bp, probe
cactgcatcgagtttgtggtgcgtg

SEQ ID NO: 164010 - DNA, 25 bp, probe
cactgctgcggaccgtggtgattgt

SEQ ID NO: 164011 - DNA, 25 bp, probe
cactgctgcggaccgtggtgattgt

SEQ ID NO: 164012 - DNA, 25 bp, probe
cactgctcggtgacccagtgtgtgg

SEQ ID NO: 164013 - DNA, 25 bp, probe
cactgccaggcgagcttgctggcgg

SEQ ID NO: 164014 - DNA, 25 bp, probe
cactgtcagggttaagcggcaggca

SEQ ID NO: 164015 - DNA, 25 bp, probe
cactgaagtgtcaaacacagtcaga

SEQ ID NO: 164016 - DNA, 25 bp, probe
cacgaagtgactccaagaccatgac

SEQ ID NO: 164017 - DNA, 25 bp, probe
cacgtatgagagctatggccttggc

SEQ ID NO: 164018 - DNA, 25 bp, probe
cactgttagtgccacagcacctggg

SEQ ID NO: 164019 - DNA, 25 bp, probe
cactgtgatagtggacagcaacttg

SEQ ID NO: 164020 - DNA, 25 bp, probe
cactgtgtagggggacagctgtggc

SEQ ID NO: 164021 - DNA, 25 bp, probe
cactgtgtagggggacagctgtggc

SEQ ID NO: 164022 - DNA, 25 bp, probe
cactgttctgggctacatttgtgct

SEQ ID NO: 164023 - DNA, 25 bp, probe
cacctggattggctacttttgcttc

SEQ ID NO: 164024 - DNA, 25 bp, probe
caccgaagtttgtcccatttgttgc

SEQ ID NO: 164025 - DNA, 25 bp, probe
caccatatttttgcaactctttctc

SEQ ID NO: 164026 - DNA, 25 bp, probe
caccaaatgttcccaaatccttatc

SEQ ID NO: 164027 - DNA, 25 bp, probe
catcccaatgttgtaaagttttatg

SEQ ID NO: 164028 - DNA, 25 bp, probe
catcccaatgttgtaaagttttatg

SEQ ID NO: 164029 - DNA, 25 bp, probe
caccaaattctggttataatttaca

SEQ ID NO: 164030 - DNA, 25 bp, probe
cacccaaattgtcttcctaaaatat

SEQ ID NO: 164031 - DNA, 25 bp, probe
cacccaaattgtcttcctaaaatat

SEQ ID NO: 164032 - DNA, 25 bp, probe
catcctaaatttctacactggaatt

SEQ ID NO: 164033 - DNA, 25 bp, probe
catcccaaactttaaaatgcgaaat

SEQ ID NO: 164034 - DNA, 25 bp, probe
ccccaaacttgatcaaaggtccgct

SEQ ID NO: 164035 - DNA, 25 bp, probe
cccccatacttatatcaaggtccca

SEQ ID NO: 164036 - DNA, 25 bp, probe
caccccaaacttgatcaaaggtccg

SEQ ID NO: 164037 - DNA, 25 bp, probe
cacctacaacctagagaagaagcga

SEQ ID NO: 164038 - DNA, 25 bp, probe
taccggatcacagagaaaaaggctt

SEQ ID NO: 164039 - DNA, 25 bp, probe
cactgccctccagaaaacagaggtg

SEQ ID NO: 164040 - DNA, 25 bp, probe
cactgcctccaagtgaaagatggaa

SEQ ID NO: 164041 - DNA, 25 bp, probe
cactgcctgcttttacttggcagaa

SEQ ID NO: 164042 - DNA, 25 bp, probe
cagtctttctcgaagcttggcggac

SEQ ID NO: 164043 - DNA, 25 bp, probe
cactgctgtttggatgagcttcgcc

SEQ ID NO: 164044 - DNA, 25 bp, probe
cacgtgcatttgctatgtgccgtca

SEQ ID NO: 164045 - DNA, 25 bp, probe
cactgtctttcctagatggcagtca

SEQ ID NO: 164046 - DNA, 25 bp, probe
cactgctcttatcctgtggtagtac

SEQ ID NO: 164047 - DNA, 25 bp, probe
cactgacttctgcaatgccaattac

SEQ ID NO: 164048 - DNA, 25 bp, probe
cacgagtttgcggtgaagattatgg

SEQ ID NO: 164049 - DNA, 25 bp, probe
cactgcttcttgggaggagtggtgg

SEQ ID NO: 164050 - DNA, 25 bp, probe
caccctttgggcagcgtgtggtgaa

SEQ ID NO: 164051 - DNA, 25 bp, probe
cacctgtaccggagcgggcagtatc

SEQ ID NO: 164052 - DNA, 25 bp, probe
cacctagcagggcttcaggggttcc

SEQ ID NO: 164053 - DNA, 25 bp, probe
cacgcggaggacgcgagggggacgc

SEQ ID NO: 164054 - DNA, 25 bp, probe
caccccggcacccaggggtggatag

SEQ ID NO: 164055 - DNA, 25 bp, probe
cacccctgtgggtggcgggtgtgcg

SEQ ID NO: 164056 - DNA, 25 bp, probe
caccccgttggttctgaggtcaagg

SEQ ID NO: 164057 - DNA, 25 bp, probe
ccccggttggttgccagtgaagaca

SEQ ID NO: 164058 - DNA, 25 bp, probe
cagcccggtacctggcgaggaagta

SEQ ID NO: 164059 - DNA, 25 bp, probe
cagcccaggtcacacgtggggtcag

SEQ ID NO: 164060 - DNA, 25 bp, probe
caccccatgtcacacgggtatccag

SEQ ID NO: 164061 - DNA, 25 bp, probe
cacctgccaggcctacgaattggcc

SEQ ID NO: 164062 - DNA, 25 bp, probe
caccccggctggagtcatgatgggc

SEQ ID NO: 164063 - DNA, 25 bp, probe
cacccaaggggaagcttcggagcct

SEQ ID NO: 164064 - DNA, 25 bp, probe
cacccaaggatatgtcttctgaaga

SEQ ID NO: 164065 - DNA, 25 bp, probe
cacccagcaggtcagttttctgtgc

SEQ ID NO: 164066 - DNA, 25 bp, probe
cactgacagagagcaagttttctgt

SEQ ID NO: 164067 - DNA, 25 bp, probe
cacccaagcagccaaagcagtgtcg

SEQ ID NO: 164068 - DNA, 25 bp, probe
cactgctcctgccgtgaaagatgtc

SEQ ID NO: 164069 - DNA, 25 bp, probe
cactgcaggcttcagcaacttatct

SEQ ID NO: 164070 - DNA, 25 bp, probe
cacgggctgagcggaacattctaga

SEQ ID NO: 164071 - DNA, 25 bp, probe
cacgggctgagcggaacattctaga

SEQ ID NO: 164072 - DNA, 25 bp, probe
cacggcagctccggaagatcctaga

SEQ ID NO: 164073 - DNA, 25 bp, probe
cacggcagcaccggggctgttaatg

SEQ ID NO: 164074 - DNA, 25 bp, probe
caccgaaaacggcgtgcatggcatg

SEQ ID NO: 164075 - DNA, 25 bp, probe
caccataaaacccttgagcacaaca

SEQ ID NO: 164076 - DNA, 25 bp, probe
cacctaataggctgggagactgaag

SEQ ID NO: 164077 - DNA, 25 bp, probe
caccaaaaggtgtcgagaaccctgc

SEQ ID NO: 164078 - DNA, 25 bp, probe
caccgaagggtactgaagagcctca

SEQ ID NO: 164079 - DNA, 25 bp, probe
caccgacggaggcagacaagcccaa

SEQ ID NO: 164080 - DNA, 25 bp, probe
caccaagcggaaaataaactccaag

SEQ ID NO: 164081 - DNA, 25 bp, probe
cacccagtggaaccaaaacccatcg

SEQ ID NO: 164082 - DNA, 25 bp, probe
cacgctcgtggaaaccacactcaaa

SEQ ID NO: 164083 - DNA, 25 bp, probe
cacgggtgtaagtgccatctggtag

SEQ ID NO: 164084 - DNA, 25 bp, probe
cacgggggagagtggctgtgcaggg

SEQ ID NO: 164085 - DNA, 25 bp, probe
cacgggaggcggaggttgcggttag

SEQ ID NO: 164086 - DNA, 25 bp, probe
cacgggaagggttggtgtgctggct

SEQ ID NO: 164087 - DNA, 25 bp, probe
cacgggaagggttggtgtgctggct

SEQ ID NO: 164088 - DNA, 25 bp, probe
cacggacgcagtggtcaggtttgag

SEQ ID NO: 164089 - DNA, 25 bp, probe
cacgagtgcgcgactggcacgattt

SEQ ID NO: 164090 - DNA, 25 bp, probe
cactgatgcctcctctagaagcatt

SEQ ID NO: 164091 - DNA, 25 bp, probe
cagctgtgcagcttgctgctttcag

SEQ ID NO: 164092 - DNA, 25 bp, probe
cagctagatgcatgcctgaggcagg

SEQ ID NO: 164093 - DNA, 25 bp, probe
cactgaatgaaactggagaagttgt

SEQ ID NO: 164094 - DNA, 25 bp, probe
cactggatgggatgtggaacattac

SEQ ID NO: 164095 - DNA, 25 bp, probe
caccggggaagggcatgggctagaa

SEQ ID NO: 164096 - DNA, 25 bp, probe
caccgaggagaccctaagccaagaa

SEQ ID NO: 164097 - DNA, 25 bp, probe
caccgaggagaccctaagccaagaa

SEQ ID NO: 164098 - DNA, 25 bp, probe
cactgggggcactgagaaccaagga

SEQ ID NO: 164099 - DNA, 25 bp, probe
cacgagggtcactgtaaactggcag

SEQ ID NO: 164100 - DNA, 25 bp, probe
cacggataccccggaaactcagcag

SEQ ID NO: 164101 - DNA, 25 bp, probe
cacggataccccggaaactcagcag

SEQ ID NO: 164102 - DNA, 25 bp, probe
cacggataccccggaaactcagcag

SEQ ID NO: 164103 - DNA, 25 bp, probe
cacggataccccggaaactcagcag

SEQ ID NO: 164104 - DNA, 25 bp, probe
cgggaaccatttgtgcaacgacaga

SEQ ID NO: 164105 - DNA, 25 bp, probe
gctgaaaacgttagcctctaaaaga

SEQ ID NO: 164106 - DNA, 25 bp, probe
caccagggctttggccttaaaggcg

SEQ ID NO: 164107 - DNA, 25 bp, probe
catctaaggaaaaccgtaaacacag

SEQ ID NO: 164108 - DNA, 25 bp, probe
cagtaaggacttacgttgaaaacag

SEQ ID NO: 164109 - DNA, 25 bp, probe
cagttttcctatgctttgaaacaga

SEQ ID NO: 164110 - DNA, 25 bp, probe
cagctgtattccgtgactttttaaa

SEQ ID NO: 164111 - DNA, 25 bp, probe
cactgtactgcatgtgacttctccc

SEQ ID NO: 164112 - DNA, 25 bp, probe
cactgtactgcatgtgacttctccc

SEQ ID NO: 164113 - DNA, 25 bp, probe
caccagaattcaggactgtctcctc

SEQ ID NO: 164114 - DNA, 25 bp, probe
cactgagaactaaatgctgtaccac

SEQ ID NO: 164115 - DNA, 25 bp, probe
cacgagatcctctctctgaaatcac

SEQ ID NO: 164116 - DNA, 25 bp, probe
cactggtctgtctttggataatagg

SEQ ID NO: 164117 - DNA, 25 bp, probe
cactgttctaatgctggcaattcag

SEQ ID NO: 164118 - DNA, 25 bp, probe
cactgtacttctgtgtgcaattgta

SEQ ID NO: 164119 - DNA, 25 bp, probe
cacgtacgtgctgggcatcggtgat

SEQ ID NO: 164120 - DNA, 25 bp, probe
cactgtggcgtgggtggcagaggat

SEQ ID NO: 164121 - DNA, 25 bp, probe
cacggcgccggagtggcatgaagct

SEQ ID NO: 164122 - DNA, 25 bp, probe
cactgtggtgcgtgtgtgtgaagtg

SEQ ID NO: 164123 - DNA, 25 bp, probe
cactggactccatgagcggcaatgt

SEQ ID NO: 164124 - DNA, 25 bp, probe
cactggttcctccatgagatcagat

SEQ ID NO: 164125 - DNA, 25 bp, probe
cactggttcctccatgagatcagat

SEQ ID NO: 164126 - DNA, 25 bp, probe
cactggtgtcaccctggataggcaa

SEQ ID NO: 164127 - DNA, 25 bp, probe
cactgtctgtccctgtgcaacaggt

SEQ ID NO: 164128 - DNA, 25 bp, probe
cacgtgctggtccactgcaagatgg

SEQ ID NO: 164129 - DNA, 25 bp, probe
cacgcgggtgcaccgcgagtggagc

SEQ ID NO: 164130 - DNA, 25 bp, probe
cacgcgatgttgactgcacaggtaa

SEQ ID NO: 164131 - DNA, 25 bp, probe
cacgttgtgctactaagagatctca

SEQ ID NO: 164132 - DNA, 25 bp, probe
cacgatgtgctctgtatccagacac

SEQ ID NO: 164133 - DNA, 25 bp, probe
cacgtggccaggagccatgacaggg

SEQ ID NO: 164134 - DNA, 25 bp, probe
cacccagaagtgagccagagtgtgg

SEQ ID NO: 164135 - DNA, 25 bp, probe
caccatctaagtccccagaggagat

SEQ ID NO: 164136 - DNA, 25 bp, probe
caccacggggtctgcagcaatgaag

SEQ ID NO: 164137 - DNA, 25 bp, probe
caccagggggtctacagtgctgtaa

SEQ ID NO: 164138 - DNA, 25 bp, probe
caccagggggtctacagtgctgtaa

SEQ ID NO: 164139 - DNA, 25 bp, probe
caccggggagggacagtctggaggt

SEQ ID NO: 164140 - DNA, 25 bp, probe
caccgagtttgcggtgcgctctgga

SEQ ID NO: 164141 - DNA, 25 bp, probe
cactggcattgtgcaggtggcctgc

SEQ ID NO: 164142 - DNA, 25 bp, probe
cactggcatcgtgatggactccggt

SEQ ID NO: 164143 - DNA, 25 bp, probe
cactggatgccatatggatctctct

SEQ ID NO: 164144 - DNA, 25 bp, probe
cactggatggcaagggcacgctgct

SEQ ID NO: 164145 - DNA, 25 bp, probe
cactggaaggagacgcaccgcttca

SEQ ID NO: 164146 - DNA, 25 bp, probe
cacgagcagacggacatcacctcgc

SEQ ID NO: 164147 - DNA, 25 bp, probe
cacgagcagacggacatcacctcgc

SEQ ID NO: 164148 - DNA, 25 bp, probe
cactggcagcactgcatgtcacctg

SEQ ID NO: 164149 - DNA, 25 bp, probe
cacgagcagcaaacccagcagctga

SEQ ID NO: 164150 - DNA, 25 bp, probe
cacgatcacagttcaatgcagcctt

SEQ ID NO: 164151 - DNA, 25 bp, probe
cacgtcaagcgcatagcagcactgc

SEQ ID NO: 164152 - DNA, 25 bp, probe
cacgtcaagcgcatagcagcactgc

SEQ ID NO: 164153 - DNA, 25 bp, probe
cactgtgctagcagctcagcagggc

SEQ ID NO: 164154 - DNA, 25 bp, probe
cacgcacattacctgcatcagcggc

SEQ ID NO: 164155 - DNA, 25 bp, probe
cacgcatctttgcttacagtgcatc

SEQ ID NO: 164156 - DNA, 25 bp, probe
cactgtttagtgctgagagtgagct

SEQ ID NO: 164157 - DNA, 25 bp, probe
cactgagatctactggataaagaat

SEQ ID NO: 164158 - DNA, 25 bp, probe
catcggccaagtccataaaacaaaa

SEQ ID NO: 164159 - DNA, 25 bp, probe
cactggcaaagccacataaccccaa

SEQ ID NO: 164160 - DNA, 25 bp, probe
cacgatgccaaggcagaacccattc

SEQ ID NO: 164161 - DNA, 25 bp, probe
cacgatgccaaggcagaacccattc

SEQ ID NO: 164162 - DNA, 25 bp, probe
cactggaccatgtgaacagccatcc

SEQ ID NO: 164163 - DNA, 25 bp, probe
cagctaacacatgaatgaggccaat

SEQ ID NO: 164164 - DNA, 25 bp, probe
cactgaggcacaaaagaaccgcatg

SEQ ID NO: 164165 - DNA, 25 bp, probe
cacgagacagacaacatgaaccaga

SEQ ID NO: 164166 - DNA, 25 bp, probe
caccccaaatacaacagccggactc

SEQ ID NO: 164167 - DNA, 25 bp, probe
caccgccgaaagacggcaagaactc

SEQ ID NO: 164168 - DNA, 25 bp, probe
caggccaaaaagacaggggcaaagc

SEQ ID NO: 164169 - DNA, 25 bp, probe
cacgccgaaaaatgaagtgcacaag

SEQ ID NO: 164170 - DNA, 25 bp, probe
cacgccaccaacagtcagaggccaa

SEQ ID NO: 164171 - DNA, 25 bp, probe
cacgacctgtacatgatcatgcggg

SEQ ID NO: 164172 - DNA, 25 bp, probe
cagcgaacgaaataaggggccttag

SEQ ID NO: 164173 - DNA, 25 bp, probe
cagcgaacgaaataaggggccttag

SEQ ID NO: 164174 - DNA, 25 bp, probe
cagcaaccgatattgtgggggccct

SEQ ID NO: 164175 - DNA, 25 bp, probe
catccacgcgaatctgtttgcgtcc

SEQ ID NO: 164176 - DNA, 25 bp, probe
cacccatacatcactgtttggtatg

SEQ ID NO: 164177 - DNA, 25 bp, probe
caccagaaactttttcaggacatgc

SEQ ID NO: 164178 - DNA, 25 bp, probe
cacctgaaacatgttctccggcagt

SEQ ID NO: 164179 - DNA, 25 bp, probe
caccgaaaatgctgatgtccagaag

SEQ ID NO: 164180 - DNA, 25 bp, probe
cacggaggtcagctgagtccgagga

SEQ ID NO: 164181 - DNA, 25 bp, probe
cacgcagggacgtgagttggagcgg

SEQ ID NO: 164182 - DNA, 25 bp, probe
cacgtgggagtgatgtgttggaggt

SEQ ID NO: 164183 - DNA, 25 bp, probe
cacgtggaggatcttgcgtctgcag

SEQ ID NO: 164184 - DNA, 25 bp, probe
cacgtccatcgacatgtggtcagcc

SEQ ID NO: 164185 - DNA, 25 bp, probe
cacgtccatcgacatgtggtcagcc

SEQ ID NO: 164186 - DNA, 25 bp, probe
cacgtccattgacttgtggtcagct

SEQ ID NO: 164187 - DNA, 25 bp, probe
cacgtcacagtattgatgtgattca

SEQ ID NO: 164188 - DNA, 25 bp, probe
cactgtcatcagaatctgtcggcca

SEQ ID NO: 164189 - DNA, 25 bp, probe
cactgtgtgggaatgtccgccaggc

SEQ ID NO: 164190 - DNA, 25 bp, probe
cactggctggtgtacgccaacagcg

SEQ ID NO: 164191 - DNA, 25 bp, probe
cactgtgctggtaacgggagctggg

SEQ ID NO: 164192 - DNA, 25 bp, probe
cactggctgagaatctgggggtgag

SEQ ID NO: 164193 - DNA, 25 bp, probe
cactggtgatgtcccaggaggtaga

SEQ ID NO: 164194 - DNA, 25 bp, probe
cacgctatagtctctggaggtcatg

SEQ ID NO: 164195 - DNA, 25 bp, probe
cactgtcaagacagcggcaggcctg

SEQ ID NO: 164196 - DNA, 25 bp, probe
cactgtcaagacagcggcaggcctg

SEQ ID NO: 164197 - DNA, 25 bp, probe
cactgtcaacactgggccttaggag

SEQ ID NO: 164198 - DNA, 25 bp, probe
cactgtcaacactgggccttaggag

SEQ ID NO: 164199 - DNA, 25 bp, probe
cactgtcattcaaaaggcctatcgg

SEQ ID NO: 164200 - DNA, 25 bp, probe
cactgtttgcaatggccgtgaggtg

SEQ ID NO: 164201 - DNA, 25 bp, probe
cactgtcaagtatagccgagaagct

SEQ ID NO: 164202 - DNA, 25 bp, probe
cacggacatcaagcccgagaacatc

SEQ ID NO: 164203 - DNA, 25 bp, probe
cacggtctacatgatcaaatacctc

SEQ ID NO: 164204 - DNA, 25 bp, probe
cacggaccatgacatcaaaaggcct

SEQ ID NO: 164205 - DNA, 25 bp, probe
cacccacacacacacaaaagtcgtt

SEQ ID NO: 164206 - DNA, 25 bp, probe
cacccacccatatggaaattgctgg

SEQ ID NO: 164207 - DNA, 25 bp, probe
cagccacagtagaagcggtagaggc

SEQ ID NO: 164208 - DNA, 25 bp, probe
cacgccagtacggggatgagtccac

SEQ ID NO: 164209 - DNA, 25 bp, probe
cacgtgcagctactgcaggtgatca

SEQ ID NO: 164210 - DNA, 25 bp, probe
cactgtgtcatcgatgagcggactg

SEQ ID NO: 164211 - DNA, 25 bp, probe
cacggtcaacatggatggcactgcc

SEQ ID NO: 164212 - DNA, 25 bp, probe
cacggtcaacatggatggcactgcc

SEQ ID NO: 164213 - DNA, 25 bp, probe
cactgtgtcaaaggctgtgagccct

SEQ ID NO: 164214 - DNA, 25 bp, probe
cactgtaagaacctggagcccaagt

SEQ ID NO: 164215 - DNA, 25 bp, probe
cagcgtcaacaaacggggctcaagg

SEQ ID NO: 164216 - DNA, 25 bp, probe
cacgtctacaaggcgaggcggaaag

SEQ ID NO: 164217 - DNA, 25 bp, probe
cacgtctacaaggcgaggcggaaag

SEQ ID NO: 164218 - DNA, 25 bp, probe
cacgtcccgagctggggtaatcaag

SEQ ID NO: 164219 - DNA, 25 bp, probe
cacgtggccgagggcatggagtacc

SEQ ID NO: 164220 - DNA, 25 bp, probe
cacggggccagagagtactcatcct

SEQ ID NO: 164221 - DNA, 25 bp, probe
cacggaacacgtgcagctactgcag

SEQ ID NO: 164222 - DNA, 25 bp, probe
cactggccagagcttagtcacgcag

SEQ ID NO: 164223 - DNA, 25 bp, probe
cactgtgtcaatcattagtaacatc

SEQ ID NO: 164224 - DNA, 25 bp, probe
cactgtgtcaatcattagtaacatc

SEQ ID NO: 164225 - DNA, 25 bp, probe
cactgtgtccatctatggtagcaca

SEQ ID NO: 164226 - DNA, 25 bp, probe
cactggtcaatgctgctgtgtactc

SEQ ID NO: 164227 - DNA, 25 bp, probe
cactggtcaatgctgctgtgtactc

SEQ ID NO: 164228 - DNA, 25 bp, probe
cacggtcaatgacttctggcagatg

SEQ ID NO: 164229 - DNA, 25 bp, probe
cacgatgaccgtgtagtgcaggggg

SEQ ID NO: 164230 - DNA, 25 bp, probe
cacgatgaccgtgtagtgcaggggg

SEQ ID NO: 164231 - DNA, 25 bp, probe
cacggacacagtatgagtgaccctg

SEQ ID NO: 164232 - DNA, 25 bp, probe
cacgacaaggatatgatgtccgctc

SEQ ID NO: 164233 - DNA, 25 bp, probe
cacgacgatgcggacgtgtgggccg

SEQ ID NO: 164234 - DNA, 25 bp, probe
cacgacgtggagatggtgggccagc

SEQ ID NO: 164235 - DNA, 25 bp, probe
cacgacgaggacctggctgaggagg

SEQ ID NO: 164236 - DNA, 25 bp, probe
cacgcctcagactgtgttgaggagg

SEQ ID NO: 164237 - DNA, 25 bp, probe
cacgcctcagactgtgttgaggagg

SEQ ID NO: 164238 - DNA, 25 bp, probe
cacccgaggctcagcctgaggggtg

SEQ ID NO: 164239 - DNA, 25 bp, probe
cacccgaggtcatcaaacagtcggc

SEQ ID NO: 164240 - DNA, 25 bp, probe
cacccgtgcatgtcatcacaaacat

SEQ ID NO: 164241 - DNA, 25 bp, probe
cacccgagattgagcaataacaggt

SEQ ID NO: 164242 - DNA, 25 bp, probe
caccaggggtgcacaataaaggggg

SEQ ID NO: 164243 - DNA, 25 bp, probe
caccaactactcaccagaagggggc

SEQ ID NO: 164244 - DNA, 25 bp, probe
cagccatggctaaaaccgtggggtt

SEQ ID NO: 164245 - DNA, 25 bp, probe
cagccatggctaaaaccgtggggtt

SEQ ID NO: 164246 - DNA, 25 bp, probe
cagatccccaaatcctggggtcttt

SEQ ID NO: 164247 - DNA, 25 bp, probe
cgtccccaaacctagctaggctaag

SEQ ID NO: 164248 - DNA, 25 bp, probe
cagccccgggggttcaaggcataag

SEQ ID NO: 164249 - DNA, 25 bp, probe
cagaccccgaggttgtctggttcaa

SEQ ID NO: 164250 - DNA, 25 bp, probe
cagccacccaggatctgatcctttc

SEQ ID NO: 164251 - DNA, 25 bp, probe
caccaaatcagtgaccatcgttgtc

SEQ ID NO: 164252 - DNA, 25 bp, probe
cacctttcagtctagttcctagtcc

SEQ ID NO: 164253 - DNA, 25 bp, probe
caccttcaggcttaggtccattctc

SEQ ID NO: 164254 - DNA, 25 bp, probe
caccagtggctttagggcctgtcgc

SEQ ID NO: 164255 - DNA, 25 bp, probe
cacggtgacttccgtgtcctgttgc

SEQ ID NO: 164256 - DNA, 25 bp, probe
cacgtggatcaggtctgttcctgtt

SEQ ID NO: 164257 - DNA, 25 bp, probe
cactgtggtgtcactgtcctatggg

SEQ ID NO: 164258 - DNA, 25 bp, probe
cactgtggtgtcactgtcctatggg

SEQ ID NO: 164259 - DNA, 25 bp, probe
cacgtgccagtcactgttctaatgc

SEQ ID NO: 164260 - DNA, 25 bp, probe
cactggcaagactctggttgaatgc

SEQ ID NO: 164261 - DNA, 25 bp, probe
cactggactacttgccgccagaaat

SEQ ID NO: 164262 - DNA, 25 bp, probe
cacggacaactcagtgctggaaatc

SEQ ID NO: 164263 - DNA, 25 bp, probe
cacggacaactcagtgctggaaatc

SEQ ID NO: 164264 - DNA, 25 bp, probe
cacgcggcgggcagtgcggaagatg

SEQ ID NO: 164265 - DNA, 25 bp, probe
cacgcggcgggcagtgcggaagatg

SEQ ID NO: 164266 - DNA, 25 bp, probe
caccgtgcacgaagggggcacagga

SEQ ID NO: 164267 - DNA, 25 bp, probe
cagcggagcatcgagaggaggccag

SEQ ID NO: 164268 - DNA, 25 bp, probe
cactggacagcccagggagtgtggg

SEQ ID NO: 164269 - DNA, 25 bp, probe
cagctgaagcgcatcatggaagtgg

SEQ ID NO: 164270 - DNA, 25 bp, probe
cacccagcactttggaaggctgagg

SEQ ID NO: 164271 - DNA, 25 bp, probe
caccctatcctacacgactaggaac

SEQ ID NO: 164272 - DNA, 25 bp, probe
caccctgaccaagaccactggtgct

SEQ ID NO: 164273 - DNA, 25 bp, probe
cacccatcaaaagcaccagcaggca

SEQ ID NO: 164274 - DNA, 25 bp, probe
cacgcgcatcaagaggccgcaggac

SEQ ID NO: 164275 - DNA, 25 bp, probe
cacgcagctcaagattgccagcaat

SEQ ID NO: 164276 - DNA, 25 bp, probe
cacgcagtactatggccaacaggcc

SEQ ID NO: 164277 - DNA, 25 bp, probe
cacgcagtcagcactggcagcaagg

SEQ ID NO: 164278 - DNA, 25 bp, probe
cacgcagacagcactgtcaacactg

SEQ ID NO: 164279 - DNA, 25 bp, probe
cactggatggcttcatgatgtacct

SEQ ID NO: 164280 - DNA, 25 bp, probe
cactgggctgtgtcatgtacacgct

SEQ ID NO: 164281 - DNA, 25 bp, probe
cacgtcgcagtgccatggacgcagc

SEQ ID NO: 164282 - DNA, 25 bp, probe
cactggcacagtcaggaccagcgcc

SEQ ID NO: 164283 - DNA, 25 bp, probe
cacgcgcacgctcagcgagaagcgc

SEQ ID NO: 164284 - DNA, 25 bp, probe
cacgtctcgccaagcaggacagtgc

SEQ ID NO: 164285 - DNA, 25 bp, probe
cacgtcctgcacacacaatgcaagt

SEQ ID NO: 164286 - DNA, 25 bp, probe
cacccctgagcagagcaaacgcagt

SEQ ID NO: 164287 - DNA, 25 bp, probe
cacccctggccaaggtcatccatga

SEQ ID NO: 164288 - DNA, 25 bp, probe
cacccaagcaacaaagtcccgagca

SEQ ID NO: 164289 - DNA, 25 bp, probe
cacctcagagccagtattacctggc

SEQ ID NO: 164290 - DNA, 25 bp, probe
cacccgaggcattatttgaccggat

SEQ ID NO: 164291 - DNA, 25 bp, probe
caccgtgggcaaattctacgccaca

SEQ ID NO: 164292 - DNA, 25 bp, probe
caccgtgtccaaaaagggcttcaag

SEQ ID NO: 164293 - DNA, 25 bp, probe
caccgtgtccaaaaagggcttcaag

SEQ ID NO: 164294 - DNA, 25 bp, probe
caccgtgtccaaaaagggcttcaag

SEQ ID NO: 164295 - DNA, 25 bp, probe
caccgtgtccaaaaagggcttcaag

SEQ ID NO: 164296 - DNA, 25 bp, probe
caccgtgtccaaaaagggcttcaag

SEQ ID NO: 164297 - DNA, 25 bp, probe
cacctgggccagagatggacgtgta

SEQ ID NO: 164298 - DNA, 25 bp, probe
cacccaggccagggtcgaatctgga

SEQ ID NO: 164299 - DNA, 25 bp, probe
caccaaggcctgggatcaacctggg

SEQ ID NO: 164300 - DNA, 25 bp, probe
cacccaggcctgggaagagctcggc

SEQ ID NO: 164301 - DNA, 25 bp, probe
cacccaggctttgaagagcatggag

SEQ ID NO: 164302 - DNA, 25 bp, probe
cacccagcgttacataatcattacc

SEQ ID NO: 164303 - DNA, 25 bp, probe
caccccttgggtatatctaatggct

SEQ ID NO: 164304 - DNA, 25 bp, probe
cacccctagagtcccttctataggg

SEQ ID NO: 164305 - DNA, 25 bp, probe
caccaatgctgaaccccatgattta

SEQ ID NO: 164306 - DNA, 25 bp, probe
cacgtatgcagtatcctatctcttt

SEQ ID NO: 164307 - DNA, 25 bp, probe
cacgtgcggttcattgactatgaat

SEQ ID NO: 164308 - DNA, 25 bp, probe
cacgtgggctccaaggagcacagcc

SEQ ID NO: 164309 - DNA, 25 bp, probe
cacgctggctgctcaagtactagcc

SEQ ID NO: 164310 - DNA, 25 bp, probe
cacgctggctgctcaagtactagcc

SEQ ID NO: 164311 - DNA, 25 bp, probe
cacgctggtgcagggatcgttaccc

SEQ ID NO: 164312 - DNA, 25 bp, probe
cacctggatgatgagaccttggcaa

SEQ ID NO: 164313 - DNA, 25 bp, probe
cacctggatgatgagaccttggcaa

SEQ ID NO: 164314 - DNA, 25 bp, probe
cacgcagaggcaagaacgcttcgct

SEQ ID NO: 164315 - DNA, 25 bp, probe
cacggaggcaatcgactgcatcacg

SEQ ID NO: 164316 - DNA, 25 bp, probe
cacgctgcagatcgaggactttctg

SEQ ID NO: 164317 - DNA, 25 bp, probe
cacctgagaggggactctcgttgcc

SEQ ID NO: 164318 - DNA, 25 bp, probe
cacctgagcagaatctacccggctg

SEQ ID NO: 164319 - DNA, 25 bp, probe
cagagtgggattaacaaccctggaa

SEQ ID NO: 164320 - DNA, 25 bp, probe
cacgtggtgcttcaaagccctgaga

SEQ ID NO: 164321 - DNA, 25 bp, probe
cacctggagcatgaaaaccactagt

SEQ ID NO: 164322 - DNA, 25 bp, probe
caccgagaatccttacaccaaagct

SEQ ID NO: 164323 - DNA, 25 bp, probe
cacccagtcgtcgtaacagcaacag

SEQ ID NO: 164324 - DNA, 25 bp, probe
cacccagtcgtcgtaacagcaacag

SEQ ID NO: 164325 - DNA, 25 bp, probe
cacccaatcattctaaagcagcctc

SEQ ID NO: 164326 - DNA, 25 bp, probe
cacgaagatttgtgatccaggcctc

SEQ ID NO: 164327 - DNA, 25 bp, probe
cactggctgtttgggaccatggagc

SEQ ID NO: 164328 - DNA, 25 bp, probe
cacggctatattcggaggcattctc

SEQ ID NO: 164329 - DNA, 25 bp, probe
cagcttgtattactgggaattatag

SEQ ID NO: 164330 - DNA, 25 bp, probe
cagcttggactcatgaaggattaaa

SEQ ID NO: 164331 - DNA, 25 bp, probe
caccatggaacactatgtgtattaa

SEQ ID NO: 164332 - DNA, 25 bp, probe
cacctgtgaggcgtgatgattgttg

SEQ ID NO: 164333 - DNA, 25 bp, probe
cacggctggagcgtgcagagggctg

SEQ ID NO: 164334 - DNA, 25 bp, probe
cacgttgagagcctgcaggagaagg

SEQ ID NO: 164335 - DNA, 25 bp, probe
cacgtagctgtgctgggcatgaaca

SEQ ID NO: 164336 - DNA, 25 bp, probe
cacgctacagtgagtggctggcctt

SEQ ID NO: 164337 - DNA, 25 bp, probe
cacgcgcgctacactgactggctca

SEQ ID NO: 164338 - DNA, 25 bp, probe
cacgcgcgctacactgactggctca

SEQ ID NO: 164339 - DNA, 25 bp, probe
cacggcagctatttccacatggctg

SEQ ID NO: 164340 - DNA, 25 bp, probe
cacggagtttgtgcagaagctgaac

SEQ ID NO: 164341 - DNA, 25 bp, probe
cacggagtttgtgcagaagctgaac

SEQ ID NO: 164342 - DNA, 25 bp, probe
cacgtaacttgctgggactgtaccc

SEQ ID NO: 164343 - DNA, 25 bp, probe
cacgataagcaccagtgggactgtg

SEQ ID NO: 164344 - DNA, 25 bp, probe
cacgtgtgagcaggcagctcggcac

SEQ ID NO: 164345 - DNA, 25 bp, probe
cacgtggagcaggtcctgcagcgcc

SEQ ID NO: 164346 - DNA, 25 bp, probe
cacgtggagcaggtcctgcagcgcc

SEQ ID NO: 164347 - DNA, 25 bp, probe
cacgctggacattgtcgcaagtcac

SEQ ID NO: 164348 - DNA, 25 bp, probe
cacgcttgatctacttcaagagcaa

SEQ ID NO: 164349 - DNA, 25 bp, probe
cacgaagacattttcgggctcacgc

SEQ ID NO: 164350 - DNA, 25 bp, probe
caccaagacaggcttgaggcccgac

SEQ ID NO: 164351 - DNA, 25 bp, probe
cacccagagggccatgtgtgcccac

SEQ ID NO: 164352 - DNA, 25 bp, probe
caccgatgctgactccatgtgtgct

SEQ ID NO: 164353 - DNA, 25 bp, probe
cacgtgagctgatcgtggctgcacc

SEQ ID NO: 164354 - DNA, 25 bp, probe
cacgtgattgacaagcgcagtcccc

SEQ ID NO: 164355 - DNA, 25 bp, probe
cacggaatgaaaacagagcttcccg

SEQ ID NO: 164356 - DNA, 25 bp, probe
cacggtcttcaaccaggatttccgg

SEQ ID NO: 164357 - DNA, 25 bp, probe
cacgaccttctgtacggatttgctc

SEQ ID NO: 164358 - DNA, 25 bp, probe
caccccagtttgtgtgattctgtcc

SEQ ID NO: 164359 - DNA, 25 bp, probe
caccccagtttgtgtgattctgtcc

SEQ ID NO: 164360 - DNA, 25 bp, probe
cacccacagcagtttctggcagttt

SEQ ID NO: 164361 - DNA, 25 bp, probe
cagagtacatagctcctgaggtttt

SEQ ID NO: 164362 - DNA, 25 bp, probe
cacgtatcagggaaattgcaggtct

SEQ ID NO: 164363 - DNA, 25 bp, probe
catacttcgattcttatcatggttc

SEQ ID NO: 164364 - DNA, 25 bp, probe
caccctctattccttgatagcggat

SEQ ID NO: 164365 - DNA, 25 bp, probe
caccctctttgtacaaccagtatga

SEQ ID NO: 164366 - DNA, 25 bp, probe
cacccagctttgctcaaaagccaaa

SEQ ID NO: 164367 - DNA, 25 bp, probe
cacccagctttgctcaaaagccaaa

SEQ ID NO: 164368 - DNA, 25 bp, probe
caccgcctactggcaaggaagaaca

SEQ ID NO: 164369 - DNA, 25 bp, probe
caccctccagtacagctacagaaag

SEQ ID NO: 164370 - DNA, 25 bp, probe
cagcctccctttgaggccgacaatg

SEQ ID NO: 164371 - DNA, 25 bp, probe
cacccctcccattaggacaatcagt

SEQ ID NO: 164372 - DNA, 25 bp, probe
caccccccaaaatcagacaaatgct

SEQ ID NO: 164373 - DNA, 25 bp, probe
caccccgtctacatcctgaaagggg

SEQ ID NO: 164374 - DNA, 25 bp, probe
caccccgtctacatcctgaaagggg

SEQ ID NO: 164375 - DNA, 25 bp, probe
caccccgacagacactgtgaacgga

SEQ ID NO: 164376 - DNA, 25 bp, probe
caccgacgtcagcaacttcgacgag

SEQ ID NO: 164377 - DNA, 25 bp, probe
caccgacgtcagcaacttcgacgag

SEQ ID NO: 164378 - DNA, 25 bp, probe
caccaaggtacctacattctaccac

SEQ ID NO: 164379 - DNA, 25 bp, probe
cacccagggacggccatgtgaagcc

SEQ ID NO: 164380 - DNA, 25 bp, probe
cacgcgcaggtgacggccttagatc

SEQ ID NO: 164381 - DNA, 25 bp, probe
cagcccagggcctgagttagactat

SEQ ID NO: 164382 - DNA, 25 bp, probe
catccacggacctgagtttactttt

SEQ ID NO: 164383 - DNA, 25 bp, probe
cacgttggtcactgagtttattcta

SEQ ID NO: 164384 - DNA, 25 bp, probe
cacgcgtccgggaatttaattctat

SEQ ID NO: 164385 - DNA, 25 bp, probe
caccgtttggtgattttcatgtttc

SEQ ID NO: 164386 - DNA, 25 bp, probe
caccgtttggtgattttcatgtttc

SEQ ID NO: 164387 - DNA, 25 bp, probe
cacccatgttttcttattcaattcc

SEQ ID NO: 164388 - DNA, 25 bp, probe
cagccggattttgttattgatatct

SEQ ID NO: 164389 - DNA, 25 bp, probe
caccggcattttatgtactttgtcc

SEQ ID NO: 164390 - DNA, 25 bp, probe
cacctacgtttatttagctctcttc

SEQ ID NO: 164391 - DNA, 25 bp, probe
caccttctgtttctttgcttatttt

SEQ ID NO: 164392 - DNA, 25 bp, probe
caccttcatttaactctttgaaact

SEQ ID NO: 164393 - DNA, 25 bp, probe
caccttgcatttcaaaatggtaact

SEQ ID NO: 164394 - DNA, 25 bp, probe
caccctatgacgaaaaagcagctaa

SEQ ID NO: 164395 - DNA, 25 bp, probe
cacccatcaatctaactaacagtaa

SEQ ID NO: 164396 - DNA, 25 bp, probe
cacccatcaatctaactaacagtaa

SEQ ID NO: 164397 - DNA, 25 bp, probe
caccctaataaagcaatcgcaaaaa

SEQ ID NO: 164398 - DNA, 25 bp, probe
cacctcattttatggcaccagaagt

SEQ ID NO: 164399 - DNA, 25 bp, probe
cacgtgtttgagcaggcatccagca

SEQ ID NO: 164400 - DNA, 25 bp, probe
cacggtggcttgcaacatgctcatg

SEQ ID NO: 164401 - DNA, 25 bp, probe
cacgggtgatagccagactgctgcg

SEQ ID NO: 164402 - DNA, 25 bp, probe
cacgggtgatagccagactgctgcg

SEQ ID NO: 164403 - DNA, 25 bp, probe
cacgattgtgacagcgtatgtgatg

SEQ ID NO: 164404 - DNA, 25 bp, probe
cacgatgtgtgtggtcgtctgctgg

SEQ ID NO: 164405 - DNA, 25 bp, probe
cacgtgttgctgctggtgcgcagcg

SEQ ID NO: 164406 - DNA, 25 bp, probe
cacggtgctggtacaggatgcagga

SEQ ID NO: 164407 - DNA, 25 bp, probe
cacggtgctggtgcaggaggctggt

SEQ ID NO: 164408 - DNA, 25 bp, probe
cagctttgcggggcgtatgtgtggc

SEQ ID NO: 164409 - DNA, 25 bp, probe
cagcgggtgttggtgatttgtagcc

SEQ ID NO: 164410 - DNA, 25 bp, probe
cacgcagtgtttcagatgtcttcct

SEQ ID NO: 164411 - DNA, 25 bp, probe
cacgtgtggatgagcgtgcactccc

SEQ ID NO: 164412 - DNA, 25 bp, probe
catcgtatggggtgacaccgcctag

SEQ ID NO: 164413 - DNA, 25 bp, probe
cacgtatgaggagaagccgccctac

SEQ ID NO: 164414 - DNA, 25 bp, probe
cacggtgagcggaatggccgccgga

SEQ ID NO: 164415 - DNA, 25 bp, probe
caccttagggcagtgtccgtcagtg

SEQ ID NO: 164416 - DNA, 25 bp, probe
cacctgtggagggcatttcccgtgg

SEQ ID NO: 164417 - DNA, 25 bp, probe
cacctgcatatactggatttccact

SEQ ID NO: 164418 - DNA, 25 bp, probe
caccgcaatatcgttcagtacctgg

SEQ ID NO: 164419 - DNA, 25 bp, probe
caccgcaatatcgttcagtacctgg

SEQ ID NO: 164420 - DNA, 25 bp, probe
cagtcccaaagcacagttcttggtt

SEQ ID NO: 164421 - DNA, 25 bp, probe
cacccgaccagcagagctttttaat

SEQ ID NO: 164422 - DNA, 25 bp, probe
caccacgcccagttgatttttgtat

SEQ ID NO: 164423 - DNA, 25 bp, probe
caccgtgcccatcatggtatatttt

SEQ ID NO: 164424 - DNA, 25 bp, probe
catctttgtccacgtttaatacttt

SEQ ID NO: 164425 - DNA, 25 bp, probe
cacgtgtgtcccctttgcaaagggg

SEQ ID NO: 164426 - DNA, 25 bp, probe
cacgtggtccttttgtgaaacctag

SEQ ID NO: 164427 - DNA, 25 bp, probe
cacgtagtaattctgtgacatactt

SEQ ID NO: 164428 - DNA, 25 bp, probe
cacgtctgtaatcccaggactttgg

SEQ ID NO: 164429 - DNA, 25 bp, probe
cacgcctgtaatcccagcactttgg

SEQ ID NO: 164430 - DNA, 25 bp, probe
caccctgtaaactaggcggctgcag

SEQ ID NO: 164431 - DNA, 25 bp, probe
caccctgatatacagcacggagctg

SEQ ID NO: 164432 - DNA, 25 bp, probe
cacccttcaggcgagcaactggggt

SEQ ID NO: 164433 - DNA, 25 bp, probe
cacctcattcttctaaaagtggata

SEQ ID NO: 164434 - DNA, 25 bp, probe
caccttctggatctggcacaagtaa

SEQ ID NO: 164435 - DNA, 25 bp, probe
caccttctggatctggcacaagtaa

SEQ ID NO: 164436 - DNA, 25 bp, probe
cacctacgcgataataaatgactgc

SEQ ID NO: 164437 - DNA, 25 bp, probe
cacctcaccgtggtgatcgtcttct

SEQ ID NO: 164438 - DNA, 25 bp, probe
cacctcaccgtggtgatcgtcttct

SEQ ID NO: 164439 - DNA, 25 bp, probe
cacctgcccagaaggttatctgttg

SEQ ID NO: 164440 - DNA, 25 bp, probe
caccctccagagaatttttacgcaa

SEQ ID NO: 164441 - DNA, 25 bp, probe
cacccacaaatgcttattagcctaa

SEQ ID NO: 164442 - DNA, 25 bp, probe
caccccagaatagttaaactctatg

SEQ ID NO: 164443 - DNA, 25 bp, probe
caccaacaaatggtttcaacccatg

SEQ ID NO: 164444 - DNA, 25 bp, probe
cacccctttggaattcaacacagac

SEQ ID NO: 164445 - DNA, 25 bp, probe
caccatccttttgttgaaatggcat

SEQ ID NO: 164446 - DNA, 25 bp, probe
cacctcatttggctttgtgaattgt

SEQ ID NO: 164447 - DNA, 25 bp, probe
cacctcatttggctttgtgaattgt

SEQ ID NO: 164448 - DNA, 25 bp, probe
cacgctgtctcttgagatttggata

SEQ ID NO: 164449 - DNA, 25 bp, probe
catacgtctttattacccaagtctt

SEQ ID NO: 164450 - DNA, 25 bp, probe
ctacacttttttttgccaactgact

SEQ ID NO: 164451 - DNA, 25 bp, probe
cacccttttctgtttgctaagtgag

SEQ ID NO: 164452 - DNA, 25 bp, probe
cacccatacttctaccctgtggtga

SEQ ID NO: 164453 - DNA, 25 bp, probe
cacccatacttctaccctgtggtga

SEQ ID NO: 164454 - DNA, 25 bp, probe
cacccacaatcctattctcgggctg

SEQ ID NO: 164455 - DNA, 25 bp, probe
cacctcaaagcccttgaagagtggg

SEQ ID NO: 164456 - DNA, 25 bp, probe
cacctgaaacagcttccagagtgta

SEQ ID NO: 164457 - DNA, 25 bp, probe
cacctcatagagggctcccagaagt

SEQ ID NO: 164458 - DNA, 25 bp, probe
cacctccatggccttcaaaaacatt

SEQ ID NO: 164459 - DNA, 25 bp, probe
cacccctggatcacagcaaattcat

SEQ ID NO: 164460 - DNA, 25 bp, probe
caccaccgtatatcaaacctcactt

SEQ ID NO: 164461 - DNA, 25 bp, probe
caccatccgttttcatgacctcctg

SEQ ID NO: 164462 - DNA, 25 bp, probe
caccatctctgtggtgaagtcacag

SEQ ID NO: 164463 - DNA, 25 bp, probe
cacctgcatgtgctgtcacgcacaa

SEQ ID NO: 164464 - DNA, 25 bp, probe
caccatgctagcctgctacttggtg

SEQ ID NO: 164465 - DNA, 25 bp, probe
cacctgacggtgatcttgggcagaa

SEQ ID NO: 164466 - DNA, 25 bp, probe
caccaactgggacgacatggagaaa

SEQ ID NO: 164467 - DNA, 25 bp, probe
caccaagcttgaccgcattggcaaa

SEQ ID NO: 164468 - DNA, 25 bp, probe
cacgcagactgtagctgctgtggga

SEQ ID NO: 164469 - DNA, 25 bp, probe
cacgcaactgtctagtgggccaggg

SEQ ID NO: 164470 - DNA, 25 bp, probe
cacgcaacatcctggtctcagagga

SEQ ID NO: 164471 - DNA, 25 bp, probe
cacgcaaacatgggtgctcttggag

SEQ ID NO: 164472 - DNA, 25 bp, probe
cacgttaaactgcccatctggagaa

SEQ ID NO: 164473 - DNA, 25 bp, probe
cacctcccaactccagtctgggaag

SEQ ID NO: 164474 - DNA, 25 bp, probe
caccttcatcaagcggtccgaggtg

SEQ ID NO: 164475 - DNA, 25 bp, probe
cacctcctaggtaggctcaaaggta

SEQ ID NO: 164476 - DNA, 25 bp, probe
caccttctaaaaactcatgtgcagg

SEQ ID NO: 164477 - DNA, 25 bp, probe
caccttcaggaaaacggctgcggcc

SEQ ID NO: 164478 - DNA, 25 bp, probe
caccgacgaatattacaacgcggca

SEQ ID NO: 164479 - DNA, 25 bp, probe
cagccaaagttactacaacggcgac

SEQ ID NO: 164480 - DNA, 25 bp, probe
cacgagcaagtttctcattactgtc

SEQ ID NO: 164481 - DNA, 25 bp, probe
cacgagcaagtttctcattactgtc

SEQ ID NO: 164482 - DNA, 25 bp, probe
cacgacacctgatctcgtatcacta

SEQ ID NO: 164483 - DNA, 25 bp, probe
cacccctatgtctatggctacatgc

SEQ ID NO: 164484 - DNA, 25 bp, probe
cacccctatgtctatggctacatgc

SEQ ID NO: 164485 - DNA, 25 bp, probe
cacccctatcagtatactagcacct

SEQ ID NO: 164486 - DNA, 25 bp, probe
cacctacttcgtgacaggcatcgtc

SEQ ID NO: 164487 - DNA, 25 bp, probe
cacctacgtcctgatcgacatggtt

SEQ ID NO: 164488 - DNA, 25 bp, probe
cacctacgtcctgatcgacatggtt

SEQ ID NO: 164489 - DNA, 25 bp, probe
caccaagccttttcataatcaagtt

SEQ ID NO: 164490 - DNA, 25 bp, probe
caccgtgccttatcaaagccagcac

SEQ ID NO: 164491 - DNA, 25 bp, probe
caccctactttgtgcaggtcatacc

SEQ ID NO: 164492 - DNA, 25 bp, probe
caccctactttgtgcaggtcatacc

SEQ ID NO: 164493 - DNA, 25 bp, probe
cacccaatctcttgcaactggtcaa

SEQ ID NO: 164494 - DNA, 25 bp, probe
cacccaatctcttgcaactggtcaa

SEQ ID NO: 164495 - DNA, 25 bp, probe
cacctactatgttgacacatttcct

SEQ ID NO: 164496 - DNA, 25 bp, probe
cacccctatgtggaccactatgatc

SEQ ID NO: 164497 - DNA, 25 bp, probe
cacccctatgtggaccactatgatc

SEQ ID NO: 164498 - DNA, 25 bp, probe
cacgcacttttctaatcattgtaca

SEQ ID NO: 164499 - DNA, 25 bp, probe
cacgccgcccatgaagatggtgaca

SEQ ID NO: 164500 - DNA, 25 bp, probe
caccatagcccagccagatgagtgc

SEQ ID NO: 164501 - DNA, 25 bp, probe
caccatagcccagccagatgagtgc

SEQ ID NO: 164502 - DNA, 25 bp, probe
cacgctgatggcagtcacagggggc

SEQ ID NO: 164503 - DNA, 25 bp, probe
cacgctgatggcagtggtcgggggc

SEQ ID NO: 164504 - DNA, 25 bp, probe
cagctcctggaactgcgacggggag

SEQ ID NO: 164505 - DNA, 25 bp, probe
cagctcctggaactgcgacggggag

SEQ ID NO: 164506 - DNA, 25 bp, probe
caccctggagagcgtcaggggccca

SEQ ID NO: 164507 - DNA, 25 bp, probe
cacccaggaatgcgggggtctgctc

SEQ ID NO: 164508 - DNA, 25 bp, probe
caccaagctgaaaccctggtgccct

SEQ ID NO: 164509 - DNA, 25 bp, probe
cacctactaagagcagcgggcctgt

SEQ ID NO: 164510 - DNA, 25 bp, probe
cacctaccacaagcaggtgtccctg

SEQ ID NO: 164511 - DNA, 25 bp, probe
cacctagccttgtaaaatgttcctg

SEQ ID NO: 164512 - DNA, 25 bp, probe
cagcctataatcctaagaacttctc

SEQ ID NO: 164513 - DNA, 25 bp, probe
cacctcatttcctaacttctgtgtc

SEQ ID NO: 164514 - DNA, 25 bp, probe
cacgttttgtgaccactgtgggtca

SEQ ID NO: 164515 - DNA, 25 bp, probe
cacgactattcttggacttgggacc

SEQ ID NO: 164516 - DNA, 25 bp, probe
cacgcattcttcaggagtgtggcag

SEQ ID NO: 164517 - DNA, 25 bp, probe
cacccgttttggcattgctgctaag

SEQ ID NO: 164518 - DNA, 25 bp, probe
cacccccgtgtgagatttctcacct

SEQ ID NO: 164519 - DNA, 25 bp, probe
cacctttcaggtgaatttctaccat

SEQ ID NO: 164520 - DNA, 25 bp, probe
cacctttagggagattctctgtggc

SEQ ID NO: 164521 - DNA, 25 bp, probe
cacctttagggagattctctgtggc

SEQ ID NO: 164522 - DNA, 25 bp, probe
caccatatcccacagcaatttctgg

SEQ ID NO: 164523 - DNA, 25 bp, probe
caccaatccctgaaagattaagccc

SEQ ID NO: 164524 - DNA, 25 bp, probe
caccaatgccaggaaacatcttagg

SEQ ID NO: 164525 - DNA, 25 bp, probe
caccaggcttgcaaatgaacttcag

SEQ ID NO: 164526 - DNA, 25 bp, probe
caccacagatggaattaacttcatg

SEQ ID NO: 164527 - DNA, 25 bp, probe
cacgacgggaagacaagttcatgta

SEQ ID NO: 164528 - DNA, 25 bp, probe
cacgacgggaagacaagttcatgta

SEQ ID NO: 164529 - DNA, 25 bp, probe
cataaagggaacaaatgtctagttt

SEQ ID NO: 164530 - DNA, 25 bp, probe
cagataggggacggaaggtcgtttg

SEQ ID NO: 164531 - DNA, 25 bp, probe
cagataggggacggaaggtcgtttg

SEQ ID NO: 164532 - DNA, 25 bp, probe
cagatatttgaagctgaccgtcttt

SEQ ID NO: 164533 - DNA, 25 bp, probe
cagcttttaagatacgagttttgtg

SEQ ID NO: 164534 - DNA, 25 bp, probe
cacccttcgcagttactggttggtg

SEQ ID NO: 164535 - DNA, 25 bp, probe
cacccggccgagaatatgtgttgtt

SEQ ID NO: 164536 - DNA, 25 bp, probe
caccattggacctatcttggcttct

SEQ ID NO: 164537 - DNA, 25 bp, probe
caccattggacctatcttggcttct

SEQ ID NO: 164538 - DNA, 25 bp, probe
caccaataatcatctcattgacttt

SEQ ID NO: 164539 - DNA, 25 bp, probe
caccttaatctcttctaatctgtgt

SEQ ID NO: 164540 - DNA, 25 bp, probe
caccctggggcacttgaatcttgga

SEQ ID NO: 164541 - DNA, 25 bp, probe
cacccttgtggacgaagcaattgta

SEQ ID NO: 164542 - DNA, 25 bp, probe
cacccaggtgtgtcgacatcagttg

SEQ ID NO: 164543 - DNA, 25 bp, probe
tacgtcatccagactactcgaaatg

SEQ ID NO: 164544 - DNA, 25 bp, probe
caccctggtgttgactgactttaac

SEQ ID NO: 164545 - DNA, 25 bp, probe
caccgtggtcttgcacatgactaag

SEQ ID NO: 164546 - DNA, 25 bp, probe
caccttggacctcagtgactcagaa

SEQ ID NO: 164547 - DNA, 25 bp, probe
cacctgtggcacggaatgaaaacag

SEQ ID NO: 164548 - DNA, 25 bp, probe
caccattaactggcctgatctaaca

SEQ ID NO: 164549 - DNA, 25 bp, probe
caccttgttactgctactacacttt

SEQ ID NO: 164550 - DNA, 25 bp, probe
caccctcctactgcagacagaactg

SEQ ID NO: 164551 - DNA, 25 bp, probe
cacccaagcactaccagacaaagcg

SEQ ID NO: 164552 - DNA, 25 bp, probe
cacccaggcactggacgtcacagag

SEQ ID NO: 164553 - DNA, 25 bp, probe
caccgcttcattgaggctgcaagag

SEQ ID NO: 164554 - DNA, 25 bp, probe
cacccattacattgtgggaatggat

SEQ ID NO: 164555 - DNA, 25 bp, probe
caccctgagacatgctgggttcagt

SEQ ID NO: 164556 - DNA, 25 bp, probe
cacctctgccaaggctgggtaagac

SEQ ID NO: 164557 - DNA, 25 bp, probe
caccctgcctacgccaggagaagtt

SEQ ID NO: 164558 - DNA, 25 bp, probe
cacccccatactgcaaggacaaagg

SEQ ID NO: 164559 - DNA, 25 bp, probe
cacccccatactgcaaggacaaagg

SEQ ID NO: 164560 - DNA, 25 bp, probe
cacccccgcacgactagggagtgag

SEQ ID NO: 164561 - DNA, 25 bp, probe
caccaacctgacccgggaagtcagg

SEQ ID NO: 164562 - DNA, 25 bp, probe
caccaacctgacccgggaagtcagg

SEQ ID NO: 164563 - DNA, 25 bp, probe
cacccaccgacgtggggcaggcaga

SEQ ID NO: 164564 - DNA, 25 bp, probe
cacccgatccactggggagcaggaa

SEQ ID NO: 164565 - DNA, 25 bp, probe
caccttgtgacccagggtggggaca

SEQ ID NO: 164566 - DNA, 25 bp, probe
cacctgaagacccaggggtgcggca

SEQ ID NO: 164567 - DNA, 25 bp, probe
cacccacagagggagggctttggag

SEQ ID NO: 164568 - DNA, 25 bp, probe
caccaacaatgagagagtggttgta

SEQ ID NO: 164569 - DNA, 25 bp, probe
caccccaagaggcgtgagggcaaat

SEQ ID NO: 164570 - DNA, 25 bp, probe
cacccacgggggagacggagagata

SEQ ID NO: 164571 - DNA, 25 bp, probe
caccccggtgcaggtggacggggag

SEQ ID NO: 164572 - DNA, 25 bp, probe
caccccggtgcaggtggacggggag

SEQ ID NO: 164573 - DNA, 25 bp, probe
cacccacggacaggtaggcacgaga

SEQ ID NO: 164574 - DNA, 25 bp, probe
caccgctcgggctggaagcaggaga

SEQ ID NO: 164575 - DNA, 25 bp, probe
cacctcttggtgtggtgcagggatc

SEQ ID NO: 164576 - DNA, 25 bp, probe
cacgcatcttcatgaagggcgcgac

SEQ ID NO: 164577 - DNA, 25 bp, probe
cacgcagtacattgacgggcagggc

SEQ ID NO: 164578 - DNA, 25 bp, probe
cacgcagtacattgacgggcagggc

SEQ ID NO: 164579 - DNA, 25 bp, probe
cacgcagtacattgacgggcagggc

SEQ ID NO: 164580 - DNA, 25 bp, probe
cacgcagtacattgacgggcagggc

SEQ ID NO: 164581 - DNA, 25 bp, probe
cacgcagtacattgacgggcagggc

SEQ ID NO: 164582 - DNA, 25 bp, probe
cacgcttagcatcgtgctggagcgg

SEQ ID NO: 164583 - DNA, 25 bp, probe
cacgctctgatcaggggtgctggtt

SEQ ID NO: 164584 - DNA, 25 bp, probe
cacgacctcaagagcctgatggaga

SEQ ID NO: 164585 - DNA, 25 bp, probe
cacgacctctaagccgagagaggag

SEQ ID NO: 164586 - DNA, 25 bp, probe
cacgacctctaagccgagagaggag

SEQ ID NO: 164587 - DNA, 25 bp, probe
caccacttttatcctcaaggcggga

SEQ ID NO: 164588 - DNA, 25 bp, probe
caccgttcttcagctctaacgggga

SEQ ID NO: 164589 - DNA, 25 bp, probe
cacctggcatttggtacccaaggga

SEQ ID NO: 164590 - DNA, 25 bp, probe
caccttcaaagggacacctacggca

SEQ ID NO: 164591 - DNA, 25 bp, probe
caccatgaaaagagaccccactgcc

SEQ ID NO: 164592 - DNA, 25 bp, probe
cacctgcaacggagactccggtggg

SEQ ID NO: 164593 - DNA, 25 bp, probe
caccgagaggggccagcccatggtg

SEQ ID NO: 164594 - DNA, 25 bp, probe
caccgagaggggccagcccatggtg

SEQ ID NO: 164595 - DNA, 25 bp, probe
cacctggaggggctgctgcaagagg

SEQ ID NO: 164596 - DNA, 25 bp, probe
caccgcgacggcaagtggcagaacg

SEQ ID NO: 164597 - DNA, 25 bp, probe
cacgctgccagctttactggagaac

SEQ ID NO: 164598 - DNA, 25 bp, probe
caccgcgatcttaaatgtgacaaca

SEQ ID NO: 164599 - DNA, 25 bp, probe
caccagttacttgagtgtcactcag

SEQ ID NO: 164600 - DNA, 25 bp, probe
caccagttcctaggtgtgtgccacc

SEQ ID NO: 164601 - DNA, 25 bp, probe
caccagttcctaggtgtgtgccacc

SEQ ID NO: 164602 - DNA, 25 bp, probe
gacctttgcctaccttgtaggcctg

SEQ ID NO: 164603 - DNA, 25 bp, probe
gacctttgcctaccttgtaggcctg

SEQ ID NO: 164604 - DNA, 25 bp, probe
cagccttggccctgttgtaggcttg

SEQ ID NO: 164605 - DNA, 25 bp, probe
caccgtgaacctcagttattgctag

SEQ ID NO: 164606 - DNA, 25 bp, probe
caccttcacagcactagctttttat

SEQ ID NO: 164607 - DNA, 25 bp, probe
caccttcacagcactagctttttat

SEQ ID NO: 164608 - DNA, 25 bp, probe
caccgtcagcagtttgcagttttcc

SEQ ID NO: 164609 - DNA, 25 bp, probe
catccagacacgctggctggtttcc

SEQ ID NO: 164610 - DNA, 25 bp, probe
caccgaaagagagcgcctatctcat

SEQ ID NO: 164611 - DNA, 25 bp, probe
caccgaaagagagcgcctatctcat

SEQ ID NO: 164612 - DNA, 25 bp, probe
cacccagaagagccgcaaggaccag

SEQ ID NO: 164613 - DNA, 25 bp, probe
caccaagcggagacgcaaggcctgt

SEQ ID NO: 164614 - DNA, 25 bp, probe
cacgcatctgggagcgagagggcat

SEQ ID NO: 164615 - DNA, 25 bp, probe
cacgcatctgggagcgagagggcat

SEQ ID NO: 164616 - DNA, 25 bp, probe
cacgcttggggagaacatcgcagat

SEQ ID NO: 164617 - DNA, 25 bp, probe
cacctctgttgggacccacaggaaa

SEQ ID NO: 164618 - DNA, 25 bp, probe
caccctgttgggcgccataatcaat

SEQ ID NO: 164619 - DNA, 25 bp, probe
caccctggggacagcagcatacatg

SEQ ID NO: 164620 - DNA, 25 bp, probe
caccctgaggtgagcatcatcttct

SEQ ID NO: 164621 - DNA, 25 bp, probe
caccgattggtgagctgatcgctat

SEQ ID NO: 164622 - DNA, 25 bp, probe
cacctgttactcagcagaccatgaa

SEQ ID NO: 164623 - DNA, 25 bp, probe
cacctttgacatggcgcaactctat

SEQ ID NO: 164624 - DNA, 25 bp, probe
cacctcggacatggcgtatgtcatc

SEQ ID NO: 164625 - DNA, 25 bp, probe
cacctggtgataccgtggtcacggc

SEQ ID NO: 164626 - DNA, 25 bp, probe
cacgctggtgttcatcggctacgtg

SEQ ID NO: 164627 - DNA, 25 bp, probe
cacgctggagttcatggctccggag

SEQ ID NO: 164628 - DNA, 25 bp, probe
cacgctggagttcatggctccggag

SEQ ID NO: 164629 - DNA, 25 bp, probe
cacgcgagctgtggactggtgggga

SEQ ID NO: 164630 - DNA, 25 bp, probe
caccgactgctgaggtgtggggcgg

SEQ ID NO: 164631 - DNA, 25 bp, probe
catcccactcggtgctgttgggtag

SEQ ID NO: 164632 - DNA, 25 bp, probe
catcccactcggtgctgttgggtag

SEQ ID NO: 164633 - DNA, 25 bp, probe
catcccactcggtgctgttgggtag

SEQ ID NO: 164634 - DNA, 25 bp, probe
cacctccttgctttgctgtttggtg

SEQ ID NO: 164635 - DNA, 25 bp, probe
cacccccatgacattgcatttgggg

SEQ ID NO: 164636 - DNA, 25 bp, probe
caccaaacaacattatgttggggga

SEQ ID NO: 164637 - DNA, 25 bp, probe
caccatgaaaaccttctgtgggacc

SEQ ID NO: 164638 - DNA, 25 bp, probe
caccatgaaaaccttctgtgggacc

SEQ ID NO: 164639 - DNA, 25 bp, probe
caccatgaaaaccttctgtgggacc

SEQ ID NO: 164640 - DNA, 25 bp, probe
caccagaactccacggtgagggccg

SEQ ID NO: 164641 - DNA, 25 bp, probe
caccaaatccagggcggagggccgg

SEQ ID NO: 164642 - DNA, 25 bp, probe
caccaaatccagggcggagggccgg

SEQ ID NO: 164643 - DNA, 25 bp, probe
caccttcctccaggggagggccaga

SEQ ID NO: 164644 - DNA, 25 bp, probe
caccttcctccaggggagggccaga

SEQ ID NO: 164645 - DNA, 25 bp, probe
caccttccccgcatggtgggtagat

SEQ ID NO: 164646 - DNA, 25 bp, probe
caccctaggccacttggagggtagc

SEQ ID NO: 164647 - DNA, 25 bp, probe
caccctggatacactggagtgggaa

SEQ ID NO: 164648 - DNA, 25 bp, probe
cacgcggagaacctcgtgcagtggg

SEQ ID NO: 164649 - DNA, 25 bp, probe
cacgcggagaacctcgtgcagtggg

SEQ ID NO: 164650 - DNA, 25 bp, probe
cacgcggagaacctcgtgcagtggg

SEQ ID NO: 164651 - DNA, 25 bp, probe
cacgccaggaggctgtggctgctgt

SEQ ID NO: 164652 - DNA, 25 bp, probe
cacccagggatcaaggcgctgctgg

SEQ ID NO: 164653 - DNA, 25 bp, probe
cacccagctggtgacccagctgacc

SEQ ID NO: 164654 - DNA, 25 bp, probe
caccctgtgtctgacgacagtgacc

SEQ ID NO: 164655 - DNA, 25 bp, probe
cacccgtatttatacagctgcttct

SEQ ID NO: 164656 - DNA, 25 bp, probe
caccctggatttgcatacattcttc

SEQ ID NO: 164657 - DNA, 25 bp, probe
caccctcacataatcaaactttatc

SEQ ID NO: 164658 - DNA, 25 bp, probe
cagccttagaacaagaaccttacct

SEQ ID NO: 164659 - DNA, 25 bp, probe
caccagtggaactaaacagttgagt

SEQ ID NO: 164660 - DNA, 25 bp, probe
cagccaaggaacctaaagtgggtag

SEQ ID NO: 164661 - DNA, 25 bp, probe
cacctgggagagctcaaactggctg

SEQ ID NO: 164662 - DNA, 25 bp, probe
cacctgggagagctcaaactggctg

SEQ ID NO: 164663 - DNA, 25 bp, probe
cacctaggcctgcaaattctgcctc

SEQ ID NO: 164664 - DNA, 25 bp, probe
cacctaggcctgcaaattctgcctc

SEQ ID NO: 164665 - DNA, 25 bp, probe
cacctacaaccgcaaatatgcccat

SEQ ID NO: 164666 - DNA, 25 bp, probe
cacctccaactgcaaaaatggcttc

SEQ ID NO: 164667 - DNA, 25 bp, probe
cacccaagtgctgaataaatctctt

SEQ ID NO: 164668 - DNA, 25 bp, probe
cacccaagtgctgaataaatctctt

SEQ ID NO: 164669 - DNA, 25 bp, probe
cacccagatctgcaaatacatgtcc

SEQ ID NO: 164670 - DNA, 25 bp, probe
cacccagatctgcaaatacatgtcc

SEQ ID NO: 164671 - DNA, 25 bp, probe
cacccgcatgtgtaacaacagccgc

SEQ ID NO: 164672 - DNA, 25 bp, probe
cacgcccagtgagaacatctggccg

SEQ ID NO: 164673 - DNA, 25 bp, probe
cacctccagtgactcaaattactag

SEQ ID NO: 164674 - DNA, 25 bp, probe
caccccattccttatattcagcaag

SEQ ID NO: 164675 - DNA, 25 bp, probe
caccccattcctcatggacaaggct

SEQ ID NO: 164676 - DNA, 25 bp, probe
caccccattcctcatggacaaggct

SEQ ID NO: 164677 - DNA, 25 bp, probe
caccccttctctcagtggagaggaa

SEQ ID NO: 164678 - DNA, 25 bp, probe
cacccctacctggaatggaggctgg

SEQ ID NO: 164679 - DNA, 25 bp, probe
cacctcctaccccataggagttaga

SEQ ID NO: 164680 - DNA, 25 bp, probe
cacctgctttccaaatctggcagat

SEQ ID NO: 164681 - DNA, 25 bp, probe
cacgcgctttaagtgtgctgggcag

SEQ ID NO: 164682 - DNA, 25 bp, probe
caccctcttcacttgtgtgtgtgtg

SEQ ID NO: 164683 - DNA, 25 bp, probe
caccctcttcacttgtgtgtgtgtg

SEQ ID NO: 164684 - DNA, 25 bp, probe
cacctctttacgtatatgatgtggc

SEQ ID NO: 164685 - DNA, 25 bp, probe
cacccttcaacccaaatgtgacagg

SEQ ID NO: 164686 - DNA, 25 bp, probe
cacccttctcattccaacagtgagt

SEQ ID NO: 164687 - DNA, 25 bp, probe
caccctactatgtgctacagctgac

SEQ ID NO: 164688 - DNA, 25 bp, probe
caccctactgcgggatgacttgtgc

SEQ ID NO: 164689 - DNA, 25 bp, probe
cacgcctgcaggctggagactggac

SEQ ID NO: 164690 - DNA, 25 bp, probe
cacccagcagagcttctcagtgggc

SEQ ID NO: 164691 - DNA, 25 bp, probe
cacccagctggacccaggaggagcc

SEQ ID NO: 164692 - DNA, 25 bp, probe
caccctgctggaccaaggtgcggac

SEQ ID NO: 164693 - DNA, 25 bp, probe
caccgcctgctacacaggcaggaat

SEQ ID NO: 164694 - DNA, 25 bp, probe
caccgccgcagggacaggaagcaga

SEQ ID NO: 164695 - DNA, 25 bp, probe
caccctccaggggacaactgagaaa

SEQ ID NO: 164696 - DNA, 25 bp, probe
cacgccaccgggagagatgctgaga

SEQ ID NO: 164697 - DNA, 25 bp, probe
cacccaccatgaggcatggagcagg

SEQ ID NO: 164698 - DNA, 25 bp, probe
cacccacatcaaggtcatgtgcgag

SEQ ID NO: 164699 - DNA, 25 bp, probe
cacccacatcatcgtggtgtccatg

SEQ ID NO: 164700 - DNA, 25 bp, probe
caccaagtctcactggctgtcagta

SEQ ID NO: 164701 - DNA, 25 bp, probe
caccacaggctgcagacgtttgcca

SEQ ID NO: 164702 - DNA, 25 bp, probe
cacccacagtggcagcgtgttggag

SEQ ID NO: 164703 - DNA, 25 bp, probe
cacccacagtgaccgagtcattggc

SEQ ID NO: 164704 - DNA, 25 bp, probe
cacccgagacaccatagtcattgct

SEQ ID NO: 164705 - DNA, 25 bp, probe
caccctagacgctaaatcaatgctg

SEQ ID NO: 164706 - DNA, 25 bp, probe
cacccctcagcttgataatagtctg

SEQ ID NO: 164707 - DNA, 25 bp, probe
cacccagctctgagttcatggatgt

SEQ ID NO: 164708 - DNA, 25 bp, probe
cacccccggagctgatggatgtgag

SEQ ID NO: 164709 - DNA, 25 bp, probe
cacccccggagctgatggatgtgag

SEQ ID NO: 164710 - DNA, 25 bp, probe
caccccctcaaggtgaagagctgat

SEQ ID NO: 164711 - DNA, 25 bp, probe
cacccaccatgccaggggtggcaat

SEQ ID NO: 164712 - DNA, 25 bp, probe
cacccaccatgccaggggtggcaat

SEQ ID NO: 164713 - DNA, 25 bp, probe
caccatccacatgcaggtggtacgc

SEQ ID NO: 164714 - DNA, 25 bp, probe
caccatccacatgcaggtggtacgc

SEQ ID NO: 164715 - DNA, 25 bp, probe
cacccgccaggatgtggagaccgag

SEQ ID NO: 164716 - DNA, 25 bp, probe
cacctcgagagagaagggcccggag

SEQ ID NO: 164717 - DNA, 25 bp, probe
cacctcgggaaatgagaagacggct

SEQ ID NO: 164718 - DNA, 25 bp, probe
cagcccgggtgagaagtaaaagctt

SEQ ID NO: 164719 - DNA, 25 bp, probe
cagccctgcgggttaagaaaacact

SEQ ID NO: 164720 - DNA, 25 bp, probe
cagccctgctggctactaactaact

SEQ ID NO: 164721 - DNA, 25 bp, probe
cacctctgatggctgaagaatgtag

SEQ ID NO: 164722 - DNA, 25 bp, probe
caccactgggcaaacagaagaattt

SEQ ID NO: 164723 - DNA, 25 bp, probe
caccctgggcagctacaagtgcagc

SEQ ID NO: 164724 - DNA, 25 bp, probe
cacctgggcgcgctacaggtgctga

SEQ ID NO: 164725 - DNA, 25 bp, probe
cacccggagtgcatacatggaggaa

SEQ ID NO: 164726 - DNA, 25 bp, probe
cacccatggagggtactgtccgcaa

SEQ ID NO: 164727 - DNA, 25 bp, probe
caccgtgatgaatgtactgaccagc

SEQ ID NO: 164728 - DNA, 25 bp, probe
caccctcaagtctgacgatgacacc

SEQ ID NO: 164729 - DNA, 25 bp, probe
caggtcaccaggtgaccgtctcctt

SEQ ID NO: 164730 - DNA, 25 bp, probe
cagcgtgcacaggtgctggacaagt

SEQ ID NO: 164731 - DNA, 25 bp, probe
cagcggaacatatgaggaagttctg

SEQ ID NO: 164732 - DNA, 25 bp, probe
cagctggagaaatatggtactcatt

SEQ ID NO: 164733 - DNA, 25 bp, probe
caccgagacagttggttttgcatgt

SEQ ID NO: 164734 - DNA, 25 bp, probe
cacctagagagcttggctgtttcca

SEQ ID NO: 164735 - DNA, 25 bp, probe
catcccaggacgtcagttctgtcca

SEQ ID NO: 164736 - DNA, 25 bp, probe
cacccaggccgatgagttgcctgcc

SEQ ID NO: 164737 - DNA, 25 bp, probe
caccgaggcctatgttagggccttt

SEQ ID NO: 164738 - DNA, 25 bp, probe
cacccaggccctggctaatgggccc

SEQ ID NO: 164739 - DNA, 25 bp, probe
cacccagaagactgtggatggcccc

SEQ ID NO: 164740 - DNA, 25 bp, probe
caccaaaaaccagtgagagccccgc

SEQ ID NO: 164741 - DNA, 25 bp, probe
cacctgcaacaaggctctgaaaccc

SEQ ID NO: 164742 - DNA, 25 bp, probe
cagacggacaacctgctcaagtccc

SEQ ID NO: 164743 - DNA, 25 bp, probe
cagaagaactactgctcaaaattca

SEQ ID NO: 164744 - DNA, 25 bp, probe
caccagaactttagccaaaataaat

SEQ ID NO: 164745 - DNA, 25 bp, probe
caccaacatccagaccaaaaagaaa

SEQ ID NO: 164746 - DNA, 25 bp, probe
caccaagtacaccagcgctaagtaa

SEQ ID NO: 164747 - DNA, 25 bp, probe
caccttggtcacagcagtaagaaaa

SEQ ID NO: 164748 - DNA, 25 bp, probe
caccttggtcacagcagtaagaaaa

SEQ ID NO: 164749 - DNA, 25 bp, probe
cacctggtgaagacgctgtacatgc

SEQ ID NO: 164750 - DNA, 25 bp, probe
cacctggtgaagacgctgtacatgc

SEQ ID NO: 164751 - DNA, 25 bp, probe
caccgagatatcaaagctgccaacg

SEQ ID NO: 164752 - DNA, 25 bp, probe
caccgagatatcaaagctgccaacg

SEQ ID NO: 164753 - DNA, 25 bp, probe
caccaggaatgtgactgaacacttc

SEQ ID NO: 164754 - DNA, 25 bp, probe
caccgtatctgtgtcaggaatttgc

SEQ ID NO: 164755 - DNA, 25 bp, probe
caccttgtcttgctgtgtactcatt

SEQ ID NO: 164756 - DNA, 25 bp, probe
caccgtgtttgcatgctgtatgtta

SEQ ID NO: 164757 - DNA, 25 bp, probe
caccaattttcactgcattttgcat

SEQ ID NO: 164758 - DNA, 25 bp, probe
caccatcagtgcactgtctttctgt

SEQ ID NO: 164759 - DNA, 25 bp, probe
caccgcaacgacatcatgttgctgc

SEQ ID NO: 164760 - DNA, 25 bp, probe
cacccatatggaaattgctgggctt

SEQ ID NO: 164761 - DNA, 25 bp, probe
cacccatatccgaagctgtggaggt

SEQ ID NO: 164762 - DNA, 25 bp, probe
cacccatatccgaagctgtggaggt

SEQ ID NO: 164763 - DNA, 25 bp, probe
caccctgcatcactgaagagcggcg

SEQ ID NO: 164764 - DNA, 25 bp, probe
caccctgcatcactgaagagcggcg

SEQ ID NO: 164765 - DNA, 25 bp, probe
cacctcagcatctgtggacttgagc

SEQ ID NO: 164766 - DNA, 25 bp, probe
caccctgcagctcagcaagtgatag

SEQ ID NO: 164767 - DNA, 25 bp, probe
caccctgattcatccgagatcagca

SEQ ID NO: 164768 - DNA, 25 bp, probe
cacccatggtcttcagccatgtgga

SEQ ID NO: 164769 - DNA, 25 bp, probe
cagcctcaagctttacacagctgtc

SEQ ID NO: 164770 - DNA, 25 bp, probe
cacctactgctcttactgcaggaag

SEQ ID NO: 164771 - DNA, 25 bp, probe
caccgacctccttatgtgagagaga

SEQ ID NO: 164772 - DNA, 25 bp, probe
cacctcccggtgtatgcagtggtga

SEQ ID NO: 164773 - DNA, 25 bp, probe
caccctgcaaggcatcatcagctgg

SEQ ID NO: 164774 - DNA, 25 bp, probe
cacctctgcaagggtgtgcctggag

SEQ ID NO: 164775 - DNA, 25 bp, probe
caccatggcaacgtggacctggtgc

SEQ ID NO: 164776 - DNA, 25 bp, probe
caccatggccaggggatccagtatc

SEQ ID NO: 164777 - DNA, 25 bp, probe
caccgagccatggcaggatcgggag

SEQ ID NO: 164778 - DNA, 25 bp, probe
caccgagcgcttgatgtgcgcggag

SEQ ID NO: 164779 - DNA, 25 bp, probe
caccgagcgcttgatgtgcgcggag

SEQ ID NO: 164780 - DNA, 25 bp, probe
caccgagcagtcggatgtgaggttc

SEQ ID NO: 164781 - DNA, 25 bp, probe
caccgtgttagccaggatggtctcg

SEQ ID NO: 164782 - DNA, 25 bp, probe
caccgatgcgtgccagggtgattcc

SEQ ID NO: 164783 - DNA, 25 bp, probe
caccgaggtgggcagatcacttcag

SEQ ID NO: 164784 - DNA, 25 bp, probe
caccaagggccccatgacagattca

SEQ ID NO: 164785 - DNA, 25 bp, probe
caccaagaagcctgcaccatgtttt

SEQ ID NO: 164786 - DNA, 25 bp, probe
caccaagaagcctgcaccatgtttt

SEQ ID NO: 164787 - DNA, 25 bp, probe
caccagagcaagccatagacagcct

SEQ ID NO: 164788 - DNA, 25 bp, probe
caccagaggatgaatatgatgtcct

SEQ ID NO: 164789 - DNA, 25 bp, probe
caccaggacactagctatgattcta

SEQ ID NO: 164790 - DNA, 25 bp, probe
caccgagaatgtgcacagactcttc

SEQ ID NO: 164791 - DNA, 25 bp, probe
caccattcctggccacagaatgcta

SEQ ID NO: 164792 - DNA, 25 bp, probe
caccaacctgcagcatgagcacatt

SEQ ID NO: 164793 - DNA, 25 bp, probe
cacctagctgtagcagacacgctgc

SEQ ID NO: 164794 - DNA, 25 bp, probe
cacctactatgcttcaggcatggtg

SEQ ID NO: 164795 - DNA, 25 bp, probe
caccgattatgtagctacgagatgg

SEQ ID NO: 164796 - DNA, 25 bp, probe
caccgattatgtagctacgagatgg

SEQ ID NO: 164797 - DNA, 25 bp, probe
caccgaatctgtactaaggacctgt

SEQ ID NO: 164798 - DNA, 25 bp, probe
caccgcaggtgtagagaaggcactt

SEQ ID NO: 164799 - DNA, 25 bp, probe
cacctgcggcaaagaaaaacttacg

SEQ ID NO: 164800 - DNA, 25 bp, probe
caccgcccaaaatacacatctaatg

SEQ ID NO: 164801 - DNA, 25 bp, probe
caccccaaacaatccagctcatggt

SEQ ID NO: 164802 - DNA, 25 bp, probe
caccccaaacaatccagctcatggt

SEQ ID NO: 164803 - DNA, 25 bp, probe
caccgtcagtcccagaaactcatgg

SEQ ID NO: 164804 - DNA, 25 bp, probe
cacctctatgtcaggattaccagat

SEQ ID NO: 164805 - DNA, 25 bp, probe
caccttcaatatcgagttccggaaa

SEQ ID NO: 164806 - DNA, 25 bp, probe
caccttaagctcagtatggcgggaa

SEQ ID NO: 164807 - DNA, 25 bp, probe
caccccacagccaagtagaggcgaa

SEQ ID NO: 164808 - DNA, 25 bp, probe
caccccacagccaagtagaggcgaa

SEQ ID NO: 164809 - DNA, 25 bp, probe
caccaccgagccatggcaggatcgg

SEQ ID NO: 164810 - DNA, 25 bp, probe
caccaccgagccatggcaggatcgg

SEQ ID NO: 164811 - DNA, 25 bp, probe
caccaccgagacagttggttttgca

SEQ ID NO: 164812 - DNA, 25 bp, probe
cagtagcccttctggtagtacttgc

SEQ ID NO: 164813 - DNA, 25 bp, probe
cagctacccgtacagtgaggacgcc

SEQ ID NO: 164814 - DNA, 25 bp, probe
cagttcccccagctgtaagacaggg

SEQ ID NO: 164815 - DNA, 25 bp, probe
cagctgtgaccccgggtacgagctg

SEQ ID NO: 164816 - DNA, 25 bp, probe
cagctgtgaccccgggtacgagctg

SEQ ID NO: 164817 - DNA, 25 bp, probe
cacctgaccctgtgtgtacaatcca

SEQ ID NO: 164818 - DNA, 25 bp, probe
cacctgaccctgtgtgtacaatcca

SEQ ID NO: 164819 - DNA, 25 bp, probe
caccggccattgtgttaaaggaaag

SEQ ID NO: 164820 - DNA, 25 bp, probe
cacccctcattgtgacttatgagga

SEQ ID NO: 164821 - DNA, 25 bp, probe
caccccaccatggtagccttagggt

SEQ ID NO: 164822 - DNA, 25 bp, probe
cagccccaggaccaagcttaaggag

SEQ ID NO: 164823 - DNA, 25 bp, probe
caccccaggaatcctgcactgaaga

SEQ ID NO: 164824 - DNA, 25 bp, probe
caccccggagatgtcgagaagcagt

SEQ ID NO: 164825 - DNA, 25 bp, probe
cagcttcctggactttctcagaagg

SEQ ID NO: 164826 - DNA, 25 bp, probe
cagcttccagcctgggtcagaaggg

SEQ ID NO: 164827 - DNA, 25 bp, probe
cagtcttaggaatcgtgcaggggga

SEQ ID NO: 164828 - DNA, 25 bp, probe
cagtttatgaaaatagcgacgggaa

SEQ ID NO: 164829 - DNA, 25 bp, probe
caccttagcaacaatgggagctgtg

SEQ ID NO: 164830 - DNA, 25 bp, probe
caccatgtcagcaatatgaaggatg

SEQ ID NO: 164831 - DNA, 25 bp, probe
cacctggcagatgatcgagcagatc

SEQ ID NO: 164832 - DNA, 25 bp, probe
cacctgcgcagatagagacaatctt

SEQ ID NO: 164833 - DNA, 25 bp, probe
cacctcacagaaatgagatcaggct

SEQ ID NO: 164834 - DNA, 25 bp, probe
cagcccaagaatttgtcaggaggtg

SEQ ID NO: 164835 - DNA, 25 bp, probe
cagcccattaacttgagaatttgtg

SEQ ID NO: 164836 - DNA, 25 bp, probe
cagcgacaagaaacgcaagtttgcg

SEQ ID NO: 164837 - DNA, 25 bp, probe
cagcgacaagaaacgcaagtttgcg

SEQ ID NO: 164838 - DNA, 25 bp, probe
cagcgtctacgacggcaagtacctg

SEQ ID NO: 164839 - DNA, 25 bp, probe
cagcggctaccaaagccaagcacct

SEQ ID NO: 164840 - DNA, 25 bp, probe
cagccctacaacaacctgaagcaca

SEQ ID NO: 164841 - DNA, 25 bp, probe
cagccctacaacaacctgaagcaca

SEQ ID NO: 164842 - DNA, 25 bp, probe
cagccctacaacaacctgaagcaca

SEQ ID NO: 164843 - DNA, 25 bp, probe
caccatctaccagatcatgtacagc

SEQ ID NO: 164844 - DNA, 25 bp, probe
cacctctcctcagaggcatggactg

SEQ ID NO: 164845 - DNA, 25 bp, probe
cagccttggtaacgccatggactgc

SEQ ID NO: 164846 - DNA, 25 bp, probe
cacctgggtcactggaggaccaacc

SEQ ID NO: 164847 - DNA, 25 bp, probe
cacctcggtcaccagtgtgaaccaa

SEQ ID NO: 164848 - DNA, 25 bp, probe
caccatcgagggagtgctggaccac

SEQ ID NO: 164849 - DNA, 25 bp, probe
caccactggggacagcacagacccc

SEQ ID NO: 164850 - DNA, 25 bp, probe
caccgcgtgtgctttgagcactacc

SEQ ID NO: 164851 - DNA, 25 bp, probe
caccttgatggctttattctcacct

SEQ ID NO: 164852 - DNA, 25 bp, probe
cacctagtgagccgtttgtggccca

SEQ ID NO: 164853 - DNA, 25 bp, probe
cacctgaaagggatgattgccaaca

SEQ ID NO: 164854 - DNA, 25 bp, probe
cacctgatcagctggttattgctaa

SEQ ID NO: 164855 - DNA, 25 bp, probe
caccagtcacggcttactgcaagag

SEQ ID NO: 164856 - DNA, 25 bp, probe
caccttccgcgtcatgttcaaggag

SEQ ID NO: 164857 - DNA, 25 bp, probe
cacctcaccgaaaagttctacagca

SEQ ID NO: 164858 - DNA, 25 bp, probe
cacctcaccgaaaagttctacagca

SEQ ID NO: 164859 - DNA, 25 bp, probe
cacctaccggaacgtgactgccgag

SEQ ID NO: 164860 - DNA, 25 bp, probe
caccgaccaggcagggacttctgca

SEQ ID NO: 164861 - DNA, 25 bp, probe
caccgaccaggcagggacttctgca

SEQ ID NO: 164862 - DNA, 25 bp, probe
caccaggccaggatgcaggcatcca

SEQ ID NO: 164863 - DNA, 25 bp, probe
caccgtgaccagaatggagtccatg

SEQ ID NO: 164864 - DNA, 25 bp, probe
caccagctcaaattccgagtgcaga

SEQ ID NO: 164865 - DNA, 25 bp, probe
caccagatcgacttgatcgtgcagc

SEQ ID NO: 164866 - DNA, 25 bp, probe
caccgtggatgatttctggcagatg

SEQ ID NO: 164867 - DNA, 25 bp, probe
caccagtggagtcttcgagacttgg

SEQ ID NO: 164868 - DNA, 25 bp, probe
cagccatgggggtttagggctggag

SEQ ID NO: 164869 - DNA, 25 bp, probe
cagcctaccgttttaggtgtccagt

SEQ ID NO: 164870 - DNA, 25 bp, probe
cacctacaccattttaggcattaca

SEQ ID NO: 164871 - DNA, 25 bp, probe
cacctacctcattttagagcacaca

SEQ ID NO: 164872 - DNA, 25 bp, probe
caccacctcaaatttatgatgccca

SEQ ID NO: 164873 - DNA, 25 bp, probe
cagcctcccaagtatttgggattac

SEQ ID NO: 164874 - DNA, 25 bp, probe
cagcctggccaacatggtgaaaccc

SEQ ID NO: 164875 - DNA, 25 bp, probe
cagctttcaaagcatttacaagtgc

SEQ ID NO: 164876 - DNA, 25 bp, probe
cagtttataatcatctgtagaagtc

SEQ ID NO: 164877 - DNA, 25 bp, probe
cacctttctgataacttatgaagcc

SEQ ID NO: 164878 - DNA, 25 bp, probe
caccttgtcatgtaccatcaataaa

SEQ ID NO: 164879 - DNA, 25 bp, probe
caccatcaccatcaccattaaggat

SEQ ID NO: 164880 - DNA, 25 bp, probe
caccacacgcacttatcaggaacgc

SEQ ID NO: 164881 - DNA, 25 bp, probe
cacctcacagcacttcattatgcag

SEQ ID NO: 164882 - DNA, 25 bp, probe
cacctcaaatttatgatgcccagtt

SEQ ID NO: 164883 - DNA, 25 bp, probe
caccgaaatggaaattccacacttt

SEQ ID NO: 164884 - DNA, 25 bp, probe
cagctgcagacctgtacaccaaact

SEQ ID NO: 164885 - DNA, 25 bp, probe
cagtgaccccagaaaaggaatttga

SEQ ID NO: 164886 - DNA, 25 bp, probe
cagtaccagccaggagaaaatttat

SEQ ID NO: 164887 - DNA, 25 bp, probe
cagagaccccaggaccaaggtccat

SEQ ID NO: 164888 - DNA, 25 bp, probe
cagagaccccaggaccaaggtccat

SEQ ID NO: 164889 - DNA, 25 bp, probe
cagcgacccagaggagctcaaggac

SEQ ID NO: 164890 - DNA, 25 bp, probe
caccactacagggagctcccagttg

SEQ ID NO: 164891 - DNA, 25 bp, probe
cacccctgcaggcaggtcctgattg

SEQ ID NO: 164892 - DNA, 25 bp, probe
cacctctctcatggaagaaccaatt

SEQ ID NO: 164893 - DNA, 25 bp, probe
cagcaacctacgggagaccgatatt

SEQ ID NO: 164894 - DNA, 25 bp, probe
cagaaccctgccatggaactgtttc

SEQ ID NO: 164895 - DNA, 25 bp, probe
cagcccttcttcaggactctgggct

SEQ ID NO: 164896 - DNA, 25 bp, probe
cagcccttcttcaggactctgggct

SEQ ID NO: 164897 - DNA, 25 bp, probe
caccacctcactgaggactttgcga

SEQ ID NO: 164898 - DNA, 25 bp, probe
caccacctgatcagctggttattgc

SEQ ID NO: 164899 - DNA, 25 bp, probe
caccccagacatagctggcaccaga

SEQ ID NO: 164900 - DNA, 25 bp, probe
caccccagacatagctggcaccaga

SEQ ID NO: 164901 - DNA, 25 bp, probe
cacctccaggctctagatggcaaag

SEQ ID NO: 164902 - DNA, 25 bp, probe
cacctgccggatccaactggaatat

SEQ ID NO: 164903 - DNA, 25 bp, probe
cacctgccggatccaactggaatat

SEQ ID NO: 164904 - DNA, 25 bp, probe
caccgtagccatctactctgagcag

SEQ ID NO: 164905 - DNA, 25 bp, probe
cagccagtatgccagggagctgccc

SEQ ID NO: 164906 - DNA, 25 bp, probe
caccataaggaggtagtgttcttgg

SEQ ID NO: 164907 - DNA, 25 bp, probe
cagctgcatacccaaaaccttttgg

SEQ ID NO: 164908 - DNA, 25 bp, probe
cagcgcatcttcgaaaacggctacg

SEQ ID NO: 164909 - DNA, 25 bp, probe
cagccacatatcacaaacgactacg

SEQ ID NO: 164910 - DNA, 25 bp, probe
cagccattaataaaaggacgatctg

SEQ ID NO: 164911 - DNA, 25 bp, probe
cagccctcaacaaaaacatccacga

SEQ ID NO: 164912 - DNA, 25 bp, probe
cagccccaatccaaaactggcaagg

SEQ ID NO: 164913 - DNA, 25 bp, probe
cacctcgaactttgacagcgacaag

SEQ ID NO: 164914 - DNA, 25 bp, probe
caccacgaagctgtgaactcagagc

SEQ ID NO: 164915 - DNA, 25 bp, probe
caccagcaggcacgttaactcgaat

SEQ ID NO: 164916 - DNA, 25 bp, probe
caccagaggtggttacacggaaagc

SEQ ID NO: 164917 - DNA, 25 bp, probe
caccggagtcagtctatagcgcaaa

SEQ ID NO: 164918 - DNA, 25 bp, probe
cacctggatctcagtatcaacagaa

SEQ ID NO: 164919 - DNA, 25 bp, probe
cacctggtgctcatcttggagctgt

SEQ ID NO: 164920 - DNA, 25 bp, probe
cacctctgtcacttccagtgaagtc

SEQ ID NO: 164921 - DNA, 25 bp, probe
cacctgttctgaatccagcatggag

SEQ ID NO: 164922 - DNA, 25 bp, probe
cacctgtacgcatccatcagggcag

SEQ ID NO: 164923 - DNA, 25 bp, probe
cagctgtgcccctgaatcatgggca

SEQ ID NO: 164924 - DNA, 25 bp, probe
cacctgccctgatgcaatgtaccag

SEQ ID NO: 164925 - DNA, 25 bp, probe
cacctgactctgcctgcagtgtaaa

SEQ ID NO: 164926 - DNA, 25 bp, probe
caccgctcagctgtcttgtaaaaca

SEQ ID NO: 164927 - DNA, 25 bp, probe
caccgctcagctgtcttgtaaaaca

SEQ ID NO: 164928 - DNA, 25 bp, probe
caccgctcagctgtcttgtaaaaca

SEQ ID NO: 164929 - DNA, 25 bp, probe
caccgctcacaactatatgctaaga

SEQ ID NO: 164930 - DNA, 25 bp, probe
caccagccacgtcatgcagtatgga

SEQ ID NO: 164931 - DNA, 25 bp, probe
caccagccacgtcatgcagtatgga

SEQ ID NO: 164932 - DNA, 25 bp, probe
cacctcctcttcatgtgatgtggac

SEQ ID NO: 164933 - DNA, 25 bp, probe
cacctccgttgccatatgggtggtg

SEQ ID NO: 164934 - DNA, 25 bp, probe
caccacacttttcaggttgttgcaa

SEQ ID NO: 164935 - DNA, 25 bp, probe
cagccttgttttcaggtggtctgga

SEQ ID NO: 164936 - DNA, 25 bp, probe
cacctggatgttcggggtgacactg

SEQ ID NO: 164937 - DNA, 25 bp, probe
caccgtgtgcttcgtgacggtcaag

SEQ ID NO: 164938 - DNA, 25 bp, probe
cacctctgtctagttacaggacggt

SEQ ID NO: 164939 - DNA, 25 bp, probe
caccagcatttcactacaggaccaa

SEQ ID NO: 164940 - DNA, 25 bp, probe
caccactgctttacagaaacatcca

SEQ ID NO: 164941 - DNA, 25 bp, probe
caccactgctaagggactctatcca

SEQ ID NO: 164942 - DNA, 25 bp, probe
caccatcctaaagatccagtccaga

SEQ ID NO: 164943 - DNA, 25 bp, probe
caccttctgaaacctcttgtctaag

SEQ ID NO: 164944 - DNA, 25 bp, probe
catcctctgggcacctttttataag

SEQ ID NO: 164945 - DNA, 25 bp, probe
caccacgggcggcttttatatgtaa

SEQ ID NO: 164946 - DNA, 25 bp, probe
caccgggggcattattttcattgta

SEQ ID NO: 164947 - DNA, 25 bp, probe
caccatgtctggctaattttttgta

SEQ ID NO: 164948 - DNA, 25 bp, probe
cacctgtgctggttgcacttgcttt

SEQ ID NO: 164949 - DNA, 25 bp, probe
caccatgctgggctacattgccatc

SEQ ID NO: 164950 - DNA, 25 bp, probe
cacctctgagaattacaatgtgaga

SEQ ID NO: 164951 - DNA, 25 bp, probe
cacctcagcaaccatgacctgaaac

SEQ ID NO: 164952 - DNA, 25 bp, probe
cacctggacctcaagcctgagaaca

SEQ ID NO: 164953 - DNA, 25 bp, probe
cacctggacctggagcgcatgcagg

SEQ ID NO: 164954 - DNA, 25 bp, probe
cacctgtgaccaaggcttatgtggt

SEQ ID NO: 164955 - DNA, 25 bp, probe
cacctggacctgggctttatggaga

SEQ ID NO: 164956 - DNA, 25 bp, probe
cacctggccctctctgaaggaggcc

SEQ ID NO: 164957 - DNA, 25 bp, probe
caccgtgcccttgtcagatggaggt

SEQ ID NO: 164958 - DNA, 25 bp, probe
cagcgggtccttctggatcaggagt

SEQ ID NO: 164959 - DNA, 25 bp, probe
cacctgagtcccaagtacaaggagt

SEQ ID NO: 164960 - DNA, 25 bp, probe
caccgagtgggcaactccaaagagc

SEQ ID NO: 164961 - DNA, 25 bp, probe
caccagaggggaactgtcaaaatat

SEQ ID NO: 164962 - DNA, 25 bp, probe
caccaattgctttacctgaacaaat

SEQ ID NO: 164963 - DNA, 25 bp, probe
cacctcaacttcttcacattaaaat

SEQ ID NO: 164964 - DNA, 25 bp, probe
cacctaatattcatgacttgagaat

SEQ ID NO: 164965 - DNA, 25 bp, probe
cacctccatgattcaggaccggata

SEQ ID NO: 164966 - DNA, 25 bp, probe
caccaccaactagacatgtgttcat

SEQ ID NO: 164967 - DNA, 25 bp, probe
caccaccaagcctggtgtctatacc

SEQ ID NO: 164968 - DNA, 25 bp, probe
cagttccaagcctaggtttcaagag

SEQ ID NO: 164969 - DNA, 25 bp, probe
cagcttctcgggcaggtttgaagac

SEQ ID NO: 164970 - DNA, 25 bp, probe
caccatcatcggcgagtgggtaaag

SEQ ID NO: 164971 - DNA, 25 bp, probe
caccatcatcggcgagtgggtaaag

SEQ ID NO: 164972 - DNA, 25 bp, probe
caccatcctggactggcgaggaaga

SEQ ID NO: 164973 - DNA, 25 bp, probe
caccatcctggaagtggcatgcaac

SEQ ID NO: 164974 - DNA, 25 bp, probe
caccatccagtgtgcatacatccac

SEQ ID NO: 164975 - DNA, 25 bp, probe
caccatgggtggccactatacagcc

SEQ ID NO: 164976 - DNA, 25 bp, probe
caccaggttggcgcctgaatgcctt

SEQ ID NO: 164977 - DNA, 25 bp, probe
caccagtgatttctcctgtttcttg

SEQ ID NO: 164978 - DNA, 25 bp, probe
caccatatattcatatcctcttgtc

SEQ ID NO: 164979 - DNA, 25 bp, probe
caccattttctattcagccattatt

SEQ ID NO: 164980 - DNA, 25 bp, probe
caccattttctattcagccattatt

SEQ ID NO: 164981 - DNA, 25 bp, probe
cagccacttgctcagtgcaggttat

SEQ ID NO: 164982 - DNA, 25 bp, probe
caccgtgacacacggcagcgctttg

SEQ ID NO: 164983 - DNA, 25 bp, probe
caccgtacaacatcatggtgctggt

SEQ ID NO: 164984 - DNA, 25 bp, probe
caccgtcacatgtcaccatgagctg

SEQ ID NO: 164985 - DNA, 25 bp, probe
cacctgtacttggtcatgcagctgg

SEQ ID NO: 164986 - DNA, 25 bp, probe
cacctggatcagttgtctcagctga

SEQ ID NO: 164987 - DNA, 25 bp, probe
caccatggtcattgtgcttacgtcg

SEQ ID NO: 164988 - DNA, 25 bp, probe
caccatggtcattgtgcttacgtcg

SEQ ID NO: 164989 - DNA, 25 bp, probe
cagccatgagtcagtttgtgcccat

SEQ ID NO: 164990 - DNA, 25 bp, probe
cacctgatgtcaaccttgtgaccca

SEQ ID NO: 164991 - DNA, 25 bp, probe
cacctgatgtcaaccttgtgaccca

SEQ ID NO: 164992 - DNA, 25 bp, probe
cacctcatggcttaaggagacccag

SEQ ID NO: 164993 - DNA, 25 bp, probe
cacctactctttagagagccccagc

SEQ ID NO: 164994 - DNA, 25 bp, probe
cacctacacctcagcagttacaagc

SEQ ID NO: 164995 - DNA, 25 bp, probe
caccaacatctcagccgtgaactac

SEQ ID NO: 164996 - DNA, 25 bp, probe
cagccaccattcaagcccaaagtgt

SEQ ID NO: 164997 - DNA, 25 bp, probe
cagcctccagtcataaaaatgtgtt

SEQ ID NO: 164998 - DNA, 25 bp, probe
caggcccaagtttgatgaaatagtc

SEQ ID NO: 164999 - DNA, 25 bp, probe
caggaccaaggtctgggaactttat

SEQ ID NO: 165000 - DNA, 25 bp, probe
caggaccaaggtctgggaactttat

SEQ ID NO: 165001 - DNA, 25 bp, probe
cagaaccaggttcttgcgcgtctat

SEQ ID NO: 165002 - DNA, 25 bp, probe
cagccagcctggctgtattcgtggt

SEQ ID NO: 165003 - DNA, 25 bp, probe
cagccacagctgggtttagctacgg

SEQ ID NO: 165004 - DNA, 25 bp, probe
caccaggtttgagaagccacgcatg

SEQ ID NO: 165005 - DNA, 25 bp, probe
caccaggtttgagaagccacgcatg

SEQ ID NO: 165006 - DNA, 25 bp, probe
caccaggtttgagaagccacgcatg

SEQ ID NO: 165007 - DNA, 25 bp, probe
caccattggttagcacactcagcgc

SEQ ID NO: 165008 - DNA, 25 bp, probe
cacctgaggtcatcaagcagtcggc

SEQ ID NO: 165009 - DNA, 25 bp, probe
cacctggtgccaccacagggcacca

SEQ ID NO: 165010 - DNA, 25 bp, probe
caccgggcacaggcaaggagacagc

SEQ ID NO: 165011 - DNA, 25 bp, probe
caccagtgtcgagcaaggagaagga

SEQ ID NO: 165012 - DNA, 25 bp, probe
cacctgatgcaggaacatatgggaa

SEQ ID NO: 165013 - DNA, 25 bp, probe
catccagatcacagattttggaaca

SEQ ID NO: 165014 - DNA, 25 bp, probe
cagccaaacgaatttctggcaaaat

SEQ ID NO: 165015 - DNA, 25 bp, probe
caccaaacgctatatgcctccagaa

SEQ ID NO: 165016 - DNA, 25 bp, probe
caccaaacgctatatgcctccagaa

SEQ ID NO: 165017 - DNA, 25 bp, probe
cagccaagaacgttcccaggcagaa

SEQ ID NO: 165018 - DNA, 25 bp, probe
cagcatcaaaaccaagcaaatacaa

SEQ ID NO: 165019 - DNA, 25 bp, probe
cagcaaaaaccaggcgttgaactcc

SEQ ID NO: 165020 - DNA, 25 bp, probe
cagccaaaaccaggtgttatttgct

SEQ ID NO: 165021 - DNA, 25 bp, probe
cagcgagtggtcaaggatttttata

SEQ ID NO: 165022 - DNA, 25 bp, probe
cagagagttctctcaatttgtaagt

SEQ ID NO: 165023 - DNA, 25 bp, probe
cagaagaactcccctttgtaagatt

SEQ ID NO: 165024 - DNA, 25 bp, probe
cagcaagacttcgtgatttttaaca

SEQ ID NO: 165025 - DNA, 25 bp, probe
cacctgcactaccactttttagagg

SEQ ID NO: 165026 - DNA, 25 bp, probe
cacctgcatctatacttacctgaga

SEQ ID NO: 165027 - DNA, 25 bp, probe
cacctgcattgttaatgctaccatt

SEQ ID NO: 165028 - DNA, 25 bp, probe
cagcccactgttgtatacgcttatt

SEQ ID NO: 165029 - DNA, 25 bp, probe
cagcccttttctcacagagttattg

SEQ ID NO: 165030 - DNA, 25 bp, probe
cggcctttaccaccgtggatgactg

SEQ ID NO: 165031 - DNA, 25 bp, probe
caggttgtaaccaggtggtatcggg

SEQ ID NO: 165032 - DNA, 25 bp, probe
caggtttagggcagggggcatttgt

SEQ ID NO: 165033 - DNA, 25 bp, probe
caggccctaaacttgggcggccttg

SEQ ID NO: 165034 - DNA, 25 bp, probe
cagcgccccaaagttttgggtctgg

SEQ ID NO: 165035 - DNA, 25 bp, probe
cagccccgcaaaaccaagggctctg

SEQ ID NO: 165036 - DNA, 25 bp, probe
cacctctcctaaacacagcagggct

SEQ ID NO: 165037 - DNA, 25 bp, probe
cacctcttcgaaagcctggaggcta

SEQ ID NO: 165038 - DNA, 25 bp, probe
cacctgttggaatgcactaatgttt

SEQ ID NO: 165039 - DNA, 25 bp, probe
cagcctgttggtgagtttagttgtg

SEQ ID NO: 165040 - DNA, 25 bp, probe
cagccagggttggagtcttagcctc

SEQ ID NO: 165041 - DNA, 25 bp, probe
cagccaggaaggggtaatgagctcc

SEQ ID NO: 165042 - DNA, 25 bp, probe
cagccagttgggtgtgcgcagagct

SEQ ID NO: 165043 - DNA, 25 bp, probe
cagccagttgggtgtgcgcagagct

SEQ ID NO: 165044 - DNA, 25 bp, probe
cagcaagtcggatgtctggagtttt

SEQ ID NO: 165045 - DNA, 25 bp, probe
cagcaggcacgttaactcgaattct

SEQ ID NO: 165046 - DNA, 25 bp, probe
cagctgcgccgggaaattgagatcc

SEQ ID NO: 165047 - DNA, 25 bp, probe
cagcatgccccttaagattttctac

SEQ ID NO: 165048 - DNA, 25 bp, probe
cagcatgccccttaagattttctac

SEQ ID NO: 165049 - DNA, 25 bp, probe
caccactgccatggaagatcttccc

SEQ ID NO: 165050 - DNA, 25 bp, probe
caccaatccatcccagatgtgggcc

SEQ ID NO: 165051 - DNA, 25 bp, probe
cacctacagcagccgcatgagctgg

SEQ ID NO: 165052 - DNA, 25 bp, probe
caccaatcacagctcatgccgaggt

SEQ ID NO: 165053 - DNA, 25 bp, probe
caccaatcacagctcatgccgaggt

SEQ ID NO: 165054 - DNA, 25 bp, probe
caccattcaagcccaaagtgtgtgg

SEQ ID NO: 165055 - DNA, 25 bp, probe
caccttctcaggacacaagtggctg

SEQ ID NO: 165056 - DNA, 25 bp, probe
caccatcctgagcacatatcagctg

SEQ ID NO: 165057 - DNA, 25 bp, probe
caccatgcactgtaaatatccctcc

SEQ ID NO: 165058 - DNA, 25 bp, probe
caccaccaataatcatctcattgac

SEQ ID NO: 165059 - DNA, 25 bp, probe
caccaccataaaacccttgagcaca

SEQ ID NO: 165060 - DNA, 25 bp, probe
caccagccataaaacaagttaaacg

SEQ ID NO: 165061 - DNA, 25 bp, probe
caccacctgcgatgatcactttaaa

SEQ ID NO: 165062 - DNA, 25 bp, probe
caccacctgcgatgatcactttaaa

SEQ ID NO: 165063 - DNA, 25 bp, probe
caccattcttatgtcactttagaat

SEQ ID NO: 165064 - DNA, 25 bp, probe
caccaaattatccaactgttatact

SEQ ID NO: 165065 - DNA, 25 bp, probe
cagccaaatgcttccatttgtaatc

SEQ ID NO: 165066 - DNA, 25 bp, probe
caccagcagagtcactttgacaatg

SEQ ID NO: 165067 - DNA, 25 bp, probe
caccagcagtgtctccaggacatct

SEQ ID NO: 165068 - DNA, 25 bp, probe
cacctctggtgctctgaggagatct

SEQ ID NO: 165069 - DNA, 25 bp, probe
cacctatgtatggtcatggaatacg

SEQ ID NO: 165070 - DNA, 25 bp, probe
cacctcattctggccgagagtaggg

SEQ ID NO: 165071 - DNA, 25 bp, probe
cacctcacttccctagagaaggcct

SEQ ID NO: 165072 - DNA, 25 bp, probe
cacctgcctcattggggagaaggac

SEQ ID NO: 165073 - DNA, 25 bp, probe
cagccatcttcaaggtgggagacga

SEQ ID NO: 165074 - DNA, 25 bp, probe
caccatttcagtttcaggcatgacc

SEQ ID NO: 165075 - DNA, 25 bp, probe
caccattccatgttgtccatatgat

SEQ ID NO: 165076 - DNA, 25 bp, probe
caccatccctgacttgactgatgtg

SEQ ID NO: 165077 - DNA, 25 bp, probe
caccattccagcctgggatatctga

SEQ ID NO: 165078 - DNA, 25 bp, probe
cagcccccagcctgaatatgtgaac

SEQ ID NO: 165079 - DNA, 25 bp, probe
cagccagaccgatgtgtatttaacc

SEQ ID NO: 165080 - DNA, 25 bp, probe
cagccacccgagattgagcaataac

SEQ ID NO: 165081 - DNA, 25 bp, probe
caccactccagactctttgcaatgg

SEQ ID NO: 165082 - DNA, 25 bp, probe
cacctccagctactttatgccagag

SEQ ID NO: 165083 - DNA, 25 bp, probe
cacctccagctactttatgccagag

SEQ ID NO: 165084 - DNA, 25 bp, probe
cacctccgctgagctgtaacatgtg

SEQ ID NO: 165085 - DNA, 25 bp, probe
caccacctgcgaccttaagatttgt

SEQ ID NO: 165086 - DNA, 25 bp, probe
caccatgctctgtgcctgtatgaga

SEQ ID NO: 165087 - DNA, 25 bp, probe
caccagcatctctccaaacaaaagc

SEQ ID NO: 165088 - DNA, 25 bp, probe
cagcagagtgtgtttaagaccaaaa

SEQ ID NO: 165089 - DNA, 25 bp, probe
cagcagttgcttactgaacgccaaa

SEQ ID NO: 165090 - DNA, 25 bp, probe
cagctgtggcatattacctgtaaca

SEQ ID NO: 165091 - DNA, 25 bp, probe
cagctgcaggcatgcatgaagccct

SEQ ID NO: 165092 - DNA, 25 bp, probe
cagccagaactggacattccatggt

SEQ ID NO: 165093 - DNA, 25 bp, probe
caccagcagtgcaggcattcggcag

SEQ ID NO: 165094 - DNA, 25 bp, probe
caccagcaagtcggatgtctggagt

SEQ ID NO: 165095 - DNA, 25 bp, probe
caccatcaaagcagatgtcttcagc

SEQ ID NO: 165096 - DNA, 25 bp, probe
cacctcttacaattccattagctct

SEQ ID NO: 165097 - DNA, 25 bp, probe
cacctttgaatgcagccatgtcgtc

SEQ ID NO: 165098 - DNA, 25 bp, probe
cacctttgaatgcagccatgtcgtc

SEQ ID NO: 165099 - DNA, 25 bp, probe
caccatactgaacagcatcaatttc

SEQ ID NO: 165100 - DNA, 25 bp, probe
cagccatccatgtgcatgagcatca

SEQ ID NO: 165101 - DNA, 25 bp, probe
cagcgccaatgaggatctgctgcac

SEQ ID NO: 165102 - DNA, 25 bp, probe
cagccagctatgggtatctgcttcc

SEQ ID NO: 165103 - DNA, 25 bp, probe
cagccatccatgaggcatgctttgg

SEQ ID NO: 165104 - DNA, 25 bp, probe
cagcgccatgctgaggcgcttcctg

SEQ ID NO: 165105 - DNA, 25 bp, probe
cagcgccatgctgaggcgcttcctg

SEQ ID NO: 165106 - DNA, 25 bp, probe
cagctgaagtggacgcctcacttag

SEQ ID NO: 165107 - DNA, 25 bp, probe
cagctgaagtggacgcctcacttag

SEQ ID NO: 165108 - DNA, 25 bp, probe
caccaagagtgtccgtgcacgtagc

SEQ ID NO: 165109 - DNA, 25 bp, probe
caccaacaagttggtctctgtactg

SEQ ID NO: 165110 - DNA, 25 bp, probe
cacctcaaagtgtactcttggaatg

SEQ ID NO: 165111 - DNA, 25 bp, probe
cagcctacaagggccacctggagat

SEQ ID NO: 165112 - DNA, 25 bp, probe
cagccgtactatgccacgagggtga

SEQ ID NO: 165113 - DNA, 25 bp, probe
cagccctccagtgtactgagggtac

SEQ ID NO: 165114 - DNA, 25 bp, probe
cagctcctcgaggggcactgagagg

SEQ ID NO: 165115 - DNA, 25 bp, probe
cagctcctcgaggggcactgagagg

SEQ ID NO: 165116 - DNA, 25 bp, probe
caccatctcagtgaggggcaggagc

SEQ ID NO: 165117 - DNA, 25 bp, probe
cagccttatgtgggggacagggcag

SEQ ID NO: 165118 - DNA, 25 bp, probe
caccatggatgggcgagtcaacggg

SEQ ID NO: 165119 - DNA, 25 bp, probe
caccaaagtgcccagcttcactgga

SEQ ID NO: 165120 - DNA, 25 bp, probe
cacctaccagaactgtgctctgctg

SEQ ID NO: 165121 - DNA, 25 bp, probe
caccttctacaatgagctgcgtgtg

SEQ ID NO: 165122 - DNA, 25 bp, probe
cacctctctgaatagtgtgtatgtg

SEQ ID NO: 165123 - DNA, 25 bp, probe
caccattcagaagcacctgaactcc

SEQ ID NO: 165124 - DNA, 25 bp, probe
caccatgtctgcacacaccagaaat

SEQ ID NO: 165125 - DNA, 25 bp, probe
caccatgtctgcacacaccagaaat

SEQ ID NO: 165126 - DNA, 25 bp, probe
caccagtctgtgccacaagcaaaga

SEQ ID NO: 165127 - DNA, 25 bp, probe
cagccgaggctgccaccaaagaaat

SEQ ID NO: 165128 - DNA, 25 bp, probe
cagccgaggctgccaccaaagaaat

SEQ ID NO: 165129 - DNA, 25 bp, probe
cagccgaggctgccaccaaagaaat

SEQ ID NO: 165130 - DNA, 25 bp, probe
cagcccagtgtggcctacaagatat

SEQ ID NO: 165131 - DNA, 25 bp, probe
cagcccagtgtggcctacaagatat

SEQ ID NO: 165132 - DNA, 25 bp, probe
caccaagtctaccccaagatcaaat

SEQ ID NO: 165133 - DNA, 25 bp, probe
caccacgtctgagaccattcagtac

SEQ ID NO: 165134 - DNA, 25 bp, probe
caccacgattgtgacagcgtatgtg

SEQ ID NO: 165135 - DNA, 25 bp, probe
cagccccaatgtcagcaggataggg

SEQ ID NO: 165136 - DNA, 25 bp, probe
caccaccatttcagtttcaggcatg

SEQ ID NO: 165137 - DNA, 25 bp, probe
caccagcgttatattttgcacagag

SEQ ID NO: 165138 - DNA, 25 bp, probe
caccagcgttatattttgcacagag

SEQ ID NO: 165139 - DNA, 25 bp, probe
caccaagtcccagtttagtcagatg

SEQ ID NO: 165140 - DNA, 25 bp, probe
caccaagtcccagtttagtcagatg

SEQ ID NO: 165141 - DNA, 25 bp, probe
caccaagcccgggtggagctcatgg

SEQ ID NO: 165142 - DNA, 25 bp, probe
caccaagtggaggggggctgctgtg

SEQ ID NO: 165143 - DNA, 25 bp, probe
caccaggtgacagggtctgggtgtg

SEQ ID NO: 165144 - DNA, 25 bp, probe
cagcccgctgagtggactggagtgg

SEQ ID NO: 165145 - DNA, 25 bp, probe
cagctgccggactggacggagtgtg

SEQ ID NO: 165146 - DNA, 25 bp, probe
cagcgccccgcagaagggggtgctg

SEQ ID NO: 165147 - DNA, 25 bp, probe
cagcccagccgacagaagcggtcgg

SEQ ID NO: 165148 - DNA, 25 bp, probe
cacctcagcctcccaaagtgttggg

SEQ ID NO: 165149 - DNA, 25 bp, probe
cacctcagcctccaaagtgctggga

SEQ ID NO: 165150 - DNA, 25 bp, probe
caccttcagtcgcaagctgggtgcc

SEQ ID NO: 165151 - DNA, 25 bp, probe
caccttcagtcgcaagctgggtgcc

SEQ ID NO: 165152 - DNA, 25 bp, probe
caccttacgcttcagctgttgatcc

SEQ ID NO: 165153 - DNA, 25 bp, probe
caccttacgcttcagctgttgatcc

SEQ ID NO: 165154 - DNA, 25 bp, probe
caccatgtaacatctggcttggagc

SEQ ID NO: 165155 - DNA, 25 bp, probe
cagccgtgaactacgacttcgacga

SEQ ID NO: 165156 - DNA, 25 bp, probe
cagccgtaaggtggccaaccacaac

SEQ ID NO: 165157 - DNA, 25 bp, probe
cagccgtaaggtggccaaccacaac

SEQ ID NO: 165158 - DNA, 25 bp, probe
cagccttcgaggaagccatacccaa

SEQ ID NO: 165159 - DNA, 25 bp, probe
cagccttcgaggaagccatacccaa

SEQ ID NO: 165160 - DNA, 25 bp, probe
cacctatcacgtggagctcaagccg

SEQ ID NO: 165161 - DNA, 25 bp, probe
caccaacatcgaggagatgaacgag

SEQ ID NO: 165162 - DNA, 25 bp, probe
caccatcaagctgctgaatgaaaat

SEQ ID NO: 165163 - DNA, 25 bp, probe
caccaccagtcactgaggaagatct

SEQ ID NO: 165164 - DNA, 25 bp, probe
caccaccagctgtgggcagtcagta

SEQ ID NO: 165165 - DNA, 25 bp, probe
caccaccatgtgcgtgtcagtcagc

SEQ ID NO: 165166 - DNA, 25 bp, probe
caccatcctggttgctctcaggagg

SEQ ID NO: 165167 - DNA, 25 bp, probe
caccaccgtgtactccagtgaggaa

SEQ ID NO: 165168 - DNA, 25 bp, probe
cagtccctttgaccatagtcggatt

SEQ ID NO: 165169 - DNA, 25 bp, probe
cagctcctttagggatgggggatct

SEQ ID NO: 165170 - DNA, 25 bp, probe
cagctcctttagggatgggggatct

SEQ ID NO: 165171 - DNA, 25 bp, probe
cagctacttcttcaagggtgcctat

SEQ ID NO: 165172 - DNA, 25 bp, probe
cagttcttctcccatagaggtcggg

SEQ ID NO: 165173 - DNA, 25 bp, probe
cagcccttcctagaagagtcaggaa

SEQ ID NO: 165174 - DNA, 25 bp, probe
caccttctccaagcaaagccatatg

SEQ ID NO: 165175 - DNA, 25 bp, probe
caccttggccaagccacacaatcag

SEQ ID NO: 165176 - DNA, 25 bp, probe
caccattggaattttgcagacagaa

SEQ ID NO: 165177 - DNA, 25 bp, probe
caccttgaactcctatgagatgcgc

SEQ ID NO: 165178 - DNA, 25 bp, probe
cagctcctgaactcgatgatgaccg

SEQ ID NO: 165179 - DNA, 25 bp, probe
cagccctattctagaggatacttga

SEQ ID NO: 165180 - DNA, 25 bp, probe
cagccctattctagaggatacttga

SEQ ID NO: 165181 - DNA, 25 bp, probe
caccatcttattcaggattgcttga

SEQ ID NO: 165182 - DNA, 25 bp, probe
caccatctttctcatggcatcactg

SEQ ID NO: 165183 - DNA, 25 bp, probe
caccacttgtgtccatggagcatcc

SEQ ID NO: 165184 - DNA, 25 bp, probe
caccatcatggtcctggtgagctcc

SEQ ID NO: 165185 - DNA, 25 bp, probe
caccttggtgcactgtgctgcaggg

SEQ ID NO: 165186 - DNA, 25 bp, probe
caccttgggcttctgagggcatcat

SEQ ID NO: 165187 - DNA, 25 bp, probe
cagccttgccacaacctgaagtgat

SEQ ID NO: 165188 - DNA, 25 bp, probe
cagccttgccacaacctgaagtgat

SEQ ID NO: 165189 - DNA, 25 bp, probe
caccatggacaaatgcctatgaaat

SEQ ID NO: 165190 - DNA, 25 bp, probe
caccatggagcacggtttaagcacc

SEQ ID NO: 165191 - DNA, 25 bp, probe
caccatggagcttgtgttctcagaa

SEQ ID NO: 165192 - DNA, 25 bp, probe
cagccagtgaactttgtcacggaga

SEQ ID NO: 165193 - DNA, 25 bp, probe
caccacgacccaatgtacttagaca

SEQ ID NO: 165194 - DNA, 25 bp, probe
caccacgacccaatgtacttagaca

SEQ ID NO: 165195 - DNA, 25 bp, probe
cagccaatagcacccattaaaagaa

SEQ ID NO: 165196 - DNA, 25 bp, probe
cagcgaccatgacttctgctaaaaa

SEQ ID NO: 165197 - DNA, 25 bp, probe
cagccaagcactcttcttcaaaaac

SEQ ID NO: 165198 - DNA, 25 bp, probe
cagccaagacgtagatccatccaag

SEQ ID NO: 165199 - DNA, 25 bp, probe
cagccaagacgtagatccatccaag

SEQ ID NO: 165200 - DNA, 25 bp, probe
caccaagacagcctacctggcagtg

SEQ ID NO: 165201 - DNA, 25 bp, probe
caccatcaacgccaacgtgcaggtg

SEQ ID NO: 165202 - DNA, 25 bp, probe
caccatccagaccaaggcgatcagg

SEQ ID NO: 165203 - DNA, 25 bp, probe
caccatgacgaccctgggctatgga

SEQ ID NO: 165204 - DNA, 25 bp, probe
caccatgacgacggtggactatggc

SEQ ID NO: 165205 - DNA, 25 bp, probe
caccagcatcgacatgtgggctgtg

SEQ ID NO: 165206 - DNA, 25 bp, probe
caccaatgcttcagatgggctgtgc

SEQ ID NO: 165207 - DNA, 25 bp, probe
cagccacctctgcaagggtgtgcct

SEQ ID NO: 165208 - DNA, 25 bp, probe
cagccatgcctccgaaagagggcca

SEQ ID NO: 165209 - DNA, 25 bp, probe
cagcctcccaccagggggtgaattg

SEQ ID NO: 165210 - DNA, 25 bp, probe
cagcctcccgtcaggagagaagccg

SEQ ID NO: 165211 - DNA, 25 bp, probe
cagcctcccgtcaggagagaagccg

SEQ ID NO: 165212 - DNA, 25 bp, probe
cagcgccggggcaggaaggacgggg

SEQ ID NO: 165213 - DNA, 25 bp, probe
cagacggtgggcagcgtgggtaagg

SEQ ID NO: 165214 - DNA, 25 bp, probe
cagacggtgggcagcgtgggtaagg

SEQ ID NO: 165215 - DNA, 25 bp, probe
cggcgtgggaggggtagtcgaagag

SEQ ID NO: 165216 - DNA, 25 bp, probe
cagggaagaatggggtcgtcaaaga

SEQ ID NO: 165217 - DNA, 25 bp, probe
cagagaaaactggggtcgcgaagaa

SEQ ID NO: 165218 - DNA, 25 bp, probe
cagcgagaaactgcatggtcgccca

SEQ ID NO: 165219 - DNA, 25 bp, probe
cagcggggcagtgtggtgccccagg

SEQ ID NO: 165220 - DNA, 25 bp, probe
cagcctaagctgagtgtgaccccag

SEQ ID NO: 165221 - DNA, 25 bp, probe
cagccttgactgaagcgaacatctt

SEQ ID NO: 165222 - DNA, 25 bp, probe
cagccttgatgaaagctaccaaatt

SEQ ID NO: 165223 - DNA, 25 bp, probe
caccttgatgtcaagcctgccaaca

SEQ ID NO: 165224 - DNA, 25 bp, probe
cagctgcttagtcacctggcaaagc

SEQ ID NO: 165225 - DNA, 25 bp, probe
cagcgcattttctacctgaaattgg

SEQ ID NO: 165226 - DNA, 25 bp, probe
cagcctattccaagcctaaacgggg

SEQ ID NO: 165227 - DNA, 25 bp, probe
cagtcttatgttgcttaaccgtggg

SEQ ID NO: 165228 - DNA, 25 bp, probe
cagcctttttgatttaaccaccctg

SEQ ID NO: 165229 - DNA, 25 bp, probe
cagagtccattttttataaccgcta

SEQ ID NO: 165230 - DNA, 25 bp, probe
cagcctgcgcttagattttaccggt

SEQ ID NO: 165231 - DNA, 25 bp, probe
cagcctggctaactgtgaaaccctc

SEQ ID NO: 165232 - DNA, 25 bp, probe
cagctgtggctccgaggaaaatcac

SEQ ID NO: 165233 - DNA, 25 bp, probe
cagcgtgaccatcgaggatccaaag

SEQ ID NO: 165234 - DNA, 25 bp, probe
cagctgatgaactgtggtgccacat

SEQ ID NO: 165235 - DNA, 25 bp, probe
cagctgataccaagcctctgaaatc

SEQ ID NO: 165236 - DNA, 25 bp, probe
caccatctccatatcattgagacca

SEQ ID NO: 165237 - DNA, 25 bp, probe
cagccactcctcaatgctcaatggc

SEQ ID NO: 165238 - DNA, 25 bp, probe
cagccactcctcaatgctcaatggc

SEQ ID NO: 165239 - DNA, 25 bp, probe
caccagacctgcaatctatggagca

SEQ ID NO: 165240 - DNA, 25 bp, probe
caccagacctgcaatctatggagca

SEQ ID NO: 165241 - DNA, 25 bp, probe
caccagctcttcgatctgattgaaa

SEQ ID NO: 165242 - DNA, 25 bp, probe
cagcacgttgctgtcgattaagacc

SEQ ID NO: 165243 - DNA, 25 bp, probe
cagactgtagctgctgtgggaaaca

SEQ ID NO: 165244 - DNA, 25 bp, probe
cagactctacatgtaggatggtaac

SEQ ID NO: 165245 - DNA, 25 bp, probe
cagccatctacttcttggctggcta

SEQ ID NO: 165246 - DNA, 25 bp, probe
cagcctctgctgtccaaggctggct

SEQ ID NO: 165247 - DNA, 25 bp, probe
catcgccattgctgcgggtgttccc

SEQ ID NO: 165248 - DNA, 25 bp, probe
caccattggcaatgagcggttccgc

SEQ ID NO: 165249 - DNA, 25 bp, probe
caccaagagcaagcgccgcttcttt

SEQ ID NO: 165250 - DNA, 25 bp, probe
caccaagagcaagcgccgcttcttt

SEQ ID NO: 165251 - DNA, 25 bp, probe
caccaggagaatgtgcaactttatt

SEQ ID NO: 165252 - DNA, 25 bp, probe
cagccagcgggcgggaactgttatg

SEQ ID NO: 165253 - DNA, 25 bp, probe
cagctatgggccggtcagactgtat

SEQ ID NO: 165254 - DNA, 25 bp, probe
cagctggtagggaaagactctgcac

SEQ ID NO: 165255 - DNA, 25 bp, probe
cagctggttgggaggaccagagcct

SEQ ID NO: 165256 - DNA, 25 bp, probe
cagcaggttggggtggttaagtctt

SEQ ID NO: 165257 - DNA, 25 bp, probe
cagcctgtgtggggtggagccaaac

SEQ ID NO: 165258 - DNA, 25 bp, probe
cagccaatgtggggggtcctgaaga

SEQ ID NO: 165259 - DNA, 25 bp, probe
cagccacacgcgaaggtgaccttaa

SEQ ID NO: 165260 - DNA, 25 bp, probe
caccacagaagatgaggacctcaaa

SEQ ID NO: 165261 - DNA, 25 bp, probe
caccagagacagtacagaatccctg

SEQ ID NO: 165262 - DNA, 25 bp, probe
cagccaaggcctaactatgcctcga

SEQ ID NO: 165263 - DNA, 25 bp, probe
cagccagggcttacctgtacactga

SEQ ID NO: 165264 - DNA, 25 bp, probe
cagccggagtttgctggaccacaag

SEQ ID NO: 165265 - DNA, 25 bp, probe
cagcctgggttttcagtctcccagg

SEQ ID NO: 165266 - DNA, 25 bp, probe
cagcctggatttgaagttcctgaat

SEQ ID NO: 165267 - DNA, 25 bp, probe
cagccttgctttggataggacctcc

SEQ ID NO: 165268 - DNA, 25 bp, probe
caccatcctcttgacgagacattcc

SEQ ID NO: 165269 - DNA, 25 bp, probe
cagccaccatgttacactggactct

SEQ ID NO: 165270 - DNA, 25 bp, probe
cagccccctgtatctggattgtaat

SEQ ID NO: 165271 - DNA, 25 bp, probe
cagccccctgtatctggattgtaat

SEQ ID NO: 165272 - DNA, 25 bp, probe
cagccccctgtatctggattgtaat

SEQ ID NO: 165273 - DNA, 25 bp, probe
cagccccctgtatctggattgtaat

SEQ ID NO: 165274 - DNA, 25 bp, probe
caccactcctttttgtgtgtgtgca

SEQ ID NO: 165275 - DNA, 25 bp, probe
caccagcagcacataccactgtggg

SEQ ID NO: 165276 - DNA, 25 bp, probe
caccagcagcacataccactgtggg

SEQ ID NO: 165277 - DNA, 25 bp, probe
caccaggacgtgctcattgagtggc

SEQ ID NO: 165278 - DNA, 25 bp, probe
caccagataggacctctgagagggg

SEQ ID NO: 165279 - DNA, 25 bp, probe
caccagattacaatcctgaagggaa

SEQ ID NO: 165280 - DNA, 25 bp, probe
caccagtgtaaaagcttgaggagaa

SEQ ID NO: 165281 - DNA, 25 bp, probe
caccagttccaaggggagtgaatgg

SEQ ID NO: 165282 - DNA, 25 bp, probe
cagcctttgccaatcgtgggtgaaa

SEQ ID NO: 165283 - DNA, 25 bp, probe
cagccttcgccaattcttggagagt

SEQ ID NO: 165284 - DNA, 25 bp, probe
cagcttgtcggtatcatggtggtgt

SEQ ID NO: 165285 - DNA, 25 bp, probe
cagctggggataaagatgttggtgt

SEQ ID NO: 165286 - DNA, 25 bp, probe
cagcgtatgtgatgactgtgacggg

SEQ ID NO: 165287 - DNA, 25 bp, probe
cagcgagtggaagttcgccgcctgt

SEQ ID NO: 165288 - DNA, 25 bp, probe
cagcgggaaagattcgtcctgtggt

SEQ ID NO: 165289 - DNA, 25 bp, probe
cagcgggatgtggatttggacctcc

SEQ ID NO: 165290 - DNA, 25 bp, probe
cagcaggggtcgtgggtctcacgat

SEQ ID NO: 165291 - DNA, 25 bp, probe
cagcgtgggtaaggtgggtcaggtg

SEQ ID NO: 165292 - DNA, 25 bp, probe
cagactggtgtgaacccgggaggtg

SEQ ID NO: 165293 - DNA, 25 bp, probe
cagacgcgttaagcgcattggtcct

SEQ ID NO: 165294 - DNA, 25 bp, probe
catacgtttttggagattgggtcta

SEQ ID NO: 165295 - DNA, 25 bp, probe
catacgtttttggagattgggtcta

SEQ ID NO: 165296 - DNA, 25 bp, probe
cagttaagtttgggaaagtgtctca

SEQ ID NO: 165297 - DNA, 25 bp, probe
tcagtaaggtacggagtaactgtcc

SEQ ID NO: 165298 - DNA, 25 bp, probe
cagtaaggtacggagtaactgtcca

SEQ ID NO: 165299 - DNA, 25 bp, probe
cagccaaggtgctggggaactcgcc

SEQ ID NO: 165300 - DNA, 25 bp, probe
cagctcgggcaggggagaacattcc

SEQ ID NO: 165301 - DNA, 25 bp, probe
cagctgaccgaggaggagatcgctt

SEQ ID NO: 165302 - DNA, 25 bp, probe
cagcgtcttgacgggagcattggcc

SEQ ID NO: 165303 - DNA, 25 bp, probe
cagcctctgagagcagttactgggg

SEQ ID NO: 165304 - DNA, 25 bp, probe
caccatgctgaagcggctcatcgag

SEQ ID NO: 165305 - DNA, 25 bp, probe
caccatgctgaagcggctcatcgag

SEQ ID NO: 165306 - DNA, 25 bp, probe
cagcgtgtgtatccgactctaagct

SEQ ID NO: 165307 - DNA, 25 bp, probe
cagccttggactagcaatttatgct

SEQ ID NO: 165308 - DNA, 25 bp, probe
cagctcttaatatcaaccttgccct

SEQ ID NO: 165309 - DNA, 25 bp, probe
cagctctgtaaactaccactcagcc

SEQ ID NO: 165310 - DNA, 25 bp, probe
cagctctgtaaactaccactcagcc

SEQ ID NO: 165311 - DNA, 25 bp, probe
cagctgtttccattacaaccactgc

SEQ ID NO: 165312 - DNA, 25 bp, probe
ggcagcagtggtcaaagtgcccctg

SEQ ID NO: 165313 - DNA, 25 bp, probe
cagcgctttgtgcccattgtagctg

SEQ ID NO: 165314 - DNA, 25 bp, probe
cagcgctttgtgcccattgtagctg

SEQ ID NO: 165315 - DNA, 25 bp, probe
cagcgcctcattcccaagagagcgc

SEQ ID NO: 165316 - DNA, 25 bp, probe
cagccccatagtgctcaggaggcag

SEQ ID NO: 165317 - DNA, 25 bp, probe
cagcctcccaggcctagagaggaaa

SEQ ID NO: 165318 - DNA, 25 bp, probe
cagcctctcccgctaggagagtcct

SEQ ID NO: 165319 - DNA, 25 bp, probe
cagcaggctaccggacggcaggtta

SEQ ID NO: 165320 - DNA, 25 bp, probe
cagcgtccactcagagcaagtgttt

SEQ ID NO: 165321 - DNA, 25 bp, probe
cagcgttcagcaaggcccttgttcc

SEQ ID NO: 165322 - DNA, 25 bp, probe
cagccttcagcacaccaatggtgtc

SEQ ID NO: 165323 - DNA, 25 bp, probe
cagccttcgcaacaaagaggtcaag

SEQ ID NO: 165324 - DNA, 25 bp, probe
caccactccagatagaaaggtcatt

SEQ ID NO: 165325 - DNA, 25 bp, probe
caccagcacaaatcgaagcaggaat

SEQ ID NO: 165326 - DNA, 25 bp, probe
caccacttactgacagaagcaggac

SEQ ID NO: 165327 - DNA, 25 bp, probe
cagccagtgtcctagcaaagctgga

SEQ ID NO: 165328 - DNA, 25 bp, probe
caccagcgccaggactaagctgggg

SEQ ID NO: 165329 - DNA, 25 bp, probe
cagccacctaccatagagcttggag

SEQ ID NO: 165330 - DNA, 25 bp, probe
caccatgcccttggtaggtctgggg

SEQ ID NO: 165331 - DNA, 25 bp, probe
caccatgcccttggtaggtctgggg

SEQ ID NO: 165332 - DNA, 25 bp, probe
caccagcctgttggcgaagttgctg

SEQ ID NO: 165333 - DNA, 25 bp, probe
caccagctgcgccgggaaattgaga

SEQ ID NO: 165334 - DNA, 25 bp, probe
cagccgtggcggaggaagtgaatgc

SEQ ID NO: 165335 - DNA, 25 bp, probe
cagccgtggcggaggaagtgaatgc

SEQ ID NO: 165336 - DNA, 25 bp, probe
cagccccacagggggccaggggcat

SEQ ID NO: 165337 - DNA, 25 bp, probe
cagcccacaggggtggccatatttg

SEQ ID NO: 165338 - DNA, 25 bp, probe
cagccaacatcacgaggtgtaattt

SEQ ID NO: 165339 - DNA, 25 bp, probe
cagccttcatcgacagagcgctaag

SEQ ID NO: 165340 - DNA, 25 bp, probe
cagccactctccgaaggtcaaggaa

SEQ ID NO: 165341 - DNA, 25 bp, probe
cagccactctccgaaggtcaaggaa

SEQ ID NO: 165342 - DNA, 25 bp, probe
caccagctcctcaaatggatcatca

SEQ ID NO: 165343 - DNA, 25 bp, probe
cagcccccacagataacatcagctg

SEQ ID NO: 165344 - DNA, 25 bp, probe
cagccaactgctcttgaacctgctg

SEQ ID NO: 165345 - DNA, 25 bp, probe
cagccaactgctcttgaacctgctg

SEQ ID NO: 165346 - DNA, 25 bp, probe
cagccaagcattgttgaagggtgat

SEQ ID NO: 165347 - DNA, 25 bp, probe
cagcagtacttggtggaggaagtgc

SEQ ID NO: 165348 - DNA, 25 bp, probe
cagcgtatgttcaggactcagggga

SEQ ID NO: 165349 - DNA, 25 bp, probe
cagctatgaacgaggccagtgggga

SEQ ID NO: 165350 - DNA, 25 bp, probe
cagctgagtccgaggaggtgtcggt

SEQ ID NO: 165351 - DNA, 25 bp, probe
cagctggtcctgtggatgggatcct

SEQ ID NO: 165352 - DNA, 25 bp, probe
cagccattccgcatggctggttcct

SEQ ID NO: 165353 - DNA, 25 bp, probe
cagccattccgcatggctggttcct

SEQ ID NO: 165354 - DNA, 25 bp, probe
cagccatcgaccatggatggtttcc

SEQ ID NO: 165355 - DNA, 25 bp, probe
cagccatcgaccatggatggtttcc

SEQ ID NO: 165356 - DNA, 25 bp, probe
cagcctccccaaaaggaattctcca

SEQ ID NO: 165357 - DNA, 25 bp, probe
cagccctcacaaaaaggccttgtaa

SEQ ID NO: 165358 - DNA, 25 bp, probe
cagcgccttcaagaacttcttttct

SEQ ID NO: 165359 - DNA, 25 bp, probe
cagctggattacgcaacagtaaatc

SEQ ID NO: 165360 - DNA, 25 bp, probe
cagcggtccacattagagttgaaat

SEQ ID NO: 165361 - DNA, 25 bp, probe
cagcggatgcacctcaagcagtatg

SEQ ID NO: 165362 - DNA, 25 bp, probe
cagcggtgacgtggtcagcatgcac

SEQ ID NO: 165363 - DNA, 25 bp, probe
cagcggtgacgtggtcagcatgcac

SEQ ID NO: 165364 - DNA, 25 bp, probe
cagcaggaatcagtcagtatctgca

SEQ ID NO: 165365 - DNA, 25 bp, probe
cagcctgaatatgtgaaccagccag

SEQ ID NO: 165366 - DNA, 25 bp, probe
cagcctcatcaaggagacctaccag

SEQ ID NO: 165367 - DNA, 25 bp, probe
cagcctcacacaagcagaaacactc

SEQ ID NO: 165368 - DNA, 25 bp, probe
cagcactgccaaactggactactcc

SEQ ID NO: 165369 - DNA, 25 bp, probe
cagcagcggacaaataaaactcgct

SEQ ID NO: 165370 - DNA, 25 bp, probe
cagatagagacaatcttacccgcag

SEQ ID NO: 165371 - DNA, 25 bp, probe
cagtacaacaacatgcgcgtggagt

SEQ ID NO: 165372 - DNA, 25 bp, probe
cagaccaaagccatgccattgcgct

SEQ ID NO: 165373 - DNA, 25 bp, probe
cagccacagataccattgatattgc

SEQ ID NO: 165374 - DNA, 25 bp, probe
cagccacagataccattgatattgc

SEQ ID NO: 165375 - DNA, 25 bp, probe
caccaagaatccatcttagcgcctc

SEQ ID NO: 165376 - DNA, 25 bp, probe
caccaagaatccatcttagcgcctc

SEQ ID NO: 165377 - DNA, 25 bp, probe
caccagaaattgctcgtatggccct

SEQ ID NO: 165378 - DNA, 25 bp, probe
cagccaacaaggcctcgttggccat

SEQ ID NO: 165379 - DNA, 25 bp, probe
cagccaaggcggacatctttgccct

SEQ ID NO: 165380 - DNA, 25 bp, probe
cagtcaaaggacatcttctgccatg

SEQ ID NO: 165381 - DNA, 25 bp, probe
caccaaagagataactgtcagcaat

SEQ ID NO: 165382 - DNA, 25 bp, probe
caccaaagagataactgtcagcaat

SEQ ID NO: 165383 - DNA, 25 bp, probe
caccaaagagactacagagaaaaca

SEQ ID NO: 165384 - DNA, 25 bp, probe
caccaactgtcagaaggcaaccaca

SEQ ID NO: 165385 - DNA, 25 bp, probe
cagccttcctgagaagatgcaacca

SEQ ID NO: 165386 - DNA, 25 bp, probe
cagccttgactgactcaaagcaaaa

SEQ ID NO: 165387 - DNA, 25 bp, probe
cagcgctggaatactcgggcaccag

SEQ ID NO: 165388 - DNA, 25 bp, probe
cagctgggagaacccagtgaccagc

SEQ ID NO: 165389 - DNA, 25 bp, probe
cagcagggtgggaacaggcagaggg

SEQ ID NO: 165390 - DNA, 25 bp, probe
cagagatgttgagaacccgcagagg

SEQ ID NO: 165391 - DNA, 25 bp, probe
cagacatgttgagaatcatggacaa

SEQ ID NO: 165392 - DNA, 25 bp, probe
cagcttgtattggccatctggaata

SEQ ID NO: 165393 - DNA, 25 bp, probe
cagcctctacttccatcagatatat

SEQ ID NO: 165394 - DNA, 25 bp, probe
cagcccgtgctaacatgaaatgcat

SEQ ID NO: 165395 - DNA, 25 bp, probe
cagccactgtgaaaccagaatctgc

SEQ ID NO: 165396 - DNA, 25 bp, probe
cagctcacgtgtattctattttgcg

SEQ ID NO: 165397 - DNA, 25 bp, probe
cagccccagatattgttgaatattc

SEQ ID NO: 165398 - DNA, 25 bp, probe
cagccctatgacttgtatgacaact

SEQ ID NO: 165399 - DNA, 25 bp, probe
caccactgacagatgattcacagag

SEQ ID NO: 165400 - DNA, 25 bp, probe
caccagcgcacacgctgatttgaac

SEQ ID NO: 165401 - DNA, 25 bp, probe
caccagccaatcaatgttcgtctct

SEQ ID NO: 165402 - DNA, 25 bp, probe
caccagcagcatgaatggtccctcc

SEQ ID NO: 165403 - DNA, 25 bp, probe
cagccgcatcatcaatggatccgac

SEQ ID NO: 165404 - DNA, 25 bp, probe
cagccgatgacatcatcgactccct

SEQ ID NO: 165405 - DNA, 25 bp, probe
cagcgtagaaaacgcacctccatcc

SEQ ID NO: 165406 - DNA, 25 bp, probe
cagctctaaatctcgatcttgccat

SEQ ID NO: 165407 - DNA, 25 bp, probe
cagctatggaactattcttagtcat

SEQ ID NO: 165408 - DNA, 25 bp, probe
cagctctgacccaaatttagtccca

SEQ ID NO: 165409 - DNA, 25 bp, probe
cagctctaccacctatttcaaaagg

SEQ ID NO: 165410 - DNA, 25 bp, probe
cagctctgaccctgatgcttaataa

SEQ ID NO: 165411 - DNA, 25 bp, probe
cagcgctaccaggagtttgttcagg

SEQ ID NO: 165412 - DNA, 25 bp, probe
cagcgctaccaggagtttgttcagg

SEQ ID NO: 165413 - DNA, 25 bp, probe
catccaagccaaggtctccttaggc

SEQ ID NO: 165414 - DNA, 25 bp, probe
caccaacacagacgtctttattgcc

SEQ ID NO: 165415 - DNA, 25 bp, probe
cagccaagccagggacttgttgtca

SEQ ID NO: 165416 - DNA, 25 bp, probe
cagccacccaatgactggcgtatct

SEQ ID NO: 165417 - DNA, 25 bp, probe
cagccagggcgagactgcgctgaac

SEQ ID NO: 165418 - DNA, 25 bp, probe
cagccagggcgagactgcgctgaac

SEQ ID NO: 165419 - DNA, 25 bp, probe
cagccgtggctgaggaggtgaacgc

SEQ ID NO: 165420 - DNA, 25 bp, probe
cagccgtgtggacgaagtttggccc

SEQ ID NO: 165421 - DNA, 25 bp, probe
cagcctgaggaacaggtacttgaaa

SEQ ID NO: 165422 - DNA, 25 bp, probe
cagcctgaggaataaggaggtcatg

SEQ ID NO: 165423 - DNA, 25 bp, probe
cagcctgggcgacagagcgagactc

SEQ ID NO: 165424 - DNA, 25 bp, probe
cagcctgggggcaagttagcacttt

SEQ ID NO: 165425 - DNA, 25 bp, probe
cagcctgttggcgaagttgctgctc

SEQ ID NO: 165426 - DNA, 25 bp, probe
cagcctgatgtgtatctttctgtcc

SEQ ID NO: 165427 - DNA, 25 bp, probe
cagcctcagcatacttcttgctgct

SEQ ID NO: 165428 - DNA, 25 bp, probe
caccaagcagattcgactgcatgct

SEQ ID NO: 165429 - DNA, 25 bp, probe
cagccacacagtgcagaagcctgct

SEQ ID NO: 165430 - DNA, 25 bp, probe
cagccatcactatcaagatcagctc

SEQ ID NO: 165431 - DNA, 25 bp, probe
cagcctcaagatcatcagcaatgcc

SEQ ID NO: 165432 - DNA, 25 bp, probe
cagcccacatgtcctgatcatatgc

SEQ ID NO: 165433 - DNA, 25 bp, probe
cagccccagatggtgactactggag

SEQ ID NO: 165434 - DNA, 25 bp, probe
cagccccagatctgcacaattgatg

SEQ ID NO: 165435 - DNA, 25 bp, probe
cagcgtcacttctgctaaggaggga

SEQ ID NO: 165436 - DNA, 25 bp, probe
cagccgtcggttcaagcgagtggtg

SEQ ID NO: 165437 - DNA, 25 bp, probe
cagcgcgggcgttggaagaactgga

SEQ ID NO: 165438 - DNA, 25 bp, probe
cagcgccaggacggagaaaacggca

SEQ ID NO: 165439 - DNA, 25 bp, probe
cagcccatgctctgggaaacactgg

SEQ ID NO: 165440 - DNA, 25 bp, probe
cagccttaatggaagaccaaatggt

SEQ ID NO: 165441 - DNA, 25 bp, probe
cagccgctattgcaagatgcccaag

SEQ ID NO: 165442 - DNA, 25 bp, probe
cagccagctttgcaggttatcagag

SEQ ID NO: 165443 - DNA, 25 bp, probe
cagcccttgagcgtggttatcgcat

SEQ ID NO: 165444 - DNA, 25 bp, probe
cagccattttcagtttatcatcgtt

SEQ ID NO: 165445 - DNA, 25 bp, probe
cagccatttcttgttacatgaaaac

SEQ ID NO: 165446 - DNA, 25 bp, probe
cagccttctcaacctttgcagaaat

SEQ ID NO: 165447 - DNA, 25 bp, probe
cagctctactcaccctttgaaagct

SEQ ID NO: 165448 - DNA, 25 bp, probe
cagccccatcaggttgttgtgaaga

SEQ ID NO: 165449 - DNA, 25 bp, probe
cagccctgctagattttgtatgatg

SEQ ID NO: 165450 - DNA, 25 bp, probe
cagccagcctattcttttggaattg

SEQ ID NO: 165451 - DNA, 25 bp, probe
cagccagcactttcctgggggaagt

SEQ ID NO: 165452 - DNA, 25 bp, probe
cagccacacagtggccggggctgaa

SEQ ID NO: 165453 - DNA, 25 bp, probe
cagccccagggcaggaggatggtgc

SEQ ID NO: 165454 - DNA, 25 bp, probe
cagctggaccggcaggagtttgtct

SEQ ID NO: 165455 - DNA, 25 bp, probe
cagcgtccctagcagtgaactattt

SEQ ID NO: 165456 - DNA, 25 bp, probe
caccaccctagacgctaaatcaatg

SEQ ID NO: 165457 - DNA, 25 bp, probe
caccaccctagacgctaaatcaatg

SEQ ID NO: 165458 - DNA, 25 bp, probe
caccaccctatgacgaaaaagcagc

SEQ ID NO: 165459 - DNA, 25 bp, probe
caccaacaccagggagaataagagc

SEQ ID NO: 165460 - DNA, 25 bp, probe
cagctccacgccgaaaaatgaagtg

SEQ ID NO: 165461 - DNA, 25 bp, probe
cagccagtgcccgaggccaggaagg

SEQ ID NO: 165462 - DNA, 25 bp, probe
cagccttcactggagaccggaattg

SEQ ID NO: 165463 - DNA, 25 bp, probe
cagctatcaactcgcgccctggaag

SEQ ID NO: 165464 - DNA, 25 bp, probe
cagcatttacatctgccctaatcag

SEQ ID NO: 165465 - DNA, 25 bp, probe
cagcatttacatctgccctaatcag

SEQ ID NO: 165466 - DNA, 25 bp, probe
cagcttcatcaatcgcaactacagg

SEQ ID NO: 165467 - DNA, 25 bp, probe
cagcttcatcaagcgctacgagacg

SEQ ID NO: 165468 - DNA, 25 bp, probe
cagctatgacagtgagtgggaacaa

SEQ ID NO: 165469 - DNA, 25 bp, probe
cagccagaacatgagagggagaact

SEQ ID NO: 165470 - DNA, 25 bp, probe
cagccaaaagaaaggccagcacctg

SEQ ID NO: 165471 - DNA, 25 bp, probe
cagccaatcaacacaggccgctagg

SEQ ID NO: 165472 - DNA, 25 bp, probe
cagcccatgaacaaattcctgcttg

SEQ ID NO: 165473 - DNA, 25 bp, probe
cagcccaggacaaagtcctctctgt

SEQ ID NO: 165474 - DNA, 25 bp, probe
cagcccaggacaaagtcctctctgt

SEQ ID NO: 165475 - DNA, 25 bp, probe
cagccggagacaaaacgccttaaag

SEQ ID NO: 165476 - DNA, 25 bp, probe
cagccatggtggagacctgcgttat

SEQ ID NO: 165477 - DNA, 25 bp, probe
cagcgaggaggcacctcgggtcttg

SEQ ID NO: 165478 - DNA, 25 bp, probe
cagacagtaggatcccagtaaatat

SEQ ID NO: 165479 - DNA, 25 bp, probe
cagacagtaggatcccagtaaatat

SEQ ID NO: 165480 - DNA, 25 bp, probe
cagccgaacgtggaacagtatcaca

SEQ ID NO: 165481 - DNA, 25 bp, probe
caccaaacgctggtcacaacagccc

SEQ ID NO: 165482 - DNA, 25 bp, probe
cagcaaaactgagatcctgacattc

SEQ ID NO: 165483 - DNA, 25 bp, probe
cagccagaatggatgtactacactt

SEQ ID NO: 165484 - DNA, 25 bp, probe
cagcaggagacgacttactagatct

SEQ ID NO: 165485 - DNA, 25 bp, probe
cagcagtcagctgtctttgtcaacc

SEQ ID NO: 165486 - DNA, 25 bp, probe
cagcagtcagctgtctttgtcaacc

SEQ ID NO: 165487 - DNA, 25 bp, probe
cagctgtcattgtgattttcgacct

SEQ ID NO: 165488 - DNA, 25 bp, probe
cagcggtggagtctgtgttgcacct

SEQ ID NO: 165489 - DNA, 25 bp, probe
cagcttgggagaaattattcaccat

SEQ ID NO: 165490 - DNA, 25 bp, probe
cagcttgggagaaattattcaccat

SEQ ID NO: 165491 - DNA, 25 bp, probe
cagcctggaggtgttcttcaatgat

SEQ ID NO: 165492 - DNA, 25 bp, probe
cagcctagaggtggcttctggcagc

SEQ ID NO: 165493 - DNA, 25 bp, probe
cagcctctgcaggggctttgagcac

SEQ ID NO: 165494 - DNA, 25 bp, probe
cagcctctgcaggggctttgagcac

SEQ ID NO: 165495 - DNA, 25 bp, probe
cagctcctgccactatctttagagc

SEQ ID NO: 165496 - DNA, 25 bp, probe
cagttttccattctgtggcaccaac

SEQ ID NO: 165497 - DNA, 25 bp, probe
cagttttccattctgtggcaccaac

SEQ ID NO: 165498 - DNA, 25 bp, probe
cagtagtttcctgcaggagcctacc

SEQ ID NO: 165499 - DNA, 25 bp, probe
cgggacttcctaaaactctatcagg

SEQ ID NO: 165500 - DNA, 25 bp, probe
catcgaggtcctgatgaacacctac

SEQ ID NO: 165501 - DNA, 25 bp, probe
cagccaggtccagatacacctgcag

SEQ ID NO: 165502 - DNA, 25 bp, probe
cagctcgacttcattcgaccagagt

SEQ ID NO: 165503 - DNA, 25 bp, probe
cagctcgacttcattcgaccagagt

SEQ ID NO: 165504 - DNA, 25 bp, probe
cagccagcactgattactacaagag

SEQ ID NO: 165505 - DNA, 25 bp, probe
cagccagtgcagattcaatcaggat

SEQ ID NO: 165506 - DNA, 25 bp, probe
cagccaggcaggtttgccaagctgc

SEQ ID NO: 165507 - DNA, 25 bp, probe
cagccaggatggtaaggccagctgc

SEQ ID NO: 165508 - DNA, 25 bp, probe
cagcacggagctgaaggctttgcag

SEQ ID NO: 165509 - DNA, 25 bp, probe
cagcctgccgtggcaaggactaagg

SEQ ID NO: 165510 - DNA, 25 bp, probe
cagcctccgatgtaagtaatgggca

SEQ ID NO: 165511 - DNA, 25 bp, probe
cagcctccgatgtaagtaatgggca

SEQ ID NO: 165512 - DNA, 25 bp, probe
cagcctctcagcaaaatgggaggga

SEQ ID NO: 165513 - DNA, 25 bp, probe
cagctttcagaagtgctgagttggc

SEQ ID NO: 165514 - DNA, 25 bp, probe
cagattgtaaattccagtttggttc

SEQ ID NO: 165515 - DNA, 25 bp, probe
cagattgtaaattccagtttggttc

SEQ ID NO: 165516 - DNA, 25 bp, probe
cagcattcggtatccctttgaaagc

SEQ ID NO: 165517 - DNA, 25 bp, probe
cagccaccaatttcctctttggata

SEQ ID NO: 165518 - DNA, 25 bp, probe
cagccagaaacatcctggtagctga

SEQ ID NO: 165519 - DNA, 25 bp, probe
cagccagaaatgctgccggctgcac

SEQ ID NO: 165520 - DNA, 25 bp, probe
cagccaatcaatgttcgtctctgcc

SEQ ID NO: 165521 - DNA, 25 bp, probe
cagctgaaatcggattcgtcccgct

SEQ ID NO: 165522 - DNA, 25 bp, probe
cagcgcacacgctgatttgaaccct

SEQ ID NO: 165523 - DNA, 25 bp, probe
cagccaacgggcttatgcagaccag

SEQ ID NO: 165524 - DNA, 25 bp, probe
cagccactgtggcctggaaaatcag

SEQ ID NO: 165525 - DNA, 25 bp, probe
cagccactgtggcctggaaaatcag

SEQ ID NO: 165526 - DNA, 25 bp, probe
cagccagcttaggtacacagattct

SEQ ID NO: 165527 - DNA, 25 bp, probe
cagccaggtcagataccaggcccag

SEQ ID NO: 165528 - DNA, 25 bp, probe
cagccaggccaggcaaccagtggcc

SEQ ID NO: 165529 - DNA, 25 bp, probe
cagcctggctcggcaagtagatggc

SEQ ID NO: 165530 - DNA, 25 bp, probe
cagcgattcctgccaagtagggttt

SEQ ID NO: 165531 - DNA, 25 bp, probe
cagattcccgactgtggcggttagc

SEQ ID NO: 165532 - DNA, 25 bp, probe
cagctaccccactgtgtgagctggt

SEQ ID NO: 165533 - DNA, 25 bp, probe
cagcctcgcctgtatggggagcagg

SEQ ID NO: 165534 - DNA, 25 bp, probe
cagcctcgcctgtatggggagcagg

SEQ ID NO: 165535 - DNA, 25 bp, probe
cagctgcccttctgtggagacaatg

SEQ ID NO: 165536 - DNA, 25 bp, probe
cagctgcccttctgtggagacaatg

SEQ ID NO: 165537 - DNA, 25 bp, probe
cagcctccgatctgctggagtacag

SEQ ID NO: 165538 - DNA, 25 bp, probe
cagcccaggtaactgggccagcagc

SEQ ID NO: 165539 - DNA, 25 bp, probe
cagccccaggaactgagtccagaga

SEQ ID NO: 165540 - DNA, 25 bp, probe
cagccaaaagaattactctcagaga

SEQ ID NO: 165541 - DNA, 25 bp, probe
cagcctccagagactataccaaata

SEQ ID NO: 165542 - DNA, 25 bp, probe
cagctctggggtgtcaccaagcaag

SEQ ID NO: 165543 - DNA, 25 bp, probe
cagccaataggagccagccaggaag

SEQ ID NO: 165544 - DNA, 25 bp, probe
cagctcaaagggcaatcgggaagga

SEQ ID NO: 165545 - DNA, 25 bp, probe
cagcatcaaaggtcacgtgcggttc

SEQ ID NO: 165546 - DNA, 25 bp, probe
cagctcaacagcaccgtggtgggcc

SEQ ID NO: 165547 - DNA, 25 bp, probe
cagcgcaacagcagcctgcagctgg

SEQ ID NO: 165548 - DNA, 25 bp, probe
cagccattcagcagcatatcagatg

SEQ ID NO: 165549 - DNA, 25 bp, probe
cagccattcagcagcatatcagatg

SEQ ID NO: 165550 - DNA, 25 bp, probe
cagctcattcagacctatgagctca

SEQ ID NO: 165551 - DNA, 25 bp, probe
cagctgtatgagacctatcagagca

SEQ ID NO: 165552 - DNA, 25 bp, probe
cagctgtatggtcttgggaggactc

SEQ ID NO: 165553 - DNA, 25 bp, probe
cagccttggcatggtgtgggggcac

SEQ ID NO: 165554 - DNA, 25 bp, probe
cagcctgggcttactggagctggac

SEQ ID NO: 165555 - DNA, 25 bp, probe
cagcctgggcttactggagctggac

SEQ ID NO: 165556 - DNA, 25 bp, probe
cagcgtggattttgtggacagagcc

SEQ ID NO: 165557 - DNA, 25 bp, probe
cagcgtggattttgtggacagagcc

SEQ ID NO: 165558 - DNA, 25 bp, probe
cagccaggattcatctgcggagacc

SEQ ID NO: 165559 - DNA, 25 bp, probe
cagcccatttcaactgggcaggtgg

SEQ ID NO: 165560 - DNA, 25 bp, probe
cagcggcatttggtcgggcagccgc

SEQ ID NO: 165561 - DNA, 25 bp, probe
cagcgtgcattcaaacgcactgctc

SEQ ID NO: 165562 - DNA, 25 bp, probe
cagcattgcatgccacagaggaatc

SEQ ID NO: 165563 - DNA, 25 bp, probe
cagcatatgcagcccgtgctaacat

SEQ ID NO: 165564 - DNA, 25 bp, probe
cagccagaggccaatgctcagagaa

SEQ ID NO: 165565 - DNA, 25 bp, probe
cagccgatgcccgattctggaaggg

SEQ ID NO: 165566 - DNA, 25 bp, probe
cagccaggcccgttataaatgtata

SEQ ID NO: 165567 - DNA, 25 bp, probe
cagccaggcccgttataaatgtata

SEQ ID NO: 165568 - DNA, 25 bp, probe
cagccacccctggttacaggagtac

SEQ ID NO: 165569 - DNA, 25 bp, probe
cagccacccctgatggagtggagta

SEQ ID NO: 165570 - DNA, 25 bp, probe
cagctgcatcccactgtgggtggag

SEQ ID NO: 165571 - DNA, 25 bp, probe
cagcctcccttcgatggggaggacg

SEQ ID NO: 165572 - DNA, 25 bp, probe
cagcccctcttctaagggaaggaga

SEQ ID NO: 165573 - DNA, 25 bp, probe
cagcccctcttctaagggaaggaga

SEQ ID NO: 165574 - DNA, 25 bp, probe
cagcacggctttggtaggggagtga

SEQ ID NO: 165575 - DNA, 25 bp, probe
cagcacggctttggtaggggagtga

SEQ ID NO: 165576 - DNA, 25 bp, probe
cagcctggaaacctacagacaagga

SEQ ID NO: 165577 - DNA, 25 bp, probe
cagcctgtgaaactctacagaaccc

SEQ ID NO: 165578 - DNA, 25 bp, probe
cagccccaaagtaacgacacacact

SEQ ID NO: 165579 - DNA, 25 bp, probe
cagccccacacgggacaacaaacat

SEQ ID NO: 165580 - DNA, 25 bp, probe
cagccccagcaagagcacaagagga

SEQ ID NO: 165581 - DNA, 25 bp, probe
cagcttccgaacaacagaaagtaga

SEQ ID NO: 165582 - DNA, 25 bp, probe
cagcttccgaacaacagaaagtaga

SEQ ID NO: 165583 - DNA, 25 bp, probe
cagctgtttgaagagcagctcaatt

SEQ ID NO: 165584 - DNA, 25 bp, probe
cagcctttagagcagcctcaagtac

SEQ ID NO: 165585 - DNA, 25 bp, probe
cagcctgtttgaggacaccctagac

SEQ ID NO: 165586 - DNA, 25 bp, probe
cagctgctggttataccacactaga

SEQ ID NO: 165587 - DNA, 25 bp, probe
cagctgctgggtgtccattgccata

SEQ ID NO: 165588 - DNA, 25 bp, probe
cagcttcggcatttgatcagaccaa

SEQ ID NO: 165589 - DNA, 25 bp, probe
cagctcttcgatctgattgaaagca

SEQ ID NO: 165590 - DNA, 25 bp, probe
cagcatcttcttttttagggcacag

SEQ ID NO: 165591 - DNA, 25 bp, probe
cagcaggtctttgtggagcgtgaca

SEQ ID NO: 165592 - DNA, 25 bp, probe
cagcagtggctgatttgggggagaa

SEQ ID NO: 165593 - DNA, 25 bp, probe
cagccgtgtcttctgtgttgaggga

SEQ ID NO: 165594 - DNA, 25 bp, probe
cagccagtttgtgagtggtggggag

SEQ ID NO: 165595 - DNA, 25 bp, probe
cagctgagttgttaaccagtcggga

SEQ ID NO: 165596 - DNA, 25 bp, probe
cagctgaagattttaggcctcgtgg

SEQ ID NO: 165597 - DNA, 25 bp, probe
cagctgaaaccaattggctctgggg

SEQ ID NO: 165598 - DNA, 25 bp, probe
cagctggaggccgagtttctgggga

SEQ ID NO: 165599 - DNA, 25 bp, probe
cagcaggaggaatgcctttcagggt

SEQ ID NO: 165600 - DNA, 25 bp, probe
cagctgaaagaaacctttgggaatg

SEQ ID NO: 165601 - DNA, 25 bp, probe
cagcgaaagcccctgaacgaggaat

SEQ ID NO: 165602 - DNA, 25 bp, probe
cagcgaaagcccctgaacgaggaat

SEQ ID NO: 165603 - DNA, 25 bp, probe
cagcagataccatagtgaacgaaga

SEQ ID NO: 165604 - DNA, 25 bp, probe
cagcaaaacaaacgacatccaattg

SEQ ID NO: 165605 - DNA, 25 bp, probe
cagccacgtaaacttgatccaactt

SEQ ID NO: 165606 - DNA, 25 bp, probe
cagccacgtaaacttgatccaactt

SEQ ID NO: 165607 - DNA, 25 bp, probe
cagcgtcgtcaagaagatccacatt

SEQ ID NO: 165608 - DNA, 25 bp, probe
cagcactgcgtatcaaaaagacttt

SEQ ID NO: 165609 - DNA, 25 bp, probe
cagccgcgaattcgacgtgagcttc

SEQ ID NO: 165610 - DNA, 25 bp, probe
cagcctcgttaggacaaggctgtgc

SEQ ID NO: 165611 - DNA, 25 bp, probe
cagccatctggatcgacacgggcat

SEQ ID NO: 165612 - DNA, 25 bp, probe
cagcctcggtgatgcacaccatggt

SEQ ID NO: 165613 - DNA, 25 bp, probe
cagcccagggaccacatcaatgtga

SEQ ID NO: 165614 - DNA, 25 bp, probe
cggccaggtcatcaccattggcaat

SEQ ID NO: 165615 - DNA, 25 bp, probe
cagccaggagtatttcctgtgccag

SEQ ID NO: 165616 - DNA, 25 bp, probe
cagccgcggtaattccagctccaat

SEQ ID NO: 165617 - DNA, 25 bp, probe
cagccagagatgaagagacacagtc

SEQ ID NO: 165618 - DNA, 25 bp, probe
cagcctggtatggagtccagtctaa

SEQ ID NO: 165619 - DNA, 25 bp, probe
cagccatcctcaaagtgctggtcga

SEQ ID NO: 165620 - DNA, 25 bp, probe
cagccagtctccgagagcggattga

SEQ ID NO: 165621 - DNA, 25 bp, probe
cagccagatctctgctgaggacctg

SEQ ID NO: 165622 - DNA, 25 bp, probe
cagctgcagcaccaggcagggactg

SEQ ID NO: 165623 - DNA, 25 bp, probe
cagctgtgcctgagaggtactgcct

SEQ ID NO: 165624 - DNA, 25 bp, probe
cagcttttgtggtgattctcctcat

SEQ ID NO: 165625 - DNA, 25 bp, probe
cagccattcttggtagacacctctc

SEQ ID NO: 165626 - DNA, 25 bp, probe
cagccagtcattactagtacctctg

SEQ ID NO: 165627 - DNA, 25 bp, probe
cagctcatgtttccataatactatt

SEQ ID NO: 165628 - DNA, 25 bp, probe
cagctctgagttcatggatgttaat

SEQ ID NO: 165629 - DNA, 25 bp, probe
cagcctgagtcacagtgtgctgtca

SEQ ID NO: 165630 - DNA, 25 bp, probe
cagcctgagctcttggatgtggtca

SEQ ID NO: 165631 - DNA, 25 bp, probe
cagcctgagctcttggatgtggtca

SEQ ID NO: 165632 - DNA, 25 bp, probe
caggtgaccttggaggatttgagac

SEQ ID NO: 165633 - DNA, 25 bp, probe
cagaaaccttggccgaattgtcaca

SEQ ID NO: 165634 - DNA, 25 bp, probe
cagaaaccttggccgaattgtcaca

SEQ ID NO: 165635 - DNA, 25 bp, probe
ctgccaacccctgggaattctacat

SEQ ID NO: 165636 - DNA, 25 bp, probe
cagccagaccctaaggattcctgta

SEQ ID NO: 165637 - DNA, 25 bp, probe
cttaaccctcgggactactgtggct

SEQ ID NO: 165638 - DNA, 25 bp, probe
cttaggcgcttcaggcggagttggt

SEQ ID NO: 165639 - DNA, 25 bp, probe
cttaccgttcacattggagatattc

SEQ ID NO: 165640 - DNA, 25 bp, probe
catctacactttcattctggggttc

SEQ ID NO: 165641 - DNA, 25 bp, probe
cagcgacacctggatgttcggggtg

SEQ ID NO: 165642 - DNA, 25 bp, probe
cagcgatactgctgtttctcgaggt

SEQ ID NO: 165643 - DNA, 25 bp, probe
cagcgactttggtctcaccaaggag

SEQ ID NO: 165644 - DNA, 25 bp, probe
cagctctgttctgattcaccagggg

SEQ ID NO: 165645 - DNA, 25 bp, probe
cagcatctgttcaaagtcgtagggc

SEQ ID NO: 165646 - DNA, 25 bp, probe
cagactgagacacagccgggtggtg

SEQ ID NO: 165647 - DNA, 25 bp, probe
cagacatgtgagcactacgggtggt

SEQ ID NO: 165648 - DNA, 25 bp, probe
cagcgagctgagcaccagtgggtga

SEQ ID NO: 165649 - DNA, 25 bp, probe
cagcgaggaagaggtggggtggcag

SEQ ID NO: 165650 - DNA, 25 bp, probe
cagccggacaacattgggatgctca

SEQ ID NO: 165651 - DNA, 25 bp, probe
cagcctggtcaagactgttgtcatc

SEQ ID NO: 165652 - DNA, 25 bp, probe
cagcctggtcaagactgttgtcatc

SEQ ID NO: 165653 - DNA, 25 bp, probe
cagcccagagaagatctgtttccct

SEQ ID NO: 165654 - DNA, 25 bp, probe
cagcccacatagtgatggttcccct

SEQ ID NO: 165655 - DNA, 25 bp, probe
cagcctaaagcaagggtaccgccac

SEQ ID NO: 165656 - DNA, 25 bp, probe
cagacgagaagaacggggcccagac

SEQ ID NO: 165657 - DNA, 25 bp, probe
cagccgcagaagaacgtggttagcc

SEQ ID NO: 165658 - DNA, 25 bp, probe
cagcctgacaaccacgggtttggca

SEQ ID NO: 165659 - DNA, 25 bp, probe
cagcaggaaactgggccgtttggca

SEQ ID NO: 165660 - DNA, 25 bp, probe
cagcaggaaactgggccgtttggca

SEQ ID NO: 165661 - DNA, 25 bp, probe
cagagtgacgtctggtcctttgggg

SEQ ID NO: 165662 - DNA, 25 bp, probe
cagaagggtccttctccttatgtgg

SEQ ID NO: 165663 - DNA, 25 bp, probe
cagacaggtaaaagctccaggtgtg

SEQ ID NO: 165664 - DNA, 25 bp, probe
cagaagtttgaattatccggtcggg

SEQ ID NO: 165665 - DNA, 25 bp, probe
cagcattgtttgaagtgccctcgct

SEQ ID NO: 165666 - DNA, 25 bp, probe
cagcactgtttgagatctacgccat

SEQ ID NO: 165667 - DNA, 25 bp, probe
cagcactttctgtggtactcctaat

SEQ ID NO: 165668 - DNA, 25 bp, probe
cagcctttctgctaagttctgtttt

SEQ ID NO: 165669 - DNA, 25 bp, probe
cagcgttatccgggttctgatgtca

SEQ ID NO: 165670 - DNA, 25 bp, probe
cagctgttgtcctggtatctgcaga

SEQ ID NO: 165671 - DNA, 25 bp, probe
cagcagtttctctgtgtacatggag

SEQ ID NO: 165672 - DNA, 25 bp, probe
cagctgttaatatgtgccttgtggc

SEQ ID NO: 165673 - DNA, 25 bp, probe
cagctgcctatgtaaggccttctag

SEQ ID NO: 165674 - DNA, 25 bp, probe
cagctactagggagaagtctgcaag

SEQ ID NO: 165675 - DNA, 25 bp, probe
cagccctctacgagacagtgatgta

SEQ ID NO: 165676 - DNA, 25 bp, probe
cagccctctacgagacagtgatgta

SEQ ID NO: 165677 - DNA, 25 bp, probe
cagcccatctacatcgtcatggagc

SEQ ID NO: 165678 - DNA, 25 bp, probe
cagaccattttgacagtcgagaacg

SEQ ID NO: 165679 - DNA, 25 bp, probe
cagtatattgggaagctcaatgata

SEQ ID NO: 165680 - DNA, 25 bp, probe
cagctattatgtggtatccatgtgt

SEQ ID NO: 165681 - DNA, 25 bp, probe
cagctgatgtatgtcccttgatgtc

SEQ ID NO: 165682 - DNA, 25 bp, probe
cagctggatgcagtgaaccttgaga

SEQ ID NO: 165683 - DNA, 25 bp, probe
cagccgtgcaaatgcagctgaaacc

SEQ ID NO: 165684 - DNA, 25 bp, probe
cagctgctgtgaaataatggaagag

SEQ ID NO: 165685 - DNA, 25 bp, probe
cagctgctggcacattttcttgcag

SEQ ID NO: 165686 - DNA, 25 bp, probe
cagcatgctgggacaattatttgac

SEQ ID NO: 165687 - DNA, 25 bp, probe
cagcatgtggagaaccttcttccca

SEQ ID NO: 165688 - DNA, 25 bp, probe
cagctggggtaggctgtctgtgcca

SEQ ID NO: 165689 - DNA, 25 bp, probe
cagctgagcggctgagtcctgagca

SEQ ID NO: 165690 - DNA, 25 bp, probe
cagcaggcggcattggagtctagga

SEQ ID NO: 165691 - DNA, 25 bp, probe
cagcggaggagaccagctcagaggc

SEQ ID NO: 165692 - DNA, 25 bp, probe
cagcgtgggaggtcatcgaggtgtc

SEQ ID NO: 165693 - DNA, 25 bp, probe
cagcgtgggaggtcatcgaggtgtc

SEQ ID NO: 165694 - DNA, 25 bp, probe
cagcggctcaaggtcatctatggct

SEQ ID NO: 165695 - DNA, 25 bp, probe
cagccgcatcgagtatatccactcc

SEQ ID NO: 165696 - DNA, 25 bp, probe
cagcgcctccaggaatcaacttggt

SEQ ID NO: 165697 - DNA, 25 bp, probe
cagcgtatcacaggcaaccagttgg

SEQ ID NO: 165698 - DNA, 25 bp, probe
cagctgtcactcatgcaacagcagc

SEQ ID NO: 165699 - DNA, 25 bp, probe
cagctgtcactcatgcaacagcagc

SEQ ID NO: 165700 - DNA, 25 bp, probe
cagcgtgcactaacttcatgatgac

SEQ ID NO: 165701 - DNA, 25 bp, probe
cagcctgactgtggcttcagggcag

SEQ ID NO: 165702 - DNA, 25 bp, probe
cagcctgactttgatcatcaggagc

SEQ ID NO: 165703 - DNA, 25 bp, probe
cagcctcctggtgactgatggacga

SEQ ID NO: 165704 - DNA, 25 bp, probe
cagcccaaggatgaggtggactggt

SEQ ID NO: 165705 - DNA, 25 bp, probe
cagcccacgcgggaagttcaaagta

SEQ ID NO: 165706 - DNA, 25 bp, probe
cagccccgtggagatgtggaatggg

SEQ ID NO: 165707 - DNA, 25 bp, probe
cagctcctagggtacagtctactag

SEQ ID NO: 165708 - DNA, 25 bp, probe
cagcccagttggatcagtttgatag

SEQ ID NO: 165709 - DNA, 25 bp, probe
cagcccagtttgttcatgtcagtga

SEQ ID NO: 165710 - DNA, 25 bp, probe
cagcctagcctatgtctggcagatg

SEQ ID NO: 165711 - DNA, 25 bp, probe
cagcctcccaaagtgctgggatcac

SEQ ID NO: 165712 - DNA, 25 bp, probe
cagcctctccagcaactgggatgac

SEQ ID NO: 165713 - DNA, 25 bp, probe
cagcctcatccaggatacaatggtg

SEQ ID NO: 165714 - DNA, 25 bp, probe
cagcctagatcactgttgaaggtgt

SEQ ID NO: 165715 - DNA, 25 bp, probe
cagcctagatcactgttgaaggtgt

SEQ ID NO: 165716 - DNA, 25 bp, probe
cagcctaaccgcagaaatgtgatca

SEQ ID NO: 165717 - DNA, 25 bp, probe
catcctatatccagtaagtagaatt

SEQ ID NO: 165718 - DNA, 25 bp, probe
catcccatgtcgtgttggttactat

SEQ ID NO: 165719 - DNA, 25 bp, probe
cagcctcttcgatgtttaatacaga

SEQ ID NO: 165720 - DNA, 25 bp, probe
cagcctcatctctttgttctaaaga

SEQ ID NO: 165721 - DNA, 25 bp, probe
cagctgagcattatgatgttaacaa

SEQ ID NO: 165722 - DNA, 25 bp, probe
cagctcagactattacaataacacc

SEQ ID NO: 165723 - DNA, 25 bp, probe
cagcatgcggccgagatcaataaca

SEQ ID NO: 165724 - DNA, 25 bp, probe
cagctctgcctggagactaaggcaa

SEQ ID NO: 165725 - DNA, 25 bp, probe
cagcttgcctcatgtcaaactgaaa

SEQ ID NO: 165726 - DNA, 25 bp, probe
cagctgagcccaggctaaactgcca

SEQ ID NO: 165727 - DNA, 25 bp, probe
cagctgaagctggggaaatggcaca

SEQ ID NO: 165728 - DNA, 25 bp, probe
cagctgaggctctgagaactggtac

SEQ ID NO: 165729 - DNA, 25 bp, probe
cagctggagctaggaacacttaccc

SEQ ID NO: 165730 - DNA, 25 bp, probe
cagcggaaacatattcttgcagccc

SEQ ID NO: 165731 - DNA, 25 bp, probe
cagcctgaacacagttttcaggact

SEQ ID NO: 165732 - DNA, 25 bp, probe
cagcttgcaaccatggtaacgtttc

SEQ ID NO: 165733 - DNA, 25 bp, probe
cagctccagacgcgttaagcgcatt

SEQ ID NO: 165734 - DNA, 25 bp, probe
cagcgccagggcagttgtgaggatt

SEQ ID NO: 165735 - DNA, 25 bp, probe
cagctgcctaggatgttctgggcta

SEQ ID NO: 165736 - DNA, 25 bp, probe
cagctctttgagtaggcatttggta

SEQ ID NO: 165737 - DNA, 25 bp, probe
cagcatcaatagaaagtcatctttg

SEQ ID NO: 165738 - DNA, 25 bp, probe
cagctcaaggtgttggcctttggat

SEQ ID NO: 165739 - DNA, 25 bp, probe
cagctccatcgttttggtcttgtac

SEQ ID NO: 165740 - DNA, 25 bp, probe
cagctctctgtcctgttgagtgttt

SEQ ID NO: 165741 - DNA, 25 bp, probe
cagctcttgatggcagcccagtgtg

SEQ ID NO: 165742 - DNA, 25 bp, probe
cagctgcatattgcacccacatagg

SEQ ID NO: 165743 - DNA, 25 bp, probe
cagctgccatattacgacttagtgc

SEQ ID NO: 165744 - DNA, 25 bp, probe
cagcccaattatcctctgatgttgc

SEQ ID NO: 165745 - DNA, 25 bp, probe
cagctccagaattccttgtctctga

SEQ ID NO: 165746 - DNA, 25 bp, probe
cagctccagcatcacttatgacctg

SEQ ID NO: 165747 - DNA, 25 bp, probe
cagctccagcatcacttatgacctg

SEQ ID NO: 165748 - DNA, 25 bp, probe
cagcatccacattgaccagatgccg

SEQ ID NO: 165749 - DNA, 25 bp, probe
cagcgcgcaagagggcagaccgata

SEQ ID NO: 165750 - DNA, 25 bp, probe
cagcaggaagccctgcaaccagaac

SEQ ID NO: 165751 - DNA, 25 bp, probe
cagcggtcagcagacaaggagaaga

SEQ ID NO: 165752 - DNA, 25 bp, probe
cagctggtcaggtcactcagaaaaa

SEQ ID NO: 165753 - DNA, 25 bp, probe
cagcggcctggccagtgaaaaggac

SEQ ID NO: 165754 - DNA, 25 bp, probe
cagctgacgctggcaagtccaaggt

SEQ ID NO: 165755 - DNA, 25 bp, probe
cagctgacgctggcaagtccaaggt

SEQ ID NO: 165756 - DNA, 25 bp, probe
cagctgaagtggcagttccagcggc

SEQ ID NO: 165757 - DNA, 25 bp, probe
cagcgaacgtggcattttctgcgcc

SEQ ID NO: 165758 - DNA, 25 bp, probe
cagcgctacaagtactggttctccc

SEQ ID NO: 165759 - DNA, 25 bp, probe
cagcgctcaaaactcggtgatcata

SEQ ID NO: 165760 - DNA, 25 bp, probe
cagctgtcagatgaacaggttattg

SEQ ID NO: 165761 - DNA, 25 bp, probe
cagctctcacagaagacagttactc

SEQ ID NO: 165762 - DNA, 25 bp, probe
cagcctgcgcagacgacaaggctcg

SEQ ID NO: 165763 - DNA, 25 bp, probe
cagcagctgaaaccaattggctctg

SEQ ID NO: 165764 - DNA, 25 bp, probe
cagcctgctcaacctgaaggccatg

SEQ ID NO: 165765 - DNA, 25 bp, probe
cagcctgtcacaactgagcagttct

SEQ ID NO: 165766 - DNA, 25 bp, probe
cagccgcacactatgagcaacatgc

SEQ ID NO: 165767 - DNA, 25 bp, probe
cagcctgcagctggattacgcaaca

SEQ ID NO: 165768 - DNA, 25 bp, probe
caggccgtggaagggcaacacaagg

SEQ ID NO: 165769 - DNA, 25 bp, probe
cagcccagcggcacggagaaagggc

SEQ ID NO: 165770 - DNA, 25 bp, probe
cagaccgccctggtaagaaacagtg

SEQ ID NO: 165771 - DNA, 25 bp, probe
cagcccagcctttatcaggaaaatt

SEQ ID NO: 165772 - DNA, 25 bp, probe
cagcccatctcttctgacatggaag

SEQ ID NO: 165773 - DNA, 25 bp, probe
cagcccatctcttctgacatggaag

SEQ ID NO: 165774 - DNA, 25 bp, probe
cagcccatcactgtacaggtctgga

SEQ ID NO: 165775 - DNA, 25 bp, probe
cagccccctacactcaaggctgaga

SEQ ID NO: 165776 - DNA, 25 bp, probe
cagcacctactatgcttcaggcatg

SEQ ID NO: 165777 - DNA, 25 bp, probe
cagcagcttgaagagtttggctggg

SEQ ID NO: 165778 - DNA, 25 bp, probe
cagacctacgggttgtgaggagggt

SEQ ID NO: 165779 - DNA, 25 bp, probe
cagacctacgggttgtgaggagggt

SEQ ID NO: 165780 - DNA, 25 bp, probe
cagcccacacggctgttcgtggtgg

SEQ ID NO: 165781 - DNA, 25 bp, probe
cagccgagaaggaagtcccgtatga

SEQ ID NO: 165782 - DNA, 25 bp, probe
cagccgggagtgaagccctgaggag

SEQ ID NO: 165783 - DNA, 25 bp, probe
cagccgtggaggagacctgcgggtt

SEQ ID NO: 165784 - DNA, 25 bp, probe
cagccgtggcggaaggccaggtggt

SEQ ID NO: 165785 - DNA, 25 bp, probe
cagcttgggccggagggcaagggat

SEQ ID NO: 165786 - DNA, 25 bp, probe
cagcttggcccagggaggggggatg

SEQ ID NO: 165787 - DNA, 25 bp, probe
cagcggcacctcgagagagaagggc

SEQ ID NO: 165788 - DNA, 25 bp, probe
cagcggcaagctgtggaggatgggg

SEQ ID NO: 165789 - DNA, 25 bp, probe
cagcacccagctgtgggggcagtgg

SEQ ID NO: 165790 - DNA, 25 bp, probe
cagacccaggccacagtggtgtcag

SEQ ID NO: 165791 - DNA, 25 bp, probe
caggcctacctgatacggtgtcaga

SEQ ID NO: 165792 - DNA, 25 bp, probe
ccggctacctatttggcagtgacgt

SEQ ID NO: 165793 - DNA, 25 bp, probe
ccggctacctatttggcagtgacgt

SEQ ID NO: 165794 - DNA, 25 bp, probe
cagctgggacctaatgctggcctga

SEQ ID NO: 165795 - DNA, 25 bp, probe
cagctggttcctgtgatgagcctga

SEQ ID NO: 165796 - DNA, 25 bp, probe
cagctggtacaaggggcagcccaag

SEQ ID NO: 165797 - DNA, 25 bp, probe
cagctggtccgaggagaacccaatg

SEQ ID NO: 165798 - DNA, 25 bp, probe
cagcatccgacgggaacatctccaa

SEQ ID NO: 165799 - DNA, 25 bp, probe
cagcatccgacgggaacatctccaa

SEQ ID NO: 165800 - DNA, 25 bp, probe
cagccgcatacgtgaggatcctgca

SEQ ID NO: 165801 - DNA, 25 bp, probe
cagccgcatgagctggggaatccag

SEQ ID NO: 165802 - DNA, 25 bp, probe
cagcgcctgaggcggccaattatcg

SEQ ID NO: 165803 - DNA, 25 bp, probe
cagcgcctgaggcggccaattatcg

SEQ ID NO: 165804 - DNA, 25 bp, probe
cagcgccagagtgctgacgccttac

SEQ ID NO: 165805 - DNA, 25 bp, probe
cagcgaaaggcaagcccgcttcagc

SEQ ID NO: 165806 - DNA, 25 bp, probe
cagccccagatggtgactactggag

SEQ ID NO: 165807 - DNA, 25 bp, probe
cagcgggcagatgggcggacggctg

SEQ ID NO: 165808 - DNA, 25 bp, probe
cagctggtggcaagcgtggagcagg

SEQ ID NO: 165809 - DNA, 25 bp, probe
cagctggctctaaagtcagtgaggc

SEQ ID NO: 165810 - DNA, 25 bp, probe
cagctggtgcgaaaatcgctaagca

SEQ ID NO: 165811 - DNA, 25 bp, probe
cagaggtggaaacactacagacact

SEQ ID NO: 165812 - DNA, 25 bp, probe
cagcagcgggaagtggaccaggacg

SEQ ID NO: 165813 - DNA, 25 bp, probe
cagcacgggcacgaggccgtggtgc

SEQ ID NO: 165814 - DNA, 25 bp, probe
cagcggagagcgaacgcctggaggc

SEQ ID NO: 165815 - DNA, 25 bp, probe
cagcggaaggtcagcgggagcaggg

SEQ ID NO: 165816 - DNA, 25 bp, probe
cagcgggaactcagggtgagcagct

SEQ ID NO: 165817 - DNA, 25 bp, probe
cagcagaggtaccacgaagctacct

SEQ ID NO: 165818 - DNA, 25 bp, probe
cattcaatgctaggacgtactcgtt

SEQ ID NO: 165819 - DNA, 25 bp, probe
catccttgtgggttgctacctttaa

SEQ ID NO: 165820 - DNA, 25 bp, probe
cagctttgtggaaattaccttgtat

SEQ ID NO: 165821 - DNA, 25 bp, probe
cagctttgtggaaattaccttgtat

SEQ ID NO: 165822 - DNA, 25 bp, probe
cagctttggtttgtatattctgtat

SEQ ID NO: 165823 - DNA, 25 bp, probe
cagcttatggcatttcctagagttt

SEQ ID NO: 165824 - DNA, 25 bp, probe
cagcttatggcatttcctagagttt

SEQ ID NO: 165825 - DNA, 25 bp, probe
cagctggaagctatggctatgtatt

SEQ ID NO: 165826 - DNA, 25 bp, probe
cagcgaggagccataatgtgcatat

SEQ ID NO: 165827 - DNA, 25 bp, probe
cagcaggcggctattggtaaacgct

SEQ ID NO: 165828 - DNA, 25 bp, probe
cagcacagctggttccggaagaaac

SEQ ID NO: 165829 - DNA, 25 bp, probe
cagcgcaggcgctcggagaagaaaa

SEQ ID NO: 165830 - DNA, 25 bp, probe
cagcagaccgccctggtaagaaaca

SEQ ID NO: 165831 - DNA, 25 bp, probe
cagcagctcaccatggctttaaaac

SEQ ID NO: 165832 - DNA, 25 bp, probe
cagcgtcctcaatgtccttaagagg

SEQ ID NO: 165833 - DNA, 25 bp, probe
cagactggtacctcgttaagatgta

SEQ ID NO: 165834 - DNA, 25 bp, probe
cagacttttctctcagttgggatgc

SEQ ID NO: 165835 - DNA, 25 bp, probe
cagcttcggcctaatcatttgggag

SEQ ID NO: 165836 - DNA, 25 bp, probe
cagctaagtgctgacacatcattcc

SEQ ID NO: 165837 - DNA, 25 bp, probe
cagctggagtctgacaccatcgctg

SEQ ID NO: 165838 - DNA, 25 bp, probe
cagctgagcgtgtcccaggacagtg

SEQ ID NO: 165839 - DNA, 25 bp, probe
cagctctggtacctatggtcgtgta

SEQ ID NO: 165840 - DNA, 25 bp, probe
cagctctggtacctatggtcgtgta

SEQ ID NO: 165841 - DNA, 25 bp, probe
cagctttggacattaggtctttgac

SEQ ID NO: 165842 - DNA, 25 bp, probe
cagctgttggacacgtgtctgtgca

SEQ ID NO: 165843 - DNA, 25 bp, probe
cagctggggatcgggctgtggtgac

SEQ ID NO: 165844 - DNA, 25 bp, probe
cagcttggtatggaggtgagtggac

SEQ ID NO: 165845 - DNA, 25 bp, probe
cagtctgcggtttagggggtcaggg

SEQ ID NO: 165846 - DNA, 25 bp, probe
cagtctgcggtttagggggtcaggg

SEQ ID NO: 165847 - DNA, 25 bp, probe
cagcccagggagtgtgggggccgtg

SEQ ID NO: 165848 - DNA, 25 bp, probe
cagcccagtgggcattggaggtgcc

SEQ ID NO: 165849 - DNA, 25 bp, probe
cagcaccgaggcctatgttagggcc

SEQ ID NO: 165850 - DNA, 25 bp, probe
cagcatcgagggccgaggtcacggc

SEQ ID NO: 165851 - DNA, 25 bp, probe
cagctcgggggccagagatcagggc

SEQ ID NO: 165852 - DNA, 25 bp, probe
cagcatcagggggctcagagtctgg

SEQ ID NO: 165853 - DNA, 25 bp, probe
cagcatatggacggccagctgtggc

SEQ ID NO: 165854 - DNA, 25 bp, probe
cagcttggaacacgcagttggcatg

SEQ ID NO: 165855 - DNA, 25 bp, probe
cagtactgaactcagttccatccgt

SEQ ID NO: 165856 - DNA, 25 bp, probe
cagctaaacaccaatttcttcctgc

SEQ ID NO: 165857 - DNA, 25 bp, probe
cagctagaacccaaggtcttcctgg

SEQ ID NO: 165858 - DNA, 25 bp, probe
cagctagaacccaaggtcttcctgg

SEQ ID NO: 165859 - DNA, 25 bp, probe
cagtatgaccgctcagggaacctgc

SEQ ID NO: 165860 - DNA, 25 bp, probe
cagaattccctgcatgtgtgataac

SEQ ID NO: 165861 - DNA, 25 bp, probe
cagcatttccaacaggatcacagac

SEQ ID NO: 165862 - DNA, 25 bp, probe
cagcatgttctcacccaacaatgac

SEQ ID NO: 165863 - DNA, 25 bp, probe
cagcattatgcttctggccaaacag

SEQ ID NO: 165864 - DNA, 25 bp, probe
cagcattatctctgagtccaccaga

SEQ ID NO: 165865 - DNA, 25 bp, probe
cagcgtcatcaaggagtcagaccat

SEQ ID NO: 165866 - DNA, 25 bp, probe
cagctgatccagatgttatgctcct

SEQ ID NO: 165867 - DNA, 25 bp, probe
cagctattcaatatgtgatctccaa

SEQ ID NO: 165868 - DNA, 25 bp, probe
cagctgcattgtaagagttctgtca

SEQ ID NO: 165869 - DNA, 25 bp, probe
cagctgtatgaggagagcttcaggc

SEQ ID NO: 165870 - DNA, 25 bp, probe
cagctgattggcggattggagatgc

SEQ ID NO: 165871 - DNA, 25 bp, probe
cagctgattccatgtctgggatgac

SEQ ID NO: 165872 - DNA, 25 bp, probe
cagctatgctctgtgtctgtgggaa

SEQ ID NO: 165873 - DNA, 25 bp, probe
cagctatgcgcaatgtggcattggg

SEQ ID NO: 165874 - DNA, 25 bp, probe
cagcgtgtgaatggctctctggctg

SEQ ID NO: 165875 - DNA, 25 bp, probe
cagcagctatctaagtcacaggtgg

SEQ ID NO: 165876 - DNA, 25 bp, probe
cagctgagcaccaaatccagggcgg

SEQ ID NO: 165877 - DNA, 25 bp, probe
cagctgagcaccaaatccagggcgg

SEQ ID NO: 165878 - DNA, 25 bp, probe
cagctggatctccatacggaggcgc

SEQ ID NO: 165879 - DNA, 25 bp, probe
cagctggaacccagaggacgccaag

SEQ ID NO: 165880 - DNA, 25 bp, probe
cagcgctaaccccagagggggaaag

SEQ ID NO: 165881 - DNA, 25 bp, probe
cagcttacaccaccagggtaagaaa

SEQ ID NO: 165882 - DNA, 25 bp, probe
cgctgccgccaacaggggacaaaac

SEQ ID NO: 165883 - DNA, 25 bp, probe
cagcgaaccacaggatggggccaaa

SEQ ID NO: 165884 - DNA, 25 bp, probe
cagcgacagccaaagcagggtccga

SEQ ID NO: 165885 - DNA, 25 bp, probe
cagcgacagccaaagcagggtccga

SEQ ID NO: 165886 - DNA, 25 bp, probe
cagctgcaggaaacagcaggccccg

SEQ ID NO: 165887 - DNA, 25 bp, probe
cagctcatggatgagcagatggccc

SEQ ID NO: 165888 - DNA, 25 bp, probe
cagctcatggcagtgacggagagca

SEQ ID NO: 165889 - DNA, 25 bp, probe
cagctgcatggagcctggaactgca

SEQ ID NO: 165890 - DNA, 25 bp, probe
cagctgctgggcacgcccagtgaga

SEQ ID NO: 165891 - DNA, 25 bp, probe
cagctgctgggcacgcccagtgaga

SEQ ID NO: 165892 - DNA, 25 bp, probe
cagcagtgggatacctgcgcttgaa

SEQ ID NO: 165893 - DNA, 25 bp, probe
cagcagctgggagcccagtgaacat

SEQ ID NO: 165894 - DNA, 25 bp, probe
cagactggggaagagtccaaggaag

SEQ ID NO: 165895 - DNA, 25 bp, probe
cagacttggaaaggtcacagaagga

SEQ ID NO: 165896 - DNA, 25 bp, probe
cagaggtaaagaggaagcattgaaa

SEQ ID NO: 165897 - DNA, 25 bp, probe
cagctggtcaaacaaactctctgaa

SEQ ID NO: 165898 - DNA, 25 bp, probe
cagctggtcaaacaaactctctgaa

SEQ ID NO: 165899 - DNA, 25 bp, probe
cagcggacaaataaaactcgctgac

SEQ ID NO: 165900 - DNA, 25 bp, probe
cagcggctgcaattttgctactcgc

SEQ ID NO: 165901 - DNA, 25 bp, probe
cagcggcatagagctgctgacctgc

SEQ ID NO: 165902 - DNA, 25 bp, probe
cagctgcgtaggggcacagctgctg

SEQ ID NO: 165903 - DNA, 25 bp, probe
cagcagtgacagcagcgacagcagt

SEQ ID NO: 165904 - DNA, 25 bp, probe
gaggaggcgatcaggagggagctag

SEQ ID NO: 165905 - DNA, 25 bp, probe
cagcatatccatctagaacaccacc

SEQ ID NO: 165906 - DNA, 25 bp, probe
cagcatgacctcctgaagtcgagcc

SEQ ID NO: 165907 - DNA, 25 bp, probe
cagcagagcctcgtgaatgtatttc

SEQ ID NO: 165908 - DNA, 25 bp, probe
cagcagagcctcgtgaatgtatttc

SEQ ID NO: 165909 - DNA, 25 bp, probe
cagcatgctttggtgagtttttctc

SEQ ID NO: 165910 - DNA, 25 bp, probe
cagcaatttctgtatagttttcacc

SEQ ID NO: 165911 - DNA, 25 bp, probe
cagcagataattaatcagatttcta

SEQ ID NO: 165912 - DNA, 25 bp, probe
cagcgccacaaatgactctggacac

SEQ ID NO: 165913 - DNA, 25 bp, probe
cagagcacaagaaagcaaccaacaa

SEQ ID NO: 165914 - DNA, 25 bp, probe
cagcaacttgtcaaacctaagcata

SEQ ID NO: 165915 - DNA, 25 bp, probe
cagcaacatttgggccagctaaaca

SEQ ID NO: 165916 - DNA, 25 bp, probe
cagcatccgtgggtcacaggtaaag

SEQ ID NO: 165917 - DNA, 25 bp, probe
cagctccctgtgattgagaataaag

SEQ ID NO: 165918 - DNA, 25 bp, probe
cagctcggcggtggtggactgaaga

SEQ ID NO: 165919 - DNA, 25 bp, probe
cagctggccggaaggagactgtggt

SEQ ID NO: 165920 - DNA, 25 bp, probe
cagcggcctacaaaggcacgcggcc

SEQ ID NO: 165921 - DNA, 25 bp, probe
cagcggcctacaaaggcacgcggcc

SEQ ID NO: 165922 - DNA, 25 bp, probe
cagcggcttaagggcgatgcctggg

SEQ ID NO: 165923 - DNA, 25 bp, probe
cagctggctgttgctgtcgagactg

SEQ ID NO: 165924 - DNA, 25 bp, probe
cagcggatgtgttcagtctgggcct

SEQ ID NO: 165925 - DNA, 25 bp, probe
cagcgtgaggcttcagcctggagcc

SEQ ID NO: 165926 - DNA, 25 bp, probe
cagaagagctgggcaccttagcgac

SEQ ID NO: 165927 - DNA, 25 bp, probe
cagcaacactggtcacgtttggaaa

SEQ ID NO: 165928 - DNA, 25 bp, probe
cagcaacactggtcacgtttggaaa

SEQ ID NO: 165929 - DNA, 25 bp, probe
cagaagcctttctgggtgaggccaa

SEQ ID NO: 165930 - DNA, 25 bp, probe
cagaccctgttgtgggcgttgtcat

SEQ ID NO: 165931 - DNA, 25 bp, probe
cagaccgagttggggccaactttga

SEQ ID NO: 165932 - DNA, 25 bp, probe
cagaagcaggttgttccccatttaa

SEQ ID NO: 165933 - DNA, 25 bp, probe
cagaaagagtctgaatccacccaga

SEQ ID NO: 165934 - DNA, 25 bp, probe
cagaaggaatctgagatcccaccct

SEQ ID NO: 165935 - DNA, 25 bp, probe
cagcaacccactaaagtccagatcc

SEQ ID NO: 165936 - DNA, 25 bp, probe
cagcaacctacatgaacttgggccc

SEQ ID NO: 165937 - DNA, 25 bp, probe
cagcgacacaagtgaccctgggcgc

SEQ ID NO: 165938 - DNA, 25 bp, probe
cagcaacgacagcggctttggaggc

SEQ ID NO: 165939 - DNA, 25 bp, probe
cagctcactgagctgggtgtaggag

SEQ ID NO: 165940 - DNA, 25 bp, probe
cagctcagctgggcatggagttaag

SEQ ID NO: 165941 - DNA, 25 bp, probe
cagcatcagctgggctgctttcttt

SEQ ID NO: 165942 - DNA, 25 bp, probe
cagcatcactctgttctagcattct

SEQ ID NO: 165943 - DNA, 25 bp, probe
cagcatgacctgtgaccagcactgt

SEQ ID NO: 165944 - DNA, 25 bp, probe
cagctgacactgaagacgagcctgg

SEQ ID NO: 165945 - DNA, 25 bp, probe
cagctggcagtgctgatcgatccca

SEQ ID NO: 165946 - DNA, 25 bp, probe
cagcgaatgaggcacagcaaccact

SEQ ID NO: 165947 - DNA, 25 bp, probe
cagcgacaactttcagcaggctgtc

SEQ ID NO: 165948 - DNA, 25 bp, probe
cagctggcaatcttccagagggatg

SEQ ID NO: 165949 - DNA, 25 bp, probe
cagctgccattctccaaagctgctg

SEQ ID NO: 165950 - DNA, 25 bp, probe
cagctgcttatctgtctaacttggc

SEQ ID NO: 165951 - DNA, 25 bp, probe
cagctgcttacatgttcatctcttg

SEQ ID NO: 165952 - DNA, 25 bp, probe
cagcacatctaacgagtagctcatt

SEQ ID NO: 165953 - DNA, 25 bp, probe
cagaactagacgccatggctgcatt

SEQ ID NO: 165954 - DNA, 25 bp, probe
cagaatgctagctctgagccagttc

SEQ ID NO: 165955 - DNA, 25 bp, probe
cagcaggtcactgctacaagtcccg

SEQ ID NO: 165956 - DNA, 25 bp, probe
cagcagagtcactttgacaatggga

SEQ ID NO: 165957 - DNA, 25 bp, probe
cagcaggtccagaaacaatatcaaa

SEQ ID NO: 165958 - DNA, 25 bp, probe
cagcaggtccagaaacaatatcaaa

SEQ ID NO: 165959 - DNA, 25 bp, probe
cagcatccacaactacaaatcacta

SEQ ID NO: 165960 - DNA, 25 bp, probe
cagctgcctcaaggccatagtcctg

SEQ ID NO: 165961 - DNA, 25 bp, probe
cagctcaccgacgagcaggtcatcg

SEQ ID NO: 165962 - DNA, 25 bp, probe
cagctccaggaccagtgcaggctgg

SEQ ID NO: 165963 - DNA, 25 bp, probe
cagctccagggccagatgagcagaa

SEQ ID NO: 165964 - DNA, 25 bp, probe
cagctcagcaggcacggtcaaaagg

SEQ ID NO: 165965 - DNA, 25 bp, probe
cagcatccggctgcggacaaagagg

SEQ ID NO: 165966 - DNA, 25 bp, probe
cagctactggtggcggaggaagcag

SEQ ID NO: 165967 - DNA, 25 bp, probe
cagcttctgggggggtgatctcaga

SEQ ID NO: 165968 - DNA, 25 bp, probe
cagcttctgggggggtgatctcaga

SEQ ID NO: 165969 - DNA, 25 bp, probe
cagctggaggggccgtaactgcagg

SEQ ID NO: 165970 - DNA, 25 bp, probe
cagcggaatgggcagcgacacgcgg

SEQ ID NO: 165971 - DNA, 25 bp, probe
cagcttccaggtgatgtacacagtg

SEQ ID NO: 165972 - DNA, 25 bp, probe
cagcttccatggtagtgtccatttg

SEQ ID NO: 165973 - DNA, 25 bp, probe
cagcttcctggaccatgactttggc

SEQ ID NO: 165974 - DNA, 25 bp, probe
cagcttctcggaatgcatgttgttc

SEQ ID NO: 165975 - DNA, 25 bp, probe
cagcttctgcgatcagattatcatc

SEQ ID NO: 165976 - DNA, 25 bp, probe
cagcttgctgctttcagctggagca

SEQ ID NO: 165977 - DNA, 25 bp, probe
cagctagctccatagggaagcctgt

SEQ ID NO: 165978 - DNA, 25 bp, probe
cagctgcctgccaggggagacctgg

SEQ ID NO: 165979 - DNA, 25 bp, probe
cagcgtcgacaccggggagctgatg

SEQ ID NO: 165980 - DNA, 25 bp, probe
cagcagtggacatcttaggagttgg

SEQ ID NO: 165981 - DNA, 25 bp, probe
cagctgtagtcttcttgaacacttc

SEQ ID NO: 165982 - DNA, 25 bp, probe
cagcgtagtgttttgacctttctag

SEQ ID NO: 165983 - DNA, 25 bp, probe
cagctatgagtttgactctcctttc

SEQ ID NO: 165984 - DNA, 25 bp, probe
cagcatggggcttggctccaagttc

SEQ ID NO: 165985 - DNA, 25 bp, probe
cagcttgggctatgccaacagctgc

SEQ ID NO: 165986 - DNA, 25 bp, probe
cagcttctgaggttgccaaaggccc

SEQ ID NO: 165987 - DNA, 25 bp, probe
cagctcctgcagcagtaccgagtgc

SEQ ID NO: 165988 - DNA, 25 bp, probe
cagctcctgagtctccagatgttgt

SEQ ID NO: 165989 - DNA, 25 bp, probe
cagctcctgagtctccagatgttgt

SEQ ID NO: 165990 - DNA, 25 bp, probe
cagctactgacacgtaaggtttccc

SEQ ID NO: 165991 - DNA, 25 bp, probe
cagctactacactgtaagcctctgc

SEQ ID NO: 165992 - DNA, 25 bp, probe
cagcacctacagtgtacagtcttgt

SEQ ID NO: 165993 - DNA, 25 bp, probe
cagcattaacagttctacacattta

SEQ ID NO: 165994 - DNA, 25 bp, probe
cagcttgaacatctagaattcctag

SEQ ID NO: 165995 - DNA, 25 bp, probe
cagcttgagcacatcaaaacccacg

SEQ ID NO: 165996 - DNA, 25 bp, probe
cagttggagaccgtcaaccttcaag

SEQ ID NO: 165997 - DNA, 25 bp, probe
caggggaccctggagatcctgtacc

SEQ ID NO: 165998 - DNA, 25 bp, probe
cagcagggacacctggagtgcgcgc

SEQ ID NO: 165999 - DNA, 25 bp, probe
cagcagccctacgtggaggcgctgc

SEQ ID NO: 166000 - DNA, 25 bp, probe
cagcagcaaatactcagcgggcacc

SEQ ID NO: 166001 - DNA, 25 bp, probe
cagcacaaatcgaagcaggaattcc

SEQ ID NO: 166002 - DNA, 25 bp, probe
cagcagcaacctgagaactgttcct

SEQ ID NO: 166003 - DNA, 25 bp, probe
cagcagcaacctgagaactgttcct

SEQ ID NO: 166004 - DNA, 25 bp, probe
cagcaaaaccctcatcagcattaca

SEQ ID NO: 166005 - DNA, 25 bp, probe
cagaagtaccctgagcagcagggac

SEQ ID NO: 166006 - DNA, 25 bp, probe
cagaagctccgcttcacatgcagaa

SEQ ID NO: 166007 - DNA, 25 bp, probe
cagcaagcagccattgccaaaactc

SEQ ID NO: 166008 - DNA, 25 bp, probe
cagacaagcccaatggcatgaaacg

SEQ ID NO: 166009 - DNA, 25 bp, probe
cagaaagatgactgccatgaaggca

SEQ ID NO: 166010 - DNA, 25 bp, probe
cagcaaaggacaagctgcagaagct

SEQ ID NO: 166011 - DNA, 25 bp, probe
cagtaatgaacaacagcattcagtt

SEQ ID NO: 166012 - DNA, 25 bp, probe
cagctataaattgcgctctcagctg

SEQ ID NO: 166013 - DNA, 25 bp, probe
cagcttaagatggtgccttcgtgaa

SEQ ID NO: 166014 - DNA, 25 bp, probe
cagctgtaggtggttttgccagaga

SEQ ID NO: 166015 - DNA, 25 bp, probe
cagctggacagaggtttctgggaga

SEQ ID NO: 166016 - DNA, 25 bp, probe
cagcttgaagagtttggctgggcca

SEQ ID NO: 166017 - DNA, 25 bp, probe
cagcggcaagggctggtggcggcag

SEQ ID NO: 166018 - DNA, 25 bp, probe
cagcatgcaagagctcagcacgatc

SEQ ID NO: 166019 - DNA, 25 bp, probe
cagctgagatagagcaccgtgccct

SEQ ID NO: 166020 - DNA, 25 bp, probe
cagctgagatagagcaccgtgccct

SEQ ID NO: 166021 - DNA, 25 bp, probe
cagctgagttgtaggcctggctgcc

SEQ ID NO: 166022 - DNA, 25 bp, probe
cagctagttagtgccatggcacact

SEQ ID NO: 166023 - DNA, 25 bp, probe
cagctccattagccaagcatggatt

SEQ ID NO: 166024 - DNA, 25 bp, probe
cagcttcgacagccaatcaggtgtc

SEQ ID NO: 166025 - DNA, 25 bp, probe
cagcttcgacagccaatcaggtgtc

SEQ ID NO: 166026 - DNA, 25 bp, probe
cagcttgcgggagatcacgctgctg

SEQ ID NO: 166027 - DNA, 25 bp, probe
cagtatcggaacatcggcactgcca

SEQ ID NO: 166028 - DNA, 25 bp, probe
cagatactggaagctctacgctact

SEQ ID NO: 166029 - DNA, 25 bp, probe
cagactggagaagcccctgaactgt

SEQ ID NO: 166030 - DNA, 25 bp, probe
cagaatggataagccagccaactgc

SEQ ID NO: 166031 - DNA, 25 bp, probe
cagcagggaagtggccgctcaagtg

SEQ ID NO: 166032 - DNA, 25 bp, probe
cagcagggacggtttgccaagctgc

SEQ ID NO: 166033 - DNA, 25 bp, probe
cagcaggcgcgcaaattacccactc

SEQ ID NO: 166034 - DNA, 25 bp, probe
cagcaggaggcaaatctccatcccc

SEQ ID NO: 166035 - DNA, 25 bp, probe
cagctggaggacatgctgctctcct

SEQ ID NO: 166036 - DNA, 25 bp, probe
cagctaaggagcatgcccatcagat

SEQ ID NO: 166037 - DNA, 25 bp, probe
cagctataggaccagcaaccatgat

SEQ ID NO: 166038 - DNA, 25 bp, probe
cagctttgagctcagcatgacttga

SEQ ID NO: 166039 - DNA, 25 bp, probe
cagctttcacatctgatttctgtat

SEQ ID NO: 166040 - DNA, 25 bp, probe
cagcttcacactctgcattacagtc

SEQ ID NO: 166041 - DNA, 25 bp, probe
cagctctcaatcctcgtatagcgta

SEQ ID NO: 166042 - DNA, 25 bp, probe
cagcatccttccagctttggataat

SEQ ID NO: 166043 - DNA, 25 bp, probe
cagcatccaccccggatgggaaagc

SEQ ID NO: 166044 - DNA, 25 bp, probe
cagcatccaccccggatgggaaagc

SEQ ID NO: 166045 - DNA, 25 bp, probe
cagctccagcactacaggacaggta

SEQ ID NO: 166046 - DNA, 25 bp, probe
cagcatcaagcagacggccgctgtg

SEQ ID NO: 166047 - DNA, 25 bp, probe
cagcatcaactggcaggacgtggtc

SEQ ID NO: 166048 - DNA, 25 bp, probe
cagcaaacgccaggacttggctccc

SEQ ID NO: 166049 - DNA, 25 bp, probe
cagcaaagccgttgactgctggtcc

SEQ ID NO: 166050 - DNA, 25 bp, probe
cagcaaggacctcagcgaggtcagc

SEQ ID NO: 166051 - DNA, 25 bp, probe
cagcaaaggcaagggcaggttcacc

SEQ ID NO: 166052 - DNA, 25 bp, probe
cagaaagtgggtggggtctccccag

SEQ ID NO: 166053 - DNA, 25 bp, probe
cagaaagtagggggttcccatccag

SEQ ID NO: 166054 - DNA, 25 bp, probe
cagaaggtgaggaaggttccgtgga

SEQ ID NO: 166055 - DNA, 25 bp, probe
cagcaaggttggcatggattacaga

SEQ ID NO: 166056 - DNA, 25 bp, probe
cagcaaggttggcatggattacaga

SEQ ID NO: 166057 - DNA, 25 bp, probe
cagcagggctggacggatgttggga

SEQ ID NO: 166058 - DNA, 25 bp, probe
cagcagggctggacggatgttggga

SEQ ID NO: 166059 - DNA, 25 bp, probe
cagcagcggatgtgttcagtctggg

SEQ ID NO: 166060 - DNA, 25 bp, probe
cagcagggcagctcgatgcagtgct

SEQ ID NO: 166061 - DNA, 25 bp, probe
cagcagtgggctcagcatggtcttc

SEQ ID NO: 166062 - DNA, 25 bp, probe
cagcaacctgagaactgttcctctc

SEQ ID NO: 166063 - DNA, 25 bp, probe
cagcaacctgagaactgttcctctc

SEQ ID NO: 166064 - DNA, 25 bp, probe
cagcagccgtttgatgattccttag

SEQ ID NO: 166065 - DNA, 25 bp, probe
cagaccctaaggattcctgtagctg

SEQ ID NO: 166066 - DNA, 25 bp, probe
cagaaccaaattatctccatctttt

SEQ ID NO: 166067 - DNA, 25 bp, probe
cagcagatcacatcattgcctacca

SEQ ID NO: 166068 - DNA, 25 bp, probe
cagcagcctgcagctggattacgca

SEQ ID NO: 166069 - DNA, 25 bp, probe
cagcacccactccaataacagagta

SEQ ID NO: 166070 - DNA, 25 bp, probe
cagaccacttctcagaaaatgcagc

SEQ ID NO: 166071 - DNA, 25 bp, probe
cagaccgctcaccaagaacaacgcg

SEQ ID NO: 166072 - DNA, 25 bp, probe
cagaccgctcaccaagaacaacgcg

SEQ ID NO: 166073 - DNA, 25 bp, probe
cagacatcactggcagaagtaaact

SEQ ID NO: 166074 - DNA, 25 bp, probe
cagacatcactggcagaagtaaact

SEQ ID NO: 166075 - DNA, 25 bp, probe
cagatcctctggacacgtaacctat

SEQ ID NO: 166076 - DNA, 25 bp, probe
cagcaacctgtgacaggatcaagca

SEQ ID NO: 166077 - DNA, 25 bp, probe
cagcaaagtctggcgtgatcaacat

SEQ ID NO: 166078 - DNA, 25 bp, probe
cagcattcagttatttgcagaaggg

SEQ ID NO: 166079 - DNA, 25 bp, probe
cagctgctaaaaattctggacagag

SEQ ID NO: 166080 - DNA, 25 bp, probe
cagctcgagtacttgtctgtggagg

SEQ ID NO: 166081 - DNA, 25 bp, probe
cagctcgagtacttgtctgtggagg

SEQ ID NO: 166082 - DNA, 25 bp, probe
cagctcctgggcgtgatcgtggagg

SEQ ID NO: 166083 - DNA, 25 bp, probe
cagctcctgggctattggtggtgct

SEQ ID NO: 166084 - DNA, 25 bp, probe
cagctctcagcagggctttggggat

SEQ ID NO: 166085 - DNA, 25 bp, probe
cagcagctgaagggctttgtggtga

SEQ ID NO: 166086 - DNA, 25 bp, probe
cagcactgttgcactttatgtttta

SEQ ID NO: 166087 - DNA, 25 bp, probe
cagagctgttaagggcttatttttt

SEQ ID NO: 166088 - DNA, 25 bp, probe
ctaggatccaagtttccttatttgt

SEQ ID NO: 166089 - DNA, 25 bp, probe
ctagcgcccagggcttgcttttacc

SEQ ID NO: 166090 - DNA, 25 bp, probe
catagcgcccaagctcagcttagaa

SEQ ID NO: 166091 - DNA, 25 bp, probe
catagtccaccgtgacattaaaggt

SEQ ID NO: 166092 - DNA, 25 bp, probe
cagagcttcccgtgcaaaaagggtc

SEQ ID NO: 166093 - DNA, 25 bp, probe
cagagccctccaaaacaaaagacca

SEQ ID NO: 166094 - DNA, 25 bp, probe
caggcctgaccaaaaaaggagtgtc

SEQ ID NO: 166095 - DNA, 25 bp, probe
cagagcaataacactatatttattt

SEQ ID NO: 166096 - DNA, 25 bp, probe
cagcagctaaacaccgttcttcagc

SEQ ID NO: 166097 - DNA, 25 bp, probe
cagcactataagttccgttaccacc

SEQ ID NO: 166098 - DNA, 25 bp, probe
cagaatatgaagttgccgatgatga

SEQ ID NO: 166099 - DNA, 25 bp, probe
cagctccatgaacagcggcaggagg

SEQ ID NO: 166100 - DNA, 25 bp, probe
cagcacgatgaagactggaaagcga

SEQ ID NO: 166101 - DNA, 25 bp, probe
cagacagattgtcacggaacacgtg

SEQ ID NO: 166102 - DNA, 25 bp, probe
cagacatggtggctcggtacaggtt

SEQ ID NO: 166103 - DNA, 25 bp, probe
cagaagccggtcaagttccaggttg

SEQ ID NO: 166104 - DNA, 25 bp, probe
cagtagccggaaatgctcccgggcc

SEQ ID NO: 166105 - DNA, 25 bp, probe
cagtagccggaaatgctcccgggcc

SEQ ID NO: 166106 - DNA, 25 bp, probe
cagcttgggagatactcccgctgtc

SEQ ID NO: 166107 - DNA, 25 bp, probe
cagcaggaggaatatctacctgtgt

SEQ ID NO: 166108 - DNA, 25 bp, probe
cagcaggggcaatagtgatggttat

SEQ ID NO: 166109 - DNA, 25 bp, probe
cagcagagggcctcgtgtggtcata

SEQ ID NO: 166110 - DNA, 25 bp, probe
cagaaggcccggcttggaacagtac

SEQ ID NO: 166111 - DNA, 25 bp, probe
cagaactggtggatgcgggaaagat

SEQ ID NO: 166112 - DNA, 25 bp, probe
cagcaagggctgattctaggataag

SEQ ID NO: 166113 - DNA, 25 bp, probe
cagcaaagcctccttccagaggctc

SEQ ID NO: 166114 - DNA, 25 bp, probe
cagcaaagcctccttccagaggctc

SEQ ID NO: 166115 - DNA, 25 bp, probe
cagacagacctcatctataacctcc

SEQ ID NO: 166116 - DNA, 25 bp, probe
cagaagacccctgactcatcatttg

SEQ ID NO: 166117 - DNA, 25 bp, probe
cagcaagacctctgaaatcctgggt

SEQ ID NO: 166118 - DNA, 25 bp, probe
cagcttacctgcagtcaattcattg

SEQ ID NO: 166119 - DNA, 25 bp, probe
cagcttcactccatgtcatatatgg

SEQ ID NO: 166120 - DNA, 25 bp, probe
cagcattcctccatcttagatagat

SEQ ID NO: 166121 - DNA, 25 bp, probe
cagcattcctccatcttagatagat

SEQ ID NO: 166122 - DNA, 25 bp, probe
cagcattcgatgcatttttatagaa

SEQ ID NO: 166123 - DNA, 25 bp, probe
cagcagtccaggtgcacactaagaa

SEQ ID NO: 166124 - DNA, 25 bp, probe
cagctgccatagctgccttttagga

SEQ ID NO: 166125 - DNA, 25 bp, probe
cagctgccagcctgtgttgaacagc

SEQ ID NO: 166126 - DNA, 25 bp, probe
cagctgccagcctgtgttgaacagc

SEQ ID NO: 166127 - DNA, 25 bp, probe
cagctccatctccagttctggaggc

SEQ ID NO: 166128 - DNA, 25 bp, probe
cagctgaatcttggcttctggacct

SEQ ID NO: 166129 - DNA, 25 bp, probe
caggaacttcctatggccttttggt

SEQ ID NO: 166130 - DNA, 25 bp, probe
cagagaagtttcaaagtgcctttct

SEQ ID NO: 166131 - DNA, 25 bp, probe
cagcaaggagttcaagcgcgctttc

SEQ ID NO: 166132 - DNA, 25 bp, probe
cagcaatggcagattatcgacatct

SEQ ID NO: 166133 - DNA, 25 bp, probe
cagacatgcctgtcttagctgacct

SEQ ID NO: 166134 - DNA, 25 bp, probe
cagacatgcctgtcttagctgacct

SEQ ID NO: 166135 - DNA, 25 bp, probe
cagcagtgcctatatagtgactgat

SEQ ID NO: 166136 - DNA, 25 bp, probe
cagcagtgcctatatagtgactgat

SEQ ID NO: 166137 - DNA, 25 bp, probe
cagcagtgttaactcatttctcatg

SEQ ID NO: 166138 - DNA, 25 bp, probe
cagcaatgctgtttcactggttatg

SEQ ID NO: 166139 - DNA, 25 bp, probe
cagcatgagctgatgacactggatg

SEQ ID NO: 166140 - DNA, 25 bp, probe
cagctgcagctgttcaagcacgaga

SEQ ID NO: 166141 - DNA, 25 bp, probe
cagcatcagctcgtcaacgggaagg

SEQ ID NO: 166142 - DNA, 25 bp, probe
cagcatcagctcgtcaacgggaagg

SEQ ID NO: 166143 - DNA, 25 bp, probe
cagctacaagtttctgggcgagcgt

SEQ ID NO: 166144 - DNA, 25 bp, probe
cagtacaagttctgctacgaggtgg

SEQ ID NO: 166145 - DNA, 25 bp, probe
cagatatcagaaatcccttggggga

SEQ ID NO: 166146 - DNA, 25 bp, probe
cagatatcagaaatccccttggggg

SEQ ID NO: 166147 - DNA, 25 bp, probe
cagcaaaaagtccccgctgggtgcg

SEQ ID NO: 166148 - DNA, 25 bp, probe
cagcaaaatttaacacctaggcctg

SEQ ID NO: 166149 - DNA, 25 bp, probe
cagaaaaatgattggccccagtccc

SEQ ID NO: 166150 - DNA, 25 bp, probe
gcagaaaaatgattggccccagtcc

SEQ ID NO: 166151 - DNA, 25 bp, probe
cagcaggaattgctgtgtcccagag

SEQ ID NO: 166152 - DNA, 25 bp, probe
cagcaggagagtcgagcctgcccag

SEQ ID NO: 166153 - DNA, 25 bp, probe
cagcaagagagctgcagcctgggcc

SEQ ID NO: 166154 - DNA, 25 bp, probe
cagcaccaaagccggtggacagcgg

SEQ ID NO: 166155 - DNA, 25 bp, probe
cagctgccttcagtgggtagaatgg

SEQ ID NO: 166156 - DNA, 25 bp, probe
cagcttcttcaggcggtagctgatt

SEQ ID NO: 166157 - DNA, 25 bp, probe
cagctagtgtcagcagtgggatacc

SEQ ID NO: 166158 - DNA, 25 bp, probe
cagctagtgtcagcagtgggatacc

SEQ ID NO: 166159 - DNA, 25 bp, probe
cagctcagtgccacagggtgcagag

SEQ ID NO: 166160 - DNA, 25 bp, probe
cagctgcgtcctgcagaatgggagc

SEQ ID NO: 166161 - DNA, 25 bp, probe
cagcatcggccgtcgacatgatgga

SEQ ID NO: 166162 - DNA, 25 bp, probe
cagcatcatggcccacgagctgttg

SEQ ID NO: 166163 - DNA, 25 bp, probe
cagcatcgcagccagcctggctgta

SEQ ID NO: 166164 - DNA, 25 bp, probe
cagctgccagacggtggatgtgatg

SEQ ID NO: 166165 - DNA, 25 bp, probe
cagcatcctgacggttgatgtggcc

SEQ ID NO: 166166 - DNA, 25 bp, probe
cagcacagttcagcattgtgtggct

SEQ ID NO: 166167 - DNA, 25 bp, probe
cagaagcatccatatttgtacacat

SEQ ID NO: 166168 - DNA, 25 bp, probe
cagacatccgattcaatagttacta

SEQ ID NO: 166169 - DNA, 25 bp, probe
cagaaccaagacctaactcctgcag

SEQ ID NO: 166170 - DNA, 25 bp, probe
cagaggcaaaacctgaatatccagt

SEQ ID NO: 166171 - DNA, 25 bp, probe
gaaggaaaacttcaacagctaacta

SEQ ID NO: 166172 - DNA, 25 bp, probe
gaaggaaaacttcaacagctaacta

SEQ ID NO: 166173 - DNA, 25 bp, probe
gaattaaataatgtacttttggcta

SEQ ID NO: 166174 - DNA, 25 bp, probe
gcagttaaaaagctcgtagttggat

SEQ ID NO: 166175 - DNA, 25 bp, probe
caggtggaccaacggactgatttag

SEQ ID NO: 166176 - DNA, 25 bp, probe
cagcatgctgaaccgacggacgacc

SEQ ID NO: 166177 - DNA, 25 bp, probe
cagctccaacctggaggctggacca

SEQ ID NO: 166178 - DNA, 25 bp, probe
cagctctacaccagagagtgctgcc

SEQ ID NO: 166179 - DNA, 25 bp, probe
cagtcatccacaaggcatagcctcc

SEQ ID NO: 166180 - DNA, 25 bp, probe
cagcatcaagcgggtgctggccatc

SEQ ID NO: 166181 - DNA, 25 bp, probe
cagcatcaaggatgtgcacgcccgg

SEQ ID NO: 166182 - DNA, 25 bp, probe
cagcatcaaggatgtgcacgcccgg

SEQ ID NO: 166183 - DNA, 25 bp, probe
cagcagcaggagtcagctacgaccc

SEQ ID NO: 166184 - DNA, 25 bp, probe
cagcagcaggagtcagctacgaccc

SEQ ID NO: 166185 - DNA, 25 bp, probe
cagcaagggtgagctggacccacct

SEQ ID NO: 166186 - DNA, 25 bp, probe
cagcaaggagtgcgtggggcctcct

SEQ ID NO: 166187 - DNA, 25 bp, probe
cagcaaggacttctgcgaggcgctg

SEQ ID NO: 166188 - DNA, 25 bp, probe
cagcaaggacttctgcgaggcgctg

SEQ ID NO: 166189 - DNA, 25 bp, probe
cagcaagctatcttgtctcgggctt

SEQ ID NO: 166190 - DNA, 25 bp, probe
cagaagcattccctataaggcctgc

SEQ ID NO: 166191 - DNA, 25 bp, probe
cagcagaatttgccctacggtgtga

SEQ ID NO: 166192 - DNA, 25 bp, probe
cagtcagatgtgtatgcgtttggga

SEQ ID NO: 166193 - DNA, 25 bp, probe
cagctcagaggcttggcatttgcca

SEQ ID NO: 166194 - DNA, 25 bp, probe
cagctcagaggcacctgtgtggagg

SEQ ID NO: 166195 - DNA, 25 bp, probe
cagctcagagtacctcgggaatgaa

SEQ ID NO: 166196 - DNA, 25 bp, probe
cagctaatgctatggggtgtatgaa

SEQ ID NO: 166197 - DNA, 25 bp, probe
cagctagagcttcggggggatgtgg

SEQ ID NO: 166198 - DNA, 25 bp, probe
cagctaactttctgatagttgatgg

SEQ ID NO: 166199 - DNA, 25 bp, probe
cagacaagttctctgcagagtttgt

SEQ ID NO: 166200 - DNA, 25 bp, probe
cagacaagttctctgcagagtttgt

SEQ ID NO: 166201 - DNA, 25 bp, probe
cagaaaccttctgggagctttgtcg

SEQ ID NO: 166202 - DNA, 25 bp, probe
cagaaccctgaatgcaacttctgtg

SEQ ID NO: 166203 - DNA, 25 bp, probe
cagcaaccgtatccagaacttcaga

SEQ ID NO: 166204 - DNA, 25 bp, probe
cagcaagcccttcaaagttatgatg

SEQ ID NO: 166205 - DNA, 25 bp, probe
cagcaagcccttcaaagttatgatg

SEQ ID NO: 166206 - DNA, 25 bp, probe
cagcaagttcacctccaagtttgta

SEQ ID NO: 166207 - DNA, 25 bp, probe
cagcaatactcagcccaagaatttg

SEQ ID NO: 166208 - DNA, 25 bp, probe
cagcagatcaaacatctggaaatta

SEQ ID NO: 166209 - DNA, 25 bp, probe
cagcttagaagttcgaaaactcagc

SEQ ID NO: 166210 - DNA, 25 bp, probe
cagctctccaacacggaggcaatcg

SEQ ID NO: 166211 - DNA, 25 bp, probe
cagcattctcgaaattggaggactc

SEQ ID NO: 166212 - DNA, 25 bp, probe
cagcttcccaaagtgctgggattac

SEQ ID NO: 166213 - DNA, 25 bp, probe
cagcttcccaaagtgctgggattac

SEQ ID NO: 166214 - DNA, 25 bp, probe
cagcattcccaaagctcttaattct

SEQ ID NO: 166215 - DNA, 25 bp, probe
cagcttacctaactctcagactatt

SEQ ID NO: 166216 - DNA, 25 bp, probe
cagcttgagcctgaccatacactta

SEQ ID NO: 166217 - DNA, 25 bp, probe
cagcttggacatgcccattacaaag

SEQ ID NO: 166218 - DNA, 25 bp, probe
cagcttcataatttccatgatacaa

SEQ ID NO: 166219 - DNA, 25 bp, probe
cagagttagatcctctcagaacaga

SEQ ID NO: 166220 - DNA, 25 bp, probe
cgagttgtgtccaacgattcggact

SEQ ID NO: 166221 - DNA, 25 bp, probe
cagagttggtgtttggagcccgact

SEQ ID NO: 166222 - DNA, 25 bp, probe
cagagttggtgtttggagcccgact

SEQ ID NO: 166223 - DNA, 25 bp, probe
cagagttggtgtttggagcccgact

SEQ ID NO: 166224 - DNA, 25 bp, probe
cagagtctgtttcaggagcggcgcc

SEQ ID NO: 166225 - DNA, 25 bp, probe
cagcagtcggttggagcgagcatcc

SEQ ID NO: 166226 - DNA, 25 bp, probe
cagcaactgggatgacgacagccta

SEQ ID NO: 166227 - DNA, 25 bp, probe
cagcaacggccaagaggatcaacag

SEQ ID NO: 166228 - DNA, 25 bp, probe
cagcaacggccaagaggatcaacag

SEQ ID NO: 166229 - DNA, 25 bp, probe
cagcaaatgggcattttacaagaag

SEQ ID NO: 166230 - DNA, 25 bp, probe
cagagaacgcacaggctattagtca

SEQ ID NO: 166231 - DNA, 25 bp, probe
cagcaacatctggctgggctcttac

SEQ ID NO: 166232 - DNA, 25 bp, probe
cagaacatagccctggcctaggact

SEQ ID NO: 166233 - DNA, 25 bp, probe
cagactcttcacagggtcaggactc

SEQ ID NO: 166234 - DNA, 25 bp, probe
cagcaccttcaaagggacacctacg

SEQ ID NO: 166235 - DNA, 25 bp, probe
catgaccccaaagaatcacaccaag

SEQ ID NO: 166236 - DNA, 25 bp, probe
cagaccctaaagaaagagacctcaa

SEQ ID NO: 166237 - DNA, 25 bp, probe
cagacccgaagtgaggagtcccaag

SEQ ID NO: 166238 - DNA, 25 bp, probe
cagacccttcgaccaggagtcaaat

SEQ ID NO: 166239 - DNA, 25 bp, probe
cagcaagccgtcgactatggagaca

SEQ ID NO: 166240 - DNA, 25 bp, probe
cagcattccgcggactgaagggcag

SEQ ID NO: 166241 - DNA, 25 bp, probe
cagcaggcacggtcaaaagggcaag

SEQ ID NO: 166242 - DNA, 25 bp, probe
cagagtcactttgacaatgggaatg

SEQ ID NO: 166243 - DNA, 25 bp, probe
cagagctagtgtccaaaatgcgtga

SEQ ID NO: 166244 - DNA, 25 bp, probe
cagcagccaggtccagatacacctg

SEQ ID NO: 166245 - DNA, 25 bp, probe
cagcaggagtcacagtcacagtcgc

SEQ ID NO: 166246 - DNA, 25 bp, probe
cagagctggtggggctccagatcag

SEQ ID NO: 166247 - DNA, 25 bp, probe
cagaattatctggagcctgcggcag

SEQ ID NO: 166248 - DNA, 25 bp, probe
cagaatgtatcatcagagcgccgag

SEQ ID NO: 166249 - DNA, 25 bp, probe
cagcacagtatcttcaaggaagcag

SEQ ID NO: 166250 - DNA, 25 bp, probe
cagcatgagttcctgccggagagat

SEQ ID NO: 166251 - DNA, 25 bp, probe
cagcatgactgtggtgccgtacttg

SEQ ID NO: 166252 - DNA, 25 bp, probe
cagcatgactgtggtgccgtacttg

SEQ ID NO: 166253 - DNA, 25 bp, probe
cagcagatcatgcgagggtaccggc

SEQ ID NO: 166254 - DNA, 25 bp, probe
cagaactgcgtattacaatccggca

SEQ ID NO: 166255 - DNA, 25 bp, probe
cagaactcgttaaagcaaagcgcta

SEQ ID NO: 166256 - DNA, 25 bp, probe
cagacgccaggcaacaaaatgggca

SEQ ID NO: 166257 - DNA, 25 bp, probe
cagaccgcggcctaataatgagtga

SEQ ID NO: 166258 - DNA, 25 bp, probe
ctgaaaggtcctatacaagtcagtt

SEQ ID NO: 166259 - DNA, 25 bp, probe
cagactcagtagcgttttagtcgtt

SEQ ID NO: 166260 - DNA, 25 bp, probe
cagactttcaggtttttactcactt

SEQ ID NO: 166261 - DNA, 25 bp, probe
cagactttcaggtttttactcactt

SEQ ID NO: 166262 - DNA, 25 bp, probe
cagaacctcaagcttttcaggcatc

SEQ ID NO: 166263 - DNA, 25 bp, probe
cagaaacacaaccggatgtcttgat

SEQ ID NO: 166264 - DNA, 25 bp, probe
cagcaaacccctctgcatgtagctg

SEQ ID NO: 166265 - DNA, 25 bp, probe
cagaaaccacacacactgttgctgg

SEQ ID NO: 166266 - DNA, 25 bp, probe
cagaaggccattgaactcttctgtg

SEQ ID NO: 166267 - DNA, 25 bp, probe
cagagaagcgttgcaacctcacgtg

SEQ ID NO: 166268 - DNA, 25 bp, probe
cagagaacgtctgcaacatcgtggt

SEQ ID NO: 166269 - DNA, 25 bp, probe
cagagaacgtctgcaacatcgtggt

SEQ ID NO: 166270 - DNA, 25 bp, probe
cagaatatcccgagtgctgcgtgga

SEQ ID NO: 166271 - DNA, 25 bp, probe
cagaaaaacgagcctcagctggcga

SEQ ID NO: 166272 - DNA, 25 bp, probe
cagaaacttcgaggggctgagcgag

SEQ ID NO: 166273 - DNA, 25 bp, probe
cagacagacctcaagggacagggaa

SEQ ID NO: 166274 - DNA, 25 bp, probe
cagagcaacgcttaggaagcagtgt

SEQ ID NO: 166275 - DNA, 25 bp, probe
cagcagattgctcagttacatgggt

SEQ ID NO: 166276 - DNA, 25 bp, probe
cagcacatctgcccagattctgagg

SEQ ID NO: 166277 - DNA, 25 bp, probe
cagcagcacataccactgtgggggc

SEQ ID NO: 166278 - DNA, 25 bp, probe
cagcagcacataccactgtgggggc

SEQ ID NO: 166279 - DNA, 25 bp, probe
cagcaccatgatcatcgtgggcctc

SEQ ID NO: 166280 - DNA, 25 bp, probe
cagcagctagatgcatgcctgaggc

SEQ ID NO: 166281 - DNA, 25 bp, probe
cagcagctggcagagcgcgagatcg

SEQ ID NO: 166282 - DNA, 25 bp, probe
cagcatctgcacaaaggtggacatg

SEQ ID NO: 166283 - DNA, 25 bp, probe
cagcatctggagttggggcacagcg

SEQ ID NO: 166284 - DNA, 25 bp, probe
cagcagctggacatggggaggcgac

SEQ ID NO: 166285 - DNA, 25 bp, probe
cagcagggtctgagagaggagccac

SEQ ID NO: 166286 - DNA, 25 bp, probe
cagactgtgttgaggaggagacgct

SEQ ID NO: 166287 - DNA, 25 bp, probe
cagactgtgttgaggaggagacgct

SEQ ID NO: 166288 - DNA, 25 bp, probe
cagcaagtgtaggagtggtgggcct

SEQ ID NO: 166289 - DNA, 25 bp, probe
cagaatgggagcggtgggggtggga

SEQ ID NO: 166290 - DNA, 25 bp, probe
cagaagtgggttagtcggttggtga

SEQ ID NO: 166291 - DNA, 25 bp, probe
cagaagtgggttagtcggttggtga

SEQ ID NO: 166292 - DNA, 25 bp, probe
ctaagggagttcattgatttggttg

SEQ ID NO: 166293 - DNA, 25 bp, probe
cagaaggaagttgtctataatgagc

SEQ ID NO: 166294 - DNA, 25 bp, probe
cagaattgagagatgttttgttgat

SEQ ID NO: 166295 - DNA, 25 bp, probe
cagagcttttgcatttcctgtgttt

SEQ ID NO: 166296 - DNA, 25 bp, probe
cagcactctctaaatcttccttgtg

SEQ ID NO: 166297 - DNA, 25 bp, probe
cagcactctctaaatcttccttgtg

SEQ ID NO: 166298 - DNA, 25 bp, probe
cagcattctttgattgtcatcttat

SEQ ID NO: 166299 - DNA, 25 bp, probe
cagcatcctttatctgtgacttcat

SEQ ID NO: 166300 - DNA, 25 bp, probe
cagcaatctttatttagtcaacatg

SEQ ID NO: 166301 - DNA, 25 bp, probe
cagcactctgtgaaaccttgaaatg

SEQ ID NO: 166302 - DNA, 25 bp, probe
cagctttatgatatcaaagactcat

SEQ ID NO: 166303 - DNA, 25 bp, probe
cagcttttatagtcacccagcatcc

SEQ ID NO: 166304 - DNA, 25 bp, probe
cagaatgattactacctcaggacca

SEQ ID NO: 166305 - DNA, 25 bp, probe
cagacatctaaattttcgagactta

SEQ ID NO: 166306 - DNA, 25 bp, probe
cagagatccagtctattcaaggcat

SEQ ID NO: 166307 - DNA, 25 bp, probe
cagaagtgcagcctttgttattgca

SEQ ID NO: 166308 - DNA, 25 bp, probe
cagcaggctctgctgtttctagtga

SEQ ID NO: 166309 - DNA, 25 bp, probe
cagcaggctctgctgtttctagtga

SEQ ID NO: 166310 - DNA, 25 bp, probe
cagcaggtgcatcgccagcatttcg

SEQ ID NO: 166311 - DNA, 25 bp, probe
cagcagcagtggcagcagcagtggc

SEQ ID NO: 166312 - DNA, 25 bp, probe
cagcagcagtggcagcagcagtggc

SEQ ID NO: 166313 - DNA, 25 bp, probe
cagcagcagtggcagcagcagtggc

SEQ ID NO: 166314 - DNA, 25 bp, probe
cagcagcagtggcagcagcagtggc

SEQ ID NO: 166315 - DNA, 25 bp, probe
cagcagcagtgccatagccaggctc

SEQ ID NO: 166316 - DNA, 25 bp, probe
cagcacgtgctcttgccagtgctgg

SEQ ID NO: 166317 - DNA, 25 bp, probe
cagcatccgcgagtgagcagtctgc

SEQ ID NO: 166318 - DNA, 25 bp, probe
cagcatcgcggatgaagacgcacgg

SEQ ID NO: 166319 - DNA, 25 bp, probe
cagacctggagggaacagacatgtt

SEQ ID NO: 166320 - DNA, 25 bp, probe
cagagcttggcagaagatgagtttg

SEQ ID NO: 166321 - DNA, 25 bp, probe
cagcatgttccagttataggccttg

SEQ ID NO: 166322 - DNA, 25 bp, probe
cagaagtgcacaggtcaaagcgtct

SEQ ID NO: 166323 - DNA, 25 bp, probe
cagaaagcaaggacatgcggcctgc

SEQ ID NO: 166324 - DNA, 25 bp, probe
cagcagctagaatacgccctgctca

SEQ ID NO: 166325 - DNA, 25 bp, probe
cagcagtacatgttgaccttattcg

SEQ ID NO: 166326 - DNA, 25 bp, probe
cagcagctacatttacacatctagc

SEQ ID NO: 166327 - DNA, 25 bp, probe
cagcattatctcggacacatcttgt

SEQ ID NO: 166328 - DNA, 25 bp, probe
cagcagtgtctccaggacatcttgg

SEQ ID NO: 166329 - DNA, 25 bp, probe
cagcagcttgcgggagatcacgctg

SEQ ID NO: 166330 - DNA, 25 bp, probe
cagcagtgttgcagcaacctgtgac

SEQ ID NO: 166331 - DNA, 25 bp, probe
cagcaggagtgagcgacgcagagca

SEQ ID NO: 166332 - DNA, 25 bp, probe
cagcaggaagaggccggaggagtag

SEQ ID NO: 166333 - DNA, 25 bp, probe
cagcacgatcggggccggagacaag

SEQ ID NO: 166334 - DNA, 25 bp, probe
cagcacgacgaggacctggctgagg

SEQ ID NO: 166335 - DNA, 25 bp, probe
cagatgcccgagcaccgtgtcgggc

SEQ ID NO: 166336 - DNA, 25 bp, probe
catcatcaaatggccaatctagaac

SEQ ID NO: 166337 - DNA, 25 bp, probe
cagcatcagccttagaacaagaacc

SEQ ID NO: 166338 - DNA, 25 bp, probe
cagacatgagcttgagcaggcaggg

SEQ ID NO: 166339 - DNA, 25 bp, probe
cagcacagagcttgatgatatcact

SEQ ID NO: 166340 - DNA, 25 bp, probe
cagacaatcatgtagcattgaattc

SEQ ID NO: 166341 - DNA, 25 bp, probe
cagacaatcatgtagcattgaattc

SEQ ID NO: 166342 - DNA, 25 bp, probe
cagcacagactctcttaataagacc

SEQ ID NO: 166343 - DNA, 25 bp, probe
cagcacagcgtctctgtaaaggttt

SEQ ID NO: 166344 - DNA, 25 bp, probe
cagcatccagtctgtgctatcagag

SEQ ID NO: 166345 - DNA, 25 bp, probe
cagcagcacgatcacagttcaatgc

SEQ ID NO: 166346 - DNA, 25 bp, probe
cagcatccagctctcagttaagaag

SEQ ID NO: 166347 - DNA, 25 bp, probe
cagcaacagagctcagttaaatgca

SEQ ID NO: 166348 - DNA, 25 bp, probe
cagcaacatgagggaaataagcaaa

SEQ ID NO: 166349 - DNA, 25 bp, probe
cagcagcaagaggagtccaagtcac

SEQ ID NO: 166350 - DNA, 25 bp, probe
cagcatcaagccagaggccagtcag

SEQ ID NO: 166351 - DNA, 25 bp, probe
cagagcgagtgcaagatggccaaga

SEQ ID NO: 166352 - DNA, 25 bp, probe
cagagcctgtcatctgttacagcac

SEQ ID NO: 166353 - DNA, 25 bp, probe
cagcagcctttggtgaatacatgag

SEQ ID NO: 166354 - DNA, 25 bp, probe
cagcaagctgtcggtgatccacaga

SEQ ID NO: 166355 - DNA, 25 bp, probe
cagcaagcagttctacctaacgtcc

SEQ ID NO: 166356 - DNA, 25 bp, probe
cagacagcagaacttgacctttccc

SEQ ID NO: 166357 - DNA, 25 bp, probe
cagacagcagaacttgacctttccc

SEQ ID NO: 166358 - DNA, 25 bp, probe
caggactgacagaataagacttatc

SEQ ID NO: 166359 - DNA, 25 bp, probe
caggactgacagaataagacttatc

SEQ ID NO: 166360 - DNA, 25 bp, probe
cagcaccaggctagtaatacttatt

SEQ ID NO: 166361 - DNA, 25 bp, probe
cagcaccagactattctctgcgtgt

SEQ ID NO: 166362 - DNA, 25 bp, probe
cagactaatcaggcttatccgatgt

SEQ ID NO: 166363 - DNA, 25 bp, probe
cagcatctacctgaacatccagagg

SEQ ID NO: 166364 - DNA, 25 bp, probe
cagcaaatcctcagacacctgtgga

SEQ ID NO: 166365 - DNA, 25 bp, probe
cagaatgtcctaaacccttgctgcc

SEQ ID NO: 166366 - DNA, 25 bp, probe
cagactactcgaaatggcgtccgcc

SEQ ID NO: 166367 - DNA, 25 bp, probe
cagactactcgaaatggcgtccgcc

SEQ ID NO: 166368 - DNA, 25 bp, probe
cagaatactccacaaggctctgtcc

SEQ ID NO: 166369 - DNA, 25 bp, probe
cagcagaaacgacaaggcacttcat

SEQ ID NO: 166370 - DNA, 25 bp, probe
cagcagcagaaacgacaaggcactt

SEQ ID NO: 166371 - DNA, 25 bp, probe
cagcagcagaaacgacaaggcactt

SEQ ID NO: 166372 - DNA, 25 bp, probe
cagcagacaagatccagatggccat

SEQ ID NO: 166373 - DNA, 25 bp, probe
cagcagcacatctaacgagtagctc

SEQ ID NO: 166374 - DNA, 25 bp, probe
cagcagaccaaaggagtggcgcccc

SEQ ID NO: 166375 - DNA, 25 bp, probe
cagagatgccaagggggagaccccc

SEQ ID NO: 166376 - DNA, 25 bp, probe
cagacagaacgacagaaccacgccc

SEQ ID NO: 166377 - DNA, 25 bp, probe
cagacagaacgacagaaccacgccc

SEQ ID NO: 166378 - DNA, 25 bp, probe
cagaaggagctacaaaacctaccct

SEQ ID NO: 166379 - DNA, 25 bp, probe
cagaagaggggttgagaatggaatc

SEQ ID NO: 166380 - DNA, 25 bp, probe
cagactgcagggcttgaaatggaca

SEQ ID NO: 166381 - DNA, 25 bp, probe
cagagacagggttgcttataggaag

SEQ ID NO: 166382 - DNA, 25 bp, probe
cagcagacacgggagtttgtggaga

SEQ ID NO: 166383 - DNA, 25 bp, probe
cagcagacacgggagtttgtggaga

SEQ ID NO: 166384 - DNA, 25 bp, probe
cagatgcccgagcaccgtgtcgggc

SEQ ID NO: 166385 - DNA, 25 bp, probe
cagcacacccagcagggggaacaca

SEQ ID NO: 166386 - DNA, 25 bp, probe
cagcaacagtcaggagggcggtctt

SEQ ID NO: 166387 - DNA, 25 bp, probe
cagcaatcagcagacacgggagttt

SEQ ID NO: 166388 - DNA, 25 bp, probe
cagcatacgcaactcacgaaggccg

SEQ ID NO: 166389 - DNA, 25 bp, probe
cagcatgcacaggagctccaagggc

SEQ ID NO: 166390 - DNA, 25 bp, probe
cagcatgcacaggagctccaagggc

SEQ ID NO: 166391 - DNA, 25 bp, probe
cagcaatcacaagccaaggtctgaa

SEQ ID NO: 166392 - DNA, 25 bp, probe
cagcagcacacctggacaggtctgc

SEQ ID NO: 166393 - DNA, 25 bp, probe
cagcaagcacagatgtacaggtatc

SEQ ID NO: 166394 - DNA, 25 bp, probe
cagaagggaatgtcaagctttgctc

SEQ ID NO: 166395 - DNA, 25 bp, probe
cagaatgggagctaccgctgcaagt

SEQ ID NO: 166396 - DNA, 25 bp, probe
cagaatggctgacttgaagagcaac

SEQ ID NO: 166397 - DNA, 25 bp, probe
cagcatgggcacttatgaggacaaa

SEQ ID NO: 166398 - DNA, 25 bp, probe
cagatgctgcgcaccaggagcaaaa

SEQ ID NO: 166399 - DNA, 25 bp, probe
cagatgctgcgcaccaggagcaaaa

SEQ ID NO: 166400 - DNA, 25 bp, probe
cagcacttgctaccagagaggacag

SEQ ID NO: 166401 - DNA, 25 bp, probe
cagactctgctaccattttggctgt

SEQ ID NO: 166402 - DNA, 25 bp, probe
cagactcgtgtgactatataggcaa

SEQ ID NO: 166403 - DNA, 25 bp, probe
cagagctcggagcctcattgagaca

SEQ ID NO: 166404 - DNA, 25 bp, probe
cagaccgagagcgcttagtaggtcg

SEQ ID NO: 166405 - DNA, 25 bp, probe
cagacccagagggtttggagcctgg

SEQ ID NO: 166406 - DNA, 25 bp, probe
cagaccacagggcagcttgggactc

SEQ ID NO: 166407 - DNA, 25 bp, probe
cagaccacagggcagcttgggactc

SEQ ID NO: 166408 - DNA, 25 bp, probe
cagcacccaggacacgggcaagctg

SEQ ID NO: 166409 - DNA, 25 bp, probe
cagcaggagggacaatgcggccagg

SEQ ID NO: 166410 - DNA, 25 bp, probe
cagaaaggagacgaagcgggcggct

SEQ ID NO: 166411 - DNA, 25 bp, probe
cagaaggggacacgtggcgggagca

SEQ ID NO: 166412 - DNA, 25 bp, probe
cagaaggggacacgtggcgggagca

SEQ ID NO: 166413 - DNA, 25 bp, probe
cagaaggggcacggggaggccatgc

SEQ ID NO: 166414 - DNA, 25 bp, probe
cagaagtgtttctggtgggctctgc

SEQ ID NO: 166415 - DNA, 25 bp, probe
cagaaggattcctatgtgggcgacg

SEQ ID NO: 166416 - DNA, 25 bp, probe
cagaagacaccacaggctggggcgt

SEQ ID NO: 166417 - DNA, 25 bp, probe
cagaagtacctgaaggtggtgatgg

SEQ ID NO: 166418 - DNA, 25 bp, probe
cagcaactctatggtagggggagag

SEQ ID NO: 166419 - DNA, 25 bp, probe
cagagacccgcgtggcggtgaagac

SEQ ID NO: 166420 - DNA, 25 bp, probe
cagtgaagttcgtaggaggaaaaca

SEQ ID NO: 166421 - DNA, 25 bp, probe
cttgatagttaccggaacgaaatag

SEQ ID NO: 166422 - DNA, 25 bp, probe
cttgagtcttaccgtaattgataac

SEQ ID NO: 166423 - DNA, 25 bp, probe
cagtttttcagccgtaattagtaca

SEQ ID NO: 166424 - DNA, 25 bp, probe
cagttttatagtgtgcaagtggcag

SEQ ID NO: 166425 - DNA, 25 bp, probe
cagaccttggagccgacacgggagt

SEQ ID NO: 166426 - DNA, 25 bp, probe
cagaccttggagccgacacgggagt

SEQ ID NO: 166427 - DNA, 25 bp, probe
cagcacctgggtatgacccagagac

SEQ ID NO: 166428 - DNA, 25 bp, probe
cagatcacgggtgtacccagggttt

SEQ ID NO: 166429 - DNA, 25 bp, probe
cagaccagacttgtccccaaggtct

SEQ ID NO: 166430 - DNA, 25 bp, probe
cagaccaaatcgagccgccaaaagt

SEQ ID NO: 166431 - DNA, 25 bp, probe
cagaccagaagctgcccgagaacaa

SEQ ID NO: 166432 - DNA, 25 bp, probe
cagaacaaaatgactcctgatgaac

SEQ ID NO: 166433 - DNA, 25 bp, probe
cagcaaccaagtaccctgctaaatc

SEQ ID NO: 166434 - DNA, 25 bp, probe
cagatcatccacagttacacggaaa

SEQ ID NO: 166435 - DNA, 25 bp, probe
cagcaggatcacagttacacaggag

SEQ ID NO: 166436 - DNA, 25 bp, probe
cagcaggccacatggctggccaagc

SEQ ID NO: 166437 - DNA, 25 bp, probe
cagaagcaacagaggtgccaggcct

SEQ ID NO: 166438 - DNA, 25 bp, probe
cagcactgaaaataccatcaggcct

SEQ ID NO: 166439 - DNA, 25 bp, probe
cagactgtgagatgaacagccccca

SEQ ID NO: 166440 - DNA, 25 bp, probe
cagcacgtggtggggctgcaccacc

SEQ ID NO: 166441 - DNA, 25 bp, probe
cagcacggagagcgtgagcccagca

SEQ ID NO: 166442 - DNA, 25 bp, probe
cagcaagaggagtccaagtcacacc

SEQ ID NO: 166443 - DNA, 25 bp, probe
cagaaagggtgtgggtacactggct

SEQ ID NO: 166444 - DNA, 25 bp, probe
cagcagcggagggtggagtaactgc

SEQ ID NO: 166445 - DNA, 25 bp, probe
cagcagcgtgaaccggcggacacgc

SEQ ID NO: 166446 - DNA, 25 bp, probe
cagacgatgagaccagcctggaagg

SEQ ID NO: 166447 - DNA, 25 bp, probe
cagacgatgaggatgccataaagag

SEQ ID NO: 166448 - DNA, 25 bp, probe
cagactgatgatttggctaaagagg

SEQ ID NO: 166449 - DNA, 25 bp, probe
cagatctcagtaaggtacggagtaa

SEQ ID NO: 166450 - DNA, 25 bp, probe
cagatgttgtgaaggtcctgggcct

SEQ ID NO: 166451 - DNA, 25 bp, probe
cagacttcatgctgtgtgtcggaca

SEQ ID NO: 166452 - DNA, 25 bp, probe
catgaattgatgaatctgtgttgga

SEQ ID NO: 166453 - DNA, 25 bp, probe
cagaattatgtcaggttggcttgtc

SEQ ID NO: 166454 - DNA, 25 bp, probe
cagaaaatgccatactctgttttgg

SEQ ID NO: 166455 - DNA, 25 bp, probe
cagacaagagcctttgttgttttct

SEQ ID NO: 166456 - DNA, 25 bp, probe
cagagtaagcctgttgtgactttgc

SEQ ID NO: 166457 - DNA, 25 bp, probe
cagagtcaaccttgggtgatgcctt

SEQ ID NO: 166458 - DNA, 25 bp, probe
cagcagaaactttcgctggatggtt

SEQ ID NO: 166459 - DNA, 25 bp, probe
cagatgtcccaatcctggaggtcat

SEQ ID NO: 166460 - DNA, 25 bp, probe
cagagtagcccatttcctagggcac

SEQ ID NO: 166461 - DNA, 25 bp, probe
cagacttccctaatcctaaaatgcg

SEQ ID NO: 166462 - DNA, 25 bp, probe
cagacttccctaatcctaaaatgcg

SEQ ID NO: 166463 - DNA, 25 bp, probe
cagatttcccatttagtagtcatag

SEQ ID NO: 166464 - DNA, 25 bp, probe
cagagttccctaaacttgcttcagt

SEQ ID NO: 166465 - DNA, 25 bp, probe
cagagtgtttcttaaatggtgtaat

SEQ ID NO: 166466 - DNA, 25 bp, probe
atgagctgagggaagtggacggcac

SEQ ID NO: 166467 - DNA, 25 bp, probe
cagagaaagatgcaagacatgtagt

SEQ ID NO: 166468 - DNA, 25 bp, probe
caggaaaagccaagaattggtttct

SEQ ID NO: 166469 - DNA, 25 bp, probe
cagtaaaacttacctgttgtggtct

SEQ ID NO: 166470 - DNA, 25 bp, probe
catgttagaactgaggtgggctagt

SEQ ID NO: 166471 - DNA, 25 bp, probe
catgttgcagaaaaaggttatacgt

SEQ ID NO: 166472 - DNA, 25 bp, probe
catttctgtcagtgggattaaccat

SEQ ID NO: 166473 - DNA, 25 bp, probe
catttgcttctgctaggttaaactt

SEQ ID NO: 166474 - DNA, 25 bp, probe
cgttgcttgtggatttatagtagtt

SEQ ID NO: 166475 - DNA, 25 bp, probe
cagggctttggccttaaaggcgctg

SEQ ID NO: 166476 - DNA, 25 bp, probe
cagagcgtggttgtatctggggccg

SEQ ID NO: 166477 - DNA, 25 bp, probe
cagagtgtgggagctaatgggaatc

SEQ ID NO: 166478 - DNA, 25 bp, probe
cagagtgtcctcactttggggcatg

SEQ ID NO: 166479 - DNA, 25 bp, probe
cagtcggcctacgacttcaaggctg

SEQ ID NO: 166480 - DNA, 25 bp, probe
cagttgggtgcactacttctaagga

SEQ ID NO: 166481 - DNA, 25 bp, probe
cagaatggtcgcaccttcaaagtgg

SEQ ID NO: 166482 - DNA, 25 bp, probe
cagatatggtccgcctttggcattg

SEQ ID NO: 166483 - DNA, 25 bp, probe
cagaatggtccagcacttttgcttt

SEQ ID NO: 166484 - DNA, 25 bp, probe
cagaagttcggcaccttatttctct

SEQ ID NO: 166485 - DNA, 25 bp, probe
cagaagtaagacaactgtttttctc

SEQ ID NO: 166486 - DNA, 25 bp, probe
catcaaaaatggcactgtccccttc

SEQ ID NO: 166487 - DNA, 25 bp, probe
cagcaagcaaatgggcggtccctct

SEQ ID NO: 166488 - DNA, 25 bp, probe
cagaagtcagacgtctggtccttcg

SEQ ID NO: 166489 - DNA, 25 bp, probe
cagaagtcagacgtctggtccttcg

SEQ ID NO: 166490 - DNA, 25 bp, probe
cagaatgtttccgtgctacactttg

SEQ ID NO: 166491 - DNA, 25 bp, probe
cagaattgtgggaacaacagcttat

SEQ ID NO: 166492 - DNA, 25 bp, probe
cagcacattcatgggaccaacctct

SEQ ID NO: 166493 - DNA, 25 bp, probe
cagcagttcagaggacatcaagccc

SEQ ID NO: 166494 - DNA, 25 bp, probe
cagcagtatgtcatgaccagcctcc

SEQ ID NO: 166495 - DNA, 25 bp, probe
cagcacttgtcagggctgacatccc

SEQ ID NO: 166496 - DNA, 25 bp, probe
cagacttgtattttgatccccaatt

SEQ ID NO: 166497 - DNA, 25 bp, probe
cagcactgtgtgggaatgtccgcca

SEQ ID NO: 166498 - DNA, 25 bp, probe
cagcagcagtggggagaagtcagcc

SEQ ID NO: 166499 - DNA, 25 bp, probe
cagcactgtgctgttgttgtctgac

SEQ ID NO: 166500 - DNA, 25 bp, probe
cagcagctcctgtgtgttgtgtgca

SEQ ID NO: 166501 - DNA, 25 bp, probe
cagcagctcctgtgtgttgtgtgca

SEQ ID NO: 166502 - DNA, 25 bp, probe
cagcagtgccagtcactttggggac

SEQ ID NO: 166503 - DNA, 25 bp, probe
cagactgctgcagataagtgcgagg

SEQ ID NO: 166504 - DNA, 25 bp, probe
cagagctgctcagcagatcatgcac

SEQ ID NO: 166505 - DNA, 25 bp, probe
cagcagctgctagagatgtgcaagg

SEQ ID NO: 166506 - DNA, 25 bp, probe
cagcagcgcagggagatgctgaagg

SEQ ID NO: 166507 - DNA, 25 bp, probe
cagcagcgcaggcgctcggagaaga

SEQ ID NO: 166508 - DNA, 25 bp, probe
cagcagctatgacagtgagtgggaa

SEQ ID NO: 166509 - DNA, 25 bp, probe
cagcagccatgatagggaggaccag

SEQ ID NO: 166510 - DNA, 25 bp, probe
cagcagccgcatgagctggggaatc

SEQ ID NO: 166511 - DNA, 25 bp, probe
cagcagacagcaaatggagtgagag

SEQ ID NO: 166512 - DNA, 25 bp, probe
cagcagagccagcatgaggggtggg

SEQ ID NO: 166513 - DNA, 25 bp, probe
cagaagacatgcctggagggatgtc

SEQ ID NO: 166514 - DNA, 25 bp, probe
cagcacagaagcctgcgaggaagcc

SEQ ID NO: 166515 - DNA, 25 bp, probe
cagcacataggccgtgagaatgcac

SEQ ID NO: 166516 - DNA, 25 bp, probe
cagcactcaaccctaagagcagcct

SEQ ID NO: 166517 - DNA, 25 bp, probe
cagcactcaaccctaagagcagcct

SEQ ID NO: 166518 - DNA, 25 bp, probe
cagcaccaaagcccacagaggagtt

SEQ ID NO: 166519 - DNA, 25 bp, probe
cagcacaccaatggtgtcaatggca

SEQ ID NO: 166520 - DNA, 25 bp, probe
cagcaccatcaagctgctgaatgaa

SEQ ID NO: 166521 - DNA, 25 bp, probe
cagcagcgtcaggtactactaatat

SEQ ID NO: 166522 - DNA, 25 bp, probe
cagacttcgagtgtacaaaattata

SEQ ID NO: 166523 - DNA, 25 bp, probe
cagactttttagtccaaaattacat

SEQ ID NO: 166524 - DNA, 25 bp, probe
cagaatctttgtatatcaaaatcat

SEQ ID NO: 166525 - DNA, 25 bp, probe
cagaatctgagttttacttgaaatt

SEQ ID NO: 166526 - DNA, 25 bp, probe
cagaagactgtaatgtacctgaagt

SEQ ID NO: 166527 - DNA, 25 bp, probe
cagaaaatgtgttgctagcctcagc

SEQ ID NO: 166528 - DNA, 25 bp, probe
cagaagatgagtttgtgtactggcc

SEQ ID NO: 166529 - DNA, 25 bp, probe
cagagcagatcagtctttgtcaatg

SEQ ID NO: 166530 - DNA, 25 bp, probe
cagcagcaatggccttttctgtgcc

SEQ ID NO: 166531 - DNA, 25 bp, probe
cagcagagagcggccagtagcttcc

SEQ ID NO: 166532 - DNA, 25 bp, probe
cagaagatcgagcagtgtgactacc

SEQ ID NO: 166533 - DNA, 25 bp, probe
cagaagacagaccggctgcttacac

SEQ ID NO: 166534 - DNA, 25 bp, probe
cagaaaggaccagtgccgtcacatc

SEQ ID NO: 166535 - DNA, 25 bp, probe
cagaaggcgaaagtccagctgccaa

SEQ ID NO: 166536 - DNA, 25 bp, probe
cagaagttgacctttgcactggcat

SEQ ID NO: 166537 - DNA, 25 bp, probe
cagacttatcaccattcttatgtca

SEQ ID NO: 166538 - DNA, 25 bp, probe
cagacatttatcctttgtttcacca

SEQ ID NO: 166539 - DNA, 25 bp, probe
cagacatttatctttgtattcttca

SEQ ID NO: 166540 - DNA, 25 bp, probe
cagcaatgttgactttgtttcatac

SEQ ID NO: 166541 - DNA, 25 bp, probe
cagactgttcagtgtttgtcaagct

SEQ ID NO: 166542 - DNA, 25 bp, probe
cagcaacttcaaggtttctgccagc

SEQ ID NO: 166543 - DNA, 25 bp, probe
cagcaccttcattgaggacctgaag

SEQ ID NO: 166544 - DNA, 25 bp, probe
cagaatctatttgggacttcatgag

SEQ ID NO: 166545 - DNA, 25 bp, probe
cagaatctatttgggacttcatgag

SEQ ID NO: 166546 - DNA, 25 bp, probe
cagaattagaacaccttgcacagaa

SEQ ID NO: 166547 - DNA, 25 bp, probe
cagaatttggagtcccttgaatcaa

SEQ ID NO: 166548 - DNA, 25 bp, probe
cagtattttagtggccttgaacaac

SEQ ID NO: 166549 - DNA, 25 bp, probe
cagtacctctaaggactctagaaag

SEQ ID NO: 166550 - DNA, 25 bp, probe
cagaaccaatatttcactgtcgaca

SEQ ID NO: 166551 - DNA, 25 bp, probe
cagacaccaaaaaccagtgagagcc

SEQ ID NO: 166552 - DNA, 25 bp, probe
cagaccctcaaagctagtatgagag

SEQ ID NO: 166553 - DNA, 25 bp, probe
cagacccctcactcatggtggggag

SEQ ID NO: 166554 - DNA, 25 bp, probe
cagaaccgctacacagcggaagagg

SEQ ID NO: 166555 - DNA, 25 bp, probe
cagaggacgccaagagcactggcca

SEQ ID NO: 166556 - DNA, 25 bp, probe
cagaaagcgccataacagcatctcg

SEQ ID NO: 166557 - DNA, 25 bp, probe
cagaaaatctcatcctagatcaccg

SEQ ID NO: 166558 - DNA, 25 bp, probe
cagaaagcatcgcactctttcacag

SEQ ID NO: 166559 - DNA, 25 bp, probe
cagagaacttacttcttggatcagc

SEQ ID NO: 166560 - DNA, 25 bp, probe
cagagaactttatctattcctgtgc

SEQ ID NO: 166561 - DNA, 25 bp, probe
cagaagcctttgtgatctcacctgt

SEQ ID NO: 166562 - DNA, 25 bp, probe
cagaagtttctcttacctcatctgt

SEQ ID NO: 166563 - DNA, 25 bp, probe
cagaaggtgttcctttctcacagtg

SEQ ID NO: 166564 - DNA, 25 bp, probe
cagaaggtgttcctttctcacagtg

SEQ ID NO: 166565 - DNA, 25 bp, probe
cagaagaggttcacctgccaacagg

SEQ ID NO: 166566 - DNA, 25 bp, probe
cagaaagtgtgtgcctccgagaagc

SEQ ID NO: 166567 - DNA, 25 bp, probe
cagcaaaagtcttatccccagagag

SEQ ID NO: 166568 - DNA, 25 bp, probe
cagcaaaagttctttctcgtgggta

SEQ ID NO: 166569 - DNA, 25 bp, probe
cagcaaaagttctttctcgtgggta

SEQ ID NO: 166570 - DNA, 25 bp, probe
cagacacaacacagttctcggggct

SEQ ID NO: 166571 - DNA, 25 bp, probe
cagaaacatcctggtagctgagggg

SEQ ID NO: 166572 - DNA, 25 bp, probe
cagaaggctcttctgactactgggc

SEQ ID NO: 166573 - DNA, 25 bp, probe
cagataacctgatctaccaagtggc

SEQ ID NO: 166574 - DNA, 25 bp, probe
cagacacctgtggaatacccaatgg

SEQ ID NO: 166575 - DNA, 25 bp, probe
cagaactgtgagatcagccccaatg

SEQ ID NO: 166576 - DNA, 25 bp, probe
cagaactgtgagatcagccccaatg

SEQ ID NO: 166577 - DNA, 25 bp, probe
cagaatcttaaatgcctctcctgag

SEQ ID NO: 166578 - DNA, 25 bp, probe
cagatgacttatttggcccatccga

SEQ ID NO: 166579 - DNA, 25 bp, probe
cagatgacttatttggcccatccga

SEQ ID NO: 166580 - DNA, 25 bp, probe
cagaatgttcattttcatcgctcgg

SEQ ID NO: 166581 - DNA, 25 bp, probe
cagaagttgcaagttcatcagcatc

SEQ ID NO: 166582 - DNA, 25 bp, probe
cagacagcttcatgaatgctgtgct

SEQ ID NO: 166583 - DNA, 25 bp, probe
cagacagaatccaaatgcatgtgct

SEQ ID NO: 166584 - DNA, 25 bp, probe
cagcactttctttctgatgatgctt

SEQ ID NO: 166585 - DNA, 25 bp, probe
cagcactttctttctgatgatgctt

SEQ ID NO: 166586 - DNA, 25 bp, probe
cagcactttctgttgataatggttg

SEQ ID NO: 166587 - DNA, 25 bp, probe
cagcactgttttcatcacaacttgt

SEQ ID NO: 166588 - DNA, 25 bp, probe
cagcactgtaactgacaaacttgaa

SEQ ID NO: 166589 - DNA, 25 bp, probe
cagacttaatcttgaatgatacgat

SEQ ID NO: 166590 - DNA, 25 bp, probe
cagacctcagacagattgtcacgga

SEQ ID NO: 166591 - DNA, 25 bp, probe
cagacaacatgaaccagatctacgg

SEQ ID NO: 166592 - DNA, 25 bp, probe
cagagcccatgaagcccaagatgct

SEQ ID NO: 166593 - DNA, 25 bp, probe
cagacacgctgcagatcgaggactt

SEQ ID NO: 166594 - DNA, 25 bp, probe
cagcaacgctaccacgaagacattt

SEQ ID NO: 166595 - DNA, 25 bp, probe
cagcaaccactccacagagaactct

SEQ ID NO: 166596 - DNA, 25 bp, probe
cagcaatcccttcgcgaaaggcttc

SEQ ID NO: 166597 - DNA, 25 bp, probe
cagatgtccctaaggtagaggtgtt

SEQ ID NO: 166598 - DNA, 25 bp, probe
cagatgtcccggaggggactgagct

SEQ ID NO: 166599 - DNA, 25 bp, probe
cagattccagggagcttcgtctact

SEQ ID NO: 166600 - DNA, 25 bp, probe
cagttaagggggcacaggctgagct

SEQ ID NO: 166601 - DNA, 25 bp, probe
cagtctattagacggccaagtcgac

SEQ ID NO: 166602 - DNA, 25 bp, probe
cagtctattagacggccaagtcgac

SEQ ID NO: 166603 - DNA, 25 bp, probe
cagactttggaccatgaagaccaga

SEQ ID NO: 166604 - DNA, 25 bp, probe
cagacttcgaattctactgactcga

SEQ ID NO: 166605 - DNA, 25 bp, probe
cagactccgaggatgagtgcagcac

SEQ ID NO: 166606 - DNA, 25 bp, probe
cagaatgtcataggagtggtgctca

SEQ ID NO: 166607 - DNA, 25 bp, probe
cagaatgtcataggagtggtgctca

SEQ ID NO: 166608 - DNA, 25 bp, probe
cagaagatctctggacaggtccctt

SEQ ID NO: 166609 - DNA, 25 bp, probe
cagaagtcttcaacggtgaccagtg

SEQ ID NO: 166610 - DNA, 25 bp, probe
cagaagtcttaccagtgctggttta

SEQ ID NO: 166611 - DNA, 25 bp, probe
cagaaactttcgctggatggtttta

SEQ ID NO: 166612 - DNA, 25 bp, probe
cagaagactttcagatggtttattt

SEQ ID NO: 166613 - DNA, 25 bp, probe
cagtctgaatttgaaggttttgagt

SEQ ID NO: 166614 - DNA, 25 bp, probe
cagtctgattttgaagggttctcgt

SEQ ID NO: 166615 - DNA, 25 bp, probe
cagttgatgccttcccagagtcaac

SEQ ID NO: 166616 - DNA, 25 bp, probe
cagaatatggcttggcctatggcca

SEQ ID NO: 166617 - DNA, 25 bp, probe
cagcaacatgcagagtccctgagcc

SEQ ID NO: 166618 - DNA, 25 bp, probe
cagaatgatgatgagctgcccatga

SEQ ID NO: 166619 - DNA, 25 bp, probe
cagaatggaaagtcccagtggtccc

SEQ ID NO: 166620 - DNA, 25 bp, probe
cagcaaaatacatctcgcctggtac

SEQ ID NO: 166621 - DNA, 25 bp, probe
cagcaacacaggtgacccgagtgac

SEQ ID NO: 166622 - DNA, 25 bp, probe
catcaccaaggacgtccctggttga

SEQ ID NO: 166623 - DNA, 25 bp, probe
cagaccaaaaggaacacttttgtgg

SEQ ID NO: 166624 - DNA, 25 bp, probe
cagaggaaaggggaataatcttagg

SEQ ID NO: 166625 - DNA, 25 bp, probe
cagagctaaagccacaaacccatct

SEQ ID NO: 166626 - DNA, 25 bp, probe
cagcactccaaccaaaagccaaaaa

SEQ ID NO: 166627 - DNA, 25 bp, probe
cagagcctgaccctaaaaagaaagc

SEQ ID NO: 166628 - DNA, 25 bp, probe
cagagactgtccctgaaacctagta

SEQ ID NO: 166629 - DNA, 25 bp, probe
cagaacatttcactggacagcccag

SEQ ID NO: 166630 - DNA, 25 bp, probe
cagaacttgatcctgcgtaaccaga

SEQ ID NO: 166631 - DNA, 25 bp, probe
cagaagcttcacaggctgagagctc

SEQ ID NO: 166632 - DNA, 25 bp, probe
cagagagcaaacaaggtagtatccg

SEQ ID NO: 166633 - DNA, 25 bp, probe
cagagcaaacatccggaagtatccc

SEQ ID NO: 166634 - DNA, 25 bp, probe
cagagcaaacatccggaagtatccc

SEQ ID NO: 166635 - DNA, 25 bp, probe
cagatggtcacaccgaaggtatcga

SEQ ID NO: 166636 - DNA, 25 bp, probe
cagatggtcacaccgaaggtatcga

SEQ ID NO: 166637 - DNA, 25 bp, probe
cagagagtgctcaccacagactacg

SEQ ID NO: 166638 - DNA, 25 bp, probe
cagagcaacctcgaacagtcatcaa

SEQ ID NO: 166639 - DNA, 25 bp, probe
cagagagtgcctgcaagctttggat

SEQ ID NO: 166640 - DNA, 25 bp, probe
cagcaatagcgttcaactttgaggc

SEQ ID NO: 166641 - DNA, 25 bp, probe
cagaatctggtagactgctctgggc

SEQ ID NO: 166642 - DNA, 25 bp, probe
cagaattctgtcctcactgataggg

SEQ ID NO: 166643 - DNA, 25 bp, probe
cagaaacccgtcatgacgcggctgc

SEQ ID NO: 166644 - DNA, 25 bp, probe
cagaaacgccgaatatccagggcca

SEQ ID NO: 166645 - DNA, 25 bp, probe
cagaaggggcagctgaccagtgtcc

SEQ ID NO: 166646 - DNA, 25 bp, probe
cagagcatgtgggaactgttcagtg

SEQ ID NO: 166647 - DNA, 25 bp, probe
cagcacagatgaggagcagctgggg

SEQ ID NO: 166648 - DNA, 25 bp, probe
cagcacatgccaggccgcatgattc

SEQ ID NO: 166649 - DNA, 25 bp, probe
cagaagcaaatgtcatgcagcagct

SEQ ID NO: 166650 - DNA, 25 bp, probe
cagaagcagacagcaccagcaagcc

SEQ ID NO: 166651 - DNA, 25 bp, probe
cagaccatggagtcccagaaaccac

SEQ ID NO: 166652 - DNA, 25 bp, probe
cagaaatggttggcctgagcaacct

SEQ ID NO: 166653 - DNA, 25 bp, probe
cagaatctgatgctttctgatcaac

SEQ ID NO: 166654 - DNA, 25 bp, probe
cagaacttctttcctatcacagctg

SEQ ID NO: 166655 - DNA, 25 bp, probe
cagaatattttttcctcactcctga

SEQ ID NO: 166656 - DNA, 25 bp, probe
cagttgttggtttggccactcttga

SEQ ID NO: 166657 - DNA, 25 bp, probe
cagttggagagttctcggagccatt

SEQ ID NO: 166658 - DNA, 25 bp, probe
cagacggagcagattcgcaagcggc

SEQ ID NO: 166659 - DNA, 25 bp, probe
cagaggaggaacatgcccctggaga

SEQ ID NO: 166660 - DNA, 25 bp, probe
cagagaagagaaccctcacctctga

SEQ ID NO: 166661 - DNA, 25 bp, probe
cagaagatgagtacacaccaccatc

SEQ ID NO: 166662 - DNA, 25 bp, probe
cagcaatgcaagatggcagccacca

SEQ ID NO: 166663 - DNA, 25 bp, probe
cagaaaagaggccagctctgcagcc

SEQ ID NO: 166664 - DNA, 25 bp, probe
cagaaaagaggccagctctgcagcc

SEQ ID NO: 166665 - DNA, 25 bp, probe
cagaaaagaggccagctctgcagcc

SEQ ID NO: 166666 - DNA, 25 bp, probe
cagaacagaagccatgtatctcccc

SEQ ID NO: 166667 - DNA, 25 bp, probe
cagaagcaaagccttctccacatgc

SEQ ID NO: 166668 - DNA, 25 bp, probe
cagaagataagaggacgcagaagct

SEQ ID NO: 166669 - DNA, 25 bp, probe
cagaagatgcatcaggcaccaattt

SEQ ID NO: 166670 - DNA, 25 bp, probe
cagaagctgagcaagagaacatgtt

SEQ ID NO: 166671 - DNA, 25 bp, probe
cagaggcgcagcaagagaccgatcc

SEQ ID NO: 166672 - DNA, 25 bp, probe
cagagtggcctagagcactctcacc

SEQ ID NO: 166673 - DNA, 25 bp, probe
cagatcaagtcgggaactccatacc

SEQ ID NO: 166674 - DNA, 25 bp, probe
cagatccgtccatttagtactacct

SEQ ID NO: 166675 - DNA, 25 bp, probe
cagacccccaggaaggatttcactc

SEQ ID NO: 166676 - DNA, 25 bp, probe
cagatccccacggagaggtacggaa

SEQ ID NO: 166677 - DNA, 25 bp, probe
cagacacttctggggatggtacagg

SEQ ID NO: 166678 - DNA, 25 bp, probe
cagacctgccaaggtgatgggcgtc

SEQ ID NO: 166679 - DNA, 25 bp, probe
cagacctgccaaggtgatgggcgtc

SEQ ID NO: 166680 - DNA, 25 bp, probe
cagaagtgccttgtcatgggcatga

SEQ ID NO: 166681 - DNA, 25 bp, probe
cagaagtgcctgagacgcggagaca

SEQ ID NO: 166682 - DNA, 25 bp, probe
cagaagcgtgcctgtggaggagagc

SEQ ID NO: 166683 - DNA, 25 bp, probe
cagcaacgccacagcatcaaggatg

SEQ ID NO: 166684 - DNA, 25 bp, probe
cagcaacgccacagcatcaaggatg

SEQ ID NO: 166685 - DNA, 25 bp, probe
cagaatccctcagctgacactgaag

SEQ ID NO: 166686 - DNA, 25 bp, probe
cagaatcgttagtctgaccctgaac

SEQ ID NO: 166687 - DNA, 25 bp, probe
cagaacggtgagtctgcaacttccc

SEQ ID NO: 166688 - DNA, 25 bp, probe
cagcaagcagtttgtctgcttcttc

SEQ ID NO: 166689 - DNA, 25 bp, probe
cagaagcacttagttgctcctttca

SEQ ID NO: 166690 - DNA, 25 bp, probe
cagaatcgctgaactgtgtgcctct

SEQ ID NO: 166691 - DNA, 25 bp, probe
cagaaggctgaggctgcctgtgcct

SEQ ID NO: 166692 - DNA, 25 bp, probe
cagagcaggggagtggcttcccaag

SEQ ID NO: 166693 - DNA, 25 bp, probe
cagagctgggtggcagctcttcctc

SEQ ID NO: 166694 - DNA, 25 bp, probe
cagagacgggtcatctgtcgctaag

SEQ ID NO: 166695 - DNA, 25 bp, probe
cagagacgggtcatctgtcgctaag

SEQ ID NO: 166696 - DNA, 25 bp, probe
cagagccggttgacttctctgctag

SEQ ID NO: 166697 - DNA, 25 bp, probe
cagaccaggtggaattacttaaatt

SEQ ID NO: 166698 - DNA, 25 bp, probe
cagatccatcggtttatactattta

SEQ ID NO: 166699 - DNA, 25 bp, probe
catagtagcctttctatactttttc

SEQ ID NO: 166700 - DNA, 25 bp, probe
catggaatccttaggctacgttttc

SEQ ID NO: 166701 - DNA, 25 bp, probe
cagagaccctaaacaacgttctatc

SEQ ID NO: 166702 - DNA, 25 bp, probe
cagagaacctaataagtgctacttt

SEQ ID NO: 166703 - DNA, 25 bp, probe
cagacaatcacttaagaaacccctt

SEQ ID NO: 166704 - DNA, 25 bp, probe
cagagttctttaaaacacaccagcc

SEQ ID NO: 166705 - DNA, 25 bp, probe
cagagaatcttaattgcaaaaccga

SEQ ID NO: 166706 - DNA, 25 bp, probe
cagagaatcttaattgcaaaaccga

SEQ ID NO: 166707 - DNA, 25 bp, probe
cagaaatctttcagaactcaaaggg

SEQ ID NO: 166708 - DNA, 25 bp, probe
cagaaagcaaatcagacacaattag

SEQ ID NO: 166709 - DNA, 25 bp, probe
cagaaagcaaatcagacacaattag

SEQ ID NO: 166710 - DNA, 25 bp, probe
cagcaaggacatccggatgaaaaag

SEQ ID NO: 166711 - DNA, 25 bp, probe
cagacaggtaagcgctgaacagaga

SEQ ID NO: 166712 - DNA, 25 bp, probe
cagaagaggaactattggacagaga

SEQ ID NO: 166713 - DNA, 25 bp, probe
cagaagaggaactattggacagaga

SEQ ID NO: 166714 - DNA, 25 bp, probe
cagaagagtgacatctgggccctgg

SEQ ID NO: 166715 - DNA, 25 bp, probe
cagaagagtgacatctgggccctgg

SEQ ID NO: 166716 - DNA, 25 bp, probe
cagatgggtggatcaggggacggga

SEQ ID NO: 166717 - DNA, 25 bp, probe
cagtgtttgacatcggggtgagggt

SEQ ID NO: 166718 - DNA, 25 bp, probe
cagtgttggaattctttggtgtaaa

SEQ ID NO: 166719 - DNA, 25 bp, probe
cagagttcgaaggctttgagtatat

SEQ ID NO: 166720 - DNA, 25 bp, probe
caggttccacatggtatagttactg

SEQ ID NO: 166721 - DNA, 25 bp, probe
catggttccaactctcaaacacgga

SEQ ID NO: 166722 - DNA, 25 bp, probe
catggttccaactctcaaacacgga

SEQ ID NO: 166723 - DNA, 25 bp, probe
catggttccaactctcaaacacgga

SEQ ID NO: 166724 - DNA, 25 bp, probe
catggttccaactctcaaacacgga

SEQ ID NO: 166725 - DNA, 25 bp, probe
cagagttgtccattaccaaagcctg

SEQ ID NO: 166726 - DNA, 25 bp, probe
cagagttgtccattaccaaagcctg

SEQ ID NO: 166727 - DNA, 25 bp, probe
cagaatttccccagaaacctgtaat

SEQ ID NO: 166728 - DNA, 25 bp, probe
cagaatttccccaggcaatttgtag

SEQ ID NO: 166729 - DNA, 25 bp, probe
cagaatttcctggctcaggctactt

SEQ ID NO: 166730 - DNA, 25 bp, probe
cagaaatatgccatcgcggctgcac

SEQ ID NO: 166731 - DNA, 25 bp, probe
cagaaatatgccatcgcggctgcac

SEQ ID NO: 166732 - DNA, 25 bp, probe
cagaatatgaccgtcagcgtggtca

SEQ ID NO: 166733 - DNA, 25 bp, probe
cagacgatgccacgacggtggacac

SEQ ID NO: 166734 - DNA, 25 bp, probe
cagacagagaagcacgtgtttgagc

SEQ ID NO: 166735 - DNA, 25 bp, probe
cagaagccgaggacgtgcttgggga

SEQ ID NO: 166736 - DNA, 25 bp, probe
cagaatgacgatgcctgccttggtg

SEQ ID NO: 166737 - DNA, 25 bp, probe
cagaatgacgatgcctgccttggtg

SEQ ID NO: 166738 - DNA, 25 bp, probe
cagaatgacgatgcctgccttggtg

SEQ ID NO: 166739 - DNA, 25 bp, probe
cagaaggagatcactgccctggcac

SEQ ID NO: 166740 - DNA, 25 bp, probe
cagaaagagctcactatcatcaaga

SEQ ID NO: 166741 - DNA, 25 bp, probe
cagaagaggccatgtgtctcagagc

SEQ ID NO: 166742 - DNA, 25 bp, probe
cagaagagccgcaaggaccagatcc

SEQ ID NO: 166743 - DNA, 25 bp, probe
cagaagcaggtgagcgaaagaactc

SEQ ID NO: 166744 - DNA, 25 bp, probe
cagaaggtgtttggtatgggaacct

SEQ ID NO: 166745 - DNA, 25 bp, probe
cagaaggttttgttcagggatcacc

SEQ ID NO: 166746 - DNA, 25 bp, probe
cagaagaggctcattccaggtttca

SEQ ID NO: 166747 - DNA, 25 bp, probe
cagaaagcgctctgtctcatttgct

SEQ ID NO: 166748 - DNA, 25 bp, probe
cagaaagcgctctgtctcatttgct

SEQ ID NO: 166749 - DNA, 25 bp, probe
cagaaagcgcaaagtcatctccttt

SEQ ID NO: 166750 - DNA, 25 bp, probe
cagaaatggcagggacacttctctt

SEQ ID NO: 166751 - DNA, 25 bp, probe
cagaatctgcgtctgagatctctct

SEQ ID NO: 166752 - DNA, 25 bp, probe
cagactctctgccagtacacatttg

SEQ ID NO: 166753 - DNA, 25 bp, probe
cagacacaacggcaacattatgctg

SEQ ID NO: 166754 - DNA, 25 bp, probe
cagatgtaagcgtcttactttctcc

SEQ ID NO: 166755 - DNA, 25 bp, probe
cagaaatcgtgggctactattatcc

SEQ ID NO: 166756 - DNA, 25 bp, probe
cagaaatcgtgggctactattatcc

SEQ ID NO: 166757 - DNA, 25 bp, probe
cagactatcaggcccatttgtctcc

SEQ ID NO: 166758 - DNA, 25 bp, probe
cagactatcaggcccatttgtctcc

SEQ ID NO: 166759 - DNA, 25 bp, probe
cagacaagcgccgctgtgaggctgc

SEQ ID NO: 166760 - DNA, 25 bp, probe
cagacaagcgccgctgtgaggctgc

SEQ ID NO: 166761 - DNA, 25 bp, probe
cagaatacagcccagttggatcagt

SEQ ID NO: 166762 - DNA, 25 bp, probe
cagaatgctcagctacttgtgctgg

SEQ ID NO: 166763 - DNA, 25 bp, probe
cagaagctcagggtgcatagtagga

SEQ ID NO: 166764 - DNA, 25 bp, probe
cagacagatcctgggcatgcgctag

SEQ ID NO: 166765 - DNA, 25 bp, probe
cagaagatggaggtgcagcgccggc

SEQ ID NO: 166766 - DNA, 25 bp, probe
cagaagattgtgaagaggccggctt

SEQ ID NO: 166767 - DNA, 25 bp, probe
cagagaagtctacaggccttgcact

SEQ ID NO: 166768 - DNA, 25 bp, probe
cagagaagtctacaggccttgcact

SEQ ID NO: 166769 - DNA, 25 bp, probe
cagagaactatactaccctcacagt

SEQ ID NO: 166770 - DNA, 25 bp, probe
cagaacatctgtataccctctgttt

SEQ ID NO: 166771 - DNA, 25 bp, probe
cagagaatttgtaacctgattgtgg

SEQ ID NO: 166772 - DNA, 25 bp, probe
cagaacctgtggtccctgattctgg

SEQ ID NO: 166773 - DNA, 25 bp, probe
cagagacctggtgtccatatctagg

SEQ ID NO: 166774 - DNA, 25 bp, probe
cagaagcttgacgcaccaagcggaa

SEQ ID NO: 166775 - DNA, 25 bp, probe
cagaggcacttcgcaggaaatggaa

SEQ ID NO: 166776 - DNA, 25 bp, probe
cagaggcacttcgcaggaaatggaa

SEQ ID NO: 166777 - DNA, 25 bp, probe
cagaggcactgtgctcacggttgga

SEQ ID NO: 166778 - DNA, 25 bp, probe
cagagggggccatcaagctagcaga

SEQ ID NO: 166779 - DNA, 25 bp, probe
cagaggggcagagccaaaatgagag

SEQ ID NO: 166780 - DNA, 25 bp, probe
cagacagggcatccccaagcagaaa

SEQ ID NO: 166781 - DNA, 25 bp, probe
cagacagatggaccaccaacctgga

SEQ ID NO: 166782 - DNA, 25 bp, probe
cagaagcatgaacaccatcctggga

SEQ ID NO: 166783 - DNA, 25 bp, probe
cagaccaagagggaccctggagcac

SEQ ID NO: 166784 - DNA, 25 bp, probe
cagaaaggaggcgccctggacataa

SEQ ID NO: 166785 - DNA, 25 bp, probe
cagaagagggggctgcctgaccatg

SEQ ID NO: 166786 - DNA, 25 bp, probe
cagaagagggggctgcctgaccatg

SEQ ID NO: 166787 - DNA, 25 bp, probe
cagaagaggaagcttgggcacactc

SEQ ID NO: 166788 - DNA, 25 bp, probe
cagaagaggaagcttgggcacactc

SEQ ID NO: 166789 - DNA, 25 bp, probe
cagagaaggacgagttcgacatccc

SEQ ID NO: 166790 - DNA, 25 bp, probe
cagacctggcccagtatatgtctca

SEQ ID NO: 166791 - DNA, 25 bp, probe
cagaccgtgtcggtgtctgtgtctg

SEQ ID NO: 166792 - DNA, 25 bp, probe
cagacaggctacggatggatatgtc

SEQ ID NO: 166793 - DNA, 25 bp, probe
cagaaggtcatcagattgtgagact

SEQ ID NO: 166794 - DNA, 25 bp, probe
cagaatggggctcgaatggctatgt

SEQ ID NO: 166795 - DNA, 25 bp, probe
cagaagaggtgtcgcagatgcagct

SEQ ID NO: 166796 - DNA, 25 bp, probe
cagatcgacttgatcgtgcagctgc

SEQ ID NO: 166797 - DNA, 25 bp, probe
cagacatggcccatgctgtgcatcc

SEQ ID NO: 166798 - DNA, 25 bp, probe
cagacatggcccatgctgtgcatcc

SEQ ID NO: 166799 - DNA, 25 bp, probe
cagactgtgcccggcaggagactga

SEQ ID NO: 166800 - DNA, 25 bp, probe
cagagctgttccagctgcggcctgc

SEQ ID NO: 166801 - DNA, 25 bp, probe
cagagctgtaaaacatctgaaccta

SEQ ID NO: 166802 - DNA, 25 bp, probe
cagatgagtcaataccgttccatag

SEQ ID NO: 166803 - DNA, 25 bp, probe
cagagaaaagagtccttgttccagc

SEQ ID NO: 166804 - DNA, 25 bp, probe
cagagtgaaccgtcctttcacacat

SEQ ID NO: 166805 - DNA, 25 bp, probe
cagaggaaagcgggtgcccggcatg

SEQ ID NO: 166806 - DNA, 25 bp, probe
cagaggaaagtgcgtcagatcagtg

SEQ ID NO: 166807 - DNA, 25 bp, probe
cagaggaaaattttcgtagtctttg

SEQ ID NO: 166808 - DNA, 25 bp, probe
cagaggaaaattttcgtagtctttg

SEQ ID NO: 166809 - DNA, 25 bp, probe
cagaggcaaaaatggctgttttcca

SEQ ID NO: 166810 - DNA, 25 bp, probe
cagaccaaacagaggcttcttctat

SEQ ID NO: 166811 - DNA, 25 bp, probe
cagaccaaacagaggcttcttctat

SEQ ID NO: 166812 - DNA, 25 bp, probe
cagacgacaagtcgggtcctgctct

SEQ ID NO: 166813 - DNA, 25 bp, probe
cagaagcccatgtgagagccctgaa

SEQ ID NO: 166814 - DNA, 25 bp, probe
cagaagaccaggcagagccctcaga

SEQ ID NO: 166815 - DNA, 25 bp, probe
cagaagatccaagaggccctgcacg

SEQ ID NO: 166816 - DNA, 25 bp, probe
cagaaattgctcgtatggccctagc

SEQ ID NO: 166817 - DNA, 25 bp, probe
cagaaattgtgccatttcgcctgac

SEQ ID NO: 166818 - DNA, 25 bp, probe
cagacaagtgtgccatttgaccatc

SEQ ID NO: 166819 - DNA, 25 bp, probe
cagacatgtttgcgttcatcgcgcg

SEQ ID NO: 166820 - DNA, 25 bp, probe
cagatctgatttgcttacggccttc

SEQ ID NO: 166821 - DNA, 25 bp, probe
cagatctgatttgcttacggccttc

SEQ ID NO: 166822 - DNA, 25 bp, probe
cagagctgcctgcacttacaggcgt

SEQ ID NO: 166823 - DNA, 25 bp, probe
cagagtcctggatctgcacagtctt

SEQ ID NO: 166824 - DNA, 25 bp, probe
cagagatctctgtgtgaaagtatct

SEQ ID NO: 166825 - DNA, 25 bp, probe
cagagacatctatgaaacggattac

SEQ ID NO: 166826 - DNA, 25 bp, probe
cagagacatggctcagatcctggat

SEQ ID NO: 166827 - DNA, 25 bp, probe
cagaaattcattttcctgcacattc

SEQ ID NO: 166828 - DNA, 25 bp, probe
cagaaattcattttcctgcacattc

SEQ ID NO: 166829 - DNA, 25 bp, probe
cagaaattattcttgcactgtgctg

SEQ ID NO: 166830 - DNA, 25 bp, probe
cagaaacctgtaatcagtgtctgtt

SEQ ID NO: 166831 - DNA, 25 bp, probe
cagaaactcgatgaatgtgttgatt

SEQ ID NO: 166832 - DNA, 25 bp, probe
cagacaaccctcagatttgatgatt

SEQ ID NO: 166833 - DNA, 25 bp, probe
cagttaccctgcagtttgtgaattt

SEQ ID NO: 166834 - DNA, 25 bp, probe
cagtcatatggcctgtggggctctg

SEQ ID NO: 166835 - DNA, 25 bp, probe
cagtcatatggcctgtggggctctg

SEQ ID NO: 166836 - DNA, 25 bp, probe
cagactaggctatcggtgctgcttc

SEQ ID NO: 166837 - DNA, 25 bp, probe
cagaaaggtgttcatgtgacttcag

SEQ ID NO: 166838 - DNA, 25 bp, probe
cagaagatggttactagattttaag

SEQ ID NO: 166839 - DNA, 25 bp, probe
cagaagatcctcaccaagttcaaac

SEQ ID NO: 166840 - DNA, 25 bp, probe
cagaagtttcgaccaagtatcccaa

SEQ ID NO: 166841 - DNA, 25 bp, probe
cagaaactaccaccaaattatccaa

SEQ ID NO: 166842 - DNA, 25 bp, probe
cagaaactattatggaaattctctg

SEQ ID NO: 166843 - DNA, 25 bp, probe
cagataagaagcactggaaaaccga

SEQ ID NO: 166844 - DNA, 25 bp, probe
cagtgtggctacgtcctaaaacctg

SEQ ID NO: 166845 - DNA, 25 bp, probe
cagttttatttgcctctactacgtc

SEQ ID NO: 166846 - DNA, 25 bp, probe
cagtttgaatttgccctgacagccg

SEQ ID NO: 166847 - DNA, 25 bp, probe
cagtttacattttcggtatatttgt

SEQ ID NO: 166848 - DNA, 25 bp, probe
cagttacacagcaggtgaaaaattt

SEQ ID NO: 166849 - DNA, 25 bp, probe
cagtccagacatcaactccaaaact

SEQ ID NO: 166850 - DNA, 25 bp, probe
cagtatcaactgcaacatccctttg

SEQ ID NO: 166851 - DNA, 25 bp, probe
cgtgatcgccgaggacttcacaatc

SEQ ID NO: 166852 - DNA, 25 bp, probe
cagatgaagactccagccatgacct

SEQ ID NO: 166853 - DNA, 25 bp, probe
cagagtcagaactccagcaccatct

SEQ ID NO: 166854 - DNA, 25 bp, probe
cagagtatgtagccccagagatcat

SEQ ID NO: 166855 - DNA, 25 bp, probe
cagagaaatatgacccgatgccacc

SEQ ID NO: 166856 - DNA, 25 bp, probe
cagaagaagtggcagcaatggcacc

SEQ ID NO: 166857 - DNA, 25 bp, probe
cagaccaagggtgagggcgcctttc

SEQ ID NO: 166858 - DNA, 25 bp, probe
cagaccaaggctgcaagtggccctc

SEQ ID NO: 166859 - DNA, 25 bp, probe
cagacctgtggctacaagttccacc

SEQ ID NO: 166860 - DNA, 25 bp, probe
cagaacttggccaaggcatctccgg

SEQ ID NO: 166861 - DNA, 25 bp, probe
cagaacttggccaaggcatctccgg

SEQ ID NO: 166862 - DNA, 25 bp, probe
cagacacttcccaagtgtctgctcg

SEQ ID NO: 166863 - DNA, 25 bp, probe
cagaccatggcctgatgtttacaga

SEQ ID NO: 166864 - DNA, 25 bp, probe
cagagcggaggctgggatctagcga

SEQ ID NO: 166865 - DNA, 25 bp, probe
cagagcggaggctgggatctagcga

SEQ ID NO: 166866 - DNA, 25 bp, probe
cagactggcatggccatgggtccag

SEQ ID NO: 166867 - DNA, 25 bp, probe
cagacagcagctgtctggcccttgc

SEQ ID NO: 166868 - DNA, 25 bp, probe
cagagcagagcagccatggcaccag

SEQ ID NO: 166869 - DNA, 25 bp, probe
cagagcacctgcgtatgaatctatg

SEQ ID NO: 166870 - DNA, 25 bp, probe
cagacctagcagtgacatctcattg

SEQ ID NO: 166871 - DNA, 25 bp, probe
cagaccccagcaagcattatatctc

SEQ ID NO: 166872 - DNA, 25 bp, probe
cagaccccagatgatcaggatcagc

SEQ ID NO: 166873 - DNA, 25 bp, probe
cagaccccagatgatcaggatcagc

SEQ ID NO: 166874 - DNA, 25 bp, probe
cagaccaccgaggtcaagatggccc

SEQ ID NO: 166875 - DNA, 25 bp, probe
cagaccaccgaggtcaagatggccc

SEQ ID NO: 166876 - DNA, 25 bp, probe
cagagtaccgaggctccaaggatgc

SEQ ID NO: 166877 - DNA, 25 bp, probe
cagagaacacgagaccaatggtgtg

SEQ ID NO: 166878 - DNA, 25 bp, probe
cagaagaccaggctacaaggtgttt

SEQ ID NO: 166879 - DNA, 25 bp, probe
cagaccccagtgattaatgtggttc

SEQ ID NO: 166880 - DNA, 25 bp, probe
caggccccgtggagaattgattccc

SEQ ID NO: 166881 - DNA, 25 bp, probe
cagaccgctcgggcatggagaattc

SEQ ID NO: 166882 - DNA, 25 bp, probe
cagaccagctggggtgagatgaatg

SEQ ID NO: 166883 - DNA, 25 bp, probe
cagacacacttggcagatggaggaa

SEQ ID NO: 166884 - DNA, 25 bp, probe
cagaccaatctgaactggaccaatg

SEQ ID NO: 166885 - DNA, 25 bp, probe
cagatccaggtgaaagggcagcttt

SEQ ID NO: 166886 - DNA, 25 bp, probe
cagatcctggatttgcagggagttg

SEQ ID NO: 166887 - DNA, 25 bp, probe
cagatgatcgtggtggatggggtat

SEQ ID NO: 166888 - DNA, 25 bp, probe
cagagagcatgggtgagcgtgtaaa

SEQ ID NO: 166889 - DNA, 25 bp, probe
cagaacagctgctggtgcttcaggg

SEQ ID NO: 166890 - DNA, 25 bp, probe
cagacaatgctgtgctttccagtgg

SEQ ID NO: 166891 - DNA, 25 bp, probe
cagaacatgctgtgttccatacagc

SEQ ID NO: 166892 - DNA, 25 bp, probe
cagaggcagcagttgcttactgaac

SEQ ID NO: 166893 - DNA, 25 bp, probe
cagagcggcggcctttaaactgctg

SEQ ID NO: 166894 - DNA, 25 bp, probe
cagagcggcggcctttaaactgctg

SEQ ID NO: 166895 - DNA, 25 bp, probe
cagagttcttgcctattaaaatttt

SEQ ID NO: 166896 - DNA, 25 bp, probe
cagagttcttgcctattaaaatttt

SEQ ID NO: 166897 - DNA, 25 bp, probe
cagactgtcttttatctttagactt

SEQ ID NO: 166898 - DNA, 25 bp, probe
cagtcttgctcaaacctttgcgacg

SEQ ID NO: 166899 - DNA, 25 bp, probe
cagactcactaaatcctttccaata

SEQ ID NO: 166900 - DNA, 25 bp, probe
cagactactacaaagctaatgaaaa

SEQ ID NO: 166901 - DNA, 25 bp, probe
cagacctaaatatgctggatatagc

SEQ ID NO: 166902 - DNA, 25 bp, probe
cagagccccttctatggagataaga

SEQ ID NO: 166903 - DNA, 25 bp, probe
cagacacttcttttggtgtgatcaa

SEQ ID NO: 166904 - DNA, 25 bp, probe
cagaacctctctagctaatgtgtgg

SEQ ID NO: 166905 - DNA, 25 bp, probe
cagaacctctctagctaatgtgtgg

SEQ ID NO: 166906 - DNA, 25 bp, probe
cagaagccccagaagccgtggtggg

SEQ ID NO: 166907 - DNA, 25 bp, probe
cagaagccctacaaggcaggcgcgg

SEQ ID NO: 166908 - DNA, 25 bp, probe
cagacagcctgaaggggcggcgggg

SEQ ID NO: 166909 - DNA, 25 bp, probe
cagacagcctgaaggggcggcgggg

SEQ ID NO: 166910 - DNA, 25 bp, probe
cagagcatccgaaagcggcatcggt

SEQ ID NO: 166911 - DNA, 25 bp, probe
cagagctggcgaagaagtcctggtt

SEQ ID NO: 166912 - DNA, 25 bp, probe
cagagcagggccaaagcacagctgg

SEQ ID NO: 166913 - DNA, 25 bp, probe
cagaagcgtcctgtgactctgggag

SEQ ID NO: 166914 - DNA, 25 bp, probe
cagaagcgtcctgtgactctgggag

SEQ ID NO: 166915 - DNA, 25 bp, probe
cagactggatttgtgagtgctggga

SEQ ID NO: 166916 - DNA, 25 bp, probe
cataggccataatcgaatgtggaga

SEQ ID NO: 166917 - DNA, 25 bp, probe
cattccgcggactgaagggcaggac

SEQ ID NO: 166918 - DNA, 25 bp, probe
cagtctacaagggaaagtggcatgg

SEQ ID NO: 166919 - DNA, 25 bp, probe
cagatctacggtttcgagggtgagg

SEQ ID NO: 166920 - DNA, 25 bp, probe
cagatcttccctaccggggagggat

SEQ ID NO: 166921 - DNA, 25 bp, probe
cagatcttccctaccggggagggat

SEQ ID NO: 166922 - DNA, 25 bp, probe
cagtttccccgtctgagaaatgaga

SEQ ID NO: 166923 - DNA, 25 bp, probe
caggttcccggttggaacctgcaat

SEQ ID NO: 166924 - DNA, 25 bp, probe
cagatgttccagggggtcaaatcca

SEQ ID NO: 166925 - DNA, 25 bp, probe
cagagcggcgagtggtggaaggcgc

SEQ ID NO: 166926 - DNA, 25 bp, probe
cagagcagggcctggtgtggaacca

SEQ ID NO: 166927 - DNA, 25 bp, probe
cagagcgggtgcttgagttgttgtc

SEQ ID NO: 166928 - DNA, 25 bp, probe
cagagacggaattagctgtgatttt

SEQ ID NO: 166929 - DNA, 25 bp, probe
cagaacgtattattgctatgtcatt

SEQ ID NO: 166930 - DNA, 25 bp, probe
cagaacgtattattgctatgtcatt

SEQ ID NO: 166931 - DNA, 25 bp, probe
cagagagccgttttctatgctgcag

SEQ ID NO: 166932 - DNA, 25 bp, probe
cagagagccgttttctatgctgcag

SEQ ID NO: 166933 - DNA, 25 bp, probe
cagacccttattccagatgctgaga

SEQ ID NO: 166934 - DNA, 25 bp, probe
cagaccttcatgagacagtgctcat

SEQ ID NO: 166935 - DNA, 25 bp, probe
cagacctctctgaagtgtctcctgt

SEQ ID NO: 166936 - DNA, 25 bp, probe
cagagccgctgtagagtttgcacct

SEQ ID NO: 166937 - DNA, 25 bp, probe
cagagccgctgtagagtttgcacct

SEQ ID NO: 166938 - DNA, 25 bp, probe
cagagtttgttgactttacctcaca

SEQ ID NO: 166939 - DNA, 25 bp, probe
cagtttcttcatactcgaactccac

SEQ ID NO: 166940 - DNA, 25 bp, probe
cagttgacgccttcccagagtcaac

SEQ ID NO: 166941 - DNA, 25 bp, probe
cagtcccagacctcaaggatcttgc

SEQ ID NO: 166942 - DNA, 25 bp, probe
caggcccaacctacatcaaactggg

SEQ ID NO: 166943 - DNA, 25 bp, probe
cagaggacaagccttctgaaaggga

SEQ ID NO: 166944 - DNA, 25 bp, probe
cagagcgaaagcatttgccaagaat

SEQ ID NO: 166945 - DNA, 25 bp, probe
cagaggcttggcatttgccatatca

SEQ ID NO: 166946 - DNA, 25 bp, probe
cagagagtgggcacatcaccaaaga

SEQ ID NO: 166947 - DNA, 25 bp, probe
cagagaatggtctttacctaacaca

SEQ ID NO: 166948 - DNA, 25 bp, probe
cagacaatggctataaactgaatta

SEQ ID NO: 166949 - DNA, 25 bp, probe
cagatgcccagtatcatacgttgat

SEQ ID NO: 166950 - DNA, 25 bp, probe
cagatgaccagtaccaaagagcagg

SEQ ID NO: 166951 - DNA, 25 bp, probe
cagagatctgcattcctaacatcca

SEQ ID NO: 166952 - DNA, 25 bp, probe
cagagcatgtgctccagcaagtctg

SEQ ID NO: 166953 - DNA, 25 bp, probe
cagacaggccacaagaagtcagcta

SEQ ID NO: 166954 - DNA, 25 bp, probe
cagacgccggtggacagtcctgatg

SEQ ID NO: 166955 - DNA, 25 bp, probe
cagacgccggtggacagtcctgatg

SEQ ID NO: 166956 - DNA, 25 bp, probe
cagagcccagaagtaagtcctcatg

SEQ ID NO: 166957 - DNA, 25 bp, probe
cagagcccagaagtaagtcctcatg

SEQ ID NO: 166958 - DNA, 25 bp, probe
cagagagccaaatatggggctgatg

SEQ ID NO: 166959 - DNA, 25 bp, probe
cagagagccaaatatggggctgatg

SEQ ID NO: 166960 - DNA, 25 bp, probe
cagagcccagagtgtgggagctaat

SEQ ID NO: 166961 - DNA, 25 bp, probe
cagagcaccaaatatgcccagtcca

SEQ ID NO: 166962 - DNA, 25 bp, probe
cagaccgcagagatcttccaggcgc

SEQ ID NO: 166963 - DNA, 25 bp, probe
cagattcgaaattctgtgccatggc

SEQ ID NO: 166964 - DNA, 25 bp, probe
cagattgcctcctaatgacgcggct

SEQ ID NO: 166965 - DNA, 25 bp, probe
cagagccttctctagaacaggtcgg

SEQ ID NO: 166966 - DNA, 25 bp, probe
cagaggcttctgtacagtcaggtct

SEQ ID NO: 166967 - DNA, 25 bp, probe
cagaggctatcacaggctcagggca

SEQ ID NO: 166968 - DNA, 25 bp, probe
cagaggctatcacaggctcagggca

SEQ ID NO: 166969 - DNA, 25 bp, probe
caggctcatctacagtaaggacagt

SEQ ID NO: 166970 - DNA, 25 bp, probe
cagagcaatgtgacaagtatgacgc

SEQ ID NO: 166971 - DNA, 25 bp, probe
cagagattgctgacgggatggccta

SEQ ID NO: 166972 - DNA, 25 bp, probe
cagagatattgtggatggcatgggc

SEQ ID NO: 166973 - DNA, 25 bp, probe
cagacagcactgtcaacactgggcc

SEQ ID NO: 166974 - DNA, 25 bp, probe
cagacacagctgtctggttcaggcc

SEQ ID NO: 166975 - DNA, 25 bp, probe
cagacacctaatattcatgacttga

SEQ ID NO: 166976 - DNA, 25 bp, probe
cagacacgtacaaaatccagctatg

SEQ ID NO: 166977 - DNA, 25 bp, probe
cagacaaaacaatccccatcaggta

SEQ ID NO: 166978 - DNA, 25 bp, probe
cagataagaaaattggcacctacgt

SEQ ID NO: 166979 - DNA, 25 bp, probe
cagaaatcaaaattcagacgctgac

SEQ ID NO: 166980 - DNA, 25 bp, probe
cagtcacaagaacttcaacctgccc

SEQ ID NO: 166981 - DNA, 25 bp, probe
cagatgccaaatatgccaaggtgaa

SEQ ID NO: 166982 - DNA, 25 bp, probe
cagatgctcaaaggccttaagtaca

SEQ ID NO: 166983 - DNA, 25 bp, probe
cagagtgctgacgccttactggcaa

SEQ ID NO: 166984 - DNA, 25 bp, probe
cagagtgcagtctacaacttcacca

SEQ ID NO: 166985 - DNA, 25 bp, probe
cagagtgcagtctacaacttcacca

SEQ ID NO: 166986 - DNA, 25 bp, probe
cagattcagtcttgccttacacaaa

SEQ ID NO: 166987 - DNA, 25 bp, probe
cagagagcagtttgccagaagctca

SEQ ID NO: 166988 - DNA, 25 bp, probe
cagacagcagtctagaagcagcagc

SEQ ID NO: 166989 - DNA, 25 bp, probe
cagacagcagtctagaagcagcagc

SEQ ID NO: 166990 - DNA, 25 bp, probe
cagacacagtagaagcacacaggca

SEQ ID NO: 166991 - DNA, 25 bp, probe
cagagctgcttcctcagcaacagga

SEQ ID NO: 166992 - DNA, 25 bp, probe
cagagctgcttcctcagcaacagga

SEQ ID NO: 166993 - DNA, 25 bp, probe
cagactgttctgaagcaccgagaca

SEQ ID NO: 166994 - DNA, 25 bp, probe
cagactgttctgaagcaccgagaca

SEQ ID NO: 166995 - DNA, 25 bp, probe
cagacagatgtggttgcatcctaac

SEQ ID NO: 166996 - DNA, 25 bp, probe
cagacagatgagattgtcgcactga

SEQ ID NO: 166997 - DNA, 25 bp, probe
cagtgctatgcacatattagatctt

SEQ ID NO: 166998 - DNA, 25 bp, probe
cagtccaacctttttctgtgtctgg

SEQ ID NO: 166999 - DNA, 25 bp, probe
cagtccaacctttttctgtgtctgg

SEQ ID NO: 167000 - DNA, 25 bp, probe
cagaccaacgattttctcagttatc

SEQ ID NO: 167001 - DNA, 25 bp, probe
cagttaactgcataattcaggaaca

SEQ ID NO: 167002 - DNA, 25 bp, probe
caggtacattgcggttactgacccc

SEQ ID NO: 167003 - DNA, 25 bp, probe
cagttaaatatcctctactacctca

SEQ ID NO: 167004 - DNA, 25 bp, probe
cagactaatttatcaaccatccaca

SEQ ID NO: 167005 - DNA, 25 bp, probe
cagttaacttaatatccctccagga

SEQ ID NO: 167006 - DNA, 25 bp, probe
cagtttctgtaataattgccctccg

SEQ ID NO: 167007 - DNA, 25 bp, probe
cgttccattggtacaaatccgctct

SEQ ID NO: 167008 - DNA, 25 bp, probe
cgttccattggtacaaatccgctct

SEQ ID NO: 167009 - DNA, 25 bp, probe
cagttccttggatgaagcacttggt

SEQ ID NO: 167010 - DNA, 25 bp, probe
cagagtcttcggcagaagcacttgt

SEQ ID NO: 167011 - DNA, 25 bp, probe
cagagtcacctgatgtcaaccttgt

SEQ ID NO: 167012 - DNA, 25 bp, probe
cagagtcacctgatgtcaaccttgt

SEQ ID NO: 167013 - DNA, 25 bp, probe
cagagtcatcctcgggtgatgcctt

SEQ ID NO: 167014 - DNA, 25 bp, probe
cagagtacctcgggaatgaacttcc

SEQ ID NO: 167015 - DNA, 25 bp, probe
cagaggaccacagagaaacttacca

SEQ ID NO: 167016 - DNA, 25 bp, probe
cagaggaccacagagaaacttacca

SEQ ID NO: 167017 - DNA, 25 bp, probe
cagaggggaaataccaacctcccag

SEQ ID NO: 167018 - DNA, 25 bp, probe
cagagggtgggtgccaattccacca

SEQ ID NO: 167019 - DNA, 25 bp, probe
cagagaggggagcctccaattcggc

SEQ ID NO: 167020 - DNA, 25 bp, probe
cagagacggagacctctgcctatgc

SEQ ID NO: 167021 - DNA, 25 bp, probe
cagagaactggaacctgcctgagga

SEQ ID NO: 167022 - DNA, 25 bp, probe
cagagtcctgctggacacggagtgg

SEQ ID NO: 167023 - DNA, 25 bp, probe
cagagcccctgaacagcggaagaca

SEQ ID NO: 167024 - DNA, 25 bp, probe
cagaccccagccaagggagatgagg

SEQ ID NO: 167025 - DNA, 25 bp, probe
cagaccaacaggaggcagagtggct

SEQ ID NO: 167026 - DNA, 25 bp, probe
cagaccaccagcatcgacatgtggg

SEQ ID NO: 167027 - DNA, 25 bp, probe
cagagctgccaaggtggcacagggg

SEQ ID NO: 167028 - DNA, 25 bp, probe
cagacagcactaggagccactgggg

SEQ ID NO: 167029 - DNA, 25 bp, probe
cagacaccaaggaccggtggcgcag

SEQ ID NO: 167030 - DNA, 25 bp, probe
cagacaccaaggaccggtggcgcag

SEQ ID NO: 167031 - DNA, 25 bp, probe
cagagacacacaaatcaatgggacc

SEQ ID NO: 167032 - DNA, 25 bp, probe
cagagaactgaagtactggggcctc

SEQ ID NO: 167033 - DNA, 25 bp, probe
cagagaacgagatccgcggtctgtg

SEQ ID NO: 167034 - DNA, 25 bp, probe
cagacgccgagatgactggctacgt

SEQ ID NO: 167035 - DNA, 25 bp, probe
cagaggcagcgatggaagccatgaa

SEQ ID NO: 167036 - DNA, 25 bp, probe
cagttcacgtgcgagggctgcaaga

SEQ ID NO: 167037 - DNA, 25 bp, probe
cagatgtcaatctgcaggaccacga

SEQ ID NO: 167038 - DNA, 25 bp, probe
cagatctctgaaacaggactgacag

SEQ ID NO: 167039 - DNA, 25 bp, probe
cagatctctgaaacaggactgacag

SEQ ID NO: 167040 - DNA, 25 bp, probe
cagactctgaatgcatgacctttgg

SEQ ID NO: 167041 - DNA, 25 bp, probe
cagacctgataggattgcctgctta

SEQ ID NO: 167042 - DNA, 25 bp, probe
cagagccagtctggactgctcagcc

SEQ ID NO: 167043 - DNA, 25 bp, probe
cagtccaaattgtctgtctgctctt

SEQ ID NO: 167044 - DNA, 25 bp, probe
cagtccaaattgtctgtctgctctt

SEQ ID NO: 167045 - DNA, 25 bp, probe
cagtccactttgacttcgtactgtc

SEQ ID NO: 167046 - DNA, 25 bp, probe
cagtcccttataattggtgcatagc

SEQ ID NO: 167047 - DNA, 25 bp, probe
cagtcccagaaactcatggttggca

SEQ ID NO: 167048 - DNA, 25 bp, probe
cagatcccagagggcgagggggcct

SEQ ID NO: 167049 - DNA, 25 bp, probe
cagagcgagagctgcggagggggag

SEQ ID NO: 167050 - DNA, 25 bp, probe
cagagagagggtcagcaggggggcc

SEQ ID NO: 167051 - DNA, 25 bp, probe
cagaggtggtgacagagtttgggac

SEQ ID NO: 167052 - DNA, 25 bp, probe
cagagggtacctaggtctcagggca

SEQ ID NO: 167053 - DNA, 25 bp, probe
cagagggtacctaggtctcagggca

SEQ ID NO: 167054 - DNA, 25 bp, probe
cagtgggatacctgcgcttgaagga

SEQ ID NO: 167055 - DNA, 25 bp, probe
cagtgggatacctgcgcttgaagga

SEQ ID NO: 167056 - DNA, 25 bp, probe
cagagtttaggctggtgctgccaaa

SEQ ID NO: 167057 - DNA, 25 bp, probe
cagagttgtcatcttggagactaaa

SEQ ID NO: 167058 - DNA, 25 bp, probe
cgttgctgtcggtggaagataacca

SEQ ID NO: 167059 - DNA, 25 bp, probe
cagttcttggttgaacatgaaaccc

SEQ ID NO: 167060 - DNA, 25 bp, probe
cagttttcccatggaaatcagacag

SEQ ID NO: 167061 - DNA, 25 bp, probe
cagtttcctcacgtgtactataagg

SEQ ID NO: 167062 - DNA, 25 bp, probe
cagttgtgccatcccttaagatgaa

SEQ ID NO: 167063 - DNA, 25 bp, probe
catgatggaacacccccatttactg

SEQ ID NO: 167064 - DNA, 25 bp, probe
catgttccaagagccttttagtgat

SEQ ID NO: 167065 - DNA, 25 bp, probe
cagactccaagaggtctttaagatt

SEQ ID NO: 167066 - DNA, 25 bp, probe
cagactagcattgttctattagaat

SEQ ID NO: 167067 - DNA, 25 bp, probe
cagactagcattgttctattagaat

SEQ ID NO: 167068 - DNA, 25 bp, probe
cagactgctagtgttctgtctaaaa

SEQ ID NO: 167069 - DNA, 25 bp, probe
cagatgcgatttccgttttaacaga

SEQ ID NO: 167070 - DNA, 25 bp, probe
cagtcagtttttctcttaagtgcct

SEQ ID NO: 167071 - DNA, 25 bp, probe
cagtcagtttttctcttaagtgcct

SEQ ID NO: 167072 - DNA, 25 bp, probe
cagtacctccttcagcggaaggcct

SEQ ID NO: 167073 - DNA, 25 bp, probe
cagattcactccgttgatcagaaag

SEQ ID NO: 167074 - DNA, 25 bp, probe
cagatccacagcatcctgagcaaga

SEQ ID NO: 167075 - DNA, 25 bp, probe
cagactgcacagctaatggcacagg

SEQ ID NO: 167076 - DNA, 25 bp, probe
cagactgcacagctaatggcacagg

SEQ ID NO: 167077 - DNA, 25 bp, probe
cagactcaaggagaggcagattcac

SEQ ID NO: 167078 - DNA, 25 bp, probe
cagaccaaggcgcagagcaactatc

SEQ ID NO: 167079 - DNA, 25 bp, probe
cagactcgagagggctgagcccctc

SEQ ID NO: 167080 - DNA, 25 bp, probe
cagagggaagcaactgcacagcccc

SEQ ID NO: 167081 - DNA, 25 bp, probe
cagagacagagagatcgccgctgcc

SEQ ID NO: 167082 - DNA, 25 bp, probe
cagagcacaggtgctaccagacctc

SEQ ID NO: 167083 - DNA, 25 bp, probe
cagacgcggcttcaacaagcccatc

SEQ ID NO: 167084 - DNA, 25 bp, probe
cagaggctgcggttcaaagacccac

SEQ ID NO: 167085 - DNA, 25 bp, probe
cagaggtggctgtgcgaagaggggc

SEQ ID NO: 167086 - DNA, 25 bp, probe
cagggcttgatttgccacagttggt

SEQ ID NO: 167087 - DNA, 25 bp, probe
cagtccttttatgacgtgggctttt

SEQ ID NO: 167088 - DNA, 25 bp, probe
taattttgataagacagggtattgc

SEQ ID NO: 167089 - DNA, 25 bp, probe
cagattattaccttacagaagtttg

SEQ ID NO: 167090 - DNA, 25 bp, probe
cagagcttttccttgcaggagcgtc

SEQ ID NO: 167091 - DNA, 25 bp, probe
cagagcttcttctgctgctatgaag

SEQ ID NO: 167092 - DNA, 25 bp, probe
cagtctattcaaggcattgagaatg

SEQ ID NO: 167093 - DNA, 25 bp, probe
cagtcaagaccagctgggtagtcag

SEQ ID NO: 167094 - DNA, 25 bp, probe
cagaggaatctacctgtggtgactg

SEQ ID NO: 167095 - DNA, 25 bp, probe
cagaggaatctacctgtggtgactg

SEQ ID NO: 167096 - DNA, 25 bp, probe
cagatggagacttcattatgttaat

SEQ ID NO: 167097 - DNA, 25 bp, probe
cagatgtacaggtatcagggaacat

SEQ ID NO: 167098 - DNA, 25 bp, probe
cagtattactgaatagtcccagctg

SEQ ID NO: 167099 - DNA, 25 bp, probe
cagttagacccaaggcctatgctga

SEQ ID NO: 167100 - DNA, 25 bp, probe
cagttactccgtaccttactgagat

SEQ ID NO: 167101 - DNA, 25 bp, probe
cagttacctggttgctgttttaatt

SEQ ID NO: 167102 - DNA, 25 bp, probe
cagttacctggttgctgttttaatt

SEQ ID NO: 167103 - DNA, 25 bp, probe
cagttgactatctgaatcattttta

SEQ ID NO: 167104 - DNA, 25 bp, probe
cagttgactatctgaatcattttta

SEQ ID NO: 167105 - DNA, 25 bp, probe
cagttttataagtagatctttttca

SEQ ID NO: 167106 - DNA, 25 bp, probe
cagactctttgatgataattttttt

SEQ ID NO: 167107 - DNA, 25 bp, probe
cagatttgtatgtgaagctattttg

SEQ ID NO: 167108 - DNA, 25 bp, probe
cagttctgaatgtccagcacaacct

SEQ ID NO: 167109 - DNA, 25 bp, probe
cagttctgaatgtccagcacaacct

SEQ ID NO: 167110 - DNA, 25 bp, probe
cagttcgctcattccaactaatcat

SEQ ID NO: 167111 - DNA, 25 bp, probe
cagttctgttaccaggcggcactgg

SEQ ID NO: 167112 - DNA, 25 bp, probe
catgttctgctttcgattcgttaag

SEQ ID NO: 167113 - DNA, 25 bp, probe
cagttgctgttgtgttcaccatggc

SEQ ID NO: 167114 - DNA, 25 bp, probe
cagttgctgttgtgttcaccatggc

SEQ ID NO: 167115 - DNA, 25 bp, probe
cagtagctttggtattatgagtgca

SEQ ID NO: 167116 - DNA, 25 bp, probe
cagttgacatttggagtataggcac

SEQ ID NO: 167117 - DNA, 25 bp, probe
cagatctacacacttgcagtttgga

SEQ ID NO: 167118 - DNA, 25 bp, probe
cagtaccagcctcagccttgagagg

SEQ ID NO: 167119 - DNA, 25 bp, probe
cagtaccagcctcagccttgagagg

SEQ ID NO: 167120 - DNA, 25 bp, probe
cagatgactatgcagaggcctgggg

SEQ ID NO: 167121 - DNA, 25 bp, probe
cagagatctgagccaaccttggccg

SEQ ID NO: 167122 - DNA, 25 bp, probe
cagagactgactgctgctcttgtgc

SEQ ID NO: 167123 - DNA, 25 bp, probe
cagagagtcgctgtcattctgtcat

SEQ ID NO: 167124 - DNA, 25 bp, probe
cagaggatgaatatgatgtcctcat

SEQ ID NO: 167125 - DNA, 25 bp, probe
cagaggagcagtacaggttcctgta

SEQ ID NO: 167126 - DNA, 25 bp, probe
cagacgtctgtcaggggcttggatt

SEQ ID NO: 167127 - DNA, 25 bp, probe
cagaggtcactcagggtcaatactc

SEQ ID NO: 167128 - DNA, 25 bp, probe
cagaggtttctgggagacctaccgg

SEQ ID NO: 167129 - DNA, 25 bp, probe
cagagtttcgtgaccaactatcccg

SEQ ID NO: 167130 - DNA, 25 bp, probe
cagaggttcagaatcaacatctcac

SEQ ID NO: 167131 - DNA, 25 bp, probe
cagagtgtcccagctgacacagacc

SEQ ID NO: 167132 - DNA, 25 bp, probe
cagagtccctgaaaggcagcagacc

SEQ ID NO: 167133 - DNA, 25 bp, probe
cagacctcactgggcggcaagaggt

SEQ ID NO: 167134 - DNA, 25 bp, probe
cagagccctatgcagggctacgatt

SEQ ID NO: 167135 - DNA, 25 bp, probe
cagagacttttactgagctccgagc

SEQ ID NO: 167136 - DNA, 25 bp, probe
cagagatgtactgcaaagtcgccag

SEQ ID NO: 167137 - DNA, 25 bp, probe
cagagctgctcacggagaagtccgc

SEQ ID NO: 167138 - DNA, 25 bp, probe
cagacctcaatgcgtgagtccagcc

SEQ ID NO: 167139 - DNA, 25 bp, probe
cagtcctcaagtagtttctcaaact

SEQ ID NO: 167140 - DNA, 25 bp, probe
cagagaccaatgagtatgttaacag

SEQ ID NO: 167141 - DNA, 25 bp, probe
cagagctcaaccagaagggatacag

SEQ ID NO: 167142 - DNA, 25 bp, probe
cagagccaggccaggcatggggccg

SEQ ID NO: 167143 - DNA, 25 bp, probe
cagagccagggcctggcgagctggc

SEQ ID NO: 167144 - DNA, 25 bp, probe
cagagccagggcctggcgagctggc

SEQ ID NO: 167145 - DNA, 25 bp, probe
cagagacgggcgagcagattcagag

SEQ ID NO: 167146 - DNA, 25 bp, probe
cagagatctggctgcaagaaatgtg

SEQ ID NO: 167147 - DNA, 25 bp, probe
cagagctcatggcgaagagacttgg

SEQ ID NO: 167148 - DNA, 25 bp, probe
cagagccaggcggccgagatcatgt

SEQ ID NO: 167149 - DNA, 25 bp, probe
cagaccgccatgggggatcagtgca

SEQ ID NO: 167150 - DNA, 25 bp, probe
cagagggccagagtgggtagtgggg

SEQ ID NO: 167151 - DNA, 25 bp, probe
cagagagcaccctggtgtgggggcg

SEQ ID NO: 167152 - DNA, 25 bp, probe
cagagagcaccctggtgtgggggcg

SEQ ID NO: 167153 - DNA, 25 bp, probe
cagagacccggggatggattggcct

SEQ ID NO: 167154 - DNA, 25 bp, probe
cagagactgcccggcgagaattcga

SEQ ID NO: 167155 - DNA, 25 bp, probe
caggatcacccagctgaaaatcgcc

SEQ ID NO: 167156 - DNA, 25 bp, probe
cagttcaacgcagccaatgacattg

SEQ ID NO: 167157 - DNA, 25 bp, probe
cagtatgcaaaagcccaaactagtg

SEQ ID NO: 167158 - DNA, 25 bp, probe
cagatccatcaacaccacaacagga

SEQ ID NO: 167159 - DNA, 25 bp, probe
cagatccacaggtatgtaaaagaca

SEQ ID NO: 167160 - DNA, 25 bp, probe
cagttggctgtgtagaaaaagaaaa

SEQ ID NO: 167161 - DNA, 25 bp, probe
cagttggctgtatgactgaagtaat

SEQ ID NO: 167162 - DNA, 25 bp, probe
cagtttgcagttcactgcaaatctt

SEQ ID NO: 167163 - DNA, 25 bp, probe
cagtatgtcagttcagtcggaacaa

SEQ ID NO: 167164 - DNA, 25 bp, probe
cagtatctgcagaacagtaagcgaa

SEQ ID NO: 167165 - DNA, 25 bp, probe
cagagtcagagatcagctccactgg

SEQ ID NO: 167166 - DNA, 25 bp, probe
cagagtcagagatcagctccactgg

SEQ ID NO: 167167 - DNA, 25 bp, probe
cagagtcagagaccactgtcttaac

SEQ ID NO: 167168 - DNA, 25 bp, probe
cagagtcagagaccactgtcttaac

SEQ ID NO: 167169 - DNA, 25 bp, probe
cagagtggagcgacaatagctaaag

SEQ ID NO: 167170 - DNA, 25 bp, probe
cagagcgcgagctcaatcaggccgg

SEQ ID NO: 167171 - DNA, 25 bp, probe
cagagcgcgagatcgacgtgctgga

SEQ ID NO: 167172 - DNA, 25 bp, probe
cagagcgcgagatcgacgtgctgga

SEQ ID NO: 167173 - DNA, 25 bp, probe
cagagagcggaccgaccagctgaaa

SEQ ID NO: 167174 - DNA, 25 bp, probe
cagtatgaggaccagcttagctgac

SEQ ID NO: 167175 - DNA, 25 bp, probe
cagttgaaaaagctggcgcctcctt

SEQ ID NO: 167176 - DNA, 25 bp, probe
cagtgttaaaagcttccctgccatg

SEQ ID NO: 167177 - DNA, 25 bp, probe
cagtcttttctagtttccctggatt

SEQ ID NO: 167178 - DNA, 25 bp, probe
gcacgttgtttagggtgcccttact

SEQ ID NO: 167179 - DNA, 25 bp, probe
cggtgtgtaaggtggcctattcctc

SEQ ID NO: 167180 - DNA, 25 bp, probe
cagatggttatacttatggctgtat

SEQ ID NO: 167181 - DNA, 25 bp, probe
cagatggttatacttatggctgtat

SEQ ID NO: 167182 - DNA, 25 bp, probe
cagatttctacaattgtgcgttgac

SEQ ID NO: 167183 - DNA, 25 bp, probe
cagattctgtttctggcgtctgcat

SEQ ID NO: 167184 - DNA, 25 bp, probe
cagtattgaatcctttgtgtctgct

SEQ ID NO: 167185 - DNA, 25 bp, probe
cagttagcaactatcgatcttgcca

SEQ ID NO: 167186 - DNA, 25 bp, probe
cagtctcagtttgccagtcttgcaa

SEQ ID NO: 167187 - DNA, 25 bp, probe
cagttcgttggatggctcttgaaag

SEQ ID NO: 167188 - DNA, 25 bp, probe
cagggtttggattagcagtggaata

SEQ ID NO: 167189 - DNA, 25 bp, probe
cagggttggaaactgcactggaaaa

SEQ ID NO: 167190 - DNA, 25 bp, probe
cagggctccaaatctgcctagaaaa

SEQ ID NO: 167191 - DNA, 25 bp, probe
catcgaccgctataagcgctggaag

SEQ ID NO: 167192 - DNA, 25 bp, probe
cagagtccgtcagtaagctggaaga

SEQ ID NO: 167193 - DNA, 25 bp, probe
cagagtccgtcagtaagctggaaga

SEQ ID NO: 167194 - DNA, 25 bp, probe
cagatcctcagtagaaagcccaagc

SEQ ID NO: 167195 - DNA, 25 bp, probe
cagatcccaatcaaagtgccaagtg

SEQ ID NO: 167196 - DNA, 25 bp, probe
cagatgcaccacacagactacaagt

SEQ ID NO: 167197 - DNA, 25 bp, probe
cagatgctcactaaagatttcaaag

SEQ ID NO: 167198 - DNA, 25 bp, probe
cagagcgagctgcatgagaagtaca

SEQ ID NO: 167199 - DNA, 25 bp, probe
cagagtgtgctggatgacttctaca

SEQ ID NO: 167200 - DNA, 25 bp, probe
cagagggctgcccagtatctgaagg

SEQ ID NO: 167201 - DNA, 25 bp, probe
cagagggccaggatttgaggctgcc

SEQ ID NO: 167202 - DNA, 25 bp, probe
cagagaagcacgtgtttgagcaggc

SEQ ID NO: 167203 - DNA, 25 bp, probe
cagagcatatgcatttttggtagaa

SEQ ID NO: 167204 - DNA, 25 bp, probe
cagagcatatgcatttttggtagaa

SEQ ID NO: 167205 - DNA, 25 bp, probe
cagagcattgtgatattgtcaaaga

SEQ ID NO: 167206 - DNA, 25 bp, probe
cagagttattaaagtcaaaggagga

SEQ ID NO: 167207 - DNA, 25 bp, probe
caggagtcttcgaaaccgtggagga

SEQ ID NO: 167208 - DNA, 25 bp, probe
cagtactacgggtacctgtggagcg

SEQ ID NO: 167209 - DNA, 25 bp, probe
cagtactacgggtacctgtggagcg

SEQ ID NO: 167210 - DNA, 25 bp, probe
cagagatggacgtgtaccagggccg

SEQ ID NO: 167211 - DNA, 25 bp, probe
cagagcaaacgcagtaccatggtcg

SEQ ID NO: 167212 - DNA, 25 bp, probe
cagatgaaagccagtgagcctacta

SEQ ID NO: 167213 - DNA, 25 bp, probe
cagagagaagatggtgtggtctacg

SEQ ID NO: 167214 - DNA, 25 bp, probe
caggcatgcagaaggctgacgtcta

SEQ ID NO: 167215 - DNA, 25 bp, probe
cagagcagagaaggacctgtccaac

SEQ ID NO: 167216 - DNA, 25 bp, probe
cagagatgaagagacacagtctaga

SEQ ID NO: 167217 - DNA, 25 bp, probe
cagagcatttgagctgccactcttg

SEQ ID NO: 167218 - DNA, 25 bp, probe
cagagctttacagtgccacgacatg

SEQ ID NO: 167219 - DNA, 25 bp, probe
cagatgctttcatttacacagatat

SEQ ID NO: 167220 - DNA, 25 bp, probe
cagagtgcttctaatcatcacagta

SEQ ID NO: 167221 - DNA, 25 bp, probe
cagagctcagttaaatgcaactgca

SEQ ID NO: 167222 - DNA, 25 bp, probe
cagagctcttctctgtgcagagtca

SEQ ID NO: 167223 - DNA, 25 bp, probe
cagatctttctttgtagtgtcccag

SEQ ID NO: 167224 - DNA, 25 bp, probe
cagatctttctttgtagtgtcccag

SEQ ID NO: 167225 - DNA, 25 bp, probe
cagtcagttttatagtgtgcaagtg

SEQ ID NO: 167226 - DNA, 25 bp, probe
cagtcagtcacacataagttccttg

SEQ ID NO: 167227 - DNA, 25 bp, probe
cagtcagtagcagaggacgatcctc

SEQ ID NO: 167228 - DNA, 25 bp, probe
cagtacatagcctggcctgaccatg

SEQ ID NO: 167229 - DNA, 25 bp, probe
cagtactcagtatagcattgaacat

SEQ ID NO: 167230 - DNA, 25 bp, probe
cagatcccagcttcggcatttgatc

SEQ ID NO: 167231 - DNA, 25 bp, probe
cagatcagccgcatcgagtatatcc

SEQ ID NO: 167232 - DNA, 25 bp, probe
cagagacccctggatgcagagagcc

SEQ ID NO: 167233 - DNA, 25 bp, probe
cagagacccctggatgcagagagcc

SEQ ID NO: 167234 - DNA, 25 bp, probe
cagagtcaccgggaggagagccggg

SEQ ID NO: 167235 - DNA, 25 bp, probe
cagttacctggcagggacgctggga

SEQ ID NO: 167236 - DNA, 25 bp, probe
cagttacaatggccgggggcaggga

SEQ ID NO: 167237 - DNA, 25 bp, probe
cagttccagagacctgggggtgtgt

SEQ ID NO: 167238 - DNA, 25 bp, probe
cagtttcgagtgggcggaggatttc

SEQ ID NO: 167239 - DNA, 25 bp, probe
cagtttgctgatggccgccaaagtt

SEQ ID NO: 167240 - DNA, 25 bp, probe
cagttggtggcggcccaactgcagt

SEQ ID NO: 167241 - DNA, 25 bp, probe
cagtattatggcttctcgcataccg

SEQ ID NO: 167242 - DNA, 25 bp, probe
cagttctagctctctattacctgtc

SEQ ID NO: 167243 - DNA, 25 bp, probe
cagttccccttcaaggagcctgaaa

SEQ ID NO: 167244 - DNA, 25 bp, probe
cagtttccctacaagaactgcaaga

SEQ ID NO: 167245 - DNA, 25 bp, probe
cagtttctccaagctgcttctggaa

SEQ ID NO: 167246 - DNA, 25 bp, probe
cagttgacttcaagacgctggctga

SEQ ID NO: 167247 - DNA, 25 bp, probe
cagtttttcacaatggtggcatcaa

SEQ ID NO: 167248 - DNA, 25 bp, probe
cagatttttcactagcgtacatcta

SEQ ID NO: 167249 - DNA, 25 bp, probe
cagatttgctctgcatgtggtaact

SEQ ID NO: 167250 - DNA, 25 bp, probe
cagtctgtgtcttgctatggaatat

SEQ ID NO: 167251 - DNA, 25 bp, probe
cagtccttcttggaagactacttca

SEQ ID NO: 167252 - DNA, 25 bp, probe
cagtccttcttggaagactacttca

SEQ ID NO: 167253 - DNA, 25 bp, probe
cagattttcttgggagagtcactcc

SEQ ID NO: 167254 - DNA, 25 bp, probe
cagatgttacaacgggcaggagcct

SEQ ID NO: 167255 - DNA, 25 bp, probe
cagagctggccaatgctgggcggcc

SEQ ID NO: 167256 - DNA, 25 bp, probe
cagagctggccaatgctgggcggcc

SEQ ID NO: 167257 - DNA, 25 bp, probe
cagagctgagcactcagcccgggag

SEQ ID NO: 167258 - DNA, 25 bp, probe
cagagctgagcactcagcccgggag

SEQ ID NO: 167259 - DNA, 25 bp, probe
cagatctacaccggcctgaagagtg

SEQ ID NO: 167260 - DNA, 25 bp, probe
gaattacaacggtcgacgagctcga

SEQ ID NO: 167261 - DNA, 25 bp, probe
gcaaaaaagggtcacctctctccct

SEQ ID NO: 167262 - DNA, 25 bp, probe
tcaaaaaagggtcccgtgtctacag

SEQ ID NO: 167263 - DNA, 25 bp, probe
cagtgaaaaggactacccgttccag

SEQ ID NO: 167264 - DNA, 25 bp, probe
cagtaccaaggagtacgcctacctc

SEQ ID NO: 167265 - DNA, 25 bp, probe
cggaccgggactatcaatgacttca

SEQ ID NO: 167266 - DNA, 25 bp, probe
cagggcctgggaaatttctacttat

SEQ ID NO: 167267 - DNA, 25 bp, probe
cagatgggggctgaatcattcaact

SEQ ID NO: 167268 - DNA, 25 bp, probe
cagaggtggtgagcatgtaacatga

SEQ ID NO: 167269 - DNA, 25 bp, probe
cagaggctttgctgctgtgaatccc

SEQ ID NO: 167270 - DNA, 25 bp, probe
cagatagtcttctgctgctggtacc

SEQ ID NO: 167271 - DNA, 25 bp, probe
cagatagtcttctgctgctggtacc

SEQ ID NO: 167272 - DNA, 25 bp, probe
cagagaggtctgtgctgcaggtggc

SEQ ID NO: 167273 - DNA, 25 bp, probe
cagagaggtctgtgctgcaggtggc

SEQ ID NO: 167274 - DNA, 25 bp, probe
cagagaggtctgtgctgcaggtggc

SEQ ID NO: 167275 - DNA, 25 bp, probe
cagagaggactgcgcaaggggctgg

SEQ ID NO: 167276 - DNA, 25 bp, probe
cagagaaagctggggcagcccaggg

SEQ ID NO: 167277 - DNA, 25 bp, probe
cagagagatagccgggctccaggga

SEQ ID NO: 167278 - DNA, 25 bp, probe
cagaggaatgtagggcctgcatgga

SEQ ID NO: 167279 - DNA, 25 bp, probe
cagagtgatgtgtggagttatggtg

SEQ ID NO: 167280 - DNA, 25 bp, probe
cagagaatgtgatgtgaggttggat

SEQ ID NO: 167281 - DNA, 25 bp, probe
cagagaatgtgatgtgaggttggat

SEQ ID NO: 167282 - DNA, 25 bp, probe
cagagcaaggcgctatggtcaggag

SEQ ID NO: 167283 - DNA, 25 bp, probe
cagagggcttgcattggtcaggata

SEQ ID NO: 167284 - DNA, 25 bp, probe
cagagaaccctactgtgtcatgtga

SEQ ID NO: 167285 - DNA, 25 bp, probe
cagagatacctggcctggtctggac

SEQ ID NO: 167286 - DNA, 25 bp, probe
cagatctacagcgccagagtgctga

SEQ ID NO: 167287 - DNA, 25 bp, probe
cagatgccaaggagctggagctgat

SEQ ID NO: 167288 - DNA, 25 bp, probe
cagatgtcaaggacagctcagaggc

SEQ ID NO: 167289 - DNA, 25 bp, probe
cagatgtcggcggcaacgaccagtc

SEQ ID NO: 167290 - DNA, 25 bp, probe
cagttctgtggtgcatctgagccag

SEQ ID NO: 167291 - DNA, 25 bp, probe
cagattttggctggtctgtgcacac

SEQ ID NO: 167292 - DNA, 25 bp, probe
cagtttacactgcctcttagcagcc

SEQ ID NO: 167293 - DNA, 25 bp, probe
cagattctaagccctgttcagagac

SEQ ID NO: 167294 - DNA, 25 bp, probe
cagtttagagctcctggacagtaaa

SEQ ID NO: 167295 - DNA, 25 bp, probe
cagtttggagctcctggaaggtaaa

SEQ ID NO: 167296 - DNA, 25 bp, probe
cagtcgggagctctggcaagctata

SEQ ID NO: 167297 - DNA, 25 bp, probe
catccgtggaggacggccagatccc

SEQ ID NO: 167298 - DNA, 25 bp, probe
cagaggggaagaggccctcaccctg

SEQ ID NO: 167299 - DNA, 25 bp, probe
cagatgcgggaaggactgcagtcac

SEQ ID NO: 167300 - DNA, 25 bp, probe
cagagtgcgaggtgagccagtgcca

SEQ ID NO: 167301 - DNA, 25 bp, probe
cagagtgggtgttgactgctgccca

SEQ ID NO: 167302 - DNA, 25 bp, probe
cagagtgggtgttgactgctgccca

SEQ ID NO: 167303 - DNA, 25 bp, probe
cagaggaggagcgtgatctctccca

SEQ ID NO: 167304 - DNA, 25 bp, probe
cagatgaaacaaggatcttccgagt

SEQ ID NO: 167305 - DNA, 25 bp, probe
cagatataaacagatcccctgctga

SEQ ID NO: 167306 - DNA, 25 bp, probe
cagagtacaacagacccttgctcgc

SEQ ID NO: 167307 - DNA, 25 bp, probe
cagagtaacacaggattcactgttt

SEQ ID NO: 167308 - DNA, 25 bp, probe
cagagtatcacagagatccagtcta

SEQ ID NO: 167309 - DNA, 25 bp, probe
cagagatgctcataggtcacttcta

SEQ ID NO: 167310 - DNA, 25 bp, probe
cagatgtgctgacaaggcacttcat

SEQ ID NO: 167311 - DNA, 25 bp, probe
cagatgcctaccaggacctgtacca

SEQ ID NO: 167312 - DNA, 25 bp, probe
cagatcgcctcgggtatggtgtacc

SEQ ID NO: 167313 - DNA, 25 bp, probe
cagtccctggatgggtggttacctc

SEQ ID NO: 167314 - DNA, 25 bp, probe
cagtccctggatgggtggttacctc

SEQ ID NO: 167315 - DNA, 25 bp, probe
cagatcacctggtggaggtaccgtt

SEQ ID NO: 167316 - DNA, 25 bp, probe
cagatcaccttgtggaagatttaat

SEQ ID NO: 167317 - DNA, 25 bp, probe
cagtctctttgatgtggtccttaag

SEQ ID NO: 167318 - DNA, 25 bp, probe
cagtcttttgacatgagccctgaaa

SEQ ID NO: 167319 - DNA, 25 bp, probe
catgtctgtttgtaggacggagaaa

SEQ ID NO: 167320 - DNA, 25 bp, probe
cagtgtgttgagaagggccgagtaa

SEQ ID NO: 167321 - DNA, 25 bp, probe
cagtgttggcagcacgagcctgagc

SEQ ID NO: 167322 - DNA, 25 bp, probe
cagtttgccagaagctcagggtgca

SEQ ID NO: 167323 - DNA, 25 bp, probe
cagtatatgtctcagcatccaggag

SEQ ID NO: 167324 - DNA, 25 bp, probe
cagattcgactgcatgctacagggt

SEQ ID NO: 167325 - DNA, 25 bp, probe
cagattgtgacgaagcagacaggca

SEQ ID NO: 167326 - DNA, 25 bp, probe
cagatgtggatatccagagcgagcg

SEQ ID NO: 167327 - DNA, 25 bp, probe
cagaggagctaggccagtccatctg

SEQ ID NO: 167328 - DNA, 25 bp, probe
cagagggcgagggggcctctgagca

SEQ ID NO: 167329 - DNA, 25 bp, probe
cagagtggtgggtggcacatgctta

SEQ ID NO: 167330 - DNA, 25 bp, probe
cagagtggtgggtggcacatgctta

SEQ ID NO: 167331 - DNA, 25 bp, probe
cagagtttgtgggtcagtctgtctt

SEQ ID NO: 167332 - DNA, 25 bp, probe
cagatggtgggggatgcagctgctg

SEQ ID NO: 167333 - DNA, 25 bp, probe
cagattgaggggcccactgtttgga

SEQ ID NO: 167334 - DNA, 25 bp, probe
cagaggacagggtacctgctgtgta

SEQ ID NO: 167335 - DNA, 25 bp, probe
cagatggacgtggtccaccgcatgt

SEQ ID NO: 167336 - DNA, 25 bp, probe
cagtgctgtctggcggcaccaccat

SEQ ID NO: 167337 - DNA, 25 bp, probe
cagtttgtgacaatgactcaccttt

SEQ ID NO: 167338 - DNA, 25 bp, probe
cagtttgtgacaatgactcaccttt

SEQ ID NO: 167339 - DNA, 25 bp, probe
cagattggtttgagtgccctttgct

SEQ ID NO: 167340 - DNA, 25 bp, probe
cagtcattttggttggcgcttttgt

SEQ ID NO: 167341 - DNA, 25 bp, probe
cagtcagtgcttaaatgggctcctt

SEQ ID NO: 167342 - DNA, 25 bp, probe
cagtcagttttgatgtcagctcctc

SEQ ID NO: 167343 - DNA, 25 bp, probe
cagatcagtgatcctattcagcaga

SEQ ID NO: 167344 - DNA, 25 bp, probe
cagatcgtatttatgcaatgaaagt

SEQ ID NO: 167345 - DNA, 25 bp, probe
catgtttatgttgagaactaaggat

SEQ ID NO: 167346 - DNA, 25 bp, probe
cagttggagtgctggagactttgga

SEQ ID NO: 167347 - DNA, 25 bp, probe
cagttccaagctgagagagcattgt

SEQ ID NO: 167348 - DNA, 25 bp, probe
cagattgccaagaaaagacctcacc

SEQ ID NO: 167349 - DNA, 25 bp, probe
cagagggcacagagaaagctctcaa

SEQ ID NO: 167350 - DNA, 25 bp, probe
cagatggacctgagtgtcggtcaca

SEQ ID NO: 167351 - DNA, 25 bp, probe
cagatggaattaacttcatggtgaa

SEQ ID NO: 167352 - DNA, 25 bp, probe
cagagagtgtcttactggtggatga

SEQ ID NO: 167353 - DNA, 25 bp, probe
cagagggctacttcatggaggatgg

SEQ ID NO: 167354 - DNA, 25 bp, probe
cagaggcgaactgtagagtgcaggg

SEQ ID NO: 167355 - DNA, 25 bp, probe
cagaggtaactgaggagaggggcgc

SEQ ID NO: 167356 - DNA, 25 bp, probe
cagagtgtaacaaccacgggtgtaa

SEQ ID NO: 167357 - DNA, 25 bp, probe
cagagtgtaacaaccttgatcgttt

SEQ ID NO: 167358 - DNA, 25 bp, probe
cagaggtaccacgaagctacctttt

SEQ ID NO: 167359 - DNA, 25 bp, probe
cagaggtaccacgaagctacctttt

SEQ ID NO: 167360 - DNA, 25 bp, probe
cagttataacctattacctattttg

SEQ ID NO: 167361 - DNA, 25 bp, probe
cagttataacctattacctattttg

SEQ ID NO: 167362 - DNA, 25 bp, probe
cagtattaaactctcctttgatatt

SEQ ID NO: 167363 - DNA, 25 bp, probe
cagattatggaagttttcttctatt

SEQ ID NO: 167364 - DNA, 25 bp, probe
cagtttcttactgttttgtatcaaa

SEQ ID NO: 167365 - DNA, 25 bp, probe
cagtttcttactgttttgtatcaaa

SEQ ID NO: 167366 - DNA, 25 bp, probe
catgtttgtacactgggatttttca

SEQ ID NO: 167367 - DNA, 25 bp, probe
cagttctgtaagtctcactttgttc

SEQ ID NO: 167368 - DNA, 25 bp, probe
cagagatcccaaaccagctattctt

SEQ ID NO: 167369 - DNA, 25 bp, probe
cagagtactaaacagcttccttcag

SEQ ID NO: 167370 - DNA, 25 bp, probe
cagagataccaatgggcattgctgt

SEQ ID NO: 167371 - DNA, 25 bp, probe
cagtcatgacgcaactgcggcatag

SEQ ID NO: 167372 - DNA, 25 bp, probe
cagatcatgtacagctgctggcacg

SEQ ID NO: 167373 - DNA, 25 bp, probe
cagatctggagaggagctggcccgg

SEQ ID NO: 167374 - DNA, 25 bp, probe
cagattgtcgcatctgtggtctctg

SEQ ID NO: 167375 - DNA, 25 bp, probe
cagatttccattgtgtggcctggtg

SEQ ID NO: 167376 - DNA, 25 bp, probe
cagattatccatcactgggagtgtg

SEQ ID NO: 167377 - DNA, 25 bp, probe
cagaggaccatcagcatggccgagc

SEQ ID NO: 167378 - DNA, 25 bp, probe
cagaggagcagtactcaagccgcac

SEQ ID NO: 167379 - DNA, 25 bp, probe
cagaggagcagtactcaagccgcac

SEQ ID NO: 167380 - DNA, 25 bp, probe
cagaggatctttccaaccacatctg

SEQ ID NO: 167381 - DNA, 25 bp, probe
cagaggacgcttgagccagaatctc

SEQ ID NO: 167382 - DNA, 25 bp, probe
cagggccacttttgaagtcttccct

SEQ ID NO: 167383 - DNA, 25 bp, probe
cagggtattttgaccaggttaccat

SEQ ID NO: 167384 - DNA, 25 bp, probe
cagatggaactttaccacgccttgc

SEQ ID NO: 167385 - DNA, 25 bp, probe
cagaggaagttatcctctgcctccc

SEQ ID NO: 167386 - DNA, 25 bp, probe
cagtagaatgcaaatacctccctcc

SEQ ID NO: 167387 - DNA, 25 bp, probe
cagttattggaaaagctccctgcct

SEQ ID NO: 167388 - DNA, 25 bp, probe
cagttataggaacaattctcttttc

SEQ ID NO: 167389 - DNA, 25 bp, probe
cagttgagaggacactcccgttttc

SEQ ID NO: 167390 - DNA, 25 bp, probe
cagtctgttggacttctcttcagga

SEQ ID NO: 167391 - DNA, 25 bp, probe
cagtgccaaggagtttcatacagcg

SEQ ID NO: 167392 - DNA, 25 bp, probe
cagatgcacgagaaatccatcccct

SEQ ID NO: 167393 - DNA, 25 bp, probe
cagatcctgcagaagtactcctatt

SEQ ID NO: 167394 - DNA, 25 bp, probe
cagatactgcgcaagaatacattgt

SEQ ID NO: 167395 - DNA, 25 bp, probe
cagatgatgctgtcaagcaatattg

SEQ ID NO: 167396 - DNA, 25 bp, probe
cagattgtgagccgccaatatcatc

SEQ ID NO: 167397 - DNA, 25 bp, probe
cagatcctgagggccagctatgagt

SEQ ID NO: 167398 - DNA, 25 bp, probe
cagatcctggccacaattgagctgc

SEQ ID NO: 167399 - DNA, 25 bp, probe
cagattatcgacatctttgaagctg

SEQ ID NO: 167400 - DNA, 25 bp, probe
cagttcatagacaccatctgatagg

SEQ ID NO: 167401 - DNA, 25 bp, probe
cagatactagatattttgatgaaga

SEQ ID NO: 167402 - DNA, 25 bp, probe
cagagatatctgcactttgtagaaa

SEQ ID NO: 167403 - DNA, 25 bp, probe
cagagtgtcatgtttattgatgtgg

SEQ ID NO: 167404 - DNA, 25 bp, probe
cagagttatgcgttctttgctggct

SEQ ID NO: 167405 - DNA, 25 bp, probe
cagatgtttggagctttggagtggt

SEQ ID NO: 167406 - DNA, 25 bp, probe
cagttgaggccagggtggtcagggt

SEQ ID NO: 167407 - DNA, 25 bp, probe
cagttatcccaaagccttcaggtgg

SEQ ID NO: 167408 - DNA, 25 bp, probe
cagttatccttgtatccatgtaatt

SEQ ID NO: 167409 - DNA, 25 bp, probe
cagattaccatttattacatcgttc

SEQ ID NO: 167410 - DNA, 25 bp, probe
cagttcaccatgattctcttctgtc

SEQ ID NO: 167411 - DNA, 25 bp, probe
cagatgacactggggttcttcttgc

SEQ ID NO: 167412 - DNA, 25 bp, probe
cagatgactgtggagctcctgttca

SEQ ID NO: 167413 - DNA, 25 bp, probe
cagatacttgattgcaactgtgttg

SEQ ID NO: 167414 - DNA, 25 bp, probe
cagatggcttgtgcagaagattgga

SEQ ID NO: 167415 - DNA, 25 bp, probe
cagaggcttgtgggcaatgtgtatg

SEQ ID NO: 167416 - DNA, 25 bp, probe
cagaggcttgtgggcaatgtgtatg

SEQ ID NO: 167417 - DNA, 25 bp, probe
cagatggtgtgtccagcactcgatt

SEQ ID NO: 167418 - DNA, 25 bp, probe
cagaggagctctacaacatcatgat

SEQ ID NO: 167419 - DNA, 25 bp, probe
cagaggatgcactcaacacggtgtg

SEQ ID NO: 167420 - DNA, 25 bp, probe
cagaggcagcaagcactacagagtc

SEQ ID NO: 167421 - DNA, 25 bp, probe
cgtggcggtgaagacggtcaacgag

SEQ ID NO: 167422 - DNA, 25 bp, probe
caggaaggtgaacaagtgctaccgg

SEQ ID NO: 167423 - DNA, 25 bp, probe
caggaacgtggagaccctgacgtgg

SEQ ID NO: 167424 - DNA, 25 bp, probe
caggaaggacggggaccttctgtgc

SEQ ID NO: 167425 - DNA, 25 bp, probe
caggaaggacggggaccttctgtgc

SEQ ID NO: 167426 - DNA, 25 bp, probe
cagggtggcccggtggaaatcctgc

SEQ ID NO: 167427 - DNA, 25 bp, probe
cgaatggaccctatgggactcctct

SEQ ID NO: 167428 - DNA, 25 bp, probe
cagagggtccctaggtgggtcaact

SEQ ID NO: 167429 - DNA, 25 bp, probe
caggggttcccctgatgggagtcat

SEQ ID NO: 167430 - DNA, 25 bp, probe
cagtgtggtttctcttatgtcgagt

SEQ ID NO: 167431 - DNA, 25 bp, probe
cagaggattttagtctatatgcttg

SEQ ID NO: 167432 - DNA, 25 bp, probe
cagaggattttagtctatatgcttg

SEQ ID NO: 167433 - DNA, 25 bp, probe
cagtaattttgaccctgacttcata

SEQ ID NO: 167434 - DNA, 25 bp, probe
catgaaaatggttccctttatgatt

SEQ ID NO: 167435 - DNA, 25 bp, probe
cagatatatctgtgaccgcttctac

SEQ ID NO: 167436 - DNA, 25 bp, probe
cagatattctgagtacttgcccaac

SEQ ID NO: 167437 - DNA, 25 bp, probe
cagtcatcctgaacctgagttcaac

SEQ ID NO: 167438 - DNA, 25 bp, probe
cagtcatgtatttcctgatgtccag

SEQ ID NO: 167439 - DNA, 25 bp, probe
cagtcatgtatttcctgatgtccag

SEQ ID NO: 167440 - DNA, 25 bp, probe
cagatcagtctttgtcaatgctcta

SEQ ID NO: 167441 - DNA, 25 bp, probe
cagatgggtgggacacatgccttcc

SEQ ID NO: 167442 - DNA, 25 bp, probe
cagatgtggttgcatcctaactcca

SEQ ID NO: 167443 - DNA, 25 bp, probe
cagaggagatggccacgtacctgcg

SEQ ID NO: 167444 - DNA, 25 bp, probe
cagaggagtgagctctgtggtccgc

SEQ ID NO: 167445 - DNA, 25 bp, probe
cagagggaagcgtcagcgggcgctg

SEQ ID NO: 167446 - DNA, 25 bp, probe
cagagggagttgtcacgctacagtg

SEQ ID NO: 167447 - DNA, 25 bp, probe
cagatgggaattgcacagtaggatg

SEQ ID NO: 167448 - DNA, 25 bp, probe
cagagtgtgtatacccaggcttgtc

SEQ ID NO: 167449 - DNA, 25 bp, probe
cagggggatatggtgggtttccagt

SEQ ID NO: 167450 - DNA, 25 bp, probe
cagaggggattttggatgtcttcca

SEQ ID NO: 167451 - DNA, 25 bp, probe
cagaggggttgctggaggtgacaag

SEQ ID NO: 167452 - DNA, 25 bp, probe
cagagggagggctttggagcgacca

SEQ ID NO: 167453 - DNA, 25 bp, probe
cagagggagggccatgggccgaggc

SEQ ID NO: 167454 - DNA, 25 bp, probe
cagagggagggccatgggccgaggc

SEQ ID NO: 167455 - DNA, 25 bp, probe
cagatgggagggttgtgcttgtggg

SEQ ID NO: 167456 - DNA, 25 bp, probe
cagaggtggtggtgatgatcgcagg

SEQ ID NO: 167457 - DNA, 25 bp, probe
cagaggtggtggtgatgatcgcagg

SEQ ID NO: 167458 - DNA, 25 bp, probe
cagaggtggaggtggccgatgaaac

SEQ ID NO: 167459 - DNA, 25 bp, probe
cagaggaggacgtgagccagtttga

SEQ ID NO: 167460 - DNA, 25 bp, probe
cagagtgagcagtgagggccagtct

SEQ ID NO: 167461 - DNA, 25 bp, probe
cagaggtgcagtgagttcccttgtc

SEQ ID NO: 167462 - DNA, 25 bp, probe
cagggctgactctaggtgcccttgg

SEQ ID NO: 167463 - DNA, 25 bp, probe
cagaggtgacaacagggacattggc

SEQ ID NO: 167464 - DNA, 25 bp, probe
cagaggtgacaacagggacattggc

SEQ ID NO: 167465 - DNA, 25 bp, probe
cagaggtgcaccctgcaggagatac

SEQ ID NO: 167466 - DNA, 25 bp, probe
cagttatacatcttcaggatgattc

SEQ ID NO: 167467 - DNA, 25 bp, probe
cagatttcatcatccgagcattgtc

SEQ ID NO: 167468 - DNA, 25 bp, probe
cagattgtatcatccccattactga

SEQ ID NO: 167469 - DNA, 25 bp, probe
cagattattctgtcaccacttaaat

SEQ ID NO: 167470 - DNA, 25 bp, probe
cagatttcctgatcccgatgttaga

SEQ ID NO: 167471 - DNA, 25 bp, probe
cagttactcgcttccatttttatga

SEQ ID NO: 167472 - DNA, 25 bp, probe
cagttctctagcataatttgtattg

SEQ ID NO: 167473 - DNA, 25 bp, probe
cagttgttgccaggaatttgctttg

SEQ ID NO: 167474 - DNA, 25 bp, probe
cagtcttgtcaatgcaattgtctct

SEQ ID NO: 167475 - DNA, 25 bp, probe
cagttattctgagcaaggttctatg

SEQ ID NO: 167476 - DNA, 25 bp, probe
cagtcggggacctatggtgtctatg

SEQ ID NO: 167477 - DNA, 25 bp, probe
cagtggggccatgattggtttctag

SEQ ID NO: 167478 - DNA, 25 bp, probe
cagggcctgactgtatttttcatcc

SEQ ID NO: 167479 - DNA, 25 bp, probe
cagtgacctaccttaaaacaacaca

SEQ ID NO: 167480 - DNA, 25 bp, probe
cagtaactcactttaaaacctctct

SEQ ID NO: 167481 - DNA, 25 bp, probe
cagattaccagttataggaacaatt

SEQ ID NO: 167482 - DNA, 25 bp, probe
cagattccccatcaacaaacacttg

SEQ ID NO: 167483 - DNA, 25 bp, probe
cagttctacttatgacacctcactt

SEQ ID NO: 167484 - DNA, 25 bp, probe
cagttctacttatgacacctcactt

SEQ ID NO: 167485 - DNA, 25 bp, probe
cagtatttattatcctgcaccacct

SEQ ID NO: 167486 - DNA, 25 bp, probe
cagttattttaagaacacagactta

SEQ ID NO: 167487 - DNA, 25 bp, probe
cagtttctcttccatcaagaaaact

SEQ ID NO: 167488 - DNA, 25 bp, probe
cagatgtcccttgatgcacagagaa

SEQ ID NO: 167489 - DNA, 25 bp, probe
cagtttctcttggcagcatcagctg

SEQ ID NO: 167490 - DNA, 25 bp, probe
cagattttctgcagcaagcactgtc

SEQ ID NO: 167491 - DNA, 25 bp, probe
cagatccagttcatcaagctcttcg

SEQ ID NO: 167492 - DNA, 25 bp, probe
cagattcagcttttcaaattgtcaa

SEQ ID NO: 167493 - DNA, 25 bp, probe
cagattcagcttttcaaattgtcaa

SEQ ID NO: 167494 - DNA, 25 bp, probe
cagtctcagattgatgaaattgacc

SEQ ID NO: 167495 - DNA, 25 bp, probe
cagtctcagattgatgaaattgacc

SEQ ID NO: 167496 - DNA, 25 bp, probe
cagtctgtattgtatggttttcctt

SEQ ID NO: 167497 - DNA, 25 bp, probe
catgtttagtgaccagaatttcctg

SEQ ID NO: 167498 - DNA, 25 bp, probe
catgcttaattattctgaagggccg

SEQ ID NO: 167499 - DNA, 25 bp, probe
cagtcgatgactttgaaatcgggcg

SEQ ID NO: 167500 - DNA, 25 bp, probe
cagtcattactagtacctctgcggg

SEQ ID NO: 167501 - DNA, 25 bp, probe
cagtctctacaagtagccctgctgg

SEQ ID NO: 167502 - DNA, 25 bp, probe
cagttgctgataaagaggccattgc

SEQ ID NO: 167503 - DNA, 25 bp, probe
cagttgctgataaagaggccattgc

SEQ ID NO: 167504 - DNA, 25 bp, probe
cagtatgtgtcaactgagagtcata

SEQ ID NO: 167505 - DNA, 25 bp, probe
cagtatggctcaaccagccatctac

SEQ ID NO: 167506 - DNA, 25 bp, probe
cagttagctcatacagtgcctttga

SEQ ID NO: 167507 - DNA, 25 bp, probe
cagaggagtcactttgcatcttgtg

SEQ ID NO: 167508 - DNA, 25 bp, probe
cagaggtgacatttgacttttttcc

SEQ ID NO: 167509 - DNA, 25 bp, probe
cagaggctactcttgacttagacct

SEQ ID NO: 167510 - DNA, 25 bp, probe
catgggtgaagacacctacccctac

SEQ ID NO: 167511 - DNA, 25 bp, probe
cagaggctgaagatcacctacagtc

SEQ ID NO: 167512 - DNA, 25 bp, probe
cagatcggaagtaactgctccctcc

SEQ ID NO: 167513 - DNA, 25 bp, probe
cagtcaccacagctgacttttcgct

SEQ ID NO: 167514 - DNA, 25 bp, probe
cagtcccagatgagcctctattttc

SEQ ID NO: 167515 - DNA, 25 bp, probe
cagtcccagtgaagtgccaggtttg

SEQ ID NO: 167516 - DNA, 25 bp, probe
cagtcggcaaaaggcgcggtgtggc

SEQ ID NO: 167517 - DNA, 25 bp, probe
cagtaagcgcacaggccggagtgtg

SEQ ID NO: 167518 - DNA, 25 bp, probe
cagtgaaccgaagcgcaatgtggtg

SEQ ID NO: 167519 - DNA, 25 bp, probe
cagggacacccaaggatatgtcttc

SEQ ID NO: 167520 - DNA, 25 bp, probe
cagaggacatccttggggagattgc

SEQ ID NO: 167521 - DNA, 25 bp, probe
cagatggaatccgagcagggcgact

SEQ ID NO: 167522 - DNA, 25 bp, probe
cagaggcagacaggcgctggacaga

SEQ ID NO: 167523 - DNA, 25 bp, probe
cagaggccaatgctcagagaagtac

SEQ ID NO: 167524 - DNA, 25 bp, probe
cagatgtgctaccagatcagcaggg

SEQ ID NO: 167525 - DNA, 25 bp, probe
cagatgtggatcagcaagcaggagt

SEQ ID NO: 167526 - DNA, 25 bp, probe
cagaggatgctgctacacaggagaa

SEQ ID NO: 167527 - DNA, 25 bp, probe
cagattgactcctaccatggagctg

SEQ ID NO: 167528 - DNA, 25 bp, probe
cagatgtatctgcttccatctgcct

SEQ ID NO: 167529 - DNA, 25 bp, probe
cagatgatatgtgctgcctttgctt

SEQ ID NO: 167530 - DNA, 25 bp, probe
cagatagatgcaggtccattctgca

SEQ ID NO: 167531 - DNA, 25 bp, probe
cagtgcatgattggcctatacataa

SEQ ID NO: 167532 - DNA, 25 bp, probe
cagatgcagactgtgattgaagaag

SEQ ID NO: 167533 - DNA, 25 bp, probe
cagatcagactgatgatttggctaa

SEQ ID NO: 167534 - DNA, 25 bp, probe
cagtgcctgctgaatgatttccaaa

SEQ ID NO: 167535 - DNA, 25 bp, probe
cagtctctgtgtaatcatctgaaga

SEQ ID NO: 167536 - DNA, 25 bp, probe
cagtctttgtcaatgctctaacaaa

SEQ ID NO: 167537 - DNA, 25 bp, probe
cagtgcttacttaccttactaactt

SEQ ID NO: 167538 - DNA, 25 bp, probe
caggctttccatcacttattacaat

SEQ ID NO: 167539 - DNA, 25 bp, probe
caggctttccatcacttattacaat

SEQ ID NO: 167540 - DNA, 25 bp, probe
caggccccgcaaaagttgaaacatg

SEQ ID NO: 167541 - DNA, 25 bp, probe
caggcccctttatctgtacatagtg

SEQ ID NO: 167542 - DNA, 25 bp, probe
cagtgcctgcctatgaaatttcaac

SEQ ID NO: 167543 - DNA, 25 bp, probe
cagtctccattttgcaaatgctgct

SEQ ID NO: 167544 - DNA, 25 bp, probe
cagttccttttagactcaccagaga

SEQ ID NO: 167545 - DNA, 25 bp, probe
caggctggttttaacctacgcaaag

SEQ ID NO: 167546 - DNA, 25 bp, probe
cgggccgtggtatccatgacggtga

SEQ ID NO: 167547 - DNA, 25 bp, probe
cagggccgtgtgggacgagtggagg

SEQ ID NO: 167548 - DNA, 25 bp, probe
cagggctgcgggagaataagtggga

SEQ ID NO: 167549 - DNA, 25 bp, probe
caggtgctggggctaaagtttgggg

SEQ ID NO: 167550 - DNA, 25 bp, probe
catggatgggcgagtcaacgggggc

SEQ ID NO: 167551 - DNA, 25 bp, probe
cagaggagcggctgtacacgggccg

SEQ ID NO: 167552 - DNA, 25 bp, probe
cagaggacagtgctggaggcgggcc

SEQ ID NO: 167553 - DNA, 25 bp, probe
cagatgggcatatgtgtcagtgggg

SEQ ID NO: 167554 - DNA, 25 bp, probe
cagaggcctcagtgtagtggaagtg

SEQ ID NO: 167555 - DNA, 25 bp, probe
cagggccgagtacaaggccagtggc

SEQ ID NO: 167556 - DNA, 25 bp, probe
cagggcccaggtaaaccaagctgcg

SEQ ID NO: 167557 - DNA, 25 bp, probe
cagaggctccggatggagcctgggg

SEQ ID NO: 167558 - DNA, 25 bp, probe
cagaggccctgatccgagaggtggc

SEQ ID NO: 167559 - DNA, 25 bp, probe
cagaggccctgatccgagaggtggc

SEQ ID NO: 167560 - DNA, 25 bp, probe
cagaggacccccactgggggcatcg

SEQ ID NO: 167561 - DNA, 25 bp, probe
caggagacccccaaggaggacaaag

SEQ ID NO: 167562 - DNA, 25 bp, probe
cagtgacccgccagggacatacaaa

SEQ ID NO: 167563 - DNA, 25 bp, probe
cagtgacccgccagggacatacaaa

SEQ ID NO: 167564 - DNA, 25 bp, probe
cagatgacggctgctcgaagaacaa

SEQ ID NO: 167565 - DNA, 25 bp, probe
cagatggaggctgctcagtcgggag

SEQ ID NO: 167566 - DNA, 25 bp, probe
cagattgccggcttcgtgaaggagt

SEQ ID NO: 167567 - DNA, 25 bp, probe
cagatctcggtgaacgtggaggact

SEQ ID NO: 167568 - DNA, 25 bp, probe
cagatccggctgcaggtggagcggc

SEQ ID NO: 167569 - DNA, 25 bp, probe
cagatggcacaggggcgtgtggcgg

SEQ ID NO: 167570 - DNA, 25 bp, probe
cagatgatgcgggagtgctggtacc

SEQ ID NO: 167571 - DNA, 25 bp, probe
cagatgatcctggagtgtggaggca

SEQ ID NO: 167572 - DNA, 25 bp, probe
cagtctactgcaatctgtgcgagtc

SEQ ID NO: 167573 - DNA, 25 bp, probe
cagatgctcctcactgcagtggatt

SEQ ID NO: 167574 - DNA, 25 bp, probe
cagatgctcctcactgcagtggatt

SEQ ID NO: 167575 - DNA, 25 bp, probe
caggcccttaggctctatttttcat

SEQ ID NO: 167576 - DNA, 25 bp, probe
cagtgccctgtagagttcctagatt

SEQ ID NO: 167577 - DNA, 25 bp, probe
cagtctccagggtcagtccctggat

SEQ ID NO: 167578 - DNA, 25 bp, probe
cagtcatacaggacacatcccactc

SEQ ID NO: 167579 - DNA, 25 bp, probe
cagtcacatgggaacatccacaatg

SEQ ID NO: 167580 - DNA, 25 bp, probe
cagtccttcagtaacaccagtgtaa

SEQ ID NO: 167581 - DNA, 25 bp, probe
cagtcttgccttacacaaaggggat

SEQ ID NO: 167582 - DNA, 25 bp, probe
cagtcgttctggaccaaaggaacat

SEQ ID NO: 167583 - DNA, 25 bp, probe
cagtcgtcttctgccacaatgacat

SEQ ID NO: 167584 - DNA, 25 bp, probe
cagtcagtgctgttgcctctaatat

SEQ ID NO: 167585 - DNA, 25 bp, probe
cagatgaagctgtccctcagatcat

SEQ ID NO: 167586 - DNA, 25 bp, probe
cagtaagtgccttggaacaatattg

SEQ ID NO: 167587 - DNA, 25 bp, probe
cagtagcgtcttaaacagcagtatt

SEQ ID NO: 167588 - DNA, 25 bp, probe
cagatgacagtgtttaaccatggtc

SEQ ID NO: 167589 - DNA, 25 bp, probe
cagattggcaaaatcaacactggtc

SEQ ID NO: 167590 - DNA, 25 bp, probe
cagatctggaagccaaacaccggca

SEQ ID NO: 167591 - DNA, 25 bp, probe
cagatgcggcagacatacaacacct

SEQ ID NO: 167592 - DNA, 25 bp, probe
cagtaggaatcattgcagcaagtgc

SEQ ID NO: 167593 - DNA, 25 bp, probe
cagatggtgaaattggaagccgaga

SEQ ID NO: 167594 - DNA, 25 bp, probe
caggggtaattattagcgtggcttt

SEQ ID NO: 167595 - DNA, 25 bp, probe
cagggcttacctgtacactgacttg

SEQ ID NO: 167596 - DNA, 25 bp, probe
cagggcttacctgtacactgacttg

SEQ ID NO: 167597 - DNA, 25 bp, probe
cagggcctgatggggaacctaccat

SEQ ID NO: 167598 - DNA, 25 bp, probe
cagaggccgatgagcgagagtccca

SEQ ID NO: 167599 - DNA, 25 bp, probe
cagatggccaaaagctgggcaccct

SEQ ID NO: 167600 - DNA, 25 bp, probe
cagatggccaaaagctgggcaccct

SEQ ID NO: 167601 - DNA, 25 bp, probe
cagatggccacaaactggtcatagg

SEQ ID NO: 167602 - DNA, 25 bp, probe
cagatggccacaaactggtcatagg

SEQ ID NO: 167603 - DNA, 25 bp, probe
cagtactgcacaaattcctaagggg

SEQ ID NO: 167604 - DNA, 25 bp, probe
cagtactgccgtctcaagaagtgct

SEQ ID NO: 167605 - DNA, 25 bp, probe
cagtaccactctgtgcacggagttg

SEQ ID NO: 167606 - DNA, 25 bp, probe
cagttctcacccatgccagggaatg

SEQ ID NO: 167607 - DNA, 25 bp, probe
cagttctccactgtgaagggcgtca

SEQ ID NO: 167608 - DNA, 25 bp, probe
cagtacattgacgggcagggccggc

SEQ ID NO: 167609 - DNA, 25 bp, probe
cagtacattgacgggcagggccggc

SEQ ID NO: 167610 - DNA, 25 bp, probe
cagtacattgacgggcagggccggc

SEQ ID NO: 167611 - DNA, 25 bp, probe
cagtacattgacgggcagggccggc

SEQ ID NO: 167612 - DNA, 25 bp, probe
cagtagactggtgggcaatgggcgt

SEQ ID NO: 167613 - DNA, 25 bp, probe
cagatacctgtgaggactggttgtc

SEQ ID NO: 167614 - DNA, 25 bp, probe
cagatattggagagaacacattatg

SEQ ID NO: 167615 - DNA, 25 bp, probe
cagtttcgaaactgcatcttgcagc

SEQ ID NO: 167616 - DNA, 25 bp, probe
cagtttcgaaactgcatcttgcagc

SEQ ID NO: 167617 - DNA, 25 bp, probe
cagtattcctagaagaactggagct

SEQ ID NO: 167618 - DNA, 25 bp, probe
cagtacccagagacctacagggcct

SEQ ID NO: 167619 - DNA, 25 bp, probe
cagattccaaggacctcacgatggt

SEQ ID NO: 167620 - DNA, 25 bp, probe
cagattacacaaccttcacgacagt

SEQ ID NO: 167621 - DNA, 25 bp, probe
cagatgtagagactccttccgaaga

SEQ ID NO: 167622 - DNA, 25 bp, probe
cagattcggacaatcgaccgaaagc

SEQ ID NO: 167623 - DNA, 25 bp, probe
cagggcaggaaacgccaagaactgc

SEQ ID NO: 167624 - DNA, 25 bp, probe
cagtgagcaggatgtctgtaaaatt

SEQ ID NO: 167625 - DNA, 25 bp, probe
cagatgcagcagcagtctttagcca

SEQ ID NO: 167626 - DNA, 25 bp, probe
cagtgcagatgaagagtttaccatg

SEQ ID NO: 167627 - DNA, 25 bp, probe
cagtgcagtgatacatgtactccag

SEQ ID NO: 167628 - DNA, 25 bp, probe
cagatctgcacaattgatgtctaca

SEQ ID NO: 167629 - DNA, 25 bp, probe
cagatgctgagacacatgtctccgc

SEQ ID NO: 167630 - DNA, 25 bp, probe
cagatgctgatacacagcacacagg

SEQ ID NO: 167631 - DNA, 25 bp, probe
cagtcagtatctgcagaacagtaag

SEQ ID NO: 167632 - DNA, 25 bp, probe
cagtcatgactagcagaattgtggg

SEQ ID NO: 167633 - DNA, 25 bp, probe
cagtcatgatgctaccagaccctaa

SEQ ID NO: 167634 - DNA, 25 bp, probe
cagtagcatatattcgatccaatca

SEQ ID NO: 167635 - DNA, 25 bp, probe
cagtgacatgcttaagtccatgcat

SEQ ID NO: 167636 - DNA, 25 bp, probe
cagtacatggattcttcacttgtta

SEQ ID NO: 167637 - DNA, 25 bp, probe
cagtataagtatctcattcagtatt

SEQ ID NO: 167638 - DNA, 25 bp, probe
cagattaattacttcttctgtgaca

SEQ ID NO: 167639 - DNA, 25 bp, probe
cagttaccagaatcttgctgctaaa

SEQ ID NO: 167640 - DNA, 25 bp, probe
cagtgtactggaaactttccatttt

SEQ ID NO: 167641 - DNA, 25 bp, probe
cagttcactgttcagtttagcatta

SEQ ID NO: 167642 - DNA, 25 bp, probe
caggtcaagttgtcaggttatttat

SEQ ID NO: 167643 - DNA, 25 bp, probe
cagatgttacttccaagattcttaa

SEQ ID NO: 167644 - DNA, 25 bp, probe
cagtgtacctacggaaatcctaact

SEQ ID NO: 167645 - DNA, 25 bp, probe
cagttgtgcacttttacaagccgca

SEQ ID NO: 167646 - DNA, 25 bp, probe
cagggatcagtagttcctacccata

SEQ ID NO: 167647 - DNA, 25 bp, probe
cagttatcatactttcctattccca

SEQ ID NO: 167648 - DNA, 25 bp, probe
cagtttcattttcagcatagtagcc

SEQ ID NO: 167649 - DNA, 25 bp, probe
cagtttcactttcacatagatgtcc

SEQ ID NO: 167650 - DNA, 25 bp, probe
cgttacagctttcacagagttaaaa

SEQ ID NO: 167651 - DNA, 25 bp, probe
cagttacacggaaagcatggttcaa

SEQ ID NO: 167652 - DNA, 25 bp, probe
cagttgacctggctattggttctga

SEQ ID NO: 167653 - DNA, 25 bp, probe
cagggaactgagctaatactttttt

SEQ ID NO: 167654 - DNA, 25 bp, probe
cagggaactgagctaatactttttt

SEQ ID NO: 167655 - DNA, 25 bp, probe
cagtggaacgtgccggaactttttg

SEQ ID NO: 167656 - DNA, 25 bp, probe
cgggaaaggtgtcagtccgttctgg

SEQ ID NO: 167657 - DNA, 25 bp, probe
cagggcaaagggtgtgtctcgtcct

SEQ ID NO: 167658 - DNA, 25 bp, probe
caggaactgtgggttgtgttggtcc

SEQ ID NO: 167659 - DNA, 25 bp, probe
ccgaactggcccttttaggcacagg

SEQ ID NO: 167660 - DNA, 25 bp, probe
cagatccggctgcaggtggagcggc

SEQ ID NO: 167661 - DNA, 25 bp, probe
cagatccggctgcaggtggagcggc

SEQ ID NO: 167662 - DNA, 25 bp, probe
cagttcggggaggtgtggatggggt

SEQ ID NO: 167663 - DNA, 25 bp, probe
cagatcatcgggggccgggaggtga

SEQ ID NO: 167664 - DNA, 25 bp, probe
cagtacgggtgaccgagtgcagcag

SEQ ID NO: 167665 - DNA, 25 bp, probe
cagttcagagagtgacgtgtggagc

SEQ ID NO: 167666 - DNA, 25 bp, probe
cagatccagatgttacaacgggcag

SEQ ID NO: 167667 - DNA, 25 bp, probe
cagatccacagccacagaacgggcg

SEQ ID NO: 167668 - DNA, 25 bp, probe
cagtccacaagttgaagagggcgat

SEQ ID NO: 167669 - DNA, 25 bp, probe
cagtccacaagttgaagagggcgat

SEQ ID NO: 167670 - DNA, 25 bp, probe
cagtcagacaagaatcctgggagca

SEQ ID NO: 167671 - DNA, 25 bp, probe
cagtcaacacggtccttgcgactgt

SEQ ID NO: 167672 - DNA, 25 bp, probe
cagtccccaggagatgtggaactcg

SEQ ID NO: 167673 - DNA, 25 bp, probe
cagtcctagcaagaagcgagaattc

SEQ ID NO: 167674 - DNA, 25 bp, probe
cagttccatgcaacgtcctgaggac

SEQ ID NO: 167675 - DNA, 25 bp, probe
cagttccatgcaacgtcctgaggac

SEQ ID NO: 167676 - DNA, 25 bp, probe
cagtttacaacaccctgaagaaaat

SEQ ID NO: 167677 - DNA, 25 bp, probe
cagtttgaagagaacacatgaagaa

SEQ ID NO: 167678 - DNA, 25 bp, probe
cagtcgccaagtggaccatcgatga

SEQ ID NO: 167679 - DNA, 25 bp, probe
cagtctggaagcttgtctgctctat

SEQ ID NO: 167680 - DNA, 25 bp, probe
cagatcgagtccaaggcagcctatg

SEQ ID NO: 167681 - DNA, 25 bp, probe
cagatcgagtccaaggcagcctatg

SEQ ID NO: 167682 - DNA, 25 bp, probe
cagttgagctcaggaaggttatgtc

SEQ ID NO: 167683 - DNA, 25 bp, probe
cagttactggttggtgttcttccca

SEQ ID NO: 167684 - DNA, 25 bp, probe
cagttactgagaattgttgtgcttt

SEQ ID NO: 167685 - DNA, 25 bp, probe
cagttactgagaattgttgtgcttt

SEQ ID NO: 167686 - DNA, 25 bp, probe
cagttcacagagattgagggcagaa

SEQ ID NO: 167687 - DNA, 25 bp, probe
cagattacatgtatctgaggcagct

SEQ ID NO: 167688 - DNA, 25 bp, probe
cagtctagcttttcgggcagcatgg

SEQ ID NO: 167689 - DNA, 25 bp, probe
cagtgggtttatctgtgtgggtact

SEQ ID NO: 167690 - DNA, 25 bp, probe
cggcctgttcctgagtttgagtagg

SEQ ID NO: 167691 - DNA, 25 bp, probe
cggtcgcctccatggtttggaagga

SEQ ID NO: 167692 - DNA, 25 bp, probe
ctggtggccacgaggttaaagaagc

SEQ ID NO: 167693 - DNA, 25 bp, probe
cagttggtcaagactttgtaaagaa

SEQ ID NO: 167694 - DNA, 25 bp, probe
cagttgttaaataaagcttacagaa

SEQ ID NO: 167695 - DNA, 25 bp, probe
cagatttctaaattacatgccataa

SEQ ID NO: 167696 - DNA, 25 bp, probe
cagattatacagctctaaggataag

SEQ ID NO: 167697 - DNA, 25 bp, probe
cagttggatcagtttgatagaatca

SEQ ID NO: 167698 - DNA, 25 bp, probe
cagattattgcaacatttaacctga

SEQ ID NO: 167699 - DNA, 25 bp, probe
cagtttgctgcagcatttacatctg

SEQ ID NO: 167700 - DNA, 25 bp, probe
cagtttgccagtcttgcaatcaggt

SEQ ID NO: 167701 - DNA, 25 bp, probe
cagtgttcacagggccgcagaaagc

SEQ ID NO: 167702 - DNA, 25 bp, probe
cagattactgcacgggcaacaaagg

SEQ ID NO: 167703 - DNA, 25 bp, probe
cagatcaaccagcggcaggaaagtc

SEQ ID NO: 167704 - DNA, 25 bp, probe
cagatcaaacatctggaaattacct

SEQ ID NO: 167705 - DNA, 25 bp, probe
cagatcacagattttggaacagcaa

SEQ ID NO: 167706 - DNA, 25 bp, probe
cagtcacaatgtattgcataatcaa

SEQ ID NO: 167707 - DNA, 25 bp, probe
cagtccagatgttcttcgtaataaa

SEQ ID NO: 167708 - DNA, 25 bp, probe
cagtcacaatctacttttcttaaac

SEQ ID NO: 167709 - DNA, 25 bp, probe
cagtaaatccttacaccttcgcaga

SEQ ID NO: 167710 - DNA, 25 bp, probe
cagtttaccttaatgccttagcaga

SEQ ID NO: 167711 - DNA, 25 bp, probe
cagtatggaccccttccaataagcc

SEQ ID NO: 167712 - DNA, 25 bp, probe
cagtattgctgtccgcttctagaaa

SEQ ID NO: 167713 - DNA, 25 bp, probe
gaatcattcgtctggtccgagtatt

SEQ ID NO: 167714 - DNA, 25 bp, probe
cagatatgtccttaggtcctggtct

SEQ ID NO: 167715 - DNA, 25 bp, probe
cagatatgccaccaaggccacatcg

SEQ ID NO: 167716 - DNA, 25 bp, probe
cagtgcagctgaggcactggcccac

SEQ ID NO: 167717 - DNA, 25 bp, probe
cagtgcagctgaggcactggcccac

SEQ ID NO: 167718 - DNA, 25 bp, probe
cagtcagctggaggtactgcagccc

SEQ ID NO: 167719 - DNA, 25 bp, probe
cagatcatgcgagggtaccggctgc

SEQ ID NO: 167720 - DNA, 25 bp, probe
cagatcatgcgagggtaccggctgc

SEQ ID NO: 167721 - DNA, 25 bp, probe
cagatcatgcgagggtaccggctgc

SEQ ID NO: 167722 - DNA, 25 bp, probe
cagtatgtggggacacccatggcca

SEQ ID NO: 167723 - DNA, 25 bp, probe
cagatatgggcggcctcaagctggc

SEQ ID NO: 167724 - DNA, 25 bp, probe
cagtcttgagctgtccacatgcatg

SEQ ID NO: 167725 - DNA, 25 bp, probe
cagtcacggcttactgcaagagagg

SEQ ID NO: 167726 - DNA, 25 bp, probe
cagtgtcgtcctaccagaggggatt

SEQ ID NO: 167727 - DNA, 25 bp, probe
cagattcagttccacacggggtttg

SEQ ID NO: 167728 - DNA, 25 bp, probe
cagattcagttccacacggggtttg

SEQ ID NO: 167729 - DNA, 25 bp, probe
catggtcagttccccagtgggaatg

SEQ ID NO: 167730 - DNA, 25 bp, probe
cagtccagtggacccaggaagaagg

SEQ ID NO: 167731 - DNA, 25 bp, probe
cagtccaggccaaagaggaagcatt

SEQ ID NO: 167732 - DNA, 25 bp, probe
cagtcagaggctgatgccggaactg

SEQ ID NO: 167733 - DNA, 25 bp, probe
cagtcaggaatccacatggtgtaat

SEQ ID NO: 167734 - DNA, 25 bp, probe
cagtgccataaaccttgttacatat

SEQ ID NO: 167735 - DNA, 25 bp, probe
cagattctcaaaccagaggctaaga

SEQ ID NO: 167736 - DNA, 25 bp, probe
cagatcactctcaagaaggaccaga

SEQ ID NO: 167737 - DNA, 25 bp, probe
cagatctatcttaagagtgaccagg

SEQ ID NO: 167738 - DNA, 25 bp, probe
catatctacttggggacagccacga

SEQ ID NO: 167739 - DNA, 25 bp, probe
cagttacttgagtgtcactcagcaa

SEQ ID NO: 167740 - DNA, 25 bp, probe
cagttacttgcctgcattccaaaat

SEQ ID NO: 167741 - DNA, 25 bp, probe
cagttacttgcctgcattccaaaat

SEQ ID NO: 167742 - DNA, 25 bp, probe
cagtgtttgaacagcattgtaaaat

SEQ ID NO: 167743 - DNA, 25 bp, probe
cagtttctgtcctagcaagtaagaa

SEQ ID NO: 167744 - DNA, 25 bp, probe
cagtttatgtgtcatcaatgtacat

SEQ ID NO: 167745 - DNA, 25 bp, probe
cagtgcttgttgccctagcattaat

SEQ ID NO: 167746 - DNA, 25 bp, probe
cagtgcttgattccaaccagacacg

SEQ ID NO: 167747 - DNA, 25 bp, probe
cagtattattcccgacgacacatat

SEQ ID NO: 167748 - DNA, 25 bp, probe
cagtatggttcttcagtcgatatat

SEQ ID NO: 167749 - DNA, 25 bp, probe
cagtagcgttttagtcgttttatgt

SEQ ID NO: 167750 - DNA, 25 bp, probe
cagtagcgttttagtcgttttatgt

SEQ ID NO: 167751 - DNA, 25 bp, probe
cagtagggatttttcgtctattgta

SEQ ID NO: 167752 - DNA, 25 bp, probe
cagttggttgttctggccaacaata

SEQ ID NO: 167753 - DNA, 25 bp, probe
cagttggttttgcatgtctgcatga

SEQ ID NO: 167754 - DNA, 25 bp, probe
cagtttcagtattgagatggctcag

SEQ ID NO: 167755 - DNA, 25 bp, probe
cagtcttcaggatgtgcttatgcag

SEQ ID NO: 167756 - DNA, 25 bp, probe
cagtagccaggatgactattgagga

SEQ ID NO: 167757 - DNA, 25 bp, probe
cagtccgaggctgcttttgggagga

SEQ ID NO: 167758 - DNA, 25 bp, probe
cagtccgaggctgcttttgggagga

SEQ ID NO: 167759 - DNA, 25 bp, probe
cagtgcccagagggagtttgcgggg

SEQ ID NO: 167760 - DNA, 25 bp, probe
cagtctctactgggacatgttaggc

SEQ ID NO: 167761 - DNA, 25 bp, probe
cagttgtatgctgtggtttcagagg

SEQ ID NO: 167762 - DNA, 25 bp, probe
cagggatgtgtctggtttcctaggt

SEQ ID NO: 167763 - DNA, 25 bp, probe
cagggatgtgtctggtttcctaggt

SEQ ID NO: 167764 - DNA, 25 bp, probe
caggggagtctgcttgtcttagatg

SEQ ID NO: 167765 - DNA, 25 bp, probe
cagggaagcctccaaacttcaagaa

SEQ ID NO: 167766 - DNA, 25 bp, probe
cagggcgggatcctgaacctgaaca

SEQ ID NO: 167767 - DNA, 25 bp, probe
cagggtgtggtagaacactttcaaa

SEQ ID NO: 167768 - DNA, 25 bp, probe
cagggttcaatagaaatcctcaatt

SEQ ID NO: 167769 - DNA, 25 bp, probe
cagggtatcatcagaaccaaaaata

SEQ ID NO: 167770 - DNA, 25 bp, probe
caggtcgccatcataaacaactcta

SEQ ID NO: 167771 - DNA, 25 bp, probe
cagttcctcatgctcggaaacctac

SEQ ID NO: 167772 - DNA, 25 bp, probe
cagttgcactattctgagggaaaat

SEQ ID NO: 167773 - DNA, 25 bp, probe
cagtttgctgctttgtggtgcacaa

SEQ ID NO: 167774 - DNA, 25 bp, probe
cagtcattgagtctcgagtcactag

SEQ ID NO: 167775 - DNA, 25 bp, probe
cagtcctggttgtctgaacccaggc

SEQ ID NO: 167776 - DNA, 25 bp, probe
cagttctggatggtgtgccttccag

SEQ ID NO: 167777 - DNA, 25 bp, probe
cagttgctgcgaggtctgtcttaca

SEQ ID NO: 167778 - DNA, 25 bp, probe
cagttgctgcgaggtctgtcttaca

SEQ ID NO: 167779 - DNA, 25 bp, probe
cagatatccatgcctgttttacaga

SEQ ID NO: 167780 - DNA, 25 bp, probe
cagtctcacatactgtcttgtactg

SEQ ID NO: 167781 - DNA, 25 bp, probe
cagtccagaagcatcaggggctccg

SEQ ID NO: 167782 - DNA, 25 bp, probe
cagtccatgggggcctgaggctcct

SEQ ID NO: 167783 - DNA, 25 bp, probe
cagtcacagggggcctgtgtcacag

SEQ ID NO: 167784 - DNA, 25 bp, probe
cagtacctgggctctgtttcagaga

SEQ ID NO: 167785 - DNA, 25 bp, probe
cagtacctgggctctgtttcagaga

SEQ ID NO: 167786 - DNA, 25 bp, probe
cagtaacagggcagttcattccaaa

SEQ ID NO: 167787 - DNA, 25 bp, probe
cagtaacagggcagtatcgcttcct

SEQ ID NO: 167788 - DNA, 25 bp, probe
cagtaagcaggacaaatcccggctg

SEQ ID NO: 167789 - DNA, 25 bp, probe
cagtagaagcggtagaggcccggga

SEQ ID NO: 167790 - DNA, 25 bp, probe
cagtgagaacggggggacggggatg

SEQ ID NO: 167791 - DNA, 25 bp, probe
cagtgagaacggggggacggggatg

SEQ ID NO: 167792 - DNA, 25 bp, probe
caggaggaggtcgtgggacggggag

SEQ ID NO: 167793 - DNA, 25 bp, probe
caggacgggcccagaggctggggga

SEQ ID NO: 167794 - DNA, 25 bp, probe
caggacgggcccaaagttatttatg

SEQ ID NO: 167795 - DNA, 25 bp, probe
caggaaaaaccaccagttacttgag

SEQ ID NO: 167796 - DNA, 25 bp, probe
caggaaaaaccaacaggtttatctg

SEQ ID NO: 167797 - DNA, 25 bp, probe
caggataagaacttccaggttacct

SEQ ID NO: 167798 - DNA, 25 bp, probe
cagtgataagatcatccgactttat

SEQ ID NO: 167799 - DNA, 25 bp, probe
cagtgatttatttcctgggttcata

SEQ ID NO: 167800 - DNA, 25 bp, probe
cagtgttgtagtttctgatacttta

SEQ ID NO: 167801 - DNA, 25 bp, probe
cagttgatatattaattgatgcctt

SEQ ID NO: 167802 - DNA, 25 bp, probe
cagttgcatcctacaatttgccact

SEQ ID NO: 167803 - DNA, 25 bp, probe
cagtcatgatacctacacttccatc

SEQ ID NO: 167804 - DNA, 25 bp, probe
catgtcacaacaataacctccatag

SEQ ID NO: 167805 - DNA, 25 bp, probe
catgtacaaaagtaccatagcacag

SEQ ID NO: 167806 - DNA, 25 bp, probe
cagtctcagcaagacatcctacaag

SEQ ID NO: 167807 - DNA, 25 bp, probe
cagtctaattgttcatcctaattgt

SEQ ID NO: 167808 - DNA, 25 bp, probe
cagtctggaatttcaagattttgtg

SEQ ID NO: 167809 - DNA, 25 bp, probe
cagtctggaatttcaagattttgtg

SEQ ID NO: 167810 - DNA, 25 bp, probe
cagtagtgaatcccctcattttgtg

SEQ ID NO: 167811 - DNA, 25 bp, probe
cagtgaggaaagcgtctctgagtgt

SEQ ID NO: 167812 - DNA, 25 bp, probe
cagtaggataagccactctgtccct

SEQ ID NO: 167813 - DNA, 25 bp, probe
cagtagtatgaaggccctgctccag

SEQ ID NO: 167814 - DNA, 25 bp, probe
cagtagtatgaaggccctgctccag

SEQ ID NO: 167815 - DNA, 25 bp, probe
cagggctttggagtctggcccatgc

SEQ ID NO: 167816 - DNA, 25 bp, probe
tcagggttagtaactgtcccttcct

SEQ ID NO: 167817 - DNA, 25 bp, probe
tcagggttagtaactgtcccttcct

SEQ ID NO: 167818 - DNA, 25 bp, probe
cagggtttatggtcccatacttcct

SEQ ID NO: 167819 - DNA, 25 bp, probe
caggtgtaattggtccttattccct

SEQ ID NO: 167820 - DNA, 25 bp, probe
cagggtagattacctcggataccac

SEQ ID NO: 167821 - DNA, 25 bp, probe
caggggacaggtacctggtgtgcca

SEQ ID NO: 167822 - DNA, 25 bp, probe
caggggacaggtacctggtgtgcca

SEQ ID NO: 167823 - DNA, 25 bp, probe
caggtggacctgtgcactcagtaaa

SEQ ID NO: 167824 - DNA, 25 bp, probe
caggtggacctgtgcactcagtaaa

SEQ ID NO: 167825 - DNA, 25 bp, probe
ttggtgagtcccagaccttaaaaat

SEQ ID NO: 167826 - DNA, 25 bp, probe
cgaggagccggcagtccttaaggaa

SEQ ID NO: 167827 - DNA, 25 bp, probe
cgggtccttcattgtcctgtaaggg

SEQ ID NO: 167828 - DNA, 25 bp, probe
cgggtccttcattgtcctgtaaggg

SEQ ID NO: 167829 - DNA, 25 bp, probe
cggaaagcttatggccctaaagtcg

SEQ ID NO: 167830 - DNA, 25 bp, probe
cagtgaaacttgaaccgggaagtgg

SEQ ID NO: 167831 - DNA, 25 bp, probe
cagtgtagagaaaaccgtgaagaga

SEQ ID NO: 167832 - DNA, 25 bp, probe
cagtccactgaaacaccctgagtga

SEQ ID NO: 167833 - DNA, 25 bp, probe
cagtctcctatacccagcagaggga

SEQ ID NO: 167834 - DNA, 25 bp, probe
cagtatctcttacatcagtagcatt

SEQ ID NO: 167835 - DNA, 25 bp, probe
cagtatctcttatgactgtagtcat

SEQ ID NO: 167836 - DNA, 25 bp, probe
cagtgcagtttctaagcatgtagcc

SEQ ID NO: 167837 - DNA, 25 bp, probe
cagtatgttcaggataatggaggcc

SEQ ID NO: 167838 - DNA, 25 bp, probe
cagttggtccgaggggagcccaatg

SEQ ID NO: 167839 - DNA, 25 bp, probe
cagtgatggtgcggggaggaccggc

SEQ ID NO: 167840 - DNA, 25 bp, probe
cagtgatgacggaggagtagccggc

SEQ ID NO: 167841 - DNA, 25 bp, probe
cagttacactgcagtatgtcccaag

SEQ ID NO: 167842 - DNA, 25 bp, probe
cagtgaactgtttttgtgccaagaa

SEQ ID NO: 167843 - DNA, 25 bp, probe
cagtgaccttttttgccacatctga

SEQ ID NO: 167844 - DNA, 25 bp, probe
cagttctttattttcccttgtggat

SEQ ID NO: 167845 - DNA, 25 bp, probe
cagtttcaaatttaccttttgagag

SEQ ID NO: 167846 - DNA, 25 bp, probe
cattttacgaattcaccttccgaag

SEQ ID NO: 167847 - DNA, 25 bp, probe
cagtttaggatgtagcacctgcccc

SEQ ID NO: 167848 - DNA, 25 bp, probe
cagtttaggatgtagcacctgcccc

SEQ ID NO: 167849 - DNA, 25 bp, probe
cagtcacggagtgaatcctgccacc

SEQ ID NO: 167850 - DNA, 25 bp, probe
cagtcacggagtgaatcctgccacc

SEQ ID NO: 167851 - DNA, 25 bp, probe
cagtacgaatctgagatcctgccct

SEQ ID NO: 167852 - DNA, 25 bp, probe
cagtcaagaaactaagccgtccttt

SEQ ID NO: 167853 - DNA, 25 bp, probe
cagtaagcgaaagagccggcctgtg

SEQ ID NO: 167854 - DNA, 25 bp, probe
cagtaactgcaccaacgagctggcc

SEQ ID NO: 167855 - DNA, 25 bp, probe
cagttcctggtgaaggactgtggcg

SEQ ID NO: 167856 - DNA, 25 bp, probe
cagtctcatcggcaggaagctgtgg

SEQ ID NO: 167857 - DNA, 25 bp, probe
cagtcacagctgaaaagaacagtgt

SEQ ID NO: 167858 - DNA, 25 bp, probe
cagtcacttgtttgcagaagcaatt

SEQ ID NO: 167859 - DNA, 25 bp, probe
cagtgcaatctttcagcagcaacct

SEQ ID NO: 167860 - DNA, 25 bp, probe
cagtgcaatctttcagcagcaacct

SEQ ID NO: 167861 - DNA, 25 bp, probe
cagtcttccatgtcagagtcacctg

SEQ ID NO: 167862 - DNA, 25 bp, probe
cagtctgtgctatcagagcaaggcg

SEQ ID NO: 167863 - DNA, 25 bp, probe
cagtctggtatgtgaggcgtgcgtg

SEQ ID NO: 167864 - DNA, 25 bp, probe
cagtctggtatgtgaggcgtgcgtg

SEQ ID NO: 167865 - DNA, 25 bp, probe
cagtctggtgccagggccatcagag

SEQ ID NO: 167866 - DNA, 25 bp, probe
cagtctggtgccagggccatcagag

SEQ ID NO: 167867 - DNA, 25 bp, probe
cagtctcttggcagtgtccacagag

SEQ ID NO: 167868 - DNA, 25 bp, probe
cagtctcttggcagtgtccacagag

SEQ ID NO: 167869 - DNA, 25 bp, probe
cagtcatcggtgaggttaatgcact

SEQ ID NO: 167870 - DNA, 25 bp, probe
cagtcatcggtgaggttaatgcact

SEQ ID NO: 167871 - DNA, 25 bp, probe
cagtatcggccttgtgtagaatcac

SEQ ID NO: 167872 - DNA, 25 bp, probe
cagtatcggccttgtgtagaatcac

SEQ ID NO: 167873 - DNA, 25 bp, probe
cagttctgtccatgtgggagaccca

SEQ ID NO: 167874 - DNA, 25 bp, probe
cagtggctgatttgggggagaaaca

SEQ ID NO: 167875 - DNA, 25 bp, probe
cagtgccagatggatggcgaggaga

SEQ ID NO: 167876 - DNA, 25 bp, probe
cagtccagccggcagagggaacaca

SEQ ID NO: 167877 - DNA, 25 bp, probe
cagtccagccggcagagggaacaca

SEQ ID NO: 167878 - DNA, 25 bp, probe
cagtacgtcggcaatggaagaagac

SEQ ID NO: 167879 - DNA, 25 bp, probe
cagtcacgtgggctccaaggagcac

SEQ ID NO: 167880 - DNA, 25 bp, probe
cagtagcagatgccgttcaaaaggt

SEQ ID NO: 167881 - DNA, 25 bp, probe
cagttccaccagttcacagcagtgg

SEQ ID NO: 167882 - DNA, 25 bp, probe
cagttcacacaatccatcaacatgg

SEQ ID NO: 167883 - DNA, 25 bp, probe
cagttacataattcactctgagtgt

SEQ ID NO: 167884 - DNA, 25 bp, probe
cagttacataattcactctgagtgt

SEQ ID NO: 167885 - DNA, 25 bp, probe
catgttaaacttacttagtgttatg

SEQ ID NO: 167886 - DNA, 25 bp, probe
cagtaaacactgtgtattgttgtaa

SEQ ID NO: 167887 - DNA, 25 bp, probe
catgttaggcccttgttttctttga

SEQ ID NO: 167888 - DNA, 25 bp, probe
catgttaggcccttgttttctttga

SEQ ID NO: 167889 - DNA, 25 bp, probe
cagttatactccttgagttattttt

SEQ ID NO: 167890 - DNA, 25 bp, probe
cagtttatcatcgttgactctttgc

SEQ ID NO: 167891 - DNA, 25 bp, probe
cagtttgaaccaagaactttccagg

SEQ ID NO: 167892 - DNA, 25 bp, probe
cagtttgagacccaggtgctgtgtc

SEQ ID NO: 167893 - DNA, 25 bp, probe
caggttgcaaccaggtggtatcagg

SEQ ID NO: 167894 - DNA, 25 bp, probe
cagggtctacctaactgagcctaga

SEQ ID NO: 167895 - DNA, 25 bp, probe
cagggtctacctaactgagcctaga

SEQ ID NO: 167896 - DNA, 25 bp, probe
cagggatctccagaagtgcagcctt

SEQ ID NO: 167897 - DNA, 25 bp, probe
cagggtctccaaggagacgcctctg

SEQ ID NO: 167898 - DNA, 25 bp, probe
cagtggtccgggacaactggcacga

SEQ ID NO: 167899 - DNA, 25 bp, probe
cggtgtccttttcactacaccatgt

SEQ ID NO: 167900 - DNA, 25 bp, probe
caggggccttttctccaataatgtg

SEQ ID NO: 167901 - DNA, 25 bp, probe
cagtggtgacatattattacttttt

SEQ ID NO: 167902 - DNA, 25 bp, probe
cagtgggaggtaatttaatcctcgg

SEQ ID NO: 167903 - DNA, 25 bp, probe
cagtagttggccaatctttatctct

SEQ ID NO: 167904 - DNA, 25 bp, probe
cagtagttggccaatctttatctct

SEQ ID NO: 167905 - DNA, 25 bp, probe
cagtagggcgctaatgtatacacat

SEQ ID NO: 167906 - DNA, 25 bp, probe
cagtactggccaacagatgaccaag

SEQ ID NO: 167907 - DNA, 25 bp, probe
cagtgagtttcaacaggcatccatc

SEQ ID NO: 167908 - DNA, 25 bp, probe
cagtagtgtctttgcaggaccacag

SEQ ID NO: 167909 - DNA, 25 bp, probe
cagtttgactcttcatcgttcatct

SEQ ID NO: 167910 - DNA, 25 bp, probe
cagtggtgactattaccggatccag

SEQ ID NO: 167911 - DNA, 25 bp, probe
cagtggtgactattaccggatccag

SEQ ID NO: 167912 - DNA, 25 bp, probe
cagtggtgtctgtgaagggtgccgc

SEQ ID NO: 167913 - DNA, 25 bp, probe
cagtggtgtctgtgaagggtgccgc

SEQ ID NO: 167914 - DNA, 25 bp, probe
cagggtactctaataggggcggctc

SEQ ID NO: 167915 - DNA, 25 bp, probe
cagggtgcaggtaacccttggtctg

SEQ ID NO: 167916 - DNA, 25 bp, probe
cagtgggattgaaacccagggtcgt

SEQ ID NO: 167917 - DNA, 25 bp, probe
cagtaggttcacaaactcttggtca

SEQ ID NO: 167918 - DNA, 25 bp, probe
cagtaggttcacaaactcttggtca

SEQ ID NO: 167919 - DNA, 25 bp, probe
cagtcagagttcgaaggctttgagt

SEQ ID NO: 167920 - DNA, 25 bp, probe
cagtgacagttgacctggctattgg

SEQ ID NO: 167921 - DNA, 25 bp, probe
cagtatctgttgatttgctttgtag

SEQ ID NO: 167922 - DNA, 25 bp, probe
cagtatctgttgatttgctttgtag

SEQ ID NO: 167923 - DNA, 25 bp, probe
cagtgttgactgctttggaggcaca

SEQ ID NO: 167924 - DNA, 25 bp, probe
cagtcaaactcactggatggggcac

SEQ ID NO: 167925 - DNA, 25 bp, probe
cagtacacatcgtatggggtgacac

SEQ ID NO: 167926 - DNA, 25 bp, probe
cagtacaagcgctgcggtgtcacct

SEQ ID NO: 167927 - DNA, 25 bp, probe
cagtacaagcgctgcggtgtcacct

SEQ ID NO: 167928 - DNA, 25 bp, probe
cagtacaagcgctgcggtgtcacct

SEQ ID NO: 167929 - DNA, 25 bp, probe
cagtatacatgcctttggtatcagc

SEQ ID NO: 167930 - DNA, 25 bp, probe
cagtaattggtcatgtgatgcaagc

SEQ ID NO: 167931 - DNA, 25 bp, probe
cagtccaatggtatgctggagagtt

SEQ ID NO: 167932 - DNA, 25 bp, probe
cagtcggaggaattgttgaggagta

SEQ ID NO: 167933 - DNA, 25 bp, probe
cagtcggatgtgaggttcagcagtg

SEQ ID NO: 167934 - DNA, 25 bp, probe
cagtcgggagtgtggtcagtctgcc

SEQ ID NO: 167935 - DNA, 25 bp, probe
cagtcgggagtgtggtcagtctgcc

SEQ ID NO: 167936 - DNA, 25 bp, probe
cagtcgggagtgtggtcagtctgcc

SEQ ID NO: 167937 - DNA, 25 bp, probe
cagtgcggggtttgcatcttttgac

SEQ ID NO: 167938 - DNA, 25 bp, probe
caggcagtaggtttgctctgtaccc

SEQ ID NO: 167939 - DNA, 25 bp, probe
cagggtagtggtggctgcttcaacc

SEQ ID NO: 167940 - DNA, 25 bp, probe
cagtggaagtgaatccttaacccta

SEQ ID NO: 167941 - DNA, 25 bp, probe
cagggacgggacagtaacatccccg

SEQ ID NO: 167942 - DNA, 25 bp, probe
cagtgaaagggcattccaaagcgcc

SEQ ID NO: 167943 - DNA, 25 bp, probe
cagtacaagaggctggccaagtcca

SEQ ID NO: 167944 - DNA, 25 bp, probe
cagtacaagaggctggccaagtcca

SEQ ID NO: 167945 - DNA, 25 bp, probe
cagtggcaacctcatgaacaggatc

SEQ ID NO: 167946 - DNA, 25 bp, probe
cagtgggaactcttcaaggtctctt

SEQ ID NO: 167947 - DNA, 25 bp, probe
catctggggaacttacttttccttg

SEQ ID NO: 167948 - DNA, 25 bp, probe
cagggaaggtaggcacttttccttg

SEQ ID NO: 167949 - DNA, 25 bp, probe
cagggaaggtaggcacttttccttg

SEQ ID NO: 167950 - DNA, 25 bp, probe
cagggcctgagttagactatttccc

SEQ ID NO: 167951 - DNA, 25 bp, probe
caggctcctattgaaggaaccaccc

SEQ ID NO: 167952 - DNA, 25 bp, probe
caggctcctattgaaggaaccaccc

SEQ ID NO: 167953 - DNA, 25 bp, probe
cagtccctttgcaaagtgattcctt

SEQ ID NO: 167954 - DNA, 25 bp, probe
cagtcctctgttgtcggatttcatt

SEQ ID NO: 167955 - DNA, 25 bp, probe
cagtgcctattttactggctttatt

SEQ ID NO: 167956 - DNA, 25 bp, probe
cagtctgctgcttttaagagcttta

SEQ ID NO: 167957 - DNA, 25 bp, probe
cagtctctcttctgtaggcattgtg

SEQ ID NO: 167958 - DNA, 25 bp, probe
cagtttgttcatgtcagtgagagct

SEQ ID NO: 167959 - DNA, 25 bp, probe
cagtttggagtggtcagctgggcaa

SEQ ID NO: 167960 - DNA, 25 bp, probe
cagtttggagtggtcagctgggcaa

SEQ ID NO: 167961 - DNA, 25 bp, probe
cagtgtgtggagggtcatcgggaga

SEQ ID NO: 167962 - DNA, 25 bp, probe
cagtgtactgagggtactggcctag

SEQ ID NO: 167963 - DNA, 25 bp, probe
caggctcaccagtgattgctgctgc

SEQ ID NO: 167964 - DNA, 25 bp, probe
cagtgcatcagtgtggtagcttgct

SEQ ID NO: 167965 - DNA, 25 bp, probe
cagtgatggctggggaacaatgttc

SEQ ID NO: 167966 - DNA, 25 bp, probe
caggtggctgtgtgaacctggggct

SEQ ID NO: 167967 - DNA, 25 bp, probe
caggtggaggtgtgtccaggggctg

SEQ ID NO: 167968 - DNA, 25 bp, probe
cagtgggagcggtggaagaggaggc

SEQ ID NO: 167969 - DNA, 25 bp, probe
cagtgggaggggcccaagatctctg

SEQ ID NO: 167970 - DNA, 25 bp, probe
cagtgggcaggggtagctagcgtgt

SEQ ID NO: 167971 - DNA, 25 bp, probe
caggcggagttggtacttttgctat

SEQ ID NO: 167972 - DNA, 25 bp, probe
cagtgtaaatgttgtagcttattct

SEQ ID NO: 167973 - DNA, 25 bp, probe
cagtgtgaaattagtccccagtgca

SEQ ID NO: 167974 - DNA, 25 bp, probe
cagtgtgtacaaagtcagccgcctg

SEQ ID NO: 167975 - DNA, 25 bp, probe
cagtgctggaataggtcgaaccggt

SEQ ID NO: 167976 - DNA, 25 bp, probe
cagtgggaatcactgaccacctcgg

SEQ ID NO: 167977 - DNA, 25 bp, probe
cagggtgtctctaggcatcaccacg

SEQ ID NO: 167978 - DNA, 25 bp, probe
cagggattcctgaagatcgcagact

SEQ ID NO: 167979 - DNA, 25 bp, probe
cagtgtggtcgagcattccaagtcc

SEQ ID NO: 167980 - DNA, 25 bp, probe
cagtcggtcatttttcacaagcgcg

SEQ ID NO: 167981 - DNA, 25 bp, probe
cagtcagtcacttgtttgcagaagc

SEQ ID NO: 167982 - DNA, 25 bp, probe
cagggccatcattgtccggaatggt

SEQ ID NO: 167983 - DNA, 25 bp, probe
caggtttaaccctgcaagctgtttc

SEQ ID NO: 167984 - DNA, 25 bp, probe
caggtggtatcaggcccctgagtta

SEQ ID NO: 167985 - DNA, 25 bp, probe
cagtgtggtagcttgctcaacaggt

SEQ ID NO: 167986 - DNA, 25 bp, probe
cagtggcgacgatgaacatgccgtt

SEQ ID NO: 167987 - DNA, 25 bp, probe
caggggatctgctaaactctatgtt

SEQ ID NO: 167988 - DNA, 25 bp, probe
cagtggattttttgcctctagacat

SEQ ID NO: 167989 - DNA, 25 bp, probe
cagtggattttttgcctctagacat

SEQ ID NO: 167990 - DNA, 25 bp, probe
cagggattaacctctgcactactga

SEQ ID NO: 167991 - DNA, 25 bp, probe
cagggttaagcggcaggcaggattg

SEQ ID NO: 167992 - DNA, 25 bp, probe
catgtggtaaagggggtggcttggt

SEQ ID NO: 167993 - DNA, 25 bp, probe
cagggtaagatgggtcgtgggtgga

SEQ ID NO: 167994 - DNA, 25 bp, probe
caggtaaatgttgaagctcggtgta

SEQ ID NO: 167995 - DNA, 25 bp, probe
caggtaaatgttgaagctcggtgta

SEQ ID NO: 167996 - DNA, 25 bp, probe
caggtaatagccctagccattggtg

SEQ ID NO: 167997 - DNA, 25 bp, probe
caggagcaaacccaagtcttagttg

SEQ ID NO: 167998 - DNA, 25 bp, probe
cagggaataccacagtcattagcct

SEQ ID NO: 167999 - DNA, 25 bp, probe
cagggaaaccgttttggtcactgtg

SEQ ID NO: 168000 - DNA, 25 bp, probe
cagtggattgaatgtctttttattt

SEQ ID NO: 168001 - DNA, 25 bp, probe
cagtggattgaatgtctttttattt

SEQ ID NO: 168002 - DNA, 25 bp, probe
cagtggtcttatttttgggtgattt

SEQ ID NO: 168003 - DNA, 25 bp, probe
cagtggtcttatttttgggtgattt

SEQ ID NO: 168004 - DNA, 25 bp, probe
cagtgtatttagtgtgttcagtgat

SEQ ID NO: 168005 - DNA, 25 bp, probe
cagtgcctttaggtgagattcaggt

SEQ ID NO: 168006 - DNA, 25 bp, probe
caggcctctgcaaggctagtctggg

SEQ ID NO: 168007 - DNA, 25 bp, probe
cagtggtcatcaaaggagttcgcgg

SEQ ID NO: 168008 - DNA, 25 bp, probe
cagtgcgtcaatcagagcgtcctgt

SEQ ID NO: 168009 - DNA, 25 bp, probe
cagtgcgtcaatcagagcgtcctgt

SEQ ID NO: 168010 - DNA, 25 bp, probe
cagtgcgtcaatcagagcgtcctgt

SEQ ID NO: 168011 - DNA, 25 bp, probe
cagtgcgtcaatcagagcgtcctgt

SEQ ID NO: 168012 - DNA, 25 bp, probe
cagtgcgtcaatcagagcgtcctgt

SEQ ID NO: 168013 - DNA, 25 bp, probe
cagtgtccgcatgcggaggcctgtg

SEQ ID NO: 168014 - DNA, 25 bp, probe
cagtgtccgcatgcggaggcctgtg

SEQ ID NO: 168015 - DNA, 25 bp, probe
cagtgttctcaggcagcaggcagcc

SEQ ID NO: 168016 - DNA, 25 bp, probe
cagtgccctcaagcatggcaccttg

SEQ ID NO: 168017 - DNA, 25 bp, probe
cagtggctcaaagagacccctgaca

SEQ ID NO: 168018 - DNA, 25 bp, probe
cagtggctcaaagagacccctgaca

SEQ ID NO: 168019 - DNA, 25 bp, probe
cagggaccttgtagactacctggac

SEQ ID NO: 168020 - DNA, 25 bp, probe
cgggacctggttggagccatgttga

SEQ ID NO: 168021 - DNA, 25 bp, probe
cagggtttatgtttaggatgttgaa

SEQ ID NO: 168022 - DNA, 25 bp, probe
cagggttttagagagcagtggcaga

SEQ ID NO: 168023 - DNA, 25 bp, probe
caggggagtttggcgaggtctgcag

SEQ ID NO: 168024 - DNA, 25 bp, probe
cagggagtttggcagcagcgtctgg

SEQ ID NO: 168025 - DNA, 25 bp, probe
caggaaatggggtatgcagggtctg

SEQ ID NO: 168026 - DNA, 25 bp, probe
caggtagggggagatggccttgctc

SEQ ID NO: 168027 - DNA, 25 bp, probe
catgttcagggatcgccaggcgttt

SEQ ID NO: 168028 - DNA, 25 bp, probe
cagtctccgagagcggattgagttc

SEQ ID NO: 168029 - DNA, 25 bp, probe
cagtccggggcgctgcatagagtgc

SEQ ID NO: 168030 - DNA, 25 bp, probe
cagggcaggctgccgttgctaaatg

SEQ ID NO: 168031 - DNA, 25 bp, probe
cagggaggctcagcttgctccctgc

SEQ ID NO: 168032 - DNA, 25 bp, probe
cagtgaggagctcacacgttccacc

SEQ ID NO: 168033 - DNA, 25 bp, probe
cagtagtgagcagcatctagtttcc

SEQ ID NO: 168034 - DNA, 25 bp, probe
cagtgactgagagctgccatctttc

SEQ ID NO: 168035 - DNA, 25 bp, probe
cagtgactgagagctgccatctttc

SEQ ID NO: 168036 - DNA, 25 bp, probe
cagtgactccacatcaactgatgct

SEQ ID NO: 168037 - DNA, 25 bp, probe
caggatcccagcaatgaactgttct

SEQ ID NO: 168038 - DNA, 25 bp, probe
cagtcttcacagtatcaactgcaac

SEQ ID NO: 168039 - DNA, 25 bp, probe
cagtaggcagagttcacactgaaaa

SEQ ID NO: 168040 - DNA, 25 bp, probe
cagtgaggcaggcgtcttagacaag

SEQ ID NO: 168041 - DNA, 25 bp, probe
cagtgacggcaggaacgtggacaag

SEQ ID NO: 168042 - DNA, 25 bp, probe
cagtggttgccaaaagtggagcgag

SEQ ID NO: 168043 - DNA, 25 bp, probe
cagggtgggaaatgtgggggctttg

SEQ ID NO: 168044 - DNA, 25 bp, probe
cttggacggaatgggatgggggctt

SEQ ID NO: 168045 - DNA, 25 bp, probe
cttggacggaatgggatgggggctt

SEQ ID NO: 168046 - DNA, 25 bp, probe
caggtaagtgcaaaggagaagtggt

SEQ ID NO: 168047 - DNA, 25 bp, probe
cagtgcccagagacaagtgaaggtg

SEQ ID NO: 168048 - DNA, 25 bp, probe
cagtgaccagctccttgaagtggtg

SEQ ID NO: 168049 - DNA, 25 bp, probe
caggcgacagcatcctgacggttga

SEQ ID NO: 168050 - DNA, 25 bp, probe
cagggatcgccaggcgttttctgag

SEQ ID NO: 168051 - DNA, 25 bp, probe
cagtcgtagtcagtgctgtctgtct

SEQ ID NO: 168052 - DNA, 25 bp, probe
cagtcgcttggatctggctgttgag

SEQ ID NO: 168053 - DNA, 25 bp, probe
cagtccttgtgctctgagatggctg

SEQ ID NO: 168054 - DNA, 25 bp, probe
cagtccttgtgctctgagatggctg

SEQ ID NO: 168055 - DNA, 25 bp, probe
cagtcctttccagggctgagctgga

SEQ ID NO: 168056 - DNA, 25 bp, probe
cagtcactttgccagagcctgagag

SEQ ID NO: 168057 - DNA, 25 bp, probe
cagtactcaagccgcaccagagatg

SEQ ID NO: 168058 - DNA, 25 bp, probe
cagtactcaagccgcaccagagatg

SEQ ID NO: 168059 - DNA, 25 bp, probe
cagtaccaatgattaccatgatgtc

SEQ ID NO: 168060 - DNA, 25 bp, probe
cggaaatgtgcctaccagattctgg

SEQ ID NO: 168061 - DNA, 25 bp, probe
catggaaatgtaacctagtttaggg

SEQ ID NO: 168062 - DNA, 25 bp, probe
caggaactttaatgagtgttttggc

SEQ ID NO: 168063 - DNA, 25 bp, probe
cagtgaacttgtaaggaagcttggt

SEQ ID NO: 168064 - DNA, 25 bp, probe
caggaactgaggcgatagaattggc

SEQ ID NO: 168065 - DNA, 25 bp, probe
cagggacgggcccaggaactgttgt

SEQ ID NO: 168066 - DNA, 25 bp, probe
caggaggggagctatttggactttt

SEQ ID NO: 168067 - DNA, 25 bp, probe
caggggattgtgttttgtcactcta

SEQ ID NO: 168068 - DNA, 25 bp, probe
caggccttattgttctttgtcggaa

SEQ ID NO: 168069 - DNA, 25 bp, probe
caggctgcattgagaatcgatttcg

SEQ ID NO: 168070 - DNA, 25 bp, probe
cgagccacatgttactcgtcgtacc

SEQ ID NO: 168071 - DNA, 25 bp, probe
caggaaattctagcttcctcagcct

SEQ ID NO: 168072 - DNA, 25 bp, probe
catgggaatcatgaactccttcgtc

SEQ ID NO: 168073 - DNA, 25 bp, probe
cagggagtagaaactccttctcaga

SEQ ID NO: 168074 - DNA, 25 bp, probe
cagtaagtagaattatctcttcatc

SEQ ID NO: 168075 - DNA, 25 bp, probe
cagtgaagtatttgaagccatcaac

SEQ ID NO: 168076 - DNA, 25 bp, probe
cagtgtatgcgaaaacagccaaaag

SEQ ID NO: 168077 - DNA, 25 bp, probe
cagtgttcagttcatagcagaaaac

SEQ ID NO: 168078 - DNA, 25 bp, probe
cagtgtctctgtttaagtataatca

SEQ ID NO: 168079 - DNA, 25 bp, probe
cagtgctcttgtggtaggtggataa

SEQ ID NO: 168080 - DNA, 25 bp, probe
cagtgttagggtagcatgggattac

SEQ ID NO: 168081 - DNA, 25 bp, probe
caggtttgggatggagatggtctgc

SEQ ID NO: 168082 - DNA, 25 bp, probe
caggtttgggatggagatggtctgc

SEQ ID NO: 168083 - DNA, 25 bp, probe
caggtacaaggtggactggcctctc

SEQ ID NO: 168084 - DNA, 25 bp, probe
caggtccaagtgtactgttggccgc

SEQ ID NO: 168085 - DNA, 25 bp, probe
caggtgaacttctacggggaccaca

SEQ ID NO: 168086 - DNA, 25 bp, probe
cagggaatcttcccctgtggacttc

SEQ ID NO: 168087 - DNA, 25 bp, probe
cagggaactgaactcttgtggaccc

SEQ ID NO: 168088 - DNA, 25 bp, probe
cagggctacgattggctgaagtacc

SEQ ID NO: 168089 - DNA, 25 bp, probe
cagggctacgattggctgaagtacc

SEQ ID NO: 168090 - DNA, 25 bp, probe
cagggctacgattggctgaagtacc

SEQ ID NO: 168091 - DNA, 25 bp, probe
cagggaacaggggtggagtggcctt

SEQ ID NO: 168092 - DNA, 25 bp, probe
gcgggaactgggagggaagggtgag

SEQ ID NO: 168093 - DNA, 25 bp, probe
cagggagtggggaggagagaggggg

SEQ ID NO: 168094 - DNA, 25 bp, probe
cagggaggcgcggaggacgaaggag

SEQ ID NO: 168095 - DNA, 25 bp, probe
cagggaggcgcggaggacgaaggag

SEQ ID NO: 168096 - DNA, 25 bp, probe
caggggatgagtggaggttaaggct

SEQ ID NO: 168097 - DNA, 25 bp, probe
cagggtcgactgtcagggtgaccgt

SEQ ID NO: 168098 - DNA, 25 bp, probe
cagggagtgacgaagggggctccag

SEQ ID NO: 168099 - DNA, 25 bp, probe
cagggggacctccatggggatggag

SEQ ID NO: 168100 - DNA, 25 bp, probe
caggaatgagtctcgtggctgggaa

SEQ ID NO: 168101 - DNA, 25 bp, probe
caggacagacactcggccagaaaaa

SEQ ID NO: 168102 - DNA, 25 bp, probe
caggatcaaccgtggaagatgaact

SEQ ID NO: 168103 - DNA, 25 bp, probe
caggatcaaccgtggaagatgaact

SEQ ID NO: 168104 - DNA, 25 bp, probe
caggtctagcctgggtatgaagaag

SEQ ID NO: 168105 - DNA, 25 bp, probe
cagtggtccctccttaatgatgaag

SEQ ID NO: 168106 - DNA, 25 bp, probe
cagtcgctccagccttaatttgaaa

SEQ ID NO: 168107 - DNA, 25 bp, probe
cagtcttcagaggcctcaattatta

SEQ ID NO: 168108 - DNA, 25 bp, probe
cagtgcctcaagtacatccttatta

SEQ ID NO: 168109 - DNA, 25 bp, probe
cagtgctcccaatttctttatggag

SEQ ID NO: 168110 - DNA, 25 bp, probe
cagtgtccaggatagaatttgagag

SEQ ID NO: 168111 - DNA, 25 bp, probe
cagtgtccaggatagaatttgagag

SEQ ID NO: 168112 - DNA, 25 bp, probe
cagtgtctacgagcagttttgaagc

SEQ ID NO: 168113 - DNA, 25 bp, probe
caggatcgacgcgcttctgtatggg

SEQ ID NO: 168114 - DNA, 25 bp, probe
cagtcacaggcagctctttggtgtt

SEQ ID NO: 168115 - DNA, 25 bp, probe
cagtaagtgccacttctgtgtcttt

SEQ ID NO: 168116 - DNA, 25 bp, probe
cagtaagtgccacttctgtgtcttt

SEQ ID NO: 168117 - DNA, 25 bp, probe
cagtaagcctcattatttggaattt

SEQ ID NO: 168118 - DNA, 25 bp, probe
cagtaaccctgaatttgcctttctg

SEQ ID NO: 168119 - DNA, 25 bp, probe
cagtaacctgtcttcagttactttg

SEQ ID NO: 168120 - DNA, 25 bp, probe
caggtacctctcttagggactctgt

SEQ ID NO: 168121 - DNA, 25 bp, probe
caggtacctctcttagggactctgt

SEQ ID NO: 168122 - DNA, 25 bp, probe
caggtgaccgatgtacaggactttc

SEQ ID NO: 168123 - DNA, 25 bp, probe
catgaatggtttaaacaggaccttc

SEQ ID NO: 168124 - DNA, 25 bp, probe
caggtagtttgaaaaacacactcta

SEQ ID NO: 168125 - DNA, 25 bp, probe
caggtagtttgaaaaacacactcta

SEQ ID NO: 168126 - DNA, 25 bp, probe
catgttgagaatcatggacaaaacc

SEQ ID NO: 168127 - DNA, 25 bp, probe
cagtcttgcaatcaggtcagaaagg

SEQ ID NO: 168128 - DNA, 25 bp, probe
cagtcagtgcaacagtgtcaggcct

SEQ ID NO: 168129 - DNA, 25 bp, probe
cagtcagagcggcatgggctggcca

SEQ ID NO: 168130 - DNA, 25 bp, probe
cagtctcagtacaagaggctggcca

SEQ ID NO: 168131 - DNA, 25 bp, probe
cagtctcagtacaagaggctggcca

SEQ ID NO: 168132 - DNA, 25 bp, probe
cagtgctcagacagaggtctcgctc

SEQ ID NO: 168133 - DNA, 25 bp, probe
cagtgctaccagcaggtgggctgcc

SEQ ID NO: 168134 - DNA, 25 bp, probe
cagtgctaccagcaggtgggctgcc

SEQ ID NO: 168135 - DNA, 25 bp, probe
caggtgacagggtctgggtgtgcct

SEQ ID NO: 168136 - DNA, 25 bp, probe
caggtgacagggtctgggtgtgcct

SEQ ID NO: 168137 - DNA, 25 bp, probe
cagggcattgtgtcctggggtgacg

SEQ ID NO: 168138 - DNA, 25 bp, probe
cagtctttcgacatgggcgtggctg

SEQ ID NO: 168139 - DNA, 25 bp, probe
cagtctttcgacatgggcgtggctg

SEQ ID NO: 168140 - DNA, 25 bp, probe
cagtcaactacgcgaggcagaggct

SEQ ID NO: 168141 - DNA, 25 bp, probe
cagtgaagatcaacagccgggggct

SEQ ID NO: 168142 - DNA, 25 bp, probe
cagtgcaagagcccttcgtgggagc

SEQ ID NO: 168143 - DNA, 25 bp, probe
cagtgcagagactgctagcctgggc

SEQ ID NO: 168144 - DNA, 25 bp, probe
cagtcaagattggagacctcggtct

SEQ ID NO: 168145 - DNA, 25 bp, probe
cagtcaggttcagcactttggatct

SEQ ID NO: 168146 - DNA, 25 bp, probe
caggggtacagtttttggcattgct

SEQ ID NO: 168147 - DNA, 25 bp, probe
catgggttccttgcttgagaccttg

SEQ ID NO: 168148 - DNA, 25 bp, probe
cagggtgaacctgcctgtgaactct

SEQ ID NO: 168149 - DNA, 25 bp, probe
caggggcaagcagtccttggagacc

SEQ ID NO: 168150 - DNA, 25 bp, probe
cagtggagaagcttcctctaccacc

SEQ ID NO: 168151 - DNA, 25 bp, probe
cagtgagccaagttcacaccactgc

SEQ ID NO: 168152 - DNA, 25 bp, probe
catggggaagttcacgactgcgagt

SEQ ID NO: 168153 - DNA, 25 bp, probe
cagtggcttcgtgttcgactatgag

SEQ ID NO: 168154 - DNA, 25 bp, probe
cagggtcctgtgcttggattgtggg

SEQ ID NO: 168155 - DNA, 25 bp, probe
caggggccatgtggtaaagggggtg

SEQ ID NO: 168156 - DNA, 25 bp, probe
cagggtccgaaaccaaggcgggctg

SEQ ID NO: 168157 - DNA, 25 bp, probe
catggttccgactaccattggggga

SEQ ID NO: 168158 - DNA, 25 bp, probe
cagggtcccacaggtttggggacat

SEQ ID NO: 168159 - DNA, 25 bp, probe
cagggcttcccgggattggaaacat

SEQ ID NO: 168160 - DNA, 25 bp, probe
cagggccccggtggaaggaaggcag

SEQ ID NO: 168161 - DNA, 25 bp, probe
cagggccatccgggagacaggacgg

SEQ ID NO: 168162 - DNA, 25 bp, probe
cagtggttccgcaagctggcggact

SEQ ID NO: 168163 - DNA, 25 bp, probe
cagtggttccgcaagctggcggact

SEQ ID NO: 168164 - DNA, 25 bp, probe
caggagttcctgaacgagaaggcgc

SEQ ID NO: 168165 - DNA, 25 bp, probe
caggtgtgtccaaccgtaggagcca

SEQ ID NO: 168166 - DNA, 25 bp, probe
caggggctctgtacatcgtaggagc

SEQ ID NO: 168167 - DNA, 25 bp, probe
cagtgtgacctgtactcgtcagtgg

SEQ ID NO: 168168 - DNA, 25 bp, probe
cagtgaacctgagcatcatggctgt

SEQ ID NO: 168169 - DNA, 25 bp, probe
cagtgaacctgagcatcatggctgt

SEQ ID NO: 168170 - DNA, 25 bp, probe
cagtgaagctcttcatctgtgagct

SEQ ID NO: 168171 - DNA, 25 bp, probe
cagtgcaatcctttctgtggatgaa

SEQ ID NO: 168172 - DNA, 25 bp, probe
cagtcacgatcaacttaggcatgaa

SEQ ID NO: 168173 - DNA, 25 bp, probe
cagtccatgtcatctacacagtcaa

SEQ ID NO: 168174 - DNA, 25 bp, probe
cagtgctgaccatgtccacaatcat

SEQ ID NO: 168175 - DNA, 25 bp, probe
cagtggtaccagcccatgaacaaat

SEQ ID NO: 168176 - DNA, 25 bp, probe
caggttatccagactactactcaga

SEQ ID NO: 168177 - DNA, 25 bp, probe
caggcttatccgatgtgctacatga

SEQ ID NO: 168178 - DNA, 25 bp, probe
caggtcttccagatgtgtaatacat

SEQ ID NO: 168179 - DNA, 25 bp, probe
caggctcttccatccttgaaaagga

SEQ ID NO: 168180 - DNA, 25 bp, probe
caggcccacctggccttaataacaa

SEQ ID NO: 168181 - DNA, 25 bp, probe
caggtaactttgcttgattaaacag

SEQ ID NO: 168182 - DNA, 25 bp, probe
caggtaactttgcttgattaaacag

SEQ ID NO: 168183 - DNA, 25 bp, probe
caggggttgtacctccataaaacag

SEQ ID NO: 168184 - DNA, 25 bp, probe
cagggggtgatgtgccccacaagac

SEQ ID NO: 168185 - DNA, 25 bp, probe
cagggggtgagtttctgccactcac

SEQ ID NO: 168186 - DNA, 25 bp, probe
caggagttggagtatggcccctccg

SEQ ID NO: 168187 - DNA, 25 bp, probe
cagtctgatgggcaatgggatcccc

SEQ ID NO: 168188 - DNA, 25 bp, probe
cagtctgaggagccgcgagtactgg

SEQ ID NO: 168189 - DNA, 25 bp, probe
cagtctgagctgtaggtaaccggca

SEQ ID NO: 168190 - DNA, 25 bp, probe
cagtctgagctgtaggtaaccggca

SEQ ID NO: 168191 - DNA, 25 bp, probe
cagtgggtgaagctgtaccgcggag

SEQ ID NO: 168192 - DNA, 25 bp, probe
cagggaggaaggaggccacggagcg

SEQ ID NO: 168193 - DNA, 25 bp, probe
cagggagaacgagcggcttcgcgag

SEQ ID NO: 168194 - DNA, 25 bp, probe
caggagagactggttcggctctagg

SEQ ID NO: 168195 - DNA, 25 bp, probe
cagggcggtggctgtgagtctagtt

SEQ ID NO: 168196 - DNA, 25 bp, probe
cagtggaggtcctctggtttgcttc

SEQ ID NO: 168197 - DNA, 25 bp, probe
cagtggcggtgcaaactggtttcct

SEQ ID NO: 168198 - DNA, 25 bp, probe
cagggcatggcacagaaggtttcca

SEQ ID NO: 168199 - DNA, 25 bp, probe
cagggacatcatcaagggtgaggca

SEQ ID NO: 168200 - DNA, 25 bp, probe
cagggacatgtcagggaatgagata

SEQ ID NO: 168201 - DNA, 25 bp, probe
caggtgactgacaaggtggaaacca

SEQ ID NO: 168202 - DNA, 25 bp, probe
cagtgggtgaccggggagaaacagg

SEQ ID NO: 168203 - DNA, 25 bp, probe
cagtggtggtccggtggagggaaga

SEQ ID NO: 168204 - DNA, 25 bp, probe
cagtggtggtccggtggagggaaga

SEQ ID NO: 168205 - DNA, 25 bp, probe
cagtggtggtccggtggagggaaga

SEQ ID NO: 168206 - DNA, 25 bp, probe
cagggcaggggcagggagggaaact

SEQ ID NO: 168207 - DNA, 25 bp, probe
cagggcaggggcagggagggaaact

SEQ ID NO: 168208 - DNA, 25 bp, probe
cagggcacggcgtgggaggggtagt

SEQ ID NO: 168209 - DNA, 25 bp, probe
cagggccccgaggagggatggggag

SEQ ID NO: 168210 - DNA, 25 bp, probe
caggccccatggagcgggcaggggc

SEQ ID NO: 168211 - DNA, 25 bp, probe
cagggctccagcgggggagcggttg

SEQ ID NO: 168212 - DNA, 25 bp, probe
cagtgcctctcaccgcagaagaggg

SEQ ID NO: 168213 - DNA, 25 bp, probe
cagtgccctgccatggacatatggg

SEQ ID NO: 168214 - DNA, 25 bp, probe
caggcccagcccagaattggccagt

SEQ ID NO: 168215 - DNA, 25 bp, probe
cagtgttccccaagaggatggccat

SEQ ID NO: 168216 - DNA, 25 bp, probe
cagtgtaatcccccaggagaacatc

SEQ ID NO: 168217 - DNA, 25 bp, probe
cagtgatcagtcgcctcagtaaagc

SEQ ID NO: 168218 - DNA, 25 bp, probe
cagtggcaatcagctccactgcgga

SEQ ID NO: 168219 - DNA, 25 bp, probe
cagtggagccatgaacactactgcc

SEQ ID NO: 168220 - DNA, 25 bp, probe
cagggcactcatgatccaggacgcc

SEQ ID NO: 168221 - DNA, 25 bp, probe
cagggcactcatgatccaggacgcc

SEQ ID NO: 168222 - DNA, 25 bp, probe
cagtgtgactgatctctcgtgattg

SEQ ID NO: 168223 - DNA, 25 bp, probe
cagtgtgactgatctctcgtgattg

SEQ ID NO: 168224 - DNA, 25 bp, probe
catggataatgatctggaggtttta

SEQ ID NO: 168225 - DNA, 25 bp, probe
caggatatgtgattttgggtttgca

SEQ ID NO: 168226 - DNA, 25 bp, probe
caggaatgggctgtttttggcctaa

SEQ ID NO: 168227 - DNA, 25 bp, probe
caggaaggacttgtctctgggcttg

SEQ ID NO: 168228 - DNA, 25 bp, probe
cagtgggacctaaagtccgggatgg

SEQ ID NO: 168229 - DNA, 25 bp, probe
caggagggactgagacccgggacgc

SEQ ID NO: 168230 - DNA, 25 bp, probe
cagggcaggacgaagccatccgatt

SEQ ID NO: 168231 - DNA, 25 bp, probe
cagtgggtgaagacagaactctgag

SEQ ID NO: 168232 - DNA, 25 bp, probe
cagtgggtgaagacagaactctgag

SEQ ID NO: 168233 - DNA, 25 bp, probe
cagggcttgaaatggacatctgtga

SEQ ID NO: 168234 - DNA, 25 bp, probe
caggatttcacctgagaatttggct

SEQ ID NO: 168235 - DNA, 25 bp, probe
caggacctgtgctttgagatttttt

SEQ ID NO: 168236 - DNA, 25 bp, probe
caggacctgtgctttgagatttttt

SEQ ID NO: 168237 - DNA, 25 bp, probe
cataatccttagtgagggtgccctg

SEQ ID NO: 168238 - DNA, 25 bp, probe
cagtgacctctagtggaggggcccc

SEQ ID NO: 168239 - DNA, 25 bp, probe
cagtgacgatctaccaagggactct

SEQ ID NO: 168240 - DNA, 25 bp, probe
caggacttgcacacagggaggctgt

SEQ ID NO: 168241 - DNA, 25 bp, probe
cagtgactgctactttgggaatggg

SEQ ID NO: 168242 - DNA, 25 bp, probe
cagtgacatcttgttcggaagtgcc

SEQ ID NO: 168243 - DNA, 25 bp, probe
cagtgacatcttgttcggaagtgcc

SEQ ID NO: 168244 - DNA, 25 bp, probe
cagtgacttcccatgtagagtggcc

SEQ ID NO: 168245 - DNA, 25 bp, probe
caggacccactgagaagggctgccc

SEQ ID NO: 168246 - DNA, 25 bp, probe
ccagacccctggggagtccagggtg

SEQ ID NO: 168247 - DNA, 25 bp, probe
cataacccggaggggccctgatggg

SEQ ID NO: 168248 - DNA, 25 bp, probe
caggaaaccaaggtctgacctaggg

SEQ ID NO: 168249 - DNA, 25 bp, probe
caggaataccaggatggcgtgccca

SEQ ID NO: 168250 - DNA, 25 bp, probe
cagtgatcaacccagagacgggcga

SEQ ID NO: 168251 - DNA, 25 bp, probe
caggatccatggcaggacggtgtga

SEQ ID NO: 168252 - DNA, 25 bp, probe
caggacctcagtaggcaccgttgag

SEQ ID NO: 168253 - DNA, 25 bp, probe
caggcacccagtgtggacctagaat

SEQ ID NO: 168254 - DNA, 25 bp, probe
caggtcctcagatgggaattgcaca

SEQ ID NO: 168255 - DNA, 25 bp, probe
cagtgatccattgtagcgaaggcac

SEQ ID NO: 168256 - DNA, 25 bp, probe
cagtgcaggcattactaaaagaacc

SEQ ID NO: 168257 - DNA, 25 bp, probe
cagggcacataagagcaaaggctcc

SEQ ID NO: 168258 - DNA, 25 bp, probe
cagggagcgaagcaaaaccacccgg

SEQ ID NO: 168259 - DNA, 25 bp, probe
cagggagagtgggaaccactacgcc

SEQ ID NO: 168260 - DNA, 25 bp, probe
cagtgtggggctgaccccaatgctg

SEQ ID NO: 168261 - DNA, 25 bp, probe
cagtgtggggtgctaaacagatctc

SEQ ID NO: 168262 - DNA, 25 bp, probe
cagtggaggtctgagaatgacgata

SEQ ID NO: 168263 - DNA, 25 bp, probe
cagtggagtgttcagtctggaattt

SEQ ID NO: 168264 - DNA, 25 bp, probe
cagtgagagggagacccggcacttc

SEQ ID NO: 168265 - DNA, 25 bp, probe
cagtgagagggagacccggcacttc

SEQ ID NO: 168266 - DNA, 25 bp, probe
cagggacagtgaggtcccaggcccc

SEQ ID NO: 168267 - DNA, 25 bp, probe
cagggacagtgaggtcccaggcccc

SEQ ID NO: 168268 - DNA, 25 bp, probe
caggtgagcagtaggtcatccagtc

SEQ ID NO: 168269 - DNA, 25 bp, probe
cagtggtgatgttcagctagctcag

SEQ ID NO: 168270 - DNA, 25 bp, probe
cagtgagactgtacataattgcatg

SEQ ID NO: 168271 - DNA, 25 bp, probe
cagtgtgatctgatcaacactctgg

SEQ ID NO: 168272 - DNA, 25 bp, probe
cagtgtgctgtcacagaccagcttc

SEQ ID NO: 168273 - DNA, 25 bp, probe
cagtgtgctgtcacagaccagcttc

SEQ ID NO: 168274 - DNA, 25 bp, probe
cagtgtttgctgagtcacagatatc

SEQ ID NO: 168275 - DNA, 25 bp, probe
cagtgttttatgcataatgagtggc

SEQ ID NO: 168276 - DNA, 25 bp, probe
cagtgtctctaagattgtggtgcac

SEQ ID NO: 168277 - DNA, 25 bp, probe
cagtgtcctagcaaagctggatggg

SEQ ID NO: 168278 - DNA, 25 bp, probe
cagtgactcgagcaagggtgcgacc

SEQ ID NO: 168279 - DNA, 25 bp, probe
cagtgactcgagcaagggtgcgacc

SEQ ID NO: 168280 - DNA, 25 bp, probe
ctagcccgatggtaggattcagttc

SEQ ID NO: 168281 - DNA, 25 bp, probe
cttgtactgtgtgaagattactaac

SEQ ID NO: 168282 - DNA, 25 bp, probe
cttgtactgtgtgaagattactaac

SEQ ID NO: 168283 - DNA, 25 bp, probe
catttgatcttgtaaaaatagcaaa

SEQ ID NO: 168284 - DNA, 25 bp, probe
caggagatcctgtgcaattagaaaa

SEQ ID NO: 168285 - DNA, 25 bp, probe
cagggacaggataactctaataaaa

SEQ ID NO: 168286 - DNA, 25 bp, probe
cagtgaagcagccttactattcata

SEQ ID NO: 168287 - DNA, 25 bp, probe
cagtgaacactgcttctcgaatgga

SEQ ID NO: 168288 - DNA, 25 bp, probe
cagtgaacactgcttctcgaatgga

SEQ ID NO: 168289 - DNA, 25 bp, probe
cagtgaacactgcttctcgaatgga

SEQ ID NO: 168290 - DNA, 25 bp, probe
caggtagtgctgcttctgaagttat

SEQ ID NO: 168291 - DNA, 25 bp, probe
cagtggagtggtccatgctaagtct

SEQ ID NO: 168292 - DNA, 25 bp, probe
cagggtatgctgcctctgtaaattc

SEQ ID NO: 168293 - DNA, 25 bp, probe
caggtgattgtttagtacaaacttt

SEQ ID NO: 168294 - DNA, 25 bp, probe
caggttggtgattcagtccgacctt

SEQ ID NO: 168295 - DNA, 25 bp, probe
caggtggggactgggctggagactg

SEQ ID NO: 168296 - DNA, 25 bp, probe
caggtcggtgggggtggagacaggg

SEQ ID NO: 168297 - DNA, 25 bp, probe
catcgtcacggtctcgggagacggg

SEQ ID NO: 168298 - DNA, 25 bp, probe
cagtgaatgcgactcctcagcagat

SEQ ID NO: 168299 - DNA, 25 bp, probe
cagtgccatgcgttcgctgaaaggc

SEQ ID NO: 168300 - DNA, 25 bp, probe
cagtgcattgcgttgtggaattggg

SEQ ID NO: 168301 - DNA, 25 bp, probe
cagtgtggctgtctgcgagattggg

SEQ ID NO: 168302 - DNA, 25 bp, probe
cagtgtggagccttacatactggga

SEQ ID NO: 168303 - DNA, 25 bp, probe
cagtgtgaagtctgacatttggagt

SEQ ID NO: 168304 - DNA, 25 bp, probe
cagtgaaaatcagcaccttgtcagc

SEQ ID NO: 168305 - DNA, 25 bp, probe
cagtgaaagccacgatccttgacag

SEQ ID NO: 168306 - DNA, 25 bp, probe
cagtgcccaccaaatcttcataagc

SEQ ID NO: 168307 - DNA, 25 bp, probe
cagtgcctgagaccaactatctagg

SEQ ID NO: 168308 - DNA, 25 bp, probe
cagtgcctgagaccaactatctagg

SEQ ID NO: 168309 - DNA, 25 bp, probe
cagtgcactcggtacaccatcaaag

SEQ ID NO: 168310 - DNA, 25 bp, probe
cagtgcgtggagtgcagctgctaaa

SEQ ID NO: 168311 - DNA, 25 bp, probe
cagtgcctgtgcaccattcgagaag

SEQ ID NO: 168312 - DNA, 25 bp, probe
cagtgctgcttctacacatgtggta

SEQ ID NO: 168313 - DNA, 25 bp, probe
cagtgtcttgctggcagatgtggaa

SEQ ID NO: 168314 - DNA, 25 bp, probe
cagtggtccatggaatgcttgaaaa

SEQ ID NO: 168315 - DNA, 25 bp, probe
cagtggtgtctgaaatcatattaaa

SEQ ID NO: 168316 - DNA, 25 bp, probe
cagtggttcatatcccatggctata

SEQ ID NO: 168317 - DNA, 25 bp, probe
cagtgggaatgatccctgacatcta

SEQ ID NO: 168318 - DNA, 25 bp, probe
cagggatgtcaaaccctgaagtgat

SEQ ID NO: 168319 - DNA, 25 bp, probe
cagtgggtcacaactgcagcttcag

SEQ ID NO: 168320 - DNA, 25 bp, probe
cagtgggtcacaactgcagcttcag

SEQ ID NO: 168321 - DNA, 25 bp, probe
cagtgttgtacgacgatgtatcaac

SEQ ID NO: 168322 - DNA, 25 bp, probe
cagtgttctacaccattttcattcc

SEQ ID NO: 168323 - DNA, 25 bp, probe
cagtgcttctacacatttcatctaa

SEQ ID NO: 168324 - DNA, 25 bp, probe
cagtgttaactcatttctcatgcca

SEQ ID NO: 168325 - DNA, 25 bp, probe
caggattaccagattacatgagccc

SEQ ID NO: 168326 - DNA, 25 bp, probe
caggataatcgtgctggatcagagt

SEQ ID NO: 168327 - DNA, 25 bp, probe
cagtgtgaatcttggtgtctacgtt

SEQ ID NO: 168328 - DNA, 25 bp, probe
cagtgctacattttgtggcttttta

SEQ ID NO: 168329 - DNA, 25 bp, probe
caggcacgaatgggcggatttttaa

SEQ ID NO: 168330 - DNA, 25 bp, probe
cagtggctggcaaggcggttttgtt

SEQ ID NO: 168331 - DNA, 25 bp, probe
caggggaaagagcagtgatttgggg

SEQ ID NO: 168332 - DNA, 25 bp, probe
caggtctaaactcagcatgctttgg

SEQ ID NO: 168333 - DNA, 25 bp, probe
cagtgtgaaaaaaaatctcttgaga

SEQ ID NO: 168334 - DNA, 25 bp, probe
cagtgtaacaacattatctgaccaa

SEQ ID NO: 168335 - DNA, 25 bp, probe
cagtggagacagatttagatatagc

SEQ ID NO: 168336 - DNA, 25 bp, probe
cagtgtgaagctcttgtcagaagat

SEQ ID NO: 168337 - DNA, 25 bp, probe
caggtggatcacgaggtcaggagat

SEQ ID NO: 168338 - DNA, 25 bp, probe
cagtgggtatgaggtgtgcaggggg

SEQ ID NO: 168339 - DNA, 25 bp, probe
cagtgcggaagatgctgctggtgtg

SEQ ID NO: 168340 - DNA, 25 bp, probe
cagtgccatgaagatggagactgtg

SEQ ID NO: 168341 - DNA, 25 bp, probe
cagtgccaggcagtagggatccaga

SEQ ID NO: 168342 - DNA, 25 bp, probe
cagtgcaaacacaggtcacccaacg

SEQ ID NO: 168343 - DNA, 25 bp, probe
cagtggaacttctgtactacaacgc

SEQ ID NO: 168344 - DNA, 25 bp, probe
cagtggaacttctgtactacaacgc

SEQ ID NO: 168345 - DNA, 25 bp, probe
cagggaacatgaatggtttaaacag

SEQ ID NO: 168346 - DNA, 25 bp, probe
caggaggactatgtgtttctaaagg

SEQ ID NO: 168347 - DNA, 25 bp, probe
caggttacccttctgtgctagaaag

SEQ ID NO: 168348 - DNA, 25 bp, probe
caggtaacccttggtctgtaagcac

SEQ ID NO: 168349 - DNA, 25 bp, probe
caggtaacctgcgtgctttataagc

SEQ ID NO: 168350 - DNA, 25 bp, probe
cagtgcatcatacctagtctttcta

SEQ ID NO: 168351 - DNA, 25 bp, probe
cagtgacctgtcaaggcttatgcta

SEQ ID NO: 168352 - DNA, 25 bp, probe
cagtgacctgtcaaggcttatgcta

SEQ ID NO: 168353 - DNA, 25 bp, probe
cagtgagccgagatcatgccattgc

SEQ ID NO: 168354 - DNA, 25 bp, probe
cagtggcagggaatcagcggtccgt

SEQ ID NO: 168355 - DNA, 25 bp, probe
cagtgacagcagcgacagcagtgac

SEQ ID NO: 168356 - DNA, 25 bp, probe
cagtgctggcagcaggagcgtgccc

SEQ ID NO: 168357 - DNA, 25 bp, probe
cagtgatggagcggtggctggctgc

SEQ ID NO: 168358 - DNA, 25 bp, probe
cagtgaggaggctggcgcatgttgg

SEQ ID NO: 168359 - DNA, 25 bp, probe
cagtgagaggcggtgggctgactgg

SEQ ID NO: 168360 - DNA, 25 bp, probe
cagtgatgaggggatccagagagtg

SEQ ID NO: 168361 - DNA, 25 bp, probe
cagtgaggatgacgtcgaggcagtg

SEQ ID NO: 168362 - DNA, 25 bp, probe
cagtgaggatgacgtcgaggcagtg

SEQ ID NO: 168363 - DNA, 25 bp, probe
cagtggtatgagccgctgcagaagt

SEQ ID NO: 168364 - DNA, 25 bp, probe
cagtggtcgcacctggaaaggagaa

SEQ ID NO: 168365 - DNA, 25 bp, probe
cagtgcgcactggaggagtacgtga

SEQ ID NO: 168366 - DNA, 25 bp, probe
cagtgacatcataaggcaggcccta

SEQ ID NO: 168367 - DNA, 25 bp, probe
cagtgagcagatatgggcagcagcc

SEQ ID NO: 168368 - DNA, 25 bp, probe
cagggcagattatgccaggcacttt

SEQ ID NO: 168369 - DNA, 25 bp, probe
caggcaagaggatccaggtcctatt

SEQ ID NO: 168370 - DNA, 25 bp, probe
cagtgaagaatcaaccggacctgtt

SEQ ID NO: 168371 - DNA, 25 bp, probe
cagtgaagaatcaaccggacctgtt

SEQ ID NO: 168372 - DNA, 25 bp, probe
cagtgaaaacaagtgctggcaccac

SEQ ID NO: 168373 - DNA, 25 bp, probe
cagtgttcatatagcacctggccca

SEQ ID NO: 168374 - DNA, 25 bp, probe
caggcttaattgccctacaaagggt

SEQ ID NO: 168375 - DNA, 25 bp, probe
caggttgatatcacctacacggagg

SEQ ID NO: 168376 - DNA, 25 bp, probe
caggtttgagaagccacgcatggac

SEQ ID NO: 168377 - DNA, 25 bp, probe
caggtgtgttgaagccgggctcaga

SEQ ID NO: 168378 - DNA, 25 bp, probe
caggtgtgttgaagccgggctcaga

SEQ ID NO: 168379 - DNA, 25 bp, probe
cagggcagtggctagcccggaagca

SEQ ID NO: 168380 - DNA, 25 bp, probe
caggcacaggcgttttcaggaaaca

SEQ ID NO: 168381 - DNA, 25 bp, probe
caggcgcgcggtctggcagtaaaaa

SEQ ID NO: 168382 - DNA, 25 bp, probe
cagtggcctggtgtttgtacataca

SEQ ID NO: 168383 - DNA, 25 bp, probe
cagtgacttagggctaggaacattc

SEQ ID NO: 168384 - DNA, 25 bp, probe
cagtgacacaatggattaccgacag

SEQ ID NO: 168385 - DNA, 25 bp, probe
catggcaaattccatggcaccgtca

SEQ ID NO: 168386 - DNA, 25 bp, probe
cagtgcaacagtgtcaggcctggct

SEQ ID NO: 168387 - DNA, 25 bp, probe
cagtgcaactgtttagtcatgtgtt

SEQ ID NO: 168388 - DNA, 25 bp, probe
cagtgcattttgttttcctgcttcc

SEQ ID NO: 168389 - DNA, 25 bp, probe
caggcaccaatttattcctcgttgc

SEQ ID NO: 168390 - DNA, 25 bp, probe
cagggcgttgttgtcgccagattcc

SEQ ID NO: 168391 - DNA, 25 bp, probe
cagtgggttttggttcagcatgtaa

SEQ ID NO: 168392 - DNA, 25 bp, probe
cggttatttaggtccagcagctaca

SEQ ID NO: 168393 - DNA, 25 bp, probe
cgagttcttctacaactggtacttc

SEQ ID NO: 168394 - DNA, 25 bp, probe
caggtccttaaatacgatgaacatg

SEQ ID NO: 168395 - DNA, 25 bp, probe
caggcctcctatggtaaagacgaag

SEQ ID NO: 168396 - DNA, 25 bp, probe
caggccctcctggggtacaggaagc

SEQ ID NO: 168397 - DNA, 25 bp, probe
caggccctcctggggtacaggaagc

SEQ ID NO: 168398 - DNA, 25 bp, probe
caggccctgcgggagattaaggctc

SEQ ID NO: 168399 - DNA, 25 bp, probe
cagggcatcatgggggatttggcac

SEQ ID NO: 168400 - DNA, 25 bp, probe
cagggctcagtggcaggaaatcctc

SEQ ID NO: 168401 - DNA, 25 bp, probe
cagggtgctgtgtgtgacatagaca

SEQ ID NO: 168402 - DNA, 25 bp, probe
caggaggtggtggtgcacaagaaga

SEQ ID NO: 168403 - DNA, 25 bp, probe
caggaaggcttggatatgcaaatga

SEQ ID NO: 168404 - DNA, 25 bp, probe
caggaaggcttggatatgcaaatga

SEQ ID NO: 168405 - DNA, 25 bp, probe
cagtggtcttgtctatgcaggcatg

SEQ ID NO: 168406 - DNA, 25 bp, probe
cagggtttgatggacagtagcatta

SEQ ID NO: 168407 - DNA, 25 bp, probe
cagggaattctggaggcagccttca

SEQ ID NO: 168408 - DNA, 25 bp, probe
cagggaattctggaggcagccttca

SEQ ID NO: 168409 - DNA, 25 bp, probe
cagggcaatttgtggagagatatct

SEQ ID NO: 168410 - DNA, 25 bp, probe
cagtgaactttgtcacggagacaca

SEQ ID NO: 168411 - DNA, 25 bp, probe
caggaattctttggcctgaataatt

SEQ ID NO: 168412 - DNA, 25 bp, probe
cagggtttttcagctcattacacta

SEQ ID NO: 168413 - DNA, 25 bp, probe
caggactgtactacgactcttaaga

SEQ ID NO: 168414 - DNA, 25 bp, probe
caggaggtgaccagtcttcatttga

SEQ ID NO: 168415 - DNA, 25 bp, probe
cagtgagggcatcttgtctttagtg

SEQ ID NO: 168416 - DNA, 25 bp, probe
cagtgagcttatcatgctgtcttta

SEQ ID NO: 168417 - DNA, 25 bp, probe
cagtgagattatgatttgtagcttc

SEQ ID NO: 168418 - DNA, 25 bp, probe
cagggactttcacttgaatcttgct

SEQ ID NO: 168419 - DNA, 25 bp, probe
cagtgagactttcctggtacctgtg

SEQ ID NO: 168420 - DNA, 25 bp, probe
caggaactatgtctgtgcaagcctt

SEQ ID NO: 168421 - DNA, 25 bp, probe
caggaactgagtgaggcccctggtc

SEQ ID NO: 168422 - DNA, 25 bp, probe
caggaagggtgtgtgccacctcgtt

SEQ ID NO: 168423 - DNA, 25 bp, probe
cagggtgggtgtccatgtgcacccg

SEQ ID NO: 168424 - DNA, 25 bp, probe
cagtgggggtgctctggagaggctg

SEQ ID NO: 168425 - DNA, 25 bp, probe
cagtggagtagggaatgggaggctt

SEQ ID NO: 168426 - DNA, 25 bp, probe
cagtggtgctggcccaagtgaaggc

SEQ ID NO: 168427 - DNA, 25 bp, probe
cagtggtgatgcctaaaggaatgtc

SEQ ID NO: 168428 - DNA, 25 bp, probe
cagtgatgtatggtcctatggtgtg

SEQ ID NO: 168429 - DNA, 25 bp, probe
cagggctggcagtctttgcagcgtg

SEQ ID NO: 168430 - DNA, 25 bp, probe
caggactggagcccatgtaggtttg

SEQ ID NO: 168431 - DNA, 25 bp, probe
caggacgaagccatccgattcttgg

SEQ ID NO: 168432 - DNA, 25 bp, probe
caggcctaagcctgggatttgggcc

SEQ ID NO: 168433 - DNA, 25 bp, probe
caggttaagctgtgtgattttggag

SEQ ID NO: 168434 - DNA, 25 bp, probe
caggctacaaggtgtttttggcctt

SEQ ID NO: 168435 - DNA, 25 bp, probe
cagggacaagagtagtcctttacca

SEQ ID NO: 168436 - DNA, 25 bp, probe
cagggacaatggaaaggctgttata

SEQ ID NO: 168437 - DNA, 25 bp, probe
caggtaactgggccagcagccttta

SEQ ID NO: 168438 - DNA, 25 bp, probe
cagtgtatctctgtccatgatgcac

SEQ ID NO: 168439 - DNA, 25 bp, probe
cagtgtatctctgtccatgatgcac

SEQ ID NO: 168440 - DNA, 25 bp, probe
cagtgtcccaaagcagtgcacaatt

SEQ ID NO: 168441 - DNA, 25 bp, probe
caggttgcctaaatcatgtgcagat

SEQ ID NO: 168442 - DNA, 25 bp, probe
caggtggccaagtgcttggatcaca

SEQ ID NO: 168443 - DNA, 25 bp, probe
cagtgggcggcagagatgctggtag

SEQ ID NO: 168444 - DNA, 25 bp, probe
cagtggaaatctggagactggtcag

SEQ ID NO: 168445 - DNA, 25 bp, probe
cagtggatttgtggagcctgggaga

SEQ ID NO: 168446 - DNA, 25 bp, probe
cagtggtttgtggatgcacccttgg

SEQ ID NO: 168447 - DNA, 25 bp, probe
cagtggtttgtggatgcacccttgg

SEQ ID NO: 168448 - DNA, 25 bp, probe
caggggctatgtgtacttcttgtgc

SEQ ID NO: 168449 - DNA, 25 bp, probe
caggggctatgggtttgctttggtg

SEQ ID NO: 168450 - DNA, 25 bp, probe
caggtggagcagcgtttcctagttc

SEQ ID NO: 168451 - DNA, 25 bp, probe
cagtggagagcagctgttcctccaa

SEQ ID NO: 168452 - DNA, 25 bp, probe
cagtgtggatgaactactcctacag

SEQ ID NO: 168453 - DNA, 25 bp, probe
cagggtggaagtcctgcctatgcgg

SEQ ID NO: 168454 - DNA, 25 bp, probe
cagggagctgagggactgcttcagg

SEQ ID NO: 168455 - DNA, 25 bp, probe
cagggagctgagggactgcttcagg

SEQ ID NO: 168456 - DNA, 25 bp, probe
cagggatgctgcggagcctgtggag

SEQ ID NO: 168457 - DNA, 25 bp, probe
cagggtggatcatgtgcttgagcag

SEQ ID NO: 168458 - DNA, 25 bp, probe
cagggtggatcatgtgcttgagcag

SEQ ID NO: 168459 - DNA, 25 bp, probe
cagggtggagcattgtctgggtgtt

SEQ ID NO: 168460 - DNA, 25 bp, probe
cagggtggagcattgtctgggtgtt

SEQ ID NO: 168461 - DNA, 25 bp, probe
cagtggctgagaggagccggctgtg

SEQ ID NO: 168462 - DNA, 25 bp, probe
cagtgggcaatgggctggtgctggc

SEQ ID NO: 168463 - DNA, 25 bp, probe
cagtggtatgtgctgctggtgctga

SEQ ID NO: 168464 - DNA, 25 bp, probe
cagtgtgtatgcaggcatcctcagc

SEQ ID NO: 168465 - DNA, 25 bp, probe
cagtggcctgcattgtacccactaa

SEQ ID NO: 168466 - DNA, 25 bp, probe
cagtggcctgcattgtacccactaa

SEQ ID NO: 168467 - DNA, 25 bp, probe
caggagagtctgttatcacccaaat

SEQ ID NO: 168468 - DNA, 25 bp, probe
caggagagtctgttatcacccaaat

SEQ ID NO: 168469 - DNA, 25 bp, probe
caggggatcatgttaaaaatagcag

SEQ ID NO: 168470 - DNA, 25 bp, probe
caggggccattcaaccaaagcagac

SEQ ID NO: 168471 - DNA, 25 bp, probe
cagggcgccatcgccaagtaagaaa

SEQ ID NO: 168472 - DNA, 25 bp, probe
cagggcgccatcgccaagtaagaaa

SEQ ID NO: 168473 - DNA, 25 bp, probe
caggacccacacgacgggaagacaa

SEQ ID NO: 168474 - DNA, 25 bp, probe
caggagcccagctggctgggcccag

SEQ ID NO: 168475 - DNA, 25 bp, probe
cagtgaggggcaggagctggggctc

SEQ ID NO: 168476 - DNA, 25 bp, probe
caggagggctggggtgaaaccaagc

SEQ ID NO: 168477 - DNA, 25 bp, probe
caggagtggcggtggggacctgaca

SEQ ID NO: 168478 - DNA, 25 bp, probe
cagtggaccgggcaggtgtccacca

SEQ ID NO: 168479 - DNA, 25 bp, probe
cagggacacgaagcagagactccag

SEQ ID NO: 168480 - DNA, 25 bp, probe
cagggacctgaagctggacaacgtc

SEQ ID NO: 168481 - DNA, 25 bp, probe
cagggacctaaagggactacctctg

SEQ ID NO: 168482 - DNA, 25 bp, probe
cagggagttaaacagcagcaacact

SEQ ID NO: 168483 - DNA, 25 bp, probe
cagtggcgattattaccgccaaggc

SEQ ID NO: 168484 - DNA, 25 bp, probe
cagtggccaaggaaccttcaacgaa

SEQ ID NO: 168485 - DNA, 25 bp, probe
cagtgggcagggaatcctggagcac

SEQ ID NO: 168486 - DNA, 25 bp, probe
caggagaaggtgatgatctgggcat

SEQ ID NO: 168487 - DNA, 25 bp, probe
caggatgatgaggtggtggctattt

SEQ ID NO: 168488 - DNA, 25 bp, probe
cagtggattgtgggaggctcttgct

SEQ ID NO: 168489 - DNA, 25 bp, probe
cagggatgtgatccggcatccttga

SEQ ID NO: 168490 - DNA, 25 bp, probe
cagtggatgtgacaagtgccctggc

SEQ ID NO: 168491 - DNA, 25 bp, probe
cagggagctgaattcgtgccagtgc

SEQ ID NO: 168492 - DNA, 25 bp, probe
caggacatcatgctgttgcgcctgg

SEQ ID NO: 168493 - DNA, 25 bp, probe
caggtcatcaccattggcaatgagc

SEQ ID NO: 168494 - DNA, 25 bp, probe
caggttcagcactttggatctgggc

SEQ ID NO: 168495 - DNA, 25 bp, probe
cagtgttgcagcaacctgtgacagg

SEQ ID NO: 168496 - DNA, 25 bp, probe
cagtgtgatgagcaagctggaagtg

SEQ ID NO: 168497 - DNA, 25 bp, probe
cagtggatacgccagcaggccacat

SEQ ID NO: 168498 - DNA, 25 bp, probe
cagtggatacgccagcaggccacat

SEQ ID NO: 168499 - DNA, 25 bp, probe
caggcgaatgcagctcagtgccaca

SEQ ID NO: 168500 - DNA, 25 bp, probe
caggcgaatgcagctcagtgccaca

SEQ ID NO: 168501 - DNA, 25 bp, probe
cagtggcacgatctcagctcactgc

SEQ ID NO: 168502 - DNA, 25 bp, probe
cagtggcgcaatctcagctcactgc

SEQ ID NO: 168503 - DNA, 25 bp, probe
cagtggagcaggctcagtcactcca

SEQ ID NO: 168504 - DNA, 25 bp, probe
cagtgtccaggcaatgcgaacccaa

SEQ ID NO: 168505 - DNA, 25 bp, probe
cagtgtgaaccaagccagcacatcc

SEQ ID NO: 168506 - DNA, 25 bp, probe
caggtgtgacacagccacagcagag

SEQ ID NO: 168507 - DNA, 25 bp, probe
cagtgtctataccaccaagagtgat

SEQ ID NO: 168508 - DNA, 25 bp, probe
cagggctgcaacaaccagtagctca

SEQ ID NO: 168509 - DNA, 25 bp, probe
caggcgctgatgaccccggacaccg

SEQ ID NO: 168510 - DNA, 25 bp, probe
caggagtgtaccaacacgtcaccgg

SEQ ID NO: 168511 - DNA, 25 bp, probe
cagggctgtgaggcttatcttcacc

SEQ ID NO: 168512 - DNA, 25 bp, probe
caggacgtcaggctgaccaacacct

SEQ ID NO: 168513 - DNA, 25 bp, probe
caggacgtggtccagaagaagctcc

SEQ ID NO: 168514 - DNA, 25 bp, probe
caggccctggctgggccagaggtgg

SEQ ID NO: 168515 - DNA, 25 bp, probe
caggccctggctgggccagaggtgg

SEQ ID NO: 168516 - DNA, 25 bp, probe
caggggcaggtggtggaggggcgcc

SEQ ID NO: 168517 - DNA, 25 bp, probe
cagtggacggggagcaggtggagta

SEQ ID NO: 168518 - DNA, 25 bp, probe
cagggattggtgtttagagggatgc

SEQ ID NO: 168519 - DNA, 25 bp, probe
cagggactggtggtcaagattggtg

SEQ ID NO: 168520 - DNA, 25 bp, probe
cagggacagggcatcatgggggatt

SEQ ID NO: 168521 - DNA, 25 bp, probe
cagggactgagtgtaccgtggatct

SEQ ID NO: 168522 - DNA, 25 bp, probe
cagggactgagtgtaccgtggatct

SEQ ID NO: 168523 - DNA, 25 bp, probe
caggtgccaaattctaccgtggaat

SEQ ID NO: 168524 - DNA, 25 bp, probe
cagggccaactcattcgtgggaaca

SEQ ID NO: 168525 - DNA, 25 bp, probe
cagggcctccaagttcaggggaagg

SEQ ID NO: 168526 - DNA, 25 bp, probe
cagggtgtgccaaagtcgggggagg

SEQ ID NO: 168527 - DNA, 25 bp, probe
catgggggcccacgggtgtgggcgc

SEQ ID NO: 168528 - DNA, 25 bp, probe
cagggaagcccaaagctgttggccg

SEQ ID NO: 168529 - DNA, 25 bp, probe
caggaaacgccaagaactgctggcc

SEQ ID NO: 168530 - DNA, 25 bp, probe
caggtgatccccatcaactctgggg

SEQ ID NO: 168531 - DNA, 25 bp, probe
caggttcaagccatagagttggggc

SEQ ID NO: 168532 - DNA, 25 bp, probe
caggtccaagccatcaagtgctttc

SEQ ID NO: 168533 - DNA, 25 bp, probe
caggatgccgaggagatcaaggtcc

SEQ ID NO: 168534 - DNA, 25 bp, probe
cagggctcttgataaaggatccaaa

SEQ ID NO: 168535 - DNA, 25 bp, probe
catgggcttcgtacacaacttccag

SEQ ID NO: 168536 - DNA, 25 bp, probe
cagggctggcaggacaaactgacca

SEQ ID NO: 168537 - DNA, 25 bp, probe
caggagtctcatggcctgaacgacc

SEQ ID NO: 168538 - DNA, 25 bp, probe
caggatggctttctgtagccacacc

SEQ ID NO: 168539 - DNA, 25 bp, probe
caggtggacttgtttacacaccctg

SEQ ID NO: 168540 - DNA, 25 bp, probe
caggaggaaggcgttctccacctgt

SEQ ID NO: 168541 - DNA, 25 bp, probe
caggaggaaggcgttctccacctgt

SEQ ID NO: 168542 - DNA, 25 bp, probe
caggaggagtgggatctcggccctg

SEQ ID NO: 168543 - DNA, 25 bp, probe
caggtggtagaggagccatcgccac

SEQ ID NO: 168544 - DNA, 25 bp, probe
cagtgtggtggatgggcacccagga

SEQ ID NO: 168545 - DNA, 25 bp, probe
caggaggccaaaaggcagctccaga

SEQ ID NO: 168546 - DNA, 25 bp, probe
cagtgggagttcaaggcgcccatga

SEQ ID NO: 168547 - DNA, 25 bp, probe
cagtgggcctgtgcatggtgcccag

SEQ ID NO: 168548 - DNA, 25 bp, probe
cagggtctcttcggagacccaggat

SEQ ID NO: 168549 - DNA, 25 bp, probe
cagggtctcgtcaggaggtgcctga

SEQ ID NO: 168550 - DNA, 25 bp, probe
caggagctcctatcggagggtcttc

SEQ ID NO: 168551 - DNA, 25 bp, probe
cagtggccactctgggtggttctaa

SEQ ID NO: 168552 - DNA, 25 bp, probe
cagggccacttcagagggtctcctg

SEQ ID NO: 168553 - DNA, 25 bp, probe
cagggccacttcagagggtctcctg

SEQ ID NO: 168554 - DNA, 25 bp, probe
cagggccgtgacacaggttctggcc

SEQ ID NO: 168555 - DNA, 25 bp, probe
caggtggcgtacgacggtgttgaga

SEQ ID NO: 168556 - DNA, 25 bp, probe
cagggaggcgagcacgccatcttga

SEQ ID NO: 168557 - DNA, 25 bp, probe
caggtggccaagcagatgcacatct

SEQ ID NO: 168558 - DNA, 25 bp, probe
caggatgcaggcatccacatgccct

SEQ ID NO: 168559 - DNA, 25 bp, probe
caggatgcaggcatccacatgccct

SEQ ID NO: 168560 - DNA, 25 bp, probe
caggtgcgttatctcagcttcttca

SEQ ID NO: 168561 - DNA, 25 bp, probe
caggtgtgtcgacatcagttgtgtg

SEQ ID NO: 168562 - DNA, 25 bp, probe
cagggatgtccagaggtcggtgcag

SEQ ID NO: 168563 - DNA, 25 bp, probe
cagggctgtgcccaaggacaagtgg

SEQ ID NO: 168564 - DNA, 25 bp, probe
catgaagctttcctatggtcctgaa

SEQ ID NO: 168565 - DNA, 25 bp, probe
catgaagctttcctatggtcctgaa

SEQ ID NO: 168566 - DNA, 25 bp, probe
catgaactggtcctgcaggaccccg

SEQ ID NO: 168567 - DNA, 25 bp, probe
catgacaaggtgtgcagtggcccca

SEQ ID NO: 168568 - DNA, 25 bp, probe
ctggaaagggggtgacctcttgcct

SEQ ID NO: 168569 - DNA, 25 bp, probe
ctggaaagggggtgacctcttgcct

SEQ ID NO: 168570 - DNA, 25 bp, probe
catggaaagggagggtgaaagtgat

SEQ ID NO: 168571 - DNA, 25 bp, probe
caggtacgcggggtatgcaaagttt

SEQ ID NO: 168572 - DNA, 25 bp, probe
caggcatccctggggtccaaagtga

SEQ ID NO: 168573 - DNA, 25 bp, probe
caggaccctgccaggcacaggcagg

SEQ ID NO: 168574 - DNA, 25 bp, probe
caggacctgcggaggctacggcagg

SEQ ID NO: 168575 - DNA, 25 bp, probe
caggaggcggcgccgttatcaggac

SEQ ID NO: 168576 - DNA, 25 bp, probe
cagggggaggatggtaatcacagca

SEQ ID NO: 168577 - DNA, 25 bp, probe
caggggggtggcaatggtcagcagc

SEQ ID NO: 168578 - DNA, 25 bp, probe
caggtggggagtcagggacccctgc

SEQ ID NO: 168579 - DNA, 25 bp, probe
cagggaggctgtagccaggaaaccc

SEQ ID NO: 168580 - DNA, 25 bp, probe
cagtggggtgtgagaccaaggccct

SEQ ID NO: 168581 - DNA, 25 bp, probe
caggggaggctgagacgcaaggatc

SEQ ID NO: 168582 - DNA, 25 bp, probe
cagggaagcctgggtgtcaagtgcc

SEQ ID NO: 168583 - DNA, 25 bp, probe
cagggaactcagtgtgacaccgcca

SEQ ID NO: 168584 - DNA, 25 bp, probe
cagggagaccagaggacccttgtct

SEQ ID NO: 168585 - DNA, 25 bp, probe
cagggagggctgatacctccttgct

SEQ ID NO: 168586 - DNA, 25 bp, probe
cagggatggtgaaaccccttctctt

SEQ ID NO: 168587 - DNA, 25 bp, probe
cagggatgaggaatcgccccagact

SEQ ID NO: 168588 - DNA, 25 bp, probe
cagggcaatgaagggcctctccatc

SEQ ID NO: 168589 - DNA, 25 bp, probe
caggtaggaatgcggcttcatctcg

SEQ ID NO: 168590 - DNA, 25 bp, probe
caggtgggatcaaagaggtcataag

SEQ ID NO: 168591 - DNA, 25 bp, probe
cagggagcccatgctcatggttgaa

SEQ ID NO: 168592 - DNA, 25 bp, probe
cagtggagctactgctgtggttcag

SEQ ID NO: 168593 - DNA, 25 bp, probe
cagtggttcatcgtgttggctgtgc

SEQ ID NO: 168594 - DNA, 25 bp, probe
cagtggttcatcgtgttggctgtgc

SEQ ID NO: 168595 - DNA, 25 bp, probe
cagggatgccatctgttgtgcaggg

SEQ ID NO: 168596 - DNA, 25 bp, probe
cagtggagatccatggcgtgagccg

SEQ ID NO: 168597 - DNA, 25 bp, probe
cagggtacaccacggtggccgtgaa

SEQ ID NO: 168598 - DNA, 25 bp, probe
cagggtagcaccatggcaggactgg

SEQ ID NO: 168599 - DNA, 25 bp, probe
caggtggagcaggatgggcggacgg

SEQ ID NO: 168600 - DNA, 25 bp, probe
caggtatggggtgggtgaggcggcc

SEQ ID NO: 168601 - DNA, 25 bp, probe
caggtattcggtgtcagtcctgtct

SEQ ID NO: 168602 - DNA, 25 bp, probe
caggtaggcggagagcagtccctcc

SEQ ID NO: 168603 - DNA, 25 bp, probe
caggtagcaggaggcccagatcacc

SEQ ID NO: 168604 - DNA, 25 bp, probe
caggtagcaggaggcccagatcacc

SEQ ID NO: 168605 - DNA, 25 bp, probe
caggtagcaggaggcccagatcacc

SEQ ID NO: 168606 - DNA, 25 bp, probe
cagtggagaggagggcgaggcctga

SEQ ID NO: 168607 - DNA, 25 bp, probe
cagggagcatgtcggtggaggcctt

SEQ ID NO: 168608 - DNA, 25 bp, probe
cagggagattgagtctagaggtctt

SEQ ID NO: 168609 - DNA, 25 bp, probe
caggggcacttcattgagagttttg

SEQ ID NO: 168610 - DNA, 25 bp, probe
cagggaccctgatttgcatagatgt

SEQ ID NO: 168611 - DNA, 25 bp, probe
cagggacaagtgttccagactgcat

SEQ ID NO: 168612 - DNA, 25 bp, probe
cagggcctgaagtacacattctctg

SEQ ID NO: 168613 - DNA, 25 bp, probe
cagtggcggaacttgcaatcctcag

SEQ ID NO: 168614 - DNA, 25 bp, probe
cagtggcggaacttgcaatcctcag

SEQ ID NO: 168615 - DNA, 25 bp, probe
cagtggcttatgtcatttacacaca

SEQ ID NO: 168616 - DNA, 25 bp, probe
cagggatttgccaattccactcatt

SEQ ID NO: 168617 - DNA, 25 bp, probe
cagggatttgccaattccactcatt

SEQ ID NO: 168618 - DNA, 25 bp, probe
cagggtgttttattgctacatccat

SEQ ID NO: 168619 - DNA, 25 bp, probe
caggcaggcttttcattcaaaatct

SEQ ID NO: 168620 - DNA, 25 bp, probe
caggacacatttccactataatttt

SEQ ID NO: 168621 - DNA, 25 bp, probe
caggatcttaaaactaacacttata

SEQ ID NO: 168622 - DNA, 25 bp, probe
caggtgttaacattccaagactcta

SEQ ID NO: 168623 - DNA, 25 bp, probe
caggtgttaacattccaagactcta

SEQ ID NO: 168624 - DNA, 25 bp, probe
caggtatgtaaaagacaatactctt

SEQ ID NO: 168625 - DNA, 25 bp, probe
caggtggttacaaaaatcatctata

SEQ ID NO: 168626 - DNA, 25 bp, probe
caggtggttagctcaaccaatggag

SEQ ID NO: 168627 - DNA, 25 bp, probe
catgcgttttcgtcaccttaagaag

SEQ ID NO: 168628 - DNA, 25 bp, probe
catgctggtaatgcaacctttgaaa

SEQ ID NO: 168629 - DNA, 25 bp, probe
cagggacctcagtcacctttgagaa

SEQ ID NO: 168630 - DNA, 25 bp, probe
cagggacacagcccctatttggaac

SEQ ID NO: 168631 - DNA, 25 bp, probe
catgtgggaagtcatgtcatttgga

SEQ ID NO: 168632 - DNA, 25 bp, probe
cagtggcgatgactttatttgcgga

SEQ ID NO: 168633 - DNA, 25 bp, probe
caggggtggtttatctgcatggtat

SEQ ID NO: 168634 - DNA, 25 bp, probe
caggtggtactgctcctggatggtt

SEQ ID NO: 168635 - DNA, 25 bp, probe
caggtggtactgctcctggatggtt

SEQ ID NO: 168636 - DNA, 25 bp, probe
cagggcagtaccacttggagcggta

SEQ ID NO: 168637 - DNA, 25 bp, probe
cagggataacacacaatgagagggt

SEQ ID NO: 168638 - DNA, 25 bp, probe
cagggtcaaaattcagtgatagttt

SEQ ID NO: 168639 - DNA, 25 bp, probe
cagggccaagagagcagtgaccact

SEQ ID NO: 168640 - DNA, 25 bp, probe
cagggccggagttagagaggcctct

SEQ ID NO: 168641 - DNA, 25 bp, probe
cagggacgtgagttggagcggccac

SEQ ID NO: 168642 - DNA, 25 bp, probe
cagggacgtgagttggagcggccac

SEQ ID NO: 168643 - DNA, 25 bp, probe
cagtggcagcgtgttggagcgcgag

SEQ ID NO: 168644 - DNA, 25 bp, probe
cagggcacatgtgatgtggtgcgtg

SEQ ID NO: 168645 - DNA, 25 bp, probe
cagtggctgagtgcagctgagcggc

SEQ ID NO: 168646 - DNA, 25 bp, probe
cagggtgcacaggagctgagcttgg

SEQ ID NO: 168647 - DNA, 25 bp, probe
caggcagtgcaggagtatggttgag

SEQ ID NO: 168648 - DNA, 25 bp, probe
cagggatcaccacatgagtggctgg

SEQ ID NO: 168649 - DNA, 25 bp, probe
cagggacacaatcctagtcagcttt

SEQ ID NO: 168650 - DNA, 25 bp, probe
cagtggcaaattccgggagcagttt

SEQ ID NO: 168651 - DNA, 25 bp, probe
cagggcacaatttcgggccagttcc

SEQ ID NO: 168652 - DNA, 25 bp, probe
cagggacagtctccagggtcagtcc

SEQ ID NO: 168653 - DNA, 25 bp, probe
cagggacagtctccagggtcagtcc

SEQ ID NO: 168654 - DNA, 25 bp, probe
cagggacagtctccagggtcagtcc

SEQ ID NO: 168655 - DNA, 25 bp, probe
caggagccaatcagaggcccatgcc

SEQ ID NO: 168656 - DNA, 25 bp, probe
caggagccaatcagaggcccatgcc

SEQ ID NO: 168657 - DNA, 25 bp, probe
caggagactccaaggagctactgac

SEQ ID NO: 168658 - DNA, 25 bp, probe
caggagacccttgtggttgactagg

SEQ ID NO: 168659 - DNA, 25 bp, probe
caggttccctgatatggattcctat

SEQ ID NO: 168660 - DNA, 25 bp, probe
caggtactcctgaaaggctgtagaa

SEQ ID NO: 168661 - DNA, 25 bp, probe
caggtcttattggaattgcttatga

SEQ ID NO: 168662 - DNA, 25 bp, probe
caggttgactgtgaatggctattag

SEQ ID NO: 168663 - DNA, 25 bp, probe
caggttgactgccaaatgggttgtt

SEQ ID NO: 168664 - DNA, 25 bp, probe
caggataacagagaatggtggtatt

SEQ ID NO: 168665 - DNA, 25 bp, probe
caggatccaaaatgtggcgtttttc

SEQ ID NO: 168666 - DNA, 25 bp, probe
catgtgtccaaatcggggattggtg

SEQ ID NO: 168667 - DNA, 25 bp, probe
caggtcccaagcggttgagcctggc

SEQ ID NO: 168668 - DNA, 25 bp, probe
caggtcccaagcggttgagcctggc

SEQ ID NO: 168669 - DNA, 25 bp, probe
caggtccaaagccttcagcacctgc

SEQ ID NO: 168670 - DNA, 25 bp, probe
caggtccagatacacctgcaggctc

SEQ ID NO: 168671 - DNA, 25 bp, probe
caggtcacaggactcatcgtagccg

SEQ ID NO: 168672 - DNA, 25 bp, probe
cagggcctggcccatgtatggccag

SEQ ID NO: 168673 - DNA, 25 bp, probe
cagggccgtcaccgaatatgtgcag

SEQ ID NO: 168674 - DNA, 25 bp, probe
caggaccagtcccagagcaggaatg

SEQ ID NO: 168675 - DNA, 25 bp, probe
caggtcctctcctaaagatctcatg

SEQ ID NO: 168676 - DNA, 25 bp, probe
caggtcctctcctaaagatctcatg

SEQ ID NO: 168677 - DNA, 25 bp, probe
cagggacattttcaagacacagaca

SEQ ID NO: 168678 - DNA, 25 bp, probe
cagggcagcctcgttaggacaaggc

SEQ ID NO: 168679 - DNA, 25 bp, probe
caggcacggtcaaaagggcaagtgc

SEQ ID NO: 168680 - DNA, 25 bp, probe
caggaggggaactgagtcacgctgg

SEQ ID NO: 168681 - DNA, 25 bp, probe
cagggattggaaacggatgacgggc

SEQ ID NO: 168682 - DNA, 25 bp, probe
cagggacggcatgagcaggaggcgg

SEQ ID NO: 168683 - DNA, 25 bp, probe
caggtcatcgagaacgcgggggagt

SEQ ID NO: 168684 - DNA, 25 bp, probe
caggtgacgaatacagtgaggagga

SEQ ID NO: 168685 - DNA, 25 bp, probe
caggtgacgaatacagtgaggagga

SEQ ID NO: 168686 - DNA, 25 bp, probe
caggtgacgtgattctaaggcagga

SEQ ID NO: 168687 - DNA, 25 bp, probe
caggcaccacttactaagagaggat

SEQ ID NO: 168688 - DNA, 25 bp, probe
caggcagacacccagcttagggggt

SEQ ID NO: 168689 - DNA, 25 bp, probe
caggcagacacccagcttagggggt

SEQ ID NO: 168690 - DNA, 25 bp, probe
caggagagccacaaggctagccgag

SEQ ID NO: 168691 - DNA, 25 bp, probe
caggtagctatcaagaccctgccag

SEQ ID NO: 168692 - DNA, 25 bp, probe
caggttcattgcagaagaggccgcg

SEQ ID NO: 168693 - DNA, 25 bp, probe
caggagatcgtcaagtacgaccgcg

SEQ ID NO: 168694 - DNA, 25 bp, probe
caggaacgtggacaagactcgcaga

SEQ ID NO: 168695 - DNA, 25 bp, probe
caggaacctcggagagagtcccaca

SEQ ID NO: 168696 - DNA, 25 bp, probe
caggaacctcggagagagtcccaca

SEQ ID NO: 168697 - DNA, 25 bp, probe
gcaggaccttccacaaggtcctagc

SEQ ID NO: 168698 - DNA, 25 bp, probe
caggactatttccgcaaattccggc

SEQ ID NO: 168699 - DNA, 25 bp, probe
caggacattttgggaatttgggtgg

SEQ ID NO: 168700 - DNA, 25 bp, probe
caggacctctgggggttgttgggag

SEQ ID NO: 168701 - DNA, 25 bp, probe
caggacctctgggggttgttgggag

SEQ ID NO: 168702 - DNA, 25 bp, probe
caggagcacatcaagagggtttcgg

SEQ ID NO: 168703 - DNA, 25 bp, probe
cagggaaggaggcagctaggctgta

SEQ ID NO: 168704 - DNA, 25 bp, probe
cagggcagaggaatgtagggcctgc

SEQ ID NO: 168705 - DNA, 25 bp, probe
caggccagtggctgtttggcacttc

SEQ ID NO: 168706 - DNA, 25 bp, probe
catggtcgcccatgattttactgtc

SEQ ID NO: 168707 - DNA, 25 bp, probe
caggtgctggacaagttcattcacg

SEQ ID NO: 168708 - DNA, 25 bp, probe
caggtggctgtgaatgtcatcttga

SEQ ID NO: 168709 - DNA, 25 bp, probe
caggtgatttgtatgctcattgaac

SEQ ID NO: 168710 - DNA, 25 bp, probe
caggctattcctttgctgttgactg

SEQ ID NO: 168711 - DNA, 25 bp, probe
caggtatgtggccatttgtcatcct

SEQ ID NO: 168712 - DNA, 25 bp, probe
caggcttgtggcccaagtcattcaa

SEQ ID NO: 168713 - DNA, 25 bp, probe
caggtgtgcatgggacaagaacata

SEQ ID NO: 168714 - DNA, 25 bp, probe
caggtgcacatgatacaaggacata

SEQ ID NO: 168715 - DNA, 25 bp, probe
caggcctgctgtcttgagtacaaat

SEQ ID NO: 168716 - DNA, 25 bp, probe
caggccatttgtctgaatgtcaaac

SEQ ID NO: 168717 - DNA, 25 bp, probe
caggacttggtgcagttctcatgat

SEQ ID NO: 168718 - DNA, 25 bp, probe
caggtcttggtaggtgcctgcatct

SEQ ID NO: 168719 - DNA, 25 bp, probe
caggtgttggtacatatgatgattt

SEQ ID NO: 168720 - DNA, 25 bp, probe
cagggattggaacatgatttatagt

SEQ ID NO: 168721 - DNA, 25 bp, probe
cagggaaacaactatgtatctcata

SEQ ID NO: 168722 - DNA, 25 bp, probe
caggtccaagacacttattcataca

SEQ ID NO: 168723 - DNA, 25 bp, probe
caggtcaaagacagcgctcaaaact

SEQ ID NO: 168724 - DNA, 25 bp, probe
caggtacaaactcgacttcagacct

SEQ ID NO: 168725 - DNA, 25 bp, probe
caggttcaagaaagcatatgtcgat

SEQ ID NO: 168726 - DNA, 25 bp, probe
caggttctatgatttgtagctctag

SEQ ID NO: 168727 - DNA, 25 bp, probe
caggtagcatagctctgtacatctt

SEQ ID NO: 168728 - DNA, 25 bp, probe
caggtcagcacgttgctgtcgatta

SEQ ID NO: 168729 - DNA, 25 bp, probe
caggctcatacagttgcattggtta

SEQ ID NO: 168730 - DNA, 25 bp, probe
caggtctaccattgcttgttcagag

SEQ ID NO: 168731 - DNA, 25 bp, probe
caggtctaccattgcttgttcagag

SEQ ID NO: 168732 - DNA, 25 bp, probe
caggtctccaattcatggttatcag

SEQ ID NO: 168733 - DNA, 25 bp, probe
caggactccagatgaggacaagagg

SEQ ID NO: 168734 - DNA, 25 bp, probe
caggatttgaggccaggccaaagag

SEQ ID NO: 168735 - DNA, 25 bp, probe
caggtttgaggttgggctgcacgag

SEQ ID NO: 168736 - DNA, 25 bp, probe
cagggatctgatagtgggggccggc

SEQ ID NO: 168737 - DNA, 25 bp, probe
cagggacaacctggggatctctgga

SEQ ID NO: 168738 - DNA, 25 bp, probe
caggctacagacacgtgtacctaga

SEQ ID NO: 168739 - DNA, 25 bp, probe
caggctacagacacgtgtacctaga

SEQ ID NO: 168740 - DNA, 25 bp, probe
cagggaaagcatcaggcaacctaga

SEQ ID NO: 168741 - DNA, 25 bp, probe
cagggaacacgatggacctcaagaa

SEQ ID NO: 168742 - DNA, 25 bp, probe
caggaaacggctttgtccgcacaac

SEQ ID NO: 168743 - DNA, 25 bp, probe
caggtacctggtgtgccagcgaaac

SEQ ID NO: 168744 - DNA, 25 bp, probe
caggtacctggtgtgccagcgaaac

SEQ ID NO: 168745 - DNA, 25 bp, probe
catggtaccggggacttgggagagt

SEQ ID NO: 168746 - DNA, 25 bp, probe
cggtgacctgaagccttttgtcgtt

SEQ ID NO: 168747 - DNA, 25 bp, probe
caggtaccataacctcttgggtagt

SEQ ID NO: 168748 - DNA, 25 bp, probe
caggtaccataacctcttgggtagt

SEQ ID NO: 168749 - DNA, 25 bp, probe
caggtactcttctgtttgtgggcag

SEQ ID NO: 168750 - DNA, 25 bp, probe
caggtcatttttagtttgtgcttgg

SEQ ID NO: 168751 - DNA, 25 bp, probe
catggtctttgccttttgttgggga

SEQ ID NO: 168752 - DNA, 25 bp, probe
catggtctttgccttttgttgggga

SEQ ID NO: 168753 - DNA, 25 bp, probe
cagggtcgtctttgtgtatggggga

SEQ ID NO: 168754 - DNA, 25 bp, probe
cggagtacctgttggtttgtcctgc

SEQ ID NO: 168755 - DNA, 25 bp, probe
catggagattccaaaggttttccta

SEQ ID NO: 168756 - DNA, 25 bp, probe
catggaaaccttctggacttccttc

SEQ ID NO: 168757 - DNA, 25 bp, probe
caggggacgattctgtgttttctcc

SEQ ID NO: 168758 - DNA, 25 bp, probe
cagggtaaagtgaatgtgttgcatt

SEQ ID NO: 168759 - DNA, 25 bp, probe
cagggaccataggaaggctcagcct

SEQ ID NO: 168760 - DNA, 25 bp, probe
cagggacctgaacagactgcacagc

SEQ ID NO: 168761 - DNA, 25 bp, probe
caggggcttgttgagagctgagcca

SEQ ID NO: 168762 - DNA, 25 bp, probe
cagggactctgttcaaactgcgccc

SEQ ID NO: 168763 - DNA, 25 bp, probe
cagggactctgttcaaactgcgccc

SEQ ID NO: 168764 - DNA, 25 bp, probe
caggaaggtctataacagtcaccct

SEQ ID NO: 168765 - DNA, 25 bp, probe
caggatatgttaagtaacactcaac

SEQ ID NO: 168766 - DNA, 25 bp, probe
caggatcatgtaaatgctcaaagat

SEQ ID NO: 168767 - DNA, 25 bp, probe
caggatcagcttggacatgcccatt

SEQ ID NO: 168768 - DNA, 25 bp, probe
caggtagctatcaaggccatcaatg

SEQ ID NO: 168769 - DNA, 25 bp, probe
caggtagctatcaaggccatcaatg

SEQ ID NO: 168770 - DNA, 25 bp, probe
caggtcagcctggtgagacataaag

SEQ ID NO: 168771 - DNA, 25 bp, probe
caggtcactgctgtggttgcagcca

SEQ ID NO: 168772 - DNA, 25 bp, probe
caggtccatgcacaggtgtagcatg

SEQ ID NO: 168773 - DNA, 25 bp, probe
caggatgcctgcgagggcgacagtg

SEQ ID NO: 168774 - DNA, 25 bp, probe
caggatggcccgaggaagaggcaga

SEQ ID NO: 168775 - DNA, 25 bp, probe
caggatgccccgtgtggagaactgc

SEQ ID NO: 168776 - DNA, 25 bp, probe
caggatgccccgtgtggagaactgc

SEQ ID NO: 168777 - DNA, 25 bp, probe
caggtgcccgtctgatggggagatg

SEQ ID NO: 168778 - DNA, 25 bp, probe
cagggactgaggggaggggagcatg

SEQ ID NO: 168779 - DNA, 25 bp, probe
caggtacagaagccgaggacgtgct

SEQ ID NO: 168780 - DNA, 25 bp, probe
caggtcacaactgtaggcaagacat

SEQ ID NO: 168781 - DNA, 25 bp, probe
caggtgaaactctctggcagccata

SEQ ID NO: 168782 - DNA, 25 bp, probe
caggtgacaagcgtcacttctcctg

SEQ ID NO: 168783 - DNA, 25 bp, probe
caggaggcttctgagcttctcctgt

SEQ ID NO: 168784 - DNA, 25 bp, probe
caggggtcatcagcctgtatcgctt

SEQ ID NO: 168785 - DNA, 25 bp, probe
caggctgtgctatccctgtacgcct

SEQ ID NO: 168786 - DNA, 25 bp, probe
cagggtcatcagtgacttcaagcct

SEQ ID NO: 168787 - DNA, 25 bp, probe
cagggtcataaccatccatgcagac

SEQ ID NO: 168788 - DNA, 25 bp, probe
caggtggcagcagccttatcacact

SEQ ID NO: 168789 - DNA, 25 bp, probe
cagggtgagcagtacatgaacaccc

SEQ ID NO: 168790 - DNA, 25 bp, probe
catgtttgacagcggaaaccctgga

SEQ ID NO: 168791 - DNA, 25 bp, probe
caggtggacagggacacaatcctag

SEQ ID NO: 168792 - DNA, 25 bp, probe
caggtcaactgggactgcaacctgg

SEQ ID NO: 168793 - DNA, 25 bp, probe
caggtctacgtgtttgcaacgctag

SEQ ID NO: 168794 - DNA, 25 bp, probe
caggcccacaggtttaaggctgagg

SEQ ID NO: 168795 - DNA, 25 bp, probe
catggcccacatggcctccaaggag

SEQ ID NO: 168796 - DNA, 25 bp, probe
catggcctacatggaacgcatgaac

SEQ ID NO: 168797 - DNA, 25 bp, probe
caggtctgaattcaagcatgagaaa

SEQ ID NO: 168798 - DNA, 25 bp, probe
caggtcctttggggcatagatcaga

SEQ ID NO: 168799 - DNA, 25 bp, probe
caggtgccttgccgcagagaaaaca

SEQ ID NO: 168800 - DNA, 25 bp, probe
caggctggtttgcaagaatgaaatg

SEQ ID NO: 168801 - DNA, 25 bp, probe
caggttttctctagagcaaaacggt

SEQ ID NO: 168802 - DNA, 25 bp, probe
catggttttttcgaggacaacgact

SEQ ID NO: 168803 - DNA, 25 bp, probe
caggagagtttcagggacaattact

SEQ ID NO: 168804 - DNA, 25 bp, probe
caggtctggttcggggtcagattcc

SEQ ID NO: 168805 - DNA, 25 bp, probe
caggtgtagttctgctgaatcctat

SEQ ID NO: 168806 - DNA, 25 bp, probe
caggtgtagttctgctgaatcctat

SEQ ID NO: 168807 - DNA, 25 bp, probe
caggttcaattttctgagatttctc

SEQ ID NO: 168808 - DNA, 25 bp, probe
caggttcaattttctgagatttctc

SEQ ID NO: 168809 - DNA, 25 bp, probe
caggctactgatgtcctgggttgct

SEQ ID NO: 168810 - DNA, 25 bp, probe
caggcaacttcagtcctgggagacc

SEQ ID NO: 168811 - DNA, 25 bp, probe
caggcacagcatgacctcctgaagt

SEQ ID NO: 168812 - DNA, 25 bp, probe
caggcaatgcgaacccaaatgcagc

SEQ ID NO: 168813 - DNA, 25 bp, probe
cagggagtgtcacctcaaatgcaat

SEQ ID NO: 168814 - DNA, 25 bp, probe
catggagcggtacctaaaacagatc

SEQ ID NO: 168815 - DNA, 25 bp, probe
caggaggcccagactatatgaaact

SEQ ID NO: 168816 - DNA, 25 bp, probe
caggaggcccagactatatgaaact

SEQ ID NO: 168817 - DNA, 25 bp, probe
catggaccccgtataacatcatggt

SEQ ID NO: 168818 - DNA, 25 bp, probe
caggacaacctgaattctataagtt

SEQ ID NO: 168819 - DNA, 25 bp, probe
caggaaactctgcactctacttgtg

SEQ ID NO: 168820 - DNA, 25 bp, probe
caggaaactctgcactctacttgtg

SEQ ID NO: 168821 - DNA, 25 bp, probe
caggaaactgctgagatccacctcc

SEQ ID NO: 168822 - DNA, 25 bp, probe
caggtgaactcgaagcccacaatcc

SEQ ID NO: 168823 - DNA, 25 bp, probe
cagggggccagtacaccaacctgca

SEQ ID NO: 168824 - DNA, 25 bp, probe
caggggatgaagagcacccaccagc

SEQ ID NO: 168825 - DNA, 25 bp, probe
catgaggctgagggcaagacccccc

SEQ ID NO: 168826 - DNA, 25 bp, probe
caggaggaaggtggaggcccccacg

SEQ ID NO: 168827 - DNA, 25 bp, probe
caggacgaaagtgtggacagcaaga

SEQ ID NO: 168828 - DNA, 25 bp, probe
caggaaggaagtgggatgacctcag

SEQ ID NO: 168829 - DNA, 25 bp, probe
caggaggagacagtcaggaagcctc

SEQ ID NO: 168830 - DNA, 25 bp, probe
caggggactcagaggctcccctgtg

SEQ ID NO: 168831 - DNA, 25 bp, probe
caggtgcacctaaaggctgacccgg

SEQ ID NO: 168832 - DNA, 25 bp, probe
caggtgcacctaaaggctgacccgg

SEQ ID NO: 168833 - DNA, 25 bp, probe
caggtcctgctgatgaggtggcctc

SEQ ID NO: 168834 - DNA, 25 bp, probe
caggtcctgctgatgaggtggcctc

SEQ ID NO: 168835 - DNA, 25 bp, probe
caggcactgggcatgaggggttcct

SEQ ID NO: 168836 - DNA, 25 bp, probe
caggactgctcagaggggcgattcc

SEQ ID NO: 168837 - DNA, 25 bp, probe
caggaagctgcttcggggggtgagc

SEQ ID NO: 168838 - DNA, 25 bp, probe
caggaactgcctggtgggcgagaac

SEQ ID NO: 168839 - DNA, 25 bp, probe
caggtgtgctcctgtggagtgaccc

SEQ ID NO: 168840 - DNA, 25 bp, probe
caggtgtgctcctgtggagtgaccc

SEQ ID NO: 168841 - DNA, 25 bp, probe
caggcagtggcgtcgttgaggtgct

SEQ ID NO: 168842 - DNA, 25 bp, probe
caggaatgattgtgttgccgtgctc

SEQ ID NO: 168843 - DNA, 25 bp, probe
caggaatgattgtgttgccgtgctc

SEQ ID NO: 168844 - DNA, 25 bp, probe
cagggtgattctggtggccctgtgg

SEQ ID NO: 168845 - DNA, 25 bp, probe
catgagtttcttgggcaggttgagg

SEQ ID NO: 168846 - DNA, 25 bp, probe
caggatttgctgggagagggtgttg

SEQ ID NO: 168847 - DNA, 25 bp, probe
caggtccctgtgaagaacgtgttgg

SEQ ID NO: 168848 - DNA, 25 bp, probe
caggtccctgtgaagaacgtgttgg

SEQ ID NO: 168849 - DNA, 25 bp, probe
catggtcccctggcagaaggaggtg

SEQ ID NO: 168850 - DNA, 25 bp, probe
caggcctggccagtcaaagtagtct

SEQ ID NO: 168851 - DNA, 25 bp, probe
caggcctgtccggcagaatctggcc

SEQ ID NO: 168852 - DNA, 25 bp, probe
caggactataagaatacatttccca

SEQ ID NO: 168853 - DNA, 25 bp, probe
catggccttcaaaaacattgcctcc

SEQ ID NO: 168854 - DNA, 25 bp, probe
catggacttcccaacagattccacc

SEQ ID NO: 168855 - DNA, 25 bp, probe
caggacttcccttataaagcaaaat

SEQ ID NO: 168856 - DNA, 25 bp, probe
caggacttgcccatcataggtaagt

SEQ ID NO: 168857 - DNA, 25 bp, probe
caggaggtcccaccatgtggacaga

SEQ ID NO: 168858 - DNA, 25 bp, probe
caggggttcccactaggatgcagag

SEQ ID NO: 168859 - DNA, 25 bp, probe
caggggcttgcctacagaggaaagg

SEQ ID NO: 168860 - DNA, 25 bp, probe
caggggcttgcctacagaggaaagg

SEQ ID NO: 168861 - DNA, 25 bp, probe
caggtacttcactcagaaagaggaa

SEQ ID NO: 168862 - DNA, 25 bp, probe
caggttctaccagctccatagagaa

SEQ ID NO: 168863 - DNA, 25 bp, probe
caggctttactctgacattcaagca

SEQ ID NO: 168864 - DNA, 25 bp, probe
caggcataaaccttccactcttgaa

SEQ ID NO: 168865 - DNA, 25 bp, probe
caggaagagacctttcctctgacgg

SEQ ID NO: 168866 - DNA, 25 bp, probe
caggcaataaactttcttcggtgag

SEQ ID NO: 168867 - DNA, 25 bp, probe
caggatttgaatcttctcttggtga

SEQ ID NO: 168868 - DNA, 25 bp, probe
caggactggaatcaccgactactga

SEQ ID NO: 168869 - DNA, 25 bp, probe
caggagcttgaagcactcggctgca

SEQ ID NO: 168870 - DNA, 25 bp, probe
cagggtctgaaggactggattggcc

SEQ ID NO: 168871 - DNA, 25 bp, probe
caggctgtgcgaagtttaactgtgc

SEQ ID NO: 168872 - DNA, 25 bp, probe
caggtgtctgacgtgtaaacttgga

SEQ ID NO: 168873 - DNA, 25 bp, probe
caggtgtctgacgtgtaaacttgga

SEQ ID NO: 168874 - DNA, 25 bp, probe
caggctctctggcttaagtttagaa

SEQ ID NO: 168875 - DNA, 25 bp, probe
catcatcttctgggttaggccttgc

SEQ ID NO: 168876 - DNA, 25 bp, probe
catgactgtctgtgttgcggacttc

SEQ ID NO: 168877 - DNA, 25 bp, probe
catgatcattagtgcctctgtgcgc

SEQ ID NO: 168878 - DNA, 25 bp, probe
catggacatatggggccttggcgtc

SEQ ID NO: 168879 - DNA, 25 bp, probe
catgttcattcagcgtgcttggtcc

SEQ ID NO: 168880 - DNA, 25 bp, probe
caggtcagcttccatggtagtgtcc

SEQ ID NO: 168881 - DNA, 25 bp, probe
catggtagtgtccatttggggtccc

SEQ ID NO: 168882 - DNA, 25 bp, probe
caggtatgttgcctttatggtttcc

SEQ ID NO: 168883 - DNA, 25 bp, probe
caggtattgggctgttggttcctca

SEQ ID NO: 168884 - DNA, 25 bp, probe
caggatttggtgtttagctgtttct

SEQ ID NO: 168885 - DNA, 25 bp, probe
cataatttcagttcttaccctactt

SEQ ID NO: 168886 - DNA, 25 bp, probe
caggacagtagctgctctactccta

SEQ ID NO: 168887 - DNA, 25 bp, probe
caggacagtagctgctctactccta

SEQ ID NO: 168888 - DNA, 25 bp, probe
cggacctacgacatgatccagtact

SEQ ID NO: 168889 - DNA, 25 bp, probe
caggatccttggaagtcatccagga

SEQ ID NO: 168890 - DNA, 25 bp, probe
cataaacacggaagattcgcggatg

SEQ ID NO: 168891 - DNA, 25 bp, probe
catacacatacgtattttccgtagt

SEQ ID NO: 168892 - DNA, 25 bp, probe
catctccccaaacttggacgaagta

SEQ ID NO: 168893 - DNA, 25 bp, probe
catccaccctggtgttgactgactt

SEQ ID NO: 168894 - DNA, 25 bp, probe
catccacaactacaaatcactaccg

SEQ ID NO: 168895 - DNA, 25 bp, probe
catcccaggctacaacaagctgtcc

SEQ ID NO: 168896 - DNA, 25 bp, probe
catcccaggctacaacaagctgtcc

SEQ ID NO: 168897 - DNA, 25 bp, probe
ccgaaggtatcgaacggcgtgcccg

SEQ ID NO: 168898 - DNA, 25 bp, probe
ccgaaggtatcgaacggcgtgcccg

SEQ ID NO: 168899 - DNA, 25 bp, probe
cttgcagggtatctatcgggtcagc

SEQ ID NO: 168900 - DNA, 25 bp, probe
cttgcagggtatctatcgggtcagc

SEQ ID NO: 168901 - DNA, 25 bp, probe
ctctgagcggttggtgccgggtata

SEQ ID NO: 168902 - DNA, 25 bp, probe
caggagggtaaggccagggtgtgaa

SEQ ID NO: 168903 - DNA, 25 bp, probe
caggagggagccccaaggcgtagaa

SEQ ID NO: 168904 - DNA, 25 bp, probe
caggatggggccaaaaggccattga

SEQ ID NO: 168905 - DNA, 25 bp, probe
caggtgggtctcgtaagtgtcctgg

SEQ ID NO: 168906 - DNA, 25 bp, probe
caggtgggtctcgtaagtgtcctgg

SEQ ID NO: 168907 - DNA, 25 bp, probe
caggggtgtccagaatctgcgtctg

SEQ ID NO: 168908 - DNA, 25 bp, probe
catgtcaggcgttaaactgtcagtc

SEQ ID NO: 168909 - DNA, 25 bp, probe
catgtcaggcgttaaactgtcagtc

SEQ ID NO: 168910 - DNA, 25 bp, probe
caggcatgactttgacagactccag

SEQ ID NO: 168911 - DNA, 25 bp, probe
caggctgcgatcatggaactagatg

SEQ ID NO: 168912 - DNA, 25 bp, probe
caggctgatgagctccaacataaca

SEQ ID NO: 168913 - DNA, 25 bp, probe
caggctgagagctcagatttagaaa

SEQ ID NO: 168914 - DNA, 25 bp, probe
caggtaatgaaagtcttgcggcaca

SEQ ID NO: 168915 - DNA, 25 bp, probe
caggtgccatgtaaggcttggtgcc

SEQ ID NO: 168916 - DNA, 25 bp, probe
caggtgccagtttgctgatggccgc

SEQ ID NO: 168917 - DNA, 25 bp, probe
caggtgcccatcaagtggatggcgc

SEQ ID NO: 168918 - DNA, 25 bp, probe
catcgatgccgtgaaggactgccgt

SEQ ID NO: 168919 - DNA, 25 bp, probe
catgcgttcgctgaaaggcatcggt

SEQ ID NO: 168920 - DNA, 25 bp, probe
catcgtttgccttaattctcgaaca

SEQ ID NO: 168921 - DNA, 25 bp, probe
catagttttctgacaatttggacaa

SEQ ID NO: 168922 - DNA, 25 bp, probe
catgatattttatagcttgggaaga

SEQ ID NO: 168923 - DNA, 25 bp, probe
cataaaggctttacttgttggtgaa

SEQ ID NO: 168924 - DNA, 25 bp, probe
cataaaggctttacttgttggtgaa

SEQ ID NO: 168925 - DNA, 25 bp, probe
catgtcaaggttaagtctttcgaga

SEQ ID NO: 168926 - DNA, 25 bp, probe
catggaaatccaaatgtctggggaa

SEQ ID NO: 168927 - DNA, 25 bp, probe
catggaaatccaaatgtctggggaa

SEQ ID NO: 168928 - DNA, 25 bp, probe
caggacaagcgcttcatctagggtg

SEQ ID NO: 168929 - DNA, 25 bp, probe
caggacaagcgcttcatctagggtg

SEQ ID NO: 168930 - DNA, 25 bp, probe
caggtctatggcttctacgatgagt

SEQ ID NO: 168931 - DNA, 25 bp, probe
caggtatttcaggtcagccacagct

SEQ ID NO: 168932 - DNA, 25 bp, probe
caggttttcatcctgaacatcctct

SEQ ID NO: 168933 - DNA, 25 bp, probe
caggttttcatcctgaacatcctct

SEQ ID NO: 168934 - DNA, 25 bp, probe
caggtagtggccctgagcagcatcc

SEQ ID NO: 168935 - DNA, 25 bp, probe
caggtgactggtggcctgacatcga

SEQ ID NO: 168936 - DNA, 25 bp, probe
caggtcatcgtctcctatgaagacg

SEQ ID NO: 168937 - DNA, 25 bp, probe
caggtctgtgatgcccttagatgtc

SEQ ID NO: 168938 - DNA, 25 bp, probe
caggtctgtgatgcccttagatgtc

SEQ ID NO: 168939 - DNA, 25 bp, probe
caggctttggtggcagcatggacag

SEQ ID NO: 168940 - DNA, 25 bp, probe
caggtgtctgtgggatctggaagtg

SEQ ID NO: 168941 - DNA, 25 bp, probe
caggtgtctgtgggatctggaagtg

SEQ ID NO: 168942 - DNA, 25 bp, probe
caggatgattatgtacttgaagtga

SEQ ID NO: 168943 - DNA, 25 bp, probe
caggatgcccacgtcatcctgaacg

SEQ ID NO: 168944 - DNA, 25 bp, probe
caggatccatgggagcattctcaaa

SEQ ID NO: 168945 - DNA, 25 bp, probe
caggtccaggaacttcctatggcct

SEQ ID NO: 168946 - DNA, 25 bp, probe
caggccctggaactctatctgggcc

SEQ ID NO: 168947 - DNA, 25 bp, probe
caggcaccgagaacctagcacgtgc

SEQ ID NO: 168948 - DNA, 25 bp, probe
caggaggtggaaactgcagagagtc

SEQ ID NO: 168949 - DNA, 25 bp, probe
catgacggtgagcacctcgaacgct

SEQ ID NO: 168950 - DNA, 25 bp, probe
catgaccatgtgctatgcctgtaac

SEQ ID NO: 168951 - DNA, 25 bp, probe
ctagcagctggactgattttgaata

SEQ ID NO: 168952 - DNA, 25 bp, probe
catggactggatgctttataaattt

SEQ ID NO: 168953 - DNA, 25 bp, probe
caggaatggatgtcgctaatcataa

SEQ ID NO: 168954 - DNA, 25 bp, probe
caggcacggaggctcgtgcatgtaa

SEQ ID NO: 168955 - DNA, 25 bp, probe
caggagcggatggagttgctgcagg

SEQ ID NO: 168956 - DNA, 25 bp, probe
caggaggtcaagtgtgcatgcaaga

SEQ ID NO: 168957 - DNA, 25 bp, probe
caggcaggtacatcgagtacatgtg

SEQ ID NO: 168958 - DNA, 25 bp, probe
caggcaggtacatcgagtacatgtg

SEQ ID NO: 168959 - DNA, 25 bp, probe
caggcagagaactgaagtactgggg

SEQ ID NO: 168960 - DNA, 25 bp, probe
caggcagggactgagtgtaccgtgg

SEQ ID NO: 168961 - DNA, 25 bp, probe
caggcagggactgagtgtaccgtgg

SEQ ID NO: 168962 - DNA, 25 bp, probe
caggcggaagctgcgggccgcctgg

SEQ ID NO: 168963 - DNA, 25 bp, probe
caggagtaagatgtgtgagcgcact

SEQ ID NO: 168964 - DNA, 25 bp, probe
caggatttcaatatgtacagaattc

SEQ ID NO: 168965 - DNA, 25 bp, probe
caggcatgttcatattttacatcta

SEQ ID NO: 168966 - DNA, 25 bp, probe
caggcatgttcttgttttctcctta

SEQ ID NO: 168967 - DNA, 25 bp, probe
caggattatattagcattattttta

SEQ ID NO: 168968 - DNA, 25 bp, probe
caggtctaatcaggtttctttattg

SEQ ID NO: 168969 - DNA, 25 bp, probe
caggacaaataggttctgttttatg

SEQ ID NO: 168970 - DNA, 25 bp, probe
caggagcaaaaggcggttcgtcttc

SEQ ID NO: 168971 - DNA, 25 bp, probe
caggaacaaaaccagcttgctttgt

SEQ ID NO: 168972 - DNA, 25 bp, probe
caggaaacaatcaccttgctccaca

SEQ ID NO: 168973 - DNA, 25 bp, probe
caggtgatggcaactccctggaagc

SEQ ID NO: 168974 - DNA, 25 bp, probe
caggtgaggcttcgagctctgagga

SEQ ID NO: 168975 - DNA, 25 bp, probe
caggtgagcagttagagtaggtgaa

SEQ ID NO: 168976 - DNA, 25 bp, probe
caggtcagagtggaggagagggaag

SEQ ID NO: 168977 - DNA, 25 bp, probe
caggaagcagtgagtcggggacagt

SEQ ID NO: 168978 - DNA, 25 bp, probe
caggaagcaatgcaccagggtgaca

SEQ ID NO: 168979 - DNA, 25 bp, probe
caggcaagtgagcaccggggactga

SEQ ID NO: 168980 - DNA, 25 bp, probe
caggcaccaagcctcaagtggggct

SEQ ID NO: 168981 - DNA, 25 bp, probe
caggacgtctgagtagcaggaggag

SEQ ID NO: 168982 - DNA, 25 bp, probe
caggaggttatcggcagtggagcta

SEQ ID NO: 168983 - DNA, 25 bp, probe
caggagttcgagaccagtctggtca

SEQ ID NO: 168984 - DNA, 25 bp, probe
caggagatgcctacaccgattatgt

SEQ ID NO: 168985 - DNA, 25 bp, probe
caggaagcccacctggcatttggta

SEQ ID NO: 168986 - DNA, 25 bp, probe
catggcaagttctgtggttctgaga

SEQ ID NO: 168987 - DNA, 25 bp, probe
caggatattcactctgtggtccaga

SEQ ID NO: 168988 - DNA, 25 bp, probe
caggattgccactcctgtttcagag

SEQ ID NO: 168989 - DNA, 25 bp, probe
caggaggttctcactgttgtgaagg

SEQ ID NO: 168990 - DNA, 25 bp, probe
caggaggtttgcagggagctcaagc

SEQ ID NO: 168991 - DNA, 25 bp, probe
caggaggccagtgggcgggccatga

SEQ ID NO: 168992 - DNA, 25 bp, probe
caggtgcaggagggcgagggccagg

SEQ ID NO: 168993 - DNA, 25 bp, probe
caggtgatggtgggcaagatgcagc

SEQ ID NO: 168994 - DNA, 25 bp, probe
caggtgcaggtcagcacgttgctgt

SEQ ID NO: 168995 - DNA, 25 bp, probe
caggagggcactggagctgtcttgt

SEQ ID NO: 168996 - DNA, 25 bp, probe
caggagggacttagtggctctgccg

SEQ ID NO: 168997 - DNA, 25 bp, probe
caggagcgtgacactggtgatcgca

SEQ ID NO: 168998 - DNA, 25 bp, probe
caggagcgtgacactggtgatcgca

SEQ ID NO: 168999 - DNA, 25 bp, probe
caggacgctcaaggaggtgctgaca

SEQ ID NO: 169000 - DNA, 25 bp, probe
caggagggcatagggcagcctacca

SEQ ID NO: 169001 - DNA, 25 bp, probe
caggagtgacacaggcagccagtac

SEQ ID NO: 169002 - DNA, 25 bp, probe
caggagctcaacatggaacagaaaa

SEQ ID NO: 169003 - DNA, 25 bp, probe
catgaggccaccctggaatcagaac

SEQ ID NO: 169004 - DNA, 25 bp, probe
catgtgcacagcttctggtaacaaa

SEQ ID NO: 169005 - DNA, 25 bp, probe
catgttcagcattcaggtgatcagc

SEQ ID NO: 169006 - DNA, 25 bp, probe
catggcatctcttgcacagtaacct

SEQ ID NO: 169007 - DNA, 25 bp, probe
caggcacattaactgttgcactttt

SEQ ID NO: 169008 - DNA, 25 bp, probe
catgatcttttatgttgcaccctct

SEQ ID NO: 169009 - DNA, 25 bp, probe
catgatcttttatgttgcaccctct

SEQ ID NO: 169010 - DNA, 25 bp, probe
catgttccaatatgattccacccat

SEQ ID NO: 169011 - DNA, 25 bp, probe
catgtggttataaatttcaccagcg

SEQ ID NO: 169012 - DNA, 25 bp, probe
caggccatttatggcctccatccag

SEQ ID NO: 169013 - DNA, 25 bp, probe
caggaattcattgcctctcaggcgc

SEQ ID NO: 169014 - DNA, 25 bp, probe
catggtaatgttgccctctgaggcc

SEQ ID NO: 169015 - DNA, 25 bp, probe
catggtaatgttgccctctgaggcc

SEQ ID NO: 169016 - DNA, 25 bp, probe
catggtgattttgtccggagtgccc

SEQ ID NO: 169017 - DNA, 25 bp, probe
catggtactgtatgtatgggagagc

SEQ ID NO: 169018 - DNA, 25 bp, probe
caggctacggatggatatgtcagga

SEQ ID NO: 169019 - DNA, 25 bp, probe
catggctccggagatggtgaaggga

SEQ ID NO: 169020 - DNA, 25 bp, probe
caggcccgctgggagggtacatgga

SEQ ID NO: 169021 - DNA, 25 bp, probe
catacccctggccaaggaagatccc

SEQ ID NO: 169022 - DNA, 25 bp, probe
ctgtgcccacttcaacgaaaaccac

SEQ ID NO: 169023 - DNA, 25 bp, probe
ctggtccagttggagaccgtcaacc

SEQ ID NO: 169024 - DNA, 25 bp, probe
ctgagtttgatcccagatccgtcca

SEQ ID NO: 169025 - DNA, 25 bp, probe
cttggctttggggatacttctaaat

SEQ ID NO: 169026 - DNA, 25 bp, probe
catccctttgtgtaaacctgttaat

SEQ ID NO: 169027 - DNA, 25 bp, probe
catccccattaaaaagcttttcctg

SEQ ID NO: 169028 - DNA, 25 bp, probe
catccccattaaaaagcttttcctg

SEQ ID NO: 169029 - DNA, 25 bp, probe
catccccatgttattcttttaagtg

SEQ ID NO: 169030 - DNA, 25 bp, probe
gcttaacttttgttgcctcttaacg

SEQ ID NO: 169031 - DNA, 25 bp, probe
ctagcattttttctactgtaaacgt

SEQ ID NO: 169032 - DNA, 25 bp, probe
caggttattgtcccacacgtgaaac

SEQ ID NO: 169033 - DNA, 25 bp, probe
caggaatttgtctaacacatttcaa

SEQ ID NO: 169034 - DNA, 25 bp, probe
catggccggttatgcacatcattta

SEQ ID NO: 169035 - DNA, 25 bp, probe
caggctctgatgctaagcagctgta

SEQ ID NO: 169036 - DNA, 25 bp, probe
caggctctgatgctaagcagctgta

SEQ ID NO: 169037 - DNA, 25 bp, probe
caggctctgatgctgagaggcttgc

SEQ ID NO: 169038 - DNA, 25 bp, probe
caggctcgagggagactgatcccct

SEQ ID NO: 169039 - DNA, 25 bp, probe
caggaaagtggcacctgtctgctcc

SEQ ID NO: 169040 - DNA, 25 bp, probe
caggagtttgagatccagcctgccc

SEQ ID NO: 169041 - DNA, 25 bp, probe
caggacctcgagatcatcgtcatcc

SEQ ID NO: 169042 - DNA, 25 bp, probe
caggaacctggcaacatcacgattt

SEQ ID NO: 169043 - DNA, 25 bp, probe
caggaattttcttcatcgagattta

SEQ ID NO: 169044 - DNA, 25 bp, probe
caggagtttgtcaagcttcaagtta

SEQ ID NO: 169045 - DNA, 25 bp, probe
catgcggtttccaaggtgcacattt

SEQ ID NO: 169046 - DNA, 25 bp, probe
catggtcatttccggagtacttgcc

SEQ ID NO: 169047 - DNA, 25 bp, probe
catgaagcgtttcccagaacttctc

SEQ ID NO: 169048 - DNA, 25 bp, probe
caggcacgttaactcgaattctcac

SEQ ID NO: 169049 - DNA, 25 bp, probe
caggcagctttaaccattaaaactg

SEQ ID NO: 169050 - DNA, 25 bp, probe
caggcagctttaaccattaaaactg

SEQ ID NO: 169051 - DNA, 25 bp, probe
caggatttgtcagtctctttagaag

SEQ ID NO: 169052 - DNA, 25 bp, probe
catgtaaatgtcgcttcttcaagtg

SEQ ID NO: 169053 - DNA, 25 bp, probe
caggagatcgtggacttcgctaagc

SEQ ID NO: 169054 - DNA, 25 bp, probe
caggagatcaggcatcttctctgtg

SEQ ID NO: 169055 - DNA, 25 bp, probe
caggacacagaccttttcagtatgt

SEQ ID NO: 169056 - DNA, 25 bp, probe
caggaaaacccattggcagatattg

SEQ ID NO: 169057 - DNA, 25 bp, probe
catggacaaaacctgctggaatttt

SEQ ID NO: 169058 - DNA, 25 bp, probe
catgggcaatggggtgtggcacttt

SEQ ID NO: 169059 - DNA, 25 bp, probe
catggagattggtgcttccctgttt

SEQ ID NO: 169060 - DNA, 25 bp, probe
catggcagttggatcagctccttta

SEQ ID NO: 169061 - DNA, 25 bp, probe
caggagatcgacaccatcctggcta

SEQ ID NO: 169062 - DNA, 25 bp, probe
caggagaagacacctctgggagcct

SEQ ID NO: 169063 - DNA, 25 bp, probe
caggaagaactgccactgcgaggcc

SEQ ID NO: 169064 - DNA, 25 bp, probe
caggagcgcaaggaacggaagctgc

SEQ ID NO: 169065 - DNA, 25 bp, probe
catggaggacccaacaggaggccgt

SEQ ID NO: 169066 - DNA, 25 bp, probe
catggaggacccaacaggaggccgt

SEQ ID NO: 169067 - DNA, 25 bp, probe
catgtggctggccacaccaagcagg

SEQ ID NO: 169068 - DNA, 25 bp, probe
caggttgtgaggaccaagcacgcct

SEQ ID NO: 169069 - DNA, 25 bp, probe
caggacgagagggccaacctgacca

SEQ ID NO: 169070 - DNA, 25 bp, probe
caggacgaggagatcctccgaggcc

SEQ ID NO: 169071 - DNA, 25 bp, probe
caggcccaggacaaactccagggcc

SEQ ID NO: 169072 - DNA, 25 bp, probe
catggtattggaataactcacaggg

SEQ ID NO: 169073 - DNA, 25 bp, probe
caggattcagaaagacaccaggctg

SEQ ID NO: 169074 - DNA, 25 bp, probe
caggactcaggtaacctgcgtgctt

SEQ ID NO: 169075 - DNA, 25 bp, probe
caggattcacggtgcacatgctggc

SEQ ID NO: 169076 - DNA, 25 bp, probe
caggattcacggtgcacatgctggc

SEQ ID NO: 169077 - DNA, 25 bp, probe
caggattcacggtgcacatgctggc

SEQ ID NO: 169078 - DNA, 25 bp, probe
caggacttcaactcagctgtgcagc

SEQ ID NO: 169079 - DNA, 25 bp, probe
catggtcttcgagtatatgcggcac

SEQ ID NO: 169080 - DNA, 25 bp, probe
catggtaccgagtgatccgtcatac

SEQ ID NO: 169081 - DNA, 25 bp, probe
catggtccccaagacctctatattt

SEQ ID NO: 169082 - DNA, 25 bp, probe
caggatgtcattcagcagaccttat

SEQ ID NO: 169083 - DNA, 25 bp, probe
caggatgcttcgcagaggcactgtg

SEQ ID NO: 169084 - DNA, 25 bp, probe
catggagctgatcaagaggccgtaa

SEQ ID NO: 169085 - DNA, 25 bp, probe
caggaggtggagctgcccagtattg

SEQ ID NO: 169086 - DNA, 25 bp, probe
caggaggtggagctgcccagtattg

SEQ ID NO: 169087 - DNA, 25 bp, probe
catggggctgggcagctaccatttc

SEQ ID NO: 169088 - DNA, 25 bp, probe
ctgggggtccagaccccatattcct

SEQ ID NO: 169089 - DNA, 25 bp, probe
caggagggtccaaagccgacattcc

SEQ ID NO: 169090 - DNA, 25 bp, probe
caggagggtccaaagccgacattcc

SEQ ID NO: 169091 - DNA, 25 bp, probe
caggagggtggaactcccattctca

SEQ ID NO: 169092 - DNA, 25 bp, probe
caggagaatgtgcaactttattcca

SEQ ID NO: 169093 - DNA, 25 bp, probe
catggatacagggcccttttttgca

SEQ ID NO: 169094 - DNA, 25 bp, probe
caggatatcaaagctctgtttgtgt

SEQ ID NO: 169095 - DNA, 25 bp, probe
caggatatcatctagtgatcttttg

SEQ ID NO: 169096 - DNA, 25 bp, probe
caggaatcatgatctgactttaatt

SEQ ID NO: 169097 - DNA, 25 bp, probe
caggaatgtgattcttcatcttcca

SEQ ID NO: 169098 - DNA, 25 bp, probe
caggacaggatgactgtcttcccta

SEQ ID NO: 169099 - DNA, 25 bp, probe
caggacatcaatacactgctgctct

SEQ ID NO: 169100 - DNA, 25 bp, probe
caggctacaacaagctgtcctgcaa

SEQ ID NO: 169101 - DNA, 25 bp, probe
caggtagctgagggcatggcctaca

SEQ ID NO: 169102 - DNA, 25 bp, probe
caggttgctgtgttgcagtgcattg

SEQ ID NO: 169103 - DNA, 25 bp, probe
caggatgtgcttatgcaggattcca

SEQ ID NO: 169104 - DNA, 25 bp, probe
catgactgtcctagtgaacacttaa

SEQ ID NO: 169105 - DNA, 25 bp, probe
caggcagtccttgggaagcctagga

SEQ ID NO: 169106 - DNA, 25 bp, probe
caggagtccgaggatacagccaagg

SEQ ID NO: 169107 - DNA, 25 bp, probe
caggcatgtcggggaaaccagcacg

SEQ ID NO: 169108 - DNA, 25 bp, probe
caggctgggcagggacaaccaccag

SEQ ID NO: 169109 - DNA, 25 bp, probe
catgagttccaccagaaagccactc

SEQ ID NO: 169110 - DNA, 25 bp, probe
catgagtttacacaaagacttcaac

SEQ ID NO: 169111 - DNA, 25 bp, probe
catggttctcaacaagatggccaaa

SEQ ID NO: 169112 - DNA, 25 bp, probe
catggtagccaacagaacctcctga

SEQ ID NO: 169113 - DNA, 25 bp, probe
caggatggtgaacagcaatcttgcc

SEQ ID NO: 169114 - DNA, 25 bp, probe
caggagggcaagtacgagttccccg

SEQ ID NO: 169115 - DNA, 25 bp, probe
caggcagctggcatgaaagaggacc

SEQ ID NO: 169116 - DNA, 25 bp, probe
caggagatgctgctgggagggtccc

SEQ ID NO: 169117 - DNA, 25 bp, probe
caggagcagtggcacgtggtgtcca

SEQ ID NO: 169118 - DNA, 25 bp, probe
caggcagggggaggatggtaatcac

SEQ ID NO: 169119 - DNA, 25 bp, probe
caggcgtcgaggacctggtgtttct

SEQ ID NO: 169120 - DNA, 25 bp, probe
caggcccttggaacaggaggtctct

SEQ ID NO: 169121 - DNA, 25 bp, probe
caggctcacattaaaccaggggttt

SEQ ID NO: 169122 - DNA, 25 bp, probe
catggctcaaataataccctgggta

SEQ ID NO: 169123 - DNA, 25 bp, probe
catggccagaatatgaccgtcagcg

SEQ ID NO: 169124 - DNA, 25 bp, probe
catgaacaaattcctgcttgtccgg

SEQ ID NO: 169125 - DNA, 25 bp, probe
caggaacaactgccggtgatactgg

SEQ ID NO: 169126 - DNA, 25 bp, probe
caggaagctgggcctgggctatcgt

SEQ ID NO: 169127 - DNA, 25 bp, probe
caggaagctgggcctgggctatcgt

SEQ ID NO: 169128 - DNA, 25 bp, probe
caggaaggagaccatggctctcatc

SEQ ID NO: 169129 - DNA, 25 bp, probe
caggagagcgtactgcggtcagtgc

SEQ ID NO: 169130 - DNA, 25 bp, probe
caggatgatcagtccggggcgctgc

SEQ ID NO: 169131 - DNA, 25 bp, probe
caggcagcacagacgtggggcatcc

SEQ ID NO: 169132 - DNA, 25 bp, probe
caggcagccaggtcatctgagtatc

SEQ ID NO: 169133 - DNA, 25 bp, probe
caggcggcactggtcatggaaaacg

SEQ ID NO: 169134 - DNA, 25 bp, probe
caggcagaggagatatggaacagaa

SEQ ID NO: 169135 - DNA, 25 bp, probe
caggagggagctagcactggacgca

SEQ ID NO: 169136 - DNA, 25 bp, probe
caggagggagctagcactggacgca

SEQ ID NO: 169137 - DNA, 25 bp, probe
catggatggagggtatctggatcaa

SEQ ID NO: 169138 - DNA, 25 bp, probe
catggaaagccattcactcctcaat

SEQ ID NO: 169139 - DNA, 25 bp, probe
catggagcaaggcttccctagacta

SEQ ID NO: 169140 - DNA, 25 bp, probe
caggctgcagacgtttgccagcaac

SEQ ID NO: 169141 - DNA, 25 bp, probe
caggcatagcagttctttagccata

SEQ ID NO: 169142 - DNA, 25 bp, probe
caggcatccatgtgtgcaaaccatc

SEQ ID NO: 169143 - DNA, 25 bp, probe
caggcatccatgtgtgcaaaccatc

SEQ ID NO: 169144 - DNA, 25 bp, probe
caggcatcaagctgaacaacaaggt

SEQ ID NO: 169145 - DNA, 25 bp, probe
caggccaagaggatcaatcacatta

SEQ ID NO: 169146 - DNA, 25 bp, probe
caggccgaaatggtcaacgccatgc

SEQ ID NO: 169147 - DNA, 25 bp, probe
caggcctgataactctgtacgaggc

SEQ ID NO: 169148 - DNA, 25 bp, probe
caggcaatacacctctgaacatgtg

SEQ ID NO: 169149 - DNA, 25 bp, probe
caggactgtctccataacatcattg

SEQ ID NO: 169150 - DNA, 25 bp, probe
caggactgtctccataacatcattg

SEQ ID NO: 169151 - DNA, 25 bp, probe
caggacatgtcccaggatgagaagg

SEQ ID NO: 169152 - DNA, 25 bp, probe
caggattgctctgcaggaagacact

SEQ ID NO: 169153 - DNA, 25 bp, probe
caggcttctcgggtgaagaactgcc

SEQ ID NO: 169154 - DNA, 25 bp, probe
caggcttgtctggaaggagaaggcc

SEQ ID NO: 169155 - DNA, 25 bp, probe
caggcataccgggggcagagggttc

SEQ ID NO: 169156 - DNA, 25 bp, probe
caggatgacccctgggcaggtgtgt

SEQ ID NO: 169157 - DNA, 25 bp, probe
caggcccccatctgggatgatggga

SEQ ID NO: 169158 - DNA, 25 bp, probe
caggcagccatcttcaaggtgggag

SEQ ID NO: 169159 - DNA, 25 bp, probe
caggcaccatgttctgacttgggtg

SEQ ID NO: 169160 - DNA, 25 bp, probe
caggacacatgattctggcatacat

SEQ ID NO: 169161 - DNA, 25 bp, probe
caggcatgccaaatttgcatcacat

SEQ ID NO: 169162 - DNA, 25 bp, probe
caggcatgccaaatttgcatcacat

SEQ ID NO: 169163 - DNA, 25 bp, probe
caggcacattcaaattccagcatgc

SEQ ID NO: 169164 - DNA, 25 bp, probe
caggagttgcattatagccagtagt

SEQ ID NO: 169165 - DNA, 25 bp, probe
caggatgtcagagctaccagtgtgc

SEQ ID NO: 169166 - DNA, 25 bp, probe
caggagtgcagtggcatgctctcag

SEQ ID NO: 169167 - DNA, 25 bp, probe
caggcaggtgctggcattgttgctg

SEQ ID NO: 169168 - DNA, 25 bp, probe
caggagtgcatcaacgtgcttctgc

SEQ ID NO: 169169 - DNA, 25 bp, probe
caggagtcttcagtgtgtgagcctc

SEQ ID NO: 169170 - DNA, 25 bp, probe
caggccagttcgttggatggctctt

SEQ ID NO: 169171 - DNA, 25 bp, probe
caggcgctgcttcagatttggccta

SEQ ID NO: 169172 - DNA, 25 bp, probe
caggcgcctctcaagaaaacgctgg

SEQ ID NO: 169173 - DNA, 25 bp, probe
caggcgcctctcaagaaaacgctgg

SEQ ID NO: 169174 - DNA, 25 bp, probe
caggaccctctgacaaagaaggcag

SEQ ID NO: 169175 - DNA, 25 bp, probe
ctgcggccgtgcagacagaggagca

SEQ ID NO: 169176 - DNA, 25 bp, probe
catggattacttacacgccaagtca

SEQ ID NO: 169177 - DNA, 25 bp, probe
caggaggacatctactgccacaagt

SEQ ID NO: 169178 - DNA, 25 bp, probe
caggaggacatctactgccacaagt

SEQ ID NO: 169179 - DNA, 25 bp, probe
caggatggactcactgcagaagcag

SEQ ID NO: 169180 - DNA, 25 bp, probe
caggatggagtgagctgcacacccc

SEQ ID NO: 169181 - DNA, 25 bp, probe
caggatggagtgagctgcacacccc

SEQ ID NO: 169182 - DNA, 25 bp, probe
caggatggaggtgggaggccgagcc

SEQ ID NO: 169183 - DNA, 25 bp, probe
caggagtggtttcgagtgtccagcc

SEQ ID NO: 169184 - DNA, 25 bp, probe
caggcagtgtttcctgggtccagag

SEQ ID NO: 169185 - DNA, 25 bp, probe
caggctgtactttcaggttccaaag

SEQ ID NO: 169186 - DNA, 25 bp, probe
caggctgtactttcaggttccaaag

SEQ ID NO: 169187 - DNA, 25 bp, probe
caggcgtactgacaggtggaccaac

SEQ ID NO: 169188 - DNA, 25 bp, probe
caggcctacgaattggccgactaca

SEQ ID NO: 169189 - DNA, 25 bp, probe
caggccccgagagggcgagaccaga

SEQ ID NO: 169190 - DNA, 25 bp, probe
caggccccgagagggcgagaccaga

SEQ ID NO: 169191 - DNA, 25 bp, probe
caggcctcaggagtggtcaggacca

SEQ ID NO: 169192 - DNA, 25 bp, probe
caggcgctcggagaagaaaatcacc

SEQ ID NO: 169193 - DNA, 25 bp, probe
catggggcgtggcaagggaatagcg

SEQ ID NO: 169194 - DNA, 25 bp, probe
catggggcggggaagagttaaggag

SEQ ID NO: 169195 - DNA, 25 bp, probe
catggggcggggaagagttaaggag

SEQ ID NO: 169196 - DNA, 25 bp, probe
catggggggatctcagagcttacag

SEQ ID NO: 169197 - DNA, 25 bp, probe
catggtagggtcccttcttaacaga

SEQ ID NO: 169198 - DNA, 25 bp, probe
caggcttaggtccattctcctaagt

SEQ ID NO: 169199 - DNA, 25 bp, probe
caggcttctggtgtatcggtatggg

SEQ ID NO: 169200 - DNA, 25 bp, probe
caggcggtggacagatgggtagatg

SEQ ID NO: 169201 - DNA, 25 bp, probe
caggccgagggcagagatggacgtg

SEQ ID NO: 169202 - DNA, 25 bp, probe
caggcccagaagagcgtggacgatg

SEQ ID NO: 169203 - DNA, 25 bp, probe
cattcccaaaccggtggagcagtga

SEQ ID NO: 169204 - DNA, 25 bp, probe
catttccataaatggggtcgagaat

SEQ ID NO: 169205 - DNA, 25 bp, probe
cttccagctgctaaaaggcctcgga

SEQ ID NO: 169206 - DNA, 25 bp, probe
cttaagtgccaatgggcccaccttt

SEQ ID NO: 169207 - DNA, 25 bp, probe
ctttattgaaagtgccctcccttat

SEQ ID NO: 169208 - DNA, 25 bp, probe
ctttaaaaagcaacccccatgtatg

SEQ ID NO: 169209 - DNA, 25 bp, probe
ctttaaaaagcaacccccatgtatg

SEQ ID NO: 169210 - DNA, 25 bp, probe
ctgtaaaatggatggcccccgaaag

SEQ ID NO: 169211 - DNA, 25 bp, probe
catggagaagagcaaggccacgccg

SEQ ID NO: 169212 - DNA, 25 bp, probe
catcgagggccgaggtcacggccag

SEQ ID NO: 169213 - DNA, 25 bp, probe
catcggggcagggggtatgcagagc

SEQ ID NO: 169214 - DNA, 25 bp, probe
catcgggtgcagcaggggctatggc

SEQ ID NO: 169215 - DNA, 25 bp, probe
catggggtaggaggatgggctcgcc

SEQ ID NO: 169216 - DNA, 25 bp, probe
caggctgtggggtgagaggcccctc

SEQ ID NO: 169217 - DNA, 25 bp, probe
caggcgagagccaggagacgcccct

SEQ ID NO: 169218 - DNA, 25 bp, probe
caggcgagagccaggagacgcccct

SEQ ID NO: 169219 - DNA, 25 bp, probe
caggcaagagcctgaagccgacgcc

SEQ ID NO: 169220 - DNA, 25 bp, probe
caggcaaacttgcacgacgcctgcc

SEQ ID NO: 169221 - DNA, 25 bp, probe
caggcaaacttgcacgacgcctgcc

SEQ ID NO: 169222 - DNA, 25 bp, probe
caggaaacctgatgcagggctccat

SEQ ID NO: 169223 - DNA, 25 bp, probe
caggaagacctttaagatgctgctt

SEQ ID NO: 169224 - DNA, 25 bp, probe
caggaagagccaagccacaggcttt

SEQ ID NO: 169225 - DNA, 25 bp, probe
caggaaaggaagccgcactcagtta

SEQ ID NO: 169226 - DNA, 25 bp, probe
caggcaacaagaagagccctcaggg

SEQ ID NO: 169227 - DNA, 25 bp, probe
caggcctaacatcaggtctcagcgg

SEQ ID NO: 169228 - DNA, 25 bp, probe
caggcctaggatcagggaccagagg

SEQ ID NO: 169229 - DNA, 25 bp, probe
caggccctggctaatgggcccgagg

SEQ ID NO: 169230 - DNA, 25 bp, probe
caggagcctgagtgatgtggcccag

SEQ ID NO: 169231 - DNA, 25 bp, probe
caggagactgactacgtgctcaaca

SEQ ID NO: 169232 - DNA, 25 bp, probe
caggagaagatcttctgtggccaga

SEQ ID NO: 169233 - DNA, 25 bp, probe
caggagcaagtcctgtgtggcaaaa

SEQ ID NO: 169234 - DNA, 25 bp, probe
caggcagagatcaggtgggcagagg

SEQ ID NO: 169235 - DNA, 25 bp, probe
caggagaagctgcagggcgtggagt

SEQ ID NO: 169236 - DNA, 25 bp, probe
caggagcaagtgaggccggagagga

SEQ ID NO: 169237 - DNA, 25 bp, probe
caggacaagcagaggggttgctgga

SEQ ID NO: 169238 - DNA, 25 bp, probe
caggctcaagagctggcggaggggc

SEQ ID NO: 169239 - DNA, 25 bp, probe
caggctcagcagggtgggaacaggc

SEQ ID NO: 169240 - DNA, 25 bp, probe
catggccaacgacgaggagtcagac

SEQ ID NO: 169241 - DNA, 25 bp, probe
caggacagacgatggcagaggagag

SEQ ID NO: 169242 - DNA, 25 bp, probe
caggaaaggagccacaatgtgatag

SEQ ID NO: 169243 - DNA, 25 bp, probe
catggaactggaggccgagcagctg

SEQ ID NO: 169244 - DNA, 25 bp, probe
caggagatgtggaactcgggctgtc

SEQ ID NO: 169245 - DNA, 25 bp, probe
catggtcattgagtacatcgggact

SEQ ID NO: 169246 - DNA, 25 bp, probe
catggtggtgaaaattgccgacttt

SEQ ID NO: 169247 - DNA, 25 bp, probe
catgttgttaactatttaggttgtt

SEQ ID NO: 169248 - DNA, 25 bp, probe
catgatgggaaaggtattagattta

SEQ ID NO: 169249 - DNA, 25 bp, probe
catagtaaaaatttcagactttgga

SEQ ID NO: 169250 - DNA, 25 bp, probe
catagtaaaaatttcagactttgga

SEQ ID NO: 169251 - DNA, 25 bp, probe
catcagaataacattgtacaccttg

SEQ ID NO: 169252 - DNA, 25 bp, probe
catgctagaaccatggtatcccatg

SEQ ID NO: 169253 - DNA, 25 bp, probe
catgttgaccttattcgctgccatg

SEQ ID NO: 169254 - DNA, 25 bp, probe
catgttgaccttattcgctgccatg

SEQ ID NO: 169255 - DNA, 25 bp, probe
catggctcttcagttttccattctg

SEQ ID NO: 169256 - DNA, 25 bp, probe
catggctcttcagttttccattctg

SEQ ID NO: 169257 - DNA, 25 bp, probe
caggacgtcagttctgtccatgtgg

SEQ ID NO: 169258 - DNA, 25 bp, probe
caggaactgagttcattacatcttt

SEQ ID NO: 169259 - DNA, 25 bp, probe
caggagacgacttactagatctcat

SEQ ID NO: 169260 - DNA, 25 bp, probe
caggagaccctctgcacatgaggct

SEQ ID NO: 169261 - DNA, 25 bp, probe
catggggccctggagctgcaaaatc

SEQ ID NO: 169262 - DNA, 25 bp, probe
catggtagtcagtatggctcaacca

SEQ ID NO: 169263 - DNA, 25 bp, probe
catggaagctgagaggccagaccct

SEQ ID NO: 169264 - DNA, 25 bp, probe
catggaagtggtgggcacacccagc

SEQ ID NO: 169265 - DNA, 25 bp, probe
catggtaggagtcaatctgccacag

SEQ ID NO: 169266 - DNA, 25 bp, probe
catggggaagcacttcctccactga

SEQ ID NO: 169267 - DNA, 25 bp, probe
caggaatgaaccttctgcaacatct

SEQ ID NO: 169268 - DNA, 25 bp, probe
caggagatgcaagccactaacagag

SEQ ID NO: 169269 - DNA, 25 bp, probe
caggagatgcaagccactaacagag

SEQ ID NO: 169270 - DNA, 25 bp, probe
caggcaggtgtggcttcatgaccgt

SEQ ID NO: 169271 - DNA, 25 bp, probe
caggcaggtgtggcttcatgaccgt

SEQ ID NO: 169272 - DNA, 25 bp, probe
caggcatggctgacattttggtggt

SEQ ID NO: 169273 - DNA, 25 bp, probe
caggcattgcaggcttagtcgtggc

SEQ ID NO: 169274 - DNA, 25 bp, probe
caggctcagggcaaagaagtggcct

SEQ ID NO: 169275 - DNA, 25 bp, probe
caggctacgtgccaaagatgggctt

SEQ ID NO: 169276 - DNA, 25 bp, probe
caggctttgtacaaagaaggctctt

SEQ ID NO: 169277 - DNA, 25 bp, probe
caggcattactaaaagaaccaccag

SEQ ID NO: 169278 - DNA, 25 bp, probe
caggcttttcattcaaaatctgccc

SEQ ID NO: 169279 - DNA, 25 bp, probe
caggctcacctatctgaagactgtc

SEQ ID NO: 169280 - DNA, 25 bp, probe
caggccactgattacttcatgactg

SEQ ID NO: 169281 - DNA, 25 bp, probe
caggagcacctcaactatgtgactg

SEQ ID NO: 169282 - DNA, 25 bp, probe
caggacgtgctcattgagtggctgt

SEQ ID NO: 169283 - DNA, 25 bp, probe
caggaacgcatcatgcatgcaaggc

SEQ ID NO: 169284 - DNA, 25 bp, probe
caggacttcatcatgctgcagaaca

SEQ ID NO: 169285 - DNA, 25 bp, probe
caggcattcctctttgctgagatga

SEQ ID NO: 169286 - DNA, 25 bp, probe
caggcttcatcaaggttcagctgaa

SEQ ID NO: 169287 - DNA, 25 bp, probe
caggcttcatggagctctgtcaaaa

SEQ ID NO: 169288 - DNA, 25 bp, probe
catgaggtcaggagttccagaccag

SEQ ID NO: 169289 - DNA, 25 bp, probe
catgagattaggttgggcccagcca

SEQ ID NO: 169290 - DNA, 25 bp, probe
catggactatgggggacacacgccc

SEQ ID NO: 169291 - DNA, 25 bp, probe
caggactcaggggaacaatgcagct

SEQ ID NO: 169292 - DNA, 25 bp, probe
caggacatgcacctgggaactcgct

SEQ ID NO: 169293 - DNA, 25 bp, probe
caggagcgatcgtttgcaacctgct

SEQ ID NO: 169294 - DNA, 25 bp, probe
caggaagttatctagcaagccgctg

SEQ ID NO: 169295 - DNA, 25 bp, probe
caggagcagtaatggcagcagccgg

SEQ ID NO: 169296 - DNA, 25 bp, probe
catggcatcagtatacctgagccag

SEQ ID NO: 169297 - DNA, 25 bp, probe
caggctcagtcctagttcaggattt

SEQ ID NO: 169298 - DNA, 25 bp, probe
caggctcttcactgataggccattt

SEQ ID NO: 169299 - DNA, 25 bp, probe
catggctcctatgggtcggtatatg

SEQ ID NO: 169300 - DNA, 25 bp, probe
catggctcctacggagaggtcttca

SEQ ID NO: 169301 - DNA, 25 bp, probe
catggtttacagaatcaggttgtat

SEQ ID NO: 169302 - DNA, 25 bp, probe
catggtttacagaatcaggttgtat

SEQ ID NO: 169303 - DNA, 25 bp, probe
catggtggccaacagaggtgagatt

SEQ ID NO: 169304 - DNA, 25 bp, probe
catggcccctaggcgaggtgatcag

SEQ ID NO: 169305 - DNA, 25 bp, probe
catgtctccctctcaggggtagcag

SEQ ID NO: 169306 - DNA, 25 bp, probe
catcagctacctgtaggggcctggg

SEQ ID NO: 169307 - DNA, 25 bp, probe
cataggacttggtagggtcccaggg

SEQ ID NO: 169308 - DNA, 25 bp, probe
cataggactctagacggcatccagc

SEQ ID NO: 169309 - DNA, 25 bp, probe
cataggactctagacggcatccagc

SEQ ID NO: 169310 - DNA, 25 bp, probe
catgactacattacaacgggccagg

SEQ ID NO: 169311 - DNA, 25 bp, probe
caggctctcagtacaaagaacaagg

SEQ ID NO: 169312 - DNA, 25 bp, probe
caggctctcagtacaaagaacaagg

SEQ ID NO: 169313 - DNA, 25 bp, probe
caggctctagatggcaaagcccact

SEQ ID NO: 169314 - DNA, 25 bp, probe
catgttccgcatggataacgaccat

SEQ ID NO: 169315 - DNA, 25 bp, probe
catgatgggctgttttaagaccaga

SEQ ID NO: 169316 - DNA, 25 bp, probe
catggagcacggtttaagcaccact

SEQ ID NO: 169317 - DNA, 25 bp, probe
caggacggtttatgagcacacaatt

SEQ ID NO: 169318 - DNA, 25 bp, probe
caggaaagtttctcagcgccgagtg

SEQ ID NO: 169319 - DNA, 25 bp, probe
caggacatggctaacaaccgccggg

SEQ ID NO: 169320 - DNA, 25 bp, probe
caggacatggctaacaaccgccggg

SEQ ID NO: 169321 - DNA, 25 bp, probe
caggacatggctaacaaccgccggg

SEQ ID NO: 169322 - DNA, 25 bp, probe
caggcaaggtgaaccctactcagtg

SEQ ID NO: 169323 - DNA, 25 bp, probe
catacagaggtgaaccgtttagggc

SEQ ID NO: 169324 - DNA, 25 bp, probe
catgttggggcatcttgactatcag

SEQ ID NO: 169325 - DNA, 25 bp, probe
catgtagacaggtacttcactcaga

SEQ ID NO: 169326 - DNA, 25 bp, probe
catgctccagcaaggagttcaagcg

SEQ ID NO: 169327 - DNA, 25 bp, probe
caggccacatcattgctgttaagca

SEQ ID NO: 169328 - DNA, 25 bp, probe
caggcccagcattgctggttctatt

SEQ ID NO: 169329 - DNA, 25 bp, probe
catggccacatgtgtatctcctttg

SEQ ID NO: 169330 - DNA, 25 bp, probe
catgtgacgttttgactggcttgag

SEQ ID NO: 169331 - DNA, 25 bp, probe
caggaagctatttgcctggctccag

SEQ ID NO: 169332 - DNA, 25 bp, probe
caggaaatgctgtacgggcctgcag

SEQ ID NO: 169333 - DNA, 25 bp, probe
catggaattctgatcttggcccata

SEQ ID NO: 169334 - DNA, 25 bp, probe
catggaatcatcagccttggtcaga

SEQ ID NO: 169335 - DNA, 25 bp, probe
caggaatcttaacttcatgtgagct

SEQ ID NO: 169336 - DNA, 25 bp, probe
cataaagttaactcacatgacccaa

SEQ ID NO: 169337 - DNA, 25 bp, probe
ctaaagcttttctccatgtatgccc

SEQ ID NO: 169338 - DNA, 25 bp, probe
catgtatttttttaatcatttccct

SEQ ID NO: 169339 - DNA, 25 bp, probe
catgttttttggtttctcttgtaag

SEQ ID NO: 169340 - DNA, 25 bp, probe
catgttcaattcaaggttatctgga

SEQ ID NO: 169341 - DNA, 25 bp, probe
catgctaagggcaaggcttacttga

SEQ ID NO: 169342 - DNA, 25 bp, probe
catcccagaggcaaggggacctgct

SEQ ID NO: 169343 - DNA, 25 bp, probe
catgatccgggatagcgagaccact

SEQ ID NO: 169344 - DNA, 25 bp, probe
catgatccaacctgatgccgaacag

SEQ ID NO: 169345 - DNA, 25 bp, probe
catgatgctggagccagaccccaag

SEQ ID NO: 169346 - DNA, 25 bp, probe
catgatgctggagccagaccccaag

SEQ ID NO: 169347 - DNA, 25 bp, probe
caggctgagcattctcagaccttca

SEQ ID NO: 169348 - DNA, 25 bp, probe
caggcagagctcggagcctcattga

SEQ ID NO: 169349 - DNA, 25 bp, probe
caggcgatagcagggccatcattgt

SEQ ID NO: 169350 - DNA, 25 bp, probe
catggtgtatgagggcaatgccagg

SEQ ID NO: 169351 - DNA, 25 bp, probe
catggcgtatgtcatcaacgggggt

SEQ ID NO: 169352 - DNA, 25 bp, probe
caggaacatgtcttcaagcgagcta

SEQ ID NO: 169353 - DNA, 25 bp, probe
caggaagtcctaggagctgcagcca

SEQ ID NO: 169354 - DNA, 25 bp, probe
caggcataaagttggcgtgagctac

SEQ ID NO: 169355 - DNA, 25 bp, probe
caggcataaagttggcgtgagctac

SEQ ID NO: 169356 - DNA, 25 bp, probe
caggcattggagagagcctcgctcc

SEQ ID NO: 169357 - DNA, 25 bp, probe
caggcagatgggagggttgtgcttg

SEQ ID NO: 169358 - DNA, 25 bp, probe
catggcaggggtggtttatctgcat

SEQ ID NO: 169359 - DNA, 25 bp, probe
caggcatggtactagatttatttta

SEQ ID NO: 169360 - DNA, 25 bp, probe
catggtagatcaacaattctttttg

SEQ ID NO: 169361 - DNA, 25 bp, probe
caggctacatgcaacagtggattgt

SEQ ID NO: 169362 - DNA, 25 bp, probe
caggcacactgctcagtgactcgag

SEQ ID NO: 169363 - DNA, 25 bp, probe
caggcacgccagaaggatgccgcag

SEQ ID NO: 169364 - DNA, 25 bp, probe
caggaacaacaacgagtcacagagt

SEQ ID NO: 169365 - DNA, 25 bp, probe
caggcactgaaggaggcgtccgaga

SEQ ID NO: 169366 - DNA, 25 bp, probe
caggcagtgacacgacgattctcca

SEQ ID NO: 169367 - DNA, 25 bp, probe
caggcagatggcttgtgcagaagat

SEQ ID NO: 169368 - DNA, 25 bp, probe
caggcgatgtgctttatggcaggcg

SEQ ID NO: 169369 - DNA, 25 bp, probe
caggcatgctggtattctggggctg

SEQ ID NO: 169370 - DNA, 25 bp, probe
caggcatgcgagtaacaagggcatg

SEQ ID NO: 169371 - DNA, 25 bp, probe
caggcgcggagggcagaggcgcaga

SEQ ID NO: 169372 - DNA, 25 bp, probe
caggcaccgtgggcaatgtgctcac

SEQ ID NO: 169373 - DNA, 25 bp, probe
catggacctgaggccacaggccaag

SEQ ID NO: 169374 - DNA, 25 bp, probe
catgcgacgcagacttaggggccag

SEQ ID NO: 169375 - DNA, 25 bp, probe
catgggcgattcctgggggacagaa

SEQ ID NO: 169376 - DNA, 25 bp, probe
caggcggtatccagaggtgagggag

SEQ ID NO: 169377 - DNA, 25 bp, probe
caggaaggactcacattggggcgaa

SEQ ID NO: 169378 - DNA, 25 bp, probe
caggacagtgacatcttgttcggaa

SEQ ID NO: 169379 - DNA, 25 bp, probe
caggaacccaacagagctcaggaca

SEQ ID NO: 169380 - DNA, 25 bp, probe
caggaacctcaccttggacggaatg

SEQ ID NO: 169381 - DNA, 25 bp, probe
caggaacctcaccttggacggaatg

SEQ ID NO: 169382 - DNA, 25 bp, probe
caggaacctcaccttggacggaatg

SEQ ID NO: 169383 - DNA, 25 bp, probe
catgtagaccccttgaagaggggag

SEQ ID NO: 169384 - DNA, 25 bp, probe
catggggcctcctttaagggtcttg

SEQ ID NO: 169385 - DNA, 25 bp, probe
catgtttcctagtattaaggacttt

SEQ ID NO: 169386 - DNA, 25 bp, probe
catgtttcctagtattaaggacttt

SEQ ID NO: 169387 - DNA, 25 bp, probe
catggtctaaatctttgtgtacttt

SEQ ID NO: 169388 - DNA, 25 bp, probe
catgggcatcaacacttttattctt

SEQ ID NO: 169389 - DNA, 25 bp, probe
catgggactatcctttttctctact

SEQ ID NO: 169390 - DNA, 25 bp, probe
catgggactatcctttttctctact

SEQ ID NO: 169391 - DNA, 25 bp, probe
cttggtcttcttatttttaaatctg

SEQ ID NO: 169392 - DNA, 25 bp, probe
cttcctccctactttctgtaaatat

SEQ ID NO: 169393 - DNA, 25 bp, probe
cttcctccctactttctgtaaatat

SEQ ID NO: 169394 - DNA, 25 bp, probe
catgtaactcgtttgttttaaatat

SEQ ID NO: 169395 - DNA, 25 bp, probe
catgtccactggtttttttattttg

SEQ ID NO: 169396 - DNA, 25 bp, probe
caggcccagctaatttttgtatttt

SEQ ID NO: 169397 - DNA, 25 bp, probe
caggctgcacagcatttgctttcct

SEQ ID NO: 169398 - DNA, 25 bp, probe
catgggctccagattttctcaagaa

SEQ ID NO: 169399 - DNA, 25 bp, probe
catgggtaagtttctgatgctgact

SEQ ID NO: 169400 - DNA, 25 bp, probe
catggagtcctcatacaatctactt

SEQ ID NO: 169401 - DNA, 25 bp, probe
caggaacatctactcagcagactac

SEQ ID NO: 169402 - DNA, 25 bp, probe
caggcaaatccatgcaggacaagca

SEQ ID NO: 169403 - DNA, 25 bp, probe
caggaaagctcaatcagatacaaaa

SEQ ID NO: 169404 - DNA, 25 bp, probe
catggaaatgtcctccaacaataaa

SEQ ID NO: 169405 - DNA, 25 bp, probe
catggatcacttcatcagaacaatg

SEQ ID NO: 169406 - DNA, 25 bp, probe
catggatcagttaagtacacttgaa

SEQ ID NO: 169407 - DNA, 25 bp, probe
catggaagccatagagtacatcgat

SEQ ID NO: 169408 - DNA, 25 bp, probe
catggaacctgacgtagctgcaaag

SEQ ID NO: 169409 - DNA, 25 bp, probe
caggaatcagtcagtatctgcagaa

SEQ ID NO: 169410 - DNA, 25 bp, probe
caggcctagctcagatgatgcggga

SEQ ID NO: 169411 - DNA, 25 bp, probe
caggctctgcgcatgagcgtggagg

SEQ ID NO: 169412 - DNA, 25 bp, probe
catggctgctcccaaggacgatggg

SEQ ID NO: 169413 - DNA, 25 bp, probe
caggcagctcctgtgaagggaggag

SEQ ID NO: 169414 - DNA, 25 bp, probe
caggcagccagtgagatgagggatg

SEQ ID NO: 169415 - DNA, 25 bp, probe
caggccagctgggggaggtgatgaa

SEQ ID NO: 169416 - DNA, 25 bp, probe
caggccgctaggaagcagccaatga

SEQ ID NO: 169417 - DNA, 25 bp, probe
caggccagctcaagatagcggactt

SEQ ID NO: 169418 - DNA, 25 bp, probe
catgccaacataaatatggcgattg

SEQ ID NO: 169419 - DNA, 25 bp, probe
catgtgaattagccagtgggcaggt

SEQ ID NO: 169420 - DNA, 25 bp, probe
catggacaatgagaggcggccgcat

SEQ ID NO: 169421 - DNA, 25 bp, probe
catgagccacagttcagggatgccc

SEQ ID NO: 169422 - DNA, 25 bp, probe
catggaggcctgacagctgttgtcc

SEQ ID NO: 169423 - DNA, 25 bp, probe
catggaggcctgacagctgttgtcc

SEQ ID NO: 169424 - DNA, 25 bp, probe
catgaggagcaccctgtcattgtac

SEQ ID NO: 169425 - DNA, 25 bp, probe
caggaagctcacctgtgcctgaagc

SEQ ID NO: 169426 - DNA, 25 bp, probe
caggcatgagctaccgtgcctggcc

SEQ ID NO: 169427 - DNA, 25 bp, probe
catggctggccaactggcagacacc

SEQ ID NO: 169428 - DNA, 25 bp, probe
catgtatgtggtgatggagtacgcc

SEQ ID NO: 169429 - DNA, 25 bp, probe
catgtctctaatgttagtactgccc

SEQ ID NO: 169430 - DNA, 25 bp, probe
catgtctcacttcaatatgtacctc

SEQ ID NO: 169431 - DNA, 25 bp, probe
catggtcacgcatgcctataatccc

SEQ ID NO: 169432 - DNA, 25 bp, probe
catgtgttccaaggcattttagcgg

SEQ ID NO: 169433 - DNA, 25 bp, probe
catggatctctttggcattatgaag

SEQ ID NO: 169434 - DNA, 25 bp, probe
catggactgtccgagcttgtgaaag

SEQ ID NO: 169435 - DNA, 25 bp, probe
catgggcattacgggtgttgaaggt

SEQ ID NO: 169436 - DNA, 25 bp, probe
cttgcagcttttcgggaagaaggtt

SEQ ID NO: 169437 - DNA, 25 bp, probe
caggcagcgtggaggggaagggtag

SEQ ID NO: 169438 - DNA, 25 bp, probe
caggctgagggtcgtgggaaagggg

SEQ ID NO: 169439 - DNA, 25 bp, probe
caggctgcggacctgctggagaaga

SEQ ID NO: 169440 - DNA, 25 bp, probe
caggcattggatctgctgggtcaat

SEQ ID NO: 169441 - DNA, 25 bp, probe
caggcattggatctgctgggtcaat

SEQ ID NO: 169442 - DNA, 25 bp, probe
caggcattggatctgctgggtcaat

SEQ ID NO: 169443 - DNA, 25 bp, probe
caggcatgaggaatctgggaggccc

SEQ ID NO: 169444 - DNA, 25 bp, probe
caggctgggaacatgctaggcaccg

SEQ ID NO: 169445 - DNA, 25 bp, probe
caggctgggaacatgctaggcaccg

SEQ ID NO: 169446 - DNA, 25 bp, probe
caggcaccgaaaatgctgatgtcca

SEQ ID NO: 169447 - DNA, 25 bp, probe
catggcaccgtcaaggctgagaacg

SEQ ID NO: 169448 - DNA, 25 bp, probe
caggccactggcatgtgctgagtag

SEQ ID NO: 169449 - DNA, 25 bp, probe
caggcgcagtggctcatgcctgtaa

SEQ ID NO: 169450 - DNA, 25 bp, probe
caggcagcgaagctctcttacaaac

SEQ ID NO: 169451 - DNA, 25 bp, probe
caggcagcgaagctctcttacaaac

SEQ ID NO: 169452 - DNA, 25 bp, probe
caggcaggggagactcacagaaaaa

SEQ ID NO: 169453 - DNA, 25 bp, probe
caggcggccgagatcatgtgcaaaa

SEQ ID NO: 169454 - DNA, 25 bp, probe
catggcaggccgatttgggaaccaa

SEQ ID NO: 169455 - DNA, 25 bp, probe
catgaagcccaagatgctgggtatc

SEQ ID NO: 169456 - DNA, 25 bp, probe
catgaagaccaagaatcctgacagc

SEQ ID NO: 169457 - DNA, 25 bp, probe
catgtaggaagagttctcctgaggc

SEQ ID NO: 169458 - DNA, 25 bp, probe
caggcaggaagagacctttcctctg

SEQ ID NO: 169459 - DNA, 25 bp, probe
caggcgcgaaaccagccaattctgc

SEQ ID NO: 169460 - DNA, 25 bp, probe
caggctgaaaaccatgacaccttcc

SEQ ID NO: 169461 - DNA, 25 bp, probe
catggctgggaacatgacccagcct

SEQ ID NO: 169462 - DNA, 25 bp, probe
catggggaaacagatgcctcagcct

SEQ ID NO: 169463 - DNA, 25 bp, probe
catgggctatgatcactacgtgacc

SEQ ID NO: 169464 - DNA, 25 bp, probe
catggagctgacatcacaaggtgct

SEQ ID NO: 169465 - DNA, 25 bp, probe
catggatggatgacatcccagggct

SEQ ID NO: 169466 - DNA, 25 bp, probe
catgttggcagaactcaagggcaaa

SEQ ID NO: 169467 - DNA, 25 bp, probe
catgtttgagatgctcacggggtcc

SEQ ID NO: 169468 - DNA, 25 bp, probe
catgtgtgtgacgtttcgggtttgt

SEQ ID NO: 169469 - DNA, 25 bp, probe
catggtgtttgtgcttgggttagta

SEQ ID NO: 169470 - DNA, 25 bp, probe
catggattccttgtggcttttctgt

SEQ ID NO: 169471 - DNA, 25 bp, probe
catggaccctgacttgggtcccgtc

SEQ ID NO: 169472 - DNA, 25 bp, probe
catggaccctgacttgggtcccgtc

SEQ ID NO: 169473 - DNA, 25 bp, probe
catgaaccctggagggtggtcccca

SEQ ID NO: 169474 - DNA, 25 bp, probe
catggacccatgcggggggttccag

SEQ ID NO: 169475 - DNA, 25 bp, probe
catgtaccgctgcgtgacggggacg

SEQ ID NO: 169476 - DNA, 25 bp, probe
catgtaccgctgcgtgacggggacg

SEQ ID NO: 169477 - DNA, 25 bp, probe
catgttcctccacgaaaaaggcatc

SEQ ID NO: 169478 - DNA, 25 bp, probe
catgttcctccacgaaaaaggcatc

SEQ ID NO: 169479 - DNA, 25 bp, probe
catgttctaaacaatcaaaagtgat

SEQ ID NO: 169480 - DNA, 25 bp, probe
catgctttactgtctatatactaat

SEQ ID NO: 169481 - DNA, 25 bp, probe
catgttctaatttttaccgatgtta

SEQ ID NO: 169482 - DNA, 25 bp, probe
catgattcaaattatctcgcaccgg

SEQ ID NO: 169483 - DNA, 25 bp, probe
catgattcttataaccgtgcttctt

SEQ ID NO: 169484 - DNA, 25 bp, probe
catgattgtggtgtccctcttttat

SEQ ID NO: 169485 - DNA, 25 bp, probe
catgactgtggtgtccttgttctac

SEQ ID NO: 169486 - DNA, 25 bp, probe
catgactgtggtgccgtacttggag

SEQ ID NO: 169487 - DNA, 25 bp, probe
catgactgtggtgccgtacttggag

SEQ ID NO: 169488 - DNA, 25 bp, probe
catggcatagtccaccgtgacatta

SEQ ID NO: 169489 - DNA, 25 bp, probe
caggcacagtgccaggcagtaggga

SEQ ID NO: 169490 - DNA, 25 bp, probe
catggacacccagtactatggcgag

SEQ ID NO: 169491 - DNA, 25 bp, probe
catgatgaccccttacgtggtgaca

SEQ ID NO: 169492 - DNA, 25 bp, probe
catggaccagctcctacagaaggaa

SEQ ID NO: 169493 - DNA, 25 bp, probe
catggaccagctcctacagaaggaa

SEQ ID NO: 169494 - DNA, 25 bp, probe
catggacaaatgcctatgaaattaa

SEQ ID NO: 169495 - DNA, 25 bp, probe
catggcagctaacacatgaatgagg

SEQ ID NO: 169496 - DNA, 25 bp, probe
catggcgcaatcctcgcaatggaag

SEQ ID NO: 169497 - DNA, 25 bp, probe
catggcggacagcgccagcgagagc

SEQ ID NO: 169498 - DNA, 25 bp, probe
caggcgctacagcaggagtgcatga

SEQ ID NO: 169499 - DNA, 25 bp, probe
caggcctccatccagaatggcaaag

SEQ ID NO: 169500 - DNA, 25 bp, probe
caggcctccatccagaatggcaaag

SEQ ID NO: 169501 - DNA, 25 bp, probe
caggccttatctccaagaccagaga

SEQ ID NO: 169502 - DNA, 25 bp, probe
caggccttatctccaagaccagaga

SEQ ID NO: 169503 - DNA, 25 bp, probe
catgtcctatgatcacaaaccagag

SEQ ID NO: 169504 - DNA, 25 bp, probe
catgactgttgctacaaacgtctgg

SEQ ID NO: 169505 - DNA, 25 bp, probe
catgaattgggacgaccttctggcc

SEQ ID NO: 169506 - DNA, 25 bp, probe
catgaattgggacgaccttctggcc

SEQ ID NO: 169507 - DNA, 25 bp, probe
catgaattgggacgaccttctggcc

SEQ ID NO: 169508 - DNA, 25 bp, probe
cataattggggcagaagttggatcc

SEQ ID NO: 169509 - DNA, 25 bp, probe
cataattggggcagaagttggatcc

SEQ ID NO: 169510 - DNA, 25 bp, probe
catgtattgtttgagcaacttggat

SEQ ID NO: 169511 - DNA, 25 bp, probe
catgttattgttttcaacctagaaa

SEQ ID NO: 169512 - DNA, 25 bp, probe
catggcttttctttcaatcttagga

SEQ ID NO: 169513 - DNA, 25 bp, probe
catggcttttctacacacactagag

SEQ ID NO: 169514 - DNA, 25 bp, probe
catggcttttgctcacactgagtgt

SEQ ID NO: 169515 - DNA, 25 bp, probe
catgtcacttgtgccacagtagtta

SEQ ID NO: 169516 - DNA, 25 bp, probe
catgtatgttggacccagatatggg

SEQ ID NO: 169517 - DNA, 25 bp, probe
catgttgcttaccgcaccattccgg

SEQ ID NO: 169518 - DNA, 25 bp, probe
catgttgcttccagacatacttctc

SEQ ID NO: 169519 - DNA, 25 bp, probe
catgtatgtttcaggatatttgacc

SEQ ID NO: 169520 - DNA, 25 bp, probe
catgtatatccgaggctttgggcct

SEQ ID NO: 169521 - DNA, 25 bp, probe
catgtgtaaggaaggattacggcca

SEQ ID NO: 169522 - DNA, 25 bp, probe
catgtgattaggctgtattcaaagc

SEQ ID NO: 169523 - DNA, 25 bp, probe
catatagtaacaaattccaaagccc

SEQ ID NO: 169524 - DNA, 25 bp, probe
catgaagttacaaacatacagccat

SEQ ID NO: 169525 - DNA, 25 bp, probe
catgaagcattacaggatgacagca

SEQ ID NO: 169526 - DNA, 25 bp, probe
catggagctctgtcaaaatgatcaa

SEQ ID NO: 169527 - DNA, 25 bp, probe
catggagctctgtcaaaatgatcaa

SEQ ID NO: 169528 - DNA, 25 bp, probe
catggatgccaatagtcagttcacc

SEQ ID NO: 169529 - DNA, 25 bp, probe
catgtgagctattggagttttcctt

SEQ ID NO: 169530 - DNA, 25 bp, probe
catgtacgccagcagctttacgctg

SEQ ID NO: 169531 - DNA, 25 bp, probe
catgaactgtgaggcctttaccgtc

SEQ ID NO: 169532 - DNA, 25 bp, probe
catccaaagccggttctaccgatcc

SEQ ID NO: 169533 - DNA, 25 bp, probe
catagccaagctggtccctaaaacc

SEQ ID NO: 169534 - DNA, 25 bp, probe
catcagtgacggggccaccatgaaa

SEQ ID NO: 169535 - DNA, 25 bp, probe
catcatgcgggtgctcaacgtggat

SEQ ID NO: 169536 - DNA, 25 bp, probe
catgggtggtcccacagcatgggac

SEQ ID NO: 169537 - DNA, 25 bp, probe
catgcagcttggaggttcagtggag

SEQ ID NO: 169538 - DNA, 25 bp, probe
catgatgtttatagttcctgtggtt

SEQ ID NO: 169539 - DNA, 25 bp, probe
catgaaactttgtagcatcgggcta

SEQ ID NO: 169540 - DNA, 25 bp, probe
catgacaactttggtatcgtggaag

SEQ ID NO: 169541 - DNA, 25 bp, probe
caggcggcattggcgataccaggaa

SEQ ID NO: 169542 - DNA, 25 bp, probe
catggggagggtagcaccaggcata

SEQ ID NO: 169543 - DNA, 25 bp, probe
catggaggtggtcaacagcggctct

SEQ ID NO: 169544 - DNA, 25 bp, probe
catggaggtggtcaacagcggctct

SEQ ID NO: 169545 - DNA, 25 bp, probe
caggctggggtacagcctgctctcg

SEQ ID NO: 169546 - DNA, 25 bp, probe
caggctggctggcaggaactggggt

SEQ ID NO: 169547 - DNA, 25 bp, probe
catggcggagatcagcgacctggac

SEQ ID NO: 169548 - DNA, 25 bp, probe
catgacgctggtagaggccatccag

SEQ ID NO: 169549 - DNA, 25 bp, probe
catgaagctgtagggactcatcttg

SEQ ID NO: 169550 - DNA, 25 bp, probe
catggagatatcaaggcctcaaatc

SEQ ID NO: 169551 - DNA, 25 bp, probe
catggaatgcatcaccattaagaca

SEQ ID NO: 169552 - DNA, 25 bp, probe
catggaacatagccacatctagata

SEQ ID NO: 169553 - DNA, 25 bp, probe
catgttggtagccactgctagatat

SEQ ID NO: 169554 - DNA, 25 bp, probe
catgaagcgggccctgatgatgatg

SEQ ID NO: 169555 - DNA, 25 bp, probe
catgtggcccgtctatgatgtgttt

SEQ ID NO: 169556 - DNA, 25 bp, probe
catggagactcctatttactgcttt

SEQ ID NO: 169557 - DNA, 25 bp, probe
catgggagctcttttctgatccatg

SEQ ID NO: 169558 - DNA, 25 bp, probe
catggggcattgtaactttaaagta

SEQ ID NO: 169559 - DNA, 25 bp, probe
caggcctgattctacttttgaaaat

SEQ ID NO: 169560 - DNA, 25 bp, probe
caggctctttaatccatctggaaat

SEQ ID NO: 169561 - DNA, 25 bp, probe
caggctactttatcacacttatcct

SEQ ID NO: 169562 - DNA, 25 bp, probe
catgacaacgtttcgacatttcacc

SEQ ID NO: 169563 - DNA, 25 bp, probe
catgaagaggggtgtctttccgctg

SEQ ID NO: 169564 - DNA, 25 bp, probe
catgaagaggggtgtctttccgctg

SEQ ID NO: 169565 - DNA, 25 bp, probe
cataaggaggtagtgttcttggact

SEQ ID NO: 169566 - DNA, 25 bp, probe
catgaaggcaggcatgctgattcct

SEQ ID NO: 169567 - DNA, 25 bp, probe
catgatcatgcgggagtgctggcat

SEQ ID NO: 169568 - DNA, 25 bp, probe
catgtctgcatgaaggtctacctga

SEQ ID NO: 169569 - DNA, 25 bp, probe
catgtcacaggcaagttcacagctc

SEQ ID NO: 169570 - DNA, 25 bp, probe
catgggtggccactatacagcctac

SEQ ID NO: 169571 - DNA, 25 bp, probe
catggcgtacctcatgaagaccaag

SEQ ID NO: 169572 - DNA, 25 bp, probe
catccgaagcctcctaagacgagaa

SEQ ID NO: 169573 - DNA, 25 bp, probe
catctaaacctgccacggatcgaat

SEQ ID NO: 169574 - DNA, 25 bp, probe
catggtagcacacacctgtagtccc

SEQ ID NO: 169575 - DNA, 25 bp, probe
catggttcaagcgctgcttagctgc

SEQ ID NO: 169576 - DNA, 25 bp, probe
catgtgactgaagccgcttagtgct

SEQ ID NO: 169577 - DNA, 25 bp, probe
catggaaaagccttcttatatctga

SEQ ID NO: 169578 - DNA, 25 bp, probe
catggaaaagtctacaatgttgtat

SEQ ID NO: 169579 - DNA, 25 bp, probe
catggaaaagtctacaatgttgtat

SEQ ID NO: 169580 - DNA, 25 bp, probe
catgtgcagatattcctaaagtttt

SEQ ID NO: 169581 - DNA, 25 bp, probe
catcagcatgcattcatactcccag

SEQ ID NO: 169582 - DNA, 25 bp, probe
catggcatgcacgttcagacagctg

SEQ ID NO: 169583 - DNA, 25 bp, probe
catgtatcagatgctgagacacatg

SEQ ID NO: 169584 - DNA, 25 bp, probe
catggcatagttggagtctctgact

SEQ ID NO: 169585 - DNA, 25 bp, probe
catgacaagctcgtgaggctctacg

SEQ ID NO: 169586 - DNA, 25 bp, probe
catgaagatgctgcacagtttacag

SEQ ID NO: 169587 - DNA, 25 bp, probe
catgatcagcgcagacatggcccat

SEQ ID NO: 169588 - DNA, 25 bp, probe
catgatcagcgcagacatggcccat

SEQ ID NO: 169589 - DNA, 25 bp, probe
catgactccagagcagtccgcaaac

SEQ ID NO: 169590 - DNA, 25 bp, probe
catgagcctggaaagaatcaaaacc

SEQ ID NO: 169591 - DNA, 25 bp, probe
catgatcctggtcctgctgatcaat

SEQ ID NO: 169592 - DNA, 25 bp, probe
catgatcctggtcctgctgatcaat

SEQ ID NO: 169593 - DNA, 25 bp, probe
catgatgcctttgatcgatgctgct

SEQ ID NO: 169594 - DNA, 25 bp, probe
catgggcctgcagtgatccattgta

SEQ ID NO: 169595 - DNA, 25 bp, probe
catgggcggcaggatctgaactcgc

SEQ ID NO: 169596 - DNA, 25 bp, probe
catggcagggcagtggctagcccgg

SEQ ID NO: 169597 - DNA, 25 bp, probe
catgcgcgtggagttcaagtccgac

SEQ ID NO: 169598 - DNA, 25 bp, probe
catgcgcgtggagttcaagtccgac

SEQ ID NO: 169599 - DNA, 25 bp, probe
catgcgcgtggagttcaagtccgac

SEQ ID NO: 169600 - DNA, 25 bp, probe
catgcgcgtggagttcaagtccgac

SEQ ID NO: 169601 - DNA, 25 bp, probe
catccgtgtgttccgggcctgcacg

SEQ ID NO: 169602 - DNA, 25 bp, probe
catcggtgtgtaaggtggcctattc

SEQ ID NO: 169603 - DNA, 25 bp, probe
catcctgcgtatatttgggatttgc

SEQ ID NO: 169604 - DNA, 25 bp, probe
catgcgacgtatattttcctttgga

SEQ ID NO: 169605 - DNA, 25 bp, probe
catagaccaaatatcccccaataaa

SEQ ID NO: 169606 - DNA, 25 bp, probe
cataagacgtatgtaaacaaaaaca

SEQ ID NO: 169607 - DNA, 25 bp, probe
ccaaacgaatttctggcaaaatggc

SEQ ID NO: 169608 - DNA, 25 bp, probe
cgaaaaaaatagcttctggagtcag

SEQ ID NO: 169609 - DNA, 25 bp, probe
cattaacaaagcgggctttgccgtc

SEQ ID NO: 169610 - DNA, 25 bp, probe
catgaaaaccaggggcttgcccaag

SEQ ID NO: 169611 - DNA, 25 bp, probe
catgaacaacactcgccttggatgc

SEQ ID NO: 169612 - DNA, 25 bp, probe
catgcagagatattcagggtttgga

SEQ ID NO: 169613 - DNA, 25 bp, probe
catgccgaggtggaggtagtggagg

SEQ ID NO: 169614 - DNA, 25 bp, probe
caggcgcaggtgcaggtggacaggg

SEQ ID NO: 169615 - DNA, 25 bp, probe
caggctggaggcggagtgggaggag

SEQ ID NO: 169616 - DNA, 25 bp, probe
caggctggggtccagtgggaggggc

SEQ ID NO: 169617 - DNA, 25 bp, probe
caggcctggggccaggggtggtgga

SEQ ID NO: 169618 - DNA, 25 bp, probe
caggcccagaggactggggtgactc

SEQ ID NO: 169619 - DNA, 25 bp, probe
catggactatcactgtctgggggac

SEQ ID NO: 169620 - DNA, 25 bp, probe
catggagtatgttccgggctgtgag

SEQ ID NO: 169621 - DNA, 25 bp, probe
catgggtagcgaccgcgtgttggta

SEQ ID NO: 169622 - DNA, 25 bp, probe
catgggtagcgaccgcgtgttggta

SEQ ID NO: 169623 - DNA, 25 bp, probe
catggtgggacacggagtttgcgtt

SEQ ID NO: 169624 - DNA, 25 bp, probe
catcgtggagacagggcatttgagt

SEQ ID NO: 169625 - DNA, 25 bp, probe
catcaggtctacacagtccttgcag

SEQ ID NO: 169626 - DNA, 25 bp, probe
catcaggtctacacagtccttgcag

SEQ ID NO: 169627 - DNA, 25 bp, probe
ctatggtcttcaacaaggaggggga

SEQ ID NO: 169628 - DNA, 25 bp, probe
cttgggcttctgcggtgaggcaggg

SEQ ID NO: 169629 - DNA, 25 bp, probe
catggaggtacgcggagggctggcg

SEQ ID NO: 169630 - DNA, 25 bp, probe
catggaggatgagctgtgtagggag

SEQ ID NO: 169631 - DNA, 25 bp, probe
catgggggacctggtggatgctgag

SEQ ID NO: 169632 - DNA, 25 bp, probe
catgggggatcagtgcaggtattta

SEQ ID NO: 169633 - DNA, 25 bp, probe
catggctggcagtcttgaaattgtc

SEQ ID NO: 169634 - DNA, 25 bp, probe
catggctgtggtccagagactcttc

SEQ ID NO: 169635 - DNA, 25 bp, probe
catgggtgtgcaccacaactctact

SEQ ID NO: 169636 - DNA, 25 bp, probe
catggagcgtggtagccacttcagc

SEQ ID NO: 169637 - DNA, 25 bp, probe
catggacaagaacgcagcacttcag

SEQ ID NO: 169638 - DNA, 25 bp, probe
catggccatggcaacatgctcagtt

SEQ ID NO: 169639 - DNA, 25 bp, probe
catgcaagtggcgactgcacagaat

SEQ ID NO: 169640 - DNA, 25 bp, probe
catgcagacgccgagatgactggct

SEQ ID NO: 169641 - DNA, 25 bp, probe
catgaggctgcatgcaacctgcctg

SEQ ID NO: 169642 - DNA, 25 bp, probe
catgagcaccatagcaccattgtct

SEQ ID NO: 169643 - DNA, 25 bp, probe
catgtcagtcatccatgcacaactc

SEQ ID NO: 169644 - DNA, 25 bp, probe
catgtgcagcttactggccattgca

SEQ ID NO: 169645 - DNA, 25 bp, probe
catggagcatccttctccgatagtg

SEQ ID NO: 169646 - DNA, 25 bp, probe
catgaacagcctttgccaatcgtgg

SEQ ID NO: 169647 - DNA, 25 bp, probe
catgaacagcctttgccaatcgtgg

SEQ ID NO: 169648 - DNA, 25 bp, probe
catgaccaccttggcaatgtctctg

SEQ ID NO: 169649 - DNA, 25 bp, probe
catggccttcttggagagtcaccaa

SEQ ID NO: 169650 - DNA, 25 bp, probe
catgactttttccagcaggacctga

SEQ ID NO: 169651 - DNA, 25 bp, probe
catgagcttttctcgcaggaaattt

SEQ ID NO: 169652 - DNA, 25 bp, probe
ctgaccgcctactggaaatattttt

SEQ ID NO: 169653 - DNA, 25 bp, probe
cataccgttactctgatgaattgaa

SEQ ID NO: 169654 - DNA, 25 bp, probe
catacgtattttccgtagtgctctg

SEQ ID NO: 169655 - DNA, 25 bp, probe
catcaggtcttttatcctggtcctg

SEQ ID NO: 169656 - DNA, 25 bp, probe
catcgtgatcttaaacctagtaata

SEQ ID NO: 169657 - DNA, 25 bp, probe
catctgggctttcactctggtgaaa

SEQ ID NO: 169658 - DNA, 25 bp, probe
catcgggctttgcagtcccatagaa

SEQ ID NO: 169659 - DNA, 25 bp, probe
catcctgtgctcggaaatcccaaag

SEQ ID NO: 169660 - DNA, 25 bp, probe
catggcgagtctagaaacctatgga

SEQ ID NO: 169661 - DNA, 25 bp, probe
catggccacatccttaaccttggca

SEQ ID NO: 169662 - DNA, 25 bp, probe
catgcctactgccggaatccggaca

SEQ ID NO: 169663 - DNA, 25 bp, probe
catgtgtactttcgaagtctgggac

SEQ ID NO: 169664 - DNA, 25 bp, probe
catgtgtactttcgaagtctgggac

SEQ ID NO: 169665 - DNA, 25 bp, probe
catagtatcttatggattgtttaca

SEQ ID NO: 169666 - DNA, 25 bp, probe
catgccccttaagattttctacaac

SEQ ID NO: 169667 - DNA, 25 bp, probe
catgccccttaagattttctacaac

SEQ ID NO: 169668 - DNA, 25 bp, probe
catcctttctttgaccttctgaaga

SEQ ID NO: 169669 - DNA, 25 bp, probe
catcctttctttgaccttctgaaga

SEQ ID NO: 169670 - DNA, 25 bp, probe
catcctttctttgaccttctgaaga

SEQ ID NO: 169671 - DNA, 25 bp, probe
catccatttttcaccctacatgaat

SEQ ID NO: 169672 - DNA, 25 bp, probe
catccatttttcaccctacatgaat

SEQ ID NO: 169673 - DNA, 25 bp, probe
catccttcctatgacttttatagat

SEQ ID NO: 169674 - DNA, 25 bp, probe
catacttatatagcacttactttgt

SEQ ID NO: 169675 - DNA, 25 bp, probe
catggctttgggacatttacatcaa

SEQ ID NO: 169676 - DNA, 25 bp, probe
catggccatggaggtctttgtcatc

SEQ ID NO: 169677 - DNA, 25 bp, probe
catggccatggaggtctttgtcatc

SEQ ID NO: 169678 - DNA, 25 bp, probe
catggagcttgtgttctcagaatct

SEQ ID NO: 169679 - DNA, 25 bp, probe
catgaaccggatgtctcggcattaa

SEQ ID NO: 169680 - DNA, 25 bp, probe
catgaagggcgcgacccgcgaatat

SEQ ID NO: 169681 - DNA, 25 bp, probe
catagagaactgtcaccctgaggta

SEQ ID NO: 169682 - DNA, 25 bp, probe
catccataagatgcccctgggctat

SEQ ID NO: 169683 - DNA, 25 bp, probe
catgttaccatcttacttgagcctt

SEQ ID NO: 169684 - DNA, 25 bp, probe
catgtacatttctgaaatgacctca

SEQ ID NO: 169685 - DNA, 25 bp, probe
catgtaccattctcataagattctc

SEQ ID NO: 169686 - DNA, 25 bp, probe
catccaaattcatgtaccattctca

SEQ ID NO: 169687 - DNA, 25 bp, probe
cattcagaattctgtcctcactgat

SEQ ID NO: 169688 - DNA, 25 bp, probe
catagcagtttaggtccccataatc

SEQ ID NO: 169689 - DNA, 25 bp, probe
catgaactatatccgtaacctggat

SEQ ID NO: 169690 - DNA, 25 bp, probe
catgaaaatattgttgccctggaag

SEQ ID NO: 169691 - DNA, 25 bp, probe
catgaagccagtgacttcccatgta

SEQ ID NO: 169692 - DNA, 25 bp, probe
catggaccagtctgcattcgctggc

SEQ ID NO: 169693 - DNA, 25 bp, probe
catggctctcgtttttggggtcatg

SEQ ID NO: 169694 - DNA, 25 bp, probe
catggctctcgtttttggggtcatg

SEQ ID NO: 169695 - DNA, 25 bp, probe
catggctctcgtttttggggtcatg

SEQ ID NO: 169696 - DNA, 25 bp, probe
catggccacgactgttgttacactg

SEQ ID NO: 169697 - DNA, 25 bp, probe
catggcaatcgctctgtctcttcta

SEQ ID NO: 169698 - DNA, 25 bp, probe
catggcagattgtttgtgctttcaa

SEQ ID NO: 169699 - DNA, 25 bp, probe
catgtgagatagttttcattttaac

SEQ ID NO: 169700 - DNA, 25 bp, probe
catgtgcacaagtgttgtgtcgtgc

SEQ ID NO: 169701 - DNA, 25 bp, probe
catggcagcagctgaggaggccggc

SEQ ID NO: 169702 - DNA, 25 bp, probe
catggacgctcgcgaggagcaggct

SEQ ID NO: 169703 - DNA, 25 bp, probe
catggacgctcgcgaggagcaggct

SEQ ID NO: 169704 - DNA, 25 bp, probe
catggagcccaacgagatgatgcgg

SEQ ID NO: 169705 - DNA, 25 bp, probe
catgtggctgtcagtgacatcagcg

SEQ ID NO: 169706 - DNA, 25 bp, probe
catgtgtatcctggtatcatatggc

SEQ ID NO: 169707 - DNA, 25 bp, probe
catggtttgtgctggcaatgcccaa

SEQ ID NO: 169708 - DNA, 25 bp, probe
catggctttggctttgcaaaataaa

SEQ ID NO: 169709 - DNA, 25 bp, probe
catgtcagtctgcttagaaataaca

SEQ ID NO: 169710 - DNA, 25 bp, probe
catgtctgtcttctaaatacatgtg

SEQ ID NO: 169711 - DNA, 25 bp, probe
catgaatgtattgtacactgacgcg

SEQ ID NO: 169712 - DNA, 25 bp, probe
catgaatttgtcacattctcctgcc

SEQ ID NO: 169713 - DNA, 25 bp, probe
catgtagaactttcatttcttgcac

SEQ ID NO: 169714 - DNA, 25 bp, probe
catgtatgtccttacatttctgaaa

SEQ ID NO: 169715 - DNA, 25 bp, probe
catgttatcacacgtgctttctgcc

SEQ ID NO: 169716 - DNA, 25 bp, probe
catgaattcatactctgttgcctcc

SEQ ID NO: 169717 - DNA, 25 bp, probe
catgaattcatactctgttgcctcc

SEQ ID NO: 169718 - DNA, 25 bp, probe
catggagcacaacgtttcctatcca

SEQ ID NO: 169719 - DNA, 25 bp, probe
catcaggccaaagaatccttctctt

SEQ ID NO: 169720 - DNA, 25 bp, probe
catgaaggaaacacacctcttattc

SEQ ID NO: 169721 - DNA, 25 bp, probe
catgaagtaataaaaactcgttttg

SEQ ID NO: 169722 - DNA, 25 bp, probe
catggtgtaataaagagactgggct

SEQ ID NO: 169723 - DNA, 25 bp, probe
catgagggaaataagcaaagagggc

SEQ ID NO: 169724 - DNA, 25 bp, probe
catggagagctagaacccggcaggc

SEQ ID NO: 169725 - DNA, 25 bp, probe
catgaagagtacactcaccagccgc

SEQ ID NO: 169726 - DNA, 25 bp, probe
catgtgagatttctgtcctcagccc

SEQ ID NO: 169727 - DNA, 25 bp, probe
catggagttctgacagttccagcac

SEQ ID NO: 169728 - DNA, 25 bp, probe
catgggttctccatatcgagacaaa

SEQ ID NO: 169729 - DNA, 25 bp, probe
catgggttctccatatcgagacaaa

SEQ ID NO: 169730 - DNA, 25 bp, probe
catgtcgtgttggttactataacaa

SEQ ID NO: 169731 - DNA, 25 bp, probe
catggcctcctggatccttataatg

SEQ ID NO: 169732 - DNA, 25 bp, probe
catggtgcccctagctttatatatg

SEQ ID NO: 169733 - DNA, 25 bp, probe
catggtgaccaattctgttttacta

SEQ ID NO: 169734 - DNA, 25 bp, probe
catgcagtaaaggttgtcttcaact

SEQ ID NO: 169735 - DNA, 25 bp, probe
catgcagtaaaggttgtcttcaact

SEQ ID NO: 169736 - DNA, 25 bp, probe
catggaagtctgtttttatcaatat

SEQ ID NO: 169737 - DNA, 25 bp, probe
catggaaactaaggctttactcatc

SEQ ID NO: 169738 - DNA, 25 bp, probe
catggaacactatgtgtattaatcc

SEQ ID NO: 169739 - DNA, 25 bp, probe
catggaagccattaggaaaacaaac

SEQ ID NO: 169740 - DNA, 25 bp, probe
gcgggacgaagacaaaaagaaccat

SEQ ID NO: 169741 - DNA, 25 bp, probe
gggttggggagcagaaccagggcct

SEQ ID NO: 169742 - DNA, 25 bp, probe
cgacttcggaggcaacaccaagccc

SEQ ID NO: 169743 - DNA, 25 bp, probe
catacttttagtgaccacgggctac

SEQ ID NO: 169744 - DNA, 25 bp, probe
catagttaatttcatctctccggta

SEQ ID NO: 169745 - DNA, 25 bp, probe
cttgttagagttatccctgcaggag

SEQ ID NO: 169746 - DNA, 25 bp, probe
catgggggtcttaaccccagtgatg

SEQ ID NO: 169747 - DNA, 25 bp, probe
catggaggatttagtacccaaatcg

SEQ ID NO: 169748 - DNA, 25 bp, probe
catagaggtgttaaagcggccaacg

SEQ ID NO: 169749 - DNA, 25 bp, probe
catttgggttaatatggctcttcat

SEQ ID NO: 169750 - DNA, 25 bp, probe
catttgggttaatatggctcttcat

SEQ ID NO: 169751 - DNA, 25 bp, probe
catttgggttaatatggctcttcat

SEQ ID NO: 169752 - DNA, 25 bp, probe
tccaaggagttagaatttcccagtt

SEQ ID NO: 169753 - DNA, 25 bp, probe
ccaggcggtggagcagttttccggc

SEQ ID NO: 169754 - DNA, 25 bp, probe
ccaggcggtggagcagttttccggc

SEQ ID NO: 169755 - DNA, 25 bp, probe
ccaggcggtggagcagttttccggc

SEQ ID NO: 169756 - DNA, 25 bp, probe
cgggcgggaactgttatgatcacct

SEQ ID NO: 169757 - DNA, 25 bp, probe
catcagggggaagtccgtttgtcct

SEQ ID NO: 169758 - DNA, 25 bp, probe
catgagggggatttctgggtctttc

SEQ ID NO: 169759 - DNA, 25 bp, probe
catgtcgtgggctatatctgcggtg

SEQ ID NO: 169760 - DNA, 25 bp, probe
catgggcataggtgaccgctgtgag

SEQ ID NO: 169761 - DNA, 25 bp, probe
catgtccaaggattggccgcttgtc

SEQ ID NO: 169762 - DNA, 25 bp, probe
cttaatataattcgccacttctcct

SEQ ID NO: 169763 - DNA, 25 bp, probe
catccaaaagtccagacgtttcgat

SEQ ID NO: 169764 - DNA, 25 bp, probe
catccaaaagtccagacgtttcgat

SEQ ID NO: 169765 - DNA, 25 bp, probe
catccaaatagacagttggctctac

SEQ ID NO: 169766 - DNA, 25 bp, probe
catggcaaaacgcagtctgtacaaa

SEQ ID NO: 169767 - DNA, 25 bp, probe
catgggagaaggtggtgtcagcaaa

SEQ ID NO: 169768 - DNA, 25 bp, probe
catggctgaaaggtgtggggtcagc

SEQ ID NO: 169769 - DNA, 25 bp, probe
catggcgaagagacttgggcccatc

SEQ ID NO: 169770 - DNA, 25 bp, probe
catggctgaaggaattggtcaccta

SEQ ID NO: 169771 - DNA, 25 bp, probe
catggctggaggttatcgatcccca

SEQ ID NO: 169772 - DNA, 25 bp, probe
catggctggaggttatcgatcccca

SEQ ID NO: 169773 - DNA, 25 bp, probe
catggcaggtgggctagccaacctc

SEQ ID NO: 169774 - DNA, 25 bp, probe
catggtggtgctgtgcgccagcacg

SEQ ID NO: 169775 - DNA, 25 bp, probe
catggtggtgctgtgcgccagcacg

SEQ ID NO: 169776 - DNA, 25 bp, probe
catggtgagtgaagatcgcctccac

SEQ ID NO: 169777 - DNA, 25 bp, probe
catggaaatgaggatcccaccagcc

SEQ ID NO: 169778 - DNA, 25 bp, probe
catggatgaagacattgctcacaag

SEQ ID NO: 169779 - DNA, 25 bp, probe
catgaggcgacaggtcttcaaattg

SEQ ID NO: 169780 - DNA, 25 bp, probe
catgcgtggaagtcatcttcaccct

SEQ ID NO: 169781 - DNA, 25 bp, probe
catgtgcatggaaatgtcctccaac

SEQ ID NO: 169782 - DNA, 25 bp, probe
catgagcatggcatagtccaccgtg

SEQ ID NO: 169783 - DNA, 25 bp, probe
catgagcggcaatgtcacaatgacc

SEQ ID NO: 169784 - DNA, 25 bp, probe
catgtggtgaaatcaaaatcactga

SEQ ID NO: 169785 - DNA, 25 bp, probe
catgtgtgtaaactttaaatatgca

SEQ ID NO: 169786 - DNA, 25 bp, probe
catggttaaatgctgacacaataga

SEQ ID NO: 169787 - DNA, 25 bp, probe
catggttaaatgctgacacaataga

SEQ ID NO: 169788 - DNA, 25 bp, probe
catggttaccatatagcattgattc

SEQ ID NO: 169789 - DNA, 25 bp, probe
catggttaccatgggtgtggatggc

SEQ ID NO: 169790 - DNA, 25 bp, probe
catgtttacagctgggtgtgactca

SEQ ID NO: 169791 - DNA, 25 bp, probe
cattcctatccatgggggaccaaga

SEQ ID NO: 169792 - DNA, 25 bp, probe
cttctgtaccagagggccggacaaa

SEQ ID NO: 169793 - DNA, 25 bp, probe
ctatcgtcaccgaggcgggcggtaa

SEQ ID NO: 169794 - DNA, 25 bp, probe
catactggcccgaggtgggcatgca

SEQ ID NO: 169795 - DNA, 25 bp, probe
catccggggctatggtggggaggag

SEQ ID NO: 169796 - DNA, 25 bp, probe
ctcacacgactttagtttggccagg

SEQ ID NO: 169797 - DNA, 25 bp, probe
catgatctggagtattagtttggcc

SEQ ID NO: 169798 - DNA, 25 bp, probe
catgtctctgagcattagatttctc

SEQ ID NO: 169799 - DNA, 25 bp, probe
catgagcttcagcaatcagctcaat

SEQ ID NO: 169800 - DNA, 25 bp, probe
catgattatcacattctgccattaa

SEQ ID NO: 169801 - DNA, 25 bp, probe
catgtgctacgcactctgcaacaaa

SEQ ID NO: 169802 - DNA, 25 bp, probe
catggcacgccaactagcacaaaga

SEQ ID NO: 169803 - DNA, 25 bp, probe
catgtgaagcgaattctccagggaa

SEQ ID NO: 169804 - DNA, 25 bp, probe
catgtggagcgtcgtgtcacagtgg

SEQ ID NO: 169805 - DNA, 25 bp, probe
catgtggagcctgggctgcatcacg

SEQ ID NO: 169806 - DNA, 25 bp, probe
catgtggtcagtgggctgcatcttc

SEQ ID NO: 169807 - DNA, 25 bp, probe
catgtggtctgttggggtcatcatc

SEQ ID NO: 169808 - DNA, 25 bp, probe
catgtgggctcttggtgtgatcaca

SEQ ID NO: 169809 - DNA, 25 bp, probe
catgtcggcttgtagagagattgca

SEQ ID NO: 169810 - DNA, 25 bp, probe
catgtcggcttgtagagagattgca

SEQ ID NO: 169811 - DNA, 25 bp, probe
catgtccagcttccagaatatccgc

SEQ ID NO: 169812 - DNA, 25 bp, probe
catgttcagcgttctagcaacacgt

SEQ ID NO: 169813 - DNA, 25 bp, probe
catggttcagtcctagcaagaagcg

SEQ ID NO: 169814 - DNA, 25 bp, probe
catgttcgacttcagcgagaagctc

SEQ ID NO: 169815 - DNA, 25 bp, probe
catgtaagactttggccgaaatttc

SEQ ID NO: 169816 - DNA, 25 bp, probe
catgccaacccggagactgaagtgt

SEQ ID NO: 169817 - DNA, 25 bp, probe
catgtacctgccggagagtgtcaga

SEQ ID NO: 169818 - DNA, 25 bp, probe
catgtacggagccgagattatcgca

SEQ ID NO: 169819 - DNA, 25 bp, probe
catgttcagtggaggatcccatcaa

SEQ ID NO: 169820 - DNA, 25 bp, probe
catgtgcgagggtggacgctacaca

SEQ ID NO: 169821 - DNA, 25 bp, probe
catgtcgggaggggggtggacacaa

SEQ ID NO: 169822 - DNA, 25 bp, probe
catgaggggactgaaggtgggcaag

SEQ ID NO: 169823 - DNA, 25 bp, probe
catcagggggctcagagtctgggta

SEQ ID NO: 169824 - DNA, 25 bp, probe
catcctggtctcagaggacctggta

SEQ ID NO: 169825 - DNA, 25 bp, probe
catcctagaccagaggagcccaggc

SEQ ID NO: 169826 - DNA, 25 bp, probe
catgtctgatgatacctggagcgcc

SEQ ID NO: 169827 - DNA, 25 bp, probe
catgtctgatgatacctggagcgcc

SEQ ID NO: 169828 - DNA, 25 bp, probe
catgtggctctgtacctggagcatg

SEQ ID NO: 169829 - DNA, 25 bp, probe
catgtcgccttcatctgcaaggaaa

SEQ ID NO: 169830 - DNA, 25 bp, probe
catgttgccccaaatacaagcacaa

SEQ ID NO: 169831 - DNA, 25 bp, probe
catgttctgcatgtaagaaacacaa

SEQ ID NO: 169832 - DNA, 25 bp, probe
catgctttgctgctatgaaaatgag

SEQ ID NO: 169833 - DNA, 25 bp, probe
catgttctgcgccggtgacaaagca

SEQ ID NO: 169834 - DNA, 25 bp, probe
catgatgtgtggggctgtcaacaac

SEQ ID NO: 169835 - DNA, 25 bp, probe
catgatggtgatggtcggctacccg

SEQ ID NO: 169836 - DNA, 25 bp, probe
catggttgcaggacgcctacctgat

SEQ ID NO: 169837 - DNA, 25 bp, probe
catgtattgcgggcgctctagagga

SEQ ID NO: 169838 - DNA, 25 bp, probe
tacatctctgtgttgatgacagtgt

SEQ ID NO: 169839 - DNA, 25 bp, probe
catctgtaatttcgagtgggtggag

SEQ ID NO: 169840 - DNA, 25 bp, probe
catgttcacagtaggggtggtggtc

SEQ ID NO: 169841 - DNA, 25 bp, probe
catccatccaaaaagagtgggcctc

SEQ ID NO: 169842 - DNA, 25 bp, probe
catccatccaaaaagagtgggcctc

SEQ ID NO: 169843 - DNA, 25 bp, probe
catgcctccgaaagagggccaggtc

SEQ ID NO: 169844 - DNA, 25 bp, probe
catgtctcatggtattcgggaaggc

SEQ ID NO: 169845 - DNA, 25 bp, probe
ctcttgatagttaccggaacgaaat

SEQ ID NO: 169846 - DNA, 25 bp, probe
cttggaagtcatacccgaaaaagca

SEQ ID NO: 169847 - DNA, 25 bp, probe
cttgtaataaacccttaactggcat

SEQ ID NO: 169848 - DNA, 25 bp, probe
cttgtaaaaccaccgcattctaggg

SEQ ID NO: 169849 - DNA, 25 bp, probe
catgtgtaacaacagccgcttctgg

SEQ ID NO: 169850 - DNA, 25 bp, probe
catgtttaatggcacctcatttggc

SEQ ID NO: 169851 - DNA, 25 bp, probe
catgtttaatggcacctcatttggc

SEQ ID NO: 169852 - DNA, 25 bp, probe
catgctgttcaaactgaccaataag

SEQ ID NO: 169853 - DNA, 25 bp, probe
catgtttgaagatgatggcaggaag

SEQ ID NO: 169854 - DNA, 25 bp, probe
catgctgtttagtgatggcactgtc

SEQ ID NO: 169855 - DNA, 25 bp, probe
catggtgttcaaggacgtgctgctc

SEQ ID NO: 169856 - DNA, 25 bp, probe
catgggctatcttccaggtgtgcct

SEQ ID NO: 169857 - DNA, 25 bp, probe
catggtgccatcaggaggcggctgc

SEQ ID NO: 169858 - DNA, 25 bp, probe
catggtcctgcggtagactggtggg

SEQ ID NO: 169859 - DNA, 25 bp, probe
catgtgtcctctgtgaccaggagtg

SEQ ID NO: 169860 - DNA, 25 bp, probe
catgtgataatctaatacctgtgaa

SEQ ID NO: 169861 - DNA, 25 bp, probe
catgtgatacattaggaagctgaat

SEQ ID NO: 169862 - DNA, 25 bp, probe
catggagatctttgagactgaggat

SEQ ID NO: 169863 - DNA, 25 bp, probe
catggagacggtacagctgaggaac

SEQ ID NO: 169864 - DNA, 25 bp, probe
catgacgacggtggactatggcgac

SEQ ID NO: 169865 - DNA, 25 bp, probe
catgacgacggtggactatggcgac

SEQ ID NO: 169866 - DNA, 25 bp, probe
catgacgctctggttgagctcagtg

SEQ ID NO: 169867 - DNA, 25 bp, probe
catgatcctgctcaattccagtatg

SEQ ID NO: 169868 - DNA, 25 bp, probe
catgagggctggatgctctcgttga

SEQ ID NO: 169869 - DNA, 25 bp, probe
catgaaggtggaatgccccacagaa

SEQ ID NO: 169870 - DNA, 25 bp, probe
catgaagactctctatcacccaaat

SEQ ID NO: 169871 - DNA, 25 bp, probe
catacagtatatgttaacgaaataa

SEQ ID NO: 169872 - DNA, 25 bp, probe
cattgaaattcctccgcgaggataa

SEQ ID NO: 169873 - DNA, 25 bp, probe
cattaaactcactgactacggcatg

SEQ ID NO: 169874 - DNA, 25 bp, probe
cattacaagatccggaccctggaca

SEQ ID NO: 169875 - DNA, 25 bp, probe
ctgtaaaacatctgaacctaacatt

SEQ ID NO: 169876 - DNA, 25 bp, probe
catctgaaatactaaggaccttgac

SEQ ID NO: 169877 - DNA, 25 bp, probe
catggtccagacgaaggagcagttt

SEQ ID NO: 169878 - DNA, 25 bp, probe
catgtggccagggacggcatgagca

SEQ ID NO: 169879 - DNA, 25 bp, probe
catggtcagcgggacagaatgtgaa

SEQ ID NO: 169880 - DNA, 25 bp, probe
catggtcagcgggacagaatgtgaa

SEQ ID NO: 169881 - DNA, 25 bp, probe
catgttagcctggtcaagatgctga

SEQ ID NO: 169882 - DNA, 25 bp, probe
catgttgagctacttcaagccgctg

SEQ ID NO: 169883 - DNA, 25 bp, probe
catgttgcactgtttgcatgcgccc

SEQ ID NO: 169884 - DNA, 25 bp, probe
catgttgcactgtttgcatgcgccc

SEQ ID NO: 169885 - DNA, 25 bp, probe
catgttgagctgttcactcatccag

SEQ ID NO: 169886 - DNA, 25 bp, probe
catgattgtggcatccaattcgtgt

SEQ ID NO: 169887 - DNA, 25 bp, probe
catgccaatggcctcacgttggtgt

SEQ ID NO: 169888 - DNA, 25 bp, probe
catgctaaagccaggattgtgttgg

SEQ ID NO: 169889 - DNA, 25 bp, probe
catgaaaacctctgccagtgctata

SEQ ID NO: 169890 - DNA, 25 bp, probe
catgcaaacccttggccagtgcaag

SEQ ID NO: 169891 - DNA, 25 bp, probe
catgcaaacccttggccagtgcaag

SEQ ID NO: 169892 - DNA, 25 bp, probe
catgcaaacccttggccagtgcaag

SEQ ID NO: 169893 - DNA, 25 bp, probe
catgatgaaccctatcgtctatgcc

SEQ ID NO: 169894 - DNA, 25 bp, probe
catgctgggtacaatgcttctatga

SEQ ID NO: 169895 - DNA, 25 bp, probe
catgtgccttaatgcttcatatgag

SEQ ID NO: 169896 - DNA, 25 bp, probe
catgtgaccacaaatgcttgcttgg

SEQ ID NO: 169897 - DNA, 25 bp, probe
catgtccacaatcatcactgctgtg

SEQ ID NO: 169898 - DNA, 25 bp, probe
catgggcacctctaccatgtgtggt

SEQ ID NO: 169899 - DNA, 25 bp, probe
catgagggactcccctgtcattgat

SEQ ID NO: 169900 - DNA, 25 bp, probe
catgacgacacagtgccgtagctct

SEQ ID NO: 169901 - DNA, 25 bp, probe
catgacgacacagtgccgtagctct

SEQ ID NO: 169902 - DNA, 25 bp, probe
catgggatgcaaggccgaagcctgg

SEQ ID NO: 169903 - DNA, 25 bp, probe
catgaggacaggcaacacagcccga

SEQ ID NO: 169904 - DNA, 25 bp, probe
catgaaggcaaggtagactctccca

SEQ ID NO: 169905 - DNA, 25 bp, probe
catgaagtgcaaaaatgtggtccca

SEQ ID NO: 169906 - DNA, 25 bp, probe
catgtactgcagaaactgaggacta

SEQ ID NO: 169907 - DNA, 25 bp, probe
catgatagatcaccaacagaaaaag

SEQ ID NO: 169908 - DNA, 25 bp, probe
catgcataataagtcacagccaaat

SEQ ID NO: 169909 - DNA, 25 bp, probe
catgcactgatatgtccacagcaga

SEQ ID NO: 169910 - DNA, 25 bp, probe
catgtcatataatttatctgcacag

SEQ ID NO: 169911 - DNA, 25 bp, probe
catgtgcttgcatttctagcgagct

SEQ ID NO: 169912 - DNA, 25 bp, probe
catgaatatgcagactgcagggctt

SEQ ID NO: 169913 - DNA, 25 bp, probe
catgcacagtgagtacagagtagtt

SEQ ID NO: 169914 - DNA, 25 bp, probe
catcaggtcagatctggaagaactc

SEQ ID NO: 169915 - DNA, 25 bp, probe
catcggtcagcagaaaagaccctgc

SEQ ID NO: 169916 - DNA, 25 bp, probe
catcggcttggtactgaaaccctgc

SEQ ID NO: 169917 - DNA, 25 bp, probe
catcggcttggtactgaaaccctgc

SEQ ID NO: 169918 - DNA, 25 bp, probe
catcgtgctgttcacgtcagacgcc

SEQ ID NO: 169919 - DNA, 25 bp, probe
catgattgtcctcatggtcacctgc

SEQ ID NO: 169920 - DNA, 25 bp, probe
catgtgtttctccaatgtcaactgc

SEQ ID NO: 169921 - DNA, 25 bp, probe
catgtggctctactcatttgcaact

SEQ ID NO: 169922 - DNA, 25 bp, probe
catgcatggcatttgttcctgaaca

SEQ ID NO: 169923 - DNA, 25 bp, probe
catgcgatgtgtccaatcggagaca

SEQ ID NO: 169924 - DNA, 25 bp, probe
catcgattgatttacggcgctaagg

SEQ ID NO: 169925 - DNA, 25 bp, probe
catcgtgttccttgggctgataagc

SEQ ID NO: 169926 - DNA, 25 bp, probe
catgcggtactgaggtgcagacaag

SEQ ID NO: 169927 - DNA, 25 bp, probe
catgtatgatacagtgagtcagatc

SEQ ID NO: 169928 - DNA, 25 bp, probe
catgtatgatacagtgagtcagatc

SEQ ID NO: 169929 - DNA, 25 bp, probe
catgtgcagtcacgggagctcagct

SEQ ID NO: 169930 - DNA, 25 bp, probe
catgattggcagccggagtcactgc

SEQ ID NO: 169931 - DNA, 25 bp, probe
catgtatctgaggcagctattccgc

SEQ ID NO: 169932 - DNA, 25 bp, probe
catgtacaatcccatcatctactgc

SEQ ID NO: 169933 - DNA, 25 bp, probe
catgtacgacatgatcctactgcgg

SEQ ID NO: 169934 - DNA, 25 bp, probe
catgtacgacatgatcctactgcgg

SEQ ID NO: 169935 - DNA, 25 bp, probe
catgttgggcatgattctaccctta

SEQ ID NO: 169936 - DNA, 25 bp, probe
catggtggtgactgtcacccgcttc

SEQ ID NO: 169937 - DNA, 25 bp, probe
catggtggctgtgtacacccgcatt

SEQ ID NO: 169938 - DNA, 25 bp, probe
catggtggctgtgtacacccgcatt

SEQ ID NO: 169939 - DNA, 25 bp, probe
catggtggctcggtacaggttgtaa

SEQ ID NO: 169940 - DNA, 25 bp, probe
catggtggctcggtacaggttgtaa

SEQ ID NO: 169941 - DNA, 25 bp, probe
catggtggtgagggactcaggagaa

SEQ ID NO: 169942 - DNA, 25 bp, probe
catggggatggaggagctgggggat

SEQ ID NO: 169943 - DNA, 25 bp, probe
catggtggattagcagatggaggtg

SEQ ID NO: 169944 - DNA, 25 bp, probe
catgcccgcataaaactgaaggtgg

SEQ ID NO: 169945 - DNA, 25 bp, probe
catgacagggaacaggaaggtggcc

SEQ ID NO: 169946 - DNA, 25 bp, probe
catgagcaggaggcggggacgtggg

SEQ ID NO: 169947 - DNA, 25 bp, probe
catgagtgcgtggctggggacagac

SEQ ID NO: 169948 - DNA, 25 bp, probe
catgcatgtgcgaacgtccgggcac

SEQ ID NO: 169949 - DNA, 25 bp, probe
catgagtctgtaggagcaagggcac

SEQ ID NO: 169950 - DNA, 25 bp, probe
catagcctgctagtgaaaaggaagt

SEQ ID NO: 169951 - DNA, 25 bp, probe
catacccgaaaaagcaaacgatgaa

SEQ ID NO: 169952 - DNA, 25 bp, probe
cataccccagcaaaagcaaccagga

SEQ ID NO: 169953 - DNA, 25 bp, probe
cataccccagcaaaagcaaccagga

SEQ ID NO: 169954 - DNA, 25 bp, probe
catgacacagcctgtttcaaccagg

SEQ ID NO: 169955 - DNA, 25 bp, probe
catgaccagaagcttgacgcaccaa

SEQ ID NO: 169956 - DNA, 25 bp, probe
catgaccagaagcttgacgcaccaa

SEQ ID NO: 169957 - DNA, 25 bp, probe
catgatgccaacctcttacgtgcgc

SEQ ID NO: 169958 - DNA, 25 bp, probe
catgtgcaaaatccgcgaggggcgc

SEQ ID NO: 169959 - DNA, 25 bp, probe
catccaatcctcactgggtggggtg

SEQ ID NO: 169960 - DNA, 25 bp, probe
catacagatgtttcctggttggggg

SEQ ID NO: 169961 - DNA, 25 bp, probe
catacagatgtttcctggttggggg

SEQ ID NO: 169962 - DNA, 25 bp, probe
catgaagcttttacttacttgggga

SEQ ID NO: 169963 - DNA, 25 bp, probe
catcaactggttcttactctactgg

SEQ ID NO: 169964 - DNA, 25 bp, probe
catgcaactcctgcagtatgacccc

SEQ ID NO: 169965 - DNA, 25 bp, probe
catgcacacaacccagtgtacacac

SEQ ID NO: 169966 - DNA, 25 bp, probe
catgcaatcacaccatgccatgttt

SEQ ID NO: 169967 - DNA, 25 bp, probe
catgctcaccagccatgtatgcatc

SEQ ID NO: 169968 - DNA, 25 bp, probe
catgctgccgcaggatgatcagtcc

SEQ ID NO: 169969 - DNA, 25 bp, probe
catgtgaggctgttgctcagcatgc

SEQ ID NO: 169970 - DNA, 25 bp, probe
catgaagaatgctttgcagagggtc

SEQ ID NO: 169971 - DNA, 25 bp, probe
catgcaggaacatcgcaaggtgccc

SEQ ID NO: 169972 - DNA, 25 bp, probe
catcggcaacttcaaagatgccaga

SEQ ID NO: 169973 - DNA, 25 bp, probe
catgggctactacattatgttaatg

SEQ ID NO: 169974 - DNA, 25 bp, probe
catgggggtatggttttgtcactgc

SEQ ID NO: 169975 - DNA, 25 bp, probe
catggggttttgcattctttgcctg

SEQ ID NO: 169976 - DNA, 25 bp, probe
catgtggggtgttggttgcattttc

SEQ ID NO: 169977 - DNA, 25 bp, probe
catgatggttggtgacttgagtttg

SEQ ID NO: 169978 - DNA, 25 bp, probe
catgtgctttggggaccggtattat

SEQ ID NO: 169979 - DNA, 25 bp, probe
catctgcttcggagactcaggtggc

SEQ ID NO: 169980 - DNA, 25 bp, probe
catcagcgccggcgactatgagggg

SEQ ID NO: 169981 - DNA, 25 bp, probe
catccccagtgacggaaagggcatg

SEQ ID NO: 169982 - DNA, 25 bp, probe
catgacccagtgttggcagcacgag

SEQ ID NO: 169983 - DNA, 25 bp, probe
catgagctccagaggtcacagcacg

SEQ ID NO: 169984 - DNA, 25 bp, probe
catgagctccagaggtcacagcacg

SEQ ID NO: 169985 - DNA, 25 bp, probe
catgatctccaaacggccagagcac

SEQ ID NO: 169986 - DNA, 25 bp, probe
catgttgtcgatggggccagagatg

SEQ ID NO: 169987 - DNA, 25 bp, probe
catgttgtcgatggggccagagatg

SEQ ID NO: 169988 - DNA, 25 bp, probe
catgttgtccatgccaaccagaggg

SEQ ID NO: 169989 - DNA, 25 bp, probe
catgttgtccatgccaaccagaggg

SEQ ID NO: 169990 - DNA, 25 bp, probe
catgatacaccttctcaaccagatg

SEQ ID NO: 169991 - DNA, 25 bp, probe
catgatgaagtctccaggccagggc

SEQ ID NO: 169992 - DNA, 25 bp, probe
catgagaagtaccaaggccaggccc

SEQ ID NO: 169993 - DNA, 25 bp, probe
catgcgcaaggggaacctgcaggcc

SEQ ID NO: 169994 - DNA, 25 bp, probe
catgcgcaaggggaacctgcaggcc

SEQ ID NO: 169995 - DNA, 25 bp, probe
catgctgaaggtgagacatttggtt

SEQ ID NO: 169996 - DNA, 25 bp, probe
catgctgaaggtgagacatttggtt

SEQ ID NO: 169997 - DNA, 25 bp, probe
catccatgtgttccaaatttgcttt

SEQ ID NO: 169998 - DNA, 25 bp, probe
catcctggttctatactgtgtagat

SEQ ID NO: 169999 - DNA, 25 bp, probe
catccaagacttatcagtctttatg

SEQ ID NO: 170000 - DNA, 25 bp, probe
catccaagacttttaggccattctt

SEQ ID NO: 170001 - DNA, 25 bp, probe
catgctccagacataaatagctcac

SEQ ID NO: 170002 - DNA, 25 bp, probe
catgtccaaacgaagtaacaaaagg

SEQ ID NO: 170003 - DNA, 25 bp, probe
catgtcccaacaacgtagaaaaatc

SEQ ID NO: 170004 - DNA, 25 bp, probe
catgccactgaatacgttgaaaaaa

SEQ ID NO: 170005 - DNA, 25 bp, probe
catgaccgacaagggttgtgtgaag

SEQ ID NO: 170006 - DNA, 25 bp, probe
catgaccgtcactgactttggctgg

SEQ ID NO: 170007 - DNA, 25 bp, probe
catgaacactactgcctgtagtctg

SEQ ID NO: 170008 - DNA, 25 bp, probe
catgaagcacgacggcaccaagacc

SEQ ID NO: 170009 - DNA, 25 bp, probe
catgaaaggggccatcacactgacc

SEQ ID NO: 170010 - DNA, 25 bp, probe
catgaaaggggccatcacactgacc

SEQ ID NO: 170011 - DNA, 25 bp, probe
catgaaggtgggcagcacgcactct

SEQ ID NO: 170012 - DNA, 25 bp, probe
catccagggtctgatcatcgacgct

SEQ ID NO: 170013 - DNA, 25 bp, probe
catccgagtttcttctctacgaaaa

SEQ ID NO: 170014 - DNA, 25 bp, probe
catcccgtgacctccagacaaggag

SEQ ID NO: 170015 - DNA, 25 bp, probe
catcccgtgacctccagacaaggag

SEQ ID NO: 170016 - DNA, 25 bp, probe
catcccgtgacctccagacaaggag

SEQ ID NO: 170017 - DNA, 25 bp, probe
catcccgtgacctccagacaaggag

SEQ ID NO: 170018 - DNA, 25 bp, probe
ctaccagttccacatcgtcaatggc

SEQ ID NO: 170019 - DNA, 25 bp, probe
ctaccagttccacatcgtcaatggc

SEQ ID NO: 170020 - DNA, 25 bp, probe
cgaccaggttcgttcactcatggaa

SEQ ID NO: 170021 - DNA, 25 bp, probe
ctaaacagcttccttcagatctgga

SEQ ID NO: 170022 - DNA, 25 bp, probe
cataagccacctctgtaatcggatc

SEQ ID NO: 170023 - DNA, 25 bp, probe
catgaaccccattctgtatgttttc

SEQ ID NO: 170024 - DNA, 25 bp, probe
catgtaccccaatttacttgccatt

SEQ ID NO: 170025 - DNA, 25 bp, probe
catgtaccccaatttacttgccatt

SEQ ID NO: 170026 - DNA, 25 bp, probe
catgcaatccccttttggtagaatt

SEQ ID NO: 170027 - DNA, 25 bp, probe
catgagtccttcctgttctataaag

SEQ ID NO: 170028 - DNA, 25 bp, probe
catgattgtgctacagtttctttaa

SEQ ID NO: 170029 - DNA, 25 bp, probe
catgagtggcagatcttgttttaca

SEQ ID NO: 170030 - DNA, 25 bp, probe
catgagtggcagatcttgttttaca

SEQ ID NO: 170031 - DNA, 25 bp, probe
catgtgcaggtcctctatttttaat

SEQ ID NO: 170032 - DNA, 25 bp, probe
catgtcagcctcttcgatgtttaat

SEQ ID NO: 170033 - DNA, 25 bp, probe
catgctagcctgctacttggtgaag

SEQ ID NO: 170034 - DNA, 25 bp, probe
catgtcccgagtgcttgaggatgat

SEQ ID NO: 170035 - DNA, 25 bp, probe
catgtgcccaggattatattagcat

SEQ ID NO: 170036 - DNA, 25 bp, probe
catgtcctgcatcttctataaacag

SEQ ID NO: 170037 - DNA, 25 bp, probe
catgtcgtcatgcatctgtcatgaa

SEQ ID NO: 170038 - DNA, 25 bp, probe
catgttatttgtgatgctggaggca

SEQ ID NO: 170039 - DNA, 25 bp, probe
catgatgctcaccttcaatgctgaa

SEQ ID NO: 170040 - DNA, 25 bp, probe
catgtgccacctccagtgggaaaca

SEQ ID NO: 170041 - DNA, 25 bp, probe
catgcgcttccggcacttaaaaaag

SEQ ID NO: 170042 - DNA, 25 bp, probe
catctgtctcagtgactctaacaga

SEQ ID NO: 170043 - DNA, 25 bp, probe
catgccatcctgcgtctggacctgg

SEQ ID NO: 170044 - DNA, 25 bp, probe
catcgcattctgggtctgcaagtct

SEQ ID NO: 170045 - DNA, 25 bp, probe
catcgcattctgggtctgcaagtct

SEQ ID NO: 170046 - DNA, 25 bp, probe
catgcacaatctgggtcctggtgtg

SEQ ID NO: 170047 - DNA, 25 bp, probe
cattaatccgtttatgtgatgtgta

SEQ ID NO: 170048 - DNA, 25 bp, probe
cattaatccgtttatgtgatgtgta

SEQ ID NO: 170049 - DNA, 25 bp, probe
catgtatccctgttactgataggga

SEQ ID NO: 170050 - DNA, 25 bp, probe
catgtccccagaaatgatggcaggg

SEQ ID NO: 170051 - DNA, 25 bp, probe
catgccgctgcacaggtatggggtg

SEQ ID NO: 170052 - DNA, 25 bp, probe
catgacattgcatttgggggggctc

SEQ ID NO: 170053 - DNA, 25 bp, probe
catgatcctctgcgtgggagggctt

SEQ ID NO: 170054 - DNA, 25 bp, probe
catgatctactacgccgagaggata

SEQ ID NO: 170055 - DNA, 25 bp, probe
catgatctactacgccgagaggata

SEQ ID NO: 170056 - DNA, 25 bp, probe
catgatcaccaacatcgaggagatg

SEQ ID NO: 170057 - DNA, 25 bp, probe
catgatcaccaacatcgaggagatg

SEQ ID NO: 170058 - DNA, 25 bp, probe
catgatcccaacgaagcagcccatg

SEQ ID NO: 170059 - DNA, 25 bp, probe
catgcaccacaacaaaggctcatca

SEQ ID NO: 170060 - DNA, 25 bp, probe
catgatcttcaacagtgggctgcta

SEQ ID NO: 170061 - DNA, 25 bp, probe
catgatctgactttaattgtgtgtc

SEQ ID NO: 170062 - DNA, 25 bp, probe
catgagctacatggtatatttcaat

SEQ ID NO: 170063 - DNA, 25 bp, probe
catgagctggctgttctatctcacg

SEQ ID NO: 170064 - DNA, 25 bp, probe
catgtgcagagtgtcccagctgaca

SEQ ID NO: 170065 - DNA, 25 bp, probe
catgtcagagtcacctgatgtcaac

SEQ ID NO: 170066 - DNA, 25 bp, probe
catgatagagaaccctgcagtgtcc

SEQ ID NO: 170067 - DNA, 25 bp, probe
catgattccacagcccatgatgtcc

SEQ ID NO: 170068 - DNA, 25 bp, probe
catgattccacagcccatgatgtcc

SEQ ID NO: 170069 - DNA, 25 bp, probe
catgctgaccacagcctgatattcc

SEQ ID NO: 170070 - DNA, 25 bp, probe
catgccagcgacacctggatgttcg

SEQ ID NO: 170071 - DNA, 25 bp, probe
catgcctgcagagagtatagaatac

SEQ ID NO: 170072 - DNA, 25 bp, probe
catgttagagcccttctgaaaaagt

SEQ ID NO: 170073 - DNA, 25 bp, probe
catgttaaaagccttgattaaagag

SEQ ID NO: 170074 - DNA, 25 bp, probe
catgttttatgtgtagatctaatag

SEQ ID NO: 170075 - DNA, 25 bp, probe
catgtttgttgtatacttccttatg

SEQ ID NO: 170076 - DNA, 25 bp, probe
catactttattcttactaccttggg

SEQ ID NO: 170077 - DNA, 25 bp, probe
catcctttatctgtgacttcatgct

SEQ ID NO: 170078 - DNA, 25 bp, probe
catgtttctatctattgtttattgt

SEQ ID NO: 170079 - DNA, 25 bp, probe
catgtattaaattcttctgtctatt

SEQ ID NO: 170080 - DNA, 25 bp, probe
catgctctgtaagttgcttcctaac

SEQ ID NO: 170081 - DNA, 25 bp, probe
catgagtgaatgtgtcttcctgtcc

SEQ ID NO: 170082 - DNA, 25 bp, probe
catgatgggtgtgaccttctgtgcc

SEQ ID NO: 170083 - DNA, 25 bp, probe
catgtctggtttactctttatcctg

SEQ ID NO: 170084 - DNA, 25 bp, probe
catgtacagctttttctttacctta

SEQ ID NO: 170085 - DNA, 25 bp, probe
catgatgcacagtatctgctgttct

SEQ ID NO: 170086 - DNA, 25 bp, probe
catgtcacatttagctgtgctcaga

SEQ ID NO: 170087 - DNA, 25 bp, probe
catgctcctttagtgcactgtggaa

SEQ ID NO: 170088 - DNA, 25 bp, probe
catgccactggatgggatgtggaac

SEQ ID NO: 170089 - DNA, 25 bp, probe
catgctcatcgcaatggtggatgtg

SEQ ID NO: 170090 - DNA, 25 bp, probe
catgccatggcctgtggatggagaa

SEQ ID NO: 170091 - DNA, 25 bp, probe
catgcagctggatcaggtgggaaaa

SEQ ID NO: 170092 - DNA, 25 bp, probe
catgctgcggtggttgtgtgggaaa

SEQ ID NO: 170093 - DNA, 25 bp, probe
catgctaggctttctcagtggggaa

SEQ ID NO: 170094 - DNA, 25 bp, probe
catgctaggctttctcagtggggaa

SEQ ID NO: 170095 - DNA, 25 bp, probe
catgctatgctgatgttagtactgg

SEQ ID NO: 170096 - DNA, 25 bp, probe
catgtcatgcgaccctaggactttt

SEQ ID NO: 170097 - DNA, 25 bp, probe
catgcttgacatacctaccagtatt

SEQ ID NO: 170098 - DNA, 25 bp, probe
gcattcgaaaacaccaaataccgag

SEQ ID NO: 170099 - DNA, 25 bp, probe
catgacgaagaatccccacaagcgc

SEQ ID NO: 170100 - DNA, 25 bp, probe
catgtctgcaaatccttccaaagtg

SEQ ID NO: 170101 - DNA, 25 bp, probe
catcttcctcataccttcaagtaga

SEQ ID NO: 170102 - DNA, 25 bp, probe
catcacaccatcacctatacgggtt

SEQ ID NO: 170103 - DNA, 25 bp, probe
catcacaccatcacctatacgggtt

SEQ ID NO: 170104 - DNA, 25 bp, probe
catccccaccactgatatcatgggg

SEQ ID NO: 170105 - DNA, 25 bp, probe
catcctttacactctagtggtcgcc

SEQ ID NO: 170106 - DNA, 25 bp, probe
cattccttagtctcaagggctagca

SEQ ID NO: 170107 - DNA, 25 bp, probe
catcctttttgttatatgggataga

SEQ ID NO: 170108 - DNA, 25 bp, probe
catccttttgttgaaatggcatcgt

SEQ ID NO: 170109 - DNA, 25 bp, probe
catgccgttggttttattggcagtg

SEQ ID NO: 170110 - DNA, 25 bp, probe
catccacttcggattcagtgggtga

SEQ ID NO: 170111 - DNA, 25 bp, probe
catcgactttggcttcatgtttgaa

SEQ ID NO: 170112 - DNA, 25 bp, probe
catcgactttggcttcatgtttgaa

SEQ ID NO: 170113 - DNA, 25 bp, probe
catctattctgttggtctggtttac

SEQ ID NO: 170114 - DNA, 25 bp, probe
catctattctgttggtctggtttac

SEQ ID NO: 170115 - DNA, 25 bp, probe
catgattcttcttggtctactgtga

SEQ ID NO: 170116 - DNA, 25 bp, probe
catgttctgctcatggctcagagga

SEQ ID NO: 170117 - DNA, 25 bp, probe
catgtatcacatgtcttcagaagca

SEQ ID NO: 170118 - DNA, 25 bp, probe
catgtaacatctggcttggagcaag

SEQ ID NO: 170119 - DNA, 25 bp, probe
catgttgcacaaggcctgagagacg

SEQ ID NO: 170120 - DNA, 25 bp, probe
catgttgcagcaattcactgtaaag

SEQ ID NO: 170121 - DNA, 25 bp, probe
catgctttgatcctcactgtggaac

SEQ ID NO: 170122 - DNA, 25 bp, probe
catgctttgatccgaattcttcgcc

SEQ ID NO: 170123 - DNA, 25 bp, probe
catgtttgttagccagcacttctgc

SEQ ID NO: 170124 - DNA, 25 bp, probe
catgcctggaatcccagcactttga

SEQ ID NO: 170125 - DNA, 25 bp, probe
catgcactagtctccatttctggga

SEQ ID NO: 170126 - DNA, 25 bp, probe
catgcactagtctccatttctggga

SEQ ID NO: 170127 - DNA, 25 bp, probe
catgcttatgtcaccagtattggca

SEQ ID NO: 170128 - DNA, 25 bp, probe
catgcaatagctgttcggattgaga

SEQ ID NO: 170129 - DNA, 25 bp, probe
catgaatggcatgtatagctatgaa

SEQ ID NO: 170130 - DNA, 25 bp, probe
catgcaaagatcctatagaagatat

SEQ ID NO: 170131 - DNA, 25 bp, probe
catgactatacgctaagagaactta

SEQ ID NO: 170132 - DNA, 25 bp, probe
catgtactaaggtgagtatactaag

SEQ ID NO: 170133 - DNA, 25 bp, probe
catgtactaagggatgcagtggagt

SEQ ID NO: 170134 - DNA, 25 bp, probe
catgcccttacacgtgcgtgtgagt

SEQ ID NO: 170135 - DNA, 25 bp, probe
catgcctgtaaaagctcagctcgca

SEQ ID NO: 170136 - DNA, 25 bp, probe
catcgcgctcaatcagaagctgctg

SEQ ID NO: 170137 - DNA, 25 bp, probe
catcctgctgaagttcgactgtgtt

SEQ ID NO: 170138 - DNA, 25 bp, probe
catccctacatcaacgtctggtatg

SEQ ID NO: 170139 - DNA, 25 bp, probe
cataccgacatctacaactaatctt

SEQ ID NO: 170140 - DNA, 25 bp, probe
catgccccatactactgaataaact

SEQ ID NO: 170141 - DNA, 25 bp, probe
catgcccattacaaagcaaataagt

SEQ ID NO: 170142 - DNA, 25 bp, probe
catgcccattacaaagcaaataagt

SEQ ID NO: 170143 - DNA, 25 bp, probe
catctcctgaacccacaaattattc

SEQ ID NO: 170144 - DNA, 25 bp, probe
catccacagagacctcaagagtaat

SEQ ID NO: 170145 - DNA, 25 bp, probe
catcgacgagaagcgggacttccgc

SEQ ID NO: 170146 - DNA, 25 bp, probe
catcaacggaattagggccttcctt

SEQ ID NO: 170147 - DNA, 25 bp, probe
cataagggagctgcaggttcttcat

SEQ ID NO: 170148 - DNA, 25 bp, probe
cataccgtgccccagaggttttggc

SEQ ID NO: 170149 - DNA, 25 bp, probe
catcagctactgacacgtaaggttt

SEQ ID NO: 170150 - DNA, 25 bp, probe
catagtacaccatggagcacggttt

SEQ ID NO: 170151 - DNA, 25 bp, probe
catcatgtaccgctgcgtgacgggg

SEQ ID NO: 170152 - DNA, 25 bp, probe
catcatgtaccgctgcgtgacgggg

SEQ ID NO: 170153 - DNA, 25 bp, probe
catgcttcaccatggcgagaagggt

SEQ ID NO: 170154 - DNA, 25 bp, probe
catgttcatctcttgccaaataagg

SEQ ID NO: 170155 - DNA, 25 bp, probe
catgtatctacctcactattcaagt

SEQ ID NO: 170156 - DNA, 25 bp, probe
catgccttacctggacatgtatcag

SEQ ID NO: 170157 - DNA, 25 bp, probe
catctttcccatgtatgtgactggc

SEQ ID NO: 170158 - DNA, 25 bp, probe
cataataccagtgtgatgtcaggcc

SEQ ID NO: 170159 - DNA, 25 bp, probe
catcgtagccgttctgattcaagag

SEQ ID NO: 170160 - DNA, 25 bp, probe
catgcctaaggctggttcaagagac

SEQ ID NO: 170161 - DNA, 25 bp, probe
catcctaaagatccagtccagagaa

SEQ ID NO: 170162 - DNA, 25 bp, probe
catccgcaaagacctgtacgccaac

SEQ ID NO: 170163 - DNA, 25 bp, probe
catccatgcagtagaggcgctgggc

SEQ ID NO: 170164 - DNA, 25 bp, probe
catccatgcagtagaggcgctgggc

SEQ ID NO: 170165 - DNA, 25 bp, probe
catccacctggagggtgtcgtgacc

SEQ ID NO: 170166 - DNA, 25 bp, probe
catcgaccatggatggtttcctcca

SEQ ID NO: 170167 - DNA, 25 bp, probe
catcgaccatggatggtttcctcca

SEQ ID NO: 170168 - DNA, 25 bp, probe
catgctagccatgaaccatttcctg

SEQ ID NO: 170169 - DNA, 25 bp, probe
catgcgcaggtggagcagcgtttcc

SEQ ID NO: 170170 - DNA, 25 bp, probe
catgccaactcgggagcattctgcc

SEQ ID NO: 170171 - DNA, 25 bp, probe
catccaagcatgtggccattacaca

SEQ ID NO: 170172 - DNA, 25 bp, probe
catcccagatgtgggccagccttat

SEQ ID NO: 170173 - DNA, 25 bp, probe
catgcgggagtgctggcatgccgcg

SEQ ID NO: 170174 - DNA, 25 bp, probe
catgcgggagtgctggcatgccgcg

SEQ ID NO: 170175 - DNA, 25 bp, probe
catgagggagattgtgtgcatcaag

SEQ ID NO: 170176 - DNA, 25 bp, probe
catgcagggtgaagtgtacagagtt

SEQ ID NO: 170177 - DNA, 25 bp, probe
catgctgccctttgaggaagagatt

SEQ ID NO: 170178 - DNA, 25 bp, probe
catccgcctttacgaagtggtggag

SEQ ID NO: 170179 - DNA, 25 bp, probe
catcgtgcactgcctaaacggggga

SEQ ID NO: 170180 - DNA, 25 bp, probe
catccccatggagaacggcgtgggt

SEQ ID NO: 170181 - DNA, 25 bp, probe
catccccatggagaacggcgtgggt

SEQ ID NO: 170182 - DNA, 25 bp, probe
catcccactgggaaaacgtctcagg

SEQ ID NO: 170183 - DNA, 25 bp, probe
catcccactgggaaaacgtctcagg

SEQ ID NO: 170184 - DNA, 25 bp, probe
catcctgagctgggagtacctgtcc

SEQ ID NO: 170185 - DNA, 25 bp, probe
catcctgagctgggagtacctgtcc

SEQ ID NO: 170186 - DNA, 25 bp, probe
catgctggcaggggacatgacctgg

SEQ ID NO: 170187 - DNA, 25 bp, probe
catgaagcagtacgaatgcagcctg

SEQ ID NO: 170188 - DNA, 25 bp, probe
catgagagaatcagcctgcagaagc

SEQ ID NO: 170189 - DNA, 25 bp, probe
catgaggagctgcgcctctgagagc

SEQ ID NO: 170190 - DNA, 25 bp, probe
catgagtgactgctggatctacaag

SEQ ID NO: 170191 - DNA, 25 bp, probe
catgctggactgcaggcacaaagac

SEQ ID NO: 170192 - DNA, 25 bp, probe
catgctgaccgtcggcatggagaac

SEQ ID NO: 170193 - DNA, 25 bp, probe
catgctgactctatgagatggggaa

SEQ ID NO: 170194 - DNA, 25 bp, probe
catgctggcattcaacatgtggaaa

SEQ ID NO: 170195 - DNA, 25 bp, probe
catgcggtcttatgtatgataaaca

SEQ ID NO: 170196 - DNA, 25 bp, probe
catgcggtcttatgtatgataaaca

SEQ ID NO: 170197 - DNA, 25 bp, probe
catgagagctgtgatcctttaaaga

SEQ ID NO: 170198 - DNA, 25 bp, probe
catgatcttatggaactctttagaa

SEQ ID NO: 170199 - DNA, 25 bp, probe
catgctctttggcacttacatgaaa

SEQ ID NO: 170200 - DNA, 25 bp, probe
catgctcagggcccacattaaggaa

SEQ ID NO: 170201 - DNA, 25 bp, probe
catgaagaggctcagcttcctggac

SEQ ID NO: 170202 - DNA, 25 bp, probe
catgaagaactgctggcacctggac

SEQ ID NO: 170203 - DNA, 25 bp, probe
catgaagaactgctggcacctggac

SEQ ID NO: 170204 - DNA, 25 bp, probe
agactgatgagcacatctctctgcc

SEQ ID NO: 170205 - DNA, 25 bp, probe
catgaaggacttgctggcagccaac

SEQ ID NO: 170206 - DNA, 25 bp, probe
catgatcaaactggcctgtggcgac

SEQ ID NO: 170207 - DNA, 25 bp, probe
catgctcataccaagtctctgtgga

SEQ ID NO: 170208 - DNA, 25 bp, probe
catgcatgcaaggccagtcgtggtg

SEQ ID NO: 170209 - DNA, 25 bp, probe
catgctgaagcggctcatcgagaaa

SEQ ID NO: 170210 - DNA, 25 bp, probe
catgctgaagcggctcatcgagaaa

SEQ ID NO: 170211 - DNA, 25 bp, probe
catctgaagcggttctcagaatcca

SEQ ID NO: 170212 - DNA, 25 bp, probe
catctaagaaacactgggaggcaca

SEQ ID NO: 170213 - DNA, 25 bp, probe
catctaagaaacactgggaggcaca

SEQ ID NO: 170214 - DNA, 25 bp, probe
catccagtaccacggcgtggaggcc

SEQ ID NO: 170215 - DNA, 25 bp, probe
catcaagttccaaccattaaggtcc

SEQ ID NO: 170216 - DNA, 25 bp, probe
catcacgttgactaccattgggttc

SEQ ID NO: 170217 - DNA, 25 bp, probe
catcacgttgactaccattgggttc

SEQ ID NO: 170218 - DNA, 25 bp, probe
catccgtttctgacgcacatgtttt

SEQ ID NO: 170219 - DNA, 25 bp, probe
catcggtatcatcgtctacatttcc

SEQ ID NO: 170220 - DNA, 25 bp, probe
catcggatcacgcagctcaagattg

SEQ ID NO: 170221 - DNA, 25 bp, probe
catcgcgctgcaggcatacagcaag

SEQ ID NO: 170222 - DNA, 25 bp, probe
catgccctgtggcacagcacaggtg

SEQ ID NO: 170223 - DNA, 25 bp, probe
catccacactgccacaatgcaggtg

SEQ ID NO: 170224 - DNA, 25 bp, probe
catccaatgcatccacatttgtctc

SEQ ID NO: 170225 - DNA, 25 bp, probe
catccaatgcatccacatttgtctc

SEQ ID NO: 170226 - DNA, 25 bp, probe
catgacctgcatcatcatttgcttc

SEQ ID NO: 170227 - DNA, 25 bp, probe
catgactctgcaaggcagtcctttg

SEQ ID NO: 170228 - DNA, 25 bp, probe
catgatcctgcaattccacttatag

SEQ ID NO: 170229 - DNA, 25 bp, probe
catgagcagtgccatgatccagcct

SEQ ID NO: 170230 - DNA, 25 bp, probe
catgagcagtgccatgatccagcct

SEQ ID NO: 170231 - DNA, 25 bp, probe
catgaggtccatcagagctctgatt

SEQ ID NO: 170232 - DNA, 25 bp, probe
catgatctgtacctaagctcagtat

SEQ ID NO: 170233 - DNA, 25 bp, probe
catgactgtggcctgttgctcatga

SEQ ID NO: 170234 - DNA, 25 bp, probe
catgactgtggcctgttgctcatga

SEQ ID NO: 170235 - DNA, 25 bp, probe
catgcagcttagctaatgccaaagc

SEQ ID NO: 170236 - DNA, 25 bp, probe
catgctgtgtgactcaaaccaaatc

SEQ ID NO: 170237 - DNA, 25 bp, probe
catgctgtgtgccgggaacacccgg

SEQ ID NO: 170238 - DNA, 25 bp, probe
catcgaggcggatgacaaccccttc

SEQ ID NO: 170239 - DNA, 25 bp, probe
catccagggcagtgagcagccctcc

SEQ ID NO: 170240 - DNA, 25 bp, probe
catctggctggcattgttgcccatc

SEQ ID NO: 170241 - DNA, 25 bp, probe
catctgagcattgttttcctcttcc

SEQ ID NO: 170242 - DNA, 25 bp, probe
catctagcagtcagttcttgttttc

SEQ ID NO: 170243 - DNA, 25 bp, probe
catcgaatgccttttctcttttatc

SEQ ID NO: 170244 - DNA, 25 bp, probe
catctaagccttctggttttatggg

SEQ ID NO: 170245 - DNA, 25 bp, probe
cgaaagccttttggtgactttatgg

SEQ ID NO: 170246 - DNA, 25 bp, probe
cgaatacaaactccgtaccttacag

SEQ ID NO: 170247 - DNA, 25 bp, probe
catgacatcaagacactccagtacc

SEQ ID NO: 170248 - DNA, 25 bp, probe
catgaaataccactccatgtcgctg

SEQ ID NO: 170249 - DNA, 25 bp, probe
catgaaataccactccatgtcgctg

SEQ ID NO: 170250 - DNA, 25 bp, probe
catagaatacggcacagtctggtcc

SEQ ID NO: 170251 - DNA, 25 bp, probe
catcaaatgccccgaatttagtcac

SEQ ID NO: 170252 - DNA, 25 bp, probe
cataagatgcccctgggctatgacc

SEQ ID NO: 170253 - DNA, 25 bp, probe
catcgatgagcggactgatgtctgg

SEQ ID NO: 170254 - DNA, 25 bp, probe
catcctgccggatgagtgtgggtgt

SEQ ID NO: 170255 - DNA, 25 bp, probe
catgccccgcagtcagtgttggggg

SEQ ID NO: 170256 - DNA, 25 bp, probe
catccctgggctgttgggaggaaca

SEQ ID NO: 170257 - DNA, 25 bp, probe
catgaccccgctgctgggaaggaat

SEQ ID NO: 170258 - DNA, 25 bp, probe
catgatccaccagctcatgggcaat

SEQ ID NO: 170259 - DNA, 25 bp, probe
catgaccatggaagctgagaggcca

SEQ ID NO: 170260 - DNA, 25 bp, probe
catgatctgatgggactactggaat

SEQ ID NO: 170261 - DNA, 25 bp, probe
catgatgatgagggactgttggcat

SEQ ID NO: 170262 - DNA, 25 bp, probe
catgatgatgagggattgctggcat

SEQ ID NO: 170263 - DNA, 25 bp, probe
catgagtgagcccattgaggttgtg

SEQ ID NO: 170264 - DNA, 25 bp, probe
catgcagaaccagttgatgtttggt

SEQ ID NO: 170265 - DNA, 25 bp, probe
catgcaaggccagtcgtggtgcacg

SEQ ID NO: 170266 - DNA, 25 bp, probe
catcacaggccaacaaaatgaacct

SEQ ID NO: 170267 - DNA, 25 bp, probe
catccagagctaaagccacaaaccc

SEQ ID NO: 170268 - DNA, 25 bp, probe
catccagactactcgaaatggcgtc

SEQ ID NO: 170269 - DNA, 25 bp, probe
cataagactatcaaggaaactgcag

SEQ ID NO: 170270 - DNA, 25 bp, probe
cataagtcagtcaagccgaaagcga

SEQ ID NO: 170271 - DNA, 25 bp, probe
catcagaatctgtcggccaaaagcg

SEQ ID NO: 170272 - DNA, 25 bp, probe
catcagaatctgtcggccaaaagcg

SEQ ID NO: 170273 - DNA, 25 bp, probe
catagagtctacctagagcaggggt

SEQ ID NO: 170274 - DNA, 25 bp, probe
catgaaggcccctgacagggctggc

SEQ ID NO: 170275 - DNA, 25 bp, probe
catgagaaaaacggcacaggccttc

SEQ ID NO: 170276 - DNA, 25 bp, probe
catgcacatagaatacggcacagtc

SEQ ID NO: 170277 - DNA, 25 bp, probe
catgcattcatacaggcagcgatgg

SEQ ID NO: 170278 - DNA, 25 bp, probe
catgcagatctacagcgccagagtg

SEQ ID NO: 170279 - DNA, 25 bp, probe
catgcatgctcagtgaagcctagac

SEQ ID NO: 170280 - DNA, 25 bp, probe
catgcacatccttatgcacttccag

SEQ ID NO: 170281 - DNA, 25 bp, probe
catgcaagagctcagcacgatccac

SEQ ID NO: 170282 - DNA, 25 bp, probe
catgcacagatgtttggcagcttca

SEQ ID NO: 170283 - DNA, 25 bp, probe
catgcacagatgtttggcagcttca

SEQ ID NO: 170284 - DNA, 25 bp, probe
catgcagtgtcttgctggcagatgt

SEQ ID NO: 170285 - DNA, 25 bp, probe
catgcacgttcagacagctgcattg

SEQ ID NO: 170286 - DNA, 25 bp, probe
catgacctttggtacatgcctgtta

SEQ ID NO: 170287 - DNA, 25 bp, probe
catgaccattgtactgacaacaatt

SEQ ID NO: 170288 - DNA, 25 bp, probe
catccagtctgtgctatcagagcaa

SEQ ID NO: 170289 - DNA, 25 bp, probe
catccttctcattctgtcggaaatg

SEQ ID NO: 170290 - DNA, 25 bp, probe
catcccccttcccagaagaagtgga

SEQ ID NO: 170291 - DNA, 25 bp, probe
catccccctgtctaaaaattcagaa

SEQ ID NO: 170292 - DNA, 25 bp, probe
catccctttttctgctaattcgagt

SEQ ID NO: 170293 - DNA, 25 bp, probe
catcccttcttttggacttgggaga

SEQ ID NO: 170294 - DNA, 25 bp, probe
catcccttcttttggacttgggaga

SEQ ID NO: 170295 - DNA, 25 bp, probe
catcgcctttctcacgatcaagggc

SEQ ID NO: 170296 - DNA, 25 bp, probe
catcctcttccggaacgagacggtg

SEQ ID NO: 170297 - DNA, 25 bp, probe
catccctgccgaaaacgagacaatt

SEQ ID NO: 170298 - DNA, 25 bp, probe
catccactcctgaacaactcattga

SEQ ID NO: 170299 - DNA, 25 bp, probe
catccaccagcgttatattttgcac

SEQ ID NO: 170300 - DNA, 25 bp, probe
catccaccaggggatgaaatgtgac

SEQ ID NO: 170301 - DNA, 25 bp, probe
catccccactatgatcaacatcggc

SEQ ID NO: 170302 - DNA, 25 bp, probe
catccccactatgatcaacatcggc

SEQ ID NO: 170303 - DNA, 25 bp, probe
catcctcacactaaaatttcccatg

SEQ ID NO: 170304 - DNA, 25 bp, probe
catcctcacactaaaatttcccatg

SEQ ID NO: 170305 - DNA, 25 bp, probe
catgcaaaactcaaagatgctcccc

SEQ ID NO: 170306 - DNA, 25 bp, probe
catgcaaaactcaaagatgctcccc

SEQ ID NO: 170307 - DNA, 25 bp, probe
catgaacaacctcagctccatgaac

SEQ ID NO: 170308 - DNA, 25 bp, probe
catcgaaactctcatccgcgatatg

SEQ ID NO: 170309 - DNA, 25 bp, probe
catcagcattaccaacaacgtcatt

SEQ ID NO: 170310 - DNA, 25 bp, probe
ctagattaagagtcaatctgcaagc

SEQ ID NO: 170311 - DNA, 25 bp, probe
catcaactagaataatctacattga

SEQ ID NO: 170312 - DNA, 25 bp, probe
catcacctgaaacactggacctggg

SEQ ID NO: 170313 - DNA, 25 bp, probe
catcctgggctacactgagcaccag

SEQ ID NO: 170314 - DNA, 25 bp, probe
catcctggatgatggaagccaccat

SEQ ID NO: 170315 - DNA, 25 bp, probe
catccgagagggtcaactggccgtg

SEQ ID NO: 170316 - DNA, 25 bp, probe
catccagcatggtgattttgtccgg

SEQ ID NO: 170317 - DNA, 25 bp, probe
catccctggttcgagtatgtcttgg

SEQ ID NO: 170318 - DNA, 25 bp, probe
catgccgtggtgtctcggatggata

SEQ ID NO: 170319 - DNA, 25 bp, probe
catgccgtggtgtctcggatggata

SEQ ID NO: 170320 - DNA, 25 bp, probe
catcctgaggatcccctcagctgag

SEQ ID NO: 170321 - DNA, 25 bp, probe
catcctgaggatcccctcagctgag

SEQ ID NO: 170322 - DNA, 25 bp, probe
catgctggaagtcaccatcactgtg

SEQ ID NO: 170323 - DNA, 25 bp, probe
catgcatggaaattcccttcatctg

SEQ ID NO: 170324 - DNA, 25 bp, probe
catcgacattaacccactcatttag

SEQ ID NO: 170325 - DNA, 25 bp, probe
catccaattaggcatccttctttgc

SEQ ID NO: 170326 - DNA, 25 bp, probe
catccgtgtggacacgccacattat

SEQ ID NO: 170327 - DNA, 25 bp, probe
catccacagttacacggaaagcatg

SEQ ID NO: 170328 - DNA, 25 bp, probe
cataaatatattcagagtaacacag

SEQ ID NO: 170329 - DNA, 25 bp, probe
catgaagaaattcgaatctcccaac

SEQ ID NO: 170330 - DNA, 25 bp, probe
catgaagaccatgggcatgtcctcc

SEQ ID NO: 170331 - DNA, 25 bp, probe
catgaagaccagacagctctgcctg

SEQ ID NO: 170332 - DNA, 25 bp, probe
catgaagatgccttccactgggggg

SEQ ID NO: 170333 - DNA, 25 bp, probe
cataatctggtagacgtgtgtggag

SEQ ID NO: 170334 - DNA, 25 bp, probe
catagaccagtctgattttgaaggg

SEQ ID NO: 170335 - DNA, 25 bp, probe
cataactttttgtctttaagtcgtg

SEQ ID NO: 170336 - DNA, 25 bp, probe
cttggttattgttttttagccatag

SEQ ID NO: 170337 - DNA, 25 bp, probe
cttaattttgttcaccgagatctgg

SEQ ID NO: 170338 - DNA, 25 bp, probe
cttaaagttgttctcccaagagctt

SEQ ID NO: 170339 - DNA, 25 bp, probe
catccatgagagctttggttccccg

SEQ ID NO: 170340 - DNA, 25 bp, probe
catctgcattggctggggtgtgccc

SEQ ID NO: 170341 - DNA, 25 bp, probe
catgcgctctgccgatggcaggagg

SEQ ID NO: 170342 - DNA, 25 bp, probe
catgcgctctgccgatggcaggagg

SEQ ID NO: 170343 - DNA, 25 bp, probe
catgctgttgctcatggcgatgcac

SEQ ID NO: 170344 - DNA, 25 bp, probe
catgctgtatcaccaggtgacattg

SEQ ID NO: 170345 - DNA, 25 bp, probe
catgcacttatcgagatgtgccatt

SEQ ID NO: 170346 - DNA, 25 bp, probe
catccatctgctggcagagagccac

SEQ ID NO: 170347 - DNA, 25 bp, probe
catccatccgtctacagctaaaaca

SEQ ID NO: 170348 - DNA, 25 bp, probe
catccatgactttatccttgaagct

SEQ ID NO: 170349 - DNA, 25 bp, probe
catcctgaattctagagttgactct

SEQ ID NO: 170350 - DNA, 25 bp, probe
catccttgatgtcatagttgagtgc

SEQ ID NO: 170351 - DNA, 25 bp, probe
catgcccatattcataatgctttgg

SEQ ID NO: 170352 - DNA, 25 bp, probe
catgctaagtctaacactcctggga

SEQ ID NO: 170353 - DNA, 25 bp, probe
catctatatgttaaccagctctctg

SEQ ID NO: 170354 - DNA, 25 bp, probe
catgcacacatggtgtcccagatct

SEQ ID NO: 170355 - DNA, 25 bp, probe
catgcacttgctatgtgcaaggcct

SEQ ID NO: 170356 - DNA, 25 bp, probe
catgccaggcaaggtgaaccctact

SEQ ID NO: 170357 - DNA, 25 bp, probe
catgcacagggatgtgaaacctcac

SEQ ID NO: 170358 - DNA, 25 bp, probe
catcactggcagaagtaaactttcg

SEQ ID NO: 170359 - DNA, 25 bp, probe
catcactggcagaagtaaactttcg

SEQ ID NO: 170360 - DNA, 25 bp, probe
catagctggcagatgcccaacgggc

SEQ ID NO: 170361 - DNA, 25 bp, probe
catagctggcagatgcccaacgggc

SEQ ID NO: 170362 - DNA, 25 bp, probe
catacacgcaaaagacaccgggccc

SEQ ID NO: 170363 - DNA, 25 bp, probe
cataacgggcaagggctgcgggcca

SEQ ID NO: 170364 - DNA, 25 bp, probe
cataacgggcaagggctgcgggcca

SEQ ID NO: 170365 - DNA, 25 bp, probe
ctaaccgtgccatcttgcaaactac

SEQ ID NO: 170366 - DNA, 25 bp, probe
catttctttcgtgttcaaaccacgg

SEQ ID NO: 170367 - DNA, 25 bp, probe
catttctttcgtgttcaaaccacgg

SEQ ID NO: 170368 - DNA, 25 bp, probe
catcttctgttggtttccaaaccac

SEQ ID NO: 170369 - DNA, 25 bp, probe
cattggctgttggttccacagggat

SEQ ID NO: 170370 - DNA, 25 bp, probe
catacgctgcactgttcttagaggg

SEQ ID NO: 170371 - DNA, 25 bp, probe
catatcccaagccctttagggctac

SEQ ID NO: 170372 - DNA, 25 bp, probe
cattccacaaccattttggaccccg

SEQ ID NO: 170373 - DNA, 25 bp, probe
catcaccaacaaatggtttcaaccc

SEQ ID NO: 170374 - DNA, 25 bp, probe
ctagactgataagtggttccaacca

SEQ ID NO: 170375 - DNA, 25 bp, probe
gctggaatgaaagagctaaaacgtc

SEQ ID NO: 170376 - DNA, 25 bp, probe
gaggggaatacctctaaatcgtcct

SEQ ID NO: 170377 - DNA, 25 bp, probe
gattttggaacctcgaaacgtcttg

SEQ ID NO: 170378 - DNA, 25 bp, probe
cggttggaacctgcaataaactcgc

SEQ ID NO: 170379 - DNA, 25 bp, probe
ctggttccggaagaaacatcctccg

SEQ ID NO: 170380 - DNA, 25 bp, probe
gttttcgaggaagaacctgtcccag

SEQ ID NO: 170381 - DNA, 25 bp, probe
gccatttcgggcagaaaccgtggcc

SEQ ID NO: 170382 - DNA, 25 bp, probe
gctttacagggtcactaactctgga

SEQ ID NO: 170383 - DNA, 25 bp, probe
cttaaccagttctccatactgcttg

SEQ ID NO: 170384 - DNA, 25 bp, probe
cgtcgactacttcacacatactgtg

SEQ ID NO: 170385 - DNA, 25 bp, probe
cttgaacaacttaacctccatgagg

SEQ ID NO: 170386 - DNA, 25 bp, probe
cataagacttgcttgaacccgggag

SEQ ID NO: 170387 - DNA, 25 bp, probe
catatgggctgataaacccggggtg

SEQ ID NO: 170388 - DNA, 25 bp, probe
gtttggtaaacgatcaaggagttgt

SEQ ID NO: 170389 - DNA, 25 bp, probe
ctttggtatcaaagtactttacttg

SEQ ID NO: 170390 - DNA, 25 bp, probe
cggctggtaaagcaattcctccttg

SEQ ID NO: 170391 - DNA, 25 bp, probe
gtggtacgaaaacaattcccctgtg

SEQ ID NO: 170392 - DNA, 25 bp, probe
gttgtccgaaaataattccttgatc

SEQ ID NO: 170393 - DNA, 25 bp, probe
cttgtccgtgaagatgtattgcccg

SEQ ID NO: 170394 - DNA, 25 bp, probe
cttgtccggaagattgcaaatactg

SEQ ID NO: 170395 - DNA, 25 bp, probe
cttccagcggaagttactaattcgg

SEQ ID NO: 170396 - DNA, 25 bp, probe
cttccagggaaataatcattttgta

SEQ ID NO: 170397 - DNA, 25 bp, probe
catctccatggtcaaagtttttctt

SEQ ID NO: 170398 - DNA, 25 bp, probe
cattacaatggaaacaatctttttt

SEQ ID NO: 170399 - DNA, 25 bp, probe
cttacgaagtgtgccagccttttgt

SEQ ID NO: 170400 - DNA, 25 bp, probe
cttgtgtaaatagccccatctttca

SEQ ID NO: 170401 - DNA, 25 bp, probe
cttggaaaacgggcctcattcacca

SEQ ID NO: 170402 - DNA, 25 bp, probe
cattaaaaaacagcctcttcccatc

SEQ ID NO: 170403 - DNA, 25 bp, probe
catctaataaaccagtcctgcatcg

SEQ ID NO: 170404 - DNA, 25 bp, probe
catccaaatatagtcagtcttcagg

SEQ ID NO: 170405 - DNA, 25 bp, probe
catccagagaaagcaccttatgagt

SEQ ID NO: 170406 - DNA, 25 bp, probe
catcaagtggacatccctggaggct

SEQ ID NO: 170407 - DNA, 25 bp, probe
catccagatgagtcaataccgttcc

SEQ ID NO: 170408 - DNA, 25 bp, probe
catccagcaagtctacctggcactc

SEQ ID NO: 170409 - DNA, 25 bp, probe
catgcccgagtgcagacctgcatca

SEQ ID NO: 170410 - DNA, 25 bp, probe
catgcctggagacatatcactcaat

SEQ ID NO: 170411 - DNA, 25 bp, probe
catgctggggatctacaccatcact

SEQ ID NO: 170412 - DNA, 25 bp, probe
catcgacatggtcctgaaccgcatg

SEQ ID NO: 170413 - DNA, 25 bp, probe
catgctgaaattcgtgagtcacctg

SEQ ID NO: 170414 - DNA, 25 bp, probe
catgcatgaagggggcagtcaccat

SEQ ID NO: 170415 - DNA, 25 bp, probe
catgcatgaagggggcagtcaccat

SEQ ID NO: 170416 - DNA, 25 bp, probe
catcatgagatggggagtgtgcaca

SEQ ID NO: 170417 - DNA, 25 bp, probe
catctggagccctagtatctaattt

SEQ ID NO: 170418 - DNA, 25 bp, probe
catgctgatgatgactatttttttt

SEQ ID NO: 170419 - DNA, 25 bp, probe
catgctttctgttattatctttctt

SEQ ID NO: 170420 - DNA, 25 bp, probe
catgcatttccttgcataatccctt

SEQ ID NO: 170421 - DNA, 25 bp, probe
catgcatttactagattctagcacc

SEQ ID NO: 170422 - DNA, 25 bp, probe
catcagctgtacctacaatagcccc

SEQ ID NO: 170423 - DNA, 25 bp, probe
catcctgtgaggactgcaaagcctt

SEQ ID NO: 170424 - DNA, 25 bp, probe
catccttgactgaagcgaacatctt

SEQ ID NO: 170425 - DNA, 25 bp, probe
cattcgtgcactaaggaccttaata

SEQ ID NO: 170426 - DNA, 25 bp, probe
catctcctactcagggtgtctacta

SEQ ID NO: 170427 - DNA, 25 bp, probe
catatctcgactctggttgcgggtt

SEQ ID NO: 170428 - DNA, 25 bp, probe
catatctcgactctggttgcgggtt

SEQ ID NO: 170429 - DNA, 25 bp, probe
catgcttcttctcatggggtggggt

SEQ ID NO: 170430 - DNA, 25 bp, probe
catcctggtcccagtgttagggtag

SEQ ID NO: 170431 - DNA, 25 bp, probe
catcctgtgtcctgggactgagggt

SEQ ID NO: 170432 - DNA, 25 bp, probe
catactggctcttaggagagcggaa

SEQ ID NO: 170433 - DNA, 25 bp, probe
catacatgacggtgggcagagaggc

SEQ ID NO: 170434 - DNA, 25 bp, probe
catcctcactggtcgggagaggtca

SEQ ID NO: 170435 - DNA, 25 bp, probe
catcctcatcatcacggggtgaagg

SEQ ID NO: 170436 - DNA, 25 bp, probe
catccatctacttggggatcgactg

SEQ ID NO: 170437 - DNA, 25 bp, probe
catcctttgtgaagctggaacactg

SEQ ID NO: 170438 - DNA, 25 bp, probe
catcctactggtagatggaacagca

SEQ ID NO: 170439 - DNA, 25 bp, probe
catcctgacctggtatggtcatgga

SEQ ID NO: 170440 - DNA, 25 bp, probe
catgcctaccaggtgaagccacagt

SEQ ID NO: 170441 - DNA, 25 bp, probe
catgccccacactgcgggagcagtg

SEQ ID NO: 170442 - DNA, 25 bp, probe
catgctggtagctgggggcatcgtg

SEQ ID NO: 170443 - DNA, 25 bp, probe
catctgatggactggtgtcctatgg

SEQ ID NO: 170444 - DNA, 25 bp, probe
catgcaagtagctggctgtactgcc

SEQ ID NO: 170445 - DNA, 25 bp, probe
catgcctgtgaatggcgtgagccca

SEQ ID NO: 170446 - DNA, 25 bp, probe
catgcctgtgaatggcgtgagccca

SEQ ID NO: 170447 - DNA, 25 bp, probe
catgctctggaagcctggactctaa

SEQ ID NO: 170448 - DNA, 25 bp, probe
catccttggacatcgagactataaa

SEQ ID NO: 170449 - DNA, 25 bp, probe
cataccggatacagatacccaaaaa

SEQ ID NO: 170450 - DNA, 25 bp, probe
catcatggaggatttagtacccaaa

SEQ ID NO: 170451 - DNA, 25 bp, probe
catcatggtggctggacaacaaaaa

SEQ ID NO: 170452 - DNA, 25 bp, probe
catcgggacttggcagccagaaaca

SEQ ID NO: 170453 - DNA, 25 bp, probe
cataaggacttggctgcgcgtaact

SEQ ID NO: 170454 - DNA, 25 bp, probe
catcaaccacttcacctgtgagatt

SEQ ID NO: 170455 - DNA, 25 bp, probe
catcaaccacttcacctgtgagatt

SEQ ID NO: 170456 - DNA, 25 bp, probe
catgctgaccacaatggacagtagc

SEQ ID NO: 170457 - DNA, 25 bp, probe
catgctgactacattggtgtatcca

SEQ ID NO: 170458 - DNA, 25 bp, probe
catgctgactgagtgactggagaca

SEQ ID NO: 170459 - DNA, 25 bp, probe
catgctggcagcgatggcttatgac

SEQ ID NO: 170460 - DNA, 25 bp, probe
catgctggcagcgatggcttatgac

SEQ ID NO: 170461 - DNA, 25 bp, probe
catctgtgatgcttgcgcaaagtca

SEQ ID NO: 170462 - DNA, 25 bp, probe
catctgcgtcctcaaagtccgaaat

SEQ ID NO: 170463 - DNA, 25 bp, probe
catctgtgttcccaaagtccatgat

SEQ ID NO: 170464 - DNA, 25 bp, probe
catctgtggaacccattgtgacgat

SEQ ID NO: 170465 - DNA, 25 bp, probe
catctgtggaacccattgtgacgat

SEQ ID NO: 170466 - DNA, 25 bp, probe
catcgtgatggactccggtgacggg

SEQ ID NO: 170467 - DNA, 25 bp, probe
catgcagtcaaactcactggatggg

SEQ ID NO: 170468 - DNA, 25 bp, probe
catctgctccaaccagataatgggc

SEQ ID NO: 170469 - DNA, 25 bp, probe
catgccccagaaggacctgagcagc

SEQ ID NO: 170470 - DNA, 25 bp, probe
catgcttgcaagagaacactgtgag

SEQ ID NO: 170471 - DNA, 25 bp, probe
catcctgcaggagatagcacttcgc

SEQ ID NO: 170472 - DNA, 25 bp, probe
catgctggtggaggtcgcactgtgc

SEQ ID NO: 170473 - DNA, 25 bp, probe
catgctgctgtgcatgcacggcacg

SEQ ID NO: 170474 - DNA, 25 bp, probe
catgctgctgtgcatgcacggcacg

SEQ ID NO: 170475 - DNA, 25 bp, probe
catgctgtcggatctggccgaggtg

SEQ ID NO: 170476 - DNA, 25 bp, probe
catcgtcatggagcttgtgcagggg

SEQ ID NO: 170477 - DNA, 25 bp, probe
catgcagtagaggcgctgggcagag

SEQ ID NO: 170478 - DNA, 25 bp, probe
catgcagtagaggcgctgggcagag

SEQ ID NO: 170479 - DNA, 25 bp, probe
catgctgtcgctgccgaggcagaaa

SEQ ID NO: 170480 - DNA, 25 bp, probe
catcgagcctactgggcagagcagc

SEQ ID NO: 170481 - DNA, 25 bp, probe
catgcggcctgcaaagggcagcaca

SEQ ID NO: 170482 - DNA, 25 bp, probe
catgcggcctgcatggtgggagctg

SEQ ID NO: 170483 - DNA, 25 bp, probe
catctggatcgttgtggggactgcc

SEQ ID NO: 170484 - DNA, 25 bp, probe
cctggaagtcttcaggaggaaacgg

SEQ ID NO: 170485 - DNA, 25 bp, probe
cttggaacttctcttggaactgggc

SEQ ID NO: 170486 - DNA, 25 bp, probe
cttgtgtagcgttcttaggaatctg

SEQ ID NO: 170487 - DNA, 25 bp, probe
catcgtcccttagttgtggttctgg

SEQ ID NO: 170488 - DNA, 25 bp, probe
catctgtcacccgaattttctttgg

SEQ ID NO: 170489 - DNA, 25 bp, probe
catctgtccaatgacagcccttttc

SEQ ID NO: 170490 - DNA, 25 bp, probe
catctaaccattacagcctgtattt

SEQ ID NO: 170491 - DNA, 25 bp, probe
catccatacctgtgcatgagctgta

SEQ ID NO: 170492 - DNA, 25 bp, probe
catcgtcaacgacgaggttcgctac

SEQ ID NO: 170493 - DNA, 25 bp, probe
catcctagatcaccgaggttatgcc

SEQ ID NO: 170494 - DNA, 25 bp, probe
catcccagacatcatcaaggtggcc

SEQ ID NO: 170495 - DNA, 25 bp, probe
catcccgagctgaatatcggggtca

SEQ ID NO: 170496 - DNA, 25 bp, probe
catcctcggggaccggcaggatgcc

SEQ ID NO: 170497 - DNA, 25 bp, probe
catcctcaggctcagaagggaatgt

SEQ ID NO: 170498 - DNA, 25 bp, probe
catcctgaatttgcacagaggaaag

SEQ ID NO: 170499 - DNA, 25 bp, probe
catgcttacactgatacagggaaag

SEQ ID NO: 170500 - DNA, 25 bp, probe
catctgtaacccactgttgtacatg

SEQ ID NO: 170501 - DNA, 25 bp, probe
catctgtaacccactgttgtacatg

SEQ ID NO: 170502 - DNA, 25 bp, probe
catcgttacttaattttgcatacat

SEQ ID NO: 170503 - DNA, 25 bp, probe
catcgttacttaattttgcatacat

SEQ ID NO: 170504 - DNA, 25 bp, probe
catcctcttcagattgctttataca

SEQ ID NO: 170505 - DNA, 25 bp, probe
catcctcttcagattgctttataca

SEQ ID NO: 170506 - DNA, 25 bp, probe
catccttgggtggctgcttgtataa

SEQ ID NO: 170507 - DNA, 25 bp, probe
catccttgagtatctcagtgaagaa

SEQ ID NO: 170508 - DNA, 25 bp, probe
ctactgagggaaatagccaaaaagg

SEQ ID NO: 170509 - DNA, 25 bp, probe
cttcgttccagataccaaataaatg

SEQ ID NO: 170510 - DNA, 25 bp, probe
cttcgttccagataccaaataaatg

SEQ ID NO: 170511 - DNA, 25 bp, probe
ctgtaccccaaaaccaacaaggatg

SEQ ID NO: 170512 - DNA, 25 bp, probe
ctataccggctacaccattcagaag

SEQ ID NO: 170513 - DNA, 25 bp, probe
ctgtaccaccttaaccatttgaaag

SEQ ID NO: 170514 - DNA, 25 bp, probe
cttagtaacctaaaacttgcaagag

SEQ ID NO: 170515 - DNA, 25 bp, probe
cttactgaacgccaaaacttccaca

SEQ ID NO: 170516 - DNA, 25 bp, probe
cattgaccttctcaaaaccatccac

SEQ ID NO: 170517 - DNA, 25 bp, probe
cattaccttaaaaagccagtctctt

SEQ ID NO: 170518 - DNA, 25 bp, probe
cattaccttaaaaagccagtctctt

SEQ ID NO: 170519 - DNA, 25 bp, probe
ctaaatttcaacagtgccacttctg

SEQ ID NO: 170520 - DNA, 25 bp, probe
cattaaccccgcagttcactactgc

SEQ ID NO: 170521 - DNA, 25 bp, probe
cataaaccctccaagggatctgctt

SEQ ID NO: 170522 - DNA, 25 bp, probe
cttgaccatcctgattggcgtcttt

SEQ ID NO: 170523 - DNA, 25 bp, probe
catcgacagcatttcctttcagttt

SEQ ID NO: 170524 - DNA, 25 bp, probe
catcgacagcatttcctttcagttt

SEQ ID NO: 170525 - DNA, 25 bp, probe
catgcggcattactgcctttgctgg

SEQ ID NO: 170526 - DNA, 25 bp, probe
catgctgccatttctggcttatggt

SEQ ID NO: 170527 - DNA, 25 bp, probe
catcgcctatacgaaatatggttcc

SEQ ID NO: 170528 - DNA, 25 bp, probe
catgcgtgttaggaatatcagagaa

SEQ ID NO: 170529 - DNA, 25 bp, probe
catcgtgagggccagagacaggaat

SEQ ID NO: 170530 - DNA, 25 bp, probe
catcgtgatcgccgaggacttcaca

SEQ ID NO: 170531 - DNA, 25 bp, probe
catcgtgatcgccgaggacttcaca

SEQ ID NO: 170532 - DNA, 25 bp, probe
catgctggttctcagggcattgcct

SEQ ID NO: 170533 - DNA, 25 bp, probe
catgctgtattccacgaggcattga

SEQ ID NO: 170534 - DNA, 25 bp, probe
catgctgtgttccatacagccttgg

SEQ ID NO: 170535 - DNA, 25 bp, probe
catgctgtccccaacagctggggtg

SEQ ID NO: 170536 - DNA, 25 bp, probe
catgcgggccacaagcacgatgagt

SEQ ID NO: 170537 - DNA, 25 bp, probe
catcggtgccacgcatcttcatgaa

SEQ ID NO: 170538 - DNA, 25 bp, probe
catcaggagcctgtactgcctgaag

SEQ ID NO: 170539 - DNA, 25 bp, probe
catcgagcagttctccactgtgaag

SEQ ID NO: 170540 - DNA, 25 bp, probe
catcatggatttcgcctaagtgata

SEQ ID NO: 170541 - DNA, 25 bp, probe
catcatggagcttggcgtccagggc

SEQ ID NO: 170542 - DNA, 25 bp, probe
catcatcgacaacctgtcgggctcc

SEQ ID NO: 170543 - DNA, 25 bp, probe
catcaaagacaaacctctgagctcc

SEQ ID NO: 170544 - DNA, 25 bp, probe
catccagctgcacaagcgctgcgag

SEQ ID NO: 170545 - DNA, 25 bp, probe
catgccctgcaaagaggctgattga

SEQ ID NO: 170546 - DNA, 25 bp, probe
catccctgcaaggatctgcagttac

SEQ ID NO: 170547 - DNA, 25 bp, probe
catgcccatcagatccagatgttac

SEQ ID NO: 170548 - DNA, 25 bp, probe
catcctgagcacatatcagctgtgc

SEQ ID NO: 170549 - DNA, 25 bp, probe
catccatgtgcagcttactggccat

SEQ ID NO: 170550 - DNA, 25 bp, probe
catccaggcagtgacacgacgattc

SEQ ID NO: 170551 - DNA, 25 bp, probe
catccaggcactgaaggaggcgtcc

SEQ ID NO: 170552 - DNA, 25 bp, probe
catccagatgccaaatatgccaagg

SEQ ID NO: 170553 - DNA, 25 bp, probe
catccagtcccagtgtcagaatgat

SEQ ID NO: 170554 - DNA, 25 bp, probe
catccagtcccagtgtcagaatgat

SEQ ID NO: 170555 - DNA, 25 bp, probe
catcggttcctggcagaggatgcac

SEQ ID NO: 170556 - DNA, 25 bp, probe
catcggcgtcccgaaggaagctcat

SEQ ID NO: 170557 - DNA, 25 bp, probe
catcctactccctgaagagcgcaat

SEQ ID NO: 170558 - DNA, 25 bp, probe
catcctactccctgaagagcgcaat

SEQ ID NO: 170559 - DNA, 25 bp, probe
catctggacacccttggaagcaaat

SEQ ID NO: 170560 - DNA, 25 bp, probe
catgctggagacgtggtggaacaag

SEQ ID NO: 170561 - DNA, 25 bp, probe
catcgttcatccggtggaaacagcc

SEQ ID NO: 170562 - DNA, 25 bp, probe
catcgtctactcggagagcaaaatg

SEQ ID NO: 170563 - DNA, 25 bp, probe
catcgtctactcggagagcaaaatg

SEQ ID NO: 170564 - DNA, 25 bp, probe
catcgttcaccgagacatcaaaggt

SEQ ID NO: 170565 - DNA, 25 bp, probe
catcagatccagatgttacaacggg

SEQ ID NO: 170566 - DNA, 25 bp, probe
catcaaatggccaatctagaacgtg

SEQ ID NO: 170567 - DNA, 25 bp, probe
catgccagatggtcacaccgaaggt

SEQ ID NO: 170568 - DNA, 25 bp, probe
catcaagggccagcagcgaaggccc

SEQ ID NO: 170569 - DNA, 25 bp, probe
catcaacgtgcttctgcagtacggc

SEQ ID NO: 170570 - DNA, 25 bp, probe
catctacatcatcactgaatacatg

SEQ ID NO: 170571 - DNA, 25 bp, probe
catctaagcccaggacatgagtgtc

SEQ ID NO: 170572 - DNA, 25 bp, probe
cttaagcctactacagactgttaga

SEQ ID NO: 170573 - DNA, 25 bp, probe
catctacggctacttcaacgagaac

SEQ ID NO: 170574 - DNA, 25 bp, probe
catcctgaacgacatcaccgaggag

SEQ ID NO: 170575 - DNA, 25 bp, probe
catcctgaaccggaatgaccaggag

SEQ ID NO: 170576 - DNA, 25 bp, probe
catcctggactctaccaacacagtg

SEQ ID NO: 170577 - DNA, 25 bp, probe
catcctggactctaccaacacagtg

SEQ ID NO: 170578 - DNA, 25 bp, probe
catcacgccccaacaaggactgttg

SEQ ID NO: 170579 - DNA, 25 bp, probe
catccgcttccaagacgggttaaag

SEQ ID NO: 170580 - DNA, 25 bp, probe
catcctcctctatgacatggtgtgt

SEQ ID NO: 170581 - DNA, 25 bp, probe
catcctcctctatgacatggtgtgt

SEQ ID NO: 170582 - DNA, 25 bp, probe
catgcccctgacagatctagttctc

SEQ ID NO: 170583 - DNA, 25 bp, probe
catgcctgttaatattcatgttctg

SEQ ID NO: 170584 - DNA, 25 bp, probe
catcacatgtattaaattcttctgt

SEQ ID NO: 170585 - DNA, 25 bp, probe
catcaagtgttcgagtccctgagct

SEQ ID NO: 170586 - DNA, 25 bp, probe
ccgcatgccttacctggacatgtat

SEQ ID NO: 170587 - DNA, 25 bp, probe
catccatgtgtgcaaaccatctgcc

SEQ ID NO: 170588 - DNA, 25 bp, probe
cataatgctgctcgcaggaaatggc

SEQ ID NO: 170589 - DNA, 25 bp, probe
catcagagcgccgaggagagtggga

SEQ ID NO: 170590 - DNA, 25 bp, probe
catcatcagcgcgcaagagggcaga

SEQ ID NO: 170591 - DNA, 25 bp, probe
catacaggcctgtcgaggagaacaa

SEQ ID NO: 170592 - DNA, 25 bp, probe
cataaggtcatgcctttaagtaacc

SEQ ID NO: 170593 - DNA, 25 bp, probe
catcaagtccagggttaagtacaga

SEQ ID NO: 170594 - DNA, 25 bp, probe
cattcagaccagggaacggaaagaa

SEQ ID NO: 170595 - DNA, 25 bp, probe
cataaaccctggcactggtcacaaa

SEQ ID NO: 170596 - DNA, 25 bp, probe
cataacatatactgccagggtccca

SEQ ID NO: 170597 - DNA, 25 bp, probe
catcaagttaccctgcagggcctac

SEQ ID NO: 170598 - DNA, 25 bp, probe
catcagtggtcaccttgagggatta

SEQ ID NO: 170599 - DNA, 25 bp, probe
catcctggtcagtctagagtctgtg

SEQ ID NO: 170600 - DNA, 25 bp, probe
catccacgtgaacttgagcactgtg

SEQ ID NO: 170601 - DNA, 25 bp, probe
catcccggaagcatgacagcattaa

SEQ ID NO: 170602 - DNA, 25 bp, probe
catgccccacattcttaaattatca

SEQ ID NO: 170603 - DNA, 25 bp, probe
catgcccacctggctggaaatacac

SEQ ID NO: 170604 - DNA, 25 bp, probe
catccacactaggcaggaatatgag

SEQ ID NO: 170605 - DNA, 25 bp, probe
catcaatgcacatcttggtattgag

SEQ ID NO: 170606 - DNA, 25 bp, probe
catcctcagcaagtgctgagtctgt

SEQ ID NO: 170607 - DNA, 25 bp, probe
catccaccatgatgctgtcatcttc

SEQ ID NO: 170608 - DNA, 25 bp, probe
catccttgtgattggtatataccct

SEQ ID NO: 170609 - DNA, 25 bp, probe
catctttacatatgtacggcccatc

SEQ ID NO: 170610 - DNA, 25 bp, probe
catccttgagtttgctcacagtgcc

SEQ ID NO: 170611 - DNA, 25 bp, probe
catccctgagacggccacaggacaa

SEQ ID NO: 170612 - DNA, 25 bp, probe
catcacgggccagctcaagctgtac

SEQ ID NO: 170613 - DNA, 25 bp, probe
catcctcgggaggctcatttgtggc

SEQ ID NO: 170614 - DNA, 25 bp, probe
catccttggggagattgctgtgtct

SEQ ID NO: 170615 - DNA, 25 bp, probe
catccttaaaacaattctgtgacat

SEQ ID NO: 170616 - DNA, 25 bp, probe
catccttctggacatttagaacata

SEQ ID NO: 170617 - DNA, 25 bp, probe
catcctcctggaaatcatcaagcaa

SEQ ID NO: 170618 - DNA, 25 bp, probe
catcgtcacggagtacatgagcaag

SEQ ID NO: 170619 - DNA, 25 bp, probe
catccagccggaggccagagctgag

SEQ ID NO: 170620 - DNA, 25 bp, probe
catccacccagaggcaagggagctg

SEQ ID NO: 170621 - DNA, 25 bp, probe
catcccccatcagatgatgggagtg

SEQ ID NO: 170622 - DNA, 25 bp, probe
catccaccctagaggctgggtgcag

SEQ ID NO: 170623 - DNA, 25 bp, probe
catcccctactgaggaggggacctt

SEQ ID NO: 170624 - DNA, 25 bp, probe
catccacctcctagccgaggaggct

SEQ ID NO: 170625 - DNA, 25 bp, probe
catccagcctataatcctaagaact

SEQ ID NO: 170626 - DNA, 25 bp, probe
catcgccaaagcatcctggcaaagc

SEQ ID NO: 170627 - DNA, 25 bp, probe
catgcctataacactgctggacaat

SEQ ID NO: 170628 - DNA, 25 bp, probe
catgccatcaataacttgcgagaaa

SEQ ID NO: 170629 - DNA, 25 bp, probe
catgccatctttactatgtggatgg

SEQ ID NO: 170630 - DNA, 25 bp, probe
catcctcttcctcattgatgtggcc

SEQ ID NO: 170631 - DNA, 25 bp, probe
catcctcttcctcattgatgtggcc

SEQ ID NO: 170632 - DNA, 25 bp, probe
catctccaaaatctctgagcatgtg

SEQ ID NO: 170633 - DNA, 25 bp, probe
catccaggaagtcctaggagctgca

SEQ ID NO: 170634 - DNA, 25 bp, probe
catctgcagggacgcgtacgagctg

SEQ ID NO: 170635 - DNA, 25 bp, probe
catccggatcacggcaatgcggctg

SEQ ID NO: 170636 - DNA, 25 bp, probe
catcgtggactgggcacgcaggtgc

SEQ ID NO: 170637 - DNA, 25 bp, probe
catcctgcgtctggacctggctggc

SEQ ID NO: 170638 - DNA, 25 bp, probe
catcctggttgctctcaggaggctc

SEQ ID NO: 170639 - DNA, 25 bp, probe
catcctgtggtgtccatgaggtacc

SEQ ID NO: 170640 - DNA, 25 bp, probe
catccttgagtgcctcagtggtggc

SEQ ID NO: 170641 - DNA, 25 bp, probe
catccttatgtgctagggataaatc

SEQ ID NO: 170642 - DNA, 25 bp, probe
catccttatgtgctagggataaatc

SEQ ID NO: 170643 - DNA, 25 bp, probe
catcctatctagctgcaaggtataa

SEQ ID NO: 170644 - DNA, 25 bp, probe
catcctatctcagctacaagtttct

SEQ ID NO: 170645 - DNA, 25 bp, probe
catacctctgaccaacaggctgttc

SEQ ID NO: 170646 - DNA, 25 bp, probe
catacctctgaccaacaggctgttc

SEQ ID NO: 170647 - DNA, 25 bp, probe
catcatccggttcatcattggcttc

SEQ ID NO: 170648 - DNA, 25 bp, probe
catcttcaggttcatgctcatattc

SEQ ID NO: 170649 - DNA, 25 bp, probe
catcctagtgggcagtctctatgtg

SEQ ID NO: 170650 - DNA, 25 bp, probe
catcctatatggccggatctaccgg

SEQ ID NO: 170651 - DNA, 25 bp, probe
catccagatggtgcggtctcagagg

SEQ ID NO: 170652 - DNA, 25 bp, probe
catcctgggtatgggctacaaagag

SEQ ID NO: 170653 - DNA, 25 bp, probe
catcatcggcgagtgggtaaaggca

SEQ ID NO: 170654 - DNA, 25 bp, probe
catcgcaggctgatggtgctttagg

SEQ ID NO: 170655 - DNA, 25 bp, probe
catctgcgtcttcggcactgaaaag

SEQ ID NO: 170656 - DNA, 25 bp, probe
cattgctgtgttcagcagaaagaaa

SEQ ID NO: 170657 - DNA, 25 bp, probe
catcctatgtctccagatacaaaac

SEQ ID NO: 170658 - DNA, 25 bp, probe
catcctatgtctccagatacaaaac

SEQ ID NO: 170659 - DNA, 25 bp, probe
catcctcagtcgtgagatcaaggag

SEQ ID NO: 170660 - DNA, 25 bp, probe
catcctcagtcgtgagatcaaggag

SEQ ID NO: 170661 - DNA, 25 bp, probe
catccaaggccatgatgtcaagggc

SEQ ID NO: 170662 - DNA, 25 bp, probe
catcaaacccacctgtagagaagct

SEQ ID NO: 170663 - DNA, 25 bp, probe
cataatcctcgaatgttccacacgt

SEQ ID NO: 170664 - DNA, 25 bp, probe
cataatcctcgaatgttccacacgt

SEQ ID NO: 170665 - DNA, 25 bp, probe
catcagatactatggttctccacta

SEQ ID NO: 170666 - DNA, 25 bp, probe
catcgggctaagactttaactcaga

SEQ ID NO: 170667 - DNA, 25 bp, probe
catcagtggcgatgactttatttgc

SEQ ID NO: 170668 - DNA, 25 bp, probe
catcattgcccttattgtttttgcc

SEQ ID NO: 170669 - DNA, 25 bp, probe
catcattgcccttattgtttttgcc

SEQ ID NO: 170670 - DNA, 25 bp, probe
catctccatcctttttgttatatgg

SEQ ID NO: 170671 - DNA, 25 bp, probe
catcatccagctttttttgttagca

SEQ ID NO: 170672 - DNA, 25 bp, probe
catccacaatactactgattttaga

SEQ ID NO: 170673 - DNA, 25 bp, probe
catccagcaagacttcgtgattttt

SEQ ID NO: 170674 - DNA, 25 bp, probe
catcctgaagatctcgtgactatac

SEQ ID NO: 170675 - DNA, 25 bp, probe
catacgactgcaatttgctactatg

SEQ ID NO: 170676 - DNA, 25 bp, probe
catccggctcatttttgtcatcatg

SEQ ID NO: 170677 - DNA, 25 bp, probe
catccctctgattctttggacacaa

SEQ ID NO: 170678 - DNA, 25 bp, probe
catccccattccatgatgaagaaga

SEQ ID NO: 170679 - DNA, 25 bp, probe
catcctaatcatccaatgctcaaga

SEQ ID NO: 170680 - DNA, 25 bp, probe
catcctgaaaggaactcatacagca

SEQ ID NO: 170681 - DNA, 25 bp, probe
catcctgcatcatggacaagaacgc

SEQ ID NO: 170682 - DNA, 25 bp, probe
catctcagctcctgaaaaatgcctc

SEQ ID NO: 170683 - DNA, 25 bp, probe
catctcctccaaataccagatactg

SEQ ID NO: 170684 - DNA, 25 bp, probe
catcccatccacaatactactgatt

SEQ ID NO: 170685 - DNA, 25 bp, probe
catccctcaagtaagccctgtgagg

SEQ ID NO: 170686 - DNA, 25 bp, probe
catccctacgttactccaggaaaga

SEQ ID NO: 170687 - DNA, 25 bp, probe
catccctacgttactccaggaaaga

SEQ ID NO: 170688 - DNA, 25 bp, probe
cttcctactgttggccgaggccaac

SEQ ID NO: 170689 - DNA, 25 bp, probe
cttcctacaggagcacggcagttac

SEQ ID NO: 170690 - DNA, 25 bp, probe
ctttctgtcggtgcaagggcttgag

SEQ ID NO: 170691 - DNA, 25 bp, probe
ctttctgtcggtgcaagggcttgag

SEQ ID NO: 170692 - DNA, 25 bp, probe
ctttctgtcggtgcaagggcttgag

SEQ ID NO: 170693 - DNA, 25 bp, probe
cttctactcggggcaagtggaaagc

SEQ ID NO: 170694 - DNA, 25 bp, probe
cttctactcggggcaagtggaaagc

SEQ ID NO: 170695 - DNA, 25 bp, probe
catttccccagggcacgtggttgag

SEQ ID NO: 170696 - DNA, 25 bp, probe
catttccccagggcacgtggttgag

SEQ ID NO: 170697 - DNA, 25 bp, probe
cttggcccaggagagcgggctctgg

SEQ ID NO: 170698 - DNA, 25 bp, probe
cttggtgaaggagcgggctttggcg

SEQ ID NO: 170699 - DNA, 25 bp, probe
cattttgtcaggtgggagatttgga

SEQ ID NO: 170700 - DNA, 25 bp, probe
catcattttactcttggaatagtgg

SEQ ID NO: 170701 - DNA, 25 bp, probe
ctatgggatcgtcatgtgggaagtc

SEQ ID NO: 170702 - DNA, 25 bp, probe
catctgggatggccctggggcaaat

SEQ ID NO: 170703 - DNA, 25 bp, probe
catcgcatggtgtacctggaaaact

SEQ ID NO: 170704 - DNA, 25 bp, probe
catctgcatggcgtacctcatgaag

SEQ ID NO: 170705 - DNA, 25 bp, probe
catctcaagtctccgctatgaactc

SEQ ID NO: 170706 - DNA, 25 bp, probe
catccatggacccctgatgattcca

SEQ ID NO: 170707 - DNA, 25 bp, probe
catccagagaccgtttattgcccaa

SEQ ID NO: 170708 - DNA, 25 bp, probe
catcccagaagggtggataccccac

SEQ ID NO: 170709 - DNA, 25 bp, probe
catctccaactcggaagtaagccca

SEQ ID NO: 170710 - DNA, 25 bp, probe
catcctgaacctgagttcaaccaac

SEQ ID NO: 170711 - DNA, 25 bp, probe
catttgtaacggggtcaccacagcc

SEQ ID NO: 170712 - DNA, 25 bp, probe
tatttggaaggccctaaagaaggct

SEQ ID NO: 170713 - DNA, 25 bp, probe
cttgtggaatggagtaaaccagtga

SEQ ID NO: 170714 - DNA, 25 bp, probe
cattaggaaatgctgttaacctggc

SEQ ID NO: 170715 - DNA, 25 bp, probe
catccaggacttctcttacacttgg

SEQ ID NO: 170716 - DNA, 25 bp, probe
catccagtctttcgtactacatggt

SEQ ID NO: 170717 - DNA, 25 bp, probe
cataaatttcttcatcgacattttc

SEQ ID NO: 170718 - DNA, 25 bp, probe
catactaaacttcacctacattatc

SEQ ID NO: 170719 - DNA, 25 bp, probe
catagtaaataaaaccttctctcca

SEQ ID NO: 170720 - DNA, 25 bp, probe
ctattacaataacaccacctgaaaa

SEQ ID NO: 170721 - DNA, 25 bp, probe
ctcaaacagtacccaattccgacag

SEQ ID NO: 170722 - DNA, 25 bp, probe
ctataagctgtacccattgtacccg

SEQ ID NO: 170723 - DNA, 25 bp, probe
catcagtagtgtcaccttctaccac

SEQ ID NO: 170724 - DNA, 25 bp, probe
catcttcagattcgatggcccaacc

SEQ ID NO: 170725 - DNA, 25 bp, probe
catctactgcttcatgaacaaacgc

SEQ ID NO: 170726 - DNA, 25 bp, probe
catctatactccaagcgactagacc

SEQ ID NO: 170727 - DNA, 25 bp, probe
catctctacaactggaatctccctc

SEQ ID NO: 170728 - DNA, 25 bp, probe
catcctgaccactactgtttccagg

SEQ ID NO: 170729 - DNA, 25 bp, probe
catcctggtcactgatggtctccag

SEQ ID NO: 170730 - DNA, 25 bp, probe
catcctggtcactgatggtctccag

SEQ ID NO: 170731 - DNA, 25 bp, probe
catcctggtagctgaggggcggaag

SEQ ID NO: 170732 - DNA, 25 bp, probe
catcctggaaggcgtggtggaaacc

SEQ ID NO: 170733 - DNA, 25 bp, probe
catctctgctgatacgagggtggaa

SEQ ID NO: 170734 - DNA, 25 bp, probe
catctgcagcgatgcagctggggct

SEQ ID NO: 170735 - DNA, 25 bp, probe
catctgcaaagtctgagcaggtttt

SEQ ID NO: 170736 - DNA, 25 bp, probe
catctctgaaatatctcgttattta

SEQ ID NO: 170737 - DNA, 25 bp, probe
catctggaaattaccttaatatgca

SEQ ID NO: 170738 - DNA, 25 bp, probe
catcgtaaacatacttctaaaattc

SEQ ID NO: 170739 - DNA, 25 bp, probe
catccttcaactctcactagaaaat

SEQ ID NO: 170740 - DNA, 25 bp, probe
catccttgttgccccactaaggaat

SEQ ID NO: 170741 - DNA, 25 bp, probe
catcctttatgtcctaattagtaag

SEQ ID NO: 170742 - DNA, 25 bp, probe
catccctttgctctaatgatcagga

SEQ ID NO: 170743 - DNA, 25 bp, probe
catccctaatgtgtgccatagagtt

SEQ ID NO: 170744 - DNA, 25 bp, probe
catctcctgaatgctcacctaagct

SEQ ID NO: 170745 - DNA, 25 bp, probe
catcgcctatatgctacttagcggt

SEQ ID NO: 170746 - DNA, 25 bp, probe
catcccttggtttcttaccatgttt

SEQ ID NO: 170747 - DNA, 25 bp, probe
catcccaatggcttatcttacactg

SEQ ID NO: 170748 - DNA, 25 bp, probe
catcccagtggattatatctttctt

SEQ ID NO: 170749 - DNA, 25 bp, probe
catcccagtggattatatctttctt

SEQ ID NO: 170750 - DNA, 25 bp, probe
catctcacggcaccttattttttat

SEQ ID NO: 170751 - DNA, 25 bp, probe
catcgacggcacctgcaattttgtg

SEQ ID NO: 170752 - DNA, 25 bp, probe
catctaacgagtagctcattttctg

SEQ ID NO: 170753 - DNA, 25 bp, probe
catcttaccccagtatatttgcata

SEQ ID NO: 170754 - DNA, 25 bp, probe
catctcatccatcccagtggattat

SEQ ID NO: 170755 - DNA, 25 bp, probe
catctcatccatcccagtggattat

SEQ ID NO: 170756 - DNA, 25 bp, probe
catctacatcatcacggagttcatg

SEQ ID NO: 170757 - DNA, 25 bp, probe
catcggcatctgcagtgatgagtgc

SEQ ID NO: 170758 - DNA, 25 bp, probe
catcggctgcattgtggtggataat

SEQ ID NO: 170759 - DNA, 25 bp, probe
catctgggcatgccagcgtggacac

SEQ ID NO: 170760 - DNA, 25 bp, probe
catctgggcatgccagcgtggacac

SEQ ID NO: 170761 - DNA, 25 bp, probe
catcctgtatgctgcgctgaacaga

SEQ ID NO: 170762 - DNA, 25 bp, probe
catcctggaagtggcatgcaacatg

SEQ ID NO: 170763 - DNA, 25 bp, probe
catcccagtggggcataactagggg

SEQ ID NO: 170764 - DNA, 25 bp, probe
catccctgtagtgccaactgaagtg

SEQ ID NO: 170765 - DNA, 25 bp, probe
catcagactgtgaaccccacgaagg

SEQ ID NO: 170766 - DNA, 25 bp, probe
catcatgatccgagcgaggcctaac

SEQ ID NO: 170767 - DNA, 25 bp, probe
catagacctgaggcaatgagtcata

SEQ ID NO: 170768 - DNA, 25 bp, probe
cataaactgtgtgcagactcaataa

SEQ ID NO: 170769 - DNA, 25 bp, probe
cattaaacattgccaacgcaaatgt

SEQ ID NO: 170770 - DNA, 25 bp, probe
catctacaaagaccccagctacgtc

SEQ ID NO: 170771 - DNA, 25 bp, probe
catcatactaaacttcacctacatt

SEQ ID NO: 170772 - DNA, 25 bp, probe
catctcctagaacttcaatgaagat

SEQ ID NO: 170773 - DNA, 25 bp, probe
catctcctagaacttcaatgaagat

SEQ ID NO: 170774 - DNA, 25 bp, probe
catccctcaagagagaatgcatgga

SEQ ID NO: 170775 - DNA, 25 bp, probe
catcccaacattgtgcatatgcttg

SEQ ID NO: 170776 - DNA, 25 bp, probe
catcccagaatgtgtcactgtctta

SEQ ID NO: 170777 - DNA, 25 bp, probe
catcccagaatgtgtcactgtctta

SEQ ID NO: 170778 - DNA, 25 bp, probe
catccctagatgttggtttcatgta

SEQ ID NO: 170779 - DNA, 25 bp, probe
catccctgtatggaggtctcccgat

SEQ ID NO: 170780 - DNA, 25 bp, probe
catccctgtgaggggtaggcctgct

SEQ ID NO: 170781 - DNA, 25 bp, probe
catccctgcgacctgaaaggcattg

SEQ ID NO: 170782 - DNA, 25 bp, probe
catccctgcgacctgaaaggcattg

SEQ ID NO: 170783 - DNA, 25 bp, probe
catcctcagaactcacaagccattg

SEQ ID NO: 170784 - DNA, 25 bp, probe
catcagccagaagaaccaccttcct

SEQ ID NO: 170785 - DNA, 25 bp, probe
catcaaaaacactactccttttcct

SEQ ID NO: 170786 - DNA, 25 bp, probe
cataaagagaccggccagattgttg

SEQ ID NO: 170787 - DNA, 25 bp, probe
catcaaaggtcacgtgcggttcatt

SEQ ID NO: 170788 - DNA, 25 bp, probe
catcaactcatggcaggggtggttt

SEQ ID NO: 170789 - DNA, 25 bp, probe
catccccagctgtatgaggagagct

SEQ ID NO: 170790 - DNA, 25 bp, probe
catctgccggctggagcgggcagtg

SEQ ID NO: 170791 - DNA, 25 bp, probe
catctctctccttgactggaattgc

SEQ ID NO: 170792 - DNA, 25 bp, probe
catcgccatccaagtcacagaaagc

SEQ ID NO: 170793 - DNA, 25 bp, probe
catcaacatcacaaataatgaaaaa

SEQ ID NO: 170794 - DNA, 25 bp, probe
catcacacacacccaaaggcaaaga

SEQ ID NO: 170795 - DNA, 25 bp, probe
catcactcgtgcccaaagaaagggc

SEQ ID NO: 170796 - DNA, 25 bp, probe
catcctctggcacaagatgcacaat

SEQ ID NO: 170797 - DNA, 25 bp, probe
catccctatcattagcctcacaatg

SEQ ID NO: 170798 - DNA, 25 bp, probe
catctacaagcagggcctcaaatgc

SEQ ID NO: 170799 - DNA, 25 bp, probe
catcccaaggcatccatcagagcag

SEQ ID NO: 170800 - DNA, 25 bp, probe
catccgcaagactcacagcactgcg

SEQ ID NO: 170801 - DNA, 25 bp, probe
catcccagatactatcacatgcaag

SEQ ID NO: 170802 - DNA, 25 bp, probe
catcgaagcatgtctcagccagagg

SEQ ID NO: 170803 - DNA, 25 bp, probe
catcgagattgaccagaagctgcag

SEQ ID NO: 170804 - DNA, 25 bp, probe
catctggcattccaaataccagaac

SEQ ID NO: 170805 - DNA, 25 bp, probe
catcgcgctcatgcaataaccgacc

SEQ ID NO: 170806 - DNA, 25 bp, probe
catcgagcgcatgaattatatccat

SEQ ID NO: 170807 - DNA, 25 bp, probe
catcgagcgcatgaattatatccat

SEQ ID NO: 170808 - DNA, 25 bp, probe
catcgaagcatctgaatcatgtcca

SEQ ID NO: 170809 - DNA, 25 bp, probe
catcgatgagattgtggacaccaca

SEQ ID NO: 170810 - DNA, 25 bp, probe
catctgtgagatgaggctagcgatt

SEQ ID NO: 170811 - DNA, 25 bp, probe
catctgctggcagagagccacgcaa

SEQ ID NO: 170812 - DNA, 25 bp, probe
catctgctggcagagagccacgcaa

SEQ ID NO: 170813 - DNA, 25 bp, probe
catctgctggcagagagccacgcaa

SEQ ID NO: 170814 - DNA, 25 bp, probe
catcgcggatgaagacgcacggcag

SEQ ID NO: 170815 - DNA, 25 bp, probe
catcctgtgcatcaaggacatggcc

SEQ ID NO: 170816 - DNA, 25 bp, probe
catccggctgtgccaggacagagcc

SEQ ID NO: 170817 - DNA, 25 bp, probe
catccggctgtgccaggacagagcc

SEQ ID NO: 170818 - DNA, 25 bp, probe
catcaaatgcattgccaaggaggcc

SEQ ID NO: 170819 - DNA, 25 bp, probe
catctaccagtccaaggaggccggg

SEQ ID NO: 170820 - DNA, 25 bp, probe
catctaccggacagagagccacgtc

SEQ ID NO: 170821 - DNA, 25 bp, probe
catctaccggacagagagccacgtc

SEQ ID NO: 170822 - DNA, 25 bp, probe
catcatgaccgtgaggaaggccctc

SEQ ID NO: 170823 - DNA, 25 bp, probe
catctaccagatcatgtacagctgc

SEQ ID NO: 170824 - DNA, 25 bp, probe
catcatgtcttaccagtgacgctgc

SEQ ID NO: 170825 - DNA, 25 bp, probe
catcgtgttctgcaatgcaggcatc

SEQ ID NO: 170826 - DNA, 25 bp, probe
catcgatgtttggtcagctggctgt

SEQ ID NO: 170827 - DNA, 25 bp, probe
catcgatgtttggtcagctggctgt

SEQ ID NO: 170828 - DNA, 25 bp, probe
catcttgattggggcagttgacttt

SEQ ID NO: 170829 - DNA, 25 bp, probe
catcttatttgtgcagtctgactac

SEQ ID NO: 170830 - DNA, 25 bp, probe
catcttatttgtgcagtctgactac

SEQ ID NO: 170831 - DNA, 25 bp, probe
catctttcttcagcagcgtgcaata

SEQ ID NO: 170832 - DNA, 25 bp, probe
catctttcttcagcagcgtgcaata

SEQ ID NO: 170833 - DNA, 25 bp, probe
catcttccttgggaggataatttga

SEQ ID NO: 170834 - DNA, 25 bp, probe
catcatttcatttaagagatcattt

SEQ ID NO: 170835 - DNA, 25 bp, probe
catccctgtccatcaggtcattgat

SEQ ID NO: 170836 - DNA, 25 bp, probe
catcccatgttcagcaatgtcaatg

SEQ ID NO: 170837 - DNA, 25 bp, probe
catcccatgttcagcaatgtcaatg

SEQ ID NO: 170838 - DNA, 25 bp, probe
cattcaggctttacaagccaaacgc

SEQ ID NO: 170839 - DNA, 25 bp, probe
cattcaggctttacaagccaaacgc

SEQ ID NO: 170840 - DNA, 25 bp, probe
catatttccgttgcagccaaatgga

SEQ ID NO: 170841 - DNA, 25 bp, probe
catttccctttggagacacaacagg

SEQ ID NO: 170842 - DNA, 25 bp, probe
cattcccactcttttacagaatcgt

SEQ ID NO: 170843 - DNA, 25 bp, probe
catctgggtttgtttacagcaattc

SEQ ID NO: 170844 - DNA, 25 bp, probe
catctagcagacagctctggacaga

SEQ ID NO: 170845 - DNA, 25 bp, probe
catcgcagacacatgtgctggccac

SEQ ID NO: 170846 - DNA, 25 bp, probe
catctgcacagcaagctgtcggtga

SEQ ID NO: 170847 - DNA, 25 bp, probe
catcatgacccagtgttggcagcac

SEQ ID NO: 170848 - DNA, 25 bp, probe
catctacagcctgtacggcatctgc

SEQ ID NO: 170849 - DNA, 25 bp, probe
catcaaaggctgcatccgttctgcc

SEQ ID NO: 170850 - DNA, 25 bp, probe
catctacaacttcctcagtggcaaa

SEQ ID NO: 170851 - DNA, 25 bp, probe
catcaacgaggacccgggcaagaat

SEQ ID NO: 170852 - DNA, 25 bp, probe
catcaccgacaacccggacatgaac

SEQ ID NO: 170853 - DNA, 25 bp, probe
catcacacgctacaccaagaagacc

SEQ ID NO: 170854 - DNA, 25 bp, probe
catcccctggaagtacaaggactca

SEQ ID NO: 170855 - DNA, 25 bp, probe
catcttcatcggtactccaaggttc

SEQ ID NO: 170856 - DNA, 25 bp, probe
catcgtcatggtgacccagtgtgtt

SEQ ID NO: 170857 - DNA, 25 bp, probe
catcgcctatgtgtcccgagaaatg

SEQ ID NO: 170858 - DNA, 25 bp, probe
catcccattccttcctagtgagaag

SEQ ID NO: 170859 - DNA, 25 bp, probe
catctgccttgcttaccttatgagg

SEQ ID NO: 170860 - DNA, 25 bp, probe
catcgctttattgacatctggcagg

SEQ ID NO: 170861 - DNA, 25 bp, probe
catccctgtggaggagctcttcaag

SEQ ID NO: 170862 - DNA, 25 bp, probe
catccctatctacagtttccatggg

SEQ ID NO: 170863 - DNA, 25 bp, probe
catccctatctacagtttccatggg

SEQ ID NO: 170864 - DNA, 25 bp, probe
catccctacaacaatgtttatatgt

SEQ ID NO: 170865 - DNA, 25 bp, probe
catcgtgctaggcgtctttatcgtc

SEQ ID NO: 170866 - DNA, 25 bp, probe
catctgtccatggcctttctaatgg

SEQ ID NO: 170867 - DNA, 25 bp, probe
catcatccctgtatctactagtgtg

SEQ ID NO: 170868 - DNA, 25 bp, probe
catcatgaccgtcactgactttggc

SEQ ID NO: 170869 - DNA, 25 bp, probe
catcaggcctggccagctggatgtt

SEQ ID NO: 170870 - DNA, 25 bp, probe
catcatcgatctaggcacctgctgt

SEQ ID NO: 170871 - DNA, 25 bp, probe
catcatcggcacagtcagcatggat

SEQ ID NO: 170872 - DNA, 25 bp, probe
catctagtgatcttttgcatcatga

SEQ ID NO: 170873 - DNA, 25 bp, probe
catctagtgatcttttgcatcatga

SEQ ID NO: 170874 - DNA, 25 bp, probe
catctactgagctaatagccactag

SEQ ID NO: 170875 - DNA, 25 bp, probe
catctgcattcctgatgaccaatgg

SEQ ID NO: 170876 - DNA, 25 bp, probe
catcatcatctctgcaagactcatc

SEQ ID NO: 170877 - DNA, 25 bp, probe
catcacagccctgatggctgccatc

SEQ ID NO: 170878 - DNA, 25 bp, probe
catcaagtcactaagtcgcatcaca

SEQ ID NO: 170879 - DNA, 25 bp, probe
catcaaggcctacgggatccgcatt

SEQ ID NO: 170880 - DNA, 25 bp, probe
catcgaggattgctgggaccatgat

SEQ ID NO: 170881 - DNA, 25 bp, probe
catcgagcacggcatcgtcaccaac

SEQ ID NO: 170882 - DNA, 25 bp, probe
catctggcactcagacgtgcacgtc

SEQ ID NO: 170883 - DNA, 25 bp, probe
catatggagcatctacccagactcc

SEQ ID NO: 170884 - DNA, 25 bp, probe
ctaaaacgttaccagcagctgaaac

SEQ ID NO: 170885 - DNA, 25 bp, probe
cataaaacccttgagcacaacagca

SEQ ID NO: 170886 - DNA, 25 bp, probe
catcaaaaccctccttgaattgggc

SEQ ID NO: 170887 - DNA, 25 bp, probe
catcaaacaccccaatctggttcgg

SEQ ID NO: 170888 - DNA, 25 bp, probe
catcaacagcctccaaggcttcttc

SEQ ID NO: 170889 - DNA, 25 bp, probe
catcaacagcctccaaggcttcttc

SEQ ID NO: 170890 - DNA, 25 bp, probe
catcaacacgcacctgggcattggt

SEQ ID NO: 170891 - DNA, 25 bp, probe
catcaaaagcaccagcaggcacgtt

SEQ ID NO: 170892 - DNA, 25 bp, probe
catctacactcaggacttcacggtg

SEQ ID NO: 170893 - DNA, 25 bp, probe
catctactctgagcaggacacgggc

SEQ ID NO: 170894 - DNA, 25 bp, probe
catcttatctggcatgtcctgggag

SEQ ID NO: 170895 - DNA, 25 bp, probe
catctcctctggtgtgggagtgatg

SEQ ID NO: 170896 - DNA, 25 bp, probe
catctccactgaatcgctggactgt

SEQ ID NO: 170897 - DNA, 25 bp, probe
catctccagcgtgcggagcatctga

SEQ ID NO: 170898 - DNA, 25 bp, probe
catctccagcgtgcggagcatctga

SEQ ID NO: 170899 - DNA, 25 bp, probe
catcatccggatgctggagttcggc

SEQ ID NO: 170900 - DNA, 25 bp, probe
catcacgcagggacgtgagttggag

SEQ ID NO: 170901 - DNA, 25 bp, probe
catcggcagaggagtgagctctgtg

SEQ ID NO: 170902 - DNA, 25 bp, probe
catcggagcacaccgagggctgatg

SEQ ID NO: 170903 - DNA, 25 bp, probe
catcatgagtccacgggtgtgctgc

SEQ ID NO: 170904 - DNA, 25 bp, probe
catctatgtcacagctaaggagcat

SEQ ID NO: 170905 - DNA, 25 bp, probe
catctcagagcatttgtaaggcagg

SEQ ID NO: 170906 - DNA, 25 bp, probe
catctctagaagaaacggcagtgaa

SEQ ID NO: 170907 - DNA, 25 bp, probe
cattcaatgaaataagcagcctggt

SEQ ID NO: 170908 - DNA, 25 bp, probe
cattcaatgaaataagcagcctggt

SEQ ID NO: 170909 - DNA, 25 bp, probe
catctcaatgacaaactagccaagg

SEQ ID NO: 170910 - DNA, 25 bp, probe
catcacaatctatgacgaggaagcg

SEQ ID NO: 170911 - DNA, 25 bp, probe
catcacaactaactccatcggaagc

SEQ ID NO: 170912 - DNA, 25 bp, probe
catcaaaggaaaccacggagtgccc

SEQ ID NO: 170913 - DNA, 25 bp, probe
cataaacgatgccgaccggcgatgc

SEQ ID NO: 170914 - DNA, 25 bp, probe
cataaagaggatcgaccagtcagag

SEQ ID NO: 170915 - DNA, 25 bp, probe
catcaagcgggaagccttgctcaaa

SEQ ID NO: 170916 - DNA, 25 bp, probe
catcattctgggggcctttatcatc

SEQ ID NO: 170917 - DNA, 25 bp, probe
catttggggacctacttcactttga

SEQ ID NO: 170918 - DNA, 25 bp, probe
cattgctgcgggtgttcccgttgtc

SEQ ID NO: 170919 - DNA, 25 bp, probe
catcaggacggggttgccctgtgtt

SEQ ID NO: 170920 - DNA, 25 bp, probe
catcgtgtcggactagtgcctgttt

SEQ ID NO: 170921 - DNA, 25 bp, probe
catcacgtgcatttgctatgtgccg

SEQ ID NO: 170922 - DNA, 25 bp, probe
catcattgtcatcgacatgctcatg

SEQ ID NO: 170923 - DNA, 25 bp, probe
catcagtatatcccatgcaatattt

SEQ ID NO: 170924 - DNA, 25 bp, probe
catagtcaatcccagttgcttttcc

SEQ ID NO: 170925 - DNA, 25 bp, probe
cataatcaattggctgggctactcc

SEQ ID NO: 170926 - DNA, 25 bp, probe
cataataacagcctgatgggattca

SEQ ID NO: 170927 - DNA, 25 bp, probe
cataataacagcctgatgggattca

SEQ ID NO: 170928 - DNA, 25 bp, probe
catcgtcaacgccacaggagagctc

SEQ ID NO: 170929 - DNA, 25 bp, probe
catagtcgacgctacattgatgagt

SEQ ID NO: 170930 - DNA, 25 bp, probe
catctgctgcttcttattgatagat

SEQ ID NO: 170931 - DNA, 25 bp, probe
catagcagttctttagccatacata

SEQ ID NO: 170932 - DNA, 25 bp, probe
catagccttgtcgtgggcatgctca

SEQ ID NO: 170933 - DNA, 25 bp, probe
catagccttgtcgtgggcatgctca

SEQ ID NO: 170934 - DNA, 25 bp, probe
catagccatatccaggtacatccac

SEQ ID NO: 170935 - DNA, 25 bp, probe
catcagccatgtgcctgaaaacaca

SEQ ID NO: 170936 - DNA, 25 bp, probe
catacgctggcatcgaaaacactga

SEQ ID NO: 170937 - DNA, 25 bp, probe
catcaacagccttcgcaacaaagag

SEQ ID NO: 170938 - DNA, 25 bp, probe
catctaccttgggatcaaacggaaa

SEQ ID NO: 170939 - DNA, 25 bp, probe
catctaccttgggatcaaacggaaa

SEQ ID NO: 170940 - DNA, 25 bp, probe
catctacctgaacatccagaggcgc

SEQ ID NO: 170941 - DNA, 25 bp, probe
catctatccatgaaacccatgggaa

SEQ ID NO: 170942 - DNA, 25 bp, probe
catctatccatgaaacccatgggaa

SEQ ID NO: 170943 - DNA, 25 bp, probe
catctgtctggcatacctcatgcag

SEQ ID NO: 170944 - DNA, 25 bp, probe
catcgtctacgttatctgcatcact

SEQ ID NO: 170945 - DNA, 25 bp, probe
catcgtcaacgtggtgtgcccactg

SEQ ID NO: 170946 - DNA, 25 bp, probe
catcgtcaacgtggtgtgcccactg

SEQ ID NO: 170947 - DNA, 25 bp, probe
catcagtcaaagaatggttccatct

SEQ ID NO: 170948 - DNA, 25 bp, probe
catcgataaagccaagctctccagc

SEQ ID NO: 170949 - DNA, 25 bp, probe
catcaggtgaagaaacagtcacagc

SEQ ID NO: 170950 - DNA, 25 bp, probe
catcagggagatctcgctgctcaag

SEQ ID NO: 170951 - DNA, 25 bp, probe
catcgtggtgaaggcgcttcagccc

SEQ ID NO: 170952 - DNA, 25 bp, probe
catcgtggtgaaggcgcttcagccc

SEQ ID NO: 170953 - DNA, 25 bp, probe
catcgagaggaggccagatgtcccg

SEQ ID NO: 170954 - DNA, 25 bp, probe
catctgtcacgagcggtatgtctag

SEQ ID NO: 170955 - DNA, 25 bp, probe
catctgtcacgagcggtatgtctag

SEQ ID NO: 170956 - DNA, 25 bp, probe
catctgtggcgacgggtgatgctca

SEQ ID NO: 170957 - DNA, 25 bp, probe
catctattgcgtggtgggcagccat

SEQ ID NO: 170958 - DNA, 25 bp, probe
catcatattgagggggattgacatg

SEQ ID NO: 170959 - DNA, 25 bp, probe
catcttatgaagttatttgcatctg

SEQ ID NO: 170960 - DNA, 25 bp, probe
catcttaatgcattccacttcactg

SEQ ID NO: 170961 - DNA, 25 bp, probe
catcaccaacaatcagctgtcattt

SEQ ID NO: 170962 - DNA, 25 bp, probe
catcagccatgtagaccacgcttta

SEQ ID NO: 170963 - DNA, 25 bp, probe
catcagccatgtagaccacgcttta

SEQ ID NO: 170964 - DNA, 25 bp, probe
catcaccttggagcactgactgtac

SEQ ID NO: 170965 - DNA, 25 bp, probe
catacctgtagagcacgaatccaag

SEQ ID NO: 170966 - DNA, 25 bp, probe
catagcagcttattcacaagaccca

SEQ ID NO: 170967 - DNA, 25 bp, probe
cataaggaattcgatgatgacactt

SEQ ID NO: 170968 - DNA, 25 bp, probe
catcaaagaattccgcatgaacatc

SEQ ID NO: 170969 - DNA, 25 bp, probe
catctagaacaccaccagaggcagc

SEQ ID NO: 170970 - DNA, 25 bp, probe
cattcaggactacacgaggcgctgc

SEQ ID NO: 170971 - DNA, 25 bp, probe
catacatgggatagcacctgggccg

SEQ ID NO: 170972 - DNA, 25 bp, probe
cataccggatgtctatggtacagac

SEQ ID NO: 170973 - DNA, 25 bp, probe
ctaggggagccgaattctacaatcc

SEQ ID NO: 170974 - DNA, 25 bp, probe
cttggtggggtcaccaactactcac

SEQ ID NO: 170975 - DNA, 25 bp, probe
cttacgggtgtatctccaaatcctc

SEQ ID NO: 170976 - DNA, 25 bp, probe
ctttcaagtttatctcaataaccag

SEQ ID NO: 170977 - DNA, 25 bp, probe
ctttaggttaaagcagcgccaggag

SEQ ID NO: 170978 - DNA, 25 bp, probe
cttcaaggtttctgccagcccactg

SEQ ID NO: 170979 - DNA, 25 bp, probe
cccactgtttgcaatggccgtgagg

SEQ ID NO: 170980 - DNA, 25 bp, probe
cattcaaaatctgcccaaccaattg

SEQ ID NO: 170981 - DNA, 25 bp, probe
cattccatccttgagtcaaaaaatc

SEQ ID NO: 170982 - DNA, 25 bp, probe
cattcctctccaccgacaaaaggaa

SEQ ID NO: 170983 - DNA, 25 bp, probe
catatctcttatcttacgaaaaaat

SEQ ID NO: 170984 - DNA, 25 bp, probe
catacatctttcaatgtccaaaaaa

SEQ ID NO: 170985 - DNA, 25 bp, probe
catacttatatcaaggtcccaaaat

SEQ ID NO: 170986 - DNA, 25 bp, probe
catttttcagtacttctacagaatt

SEQ ID NO: 170987 - DNA, 25 bp, probe
catctactcagcagactactacaaa

SEQ ID NO: 170988 - DNA, 25 bp, probe
catctctgatgctgtgttactaaaa

SEQ ID NO: 170989 - DNA, 25 bp, probe
catcacctgcattgttaatgctacc

SEQ ID NO: 170990 - DNA, 25 bp, probe
catctactgatgctagacacttggc

SEQ ID NO: 170991 - DNA, 25 bp, probe
catcatcactgatgtcgccacattc

SEQ ID NO: 170992 - DNA, 25 bp, probe
catcatcactgatgtcgccacattc

SEQ ID NO: 170993 - DNA, 25 bp, probe
catcatctctgttatacacctgtat

SEQ ID NO: 170994 - DNA, 25 bp, probe
catcttctgctatatactccaaata

SEQ ID NO: 170995 - DNA, 25 bp, probe
catcaagtgctttctttccaaatgc

SEQ ID NO: 170996 - DNA, 25 bp, probe
cataattctgttctatgccacctgc

SEQ ID NO: 170997 - DNA, 25 bp, probe
catctatccggagaatgccaccgcc

SEQ ID NO: 170998 - DNA, 25 bp, probe
catcttccaggagcgagatccctcc

SEQ ID NO: 170999 - DNA, 25 bp, probe
catcaacagcagtgccaaacccatc

SEQ ID NO: 171000 - DNA, 25 bp, probe
cataatccacaagcaagcacctcca

SEQ ID NO: 171001 - DNA, 25 bp, probe
catagatcagcaaaccggggcctac

SEQ ID NO: 171002 - DNA, 25 bp, probe
cataaagtcatcaaagtggggtaca

SEQ ID NO: 171003 - DNA, 25 bp, probe
catcaagacgctcaagtcgggctac

SEQ ID NO: 171004 - DNA, 25 bp, probe
catcatcgacctccagaccgaggtc

SEQ ID NO: 171005 - DNA, 25 bp, probe
catcattgaatcccccagcaaagtg

SEQ ID NO: 171006 - DNA, 25 bp, probe
catctctgttttctacacaattgtc

SEQ ID NO: 171007 - DNA, 25 bp, probe
catcttggttgcttgttccagttcc

SEQ ID NO: 171008 - DNA, 25 bp, probe
catcttggttgttgtgcttgtcctg

SEQ ID NO: 171009 - DNA, 25 bp, probe
cttttttggggctgctgagtgctgc

SEQ ID NO: 171010 - DNA, 25 bp, probe
cttccttaacggtggtggtcctgat

SEQ ID NO: 171011 - DNA, 25 bp, probe
cttccttaacggtggtggtcctgat

SEQ ID NO: 171012 - DNA, 25 bp, probe
cttttcataactcaggggattccct

SEQ ID NO: 171013 - DNA, 25 bp, probe
catttttaacgcagaccatttccct

SEQ ID NO: 171014 - DNA, 25 bp, probe
ctttttaagcacagactaaggctgg

SEQ ID NO: 171015 - DNA, 25 bp, probe
ctttttaagcacagactaaggctgg

SEQ ID NO: 171016 - DNA, 25 bp, probe
cattgtttacacttcaactacgggg

SEQ ID NO: 171017 - DNA, 25 bp, probe
catttttggcacataacaacgtttt

SEQ ID NO: 171018 - DNA, 25 bp, probe
catttttggcacataacaacgtttt

SEQ ID NO: 171019 - DNA, 25 bp, probe
catctttcccacctaaaaatgtctg

SEQ ID NO: 171020 - DNA, 25 bp, probe
cattttccacggaaacagaactcga

SEQ ID NO: 171021 - DNA, 25 bp, probe
catctatgaaacggattactaccgg

SEQ ID NO: 171022 - DNA, 25 bp, probe
cggagacccggaaactgatcagggc

SEQ ID NO: 171023 - DNA, 25 bp, probe
cgctggtacacgtcaaacttcggtc

SEQ ID NO: 171024 - DNA, 25 bp, probe
cttggttcccataatagcttccagt

SEQ ID NO: 171025 - DNA, 25 bp, probe
cttggtgtccaacagagtctaggct

SEQ ID NO: 171026 - DNA, 25 bp, probe
cgggactggacacaagccagggctg

SEQ ID NO: 171027 - DNA, 25 bp, probe
cgttacccgaactgcatcaggcgtg

SEQ ID NO: 171028 - DNA, 25 bp, probe
cgtctcctgggatgtttaactttga

SEQ ID NO: 171029 - DNA, 25 bp, probe
cgtctcctgggatgtttaactttga

SEQ ID NO: 171030 - DNA, 25 bp, probe
ctgtttcggatctgtggttcctttg

SEQ ID NO: 171031 - DNA, 25 bp, probe
cattttggttggcgcttttgttggc

SEQ ID NO: 171032 - DNA, 25 bp, probe
catttgtggtctgactccttggggt

SEQ ID NO: 171033 - DNA, 25 bp, probe
catttgaggttttctacaatttggt

SEQ ID NO: 171034 - DNA, 25 bp, probe
gcgaggaaggcctgtacttttggtc

SEQ ID NO: 171035 - DNA, 25 bp, probe
cttggtatgggctgttctgtttcct

SEQ ID NO: 171036 - DNA, 25 bp, probe
cattcattaaggtgcctcgtttttg

SEQ ID NO: 171037 - DNA, 25 bp, probe
cattcattaaggtgcctcgtttttg

SEQ ID NO: 171038 - DNA, 25 bp, probe
cattttaaaaatatcgttcactgtg

SEQ ID NO: 171039 - DNA, 25 bp, probe
catttctaaacagttattttccatt

SEQ ID NO: 171040 - DNA, 25 bp, probe
catttaaaaactcatattacctcct

SEQ ID NO: 171041 - DNA, 25 bp, probe
cattaataagaagattactccccct

SEQ ID NO: 171042 - DNA, 25 bp, probe
cataaatgaagtctctttccccacc

SEQ ID NO: 171043 - DNA, 25 bp, probe
cataaatgcggtaccctttactaca

SEQ ID NO: 171044 - DNA, 25 bp, probe
cataaatgcggtaccctttactaca

SEQ ID NO: 171045 - DNA, 25 bp, probe
cataactggggcaaccttttcttcg

SEQ ID NO: 171046 - DNA, 25 bp, probe
catacctagaggaactctaaccccg

SEQ ID NO: 171047 - DNA, 25 bp, probe
catacggaatggacagccgacctcc

SEQ ID NO: 171048 - DNA, 25 bp, probe
catacggaatggacagccgacctcc

SEQ ID NO: 171049 - DNA, 25 bp, probe
catctctgggcatgtcccgatatct

SEQ ID NO: 171050 - DNA, 25 bp, probe
catcactgagtcagtcaactccatc

SEQ ID NO: 171051 - DNA, 25 bp, probe
catcagctggtcaaacaaactctct

SEQ ID NO: 171052 - DNA, 25 bp, probe
catcagctggtcaaacaaactctct

SEQ ID NO: 171053 - DNA, 25 bp, probe
catcatcgcgccaaattttgcgctc

SEQ ID NO: 171054 - DNA, 25 bp, probe
catcatctccaaagagttgagcctc

SEQ ID NO: 171055 - DNA, 25 bp, probe
catcttggcatcagcaggaggcctc

SEQ ID NO: 171056 - DNA, 25 bp, probe
catcttgtgcccactgatggcagcc

SEQ ID NO: 171057 - DNA, 25 bp, probe
cattgttggcaacctggtacctcta

SEQ ID NO: 171058 - DNA, 25 bp, probe
catcttctccaacgggaacctggac

SEQ ID NO: 171059 - DNA, 25 bp, probe
catctcttcaatggggctgatacct

SEQ ID NO: 171060 - DNA, 25 bp, probe
catcttctccaggaggttcacagct

SEQ ID NO: 171061 - DNA, 25 bp, probe
catcttctccatgtggaaacatcgc

SEQ ID NO: 171062 - DNA, 25 bp, probe
catttatcctttgtttcaccaacca

SEQ ID NO: 171063 - DNA, 25 bp, probe
cttttcctttgtgtactctatactg

SEQ ID NO: 171064 - DNA, 25 bp, probe
cttttcctttgtgtactctatactg

SEQ ID NO: 171065 - DNA, 25 bp, probe
ctttttcctttagccttagcagtgg

SEQ ID NO: 171066 - DNA, 25 bp, probe
cttttgttcctgtccgtttatcagg

SEQ ID NO: 171067 - DNA, 25 bp, probe
catctttgttcacttgaggctttcc

SEQ ID NO: 171068 - DNA, 25 bp, probe
catctttgttcacttgaggctttcc

SEQ ID NO: 171069 - DNA, 25 bp, probe
catctgtgtttcaagtggggctcgc

SEQ ID NO: 171070 - DNA, 25 bp, probe
catctctgttctgcaggtgagagga

SEQ ID NO: 171071 - DNA, 25 bp, probe
catctcgaatatcaggatgctgagg

SEQ ID NO: 171072 - DNA, 25 bp, probe
catctcgaatatcaggatgctgagg

SEQ ID NO: 171073 - DNA, 25 bp, probe
catcaccatcttccaggagcgagat

SEQ ID NO: 171074 - DNA, 25 bp, probe
catcaccttggcaggccatcagaag

SEQ ID NO: 171075 - DNA, 25 bp, probe
catctctttggctgaacatcgagag

SEQ ID NO: 171076 - DNA, 25 bp, probe
catactattgactgggtgcaagaaa

SEQ ID NO: 171077 - DNA, 25 bp, probe
catctctagtacttcggatcaagaa

SEQ ID NO: 171078 - DNA, 25 bp, probe
catctgctactactacatggccaag

SEQ ID NO: 171079 - DNA, 25 bp, probe
catctctccaagaatctcctcagag

SEQ ID NO: 171080 - DNA, 25 bp, probe
catcttgccaagggtccctgtgtgt

SEQ ID NO: 171081 - DNA, 25 bp, probe
catcttcttagtgtgccacttgctt

SEQ ID NO: 171082 - DNA, 25 bp, probe
catcatatttatgttccgctgtaca

SEQ ID NO: 171083 - DNA, 25 bp, probe
catcatatttatgttccgctgtaca

SEQ ID NO: 171084 - DNA, 25 bp, probe
catcattttaagtctgtggcctaaa

SEQ ID NO: 171085 - DNA, 25 bp, probe
catcattttaagtctgtggcctaaa

SEQ ID NO: 171086 - DNA, 25 bp, probe
catcttgttcaatcctcactttaag

SEQ ID NO: 171087 - DNA, 25 bp, probe
catcaggcctaatctcatacctctg

SEQ ID NO: 171088 - DNA, 25 bp, probe
catcaggcctaatctcatacctctg

SEQ ID NO: 171089 - DNA, 25 bp, probe
catcatgagatcttcaacttacttt

SEQ ID NO: 171090 - DNA, 25 bp, probe
catctgagacagatactagatattt

SEQ ID NO: 171091 - DNA, 25 bp, probe
catagaccagaccccagtgattaat

SEQ ID NO: 171092 - DNA, 25 bp, probe
cataagccaccaatccctgaaagat

SEQ ID NO: 171093 - DNA, 25 bp, probe
cataagccaccaatccctgaaagat

SEQ ID NO: 171094 - DNA, 25 bp, probe
cataagccaccaatccctgaaagat

SEQ ID NO: 171095 - DNA, 25 bp, probe
cataacaacacaattcctagacatt

SEQ ID NO: 171096 - DNA, 25 bp, probe
cataacaacacaattcctagacatt

SEQ ID NO: 171097 - DNA, 25 bp, probe
cataacatcccagatactatcacat

SEQ ID NO: 171098 - DNA, 25 bp, probe
catcaagcagtcggcctacgacttc

SEQ ID NO: 171099 - DNA, 25 bp, probe
catcaagcagtccacagcagtctga

SEQ ID NO: 171100 - DNA, 25 bp, probe
catcagccagtccacaggactacag

SEQ ID NO: 171101 - DNA, 25 bp, probe
catctcctgtcccaggattagcaga

SEQ ID NO: 171102 - DNA, 25 bp, probe
catctcctgtccttcagtttgtata

SEQ ID NO: 171103 - DNA, 25 bp, probe
catcttctgctactggcgttttgtg

SEQ ID NO: 171104 - DNA, 25 bp, probe
catcttctgctactggcgttttgtg

SEQ ID NO: 171105 - DNA, 25 bp, probe
catcatttttcttgctgtcttgggc

SEQ ID NO: 171106 - DNA, 25 bp, probe
catcatttacttcttcatgggctcc

SEQ ID NO: 171107 - DNA, 25 bp, probe
catctttcacacacattctggacag

SEQ ID NO: 171108 - DNA, 25 bp, probe
catcattgacaagatcttcatggac

SEQ ID NO: 171109 - DNA, 25 bp, probe
catcttcaggatgattcatctagca

SEQ ID NO: 171110 - DNA, 25 bp, probe
cataggaggatgattcagcatcaga

SEQ ID NO: 171111 - DNA, 25 bp, probe
cataggaggatgattcagcatcaga

SEQ ID NO: 171112 - DNA, 25 bp, probe
catcagtgtggtagcttgctcaaca

SEQ ID NO: 171113 - DNA, 25 bp, probe
catcttttactggatcacatacaag

SEQ ID NO: 171114 - DNA, 25 bp, probe
catcttttactggatcacatacaag

SEQ ID NO: 171115 - DNA, 25 bp, probe
catcttttccatgatcatctacaca

SEQ ID NO: 171116 - DNA, 25 bp, probe
catcattttctcctatgtgctatcc

SEQ ID NO: 171117 - DNA, 25 bp, probe
catcattttctcctatgtgctatcc

SEQ ID NO: 171118 - DNA, 25 bp, probe
catcttcatgtatctcaggagaccc

SEQ ID NO: 171119 - DNA, 25 bp, probe
catctctcaatctcatgcttgagtc

SEQ ID NO: 171120 - DNA, 25 bp, probe
catctctcactcttactgtgagcac

SEQ ID NO: 171121 - DNA, 25 bp, probe
catctccatcgtggactgggcacgc

SEQ ID NO: 171122 - DNA, 25 bp, probe
catcatggaagtggtgggcacaccc

SEQ ID NO: 171123 - DNA, 25 bp, probe
catcatggggccctgagccatgtgc

SEQ ID NO: 171124 - DNA, 25 bp, probe
catcttggagcgtctgcagtactgc

SEQ ID NO: 171125 - DNA, 25 bp, probe
catcttcagcctgtctgtgattgct

SEQ ID NO: 171126 - DNA, 25 bp, probe
catcttcagcctgtctgtgattgct

SEQ ID NO: 171127 - DNA, 25 bp, probe
catctttgacactctgcagactgct

SEQ ID NO: 171128 - DNA, 25 bp, probe
catcttggtactactagatgtcttt

SEQ ID NO: 171129 - DNA, 25 bp, probe
catctttccagcagcatacatttta

SEQ ID NO: 171130 - DNA, 25 bp, probe
catctttccagcagcatacatttta

SEQ ID NO: 171131 - DNA, 25 bp, probe
catttttcagtgcaactgtttagtc

SEQ ID NO: 171132 - DNA, 25 bp, probe
cttacgtggtgacacggtactaccg

SEQ ID NO: 171133 - DNA, 25 bp, probe
cattacgggtgttgaaggtgtcttc

SEQ ID NO: 171134 - DNA, 25 bp, probe
catttcgggaagacagagagggcct

SEQ ID NO: 171135 - DNA, 25 bp, probe
catttcgggaagacagagagggcct

SEQ ID NO: 171136 - DNA, 25 bp, probe
catttgcaaccctctgagataccct

SEQ ID NO: 171137 - DNA, 25 bp, probe
catttgcaaccctctgagataccct

SEQ ID NO: 171138 - DNA, 25 bp, probe
catatgtaatcccttgctttatcca

SEQ ID NO: 171139 - DNA, 25 bp, probe
catatgtaatcccttgctttatcca

SEQ ID NO: 171140 - DNA, 25 bp, probe
cattgaagtgcgctctttgcaatcc

SEQ ID NO: 171141 - DNA, 25 bp, probe
catcacattggcgttatttgtcatc

SEQ ID NO: 171142 - DNA, 25 bp, probe
catcacattggcgttatttgtcatc

SEQ ID NO: 171143 - DNA, 25 bp, probe
catctactgggttgatttcatcatc

SEQ ID NO: 171144 - DNA, 25 bp, probe
catctttgctgcttcagtgttcatc

SEQ ID NO: 171145 - DNA, 25 bp, probe
catcttgtggcttagttgtagaagc

SEQ ID NO: 171146 - DNA, 25 bp, probe
cattcgtgggaacagcgcagtacgt

SEQ ID NO: 171147 - DNA, 25 bp, probe
cattgagtagggccggccagtgcaa

SEQ ID NO: 171148 - DNA, 25 bp, probe
cattgagtagggccggccagtgcaa

SEQ ID NO: 171149 - DNA, 25 bp, probe
cttcagtggtaccagcccatgaaca

SEQ ID NO: 171150 - DNA, 25 bp, probe
catacaggtttctgcctcagatcga

SEQ ID NO: 171151 - DNA, 25 bp, probe
cataagggactgtgccagatgttag

SEQ ID NO: 171152 - DNA, 25 bp, probe
catttgggggctcccagttacagaa

SEQ ID NO: 171153 - DNA, 25 bp, probe
cttggggacgaagcgtatcagcgta

SEQ ID NO: 171154 - DNA, 25 bp, probe
cttgggtgaccttccaaaactctgc

SEQ ID NO: 171155 - DNA, 25 bp, probe
cttgcttctacctggcaaaacgtcc

SEQ ID NO: 171156 - DNA, 25 bp, probe
cttgtttacccaccagattacaatc

SEQ ID NO: 171157 - DNA, 25 bp, probe
cttgttttctaagggaagcgacatc

SEQ ID NO: 171158 - DNA, 25 bp, probe
cttgttttctaagggaagcgacatc

SEQ ID NO: 171159 - DNA, 25 bp, probe
ctttgacgtcgatggggatggccac

SEQ ID NO: 171160 - DNA, 25 bp, probe
cttgtgccttggaaagaggttccca

SEQ ID NO: 171161 - DNA, 25 bp, probe
cttggcactttgtggcaagattttc

SEQ ID NO: 171162 - DNA, 25 bp, probe
cttgtggatttatagtagttcagtc

SEQ ID NO: 171163 - DNA, 25 bp, probe
cttgaagatcttttacttgttaaca

SEQ ID NO: 171164 - DNA, 25 bp, probe
cttgaaaccttatgattttcccaag

SEQ ID NO: 171165 - DNA, 25 bp, probe
cttggttcctaagagtttcctcaga

SEQ ID NO: 171166 - DNA, 25 bp, probe
ctttgtttcttagcggtacctggat

SEQ ID NO: 171167 - DNA, 25 bp, probe
cttttatgtttacagggcacgtctg

SEQ ID NO: 171168 - DNA, 25 bp, probe
cttttggggtagatgcggccccgat

SEQ ID NO: 171169 - DNA, 25 bp, probe
catctttggggtaatcatcgacacc

SEQ ID NO: 171170 - DNA, 25 bp, probe
catctttggctgatgttcttagccc

SEQ ID NO: 171171 - DNA, 25 bp, probe
catcttttctgaagtgtctttgggc

SEQ ID NO: 171172 - DNA, 25 bp, probe
catttctagcgagctggcgtggggg

SEQ ID NO: 171173 - DNA, 25 bp, probe
catcttcgtgctagtcggggtggag

SEQ ID NO: 171174 - DNA, 25 bp, probe
catcaaggtcatgtgcgagggtgga

SEQ ID NO: 171175 - DNA, 25 bp, probe
catcaaggacatggccgggctgctg

SEQ ID NO: 171176 - DNA, 25 bp, probe
catcaaggattcctgggtgctcaag

SEQ ID NO: 171177 - DNA, 25 bp, probe
catcaagcggtccgaggtggaagaa

SEQ ID NO: 171178 - DNA, 25 bp, probe
catcattcgggtccgggctggagaa

SEQ ID NO: 171179 - DNA, 25 bp, probe
catcaaaggagttcgcggaggcaga

SEQ ID NO: 171180 - DNA, 25 bp, probe
catcatcaaggattcctgggtgctc

SEQ ID NO: 171181 - DNA, 25 bp, probe
catcatcaatggatccgactgcgat

SEQ ID NO: 171182 - DNA, 25 bp, probe
catcatccaggagatcgtcaagtac

SEQ ID NO: 171183 - DNA, 25 bp, probe
catagccagcaatgttgtcaaggtc

SEQ ID NO: 171184 - DNA, 25 bp, probe
catcattagcagttgtcccgttgtc

SEQ ID NO: 171185 - DNA, 25 bp, probe
catcttcagcagttgctagtccatt

SEQ ID NO: 171186 - DNA, 25 bp, probe
catctatgagaaggaagtccgtttg

SEQ ID NO: 171187 - DNA, 25 bp, probe
catcaatgccacaaacatgtcctgt

SEQ ID NO: 171188 - DNA, 25 bp, probe
catcatggaacaaactgtcacctac

SEQ ID NO: 171189 - DNA, 25 bp, probe
catatcgagacaaaattaccatagc

SEQ ID NO: 171190 - DNA, 25 bp, probe
catatcgagacaaaattaccatagc

SEQ ID NO: 171191 - DNA, 25 bp, probe
catagcaggagttattaaccagcca

SEQ ID NO: 171192 - DNA, 25 bp, probe
catacagccctattctagaggatac

SEQ ID NO: 171193 - DNA, 25 bp, probe
ctatcgtgccgcactagagtacctg

SEQ ID NO: 171194 - DNA, 25 bp, probe
cattctggccgctccaggaattctg

SEQ ID NO: 171195 - DNA, 25 bp, probe
catcttctggctgtccaagaacctg

SEQ ID NO: 171196 - DNA, 25 bp, probe
catcttctggctgtccaagaacctg

SEQ ID NO: 171197 - DNA, 25 bp, probe
catttctggccatttaactagcact

SEQ ID NO: 171198 - DNA, 25 bp, probe
catattaggcgcagataaaagaatt

SEQ ID NO: 171199 - DNA, 25 bp, probe
catcttgagtgctggtcaaatcaga

SEQ ID NO: 171200 - DNA, 25 bp, probe
catcattgtttacatcaagatcacc

SEQ ID NO: 171201 - DNA, 25 bp, probe
catcttcttttttagggcacaggat

SEQ ID NO: 171202 - DNA, 25 bp, probe
catcttcacctttgaccgtacaggt

SEQ ID NO: 171203 - DNA, 25 bp, probe
catcattcacaggtaaccgcggggg

SEQ ID NO: 171204 - DNA, 25 bp, probe
catattctatggcaccctcagttgg

SEQ ID NO: 171205 - DNA, 25 bp, probe
catattctatggcaccctcagttgg

SEQ ID NO: 171206 - DNA, 25 bp, probe
catcttctatgtcacctccagtgac

SEQ ID NO: 171207 - DNA, 25 bp, probe
catcttctatgagatggccacaggc

SEQ ID NO: 171208 - DNA, 25 bp, probe
catcttgtatatcctactcagcggc

SEQ ID NO: 171209 - DNA, 25 bp, probe
catatttattacatcggggcaaatt

SEQ ID NO: 171210 - DNA, 25 bp, probe
cattactattccataactccagaca

SEQ ID NO: 171211 - DNA, 25 bp, probe
cattactattccataactccagaca

SEQ ID NO: 171212 - DNA, 25 bp, probe
catttcataatgccttcagtaccga

SEQ ID NO: 171213 - DNA, 25 bp, probe
catcattataaggcttaattgtgga

SEQ ID NO: 171214 - DNA, 25 bp, probe
catcatctaaccattacagcctgta

SEQ ID NO: 171215 - DNA, 25 bp, probe
catactgagacctccagatgcactt

SEQ ID NO: 171216 - DNA, 25 bp, probe
catactggatcctgaagaactcctg

SEQ ID NO: 171217 - DNA, 25 bp, probe
catcactgcgtactggaagggcttc

SEQ ID NO: 171218 - DNA, 25 bp, probe
catcacatccatgttgaactccctc

SEQ ID NO: 171219 - DNA, 25 bp, probe
catttctcagctataaattgcgctc

SEQ ID NO: 171220 - DNA, 25 bp, probe
catcttccgaggccaataaagtgct

SEQ ID NO: 171221 - DNA, 25 bp, probe
catcttgtcagaagtcaatgaaaca

SEQ ID NO: 171222 - DNA, 25 bp, probe
catcaatgtacatgccaacataaat

SEQ ID NO: 171223 - DNA, 25 bp, probe
catcaatggaaatcccatcaccatc

SEQ ID NO: 171224 - DNA, 25 bp, probe
catcaatggaaatcccatcaccatc

SEQ ID NO: 171225 - DNA, 25 bp, probe
catcaaggagacctaccagctccac

SEQ ID NO: 171226 - DNA, 25 bp, probe
catcaagccagacaacctgctgctg

SEQ ID NO: 171227 - DNA, 25 bp, probe
catcaagccagacaacctgctgctg

SEQ ID NO: 171228 - DNA, 25 bp, probe
catcaagcgctacgagacgctggag

SEQ ID NO: 171229 - DNA, 25 bp, probe
catcacagatgctgtgaaggtcgtg

SEQ ID NO: 171230 - DNA, 25 bp, probe
catcacggccttcatggatggtgcc

SEQ ID NO: 171231 - DNA, 25 bp, probe
ctcaagtcctcgcaggggtaccgag

SEQ ID NO: 171232 - DNA, 25 bp, probe
ctgtttcctaggctggggacccagc

SEQ ID NO: 171233 - DNA, 25 bp, probe
ctgttgcctttggttagggaacaca

SEQ ID NO: 171234 - DNA, 25 bp, probe
catacaccttctgggtagggaaaca

SEQ ID NO: 171235 - DNA, 25 bp, probe
catataccttgttagtgggcaaacc

SEQ ID NO: 171236 - DNA, 25 bp, probe
catataccttgttagtgggcaaacc

SEQ ID NO: 171237 - DNA, 25 bp, probe
catacttctttgcagcggacaaata

SEQ ID NO: 171238 - DNA, 25 bp, probe
catcagtgacttagggctaggaaca

SEQ ID NO: 171239 - DNA, 25 bp, probe
catagtagcaagtcttctggtagaa

SEQ ID NO: 171240 - DNA, 25 bp, probe
catagtagcaagtcttctggtagaa

SEQ ID NO: 171241 - DNA, 25 bp, probe
catcatggtcagcccttgtgagtaa

SEQ ID NO: 171242 - DNA, 25 bp, probe
catcatagcctacctcatgcatagt

SEQ ID NO: 171243 - DNA, 25 bp, probe
catcatagcctacctcatgcatagt

SEQ ID NO: 171244 - DNA, 25 bp, probe
catcatagcctacctcatgcatagt

SEQ ID NO: 171245 - DNA, 25 bp, probe
cttcatcctgtgcctctatgtgcac

SEQ ID NO: 171246 - DNA, 25 bp, probe
cttggcgtgtgggaatccaccctga

SEQ ID NO: 171247 - DNA, 25 bp, probe
gcttggggtccagttcccccaagct

SEQ ID NO: 171248 - DNA, 25 bp, probe
cttgtgggaccagtcccacaccgct

SEQ ID NO: 171249 - DNA, 25 bp, probe
cttggaggacaagacaggaccaatc

SEQ ID NO: 171250 - DNA, 25 bp, probe
catttggaacagtctacaagggaaa

SEQ ID NO: 171251 - DNA, 25 bp, probe
catttaaaaatcagcatctgggcca

SEQ ID NO: 171252 - DNA, 25 bp, probe
cattgttaaccacatgagggaccag

SEQ ID NO: 171253 - DNA, 25 bp, probe
cattgttaaccacatgagggaccag

SEQ ID NO: 171254 - DNA, 25 bp, probe
cattttaagctagttgggccacaac

SEQ ID NO: 171255 - DNA, 25 bp, probe
cgcgtccgaggtgtgaagaccaaca

SEQ ID NO: 171256 - DNA, 25 bp, probe
cggatcaagaagacactacaaaaaa

SEQ ID NO: 171257 - DNA, 25 bp, probe
catcttgcaaactacactttaaaaa

SEQ ID NO: 171258 - DNA, 25 bp, probe
cataatcaaatatcgctttacatgt

SEQ ID NO: 171259 - DNA, 25 bp, probe
cattattagctatatcatttgaggt

SEQ ID NO: 171260 - DNA, 25 bp, probe
catcttccacattgattccacggag

SEQ ID NO: 171261 - DNA, 25 bp, probe
catcttccacattgattccacggag

SEQ ID NO: 171262 - DNA, 25 bp, probe
catcttccatgcttaccacagggag

SEQ ID NO: 171263 - DNA, 25 bp, probe
catcttccatgcttaccacagggag

SEQ ID NO: 171264 - DNA, 25 bp, probe
catcttccactgtgctatgaaggag

SEQ ID NO: 171265 - DNA, 25 bp, probe
catcatcaaccctgtcatatatgct

SEQ ID NO: 171266 - DNA, 25 bp, probe
catcatcatcgtcgtctgtcaatga

SEQ ID NO: 171267 - DNA, 25 bp, probe
catcatcatcgtcgtctgtcaatga

SEQ ID NO: 171268 - DNA, 25 bp, probe
catcatccgagcattgtctgcagga

SEQ ID NO: 171269 - DNA, 25 bp, probe
catcatctgtaactgttgagatgta

SEQ ID NO: 171270 - DNA, 25 bp, probe
catcatcatcttttgttatgaaaga

SEQ ID NO: 171271 - DNA, 25 bp, probe
catcagctctggctgtgtaggggag

SEQ ID NO: 171272 - DNA, 25 bp, probe
catcatctatgcctttgtcggggag

SEQ ID NO: 171273 - DNA, 25 bp, probe
catcaccatggtactgtggggggcc

SEQ ID NO: 171274 - DNA, 25 bp, probe
catcatggaggtacgcggagggctg

SEQ ID NO: 171275 - DNA, 25 bp, probe
cataggctggtggccttgggccttg

SEQ ID NO: 171276 - DNA, 25 bp, probe
cataggctggtggccttgggccttg

SEQ ID NO: 171277 - DNA, 25 bp, probe
catcatggctgagctgctccagggc

SEQ ID NO: 171278 - DNA, 25 bp, probe
catcatgatgtattttctgctggga

SEQ ID NO: 171279 - DNA, 25 bp, probe
catataggatttttctgcaggactt

SEQ ID NO: 171280 - DNA, 25 bp, probe
catcaaacctgttaccacagactat

SEQ ID NO: 171281 - DNA, 25 bp, probe
catcactatccgatgcaccaaacta

SEQ ID NO: 171282 - DNA, 25 bp, probe
catcaatgcccacgagcagcaaacc

SEQ ID NO: 171283 - DNA, 25 bp, probe
catcaatgaccccttcattgacctc

SEQ ID NO: 171284 - DNA, 25 bp, probe
catcaacattccattcagtgctgcc

SEQ ID NO: 171285 - DNA, 25 bp, probe
catcaacaacgttctcatgtctctc

SEQ ID NO: 171286 - DNA, 25 bp, probe
catcatctactgctacatcttcatc

SEQ ID NO: 171287 - DNA, 25 bp, probe
catcatctacggctacttcaacgag

SEQ ID NO: 171288 - DNA, 25 bp, probe
catcatttatggtttcttcaacgag

SEQ ID NO: 171289 - DNA, 25 bp, probe
cattttttctatgcattcgggggag

SEQ ID NO: 171290 - DNA, 25 bp, probe
catttttcttctcttagccaaaggg

SEQ ID NO: 171291 - DNA, 25 bp, probe
ctatggtttgttgcctacctagctg

SEQ ID NO: 171292 - DNA, 25 bp, probe
catagaggttgtggcccttcttttt

SEQ ID NO: 171293 - DNA, 25 bp, probe
cattgcaggttggcaccttacttcc

SEQ ID NO: 171294 - DNA, 25 bp, probe
catcaaggcactggacgtctacttc

SEQ ID NO: 171295 - DNA, 25 bp, probe
catcagagagacgcaacccatctcc

SEQ ID NO: 171296 - DNA, 25 bp, probe
catcagcaatgagctcatctcctac

SEQ ID NO: 171297 - DNA, 25 bp, probe
catcatcattgtgctgaacctcatc

SEQ ID NO: 171298 - DNA, 25 bp, probe
catcatatagttcaaccatgattga

SEQ ID NO: 171299 - DNA, 25 bp, probe
catacttctctgcaacttgttgagc

SEQ ID NO: 171300 - DNA, 25 bp, probe
catactcacctccagtttaacagca

SEQ ID NO: 171301 - DNA, 25 bp, probe
catactcacctccagtttaacagca

SEQ ID NO: 171302 - DNA, 25 bp, probe
catttcacccaatgttcacatctgc

SEQ ID NO: 171303 - DNA, 25 bp, probe
catattacgacttagtgccctctga

SEQ ID NO: 171304 - DNA, 25 bp, probe
cataatcatctggcttttcttcctg

SEQ ID NO: 171305 - DNA, 25 bp, probe
catagactgtgaagtatctttactg

SEQ ID NO: 171306 - DNA, 25 bp, probe
catagcctatgtacatctttaccag

SEQ ID NO: 171307 - DNA, 25 bp, probe
catagcctatgtacatctttaccag

SEQ ID NO: 171308 - DNA, 25 bp, probe
catcagcgtagtgttttgacctttc

SEQ ID NO: 171309 - DNA, 25 bp, probe
catcatggcggtgtttttcattttc

SEQ ID NO: 171310 - DNA, 25 bp, probe
catacgtatgttatgatgttattgt

SEQ ID NO: 171311 - DNA, 25 bp, probe
catattcaagttcatggtcctcttt

SEQ ID NO: 171312 - DNA, 25 bp, probe
catttgatagtttttcaccccttgg

SEQ ID NO: 171313 - DNA, 25 bp, probe
ctaggctatttattgtccccttagg

SEQ ID NO: 171314 - DNA, 25 bp, probe
cataggtcttgctttgttgcctgtc

SEQ ID NO: 171315 - DNA, 25 bp, probe
cataatctttctttgctgtgactga

SEQ ID NO: 171316 - DNA, 25 bp, probe
catcacactttaatttggagcatag

SEQ ID NO: 171317 - DNA, 25 bp, probe
catcatcagtcttaatattcagaga

SEQ ID NO: 171318 - DNA, 25 bp, probe
catagtggcacattatattatggaa

SEQ ID NO: 171319 - DNA, 25 bp, probe
catcagtcgcaatgattcagctcgc

SEQ ID NO: 171320 - DNA, 25 bp, probe
catcagatcatccacagttacacgg

SEQ ID NO: 171321 - DNA, 25 bp, probe
catcaatccaataatctacactgtg

SEQ ID NO: 171322 - DNA, 25 bp, probe
catcatctacaacttcctcagtggc

SEQ ID NO: 171323 - DNA, 25 bp, probe
cattcttaacatgtctcttggcctc

SEQ ID NO: 171324 - DNA, 25 bp, probe
catcatcttcaaggcggcctatggg

SEQ ID NO: 171325 - DNA, 25 bp, probe
catcagcctaaccgcagaaatgtga

SEQ ID NO: 171326 - DNA, 25 bp, probe
catacacttatcacatgaatgtgtt

SEQ ID NO: 171327 - DNA, 25 bp, probe
catcatctttatagccatcctgagc

SEQ ID NO: 171328 - DNA, 25 bp, probe
catttgtacatttcatcactcagtg

SEQ ID NO: 171329 - DNA, 25 bp, probe
cattattatcacacatcctaaactg

SEQ ID NO: 171330 - DNA, 25 bp, probe
cattattatcacacatcctaaactg

SEQ ID NO: 171331 - DNA, 25 bp, probe
catttgcttcaagccccgaaacaca

SEQ ID NO: 171332 - DNA, 25 bp, probe
catttcatctaagccacttaaaaaa

SEQ ID NO: 171333 - DNA, 25 bp, probe
catttcattaagatctctaatctgt

SEQ ID NO: 171334 - DNA, 25 bp, probe
catttagtaatgtaccttgagttaa

SEQ ID NO: 171335 - DNA, 25 bp, probe
catttactaaggtgtgctgggtcat

SEQ ID NO: 171336 - DNA, 25 bp, probe
catttggtagagcttgggggtgtgt

SEQ ID NO: 171337 - DNA, 25 bp, probe
catttggtacccaagggaagctgga

SEQ ID NO: 171338 - DNA, 25 bp, probe
catacttctaccctgtggtgaagga

SEQ ID NO: 171339 - DNA, 25 bp, probe
catacttctaccctgtggtgaagga

SEQ ID NO: 171340 - DNA, 25 bp, probe
ctagtctctgacacctgggacaggg

SEQ ID NO: 171341 - DNA, 25 bp, probe
catagtgcattgccccttgggatat

SEQ ID NO: 171342 - DNA, 25 bp, probe
catcagtgcaccctgctttaagaaa

SEQ ID NO: 171343 - DNA, 25 bp, probe
catcagaactcccttcaaacacaaa

SEQ ID NO: 171344 - DNA, 25 bp, probe
catcagaactcccttcaaacacaaa

SEQ ID NO: 171345 - DNA, 25 bp, probe
cttgaacccatatttgtacaccaat

SEQ ID NO: 171346 - DNA, 25 bp, probe
ctgctggaccggatgttaaccttta

SEQ ID NO: 171347 - DNA, 25 bp, probe
catttgtacgtgctggtcaaccttt

SEQ ID NO: 171348 - DNA, 25 bp, probe
catttgtacgtgctggtcaaccttt

SEQ ID NO: 171349 - DNA, 25 bp, probe
cattttgcaaggaagggcagaccaa

SEQ ID NO: 171350 - DNA, 25 bp, probe
catttggcgtgaccatgtgggaaat

SEQ ID NO: 171351 - DNA, 25 bp, probe
catttcaggtgagcagttagagtag

SEQ ID NO: 171352 - DNA, 25 bp, probe
catttagggatttgcttgggataca

SEQ ID NO: 171353 - DNA, 25 bp, probe
cttctgtggcagttatcttaccttc

SEQ ID NO: 171354 - DNA, 25 bp, probe
catactgttgttggatgctatactc

SEQ ID NO: 171355 - DNA, 25 bp, probe
catactttctgttgactttatcttt

SEQ ID NO: 171356 - DNA, 25 bp, probe
catactttctgttgactttatcttt

SEQ ID NO: 171357 - DNA, 25 bp, probe
catacttgtccctctaagtcattta

SEQ ID NO: 171358 - DNA, 25 bp, probe
catatttgtccacaatgatcaacta

SEQ ID NO: 171359 - DNA, 25 bp, probe
cattcctacctggacatgtcccatt

SEQ ID NO: 171360 - DNA, 25 bp, probe
cattccagtcttcacagtatcaact

SEQ ID NO: 171361 - DNA, 25 bp, probe
cttggagctcttcaaattcaccatc

SEQ ID NO: 171362 - DNA, 25 bp, probe
cttgggttcaagtgattctcctgcc

SEQ ID NO: 171363 - DNA, 25 bp, probe
gttacgttcaatcagaatccccgaa

SEQ ID NO: 171364 - DNA, 25 bp, probe
cttaagtccaagcaaatcatcccca

SEQ ID NO: 171365 - DNA, 25 bp, probe
cattaataaaaggacgatctgcccc

SEQ ID NO: 171366 - DNA, 25 bp, probe
catcaaaaagaaccggcatcctgac

SEQ ID NO: 171367 - DNA, 25 bp, probe
cataaaaagatacctggtctgcctt

SEQ ID NO: 171368 - DNA, 25 bp, probe
catattgaataatccttgttagagt

SEQ ID NO: 171369 - DNA, 25 bp, probe
catttgaagatatcccgttagaaga

SEQ ID NO: 171370 - DNA, 25 bp, probe
catttgtgaacttccccctaagaga

SEQ ID NO: 171371 - DNA, 25 bp, probe
cattttgatcctttgtactctataa

SEQ ID NO: 171372 - DNA, 25 bp, probe
cattttaagatgttggacttctgca

SEQ ID NO: 171373 - DNA, 25 bp, probe
cattgggagggtacgatttgctaaa

SEQ ID NO: 171374 - DNA, 25 bp, probe
cattatacatggcttcttttatgaa

SEQ ID NO: 171375 - DNA, 25 bp, probe
catagaacattgatctgttttacag

SEQ ID NO: 171376 - DNA, 25 bp, probe
catcagagactccattgttatttat

SEQ ID NO: 171377 - DNA, 25 bp, probe
ctcagagtcctggatctgcacagtc

SEQ ID NO: 171378 - DNA, 25 bp, probe
catattgatcatggggattcctagg

SEQ ID NO: 171379 - DNA, 25 bp, probe
catttattacatcgttcatccggtg

SEQ ID NO: 171380 - DNA, 25 bp, probe
cattctatttgctttattatcggtg

SEQ ID NO: 171381 - DNA, 25 bp, probe
catatacattagttttaatctctta

SEQ ID NO: 171382 - DNA, 25 bp, probe
cattaaatcagttatggttcctttg

SEQ ID NO: 171383 - DNA, 25 bp, probe
cattaatgatgcacatcaggtcacc

SEQ ID NO: 171384 - DNA, 25 bp, probe
catcagctttggcctgcaggtagcc

SEQ ID NO: 171385 - DNA, 25 bp, probe
catcagctcctggttcatggaagcc

SEQ ID NO: 171386 - DNA, 25 bp, probe
catcacgctgtggtttgatgatgcg

SEQ ID NO: 171387 - DNA, 25 bp, probe
catcaccgagcgcttgatgtgcgcg

SEQ ID NO: 171388 - DNA, 25 bp, probe
catcacgacaaggatatgatgtccg

SEQ ID NO: 171389 - DNA, 25 bp, probe
catactgaacagcatcaatttcgac

SEQ ID NO: 171390 - DNA, 25 bp, probe
catatataacagatacatttccctc

SEQ ID NO: 171391 - DNA, 25 bp, probe
catattcaacgtaccattcaccttc

SEQ ID NO: 171392 - DNA, 25 bp, probe
cattctcaaatgcggcttcgctttg

SEQ ID NO: 171393 - DNA, 25 bp, probe
cattctcaaatgcggcttcgctttg

SEQ ID NO: 171394 - DNA, 25 bp, probe
catattcattatacatggcttcttt

SEQ ID NO: 171395 - DNA, 25 bp, probe
catcagctgcaccactgcatgggtg

SEQ ID NO: 171396 - DNA, 25 bp, probe
catcagctcctctgagggtccagag

SEQ ID NO: 171397 - DNA, 25 bp, probe
catcagctcctctgagggtccagag

SEQ ID NO: 171398 - DNA, 25 bp, probe
catcagctccagtcggagaatccag

SEQ ID NO: 171399 - DNA, 25 bp, probe
catcagcagcttgcgggagatcacg

SEQ ID NO: 171400 - DNA, 25 bp, probe
catcagcgcgcaagagggcagaccg

SEQ ID NO: 171401 - DNA, 25 bp, probe
catcagcagcagtggtggagcccca

SEQ ID NO: 171402 - DNA, 25 bp, probe
catttggtcgggcagccgcacacta

SEQ ID NO: 171403 - DNA, 25 bp, probe
cttctctggggcctcaacagaacta

SEQ ID NO: 171404 - DNA, 25 bp, probe
cttctctggggcctcaacagaacta

SEQ ID NO: 171405 - DNA, 25 bp, probe
catattctggtgccgctgaaaatcc

SEQ ID NO: 171406 - DNA, 25 bp, probe
cattttcagtgtcggtcaaattcac

SEQ ID NO: 171407 - DNA, 25 bp, probe
cattttagtgctggccctcatatta

SEQ ID NO: 171408 - DNA, 25 bp, probe
cattttagtgctggccctcatatta

SEQ ID NO: 171409 - DNA, 25 bp, probe
catatttggatggtgaagtcacatt

SEQ ID NO: 171410 - DNA, 25 bp, probe
ctttggggtagctattcaattaggg

SEQ ID NO: 171411 - DNA, 25 bp, probe
catttggggaggtgtacaaggggat

SEQ ID NO: 171412 - DNA, 25 bp, probe
catacttgcggacgggtccgctggg

SEQ ID NO: 171413 - DNA, 25 bp, probe
cattcgccgaggaaggtccggaggg

SEQ ID NO: 171414 - DNA, 25 bp, probe
catacgggaggcgagtggttggtgg

SEQ ID NO: 171415 - DNA, 25 bp, probe
cataaaggtggtatgtgtgtgtatg

SEQ ID NO: 171416 - DNA, 25 bp, probe
catacagggaggttcattgtgatta

SEQ ID NO: 171417 - DNA, 25 bp, probe
catcacaaggtgctggcacttattg

SEQ ID NO: 171418 - DNA, 25 bp, probe
catcacgggtgcctggagtgtggtg

SEQ ID NO: 171419 - DNA, 25 bp, probe
catagaggctggcggagtgctgctg

SEQ ID NO: 171420 - DNA, 25 bp, probe
catagggctcagggcacacgttgcc

SEQ ID NO: 171421 - DNA, 25 bp, probe
catagggatcggccatcacaacagc

SEQ ID NO: 171422 - DNA, 25 bp, probe
catagcgagacctcatctcaaaccg

SEQ ID NO: 171423 - DNA, 25 bp, probe
cataaagatcactcatcccatacca

SEQ ID NO: 171424 - DNA, 25 bp, probe
cataaagatcactcatcccatacca

SEQ ID NO: 171425 - DNA, 25 bp, probe
catataaactcaagtgcctgctaca

SEQ ID NO: 171426 - DNA, 25 bp, probe
catatgaataacatggtgtgcttct

SEQ ID NO: 171427 - DNA, 25 bp, probe
catagcccagccagatgagtgctct

SEQ ID NO: 171428 - DNA, 25 bp, probe
catatgaccgctatgtggccatctg

SEQ ID NO: 171429 - DNA, 25 bp, probe
catatgaccgctacctggcaatttg

SEQ ID NO: 171430 - DNA, 25 bp, probe
catacagccttggactagcaattta

SEQ ID NO: 171431 - DNA, 25 bp, probe
cataccttgttatatgcagacatgt

SEQ ID NO: 171432 - DNA, 25 bp, probe
catcaccgagttcattgagaatggc

SEQ ID NO: 171433 - DNA, 25 bp, probe
catcaccaggtggatcctgagctag

SEQ ID NO: 171434 - DNA, 25 bp, probe
cattcagcatggggatcccagcaca

SEQ ID NO: 171435 - DNA, 25 bp, probe
cttcctgacggagcgcaacatttct

SEQ ID NO: 171436 - DNA, 25 bp, probe
cttcctgaccgaggatcaaatcctt

SEQ ID NO: 171437 - DNA, 25 bp, probe
cattcatcagactcagtacaaacca

SEQ ID NO: 171438 - DNA, 25 bp, probe
catcaacagcaagcagctcacctac

SEQ ID NO: 171439 - DNA, 25 bp, probe
catcaaagcagacatcgtccatgcc

SEQ ID NO: 171440 - DNA, 25 bp, probe
catcaaggctgacatcgtgcacgcc

SEQ ID NO: 171441 - DNA, 25 bp, probe
catatcaggatgacctcgagagctg

SEQ ID NO: 171442 - DNA, 25 bp, probe
cattatgtatctggcatcatgacgg

SEQ ID NO: 171443 - DNA, 25 bp, probe
catatcacaaacgactacggtctgg

SEQ ID NO: 171444 - DNA, 25 bp, probe
cattcacaaaaactcaaggactgct

SEQ ID NO: 171445 - DNA, 25 bp, probe
cattaaaaataattcggacgcgtgg

SEQ ID NO: 171446 - DNA, 25 bp, probe
cattaaaaatagtcagggccgccgg

SEQ ID NO: 171447 - DNA, 25 bp, probe
cattaaatacatgccagaagaaatc

SEQ ID NO: 171448 - DNA, 25 bp, probe
cattgaaaccactaagaagaagctg

SEQ ID NO: 171449 - DNA, 25 bp, probe
cattctggaccccaagatagacgct

SEQ ID NO: 171450 - DNA, 25 bp, probe
cattctggccgagagtagggcagct

SEQ ID NO: 171451 - DNA, 25 bp, probe
catatcaggccatggactcaggacc

SEQ ID NO: 171452 - DNA, 25 bp, probe
catatctgacaatccactcgtactc

SEQ ID NO: 171453 - DNA, 25 bp, probe
catactgtgatgaccgactcagcca

SEQ ID NO: 171454 - DNA, 25 bp, probe
catcacttgtgctgtgcaccaggca

SEQ ID NO: 171455 - DNA, 25 bp, probe
catcacttgtgctgtgcaccaggca

SEQ ID NO: 171456 - DNA, 25 bp, probe
catcactatgtgccccacagagaac

SEQ ID NO: 171457 - DNA, 25 bp, probe
catcacatcagtgcccagagggagt

SEQ ID NO: 171458 - DNA, 25 bp, probe
catcactcgaactggcagtggagat

SEQ ID NO: 171459 - DNA, 25 bp, probe
catcaacgccaacgtgcaggtggcc

SEQ ID NO: 171460 - DNA, 25 bp, probe
catcaacgccaacgtgcaggtggcc

SEQ ID NO: 171461 - DNA, 25 bp, probe
catatggcccagtgtcaagttgtgc

SEQ ID NO: 171462 - DNA, 25 bp, probe
ctagtggcaagtctgcaacctggca

SEQ ID NO: 171463 - DNA, 25 bp, probe
catatgctgtcatgattgtgctaca

SEQ ID NO: 171464 - DNA, 25 bp, probe
catacgctcattttatgtaatattc

SEQ ID NO: 171465 - DNA, 25 bp, probe
catactccttgaaatgtgactcttc

SEQ ID NO: 171466 - DNA, 25 bp, probe
catactccatctaaagtcatttttc

SEQ ID NO: 171467 - DNA, 25 bp, probe
catactcctcggagtcttcatgctt

SEQ ID NO: 171468 - DNA, 25 bp, probe
catactcctcggagtcttcatgctt

SEQ ID NO: 171469 - DNA, 25 bp, probe
cattccctagtgagcctactggctc

SEQ ID NO: 171470 - DNA, 25 bp, probe
cattccgtgattaagctttgtgact

SEQ ID NO: 171471 - DNA, 25 bp, probe
catagtccgattgcgttatttcttc

SEQ ID NO: 171472 - DNA, 25 bp, probe
catattccttctgcctatatttagt

SEQ ID NO: 171473 - DNA, 25 bp, probe
catttccctctttcttataatactc

SEQ ID NO: 171474 - DNA, 25 bp, probe
catttggccatcatttgttataata

SEQ ID NO: 171475 - DNA, 25 bp, probe
catcacagatgcaacttcttgtaat

SEQ ID NO: 171476 - DNA, 25 bp, probe
catcacagatgcaacttcttgtaat

SEQ ID NO: 171477 - DNA, 25 bp, probe
catatatgtgcatcctctgtgctat

SEQ ID NO: 171478 - DNA, 25 bp, probe
catttgctgacacatcagttatatc

SEQ ID NO: 171479 - DNA, 25 bp, probe
cattatctgaccaatagtacacaca

SEQ ID NO: 171480 - DNA, 25 bp, probe
catatcttggtcactctgaagcaca

SEQ ID NO: 171481 - DNA, 25 bp, probe
catatgctttgttccttaccacatt

SEQ ID NO: 171482 - DNA, 25 bp, probe
catattttgtattctggaccactta

SEQ ID NO: 171483 - DNA, 25 bp, probe
catattttgtattctggaccactta

SEQ ID NO: 171484 - DNA, 25 bp, probe
catacacttagctgctgtgagccac

SEQ ID NO: 171485 - DNA, 25 bp, probe
cataactctagctgtatcatcctct

SEQ ID NO: 171486 - DNA, 25 bp, probe
catagacacgatggtcgacagcctc

SEQ ID NO: 171487 - DNA, 25 bp, probe
cattagacagatgacggctgctcga

SEQ ID NO: 171488 - DNA, 25 bp, probe
catagagctagaccagctgctgtgg

SEQ ID NO: 171489 - DNA, 25 bp, probe
catagagtacatcgatgccgtgaag

SEQ ID NO: 171490 - DNA, 25 bp, probe
catagagtacatcgatgccgtgaag

SEQ ID NO: 171491 - DNA, 25 bp, probe
cataaaccacgagagtgacagtcat

SEQ ID NO: 171492 - DNA, 25 bp, probe
catcaagtcccgaggaaagtctcag

SEQ ID NO: 171493 - DNA, 25 bp, probe
catacagacccgaagtgaggagtcc

SEQ ID NO: 171494 - DNA, 25 bp, probe
catactacccgcatgtcagtgttgt

SEQ ID NO: 171495 - DNA, 25 bp, probe
cattctaatgcatgtattcgggtta

SEQ ID NO: 171496 - DNA, 25 bp, probe
catactatctgcttggatttggaga

SEQ ID NO: 171497 - DNA, 25 bp, probe
cataccatcgcagacttctggcaga

SEQ ID NO: 171498 - DNA, 25 bp, probe
cataactccagacatcactggcaga

SEQ ID NO: 171499 - DNA, 25 bp, probe
cataactccagacatcactggcaga

SEQ ID NO: 171500 - DNA, 25 bp, probe
catacgctccaactgatccagatgc

SEQ ID NO: 171501 - DNA, 25 bp, probe
cataaccagcaagctctcagatgcc

SEQ ID NO: 171502 - DNA, 25 bp, probe
catacaccagcatctttctgtacct

SEQ ID NO: 171503 - DNA, 25 bp, probe
cataggcatagatctttgtaacctt

SEQ ID NO: 171504 - DNA, 25 bp, probe
catagagcaattcctttgctttccc

SEQ ID NO: 171505 - DNA, 25 bp, probe
cataagcctttggtatctttcctgc

SEQ ID NO: 171506 - DNA, 25 bp, probe
cataagcctttggtatctttcctgc

SEQ ID NO: 171507 - DNA, 25 bp, probe
catatagctcagatggaatgcttta

SEQ ID NO: 171508 - DNA, 25 bp, probe
catactgctcataataacattttag

SEQ ID NO: 171509 - DNA, 25 bp, probe
catacccattgactaactatggaag

SEQ ID NO: 171510 - DNA, 25 bp, probe
catatccaagaaaggactgggaagc

SEQ ID NO: 171511 - DNA, 25 bp, probe
cataccatgagaatgcggcactgac

SEQ ID NO: 171512 - DNA, 25 bp, probe
catagcattgatcattgaactgctg

SEQ ID NO: 171513 - DNA, 25 bp, probe
catacattgaaagtgcctcatctga

SEQ ID NO: 171514 - DNA, 25 bp, probe
cattcatattgacctgcatctcatc

SEQ ID NO: 171515 - DNA, 25 bp, probe
cattcatcattatcgttgtcctgcc

SEQ ID NO: 171516 - DNA, 25 bp, probe
cattcatcattatcgttgtcctgcc

SEQ ID NO: 171517 - DNA, 25 bp, probe
catttggtatttgtgcatcctcggg

SEQ ID NO: 171518 - DNA, 25 bp, probe
cttaaggtgttggaatccctgggca

SEQ ID NO: 171519 - DNA, 25 bp, probe
cttggacgtgattggactcccagga

SEQ ID NO: 171520 - DNA, 25 bp, probe
cttggatgcctgtaaggatcccggg

SEQ ID NO: 171521 - DNA, 25 bp, probe
cttggagctgtgaactggactcccc

SEQ ID NO: 171522 - DNA, 25 bp, probe
cttggtgtgctttttggatgggacc

SEQ ID NO: 171523 - DNA, 25 bp, probe
ctaggttcacggtctgagtaacacc

SEQ ID NO: 171524 - DNA, 25 bp, probe
cataggtgaccgctgtgagaacaag

SEQ ID NO: 171525 - DNA, 25 bp, probe
catagtcaccaccaccaagagaaag

SEQ ID NO: 171526 - DNA, 25 bp, probe
cataccacccacaggtagggaggaa

SEQ ID NO: 171527 - DNA, 25 bp, probe
cataccacccacaggtagggaggaa

SEQ ID NO: 171528 - DNA, 25 bp, probe
catcaagaacccagcggagcgggcg

SEQ ID NO: 171529 - DNA, 25 bp, probe
catataaacactggaggggagggag

SEQ ID NO: 171530 - DNA, 25 bp, probe
catataattcacttgggcagcgagg

SEQ ID NO: 171531 - DNA, 25 bp, probe
catataattcacttgggcagcgagg

SEQ ID NO: 171532 - DNA, 25 bp, probe
catatgaactgctgagaggccggag

SEQ ID NO: 171533 - DNA, 25 bp, probe
catataattgctggctggtgggttg

SEQ ID NO: 171534 - DNA, 25 bp, probe
cttgacatgtggggagtaggttgca

SEQ ID NO: 171535 - DNA, 25 bp, probe
cttggataccatgggaagtatgtga

SEQ ID NO: 171536 - DNA, 25 bp, probe
cttgctgtgtcttgggaacctgtga

SEQ ID NO: 171537 - DNA, 25 bp, probe
cttgttatcttttgtgtcctgtaac

SEQ ID NO: 171538 - DNA, 25 bp, probe
cttgaaacttgaatgtcccttccaa

SEQ ID NO: 171539 - DNA, 25 bp, probe
cttgaacagttgtgtccagattaag

SEQ ID NO: 171540 - DNA, 25 bp, probe
cttgtacaaagtggtgccgatatgt

SEQ ID NO: 171541 - DNA, 25 bp, probe
catttcacacctcaggctcgtggtg

SEQ ID NO: 171542 - DNA, 25 bp, probe
cattctgcaacctctggggatggga

SEQ ID NO: 171543 - DNA, 25 bp, probe
catttgaccatctcgggaagtgagg

SEQ ID NO: 171544 - DNA, 25 bp, probe
cattcttcgatctctgggatttatg

SEQ ID NO: 171545 - DNA, 25 bp, probe
catttgcatctggatggcgggattt

SEQ ID NO: 171546 - DNA, 25 bp, probe
catttgtatccaaggtgctgaatct

SEQ ID NO: 171547 - DNA, 25 bp, probe
catttgtactgaagaccccatctgg

SEQ ID NO: 171548 - DNA, 25 bp, probe
cattcttcctaacaagcaatctggg

SEQ ID NO: 171549 - DNA, 25 bp, probe
catttacatcatcaccgagtacatg

SEQ ID NO: 171550 - DNA, 25 bp, probe
cattattgctgtccaccgaggagtc

SEQ ID NO: 171551 - DNA, 25 bp, probe
cattgttggctgttcctgcagtaga

SEQ ID NO: 171552 - DNA, 25 bp, probe
catttttgccaagccatattgagtt

SEQ ID NO: 171553 - DNA, 25 bp, probe
catattctttattccctaccagatg

SEQ ID NO: 171554 - DNA, 25 bp, probe
catatttttgcaactctttctcgat

SEQ ID NO: 171555 - DNA, 25 bp, probe
cattcatggaccactgtttcttgct

SEQ ID NO: 171556 - DNA, 25 bp, probe
cattgcagaaggtgttcctttctca

SEQ ID NO: 171557 - DNA, 25 bp, probe
cattgcagaaggtgttcctttctca

SEQ ID NO: 171558 - DNA, 25 bp, probe
cattttggagggatccattttgatc

SEQ ID NO: 171559 - DNA, 25 bp, probe
catttgtgcaacttttctctttttc

SEQ ID NO: 171560 - DNA, 25 bp, probe
catttctgcaagcgttgcctggatg

SEQ ID NO: 171561 - DNA, 25 bp, probe
catttgtatgtgtgtagactgtaac

SEQ ID NO: 171562 - DNA, 25 bp, probe
catattgtgtcagagtgggattaac

SEQ ID NO: 171563 - DNA, 25 bp, probe
cattctcgactttggggattagttt

SEQ ID NO: 171564 - DNA, 25 bp, probe
cattctcgaaattggaggactcctt

SEQ ID NO: 171565 - DNA, 25 bp, probe
catactccaatatgcttggcacttt

SEQ ID NO: 171566 - DNA, 25 bp, probe
catatcctcagaccaggtggaatta

SEQ ID NO: 171567 - DNA, 25 bp, probe
catatcctacgaggatgtgaagctg

SEQ ID NO: 171568 - DNA, 25 bp, probe
catatgcatctgtgtgtgtagaggg

SEQ ID NO: 171569 - DNA, 25 bp, probe
catagcacttcggtgccgagagccg

SEQ ID NO: 171570 - DNA, 25 bp, probe
catacctctgagttcctgatggcat

SEQ ID NO: 171571 - DNA, 25 bp, probe
catatcccgaaacctcatgcagagg

SEQ ID NO: 171572 - DNA, 25 bp, probe
catacccaagtccttcatgatcagc

SEQ ID NO: 171573 - DNA, 25 bp, probe
catacccaagtccttcatgatcagc

SEQ ID NO: 171574 - DNA, 25 bp, probe
catactctaagatctccaagcgctg

SEQ ID NO: 171575 - DNA, 25 bp, probe
catacgcatgactacattacaacgg

SEQ ID NO: 171576 - DNA, 25 bp, probe
cattcgagatgctctctcaacctta

SEQ ID NO: 171577 - DNA, 25 bp, probe
cattcgagatgctctctcaacctta

SEQ ID NO: 171578 - DNA, 25 bp, probe
cattcacctgctgtccaaagatggc

SEQ ID NO: 171579 - DNA, 25 bp, probe
cattcctgcctggtccagtggggaa

SEQ ID NO: 171580 - DNA, 25 bp, probe
catattcatcttgatcctagggaag

SEQ ID NO: 171581 - DNA, 25 bp, probe
catattcatttgtatccaaggtgct

SEQ ID NO: 171582 - DNA, 25 bp, probe
catattcatttgtatccaaggtgct

SEQ ID NO: 171583 - DNA, 25 bp, probe
catttcaatgagtttgcaggcgtga

SEQ ID NO: 171584 - DNA, 25 bp, probe
catatagctaggttgtggcagagta

SEQ ID NO: 171585 - DNA, 25 bp, probe
ctaggcatagcctgcctcaagctat

SEQ ID NO: 171586 - DNA, 25 bp, probe
cataggaaccgaggatcacctgggg

SEQ ID NO: 171587 - DNA, 25 bp, probe
catagggagatccaaagtcctgtgg

SEQ ID NO: 171588 - DNA, 25 bp, probe
catatgggaaccaacgtcatcgttg

SEQ ID NO: 171589 - DNA, 25 bp, probe
cttggagagacacagcgtccctagc

SEQ ID NO: 171590 - DNA, 25 bp, probe
cttggagagacacagcgtccctagc

SEQ ID NO: 171591 - DNA, 25 bp, probe
cttggagagacacagcgtccctagc

SEQ ID NO: 171592 - DNA, 25 bp, probe
cattggtggcacctaccttttacaa

SEQ ID NO: 171593 - DNA, 25 bp, probe
catatcggctcgcaaatctttgata

SEQ ID NO: 171594 - DNA, 25 bp, probe
catttgcctcagccacagaatttgt

SEQ ID NO: 171595 - DNA, 25 bp, probe
catttgtcacccaagaactcttacc

SEQ ID NO: 171596 - DNA, 25 bp, probe
catattctgcatgcctataacactg

SEQ ID NO: 171597 - DNA, 25 bp, probe
catttgtcatcctctgacatacatg

SEQ ID NO: 171598 - DNA, 25 bp, probe
catttactgcctgcgcaatcaagag

SEQ ID NO: 171599 - DNA, 25 bp, probe
catatctacaccacgcaaagtgatg

SEQ ID NO: 171600 - DNA, 25 bp, probe
catagtgaactgcttgaaactctgc

SEQ ID NO: 171601 - DNA, 25 bp, probe
cataaacactgccatcatctaacca

SEQ ID NO: 171602 - DNA, 25 bp, probe
catagcacagcactgctaaatactg

SEQ ID NO: 171603 - DNA, 25 bp, probe
catacatcatgaccgtcactgactt

SEQ ID NO: 171604 - DNA, 25 bp, probe
catacatcataagctccagccttga

SEQ ID NO: 171605 - DNA, 25 bp, probe
catatgctgaaacatccacacattg

SEQ ID NO: 171606 - DNA, 25 bp, probe
cattcatgggagatccagctcctcc

SEQ ID NO: 171607 - DNA, 25 bp, probe
cattcataagatgtctgctgcccac

SEQ ID NO: 171608 - DNA, 25 bp, probe
catatcagatgacttatttggccca

SEQ ID NO: 171609 - DNA, 25 bp, probe
catatcagatgacttatttggccca

SEQ ID NO: 171610 - DNA, 25 bp, probe
catatacaggtcacttggccaaggc

SEQ ID NO: 171611 - DNA, 25 bp, probe
catttgcaggacacttttacaggcc

SEQ ID NO: 171612 - DNA, 25 bp, probe
ctttcaggaagtcttccagcaaccc

SEQ ID NO: 171613 - DNA, 25 bp, probe
cttgtcagggtctcttcggagaccc

SEQ ID NO: 171614 - DNA, 25 bp, probe
cttgctctggttttcgtccaggacg

SEQ ID NO: 171615 - DNA, 25 bp, probe
cttgctctggttttcgtccaggacg

SEQ ID NO: 171616 - DNA, 25 bp, probe
cattgcagcggcatttggtcgggca

SEQ ID NO: 171617 - DNA, 25 bp, probe
cattgacaggtaagggccggaccgc

SEQ ID NO: 171618 - DNA, 25 bp, probe
cattcacaggtaaccgcgggggtgg

SEQ ID NO: 171619 - DNA, 25 bp, probe
cattcaaggttgtgcttgtgaaggg

SEQ ID NO: 171620 - DNA, 25 bp, probe
catatcaacagtggccaggttaagg

SEQ ID NO: 171621 - DNA, 25 bp, probe
catatctgacttctaggatttattg

SEQ ID NO: 171622 - DNA, 25 bp, probe
catatctgacttctaggatttattg

SEQ ID NO: 171623 - DNA, 25 bp, probe
cataccctgttttcgacttaagatt

SEQ ID NO: 171624 - DNA, 25 bp, probe
catacttctgtttttgcttcaaaat

SEQ ID NO: 171625 - DNA, 25 bp, probe
cttggccaggtatttcttcaaatga

SEQ ID NO: 171626 - DNA, 25 bp, probe
cttggccaggtatttcttcaaatga

SEQ ID NO: 171627 - DNA, 25 bp, probe
catatcctagggtttctaccaatct

SEQ ID NO: 171628 - DNA, 25 bp, probe
cattactaaaagaaccaccagatct

SEQ ID NO: 171629 - DNA, 25 bp, probe
cattactgcagagaaacacggaaac

SEQ ID NO: 171630 - DNA, 25 bp, probe
catattgctgaagacatacactaag

SEQ ID NO: 171631 - DNA, 25 bp, probe
catattgctgaagacatacactaag

SEQ ID NO: 171632 - DNA, 25 bp, probe
catattgctatagtacttctgtaaa

SEQ ID NO: 171633 - DNA, 25 bp, probe
catttgcctacttttctttcataat

SEQ ID NO: 171634 - DNA, 25 bp, probe
catttggatgttttcctattcatca

SEQ ID NO: 171635 - DNA, 25 bp, probe
catttggatgttttcctattcatca

SEQ ID NO: 171636 - DNA, 25 bp, probe
catttggagctttctacatcccact

SEQ ID NO: 171637 - DNA, 25 bp, probe
catttaagagaattccaccacactg

SEQ ID NO: 171638 - DNA, 25 bp, probe
catttgaaaaacttcactgcccaga

SEQ ID NO: 171639 - DNA, 25 bp, probe
cttgtgaagtcagcacctatgccaa

SEQ ID NO: 171640 - DNA, 25 bp, probe
cattataatgaagaggctgtccaga

SEQ ID NO: 171641 - DNA, 25 bp, probe
ctgttacattgtgcaggggtaatta

SEQ ID NO: 171642 - DNA, 25 bp, probe
catttacatcgtcacggagtacatg

SEQ ID NO: 171643 - DNA, 25 bp, probe
catttgacattgatccgatggtggt

SEQ ID NO: 171644 - DNA, 25 bp, probe
catttgggagatggctcgtcgttgt

SEQ ID NO: 171645 - DNA, 25 bp, probe
catttgctgtggagatcgtcctggc

SEQ ID NO: 171646 - DNA, 25 bp, probe
catttgctgtggagatcgtcctggc

SEQ ID NO: 171647 - DNA, 25 bp, probe
catttgtttggaatcgtgccactgc

SEQ ID NO: 171648 - DNA, 25 bp, probe
catttgatattgttgggagctccga

SEQ ID NO: 171649 - DNA, 25 bp, probe
cattttgtgggtggagggccagagt

SEQ ID NO: 171650 - DNA, 25 bp, probe
cattatttgggtaggtgacctgctt

SEQ ID NO: 171651 - DNA, 25 bp, probe
cattgattttggttctggtgccctg

SEQ ID NO: 171652 - DNA, 25 bp, probe
cattgattttggttctggtgccctg

SEQ ID NO: 171653 - DNA, 25 bp, probe
catttttctggggggatgtccattt

SEQ ID NO: 171654 - DNA, 25 bp, probe
cttttcccgggcaagaacgatattg

SEQ ID NO: 171655 - DNA, 25 bp, probe
cttttcccgggcaagaacgatattg

SEQ ID NO: 171656 - DNA, 25 bp, probe
cttttcccgggcaagaacgatattg

SEQ ID NO: 171657 - DNA, 25 bp, probe
gttggctcccgtgtaaaagatcgaa

SEQ ID NO: 171658 - DNA, 25 bp, probe
gttggctcccgtgtaaaagatcgaa

SEQ ID NO: 171659 - DNA, 25 bp, probe
ctttccaacgctgtaaaaaggacag

SEQ ID NO: 171660 - DNA, 25 bp, probe
cttccccactgtgttcgtgaaggaa

SEQ ID NO: 171661 - DNA, 25 bp, probe
cttgaggacctggcttttggcaatt

SEQ ID NO: 171662 - DNA, 25 bp, probe
cttgggacgccagaggggcagtggg

SEQ ID NO: 171663 - DNA, 25 bp, probe
cttgggacgccagaggggcagtggg

SEQ ID NO: 171664 - DNA, 25 bp, probe
cttggacaggcctcaggagtggtca

SEQ ID NO: 171665 - DNA, 25 bp, probe
cttggaccccatacaacatcatggt

SEQ ID NO: 171666 - DNA, 25 bp, probe
cttgtcttcccttctgattgatggt

SEQ ID NO: 171667 - DNA, 25 bp, probe
ctttctccccaacataattatttca

SEQ ID NO: 171668 - DNA, 25 bp, probe
cttttttaacagtgcaatcctttct

SEQ ID NO: 171669 - DNA, 25 bp, probe
cattttgtttgacaccaaggttctt

SEQ ID NO: 171670 - DNA, 25 bp, probe
ctttgaggtcctcaccaaagtccta

SEQ ID NO: 171671 - DNA, 25 bp, probe
ctttgaggtcctcaccaaagtccta

SEQ ID NO: 171672 - DNA, 25 bp, probe
cattggaagtcccctgaaaggtcct

SEQ ID NO: 171673 - DNA, 25 bp, probe
cattgtggttccactggaagtctcc

SEQ ID NO: 171674 - DNA, 25 bp, probe
catatgcttgacagctttgaaactg

SEQ ID NO: 171675 - DNA, 25 bp, probe
catatcctggcggttgaaaagtttt

SEQ ID NO: 171676 - DNA, 25 bp, probe
cattacttctggttacaacagtgaa

SEQ ID NO: 171677 - DNA, 25 bp, probe
cttgaattctggctaccacttctgc

SEQ ID NO: 171678 - DNA, 25 bp, probe
cttgattttatgattccttgcctta

SEQ ID NO: 171679 - DNA, 25 bp, probe
cttgattgttttaaccattaacttg

SEQ ID NO: 171680 - DNA, 25 bp, probe
catattttatttaatccccaccctg

SEQ ID NO: 171681 - DNA, 25 bp, probe
catttttatgttagctgtcccacta

SEQ ID NO: 171682 - DNA, 25 bp, probe
cattttttataaccgctacactaca

SEQ ID NO: 171683 - DNA, 25 bp, probe
cttgtttgaccgagtctacactcac

SEQ ID NO: 171684 - DNA, 25 bp, probe
cttgtttgacgacgaaaacacagcc

SEQ ID NO: 171685 - DNA, 25 bp, probe
cttgatgtaacctggaaactatgct

SEQ ID NO: 171686 - DNA, 25 bp, probe
cattaattatggggtggaagctctc

SEQ ID NO: 171687 - DNA, 25 bp, probe
catttattgtggttgaggaagctgg

SEQ ID NO: 171688 - DNA, 25 bp, probe
cattcattttgtttgacaccaaggt

SEQ ID NO: 171689 - DNA, 25 bp, probe
cattcattttgtttgacaccaaggt

SEQ ID NO: 171690 - DNA, 25 bp, probe
catatatttatgcattacacacctt

SEQ ID NO: 171691 - DNA, 25 bp, probe
cattttgttgtgctatgagcctctg

SEQ ID NO: 171692 - DNA, 25 bp, probe
catattcttttacatggcttcttta

SEQ ID NO: 171693 - DNA, 25 bp, probe
catattcttttacatggcttcttta

SEQ ID NO: 171694 - DNA, 25 bp, probe
cattttactctcaaaggtctcctta

SEQ ID NO: 171695 - DNA, 25 bp, probe
cattttctaccctaatttcactgga

SEQ ID NO: 171696 - DNA, 25 bp, probe
cattttcctacctatattacacaaa

SEQ ID NO: 171697 - DNA, 25 bp, probe
cttgttttaccctatacatccacag

SEQ ID NO: 171698 - DNA, 25 bp, probe
cattatttgaccggatctacaccca

SEQ ID NO: 171699 - DNA, 25 bp, probe
catttttcaccctacatgaatccaa

SEQ ID NO: 171700 - DNA, 25 bp, probe
catttttcaccctacatgaatccaa

SEQ ID NO: 171701 - DNA, 25 bp, probe
cttggtctcagtgtcaatgcagccc

SEQ ID NO: 171702 - DNA, 25 bp, probe
cttgggctgcaggactttgacctaa

SEQ ID NO: 171703 - DNA, 25 bp, probe
cttgggtatctcaattcccttataa

SEQ ID NO: 171704 - DNA, 25 bp, probe
ctaggtttcaagaggccttataaat

SEQ ID NO: 171705 - DNA, 25 bp, probe
cttgtttataacagtgccttaaggt

SEQ ID NO: 171706 - DNA, 25 bp, probe
cttgtttttagaagtccttcccatg

SEQ ID NO: 171707 - DNA, 25 bp, probe
cttgtttttagaagtccttcccatg

SEQ ID NO: 171708 - DNA, 25 bp, probe
catttttcttatgagttttctaatc

SEQ ID NO: 171709 - DNA, 25 bp, probe
catttcatttaagagatcatttcat

SEQ ID NO: 171710 - DNA, 25 bp, probe
catttcattgtggccctgaaggttc

SEQ ID NO: 171711 - DNA, 25 bp, probe
cattgcctgtgtggcacaatggaga

SEQ ID NO: 171712 - DNA, 25 bp, probe
catatgcctgagaacctttgcatga

SEQ ID NO: 171713 - DNA, 25 bp, probe
cattgtcatgatcaccaacatcgag

SEQ ID NO: 171714 - DNA, 25 bp, probe
cattctcatcagtcgcaatgattca

SEQ ID NO: 171715 - DNA, 25 bp, probe
catatctctcacctcaggaactgga

SEQ ID NO: 171716 - DNA, 25 bp, probe
catagcttccatgagaacagcaggg

SEQ ID NO: 171717 - DNA, 25 bp, probe
catatccatctagaacaccaccaga

SEQ ID NO: 171718 - DNA, 25 bp, probe
cataggctattatatattctcgcag

SEQ ID NO: 171719 - DNA, 25 bp, probe
cattacttgtgatgagctactcctg

SEQ ID NO: 171720 - DNA, 25 bp, probe
catttcttgagcacctactgtctgc

SEQ ID NO: 171721 - DNA, 25 bp, probe
catttcttgagcacctactgtctgc

SEQ ID NO: 171722 - DNA, 25 bp, probe
catttatcgagtgcctctgtttgcc

SEQ ID NO: 171723 - DNA, 25 bp, probe
cattttctagctgcctttattcaca

SEQ ID NO: 171724 - DNA, 25 bp, probe
cattttccatgaacgcctctagtag

SEQ ID NO: 171725 - DNA, 25 bp, probe
catttcccataacatcccagatact

SEQ ID NO: 171726 - DNA, 25 bp, probe
ctttgcccataatatcaactttccc

SEQ ID NO: 171727 - DNA, 25 bp, probe
cttgtgtccttataaactcttactc

SEQ ID NO: 171728 - DNA, 25 bp, probe
cttggtacttatggcagaatctatt

SEQ ID NO: 171729 - DNA, 25 bp, probe
cttggtacttatggcagaatctatt

SEQ ID NO: 171730 - DNA, 25 bp, probe
cataggccatataactcaattctat

SEQ ID NO: 171731 - DNA, 25 bp, probe
catatgcgctcaataaacgtgtttc

SEQ ID NO: 171732 - DNA, 25 bp, probe
catatggccatcttgacagtgtttt

SEQ ID NO: 171733 - DNA, 25 bp, probe
catatggcagcaggttggtgattca

SEQ ID NO: 171734 - DNA, 25 bp, probe
catagaactcagatgctgttacaga

SEQ ID NO: 171735 - DNA, 25 bp, probe
cataggacacgcttctgtctgtaga

SEQ ID NO: 171736 - DNA, 25 bp, probe
cataggcaccttttactgtgatgtt

SEQ ID NO: 171737 - DNA, 25 bp, probe
cttggcagtttctaacttgtgtttc

SEQ ID NO: 171738 - DNA, 25 bp, probe
cttggcttcagtgaccttttttgcc

SEQ ID NO: 171739 - DNA, 25 bp, probe
cttggtgacagtggaatctttgtct

SEQ ID NO: 171740 - DNA, 25 bp, probe
catatgggtcaggtcattttttttt

SEQ ID NO: 171741 - DNA, 25 bp, probe
catatgggtcaggtcattttttttt

SEQ ID NO: 171742 - DNA, 25 bp, probe
cattctgttcaggatacttttgttt

SEQ ID NO: 171743 - DNA, 25 bp, probe
catttgtatctggatctctgttatg

SEQ ID NO: 171744 - DNA, 25 bp, probe
cattatgtatctactgcttgatgta

SEQ ID NO: 171745 - DNA, 25 bp, probe
cattatgtatctactgcttgatgta

SEQ ID NO: 171746 - DNA, 25 bp, probe
cttggatattacttatgtctaattt

SEQ ID NO: 171747 - DNA, 25 bp, probe
cattccacttacaattcctaatctt

SEQ ID NO: 171748 - DNA, 25 bp, probe
catatccagattgctgatctcttaa

SEQ ID NO: 171749 - DNA, 25 bp, probe
catatcgatgctgctctttctgagg

SEQ ID NO: 171750 - DNA, 25 bp, probe
catagagatcgattcttgtatattg

SEQ ID NO: 171751 - DNA, 25 bp, probe
catagagtgtgaatttctatttggg

SEQ ID NO: 171752 - DNA, 25 bp, probe
catattggtattcactaatctggga

SEQ ID NO: 171753 - DNA, 25 bp, probe
catatgcagttattccactaaatga

SEQ ID NO: 171754 - DNA, 25 bp, probe
catatgatgatttccatactattga

SEQ ID NO: 171755 - DNA, 25 bp, probe
catatgttgctccagaacttctgaa

SEQ ID NO: 171756 - DNA, 25 bp, probe
catttcagccgactactggtcactg

SEQ ID NO: 171757 - DNA, 25 bp, probe
catttccaggtcatgtggctgcctt

SEQ ID NO: 171758 - DNA, 25 bp, probe
cattgccaagctcagcattcggcct

SEQ ID NO: 171759 - DNA, 25 bp, probe
cattgccaagctcagcattcggcct

SEQ ID NO: 171760 - DNA, 25 bp, probe
cattgccaacagctgcatgaacccc

SEQ ID NO: 171761 - DNA, 25 bp, probe
catttatagcacctcagacattccc

SEQ ID NO: 171762 - DNA, 25 bp, probe
cattataagcgcctggccaggtcca

SEQ ID NO: 171763 - DNA, 25 bp, probe
catttaattggcagcacaagatcct

SEQ ID NO: 171764 - DNA, 25 bp, probe
catttactacctggccaggctgttg

SEQ ID NO: 171765 - DNA, 25 bp, probe
catttactacctggccaggctgttg

SEQ ID NO: 171766 - DNA, 25 bp, probe
cattttgttcttgccagacgtgtcc

SEQ ID NO: 171767 - DNA, 25 bp, probe
catttttatattgccatgtttattt

SEQ ID NO: 171768 - DNA, 25 bp, probe
catattttagttgattgctttttta

SEQ ID NO: 171769 - DNA, 25 bp, probe
catattttagttgattgctttttta

SEQ ID NO: 171770 - DNA, 25 bp, probe
catttcttactgccgattgcttatt

SEQ ID NO: 171771 - DNA, 25 bp, probe
cattccatttctggaagtgactttg

SEQ ID NO: 171772 - DNA, 25 bp, probe
cattttgtgactgaagagacttgtt

SEQ ID NO: 171773 - DNA, 25 bp, probe
catttatgagacagctcatggaggg

SEQ ID NO: 171774 - DNA, 25 bp, probe
catttgagagctcaccttgcagcag

SEQ ID NO: 171775 - DNA, 25 bp, probe
cattctgctagcactccaagcagca

SEQ ID NO: 171776 - DNA, 25 bp, probe
catattcttgcagcccatcagatca

SEQ ID NO: 171777 - DNA, 25 bp, probe
cattctgcttggttccacaatcatc

SEQ ID NO: 171778 - DNA, 25 bp, probe
cattgtcagtgggtccacgtttctc

SEQ ID NO: 171779 - DNA, 25 bp, probe
cattgacattgtctccattttgcct

SEQ ID NO: 171780 - DNA, 25 bp, probe
cattgcgtcgcgcattgcttttgac

SEQ ID NO: 171781 - DNA, 25 bp, probe
cattttctggcttgtcattctgtac

SEQ ID NO: 171782 - DNA, 25 bp, probe
cattcttgccgtattctcatgatcc

SEQ ID NO: 171783 - DNA, 25 bp, probe
cattcttgccgtattctcatgatcc

SEQ ID NO: 171784 - DNA, 25 bp, probe
catatttgggcagttcccagtcctg

SEQ ID NO: 171785 - DNA, 25 bp, probe
cattgaggggcacaccaagtctggg

SEQ ID NO: 171786 - DNA, 25 bp, probe
cttgcacgggcttcggcaaggctag

SEQ ID NO: 171787 - DNA, 25 bp, probe
cttcctggtaactcaaggctaccaa

SEQ ID NO: 171788 - DNA, 25 bp, probe
gattcgtagttagtttagcctacgc

SEQ ID NO: 171789 - DNA, 25 bp, probe
cttctgggttaggccttgcctaggc

SEQ ID NO: 171790 - DNA, 25 bp, probe
cattctggggaagactattccagag

SEQ ID NO: 171791 - DNA, 25 bp, probe
cattttgggaatgactttaagtgta

SEQ ID NO: 171792 - DNA, 25 bp, probe
cattttgggaatgactttaagtgta

SEQ ID NO: 171793 - DNA, 25 bp, probe
cattttcgaggctccttataaggac

SEQ ID NO: 171794 - DNA, 25 bp, probe
cttgttcaatcctcactttaaggag

SEQ ID NO: 171795 - DNA, 25 bp, probe
cttgttcaatcctcactttaaggag

SEQ ID NO: 171796 - DNA, 25 bp, probe
cttggtcaatcttgactagattaag

SEQ ID NO: 171797 - DNA, 25 bp, probe
cttggaaatttattagccattggca

SEQ ID NO: 171798 - DNA, 25 bp, probe
cttggttgcttttaagttatggcaa

SEQ ID NO: 171799 - DNA, 25 bp, probe
cattcagttcttgtgtcgtttgtga

SEQ ID NO: 171800 - DNA, 25 bp, probe
cattcgttttcagttgtttgtggac

SEQ ID NO: 171801 - DNA, 25 bp, probe
cattctctcggtatagttttgtcac

SEQ ID NO: 171802 - DNA, 25 bp, probe
cattgctttcgtgtaaattatgtaa

SEQ ID NO: 171803 - DNA, 25 bp, probe
cttgctttttccagagttatttata

SEQ ID NO: 171804 - DNA, 25 bp, probe
cttgtttttcacagttatacactga

SEQ ID NO: 171805 - DNA, 25 bp, probe
ccgggtttccatcatgtcaaggtca

SEQ ID NO: 171806 - DNA, 25 bp, probe
cttggggttggacatctctagtgta

SEQ ID NO: 171807 - DNA, 25 bp, probe
cttggtggcgttcccacttgattta

SEQ ID NO: 171808 - DNA, 25 bp, probe
cattgggggaatccccttgctggct

SEQ ID NO: 171809 - DNA, 25 bp, probe
cttggaactaggctcttatgtgtgc

SEQ ID NO: 171810 - DNA, 25 bp, probe
cgggatcaaagtctgttctggcggc

SEQ ID NO: 171811 - DNA, 25 bp, probe
cgtggacgtagtcctctttaaggat

SEQ ID NO: 171812 - DNA, 25 bp, probe
cttggggcttgacttttgtataggt

SEQ ID NO: 171813 - DNA, 25 bp, probe
catatagggcttcctttggtatcaa

SEQ ID NO: 171814 - DNA, 25 bp, probe
cattgagtggttcatgtgtggagac

SEQ ID NO: 171815 - DNA, 25 bp, probe
cattgagtggttcatgtgtggagac

SEQ ID NO: 171816 - DNA, 25 bp, probe
cattggtggttttaggtgtgcatcg

SEQ ID NO: 171817 - DNA, 25 bp, probe
cttggtgggtaaggcctgatcatag

SEQ ID NO: 171818 - DNA, 25 bp, probe
cattggagcagtgtgtccctgatcg

SEQ ID NO: 171819 - DNA, 25 bp, probe
cattaaagatgtgcaacctatgcgc

SEQ ID NO: 171820 - DNA, 25 bp, probe
catttcagaaatcaagcctgtcaca

SEQ ID NO: 171821 - DNA, 25 bp, probe
cattctcaaaatcagacctggtcaa

SEQ ID NO: 171822 - DNA, 25 bp, probe
cattccatggcaccaaacgctggtc

SEQ ID NO: 171823 - DNA, 25 bp, probe
catttcagcagctcaaacaggtggt

SEQ ID NO: 171824 - DNA, 25 bp, probe
catttgcagaattaacccgtgagtt

SEQ ID NO: 171825 - DNA, 25 bp, probe
cattctgctatttacagctcccatc

SEQ ID NO: 171826 - DNA, 25 bp, probe
cattcacatttattattcatgtccc

SEQ ID NO: 171827 - DNA, 25 bp, probe
cattaagtgtaacttctgccgccag

SEQ ID NO: 171828 - DNA, 25 bp, probe
cattaggaaaatcttctctgcagag

SEQ ID NO: 171829 - DNA, 25 bp, probe
cattagctaaaaccttccatgtcaa

SEQ ID NO: 171830 - DNA, 25 bp, probe
cttgcacttaaactcattccatatg

SEQ ID NO: 171831 - DNA, 25 bp, probe
cattcacgatactgtgcaatcatca

SEQ ID NO: 171832 - DNA, 25 bp, probe
cattccgcttcaaggcagagcaaat

SEQ ID NO: 171833 - DNA, 25 bp, probe
catttggcaccatgctgggctacat

SEQ ID NO: 171834 - DNA, 25 bp, probe
cattaggaccacttgttgtacatct

SEQ ID NO: 171835 - DNA, 25 bp, probe
cattaaagtgcatagatttctatct

SEQ ID NO: 171836 - DNA, 25 bp, probe
cattctgaaggcaaaacccctctct

SEQ ID NO: 171837 - DNA, 25 bp, probe
cttctgcaaggcagtaattcccctt

SEQ ID NO: 171838 - DNA, 25 bp, probe
cattctagagtcagtgaagcacccc

SEQ ID NO: 171839 - DNA, 25 bp, probe
cattcatacattaatgaataagctc

SEQ ID NO: 171840 - DNA, 25 bp, probe
catttaacatataagctgaactcta

SEQ ID NO: 171841 - DNA, 25 bp, probe
cttgtccagacgaagtgacgttgag

SEQ ID NO: 171842 - DNA, 25 bp, probe
cattgctctgagtcagaagctggag

SEQ ID NO: 171843 - DNA, 25 bp, probe
catatcctgagatagctctgcagat

SEQ ID NO: 171844 - DNA, 25 bp, probe
catatcctgagatagctctgcagat

SEQ ID NO: 171845 - DNA, 25 bp, probe
catttcggataactccagcagctcc

SEQ ID NO: 171846 - DNA, 25 bp, probe
cattgggtgaacacacaggctggct

SEQ ID NO: 171847 - DNA, 25 bp, probe
catttggtagacaacagggtttaat

SEQ ID NO: 171848 - DNA, 25 bp, probe
cattctggtaccacaggcagtttga

SEQ ID NO: 171849 - DNA, 25 bp, probe
catttgaataccataccttgctgga

SEQ ID NO: 171850 - DNA, 25 bp, probe
cattataaccctacagaggtggtga

SEQ ID NO: 171851 - DNA, 25 bp, probe
catttaacccataacatgagttgca

SEQ ID NO: 171852 - DNA, 25 bp, probe
catttgaaccattaacatgcatctt

SEQ ID NO: 171853 - DNA, 25 bp, probe
catttccaacaggatcacagacctg

SEQ ID NO: 171854 - DNA, 25 bp, probe
catttgccaacaggtagcatagctc

SEQ ID NO: 171855 - DNA, 25 bp, probe
catttgtcaactggaagtgctgctt

SEQ ID NO: 171856 - DNA, 25 bp, probe
cattcatggcagattgtttgtgctt

SEQ ID NO: 171857 - DNA, 25 bp, probe
catttgacatgtttaacttcctggc

SEQ ID NO: 171858 - DNA, 25 bp, probe
cattctgcagagattcccaacctgg

SEQ ID NO: 171859 - DNA, 25 bp, probe
cattctgagcagcgtcaacaaacgg

SEQ ID NO: 171860 - DNA, 25 bp, probe
cattcggcgctttaacaaggagggt

SEQ ID NO: 171861 - DNA, 25 bp, probe
cttgggcagcctgactcagggaggc

SEQ ID NO: 171862 - DNA, 25 bp, probe
cattaggccatttacatacccagag

SEQ ID NO: 171863 - DNA, 25 bp, probe
cattagccaatgagaacatccccag

SEQ ID NO: 171864 - DNA, 25 bp, probe
catttgccattgccaatagcaccgc

SEQ ID NO: 171865 - DNA, 25 bp, probe
catttatcatatggccataccagcc

SEQ ID NO: 171866 - DNA, 25 bp, probe
catttagctggccaatcagcccagg

SEQ ID NO: 171867 - DNA, 25 bp, probe
catttagctggccaatcagcccagg

SEQ ID NO: 171868 - DNA, 25 bp, probe
cattcgaggtgtcaccctgcagagc

SEQ ID NO: 171869 - DNA, 25 bp, probe
cattcagatgcactggtaccgggcc

SEQ ID NO: 171870 - DNA, 25 bp, probe
cattcccagcatgtacggaggcacc

SEQ ID NO: 171871 - DNA, 25 bp, probe
cattctctgcctgtactgaagctga

SEQ ID NO: 171872 - DNA, 25 bp, probe
catttcctcatcccggaagcatgac

SEQ ID NO: 171873 - DNA, 25 bp, probe
catttattctcattctggggaacag

SEQ ID NO: 171874 - DNA, 25 bp, probe
cttatcagtctttatggaggaagca

SEQ ID NO: 171875 - DNA, 25 bp, probe
catttgcctttgaactgagagacac

SEQ ID NO: 171876 - DNA, 25 bp, probe
catttgcctttgaactgagagacac

SEQ ID NO: 171877 - DNA, 25 bp, probe
cattcgatgcatttttatagaaaca

SEQ ID NO: 171878 - DNA, 25 bp, probe
cattgatagcatttattgtgataag

SEQ ID NO: 171879 - DNA, 25 bp, probe
cattaacatgcatctttggacatca

SEQ ID NO: 171880 - DNA, 25 bp, probe
catttgactgcagcaatttcgacaa

SEQ ID NO: 171881 - DNA, 25 bp, probe
catttggacaagacatttctgaaac

SEQ ID NO: 171882 - DNA, 25 bp, probe
catatagttcaaccatgattgatga

SEQ ID NO: 171883 - DNA, 25 bp, probe
cattcatgtgtatcctggtatcata

SEQ ID NO: 171884 - DNA, 25 bp, probe
cattatgtgctgtgcgtggtgacca

SEQ ID NO: 171885 - DNA, 25 bp, probe
cattgatgtggcctgcagggtgcag

SEQ ID NO: 171886 - DNA, 25 bp, probe
cattgatgtggcctgcagggtgcag

SEQ ID NO: 171887 - DNA, 25 bp, probe
cattatgtggactgaaccgactttt

SEQ ID NO: 171888 - DNA, 25 bp, probe
tcatttggggtcaaagccagttttt

SEQ ID NO: 171889 - DNA, 25 bp, probe
catttaatggatgcaactcagttta

SEQ ID NO: 171890 - DNA, 25 bp, probe
cattatttgtgtgatttctgtgtta

SEQ ID NO: 171891 - DNA, 25 bp, probe
cattctctttctaatcttgctggtt

SEQ ID NO: 171892 - DNA, 25 bp, probe
cattatctttgccagttggagtgct

SEQ ID NO: 171893 - DNA, 25 bp, probe
cattatcgttgcagccattatggct

SEQ ID NO: 171894 - DNA, 25 bp, probe
cattgatgcctgtgaccttaggttt

SEQ ID NO: 171895 - DNA, 25 bp, probe
cattgtccaaagccctttactttct

SEQ ID NO: 171896 - DNA, 25 bp, probe
cattgtccaaagccctttactttct

SEQ ID NO: 171897 - DNA, 25 bp, probe
catttctagaacacatttacagtat

SEQ ID NO: 171898 - DNA, 25 bp, probe
catttctggaagtgactttggctgc

SEQ ID NO: 171899 - DNA, 25 bp, probe
catttctgtgaactgtggctttagt

SEQ ID NO: 171900 - DNA, 25 bp, probe
catttctgatgatttgctggagtgc

SEQ ID NO: 171901 - DNA, 25 bp, probe
catttccatcaatgtgatcagcatg

SEQ ID NO: 171902 - DNA, 25 bp, probe
catttccatcaatgtgatcagcatg

SEQ ID NO: 171903 - DNA, 25 bp, probe
catttaccatcatgtatccagtagt

SEQ ID NO: 171904 - DNA, 25 bp, probe
catttcagcctatttgcttagtgaa

SEQ ID NO: 171905 - DNA, 25 bp, probe
catttcctctcatgtctagaatggg

SEQ ID NO: 171906 - DNA, 25 bp, probe
cattccaatctattgcttcaccatg

SEQ ID NO: 171907 - DNA, 25 bp, probe
cattggcattctttgcaatactgct

SEQ ID NO: 171908 - DNA, 25 bp, probe
cattcagtattcttggatgagctta

SEQ ID NO: 171909 - DNA, 25 bp, probe
cattcagtattcttggatgagctta

SEQ ID NO: 171910 - DNA, 25 bp, probe
cattcagtctggtatgtgaggcgtg

SEQ ID NO: 171911 - DNA, 25 bp, probe
cattctgtatgttttcatgggtcag

SEQ ID NO: 171912 - DNA, 25 bp, probe
cattgtcaagtatcgtggtgtcagc

SEQ ID NO: 171913 - DNA, 25 bp, probe
cattggaacttgtccatggggcctc

SEQ ID NO: 171914 - DNA, 25 bp, probe
cttggacacgtggctttgggcgtcc

SEQ ID NO: 171915 - DNA, 25 bp, probe
cttggacccatgactctgtagccag

SEQ ID NO: 171916 - DNA, 25 bp, probe
cattagatccaagtgctgattaaat

SEQ ID NO: 171917 - DNA, 25 bp, probe
catttgatgttagcgtataaattag

SEQ ID NO: 171918 - DNA, 25 bp, probe
cattcttctcttgctgtaacacttg

SEQ ID NO: 171919 - DNA, 25 bp, probe
cattcttccatggacaggacaacta

SEQ ID NO: 171920 - DNA, 25 bp, probe
catttcgcgatggacagactcacaa

SEQ ID NO: 171921 - DNA, 25 bp, probe
cattgtccgatttatcactgccagc

SEQ ID NO: 171922 - DNA, 25 bp, probe
cattcaccaattttaatccttttat

SEQ ID NO: 171923 - DNA, 25 bp, probe
catttccacttgctttcctaatgaa

SEQ ID NO: 171924 - DNA, 25 bp, probe
catttgccacttcatttactgtctg

SEQ ID NO: 171925 - DNA, 25 bp, probe
catttcctttcagtttagcttgcag

SEQ ID NO: 171926 - DNA, 25 bp, probe
cattttatgtactttgtccttcagc

SEQ ID NO: 171927 - DNA, 25 bp, probe
cattttgatggcttctatttttggc

SEQ ID NO: 171928 - DNA, 25 bp, probe
catttttctgccgtttttcatagtt

SEQ ID NO: 171929 - DNA, 25 bp, probe
catttttctgccgtttttcatagtt

SEQ ID NO: 171930 - DNA, 25 bp, probe
cattgtctttccatgaaacgaagtt

SEQ ID NO: 171931 - DNA, 25 bp, probe
catttctttcgcaagtgaactcaag

SEQ ID NO: 171932 - DNA, 25 bp, probe
catttctcttccagctgctaaaagg

SEQ ID NO: 171933 - DNA, 25 bp, probe
cattgttccaccacttagcttaggc

SEQ ID NO: 171934 - DNA, 25 bp, probe
cattgttccaccacttagcttaggc

SEQ ID NO: 171935 - DNA, 25 bp, probe
cattctttgtccagcgtgacttatg

SEQ ID NO: 171936 - DNA, 25 bp, probe
cattttgatggtgtctgtgacattt

SEQ ID NO: 171937 - DNA, 25 bp, probe
cattttctggtactctgtgaaagaa

SEQ ID NO: 171938 - DNA, 25 bp, probe
ctttatggaggaagcatggaagaaa

SEQ ID NO: 171939 - DNA, 25 bp, probe
catttacagctgtctgaaggaagaa

SEQ ID NO: 171940 - DNA, 25 bp, probe
cattctacagcataaaaacatgaga

SEQ ID NO: 171941 - DNA, 25 bp, probe
cattctgactacttaccacatcaaa

SEQ ID NO: 171942 - DNA, 25 bp, probe
catttttagcacttctcaccagaga

SEQ ID NO: 171943 - DNA, 25 bp, probe
catttcttaatctgctcttcagaga

SEQ ID NO: 171944 - DNA, 25 bp, probe
catttcttaatctgctcttcagaga

SEQ ID NO: 171945 - DNA, 25 bp, probe
cattttgggtttcattgctgcagat

SEQ ID NO: 171946 - DNA, 25 bp, probe
catttctggagtatatttctcataa

SEQ ID NO: 171947 - DNA, 25 bp, probe
cattttgcgtctatttcttctattg

SEQ ID NO: 171948 - DNA, 25 bp, probe
cattttgcatgttttcttcttttgg

SEQ ID NO: 171949 - DNA, 25 bp, probe
cattttcatgttttgtctttctttt

SEQ ID NO: 171950 - DNA, 25 bp, probe
catttctttgagtgtcttaattaaa

SEQ ID NO: 171951 - DNA, 25 bp, probe
catttgcatttgttatttctactta

SEQ ID NO: 171952 - DNA, 25 bp, probe
catttgcatttgttatttctactta

SEQ ID NO: 171953 - DNA, 25 bp, probe
cattagatttctcatttgccaataa

SEQ ID NO: 171954 - DNA, 25 bp, probe
cattatattcctcatcttcgctatg

SEQ ID NO: 171955 - DNA, 25 bp, probe
cattattctcacaaatccaggcata

SEQ ID NO: 171956 - DNA, 25 bp, probe
cattttccagaattgcctgtcacaa

SEQ ID NO: 171957 - DNA, 25 bp, probe
cattttccagaattgcctgtcacaa

SEQ ID NO: 171958 - DNA, 25 bp, probe
catttactggatttgacttcagcca

SEQ ID NO: 171959 - DNA, 25 bp, probe
catttactagattctagcaccgctg

SEQ ID NO: 171960 - DNA, 25 bp, probe
catttagcaaatacctctgccgctg

SEQ ID NO: 171961 - DNA, 25 bp, probe
catttactatcactgcacctgaaga

SEQ ID NO: 171962 - DNA, 25 bp, probe
catttactatcactgcacctgaaga

SEQ ID NO: 171963 - DNA, 25 bp, probe
cattcaattatcttcatgaaggagg

SEQ ID NO: 171964 - DNA, 25 bp, probe
cattcagttatttgcagaagggaac

SEQ ID NO: 171965 - DNA, 25 bp, probe
cttgcttatttgccaaagctgggag

SEQ ID NO: 171966 - DNA, 25 bp, probe
cttgttacattggcacagagccatg

SEQ ID NO: 171967 - DNA, 25 bp, probe
cattttcatattgcaaatctcatgt

SEQ ID NO: 171968 - DNA, 25 bp, probe
cattcttaacattgcagcaatcacc

SEQ ID NO: 171969 - DNA, 25 bp, probe
cattctttcaattgttatgcaccag

SEQ ID NO: 171970 - DNA, 25 bp, probe
cattctgcttacagctacagtcaca

SEQ ID NO: 171971 - DNA, 25 bp, probe
cattgctgtttcatctactgttgct

SEQ ID NO: 171972 - DNA, 25 bp, probe
cattgcttggcaaccttcttatcat

SEQ ID NO: 171973 - DNA, 25 bp, probe
cattctttgattgtcatcttattgc

SEQ ID NO: 171974 - DNA, 25 bp, probe
cattttctacatgtcgcttgttgga

SEQ ID NO: 171975 - DNA, 25 bp, probe
cattttctcctgctgattgtgtgtg

SEQ ID NO: 171976 - DNA, 25 bp, probe
catttcctcttgatttgtctgggtt

SEQ ID NO: 171977 - DNA, 25 bp, probe
catttctgttctcatttgatcaggg

SEQ ID NO: 171978 - DNA, 25 bp, probe
cattctggttctgcacttggacagg

SEQ ID NO: 171979 - DNA, 25 bp, probe
cattctctgatgagcccttggaggc

SEQ ID NO: 171980 - DNA, 25 bp, probe
cttcctgcagttccttcaggggact

SEQ ID NO: 171981 - DNA, 25 bp, probe
cattcaccgcgatcttaaatgtgac

SEQ ID NO: 171982 - DNA, 25 bp, probe
cttgcagaccgagtctacacaagta

SEQ ID NO: 171983 - DNA, 25 bp, probe
cttggacatgcccattacaaagcaa

SEQ ID NO: 171984 - DNA, 25 bp, probe
cttggacatgcccattacaaagcaa

SEQ ID NO: 171985 - DNA, 25 bp, probe
cattgtacaccgggatctcaagcca

SEQ ID NO: 171986 - DNA, 25 bp, probe
cattgtccaccatgatttcatagcc

SEQ ID NO: 171987 - DNA, 25 bp, probe
catttgccaacagctgtgtcaaccc

SEQ ID NO: 171988 - DNA, 25 bp, probe
catttcccagctgtgtaaaaacaat

SEQ ID NO: 171989 - DNA, 25 bp, probe
cattatcgaagtgtgtatcaaaaga

SEQ ID NO: 171990 - DNA, 25 bp, probe
catttaagagatcatttcattaaga

SEQ ID NO: 171991 - DNA, 25 bp, probe
cattctacgaaaattacatccaaac

SEQ ID NO: 171992 - DNA, 25 bp, probe
cattctatgctgattttacaaaaga

SEQ ID NO: 171993 - DNA, 25 bp, probe
cattctatgctgattttacaaaaga

SEQ ID NO: 171994 - DNA, 25 bp, probe
cattcttctttctctgaaaggagag

SEQ ID NO: 171995 - DNA, 25 bp, probe
catttttatcttctgaaatctttga

SEQ ID NO: 171996 - DNA, 25 bp, probe
catttttatcttctgaaatctttga

SEQ ID NO: 171997 - DNA, 25 bp, probe
cattcagttactcttaattctttat

SEQ ID NO: 171998 - DNA, 25 bp, probe
cattggcttgttggttttgttttat

SEQ ID NO: 171999 - DNA, 25 bp, probe
cttgtgacttcggtcttcttgtttt

SEQ ID NO: 172000 - DNA, 25 bp, probe
cttctgacttaggattggccttttg

SEQ ID NO: 172001 - DNA, 25 bp, probe
cattacaactacggctggtcttttt

SEQ ID NO: 172002 - DNA, 25 bp, probe
cattaagaccacggagcagctcatc

SEQ ID NO: 172003 - DNA, 25 bp, probe
cattaagaccacggagcagctcatc

SEQ ID NO: 172004 - DNA, 25 bp, probe
cattaagaccacggagcagctcatc

SEQ ID NO: 172005 - DNA, 25 bp, probe
cattaagaccacggagcagctcatc

SEQ ID NO: 172006 - DNA, 25 bp, probe
cattaagaccacggagcagctcatc

SEQ ID NO: 172007 - DNA, 25 bp, probe
cattaccgagcaccagaagtcatcc

SEQ ID NO: 172008 - DNA, 25 bp, probe
cattcttaatcaccaaggtcatatg

SEQ ID NO: 172009 - DNA, 25 bp, probe
cattgtgtcagattaccagttatag

SEQ ID NO: 172010 - DNA, 25 bp, probe
cattgctggcaactgacttgtcatt

SEQ ID NO: 172011 - DNA, 25 bp, probe
cattcggaaagccttgtcatttgac

SEQ ID NO: 172012 - DNA, 25 bp, probe
cattgcctgagatggtgttctgtaa

SEQ ID NO: 172013 - DNA, 25 bp, probe
cattgggcaggcagatgttcctaat

SEQ ID NO: 172014 - DNA, 25 bp, probe
cattgaggcggtgggcttgctcaac

SEQ ID NO: 172015 - DNA, 25 bp, probe
cattgcagcgcgggcgttggaagaa

SEQ ID NO: 172016 - DNA, 25 bp, probe
cattgaagacggctgtggctcggac

SEQ ID NO: 172017 - DNA, 25 bp, probe
cattaatgacgccttcaacctggcc

SEQ ID NO: 172018 - DNA, 25 bp, probe
cattcagattctcgtgtaacacttg

SEQ ID NO: 172019 - DNA, 25 bp, probe
cattcagattctcgtgtaacacttg

SEQ ID NO: 172020 - DNA, 25 bp, probe
cattcagaagcgccataagtcagtt

SEQ ID NO: 172021 - DNA, 25 bp, probe
cattcagaagctcctccagaagtgc

SEQ ID NO: 172022 - DNA, 25 bp, probe
cattcagaagctcctccagaagtgc

SEQ ID NO: 172023 - DNA, 25 bp, probe
cattgagaatgtacctgaagagctc

SEQ ID NO: 172024 - DNA, 25 bp, probe
cattggcaatgtttcgatagacagc

SEQ ID NO: 172025 - DNA, 25 bp, probe
cattcccacatcttgccaagacagc

SEQ ID NO: 172026 - DNA, 25 bp, probe
cattagctctcactttcaagaagca

SEQ ID NO: 172027 - DNA, 25 bp, probe
cattctgcctcaatcttttgcaagc

SEQ ID NO: 172028 - DNA, 25 bp, probe
cattgctgctctctgttattacact

SEQ ID NO: 172029 - DNA, 25 bp, probe
cattgctgctctctgttattacact

SEQ ID NO: 172030 - DNA, 25 bp, probe
cattgtgtctctggatttctagcac

SEQ ID NO: 172031 - DNA, 25 bp, probe
cattgtgtggctggttgtttcctgg

SEQ ID NO: 172032 - DNA, 25 bp, probe
ccttatggatagtgtttcttccttc

SEQ ID NO: 172033 - DNA, 25 bp, probe
ccttatggatagtgtttcttccttc

SEQ ID NO: 172034 - DNA, 25 bp, probe
cattataggatatcgtgcttttact

SEQ ID NO: 172035 - DNA, 25 bp, probe
cattatatgccttcactggcttctt

SEQ ID NO: 172036 - DNA, 25 bp, probe
cattgtgaccagcagcaggcttttt

SEQ ID NO: 172037 - DNA, 25 bp, probe
cattcagcaccagagcacgtgatgg

SEQ ID NO: 172038 - DNA, 25 bp, probe
cattcacacgcgattgcgcaatgcc

SEQ ID NO: 172039 - DNA, 25 bp, probe
cattcagctgctgggtgtccattgc

SEQ ID NO: 172040 - DNA, 25 bp, probe
cattgagagctgggtctgcctctct

SEQ ID NO: 172041 - DNA, 25 bp, probe
cattgagagctgggtctgcctctct

SEQ ID NO: 172042 - DNA, 25 bp, probe
cattgacatgtggagcctgggctgc

SEQ ID NO: 172043 - DNA, 25 bp, probe
cattgtcggatgagtggcagctgct

SEQ ID NO: 172044 - DNA, 25 bp, probe
cttgtaggaatcatgccgctctcaa

SEQ ID NO: 172045 - DNA, 25 bp, probe
cttgtaggaatcatgccgctctcaa

SEQ ID NO: 172046 - DNA, 25 bp, probe
cttgtattagtcccaagccacagaa

SEQ ID NO: 172047 - DNA, 25 bp, probe
ctatgttgtagttggggcccagaga

SEQ ID NO: 172048 - DNA, 25 bp, probe
cttgttggcctagactgctcaaaga

SEQ ID NO: 172049 - DNA, 25 bp, probe
cttcctggggacgctgtcacagggg

SEQ ID NO: 172050 - DNA, 25 bp, probe
cttcctggggacgctgtcacagggg

SEQ ID NO: 172051 - DNA, 25 bp, probe
cttcgtggggaaccgcgagataggg

SEQ ID NO: 172052 - DNA, 25 bp, probe
ctatcgggggccagcgttatcaggc

SEQ ID NO: 172053 - DNA, 25 bp, probe
ctagggtgggcctgttggggagcca

SEQ ID NO: 172054 - DNA, 25 bp, probe
cttgtggggggcgcttgagaacagc

SEQ ID NO: 172055 - DNA, 25 bp, probe
cttgtaggggtctctcagaggttct

SEQ ID NO: 172056 - DNA, 25 bp, probe
cttgtgaggccggaatccgggctcc

SEQ ID NO: 172057 - DNA, 25 bp, probe
cttggggtcaggatgcctgggtctc

SEQ ID NO: 172058 - DNA, 25 bp, probe
cttgggagccagacactccagggat

SEQ ID NO: 172059 - DNA, 25 bp, probe
cattgtggcagctgggccacaggct

SEQ ID NO: 172060 - DNA, 25 bp, probe
cttgctgctgcagtgggtcaagacg

SEQ ID NO: 172061 - DNA, 25 bp, probe
cttctgtgactgccagctctaaatc

SEQ ID NO: 172062 - DNA, 25 bp, probe
cattcaagacaacctgctacaagcc

SEQ ID NO: 172063 - DNA, 25 bp, probe
cattacaacaagcgctcgaccatca

SEQ ID NO: 172064 - DNA, 25 bp, probe
cattaaacaagccagtaggtcacct

SEQ ID NO: 172065 - DNA, 25 bp, probe
cttggacaacttcgtaggtagcctt

SEQ ID NO: 172066 - DNA, 25 bp, probe
cttgaacacctaggccagggatccc

SEQ ID NO: 172067 - DNA, 25 bp, probe
cttgtccctctaagtcatttagccc

SEQ ID NO: 172068 - DNA, 25 bp, probe
cattaccctgccattcatgtgtatc

SEQ ID NO: 172069 - DNA, 25 bp, probe
cattccctgatcctacatcatggta

SEQ ID NO: 172070 - DNA, 25 bp, probe
cattccataatggcttccagactag

SEQ ID NO: 172071 - DNA, 25 bp, probe
cattctcagaggattctgaaccact

SEQ ID NO: 172072 - DNA, 25 bp, probe
cattctcagaggattctgaaccact

SEQ ID NO: 172073 - DNA, 25 bp, probe
cattctatgagggtccagataagtc

SEQ ID NO: 172074 - DNA, 25 bp, probe
cattctggaagctccctagaatctc

SEQ ID NO: 172075 - DNA, 25 bp, probe
cattcactaagccctacataggatt

SEQ ID NO: 172076 - DNA, 25 bp, probe
cattatgcaaagcctctgaccagtt

SEQ ID NO: 172077 - DNA, 25 bp, probe
cattgtaagagttctgtcatgcagt

SEQ ID NO: 172078 - DNA, 25 bp, probe
cattgggcatgacttctgggagcac

SEQ ID NO: 172079 - DNA, 25 bp, probe
cattgtgcgtgttgtcatgggtgac

SEQ ID NO: 172080 - DNA, 25 bp, probe
cattgtgcactgcagctctggtgtg

SEQ ID NO: 172081 - DNA, 25 bp, probe
cattgtgcactgcagctctggtgtg

SEQ ID NO: 172082 - DNA, 25 bp, probe
cattgtgcactgcaggtagagggtg

SEQ ID NO: 172083 - DNA, 25 bp, probe
cattagctctgttggcaagggtctg

SEQ ID NO: 172084 - DNA, 25 bp, probe
cattgaggctgcaagagcacagggc

SEQ ID NO: 172085 - DNA, 25 bp, probe
cttgtgtctcgctgcaaggctgcag

SEQ ID NO: 172086 - DNA, 25 bp, probe
cattgatatccgcccaagatcagca

SEQ ID NO: 172087 - DNA, 25 bp, probe
cttgtgaccgtgccaagaaaacgta

SEQ ID NO: 172088 - DNA, 25 bp, probe
cttgtgcccttgcctgaaaaactat

SEQ ID NO: 172089 - DNA, 25 bp, probe
cttggccactatgcgggtagactac

SEQ ID NO: 172090 - DNA, 25 bp, probe
cttggccatggagcgtggtagccac

SEQ ID NO: 172091 - DNA, 25 bp, probe
cttggtatatgctcatctgagtgac

SEQ ID NO: 172092 - DNA, 25 bp, probe
cttgtgtgtagctgctcggacactc

SEQ ID NO: 172093 - DNA, 25 bp, probe
cttgtgtgtagctgctcggacactc

SEQ ID NO: 172094 - DNA, 25 bp, probe
cttgtggtggggcaggaacggtgga

SEQ ID NO: 172095 - DNA, 25 bp, probe
cattgatggcgaggcggaggacggg

SEQ ID NO: 172096 - DNA, 25 bp, probe
ctttgtggtacggcagaggcggggg

SEQ ID NO: 172097 - DNA, 25 bp, probe
cgtagttggactgacgggcagggcc

SEQ ID NO: 172098 - DNA, 25 bp, probe
cgtatcttaagtgaggaggcatggg

SEQ ID NO: 172099 - DNA, 25 bp, probe
ctttcagctaagggagggttggatt

SEQ ID NO: 172100 - DNA, 25 bp, probe
cttgtactagcagagagtcctgagc

SEQ ID NO: 172101 - DNA, 25 bp, probe
cttgctactagcaggcgacttagga

SEQ ID NO: 172102 - DNA, 25 bp, probe
cttgctactagcaggcgacttagga

SEQ ID NO: 172103 - DNA, 25 bp, probe
ctagcaagccgctggggcttggggg

SEQ ID NO: 172104 - DNA, 25 bp, probe
cttccagcacggctttggtagggga

SEQ ID NO: 172105 - DNA, 25 bp, probe
cttccagcacggctttggtagggga

SEQ ID NO: 172106 - DNA, 25 bp, probe
ctactcagtagtcttaggtgggaag

SEQ ID NO: 172107 - DNA, 25 bp, probe
cttccagctagagcttcggggggat

SEQ ID NO: 172108 - DNA, 25 bp, probe
cattccctgatgtgttgtgtctggg

SEQ ID NO: 172109 - DNA, 25 bp, probe
cattctcccagagactgttcatggt

SEQ ID NO: 172110 - DNA, 25 bp, probe
cattctgcccttgtatctttgcagt

SEQ ID NO: 172111 - DNA, 25 bp, probe
cattctgtccttttttgttaaattg

SEQ ID NO: 172112 - DNA, 25 bp, probe
cattccaaccttgatgtgttaaact

SEQ ID NO: 172113 - DNA, 25 bp, probe
cttccaggcctcctatggtaaagac

SEQ ID NO: 172114 - DNA, 25 bp, probe
cttcaggcccacctggccttaataa

SEQ ID NO: 172115 - DNA, 25 bp, probe
cttactccatccctggttcgagtat

SEQ ID NO: 172116 - DNA, 25 bp, probe
cattaccaccttctgctatggaatc

SEQ ID NO: 172117 - DNA, 25 bp, probe
cattacagcctgtatttgccaaaac

SEQ ID NO: 172118 - DNA, 25 bp, probe
cattaagccttttggacacaggacc

SEQ ID NO: 172119 - DNA, 25 bp, probe
cattgtggctcctcaggccacagta

SEQ ID NO: 172120 - DNA, 25 bp, probe
cattgcggtcgcgcggatcatgatg

SEQ ID NO: 172121 - DNA, 25 bp, probe
cattgctcttcctactgtacatatt

SEQ ID NO: 172122 - DNA, 25 bp, probe
cattgctcttcctactgtacatatt

SEQ ID NO: 172123 - DNA, 25 bp, probe
cattatctctacaatcctcaagatt

SEQ ID NO: 172124 - DNA, 25 bp, probe
cattgtcatcgacatgctcatggag

SEQ ID NO: 172125 - DNA, 25 bp, probe
cattctcaagagcacacaggattaa

SEQ ID NO: 172126 - DNA, 25 bp, probe
cttggatgtggtcagctctccagga

SEQ ID NO: 172127 - DNA, 25 bp, probe
cattctgggtcgcagccatgaagtg

SEQ ID NO: 172128 - DNA, 25 bp, probe
cattctggtgaccagcagcggacaa

SEQ ID NO: 172129 - DNA, 25 bp, probe
cattcaaggatccaggatgccaaaa

SEQ ID NO: 172130 - DNA, 25 bp, probe
cattaactggcctgatctaacaatg

SEQ ID NO: 172131 - DNA, 25 bp, probe
ctacaactggcgtctcaacaacgtc

SEQ ID NO: 172132 - DNA, 25 bp, probe
ctacaactggcgtctcaacaacgtc

SEQ ID NO: 172133 - DNA, 25 bp, probe
ctaccaagccggagcacgaggatca

SEQ ID NO: 172134 - DNA, 25 bp, probe
cttctctagcctcgagtccgaggta

SEQ ID NO: 172135 - DNA, 25 bp, probe
cttggcatcagcaggaggcctcatg

SEQ ID NO: 172136 - DNA, 25 bp, probe
cttggtcatgcagctggatcaggtg

SEQ ID NO: 172137 - DNA, 25 bp, probe
cttggtctgacttggccatgggagc

SEQ ID NO: 172138 - DNA, 25 bp, probe
cttggccatatcaaggcagcacggc

SEQ ID NO: 172139 - DNA, 25 bp, probe
cttgacgcaccaagcggaactgcgc

SEQ ID NO: 172140 - DNA, 25 bp, probe
cttgcaaagcacaagctgggaccgc

SEQ ID NO: 172141 - DNA, 25 bp, probe
cttgagccagaatctcaggaccccg

SEQ ID NO: 172142 - DNA, 25 bp, probe
cttgcagaccaagagggaccctgga

SEQ ID NO: 172143 - DNA, 25 bp, probe
cttgcaaccatggtaacgtttctgg

SEQ ID NO: 172144 - DNA, 25 bp, probe
cattcattccataggtagctttacg

SEQ ID NO: 172145 - DNA, 25 bp, probe
cattcattccataggtagctttacg

SEQ ID NO: 172146 - DNA, 25 bp, probe
cattcttttaagaagctcttcacca

SEQ ID NO: 172147 - DNA, 25 bp, probe
cattcctttaggaatgctgtgtgtc

SEQ ID NO: 172148 - DNA, 25 bp, probe
cattccaaatatgagatgcattgtt

SEQ ID NO: 172149 - DNA, 25 bp, probe
cattctcaacattcccagcatgtac

SEQ ID NO: 172150 - DNA, 25 bp, probe
cattgtcgcaagtcacagaattatt

SEQ ID NO: 172151 - DNA, 25 bp, probe
cttgcaaggagataggagctcatat

SEQ ID NO: 172152 - DNA, 25 bp, probe
cttgacaggggctatgggtttgctt

SEQ ID NO: 172153 - DNA, 25 bp, probe
cttgtattggccatctggaatatgc

SEQ ID NO: 172154 - DNA, 25 bp, probe
cttgaaatggacatctgtgatgggc

SEQ ID NO: 172155 - DNA, 25 bp, probe
cttgggctggacatataattgctgg

SEQ ID NO: 172156 - DNA, 25 bp, probe
cttgaagctcgacgtcattcagctt

SEQ ID NO: 172157 - DNA, 25 bp, probe
cttgggcatcaactggttcttactc

SEQ ID NO: 172158 - DNA, 25 bp, probe
cttgcagacaagatagatttcccca

SEQ ID NO: 172159 - DNA, 25 bp, probe
cttaagcaagatttgtattcccaca

SEQ ID NO: 172160 - DNA, 25 bp, probe
cttgggagagtatcttgctgggcaa

SEQ ID NO: 172161 - DNA, 25 bp, probe
cttgggaagctatgtgttacacaga

SEQ ID NO: 172162 - DNA, 25 bp, probe
cttgggacactgaattgaacaccat

SEQ ID NO: 172163 - DNA, 25 bp, probe
cttggcaacacgacttgaaataaat

SEQ ID NO: 172164 - DNA, 25 bp, probe
cattcccacaggccttgagcagaat

SEQ ID NO: 172165 - DNA, 25 bp, probe
cattaccacacacttgtacagattt

SEQ ID NO: 172166 - DNA, 25 bp, probe
cattaacacactactgtgcaagcat

SEQ ID NO: 172167 - DNA, 25 bp, probe
cattcaaagtgccctgtgcaggctg

SEQ ID NO: 172168 - DNA, 25 bp, probe
cattcaaagtgccctgtgcaggctg

SEQ ID NO: 172169 - DNA, 25 bp, probe
cattcaaacgcactgctctgagagg

SEQ ID NO: 172170 - DNA, 25 bp, probe
cattgaaagtgggcatgctaagggc

SEQ ID NO: 172171 - DNA, 25 bp, probe
cattacaggatgacagcagccgaga

SEQ ID NO: 172172 - DNA, 25 bp, probe
cttgcaaggctgaggcgggaggatc

SEQ ID NO: 172173 - DNA, 25 bp, probe
cttgctggacgggacggcagacgat

SEQ ID NO: 172174 - DNA, 25 bp, probe
cttgctggacgggacggcagacgat

SEQ ID NO: 172175 - DNA, 25 bp, probe
cttgtggaggtggtcggcaatggaa

SEQ ID NO: 172176 - DNA, 25 bp, probe
cttggaaggtgccctgtgctatgtc

SEQ ID NO: 172177 - DNA, 25 bp, probe
cttggacatggaggcctgacagctg

SEQ ID NO: 172178 - DNA, 25 bp, probe
cttggacatggaggcctgacagctg

SEQ ID NO: 172179 - DNA, 25 bp, probe
cattagcggagtgcgcatggcctgt

SEQ ID NO: 172180 - DNA, 25 bp, probe
cattgcagaagaggccgcggcttct

SEQ ID NO: 172181 - DNA, 25 bp, probe
cattggcacagagccatggaaaccc

SEQ ID NO: 172182 - DNA, 25 bp, probe
cattcccagacccagggtactctaa

SEQ ID NO: 172183 - DNA, 25 bp, probe
cattaccagtacctgagctggcccg

SEQ ID NO: 172184 - DNA, 25 bp, probe
cattggccgtatgctggatgcccaa

SEQ ID NO: 172185 - DNA, 25 bp, probe
cttggtcattatagtatatgcctaa

SEQ ID NO: 172186 - DNA, 25 bp, probe
cttggtcattatagtatatgcctaa

SEQ ID NO: 172187 - DNA, 25 bp, probe
cattgttttgctaaatatgttaatt

SEQ ID NO: 172188 - DNA, 25 bp, probe
cattgatttcgaatacagcagttac

SEQ ID NO: 172189 - DNA, 25 bp, probe
cattgatttcgaatacagcagttac

SEQ ID NO: 172190 - DNA, 25 bp, probe
cattcttgtcctaaagcaattgaag

SEQ ID NO: 172191 - DNA, 25 bp, probe
cattccttccatagccagcaatgtt

SEQ ID NO: 172192 - DNA, 25 bp, probe
cattcacttctcaaacctatgtaga

SEQ ID NO: 172193 - DNA, 25 bp, probe
cattaagatctctaatctgttttga

SEQ ID NO: 172194 - DNA, 25 bp, probe
cttgcatcaatttttcttatttcat

SEQ ID NO: 172195 - DNA, 25 bp, probe
cttgtcaattactaccctttcacaa

SEQ ID NO: 172196 - DNA, 25 bp, probe
cttgttgatgaatcccctggataca

SEQ ID NO: 172197 - DNA, 25 bp, probe
cattgttggaattactctctgggga

SEQ ID NO: 172198 - DNA, 25 bp, probe
cattgttgctgattctgttccggaa

SEQ ID NO: 172199 - DNA, 25 bp, probe
cattgcaggtggccatgtttctgga

SEQ ID NO: 172200 - DNA, 25 bp, probe
cattggggaccacttctataagaga

SEQ ID NO: 172201 - DNA, 25 bp, probe
cattctgggtgttttcagaaagatg

SEQ ID NO: 172202 - DNA, 25 bp, probe
cattctggcaatgatttggcaacag

SEQ ID NO: 172203 - DNA, 25 bp, probe
cattctggcaatgatttggcaacag

SEQ ID NO: 172204 - DNA, 25 bp, probe
cattcccgtggagttgtccatcgtg

SEQ ID NO: 172205 - DNA, 25 bp, probe
cattcccgtggagttgtccatcgtg

SEQ ID NO: 172206 - DNA, 25 bp, probe
cattcgccggggatgttggcaggat

SEQ ID NO: 172207 - DNA, 25 bp, probe
cattggccttggtacttatggcaga

SEQ ID NO: 172208 - DNA, 25 bp, probe
cattggccttggtacttatggcaga

SEQ ID NO: 172209 - DNA, 25 bp, probe
cattgtggcctgggccattgggaag

SEQ ID NO: 172210 - DNA, 25 bp, probe
cattgctttcagggctcttgataaa

SEQ ID NO: 172211 - DNA, 25 bp, probe
cattctgtaaggtcctctgaagaca

SEQ ID NO: 172212 - DNA, 25 bp, probe
cattctcataagattctctcatcaa

SEQ ID NO: 172213 - DNA, 25 bp, probe
cattctgcagacacttcccaagtgt

SEQ ID NO: 172214 - DNA, 25 bp, probe
cattcgatgagacctgtacccgatt

SEQ ID NO: 172215 - DNA, 25 bp, probe
cattcagaagcacctgaactccacg

SEQ ID NO: 172216 - DNA, 25 bp, probe
cattcacagagacctagcagcacgc

SEQ ID NO: 172217 - DNA, 25 bp, probe
cattgccatgaaccggcagctggcc

SEQ ID NO: 172218 - DNA, 25 bp, probe
cattgctgattcttcgtgcacagga

SEQ ID NO: 172219 - DNA, 25 bp, probe
cattggcatctaccggacagagagc

SEQ ID NO: 172220 - DNA, 25 bp, probe
cattggctggcagcccaaggagcag

SEQ ID NO: 172221 - DNA, 25 bp, probe
cattccagtcaagggcaaaggagag

SEQ ID NO: 172222 - DNA, 25 bp, probe
cttgaatgtaaatgtacatgtgcag

SEQ ID NO: 172223 - DNA, 25 bp, probe
cttggaagactacttcactgctaca

SEQ ID NO: 172224 - DNA, 25 bp, probe
cttggaagactacttcactgctaca

SEQ ID NO: 172225 - DNA, 25 bp, probe
cttgaacagcgtcttgcctgtgatc

SEQ ID NO: 172226 - DNA, 25 bp, probe
cttgtagccgggaatgctgctgctg

SEQ ID NO: 172227 - DNA, 25 bp, probe
cttgtagccgggaatgctgctgctg

SEQ ID NO: 172228 - DNA, 25 bp, probe
cttgttctacggggctgccatgtac

SEQ ID NO: 172229 - DNA, 25 bp, probe
cttgttctacggggctgccatgtac

SEQ ID NO: 172230 - DNA, 25 bp, probe
cttggtctactgtgaactcttaccc

SEQ ID NO: 172231 - DNA, 25 bp, probe
cttggtctacagagaaatcttcatg

SEQ ID NO: 172232 - DNA, 25 bp, probe
cttgatgtcaagcctgccaacatct

SEQ ID NO: 172233 - DNA, 25 bp, probe
cttgatgccaatcttcacagcattc

SEQ ID NO: 172234 - DNA, 25 bp, probe
cattggccaagagatgtacatcatc

SEQ ID NO: 172235 - DNA, 25 bp, probe
cattctccaaagctgctgatgtcta

SEQ ID NO: 172236 - DNA, 25 bp, probe
cattcatccccaaatgctatgttat

SEQ ID NO: 172237 - DNA, 25 bp, probe
cattcacaacgtctgcagcatttat

SEQ ID NO: 172238 - DNA, 25 bp, probe
cattgccatatcggctcgcaaatct

SEQ ID NO: 172239 - DNA, 25 bp, probe
cattgccaatggcctcctaatagcc

SEQ ID NO: 172240 - DNA, 25 bp, probe
cattgcccatggctgggaacatgac

SEQ ID NO: 172241 - DNA, 25 bp, probe
cattccaatggggcggagcctgagc

SEQ ID NO: 172242 - DNA, 25 bp, probe
cattccaatggggcggagcctgagc

SEQ ID NO: 172243 - DNA, 25 bp, probe
cattctcacagggacccaggtggct

SEQ ID NO: 172244 - DNA, 25 bp, probe
cattctcacagggacccaggtggct

SEQ ID NO: 172245 - DNA, 25 bp, probe
cattgtccagatgggcactgctgtg

SEQ ID NO: 172246 - DNA, 25 bp, probe
cattctctccatggtgactggtgag

SEQ ID NO: 172247 - DNA, 25 bp, probe
cattctctcatagaacattgatctg

SEQ ID NO: 172248 - DNA, 25 bp, probe
cattgccctatgcactgttagcatg

SEQ ID NO: 172249 - DNA, 25 bp, probe
cattccctatgggttctgtgaccac

SEQ ID NO: 172250 - DNA, 25 bp, probe
cattctccgtgcagtatttacaacc

SEQ ID NO: 172251 - DNA, 25 bp, probe
cattctccgtgcagtatttacaacc

SEQ ID NO: 172252 - DNA, 25 bp, probe
cattcctttgttatttagcatttcg

SEQ ID NO: 172253 - DNA, 25 bp, probe
cattcctgggattttcttatgcgcc

SEQ ID NO: 172254 - DNA, 25 bp, probe
cattcctgggattttcttatgcgcc

SEQ ID NO: 172255 - DNA, 25 bp, probe
cattccagagcgtgtagtgaatcac

SEQ ID NO: 172256 - DNA, 25 bp, probe
cattgcctggtctagtagcggatct

SEQ ID NO: 172257 - DNA, 25 bp, probe
cattgcctcttctaaaagctactga

SEQ ID NO: 172258 - DNA, 25 bp, probe
cattcccagtcctgtgagctcaggt

SEQ ID NO: 172259 - DNA, 25 bp, probe
cattctcccaactgagtgtagtatg

SEQ ID NO: 172260 - DNA, 25 bp, probe
cattctcccaactgagtgtagtatg

SEQ ID NO: 172261 - DNA, 25 bp, probe
cattccctctcatctcaggtagaag

SEQ ID NO: 172262 - DNA, 25 bp, probe
cattctcctctctacttctaagaga

SEQ ID NO: 172263 - DNA, 25 bp, probe
cattctcctctctacttctaagaga

SEQ ID NO: 172264 - DNA, 25 bp, probe
cattcccactctaattgctaaaata

SEQ ID NO: 172265 - DNA, 25 bp, probe
cattcctaactcatattaacagcac

SEQ ID NO: 172266 - DNA, 25 bp, probe
cattcctaactcatattaacagcac

SEQ ID NO: 172267 - DNA, 25 bp, probe
cattccattagctataattcagtca

SEQ ID NO: 172268 - DNA, 25 bp, probe
cattccagtagctatgacctgccgc

SEQ ID NO: 172269 - DNA, 25 bp, probe
cttgggtatgcagcagcctgctcag

SEQ ID NO: 172270 - DNA, 25 bp, probe
cttgggtatgcagcagcctgctcag

SEQ ID NO: 172271 - DNA, 25 bp, probe
cttgggataagccccagtccaggtc

SEQ ID NO: 172272 - DNA, 25 bp, probe
gcattgggtatggggccaggcccct

SEQ ID NO: 172273 - DNA, 25 bp, probe
cttggggagggtgcagagctctgca

SEQ ID NO: 172274 - DNA, 25 bp, probe
cttggggagggggatgccttcatgg

SEQ ID NO: 172275 - DNA, 25 bp, probe
cttgttgtggacaggatccattgca

SEQ ID NO: 172276 - DNA, 25 bp, probe
cattgtttccagatagacgctggca

SEQ ID NO: 172277 - DNA, 25 bp, probe
cttgtttacagcactactctgtgcc

SEQ ID NO: 172278 - DNA, 25 bp, probe
cttgttgaacagaagttgtcgcagc

SEQ ID NO: 172279 - DNA, 25 bp, probe
cttggtcaacagaagctggtgctac

SEQ ID NO: 172280 - DNA, 25 bp, probe
cattcgtgcacactgcacacggtgt

SEQ ID NO: 172281 - DNA, 25 bp, probe
cattgggcacggtacagagtgattg

SEQ ID NO: 172282 - DNA, 25 bp, probe
cattgggtctgggatgaagtattta

SEQ ID NO: 172283 - DNA, 25 bp, probe
cttggtgtgtgggagaagttttata

SEQ ID NO: 172284 - DNA, 25 bp, probe
cttgggtgggattgagtttgttctc

SEQ ID NO: 172285 - DNA, 25 bp, probe
cttgggggtgcttttgtacttcatg

SEQ ID NO: 172286 - DNA, 25 bp, probe
cttggtgtggtgcagggatcctgat

SEQ ID NO: 172287 - DNA, 25 bp, probe
cattcttgtgggagacagcagcctg

SEQ ID NO: 172288 - DNA, 25 bp, probe
cattcttgtgggagacagcagcctg

SEQ ID NO: 172289 - DNA, 25 bp, probe
cttgttgatgtggacatgagccatt

SEQ ID NO: 172290 - DNA, 25 bp, probe
cattggtctctccaatatcctgtgc

SEQ ID NO: 172291 - DNA, 25 bp, probe
cattgtgattctgaattcttggata

SEQ ID NO: 172292 - DNA, 25 bp, probe
cattgtgggtgtgtatcttcttatc

SEQ ID NO: 172293 - DNA, 25 bp, probe
cttgattggggcagttgactttttt

SEQ ID NO: 172294 - DNA, 25 bp, probe
cttgtaggggccatagaccatacat

SEQ ID NO: 172295 - DNA, 25 bp, probe
cattgcgggtgtcttaaccattgct

SEQ ID NO: 172296 - DNA, 25 bp, probe
cattccaagcctcttaaccatggca

SEQ ID NO: 172297 - DNA, 25 bp, probe
cattccaaggggcttacctggaaat

SEQ ID NO: 172298 - DNA, 25 bp, probe
cattccaggtttcattcctaataaa

SEQ ID NO: 172299 - DNA, 25 bp, probe
ctgtgcaacgccacctttaaaaaga

SEQ ID NO: 172300 - DNA, 25 bp, probe
cttacctgccggctatgtcggaaga

SEQ ID NO: 172301 - DNA, 25 bp, probe
cttcgagtccgtcacgtgggagaac

SEQ ID NO: 172302 - DNA, 25 bp, probe
cttggcctcccaaagtgctgggatt

SEQ ID NO: 172303 - DNA, 25 bp, probe
cttggcctcccaaagtgctgggatt

SEQ ID NO: 172304 - DNA, 25 bp, probe
cttggcctcccaaagtgctgggatt

SEQ ID NO: 172305 - DNA, 25 bp, probe
cttggatctcctcagatctttggtt

SEQ ID NO: 172306 - DNA, 25 bp, probe
cattggttctatatgttttctttta

SEQ ID NO: 172307 - DNA, 25 bp, probe
cattggttattcctttcatcctgtt

SEQ ID NO: 172308 - DNA, 25 bp, probe
cattgtgtgttttgtgtactcctgt

SEQ ID NO: 172309 - DNA, 25 bp, probe
cttgctgtgtatattgtaacgttaa

SEQ ID NO: 172310 - DNA, 25 bp, probe
cttgctgtgtatattgtaacgttaa

SEQ ID NO: 172311 - DNA, 25 bp, probe
cttgctggttttctggatggttccc

SEQ ID NO: 172312 - DNA, 25 bp, probe
cttgctgtatccctgttgtgaggtt

SEQ ID NO: 172313 - DNA, 25 bp, probe
cttcatctccccattgacaatttac

SEQ ID NO: 172314 - DNA, 25 bp, probe
cattctctccctaataaaaattgga

SEQ ID NO: 172315 - DNA, 25 bp, probe
ctttcttccggcaaaacgatgggca

SEQ ID NO: 172316 - DNA, 25 bp, probe
cttgatcttcaaggaaactcgtggt

SEQ ID NO: 172317 - DNA, 25 bp, probe
ctatgtctttatgaaccggcagttt

SEQ ID NO: 172318 - DNA, 25 bp, probe
ctatgtctttatgaaccggcagttt

SEQ ID NO: 172319 - DNA, 25 bp, probe
cattgagctatttaaagttgccagt

SEQ ID NO: 172320 - DNA, 25 bp, probe
cttagaatctaaaacttacagtaat

SEQ ID NO: 172321 - DNA, 25 bp, probe
cttagaagcttcgaactcaaaatca

SEQ ID NO: 172322 - DNA, 25 bp, probe
ctaaatagcccagatcccaagagat

SEQ ID NO: 172323 - DNA, 25 bp, probe
ctagaaaaacctgccaaatatgatg

SEQ ID NO: 172324 - DNA, 25 bp, probe
cttgacaaatggcttccaatgttag

SEQ ID NO: 172325 - DNA, 25 bp, probe
cattgaacttggctgcggcaacttt

SEQ ID NO: 172326 - DNA, 25 bp, probe
cttggatttgctctcgaaaatgtta

SEQ ID NO: 172327 - DNA, 25 bp, probe
cttggtttggaaaatcacacagttt

SEQ ID NO: 172328 - DNA, 25 bp, probe
cattgtttcggaaatccaggatttt

SEQ ID NO: 172329 - DNA, 25 bp, probe
cattgtttcggaaatccaggatttt

SEQ ID NO: 172330 - DNA, 25 bp, probe
cattggccatcaggatataccagga

SEQ ID NO: 172331 - DNA, 25 bp, probe
cttgtcatcaatggaaatcccatca

SEQ ID NO: 172332 - DNA, 25 bp, probe
cttgttactcaggaacctcaccttg

SEQ ID NO: 172333 - DNA, 25 bp, probe
cttgttactcaggaacctcaccttg

SEQ ID NO: 172334 - DNA, 25 bp, probe
cttgttactcaggaacctcaccttg

SEQ ID NO: 172335 - DNA, 25 bp, probe
cattggtatccagcaattaaccatt

SEQ ID NO: 172336 - DNA, 25 bp, probe
cttggtacacagggttcatcatcta

SEQ ID NO: 172337 - DNA, 25 bp, probe
cttggtctgcaacgggctaatccac

SEQ ID NO: 172338 - DNA, 25 bp, probe
cttttcatgcaaaagttgaaaccaa

SEQ ID NO: 172339 - DNA, 25 bp, probe
ctttatctacagtttgaggaaccaa

SEQ ID NO: 172340 - DNA, 25 bp, probe
cttgtgtctaggtttggaccagagc

SEQ ID NO: 172341 - DNA, 25 bp, probe
cattgcgttgtggaattgggaaggg

SEQ ID NO: 172342 - DNA, 25 bp, probe
cattctgtgaggaagtggggtatgg

SEQ ID NO: 172343 - DNA, 25 bp, probe
cattctgctgagcaagtgtggctgc

SEQ ID NO: 172344 - DNA, 25 bp, probe
cattgcccaccaatggtgctgcatg

SEQ ID NO: 172345 - DNA, 25 bp, probe
cattgaccagctgaagcgcatcatg

SEQ ID NO: 172346 - DNA, 25 bp, probe
cattcctcagtgcacagcgcaattt

SEQ ID NO: 172347 - DNA, 25 bp, probe
cattcctcttctccaagatcatttt

SEQ ID NO: 172348 - DNA, 25 bp, probe
cattcctttcagccatcgtcctttc

SEQ ID NO: 172349 - DNA, 25 bp, probe
cattgctttaggcctggagactttc

SEQ ID NO: 172350 - DNA, 25 bp, probe
cattgctgatgtggacctagagagt

SEQ ID NO: 172351 - DNA, 25 bp, probe
cattgtgcatgtgatccaggataac

SEQ ID NO: 172352 - DNA, 25 bp, probe
cattgtcatctttgccatgcgtaag

SEQ ID NO: 172353 - DNA, 25 bp, probe
cattgcttcactggccagagcttag

SEQ ID NO: 172354 - DNA, 25 bp, probe
cattgcctacctgcacagcaagagc

SEQ ID NO: 172355 - DNA, 25 bp, probe
cattccagccacatatcacaaacga

SEQ ID NO: 172356 - DNA, 25 bp, probe
cattgccagaacacattatatacag

SEQ ID NO: 172357 - DNA, 25 bp, probe
cttccagatgaaatgcttgcaattc

SEQ ID NO: 172358 - DNA, 25 bp, probe
cttggcaatgcatttgatggccacc

SEQ ID NO: 172359 - DNA, 25 bp, probe
cttggcatgtggctggccacaccaa

SEQ ID NO: 172360 - DNA, 25 bp, probe
cttggcagcgacgtggctcgagaag

SEQ ID NO: 172361 - DNA, 25 bp, probe
cattggccgagctcctggggagctc

SEQ ID NO: 172362 - DNA, 25 bp, probe
cattgctgtcaagttcctttgggtt

SEQ ID NO: 172363 - DNA, 25 bp, probe
cattctgtacactgaccttaggcat

SEQ ID NO: 172364 - DNA, 25 bp, probe
cttctcttgctgtaacacttgacct

SEQ ID NO: 172365 - DNA, 25 bp, probe
cattgtctgtgccataacacagtac

SEQ ID NO: 172366 - DNA, 25 bp, probe
cattgtctttttgcatcagtacttt

SEQ ID NO: 172367 - DNA, 25 bp, probe
cattgtctttttgcatcagtacttt

SEQ ID NO: 172368 - DNA, 25 bp, probe
cattgtctttttaatactgtcacca

SEQ ID NO: 172369 - DNA, 25 bp, probe
cattgatttatttctggctttccca

SEQ ID NO: 172370 - DNA, 25 bp, probe
cttgcagatgatatgtgctgccttt

SEQ ID NO: 172371 - DNA, 25 bp, probe
cttgtgcagacaatgctgtgctttc

SEQ ID NO: 172372 - DNA, 25 bp, probe
cattggagtcatagcatgtgtgtaa

SEQ ID NO: 172373 - DNA, 25 bp, probe
cttggagtgctaatgtttgagacga

SEQ ID NO: 172374 - DNA, 25 bp, probe
cttggagtgctcatgtttgaagatg

SEQ ID NO: 172375 - DNA, 25 bp, probe
cattgagttgctttttctgggatga

SEQ ID NO: 172376 - DNA, 25 bp, probe
cttggtgactttatcagcactgtca

SEQ ID NO: 172377 - DNA, 25 bp, probe
cttggtgactttatcagcactgtca

SEQ ID NO: 172378 - DNA, 25 bp, probe
cttgctggacctaaaatcaatgatc

SEQ ID NO: 172379 - DNA, 25 bp, probe
cttgaggcttctaaataaatggcag

SEQ ID NO: 172380 - DNA, 25 bp, probe
cttgaggcatctcaaagacaactca

SEQ ID NO: 172381 - DNA, 25 bp, probe
cttggtcagtgaaaagatgctacta

SEQ ID NO: 172382 - DNA, 25 bp, probe
cttgcagtgctggaaatagatctca

SEQ ID NO: 172383 - DNA, 25 bp, probe
cttgtgtgtgcatacatctcatcca

SEQ ID NO: 172384 - DNA, 25 bp, probe
cttgccattgccaacagctgcatga

SEQ ID NO: 172385 - DNA, 25 bp, probe
cattcctctacaatcagtcatgata

SEQ ID NO: 172386 - DNA, 25 bp, probe
cattgccatttggtagcatcatgta

SEQ ID NO: 172387 - DNA, 25 bp, probe
cttggcatttgccatatcatcatct

SEQ ID NO: 172388 - DNA, 25 bp, probe
cattggcatcatagtgtacatatct

SEQ ID NO: 172389 - DNA, 25 bp, probe
cattggcatcatagtgtacatatct

SEQ ID NO: 172390 - DNA, 25 bp, probe
cattgtgtcatatttactctaaaaa

SEQ ID NO: 172391 - DNA, 25 bp, probe
cattgtgttatatgttcaaatatga

SEQ ID NO: 172392 - DNA, 25 bp, probe
cattgtgtgtttcctctttgaagca

SEQ ID NO: 172393 - DNA, 25 bp, probe
cattgttgctggaatcatctttaaa

SEQ ID NO: 172394 - DNA, 25 bp, probe
cattgctcagggatcctttacagag

SEQ ID NO: 172395 - DNA, 25 bp, probe
cttgtccacgttgtttcacatctgg

SEQ ID NO: 172396 - DNA, 25 bp, probe
cttgtccacgttgtttcacatctgg

SEQ ID NO: 172397 - DNA, 25 bp, probe
cttgtcaccaaccattcttacttgg

SEQ ID NO: 172398 - DNA, 25 bp, probe
cttgtcaccaaccattcttacttgg

SEQ ID NO: 172399 - DNA, 25 bp, probe
ctttacaaacgtgagctccttcgcc

SEQ ID NO: 172400 - DNA, 25 bp, probe
cttgataaaactccaggctcctttg

SEQ ID NO: 172401 - DNA, 25 bp, probe
cattgtaattacttcctgacctttg

SEQ ID NO: 172402 - DNA, 25 bp, probe
cattgtcaagaagctgccatacctg

SEQ ID NO: 172403 - DNA, 25 bp, probe
cttgtgcacagatgacgacagcccc

SEQ ID NO: 172404 - DNA, 25 bp, probe
cttgtaaatagaaccagcccagccc

SEQ ID NO: 172405 - DNA, 25 bp, probe
cattgtggaattgcctcagcagcca

SEQ ID NO: 172406 - DNA, 25 bp, probe
cattgtagcgaaggcactgggtgca

SEQ ID NO: 172407 - DNA, 25 bp, probe
cattgtccataaggaattcgatgat

SEQ ID NO: 172408 - DNA, 25 bp, probe
cttgcttctaagggatccagagacc

SEQ ID NO: 172409 - DNA, 25 bp, probe
cttccttatcgccgacaagtggccc

SEQ ID NO: 172410 - DNA, 25 bp, probe
cttgctttggcacaacacactgagg

SEQ ID NO: 172411 - DNA, 25 bp, probe
cttgttcaggcacgccagaaggatg

SEQ ID NO: 172412 - DNA, 25 bp, probe
cttgattccagaaacatatgggctg

SEQ ID NO: 172413 - DNA, 25 bp, probe
cttgtctgtcagaagagccggcgtg

SEQ ID NO: 172414 - DNA, 25 bp, probe
cttgtcatgatgctggagccagacc

SEQ ID NO: 172415 - DNA, 25 bp, probe
cttgtcatgatgctggagccagacc

SEQ ID NO: 172416 - DNA, 25 bp, probe
cttgatgaagggcagccgactccct

SEQ ID NO: 172417 - DNA, 25 bp, probe
cattgatgaagaaggcaaagccccc

SEQ ID NO: 172418 - DNA, 25 bp, probe
cattgagtagcaaagccacgctccc

SEQ ID NO: 172419 - DNA, 25 bp, probe
cattgatgggcacaatgacctcccc

SEQ ID NO: 172420 - DNA, 25 bp, probe
cttgatagcggattacacctacccc

SEQ ID NO: 172421 - DNA, 25 bp, probe
cttgatagcggattacacctacccc

SEQ ID NO: 172422 - DNA, 25 bp, probe
cattgtccggagatacctactcagg

SEQ ID NO: 172423 - DNA, 25 bp, probe
cttgatcctgtgtttcaaaactaga

SEQ ID NO: 172424 - DNA, 25 bp, probe
cttgatttgtttagactgaaggaag

SEQ ID NO: 172425 - DNA, 25 bp, probe
ctggcatttggtacccaagggaagc

SEQ ID NO: 172426 - DNA, 25 bp, probe
cttcgatacttacacaaggagaaga

SEQ ID NO: 172427 - DNA, 25 bp, probe
cttcggcctttctcggggagaggag

SEQ ID NO: 172428 - DNA, 25 bp, probe
ctagccccttactgaggggggagtg

SEQ ID NO: 172429 - DNA, 25 bp, probe
cttctcccttgacggggaggcctgg

SEQ ID NO: 172430 - DNA, 25 bp, probe
cttctcccaagatgatttatgacct

SEQ ID NO: 172431 - DNA, 25 bp, probe
cttcctccagaatattccgttctgc

SEQ ID NO: 172432 - DNA, 25 bp, probe
ctatgccccaaatatagcgttccca

SEQ ID NO: 172433 - DNA, 25 bp, probe
cttcacccagaagaagttccgccgg

SEQ ID NO: 172434 - DNA, 25 bp, probe
cttggctcataatacaagcttcctg

SEQ ID NO: 172435 - DNA, 25 bp, probe
cttggaaatgatgaaaatgtgcctg

SEQ ID NO: 172436 - DNA, 25 bp, probe
cttggaaatgatgaaaatgtgcctg

SEQ ID NO: 172437 - DNA, 25 bp, probe
cttcgtggagtcagaactgcctctg

SEQ ID NO: 172438 - DNA, 25 bp, probe
cttccttggtcaccggtggtgtgtg

SEQ ID NO: 172439 - DNA, 25 bp, probe
cttccttggtcaccggtggtgtgtg

SEQ ID NO: 172440 - DNA, 25 bp, probe
cttctactcgtcacgtgtttggatc

SEQ ID NO: 172441 - DNA, 25 bp, probe
cttacatccaccagcgttatatttt

SEQ ID NO: 172442 - DNA, 25 bp, probe
cttacatccaccagcgttatatttt

SEQ ID NO: 172443 - DNA, 25 bp, probe
cttcacccttttgtcaaattgttat

SEQ ID NO: 172444 - DNA, 25 bp, probe
cttcccctttgtgtgcttttggagc

SEQ ID NO: 172445 - DNA, 25 bp, probe
cattgccattttctattctttgggg

SEQ ID NO: 172446 - DNA, 25 bp, probe
cattggaagggactcctctttgggg

SEQ ID NO: 172447 - DNA, 25 bp, probe
cattgtgaacaaggcccccttggag

SEQ ID NO: 172448 - DNA, 25 bp, probe
cattgtcattcaagtgcccaccttg

SEQ ID NO: 172449 - DNA, 25 bp, probe
cttgtattacgattcgcacgatgag

SEQ ID NO: 172450 - DNA, 25 bp, probe
cttgttttcagatccatagcatgga

SEQ ID NO: 172451 - DNA, 25 bp, probe
cttggtgcctggagcctactaaatg

SEQ ID NO: 172452 - DNA, 25 bp, probe
cttggtgcctaacctggattagtaa

SEQ ID NO: 172453 - DNA, 25 bp, probe
cttgggatttggcctggatacagta

SEQ ID NO: 172454 - DNA, 25 bp, probe
cttggtgtgtcgcccaggcgacaaa

SEQ ID NO: 172455 - DNA, 25 bp, probe
cttggtgtgtcgcccaggcgacaaa

SEQ ID NO: 172456 - DNA, 25 bp, probe
cttggcgcgtctcatcaaggacgat

SEQ ID NO: 172457 - DNA, 25 bp, probe
cttgaccaatggctaagtgaagatg

SEQ ID NO: 172458 - DNA, 25 bp, probe
cattgcccaaggttgaagcaatgaa

SEQ ID NO: 172459 - DNA, 25 bp, probe
cttcctcaaggatttcagttataac

SEQ ID NO: 172460 - DNA, 25 bp, probe
cttcccaagaaatagttgatgaatt

SEQ ID NO: 172461 - DNA, 25 bp, probe
cttgcccaagtcagtcctggtggca

SEQ ID NO: 172462 - DNA, 25 bp, probe
cttggcagccagaaacatcctggta

SEQ ID NO: 172463 - DNA, 25 bp, probe
cttcgtgcacaggaagcaccgagga

SEQ ID NO: 172464 - DNA, 25 bp, probe
cttcgaaatcagagccttaggactg

SEQ ID NO: 172465 - DNA, 25 bp, probe
ctttcaatatacgttcttcagggtc

SEQ ID NO: 172466 - DNA, 25 bp, probe
cttgtccagatatgtccttaggtcc

SEQ ID NO: 172467 - DNA, 25 bp, probe
cttgctacagaatgtggccaaggtg

SEQ ID NO: 172468 - DNA, 25 bp, probe
cttccgtgaacatggccacagggct

SEQ ID NO: 172469 - DNA, 25 bp, probe
cttccgtgaacatggccacagggct

SEQ ID NO: 172470 - DNA, 25 bp, probe
cttgccgagatgctgagatgcgccg

SEQ ID NO: 172471 - DNA, 25 bp, probe
cttgccgagatgctgagatgcgccg

SEQ ID NO: 172472 - DNA, 25 bp, probe
cttcaggcacacatatgcacgccgc

SEQ ID NO: 172473 - DNA, 25 bp, probe
cttaagcaccgcaatatcgttcagt

SEQ ID NO: 172474 - DNA, 25 bp, probe
ctttcaccccgaatggattccatta

SEQ ID NO: 172475 - DNA, 25 bp, probe
cttccacctgcccaggtgttacctg

SEQ ID NO: 172476 - DNA, 25 bp, probe
cttccaccgccggaaactgcaagtt

SEQ ID NO: 172477 - DNA, 25 bp, probe
cttccaccgccggaaactgcaagtt

SEQ ID NO: 172478 - DNA, 25 bp, probe
ctttaaccattaaaactgaagtctg

SEQ ID NO: 172479 - DNA, 25 bp, probe
cttgtaccgttttaaatggagatca

SEQ ID NO: 172480 - DNA, 25 bp, probe
cttgttgcggctgttgagaaaaatc

SEQ ID NO: 172481 - DNA, 25 bp, probe
cttgttgcggctgttgagaaaaatc

SEQ ID NO: 172482 - DNA, 25 bp, probe
cttgcttggacggctggagtaacaa

SEQ ID NO: 172483 - DNA, 25 bp, probe
cttgcttggacagctgggagtaaca

SEQ ID NO: 172484 - DNA, 25 bp, probe
cttgggagccacgggattgtaactg

SEQ ID NO: 172485 - DNA, 25 bp, probe
cttggggattgcagcgttctcgaag

SEQ ID NO: 172486 - DNA, 25 bp, probe
cttgggagattcatgcgatgtgtcc

SEQ ID NO: 172487 - DNA, 25 bp, probe
cattgggaacatttgcctcattctc

SEQ ID NO: 172488 - DNA, 25 bp, probe
cttgtgtgaaagtggctggttggga

SEQ ID NO: 172489 - DNA, 25 bp, probe
cttgctggaaaattagttggctgga

SEQ ID NO: 172490 - DNA, 25 bp, probe
cttctggaccacagagttttggaag

SEQ ID NO: 172491 - DNA, 25 bp, probe
cttccacaccctgggttctgagaaa

SEQ ID NO: 172492 - DNA, 25 bp, probe
cattgaccccaggggtgtgctggac

SEQ ID NO: 172493 - DNA, 25 bp, probe
cattgacctcaactacatggtttac

SEQ ID NO: 172494 - DNA, 25 bp, probe
cattgggctgcttgctgtatgagtt

SEQ ID NO: 172495 - DNA, 25 bp, probe
cattgagacttgtgtagatgcttct

SEQ ID NO: 172496 - DNA, 25 bp, probe
cattgtggcttgtcatgtcagcccc

SEQ ID NO: 172497 - DNA, 25 bp, probe
cttgtgtcatgtgttcagctggcca

SEQ ID NO: 172498 - DNA, 25 bp, probe
cttgggcagtgcctatgcctgggaa

SEQ ID NO: 172499 - DNA, 25 bp, probe
cttgggcagtgcctatgcctgggaa

SEQ ID NO: 172500 - DNA, 25 bp, probe
cttgggaggctcaaccacgagaatc

SEQ ID NO: 172501 - DNA, 25 bp, probe
cttggcaaggcttaaaggctgacac

SEQ ID NO: 172502 - DNA, 25 bp, probe
cttgtcagaggtggaaacactacag

SEQ ID NO: 172503 - DNA, 25 bp, probe
ctttatgaacttcaccaccactagt

SEQ ID NO: 172504 - DNA, 25 bp, probe
ctaaagcaagggtaccgccacatac

SEQ ID NO: 172505 - DNA, 25 bp, probe
cttcaactggggttcccaccaatgc

SEQ ID NO: 172506 - DNA, 25 bp, probe
cttcaactggggttcccaccaatgc

SEQ ID NO: 172507 - DNA, 25 bp, probe
ctctcaacggggttcgatttaagcg

SEQ ID NO: 172508 - DNA, 25 bp, probe
cttccggggcatttggacctgtagg

SEQ ID NO: 172509 - DNA, 25 bp, probe
cttcactgtattctttactttaggt

SEQ ID NO: 172510 - DNA, 25 bp, probe
cttgcacgtattttaatagcgtcat

SEQ ID NO: 172511 - DNA, 25 bp, probe
cttgacgtgttttaacagcaacagc

SEQ ID NO: 172512 - DNA, 25 bp, probe
cttgacagctttgaaactgataaag

SEQ ID NO: 172513 - DNA, 25 bp, probe
cttggttgttgcagttcagacaaat

SEQ ID NO: 172514 - DNA, 25 bp, probe
cttaggtttcattgcttcagacatg

SEQ ID NO: 172515 - DNA, 25 bp, probe
cattggcgttatttgtcatcacaag

SEQ ID NO: 172516 - DNA, 25 bp, probe
cattggcgttatttgtcatcacaag

SEQ ID NO: 172517 - DNA, 25 bp, probe
cttggcgtcatactctaccatatgg

SEQ ID NO: 172518 - DNA, 25 bp, probe
cttggcctaatgctaatgagattgt

SEQ ID NO: 172519 - DNA, 25 bp, probe
cttggcctcaagttcaatatggaga

SEQ ID NO: 172520 - DNA, 25 bp, probe
cttggcctcaagttcaatatggaga

SEQ ID NO: 172521 - DNA, 25 bp, probe
cattgtgccacaacattcaaagaag

SEQ ID NO: 172522 - DNA, 25 bp, probe
cattgtctgccagcttcgtatggat

SEQ ID NO: 172523 - DNA, 25 bp, probe
cattgtctctgggttgcggcaagaa

SEQ ID NO: 172524 - DNA, 25 bp, probe
cattgatgcctgccagggcgacagc

SEQ ID NO: 172525 - DNA, 25 bp, probe
cttgggctgcagcgagctcatcagc

SEQ ID NO: 172526 - DNA, 25 bp, probe
cttgggctgtgtcaacagcagcctc

SEQ ID NO: 172527 - DNA, 25 bp, probe
cttggagctctttccaaatggacta

SEQ ID NO: 172528 - DNA, 25 bp, probe
ctagttgctcctctcaacatgggta

SEQ ID NO: 172529 - DNA, 25 bp, probe
cttgtatctcctttctcgggaattg

SEQ ID NO: 172530 - DNA, 25 bp, probe
cattgttctctttggatccagggat

SEQ ID NO: 172531 - DNA, 25 bp, probe
cattgtgattttcgacctcatgggc

SEQ ID NO: 172532 - DNA, 25 bp, probe
cttggagaagggtcctatggcagcg

SEQ ID NO: 172533 - DNA, 25 bp, probe
ctgggaagaagtggcctcaaaggca

SEQ ID NO: 172534 - DNA, 25 bp, probe
cattggggacgggcagtacaagcgc

SEQ ID NO: 172535 - DNA, 25 bp, probe
cttgtccgatcctgagttgcagagg

SEQ ID NO: 172536 - DNA, 25 bp, probe
cttgtgccaaccagatttacagatt

SEQ ID NO: 172537 - DNA, 25 bp, probe
cttgtcctaaagcaattgaagttgt

SEQ ID NO: 172538 - DNA, 25 bp, probe
cttgtttaaagtgagagaatctggc

SEQ ID NO: 172539 - DNA, 25 bp, probe
cttgtttacacaccctggtactggg

SEQ ID NO: 172540 - DNA, 25 bp, probe
cttctggacaaacttctgcgatacg

SEQ ID NO: 172541 - DNA, 25 bp, probe
cttctggacaaacttctgcgatacg

SEQ ID NO: 172542 - DNA, 25 bp, probe
cttgtcagacaatggctataaactg

SEQ ID NO: 172543 - DNA, 25 bp, probe
cttgtctgacaacttcaagaagagc

SEQ ID NO: 172544 - DNA, 25 bp, probe
cttgatctacagcttgaggaataag

SEQ ID NO: 172545 - DNA, 25 bp, probe
cattgtcttcctccaaggagttaga

SEQ ID NO: 172546 - DNA, 25 bp, probe
cttcatcccgggtgtggttatggcc

SEQ ID NO: 172547 - DNA, 25 bp, probe
cttcttcgtgggctcttttaggaag

SEQ ID NO: 172548 - DNA, 25 bp, probe
cttcgtcgtgagatgtttgttttca

SEQ ID NO: 172549 - DNA, 25 bp, probe
cttgcggagtacctgttggtttgtc

SEQ ID NO: 172550 - DNA, 25 bp, probe
cttccgtgtactcgggaatccggca

SEQ ID NO: 172551 - DNA, 25 bp, probe
cttcggggacacagtgaaccctgac

SEQ ID NO: 172552 - DNA, 25 bp, probe
cttcgggatgactcgggacgtgtat

SEQ ID NO: 172553 - DNA, 25 bp, probe
gttgggccatattttaggacaggta

SEQ ID NO: 172554 - DNA, 25 bp, probe
cattggctccaattttagagaactt

SEQ ID NO: 172555 - DNA, 25 bp, probe
cttggtcactactttagagccactc

SEQ ID NO: 172556 - DNA, 25 bp, probe
cttggcccttgctttgtatgcaacc

SEQ ID NO: 172557 - DNA, 25 bp, probe
cattggccgcgtgggggcagaagtg

SEQ ID NO: 172558 - DNA, 25 bp, probe
cttgcagccgtgtggacgaagtttg

SEQ ID NO: 172559 - DNA, 25 bp, probe
cttgacatctgtgagtgactgaggg

SEQ ID NO: 172560 - DNA, 25 bp, probe
cttgcacatgcatgctcagtgaagc

SEQ ID NO: 172561 - DNA, 25 bp, probe
cttgcatcatgaagatggtgtgtgg

SEQ ID NO: 172562 - DNA, 25 bp, probe
cttgcatcatgaagatggtgtgtgg

SEQ ID NO: 172563 - DNA, 25 bp, probe
cttgtagttacacttgtgtttcaat

SEQ ID NO: 172564 - DNA, 25 bp, probe
cttgggtgctacctcagtgttgtag

SEQ ID NO: 172565 - DNA, 25 bp, probe
cttggctagatcactcactgttgta

SEQ ID NO: 172566 - DNA, 25 bp, probe
cttgagtttgctcacagtgcctgtg

SEQ ID NO: 172567 - DNA, 25 bp, probe
cttgttctatggcactggccttggg

SEQ ID NO: 172568 - DNA, 25 bp, probe
cattgtgtttgggccgacactgctg

SEQ ID NO: 172569 - DNA, 25 bp, probe
cattggcttctgtgggccagtgggg

SEQ ID NO: 172570 - DNA, 25 bp, probe
cttggcaccttcgggcaaggggagg

SEQ ID NO: 172571 - DNA, 25 bp, probe
cttagcccccggcacaggatggggc

SEQ ID NO: 172572 - DNA, 25 bp, probe
cttggctcccctgctgaaggtgggg

SEQ ID NO: 172573 - DNA, 25 bp, probe
cttggctcccctgctgaaggtgggg

SEQ ID NO: 172574 - DNA, 25 bp, probe
cttcctccccccaaatattgggcag

SEQ ID NO: 172575 - DNA, 25 bp, probe
cttctcccctaccataaaatagtca

SEQ ID NO: 172576 - DNA, 25 bp, probe
cttccaggttacctaaaaatgcaat

SEQ ID NO: 172577 - DNA, 25 bp, probe
cttgccaacttacatcagaaaagca

SEQ ID NO: 172578 - DNA, 25 bp, probe
cttccaactgaatatgagaggaacg

SEQ ID NO: 172579 - DNA, 25 bp, probe
cttccacagtcagcacggggatcac

SEQ ID NO: 172580 - DNA, 25 bp, probe
cttgccgagtccgacggtgagacgc

SEQ ID NO: 172581 - DNA, 25 bp, probe
cttgcaaattacgacctgaaaatgg

SEQ ID NO: 172582 - DNA, 25 bp, probe
cttgagcttctacaatctgatataa

SEQ ID NO: 172583 - DNA, 25 bp, probe
cttgagcaatgttgggacattccca

SEQ ID NO: 172584 - DNA, 25 bp, probe
cattgggatgtatggtttctctcaa

SEQ ID NO: 172585 - DNA, 25 bp, probe
cattgggatgtatggtttctctcaa

SEQ ID NO: 172586 - DNA, 25 bp, probe
cttggtcattttggtgtgctattca

SEQ ID NO: 172587 - DNA, 25 bp, probe
cttggtcattttggtgtgctattca

SEQ ID NO: 172588 - DNA, 25 bp, probe
cttgtttgtattggtgtgtataaaa

SEQ ID NO: 172589 - DNA, 25 bp, probe
cttgtctattcctgtctgtataaag

SEQ ID NO: 172590 - DNA, 25 bp, probe
cttgtcttgggctggacatataatt

SEQ ID NO: 172591 - DNA, 25 bp, probe
cttggctgtgggtatggcatctgaa

SEQ ID NO: 172592 - DNA, 25 bp, probe
cttggctgtgggtatggcatctgaa

SEQ ID NO: 172593 - DNA, 25 bp, probe
cttgatggcatcagttctgacgaat

SEQ ID NO: 172594 - DNA, 25 bp, probe
cttgatggcatcagttctgacgaat

SEQ ID NO: 172595 - DNA, 25 bp, probe
cttgtggatcattcttgctgcttaa

SEQ ID NO: 172596 - DNA, 25 bp, probe
cattgtggctcctatctgtgttttg

SEQ ID NO: 172597 - DNA, 25 bp, probe
cttgtggcacacaactgtggtccca

SEQ ID NO: 172598 - DNA, 25 bp, probe
cttgggcaatatactttgccacttc

SEQ ID NO: 172599 - DNA, 25 bp, probe
cttggactagcaatttatgcttctt

SEQ ID NO: 172600 - DNA, 25 bp, probe
cttggacatcacagccctgatggct

SEQ ID NO: 172601 - DNA, 25 bp, probe
cttggactccacactcagtggtgcc

SEQ ID NO: 172602 - DNA, 25 bp, probe
cttctttggccaagtagtggcagcc

SEQ ID NO: 172603 - DNA, 25 bp, probe
cttgcatttcagacctgggctggca

SEQ ID NO: 172604 - DNA, 25 bp, probe
cttgcatgattcttcttggtctact

SEQ ID NO: 172605 - DNA, 25 bp, probe
cttgtgtctcttgcatgattcttct

SEQ ID NO: 172606 - DNA, 25 bp, probe
cttgtgccattcagatgttcttctc

SEQ ID NO: 172607 - DNA, 25 bp, probe
cttgtgactctcagcgtatgttcag

SEQ ID NO: 172608 - DNA, 25 bp, probe
cttgatgacttggagctctttccaa

SEQ ID NO: 172609 - DNA, 25 bp, probe
cttgatgaccagtatgtcagttcag

SEQ ID NO: 172610 - DNA, 25 bp, probe
cttgtggccaattatccatatgatg

SEQ ID NO: 172611 - DNA, 25 bp, probe
cttgtgttacatcatctcattaagg

SEQ ID NO: 172612 - DNA, 25 bp, probe
cttgtgttacatcatctcattaagg

SEQ ID NO: 172613 - DNA, 25 bp, probe
cttgtgacccagcagctatctaagt

SEQ ID NO: 172614 - DNA, 25 bp, probe
cttgtccccgtgttattaatcttca

SEQ ID NO: 172615 - DNA, 25 bp, probe
cttacccgcaggttttcagatctag

SEQ ID NO: 172616 - DNA, 25 bp, probe
cttcaggcacaggcgttttcaggaa

SEQ ID NO: 172617 - DNA, 25 bp, probe
ctacgtcacttcccttgtgggaatg

SEQ ID NO: 172618 - DNA, 25 bp, probe
ctacgtcacttcccttgtgggaatg

SEQ ID NO: 172619 - DNA, 25 bp, probe
cttcggcctaatcatttgggagatg

SEQ ID NO: 172620 - DNA, 25 bp, probe
cattggagagaagtctttccggagg

SEQ ID NO: 172621 - DNA, 25 bp, probe
cttgtgacaagagctacccagggcg

SEQ ID NO: 172622 - DNA, 25 bp, probe
cttgtgacaagagctacccagggcg

SEQ ID NO: 172623 - DNA, 25 bp, probe
cttggagacagtctgacccagtgcc

SEQ ID NO: 172624 - DNA, 25 bp, probe
cttggagaaggattactgtagatgc

SEQ ID NO: 172625 - DNA, 25 bp, probe
cttgtgccaatccatttctgtatgc

SEQ ID NO: 172626 - DNA, 25 bp, probe
cttgtgctaatcctctttttctagt

SEQ ID NO: 172627 - DNA, 25 bp, probe
cttgctgtaacacttgaccttaact

SEQ ID NO: 172628 - DNA, 25 bp, probe
cttgttcagatacatggctcctaga

SEQ ID NO: 172629 - DNA, 25 bp, probe
cttgttcagatacatggctcctaga

SEQ ID NO: 172630 - DNA, 25 bp, probe
cttgcttctattccttccaatgaga

SEQ ID NO: 172631 - DNA, 25 bp, probe
cttgcttctattccttccaatgaga

SEQ ID NO: 172632 - DNA, 25 bp, probe
cttgcttcctatgctagtattggaa

SEQ ID NO: 172633 - DNA, 25 bp, probe
cttgtccctggtgcagaggtgagca

SEQ ID NO: 172634 - DNA, 25 bp, probe
cttggccctgttgtaggcttgttct

SEQ ID NO: 172635 - DNA, 25 bp, probe
cttcgtgcttttgtacagacctttg

SEQ ID NO: 172636 - DNA, 25 bp, probe
cttcgtgcttttgtacagacctttg

SEQ ID NO: 172637 - DNA, 25 bp, probe
cttcggcttgttactgccttttgtc

SEQ ID NO: 172638 - DNA, 25 bp, probe
cttcggcttgttactgccttttgtc

SEQ ID NO: 172639 - DNA, 25 bp, probe
ctttgggcttctatgacttttatgg

SEQ ID NO: 172640 - DNA, 25 bp, probe
ctgtcagggcggccctgacttctac

SEQ ID NO: 172641 - DNA, 25 bp, probe
cttcaaggctggcttaagtataaaa

SEQ ID NO: 172642 - DNA, 25 bp, probe
ctacagaatcatgagttactttaaa

SEQ ID NO: 172643 - DNA, 25 bp, probe
ctctcaggagtatcttacctgtaaa

SEQ ID NO: 172644 - DNA, 25 bp, probe
cttgctggagaaccgatcccttaga

SEQ ID NO: 172645 - DNA, 25 bp, probe
cttgccgaggagccaggcaacttca

SEQ ID NO: 172646 - DNA, 25 bp, probe
cttcccagaatgcacctgacttatg

SEQ ID NO: 172647 - DNA, 25 bp, probe
cttgtcaggagacggctcttctttg

SEQ ID NO: 172648 - DNA, 25 bp, probe
cttggggagattgctgtgtctatcg

SEQ ID NO: 172649 - DNA, 25 bp, probe
cttggcaaaattggatttcttcaaa

SEQ ID NO: 172650 - DNA, 25 bp, probe
cttggcagaagatgagtttgtgtac

SEQ ID NO: 172651 - DNA, 25 bp, probe
cttggcacaatgagtgtctctgctg

SEQ ID NO: 172652 - DNA, 25 bp, probe
cttggcacctgaagtgcttctggaa

SEQ ID NO: 172653 - DNA, 25 bp, probe
cttggcacctgaagtgcttctggaa

SEQ ID NO: 172654 - DNA, 25 bp, probe
cttggcaggtgaggtgcgtctgtgc

SEQ ID NO: 172655 - DNA, 25 bp, probe
cttgcagaggtgattctggcggccc

SEQ ID NO: 172656 - DNA, 25 bp, probe
cttgaaggtgtgttctccaggacag

SEQ ID NO: 172657 - DNA, 25 bp, probe
ctataaggggtttcctgctggacag

SEQ ID NO: 172658 - DNA, 25 bp, probe
cttgcaaagagcagctacctggcaa

SEQ ID NO: 172659 - DNA, 25 bp, probe
cttgacatgctgtattccacgaggc

SEQ ID NO: 172660 - DNA, 25 bp, probe
cttgatgatgcccctagagctgagg

SEQ ID NO: 172661 - DNA, 25 bp, probe
cttgtgctgctcatgccatactgag

SEQ ID NO: 172662 - DNA, 25 bp, probe
cttgaccgcattggcaaaggctcat

SEQ ID NO: 172663 - DNA, 25 bp, probe
cttcctcgcttccaagaattgcatc

SEQ ID NO: 172664 - DNA, 25 bp, probe
cttgacctgcttctgaaagtgccac

SEQ ID NO: 172665 - DNA, 25 bp, probe
cttggactattcagggagctgcaaa

SEQ ID NO: 172666 - DNA, 25 bp, probe
cttgtacttgtcaagtcgacatcta

SEQ ID NO: 172667 - DNA, 25 bp, probe
cttgctacttctacgagcaggcctt

SEQ ID NO: 172668 - DNA, 25 bp, probe
cttgcatttctagcgagctggcgtg

SEQ ID NO: 172669 - DNA, 25 bp, probe
cttgtgttctcagaatctgatgctt

SEQ ID NO: 172670 - DNA, 25 bp, probe
cttgtttgctcaagtctttctgctt

SEQ ID NO: 172671 - DNA, 25 bp, probe
cttgtttgctcaagtctttctgctt

SEQ ID NO: 172672 - DNA, 25 bp, probe
cttcttccccagggttctgtattgc

SEQ ID NO: 172673 - DNA, 25 bp, probe
cttcttccccagggttctgtattgc

SEQ ID NO: 172674 - DNA, 25 bp, probe
cttcctcaccaatgacattcttttc

SEQ ID NO: 172675 - DNA, 25 bp, probe
cttgacccctaatgctgcatatgtt

SEQ ID NO: 172676 - DNA, 25 bp, probe
cttgcaacctcttttcgtgatgggc

SEQ ID NO: 172677 - DNA, 25 bp, probe
cttgcatgagccacagttcagggat

SEQ ID NO: 172678 - DNA, 25 bp, probe
cttgagacctagcaatcagtcaggg

SEQ ID NO: 172679 - DNA, 25 bp, probe
cttgcagcagctcgagggaatgtag

SEQ ID NO: 172680 - DNA, 25 bp, probe
cttgagagtgacccaaagatgagat

SEQ ID NO: 172681 - DNA, 25 bp, probe
cttgaaggactagagcagtgtgtat

SEQ ID NO: 172682 - DNA, 25 bp, probe
cttccaggactcggagcctgtcctg

SEQ ID NO: 172683 - DNA, 25 bp, probe
cttccaggattcacggtgcacatgc

SEQ ID NO: 172684 - DNA, 25 bp, probe
cttccagacttcggctgagcttgga

SEQ ID NO: 172685 - DNA, 25 bp, probe
cttccgagttgccagtggccgtaac

SEQ ID NO: 172686 - DNA, 25 bp, probe
cttccaagaccacatgatccgtaac

SEQ ID NO: 172687 - DNA, 25 bp, probe
cttcaaccaaagggatccacaaagc

SEQ ID NO: 172688 - DNA, 25 bp, probe
cttcccgaaagtgcatccacagaga

SEQ ID NO: 172689 - DNA, 25 bp, probe
cttcgacgaggagtacttcagcaac

SEQ ID NO: 172690 - DNA, 25 bp, probe
cttccaggagcgatcgtttgcaacc

SEQ ID NO: 172691 - DNA, 25 bp, probe
cttccttggggatgttcatgggccc

SEQ ID NO: 172692 - DNA, 25 bp, probe
cttcttgggaggagtggtgggtgca

SEQ ID NO: 172693 - DNA, 25 bp, probe
cttgggagggtgaggcgggtggatc

SEQ ID NO: 172694 - DNA, 25 bp, probe
cttgggaggagtggtgggtgcagtc

SEQ ID NO: 172695 - DNA, 25 bp, probe
cttgggaggagtggtgggtgcagtc

SEQ ID NO: 172696 - DNA, 25 bp, probe
cttggggaaatcaggtgcagcggcc

SEQ ID NO: 172697 - DNA, 25 bp, probe
cttgggccaccaaaggtggtggcca

SEQ ID NO: 172698 - DNA, 25 bp, probe
cttggtgccgccaggagctagcggc

SEQ ID NO: 172699 - DNA, 25 bp, probe
cttggtgccagccatggtggagacc

SEQ ID NO: 172700 - DNA, 25 bp, probe
cttggtgccaccattgagaactcca

SEQ ID NO: 172701 - DNA, 25 bp, probe
cttccatcaattctgggtacccatg

SEQ ID NO: 172702 - DNA, 25 bp, probe
cttccaacactcagtgtttctcctg

SEQ ID NO: 172703 - DNA, 25 bp, probe
cttccaacactcagtgtttctcctg

SEQ ID NO: 172704 - DNA, 25 bp, probe
cttccaaggtcaagccatgtgtctg

SEQ ID NO: 172705 - DNA, 25 bp, probe
cttccaacgtcattgatcactttgc

SEQ ID NO: 172706 - DNA, 25 bp, probe
cttccaacgtcattgatcactttgc

SEQ ID NO: 172707 - DNA, 25 bp, probe
cttccaaactctatcggctgatgca

SEQ ID NO: 172708 - DNA, 25 bp, probe
cttccaaactctatcggctgatgca

SEQ ID NO: 172709 - DNA, 25 bp, probe
cttccagccctacatcatggctgac

SEQ ID NO: 172710 - DNA, 25 bp, probe
cttccagatccttcgagcaattgac

SEQ ID NO: 172711 - DNA, 25 bp, probe
cttgtcagcaagatccagattggca

SEQ ID NO: 172712 - DNA, 25 bp, probe
cttgtcagaagatcctgtggaagac

SEQ ID NO: 172713 - DNA, 25 bp, probe
cttgctaatacactccttgaggaga

SEQ ID NO: 172714 - DNA, 25 bp, probe
cttgtcatacacccacctggtggat

SEQ ID NO: 172715 - DNA, 25 bp, probe
cttgtcatacacccacctggtggat

SEQ ID NO: 172716 - DNA, 25 bp, probe
cttgcccatagggctgcctggttga

SEQ ID NO: 172717 - DNA, 25 bp, probe
cttccagcattgtcctgggagtctg

SEQ ID NO: 172718 - DNA, 25 bp, probe
cttccgcgacgaggaggagttgcgc

SEQ ID NO: 172719 - DNA, 25 bp, probe
cttcctgcgggtggggagactgagc

SEQ ID NO: 172720 - DNA, 25 bp, probe
cttcctgcgggtggggagactgagc

SEQ ID NO: 172721 - DNA, 25 bp, probe
cttcgtcgggagccagctgaacggc

SEQ ID NO: 172722 - DNA, 25 bp, probe
cttgggccggagggcaagggatgcc

SEQ ID NO: 172723 - DNA, 25 bp, probe
cttgggcagggccgtgacacaggtt

SEQ ID NO: 172724 - DNA, 25 bp, probe
cttgaccaggagcctgatgtccgga

SEQ ID NO: 172725 - DNA, 25 bp, probe
cttgaccggtcttgttcacataggc

SEQ ID NO: 172726 - DNA, 25 bp, probe
cttgctgccggagcgttacatcaaa

SEQ ID NO: 172727 - DNA, 25 bp, probe
cttcccaagaactttcaagccaaca

SEQ ID NO: 172728 - DNA, 25 bp, probe
cttcccaagaactttcaagccaaca

SEQ ID NO: 172729 - DNA, 25 bp, probe
cttgcgcctagagactgtagaccct

SEQ ID NO: 172730 - DNA, 25 bp, probe
cttgcatggtaagacggtcagccgc

SEQ ID NO: 172731 - DNA, 25 bp, probe
cttgtggttgaggcagggccatccc

SEQ ID NO: 172732 - DNA, 25 bp, probe
cttgtggttgactagggctgggagc

SEQ ID NO: 172733 - DNA, 25 bp, probe
cttgtggttgactagggctgggagc

SEQ ID NO: 172734 - DNA, 25 bp, probe
cttggtggtcaggatgggtgggagc

SEQ ID NO: 172735 - DNA, 25 bp, probe
ctaggcttgattcatggagggaggg

SEQ ID NO: 172736 - DNA, 25 bp, probe
cttcgctattcccaggcagggaggg

SEQ ID NO: 172737 - DNA, 25 bp, probe
cttcgccttcgatggggcacatcgt

SEQ ID NO: 172738 - DNA, 25 bp, probe
cttcccatgtagagtggccaagctt

SEQ ID NO: 172739 - DNA, 25 bp, probe
cttgccttgttgatgtggacatgag

SEQ ID NO: 172740 - DNA, 25 bp, probe
cttctctgctggcttggtggatggt

SEQ ID NO: 172741 - DNA, 25 bp, probe
cttccgcaggaagtggtcttggtgc

SEQ ID NO: 172742 - DNA, 25 bp, probe
cttccgcagagggcaggttggccaa

SEQ ID NO: 172743 - DNA, 25 bp, probe
cttccccaggcctaatctggcctgt

SEQ ID NO: 172744 - DNA, 25 bp, probe
cttccctggagttaatagagtgatt

SEQ ID NO: 172745 - DNA, 25 bp, probe
cttgcccagagatcttacgaggctt

SEQ ID NO: 172746 - DNA, 25 bp, probe
cttccacagtcatttcttctaggtt

SEQ ID NO: 172747 - DNA, 25 bp, probe
cttcctaaatttcagtaggctttat

SEQ ID NO: 172748 - DNA, 25 bp, probe
cttctgtgacttctgccttaagttt

SEQ ID NO: 172749 - DNA, 25 bp, probe
cttctgccacttcccaggtaagcag

SEQ ID NO: 172750 - DNA, 25 bp, probe
cttctgccacttcccaggtaagcag

SEQ ID NO: 172751 - DNA, 25 bp, probe
cttccacccatggtcaggacagtca

SEQ ID NO: 172752 - DNA, 25 bp, probe
ctttacccaccagagacagtacaga

SEQ ID NO: 172753 - DNA, 25 bp, probe
ctttccctccgaggccaaggacaag

SEQ ID NO: 172754 - DNA, 25 bp, probe
ctttccctccgaggccaaggacaag

SEQ ID NO: 172755 - DNA, 25 bp, probe
cttcccccacggctcaagagaagat

SEQ ID NO: 172756 - DNA, 25 bp, probe
cttccccttctgggaaagaattatg

SEQ ID NO: 172757 - DNA, 25 bp, probe
cttcggccttccgtgatggaaacca

SEQ ID NO: 172758 - DNA, 25 bp, probe
cttccgctgtacctgcgtctaaaaa

SEQ ID NO: 172759 - DNA, 25 bp, probe
cttgcccttcaacttgactcattaa

SEQ ID NO: 172760 - DNA, 25 bp, probe
cttgtgccttgcaactctgaactgt

SEQ ID NO: 172761 - DNA, 25 bp, probe
cttccatccagttctctgaatcttt

SEQ ID NO: 172762 - DNA, 25 bp, probe
cttgacccagtctactgagatctgg

SEQ ID NO: 172763 - DNA, 25 bp, probe
cttgatcaaaggtccgcttctggca

SEQ ID NO: 172764 - DNA, 25 bp, probe
cttcatgtttgaaagctcgccgggc

SEQ ID NO: 172765 - DNA, 25 bp, probe
cttcatgtttgaaagctcgccgggc

SEQ ID NO: 172766 - DNA, 25 bp, probe
cttcatgtttgaaagctcgccgggc

SEQ ID NO: 172767 - DNA, 25 bp, probe
cttctgcctgaaaagtcccaaggag

SEQ ID NO: 172768 - DNA, 25 bp, probe
cttccatctgggagccccaagaggg

SEQ ID NO: 172769 - DNA, 25 bp, probe
cttatattgggatgacctgaagaga

SEQ ID NO: 172770 - DNA, 25 bp, probe
ctatcaatcgggccaatccgaagtc

SEQ ID NO: 172771 - DNA, 25 bp, probe
cttccctaagtactccagcagagtc

SEQ ID NO: 172772 - DNA, 25 bp, probe
cttccctaagtactccagcagagtc

SEQ ID NO: 172773 - DNA, 25 bp, probe
cttccagcttcaagaggcgtaggtc

SEQ ID NO: 172774 - DNA, 25 bp, probe
cttgttgctgtagatgtgcgtgcag

SEQ ID NO: 172775 - DNA, 25 bp, probe
cttggtgctggagttgctggtgttg

SEQ ID NO: 172776 - DNA, 25 bp, probe
cttgggcttggcaatgctggtggct

SEQ ID NO: 172777 - DNA, 25 bp, probe
cttgggcaaggcgatgcaggtccat

SEQ ID NO: 172778 - DNA, 25 bp, probe
cttgaggaagaggctcgcctccagt

SEQ ID NO: 172779 - DNA, 25 bp, probe
cttaggaagagccttccacccaggg

SEQ ID NO: 172780 - DNA, 25 bp, probe
cttcagagagtacaccaagccctgg

SEQ ID NO: 172781 - DNA, 25 bp, probe
cttcagagagtacaccaagccctgg

SEQ ID NO: 172782 - DNA, 25 bp, probe
cttgcagggtatctccacagcatgc

SEQ ID NO: 172783 - DNA, 25 bp, probe
cttacaggcgtttcgagctgatccg

SEQ ID NO: 172784 - DNA, 25 bp, probe
cttctcaagggtgcgagctcatccc

SEQ ID NO: 172785 - DNA, 25 bp, probe
cttgacaatggggtcaggccccaga

SEQ ID NO: 172786 - DNA, 25 bp, probe
cttgacaagaaccatcaagttccaa

SEQ ID NO: 172787 - DNA, 25 bp, probe
cttcacgacgacctcagtaactaca

SEQ ID NO: 172788 - DNA, 25 bp, probe
cttgtcctcgagccatagtgaactg

SEQ ID NO: 172789 - DNA, 25 bp, probe
cttgccacattaaattgataacatg

SEQ ID NO: 172790 - DNA, 25 bp, probe
cttgacaatgtaacaggtcttattg

SEQ ID NO: 172791 - DNA, 25 bp, probe
cttgaatgagaaacgtgtttagtat

SEQ ID NO: 172792 - DNA, 25 bp, probe
cttgaaatgcagataatgtttactt

SEQ ID NO: 172793 - DNA, 25 bp, probe
cttgggaggctttcaattgtatttt

SEQ ID NO: 172794 - DNA, 25 bp, probe
cttgaagtgttttcatattgcttct

SEQ ID NO: 172795 - DNA, 25 bp, probe
cttgggttaatccatgttcaattca

SEQ ID NO: 172796 - DNA, 25 bp, probe
cttgcgggtcaagcttaccgtcaga

SEQ ID NO: 172797 - DNA, 25 bp, probe
ctttagagacaagctttgccccagg

SEQ ID NO: 172798 - DNA, 25 bp, probe
cttatctaacaaacatttttccagg

SEQ ID NO: 172799 - DNA, 25 bp, probe
cttgaggaaacaacagctttaaaag

SEQ ID NO: 172800 - DNA, 25 bp, probe
cttcggggttctcctttatgaaatg

SEQ ID NO: 172801 - DNA, 25 bp, probe
ctctggaaagtgggtttttcaaatg

SEQ ID NO: 172802 - DNA, 25 bp, probe
cttgccagaggggaatgtttttaat

SEQ ID NO: 172803 - DNA, 25 bp, probe
cttgctcatgaccgacaagggttgt

SEQ ID NO: 172804 - DNA, 25 bp, probe
ctaagaaacgactgggttgtcatcc

SEQ ID NO: 172805 - DNA, 25 bp, probe
ctatgagaacagccccgggggttca

SEQ ID NO: 172806 - DNA, 25 bp, probe
cttgagcagatacaccgaggagtta

SEQ ID NO: 172807 - DNA, 25 bp, probe
cttgagcttatcatgccaagggtta

SEQ ID NO: 172808 - DNA, 25 bp, probe
cttgcacttgagagcactagggagc

SEQ ID NO: 172809 - DNA, 25 bp, probe
ctagcctggagaagagcaaaatgga

SEQ ID NO: 172810 - DNA, 25 bp, probe
ctagcctggagaagagcaaaatgga

SEQ ID NO: 172811 - DNA, 25 bp, probe
ctacctggaatgctgggaagtgcta

SEQ ID NO: 172812 - DNA, 25 bp, probe
cttcctggctaccatgggccagtgc

SEQ ID NO: 172813 - DNA, 25 bp, probe
cttccgagatgttctgggcacgggg

SEQ ID NO: 172814 - DNA, 25 bp, probe
cttccaaagggccaggccgagctga

SEQ ID NO: 172815 - DNA, 25 bp, probe
cttccaaagggccaggccgagctga

SEQ ID NO: 172816 - DNA, 25 bp, probe
cttccaacaaccttgaccgagtgaa

SEQ ID NO: 172817 - DNA, 25 bp, probe
cttcctacacccttggacttgagga

SEQ ID NO: 172818 - DNA, 25 bp, probe
cttcaaaacctttgtgttcgaggag

SEQ ID NO: 172819 - DNA, 25 bp, probe
cttcgacaacctctattactgggac

SEQ ID NO: 172820 - DNA, 25 bp, probe
cttccactcccgaatttactgagga

SEQ ID NO: 172821 - DNA, 25 bp, probe
cttacctcccaaaggttctgcaggg

SEQ ID NO: 172822 - DNA, 25 bp, probe
cttactccccactgatggaccagtg

SEQ ID NO: 172823 - DNA, 25 bp, probe
cttgttgccccactaaggaatcact

SEQ ID NO: 172824 - DNA, 25 bp, probe
cttgatcgccctgtgataggatcta

SEQ ID NO: 172825 - DNA, 25 bp, probe
cttgcccatgccattaaggcattca

SEQ ID NO: 172826 - DNA, 25 bp, probe
cttgctgcacagacatattagaaga

SEQ ID NO: 172827 - DNA, 25 bp, probe
cttgctgtttatttatgacagaaca

SEQ ID NO: 172828 - DNA, 25 bp, probe
cttgctcttctttctagaatgtcca

SEQ ID NO: 172829 - DNA, 25 bp, probe
cttcatcctgaaccggaatgaccag

SEQ ID NO: 172830 - DNA, 25 bp, probe
cttatcttacactggatcaccaact

SEQ ID NO: 172831 - DNA, 25 bp, probe
cttacttaacctgaagctagacgag

SEQ ID NO: 172832 - DNA, 25 bp, probe
cttccttgaaccattatgctggcta

SEQ ID NO: 172833 - DNA, 25 bp, probe
cttgtcttagaggcctttcttgtat

SEQ ID NO: 172834 - DNA, 25 bp, probe
cttgttctaaagctatccattgtgt

SEQ ID NO: 172835 - DNA, 25 bp, probe
cttgtcctaatacgctatgtgcttg

SEQ ID NO: 172836 - DNA, 25 bp, probe
cttgatctgctgatagagtctgtgt

SEQ ID NO: 172837 - DNA, 25 bp, probe
cttgcagtgcgccaagttgctgctg

SEQ ID NO: 172838 - DNA, 25 bp, probe
cttgcagtgcgccaagttgctgctg

SEQ ID NO: 172839 - DNA, 25 bp, probe
cttgcaggagcgtcagttgcggggc

SEQ ID NO: 172840 - DNA, 25 bp, probe
cttgatggcagcccagtgtggccta

SEQ ID NO: 172841 - DNA, 25 bp, probe
cttgtggcacacgatgggcatctaa

SEQ ID NO: 172842 - DNA, 25 bp, probe
cttgctggattcatgcagccagctt

SEQ ID NO: 172843 - DNA, 25 bp, probe
cttctgcagactcatgcagccctat

SEQ ID NO: 172844 - DNA, 25 bp, probe
cttctgcagtgggtactcgtcagca

SEQ ID NO: 172845 - DNA, 25 bp, probe
cttgctgagctgggcttccaggaca

SEQ ID NO: 172846 - DNA, 25 bp, probe
cttgtgcactgcaccacgattgtga

SEQ ID NO: 172847 - DNA, 25 bp, probe
cttgcccatctagcactttggaaat

SEQ ID NO: 172848 - DNA, 25 bp, probe
cttccagccagaagcctgcctggaa

SEQ ID NO: 172849 - DNA, 25 bp, probe
cttgctgtaagaaactgcctggagc

SEQ ID NO: 172850 - DNA, 25 bp, probe
cttgtgcaagatgcctgctctctaa

SEQ ID NO: 172851 - DNA, 25 bp, probe
cttgtcagagttatgctgctctcaa

SEQ ID NO: 172852 - DNA, 25 bp, probe
cttgtgctcagcatgattctttaat

SEQ ID NO: 172853 - DNA, 25 bp, probe
cttgaatcagatggtgtcatttagt

SEQ ID NO: 172854 - DNA, 25 bp, probe
cttgcagagcaagggcatcatttac

SEQ ID NO: 172855 - DNA, 25 bp, probe
cttgcacggcaagggcatcattcac

SEQ ID NO: 172856 - DNA, 25 bp, probe
cttccacatcaaggcagccatccag

SEQ ID NO: 172857 - DNA, 25 bp, probe
cttcaagtaagcggcaacaagggtc

SEQ ID NO: 172858 - DNA, 25 bp, probe
cttcctgtaccccaatctaggaggc

SEQ ID NO: 172859 - DNA, 25 bp, probe
cttcctgtaccccaatctaggaggc

SEQ ID NO: 172860 - DNA, 25 bp, probe
cttcactgtcaccacgtacttggta

SEQ ID NO: 172861 - DNA, 25 bp, probe
cttcactgtcaccacgtacttggta

SEQ ID NO: 172862 - DNA, 25 bp, probe
cttgaatggatccagcgctacgggg

SEQ ID NO: 172863 - DNA, 25 bp, probe
cttgcaagtgtccctgtggctggac

SEQ ID NO: 172864 - DNA, 25 bp, probe
cttcgggatgaccatggactggatg

SEQ ID NO: 172865 - DNA, 25 bp, probe
cttgctctggcaacagggcttgtag

SEQ ID NO: 172866 - DNA, 25 bp, probe
cttcttggaccttggcgcttagtcc

SEQ ID NO: 172867 - DNA, 25 bp, probe
cttcttggaccttggcgcttagtcc

SEQ ID NO: 172868 - DNA, 25 bp, probe
cttcttggaccttggcgcttagtcc

SEQ ID NO: 172869 - DNA, 25 bp, probe
cttgcttgagaccttgaccattttg

SEQ ID NO: 172870 - DNA, 25 bp, probe
cttgttcacactctcacatgtttag

SEQ ID NO: 172871 - DNA, 25 bp, probe
cttgttcacactctcacatgtttag

SEQ ID NO: 172872 - DNA, 25 bp, probe
cttgttctactcatatatatctatc

SEQ ID NO: 172873 - DNA, 25 bp, probe
cttctggaactactttatctacgga

SEQ ID NO: 172874 - DNA, 25 bp, probe
cttctactggcttgtaatttaggga

SEQ ID NO: 172875 - DNA, 25 bp, probe
cttctatcaccgttggtttgatgtg

SEQ ID NO: 172876 - DNA, 25 bp, probe
cttctcctccagctggattactgtg

SEQ ID NO: 172877 - DNA, 25 bp, probe
cttcaacccgtgattccaagtgctt

SEQ ID NO: 172878 - DNA, 25 bp, probe
cttcaacccgtgattccaagtgctt

SEQ ID NO: 172879 - DNA, 25 bp, probe
cttcagcaccacacttacgaagtgt

SEQ ID NO: 172880 - DNA, 25 bp, probe
cttcgggagctcggtaccagagtgt

SEQ ID NO: 172881 - DNA, 25 bp, probe
cttcgacgtgctggtatacgggaat

SEQ ID NO: 172882 - DNA, 25 bp, probe
cttcgccagtcaactacgcgaggca

SEQ ID NO: 172883 - DNA, 25 bp, probe
cttcccatgatctctgaagctgggc

SEQ ID NO: 172884 - DNA, 25 bp, probe
cttccgctcagcggagaagctggcc

SEQ ID NO: 172885 - DNA, 25 bp, probe
cttccagctcagcagagtctatggc

SEQ ID NO: 172886 - DNA, 25 bp, probe
cttgccaaaggagtgattcagatgc

SEQ ID NO: 172887 - DNA, 25 bp, probe
cttgcatcagtaaggtggtgaagct

SEQ ID NO: 172888 - DNA, 25 bp, probe
cttctagagattttgttcaagatca

SEQ ID NO: 172889 - DNA, 25 bp, probe
cttgcaccgtcttagtttacacatc

SEQ ID NO: 172890 - DNA, 25 bp, probe
cttcaccagtttctgttccttgtgg

SEQ ID NO: 172891 - DNA, 25 bp, probe
cttcaccttgaacctgtttattggt

SEQ ID NO: 172892 - DNA, 25 bp, probe
cttccttggcaaggcttaaaggctg

SEQ ID NO: 172893 - DNA, 25 bp, probe
cttcctgggagatgcgtacgcagcc

SEQ ID NO: 172894 - DNA, 25 bp, probe
cttactggtgaaagcaaccatgcaa

SEQ ID NO: 172895 - DNA, 25 bp, probe
cttactggtgaaagcaaccatgcaa

SEQ ID NO: 172896 - DNA, 25 bp, probe
cttccatggtcatcagtgacctcag

SEQ ID NO: 172897 - DNA, 25 bp, probe
cttccaggtgaacggcatgttgatc

SEQ ID NO: 172898 - DNA, 25 bp, probe
cttccaggtgaacggcatgttgatc

SEQ ID NO: 172899 - DNA, 25 bp, probe
cttcctggctgaagcctcagtcatg

SEQ ID NO: 172900 - DNA, 25 bp, probe
cttcctgacgaagctcaacgagaat

SEQ ID NO: 172901 - DNA, 25 bp, probe
cttccagacgccaggctacgagatg

SEQ ID NO: 172902 - DNA, 25 bp, probe
cttccagaccgcggcctaataatga

SEQ ID NO: 172903 - DNA, 25 bp, probe
cttccagacggcgctgttcaaaggc

SEQ ID NO: 172904 - DNA, 25 bp, probe
cttccaacttgtgttctcagtgcag

SEQ ID NO: 172905 - DNA, 25 bp, probe
cttcagatttttgtgttagatcagg

SEQ ID NO: 172906 - DNA, 25 bp, probe
cttccagtattatcagttacacaag

SEQ ID NO: 172907 - DNA, 25 bp, probe
cttccgtctcgatgctgttaacaac

SEQ ID NO: 172908 - DNA, 25 bp, probe
cttccgttggtagcttgagtcccat

SEQ ID NO: 172909 - DNA, 25 bp, probe
cttaggacttgatcctgtggttgcc

SEQ ID NO: 172910 - DNA, 25 bp, probe
cttctgaactggtgcgcgtggttcc

SEQ ID NO: 172911 - DNA, 25 bp, probe
cttcgtggaggtgcgcagtggactc

SEQ ID NO: 172912 - DNA, 25 bp, probe
cttcaggaaaacggctgcggcctcg

SEQ ID NO: 172913 - DNA, 25 bp, probe
cttgaagaaacagagtggcctccct

SEQ ID NO: 172914 - DNA, 25 bp, probe
cttccagaaacactcagtgtcccct

SEQ ID NO: 172915 - DNA, 25 bp, probe
cttctttaacctcagcatctacctg

SEQ ID NO: 172916 - DNA, 25 bp, probe
cttcctgaaaccagagctgctaggc

SEQ ID NO: 172917 - DNA, 25 bp, probe
cttccgcagcatattgcggtgctga

SEQ ID NO: 172918 - DNA, 25 bp, probe
cttgccgccaacgatgcaagtgtga

SEQ ID NO: 172919 - DNA, 25 bp, probe
cttgctggctaatataaatgctttt

SEQ ID NO: 172920 - DNA, 25 bp, probe
cttctggcgcaagagaacatttcta

SEQ ID NO: 172921 - DNA, 25 bp, probe
cttctggacatttgccaactactta

SEQ ID NO: 172922 - DNA, 25 bp, probe
cttcgagttggagcggctcctctac

SEQ ID NO: 172923 - DNA, 25 bp, probe
cttaagtagggacttctgtcttcac

SEQ ID NO: 172924 - DNA, 25 bp, probe
cttgaagtgaggcactttcagtgtc

SEQ ID NO: 172925 - DNA, 25 bp, probe
cttcaagctgggctttatcgtggag

SEQ ID NO: 172926 - DNA, 25 bp, probe
cttcatccgggaggtcaatgccatg

SEQ ID NO: 172927 - DNA, 25 bp, probe
cttctgcgagagcagctgccacatg

SEQ ID NO: 172928 - DNA, 25 bp, probe
cttctactgcgacatgctcaagatt

SEQ ID NO: 172929 - DNA, 25 bp, probe
cttctatcctgctaacccagtaacc

SEQ ID NO: 172930 - DNA, 25 bp, probe
cttctacgtgctcaacatcgtcaac

SEQ ID NO: 172931 - DNA, 25 bp, probe
cttctacctggcaaaacgtcctttg

SEQ ID NO: 172932 - DNA, 25 bp, probe
cttccacctggcaagtgacatcctg

SEQ ID NO: 172933 - DNA, 25 bp, probe
cttcccctggcactggcaaacaggg

SEQ ID NO: 172934 - DNA, 25 bp, probe
cttccaagctgtgggagccccagga

SEQ ID NO: 172935 - DNA, 25 bp, probe
cttccaggagcgagatccctccaaa

SEQ ID NO: 172936 - DNA, 25 bp, probe
cttcaatggggctgataccttcaca

SEQ ID NO: 172937 - DNA, 25 bp, probe
cttcaagggctaattacctaaccag

SEQ ID NO: 172938 - DNA, 25 bp, probe
cttcaggggctgattatccggtggc

SEQ ID NO: 172939 - DNA, 25 bp, probe
cttcggccaggtggtcatggcggag

SEQ ID NO: 172940 - DNA, 25 bp, probe
cttgccctcacagtggtatgtgctg

SEQ ID NO: 172941 - DNA, 25 bp, probe
cttgcggcccactgcattgtgggac

SEQ ID NO: 172942 - DNA, 25 bp, probe
cttcaggtagcctcatggcagcggc

SEQ ID NO: 172943 - DNA, 25 bp, probe
cttcggcaaggctagcgcagacggt

SEQ ID NO: 172944 - DNA, 25 bp, probe
cttaggaagagtgaggttggtgtgt

SEQ ID NO: 172945 - DNA, 25 bp, probe
cttcgaaagcctggaggctattttg

SEQ ID NO: 172946 - DNA, 25 bp, probe
cttcattaggactgagactttgttg

SEQ ID NO: 172947 - DNA, 25 bp, probe
cttcatgtttaatggcacctcattt

SEQ ID NO: 172948 - DNA, 25 bp, probe
cttcatgtttaatggcacctcattt

SEQ ID NO: 172949 - DNA, 25 bp, probe
cttcttcagtggtgcgcagggcatt

SEQ ID NO: 172950 - DNA, 25 bp, probe
cttcttcagtggtgcgcagggcatt

SEQ ID NO: 172951 - DNA, 25 bp, probe
cttcctgcagtcgttccagggtttc

SEQ ID NO: 172952 - DNA, 25 bp, probe
cttcctggtcttatcatggacaatt

SEQ ID NO: 172953 - DNA, 25 bp, probe
cttccttactttagcgggctgcaat

SEQ ID NO: 172954 - DNA, 25 bp, probe
cttgccttacacaaaggggatcata

SEQ ID NO: 172955 - DNA, 25 bp, probe
cttcttttcaagttgggtgatatgt

SEQ ID NO: 172956 - DNA, 25 bp, probe
cttcctttcagtagggcgctaatgt

SEQ ID NO: 172957 - DNA, 25 bp, probe
cttcctgtttcttagtccgaatgtt

SEQ ID NO: 172958 - DNA, 25 bp, probe
cttcgcagttactggttggtgttct

SEQ ID NO: 172959 - DNA, 25 bp, probe
cttcggttacggcatagcctatgta

SEQ ID NO: 172960 - DNA, 25 bp, probe
ctaaaattacggcctccactgaata

SEQ ID NO: 172961 - DNA, 25 bp, probe
ctgaaaaaatttcgccagcccaact

SEQ ID NO: 172962 - DNA, 25 bp, probe
ctgaaaaaatttcgccagcccaact

SEQ ID NO: 172963 - DNA, 25 bp, probe
cttacaaagaggtgctcagcttcaa

SEQ ID NO: 172964 - DNA, 25 bp, probe
cttaaaaatagctgctaatctgtca

SEQ ID NO: 172965 - DNA, 25 bp, probe
ctttatgaaaactgaagcatcaata

SEQ ID NO: 172966 - DNA, 25 bp, probe
cttcctgaaaattctcaagcttctc

SEQ ID NO: 172967 - DNA, 25 bp, probe
cttcgtgtatggacctcaagcgttg

SEQ ID NO: 172968 - DNA, 25 bp, probe
cttcgcctcggaatccaaggtgtag

SEQ ID NO: 172969 - DNA, 25 bp, probe
cttgttccaggaatcctcagcctgc

SEQ ID NO: 172970 - DNA, 25 bp, probe
cttgctggcaagcttcctaggcttg

SEQ ID NO: 172971 - DNA, 25 bp, probe
cttctggccagggatcctgggtctg

SEQ ID NO: 172972 - DNA, 25 bp, probe
ctttgggaactaactcggtcattgc

SEQ ID NO: 172973 - DNA, 25 bp, probe
cgattggtggtcctttggagttctg

SEQ ID NO: 172974 - DNA, 25 bp, probe
cttcgtaggtagccttaacttctgg

SEQ ID NO: 172975 - DNA, 25 bp, probe
cttcctgcagggcgtttacaaccag

SEQ ID NO: 172976 - DNA, 25 bp, probe
cttcctgcagggcgtttacaaccag

SEQ ID NO: 172977 - DNA, 25 bp, probe
ctttcatacgtctttattacccaag

SEQ ID NO: 172978 - DNA, 25 bp, probe
cttttctagtgctttttggcccaag

SEQ ID NO: 172979 - DNA, 25 bp, probe
ctttgtcttggccattttgaattca

SEQ ID NO: 172980 - DNA, 25 bp, probe
cttgctgtctagggatggacttggt

SEQ ID NO: 172981 - DNA, 25 bp, probe
cttcagtcgatatatgggctattgg

SEQ ID NO: 172982 - DNA, 25 bp, probe
cttctgccttcatctgcagtaacgg

SEQ ID NO: 172983 - DNA, 25 bp, probe
cttgctgcctcttatcaaaaccatg

SEQ ID NO: 172984 - DNA, 25 bp, probe
cttgcttcagtcatcctgaacctga

SEQ ID NO: 172985 - DNA, 25 bp, probe
cttctacagctattactgaattata

SEQ ID NO: 172986 - DNA, 25 bp, probe
cttcgaaatcagaactgcgtattac

SEQ ID NO: 172987 - DNA, 25 bp, probe
cttgctatccatctacgtgtattac

SEQ ID NO: 172988 - DNA, 25 bp, probe
cttgctcccagtcaagtggatgccc

SEQ ID NO: 172989 - DNA, 25 bp, probe
cttgctgcccaacgggaggatggct

SEQ ID NO: 172990 - DNA, 25 bp, probe
cttgcatgcctccagcgatggggag

SEQ ID NO: 172991 - DNA, 25 bp, probe
cttgcaccagcacctatgtgaatga

SEQ ID NO: 172992 - DNA, 25 bp, probe
cttgactcagcccatcatctgaaaa

SEQ ID NO: 172993 - DNA, 25 bp, probe
cttcccaccatactgctcataataa

SEQ ID NO: 172994 - DNA, 25 bp, probe
cttccccctcaggtgatactatgac

SEQ ID NO: 172995 - DNA, 25 bp, probe
cttcgccaaagagtggatactatgg

SEQ ID NO: 172996 - DNA, 25 bp, probe
cttgccaaaatgtcagagtcccagg

SEQ ID NO: 172997 - DNA, 25 bp, probe
cttcccataagctatagacccgagg

SEQ ID NO: 172998 - DNA, 25 bp, probe
cttccacgacctctaagccgagaga

SEQ ID NO: 172999 - DNA, 25 bp, probe
cttccacgacctctaagccgagaga

SEQ ID NO: 173000 - DNA, 25 bp, probe
cttccacgacctctaagccgagaga

SEQ ID NO: 173001 - DNA, 25 bp, probe
cttctgtaactccctagagccacag

SEQ ID NO: 173002 - DNA, 25 bp, probe
cttcgaatccaggttcaagccatag

SEQ ID NO: 173003 - DNA, 25 bp, probe
cttccaatgagagattataacataa

SEQ ID NO: 173004 - DNA, 25 bp, probe
cttccttgtgccttatcaaacagga

SEQ ID NO: 173005 - DNA, 25 bp, probe
cttcctttgtcatttgcaaccagtt

SEQ ID NO: 173006 - DNA, 25 bp, probe
cttcctttgtcatttgcaaccagtt

SEQ ID NO: 173007 - DNA, 25 bp, probe
ctttctttgtagtgtcccagctaag

SEQ ID NO: 173008 - DNA, 25 bp, probe
ctttctttgtagtgtcccagctaag

SEQ ID NO: 173009 - DNA, 25 bp, probe
cttctggtttggtgtcaacagctca

SEQ ID NO: 173010 - DNA, 25 bp, probe
cttctggtttggtgtcaacagctca

SEQ ID NO: 173011 - DNA, 25 bp, probe
ctttctggttggcttgaccagtcac

SEQ ID NO: 173012 - DNA, 25 bp, probe
cgcttttgttggctggacactgttt

SEQ ID NO: 173013 - DNA, 25 bp, probe
cttcatttgttgctccgagagtgtt

SEQ ID NO: 173014 - DNA, 25 bp, probe
cttccaagcttgcctccaagagtta

SEQ ID NO: 173015 - DNA, 25 bp, probe
cttccagatttgctctgcatgtggt

SEQ ID NO: 173016 - DNA, 25 bp, probe
cttgctgaacttcttcatgtatgtg

SEQ ID NO: 173017 - DNA, 25 bp, probe
cttgcaggagaccgtgtgatttgtg

SEQ ID NO: 173018 - DNA, 25 bp, probe
cttgaggacactcggtttgactctc

SEQ ID NO: 173019 - DNA, 25 bp, probe
cttgcctgacacttggatttacttc

SEQ ID NO: 173020 - DNA, 25 bp, probe
cttcctgaacaagcagccatactga

SEQ ID NO: 173021 - DNA, 25 bp, probe
ctaagtcaaagaccatcctcactga

SEQ ID NO: 173022 - DNA, 25 bp, probe
ctatcagaatgacatcccctactga

SEQ ID NO: 173023 - DNA, 25 bp, probe
ctatcagaatgacatcccctactga

SEQ ID NO: 173024 - DNA, 25 bp, probe
cttgacaatgactattccctgacag

SEQ ID NO: 173025 - DNA, 25 bp, probe
cttgacaataggatcatcatctcca

SEQ ID NO: 173026 - DNA, 25 bp, probe
cttgacacttagccgctgtctcgcc

SEQ ID NO: 173027 - DNA, 25 bp, probe
cttgagacttattcgctactacgag

SEQ ID NO: 173028 - DNA, 25 bp, probe
cttgactattattaccacatacgaa

SEQ ID NO: 173029 - DNA, 25 bp, probe
cttgaattatagttctcaacaataa

SEQ ID NO: 173030 - DNA, 25 bp, probe
cttgaatggacctctataaacgcaa

SEQ ID NO: 173031 - DNA, 25 bp, probe
cttccatggccctcattaatgacac

SEQ ID NO: 173032 - DNA, 25 bp, probe
cttccatggccctcattaatgacac

SEQ ID NO: 173033 - DNA, 25 bp, probe
cttcctgaccctactgtagtcacta

SEQ ID NO: 173034 - DNA, 25 bp, probe
cttccaactcaaaattagcaatcta

SEQ ID NO: 173035 - DNA, 25 bp, probe
cttccaagctgagagtctagcactc

SEQ ID NO: 173036 - DNA, 25 bp, probe
cttccaagctgagagtctagcactc

SEQ ID NO: 173037 - DNA, 25 bp, probe
cttcgaagtggaggtctgccagctg

SEQ ID NO: 173038 - DNA, 25 bp, probe
cttcagaaaggctttgctcctgctc

SEQ ID NO: 173039 - DNA, 25 bp, probe
cttgccaaaacttactcattgcttc

SEQ ID NO: 173040 - DNA, 25 bp, probe
cttgccaaaacttactcattgcttc

SEQ ID NO: 173041 - DNA, 25 bp, probe
cttgctgaaaaattccctctttcca

SEQ ID NO: 173042 - DNA, 25 bp, probe
ctagctgaaaacttttccacagttt

SEQ ID NO: 173043 - DNA, 25 bp, probe
cttgctgcaaaatggctctgcacca

SEQ ID NO: 173044 - DNA, 25 bp, probe
cttgctgagcaagggccaggcagta

SEQ ID NO: 173045 - DNA, 25 bp, probe
cttctatgagatggccacaggccgt

SEQ ID NO: 173046 - DNA, 25 bp, probe
cttctgatgaaggcctgaggataga

SEQ ID NO: 173047 - DNA, 25 bp, probe
cttccatggggcgtggcaagggaat

SEQ ID NO: 173048 - DNA, 25 bp, probe
cttcttgctgggggaccagggctgt

SEQ ID NO: 173049 - DNA, 25 bp, probe
cttcggatggcggcgggaggttgat

SEQ ID NO: 173050 - DNA, 25 bp, probe
cttctgtgccgggccggatggtgga

SEQ ID NO: 173051 - DNA, 25 bp, probe
cttcgtgctccaggagcgcgtggtg

SEQ ID NO: 173052 - DNA, 25 bp, probe
cttcgtgctccaggagcgcgtggtg

SEQ ID NO: 173053 - DNA, 25 bp, probe
cttcgtgctggaggaacttgctgct

SEQ ID NO: 173054 - DNA, 25 bp, probe
cttcgatctctgggatttatgctca

SEQ ID NO: 173055 - DNA, 25 bp, probe
cttgctgatcttgtgttcctatact

SEQ ID NO: 173056 - DNA, 25 bp, probe
cttgctgatcttgtgttcctatact

SEQ ID NO: 173057 - DNA, 25 bp, probe
cttctggtcatgcttacactgatac

SEQ ID NO: 173058 - DNA, 25 bp, probe
cttcagcggtgcgtatgacatctct

SEQ ID NO: 173059 - DNA, 25 bp, probe
cttccagctgtggtttcacttcaag

SEQ ID NO: 173060 - DNA, 25 bp, probe
cttccaggagtttgtcaataaatgc

SEQ ID NO: 173061 - DNA, 25 bp, probe
cttccagaagcattttaaagctcag

SEQ ID NO: 173062 - DNA, 25 bp, probe
cttgccttgaaatttacacagtgag

SEQ ID NO: 173063 - DNA, 25 bp, probe
cttgctcttggcattaacggtggag

SEQ ID NO: 173064 - DNA, 25 bp, probe
cttcctaggcttgattcatggaggg

SEQ ID NO: 173065 - DNA, 25 bp, probe
cttcctactgtacatattggggagt

SEQ ID NO: 173066 - DNA, 25 bp, probe
cttcctactgtacatattggggagt

SEQ ID NO: 173067 - DNA, 25 bp, probe
cttccctctgttggaaattgggtgt

SEQ ID NO: 173068 - DNA, 25 bp, probe
cttccctcagatttccattgtgtgg

SEQ ID NO: 173069 - DNA, 25 bp, probe
cttccctcagatttccattgtgtgg

SEQ ID NO: 173070 - DNA, 25 bp, probe
cttccaccagaagctgttcgtgcag

SEQ ID NO: 173071 - DNA, 25 bp, probe
cttgccccaaaggtgagtccacggg

SEQ ID NO: 173072 - DNA, 25 bp, probe
cttcgcttaaagatatgtcccaggg

SEQ ID NO: 173073 - DNA, 25 bp, probe
cttcgcttaaagatatgtcccaggg

SEQ ID NO: 173074 - DNA, 25 bp, probe
cttgcaaaatatgttatgtctccag

SEQ ID NO: 173075 - DNA, 25 bp, probe
cttcaaaggctcatcaagtcccgag

SEQ ID NO: 173076 - DNA, 25 bp, probe
cttcaactggccttacatgtccatc

SEQ ID NO: 173077 - DNA, 25 bp, probe
cttctcctggtgtctacatgtttgc

SEQ ID NO: 173078 - DNA, 25 bp, probe
cttctcctggtgtctacatgtttgc

SEQ ID NO: 173079 - DNA, 25 bp, probe
cttccctgaggtacgagtgtatgac

SEQ ID NO: 173080 - DNA, 25 bp, probe
cttcccaggcgctcaggcctggatc

SEQ ID NO: 173081 - DNA, 25 bp, probe
cttccacaagtctcaagcctcagtg

SEQ ID NO: 173082 - DNA, 25 bp, probe
cttccaccgttgttagtatcatggt

SEQ ID NO: 173083 - DNA, 25 bp, probe
cttccaaccctttcttctatggatg

SEQ ID NO: 173084 - DNA, 25 bp, probe
cttccaccctttacttcgtgatgag

SEQ ID NO: 173085 - DNA, 25 bp, probe
cttacagtcacgttactacaggcaa

SEQ ID NO: 173086 - DNA, 25 bp, probe
ctttcaatctggtgccggcttaaag

SEQ ID NO: 173087 - DNA, 25 bp, probe
cttccaatctggtcgcctgggaaac

SEQ ID NO: 173088 - DNA, 25 bp, probe
cttctgttttgaagctcatgggaaa

SEQ ID NO: 173089 - DNA, 25 bp, probe
cttcgacgtgtgtgtcatggcttaa

SEQ ID NO: 173090 - DNA, 25 bp, probe
cttccaatgttaggtttgctacaag

SEQ ID NO: 173091 - DNA, 25 bp, probe
cttccaggtagtgctgcttctgaag

SEQ ID NO: 173092 - DNA, 25 bp, probe
cttgctcgattacttcctacaggag

SEQ ID NO: 173093 - DNA, 25 bp, probe
cttgctctatttggctcctaacagt

SEQ ID NO: 173094 - DNA, 25 bp, probe
cttgctctatttggctcctaacagt

SEQ ID NO: 173095 - DNA, 25 bp, probe
cttgctcaacaggtgaccttacagg

SEQ ID NO: 173096 - DNA, 25 bp, probe
cttgctatatagactgtacttatgt

SEQ ID NO: 173097 - DNA, 25 bp, probe
cttccttaactgcacgatattcaga

SEQ ID NO: 173098 - DNA, 25 bp, probe
cttcctcagcaacaacgtatgtgga

SEQ ID NO: 173099 - DNA, 25 bp, probe
cttcgcacaatgaccaacgtactgg

SEQ ID NO: 173100 - DNA, 25 bp, probe
cttcgcacaatgaccaacgtactgg

SEQ ID NO: 173101 - DNA, 25 bp, probe
cttcctcaatgtcatcactcaatat

SEQ ID NO: 173102 - DNA, 25 bp, probe
cttcaccaatagtctctctgcaaga

SEQ ID NO: 173103 - DNA, 25 bp, probe
cttcccaagaggcactgccagtcgt

SEQ ID NO: 173104 - DNA, 25 bp, probe
cttcccgagaggcgtgatgcagggg

SEQ ID NO: 173105 - DNA, 25 bp, probe
cttaactggaggcagctggaggctg

SEQ ID NO: 173106 - DNA, 25 bp, probe
cttcctgtagggcactggggctagg

SEQ ID NO: 173107 - DNA, 25 bp, probe
cttacatataaacactggaggggag

SEQ ID NO: 173108 - DNA, 25 bp, probe
cttccacattgattccacggagggc

SEQ ID NO: 173109 - DNA, 25 bp, probe
ctctggcaagtattactgggaggtc

SEQ ID NO: 173110 - DNA, 25 bp, probe
cttgctgacgtcttgactgtgaacc

SEQ ID NO: 173111 - DNA, 25 bp, probe
cttgctcacgctggatgactggtcc

SEQ ID NO: 173112 - DNA, 25 bp, probe
cttgctcaacagtatagtggtacca

SEQ ID NO: 173113 - DNA, 25 bp, probe
cttgcatccctgtatggaggtctcc

SEQ ID NO: 173114 - DNA, 25 bp, probe
cttgcatctcgttgctggcagagtc

SEQ ID NO: 173115 - DNA, 25 bp, probe
cttccacgttggcagaatcatttac

SEQ ID NO: 173116 - DNA, 25 bp, probe
cttaaggcctggaaacgattttctg

SEQ ID NO: 173117 - DNA, 25 bp, probe
cttaatccgctggtgaccggttact

SEQ ID NO: 173118 - DNA, 25 bp, probe
cttcagatgggctgtgcacacggtt

SEQ ID NO: 173119 - DNA, 25 bp, probe
cttcaatgagacggtgctcactgtg

SEQ ID NO: 173120 - DNA, 25 bp, probe
cttcgtgtgacaggcggcagcagtg

SEQ ID NO: 173121 - DNA, 25 bp, probe
cttcagtaggccgtggccggaagcc

SEQ ID NO: 173122 - DNA, 25 bp, probe
ctacatgtaccagcggaaggaagga

SEQ ID NO: 173123 - DNA, 25 bp, probe
cttcgaagccatagggtggagaaag

SEQ ID NO: 173124 - DNA, 25 bp, probe
cttcgcaagagccgtgtgctggaga

SEQ ID NO: 173125 - DNA, 25 bp, probe
cttcagaagcaccgtgtctgaaccg

SEQ ID NO: 173126 - DNA, 25 bp, probe
cttcgtgatctggggatgtgccacc

SEQ ID NO: 173127 - DNA, 25 bp, probe
cttctggagatggatccttccatct

SEQ ID NO: 173128 - DNA, 25 bp, probe
cttcatggagatgcccactctcctg

SEQ ID NO: 173129 - DNA, 25 bp, probe
cttcatccagatgccaaatatgcca

SEQ ID NO: 173130 - DNA, 25 bp, probe
cttccatagccagcaatgttgtcaa

SEQ ID NO: 173131 - DNA, 25 bp, probe
cttccaagccaagcgctttaacagg

SEQ ID NO: 173132 - DNA, 25 bp, probe
cttccaagccaagcgctttaacagg

SEQ ID NO: 173133 - DNA, 25 bp, probe
cttccaagtgaagatccatttaaga

SEQ ID NO: 173134 - DNA, 25 bp, probe
cttccggctgaagaccattaacctc

SEQ ID NO: 173135 - DNA, 25 bp, probe
cttcctgggcaagacgagtgaccac

SEQ ID NO: 173136 - DNA, 25 bp, probe
ctgtttggggacacggtcaacaccg

SEQ ID NO: 173137 - DNA, 25 bp, probe
ctttgggtgggcagggcattaaact

SEQ ID NO: 173138 - DNA, 25 bp, probe
ctttgggggtcaggaacactacact

SEQ ID NO: 173139 - DNA, 25 bp, probe
cttctggggctgtgaaacgctcaca

SEQ ID NO: 173140 - DNA, 25 bp, probe
cttccagaggctctggacacctccc

SEQ ID NO: 173141 - DNA, 25 bp, probe
cttccagagagactggacacagccc

SEQ ID NO: 173142 - DNA, 25 bp, probe
cttccaggatggatgcatcacactc

SEQ ID NO: 173143 - DNA, 25 bp, probe
cttccgtgatggaaaccacttcctc

SEQ ID NO: 173144 - DNA, 25 bp, probe
cttccagctgtggatgaacaccgtg

SEQ ID NO: 173145 - DNA, 25 bp, probe
cttcacacggcagacgccggtggac

SEQ ID NO: 173146 - DNA, 25 bp, probe
cttccctccctgaggcaggtgagaa

SEQ ID NO: 173147 - DNA, 25 bp, probe
cttccttctcccagatgcaggatgt

SEQ ID NO: 173148 - DNA, 25 bp, probe
cttgcctcctagtatcgatgcagtt

SEQ ID NO: 173149 - DNA, 25 bp, probe
cttcctgcgtgatatccagagttct

SEQ ID NO: 173150 - DNA, 25 bp, probe
cttccagcattataaatcagtacat

SEQ ID NO: 173151 - DNA, 25 bp, probe
cttgccctcaaaggaacagacaatc

SEQ ID NO: 173152 - DNA, 25 bp, probe
cttcccccatgaagaccagacagct

SEQ ID NO: 173153 - DNA, 25 bp, probe
cttcccccatgaagaccagacagct

SEQ ID NO: 173154 - DNA, 25 bp, probe
cttcctgtccagagatgctcatagg

SEQ ID NO: 173155 - DNA, 25 bp, probe
cttccgatatcagagactttgagca

SEQ ID NO: 173156 - DNA, 25 bp, probe
cttcctggatctgagaatttattgg

SEQ ID NO: 173157 - DNA, 25 bp, probe
cttctctgggctgacaaacaactgc

SEQ ID NO: 173158 - DNA, 25 bp, probe
cttccgcaggcgcacggacaaggac

SEQ ID NO: 173159 - DNA, 25 bp, probe
cttccacagcaccagacaagacaac

SEQ ID NO: 173160 - DNA, 25 bp, probe
cttcctcagcatcaactggcaggac

SEQ ID NO: 173161 - DNA, 25 bp, probe
cttcctcattgttaaggcagcagaa

SEQ ID NO: 173162 - DNA, 25 bp, probe
cttcattgaggctgcaagagcacag

SEQ ID NO: 173163 - DNA, 25 bp, probe
cttgctggctgggcgagatgagcac

SEQ ID NO: 173164 - DNA, 25 bp, probe
cttgcgagctgggcacatgaagcag

SEQ ID NO: 173165 - DNA, 25 bp, probe
cttcggcatggtgtatgagggcaat

SEQ ID NO: 173166 - DNA, 25 bp, probe
cttcattgtcctgtaagggtgttga

SEQ ID NO: 173167 - DNA, 25 bp, probe
cttcattgtcctgtaagggtgttga

SEQ ID NO: 173168 - DNA, 25 bp, probe
cttctgactactgggcaaagagtgt

SEQ ID NO: 173169 - DNA, 25 bp, probe
cttcgactgcacggccaccatgaag

SEQ ID NO: 173170 - DNA, 25 bp, probe
cttcgagctatgggccttcaggaga

SEQ ID NO: 173171 - DNA, 25 bp, probe
cttcgagtatcgtcaccgcaagatg

SEQ ID NO: 173172 - DNA, 25 bp, probe
cttcagggagtgtcacctcaaatgc

SEQ ID NO: 173173 - DNA, 25 bp, probe
cttctttgcagtgcgtgctcaacag

SEQ ID NO: 173174 - DNA, 25 bp, probe
cttcttccagttgctaaaagctgta

SEQ ID NO: 173175 - DNA, 25 bp, probe
cttacctacctcgtaaaagtctgat

SEQ ID NO: 173176 - DNA, 25 bp, probe
cttacctacctcgtaaaagtctgat

SEQ ID NO: 173177 - DNA, 25 bp, probe
cttacctaactctcagactattctg

SEQ ID NO: 173178 - DNA, 25 bp, probe
cttagctaaaagtgtgttattctgc

SEQ ID NO: 173179 - DNA, 25 bp, probe
cttcctaagaagagtgctgtcatta

SEQ ID NO: 173180 - DNA, 25 bp, probe
cttactgacagaagcaggacggttt

SEQ ID NO: 173181 - DNA, 25 bp, probe
cttcctacagctccgagagcagctt

SEQ ID NO: 173182 - DNA, 25 bp, probe
cttcctacagctccgagagcagctt

SEQ ID NO: 173183 - DNA, 25 bp, probe
cttgccttcctgtcacagggtttgc

SEQ ID NO: 173184 - DNA, 25 bp, probe
cttcacttcggggactgcagtttga

SEQ ID NO: 173185 - DNA, 25 bp, probe
cttcatctttggtgtcgagttcgtg

SEQ ID NO: 173186 - DNA, 25 bp, probe
cttcagcgagggcttctactttgct

SEQ ID NO: 173187 - DNA, 25 bp, probe
cttcaggcggagttggtacttttgc

SEQ ID NO: 173188 - DNA, 25 bp, probe
cttcaccaggagaatgtgcaacttt

SEQ ID NO: 173189 - DNA, 25 bp, probe
cttaccgccaagtgaactgcttttc

SEQ ID NO: 173190 - DNA, 25 bp, probe
cttaggcagctatgggtttcttttg

SEQ ID NO: 173191 - DNA, 25 bp, probe
cttaggcagctatgggtttcttttg

SEQ ID NO: 173192 - DNA, 25 bp, probe
cttcactcgctgggggtgtttgttt

SEQ ID NO: 173193 - DNA, 25 bp, probe
cctcttagcgggtggatttccctga

SEQ ID NO: 173194 - DNA, 25 bp, probe
cttacccagggatgtcaaaccctga

SEQ ID NO: 173195 - DNA, 25 bp, probe
ctatacccagcagagggataaccca

SEQ ID NO: 173196 - DNA, 25 bp, probe
cttcagcccacgcgggaagttcaaa

SEQ ID NO: 173197 - DNA, 25 bp, probe
cttcagccgactctgggaggatttc

SEQ ID NO: 173198 - DNA, 25 bp, probe
cttccatcaactcatggcaggggtg

SEQ ID NO: 173199 - DNA, 25 bp, probe
cttcctcagacggaggctgggcgtg

SEQ ID NO: 173200 - DNA, 25 bp, probe
cttcctaccatggcagcagctgagg

SEQ ID NO: 173201 - DNA, 25 bp, probe
cttcgaatacatccagagtgtgctg

SEQ ID NO: 173202 - DNA, 25 bp, probe
cttcctaatcatcccaatgttgtaa

SEQ ID NO: 173203 - DNA, 25 bp, probe
cttcctaatcatcccaatgttgtaa

SEQ ID NO: 173204 - DNA, 25 bp, probe
ctatcctttaccagagttggaagta

SEQ ID NO: 173205 - DNA, 25 bp, probe
cttctttttccgcgtgtcggaggag

SEQ ID NO: 173206 - DNA, 25 bp, probe
cttctttttccgcgtgtcggaggag

SEQ ID NO: 173207 - DNA, 25 bp, probe
cttcctttaactcagaggcggggag

SEQ ID NO: 173208 - DNA, 25 bp, probe
cttcctttaactcagaggcggggag

SEQ ID NO: 173209 - DNA, 25 bp, probe
cttcctcttcaacagggagctgagg

SEQ ID NO: 173210 - DNA, 25 bp, probe
cttcctcttcaacagggagctgagg

SEQ ID NO: 173211 - DNA, 25 bp, probe
cttcgcccgcaaaggggcgctgagg

SEQ ID NO: 173212 - DNA, 25 bp, probe
cttcgcccgcaaaggggcgctgagg

SEQ ID NO: 173213 - DNA, 25 bp, probe
cttccactgcccaatgtggagacgg

SEQ ID NO: 173214 - DNA, 25 bp, probe
cttcctgctgccacgtggagaaggg

SEQ ID NO: 173215 - DNA, 25 bp, probe
cttccggcgcataaagtcagcaagg

SEQ ID NO: 173216 - DNA, 25 bp, probe
cttccgtatcttaagtgaggaggca

SEQ ID NO: 173217 - DNA, 25 bp, probe
cttcctgtgtctctgggagcggaga

SEQ ID NO: 173218 - DNA, 25 bp, probe
cttcctgttgctgccgtgaagtcag

SEQ ID NO: 173219 - DNA, 25 bp, probe
cttccttctgtgcctttgaatacaa

SEQ ID NO: 173220 - DNA, 25 bp, probe
cttcgtgtctgcaggtctgagtaac

SEQ ID NO: 173221 - DNA, 25 bp, probe
cttcgtgtctgcaggtctgagtaac

SEQ ID NO: 173222 - DNA, 25 bp, probe
cttcctgacatcaaggtgctgactc

SEQ ID NO: 173223 - DNA, 25 bp, probe
cttccagagacatggctcagatcct

SEQ ID NO: 173224 - DNA, 25 bp, probe
cttctctacatcttgttcaatcctc

SEQ ID NO: 173225 - DNA, 25 bp, probe
cttctctacatcttgttcaatcctc

SEQ ID NO: 173226 - DNA, 25 bp, probe
cttctatttcattgtctctctagcc

SEQ ID NO: 173227 - DNA, 25 bp, probe
cttattcttaggatcctagttcagt

SEQ ID NO: 173228 - DNA, 25 bp, probe
cttttctggggctcttagcccttgg

SEQ ID NO: 173229 - DNA, 25 bp, probe
cttccttgggatccctaagaccgtg

SEQ ID NO: 173230 - DNA, 25 bp, probe
cttccttgggatccctaagaccgtg

SEQ ID NO: 173231 - DNA, 25 bp, probe
cttcctgttcctcttatataccagt

SEQ ID NO: 173232 - DNA, 25 bp, probe
cttctgctgtctactccaagaaacc

SEQ ID NO: 173233 - DNA, 25 bp, probe
cttctggatgccaatctgaatatca

SEQ ID NO: 173234 - DNA, 25 bp, probe
cttctggatgccaatctgaatatca

SEQ ID NO: 173235 - DNA, 25 bp, probe
cttcagtgacacaagctgctttagc

SEQ ID NO: 173236 - DNA, 25 bp, probe
cttcgtagcagcacctactatgctt

SEQ ID NO: 173237 - DNA, 25 bp, probe
cttccctgcagcacgtcgcttatat

SEQ ID NO: 173238 - DNA, 25 bp, probe
cttccagccacactggtcgtggata

SEQ ID NO: 173239 - DNA, 25 bp, probe
cttccagccgcgttgtcaatggtga

SEQ ID NO: 173240 - DNA, 25 bp, probe
cttctcggctgcctgggtatggtga

SEQ ID NO: 173241 - DNA, 25 bp, probe
cttcctggctgccatggcgtatgac

SEQ ID NO: 173242 - DNA, 25 bp, probe
cttccagctgtgccaggctgtcaag

SEQ ID NO: 173243 - DNA, 25 bp, probe
cttcggcgcatgccagatggtcaca

SEQ ID NO: 173244 - DNA, 25 bp, probe
cttcggcgcatgccagatggtcaca

SEQ ID NO: 173245 - DNA, 25 bp, probe
cttcggctgctggacggtataaggc

SEQ ID NO: 173246 - DNA, 25 bp, probe
ctgattgcccgtaggttaagaggtc

SEQ ID NO: 173247 - DNA, 25 bp, probe
cttcatgcgcctggtggggaagacg

SEQ ID NO: 173248 - DNA, 25 bp, probe
cttcaggccttctggaagcatggag

SEQ ID NO: 173249 - DNA, 25 bp, probe
cttcacccttcgtaaccaggagaca

SEQ ID NO: 173250 - DNA, 25 bp, probe
cttcctgccataaaactccagataa

SEQ ID NO: 173251 - DNA, 25 bp, probe
cttcaccactcaagaactgtcaagt

SEQ ID NO: 173252 - DNA, 25 bp, probe
cttccctccagaattatgtcaggtt

SEQ ID NO: 173253 - DNA, 25 bp, probe
cttccttcatctcactttaatgctt

SEQ ID NO: 173254 - DNA, 25 bp, probe
cttttacatggcttctttaatgaat

SEQ ID NO: 173255 - DNA, 25 bp, probe
cttttacatggcttctttaatgaat

SEQ ID NO: 173256 - DNA, 25 bp, probe
cttcctcctctattctctaaataat

SEQ ID NO: 173257 - DNA, 25 bp, probe
cttcctgcttatatttaggaacata

SEQ ID NO: 173258 - DNA, 25 bp, probe
cttcctgctgtgattcttcgaaatc

SEQ ID NO: 173259 - DNA, 25 bp, probe
cttctgggctacactatctaacatc

SEQ ID NO: 173260 - DNA, 25 bp, probe
cttccggaacacgacttcaactcga

SEQ ID NO: 173261 - DNA, 25 bp, probe
cttcttggaagactacttcactgct

SEQ ID NO: 173262 - DNA, 25 bp, probe
cttctgggaatggtgagctggaggc

SEQ ID NO: 173263 - DNA, 25 bp, probe
cttctgtggcagattgactcctacc

SEQ ID NO: 173264 - DNA, 25 bp, probe
cttcgtgcgcatcttgcgcatcttt

SEQ ID NO: 173265 - DNA, 25 bp, probe
cttcgtgcgcatcttgcgcatcttt

SEQ ID NO: 173266 - DNA, 25 bp, probe
cttctgagccatacagggcacttga

SEQ ID NO: 173267 - DNA, 25 bp, probe
cttatgacatcatcaatgcctttga

SEQ ID NO: 173268 - DNA, 25 bp, probe
cttcatgactgccacgcatttacag

SEQ ID NO: 173269 - DNA, 25 bp, probe
cttctggtgctgtccatttaatggg

SEQ ID NO: 173270 - DNA, 25 bp, probe
cttctcccttcatcttgatctggga

SEQ ID NO: 173271 - DNA, 25 bp, probe
cttctcccttcatcttgatctggga

SEQ ID NO: 173272 - DNA, 25 bp, probe
cttctccactttctagccagaggag

SEQ ID NO: 173273 - DNA, 25 bp, probe
cttcccattcttttacttagtgcat

SEQ ID NO: 173274 - DNA, 25 bp, probe
cttcctcattttcaacatcttttac

SEQ ID NO: 173275 - DNA, 25 bp, probe
cttccatttttatgacctttcaact

SEQ ID NO: 173276 - DNA, 25 bp, probe
cttccatttttatgacctttcaact

SEQ ID NO: 173277 - DNA, 25 bp, probe
cttccttctttatacttttctcagt

SEQ ID NO: 173278 - DNA, 25 bp, probe
cttccttttgctgatgatctttatg

SEQ ID NO: 173279 - DNA, 25 bp, probe
cttcaatttatggtcttctgttttg

SEQ ID NO: 173280 - DNA, 25 bp, probe
cttacaagttatactcttatttgga

SEQ ID NO: 173281 - DNA, 25 bp, probe
ctacgtgaattagctttttctcaga

SEQ ID NO: 173282 - DNA, 25 bp, probe
cgacctgaaaggcattggtttatga

SEQ ID NO: 173283 - DNA, 25 bp, probe
cgtccgaggaggatcgttttctaag

SEQ ID NO: 173284 - DNA, 25 bp, probe
cgtccgaggaggatcgttttctaag

SEQ ID NO: 173285 - DNA, 25 bp, probe
cgtccgatgaggatcgttttttaag

SEQ ID NO: 173286 - DNA, 25 bp, probe
cgttcggaatcccgtttttgctgag

SEQ ID NO: 173287 - DNA, 25 bp, probe
cgtacaggcaattccgtcttcttaa

SEQ ID NO: 173288 - DNA, 25 bp, probe
cttatcgtgaacttgtcctcttaaa

SEQ ID NO: 173289 - DNA, 25 bp, probe
cttccgctacacttttcacaaaatt

SEQ ID NO: 173290 - DNA, 25 bp, probe
cttccccagccatttagaaacaagt

SEQ ID NO: 173291 - DNA, 25 bp, probe
cttccaggaccgttcacatacaaag

SEQ ID NO: 173292 - DNA, 25 bp, probe
ctttcaaagccgttcctacacatag

SEQ ID NO: 173293 - DNA, 25 bp, probe
ctttgggcgagtgccttatccaaga

SEQ ID NO: 173294 - DNA, 25 bp, probe
ctttcaggggtggcccaatgaggga

SEQ ID NO: 173295 - DNA, 25 bp, probe
ctttcggggtgctcctgtgggagat

SEQ ID NO: 173296 - DNA, 25 bp, probe
cttctcggaggtgatcctggcagaa

SEQ ID NO: 173297 - DNA, 25 bp, probe
cttctatggatgtctcaaccggcag

SEQ ID NO: 173298 - DNA, 25 bp, probe
cttctgtgcctgttaatcatgggag

SEQ ID NO: 173299 - DNA, 25 bp, probe
cttctgctccttcaacaaggcgacg

SEQ ID NO: 173300 - DNA, 25 bp, probe
cttctgctccttcaacaaggcgacg

SEQ ID NO: 173301 - DNA, 25 bp, probe
cttctgctccttcaacaaggcgacg

SEQ ID NO: 173302 - DNA, 25 bp, probe
cttctccacaatcaacagtagcgcc

SEQ ID NO: 173303 - DNA, 25 bp, probe
cttcctcaattgccaaggggccgca

SEQ ID NO: 173304 - DNA, 25 bp, probe
cttctccataggccactagggcctc

SEQ ID NO: 173305 - DNA, 25 bp, probe
cttcgccatgatgctcctcatgggc

SEQ ID NO: 173306 - DNA, 25 bp, probe
cttcgccatgatgctcctcatgggc

SEQ ID NO: 173307 - DNA, 25 bp, probe
cttcgagatgctcatccatctgcgc

SEQ ID NO: 173308 - DNA, 25 bp, probe
cttcgagatgctcatccatctgcgc

SEQ ID NO: 173309 - DNA, 25 bp, probe
cttccattgctagctcatctgtggg

SEQ ID NO: 173310 - DNA, 25 bp, probe
cttccatcctgccggatgagtgtgg

SEQ ID NO: 173311 - DNA, 25 bp, probe
cttcctgccatggctggagctttgg

SEQ ID NO: 173312 - DNA, 25 bp, probe
cttcccctcatcaagagctatctgt

SEQ ID NO: 173313 - DNA, 25 bp, probe
cttcctcctgccagattctgatgtt

SEQ ID NO: 173314 - DNA, 25 bp, probe
cttctcactcatccagtgttgtatt

SEQ ID NO: 173315 - DNA, 25 bp, probe
cttctcatgccaacacttctgtaat

SEQ ID NO: 173316 - DNA, 25 bp, probe
cttccatgtcaagattcagctagtg

SEQ ID NO: 173317 - DNA, 25 bp, probe
cttccatgtcagagtcacctgatgt

SEQ ID NO: 173318 - DNA, 25 bp, probe
cttccaggcagcattccagaatgtg

SEQ ID NO: 173319 - DNA, 25 bp, probe
cttccaggcgctacagcaggagtgc

SEQ ID NO: 173320 - DNA, 25 bp, probe
cttcacaacctgacacagccaatta

SEQ ID NO: 173321 - DNA, 25 bp, probe
cttcacaggatcccagcaatgaact

SEQ ID NO: 173322 - DNA, 25 bp, probe
cttcaacctcatccagacagaacga

SEQ ID NO: 173323 - DNA, 25 bp, probe
cttcaacctcatccagacagaacga

SEQ ID NO: 173324 - DNA, 25 bp, probe
cttcgactgctccaagaatcagaga

SEQ ID NO: 173325 - DNA, 25 bp, probe
cttctgccatgccaacaacattgta

SEQ ID NO: 173326 - DNA, 25 bp, probe
cttcctccacagtaacacgctgaag

SEQ ID NO: 173327 - DNA, 25 bp, probe
cttcctccacagtaacacgctgaag

SEQ ID NO: 173328 - DNA, 25 bp, probe
cttcctggagactgacagcgtccag

SEQ ID NO: 173329 - DNA, 25 bp, probe
cttcctgtagagttactcagccaag

SEQ ID NO: 173330 - DNA, 25 bp, probe
cttcctgtagagttactcagccaag

SEQ ID NO: 173331 - DNA, 25 bp, probe
ctccctaagtttctcaggctggtct

SEQ ID NO: 173332 - DNA, 25 bp, probe
ctccctgggttcatccaggttgttc

SEQ ID NO: 173333 - DNA, 25 bp, probe
cttcctggggtctttgatatttgtt

SEQ ID NO: 173334 - DNA, 25 bp, probe
cttacgatgagcgccctattttgtt

SEQ ID NO: 173335 - DNA, 25 bp, probe
cttagcggattcctgccttttgatg

SEQ ID NO: 173336 - DNA, 25 bp, probe
cttcgctagctttagtctttctgtt

SEQ ID NO: 173337 - DNA, 25 bp, probe
cttcggcatccttggttgaattctt

SEQ ID NO: 173338 - DNA, 25 bp, probe
cttagtgctcctttatccaatttgt

SEQ ID NO: 173339 - DNA, 25 bp, probe
cttcattgctcaagttaacaactac

SEQ ID NO: 173340 - DNA, 25 bp, probe
cttcctcctaatcaacaactcagca

SEQ ID NO: 173341 - DNA, 25 bp, probe
cttccttcctaggcagtaagcccag

SEQ ID NO: 173342 - DNA, 25 bp, probe
cttcccatcgtctgcatgataagcc

SEQ ID NO: 173343 - DNA, 25 bp, probe
cttcccatcgtctgcatgataagcc

SEQ ID NO: 173344 - DNA, 25 bp, probe
cttctccactgttctatgcaaggtc

SEQ ID NO: 173345 - DNA, 25 bp, probe
cttccctatgatgctacaagagtgc

SEQ ID NO: 173346 - DNA, 25 bp, probe
cttccgcgtcatgttcaaggagccg

SEQ ID NO: 173347 - DNA, 25 bp, probe
cttccgccagatgtgctgcaaaacc

SEQ ID NO: 173348 - DNA, 25 bp, probe
cttcaggaggctcctgcgcaaaacc

SEQ ID NO: 173349 - DNA, 25 bp, probe
cttcgggagttcagcagtcacacgc

SEQ ID NO: 173350 - DNA, 25 bp, probe
cttcgagggaatatgcgaagctgcc

SEQ ID NO: 173351 - DNA, 25 bp, probe
cttcgagggaatcatgagagcagac

SEQ ID NO: 173352 - DNA, 25 bp, probe
cttcatgagagtgcgcctgggagag

SEQ ID NO: 173353 - DNA, 25 bp, probe
cttcgagactcacacgctggaggag

SEQ ID NO: 173354 - DNA, 25 bp, probe
cttcgacatcgtcaagcagaggagg

SEQ ID NO: 173355 - DNA, 25 bp, probe
cttcgacatcgccgtcgatggtgag

SEQ ID NO: 173356 - DNA, 25 bp, probe
cttcctcctgccgtagatgagtcag

SEQ ID NO: 173357 - DNA, 25 bp, probe
cttcccctggtggatctgaggcagg

SEQ ID NO: 173358 - DNA, 25 bp, probe
cttccgccaagtcagctggatggac

SEQ ID NO: 173359 - DNA, 25 bp, probe
cttccccaatgagcagtgatgatga

SEQ ID NO: 173360 - DNA, 25 bp, probe
cttcctccgagagagagatgagtat

SEQ ID NO: 173361 - DNA, 25 bp, probe
cttcctcacagggtggagatcagat

SEQ ID NO: 173362 - DNA, 25 bp, probe
cttcctcaatgagctggtcatgttc

SEQ ID NO: 173363 - DNA, 25 bp, probe
cttcctcaagatcctgtcttgctga

SEQ ID NO: 173364 - DNA, 25 bp, probe
cttctccaagagtgcttgcatctac

SEQ ID NO: 173365 - DNA, 25 bp, probe
cttctcctatgcctgagtacctgaa

SEQ ID NO: 173366 - DNA, 25 bp, probe
cttcccatcagccagagggggtcag

SEQ ID NO: 173367 - DNA, 25 bp, probe
cttcccagagcacaggtgctaccag

SEQ ID NO: 173368 - DNA, 25 bp, probe
cttcacaaggctgagagtgcttcct

SEQ ID NO: 173369 - DNA, 25 bp, probe
cttcacaaggctgagagtgcttcct

SEQ ID NO: 173370 - DNA, 25 bp, probe
cttagaacgctggtgcaatgttttc

SEQ ID NO: 173371 - DNA, 25 bp, probe
cttcagcaacctgtgtggctgtgat

SEQ ID NO: 173372 - DNA, 25 bp, probe
cttcctcatcaccttgatggcttta

SEQ ID NO: 173373 - DNA, 25 bp, probe
cttcctcatgatgtagctggcttcc

SEQ ID NO: 173374 - DNA, 25 bp, probe
cttcctcatgtgttactctgttgca

SEQ ID NO: 173375 - DNA, 25 bp, probe
cttctgacatgtggtgagttgtgtg

SEQ ID NO: 173376 - DNA, 25 bp, probe
cttcgccatctattgcgtggtgggc

SEQ ID NO: 173377 - DNA, 25 bp, probe
cttcctcattgatgtggcctgcagg

SEQ ID NO: 173378 - DNA, 25 bp, probe
cttcctcattgatgtggcctgcagg

SEQ ID NO: 173379 - DNA, 25 bp, probe
cttcctcaatgtctactgccagggc

SEQ ID NO: 173380 - DNA, 25 bp, probe
cttcctcaatgtctactgccagggc

SEQ ID NO: 173381 - DNA, 25 bp, probe
cttagccaattgcaactccagtgtt

SEQ ID NO: 173382 - DNA, 25 bp, probe
cttagccaattgcaactccagtgtt

SEQ ID NO: 173383 - DNA, 25 bp, probe
cttcccaactagactgtaagtgcct

SEQ ID NO: 173384 - DNA, 25 bp, probe
cttcccacctctctgaatagtgtgt

SEQ ID NO: 173385 - DNA, 25 bp, probe
cttcctggactttctcagaaggtgt

SEQ ID NO: 173386 - DNA, 25 bp, probe
cttcctggctctggcccagaaagtg

SEQ ID NO: 173387 - DNA, 25 bp, probe
cttctctgcctagtccacagattag

SEQ ID NO: 173388 - DNA, 25 bp, probe
cttctcagctcttgacctcagaaag

SEQ ID NO: 173389 - DNA, 25 bp, probe
cttctgcctctaagctgctctaaag

SEQ ID NO: 173390 - DNA, 25 bp, probe
cttcccagcatcagccttagaacaa

SEQ ID NO: 173391 - DNA, 25 bp, probe
cttcgccctctgaaattaaagaaat

SEQ ID NO: 173392 - DNA, 25 bp, probe
ctccagccctctcaagttaaacgaa

SEQ ID NO: 173393 - DNA, 25 bp, probe
ctccagccctctcaagttaaacgaa

SEQ ID NO: 173394 - DNA, 25 bp, probe
cttcacctgtcttaagattaaataa

SEQ ID NO: 173395 - DNA, 25 bp, probe
cttccctttagccgatgtaactgct

SEQ ID NO: 173396 - DNA, 25 bp, probe
cttcccgtactgtcgagtaagctca

SEQ ID NO: 173397 - DNA, 25 bp, probe
cttacactgatacagggaaagcatc

SEQ ID NO: 173398 - DNA, 25 bp, probe
cttacactggatcaccaactacagc

SEQ ID NO: 173399 - DNA, 25 bp, probe
cttcaccaactgcatcctaaactgc

SEQ ID NO: 173400 - DNA, 25 bp, probe
cttcaccaagcttgaccgcattggc

SEQ ID NO: 173401 - DNA, 25 bp, probe
cttcaagcgagctagcccttgtgag

SEQ ID NO: 173402 - DNA, 25 bp, probe
cttcggcctatccattactgggcaa

SEQ ID NO: 173403 - DNA, 25 bp, probe
cttcggcctatccattactgggcaa

SEQ ID NO: 173404 - DNA, 25 bp, probe
cttcgagtatatgcggcacggggac

SEQ ID NO: 173405 - DNA, 25 bp, probe
ctttaatatctatggccatgggggc

SEQ ID NO: 173406 - DNA, 25 bp, probe
cttaacttcatgtgagctattggag

SEQ ID NO: 173407 - DNA, 25 bp, probe
cttagcattttgtgacttttgtcga

SEQ ID NO: 173408 - DNA, 25 bp, probe
cttacatacttgtccctctaagtca

SEQ ID NO: 173409 - DNA, 25 bp, probe
cttagcttttgatgtctccaagtag

SEQ ID NO: 173410 - DNA, 25 bp, probe
ctatccgttggatgccaccagagtc

SEQ ID NO: 173411 - DNA, 25 bp, probe
cttccctcatggtaccaaaggtgca

SEQ ID NO: 173412 - DNA, 25 bp, probe
cttcagcaccatctaccaggagctg

SEQ ID NO: 173413 - DNA, 25 bp, probe
cttcagcatccacaactacaaatca

SEQ ID NO: 173414 - DNA, 25 bp, probe
cttcagctgccttcaactggaacga

SEQ ID NO: 173415 - DNA, 25 bp, probe
cttcatgctgttggcagtaggaatc

SEQ ID NO: 173416 - DNA, 25 bp, probe
cttactttgcaacagaaacggtcct

SEQ ID NO: 173417 - DNA, 25 bp, probe
gcattactaaaagaaccaccagatc

SEQ ID NO: 173418 - DNA, 25 bp, probe
cttcacgaaacaaatcccctgtgtc

SEQ ID NO: 173419 - DNA, 25 bp, probe
ctataatgtgaactttcccctgttc

SEQ ID NO: 173420 - DNA, 25 bp, probe
cttactggcaatgcttccacagcgt

SEQ ID NO: 173421 - DNA, 25 bp, probe
cttcacgaagtgactccaagaccat

SEQ ID NO: 173422 - DNA, 25 bp, probe
cttcaattgagaactccactcccag

SEQ ID NO: 173423 - DNA, 25 bp, probe
cttcaatctgaaggtccagtactca

SEQ ID NO: 173424 - DNA, 25 bp, probe
cttaatgtgaagctacgatgtctaa

SEQ ID NO: 173425 - DNA, 25 bp, probe
cttcacagtaaaataacagctctat

SEQ ID NO: 173426 - DNA, 25 bp, probe
cttaattctaggaaacagcaagcta

SEQ ID NO: 173427 - DNA, 25 bp, probe
cttaattctaggaaacagcaagcta

SEQ ID NO: 173428 - DNA, 25 bp, probe
cttaattctcgaacagttgactgct

SEQ ID NO: 173429 - DNA, 25 bp, probe
cttaatgcgctcaaacagttctcct

SEQ ID NO: 173430 - DNA, 25 bp, probe
cttaagagcctctaatgttctccca

SEQ ID NO: 173431 - DNA, 25 bp, probe
cttattggcctctcagttgtacacc

SEQ ID NO: 173432 - DNA, 25 bp, probe
cttactggcttctcaattttcttcc

SEQ ID NO: 173433 - DNA, 25 bp, probe
cttcaagtggtttgacttttcttca

SEQ ID NO: 173434 - DNA, 25 bp, probe
cttcggtgggtattttctgcctaag

SEQ ID NO: 173435 - DNA, 25 bp, probe
cttacccaggtagatatctccgaag

SEQ ID NO: 173436 - DNA, 25 bp, probe
cttacccagaattcttgttcacaaa

SEQ ID NO: 173437 - DNA, 25 bp, probe
cttacctagatatctgctactcaca

SEQ ID NO: 173438 - DNA, 25 bp, probe
cttccctgagttttgcttattcact

SEQ ID NO: 173439 - DNA, 25 bp, probe
cttccccagggttctgtattgcagc

SEQ ID NO: 173440 - DNA, 25 bp, probe
cttctggccaggctactttatcaca

SEQ ID NO: 173441 - DNA, 25 bp, probe
cttctggaaggcagtctttctatag

SEQ ID NO: 173442 - DNA, 25 bp, probe
cttctggaaggcagtctttctatag

SEQ ID NO: 173443 - DNA, 25 bp, probe
cttcgtgaaggcttttgttctttct

SEQ ID NO: 173444 - DNA, 25 bp, probe
cttcatctaagccttctggttttat

SEQ ID NO: 173445 - DNA, 25 bp, probe
cttattaccttctgggcatttattc

SEQ ID NO: 173446 - DNA, 25 bp, probe
cttactaacttctccgcaagttgtc

SEQ ID NO: 173447 - DNA, 25 bp, probe
cttacttccctctcacagaaaagtc

SEQ ID NO: 173448 - DNA, 25 bp, probe
ctttccttttgcaacaagacaaagc

SEQ ID NO: 173449 - DNA, 25 bp, probe
cttctctctcctttacgagacgaaa

SEQ ID NO: 173450 - DNA, 25 bp, probe
cttctcttcgtctttgagcagcagt

SEQ ID NO: 173451 - DNA, 25 bp, probe
cttcccttgtatccagtgatgtgct

SEQ ID NO: 173452 - DNA, 25 bp, probe
cttcattctgctgagcaagtgtggc

SEQ ID NO: 173453 - DNA, 25 bp, probe
cttcatctttgccaacgtcagtgag

SEQ ID NO: 173454 - DNA, 25 bp, probe
cttctttctccaaggtcagggtaat

SEQ ID NO: 173455 - DNA, 25 bp, probe
cttctttgcccaaaatgcagtgcca

SEQ ID NO: 173456 - DNA, 25 bp, probe
cttctctctaaggagaatggcccag

SEQ ID NO: 173457 - DNA, 25 bp, probe
cttccgcaaccaggagatccagcgc

SEQ ID NO: 173458 - DNA, 25 bp, probe
cttcccaatccagtggacttcgcag

SEQ ID NO: 173459 - DNA, 25 bp, probe
cttctccaatccaagatggcaacga

SEQ ID NO: 173460 - DNA, 25 bp, probe
cttccgcacggcatgtgtcagcaag

SEQ ID NO: 173461 - DNA, 25 bp, probe
cttcttgcagccgtgtggacgaagt

SEQ ID NO: 173462 - DNA, 25 bp, probe
cttctctgcaacttgttgagcaaca

SEQ ID NO: 173463 - DNA, 25 bp, probe
cttctgctgaagttggaggacaaac

SEQ ID NO: 173464 - DNA, 25 bp, probe
cttctgctaaggagggacccgtgtt

SEQ ID NO: 173465 - DNA, 25 bp, probe
cttctctacaccatggtgacaaggt

SEQ ID NO: 173466 - DNA, 25 bp, probe
cttcagcttactactctggatacag

SEQ ID NO: 173467 - DNA, 25 bp, probe
cttcagcactgaaaccgagtcacct

SEQ ID NO: 173468 - DNA, 25 bp, probe
cttccctgaaccaggatctgcctat

SEQ ID NO: 173469 - DNA, 25 bp, probe
cttccctaatcctaaaatgcgagtt

SEQ ID NO: 173470 - DNA, 25 bp, probe
cttccctaatcctaaaatgcgagtt

SEQ ID NO: 173471 - DNA, 25 bp, probe
ctaaccttgtcctaatacgctatgt

SEQ ID NO: 173472 - DNA, 25 bp, probe
cttacttttccttgatagggtgctg

SEQ ID NO: 173473 - DNA, 25 bp, probe
ctctaccttacccttgtgggagctg

SEQ ID NO: 173474 - DNA, 25 bp, probe
ctctaccttacccttgtgggagctg

SEQ ID NO: 173475 - DNA, 25 bp, probe
cttcaccttgacgcttatgaacctc

SEQ ID NO: 173476 - DNA, 25 bp, probe
cttagtcttgacagaaaaaccatct

SEQ ID NO: 173477 - DNA, 25 bp, probe
cttagcgttgcctggaaaagccaca

SEQ ID NO: 173478 - DNA, 25 bp, probe
cttaggcccctgggacaatgaccca

SEQ ID NO: 173479 - DNA, 25 bp, probe
cttccctcccatgaacagagaccac

SEQ ID NO: 173480 - DNA, 25 bp, probe
cttccctcccatgaacagagaccac

SEQ ID NO: 173481 - DNA, 25 bp, probe
cttcggctcggagcccaagatcctc

SEQ ID NO: 173482 - DNA, 25 bp, probe
cttctgtctgggatccgccagaact

SEQ ID NO: 173483 - DNA, 25 bp, probe
cttctgtctgggatccgccagaact

SEQ ID NO: 173484 - DNA, 25 bp, probe
cttctcatctggacacccttggaag

SEQ ID NO: 173485 - DNA, 25 bp, probe
cttcgtcatggtaccctttgaatat

SEQ ID NO: 173486 - DNA, 25 bp, probe
cttcgacacggacctgctttgagat

SEQ ID NO: 173487 - DNA, 25 bp, probe
cttcttcacaggcactcctggagat

SEQ ID NO: 173488 - DNA, 25 bp, probe
cttctccaagcaaagccatatggag

SEQ ID NO: 173489 - DNA, 25 bp, probe
cttcttcaggtagcctcatggcagc

SEQ ID NO: 173490 - DNA, 25 bp, probe
cttctgtagggagcagtaagcagct

SEQ ID NO: 173491 - DNA, 25 bp, probe
cttatgaaggaaaagccatagcagg

SEQ ID NO: 173492 - DNA, 25 bp, probe
cttagaggagcccacggctaagagg

SEQ ID NO: 173493 - DNA, 25 bp, probe
cttcaaaggcctcctatccaaagct

SEQ ID NO: 173494 - DNA, 25 bp, probe
cttaaacagcctccagtcataaaaa

SEQ ID NO: 173495 - DNA, 25 bp, probe
cttaaacagcctccagtcataaaaa

SEQ ID NO: 173496 - DNA, 25 bp, probe
cttctaaatcctcctgtaatggaac

SEQ ID NO: 173497 - DNA, 25 bp, probe
cttctaaacttggcagtttctaact

SEQ ID NO: 173498 - DNA, 25 bp, probe
cttcattccacttacaattcctaat

SEQ ID NO: 173499 - DNA, 25 bp, probe
cttcacacccattacattgtgggaa

SEQ ID NO: 173500 - DNA, 25 bp, probe
cttaagtacatccactctgctgggg

SEQ ID NO: 173501 - DNA, 25 bp, probe
cttaagatggtgccttcgtgaaggc

SEQ ID NO: 173502 - DNA, 25 bp, probe
cttcgagatggccgcatacctgaaa

SEQ ID NO: 173503 - DNA, 25 bp, probe
cttctgatgtgggcgccctacaata

SEQ ID NO: 173504 - DNA, 25 bp, probe
ctatctggaggagatcctaataacc

SEQ ID NO: 173505 - DNA, 25 bp, probe
cttctgggtgcataccagtcttacc

SEQ ID NO: 173506 - DNA, 25 bp, probe
cttctgggtgcataccagtcttacc

SEQ ID NO: 173507 - DNA, 25 bp, probe
cttctggagacatctcggaggtaca

SEQ ID NO: 173508 - DNA, 25 bp, probe
cttcccagagtcatcctcagttgac

SEQ ID NO: 173509 - DNA, 25 bp, probe
ctctatgtcaggattaccagattac

SEQ ID NO: 173510 - DNA, 25 bp, probe
cttctgtcagtggcttatgtcattt

SEQ ID NO: 173511 - DNA, 25 bp, probe
cttctgggtttgtattatgtctggc

SEQ ID NO: 173512 - DNA, 25 bp, probe
ctttgacatgttcaacttcctggcc

SEQ ID NO: 173513 - DNA, 25 bp, probe
cttcttcatctacagcctgtacggc

SEQ ID NO: 173514 - DNA, 25 bp, probe
cttccctcataggggctgtgacctg

SEQ ID NO: 173515 - DNA, 25 bp, probe
cttcacttacgcgggcattgatgcc

SEQ ID NO: 173516 - DNA, 25 bp, probe
cttcccttctgggcagttgatgccg

SEQ ID NO: 173517 - DNA, 25 bp, probe
cttctggttctggcacattggaaag

SEQ ID NO: 173518 - DNA, 25 bp, probe
cttcggccatctggcaggtggctac

SEQ ID NO: 173519 - DNA, 25 bp, probe
cttcgacgtgctggctgtggagtac

SEQ ID NO: 173520 - DNA, 25 bp, probe
cttcaggcgcgcggtctggcagtaa

SEQ ID NO: 173521 - DNA, 25 bp, probe
cttagtcagcagggctctgccaggg

SEQ ID NO: 173522 - DNA, 25 bp, probe
cttcgtgacaggcatcgtcagctgg

SEQ ID NO: 173523 - DNA, 25 bp, probe
cttctgtacagtcaggtctgctctg

SEQ ID NO: 173524 - DNA, 25 bp, probe
cttctcaaagggccagtctgtgctg

SEQ ID NO: 173525 - DNA, 25 bp, probe
cttctacaatgagctgcgtgtggct

SEQ ID NO: 173526 - DNA, 25 bp, probe
cttcgaaatcaggtggttagctcaa

SEQ ID NO: 173527 - DNA, 25 bp, probe
cttctgcattttagtggttccacaa

SEQ ID NO: 173528 - DNA, 25 bp, probe
cttctgcattttagtggttccacaa

SEQ ID NO: 173529 - DNA, 25 bp, probe
cttagcttttagcctggctgtcacc

SEQ ID NO: 173530 - DNA, 25 bp, probe
cttactgtggcagctttgcttacgc

SEQ ID NO: 173531 - DNA, 25 bp, probe
cttcactggccagagcttagtcacg

SEQ ID NO: 173532 - DNA, 25 bp, probe
ctattttgccagtgactagtccatg

SEQ ID NO: 173533 - DNA, 25 bp, probe
ctattttgccagtgactagtccatg

SEQ ID NO: 173534 - DNA, 25 bp, probe
ctttttccaggcaatgacgtcgatg

SEQ ID NO: 173535 - DNA, 25 bp, probe
cttcgttccagacatgagcttgagc

SEQ ID NO: 173536 - DNA, 25 bp, probe
cttctctaccaagtctgatgtctgg

SEQ ID NO: 173537 - DNA, 25 bp, probe
cttcttggtcaatcttgactagatt

SEQ ID NO: 173538 - DNA, 25 bp, probe
cttcttctggaagctggagctaatg

SEQ ID NO: 173539 - DNA, 25 bp, probe
cttctctctggatccggaagaatca

SEQ ID NO: 173540 - DNA, 25 bp, probe
cttctctctggatccggaagaatca

SEQ ID NO: 173541 - DNA, 25 bp, probe
ctttccccagacagttagaatgtgt

SEQ ID NO: 173542 - DNA, 25 bp, probe
ctttatctacggatttagaatgtgg

SEQ ID NO: 173543 - DNA, 25 bp, probe
ctttctcagaaggtgtttggtatgg

SEQ ID NO: 173544 - DNA, 25 bp, probe
cttatcccactgggttgggattatg

SEQ ID NO: 173545 - DNA, 25 bp, probe
ctactcgtcacgtgtttggatcaag

SEQ ID NO: 173546 - DNA, 25 bp, probe
cttcaggtcaggagtttgagaccag

SEQ ID NO: 173547 - DNA, 25 bp, probe
cttcaggagggaggcttcgggcaca

SEQ ID NO: 173548 - DNA, 25 bp, probe
cttcggggtgatcctctgggagatc

SEQ ID NO: 173549 - DNA, 25 bp, probe
cttcacaggggacccgttgatatct

SEQ ID NO: 173550 - DNA, 25 bp, probe
cttacacggtgacttccgtgtcctg

SEQ ID NO: 173551 - DNA, 25 bp, probe
cttaagggaataggccaggctccat

SEQ ID NO: 173552 - DNA, 25 bp, probe
cttcacgaggaatctgggcctctta

SEQ ID NO: 173553 - DNA, 25 bp, probe
cttcatataaactcaagtgcctgct

SEQ ID NO: 173554 - DNA, 25 bp, probe
cttctgggagacatcatagtgctag

SEQ ID NO: 173555 - DNA, 25 bp, probe
cttctgtggaattacaagtgagaga

SEQ ID NO: 173556 - DNA, 25 bp, probe
cttcttgcaaagcacaagctgggac

SEQ ID NO: 173557 - DNA, 25 bp, probe
cttcttgctgaccaaaagtctggac

SEQ ID NO: 173558 - DNA, 25 bp, probe
cttctggtgacttcaaattctcttc

SEQ ID NO: 173559 - DNA, 25 bp, probe
cttctgtggctcacagaacccttgg

SEQ ID NO: 173560 - DNA, 25 bp, probe
cttcatgctgtgtgtcggacacctg

SEQ ID NO: 173561 - DNA, 25 bp, probe
cttagggctggtggtgaccctttct

SEQ ID NO: 173562 - DNA, 25 bp, probe
cttaatggggggaactgccttgtgc

SEQ ID NO: 173563 - DNA, 25 bp, probe
cttcttgtgggagatactcagtatg

SEQ ID NO: 173564 - DNA, 25 bp, probe
cttcttttgcgacatgacggtgatg

SEQ ID NO: 173565 - DNA, 25 bp, probe
cttctgctatgtgacttgcatcgtg

SEQ ID NO: 173566 - DNA, 25 bp, probe
cttctgcttgtggtgcattattttc

SEQ ID NO: 173567 - DNA, 25 bp, probe
cttagcttgggtgagactgtttaca

SEQ ID NO: 173568 - DNA, 25 bp, probe
ctttcttgggttaatccatgttcaa

SEQ ID NO: 173569 - DNA, 25 bp, probe
cttttccttattaaccatgttctgg

SEQ ID NO: 173570 - DNA, 25 bp, probe
cttttccttcacgaacacagtgggg

SEQ ID NO: 173571 - DNA, 25 bp, probe
cttaccctttgtgaactgcagggac

SEQ ID NO: 173572 - DNA, 25 bp, probe
cttcaaccttctgaagaccggccac

SEQ ID NO: 173573 - DNA, 25 bp, probe
ctgaaagacttgaaaagcctccgcc

SEQ ID NO: 173574 - DNA, 25 bp, probe
ctgaaaggacgagaggccccagacg

SEQ ID NO: 173575 - DNA, 25 bp, probe
ctgaaaggacgagaggccccagacg

SEQ ID NO: 173576 - DNA, 25 bp, probe
ctgtactggacgtgaagcccgaggc

SEQ ID NO: 173577 - DNA, 25 bp, probe
cttagggctctgtgagaggtggggc

SEQ ID NO: 173578 - DNA, 25 bp, probe
cttcaccaccatggagaaggctggg

SEQ ID NO: 173579 - DNA, 25 bp, probe
cttcatcgcccagacagtgctgcga

SEQ ID NO: 173580 - DNA, 25 bp, probe
cttctacggctggacaggatgcagc

SEQ ID NO: 173581 - DNA, 25 bp, probe
cttctacacggccacagagagccag

SEQ ID NO: 173582 - DNA, 25 bp, probe
ctttcaccggcgcaagatgcaggtc

SEQ ID NO: 173583 - DNA, 25 bp, probe
ctttcaccggcgcaagatgcaggtc

SEQ ID NO: 173584 - DNA, 25 bp, probe
ctttcaccggcgcaagatgcaggtc

SEQ ID NO: 173585 - DNA, 25 bp, probe
cttctccctgtgccagaagatcgag

SEQ ID NO: 173586 - DNA, 25 bp, probe
tggttacctacgaaggctccaatcc

SEQ ID NO: 173587 - DNA, 25 bp, probe
cttctgtctcttgcataagcctcag

SEQ ID NO: 173588 - DNA, 25 bp, probe
cttctttttcttaatgcgctcaaac

SEQ ID NO: 173589 - DNA, 25 bp, probe
cttcttagaagcttcgaactcaaaa

SEQ ID NO: 173590 - DNA, 25 bp, probe
cttcttggctaagaaaccagagcaa

SEQ ID NO: 173591 - DNA, 25 bp, probe
cttctcttctccgatttaccagaaa

SEQ ID NO: 173592 - DNA, 25 bp, probe
cttttctccctagttagacacacca

SEQ ID NO: 173593 - DNA, 25 bp, probe
ctactttggccatgttagcctggtc

SEQ ID NO: 173594 - DNA, 25 bp, probe
cttttggtgccatgttttgtggctt

SEQ ID NO: 173595 - DNA, 25 bp, probe
cagcttctttgcccaaaatgcagtg

SEQ ID NO: 173596 - DNA, 25 bp, probe
cttaattgttcatgttttcagagtt

SEQ ID NO: 173597 - DNA, 25 bp, probe
cttacttttcaggctgctttgaggt

SEQ ID NO: 173598 - DNA, 25 bp, probe
cttatttttctgggtctcttaatag

SEQ ID NO: 173599 - DNA, 25 bp, probe
cttaactcttcatccatccaaaaag

SEQ ID NO: 173600 - DNA, 25 bp, probe
cttcaactattctcgccgcaaaaac

SEQ ID NO: 173601 - DNA, 25 bp, probe
cttcaactattctcgccgcaaaaac

SEQ ID NO: 173602 - DNA, 25 bp, probe
cgataattatacgacggagacctaa

SEQ ID NO: 173603 - DNA, 25 bp, probe
cgataattatacgacggagacctaa

SEQ ID NO: 173604 - DNA, 25 bp, probe
cgataattatacgacggagacctaa

SEQ ID NO: 173605 - DNA, 25 bp, probe
ctaagttaataataatgactctaaa

SEQ ID NO: 173606 - DNA, 25 bp, probe
cttacattactattccataactcca

SEQ ID NO: 173607 - DNA, 25 bp, probe
cttacattactattccataactcca

SEQ ID NO: 173608 - DNA, 25 bp, probe
cttactagatctcatacaaggctta

SEQ ID NO: 173609 - DNA, 25 bp, probe
ctttcttaccaatcaaggactcaga

SEQ ID NO: 173610 - DNA, 25 bp, probe
ctttcttaccaatcaaggactcaga

SEQ ID NO: 173611 - DNA, 25 bp, probe
cttatctgtagtcttaggaactcag

SEQ ID NO: 173612 - DNA, 25 bp, probe
cttttttgggtctataacattcatg

SEQ ID NO: 173613 - DNA, 25 bp, probe
cttttttggcggctaaatcatccca

SEQ ID NO: 173614 - DNA, 25 bp, probe
cttttttggcggctaaatcatccca

SEQ ID NO: 173615 - DNA, 25 bp, probe
ctgtaattgtttgttatatttccca

SEQ ID NO: 173616 - DNA, 25 bp, probe
cttcagatctttctttgtagtgtcc

SEQ ID NO: 173617 - DNA, 25 bp, probe
cttctgtctttggtattatagttca

SEQ ID NO: 173618 - DNA, 25 bp, probe
cttctgtttcatggaacctatgttt

SEQ ID NO: 173619 - DNA, 25 bp, probe
cttcatgctctgataactgcctttc

SEQ ID NO: 173620 - DNA, 25 bp, probe
cttcagctctacatccagatctgta

SEQ ID NO: 173621 - DNA, 25 bp, probe
cttctgctctgagttggcaagccaa

SEQ ID NO: 173622 - DNA, 25 bp, probe
cttcatccttcttgtaaccatattg

SEQ ID NO: 173623 - DNA, 25 bp, probe
cttctttgtcataaatcacaataag

SEQ ID NO: 173624 - DNA, 25 bp, probe
cttaatatgcaagactctcaaggag

SEQ ID NO: 173625 - DNA, 25 bp, probe
cttcaatgcgaaggacgcgcaaatg

SEQ ID NO: 173626 - DNA, 25 bp, probe
cttcaacagagaggccagcggcaac

SEQ ID NO: 173627 - DNA, 25 bp, probe
cttctaagcacaaccagaggcccaa

SEQ ID NO: 173628 - DNA, 25 bp, probe
cttcatcaagcggtccgaggtggaa

SEQ ID NO: 173629 - DNA, 25 bp, probe
cttcatcaagcgctacgagacgctg

SEQ ID NO: 173630 - DNA, 25 bp, probe
cttctctaccgctacatgaaccaga

SEQ ID NO: 173631 - DNA, 25 bp, probe
cttctgcgatacgaccatcaacaga

SEQ ID NO: 173632 - DNA, 25 bp, probe
ctagcatggatctgccaatgcccat

SEQ ID NO: 173633 - DNA, 25 bp, probe
cttctggcagctagttagtgccatg

SEQ ID NO: 173634 - DNA, 25 bp, probe
cttctgccagattcttggagctctc

SEQ ID NO: 173635 - DNA, 25 bp, probe
ctttgcaagagagatgggcccaagg

SEQ ID NO: 173636 - DNA, 25 bp, probe
ctttcaagcagagcacattcccagc

SEQ ID NO: 173637 - DNA, 25 bp, probe
ctttgcaagagcgcagaccaccgcg

SEQ ID NO: 173638 - DNA, 25 bp, probe
cttctgaagaccggccaccggatgg

SEQ ID NO: 173639 - DNA, 25 bp, probe
cttctaagcaaagtgcccctgcagg

SEQ ID NO: 173640 - DNA, 25 bp, probe
cttcaagagcaagttctcgggagcg

SEQ ID NO: 173641 - DNA, 25 bp, probe
cttcaacatcaacttctacgcagga

SEQ ID NO: 173642 - DNA, 25 bp, probe
cttacaatatgcctgttatctgtgg

SEQ ID NO: 173643 - DNA, 25 bp, probe
cttcactcacagtctgagttcttgt

SEQ ID NO: 173644 - DNA, 25 bp, probe
cttcttcacacccattacattgtgg

SEQ ID NO: 173645 - DNA, 25 bp, probe
cttctacacatgtggtactctgagc

SEQ ID NO: 173646 - DNA, 25 bp, probe
cttctgtgcacaaagtgctcccttc

SEQ ID NO: 173647 - DNA, 25 bp, probe
cttctgtgtatctaggtggacctca

SEQ ID NO: 173648 - DNA, 25 bp, probe
ctagaggatacttgaatggacctct

SEQ ID NO: 173649 - DNA, 25 bp, probe
ctagataatatttttagattcttct

SEQ ID NO: 173650 - DNA, 25 bp, probe
cttctttgtctgttttgactttcct

SEQ ID NO: 173651 - DNA, 25 bp, probe
cttcttggtctactgtgaactctta

SEQ ID NO: 173652 - DNA, 25 bp, probe
cttttgggatgattgctcgattgtt

SEQ ID NO: 173653 - DNA, 25 bp, probe
cttttgggatgattgctcgattgtt

SEQ ID NO: 173654 - DNA, 25 bp, probe
ctttaggactgtgtagttgtatatt

SEQ ID NO: 173655 - DNA, 25 bp, probe
cttatacgacttttcattcagttga

SEQ ID NO: 173656 - DNA, 25 bp, probe
cttcaagggcttctttgagctgttc

SEQ ID NO: 173657 - DNA, 25 bp, probe
cttcaagggcttctttgagctgttc

SEQ ID NO: 173658 - DNA, 25 bp, probe
cttctgcagggtatttgggctcctc

SEQ ID NO: 173659 - DNA, 25 bp, probe
cttcagccagcgacgtttggagcta

SEQ ID NO: 173660 - DNA, 25 bp, probe
cttctgggcgtccatctgattggaa

SEQ ID NO: 173661 - DNA, 25 bp, probe
cttagattgcctccatctcaatgtg

SEQ ID NO: 173662 - DNA, 25 bp, probe
cttacatcatgagtggactttgcat

SEQ ID NO: 173663 - DNA, 25 bp, probe
ctatagcctatggagacatcactgt

SEQ ID NO: 173664 - DNA, 25 bp, probe
cttactgctcatggattacatcggt

SEQ ID NO: 173665 - DNA, 25 bp, probe
cttctccttcacaaacacggtgggg

SEQ ID NO: 173666 - DNA, 25 bp, probe
cttctccttaattaactgggatgat

SEQ ID NO: 173667 - DNA, 25 bp, probe
ctggattttaattctttgccgtatc

SEQ ID NO: 173668 - DNA, 25 bp, probe
ctaattttggattccttggtggagg

SEQ ID NO: 173669 - DNA, 25 bp, probe
ctaattttggattccttggtggagg

SEQ ID NO: 173670 - DNA, 25 bp, probe
ctattttagtgcacctggagggaaa

SEQ ID NO: 173671 - DNA, 25 bp, probe
ctttttcacgcccgggagtggaatg

SEQ ID NO: 173672 - DNA, 25 bp, probe
cttttacccacggtggctggagaag

SEQ ID NO: 173673 - DNA, 25 bp, probe
ctttctcaggccaggagggccgagg

SEQ ID NO: 173674 - DNA, 25 bp, probe
cttctccaagccagaaaccacattt

SEQ ID NO: 173675 - DNA, 25 bp, probe
cttctaggatccaagtttccttatt

SEQ ID NO: 173676 - DNA, 25 bp, probe
cttctgcacgagcaagtttctcatt

SEQ ID NO: 173677 - DNA, 25 bp, probe
cttctgcacgagcaagtttctcatt

SEQ ID NO: 173678 - DNA, 25 bp, probe
cttctcaggaatacagttttcaact

SEQ ID NO: 173679 - DNA, 25 bp, probe
cttctagtaaaaaatatctgccacc

SEQ ID NO: 173680 - DNA, 25 bp, probe
ctactttaacagggtatgctgcctc

SEQ ID NO: 173681 - DNA, 25 bp, probe
cttaattaactgggatgatctcatt

SEQ ID NO: 173682 - DNA, 25 bp, probe
cttcataataccagtgtgatgtcag

SEQ ID NO: 173683 - DNA, 25 bp, probe
cttcatgaaaaccagatcgtgcaca

SEQ ID NO: 173684 - DNA, 25 bp, probe
cttctgagacatccctgattctctc

SEQ ID NO: 173685 - DNA, 25 bp, probe
cttcaagacgctggctgatgtactg

SEQ ID NO: 173686 - DNA, 25 bp, probe
cttctgaggcctccgaggactggat

SEQ ID NO: 173687 - DNA, 25 bp, probe
cttctgagggatgcaggtggctgtg

SEQ ID NO: 173688 - DNA, 25 bp, probe
cttctagtggacagaacatgctgtg

SEQ ID NO: 173689 - DNA, 25 bp, probe
cttctactgtacaggacactggccc

SEQ ID NO: 173690 - DNA, 25 bp, probe
cttctcctgtactgtgcatcgtgag

SEQ ID NO: 173691 - DNA, 25 bp, probe
cttctgtctgtagaggcttcatatg

SEQ ID NO: 173692 - DNA, 25 bp, probe
cttctatcatttcagcttcttcatg

SEQ ID NO: 173693 - DNA, 25 bp, probe
cttctctcacttcagctcagagtca

SEQ ID NO: 173694 - DNA, 25 bp, probe
cttctcatctcattcgacacaagtc

SEQ ID NO: 173695 - DNA, 25 bp, probe
cttctcatctcattcgacacaagtc

SEQ ID NO: 173696 - DNA, 25 bp, probe
cttcactgctacagagccacagtac

SEQ ID NO: 173697 - DNA, 25 bp, probe
cttcactgctacagagccacagtac

SEQ ID NO: 173698 - DNA, 25 bp, probe
cttcactgccaatcaggcaaagacc

SEQ ID NO: 173699 - DNA, 25 bp, probe
ctttctgtccatacttaaagaccaa

SEQ ID NO: 173700 - DNA, 25 bp, probe
cttctcagtagaacttaaacataaa

SEQ ID NO: 173701 - DNA, 25 bp, probe
ctgatttgtagctcgtaaggtagta

SEQ ID NO: 173702 - DNA, 25 bp, probe
cttttgtggcccgaaatcgtagtgc

SEQ ID NO: 173703 - DNA, 25 bp, probe
ctacctgcaggcacaaaaggggatg

SEQ ID NO: 173704 - DNA, 25 bp, probe
gcatactccagtgttttaggggttt

SEQ ID NO: 173705 - DNA, 25 bp, probe
gtacttcctttcagtagggcgctaa

SEQ ID NO: 173706 - DNA, 25 bp, probe
gtacttcctttcagtagggcgctaa

SEQ ID NO: 173707 - DNA, 25 bp, probe
ctacctcctaaactatagtggctgc

SEQ ID NO: 173708 - DNA, 25 bp, probe
ctacctcactagacatccaaaggag

SEQ ID NO: 173709 - DNA, 25 bp, probe
cttttacaagccgcaaaggcagcag

SEQ ID NO: 173710 - DNA, 25 bp, probe
cttcttaacagaagctcaagagcga

SEQ ID NO: 173711 - DNA, 25 bp, probe
cttctttgacaacccatgggctggt

SEQ ID NO: 173712 - DNA, 25 bp, probe
cttcttccacagcgtatgtggggag

SEQ ID NO: 173713 - DNA, 25 bp, probe
cttctaggacacctgtgcagggtcc

SEQ ID NO: 173714 - DNA, 25 bp, probe
cttctagagagcctgcttcaagatt

SEQ ID NO: 173715 - DNA, 25 bp, probe
cttctcatagacatgcctgcagaga

SEQ ID NO: 173716 - DNA, 25 bp, probe
cttctcactggcaagctcttgcagt

SEQ ID NO: 173717 - DNA, 25 bp, probe
cttctcactggcaagactctggttg

SEQ ID NO: 173718 - DNA, 25 bp, probe
cttcagctctcagaaattgagttcc

SEQ ID NO: 173719 - DNA, 25 bp, probe
cttcacctcggacatggcgtatgtc

SEQ ID NO: 173720 - DNA, 25 bp, probe
cttcaccctgttcatcgtgatgatg

SEQ ID NO: 173721 - DNA, 25 bp, probe
cttcatgccactgaatacgttgaaa

SEQ ID NO: 173722 - DNA, 25 bp, probe
cttcacccttgaatcctttcagaag

SEQ ID NO: 173723 - DNA, 25 bp, probe
cttagctcttcgatacttacacaag

SEQ ID NO: 173724 - DNA, 25 bp, probe
cttagtcctgatgtactttaaatat

SEQ ID NO: 173725 - DNA, 25 bp, probe
ctttaccagaccacttctcagaaaa

SEQ ID NO: 173726 - DNA, 25 bp, probe
cttcatacctacccttgttatgata

SEQ ID NO: 173727 - DNA, 25 bp, probe
cttctccgtacgattgtctctgaaa

SEQ ID NO: 173728 - DNA, 25 bp, probe
cttctccagttacttgcttgtgtaa

SEQ ID NO: 173729 - DNA, 25 bp, probe
cttctcagagtcaacctcctgtgat

SEQ ID NO: 173730 - DNA, 25 bp, probe
cttctcagataccagcccttggaga

SEQ ID NO: 173731 - DNA, 25 bp, probe
cttctttaccacaagctatggtgac

SEQ ID NO: 173732 - DNA, 25 bp, probe
cttctttcgccctatcattggagat

SEQ ID NO: 173733 - DNA, 25 bp, probe
cttctttcaggaagtcttccagcaa

SEQ ID NO: 173734 - DNA, 25 bp, probe
cttcttccagtgtgaccctgagcaa

SEQ ID NO: 173735 - DNA, 25 bp, probe
cttctccccagaggacgctatggag

SEQ ID NO: 173736 - DNA, 25 bp, probe
cttctcccacgacgatgcggacgtg

SEQ ID NO: 173737 - DNA, 25 bp, probe
cttctcccacgacgatgcggacgtg

SEQ ID NO: 173738 - DNA, 25 bp, probe
cttctccaacgacatcatgctactg

SEQ ID NO: 173739 - DNA, 25 bp, probe
ctcttccaacgaaactgagataatg

SEQ ID NO: 173740 - DNA, 25 bp, probe
cttaccaatcaaggactcagaactg

SEQ ID NO: 173741 - DNA, 25 bp, probe
cttacacaaggagaagaggattgtc

SEQ ID NO: 173742 - DNA, 25 bp, probe
cttcaacagggagctgagggactgc

SEQ ID NO: 173743 - DNA, 25 bp, probe
cttcaacagggagctgagggactgc

SEQ ID NO: 173744 - DNA, 25 bp, probe
cttcttgaaggagctggggactgga

SEQ ID NO: 173745 - DNA, 25 bp, probe
ctactctggaaaggcggcggacgtc

SEQ ID NO: 173746 - DNA, 25 bp, probe
cttcatctgcagtaacggggggacc

SEQ ID NO: 173747 - DNA, 25 bp, probe
ctttcacagctatcagggaaggtag

SEQ ID NO: 173748 - DNA, 25 bp, probe
ctttcacagctatcagggaaggtag

SEQ ID NO: 173749 - DNA, 25 bp, probe
ctttagccttagcagtgggtatgag

SEQ ID NO: 173750 - DNA, 25 bp, probe
ctttagggaaggagtcaacagtgta

SEQ ID NO: 173751 - DNA, 25 bp, probe
ctaagggtgaaagtggtttagtgct

SEQ ID NO: 173752 - DNA, 25 bp, probe
ctagggtgtagctgggtacatatta

SEQ ID NO: 173753 - DNA, 25 bp, probe
ctggcccgttcgtggaactttacag

SEQ ID NO: 173754 - DNA, 25 bp, probe
ctggcccgttcgtggaactttacag

SEQ ID NO: 173755 - DNA, 25 bp, probe
ctggtttcttcctctaagaattgaa

SEQ ID NO: 173756 - DNA, 25 bp, probe
cttactttctccccaacataattat

SEQ ID NO: 173757 - DNA, 25 bp, probe
cttaatcttccatcctcagtaatta

SEQ ID NO: 173758 - DNA, 25 bp, probe
ctttatctcccacgactcagtgaag

SEQ ID NO: 173759 - DNA, 25 bp, probe
ctttatctcccacgactcagtgaag

SEQ ID NO: 173760 - DNA, 25 bp, probe
cttcatacccagcgcaaaggcactg

SEQ ID NO: 173761 - DNA, 25 bp, probe
cttcacctccgggaaagacactgag

SEQ ID NO: 173762 - DNA, 25 bp, probe
ctatactccaagcgactagaccgga

SEQ ID NO: 173763 - DNA, 25 bp, probe
ctatactccaagcgactagaccgga

SEQ ID NO: 173764 - DNA, 25 bp, probe
cttagctgtcaactggaccacacca

SEQ ID NO: 173765 - DNA, 25 bp, probe
cttcagcatccgacgggaacatctc

SEQ ID NO: 173766 - DNA, 25 bp, probe
cttcagcacaccaatggtgtcaatg

SEQ ID NO: 173767 - DNA, 25 bp, probe
cttcagctcagcagatggatatcac

SEQ ID NO: 173768 - DNA, 25 bp, probe
cttagaagaagcagataaccaaact

SEQ ID NO: 173769 - DNA, 25 bp, probe
ctttaagaagcagtgttttagaaca

SEQ ID NO: 173770 - DNA, 25 bp, probe
ctttaatgaatcatcggcttggtac

SEQ ID NO: 173771 - DNA, 25 bp, probe
ctttgggtgatcaagggtgtggtta

SEQ ID NO: 173772 - DNA, 25 bp, probe
cttttggtcattcaagttgcgctct

SEQ ID NO: 173773 - DNA, 25 bp, probe
cttttgttctcatggaattggccta

SEQ ID NO: 173774 - DNA, 25 bp, probe
ctttgttcctaatgacgtggacttt

SEQ ID NO: 173775 - DNA, 25 bp, probe
ctttggccttaaaggcgctgtcacc

SEQ ID NO: 173776 - DNA, 25 bp, probe
cttatggcctgtcttggaggccttc

SEQ ID NO: 173777 - DNA, 25 bp, probe
cttaatacactgctatggaggactt

SEQ ID NO: 173778 - DNA, 25 bp, probe
ctttacaactggcagtggcctcctt

SEQ ID NO: 173779 - DNA, 25 bp, probe
ctttaacagggtatgctgcctctgt

SEQ ID NO: 173780 - DNA, 25 bp, probe
ctttgagatttgctcattcccctgt

SEQ ID NO: 173781 - DNA, 25 bp, probe
cttatgacatgatgattcagtccct

SEQ ID NO: 173782 - DNA, 25 bp, probe
cttagacatgatgaatatgctcaaa

SEQ ID NO: 173783 - DNA, 25 bp, probe
cttaacattgcagcaatcacctgca

SEQ ID NO: 173784 - DNA, 25 bp, probe
ctttacatggcaatcaaagcctttt

SEQ ID NO: 173785 - DNA, 25 bp, probe
ctttaattattccaagcggcttttg

SEQ ID NO: 173786 - DNA, 25 bp, probe
ctagttattacccagagtttttatg

SEQ ID NO: 173787 - DNA, 25 bp, probe
ctagttattacccagagtttttatg

SEQ ID NO: 173788 - DNA, 25 bp, probe
cttctttatacctacctttattatg

SEQ ID NO: 173789 - DNA, 25 bp, probe
ctttttgtaactaccctctcaaatg

SEQ ID NO: 173790 - DNA, 25 bp, probe
ctttttctactatccttgctaagtt

SEQ ID NO: 173791 - DNA, 25 bp, probe
cttctttctatttgacttgtggttg

SEQ ID NO: 173792 - DNA, 25 bp, probe
cttctttgcctgtatatttgtggtg

SEQ ID NO: 173793 - DNA, 25 bp, probe
cttcattgatttacatttttggagc

SEQ ID NO: 173794 - DNA, 25 bp, probe
cttcttgcttctcattttgctaagg

SEQ ID NO: 173795 - DNA, 25 bp, probe
cttcttcgtgctcacgggctacaag

SEQ ID NO: 173796 - DNA, 25 bp, probe
cttcattcgtgacagtggacatcta

SEQ ID NO: 173797 - DNA, 25 bp, probe
cttcttgcagagcaagggcatcatt

SEQ ID NO: 173798 - DNA, 25 bp, probe
cttcttcatggccagtgtgcacagt

SEQ ID NO: 173799 - DNA, 25 bp, probe
cttcttcatggatctgtgacagaga

SEQ ID NO: 173800 - DNA, 25 bp, probe
cttcatggtgaatagtcaagagatt

SEQ ID NO: 173801 - DNA, 25 bp, probe
cttcatggacatttcatgtcaggat

SEQ ID NO: 173802 - DNA, 25 bp, probe
cttcaggatgattcatctagcagac

SEQ ID NO: 173803 - DNA, 25 bp, probe
cttcaggtgacctatagagattcca

SEQ ID NO: 173804 - DNA, 25 bp, probe
cttcagtggcaccctcagaaaaatt

SEQ ID NO: 173805 - DNA, 25 bp, probe
cttcttaccgccaagtgaactgctt

SEQ ID NO: 173806 - DNA, 25 bp, probe
cttctttgccttcctggaattctta

SEQ ID NO: 173807 - DNA, 25 bp, probe
cttctattccttccaatgagagatt

SEQ ID NO: 173808 - DNA, 25 bp, probe
cttcagccctcttccaaaggattca

SEQ ID NO: 173809 - DNA, 25 bp, probe
cttcagtcatcctgaacctgagttc

SEQ ID NO: 173810 - DNA, 25 bp, probe
cttcaatgattgtaacagcctgcag

SEQ ID NO: 173811 - DNA, 25 bp, probe
cttcatcatatgttaaccttggcaa

SEQ ID NO: 173812 - DNA, 25 bp, probe
ctttcttgcagttaatttgaaaact

SEQ ID NO: 173813 - DNA, 25 bp, probe
cttttctccttatctgtgcagtaca

SEQ ID NO: 173814 - DNA, 25 bp, probe
ctgtttacctttttccatggactct

SEQ ID NO: 173815 - DNA, 25 bp, probe
ctttgtgggttgcaatacaaactgc

SEQ ID NO: 173816 - DNA, 25 bp, probe
cttttgggccgcgtctggaataatg

SEQ ID NO: 173817 - DNA, 25 bp, probe
ctttctgcggaaccccgaattacat

SEQ ID NO: 173818 - DNA, 25 bp, probe
cttttgggatagagcctttcttgtc

SEQ ID NO: 173819 - DNA, 25 bp, probe
ctttttgtgcccagactgttttcct

SEQ ID NO: 173820 - DNA, 25 bp, probe
ctttttgtgcccagactgttttcct

SEQ ID NO: 173821 - DNA, 25 bp, probe
ctttgaattctacatcctgtttctc

SEQ ID NO: 173822 - DNA, 25 bp, probe
cttctagtgttcacctctgtgatta

SEQ ID NO: 173823 - DNA, 25 bp, probe
cttcagtgttgtacgacgatgtatc

SEQ ID NO: 173824 - DNA, 25 bp, probe
cttagtatagatgctgacctccatc

SEQ ID NO: 173825 - DNA, 25 bp, probe
cttaatatcactttggtctccattt

SEQ ID NO: 173826 - DNA, 25 bp, probe
cttaatcccatgtcatgcgacccta

SEQ ID NO: 173827 - DNA, 25 bp, probe
cttatccttagctatgccaacagct

SEQ ID NO: 173828 - DNA, 25 bp, probe
cttacctggacatgtatcagatgct

SEQ ID NO: 173829 - DNA, 25 bp, probe
cttatcctggacatgaatgtattgt

SEQ ID NO: 173830 - DNA, 25 bp, probe
cttcatgccatggcctgtggatgga

SEQ ID NO: 173831 - DNA, 25 bp, probe
cttcatgctacgtgtgggtgacctc

SEQ ID NO: 173832 - DNA, 25 bp, probe
cttcatgctacgtgtgggtgacctc

SEQ ID NO: 173833 - DNA, 25 bp, probe
cttcatccacgtttgtggacaccag

SEQ ID NO: 173834 - DNA, 25 bp, probe
ctataccactgcattgggacgtctg

SEQ ID NO: 173835 - DNA, 25 bp, probe
cttcaccagctaatgttggattgtt

SEQ ID NO: 173836 - DNA, 25 bp, probe
cttcatgcagagatattcagggttt

SEQ ID NO: 173837 - DNA, 25 bp, probe
cttcaaggacctgagcgggtgctga

SEQ ID NO: 173838 - DNA, 25 bp, probe
cttaagtccttagctgcggtgctat

SEQ ID NO: 173839 - DNA, 25 bp, probe
cttcaagaccataaactggactctg

SEQ ID NO: 173840 - DNA, 25 bp, probe
cttcataacgctaagcattgttttg

SEQ ID NO: 173841 - DNA, 25 bp, probe
cttaacattggccagcatctgttta

SEQ ID NO: 173842 - DNA, 25 bp, probe
cttaagcatttcccagctgtgtaaa

SEQ ID NO: 173843 - DNA, 25 bp, probe
cttacatgattgtcctcatggtcac

SEQ ID NO: 173844 - DNA, 25 bp, probe
ctaacatgttgtgcctggaccatcg

SEQ ID NO: 173845 - DNA, 25 bp, probe
cttacattctagttctggtgctctc

SEQ ID NO: 173846 - DNA, 25 bp, probe
cttactggtgagatgctgagttcct

SEQ ID NO: 173847 - DNA, 25 bp, probe
cttagtgtctacttgcaggaccctt

SEQ ID NO: 173848 - DNA, 25 bp, probe
ctttgttctggggggacccagtgca

SEQ ID NO: 173849 - DNA, 25 bp, probe
cttttggcattgtcgtgggcaccag

SEQ ID NO: 173850 - DNA, 25 bp, probe
cttttcagcttctgctgggctgggg

SEQ ID NO: 173851 - DNA, 25 bp, probe
cttcttcaggactctgggctgggaa

SEQ ID NO: 173852 - DNA, 25 bp, probe
cttcttggcacagctctggtgtggg

SEQ ID NO: 173853 - DNA, 25 bp, probe
cttcttgcccattcagatgcactgg

SEQ ID NO: 173854 - DNA, 25 bp, probe
cttcattctctcatattgatcatgg

SEQ ID NO: 173855 - DNA, 25 bp, probe
cttcttctgctgctatgaagaatgt

SEQ ID NO: 173856 - DNA, 25 bp, probe
cttcttcgcagctttacagggtcac

SEQ ID NO: 173857 - DNA, 25 bp, probe
cttatcctcagctgtgaaggtaaaa

SEQ ID NO: 173858 - DNA, 25 bp, probe
cttcatcccatgtcgtgttggttac

SEQ ID NO: 173859 - DNA, 25 bp, probe
cttcttccactgggctctggattaa

SEQ ID NO: 173860 - DNA, 25 bp, probe
cttcttcacgtaggctcctgttaaa

SEQ ID NO: 173861 - DNA, 25 bp, probe
cttcttcacgtaggctcctgttaaa

SEQ ID NO: 173862 - DNA, 25 bp, probe
cttcattcacaaacttccgctgtac

SEQ ID NO: 173863 - DNA, 25 bp, probe
cttcttctcaaaagatcacagctct

SEQ ID NO: 173864 - DNA, 25 bp, probe
cttcttccaaaagcacattgccaaa

SEQ ID NO: 173865 - DNA, 25 bp, probe
cttttcttaggagattatgtggaca

SEQ ID NO: 173866 - DNA, 25 bp, probe
cttttctttcaatcttaggagacag

SEQ ID NO: 173867 - DNA, 25 bp, probe
ctgtttgtttgcagaccaaggggct

SEQ ID NO: 173868 - DNA, 25 bp, probe
cgttttttatatctcaggtggtgct

SEQ ID NO: 173869 - DNA, 25 bp, probe
ctttttatctttctcgtgtgaactg

SEQ ID NO: 173870 - DNA, 25 bp, probe
cttttctcagttctacttatgacac

SEQ ID NO: 173871 - DNA, 25 bp, probe
cttcatgtctcactttaacttgtat

SEQ ID NO: 173872 - DNA, 25 bp, probe
cttatggatcgttatggagtactgt

SEQ ID NO: 173873 - DNA, 25 bp, probe
cttcagtctctttgatgtggtcctt

SEQ ID NO: 173874 - DNA, 25 bp, probe
cttcatctcactttaatgctttctt

SEQ ID NO: 173875 - DNA, 25 bp, probe
cttcttcccattcatatttatttat

SEQ ID NO: 173876 - DNA, 25 bp, probe
cttcattccctgtatctatatctat

SEQ ID NO: 173877 - DNA, 25 bp, probe
cttcattccctgtatctatatctat

SEQ ID NO: 173878 - DNA, 25 bp, probe
cttcatttcctgccacttgattggt

SEQ ID NO: 173879 - DNA, 25 bp, probe
cttcattgacctcaactacatggtt

SEQ ID NO: 173880 - DNA, 25 bp, probe
cttttgctattccaatctacaactg

SEQ ID NO: 173881 - DNA, 25 bp, probe
cttcatctgttcagtcatctccaaa

SEQ ID NO: 173882 - DNA, 25 bp, probe
cttcacatactgagacctccagatg

SEQ ID NO: 173883 - DNA, 25 bp, probe
cttcagtgaggaaagcgtctctgag

SEQ ID NO: 173884 - DNA, 25 bp, probe
cttcatggccgactggaatcctgag

SEQ ID NO: 173885 - DNA, 25 bp, probe
cttcaggcgctgcttcagatttggc

SEQ ID NO: 173886 - DNA, 25 bp, probe
cttagggctaggaacattctgctgt

SEQ ID NO: 173887 - DNA, 25 bp, probe
cttcagacaatacgaagaccctctg

SEQ ID NO: 173888 - DNA, 25 bp, probe
cttcacaaattgcaaatccgctaga

SEQ ID NO: 173889 - DNA, 25 bp, probe
cttcacaaatttgaattcctgctct

SEQ ID NO: 173890 - DNA, 25 bp, probe
cttaacttaatttttcctgctgtat

SEQ ID NO: 173891 - DNA, 25 bp, probe
cttaacttaatttttcctgctgtat

SEQ ID NO: 173892 - DNA, 25 bp, probe
cttatttctacagttaccctgcagt

SEQ ID NO: 173893 - DNA, 25 bp, probe
cttttatctcactctagtccaggtg

SEQ ID NO: 173894 - DNA, 25 bp, probe
cttattcaaacatcaacaacaggga

SEQ ID NO: 173895 - DNA, 25 bp, probe
cttattggaattgcttatgaaggaa

SEQ ID NO: 173896 - DNA, 25 bp, probe
ctttcgctggatggttttaggataa

SEQ ID NO: 173897 - DNA, 25 bp, probe
cttcatcgtaactgcttctagagat

SEQ ID NO: 173898 - DNA, 25 bp, probe
ctttagggatctagctcttcgagtg

SEQ ID NO: 173899 - DNA, 25 bp, probe
ctttaagaacaccagcttgcaggat

SEQ ID NO: 173900 - DNA, 25 bp, probe
cttatggcagaatctatttgggact

SEQ ID NO: 173901 - DNA, 25 bp, probe
cttatggcagaatctatttgggact

SEQ ID NO: 173902 - DNA, 25 bp, probe
cttcatggtgtctgattttttggct

SEQ ID NO: 173903 - DNA, 25 bp, probe
cttagggcatgaagcctttttcctg

SEQ ID NO: 173904 - DNA, 25 bp, probe
cttatcaggaacgcctcgatacgct

SEQ ID NO: 173905 - DNA, 25 bp, probe
cttcatgagtgcaactctccgtaca

SEQ ID NO: 173906 - DNA, 25 bp, probe
cttcacatggcttttctttcaatct

SEQ ID NO: 173907 - DNA, 25 bp, probe
ctttctggtcactttgtacaatgta

SEQ ID NO: 173908 - DNA, 25 bp, probe
cttcatttctaactgtgtaaacttt

SEQ ID NO: 173909 - DNA, 25 bp, probe
cttttttctacgaatgcactacatt

SEQ ID NO: 173910 - DNA, 25 bp, probe
ctttctgccttataaggctagcatg

SEQ ID NO: 173911 - DNA, 25 bp, probe
ctttgagccctagctaagtcactga

SEQ ID NO: 173912 - DNA, 25 bp, probe
ctacgacgcggagaacaaactgaac

SEQ ID NO: 173913 - DNA, 25 bp, probe
ctataatcctaagaacttctccaac

SEQ ID NO: 173914 - DNA, 25 bp, probe
cttatctcccaaggtactttccata

SEQ ID NO: 173915 - DNA, 25 bp, probe
cttacttcctaacatctttctgata

SEQ ID NO: 173916 - DNA, 25 bp, probe
cttacttcctaacatctttctgata

SEQ ID NO: 173917 - DNA, 25 bp, probe
cttacatttccatttattgtttgaa

SEQ ID NO: 173918 - DNA, 25 bp, probe
cttacatttccatttattgtttgaa

SEQ ID NO: 173919 - DNA, 25 bp, probe
ctttggcttcagaattgtttttaga

SEQ ID NO: 173920 - DNA, 25 bp, probe
ctttctcattttatgttgaactaaa

SEQ ID NO: 173921 - DNA, 25 bp, probe
ctttccttttgtcttgcatactcaa

SEQ ID NO: 173922 - DNA, 25 bp, probe
ctttcctgggtgacaatgatgctga

SEQ ID NO: 173923 - DNA, 25 bp, probe
ctttcctgaggatccatcatatagt

SEQ ID NO: 173924 - DNA, 25 bp, probe
ctttcactgcaccatcagtgcactg

SEQ ID NO: 173925 - DNA, 25 bp, probe
cttatctgtgcagtacaggttgctt

SEQ ID NO: 173926 - DNA, 25 bp, probe
cttttgatgacacctgcttggcttc

SEQ ID NO: 173927 - DNA, 25 bp, probe
ctttaatagcagatttggttgcaga

SEQ ID NO: 173928 - DNA, 25 bp, probe
ctttcaatcaacactttttcagact

SEQ ID NO: 173929 - DNA, 25 bp, probe
ctttcaccagccatgtcttaaatac

SEQ ID NO: 173930 - DNA, 25 bp, probe
ctttcaccagccatgtcttaaatac

SEQ ID NO: 173931 - DNA, 25 bp, probe
cttcatgccccacattcttaaatta

SEQ ID NO: 173932 - DNA, 25 bp, probe
cttcatgccccacattcttaaatta

SEQ ID NO: 173933 - DNA, 25 bp, probe
cttcatcctccaagacttttgaaaa

SEQ ID NO: 173934 - DNA, 25 bp, probe
cttttctctacgccttcttgaataa

SEQ ID NO: 173935 - DNA, 25 bp, probe
cttttaaacggagtcttgctatatc

SEQ ID NO: 173936 - DNA, 25 bp, probe
ctttttcaactggagctttatcata

SEQ ID NO: 173937 - DNA, 25 bp, probe
cttcatgtgagctattggagttttc

SEQ ID NO: 173938 - DNA, 25 bp, probe
cttcatgttcattgggtttatcctg

SEQ ID NO: 173939 - DNA, 25 bp, probe
ctttgtagcatcgggctaagacttt

SEQ ID NO: 173940 - DNA, 25 bp, probe
cttttactcggcccagatagcctgt

SEQ ID NO: 173941 - DNA, 25 bp, probe
cttttactcggcccagatagcctgt

SEQ ID NO: 173942 - DNA, 25 bp, probe
cttaaatctcattgcttacaagcct

SEQ ID NO: 173943 - DNA, 25 bp, probe
cttaaactcattccatatgcatctg

SEQ ID NO: 173944 - DNA, 25 bp, probe
cttaaatgttctcatctgtcgcacc

SEQ ID NO: 173945 - DNA, 25 bp, probe
cttacattttcgtcctgtagcacgc

SEQ ID NO: 173946 - DNA, 25 bp, probe
cttacatgttttcctctcgaaagcc

SEQ ID NO: 173947 - DNA, 25 bp, probe
cttacatgttttcctctcgaaagcc

SEQ ID NO: 173948 - DNA, 25 bp, probe
cttacatcgtgttgcggctcatgaa

SEQ ID NO: 173949 - DNA, 25 bp, probe
cttactcaagttggtcataattaac

SEQ ID NO: 173950 - DNA, 25 bp, probe
cttactcatctgaatccatcaactg

SEQ ID NO: 173951 - DNA, 25 bp, probe
cttcacactctgcattacagtctga

SEQ ID NO: 173952 - DNA, 25 bp, probe
cttcacacctgttctgaatccagca

SEQ ID NO: 173953 - DNA, 25 bp, probe
cttacccgtatctaacacacaatag

SEQ ID NO: 173954 - DNA, 25 bp, probe
ctttcacggaacaatcccaaatgca

SEQ ID NO: 173955 - DNA, 25 bp, probe
ctttcctggcagtctcagtccaaaa

SEQ ID NO: 173956 - DNA, 25 bp, probe
ctttcgctggcgtctacagcaacga

SEQ ID NO: 173957 - DNA, 25 bp, probe
cttacgcgggcattgatgccacagc

SEQ ID NO: 173958 - DNA, 25 bp, probe
cttcagcatcagcatgttggacaca

SEQ ID NO: 173959 - DNA, 25 bp, probe
cttcagcatcatctggcaggaagca

SEQ ID NO: 173960 - DNA, 25 bp, probe
cttatgattcactacagagcaggca

SEQ ID NO: 173961 - DNA, 25 bp, probe
cttatgattcactacagagcaggca

SEQ ID NO: 173962 - DNA, 25 bp, probe
cttcagcatctcccaggacagagat

SEQ ID NO: 173963 - DNA, 25 bp, probe
ctttgctgtcagccacgacaagctc

SEQ ID NO: 173964 - DNA, 25 bp, probe
ctttcaaagcaacagctcagctctt

SEQ ID NO: 173965 - DNA, 25 bp, probe
cttatctcaaagtccgtggctgttt

SEQ ID NO: 173966 - DNA, 25 bp, probe
cttagctgcgcatttgcggggctgg

SEQ ID NO: 173967 - DNA, 25 bp, probe
ctacgtcgatctaggtgtgaccagg

SEQ ID NO: 173968 - DNA, 25 bp, probe
cttagagtatggaggctgagccagg

SEQ ID NO: 173969 - DNA, 25 bp, probe
ctttttctgctaattcgagtcatgg

SEQ ID NO: 173970 - DNA, 25 bp, probe
ctttacacgattttccagtcttatt

SEQ ID NO: 173971 - DNA, 25 bp, probe
ctttagccgatgtaactgctggttt

SEQ ID NO: 173972 - DNA, 25 bp, probe
cttttgccagctttacgttctatta

SEQ ID NO: 173973 - DNA, 25 bp, probe
ctttctgacactttcacttttgcag

SEQ ID NO: 173974 - DNA, 25 bp, probe
cttttaagttatggcaattatgaat

SEQ ID NO: 173975 - DNA, 25 bp, probe
ctttgtaaaacagcctatagatgat

SEQ ID NO: 173976 - DNA, 25 bp, probe
ctttctagaatatttgcctaattgg

SEQ ID NO: 173977 - DNA, 25 bp, probe
ctttctcagtatttaattcagctag

SEQ ID NO: 173978 - DNA, 25 bp, probe
ctattcttaataaaactcactcact

SEQ ID NO: 173979 - DNA, 25 bp, probe
cttattcttcacaaagcatccctca

SEQ ID NO: 173980 - DNA, 25 bp, probe
cttattcctccaaggctgtgatgcc

SEQ ID NO: 173981 - DNA, 25 bp, probe
cttattcctccaaggctgtgatgcc

SEQ ID NO: 173982 - DNA, 25 bp, probe
cttaccactgacaggtcgtggccct

SEQ ID NO: 173983 - DNA, 25 bp, probe
cttaacaccacctgatcagctggtt

SEQ ID NO: 173984 - DNA, 25 bp, probe
cttcaccacttcttctgacatgtgg

SEQ ID NO: 173985 - DNA, 25 bp, probe
cttagctccatttatagcacctcag

SEQ ID NO: 173986 - DNA, 25 bp, probe
cttactcgatgtcattgaccaagca

SEQ ID NO: 173987 - DNA, 25 bp, probe
cttaaagctctggattactgccaca

SEQ ID NO: 173988 - DNA, 25 bp, probe
cttaagactctatctgattgccaga

SEQ ID NO: 173989 - DNA, 25 bp, probe
cttcaagcatccatcactgagagaa

SEQ ID NO: 173990 - DNA, 25 bp, probe
cttcaagcatccatcactgagagaa

SEQ ID NO: 173991 - DNA, 25 bp, probe
cttcaatgctcctcctgataatgta

SEQ ID NO: 173992 - DNA, 25 bp, probe
cttcaatgctcctcctgataatgta

SEQ ID NO: 173993 - DNA, 25 bp, probe
cttcaagccagctccagaggaggag

SEQ ID NO: 173994 - DNA, 25 bp, probe
ctatacatcctctgcccagggaggt

SEQ ID NO: 173995 - DNA, 25 bp, probe
ctatacatcctctgcccagggaggt

SEQ ID NO: 173996 - DNA, 25 bp, probe
cttactgcccaggcctatctggaag

SEQ ID NO: 173997 - DNA, 25 bp, probe
cttactgcccaggcctatctggaag

SEQ ID NO: 173998 - DNA, 25 bp, probe
cttcactctcatctcggacgagaag

SEQ ID NO: 173999 - DNA, 25 bp, probe
cttcagcccagcacggagaggacat

SEQ ID NO: 174000 - DNA, 25 bp, probe
cttcacctccagcctggtgagtgac

SEQ ID NO: 174001 - DNA, 25 bp, probe
cttatctattgggtggtatgtgaaa

SEQ ID NO: 174002 - DNA, 25 bp, probe
cttactttgtgggttgcaatacaaa

SEQ ID NO: 174003 - DNA, 25 bp, probe
cttaccttggggtctcacatcaatg

SEQ ID NO: 174004 - DNA, 25 bp, probe
cttacacattccatcttacattagt

SEQ ID NO: 174005 - DNA, 25 bp, probe
cttacacattccatcttacattagt

SEQ ID NO: 174006 - DNA, 25 bp, probe
cttcagcaaatcctctcatttttct

SEQ ID NO: 174007 - DNA, 25 bp, probe
cttcagcaaatcctctcatttttct

SEQ ID NO: 174008 - DNA, 25 bp, probe
cttcaaattctcttcatcttattct

SEQ ID NO: 174009 - DNA, 25 bp, probe
cttcagacgaccttttgtatgatct

SEQ ID NO: 174010 - DNA, 25 bp, probe
cttacatcagatgtttctttgcagt

SEQ ID NO: 174011 - DNA, 25 bp, probe
cttcacatccagaaattctgttgga

SEQ ID NO: 174012 - DNA, 25 bp, probe
cttcacatcactgagcactcattta

SEQ ID NO: 174013 - DNA, 25 bp, probe
cttcactgcaccctggatttgcata

SEQ ID NO: 174014 - DNA, 25 bp, probe
cttagtgcatcttcatggtgtctga

SEQ ID NO: 174015 - DNA, 25 bp, probe
ctttgtcatccatgcgtgcacatat

SEQ ID NO: 174016 - DNA, 25 bp, probe
cttttgcatgactgtggcctgttgc

SEQ ID NO: 174017 - DNA, 25 bp, probe
cttttgcatgactgtggcctgttgc

SEQ ID NO: 174018 - DNA, 25 bp, probe
cttttgctggatggttcctttatgc

SEQ ID NO: 174019 - DNA, 25 bp, probe
cttaatcaggttatgcctctctgcc

SEQ ID NO: 174020 - DNA, 25 bp, probe
ctcagagtctgggtaccccaggctc

SEQ ID NO: 174021 - DNA, 25 bp, probe
ctcagagtctgggtaccccaggctc

SEQ ID NO: 174022 - DNA, 25 bp, probe
ctcagagtagcccatttcctagggc

SEQ ID NO: 174023 - DNA, 25 bp, probe
ctacggagaggtcttcaaggtgcgc

SEQ ID NO: 174024 - DNA, 25 bp, probe
ctaccgagattgaccttcacgtgta

SEQ ID NO: 174025 - DNA, 25 bp, probe
ctttctgcagatgtccctaaggtag

SEQ ID NO: 174026 - DNA, 25 bp, probe
ctatggccagtgtccctatgaaggg

SEQ ID NO: 174027 - DNA, 25 bp, probe
ctatggccagtgtccctatgaaggg

SEQ ID NO: 174028 - DNA, 25 bp, probe
ctatggccagtgtccctatgaaggg

SEQ ID NO: 174029 - DNA, 25 bp, probe
cttcagccagtgtcctagcaaagct

SEQ ID NO: 174030 - DNA, 25 bp, probe
cttcagccagtgtcctagcaaagct

SEQ ID NO: 174031 - DNA, 25 bp, probe
cttcaccgtgttaacataatctatc

SEQ ID NO: 174032 - DNA, 25 bp, probe
cccagctttgtcgaactgaagttca

SEQ ID NO: 174033 - DNA, 25 bp, probe
cccagctttgtcgaactgaagttca

SEQ ID NO: 174034 - DNA, 25 bp, probe
cgtccttttcagaaccaaactcatg

SEQ ID NO: 174035 - DNA, 25 bp, probe
ctacctcattttataaaactatgcg

SEQ ID NO: 174036 - DNA, 25 bp, probe
cttactctgtttatgaatgatactt

SEQ ID NO: 174037 - DNA, 25 bp, probe
cttactctgtttatgaatgatactt

SEQ ID NO: 174038 - DNA, 25 bp, probe
cttaacatgagctccagtttaccta

SEQ ID NO: 174039 - DNA, 25 bp, probe
cttactcgagctccacgtattggtc

SEQ ID NO: 174040 - DNA, 25 bp, probe
ctttaatgagtgttttggcagcagc

SEQ ID NO: 174041 - DNA, 25 bp, probe
ctttctattttattatctgggacat

SEQ ID NO: 174042 - DNA, 25 bp, probe
cttttatatttctttcattgggcgc

SEQ ID NO: 174043 - DNA, 25 bp, probe
cttttatatttctttcattgggcgc

SEQ ID NO: 174044 - DNA, 25 bp, probe
ctttttatttctggctcttcggatg

SEQ ID NO: 174045 - DNA, 25 bp, probe
ctttttatttctggctcttcggatg

SEQ ID NO: 174046 - DNA, 25 bp, probe
ctttaacttctctgcctatgggatg

SEQ ID NO: 174047 - DNA, 25 bp, probe
ctttctcctacttggctccaaggag

SEQ ID NO: 174048 - DNA, 25 bp, probe
cttacttctcactacgaaccagtca

SEQ ID NO: 174049 - DNA, 25 bp, probe
cttacttctcactacgaaccagtca

SEQ ID NO: 174050 - DNA, 25 bp, probe
cttattcgctactacgagaacagta

SEQ ID NO: 174051 - DNA, 25 bp, probe
cttactccaccatgcggacaatcat

SEQ ID NO: 174052 - DNA, 25 bp, probe
cttactccaccatgcggacaatcat

SEQ ID NO: 174053 - DNA, 25 bp, probe
cttatcttatgccacgggaagttta

SEQ ID NO: 174054 - DNA, 25 bp, probe
cttataattgcccgaaacacttctc

SEQ ID NO: 174055 - DNA, 25 bp, probe
ctgtaaaagtgtcacaccacctccc

SEQ ID NO: 174056 - DNA, 25 bp, probe
cttcaagaacttcaacctctttctc

SEQ ID NO: 174057 - DNA, 25 bp, probe
cttacagacagcatgctcaacctcc

SEQ ID NO: 174058 - DNA, 25 bp, probe
cttcactgactcagctagacccgta

SEQ ID NO: 174059 - DNA, 25 bp, probe
cttactgacatcgtgtcggactagt

SEQ ID NO: 174060 - DNA, 25 bp, probe
cttactgagcactctcgagataaaa

SEQ ID NO: 174061 - DNA, 25 bp, probe
cttcacaggcactcctggagatatg

SEQ ID NO: 174062 - DNA, 25 bp, probe
cttcaaagcacaactctatttcatg

SEQ ID NO: 174063 - DNA, 25 bp, probe
cttcaagatgcaatacttttcttag

SEQ ID NO: 174064 - DNA, 25 bp, probe
cttcaagatgcaatacttttcttag

SEQ ID NO: 174065 - DNA, 25 bp, probe
cttacagcaattgttatcctgtctc

SEQ ID NO: 174066 - DNA, 25 bp, probe
cttagcacgattctgtgactgtttt

SEQ ID NO: 174067 - DNA, 25 bp, probe
cttacctttgttgcagctgctgttg

SEQ ID NO: 174068 - DNA, 25 bp, probe
cttagcctgttcagacatccgattc

SEQ ID NO: 174069 - DNA, 25 bp, probe
cttacctgcttgagctttctgtgca

SEQ ID NO: 174070 - DNA, 25 bp, probe
cttacggcaatatgcttttgtagca

SEQ ID NO: 174071 - DNA, 25 bp, probe
cttagtgtcacttacttcttttcat

SEQ ID NO: 174072 - DNA, 25 bp, probe
cttaggctacgttttcatgtatttt

SEQ ID NO: 174073 - DNA, 25 bp, probe
cttaactgcacgatattcagatttc

SEQ ID NO: 174074 - DNA, 25 bp, probe
cttattcagaacattacatgccttc

SEQ ID NO: 174075 - DNA, 25 bp, probe
cttattcagaacattacatgccttc

SEQ ID NO: 174076 - DNA, 25 bp, probe
cttacctaacaagtactgctcattt

SEQ ID NO: 174077 - DNA, 25 bp, probe
cttacgccacatgtgtcacttcatt

SEQ ID NO: 174078 - DNA, 25 bp, probe
cttactgccgattgcttattactta

SEQ ID NO: 174079 - DNA, 25 bp, probe
cttacgcaatgcttctagagtttta

SEQ ID NO: 174080 - DNA, 25 bp, probe
cttatggcatttcctagagttttgt

SEQ ID NO: 174081 - DNA, 25 bp, probe
cttatggcatttcctagagttttgt

SEQ ID NO: 174082 - DNA, 25 bp, probe
cttacgctgtgttaatgtgtttact

SEQ ID NO: 174083 - DNA, 25 bp, probe
cttacatcctcttcagattgcttta

SEQ ID NO: 174084 - DNA, 25 bp, probe
cttacacactctttttgattgaact

SEQ ID NO: 174085 - DNA, 25 bp, probe
cttatacatctggtcttacaaagac

SEQ ID NO: 174086 - DNA, 25 bp, probe
ctttgccattagatctagacaagaa

SEQ ID NO: 174087 - DNA, 25 bp, probe
ctttttatgaagtgctgacaagaga

SEQ ID NO: 174088 - DNA, 25 bp, probe
cttttgttgaaatggcatcgtacat

SEQ ID NO: 174089 - DNA, 25 bp, probe
cttttcttctactggcttgtaattt

SEQ ID NO: 174090 - DNA, 25 bp, probe
cttttcgtcttcagtgtcttaatgt

SEQ ID NO: 174091 - DNA, 25 bp, probe
cttttcttttctctggtaatattga

SEQ ID NO: 174092 - DNA, 25 bp, probe
ctttttcttttgctggatggttcct

SEQ ID NO: 174093 - DNA, 25 bp, probe
ctttttcttttgctggatggttcct

SEQ ID NO: 174094 - DNA, 25 bp, probe
cttttttattggcggctccatggcc

SEQ ID NO: 174095 - DNA, 25 bp, probe
ctttctttcctgtgagggcttggtt

SEQ ID NO: 174096 - DNA, 25 bp, probe
ctttctttcctgtgagggcttggtt

SEQ ID NO: 174097 - DNA, 25 bp, probe
ctttgcctaccttgtaggcctgagc

SEQ ID NO: 174098 - DNA, 25 bp, probe
ctttcacttccatggaacactacga

SEQ ID NO: 174099 - DNA, 25 bp, probe
ctttcctgtccctagtaatcattcg

SEQ ID NO: 174100 - DNA, 25 bp, probe
ctttcatttttcttgtacatatgtg

SEQ ID NO: 174101 - DNA, 25 bp, probe
cttttcttgattccagaaacatatg

SEQ ID NO: 174102 - DNA, 25 bp, probe
cttttttatgcttagaacaccaggg

SEQ ID NO: 174103 - DNA, 25 bp, probe
ctgtttaattcttgccaaccaggag

SEQ ID NO: 174104 - DNA, 25 bp, probe
cttttttgtgtatggcaccagaagt

SEQ ID NO: 174105 - DNA, 25 bp, probe
ctttattattctttggtccctcaat

SEQ ID NO: 174106 - DNA, 25 bp, probe
ctttattattctttggtccctcaat

SEQ ID NO: 174107 - DNA, 25 bp, probe
ctttatgttgtatttggtaactcta

SEQ ID NO: 174108 - DNA, 25 bp, probe
ctttcaccatatttttgcaactctt

SEQ ID NO: 174109 - DNA, 25 bp, probe
cttatcaccattcttatgtcacttt

SEQ ID NO: 174110 - DNA, 25 bp, probe
cttatgaccagactgctgtgcagaa

SEQ ID NO: 174111 - DNA, 25 bp, probe
cttatgaccagactgctgtgcagaa

SEQ ID NO: 174112 - DNA, 25 bp, probe
cttatcaccatgaccagctggacag

SEQ ID NO: 174113 - DNA, 25 bp, probe
cttactgcaatgctcgctggagaat

SEQ ID NO: 174114 - DNA, 25 bp, probe
cttttgtatcctggctgctggaatt

SEQ ID NO: 174115 - DNA, 25 bp, probe
ctattagttcccctgggattctgaa

SEQ ID NO: 174116 - DNA, 25 bp, probe
ctattagttcccctgggattctgaa

SEQ ID NO: 174117 - DNA, 25 bp, probe
ctttagcttccacttggtgggtaag

SEQ ID NO: 174118 - DNA, 25 bp, probe
ctttccttccagatcctgggtactg

SEQ ID NO: 174119 - DNA, 25 bp, probe
ctttccttccagaggctgaattctt

SEQ ID NO: 174120 - DNA, 25 bp, probe
cttttcctcaagagcccaatgcatt

SEQ ID NO: 174121 - DNA, 25 bp, probe
cttttcatctcctgtcccaggatta

SEQ ID NO: 174122 - DNA, 25 bp, probe
ctttttacctcagtccatttcatta

SEQ ID NO: 174123 - DNA, 25 bp, probe
ctttgattgactccgttattccgaa

SEQ ID NO: 174124 - DNA, 25 bp, probe
ctttattgttcccttatgtattcaa

SEQ ID NO: 174125 - DNA, 25 bp, probe
cttttacaggccccaattatccaat

SEQ ID NO: 174126 - DNA, 25 bp, probe
cttttcaaggattaattcttcctct

SEQ ID NO: 174127 - DNA, 25 bp, probe
cttttgaagggctataccagttatt

SEQ ID NO: 174128 - DNA, 25 bp, probe
cttttggagtcctattgtcgtgcat

SEQ ID NO: 174129 - DNA, 25 bp, probe
cttttggaatcttactcacagagct

SEQ ID NO: 174130 - DNA, 25 bp, probe
cttttggcaacgtgcctgagcaccg

SEQ ID NO: 174131 - DNA, 25 bp, probe
cttagaaaacatttgcctcagccac

SEQ ID NO: 174132 - DNA, 25 bp, probe
ctataaaaacgtcgcacatgcagac

SEQ ID NO: 174133 - DNA, 25 bp, probe
ctataatgaaatctgctgcaaaatc

SEQ ID NO: 174134 - DNA, 25 bp, probe
cttatagcaatacactgtaatatca

SEQ ID NO: 174135 - DNA, 25 bp, probe
cttatcacactcacacagttgacta

SEQ ID NO: 174136 - DNA, 25 bp, probe
cttatcacactcacacagttgacta

SEQ ID NO: 174137 - DNA, 25 bp, probe
cttaccatctaaaatgtgtgatttt

SEQ ID NO: 174138 - DNA, 25 bp, probe
cttaccatcatctccatatgagagt

SEQ ID NO: 174139 - DNA, 25 bp, probe
cttacagacgcatcctcaaggtaga

SEQ ID NO: 174140 - DNA, 25 bp, probe
cttacagtgagggctatacatggta

SEQ ID NO: 174141 - DNA, 25 bp, probe
cttaattgcgtcctacacggtcatc

SEQ ID NO: 174142 - DNA, 25 bp, probe
cttttatggatgccctacaggactc

SEQ ID NO: 174143 - DNA, 25 bp, probe
cttttgggaggacttcattgacctg

SEQ ID NO: 174144 - DNA, 25 bp, probe
ctttggggaggactacacatggcct

SEQ ID NO: 174145 - DNA, 25 bp, probe
ctttggctgaacatcgagaggccct

SEQ ID NO: 174146 - DNA, 25 bp, probe
ctaagtctaacactcctgggagctc

SEQ ID NO: 174147 - DNA, 25 bp, probe
cttagtttgatcttccatggtggac

SEQ ID NO: 174148 - DNA, 25 bp, probe
cttagttctcttttgatgtaggtta

SEQ ID NO: 174149 - DNA, 25 bp, probe
cttagtgtccttcttaacagactca

SEQ ID NO: 174150 - DNA, 25 bp, probe
cttagtgttctacattattccactc

SEQ ID NO: 174151 - DNA, 25 bp, probe
ctttgctcattatccttttgccagc

SEQ ID NO: 174152 - DNA, 25 bp, probe
ctttgccaatagtttcatcttccga

SEQ ID NO: 174153 - DNA, 25 bp, probe
ctttgccaatagtttcatcttccga

SEQ ID NO: 174154 - DNA, 25 bp, probe
ctttccaggaagctgtctatgccga

SEQ ID NO: 174155 - DNA, 25 bp, probe
ctttcgaagcagccgtggctactag

SEQ ID NO: 174156 - DNA, 25 bp, probe
ctagatcaggacccgtcctcaataa

SEQ ID NO: 174157 - DNA, 25 bp, probe
ctatgacagtgaaccgaagcgcaat

SEQ ID NO: 174158 - DNA, 25 bp, probe
ctatgacagcgacgccaagacagac

SEQ ID NO: 174159 - DNA, 25 bp, probe
cttacagctacagtcacatccagcc

SEQ ID NO: 174160 - DNA, 25 bp, probe
cttacagctctggccacaacagggc

SEQ ID NO: 174161 - DNA, 25 bp, probe
ctatattcctgacaaaagttccata

SEQ ID NO: 174162 - DNA, 25 bp, probe
cttatattctggctaattttcagca

SEQ ID NO: 174163 - DNA, 25 bp, probe
ctttaagcaggcgtttatttctgca

SEQ ID NO: 174164 - DNA, 25 bp, probe
ctttaggcagcagcttttaatacag

SEQ ID NO: 174165 - DNA, 25 bp, probe
ctttatggagtctatgatgttacaa

SEQ ID NO: 174166 - DNA, 25 bp, probe
ctttatggcatagtatgtttcctgc

SEQ ID NO: 174167 - DNA, 25 bp, probe
ctttcttctatggatgtctcaaccg

SEQ ID NO: 174168 - DNA, 25 bp, probe
cttatctgatcttgtcatttatacg

SEQ ID NO: 174169 - DNA, 25 bp, probe
cttagtgagcgagtcatggattata

SEQ ID NO: 174170 - DNA, 25 bp, probe
cttactgccggtgaggctgaaacgc

SEQ ID NO: 174171 - DNA, 25 bp, probe
cttagcccagcgacggagcatgaaa

SEQ ID NO: 174172 - DNA, 25 bp, probe
cttacacaaaggggatcataaagtt

SEQ ID NO: 174173 - DNA, 25 bp, probe
cttacaataagggtactatatgtgg

SEQ ID NO: 174174 - DNA, 25 bp, probe
ctttcacatcaacctctttcaagtg

SEQ ID NO: 174175 - DNA, 25 bp, probe
ctttgcacaaaggtccttcttgtcc

SEQ ID NO: 174176 - DNA, 25 bp, probe
ctttccagatggttcctacttaaat

SEQ ID NO: 174177 - DNA, 25 bp, probe
ctttccagatggttcctacttaaat

SEQ ID NO: 174178 - DNA, 25 bp, probe
ctttctgtggtactcctaattacat

SEQ ID NO: 174179 - DNA, 25 bp, probe
ctttctggactggaccttagtactg

SEQ ID NO: 174180 - DNA, 25 bp, probe
ctttctggactggaccttagtactg

SEQ ID NO: 174181 - DNA, 25 bp, probe
ctttcgtcacagcggttgaggtctc

SEQ ID NO: 174182 - DNA, 25 bp, probe
ctttcgtcacagcggttgaggtctc

SEQ ID NO: 174183 - DNA, 25 bp, probe
cttttgctactttggttgtggtcac

SEQ ID NO: 174184 - DNA, 25 bp, probe
ctttgggccattggtgtttgcgccc

SEQ ID NO: 174185 - DNA, 25 bp, probe
ctttggagtgttgatgtgggaagca

SEQ ID NO: 174186 - DNA, 25 bp, probe
cttagtgagggtgccctggtcatga

SEQ ID NO: 174187 - DNA, 25 bp, probe
ctttcgatggtagtcgccgtgccta

SEQ ID NO: 174188 - DNA, 25 bp, probe
cttatcgatttcgtcacgcgtgacc

SEQ ID NO: 174189 - DNA, 25 bp, probe
cttatcatgacctagtgcccagtga

SEQ ID NO: 174190 - DNA, 25 bp, probe
ctttgctgaccaaatgcctggtacc

SEQ ID NO: 174191 - DNA, 25 bp, probe
ctttcaaaatcatcctatgaaccaa

SEQ ID NO: 174192 - DNA, 25 bp, probe
ctttcaaaatcatcctatgaaccaa

SEQ ID NO: 174193 - DNA, 25 bp, probe
ctttcataaatgccaatctgtgaga

SEQ ID NO: 174194 - DNA, 25 bp, probe
cttttacaattcaagcagcagcagg

SEQ ID NO: 174195 - DNA, 25 bp, probe
ctttgtatgcaaccttagctgatgg

SEQ ID NO: 174196 - DNA, 25 bp, probe
cttttggcgcccacagtgatgatgt

SEQ ID NO: 174197 - DNA, 25 bp, probe
cttttgatgtctgcagaagaatgtg

SEQ ID NO: 174198 - DNA, 25 bp, probe
ctttgtgtgcttgctaaatggtgta

SEQ ID NO: 174199 - DNA, 25 bp, probe
ctatgtgggtctgtgaatttcttta

SEQ ID NO: 174200 - DNA, 25 bp, probe
cttttgggctgcatgctattccatt

SEQ ID NO: 174201 - DNA, 25 bp, probe
cttttgggctgcatgctattccatt

SEQ ID NO: 174202 - DNA, 25 bp, probe
ctttttggctgacttcatctggggt

SEQ ID NO: 174203 - DNA, 25 bp, probe
ctttgctatgtgcttcgcatcttgg

SEQ ID NO: 174204 - DNA, 25 bp, probe
ctttgctatgtgcttcgcatcttgg

SEQ ID NO: 174205 - DNA, 25 bp, probe
ctttgctatgtgcttcgcatcttgg

SEQ ID NO: 174206 - DNA, 25 bp, probe
ctatcccttgccttaggcttgtggc

SEQ ID NO: 174207 - DNA, 25 bp, probe
cttttcttcttgcagagcaagggca

SEQ ID NO: 174208 - DNA, 25 bp, probe
cttttctctgtcagcgaacgtggca

SEQ ID NO: 174209 - DNA, 25 bp, probe
ctttctcttggcaatcagaaggctg

SEQ ID NO: 174210 - DNA, 25 bp, probe
ctttccttgtcccaggatggagctg

SEQ ID NO: 174211 - DNA, 25 bp, probe
ctttaccatgctcaatgaaaaggtg

SEQ ID NO: 174212 - DNA, 25 bp, probe
ctttacacaccaaagaagccggcgc

SEQ ID NO: 174213 - DNA, 25 bp, probe
ctttaccccaaaagccgtgatgtgc

SEQ ID NO: 174214 - DNA, 25 bp, probe
gttggcccaaaggttgccctgaagc

SEQ ID NO: 174215 - DNA, 25 bp, probe
ctcggacctagaggaggcctccgag

SEQ ID NO: 174216 - DNA, 25 bp, probe
cttaccctcgtggaggccatcaaga

SEQ ID NO: 174217 - DNA, 25 bp, probe
cttaccctcgtggaggccatcaaga

SEQ ID NO: 174218 - DNA, 25 bp, probe
cttaccctcgtggaggccatcaaga

SEQ ID NO: 174219 - DNA, 25 bp, probe
cttaccctcgtggaggccatcaaga

SEQ ID NO: 174220 - DNA, 25 bp, probe
cttaccctcgtggaggccatcaaga

SEQ ID NO: 174221 - DNA, 25 bp, probe
ctttcccctgtgcatgtgcgaagga

SEQ ID NO: 174222 - DNA, 25 bp, probe
ctttggccgctgagggcacaaggaa

SEQ ID NO: 174223 - DNA, 25 bp, probe
ctttgccaaagcagggctgcaagtg

SEQ ID NO: 174224 - DNA, 25 bp, probe
cttttcaaagcaatagccgccgggt

SEQ ID NO: 174225 - DNA, 25 bp, probe
ctttacaacacaattgcatcccaaa

SEQ ID NO: 174226 - DNA, 25 bp, probe
ctttacgttctattagcccatcaac

SEQ ID NO: 174227 - DNA, 25 bp, probe
ctttaagttgtattggcccataaca

SEQ ID NO: 174228 - DNA, 25 bp, probe
ctttctgagtctcttggactaagaa

SEQ ID NO: 174229 - DNA, 25 bp, probe
ctttcagtttgcactgaattaaaaa

SEQ ID NO: 174230 - DNA, 25 bp, probe
ctttcctacctgatagcatcaaaaa

SEQ ID NO: 174231 - DNA, 25 bp, probe
ctttttccccattgagcatcttgaa

SEQ ID NO: 174232 - DNA, 25 bp, probe
ctttttccccattgagcatcttgaa

SEQ ID NO: 174233 - DNA, 25 bp, probe
ctttgttccccactggagcagaagg

SEQ ID NO: 174234 - DNA, 25 bp, probe
ctttgttccccactggagcagaagg

SEQ ID NO: 174235 - DNA, 25 bp, probe
ctttctacatcccactggcattgat

SEQ ID NO: 174236 - DNA, 25 bp, probe
cttttgaatcaatctggcttctgca

SEQ ID NO: 174237 - DNA, 25 bp, probe
cttatatggctatggcggcttcaac

SEQ ID NO: 174238 - DNA, 25 bp, probe
cttttggctataaccagtctcagca

SEQ ID NO: 174239 - DNA, 25 bp, probe
cttttgctgttcagccttctagaga

SEQ ID NO: 174240 - DNA, 25 bp, probe
ctttgtggtgtcaggatccttggaa

SEQ ID NO: 174241 - DNA, 25 bp, probe
cttatgtgactgcgatggatctctt

SEQ ID NO: 174242 - DNA, 25 bp, probe
cttaggactgttacagctgagcatt

SEQ ID NO: 174243 - DNA, 25 bp, probe
ctatagattgtttaagacagcttat

SEQ ID NO: 174244 - DNA, 25 bp, probe
ctgattgaattttatgccccttggt

SEQ ID NO: 174245 - DNA, 25 bp, probe
ctttgattttattcgcaccattgcg

SEQ ID NO: 174246 - DNA, 25 bp, probe
cttagttttcatacacagcctgggc

SEQ ID NO: 174247 - DNA, 25 bp, probe
ctttttcatgtaaaccactggtcac

SEQ ID NO: 174248 - DNA, 25 bp, probe
ctttttcatgtaaaccactggtcac

SEQ ID NO: 174249 - DNA, 25 bp, probe
ctttcttaggaaacagacatactca

SEQ ID NO: 174250 - DNA, 25 bp, probe
ctttttcaggacatgctatcttcta

SEQ ID NO: 174251 - DNA, 25 bp, probe
ctttttgatagagtttacactcatc

SEQ ID NO: 174252 - DNA, 25 bp, probe
ctttttcacagcagattaccattta

SEQ ID NO: 174253 - DNA, 25 bp, probe
ctttttccagtctattttctgtctt

SEQ ID NO: 174254 - DNA, 25 bp, probe
cttttcccatgtaatagtattgatt

SEQ ID NO: 174255 - DNA, 25 bp, probe
cttttcccatgtaatagtattgatt

SEQ ID NO: 174256 - DNA, 25 bp, probe
cttttctatcatcagaagactgttt

SEQ ID NO: 174257 - DNA, 25 bp, probe
cttatctcatttcacaagactggct

SEQ ID NO: 174258 - DNA, 25 bp, probe
ctttctcatgtccttcaaatctgtt

SEQ ID NO: 174259 - DNA, 25 bp, probe
ctttctcatgtccttcaaatctgtt

SEQ ID NO: 174260 - DNA, 25 bp, probe
ctttctcattcttggctacagcagt

SEQ ID NO: 174261 - DNA, 25 bp, probe
cttttcatgtctggaaatcacagta

SEQ ID NO: 174262 - DNA, 25 bp, probe
ctttgtcatcaaagaattccgcatg

SEQ ID NO: 174263 - DNA, 25 bp, probe
ctttgtcatcaaagaattccgcatg

SEQ ID NO: 174264 - DNA, 25 bp, probe
ctatacttaatcccatgtcatgcga

SEQ ID NO: 174265 - DNA, 25 bp, probe
ctttcatctagctccataattgcaa

SEQ ID NO: 174266 - DNA, 25 bp, probe
ctataaaagcatgccaaatcttgga

SEQ ID NO: 174267 - DNA, 25 bp, probe
ctttcaaggatgataatttgtgtgt

SEQ ID NO: 174268 - DNA, 25 bp, probe
ctttcaagaagcaattgattttatt

SEQ ID NO: 174269 - DNA, 25 bp, probe
ctttcaaatacattaacactgtgat

SEQ ID NO: 174270 - DNA, 25 bp, probe
ctacacaatcaagatagctgacttt

SEQ ID NO: 174271 - DNA, 25 bp, probe
cttatcgacaatgcaagctcctggg

SEQ ID NO: 174272 - DNA, 25 bp, probe
cttatcaacaaggagggccatgtga

SEQ ID NO: 174273 - DNA, 25 bp, probe
ctttaaggagcaggtgcccatgccc

SEQ ID NO: 174274 - DNA, 25 bp, probe
ctttaaggagcaggtgcccatgccc

SEQ ID NO: 174275 - DNA, 25 bp, probe
ctttaaggagcaggtgcccatgccc

SEQ ID NO: 174276 - DNA, 25 bp, probe
ctttaaggagcaggtgcccatgccc

SEQ ID NO: 174277 - DNA, 25 bp, probe
ctttcagaggatgctgctacacagg

SEQ ID NO: 174278 - DNA, 25 bp, probe
ctttcagacctcactagcacaagcc

SEQ ID NO: 174279 - DNA, 25 bp, probe
ctttaaactgctgctcgcaaggaag

SEQ ID NO: 174280 - DNA, 25 bp, probe
ctttcacaagtggtttccatggaga

SEQ ID NO: 174281 - DNA, 25 bp, probe
cttatgccacgggaagtttagagag

SEQ ID NO: 174282 - DNA, 25 bp, probe
ctttgccgcccgagatatgagggag

SEQ ID NO: 174283 - DNA, 25 bp, probe
ctttgatcaggtggggagtcaggga

SEQ ID NO: 174284 - DNA, 25 bp, probe
ctttggcagcgtggagctgtgccgc

SEQ ID NO: 174285 - DNA, 25 bp, probe
ctatcggagctatgtgctgcaccgc

SEQ ID NO: 174286 - DNA, 25 bp, probe
ctataaagcttagctgccccttctg

SEQ ID NO: 174287 - DNA, 25 bp, probe
ctagaagagtctattgtctccttgg

SEQ ID NO: 174288 - DNA, 25 bp, probe
cttttgagtctaatttcctctctgt

SEQ ID NO: 174289 - DNA, 25 bp, probe
cttttgtctaagttctcattctttc

SEQ ID NO: 174290 - DNA, 25 bp, probe
ctttattgtcacattcataatgctg

SEQ ID NO: 174291 - DNA, 25 bp, probe
cttttctgctcagattgcagaggga

SEQ ID NO: 174292 - DNA, 25 bp, probe
cttttctgctcaggacagcagtggg

SEQ ID NO: 174293 - DNA, 25 bp, probe
cttttgctgagcttcaatcaggaag

SEQ ID NO: 174294 - DNA, 25 bp, probe
ctttgctctggctcagcaaaatcag

SEQ ID NO: 174295 - DNA, 25 bp, probe
ctttttggcgagaaaatgacttcca

SEQ ID NO: 174296 - DNA, 25 bp, probe
ctttcaagggagatgtgtggcttcc

SEQ ID NO: 174297 - DNA, 25 bp, probe
cttatgcagtggtgtctgtgtggtc

SEQ ID NO: 174298 - DNA, 25 bp, probe
cttatgcagtggtgtctgtgtggtc

SEQ ID NO: 174299 - DNA, 25 bp, probe
cttatgttggctgtgctcatggcag

SEQ ID NO: 174300 - DNA, 25 bp, probe
cttagctgcggtgctatatgccatg

SEQ ID NO: 174301 - DNA, 25 bp, probe
ctatgagatggggaacaagcttgtg

SEQ ID NO: 174302 - DNA, 25 bp, probe
cttatcatgctgggtacaatgcttc

SEQ ID NO: 174303 - DNA, 25 bp, probe
ctttttcggtgacctcatccaaggc

SEQ ID NO: 174304 - DNA, 25 bp, probe
cttttcaccttaccactgacaggtc

SEQ ID NO: 174305 - DNA, 25 bp, probe
cttttaccatatcccagtgaagttc

SEQ ID NO: 174306 - DNA, 25 bp, probe
cttattacgcttttcagatcctttc

SEQ ID NO: 174307 - DNA, 25 bp, probe
cttatgtaacttttattgtctttgg

SEQ ID NO: 174308 - DNA, 25 bp, probe
ctttgtcaaccatacgtttttggag

SEQ ID NO: 174309 - DNA, 25 bp, probe
cttttcacatccttgactttttaga

SEQ ID NO: 174310 - DNA, 25 bp, probe
cttttccattctgggtgttttcaga

SEQ ID NO: 174311 - DNA, 25 bp, probe
ctttcccccatgtggtcgttagaga

SEQ ID NO: 174312 - DNA, 25 bp, probe
ctttcccaccaagaatccatcttag

SEQ ID NO: 174313 - DNA, 25 bp, probe
ctttcccaccaagaatccatcttag

SEQ ID NO: 174314 - DNA, 25 bp, probe
ctttcctacaagttaaccagttgca

SEQ ID NO: 174315 - DNA, 25 bp, probe
ctttccaatacgattttctgttgca

SEQ ID NO: 174316 - DNA, 25 bp, probe
ctattctgcggatgttatttctgtt

SEQ ID NO: 174317 - DNA, 25 bp, probe
ctttcagtcagatgtgtatgcgttt

SEQ ID NO: 174318 - DNA, 25 bp, probe
ctttgagctcaatgggcagctgcgg

SEQ ID NO: 174319 - DNA, 25 bp, probe
ctttcactggcatgggagacccttg

SEQ ID NO: 174320 - DNA, 25 bp, probe
ctatgtccattctgagggaacacta

SEQ ID NO: 174321 - DNA, 25 bp, probe
cttagctcatacggaatggacagcc

SEQ ID NO: 174322 - DNA, 25 bp, probe
cttagacagtcagcatttgtctcct

SEQ ID NO: 174323 - DNA, 25 bp, probe
ctttagcatccaccaattttcactg

SEQ ID NO: 174324 - DNA, 25 bp, probe
ctttcggcacagccagaattccctg

SEQ ID NO: 174325 - DNA, 25 bp, probe
ctttcggcacagccagaattccctg

SEQ ID NO: 174326 - DNA, 25 bp, probe
cttttgcgagaattgaagcacccta

SEQ ID NO: 174327 - DNA, 25 bp, probe
cttttgcgagaattgaagcacccta

SEQ ID NO: 174328 - DNA, 25 bp, probe
cttttctgtgactcaactgcccaga

SEQ ID NO: 174329 - DNA, 25 bp, probe
cttttgtgctactcagatctgataa

SEQ ID NO: 174330 - DNA, 25 bp, probe
ctttatctgtgacttcatgctctga

SEQ ID NO: 174331 - DNA, 25 bp, probe
ctttatctgggtgtctcgcaccata

SEQ ID NO: 174332 - DNA, 25 bp, probe
ctttgacttggtgaatatccatctt

SEQ ID NO: 174333 - DNA, 25 bp, probe
cttatatttaggaacatatgctcat

SEQ ID NO: 174334 - DNA, 25 bp, probe
ctttaattagtcagcattggatcag

SEQ ID NO: 174335 - DNA, 25 bp, probe
ctttaatctcccacaaggcatctgt

SEQ ID NO: 174336 - DNA, 25 bp, probe
ctatcaagatcagctcatggaagga

SEQ ID NO: 174337 - DNA, 25 bp, probe
ctatcgagacagccacagtagaagc

SEQ ID NO: 174338 - DNA, 25 bp, probe
ctatgccatgaagcagtacgaatgc

SEQ ID NO: 174339 - DNA, 25 bp, probe
cttattgagaccatcatagagatcg

SEQ ID NO: 174340 - DNA, 25 bp, probe
cttatggaactctttagaattggtg

SEQ ID NO: 174341 - DNA, 25 bp, probe
cttaggaactagaccaaaggcgctg

SEQ ID NO: 174342 - DNA, 25 bp, probe
ctataacaacagtaccaaggtggct

SEQ ID NO: 174343 - DNA, 25 bp, probe
ctataacaacagtaccaaggtggct

SEQ ID NO: 174344 - DNA, 25 bp, probe
ctaatatcaaactttctaggtgtta

SEQ ID NO: 174345 - DNA, 25 bp, probe
ctacttccacaagcccagggagtca

SEQ ID NO: 174346 - DNA, 25 bp, probe
ctacttccacaagcccagggagtca

SEQ ID NO: 174347 - DNA, 25 bp, probe
ctttcccagagacccggggatggat

SEQ ID NO: 174348 - DNA, 25 bp, probe
ctttcccagagacccggggatggat

SEQ ID NO: 174349 - DNA, 25 bp, probe
ctttcccatgaaccctggagggtgg

SEQ ID NO: 174350 - DNA, 25 bp, probe
ctttccctgatgggttggggcagtt

SEQ ID NO: 174351 - DNA, 25 bp, probe
gaatccccttgctggctggggagta

SEQ ID NO: 174352 - DNA, 25 bp, probe
gaacctcaccttggacggaatggga

SEQ ID NO: 174353 - DNA, 25 bp, probe
gaacctcaccttggacggaatggga

SEQ ID NO: 174354 - DNA, 25 bp, probe
gaacctcaccttggacggaatggga

SEQ ID NO: 174355 - DNA, 25 bp, probe
ctatccacccttgtcggttgaggta

SEQ ID NO: 174356 - DNA, 25 bp, probe
ctgacccccaatgacaggttcattt

SEQ ID NO: 174357 - DNA, 25 bp, probe
gataaccaatgccaaactttttgaa

SEQ ID NO: 174358 - DNA, 25 bp, probe
ctgacccccaatgacaggttcattt

SEQ ID NO: 174359 - DNA, 25 bp, probe
ctgaacctcttatgacggttttgta

SEQ ID NO: 174360 - DNA, 25 bp, probe
ctaagtctttcccacggtttatgtg

SEQ ID NO: 174361 - DNA, 25 bp, probe
ctaagtctttcccacggtttatgtg

SEQ ID NO: 174362 - DNA, 25 bp, probe
ctttgtctcttcaccgtgttaacat

SEQ ID NO: 174363 - DNA, 25 bp, probe
ctttagacttcccactgttctgaaa

SEQ ID NO: 174364 - DNA, 25 bp, probe
ctttagacttcccactgttctgaaa

SEQ ID NO: 174365 - DNA, 25 bp, probe
ctttaggtaactctgctgtgctgga

SEQ ID NO: 174366 - DNA, 25 bp, probe
ctttaggtaactctgctgtgctgga

SEQ ID NO: 174367 - DNA, 25 bp, probe
ctttcagtttagcttgcaggatggg

SEQ ID NO: 174368 - DNA, 25 bp, probe
ctttcctagggctgtggagtgaggc

SEQ ID NO: 174369 - DNA, 25 bp, probe
ctttttcaaagaggtggacgagtgc

SEQ ID NO: 174370 - DNA, 25 bp, probe
ctttttcgaagagcatgtgaagtta

SEQ ID NO: 174371 - DNA, 25 bp, probe
ctattactttaggactgtgtagttg

SEQ ID NO: 174372 - DNA, 25 bp, probe
ctttatctgcttctaccttagctca

SEQ ID NO: 174373 - DNA, 25 bp, probe
ctttcatccttcctatgacttttat

SEQ ID NO: 174374 - DNA, 25 bp, probe
ctttacctcttgctattttgttata

SEQ ID NO: 174375 - DNA, 25 bp, probe
ctttcaaactgtgtattttcttaca

SEQ ID NO: 174376 - DNA, 25 bp, probe
cttatccaactctgaatcttttttc

SEQ ID NO: 174377 - DNA, 25 bp, probe
cttatccaactctgaatcttttttc

SEQ ID NO: 174378 - DNA, 25 bp, probe
ctttccacaatcagagccatttttg

SEQ ID NO: 174379 - DNA, 25 bp, probe
ctttatccagacagacaatgtttaa

SEQ ID NO: 174380 - DNA, 25 bp, probe
ctttgatacgacaccgcatggcttc

SEQ ID NO: 174381 - DNA, 25 bp, probe
cttattaagctcgtcactgcaggtg

SEQ ID NO: 174382 - DNA, 25 bp, probe
ctttctagatctctcccagtgaggc

SEQ ID NO: 174383 - DNA, 25 bp, probe
ctattgtagatctgggaaggggccc

SEQ ID NO: 174384 - DNA, 25 bp, probe
ctttgaagagcatggagggggagcc

SEQ ID NO: 174385 - DNA, 25 bp, probe
ctagtgagtagcaggacgagggcag

SEQ ID NO: 174386 - DNA, 25 bp, probe
ctttgagctcacaccggaggaggag

SEQ ID NO: 174387 - DNA, 25 bp, probe
gctttggccttagcttgacggcagg

SEQ ID NO: 174388 - DNA, 25 bp, probe
gctttggccttagcttgacggcagg

SEQ ID NO: 174389 - DNA, 25 bp, probe
gctttgttttggaatttaccggctg

SEQ ID NO: 174390 - DNA, 25 bp, probe
ctacggtgttggctttgacctggag

SEQ ID NO: 174391 - DNA, 25 bp, probe
ctacggtgttggctttgacctggag

SEQ ID NO: 174392 - DNA, 25 bp, probe
ctacggtttcgagggtgaggtgaag

SEQ ID NO: 174393 - DNA, 25 bp, probe
tctacggtttcgagggtgaggtgaa

SEQ ID NO: 174394 - DNA, 25 bp, probe
ctcagggttttcagtggccactgtg

SEQ ID NO: 174395 - DNA, 25 bp, probe
ctggggatttggagtagccactgtc

SEQ ID NO: 174396 - DNA, 25 bp, probe
ctacgttttgcagggctcagtacga

SEQ ID NO: 174397 - DNA, 25 bp, probe
ctttgtttcaccaaccagttatact

SEQ ID NO: 174398 - DNA, 25 bp, probe
cttttcctcctcaaaatgtatatat

SEQ ID NO: 174399 - DNA, 25 bp, probe
ctccgtaccctaaaatgtcactgaa

SEQ ID NO: 174400 - DNA, 25 bp, probe
ctaagtaccctctgaatggccatgc

SEQ ID NO: 174401 - DNA, 25 bp, probe
ctatgactacctgcggaagctcttc

SEQ ID NO: 174402 - DNA, 25 bp, probe
ctatgaccacattgggcccaacgtc

SEQ ID NO: 174403 - DNA, 25 bp, probe
ctatgcctcagctggatggacaacg

SEQ ID NO: 174404 - DNA, 25 bp, probe
ctatactcgcattgctgctgctatc

SEQ ID NO: 174405 - DNA, 25 bp, probe
ctatactcgcattgctgctgctatc

SEQ ID NO: 174406 - DNA, 25 bp, probe
ctttgtcaatcagtgccatgatccc

SEQ ID NO: 174407 - DNA, 25 bp, probe
cttattcaacagcagatttccaacg

SEQ ID NO: 174408 - DNA, 25 bp, probe
cttataaatatgtaggtgctccact

SEQ ID NO: 174409 - DNA, 25 bp, probe
cttataaatatgtaggtgctccact

SEQ ID NO: 174410 - DNA, 25 bp, probe
ctttatgattatctgaagtccacca

SEQ ID NO: 174411 - DNA, 25 bp, probe
cttttcatgcttctacagtccagcc

SEQ ID NO: 174412 - DNA, 25 bp, probe
ctttattggtcagtacaccctgcct

SEQ ID NO: 174413 - DNA, 25 bp, probe
ctttgaatttcaaatcaacctgcct

SEQ ID NO: 174414 - DNA, 25 bp, probe
ctttaattattgttatacacagctt

SEQ ID NO: 174415 - DNA, 25 bp, probe
cttattcattatagctattcgtcct

SEQ ID NO: 174416 - DNA, 25 bp, probe
cttatacatatcaggttgcaaccag

SEQ ID NO: 174417 - DNA, 25 bp, probe
ctttaccagctgcatattgcaccca

SEQ ID NO: 174418 - DNA, 25 bp, probe
ctttgacatagctgtcatctgcact

SEQ ID NO: 174419 - DNA, 25 bp, probe
ctttatcaagcatccatctgactaa

SEQ ID NO: 174420 - DNA, 25 bp, probe
ctttcacaagctaccatctcagata

SEQ ID NO: 174421 - DNA, 25 bp, probe
ctttcatcaacagccttcgcaacaa

SEQ ID NO: 174422 - DNA, 25 bp, probe
cttataaatatttctccagcaaatt

SEQ ID NO: 174423 - DNA, 25 bp, probe
ctaaagaatacaacctgctaagttt

SEQ ID NO: 174424 - DNA, 25 bp, probe
ctatgaagactctagacgtttactt

SEQ ID NO: 174425 - DNA, 25 bp, probe
ctatgttcccaagagtttgacttca

SEQ ID NO: 174426 - DNA, 25 bp, probe
ctatctttacaaaagtttcctactg

SEQ ID NO: 174427 - DNA, 25 bp, probe
ctttttgaagagcacattctcctca

SEQ ID NO: 174428 - DNA, 25 bp, probe
cttataattactccagactctccta

SEQ ID NO: 174429 - DNA, 25 bp, probe
ctatttactgcagcaaatctctcct

SEQ ID NO: 174430 - DNA, 25 bp, probe
cttttcttgccaaaatatatctctg

SEQ ID NO: 174431 - DNA, 25 bp, probe
ctttgttgctgctctggtattctca

SEQ ID NO: 174432 - DNA, 25 bp, probe
ctttgttgctgctctggtattctca

SEQ ID NO: 174433 - DNA, 25 bp, probe
cttttctctcagttgggatgcttca

SEQ ID NO: 174434 - DNA, 25 bp, probe
cttttccttgatagggtgctgccat

SEQ ID NO: 174435 - DNA, 25 bp, probe
cttttccttgcaggagcgtcagttg

SEQ ID NO: 174436 - DNA, 25 bp, probe
ctttttcattgggtgatgtcagggt

SEQ ID NO: 174437 - DNA, 25 bp, probe
cttttcagaagtgctgtctctttgt

SEQ ID NO: 174438 - DNA, 25 bp, probe
cttttcataatcaagtttgctttgc

SEQ ID NO: 174439 - DNA, 25 bp, probe
cttttctcaaccctattgtctatgg

SEQ ID NO: 174440 - DNA, 25 bp, probe
ctattttaacctcaattatgcattt

SEQ ID NO: 174441 - DNA, 25 bp, probe
ctattttaacctcaattatgcattt

SEQ ID NO: 174442 - DNA, 25 bp, probe
cttttaaacctcaagtaacatctga

SEQ ID NO: 174443 - DNA, 25 bp, probe
ctttacaaccttacctagatatctg

SEQ ID NO: 174444 - DNA, 25 bp, probe
ctttcaattcctcatcagaagtact

SEQ ID NO: 174445 - DNA, 25 bp, probe
ctttcattcttcaccaaagaacctt

SEQ ID NO: 174446 - DNA, 25 bp, probe
cttttacttgacaacaaggattcct

SEQ ID NO: 174447 - DNA, 25 bp, probe
cttttaattgaatcagtggtgtctg

SEQ ID NO: 174448 - DNA, 25 bp, probe
cttattgcaatttaacaccagagtt

SEQ ID NO: 174449 - DNA, 25 bp, probe
cttttgagcatttagactctcgact

SEQ ID NO: 174450 - DNA, 25 bp, probe
cttttggctgcgtaactgtgaacta

SEQ ID NO: 174451 - DNA, 25 bp, probe
ctttatccctgcttatctgaaactt

SEQ ID NO: 174452 - DNA, 25 bp, probe
ctgtttacctgcctaggaaaacatt

SEQ ID NO: 174453 - DNA, 25 bp, probe
cttttcacctgttgagcccaaattc

SEQ ID NO: 174454 - DNA, 25 bp, probe
ctctttcacggaacaatcccaaatg

SEQ ID NO: 174455 - DNA, 25 bp, probe
cctttgggctgagccacccaacaag

SEQ ID NO: 174456 - DNA, 25 bp, probe
ctttatgagggagaccccgacagag

SEQ ID NO: 174457 - DNA, 25 bp, probe
cttttggtggatctcacctctttga

SEQ ID NO: 174458 - DNA, 25 bp, probe
cttttgttggctggacactgttttt

SEQ ID NO: 174459 - DNA, 25 bp, probe
ctttattgtcgtggcagcctttctt

SEQ ID NO: 174460 - DNA, 25 bp, probe
ctttgagtgatcctccaacttcatt

SEQ ID NO: 174461 - DNA, 25 bp, probe
ctttgagaatggccgagcactggtc

SEQ ID NO: 174462 - DNA, 25 bp, probe
ctttgggctgatgcgagcactacct

SEQ ID NO: 174463 - DNA, 25 bp, probe
ctttgactgtgatctggagtccttc

SEQ ID NO: 174464 - DNA, 25 bp, probe
ctttgtattgtactgccattcctac

SEQ ID NO: 174465 - DNA, 25 bp, probe
cttttcatctgcaaagccttttttt

SEQ ID NO: 174466 - DNA, 25 bp, probe
cttttcttaaactttgtatctctag

SEQ ID NO: 174467 - DNA, 25 bp, probe
ctttctgttgataatggttgttctc

SEQ ID NO: 174468 - DNA, 25 bp, probe
ctttctctgtgtctggctagtattg

SEQ ID NO: 174469 - DNA, 25 bp, probe
ctttccctgttaggctgatttcaga

SEQ ID NO: 174470 - DNA, 25 bp, probe
ctttcttcttcttcagcgagattcc

SEQ ID NO: 174471 - DNA, 25 bp, probe
ctttcttcttcttcagcgagattcc

SEQ ID NO: 174472 - DNA, 25 bp, probe
ctttttctgatttacaagtcctaat

SEQ ID NO: 174473 - DNA, 25 bp, probe
cttttgactgtttccagagtgctta

SEQ ID NO: 174474 - DNA, 25 bp, probe
cttttcagtgtctacgagcagtttt

SEQ ID NO: 174475 - DNA, 25 bp, probe
ctcatcctagatcaccgaggttatg

SEQ ID NO: 174476 - DNA, 25 bp, probe
ctttcttgctgatcctgggatccta

SEQ ID NO: 174477 - DNA, 25 bp, probe
ctttttctcattccaaggacctgga

SEQ ID NO: 174478 - DNA, 25 bp, probe
ctttgttctttgtcacagggactga

SEQ ID NO: 174479 - DNA, 25 bp, probe
ctttgttctttgtcacagggactga

SEQ ID NO: 174480 - DNA, 25 bp, probe
ctttattcactttcactggtgcaca

SEQ ID NO: 174481 - DNA, 25 bp, probe
ctatggtgacttttagggagcacaa

SEQ ID NO: 174482 - DNA, 25 bp, probe
ctaaatactgtacatagatgtatca

SEQ ID NO: 174483 - DNA, 25 bp, probe
ctatgagatactcgaggtggatgtc

SEQ ID NO: 174484 - DNA, 25 bp, probe
ctatgaaaagagtgatggttcctgg

SEQ ID NO: 174485 - DNA, 25 bp, probe
ctttagaacactacagagttcctgg

SEQ ID NO: 174486 - DNA, 25 bp, probe
ctttggcgcacagaagggtccaggg

SEQ ID NO: 174487 - DNA, 25 bp, probe
ctttcccacatggaaggtggctgca

SEQ ID NO: 174488 - DNA, 25 bp, probe
cttttgcgacatgacggtgatgctg

SEQ ID NO: 174489 - DNA, 25 bp, probe
cttttagactcaccagagatattgt

SEQ ID NO: 174490 - DNA, 25 bp, probe
cttttagcagcccacaggtgatcct

SEQ ID NO: 174491 - DNA, 25 bp, probe
ctttctccagtccacgtgtagactt

SEQ ID NO: 174492 - DNA, 25 bp, probe
cttttcctgtctttgagattgacct

SEQ ID NO: 174493 - DNA, 25 bp, probe
cttttccgaggatgagattgccctc

SEQ ID NO: 174494 - DNA, 25 bp, probe
ctttctcggaactgaactgaactct

SEQ ID NO: 174495 - DNA, 25 bp, probe
ctttccctaatgtgccataaggcct

SEQ ID NO: 174496 - DNA, 25 bp, probe
ctcttcacctactgcgacaaaagct

SEQ ID NO: 174497 - DNA, 25 bp, probe
ctttcaactataggtaataactctt

SEQ ID NO: 174498 - DNA, 25 bp, probe
ctttccactaacgtactatcactcc

SEQ ID NO: 174499 - DNA, 25 bp, probe
ctttacctaatggtctctacctaat

SEQ ID NO: 174500 - DNA, 25 bp, probe
ctgttaactattatccaaacaaatt

SEQ ID NO: 174501 - DNA, 25 bp, probe
ctttatcactgaattctccaaccaa

SEQ ID NO: 174502 - DNA, 25 bp, probe
ctttcatgacgaagaatccccacaa

SEQ ID NO: 174503 - DNA, 25 bp, probe
cttttaggagcaattccatccatca

SEQ ID NO: 174504 - DNA, 25 bp, probe
ctttgtcatggtaagttctactcat

SEQ ID NO: 174505 - DNA, 25 bp, probe
ctttttgattcttgtagctactata

SEQ ID NO: 174506 - DNA, 25 bp, probe
ctttttatacatggcttttgctcac

SEQ ID NO: 174507 - DNA, 25 bp, probe
ctttttatgcatttgcatttgctct

SEQ ID NO: 174508 - DNA, 25 bp, probe
ctttcttacatgttttcctctcgaa

SEQ ID NO: 174509 - DNA, 25 bp, probe
ctttgttattttcatcatctttggg

SEQ ID NO: 174510 - DNA, 25 bp, probe
ctttgtttctctcccaatgtttgga

SEQ ID NO: 174511 - DNA, 25 bp, probe
ctttgtttctttgcaatgcattgta

SEQ ID NO: 174512 - DNA, 25 bp, probe
ctttattccagcattcgatgcattt

SEQ ID NO: 174513 - DNA, 25 bp, probe
ctttattgacatggttctatatttt

SEQ ID NO: 174514 - DNA, 25 bp, probe
ctttttatctctcaatataattttt

SEQ ID NO: 174515 - DNA, 25 bp, probe
ctttctctttcacattcttgtattt

SEQ ID NO: 174516 - DNA, 25 bp, probe
ctttcttaatatcactttggtctcc

SEQ ID NO: 174517 - DNA, 25 bp, probe
ctttttaatgtcgtctattggcttt

SEQ ID NO: 174518 - DNA, 25 bp, probe
ctttctgataacagctctcttcctt

SEQ ID NO: 174519 - DNA, 25 bp, probe
ctttgtgatatactggttcacatcc

SEQ ID NO: 174520 - DNA, 25 bp, probe
ctttgtgaattgtcacctcacctcg

SEQ ID NO: 174521 - DNA, 25 bp, probe
ctttgtgaattgtcacctcacctcg

SEQ ID NO: 174522 - DNA, 25 bp, probe
ctatgattgacaagtaccaggcttt

SEQ ID NO: 174523 - DNA, 25 bp, probe
ctagacagcatctgttcaaagtcgt

SEQ ID NO: 174524 - DNA, 25 bp, probe
ctagacagcccgttactttctgtgc

SEQ ID NO: 174525 - DNA, 25 bp, probe
ctaggaacctcgaagctgttctctg

SEQ ID NO: 174526 - DNA, 25 bp, probe
ctatgaaactcaggtacaaactcga

SEQ ID NO: 174527 - DNA, 25 bp, probe
ctatgcaaactctctcattaaccct

SEQ ID NO: 174528 - DNA, 25 bp, probe
ctataaactctcttgttacagcccc

SEQ ID NO: 174529 - DNA, 25 bp, probe
ctaaagtcccatgtttagccactgc

SEQ ID NO: 174530 - DNA, 25 bp, probe
ctatggtgtcccagtaaagccaatg

SEQ ID NO: 174531 - DNA, 25 bp, probe
ctttgtgctcccactcaatacaaaa

SEQ ID NO: 174532 - DNA, 25 bp, probe
ctttgatgacaccaatctcaaaaag

SEQ ID NO: 174533 - DNA, 25 bp, probe
ctattctgaccaaactatataaaga

SEQ ID NO: 174534 - DNA, 25 bp, probe
cttttcagcctcaagctttacacag

SEQ ID NO: 174535 - DNA, 25 bp, probe
ctatcattcaccgcgatcttaaatg

SEQ ID NO: 174536 - DNA, 25 bp, probe
ctatctggcccctgagattgtacgc

SEQ ID NO: 174537 - DNA, 25 bp, probe
ctatgctgaccccaatacttgcaga

SEQ ID NO: 174538 - DNA, 25 bp, probe
ctttgaccaggaaacagtgatcaac

SEQ ID NO: 174539 - DNA, 25 bp, probe
ctttgcccaaaatgcagtgccaagt

SEQ ID NO: 174540 - DNA, 25 bp, probe
ctttcagcctattttgagttaactt

SEQ ID NO: 174541 - DNA, 25 bp, probe
ctataagccatatgtaggattacct

SEQ ID NO: 174542 - DNA, 25 bp, probe
ctaatgggtcaccttctcttgacct

SEQ ID NO: 174543 - DNA, 25 bp, probe
ctcttgggtgaccttccaaaactct

SEQ ID NO: 174544 - DNA, 25 bp, probe
ctttcttgatactttccaaattctc

SEQ ID NO: 174545 - DNA, 25 bp, probe
ctttctatgtagtttggtaattatc

SEQ ID NO: 174546 - DNA, 25 bp, probe
ctttctatgtagtttggtaattatc

SEQ ID NO: 174547 - DNA, 25 bp, probe
ctttgttgtacattgtcagtgtaat

SEQ ID NO: 174548 - DNA, 25 bp, probe
ctttggtgctaataaggtctgaaaa

SEQ ID NO: 174549 - DNA, 25 bp, probe
ccttggagccgacacgggagtacca

SEQ ID NO: 174550 - DNA, 25 bp, probe
ctttgaggccgacaatgaggacgac

SEQ ID NO: 174551 - DNA, 25 bp, probe
ctttgagtacgtcaagaatgaggac

SEQ ID NO: 174552 - DNA, 25 bp, probe
ctttttccgctggattgactgggag

SEQ ID NO: 174553 - DNA, 25 bp, probe
ctcatttttcttgtgatgtcggaag

SEQ ID NO: 174554 - DNA, 25 bp, probe
ctcatttttcttgtgatgtcggaag

SEQ ID NO: 174555 - DNA, 25 bp, probe
cttttttctcatggtttcagtagag

SEQ ID NO: 174556 - DNA, 25 bp, probe
cttttattcctcttgttttatggat

SEQ ID NO: 174557 - DNA, 25 bp, probe
ctttgtgaggcagtcttgttcttag

SEQ ID NO: 174558 - DNA, 25 bp, probe
cttttactcacattctgttgttcag

SEQ ID NO: 174559 - DNA, 25 bp, probe
cttttattcagcatcctttatctgt

SEQ ID NO: 174560 - DNA, 25 bp, probe
cttttatatctgttgcctagttttg

SEQ ID NO: 174561 - DNA, 25 bp, probe
ctttaccatatgttgctccagaact

SEQ ID NO: 174562 - DNA, 25 bp, probe
ctttcagcctcttcgccaaagagtg

SEQ ID NO: 174563 - DNA, 25 bp, probe
ctatgtatggtcatggaatacgtgg

SEQ ID NO: 174564 - DNA, 25 bp, probe
ctatgtgatgctgtgcggataccct

SEQ ID NO: 174565 - DNA, 25 bp, probe
ctttactgtgtgctgtaactctcca

SEQ ID NO: 174566 - DNA, 25 bp, probe
ctttatctggtttgcttacttcaac

SEQ ID NO: 174567 - DNA, 25 bp, probe
ctttcctgccgattgttgacttgct

SEQ ID NO: 174568 - DNA, 25 bp, probe
ctttcctgccgattgttgacttgct

SEQ ID NO: 174569 - DNA, 25 bp, probe
ctttgggccagttttacagtgtaca

SEQ ID NO: 174570 - DNA, 25 bp, probe
ctttgccgaagtgtccgcactgtaa

SEQ ID NO: 174571 - DNA, 25 bp, probe
ctttcctattgagcaaccagctctg

SEQ ID NO: 174572 - DNA, 25 bp, probe
ctttccttatgggataccagcccct

SEQ ID NO: 174573 - DNA, 25 bp, probe
ctttacttagcggattcctgccttt

SEQ ID NO: 174574 - DNA, 25 bp, probe
ctttccactacactatgatcctgac

SEQ ID NO: 174575 - DNA, 25 bp, probe
ctttccactacactatgatcctgac

SEQ ID NO: 174576 - DNA, 25 bp, probe
ctttgcaccaaagatgtcctgactt

SEQ ID NO: 174577 - DNA, 25 bp, probe
ctttgtggcaagattttcatgactt

SEQ ID NO: 174578 - DNA, 25 bp, probe
ctttgttcgctcattttacgctgtc

SEQ ID NO: 174579 - DNA, 25 bp, probe
ctttgttccttaccttgaagctgtg

SEQ ID NO: 174580 - DNA, 25 bp, probe
ctttgtactctataatgtgaacttt

SEQ ID NO: 174581 - DNA, 25 bp, probe
ctttgtcaccaatattgtggatcct

SEQ ID NO: 174582 - DNA, 25 bp, probe
ctttggccgaaatttctacacctgt

SEQ ID NO: 174583 - DNA, 25 bp, probe
ctttctcttggacattgtaaacgta

SEQ ID NO: 174584 - DNA, 25 bp, probe
ctttgccttgggctgtgtcaacagc

SEQ ID NO: 174585 - DNA, 25 bp, probe
ctgtagcctgtaatgggtaaaagcc

SEQ ID NO: 174586 - DNA, 25 bp, probe
ctgtagcctgtaatgggtaaaagcc

SEQ ID NO: 174587 - DNA, 25 bp, probe
ctttgtgctatatggtatgaaatac

SEQ ID NO: 174588 - DNA, 25 bp, probe
ctttgctctatctggaaaatattct

SEQ ID NO: 174589 - DNA, 25 bp, probe
ctttcttctttgtaaaccatgtcat

SEQ ID NO: 174590 - DNA, 25 bp, probe
ctatcctagcttttaacctgagcca

SEQ ID NO: 174591 - DNA, 25 bp, probe
ctatccatgactttgcgcaagcatc

SEQ ID NO: 174592 - DNA, 25 bp, probe
ctatctgaatgcacaccaagcacat

SEQ ID NO: 174593 - DNA, 25 bp, probe
ctttgttgtcaaagacagcacaggg

SEQ ID NO: 174594 - DNA, 25 bp, probe
ctttcctgagacatgactgccagga

SEQ ID NO: 174595 - DNA, 25 bp, probe
ctatgagcctgggcagcggcccagc

SEQ ID NO: 174596 - DNA, 25 bp, probe
ctatgagcctgggcagcggcccagc

SEQ ID NO: 174597 - DNA, 25 bp, probe
ctaggttggagtgggcatcacagcc

SEQ ID NO: 174598 - DNA, 25 bp, probe
ctaggttggagtgggcatcacagcc

SEQ ID NO: 174599 - DNA, 25 bp, probe
ctatgagtttgagctcgtgccgacg

SEQ ID NO: 174600 - DNA, 25 bp, probe
ctatcgttcagaagctccgcttcac

SEQ ID NO: 174601 - DNA, 25 bp, probe
ctttgcttcaagttgccacattcaa

SEQ ID NO: 174602 - DNA, 25 bp, probe
ctttatacaagcatgcccaatctta

SEQ ID NO: 174603 - DNA, 25 bp, probe
ctatgtctacacgctcaccgtgttt

SEQ ID NO: 174604 - DNA, 25 bp, probe
ctttgctacgtggccagcacggatg

SEQ ID NO: 174605 - DNA, 25 bp, probe
ctttgctctggtggcactgtgggag

SEQ ID NO: 174606 - DNA, 25 bp, probe
ctttgagcttgtggaggtggtcggc

SEQ ID NO: 174607 - DNA, 25 bp, probe
ctttggccatgttagcctggtcaag

SEQ ID NO: 174608 - DNA, 25 bp, probe
ctttccctcttacccagaaatctag

SEQ ID NO: 174609 - DNA, 25 bp, probe
ctttccctcttacccagaaatctag

SEQ ID NO: 174610 - DNA, 25 bp, probe
ctttcccatctccaactcggaagta

SEQ ID NO: 174611 - DNA, 25 bp, probe
ctttcccatctccaactcggaagta

SEQ ID NO: 174612 - DNA, 25 bp, probe
ctttgctccattcctatccatggaa

SEQ ID NO: 174613 - DNA, 25 bp, probe
ctttctacttactaccagcaatgca

SEQ ID NO: 174614 - DNA, 25 bp, probe
ctttctcagttgacttcccaagtaa

SEQ ID NO: 174615 - DNA, 25 bp, probe
ctttcaattgttatgcaccagagat

SEQ ID NO: 174616 - DNA, 25 bp, probe
ctttctatacttaatcccatgtcat

SEQ ID NO: 174617 - DNA, 25 bp, probe
ctttgagtatatcaacccattattg

SEQ ID NO: 174618 - DNA, 25 bp, probe
ctttcagtattaaactctcctttga

SEQ ID NO: 174619 - DNA, 25 bp, probe
ctttatgatatcaaagactcattgc

SEQ ID NO: 174620 - DNA, 25 bp, probe
ctttagcatttccaggtcatgtggc

SEQ ID NO: 174621 - DNA, 25 bp, probe
ctttacctccagggatcagctgtgt

SEQ ID NO: 174622 - DNA, 25 bp, probe
ctttacagtgccacgacatggctgg

SEQ ID NO: 174623 - DNA, 25 bp, probe
ctttcacactctatccacaggatag

SEQ ID NO: 174624 - DNA, 25 bp, probe
ctttctcctctgatttcagttcact

SEQ ID NO: 174625 - DNA, 25 bp, probe
ctctttccttttttggaccatctca

SEQ ID NO: 174626 - DNA, 25 bp, probe
ctctacgcctttctagatgacaact

SEQ ID NO: 174627 - DNA, 25 bp, probe
ctatacggctttcaacaagaactac

SEQ ID NO: 174628 - DNA, 25 bp, probe
ctatacggctttcaacaagaactac

SEQ ID NO: 174629 - DNA, 25 bp, probe
ctttgggcactcccaataatgaagt

SEQ ID NO: 174630 - DNA, 25 bp, probe
ctttgaggcctacacgaagatttgt

SEQ ID NO: 174631 - DNA, 25 bp, probe
ctctaggtcctacctcagaaaatct

SEQ ID NO: 174632 - DNA, 25 bp, probe
ctttggtctgatccctcagaggatt

SEQ ID NO: 174633 - DNA, 25 bp, probe
ctttcttctgaggattgcagaggat

SEQ ID NO: 174634 - DNA, 25 bp, probe
ctttcttccacatggcagcggagac

SEQ ID NO: 174635 - DNA, 25 bp, probe
ctttcttccatggggcgtggcaagg

SEQ ID NO: 174636 - DNA, 25 bp, probe
ctttgctgccgtgaggcagtggcgg

SEQ ID NO: 174637 - DNA, 25 bp, probe
ctttgcccagttggagactgtctgg

SEQ ID NO: 174638 - DNA, 25 bp, probe
ctttgaccacagccgagtgatcctg

SEQ ID NO: 174639 - DNA, 25 bp, probe
ctttccagcaagcacagatgtacag

SEQ ID NO: 174640 - DNA, 25 bp, probe
ctttgtcccatgcacaatgcagacc

SEQ ID NO: 174641 - DNA, 25 bp, probe
ctttgccgctgggacaagagacgct

SEQ ID NO: 174642 - DNA, 25 bp, probe
ctttccatcaggccaaagaatcctt

SEQ ID NO: 174643 - DNA, 25 bp, probe
ctttccatcacttattacaattttc

SEQ ID NO: 174644 - DNA, 25 bp, probe
ctttcttacataatttgcaatttca

SEQ ID NO: 174645 - DNA, 25 bp, probe
ctttctgtccaaatatctacttgac

SEQ ID NO: 174646 - DNA, 25 bp, probe
ctttgcttcctcatgatgaccattg

SEQ ID NO: 174647 - DNA, 25 bp, probe
ctttgaccgctacctgaacatagtt

SEQ ID NO: 174648 - DNA, 25 bp, probe
ctttcacttctactctatttcagtt

SEQ ID NO: 174649 - DNA, 25 bp, probe
ctttcccctccattatttagtgact

SEQ ID NO: 174650 - DNA, 25 bp, probe
ctttcccctccattatttagtgact

SEQ ID NO: 174651 - DNA, 25 bp, probe
ctttcttcctgcttatatttaggaa

SEQ ID NO: 174652 - DNA, 25 bp, probe
ctttctttgtcattcagttctaggc

SEQ ID NO: 174653 - DNA, 25 bp, probe
ctttcatttacacagatatccatgc

SEQ ID NO: 174654 - DNA, 25 bp, probe
ctttcgtgatcacgtgaccatcctc

SEQ ID NO: 174655 - DNA, 25 bp, probe
ctttgctgtgtgctgggcaccattc

SEQ ID NO: 174656 - DNA, 25 bp, probe
ctttgggtatggttgctagcttcag

SEQ ID NO: 174657 - DNA, 25 bp, probe
ctttggtgctgattttccttatcag

SEQ ID NO: 174658 - DNA, 25 bp, probe
ctttgagtttctttccatggatctg

SEQ ID NO: 174659 - DNA, 25 bp, probe
ctagtgcagtgtactttgccgaggc

SEQ ID NO: 174660 - DNA, 25 bp, probe
ctagtgcagtgtactttgccgaggc

SEQ ID NO: 174661 - DNA, 25 bp, probe
ctatgccatggtcctgtttcgaatc

SEQ ID NO: 174662 - DNA, 25 bp, probe
ctatgccgagttcttctacaactgg

SEQ ID NO: 174663 - DNA, 25 bp, probe
ctttaggttaatccctcaagcatga

SEQ ID NO: 174664 - DNA, 25 bp, probe
ctatttgtgtcaatacccgaaatga

SEQ ID NO: 174665 - DNA, 25 bp, probe
ctagctttcctgacacctggaactg

SEQ ID NO: 174666 - DNA, 25 bp, probe
ctatggttctccactatggcaacta

SEQ ID NO: 174667 - DNA, 25 bp, probe
ctatttctaccaccgagaaactgag

SEQ ID NO: 174668 - DNA, 25 bp, probe
ctattccataactccagacatcact

SEQ ID NO: 174669 - DNA, 25 bp, probe
ctattccataactccagacatcact

SEQ ID NO: 174670 - DNA, 25 bp, probe
ctccctcaagaatccgaaccacagg

SEQ ID NO: 174671 - DNA, 25 bp, probe
ctcccttagcgttgcctggaaaagc

SEQ ID NO: 174672 - DNA, 25 bp, probe
cggccttagttatgccaaaaatgga

SEQ ID NO: 174673 - DNA, 25 bp, probe
cgactttggcctctccaaagcactg

SEQ ID NO: 174674 - DNA, 25 bp, probe
ctatccttggtttagaaaagcactg

SEQ ID NO: 174675 - DNA, 25 bp, probe
ctatccttggtttagaaaagcactg

SEQ ID NO: 174676 - DNA, 25 bp, probe
ctaccacgtatatgaggtgaacctg

SEQ ID NO: 174677 - DNA, 25 bp, probe
ctacccggttcaagcatggctgacc

SEQ ID NO: 174678 - DNA, 25 bp, probe
ctagtcaagacggcatctggcaacc

SEQ ID NO: 174679 - DNA, 25 bp, probe
ctagttaccaatgctgcagtcctgc

SEQ ID NO: 174680 - DNA, 25 bp, probe
ctatgtgatcacaaacccagacctc

SEQ ID NO: 174681 - DNA, 25 bp, probe
ctttctcagcagtatcgtagccttc

SEQ ID NO: 174682 - DNA, 25 bp, probe
ctttctcagcagtatcgtagccttc

SEQ ID NO: 174683 - DNA, 25 bp, probe
ctttcacacacattctggacagcat

SEQ ID NO: 174684 - DNA, 25 bp, probe
ctttccagctattcagtgaccaagg

SEQ ID NO: 174685 - DNA, 25 bp, probe
ctttccagctattcagtgaccaagg

SEQ ID NO: 174686 - DNA, 25 bp, probe
ctttccagccattttactgcagcag

SEQ ID NO: 174687 - DNA, 25 bp, probe
ctttccctcagctattatgcaacag

SEQ ID NO: 174688 - DNA, 25 bp, probe
ctttccctaccactgtgatagtgga

SEQ ID NO: 174689 - DNA, 25 bp, probe
ctttctcctccagctgaatcagctg

SEQ ID NO: 174690 - DNA, 25 bp, probe
ctttctcctccagctgaatcagctg

SEQ ID NO: 174691 - DNA, 25 bp, probe
ctttcttcagcagcgtgcaatagct

SEQ ID NO: 174692 - DNA, 25 bp, probe
ctttcttcagcagcgtgcaatagct

SEQ ID NO: 174693 - DNA, 25 bp, probe
ctttgcaccagagtatggagaagtc

SEQ ID NO: 174694 - DNA, 25 bp, probe
ctttcccacctaaaaatgtctgaat

SEQ ID NO: 174695 - DNA, 25 bp, probe
ctttcgtatctccatgaaaaccaaa

SEQ ID NO: 174696 - DNA, 25 bp, probe
ctttctgttcttcaacaccacataa

SEQ ID NO: 174697 - DNA, 25 bp, probe
ctttcttgtcctagtacatccagct

SEQ ID NO: 174698 - DNA, 25 bp, probe
ctttgctgttcactttggcattagt

SEQ ID NO: 174699 - DNA, 25 bp, probe
ctttgctgttcactttggcattagt

SEQ ID NO: 174700 - DNA, 25 bp, probe
ctttcgttaatcttgctgcttatgt

SEQ ID NO: 174701 - DNA, 25 bp, probe
ctttgcatttgaataattgtcttgt

SEQ ID NO: 174702 - DNA, 25 bp, probe
ctttggatgctgaaccttgtttgtc

SEQ ID NO: 174703 - DNA, 25 bp, probe
ctttggcatttatttattcgtgctt

SEQ ID NO: 174704 - DNA, 25 bp, probe
ctttgccgatttttgaatgtgattt

SEQ ID NO: 174705 - DNA, 25 bp, probe
ctttgcctgtttcggatctgtggtt

SEQ ID NO: 174706 - DNA, 25 bp, probe
ctttcaatattctgagattctgttc

SEQ ID NO: 174707 - DNA, 25 bp, probe
ctttccaaatgctggagtctgaaca

SEQ ID NO: 174708 - DNA, 25 bp, probe
ctcttggaatagtgggtggatagca

SEQ ID NO: 174709 - DNA, 25 bp, probe
ctttggatttgctcggcttttgact

SEQ ID NO: 174710 - DNA, 25 bp, probe
ctttgtggaccgtggcttctatagc

SEQ ID NO: 174711 - DNA, 25 bp, probe
ctttgttgcacgcctgggcaatttc

SEQ ID NO: 174712 - DNA, 25 bp, probe
ctttggtacatgcctgttaatattc

SEQ ID NO: 174713 - DNA, 25 bp, probe
ctttcatgtcaggcgttaaactgtc

SEQ ID NO: 174714 - DNA, 25 bp, probe
ctttcaatagactttaccctgtaat

SEQ ID NO: 174715 - DNA, 25 bp, probe
ctttctaaattgactgagccctgtc

SEQ ID NO: 174716 - DNA, 25 bp, probe
ctttctaaattgctgttccttaatt

SEQ ID NO: 174717 - DNA, 25 bp, probe
ctatacgaaatatggttccttttgt

SEQ ID NO: 174718 - DNA, 25 bp, probe
ctttgcaacagaaacggtcctcttt

SEQ ID NO: 174719 - DNA, 25 bp, probe
ctttgctagttggcagggttccttt

SEQ ID NO: 174720 - DNA, 25 bp, probe
ctttgcaatgcattgtatggcttta

SEQ ID NO: 174721 - DNA, 25 bp, probe
ctttgcactgctctatgcagctgtg

SEQ ID NO: 174722 - DNA, 25 bp, probe
ctttgcacctgctttcagtgttatt

SEQ ID NO: 174723 - DNA, 25 bp, probe
ctttcatctctgcttggattatttt

SEQ ID NO: 174724 - DNA, 25 bp, probe
ctgtttcttagtccgaatgttagat

SEQ ID NO: 174725 - DNA, 25 bp, probe
ctatttttatcctgcaactcttgat

SEQ ID NO: 174726 - DNA, 25 bp, probe
ctatttttcacctaagtcatctttg

SEQ ID NO: 174727 - DNA, 25 bp, probe
ctatttttcagcttaagtgttctta

SEQ ID NO: 174728 - DNA, 25 bp, probe
ctttgtcattcagttctaggccttt

SEQ ID NO: 174729 - DNA, 25 bp, probe
ctttgtcattcagttctaggccttt

SEQ ID NO: 174730 - DNA, 25 bp, probe
ctttgtattatagtcatgcggtctt

SEQ ID NO: 174731 - DNA, 25 bp, probe
ctttctatttgacttgtggttgaat

SEQ ID NO: 174732 - DNA, 25 bp, probe
ctttgtattttggttagctatgcaa

SEQ ID NO: 174733 - DNA, 25 bp, probe
ctttggcattcagtggttcctaata

SEQ ID NO: 174734 - DNA, 25 bp, probe
ctttggcttggctgttcgatttgag

SEQ ID NO: 174735 - DNA, 25 bp, probe
ctttggcttggcgagatttgggggt

SEQ ID NO: 174736 - DNA, 25 bp, probe
ctttggcctggccaaagccgagcgg

SEQ ID NO: 174737 - DNA, 25 bp, probe
ctttgagctgctcccaagagcacgg

SEQ ID NO: 174738 - DNA, 25 bp, probe
ctttcagtgctggccaaaacctggc

SEQ ID NO: 174739 - DNA, 25 bp, probe
ctttcaggttccaaagaatgcatgg

SEQ ID NO: 174740 - DNA, 25 bp, probe
ctttcggttcaagaagagccagcgc

SEQ ID NO: 174741 - DNA, 25 bp, probe
ctttctagtaaggccaagacagcgg

SEQ ID NO: 174742 - DNA, 25 bp, probe
ctatttattgtaccaaagacagtgg

SEQ ID NO: 174743 - DNA, 25 bp, probe
ctttgtgcatttgactgaggccagt

SEQ ID NO: 174744 - DNA, 25 bp, probe
ctttctcttgatgacgcagctgtca

SEQ ID NO: 174745 - DNA, 25 bp, probe
ctttcttttggtggcagctaaggta

SEQ ID NO: 174746 - DNA, 25 bp, probe
ctttctgtatttgtagctattggag

SEQ ID NO: 174747 - DNA, 25 bp, probe
ctttctatattgttatcagtccagg

SEQ ID NO: 174748 - DNA, 25 bp, probe
ctttctagatgacaacttccggaag

SEQ ID NO: 174749 - DNA, 25 bp, probe
ctttcggaaagctatgcttctgggc

SEQ ID NO: 174750 - DNA, 25 bp, probe
ctatctcagctacaagtttctgggc

SEQ ID NO: 174751 - DNA, 25 bp, probe
ctatccggcagtaagcgctgtctgg

SEQ ID NO: 174752 - DNA, 25 bp, probe
ctttctggcatgcagccaggtgtgg

SEQ ID NO: 174753 - DNA, 25 bp, probe
ctttctgactctgctcatgagatgg

SEQ ID NO: 174754 - DNA, 25 bp, probe
ctttcatcctatgcagcttgatgtg

SEQ ID NO: 174755 - DNA, 25 bp, probe
ctttcatgccatttccattgttgag

SEQ ID NO: 174756 - DNA, 25 bp, probe
ctttctgcgcttcgtggtgtatgag

SEQ ID NO: 174757 - DNA, 25 bp, probe
ctttctgcacattcagtgtattggt

SEQ ID NO: 174758 - DNA, 25 bp, probe
ctttccaatgtcctggtcgcatgta

SEQ ID NO: 174759 - DNA, 25 bp, probe
ctttccagtgcccagggcgcatgta

SEQ ID NO: 174760 - DNA, 25 bp, probe
ctttctcaggcccagatcctatgaa

SEQ ID NO: 174761 - DNA, 25 bp, probe
ctttgaacctcgcacagctgtgaag

SEQ ID NO: 174762 - DNA, 25 bp, probe
ctttgactgcactgagaattgctaa

SEQ ID NO: 174763 - DNA, 25 bp, probe
ctttctctgcctggcaacatcttac

SEQ ID NO: 174764 - DNA, 25 bp, probe
ctttgttcccaaatttcatacctat

SEQ ID NO: 174765 - DNA, 25 bp, probe
ctttgggcccagaaactcaaccatc

SEQ ID NO: 174766 - DNA, 25 bp, probe
ctttggggcaagctattccagcact

SEQ ID NO: 174767 - DNA, 25 bp, probe
ctttgtggagcgtgacattctcacc

SEQ ID NO: 174768 - DNA, 25 bp, probe
ctttgtacacgaagaccatccatcc

SEQ ID NO: 174769 - DNA, 25 bp, probe
ctttgcaaattcaagagcctcccct

SEQ ID NO: 174770 - DNA, 25 bp, probe
ctttgcaagaatcagccagccaaca

SEQ ID NO: 174771 - DNA, 25 bp, probe
ctttgcaagaatcagccagccaaca

SEQ ID NO: 174772 - DNA, 25 bp, probe
ctttcatgtgaatatccaggataca

SEQ ID NO: 174773 - DNA, 25 bp, probe
ctttcatgtgaatatccaggataca

SEQ ID NO: 174774 - DNA, 25 bp, probe
ctttcattatactacctggccagaa

SEQ ID NO: 174775 - DNA, 25 bp, probe
ctttcatcataagaagtgtctggaa

SEQ ID NO: 174776 - DNA, 25 bp, probe
ctacagccataagaaatttgacaag

SEQ ID NO: 174777 - DNA, 25 bp, probe
ctaacgtcagaaccaatatttcact

SEQ ID NO: 174778 - DNA, 25 bp, probe
ctactcggagagcaaaatggtcatt

SEQ ID NO: 174779 - DNA, 25 bp, probe
ctactcggagagcaaaatggtcatt

SEQ ID NO: 174780 - DNA, 25 bp, probe
ctagtttggcacagaaatggttccc

SEQ ID NO: 174781 - DNA, 25 bp, probe
ctagtttgggtgcaagtaggtctga

SEQ ID NO: 174782 - DNA, 25 bp, probe
ctaggggagagtcaaacggtgcttc

SEQ ID NO: 174783 - DNA, 25 bp, probe
ctaggggagagtcaaacggtgcttc

SEQ ID NO: 174784 - DNA, 25 bp, probe
ctatgcgggtagactacgaccaggt

SEQ ID NO: 174785 - DNA, 25 bp, probe
ctatcgtgggagagcctgggcagga

SEQ ID NO: 174786 - DNA, 25 bp, probe
ctatgcagcttgatgtggtcttggg

SEQ ID NO: 174787 - DNA, 25 bp, probe
ctatgccctgatgctggttatttgc

SEQ ID NO: 174788 - DNA, 25 bp, probe
ctatgggagctggggatctggattc

SEQ ID NO: 174789 - DNA, 25 bp, probe
ctatgggactgctggctcctagtcc

SEQ ID NO: 174790 - DNA, 25 bp, probe
ctatggagacatgtacccgcagacg

SEQ ID NO: 174791 - DNA, 25 bp, probe
ctatgtcaccaaaaacctgcggcga

SEQ ID NO: 174792 - DNA, 25 bp, probe
ctattcataaagagaccggccagat

SEQ ID NO: 174793 - DNA, 25 bp, probe
ctattccattttgcagccagaccga

SEQ ID NO: 174794 - DNA, 25 bp, probe
ctttgctagtttgtggcagagtgga

SEQ ID NO: 174795 - DNA, 25 bp, probe
ctttgcatagattccctgagcagga

SEQ ID NO: 174796 - DNA, 25 bp, probe
ctttgtgcagcttcgaggacaggaa

SEQ ID NO: 174797 - DNA, 25 bp, probe
ctttgcgatacatgagcccagaaca

SEQ ID NO: 174798 - DNA, 25 bp, probe
ctttcctggcaggcacacaaggaca

SEQ ID NO: 174799 - DNA, 25 bp, probe
ctttcctggcaggcacacaaggaca

SEQ ID NO: 174800 - DNA, 25 bp, probe
ctatgtcctgtgacctacaaggtga

SEQ ID NO: 174801 - DNA, 25 bp, probe
ctatatacggctgttgcagcaggct

SEQ ID NO: 174802 - DNA, 25 bp, probe
ctattaccgcatctatgtcacagct

SEQ ID NO: 174803 - DNA, 25 bp, probe
ctatagagccttctgatgtctctaa

SEQ ID NO: 174804 - DNA, 25 bp, probe
ctttgggcagcctcatgtctgctaa

SEQ ID NO: 174805 - DNA, 25 bp, probe
ctttggcactcttactgcctgtaag

SEQ ID NO: 174806 - DNA, 25 bp, probe
ctttgatgacatgtcctgcatcttc

SEQ ID NO: 174807 - DNA, 25 bp, probe
ctttgatactgctcatgctgactta

SEQ ID NO: 174808 - DNA, 25 bp, probe
ctatttactgcttttactaaaccag

SEQ ID NO: 174809 - DNA, 25 bp, probe
ctagatcaccgaggttatgccaaac

SEQ ID NO: 174810 - DNA, 25 bp, probe
ctatcatagccctgcttactaaaag

SEQ ID NO: 174811 - DNA, 25 bp, probe
ctatctggcaactggtactttgatg

SEQ ID NO: 174812 - DNA, 25 bp, probe
ctattggcaagatcgcatgtttttt

SEQ ID NO: 174813 - DNA, 25 bp, probe
ctattggcaagatcgcatgtttttt

SEQ ID NO: 174814 - DNA, 25 bp, probe
ctatggagaagttcaacttgctgta

SEQ ID NO: 174815 - DNA, 25 bp, probe
ctatgaggaatttcttcgagctatg

SEQ ID NO: 174816 - DNA, 25 bp, probe
ctttggtattgatttcacagtcagc

SEQ ID NO: 174817 - DNA, 25 bp, probe
ctttgtctagtgtattctcttcaca

SEQ ID NO: 174818 - DNA, 25 bp, probe
ctttctacagctcacttctatcaga

SEQ ID NO: 174819 - DNA, 25 bp, probe
ctttgctacctgttcattatcatca

SEQ ID NO: 174820 - DNA, 25 bp, probe
ctttgaactctgttgctgtctgagc

SEQ ID NO: 174821 - DNA, 25 bp, probe
ctttgaaagctgtgtgactgcctga

SEQ ID NO: 174822 - DNA, 25 bp, probe
ctagtgagggactgtgttgactgac

SEQ ID NO: 174823 - DNA, 25 bp, probe
ctagggggcttgctgcatggcaata

SEQ ID NO: 174824 - DNA, 25 bp, probe
ctatacgggttgcctcacgcaaatg

SEQ ID NO: 174825 - DNA, 25 bp, probe
ctatacgggttgcctcacgcaaatg

SEQ ID NO: 174826 - DNA, 25 bp, probe
ctttctgtgtgtgcctcacgaaatg

SEQ ID NO: 174827 - DNA, 25 bp, probe
ctttgtgattgtgctgtccagagtg

SEQ ID NO: 174828 - DNA, 25 bp, probe
ctttgagttcatgctgtcggatctg

SEQ ID NO: 174829 - DNA, 25 bp, probe
ctttgacgactttgactgtgatctg

SEQ ID NO: 174830 - DNA, 25 bp, probe
ctttccgactcccaatcatgaaggc

SEQ ID NO: 174831 - DNA, 25 bp, probe
ctttcgagactcctcaagcatgaaa

SEQ ID NO: 174832 - DNA, 25 bp, probe
ctttgatgatgcttcccaagaaata

SEQ ID NO: 174833 - DNA, 25 bp, probe
ctttgcatcagactctctaaggact

SEQ ID NO: 174834 - DNA, 25 bp, probe
ctttgctcatgactcctgtagggaa

SEQ ID NO: 174835 - DNA, 25 bp, probe
ctttgctcatgactcctgtagggaa

SEQ ID NO: 174836 - DNA, 25 bp, probe
ctttgtttctgcctttggctgcaac

SEQ ID NO: 174837 - DNA, 25 bp, probe
ctttggttcctgtattgagatgcat

SEQ ID NO: 174838 - DNA, 25 bp, probe
ctttgctgtgaggctgtcctgtaca

SEQ ID NO: 174839 - DNA, 25 bp, probe
ctttgctgtgaggctgtcctgtaca

SEQ ID NO: 174840 - DNA, 25 bp, probe
ctttgtgtacatcgtgctctgtgag

SEQ ID NO: 174841 - DNA, 25 bp, probe
ctttgtgctagtcctggcactgctg

SEQ ID NO: 174842 - DNA, 25 bp, probe
ctttgtgctagtcctggcactgctg

SEQ ID NO: 174843 - DNA, 25 bp, probe
ctttgtgctagtcctggcactgctg

SEQ ID NO: 174844 - DNA, 25 bp, probe
ctattcattatgccttaccatgtgg

SEQ ID NO: 174845 - DNA, 25 bp, probe
ctattcattatgccttaccatgtgg

SEQ ID NO: 174846 - DNA, 25 bp, probe
ctatctatcttccaaatgcaatttg

SEQ ID NO: 174847 - DNA, 25 bp, probe
ctttgctattctcagatgactctgt

SEQ ID NO: 174848 - DNA, 25 bp, probe
ctttgccatcctcagaatcattcgt

SEQ ID NO: 174849 - DNA, 25 bp, probe
ctttcctcctggcagaatgctagct

SEQ ID NO: 174850 - DNA, 25 bp, probe
ctttcctcctggcagaatgctagct

SEQ ID NO: 174851 - DNA, 25 bp, probe
ctattcgtcctaaaacactggagta

SEQ ID NO: 174852 - DNA, 25 bp, probe
ctatgtccccaaaaagccgtgagtc

SEQ ID NO: 174853 - DNA, 25 bp, probe
ctagtaaacacaagaggacaggtta

SEQ ID NO: 174854 - DNA, 25 bp, probe
ctatggcaatgatctcagggctcag

SEQ ID NO: 174855 - DNA, 25 bp, probe
ctatgacaaaacgccgctggagaag

SEQ ID NO: 174856 - DNA, 25 bp, probe
ctctcaggaaaacccattggcagat

SEQ ID NO: 174857 - DNA, 25 bp, probe
ctaagggaaaatgaagtcagcacac

SEQ ID NO: 174858 - DNA, 25 bp, probe
ctttcggaaataacacctcacagca

SEQ ID NO: 174859 - DNA, 25 bp, probe
ctttgggaaatcaccagcttggcag

SEQ ID NO: 174860 - DNA, 25 bp, probe
ctttgggactaagcgcagggagacg

SEQ ID NO: 174861 - DNA, 25 bp, probe
ctttggagactcggctgccagaggg

SEQ ID NO: 174862 - DNA, 25 bp, probe
ctctttgcaaaggacctcaggggac

SEQ ID NO: 174863 - DNA, 25 bp, probe
ctctttgcaaaggacctcaggggac

SEQ ID NO: 174864 - DNA, 25 bp, probe
ctttgagcctgaggcccttggtaac

SEQ ID NO: 174865 - DNA, 25 bp, probe
ctttgaccgactgctcttccaaagc

SEQ ID NO: 174866 - DNA, 25 bp, probe
ctattgaccactttctctttgaata

SEQ ID NO: 174867 - DNA, 25 bp, probe
ctttgcagtggcttaatgtttgaaa

SEQ ID NO: 174868 - DNA, 25 bp, probe
ctttccctcccattgtcattgaaaa

SEQ ID NO: 174869 - DNA, 25 bp, probe
ctttcctcttcctggatctgagaat

SEQ ID NO: 174870 - DNA, 25 bp, probe
ctttccccatcctgtgttgatgata

SEQ ID NO: 174871 - DNA, 25 bp, probe
ctttcccgatctgggctggagagct

SEQ ID NO: 174872 - DNA, 25 bp, probe
ctttgtctctagcctggagaagagc

SEQ ID NO: 174873 - DNA, 25 bp, probe
ctttgtctctagcctggagaagagc

SEQ ID NO: 174874 - DNA, 25 bp, probe
ctattggttcagcaagagaggcaga

SEQ ID NO: 174875 - DNA, 25 bp, probe
ctttggggctagacagactggcaga

SEQ ID NO: 174876 - DNA, 25 bp, probe
ctttgggcgccaagaagcatgggag

SEQ ID NO: 174877 - DNA, 25 bp, probe
ctttgtggagccggaactatatgag

SEQ ID NO: 174878 - DNA, 25 bp, probe
ctactgaggaggggaccttcgaggg

SEQ ID NO: 174879 - DNA, 25 bp, probe
ctatctggacagtgtgactatctta

SEQ ID NO: 174880 - DNA, 25 bp, probe
ctatcgagtctgaatctgcactact

SEQ ID NO: 174881 - DNA, 25 bp, probe
ctatgtactagtactgtgtactgta

SEQ ID NO: 174882 - DNA, 25 bp, probe
ctttgactggtgaatgcgtacatgt

SEQ ID NO: 174883 - DNA, 25 bp, probe
ctttgcactttggatgctgaaattt

SEQ ID NO: 174884 - DNA, 25 bp, probe
ctagtgatcttttgcatcatgagta

SEQ ID NO: 174885 - DNA, 25 bp, probe
ctagagtcagtcattatgaaatgta

SEQ ID NO: 174886 - DNA, 25 bp, probe
ctttgtattcttcatgaaatgtgtt

SEQ ID NO: 174887 - DNA, 25 bp, probe
ctctctttaggtctgaactggctga

SEQ ID NO: 174888 - DNA, 25 bp, probe
ctcttttgggatctaactgttgtta

SEQ ID NO: 174889 - DNA, 25 bp, probe
ctcttttgggatctaactgttgtta

SEQ ID NO: 174890 - DNA, 25 bp, probe
ctattttgaggatgttgagattatt

SEQ ID NO: 174891 - DNA, 25 bp, probe
ctatcttctaaacttggcagtttct

SEQ ID NO: 174892 - DNA, 25 bp, probe
ctacttgtgagttttgaaattgttc

SEQ ID NO: 174893 - DNA, 25 bp, probe
ctactgtgaaattttacaactgttc

SEQ ID NO: 174894 - DNA, 25 bp, probe
ctactgtgaaattttacaactgttc

SEQ ID NO: 174895 - DNA, 25 bp, probe
ctaatgtatttctcttacctgcttc

SEQ ID NO: 174896 - DNA, 25 bp, probe
ctaagtacttgcttctattccttcc

SEQ ID NO: 174897 - DNA, 25 bp, probe
ctatagcttctatttctgtttttgc

SEQ ID NO: 174898 - DNA, 25 bp, probe
ctatgatcgttatgctgctgtctgt

SEQ ID NO: 174899 - DNA, 25 bp, probe
ctatttgttattgctactatgtgaa

SEQ ID NO: 174900 - DNA, 25 bp, probe
ctatacttttaggtcccatgtcaac

SEQ ID NO: 174901 - DNA, 25 bp, probe
ctatttttgtagatctccatgcttt

SEQ ID NO: 174902 - DNA, 25 bp, probe
ctatatgtgggtagtattccagcat

SEQ ID NO: 174903 - DNA, 25 bp, probe
ctattctgatggagtactttgcaaa

SEQ ID NO: 174904 - DNA, 25 bp, probe
ctgatcctaacaggccacgttaaac

SEQ ID NO: 174905 - DNA, 25 bp, probe
ctaccttacagtgagggctatacat

SEQ ID NO: 174906 - DNA, 25 bp, probe
ctctcgactcaagaaggttaacatt

SEQ ID NO: 174907 - DNA, 25 bp, probe
ctatctaccaccaatacgtttaaat

SEQ ID NO: 174908 - DNA, 25 bp, probe
ctatctcacaccagaacagtttgat

SEQ ID NO: 174909 - DNA, 25 bp, probe
ctattaccctccaacagtcatatgg

SEQ ID NO: 174910 - DNA, 25 bp, probe
ctattaccctccaacagtcatatgg

SEQ ID NO: 174911 - DNA, 25 bp, probe
ctatctaccaattagcatcctcaat

SEQ ID NO: 174912 - DNA, 25 bp, probe
ctattatctacatgtacctgcaacc

SEQ ID NO: 174913 - DNA, 25 bp, probe
ctagtcctggaacaattgcacacca

SEQ ID NO: 174914 - DNA, 25 bp, probe
ctattactgggaccaggacccacca

SEQ ID NO: 174915 - DNA, 25 bp, probe
ctgtccaagggctcaagactttcta

SEQ ID NO: 174916 - DNA, 25 bp, probe
ctttgcaaaggctgccgagctttcg

SEQ ID NO: 174917 - DNA, 25 bp, probe
ctttgcaaaggacctcaggggacag

SEQ ID NO: 174918 - DNA, 25 bp, probe
ctttgcaaaggacctcaggggacag

SEQ ID NO: 174919 - DNA, 25 bp, probe
ctttgctctcagaaccttggggaag

SEQ ID NO: 174920 - DNA, 25 bp, probe
ctttgcctgtatatttgtggtgaca

SEQ ID NO: 174921 - DNA, 25 bp, probe
ctatttcttcctacctgctaggaca

SEQ ID NO: 174922 - DNA, 25 bp, probe
ctttgttccttttgctctgatagac

SEQ ID NO: 174923 - DNA, 25 bp, probe
ctttgtatctctaagttacatgacc

SEQ ID NO: 174924 - DNA, 25 bp, probe
ctttgttcttattggatactcctct

SEQ ID NO: 174925 - DNA, 25 bp, probe
ctatagtgaccttagtgatccctcc

SEQ ID NO: 174926 - DNA, 25 bp, probe
ctacctacctggttgatcctgccag

SEQ ID NO: 174927 - DNA, 25 bp, probe
ctaccagtccggatatcactccgat

SEQ ID NO: 174928 - DNA, 25 bp, probe
ctaccgtccttgtcataactttgtg

SEQ ID NO: 174929 - DNA, 25 bp, probe
ctacctgcaggtgacggacttcggt

SEQ ID NO: 174930 - DNA, 25 bp, probe
ctagggctggactcaggagctgggg

SEQ ID NO: 174931 - DNA, 25 bp, probe
ctagggctgcgaatctagaggaggg

SEQ ID NO: 174932 - DNA, 25 bp, probe
ctatgtgcccgaacacgagcgatgc

SEQ ID NO: 174933 - DNA, 25 bp, probe
ctatttcctggagtcatgtgagatt

SEQ ID NO: 174934 - DNA, 25 bp, probe
ctatttcagtctatcatggagcaca

SEQ ID NO: 174935 - DNA, 25 bp, probe
ctttgtggcttcctgatggcagaaa

SEQ ID NO: 174936 - DNA, 25 bp, probe
ctatgcagggctacgattggctgaa

SEQ ID NO: 174937 - DNA, 25 bp, probe
ctacagaggccacacatggtccaga

SEQ ID NO: 174938 - DNA, 25 bp, probe
ctacgagatggacctcaatgccggg

SEQ ID NO: 174939 - DNA, 25 bp, probe
ctatcgcatgtgccttcatcatcag

SEQ ID NO: 174940 - DNA, 25 bp, probe
ctatcgcatgtgccttcatcatcag

SEQ ID NO: 174941 - DNA, 25 bp, probe
ctatcctgatcgcatcacactgatc

SEQ ID NO: 174942 - DNA, 25 bp, probe
ctatccgatgcaccaaactaataaa

SEQ ID NO: 174943 - DNA, 25 bp, probe
ctatgtctacacaaaactacagaac

SEQ ID NO: 174944 - DNA, 25 bp, probe
ctatgtctacacaaaactacagaac

SEQ ID NO: 174945 - DNA, 25 bp, probe
ctatgttcatatatttgtattgaac

SEQ ID NO: 174946 - DNA, 25 bp, probe
ctatgttcatatactgtttaccttt

SEQ ID NO: 174947 - DNA, 25 bp, probe
ctatgtggctatatgtcaccctctt

SEQ ID NO: 174948 - DNA, 25 bp, probe
ctatgcttgcatagttgccaccatt

SEQ ID NO: 174949 - DNA, 25 bp, probe
ctagcttccatgtgaaactttgtga

SEQ ID NO: 174950 - DNA, 25 bp, probe
ctaaatccgcagcaaactgccgtgc

SEQ ID NO: 174951 - DNA, 25 bp, probe
ctataatccctgcgctttggcagtc

SEQ ID NO: 174952 - DNA, 25 bp, probe
ctatttcccttgctagtgtgcagat

SEQ ID NO: 174953 - DNA, 25 bp, probe
ctatttccgtggctatggcttgggc

SEQ ID NO: 174954 - DNA, 25 bp, probe
ctatttccgtggctatggcttgggc

SEQ ID NO: 174955 - DNA, 25 bp, probe
ctttgagcccattcttctgggtgtg

SEQ ID NO: 174956 - DNA, 25 bp, probe
ctttgtgcccattgtagctgaggag

SEQ ID NO: 174957 - DNA, 25 bp, probe
ctttgcctgccaggtggctgagggc

SEQ ID NO: 174958 - DNA, 25 bp, probe
ctttgcctgccaggtggctgagggc

SEQ ID NO: 174959 - DNA, 25 bp, probe
ctttgccatgtctggggaggctctt

SEQ ID NO: 174960 - DNA, 25 bp, probe
ctatcaactgtcatcggcaggtcct

SEQ ID NO: 174961 - DNA, 25 bp, probe
cgactactttggcaacgtcctacaa

SEQ ID NO: 174962 - DNA, 25 bp, probe
cccaacaatgtgaggggtcctagca

SEQ ID NO: 174963 - DNA, 25 bp, probe
cccaatccattggaagtcccctgaa

SEQ ID NO: 174964 - DNA, 25 bp, probe
ctcagaacaattgaactcccctaaa

SEQ ID NO: 174965 - DNA, 25 bp, probe
ctatgcaacgtagaaacccctgacc

SEQ ID NO: 174966 - DNA, 25 bp, probe
ctataactcatacaaatctcccttc

SEQ ID NO: 174967 - DNA, 25 bp, probe
ctagatagtgtgagaggttcctttc

SEQ ID NO: 174968 - DNA, 25 bp, probe
ctagggatggacttggttcctcttg

SEQ ID NO: 174969 - DNA, 25 bp, probe
ctagttgtggacttttccccattga

SEQ ID NO: 174970 - DNA, 25 bp, probe
ctatgttagggcctttgcccaggga

SEQ ID NO: 174971 - DNA, 25 bp, probe
ctatgttatgccggtggttaatgtg

SEQ ID NO: 174972 - DNA, 25 bp, probe
ctatctacaaccccgttatctatgt

SEQ ID NO: 174973 - DNA, 25 bp, probe
ctatctacaaccccgttatctatgt

SEQ ID NO: 174974 - DNA, 25 bp, probe
ctattaaacctcctctgctatgttc

SEQ ID NO: 174975 - DNA, 25 bp, probe
ctatatgtaagcccttgcattattt

SEQ ID NO: 174976 - DNA, 25 bp, probe
ctatcagagcaaggcgctatggtca

SEQ ID NO: 174977 - DNA, 25 bp, probe
ctattgagcaaccagctctgggctc

SEQ ID NO: 174978 - DNA, 25 bp, probe
ctcttggcaatcagaaggctgccgc

SEQ ID NO: 174979 - DNA, 25 bp, probe
ctatctggaatgactagagggagcc

SEQ ID NO: 174980 - DNA, 25 bp, probe
ctagcatgatttagcgaggtggcct

SEQ ID NO: 174981 - DNA, 25 bp, probe
ctagaatcttacagtgctacactgg

SEQ ID NO: 174982 - DNA, 25 bp, probe
ctagaatcttacagtgctacactgg

SEQ ID NO: 174983 - DNA, 25 bp, probe
ctatacagactacgtggctaccagg

SEQ ID NO: 174984 - DNA, 25 bp, probe
ctatcagaaccacaggatcacccag

SEQ ID NO: 174985 - DNA, 25 bp, probe
ctgaacaagaactcgaacccggacg

SEQ ID NO: 174986 - DNA, 25 bp, probe
ctagacaagaacatacataccccgg

SEQ ID NO: 174987 - DNA, 25 bp, probe
ctagacaagaacatacataccccgg

SEQ ID NO: 174988 - DNA, 25 bp, probe
ctaccaacaagaagactaccacacc

SEQ ID NO: 174989 - DNA, 25 bp, probe
ctaccgccgtgaagacttcatccgg

SEQ ID NO: 174990 - DNA, 25 bp, probe
ctaccccaggattctcattctttgg

SEQ ID NO: 174991 - DNA, 25 bp, probe
ctactaactagcttcttatcttgtt

SEQ ID NO: 174992 - DNA, 25 bp, probe
ctaccagaccacagttgctgttgtg

SEQ ID NO: 174993 - DNA, 25 bp, probe
ctaccagaccacagttgctgttgtg

SEQ ID NO: 174994 - DNA, 25 bp, probe
ctacccagctgatgggggttggggt

SEQ ID NO: 174995 - DNA, 25 bp, probe
ctacctaccaaaagggattgaggat

SEQ ID NO: 174996 - DNA, 25 bp, probe
ctagctctacctctggtggctatgg

SEQ ID NO: 174997 - DNA, 25 bp, probe
ctagctctacctctggtggctatgg

SEQ ID NO: 174998 - DNA, 25 bp, probe
ctaggcttccagtctgtgtttggtt

SEQ ID NO: 174999 - DNA, 25 bp, probe
ctaacttcactgtattctttacttt

SEQ ID NO: 175000 - DNA, 25 bp, probe
ctatatttcgtgtcatcttttttat

SEQ ID NO: 175001 - DNA, 25 bp, probe
ctataatattgttcccatatattta

SEQ ID NO: 175002 - DNA, 25 bp, probe
ctaaagggaactgtgacatttcaag

SEQ ID NO: 175003 - DNA, 25 bp, probe
ctaacaggaattccccctttcaatg

SEQ ID NO: 175004 - DNA, 25 bp, probe
ctacaagaacattctcccctttgac

SEQ ID NO: 175005 - DNA, 25 bp, probe
ctcaaatttatgatgcccagttgga

SEQ ID NO: 175006 - DNA, 25 bp, probe
ctagcaatttatgcttcttgggagg

SEQ ID NO: 175007 - DNA, 25 bp, probe
ctatttttacctactgtgtcttgga

SEQ ID NO: 175008 - DNA, 25 bp, probe
ctatccctgtacgcctctggccgta

SEQ ID NO: 175009 - DNA, 25 bp, probe
ctactccagtagggtcagttcacgt

SEQ ID NO: 175010 - DNA, 25 bp, probe
ctaccttttgggatgattgctcgat

SEQ ID NO: 175011 - DNA, 25 bp, probe
ctaccttttgggatgattgctcgat

SEQ ID NO: 175012 - DNA, 25 bp, probe
ctcactttttaaattttgttgcctg

SEQ ID NO: 175013 - DNA, 25 bp, probe
ctcacttttgttttctgtttattgc

SEQ ID NO: 175014 - DNA, 25 bp, probe
ctatttcattgtaaactttctcagg

SEQ ID NO: 175015 - DNA, 25 bp, probe
ctttggcatttgtcaactgctttac

SEQ ID NO: 175016 - DNA, 25 bp, probe
ctttgtcatttgcaaccagtttcag

SEQ ID NO: 175017 - DNA, 25 bp, probe
ctttgactgtgtctacacggttcag

SEQ ID NO: 175018 - DNA, 25 bp, probe
ctattgacagggatcacactggggc

SEQ ID NO: 175019 - DNA, 25 bp, probe
ctaataagaggatcagccgggtgca

SEQ ID NO: 175020 - DNA, 25 bp, probe
gaagaaagccgtgactaaggcgcag

SEQ ID NO: 175021 - DNA, 25 bp, probe
gggaaacggatcacgaggagccggc

SEQ ID NO: 175022 - DNA, 25 bp, probe
cgaaaatggcgaagccggtgcccga

SEQ ID NO: 175023 - DNA, 25 bp, probe
ctatgagataggcggcctcgttccc

SEQ ID NO: 175024 - DNA, 25 bp, probe
ctatgacatccgggccgacgtatgg

SEQ ID NO: 175025 - DNA, 25 bp, probe
ctatgaccccttgctgaactggagg

SEQ ID NO: 175026 - DNA, 25 bp, probe
ctatcgggcttaccagaactgggtg

SEQ ID NO: 175027 - DNA, 25 bp, probe
ctacaaggtggagacgattggggat

SEQ ID NO: 175028 - DNA, 25 bp, probe
ctagaagggctagaacctggagggc

SEQ ID NO: 175029 - DNA, 25 bp, probe
ctagggtggtcccaaccatgtgatg

SEQ ID NO: 175030 - DNA, 25 bp, probe
ctatggagtggtgtcacccatgttg

SEQ ID NO: 175031 - DNA, 25 bp, probe
ctagaggaggtgctctctactgagg

SEQ ID NO: 175032 - DNA, 25 bp, probe
ctagaggcttggcacctaataccag

SEQ ID NO: 175033 - DNA, 25 bp, probe
ctaggtgcttggtggtcagagacgg

SEQ ID NO: 175034 - DNA, 25 bp, probe
ctaggtgcttggtggtcagagacgg

SEQ ID NO: 175035 - DNA, 25 bp, probe
ctcaggtttcagagcccaagtcagg

SEQ ID NO: 175036 - DNA, 25 bp, probe
ctaggtattgcatattccatttacg

SEQ ID NO: 175037 - DNA, 25 bp, probe
ctagctttagattacccctatacac

SEQ ID NO: 175038 - DNA, 25 bp, probe
ctagtttacttatgcatctctttgc

SEQ ID NO: 175039 - DNA, 25 bp, probe
ctagtttacttatgcatctctttgc

SEQ ID NO: 175040 - DNA, 25 bp, probe
ctagatctcatacaaggcttattct

SEQ ID NO: 175041 - DNA, 25 bp, probe
ctagcaatcaagccacaggccttat

SEQ ID NO: 175042 - DNA, 25 bp, probe
ctatgcatgtagaagaataccttac

SEQ ID NO: 175043 - DNA, 25 bp, probe
ctatgcgtcagatgtctggtccttc

SEQ ID NO: 175044 - DNA, 25 bp, probe
ctaggtgcacagccttgattcttcc

SEQ ID NO: 175045 - DNA, 25 bp, probe
ctcaatggctacgtgtgactagtgc

SEQ ID NO: 175046 - DNA, 25 bp, probe
ctagatgagctaggatgcttccagc

SEQ ID NO: 175047 - DNA, 25 bp, probe
ctagatgacaatatgcagatccgac

SEQ ID NO: 175048 - DNA, 25 bp, probe
ctagtggattttctcaagacccctt

SEQ ID NO: 175049 - DNA, 25 bp, probe
ctagtggattttctcaagacccctt

SEQ ID NO: 175050 - DNA, 25 bp, probe
ctagtggattttctcaagacccctt

SEQ ID NO: 175051 - DNA, 25 bp, probe
ctagtagtctttgtcacaactactc

SEQ ID NO: 175052 - DNA, 25 bp, probe
ctacttttatgtgtctcagaatatt

SEQ ID NO: 175053 - DNA, 25 bp, probe
ctacattcttgcttcccttaaatta

SEQ ID NO: 175054 - DNA, 25 bp, probe
ctatattcttgactgcatccgctaa

SEQ ID NO: 175055 - DNA, 25 bp, probe
ctttgatcgatgctgctccagtaac

SEQ ID NO: 175056 - DNA, 25 bp, probe
ctttgagctgctgactgccaataac

SEQ ID NO: 175057 - DNA, 25 bp, probe
ctttgtgtgctgaatccttgaatac

SEQ ID NO: 175058 - DNA, 25 bp, probe
ctttgagttgcttcctcttgacagc

SEQ ID NO: 175059 - DNA, 25 bp, probe
ctttggcagtgccacctttgaccat

SEQ ID NO: 175060 - DNA, 25 bp, probe
ctttggagtggttctgtatgaactt

SEQ ID NO: 175061 - DNA, 25 bp, probe
ctttggcgtggtactctgggagatt

SEQ ID NO: 175062 - DNA, 25 bp, probe
ctattattctggatcctcgtggatt

SEQ ID NO: 175063 - DNA, 25 bp, probe
ctattctctttgaacctttggaggc

SEQ ID NO: 175064 - DNA, 25 bp, probe
ctatcttcattttagacttttggtc

SEQ ID NO: 175065 - DNA, 25 bp, probe
ctatttgcctggtgactttgtctgc

SEQ ID NO: 175066 - DNA, 25 bp, probe
ctatgcgtttggttgaccttctctt

SEQ ID NO: 175067 - DNA, 25 bp, probe
ctagactaatagctgatgactttcc

SEQ ID NO: 175068 - DNA, 25 bp, probe
ctatatccagtaagtagaattatct

SEQ ID NO: 175069 - DNA, 25 bp, probe
ctatgatccagccaaacgaatttct

SEQ ID NO: 175070 - DNA, 25 bp, probe
ctatgatccagccaaacgaatttct

SEQ ID NO: 175071 - DNA, 25 bp, probe
ctatatccgtaacctggatagtgaa

SEQ ID NO: 175072 - DNA, 25 bp, probe
ctagctctttaactgtaggaagaat

SEQ ID NO: 175073 - DNA, 25 bp, probe
ctatgcctttgtaggggtcaagttc

SEQ ID NO: 175074 - DNA, 25 bp, probe
ctatgtcttcgtgggggtcaagttc

SEQ ID NO: 175075 - DNA, 25 bp, probe
ctatatcttcaggcgcgcggtctgg

SEQ ID NO: 175076 - DNA, 25 bp, probe
ctattcttcagcttggtatggaggt

SEQ ID NO: 175077 - DNA, 25 bp, probe
ctatgctttctctcctaggagctgt

SEQ ID NO: 175078 - DNA, 25 bp, probe
ctatctaacatctggctgttgagtg

SEQ ID NO: 175079 - DNA, 25 bp, probe
ctatgcttcaaacgcggtgtcagag

SEQ ID NO: 175080 - DNA, 25 bp, probe
ctatgcttcaaacgcggtgtcagag

SEQ ID NO: 175081 - DNA, 25 bp, probe
ctaccccataggagttagaagttag

SEQ ID NO: 175082 - DNA, 25 bp, probe
ctgaccctaaaaagaaagccacatt

SEQ ID NO: 175083 - DNA, 25 bp, probe
ctgacctgccgtctagaaaaacctg

SEQ ID NO: 175084 - DNA, 25 bp, probe
ctgtccgacaggttaaagaaattat

SEQ ID NO: 175085 - DNA, 25 bp, probe
ctacctcaaggtaacaagagtatgt

SEQ ID NO: 175086 - DNA, 25 bp, probe
ctaccaaattgatatcagaggtcag

SEQ ID NO: 175087 - DNA, 25 bp, probe
ctaccaagtctgatgtctgggcctt

SEQ ID NO: 175088 - DNA, 25 bp, probe
ctaccaacgccaggacgtggcgcga

SEQ ID NO: 175089 - DNA, 25 bp, probe
ctaccatacccattgactaactatg

SEQ ID NO: 175090 - DNA, 25 bp, probe
ctatcctacacgactaggaacttgc

SEQ ID NO: 175091 - DNA, 25 bp, probe
ctatctccacatctctgaagaagtt

SEQ ID NO: 175092 - DNA, 25 bp, probe
ctatctggcacatatgcgctcaata

SEQ ID NO: 175093 - DNA, 25 bp, probe
ctatctcgaagaagcctacatccca

SEQ ID NO: 175094 - DNA, 25 bp, probe
ctcactaaggggccgaccccatgga

SEQ ID NO: 175095 - DNA, 25 bp, probe
ctcactaaggggccgaccccatgga

SEQ ID NO: 175096 - DNA, 25 bp, probe
ctaggtggcagaggccaacccaaag

SEQ ID NO: 175097 - DNA, 25 bp, probe
ctagagtggaacccagggcccaacg

SEQ ID NO: 175098 - DNA, 25 bp, probe
ctagagggaactcagactcctttcc

SEQ ID NO: 175099 - DNA, 25 bp, probe
ctcagggggcctcagacaagtcccc

SEQ ID NO: 175100 - DNA, 25 bp, probe
ctaaggggagctccctgcaagtcac

SEQ ID NO: 175101 - DNA, 25 bp, probe
ctatgagatggccacaggccgtccc

SEQ ID NO: 175102 - DNA, 25 bp, probe
ctacggggcgcagccagtgcgccct

SEQ ID NO: 175103 - DNA, 25 bp, probe
ctaccagagggaacacggcctactg

SEQ ID NO: 175104 - DNA, 25 bp, probe
ctattcaccggatccttgacaactt

SEQ ID NO: 175105 - DNA, 25 bp, probe
ctattcaccggatccttgacaactt

SEQ ID NO: 175106 - DNA, 25 bp, probe
ctatgctcctgggatacgctatgaa

SEQ ID NO: 175107 - DNA, 25 bp, probe
ctatgcctcagtggcaacctcatga

SEQ ID NO: 175108 - DNA, 25 bp, probe
ctatgcactttcctgacacgcaaag

SEQ ID NO: 175109 - DNA, 25 bp, probe
ctattgctattcttcaactccaaga

SEQ ID NO: 175110 - DNA, 25 bp, probe
ctatcgtaaattcacatcagcaagt

SEQ ID NO: 175111 - DNA, 25 bp, probe
ctatcatgtacagtttccagaattg

SEQ ID NO: 175112 - DNA, 25 bp, probe
ctatcatgtacagtttccagaattg

SEQ ID NO: 175113 - DNA, 25 bp, probe
ctatcatctggagccctagtatcta

SEQ ID NO: 175114 - DNA, 25 bp, probe
ctcatctagtgagaccaacttacta

SEQ ID NO: 175115 - DNA, 25 bp, probe
ctatgtcaggattaccagattacat

SEQ ID NO: 175116 - DNA, 25 bp, probe
ctagtcaggcctacattgatctacc

SEQ ID NO: 175117 - DNA, 25 bp, probe
ctattcaaggcattgagaatgtacc

SEQ ID NO: 175118 - DNA, 25 bp, probe
ctatatcaggacagcaactgggcca

SEQ ID NO: 175119 - DNA, 25 bp, probe
ctttgggagtagcactgagacatca

SEQ ID NO: 175120 - DNA, 25 bp, probe
ctttgtggagattcacactatgcac

SEQ ID NO: 175121 - DNA, 25 bp, probe
ctttgtggagcagtgccttcagcgc

SEQ ID NO: 175122 - DNA, 25 bp, probe
ctttggggagaccatgtgcaccctc

SEQ ID NO: 175123 - DNA, 25 bp, probe
ctatttgggacagcattcctctctc

SEQ ID NO: 175124 - DNA, 25 bp, probe
ctatggtgggaagtactcagtcaag

SEQ ID NO: 175125 - DNA, 25 bp, probe
ctatggatcaacactggtcaggagg

SEQ ID NO: 175126 - DNA, 25 bp, probe
ctaggcatcaccacggtgctgacga

SEQ ID NO: 175127 - DNA, 25 bp, probe
ctagagccagcctcagttgatgcct

SEQ ID NO: 175128 - DNA, 25 bp, probe
ctagagactgacccagcttttgctc

SEQ ID NO: 175129 - DNA, 25 bp, probe
ctaggagctactgggcaggttcccg

SEQ ID NO: 175130 - DNA, 25 bp, probe
ctcatgggataaaggggactccctt

SEQ ID NO: 175131 - DNA, 25 bp, probe
ctaaggctaaagaggagcagtccta

SEQ ID NO: 175132 - DNA, 25 bp, probe
ccaagttgaaacaggggcccatcat

SEQ ID NO: 175133 - DNA, 25 bp, probe
ctcaagggtaatccaggggaccaca

SEQ ID NO: 175134 - DNA, 25 bp, probe
ctagatcggtatcccgggcgacaga

SEQ ID NO: 175135 - DNA, 25 bp, probe
ctcaacgagttcccagaggaactta

SEQ ID NO: 175136 - DNA, 25 bp, probe
ctaccaactaccatgaggctaaaag

SEQ ID NO: 175137 - DNA, 25 bp, probe
ctagtgacctacctgggggcaaaga

SEQ ID NO: 175138 - DNA, 25 bp, probe
ctagtgacctacctgggggcaaaga

SEQ ID NO: 175139 - DNA, 25 bp, probe
ctcatttcttacagacggggaaact

SEQ ID NO: 175140 - DNA, 25 bp, probe
ctattttccagcaagaggctcccga

SEQ ID NO: 175141 - DNA, 25 bp, probe
ctatatcttcgacagctacatccgc

SEQ ID NO: 175142 - DNA, 25 bp, probe
ctatattgtgaacgagccacctcct

SEQ ID NO: 175143 - DNA, 25 bp, probe
ctatttgaatatcagccagctactt

SEQ ID NO: 175144 - DNA, 25 bp, probe
ctatttaatacatgaacagcctttg

SEQ ID NO: 175145 - DNA, 25 bp, probe
ctattttaatattatacacctctga

SEQ ID NO: 175146 - DNA, 25 bp, probe
ctattttaatattatacacctctga

SEQ ID NO: 175147 - DNA, 25 bp, probe
ctatttaaactccctcatcaatcca

SEQ ID NO: 175148 - DNA, 25 bp, probe
ctattttacgcgtcgcccaatgaca

SEQ ID NO: 175149 - DNA, 25 bp, probe
ctattttacgcgtcgcccaatgaca

SEQ ID NO: 175150 - DNA, 25 bp, probe
ctatgtttacaggatcctccgtggc

SEQ ID NO: 175151 - DNA, 25 bp, probe
ctattcttacttactctacagtgtc

SEQ ID NO: 175152 - DNA, 25 bp, probe
ctattcttacttactctacagtgtc

SEQ ID NO: 175153 - DNA, 25 bp, probe
ctattcttaaagctgctgaagtgca

SEQ ID NO: 175154 - DNA, 25 bp, probe
ctattttcatcgtgggaatggtggg

SEQ ID NO: 175155 - DNA, 25 bp, probe
ctattcctttgctgttgactggtgg

SEQ ID NO: 175156 - DNA, 25 bp, probe
ctatcttgtctcgggcttactgaag

SEQ ID NO: 175157 - DNA, 25 bp, probe
ctattactcatgggtgtatacgaga

SEQ ID NO: 175158 - DNA, 25 bp, probe
ctagtactgtgtactgtatagacag

SEQ ID NO: 175159 - DNA, 25 bp, probe
ctttggctgatgttcttagccctgc

SEQ ID NO: 175160 - DNA, 25 bp, probe
ctttggccaagtagtggcagccatc

SEQ ID NO: 175161 - DNA, 25 bp, probe
ctataccaaagtctgccactacttg

SEQ ID NO: 175162 - DNA, 25 bp, probe
ctaccctgaaatctcttctcagctt

SEQ ID NO: 175163 - DNA, 25 bp, probe
ctaccagtattatggcttctcgcat

SEQ ID NO: 175164 - DNA, 25 bp, probe
ctagccagttactggtcatgcctgc

SEQ ID NO: 175165 - DNA, 25 bp, probe
ctatcaccttactagtttgcagtgc

SEQ ID NO: 175166 - DNA, 25 bp, probe
ctattctcaatacatctgttgcccc

SEQ ID NO: 175167 - DNA, 25 bp, probe
ctactatacagactacgtggctacc

SEQ ID NO: 175168 - DNA, 25 bp, probe
ctactgggggctacagtgactgtcc

SEQ ID NO: 175169 - DNA, 25 bp, probe
ctacgggtggtgccagtttagagct

SEQ ID NO: 175170 - DNA, 25 bp, probe
ctatcctggggtccagaaccatgag

SEQ ID NO: 175171 - DNA, 25 bp, probe
ctcacctggttggtccaaactgaat

SEQ ID NO: 175172 - DNA, 25 bp, probe
ctaactgagctccttcacttaaaaa

SEQ ID NO: 175173 - DNA, 25 bp, probe
ctaactgagctccttcacttaaaaa

SEQ ID NO: 175174 - DNA, 25 bp, probe
ctataaggccaactgcacaaaacca

SEQ ID NO: 175175 - DNA, 25 bp, probe
ctacaacaccaacatcgacaaccgg

SEQ ID NO: 175176 - DNA, 25 bp, probe
ctacaacaccaacatcgacaaccgg

SEQ ID NO: 175177 - DNA, 25 bp, probe
ctatacccacaacactgtccgaggg

SEQ ID NO: 175178 - DNA, 25 bp, probe
ctatacccacaacactgtccgaggg

SEQ ID NO: 175179 - DNA, 25 bp, probe
ctataccaccaagagtgatgtctgg

SEQ ID NO: 175180 - DNA, 25 bp, probe
ctaagccctacataggattctcagt

SEQ ID NO: 175181 - DNA, 25 bp, probe
ctttggttactttgctgttcacttt

SEQ ID NO: 175182 - DNA, 25 bp, probe
ctatgggtttgctttggtgttgttt

SEQ ID NO: 175183 - DNA, 25 bp, probe
ctatctgtgttttgaatggtgttgt

SEQ ID NO: 175184 - DNA, 25 bp, probe
ctattctcactaagatggggtttat

SEQ ID NO: 175185 - DNA, 25 bp, probe
ctattgtcgtgcatgtgggatgtat

SEQ ID NO: 175186 - DNA, 25 bp, probe
ctattccttccaatgagagattata

SEQ ID NO: 175187 - DNA, 25 bp, probe
ctttggtttcataagagcctgagag

SEQ ID NO: 175188 - DNA, 25 bp, probe
ctttggatcactgggggcactgaga

SEQ ID NO: 175189 - DNA, 25 bp, probe
ctttggatccatttgtcaactggaa

SEQ ID NO: 175190 - DNA, 25 bp, probe
ctcctggtccactgaacctggaaac

SEQ ID NO: 175191 - DNA, 25 bp, probe
ctcccaatcccagaactcaggactg

SEQ ID NO: 175192 - DNA, 25 bp, probe
ctaccgaaccgcaaattcagaacat

SEQ ID NO: 175193 - DNA, 25 bp, probe
ctagggaatccacacttaatataat

SEQ ID NO: 175194 - DNA, 25 bp, probe
ctaggtggacctcacttgtttttag

SEQ ID NO: 175195 - DNA, 25 bp, probe
ctacgggaccttattcttcatgtat

SEQ ID NO: 175196 - DNA, 25 bp, probe
ctacgggaccttattcttcatgtat

SEQ ID NO: 175197 - DNA, 25 bp, probe
ctactttgaaattccttgatttgta

SEQ ID NO: 175198 - DNA, 25 bp, probe
ctatcagtatactagcaccttgatt

SEQ ID NO: 175199 - DNA, 25 bp, probe
ctattgacatcagcatcacctagaa

SEQ ID NO: 175200 - DNA, 25 bp, probe
ctattcacatcattgcacacctgtt

SEQ ID NO: 175201 - DNA, 25 bp, probe
ctatgtcacagctaaggagcatgcc

SEQ ID NO: 175202 - DNA, 25 bp, probe
ctatgtcacatgcacatgggtcctt

SEQ ID NO: 175203 - DNA, 25 bp, probe
ctatgtcatattttgccactgcctt

SEQ ID NO: 175204 - DNA, 25 bp, probe
ctatgagatgctcttcaactccttc

SEQ ID NO: 175205 - DNA, 25 bp, probe
ctaggtgtgcacctaggcctcattc

SEQ ID NO: 175206 - DNA, 25 bp, probe
ctagtgggcacgagtggctcggctg

SEQ ID NO: 175207 - DNA, 25 bp, probe
ctactggccacgagtttgcggtgaa

SEQ ID NO: 175208 - DNA, 25 bp, probe
ctctcgccgagtttgttagccgaaa

SEQ ID NO: 175209 - DNA, 25 bp, probe
ctctcgccgagtttgttagccgaaa

SEQ ID NO: 175210 - DNA, 25 bp, probe
ctccaactcggaagtaagcccaaga

SEQ ID NO: 175211 - DNA, 25 bp, probe
cccaacctggtaattatcctcaagt

SEQ ID NO: 175212 - DNA, 25 bp, probe
tccccagttggtgtttccaacaaag

SEQ ID NO: 175213 - DNA, 25 bp, probe
ctcctcagttttctctttaaaactg

SEQ ID NO: 175214 - DNA, 25 bp, probe
ctatccatttttctgctcttagaaa

SEQ ID NO: 175215 - DNA, 25 bp, probe
ctatccttgctaagttttcatagaa

SEQ ID NO: 175216 - DNA, 25 bp, probe
ctatcctgtcccttgtttataacat

SEQ ID NO: 175217 - DNA, 25 bp, probe
ctattgtctccttggttatattttt

SEQ ID NO: 175218 - DNA, 25 bp, probe
ctacttccctgagttttgcttattc

SEQ ID NO: 175219 - DNA, 25 bp, probe
ctacttccgccagatgtgctgcaaa

SEQ ID NO: 175220 - DNA, 25 bp, probe
ctatgtgtctccagaattgcaacca

SEQ ID NO: 175221 - DNA, 25 bp, probe
ctatgtggccacagaactcttcctg

SEQ ID NO: 175222 - DNA, 25 bp, probe
ctatgtggctccagaagtgctgctg

SEQ ID NO: 175223 - DNA, 25 bp, probe
ctatatgcctccagaagtgttggac

SEQ ID NO: 175224 - DNA, 25 bp, probe
ctatacatccacagggttttgacac

SEQ ID NO: 175225 - DNA, 25 bp, probe
ctacgctctgccaggaattctttca

SEQ ID NO: 175226 - DNA, 25 bp, probe
ctaccttgacttgaaatgctctttt

SEQ ID NO: 175227 - DNA, 25 bp, probe
ctactcctttcataaatgccaatct

SEQ ID NO: 175228 - DNA, 25 bp, probe
ctaccccattcacagacatcaagtc

SEQ ID NO: 175229 - DNA, 25 bp, probe
ctacccgcgacctggtcaagatcgg

SEQ ID NO: 175230 - DNA, 25 bp, probe
ctatccctgcaacaaagcccgaaag

SEQ ID NO: 175231 - DNA, 25 bp, probe
ctacctcatgaagtaccacgccatg

SEQ ID NO: 175232 - DNA, 25 bp, probe
ctatcccttttgtgcatgcaccatt

SEQ ID NO: 175233 - DNA, 25 bp, probe
ctaatctctgtttaggtgcctctac

SEQ ID NO: 175234 - DNA, 25 bp, probe
ctaatctctgtttaggtgcctctac

SEQ ID NO: 175235 - DNA, 25 bp, probe
ctacgctctgatgaagatctcctgc

SEQ ID NO: 175236 - DNA, 25 bp, probe
ctacgctctgatgaagatctcctgc

SEQ ID NO: 175237 - DNA, 25 bp, probe
ctaggtagatgcactgctcacctgc

SEQ ID NO: 175238 - DNA, 25 bp, probe
ctaggctcagagatgtgcacccatg

SEQ ID NO: 175239 - DNA, 25 bp, probe
ctatggcacatcaagttaccctgca

SEQ ID NO: 175240 - DNA, 25 bp, probe
ctatggcacatcaagttaccctgca

SEQ ID NO: 175241 - DNA, 25 bp, probe
ctaggcttgcaagtctaccggcaaa

SEQ ID NO: 175242 - DNA, 25 bp, probe
ctatggctcgaggtctacggagaaa

SEQ ID NO: 175243 - DNA, 25 bp, probe
ctaggcactgagattaccatgaaga

SEQ ID NO: 175244 - DNA, 25 bp, probe
ctaggagttgctttactctgtcagg

SEQ ID NO: 175245 - DNA, 25 bp, probe
ctagggttgctggagcctgagtcag

SEQ ID NO: 175246 - DNA, 25 bp, probe
ctaggccttcaggactctagaatgt

SEQ ID NO: 175247 - DNA, 25 bp, probe
ctagcctcgtcccaagctaaatgta

SEQ ID NO: 175248 - DNA, 25 bp, probe
ctatgccctgcagagcaataacact

SEQ ID NO: 175249 - DNA, 25 bp, probe
ctatgacactcatcaggtaaactga

SEQ ID NO: 175250 - DNA, 25 bp, probe
ctatgagcaacatgcagatctacag

SEQ ID NO: 175251 - DNA, 25 bp, probe
ctatcagctacatcgctcgacagct

SEQ ID NO: 175252 - DNA, 25 bp, probe
ctatgcactacattctgctagctcc

SEQ ID NO: 175253 - DNA, 25 bp, probe
ctagcagtgacatctcattgtcccc

SEQ ID NO: 175254 - DNA, 25 bp, probe
ctatggtcacagacttctggcctag

SEQ ID NO: 175255 - DNA, 25 bp, probe
ctatggatgcaggccattcgtcctt

SEQ ID NO: 175256 - DNA, 25 bp, probe
ctataatgagccgttaagtcttttc

SEQ ID NO: 175257 - DNA, 25 bp, probe
ctcaaaggccctagaacttgcctac

SEQ ID NO: 175258 - DNA, 25 bp, probe
ctcaaagatcatggtagtacttact

SEQ ID NO: 175259 - DNA, 25 bp, probe
ctatataattccggtcagtgctgac

SEQ ID NO: 175260 - DNA, 25 bp, probe
ctataaattgcgctctcagctgtgg

SEQ ID NO: 175261 - DNA, 25 bp, probe
ctatcaccatacttttccatgtgaa

SEQ ID NO: 175262 - DNA, 25 bp, probe
ctatcctaaatgttcccttgaagta

SEQ ID NO: 175263 - DNA, 25 bp, probe
ctatggtagaatttcccatgcattt

SEQ ID NO: 175264 - DNA, 25 bp, probe
ctagtgggtatctcttagacttagg

SEQ ID NO: 175265 - DNA, 25 bp, probe
ctgaagggttctccttcgatctctt

SEQ ID NO: 175266 - DNA, 25 bp, probe
ctaagaacttctccaacgacatcat

SEQ ID NO: 175267 - DNA, 25 bp, probe
ctagaacgctacacaagaaatattt

SEQ ID NO: 175268 - DNA, 25 bp, probe
ctagaacgctacacaagaaatattt

SEQ ID NO: 175269 - DNA, 25 bp, probe
ctcatacaagtaaacacagaaagtc

SEQ ID NO: 175270 - DNA, 25 bp, probe
ctaagactttaactcagagcaaggc

SEQ ID NO: 175271 - DNA, 25 bp, probe
ctataagcgctggaagtcagagggg

SEQ ID NO: 175272 - DNA, 25 bp, probe
ctatcacaggctcagggcaaagaag

SEQ ID NO: 175273 - DNA, 25 bp, probe
ctatcactgtctgggggacaatgaa

SEQ ID NO: 175274 - DNA, 25 bp, probe
ctacctgatggccatggagaagagc

SEQ ID NO: 175275 - DNA, 25 bp, probe
ctacctggtgtttgagaagatgcgg

SEQ ID NO: 175276 - DNA, 25 bp, probe
ctacgggcgtctggagaagctgggc

SEQ ID NO: 175277 - DNA, 25 bp, probe
ctacgtgggggacgagcgtgtggcc

SEQ ID NO: 175278 - DNA, 25 bp, probe
ctacgtgggggacgagcgtgtggcc

SEQ ID NO: 175279 - DNA, 25 bp, probe
ctagagttgtggtggcaggggccct

SEQ ID NO: 175280 - DNA, 25 bp, probe
ctaagtcacaggtggaggaccccct

SEQ ID NO: 175281 - DNA, 25 bp, probe
ctacgaatagtctgagtagatcccc

SEQ ID NO: 175282 - DNA, 25 bp, probe
ctactaatagtttgcttccttcctt

SEQ ID NO: 175283 - DNA, 25 bp, probe
ctacatcatatgctttgttccttac

SEQ ID NO: 175284 - DNA, 25 bp, probe
ctacatcatatgctttgttccttac

SEQ ID NO: 175285 - DNA, 25 bp, probe
ctacacagtgactttcttcctaggc

SEQ ID NO: 175286 - DNA, 25 bp, probe
ctacacagtgactttcttcctaggc

SEQ ID NO: 175287 - DNA, 25 bp, probe
ctaccagatgttcacattttatgcc

SEQ ID NO: 175288 - DNA, 25 bp, probe
ctacttgaactctacatttaatcca

SEQ ID NO: 175289 - DNA, 25 bp, probe
ctacttgaactctacatttaatcca

SEQ ID NO: 175290 - DNA, 25 bp, probe
ctactttgaccccacttgaagcaaa

SEQ ID NO: 175291 - DNA, 25 bp, probe
ctaccttgtcacacagctctagacc

SEQ ID NO: 175292 - DNA, 25 bp, probe
ctatccctgtaagtgcgcagacacc

SEQ ID NO: 175293 - DNA, 25 bp, probe
ctatagggagcaagtggcagccacc

SEQ ID NO: 175294 - DNA, 25 bp, probe
ctatcggggcattgatggcctcgcc

SEQ ID NO: 175295 - DNA, 25 bp, probe
ctatcggggcattgatggcctcgcc

SEQ ID NO: 175296 - DNA, 25 bp, probe
ctatgtgggcgacgaggcccagagc

SEQ ID NO: 175297 - DNA, 25 bp, probe
ctaatgaggctacagaaacaggccg

SEQ ID NO: 175298 - DNA, 25 bp, probe
ctaagatgtgccctggtaactggct

SEQ ID NO: 175299 - DNA, 25 bp, probe
ctaacaggccacgttaaactgccca

SEQ ID NO: 175300 - DNA, 25 bp, probe
ctcacgcaagcatggttaacgtccc

SEQ ID NO: 175301 - DNA, 25 bp, probe
ctactgggttggatacctgtatctc

SEQ ID NO: 175302 - DNA, 25 bp, probe
ctagtttgctttgctgaccaaatgc

SEQ ID NO: 175303 - DNA, 25 bp, probe
ctagattatctagtccaaacaatag

SEQ ID NO: 175304 - DNA, 25 bp, probe
ctagattatctagtccaaacaatag

SEQ ID NO: 175305 - DNA, 25 bp, probe
ctgaagttatcagtgcccacgacta

SEQ ID NO: 175306 - DNA, 25 bp, probe
ctagagtttcttctcatcagagcac

SEQ ID NO: 175307 - DNA, 25 bp, probe
ctagagtgaacttccacaccatacc

SEQ ID NO: 175308 - DNA, 25 bp, probe
ctatggcaaacagccctggtaccag

SEQ ID NO: 175309 - DNA, 25 bp, probe
ctatggcaaacagccctggtaccag

SEQ ID NO: 175310 - DNA, 25 bp, probe
ctaggcaaaaccactgaagaacaag

SEQ ID NO: 175311 - DNA, 25 bp, probe
ctgaccaacaacctactggacgaca

SEQ ID NO: 175312 - DNA, 25 bp, probe
ctaccgagattccaactccacagag

SEQ ID NO: 175313 - DNA, 25 bp, probe
ctactctggcttgagcacttctata

SEQ ID NO: 175314 - DNA, 25 bp, probe
ctaccagagtcagagatcagctcca

SEQ ID NO: 175315 - DNA, 25 bp, probe
ctaccaggagctgcagagcatccga

SEQ ID NO: 175316 - DNA, 25 bp, probe
ctacgtgggtgtactccatcaacaa

SEQ ID NO: 175317 - DNA, 25 bp, probe
ctacttccagataaccacaaaacat

SEQ ID NO: 175318 - DNA, 25 bp, probe
ctagcttcctagttccgattagact

SEQ ID NO: 175319 - DNA, 25 bp, probe
ctactcctgtagttttgtttgatgc

SEQ ID NO: 175320 - DNA, 25 bp, probe
ctaccccgagggtggcattgatgcc

SEQ ID NO: 175321 - DNA, 25 bp, probe
ctactcaccagaagggggcttacca

SEQ ID NO: 175322 - DNA, 25 bp, probe
ctcactacctggagagaacttagta

SEQ ID NO: 175323 - DNA, 25 bp, probe
ctacttgccgccagaaatgattgag

SEQ ID NO: 175324 - DNA, 25 bp, probe
ctaggactcccataaatcactgggg

SEQ ID NO: 175325 - DNA, 25 bp, probe
ctatggactccaaacaagctcactg

SEQ ID NO: 175326 - DNA, 25 bp, probe
ctaggcagttcaaagcaggatatgt

SEQ ID NO: 175327 - DNA, 25 bp, probe
ctagtcagctttgaacgctgtgtga

SEQ ID NO: 175328 - DNA, 25 bp, probe
ctagtaggcctgccacagcctagat

SEQ ID NO: 175329 - DNA, 25 bp, probe
ctagtgtccctgcctgaggatagca

SEQ ID NO: 175330 - DNA, 25 bp, probe
ctagtgtccctgcctgaggatagca

SEQ ID NO: 175331 - DNA, 25 bp, probe
ctatcccccagccatgaagaatgcc

SEQ ID NO: 175332 - DNA, 25 bp, probe
ctatggcacccccatgaacaagact

SEQ ID NO: 175333 - DNA, 25 bp, probe
ctatggcacccccatgaacaagact

SEQ ID NO: 175334 - DNA, 25 bp, probe
ctatgaagtccccaggagctacact

SEQ ID NO: 175335 - DNA, 25 bp, probe
ctaccacatcatgcgggtgctcaac

SEQ ID NO: 175336 - DNA, 25 bp, probe
ctacagcagcaagaggagtccaagt

SEQ ID NO: 175337 - DNA, 25 bp, probe
ctagccagcaactaggcagggcctg

SEQ ID NO: 175338 - DNA, 25 bp, probe
ctagctctgatcctaacaggccacg

SEQ ID NO: 175339 - DNA, 25 bp, probe
ctaggctgtggggatcaatgccatc

SEQ ID NO: 175340 - DNA, 25 bp, probe
ctacgcgagcagactgacttgcctc

SEQ ID NO: 175341 - DNA, 25 bp, probe
ctagcagacatgtttgacttcctgt

SEQ ID NO: 175342 - DNA, 25 bp, probe
ctatctggtgtttgagttcctcagc

SEQ ID NO: 175343 - DNA, 25 bp, probe
ctatcaggctttgggatgatctccc

SEQ ID NO: 175344 - DNA, 25 bp, probe
ctaaggttgtgctggacggcgctat

SEQ ID NO: 175345 - DNA, 25 bp, probe
ctccagaattatgtcaggttggctt

SEQ ID NO: 175346 - DNA, 25 bp, probe
ctacgacaatgagaagtgctggttt

SEQ ID NO: 175347 - DNA, 25 bp, probe
ctacgacaatgagaagtgctggttt

SEQ ID NO: 175348 - DNA, 25 bp, probe
ctactggacgacaacggccacatta

SEQ ID NO: 175349 - DNA, 25 bp, probe
ctactggaccacgaaggccactgta

SEQ ID NO: 175350 - DNA, 25 bp, probe
ctactggaatcaggcttggttcatt

SEQ ID NO: 175351 - DNA, 25 bp, probe
ctatgttgtcatcacttggtccatg

SEQ ID NO: 175352 - DNA, 25 bp, probe
ctatgcgttatggaattgaatccat

SEQ ID NO: 175353 - DNA, 25 bp, probe
ctagagcttctggatttcaactatc

SEQ ID NO: 175354 - DNA, 25 bp, probe
ctagcctggtggaatgtgcatactt

SEQ ID NO: 175355 - DNA, 25 bp, probe
ctagcctggtggaatgtgcatactt

SEQ ID NO: 175356 - DNA, 25 bp, probe
ctaactaatggtatctacatatttc

SEQ ID NO: 175357 - DNA, 25 bp, probe
ctaattacatgctcctggaaatttt

SEQ ID NO: 175358 - DNA, 25 bp, probe
ctaatgcaaagctctttacctcttg

SEQ ID NO: 175359 - DNA, 25 bp, probe
ctaatgcaacaagtcctgaatccct

SEQ ID NO: 175360 - DNA, 25 bp, probe
ctagccctcagaaactgtatcccat

SEQ ID NO: 175361 - DNA, 25 bp, probe
ctatgcctctaaaatgatgctgttt

SEQ ID NO: 175362 - DNA, 25 bp, probe
ctatgtcccagaggaggtgctttgg

SEQ ID NO: 175363 - DNA, 25 bp, probe
ctatgcctccatttggggatttgag

SEQ ID NO: 175364 - DNA, 25 bp, probe
ctacctccatttagggatttgcttg

SEQ ID NO: 175365 - DNA, 25 bp, probe
ctacctccatttagggatttgcttg

SEQ ID NO: 175366 - DNA, 25 bp, probe
ctacctcttcatgggggactttgtg

SEQ ID NO: 175367 - DNA, 25 bp, probe
ctaacacatatagggcttcctttgg

SEQ ID NO: 175368 - DNA, 25 bp, probe
ctaacaatattactcttcgtcgggt

SEQ ID NO: 175369 - DNA, 25 bp, probe
ctaacaatattactcttcgtcgggt

SEQ ID NO: 175370 - DNA, 25 bp, probe
ctaaaaactctgcttcggtgtcgaa

SEQ ID NO: 175371 - DNA, 25 bp, probe
ctaaaagaatatggcgtcatgcgtg

SEQ ID NO: 175372 - DNA, 25 bp, probe
ctaaccgtgatagtccttgcaagta

SEQ ID NO: 175373 - DNA, 25 bp, probe
ctatccgctggatgtcttgggagag

SEQ ID NO: 175374 - DNA, 25 bp, probe
ctatccgctggatgtcttgggagag

SEQ ID NO: 175375 - DNA, 25 bp, probe
ctatccgctggatgtcttgggagag

SEQ ID NO: 175376 - DNA, 25 bp, probe
ctaccagctggctttgagcattggg

SEQ ID NO: 175377 - DNA, 25 bp, probe
ctaggcatggtgtcttcacaggagg

SEQ ID NO: 175378 - DNA, 25 bp, probe
ctaccagtgctactctcaacgagtt

SEQ ID NO: 175379 - DNA, 25 bp, probe
ctcccggccaccgaatcaaattagc

SEQ ID NO: 175380 - DNA, 25 bp, probe
ctacgcggccgggaacaacaatggc

SEQ ID NO: 175381 - DNA, 25 bp, probe
ctgacgggtccattaacaaagcggg

SEQ ID NO: 175382 - DNA, 25 bp, probe
ctgacctggttctcaacagacccag

SEQ ID NO: 175383 - DNA, 25 bp, probe
ctacctgtattctccaaacactgat

SEQ ID NO: 175384 - DNA, 25 bp, probe
ctacctgttaaagaatcatctggat

SEQ ID NO: 175385 - DNA, 25 bp, probe
ctactttgacaaatatcctcctgaa

SEQ ID NO: 175386 - DNA, 25 bp, probe
ctacttcagagagaggttcctaaaa

SEQ ID NO: 175387 - DNA, 25 bp, probe
ctactccaagagtaagttctgctac

SEQ ID NO: 175388 - DNA, 25 bp, probe
ctatgccgaagagacagtctgctcc

SEQ ID NO: 175389 - DNA, 25 bp, probe
ctatgcctcgaacttcagtgtgatc

SEQ ID NO: 175390 - DNA, 25 bp, probe
ctatgcctcgaacttcagtgtgatc

SEQ ID NO: 175391 - DNA, 25 bp, probe
ctatctgctccaggttctgaagaag

SEQ ID NO: 175392 - DNA, 25 bp, probe
ctatctcacgagacctttgagaagg

SEQ ID NO: 175393 - DNA, 25 bp, probe
ctatccaccaactagtcatgggcag

SEQ ID NO: 175394 - DNA, 25 bp, probe
ctatgtatcctttcggcatgtggag

SEQ ID NO: 175395 - DNA, 25 bp, probe
ctcaatgctcctgtgcggattggca

SEQ ID NO: 175396 - DNA, 25 bp, probe
ctagtgtctgtccatggagttagag

SEQ ID NO: 175397 - DNA, 25 bp, probe
ctagcatatcagtcactgggcccaa

SEQ ID NO: 175398 - DNA, 25 bp, probe
ctagcatatcagtcactgggcccaa

SEQ ID NO: 175399 - DNA, 25 bp, probe
ctagcagacagctctggacagacaa

SEQ ID NO: 175400 - DNA, 25 bp, probe
ctagtgatcatctcagctgaagtgt

SEQ ID NO: 175401 - DNA, 25 bp, probe
ctagatatctgcctactacactgta

SEQ ID NO: 175402 - DNA, 25 bp, probe
ctatgaaatcgcgcttcttgaagac

SEQ ID NO: 175403 - DNA, 25 bp, probe
ctactaaccgtgccatcttgcaaac

SEQ ID NO: 175404 - DNA, 25 bp, probe
ctagcttttaagccatgcttgctca

SEQ ID NO: 175405 - DNA, 25 bp, probe
ctactttcgcaatcacttctgcatc

SEQ ID NO: 175406 - DNA, 25 bp, probe
ctagttatcgctgagactttccctg

SEQ ID NO: 175407 - DNA, 25 bp, probe
ctagataacagtctgacttttcccc

SEQ ID NO: 175408 - DNA, 25 bp, probe
ctaaaagctactgagctcatttcac

SEQ ID NO: 175409 - DNA, 25 bp, probe
ctaaaacactggagtatgcttcacc

SEQ ID NO: 175410 - DNA, 25 bp, probe
ctaaaacgctggactgcctgatggc

SEQ ID NO: 175411 - DNA, 25 bp, probe
ctatgtcacagcgatggatctcttt

SEQ ID NO: 175412 - DNA, 25 bp, probe
ctatgctaagcagagactcctgtag

SEQ ID NO: 175413 - DNA, 25 bp, probe
ctatgtaacaaggcaccgctaagca

SEQ ID NO: 175414 - DNA, 25 bp, probe
ctagatggcaaagcccacttagcaa

SEQ ID NO: 175415 - DNA, 25 bp, probe
ctagaggcacaatcttgacttgtca

SEQ ID NO: 175416 - DNA, 25 bp, probe
ctagggggatgagagcacttgcttc

SEQ ID NO: 175417 - DNA, 25 bp, probe
ctagggggatgagagcacttgcttc

SEQ ID NO: 175418 - DNA, 25 bp, probe
ctagataaggaggggcagattttct

SEQ ID NO: 175419 - DNA, 25 bp, probe
ctagataaggaggggcagattttct

SEQ ID NO: 175420 - DNA, 25 bp, probe
ctaaagaggagcagtcctatgcttt

SEQ ID NO: 175421 - DNA, 25 bp, probe
ctaaggaagacttatctcctgcctt

SEQ ID NO: 175422 - DNA, 25 bp, probe
ctactggaaacctctccgagtactg

SEQ ID NO: 175423 - DNA, 25 bp, probe
gtgacttgaaggctgttgacaagca

SEQ ID NO: 175424 - DNA, 25 bp, probe
ctacggaaacatattctagaggaca

SEQ ID NO: 175425 - DNA, 25 bp, probe
ctaccccactatagcttccaggtat

SEQ ID NO: 175426 - DNA, 25 bp, probe
ctagcctactcttgtgtttagggga

SEQ ID NO: 175427 - DNA, 25 bp, probe
ctagcaaagctggatggggttgggc

SEQ ID NO: 175428 - DNA, 25 bp, probe
ctacacaagatccatcgggacgacc

SEQ ID NO: 175429 - DNA, 25 bp, probe
ctactaagagcagcgggcctgtcca

SEQ ID NO: 175430 - DNA, 25 bp, probe
ctaccacaagcaggtgtccctgtcg

SEQ ID NO: 175431 - DNA, 25 bp, probe
ctactcgaaatggcgtccgcctctg

SEQ ID NO: 175432 - DNA, 25 bp, probe
ctactcgaaatggcgtccgcctctg

SEQ ID NO: 175433 - DNA, 25 bp, probe
ctacttacagagcgtcctggatgat

SEQ ID NO: 175434 - DNA, 25 bp, probe
ctagttgcagaactggaccaggatg

SEQ ID NO: 175435 - DNA, 25 bp, probe
ctagtggagtcctgagtcagcacca

SEQ ID NO: 175436 - DNA, 25 bp, probe
ctagttagtgccatggcacactgcc

SEQ ID NO: 175437 - DNA, 25 bp, probe
ctatgcttcaggcatggtgccggcc

SEQ ID NO: 175438 - DNA, 25 bp, probe
ctatgtcatttgctggagctctgcc

SEQ ID NO: 175439 - DNA, 25 bp, probe
ctagcagagagtcctgagccactgc

SEQ ID NO: 175440 - DNA, 25 bp, probe
ctaggatactgcacagcagccccaa

SEQ ID NO: 175441 - DNA, 25 bp, probe
ctaggatactgcacagcagccccaa

SEQ ID NO: 175442 - DNA, 25 bp, probe
ctatgttacagcatccaacttataa

SEQ ID NO: 175443 - DNA, 25 bp, probe
ctgtttgtcgtgaaaagcttaatgg

SEQ ID NO: 175444 - DNA, 25 bp, probe
ctaattacctaaccagcttgtattg

SEQ ID NO: 175445 - DNA, 25 bp, probe
ctagacaactgctcccagctagaac

SEQ ID NO: 175446 - DNA, 25 bp, probe
ctagacaactgctcccagctagaac

SEQ ID NO: 175447 - DNA, 25 bp, probe
ctaacaatgtccactacgagaacta

SEQ ID NO: 175448 - DNA, 25 bp, probe
ctaccacttgccagcaacaaaagga

SEQ ID NO: 175449 - DNA, 25 bp, probe
ctaccagctggttcgaaaattaggc

SEQ ID NO: 175450 - DNA, 25 bp, probe
ctaccagctggttcgaaaattaggc

SEQ ID NO: 175451 - DNA, 25 bp, probe
ctatgccactccatctggacattta

SEQ ID NO: 175452 - DNA, 25 bp, probe
ctatggcactggccttggggtctat

SEQ ID NO: 175453 - DNA, 25 bp, probe
ctatgtgcttggcgtgtgggaatcc

SEQ ID NO: 175454 - DNA, 25 bp, probe
ctatgtgcttcgcatcttgggcacc

SEQ ID NO: 175455 - DNA, 25 bp, probe
ctatgtgcttcgcatcttgggcacc

SEQ ID NO: 175456 - DNA, 25 bp, probe
ctatgtgcttcgcatcttgggcacc

SEQ ID NO: 175457 - DNA, 25 bp, probe
ctatgtgcttcgcatcttgggcacc

SEQ ID NO: 175458 - DNA, 25 bp, probe
ctatgtcaatagcactgtcaacccc

SEQ ID NO: 175459 - DNA, 25 bp, probe
ctatgtcaatagcactgtcaacccc

SEQ ID NO: 175460 - DNA, 25 bp, probe
ctaggcaggaggcctggaaccctct

SEQ ID NO: 175461 - DNA, 25 bp, probe
ctgagggggttcagaaccagcctgg

SEQ ID NO: 175462 - DNA, 25 bp, probe
ctctgggtggttctaagccaggagc

SEQ ID NO: 175463 - DNA, 25 bp, probe
ctatgaagggatgaccaaccacgag

SEQ ID NO: 175464 - DNA, 25 bp, probe
ctatgacagtctgctacgcaaaaca

SEQ ID NO: 175465 - DNA, 25 bp, probe
ctaataaagcaatcgcaaaaacctt

SEQ ID NO: 175466 - DNA, 25 bp, probe
ctaaaagcccaaacaggactgacct

SEQ ID NO: 175467 - DNA, 25 bp, probe
ctaaaagcccaaacaggactgacct

SEQ ID NO: 175468 - DNA, 25 bp, probe
ctaccacgcactgaggactttggcc

SEQ ID NO: 175469 - DNA, 25 bp, probe
ctacacaggcctgataactctgtac

SEQ ID NO: 175470 - DNA, 25 bp, probe
ctatgacattcctgataatccagta

SEQ ID NO: 175471 - DNA, 25 bp, probe
ctatgacttgtatgacaactcccag

SEQ ID NO: 175472 - DNA, 25 bp, probe
ctatgactgctgagtgataaaacac

SEQ ID NO: 175473 - DNA, 25 bp, probe
ctatgaccatgcccgcataaaactg

SEQ ID NO: 175474 - DNA, 25 bp, probe
ctatgaccatgcccgaatcaagctg

SEQ ID NO: 175475 - DNA, 25 bp, probe
ctacccatgctccagcaaggagttc

SEQ ID NO: 175476 - DNA, 25 bp, probe
ctagtactgcaactgccagaacttg

SEQ ID NO: 175477 - DNA, 25 bp, probe
ctatgtgactgagatcgcacaggat

SEQ ID NO: 175478 - DNA, 25 bp, probe
ctatggatataattcatgcgctcga

SEQ ID NO: 175479 - DNA, 25 bp, probe
ctatggatataattcatgcgctcga

SEQ ID NO: 175480 - DNA, 25 bp, probe
ctaggtgctcaattcatgcctgtga

SEQ ID NO: 175481 - DNA, 25 bp, probe
ctaggtgctcaattcatgcctgtga

SEQ ID NO: 175482 - DNA, 25 bp, probe
ctatgtggtcattgatctccctatc

SEQ ID NO: 175483 - DNA, 25 bp, probe
ctagtgacttgtgtcccatgatccc

SEQ ID NO: 175484 - DNA, 25 bp, probe
ctcaatacactggaacgcctcatct

SEQ ID NO: 175485 - DNA, 25 bp, probe
ctagcatatcactgacctgggatct

SEQ ID NO: 175486 - DNA, 25 bp, probe
ctagcatcatcagtcagaatcagga

SEQ ID NO: 175487 - DNA, 25 bp, probe
ctacatcatcatggagcttggcgtc

SEQ ID NO: 175488 - DNA, 25 bp, probe
ctagctcagatgatgcgggagtgct

SEQ ID NO: 175489 - DNA, 25 bp, probe
ctaggcatgtcttgggaattgctgg

SEQ ID NO: 175490 - DNA, 25 bp, probe
ctatgtgtcccgagaaatgctggtc

SEQ ID NO: 175491 - DNA, 25 bp, probe
ctagtggaccagacgagtggggatc

SEQ ID NO: 175492 - DNA, 25 bp, probe
ctagtgagagtcatcgggcgtggaa

SEQ ID NO: 175493 - DNA, 25 bp, probe
ctaatgaggacattcgtccggaaaa

SEQ ID NO: 175494 - DNA, 25 bp, probe
ctagaagatacaagcctcgggagaa

SEQ ID NO: 175495 - DNA, 25 bp, probe
ctaggagtacaagtgcctggggtgt

SEQ ID NO: 175496 - DNA, 25 bp, probe
ctagaggtgaagatccgcgactggt

SEQ ID NO: 175497 - DNA, 25 bp, probe
ctaagggcgaattccagcacactgg

SEQ ID NO: 175498 - DNA, 25 bp, probe
ctagacgtggacaagcgcctgacgg

SEQ ID NO: 175499 - DNA, 25 bp, probe
ctagacgtggacaagcgcctgacgg

SEQ ID NO: 175500 - DNA, 25 bp, probe
ctagagggagccaagaggatggggt

SEQ ID NO: 175501 - DNA, 25 bp, probe
ctaggtgaagagagggcaggggagc

SEQ ID NO: 175502 - DNA, 25 bp, probe
gccaggaaaacgtggaggggaggtg

SEQ ID NO: 175503 - DNA, 25 bp, probe
ccagtaccaacctggtgaaaacctg

SEQ ID NO: 175504 - DNA, 25 bp, probe
ctcagttccctcattggttaaaagg

SEQ ID NO: 175505 - DNA, 25 bp, probe
ctagtgttcacctctgtgattaaag

SEQ ID NO: 175506 - DNA, 25 bp, probe
ctaggtccaccacccagagtaatag

SEQ ID NO: 175507 - DNA, 25 bp, probe
ctaggtccaccacccagagtaatag

SEQ ID NO: 175508 - DNA, 25 bp, probe
ctaggtccaccacccagagtaatag

SEQ ID NO: 175509 - DNA, 25 bp, probe
ctagttccaggatccatgggagcat

SEQ ID NO: 175510 - DNA, 25 bp, probe
ctaggccgagggccttgggagctgg

SEQ ID NO: 175511 - DNA, 25 bp, probe
ctagtcctgagggtgagggcaggct

SEQ ID NO: 175512 - DNA, 25 bp, probe
ctagtcctgggaacagatggcctgt

SEQ ID NO: 175513 - DNA, 25 bp, probe
ctagggctgtggagtgaggccagta

SEQ ID NO: 175514 - DNA, 25 bp, probe
ctaggaagtgccagtgcagcggcag

SEQ ID NO: 175515 - DNA, 25 bp, probe
ctaggaagagcccgcatgccctaga

SEQ ID NO: 175516 - DNA, 25 bp, probe
ctacgacgagagcgaccctgagctc

SEQ ID NO: 175517 - DNA, 25 bp, probe
ctacgacgagagcgaccctgagctc

SEQ ID NO: 175518 - DNA, 25 bp, probe
ctacgaattggccgactacagcaac

SEQ ID NO: 175519 - DNA, 25 bp, probe
ctacgacatgatccagtactatcag

SEQ ID NO: 175520 - DNA, 25 bp, probe
ctagtatcgatgcagtttatgaaaa

SEQ ID NO: 175521 - DNA, 25 bp, probe
ctagctactcagtagtcttaggtgg

SEQ ID NO: 175522 - DNA, 25 bp, probe
ctagcctctttgatcatttctgtgg

SEQ ID NO: 175523 - DNA, 25 bp, probe
ctaagccttctggttttatgggtca

SEQ ID NO: 175524 - DNA, 25 bp, probe
ctagacaattctctattttactgaa

SEQ ID NO: 175525 - DNA, 25 bp, probe
ctacacttctccttatctttattgg

SEQ ID NO: 175526 - DNA, 25 bp, probe
ctaatattagccttgtctttgattt

SEQ ID NO: 175527 - DNA, 25 bp, probe
ctaaatatggtcgttactattttca

SEQ ID NO: 175528 - DNA, 25 bp, probe
ctaaactggtcgagcgatggatttc

SEQ ID NO: 175529 - DNA, 25 bp, probe
ctaaatctcgatcttgccataactt

SEQ ID NO: 175530 - DNA, 25 bp, probe
ctacgtgctcaacatcgtcaacgtg

SEQ ID NO: 175531 - DNA, 25 bp, probe
ctacgtgctcaacatcgtcaacgtg

SEQ ID NO: 175532 - DNA, 25 bp, probe
ctaagtgctgacacatcattcccag

SEQ ID NO: 175533 - DNA, 25 bp, probe
ctaagtgctgacacatcattcccag

SEQ ID NO: 175534 - DNA, 25 bp, probe
ctagcgtgtgccaggcagatcctct

SEQ ID NO: 175535 - DNA, 25 bp, probe
ctagcactggccatgtgactagctt

SEQ ID NO: 175536 - DNA, 25 bp, probe
ctagcacgtgccagtcactgttcta

SEQ ID NO: 175537 - DNA, 25 bp, probe
ctagcagggaataccacagtcatta

SEQ ID NO: 175538 - DNA, 25 bp, probe
ctacatggtcctacttagtcttgac

SEQ ID NO: 175539 - DNA, 25 bp, probe
ctaagttacatgacctatatctttt

SEQ ID NO: 175540 - DNA, 25 bp, probe
ctagaattggtttgctctgatcatt

SEQ ID NO: 175541 - DNA, 25 bp, probe
ctagatctcaggcttcctgacctac

SEQ ID NO: 175542 - DNA, 25 bp, probe
ctagctctgagccagttcagtacct

SEQ ID NO: 175543 - DNA, 25 bp, probe
ctactctgagcgcctcaagttcaat

SEQ ID NO: 175544 - DNA, 25 bp, probe
ctagactagagggcagaggtaaatg

SEQ ID NO: 175545 - DNA, 25 bp, probe
ctagcctcgagtccgaggtatgacg

SEQ ID NO: 175546 - DNA, 25 bp, probe
ctagcttgctggtcccgaaagattg

SEQ ID NO: 175547 - DNA, 25 bp, probe
ctacctcatggcactcagactaaag

SEQ ID NO: 175548 - DNA, 25 bp, probe
ctacctcatggcactcagactaaag

SEQ ID NO: 175549 - DNA, 25 bp, probe
ctacctcgcgaagcacacaagacag

SEQ ID NO: 175550 - DNA, 25 bp, probe
ctacctccaaactcaggaccagaca

SEQ ID NO: 175551 - DNA, 25 bp, probe
ctaccccagaaataggacaattcac

SEQ ID NO: 175552 - DNA, 25 bp, probe
ctaccctgcggatggggaaatggca

SEQ ID NO: 175553 - DNA, 25 bp, probe
ctaccctgcggatggggaaatggca

SEQ ID NO: 175554 - DNA, 25 bp, probe
ctaccctgcggatggggaaatggca

SEQ ID NO: 175555 - DNA, 25 bp, probe
ctaccggggagggatggatggttgg

SEQ ID NO: 175556 - DNA, 25 bp, probe
ctgccatcctggatacgggcacgtc

SEQ ID NO: 175557 - DNA, 25 bp, probe
ctaccaggagtggcggtggggacct

SEQ ID NO: 175558 - DNA, 25 bp, probe
ctactgggcatgtgctttggggacc

SEQ ID NO: 175559 - DNA, 25 bp, probe
ctacgggttcctctctgagcgagcg

SEQ ID NO: 175560 - DNA, 25 bp, probe
ctgacggttgatgtggcctgaaagc

SEQ ID NO: 175561 - DNA, 25 bp, probe
ctagctggccttgtagcttggaagg

SEQ ID NO: 175562 - DNA, 25 bp, probe
ctactggttcttgagcatttaatcc

SEQ ID NO: 175563 - DNA, 25 bp, probe
ctaatctgttttgagtctttacaaa

SEQ ID NO: 175564 - DNA, 25 bp, probe
ctacctttactacatcttttcaaca

SEQ ID NO: 175565 - DNA, 25 bp, probe
ctacacatttactggatcttttgga

SEQ ID NO: 175566 - DNA, 25 bp, probe
ctacctgctacaataatgactttat

SEQ ID NO: 175567 - DNA, 25 bp, probe
ctacctggagtccaagcgctttatt

SEQ ID NO: 175568 - DNA, 25 bp, probe
ctactggtagatggaacagcatgtg

SEQ ID NO: 175569 - DNA, 25 bp, probe
ctatggcagtgtttgaacagcattg

SEQ ID NO: 175570 - DNA, 25 bp, probe
ctagccaggctgttcaagactgctc

SEQ ID NO: 175571 - DNA, 25 bp, probe
ctatggatgtgttctctaggccttc

SEQ ID NO: 175572 - DNA, 25 bp, probe
ctaggtggctgctttgcagggcttt

SEQ ID NO: 175573 - DNA, 25 bp, probe
ctagggagccatgggaggatctgtc

SEQ ID NO: 175574 - DNA, 25 bp, probe
ctaaatgatgaatgtgggattattg

SEQ ID NO: 175575 - DNA, 25 bp, probe
ctaaagagctcgctgacgtgtacag

SEQ ID NO: 175576 - DNA, 25 bp, probe
ctaccacatggccctaggagtgaag

SEQ ID NO: 175577 - DNA, 25 bp, probe
ctagccattggtgcacaggatgggg

SEQ ID NO: 175578 - DNA, 25 bp, probe
ctagcatgcattttacacacattgg

SEQ ID NO: 175579 - DNA, 25 bp, probe
ctagcatatgagtttcatagctaag

SEQ ID NO: 175580 - DNA, 25 bp, probe
ctgagaatgaccaataaccaaggaa

SEQ ID NO: 175581 - DNA, 25 bp, probe
ctactgtcaccaacaaccaagctaa

SEQ ID NO: 175582 - DNA, 25 bp, probe
ctacttcactgctacagagccacag

SEQ ID NO: 175583 - DNA, 25 bp, probe
ctacttcactgctacagagccacag

SEQ ID NO: 175584 - DNA, 25 bp, probe
ctcggtactatagggcaccagagtt

SEQ ID NO: 175585 - DNA, 25 bp, probe
ctcggtactatagggcaccagagtt

SEQ ID NO: 175586 - DNA, 25 bp, probe
ctcagtctttgagcgagcccatttt

SEQ ID NO: 175587 - DNA, 25 bp, probe
ctcagtcttcagaggcctcaattat

SEQ ID NO: 175588 - DNA, 25 bp, probe
ctctgtttaggtgcctctacttggg

SEQ ID NO: 175589 - DNA, 25 bp, probe
ctctgtttaggtgcctctacttggg

SEQ ID NO: 175590 - DNA, 25 bp, probe
cgttttaggtgtccagtacgctggt

SEQ ID NO: 175591 - DNA, 25 bp, probe
ctcttttaggaagcagtggcggctg

SEQ ID NO: 175592 - DNA, 25 bp, probe
ctacttaagggaataggccaggctc

SEQ ID NO: 175593 - DNA, 25 bp, probe
ctagtgttcggccctcagagaagga

SEQ ID NO: 175594 - DNA, 25 bp, probe
ctaggtctcagggcacggaggcaga

SEQ ID NO: 175595 - DNA, 25 bp, probe
ctaggccccgtgccagaggggaaga

SEQ ID NO: 175596 - DNA, 25 bp, probe
ctaagccgagagaggaggaggagga

SEQ ID NO: 175597 - DNA, 25 bp, probe
ctacccaggcagatgggagggttgt

SEQ ID NO: 175598 - DNA, 25 bp, probe
ctacctccctgtaggaagagtgggt

SEQ ID NO: 175599 - DNA, 25 bp, probe
ctaccccactcaagaacagcagttg

SEQ ID NO: 175600 - DNA, 25 bp, probe
ctaagcccctcttgaaggtgtgttc

SEQ ID NO: 175601 - DNA, 25 bp, probe
ctaccacctttgctcgagaggttca

SEQ ID NO: 175602 - DNA, 25 bp, probe
ctaccacctttgctcgagaggttca

SEQ ID NO: 175603 - DNA, 25 bp, probe
ctacgcccacctgtaaaggttcaag

SEQ ID NO: 175604 - DNA, 25 bp, probe
ctaagtccacttaaataatcctcta

SEQ ID NO: 175605 - DNA, 25 bp, probe
ctaagtctttctgcaaacaacctcc

SEQ ID NO: 175606 - DNA, 25 bp, probe
ctagtgttctgtctaaaaaccagac

SEQ ID NO: 175607 - DNA, 25 bp, probe
ctaggtctcggactaagcctacctg

SEQ ID NO: 175608 - DNA, 25 bp, probe
ctaggtttggaccagagcctgcagg

SEQ ID NO: 175609 - DNA, 25 bp, probe
ctagtctttccagggcacctgagtg

SEQ ID NO: 175610 - DNA, 25 bp, probe
ctagtcttattcggtgatgactctt

SEQ ID NO: 175611 - DNA, 25 bp, probe
ctagtcatgttcttggttctgtctt

SEQ ID NO: 175612 - DNA, 25 bp, probe
ctagttaatctattgcttggactta

SEQ ID NO: 175613 - DNA, 25 bp, probe
ctagtgtaatgtttgctgggataat

SEQ ID NO: 175614 - DNA, 25 bp, probe
ctaggaacattctgctgtcggaaag

SEQ ID NO: 175615 - DNA, 25 bp, probe
ctagcagcccgcaactgcatggtgt

SEQ ID NO: 175616 - DNA, 25 bp, probe
ctcacatgccaggtcaccaggtgac

SEQ ID NO: 175617 - DNA, 25 bp, probe
ctactgccaacctggggagccaggg

SEQ ID NO: 175618 - DNA, 25 bp, probe
ctacattccaatggggcggagcctg

SEQ ID NO: 175619 - DNA, 25 bp, probe
ctacattccaatggggcggagcctg

SEQ ID NO: 175620 - DNA, 25 bp, probe
ctacatagccacacagggaccactg

SEQ ID NO: 175621 - DNA, 25 bp, probe
ctacaaccactcgggcgactacgag

SEQ ID NO: 175622 - DNA, 25 bp, probe
ctacagcgccccaggcaagaagggg

SEQ ID NO: 175623 - DNA, 25 bp, probe
ctaaacctgccacggatcgaatggt

SEQ ID NO: 175624 - DNA, 25 bp, probe
ctaaagccaggattgtgttgggttg

SEQ ID NO: 175625 - DNA, 25 bp, probe
ctagaaccaagatctgatgatgatg

SEQ ID NO: 175626 - DNA, 25 bp, probe
ctaaactgtagctgtattagcagca

SEQ ID NO: 175627 - DNA, 25 bp, probe
ctaccacctcgaactttgacagcga

SEQ ID NO: 175628 - DNA, 25 bp, probe
ctaacacatgcggtcacttttggga

SEQ ID NO: 175629 - DNA, 25 bp, probe
ctaacacatgctgccatttctggct

SEQ ID NO: 175630 - DNA, 25 bp, probe
ctacctcagctagctgttgcgtggt

SEQ ID NO: 175631 - DNA, 25 bp, probe
ctacctgcagcacctgtgctttggt

SEQ ID NO: 175632 - DNA, 25 bp, probe
ctaccacagcatcatgaccgtgagg

SEQ ID NO: 175633 - DNA, 25 bp, probe
ctaccacagcatcatgaccgtgagg

SEQ ID NO: 175634 - DNA, 25 bp, probe
ctacctacggtgacagatgtcagga

SEQ ID NO: 175635 - DNA, 25 bp, probe
ctaccttagctgcatagtggaagag

SEQ ID NO: 175636 - DNA, 25 bp, probe
ctaccttacccttgtgggagctgaa

SEQ ID NO: 175637 - DNA, 25 bp, probe
ctaccgctgtcgggagtgcgggctg

SEQ ID NO: 175638 - DNA, 25 bp, probe
ctaccgctgaggagatgtccagctt

SEQ ID NO: 175639 - DNA, 25 bp, probe
ctcaaccaatggagagctgaatgtt

SEQ ID NO: 175640 - DNA, 25 bp, probe
ctacaggacgcgctggcgagatgct

SEQ ID NO: 175641 - DNA, 25 bp, probe
ctacaaggacagcttcgcggctgct

SEQ ID NO: 175642 - DNA, 25 bp, probe
ctacagggaagcctccactggcttc

SEQ ID NO: 175643 - DNA, 25 bp, probe
ctaaataatgtgctctccggcttca

SEQ ID NO: 175644 - DNA, 25 bp, probe
ctacattaagatcttcctggtggcc

SEQ ID NO: 175645 - DNA, 25 bp, probe
gtacttgacggtgtcgttcttgacg

SEQ ID NO: 175646 - DNA, 25 bp, probe
ctaagtcagggtgttatgtcctgaa

SEQ ID NO: 175647 - DNA, 25 bp, probe
ctacctcgggacctaatgttctcta

SEQ ID NO: 175648 - DNA, 25 bp, probe
ctcacccctggacaaaggtgttcaa

SEQ ID NO: 175649 - DNA, 25 bp, probe
ctaccacctggtgaagacgctgtac

SEQ ID NO: 175650 - DNA, 25 bp, probe
ctacgcactctgcaacaaagccttc

SEQ ID NO: 175651 - DNA, 25 bp, probe
tggagatacggtcaacacagcctct

SEQ ID NO: 175652 - DNA, 25 bp, probe
ctacctcttgggaaagatgctcaga

SEQ ID NO: 175653 - DNA, 25 bp, probe
ctacctcttgggaaagatgctcaga

SEQ ID NO: 175654 - DNA, 25 bp, probe
ctactcctctgacgaatgggtatat

SEQ ID NO: 175655 - DNA, 25 bp, probe
ctactcctctgacgaatgggtatat

SEQ ID NO: 175656 - DNA, 25 bp, probe
ctcagaactagagattgacgtggat

SEQ ID NO: 175657 - DNA, 25 bp, probe
ctaaatctgaggaatcaacagggca

SEQ ID NO: 175658 - DNA, 25 bp, probe
ctaatgacgcggctcaaaaggaaac

SEQ ID NO: 175659 - DNA, 25 bp, probe
cgaagaccgagtccccaaggactag

SEQ ID NO: 175660 - DNA, 25 bp, probe
cgaagatataggtccccaattccca

SEQ ID NO: 175661 - DNA, 25 bp, probe
cgaagatataggtccccaattccca

SEQ ID NO: 175662 - DNA, 25 bp, probe
ctacagcaaaggtccccagaaccaa

SEQ ID NO: 175663 - DNA, 25 bp, probe
ctcaagaccatcctccgaagtaaga

SEQ ID NO: 175664 - DNA, 25 bp, probe
ctaaggactctagaaagtcaagaga

SEQ ID NO: 175665 - DNA, 25 bp, probe
ctaaggctttactcatcagtcttaa

SEQ ID NO: 175666 - DNA, 25 bp, probe
ctaaagctacaaaacatcctactca

SEQ ID NO: 175667 - DNA, 25 bp, probe
ctaccaactactatcaccatgacca

SEQ ID NO: 175668 - DNA, 25 bp, probe
ctagtaatccttatcaccatgacca

SEQ ID NO: 175669 - DNA, 25 bp, probe
ctagatgaatctaccattgctacga

SEQ ID NO: 175670 - DNA, 25 bp, probe
ctaatatcatttgtactgaagaccc

SEQ ID NO: 175671 - DNA, 25 bp, probe
ctaccagcattgagaacatgaagat

SEQ ID NO: 175672 - DNA, 25 bp, probe
ctactggccatgatgccactgaaca

SEQ ID NO: 175673 - DNA, 25 bp, probe
ctactggctgtgctacgtcaacagc

SEQ ID NO: 175674 - DNA, 25 bp, probe
ctagctgtgtgtcttccacaatgac

SEQ ID NO: 175675 - DNA, 25 bp, probe
ctacttttgccaatcccagggcagg

SEQ ID NO: 175676 - DNA, 25 bp, probe
ctaatcttaggcgcttcaggcggag

SEQ ID NO: 175677 - DNA, 25 bp, probe
ctaattctggcaggacctcaccaaa

SEQ ID NO: 175678 - DNA, 25 bp, probe
ctaatttggtcctacccagcaatgg

SEQ ID NO: 175679 - DNA, 25 bp, probe
ctaaatcaggtgaaaggctacaagc

SEQ ID NO: 175680 - DNA, 25 bp, probe
ctaacatcagttaaattattcaagt

SEQ ID NO: 175681 - DNA, 25 bp, probe
ctagcagtcagttcttgttttcaaa

SEQ ID NO: 175682 - DNA, 25 bp, probe
ctagattcactgtcttttgattctt

SEQ ID NO: 175683 - DNA, 25 bp, probe
ctacccctgactcatatatactttt

SEQ ID NO: 175684 - DNA, 25 bp, probe
ctaccaccaaattatccaactgtta

SEQ ID NO: 175685 - DNA, 25 bp, probe
ctaccaccacacaaacttagttcat

SEQ ID NO: 175686 - DNA, 25 bp, probe
ctaccaccacacaaacttagttcat

SEQ ID NO: 175687 - DNA, 25 bp, probe
ctactcactcacggagccaaagtca

SEQ ID NO: 175688 - DNA, 25 bp, probe
ctactcctggcagtgcgtcaatcag

SEQ ID NO: 175689 - DNA, 25 bp, probe
ctactcctggcagtgcgtcaatcag

SEQ ID NO: 175690 - DNA, 25 bp, probe
ctactcctggcagtgcgtcaatcag

SEQ ID NO: 175691 - DNA, 25 bp, probe
ctactcctggcagtgcgtcaatcag

SEQ ID NO: 175692 - DNA, 25 bp, probe
ctactcctggcagtgcgtcaatcag

SEQ ID NO: 175693 - DNA, 25 bp, probe
ctacgagctggccagcctcaagagg

SEQ ID NO: 175694 - DNA, 25 bp, probe
ctacgagctggccagcctcaagagg

SEQ ID NO: 175695 - DNA, 25 bp, probe
ctacgaggcgctggccaagcaagta

SEQ ID NO: 175696 - DNA, 25 bp, probe
ctacgaggcgctggccaagcaagta

SEQ ID NO: 175697 - DNA, 25 bp, probe
ctacgacgctgcggggaatgactcc

SEQ ID NO: 175698 - DNA, 25 bp, probe
ctactgcaccgtgggagtcgagccc

SEQ ID NO: 175699 - DNA, 25 bp, probe
gctacgacgactgggggggccagta

SEQ ID NO: 175700 - DNA, 25 bp, probe
ctacgaggacgtggcgggtggagct

SEQ ID NO: 175701 - DNA, 25 bp, probe
ctacgggaaggccgtagatgtgtgg

SEQ ID NO: 175702 - DNA, 25 bp, probe
ctaagttgttggccttgtgtgtgtg

SEQ ID NO: 175703 - DNA, 25 bp, probe
ctaaatgtgtggtgactgctttgta

SEQ ID NO: 175704 - DNA, 25 bp, probe
ctacttgctggggtacagttgcttc

SEQ ID NO: 175705 - DNA, 25 bp, probe
ctagttgggggctagtcgctgatct

SEQ ID NO: 175706 - DNA, 25 bp, probe
ctcagtagcgttttagtcgttttat

SEQ ID NO: 175707 - DNA, 25 bp, probe
ctagaagtcttaattgtgtttattt

SEQ ID NO: 175708 - DNA, 25 bp, probe
ctaataatttcaaggtgtgtgtgtg

SEQ ID NO: 175709 - DNA, 25 bp, probe
ctaaccattacagcctgtatttgcc

SEQ ID NO: 175710 - DNA, 25 bp, probe
ctacatgctcaaacaccagggttac

SEQ ID NO: 175711 - DNA, 25 bp, probe
ctagctccataattgcaagggaaga

SEQ ID NO: 175712 - DNA, 25 bp, probe
ctacctgcatataaccatgggaagt

SEQ ID NO: 175713 - DNA, 25 bp, probe
ctacctcaggaaccagctggcagag

SEQ ID NO: 175714 - DNA, 25 bp, probe
ctacctcaggaaccagctggcagag

SEQ ID NO: 175715 - DNA, 25 bp, probe
ctagcctgaggctccactggaagat

SEQ ID NO: 175716 - DNA, 25 bp, probe
ctacacaggtgcccgtcatggaaga

SEQ ID NO: 175717 - DNA, 25 bp, probe
ctacacaggtgcccgtcatggaaga

SEQ ID NO: 175718 - DNA, 25 bp, probe
ctacagccgcatcggcggagaccag

SEQ ID NO: 175719 - DNA, 25 bp, probe
ctacagccgcatcggcggagaccag

SEQ ID NO: 175720 - DNA, 25 bp, probe
ctaacccagcaagagcagcagcagc

SEQ ID NO: 175721 - DNA, 25 bp, probe
ctagaccaagcgaagggcagcccac

SEQ ID NO: 175722 - DNA, 25 bp, probe
ctaacgccactgatggcggccgtca

SEQ ID NO: 175723 - DNA, 25 bp, probe
ctagactctagcttttgcaggccga

SEQ ID NO: 175724 - DNA, 25 bp, probe
ctagcctgctacttggtgaaggagc

SEQ ID NO: 175725 - DNA, 25 bp, probe
ctacctgcgcagtgtgctggaggac

SEQ ID NO: 175726 - DNA, 25 bp, probe
ctaccagccgaggctgtgcgggcaa

SEQ ID NO: 175727 - DNA, 25 bp, probe
ctactcaccactgctgaggagccaa

SEQ ID NO: 175728 - DNA, 25 bp, probe
ctagctcccattggctgaagacact

SEQ ID NO: 175729 - DNA, 25 bp, probe
ctagccccatgtgatgtgaaaacta

SEQ ID NO: 175730 - DNA, 25 bp, probe
ctagccccatgtgatgtgaaaacta

SEQ ID NO: 175731 - DNA, 25 bp, probe
ctagaccaagtttgtccaacctgca

SEQ ID NO: 175732 - DNA, 25 bp, probe
ctcaatctaagtcagtccactttga

SEQ ID NO: 175733 - DNA, 25 bp, probe
ctgcaataaagtcacgagcgttcga

SEQ ID NO: 175734 - DNA, 25 bp, probe
ctcaagacggtcaccatcgtgctag

SEQ ID NO: 175735 - DNA, 25 bp, probe
ctcaagcaaggataccgccatgtcc

SEQ ID NO: 175736 - DNA, 25 bp, probe
ctcaacaaggtatacctcagttcca

SEQ ID NO: 175737 - DNA, 25 bp, probe
ctctaaggagaatggcccagtcctc

SEQ ID NO: 175738 - DNA, 25 bp, probe
ctcgacgggagatccccgatcactg

SEQ ID NO: 175739 - DNA, 25 bp, probe
ctcaaagtcaagatccccgacttga

SEQ ID NO: 175740 - DNA, 25 bp, probe
ctcagaagtttgggcccccacatta

SEQ ID NO: 175741 - DNA, 25 bp, probe
ctagaagtggctttcaccacctcat

SEQ ID NO: 175742 - DNA, 25 bp, probe
ctaaagggtcatgcctcacacttca

SEQ ID NO: 175743 - DNA, 25 bp, probe
ctaatcagcttcattttcaacttct

SEQ ID NO: 175744 - DNA, 25 bp, probe
ctaccagcagccgtttgaggacttc

SEQ ID NO: 175745 - DNA, 25 bp, probe
ctacctggccagaatttggagtccc

SEQ ID NO: 175746 - DNA, 25 bp, probe
ctaccatgtgccaaacgggaggccc

SEQ ID NO: 175747 - DNA, 25 bp, probe
ctacgatgtcccaacgagcgtggaa

SEQ ID NO: 175748 - DNA, 25 bp, probe
ctacgatgtctaaaagtctgtgagg

SEQ ID NO: 175749 - DNA, 25 bp, probe
ctacgtggcctttagctttatgtat

SEQ ID NO: 175750 - DNA, 25 bp, probe
ctacgtggcctttagctttatgtat

SEQ ID NO: 175751 - DNA, 25 bp, probe
ctactggggcttttcctattgattt

SEQ ID NO: 175752 - DNA, 25 bp, probe
ctgagctggtggtgttccaataatg

SEQ ID NO: 175753 - DNA, 25 bp, probe
ctgcggcgggggctcattaaaaata

SEQ ID NO: 175754 - DNA, 25 bp, probe
ctcccagggctgcaaattaacaaac

SEQ ID NO: 175755 - DNA, 25 bp, probe
cctacagggcctgaagtacacattc

SEQ ID NO: 175756 - DNA, 25 bp, probe
cgtcaggggcccaaagtacagaatt

SEQ ID NO: 175757 - DNA, 25 bp, probe
ctgtcggggacagacttccagattc

SEQ ID NO: 175758 - DNA, 25 bp, probe
ctactgggtgtagactggcctgaac

SEQ ID NO: 175759 - DNA, 25 bp, probe
ctagctggagaggagccctgcctct

SEQ ID NO: 175760 - DNA, 25 bp, probe
ctactgtgaaaaactgctgccctgg

SEQ ID NO: 175761 - DNA, 25 bp, probe
ctacctggcaaaacgtcctttgcat

SEQ ID NO: 175762 - DNA, 25 bp, probe
ctacctggagaaccggcagcactac

SEQ ID NO: 175763 - DNA, 25 bp, probe
ctacaaagagaacgtggacatctgg

SEQ ID NO: 175764 - DNA, 25 bp, probe
ctgaaaaaggacggcgcacacggag

SEQ ID NO: 175765 - DNA, 25 bp, probe
ctaactctggagtgagcctcagggg

SEQ ID NO: 175766 - DNA, 25 bp, probe
ctagaatctgaaggtgagaatctga

SEQ ID NO: 175767 - DNA, 25 bp, probe
ctagaagctttgctgcaggatctgc

SEQ ID NO: 175768 - DNA, 25 bp, probe
ctagcaagtatgatgggcgagtccc

SEQ ID NO: 175769 - DNA, 25 bp, probe
ctcaaatgacagattccagttccca

SEQ ID NO: 175770 - DNA, 25 bp, probe
ctcataatcaaatatcgctttacat

SEQ ID NO: 175771 - DNA, 25 bp, probe
ctcaaagcagtatacaggtctgaag

SEQ ID NO: 175772 - DNA, 25 bp, probe
ctcaaagcagtatacaggtctgaag

SEQ ID NO: 175773 - DNA, 25 bp, probe
ctcagacaagttcaaggactaccta

SEQ ID NO: 175774 - DNA, 25 bp, probe
ctaacatcaggtctcagcggttcct

SEQ ID NO: 175775 - DNA, 25 bp, probe
ctacaacagtgtcagcaaggttgac

SEQ ID NO: 175776 - DNA, 25 bp, probe
ctaccacgctgacaggtgtgcttga

SEQ ID NO: 175777 - DNA, 25 bp, probe
ctacttcctggccgggagggacaag

SEQ ID NO: 175778 - DNA, 25 bp, probe
ctacctgactggcagggcggcacta

SEQ ID NO: 175779 - DNA, 25 bp, probe
ctacctgatcagggagcggcctgcc

SEQ ID NO: 175780 - DNA, 25 bp, probe
ctaccatatacaccagggcttactt

SEQ ID NO: 175781 - DNA, 25 bp, probe
ctacctgaacatccagaggcgcacc

SEQ ID NO: 175782 - DNA, 25 bp, probe
ctacctgaacatccagaggcgcacc

SEQ ID NO: 175783 - DNA, 25 bp, probe
ctacctggagctcatggagcacccc

SEQ ID NO: 175784 - DNA, 25 bp, probe
ctaccttagctcaagaagagcccta

SEQ ID NO: 175785 - DNA, 25 bp, probe
ctaccatatgttccaaatactgcct

SEQ ID NO: 175786 - DNA, 25 bp, probe
ttacgatctgtttccaaatcccttt

SEQ ID NO: 175787 - DNA, 25 bp, probe
ctactgtgatgaatagccccaccct

SEQ ID NO: 175788 - DNA, 25 bp, probe
ctcagtatgcaaaagcccaaactag

SEQ ID NO: 175789 - DNA, 25 bp, probe
ctgcacttaattttccgactgctag

SEQ ID NO: 175790 - DNA, 25 bp, probe
ctgcacttaattttccgactgctag

SEQ ID NO: 175791 - DNA, 25 bp, probe
ctaatctaataattgtgccccgcag

SEQ ID NO: 175792 - DNA, 25 bp, probe
ctactctcaacgagttcccagagga

SEQ ID NO: 175793 - DNA, 25 bp, probe
ctaccccaagaggcttccactgggg

SEQ ID NO: 175794 - DNA, 25 bp, probe
ctaccccaagaggcttccactgggg

SEQ ID NO: 175795 - DNA, 25 bp, probe
ctcccccagtcagtgcttaaatggg

SEQ ID NO: 175796 - DNA, 25 bp, probe
ctgccgtcggttccttaactgaggc

SEQ ID NO: 175797 - DNA, 25 bp, probe
ctacttctggtcatgcttacactga

SEQ ID NO: 175798 - DNA, 25 bp, probe
ctacttgggtgctatgattcaccaa

SEQ ID NO: 175799 - DNA, 25 bp, probe
ctcaaggagaggcagattcaccaga

SEQ ID NO: 175800 - DNA, 25 bp, probe
ctaccagtaccaatgattaccatga

SEQ ID NO: 175801 - DNA, 25 bp, probe
ctaacctcagtaatgcatctacctg

SEQ ID NO: 175802 - DNA, 25 bp, probe
ctcaacctcaaaagcctgactttgg

SEQ ID NO: 175803 - DNA, 25 bp, probe
ctactcctacagcagcctgtgtttg

SEQ ID NO: 175804 - DNA, 25 bp, probe
ctactcctacagcagcctgtgtttg

SEQ ID NO: 175805 - DNA, 25 bp, probe
ctacctcaaagccatcatcttcttt

SEQ ID NO: 175806 - DNA, 25 bp, probe
ctacctgcaaatcatcgtcactgtg

SEQ ID NO: 175807 - DNA, 25 bp, probe
ctgacggccaggtcatcaccattgg

SEQ ID NO: 175808 - DNA, 25 bp, probe
ctaccgcagggagtctgccatctga

SEQ ID NO: 175809 - DNA, 25 bp, probe
ctagccggatggactctaatgcagg

SEQ ID NO: 175810 - DNA, 25 bp, probe
ctacctagcatgcattttacacaca

SEQ ID NO: 175811 - DNA, 25 bp, probe
ctactctgcgctggcttttgacaga

SEQ ID NO: 175812 - DNA, 25 bp, probe
ctaccattgcttgttcagagaacaa

SEQ ID NO: 175813 - DNA, 25 bp, probe
ctaccattgcttgttcagagaacaa

SEQ ID NO: 175814 - DNA, 25 bp, probe
ctagcataatttgtattgaaatgaa

SEQ ID NO: 175815 - DNA, 25 bp, probe
ctctagcataatttgtattgaaatg

SEQ ID NO: 175816 - DNA, 25 bp, probe
ctaactttagtgtttgaacatgtcg

SEQ ID NO: 175817 - DNA, 25 bp, probe
ctaagcatttgtgttctgatatctg

SEQ ID NO: 175818 - DNA, 25 bp, probe
ctcaagtgcctacatggtgattctc

SEQ ID NO: 175819 - DNA, 25 bp, probe
ctcaagtgcctacatggtgattctc

SEQ ID NO: 175820 - DNA, 25 bp, probe
ctacgtcctgatcgacatggttctc

SEQ ID NO: 175821 - DNA, 25 bp, probe
ctacgtcctgatcgacatggttctc

SEQ ID NO: 175822 - DNA, 25 bp, probe
ctactggccagatgagggtgcctcc

SEQ ID NO: 175823 - DNA, 25 bp, probe
ctacatggctacaggggtttcacag

SEQ ID NO: 175824 - DNA, 25 bp, probe
ctaccgattctttggagttgtcaca

SEQ ID NO: 175825 - DNA, 25 bp, probe
ctaaagctttcgggagtggtcagac

SEQ ID NO: 175826 - DNA, 25 bp, probe
ctacaagtttctgggcgagcgtgat

SEQ ID NO: 175827 - DNA, 25 bp, probe
ctacaagtttctgggcgagcgtgat

SEQ ID NO: 175828 - DNA, 25 bp, probe
ctacaggtcggtgggggtggagaca

SEQ ID NO: 175829 - DNA, 25 bp, probe
ctcacgtcccgagctggggtaatca

SEQ ID NO: 175830 - DNA, 25 bp, probe
tctaacccccagctgggtctaatcc

SEQ ID NO: 175831 - DNA, 25 bp, probe
ctaagcccccgctgtaatgaaacac

SEQ ID NO: 175832 - DNA, 25 bp, probe
ctaccgcccctcagataatgtaagc

SEQ ID NO: 175833 - DNA, 25 bp, probe
ctaccgcccctcagataatgtaagc

SEQ ID NO: 175834 - DNA, 25 bp, probe
ccccccaactgtgaatctgtaaata

SEQ ID NO: 175835 - DNA, 25 bp, probe
ctccccgaacatcacagtttaccaa

SEQ ID NO: 175836 - DNA, 25 bp, probe
ctcacgttaactcacatttatacag

SEQ ID NO: 175837 - DNA, 25 bp, probe
ctacctcaacacccttatgattcac

SEQ ID NO: 175838 - DNA, 25 bp, probe
ctacctcaacacccttatgattcac

SEQ ID NO: 175839 - DNA, 25 bp, probe
ctacacgaacctctgcaagttcacc

SEQ ID NO: 175840 - DNA, 25 bp, probe
ctaataaaactttgacgagtcacct

SEQ ID NO: 175841 - DNA, 25 bp, probe
ctaatcaacaactcagcaccgtgac

SEQ ID NO: 175842 - DNA, 25 bp, probe
ctaccattgctacgatactccgaga

SEQ ID NO: 175843 - DNA, 25 bp, probe
ctacaagtctgggaccccgatgcag

SEQ ID NO: 175844 - DNA, 25 bp, probe
ctacaaggctgccaagttccgcgtg

SEQ ID NO: 175845 - DNA, 25 bp, probe
ctacaagaacgaagtcttcactgtc

SEQ ID NO: 175846 - DNA, 25 bp, probe
ctagccagaagggtgattctaatat

SEQ ID NO: 175847 - DNA, 25 bp, probe
ctagccaggacacatttccactata

SEQ ID NO: 175848 - DNA, 25 bp, probe
ctaacctgacagttgttgccaggaa

SEQ ID NO: 175849 - DNA, 25 bp, probe
ctaagccttagttctttcatctaga

SEQ ID NO: 175850 - DNA, 25 bp, probe
ctaacaccttatttctctctctaag

SEQ ID NO: 175851 - DNA, 25 bp, probe
tctaaccctagctaactttagaagt

SEQ ID NO: 175852 - DNA, 25 bp, probe
tctaaccctagctaactttagaagt

SEQ ID NO: 175853 - DNA, 25 bp, probe
ctaaccacccaatcattctaaagca

SEQ ID NO: 175854 - DNA, 25 bp, probe
ctaccccccatacttatatcaaggt

SEQ ID NO: 175855 - DNA, 25 bp, probe
ctacacctcaccagtttgaacagtt

SEQ ID NO: 175856 - DNA, 25 bp, probe
ctaccagtctccattttgcaaatgc

SEQ ID NO: 175857 - DNA, 25 bp, probe
ctaccatttcccttttgcggatggg

SEQ ID NO: 175858 - DNA, 25 bp, probe
ctacttcaccctgttcatcgtgatg

SEQ ID NO: 175859 - DNA, 25 bp, probe
ctgtggacacccagttcatcgacga

SEQ ID NO: 175860 - DNA, 25 bp, probe
ctctggcaccaggggtttcctgagc

SEQ ID NO: 175861 - DNA, 25 bp, probe
ctctggcaccaggggtttcctgagc

SEQ ID NO: 175862 - DNA, 25 bp, probe
ctaagcaagtgcctggtttcctgca

SEQ ID NO: 175863 - DNA, 25 bp, probe
ctcacagccgtgctggctgactttg

SEQ ID NO: 175864 - DNA, 25 bp, probe
ctaccttgtaggcctgagcatgctg

SEQ ID NO: 175865 - DNA, 25 bp, probe
ctaccttgtaggcctgagcatgctg

SEQ ID NO: 175866 - DNA, 25 bp, probe
ctaccctgtgagccggagctcatgc

SEQ ID NO: 175867 - DNA, 25 bp, probe
ctaccctgtgagccggagctcatgc

SEQ ID NO: 175868 - DNA, 25 bp, probe
ctaccctgtgagccggagctcatgc

SEQ ID NO: 175869 - DNA, 25 bp, probe
ctaccgatgagacgctggactccat

SEQ ID NO: 175870 - DNA, 25 bp, probe
ctcacctggcagttgtttgcttatt

SEQ ID NO: 175871 - DNA, 25 bp, probe
ctacatgtgagatagttttcatttt

SEQ ID NO: 175872 - DNA, 25 bp, probe
ctacttggtggactctgttgctaaa

SEQ ID NO: 175873 - DNA, 25 bp, probe
ctacagtggtgtgattcgtgcagaa

SEQ ID NO: 175874 - DNA, 25 bp, probe
ctacctagactggattcgtgacaac

SEQ ID NO: 175875 - DNA, 25 bp, probe
ctaccctcagatgtgtcctaacact

SEQ ID NO: 175876 - DNA, 25 bp, probe
ctaacactcgagttggcaccaaacg

SEQ ID NO: 175877 - DNA, 25 bp, probe
ctaccactgtattaacaccacaact

SEQ ID NO: 175878 - DNA, 25 bp, probe
ctactacctcactagacatccaaag

SEQ ID NO: 175879 - DNA, 25 bp, probe
ctactacctcattttataaaactat

SEQ ID NO: 175880 - DNA, 25 bp, probe
ctaaaccttttcatgcaaaagttga

SEQ ID NO: 175881 - DNA, 25 bp, probe
ctaagtgccttttcatccaaatgga

SEQ ID NO: 175882 - DNA, 25 bp, probe
ctacaggcccttcaatatccatgga

SEQ ID NO: 175883 - DNA, 25 bp, probe
ctaagaggctgctgaaaaccatctg

SEQ ID NO: 175884 - DNA, 25 bp, probe
ctaaccctgggatgaagtatctgtg

SEQ ID NO: 175885 - DNA, 25 bp, probe
ctacaccctgcggaataagaatgta

SEQ ID NO: 175886 - DNA, 25 bp, probe
ctacatcccctggaagtacaaggac

SEQ ID NO: 175887 - DNA, 25 bp, probe
ctacccctcatggaaagacagctgg

SEQ ID NO: 175888 - DNA, 25 bp, probe
ctaccttccagttgtcagcaagcag

SEQ ID NO: 175889 - DNA, 25 bp, probe
ctaagctgctgccgcttgacaaaga

SEQ ID NO: 175890 - DNA, 25 bp, probe
ctaactctacctggacacacagaag

SEQ ID NO: 175891 - DNA, 25 bp, probe
ctacaagtccctcatggcacaggag

SEQ ID NO: 175892 - DNA, 25 bp, probe
ctacaagtccctcatggcacaggag

SEQ ID NO: 175893 - DNA, 25 bp, probe
ctacgactccctgctggtcaaagtc

SEQ ID NO: 175894 - DNA, 25 bp, probe
ctaaactgccctgtggctttcttgt

SEQ ID NO: 175895 - DNA, 25 bp, probe
ctaaagtccttcaggtgtccttctc

SEQ ID NO: 175896 - DNA, 25 bp, probe
ctaaggtcctccagtgcttgaatat

SEQ ID NO: 175897 - DNA, 25 bp, probe
ctacaaatcactaccgctttgcaat

SEQ ID NO: 175898 - DNA, 25 bp, probe
ctacaacaatctatcctgctgctgg

SEQ ID NO: 175899 - DNA, 25 bp, probe
ctccataaatgtcaccttgggggcc

SEQ ID NO: 175900 - DNA, 25 bp, probe
ctcccaaatggaccctgtggggtat

SEQ ID NO: 175901 - DNA, 25 bp, probe
ctctgcagcaaaaagtccccgctgg

SEQ ID NO: 175902 - DNA, 25 bp, probe
ctctgcagcaaaaagtccccgctgg

SEQ ID NO: 175903 - DNA, 25 bp, probe
ctcatcagaaatatggccccaaagt

SEQ ID NO: 175904 - DNA, 25 bp, probe
ctcatcgaaactggggaaccatgat

SEQ ID NO: 175905 - DNA, 25 bp, probe
ctcacgagacctttgagaaggcaag

SEQ ID NO: 175906 - DNA, 25 bp, probe
ctcacgactcttcctgcaaagggaa

SEQ ID NO: 175907 - DNA, 25 bp, probe
ctaagagtatcatctgccagaggcc

SEQ ID NO: 175908 - DNA, 25 bp, probe
ctacagagcgtatagcctggtgctg

SEQ ID NO: 175909 - DNA, 25 bp, probe
ctaccgctttgcaatcactgtggcg

SEQ ID NO: 175910 - DNA, 25 bp, probe
ctacgcagcccaggcatgactgtgg

SEQ ID NO: 175911 - DNA, 25 bp, probe
ctactgcatgctgcggtggttgtgt

SEQ ID NO: 175912 - DNA, 25 bp, probe
ctacctggtcatctggtgtgctgat

SEQ ID NO: 175913 - DNA, 25 bp, probe
ctacctggccagtggagtggtccat

SEQ ID NO: 175914 - DNA, 25 bp, probe
ctacggcggcagtggagatggcgcc

SEQ ID NO: 175915 - DNA, 25 bp, probe
ctacgtgggctaccaggtgatgcgg

SEQ ID NO: 175916 - DNA, 25 bp, probe
ctaccttgctgccaacaagtttgtg

SEQ ID NO: 175917 - DNA, 25 bp, probe
ctaccttctttaccagatgctttgt

SEQ ID NO: 175918 - DNA, 25 bp, probe
ctacgtcttcgttggcagagatttc

SEQ ID NO: 175919 - DNA, 25 bp, probe
ctacagctttctcggggagaccttc

SEQ ID NO: 175920 - DNA, 25 bp, probe
ctacagcaacctacgggagaccgat

SEQ ID NO: 175921 - DNA, 25 bp, probe
ctacatcaacgtctggtatgaccca

SEQ ID NO: 175922 - DNA, 25 bp, probe
ctacatcaacagcaccgtgaacccc

SEQ ID NO: 175923 - DNA, 25 bp, probe
ctactcggccaaccagtgcaaagcc

SEQ ID NO: 175924 - DNA, 25 bp, probe
ctaatcgagcacttctcaccaaact

SEQ ID NO: 175925 - DNA, 25 bp, probe
ctactcttgacttagacctatactg

SEQ ID NO: 175926 - DNA, 25 bp, probe
ctcactttaacttgtatctcatact

SEQ ID NO: 175927 - DNA, 25 bp, probe
ctcaacttataaactgtctgcagac

SEQ ID NO: 175928 - DNA, 25 bp, probe
ctcacacttgtctgttcttcagtgc

SEQ ID NO: 175929 - DNA, 25 bp, probe
ctactctctgatatttcctatgtac

SEQ ID NO: 175930 - DNA, 25 bp, probe
ctacctctactgtttcagctcatta

SEQ ID NO: 175931 - DNA, 25 bp, probe
ctacccatagtctttgtgtgcttgc

SEQ ID NO: 175932 - DNA, 25 bp, probe
ctacgccaagcattatgtgctgtgc

SEQ ID NO: 175933 - DNA, 25 bp, probe
ctaagtcacagggatctgctgcagc

SEQ ID NO: 175934 - DNA, 25 bp, probe
ctactgtggcattggcatcgacgcg

SEQ ID NO: 175935 - DNA, 25 bp, probe
ctacgagagtagcctctgacgctgg

SEQ ID NO: 175936 - DNA, 25 bp, probe
ctacgacaagcgctgcgacctgtgg

SEQ ID NO: 175937 - DNA, 25 bp, probe
ctactacacaggcctgataactctg

SEQ ID NO: 175938 - DNA, 25 bp, probe
ctacttcgcagaggctgacaaccag

SEQ ID NO: 175939 - DNA, 25 bp, probe
ctactttgtgcaggtcatacctccc

SEQ ID NO: 175940 - DNA, 25 bp, probe
ctactttgtgcaggtcatacctccc

SEQ ID NO: 175941 - DNA, 25 bp, probe
ctccagattctaggtcagaccctca

SEQ ID NO: 175942 - DNA, 25 bp, probe
ctaaattccacactaccacattaaa

SEQ ID NO: 175943 - DNA, 25 bp, probe
ctcaaattgtattctatatccatta

SEQ ID NO: 175944 - DNA, 25 bp, probe
ctcaagtcattcatttatcctaata

SEQ ID NO: 175945 - DNA, 25 bp, probe
ctcacagtatttattatcctgcacc

SEQ ID NO: 175946 - DNA, 25 bp, probe
ctacactttatccattattctactg

SEQ ID NO: 175947 - DNA, 25 bp, probe
ctcaagctgggcaactttttcctga

SEQ ID NO: 175948 - DNA, 25 bp, probe
ctaatgctcagagatcttttttcac

SEQ ID NO: 175949 - DNA, 25 bp, probe
ctaacatagtactttctttccagca

SEQ ID NO: 175950 - DNA, 25 bp, probe
ctaacaggtatcattcctatccatg

SEQ ID NO: 175951 - DNA, 25 bp, probe
ctaatcaggcttatccgatgtgcta

SEQ ID NO: 175952 - DNA, 25 bp, probe
ctaatcagcttgcaaggagatagga

SEQ ID NO: 175953 - DNA, 25 bp, probe
ctaatagcaggcaagaggatccagg

SEQ ID NO: 175954 - DNA, 25 bp, probe
ctcactgctggggagtccctgccac

SEQ ID NO: 175955 - DNA, 25 bp, probe
ctacttggactggatccaccactat

SEQ ID NO: 175956 - DNA, 25 bp, probe
ctactgggagatgaccaatcaagat

SEQ ID NO: 175957 - DNA, 25 bp, probe
ctactgagctaatagccactagcag

SEQ ID NO: 175958 - DNA, 25 bp, probe
ctcactagcataagcacactcccag

SEQ ID NO: 175959 - DNA, 25 bp, probe
ctactgatgctagacacttggcaga

SEQ ID NO: 175960 - DNA, 25 bp, probe
ctactgagctcatttcacttactgt

SEQ ID NO: 175961 - DNA, 25 bp, probe
ctacgagtcttctagcttcatgttc

SEQ ID NO: 175962 - DNA, 25 bp, probe
ctcactgcagtggattttttgcctc

SEQ ID NO: 175963 - DNA, 25 bp, probe
ctcactggcgaaattccattcgctc

SEQ ID NO: 175964 - DNA, 25 bp, probe
ctcagtactttaacatcgtcgctct

SEQ ID NO: 175965 - DNA, 25 bp, probe
ctcagtactttaacatcgtcgctct

SEQ ID NO: 175966 - DNA, 25 bp, probe
ctcagtcaagttatcctggagtctt

SEQ ID NO: 175967 - DNA, 25 bp, probe
ctcgtaaacatatcagtagacctgg

SEQ ID NO: 175968 - DNA, 25 bp, probe
ctcggtacttaggacttgatcctgt

SEQ ID NO: 175969 - DNA, 25 bp, probe
ctcagagctgttaagggcttatttt

SEQ ID NO: 175970 - DNA, 25 bp, probe
ctcacaagtttctgtttatatttct

SEQ ID NO: 175971 - DNA, 25 bp, probe
ctaaacttggcagtttctaacttgt

SEQ ID NO: 175972 - DNA, 25 bp, probe
ctacaaccccgttatctatgtcttt

SEQ ID NO: 175973 - DNA, 25 bp, probe
ctacaaccccgttatctatgtcttt

SEQ ID NO: 175974 - DNA, 25 bp, probe
ctacaaaacacagtgaacgactttt

SEQ ID NO: 175975 - DNA, 25 bp, probe
ctacaaactgaagtgcaaggcactg

SEQ ID NO: 175976 - DNA, 25 bp, probe
ctacacaattgaagatggagcccgt

SEQ ID NO: 175977 - DNA, 25 bp, probe
ctacagcaggagtgcatgaggcaac

SEQ ID NO: 175978 - DNA, 25 bp, probe
ctcaagcaatggagagcggcgagca

SEQ ID NO: 175979 - DNA, 25 bp, probe
ctacagaatggctcctcgggatggt

SEQ ID NO: 175980 - DNA, 25 bp, probe
ctacatgggtgcttcccattccagg

SEQ ID NO: 175981 - DNA, 25 bp, probe
ctacatgggtcattccatagtgcag

SEQ ID NO: 175982 - DNA, 25 bp, probe
ctacaggtttaccaaccagcattga

SEQ ID NO: 175983 - DNA, 25 bp, probe
ctacatggtttacatgttccaatat

SEQ ID NO: 175984 - DNA, 25 bp, probe
ctacgctttccggagcctggaattg

SEQ ID NO: 175985 - DNA, 25 bp, probe
ctacgtcttccgatcagtggtgtct

SEQ ID NO: 175986 - DNA, 25 bp, probe
ctacgtgggccgagcgggatcttga

SEQ ID NO: 175987 - DNA, 25 bp, probe
ctaccgatccccagaagtgatcctg

SEQ ID NO: 175988 - DNA, 25 bp, probe
ctaccgcaacctgaactgtgaggcg

SEQ ID NO: 175989 - DNA, 25 bp, probe
ctactccaaattccaacctcagagc

SEQ ID NO: 175990 - DNA, 25 bp, probe
ctactccaagaaaccaacgctgaga

SEQ ID NO: 175991 - DNA, 25 bp, probe
ctacatcaacagaagcccgggtgct

SEQ ID NO: 175992 - DNA, 25 bp, probe
ctacatcaagggccagcagcgaagg

SEQ ID NO: 175993 - DNA, 25 bp, probe
ctacacatagtggttctgaactgag

SEQ ID NO: 175994 - DNA, 25 bp, probe
ctaacatcgaagcatctgaatcatg

SEQ ID NO: 175995 - DNA, 25 bp, probe
ctcaattagaagcctcgtaccaatc

SEQ ID NO: 175996 - DNA, 25 bp, probe
ctaataatatacgttgtacccatta

SEQ ID NO: 175997 - DNA, 25 bp, probe
ctaataaatagcgctcttcccttca

SEQ ID NO: 175998 - DNA, 25 bp, probe
ctactttatcacacttatcctctga

SEQ ID NO: 175999 - DNA, 25 bp, probe
ctcaagctttacacagctgtcctta

SEQ ID NO: 176000 - DNA, 25 bp, probe
ctaactatatacccatctctgattt

SEQ ID NO: 176001 - DNA, 25 bp, probe
ctacactatctaacatctggctgtt

SEQ ID NO: 176002 - DNA, 25 bp, probe
ctcagcctattaaatttcccataaa

SEQ ID NO: 176003 - DNA, 25 bp, probe
ctcagcctgtttgaggacaccctag

SEQ ID NO: 176004 - DNA, 25 bp, probe
ctcccttttccagaacaccaggtgt

SEQ ID NO: 176005 - DNA, 25 bp, probe
gagcccctttggctaagacgggttg

SEQ ID NO: 176006 - DNA, 25 bp, probe
gagcccctttggctaagacgggttg

SEQ ID NO: 176007 - DNA, 25 bp, probe
ctgagcccctttggctaagacgggt

SEQ ID NO: 176008 - DNA, 25 bp, probe
ctcagaaccttggggaaggtggctg

SEQ ID NO: 176009 - DNA, 25 bp, probe
ctaaaaattagctgggtgtggtggt

SEQ ID NO: 176010 - DNA, 25 bp, probe
ctaaaacattacagttgccaaggag

SEQ ID NO: 176011 - DNA, 25 bp, probe
ctaaaccttcccctgtgacagaaga

SEQ ID NO: 176012 - DNA, 25 bp, probe
ctactctccattgacctggacaagg

SEQ ID NO: 176013 - DNA, 25 bp, probe
ctaacccagaaactctggacagcag

SEQ ID NO: 176014 - DNA, 25 bp, probe
ctaacttcagagtgcagtctacaac

SEQ ID NO: 176015 - DNA, 25 bp, probe
ctcaccattaactggcctgatctaa

SEQ ID NO: 176016 - DNA, 25 bp, probe
ctacgcttcacctggagcatgaaaa

SEQ ID NO: 176017 - DNA, 25 bp, probe
ctacgcttcacctggagcatgaaaa

SEQ ID NO: 176018 - DNA, 25 bp, probe
ctacgcttcacctggagcatgaaaa

SEQ ID NO: 176019 - DNA, 25 bp, probe
ctacggctacttcaacgagaacttc

SEQ ID NO: 176020 - DNA, 25 bp, probe
ctccttgcttccctaacaggaaggt

SEQ ID NO: 176021 - DNA, 25 bp, probe
ctcccagttacagaaaggccaagtg

SEQ ID NO: 176022 - DNA, 25 bp, probe
ctcatccagttaaccaaatggccaa

SEQ ID NO: 176023 - DNA, 25 bp, probe
ctgacacaggaaaccaacacccaaa

SEQ ID NO: 176024 - DNA, 25 bp, probe
ctgagaaaaacccaagaccgctcgg

SEQ ID NO: 176025 - DNA, 25 bp, probe
ctaagaaagagccgaaagcaccact

SEQ ID NO: 176026 - DNA, 25 bp, probe
ctacaccatacacgcaaaagacacc

SEQ ID NO: 176027 - DNA, 25 bp, probe
ctacgccattcaggaaggcagcaca

SEQ ID NO: 176028 - DNA, 25 bp, probe
ctactgcctgtagtctgatgacgat

SEQ ID NO: 176029 - DNA, 25 bp, probe
ctactgctccaagtcagatgtggat

SEQ ID NO: 176030 - DNA, 25 bp, probe
ctacccaaattgcctctggcatgaa

SEQ ID NO: 176031 - DNA, 25 bp, probe
ctacgcaccataagactctgccaga

SEQ ID NO: 176032 - DNA, 25 bp, probe
ctacgcaccataagactctgccaga

SEQ ID NO: 176033 - DNA, 25 bp, probe
ctacagcagccgcatgagctgggga

SEQ ID NO: 176034 - DNA, 25 bp, probe
ctactggcgctgccaaggctgtggg

SEQ ID NO: 176035 - DNA, 25 bp, probe
ctactggcgtgtggggctgatgtga

SEQ ID NO: 176036 - DNA, 25 bp, probe
ctaagggatgcagtggagtgtggtg

SEQ ID NO: 176037 - DNA, 25 bp, probe
ctaagaagctgctttgagctcctgg

SEQ ID NO: 176038 - DNA, 25 bp, probe
ctaaatatgctggatatagctttga

SEQ ID NO: 176039 - DNA, 25 bp, probe
ctcaatgaatgggatgtctaatgta

SEQ ID NO: 176040 - DNA, 25 bp, probe
ctcaacagtgagatgcaaaggtata

SEQ ID NO: 176041 - DNA, 25 bp, probe
ctcagctcaaagggcaatcgggaag

SEQ ID NO: 176042 - DNA, 25 bp, probe
ctactaggaggagccagggactggg

SEQ ID NO: 176043 - DNA, 25 bp, probe
ctacttggggaaatcaggtgcagcg

SEQ ID NO: 176044 - DNA, 25 bp, probe
ctacaacgaggccaaatgtgtcacc

SEQ ID NO: 176045 - DNA, 25 bp, probe
ctactacatgagccctgaattgttc

SEQ ID NO: 176046 - DNA, 25 bp, probe
ctactacgtcaggcagaattcttca

SEQ ID NO: 176047 - DNA, 25 bp, probe
ctacaactgttggagacttctggca

SEQ ID NO: 176048 - DNA, 25 bp, probe
ctacgacttcaggaggctcctgcgc

SEQ ID NO: 176049 - DNA, 25 bp, probe
ctactgacttcactggagtctcagg

SEQ ID NO: 176050 - DNA, 25 bp, probe
ctacatggctcctgaagtctgggag

SEQ ID NO: 176051 - DNA, 25 bp, probe
ctacatagctcctgagatcctgcag

SEQ ID NO: 176052 - DNA, 25 bp, probe
ctaatgatgctctcagactacgctg

SEQ ID NO: 176053 - DNA, 25 bp, probe
ctacagctgctctagccttagttgc

SEQ ID NO: 176054 - DNA, 25 bp, probe
ctcaggatccaagctaagcactgcc

SEQ ID NO: 176055 - DNA, 25 bp, probe
ctcaggatccaagctaagcactgcc

SEQ ID NO: 176056 - DNA, 25 bp, probe
ctcacgtgcagtaatcaacgcccgc

SEQ ID NO: 176057 - DNA, 25 bp, probe
ctaagcgcagggagacgctgctccc

SEQ ID NO: 176058 - DNA, 25 bp, probe
ctacacgggagacgacgtccgcatc

SEQ ID NO: 176059 - DNA, 25 bp, probe
ctacatcgcggagaacgtgctggcc

SEQ ID NO: 176060 - DNA, 25 bp, probe
ctactttgatacgacaccgcatggc

SEQ ID NO: 176061 - DNA, 25 bp, probe
ctaatgttatgactgatcactccat

SEQ ID NO: 176062 - DNA, 25 bp, probe
ctacatacaagacttcaccataagg

SEQ ID NO: 176063 - DNA, 25 bp, probe
ctactgccacaagttcatccagcaa

SEQ ID NO: 176064 - DNA, 25 bp, probe
ctactgctacatcttcatcttcagg

SEQ ID NO: 176065 - DNA, 25 bp, probe
ctcactggcctgcaattttctggtg

SEQ ID NO: 176066 - DNA, 25 bp, probe
ctcatgtagttcgatatttctctgc

SEQ ID NO: 176067 - DNA, 25 bp, probe
ctcgtagttcccaaactcatggaag

SEQ ID NO: 176068 - DNA, 25 bp, probe
ctcggcacctgttaaacttggaggc

SEQ ID NO: 176069 - DNA, 25 bp, probe
ctcttcccctaaaacttctgcaggg

SEQ ID NO: 176070 - DNA, 25 bp, probe
ctcactcccaaatggaccctgtggg

SEQ ID NO: 176071 - DNA, 25 bp, probe
ctcctccgaaagcgacgtgtggagc

SEQ ID NO: 176072 - DNA, 25 bp, probe
ctcctccagaagtgcccggagaagc

SEQ ID NO: 176073 - DNA, 25 bp, probe
ctcttcaggaccaaggtctgggaac

SEQ ID NO: 176074 - DNA, 25 bp, probe
ctcttgcataagcctcaggcctggc

SEQ ID NO: 176075 - DNA, 25 bp, probe
ctcttgcataagcctcaggcctggc

SEQ ID NO: 176076 - DNA, 25 bp, probe
ctctacaatgatggtgacagcctgc

SEQ ID NO: 176077 - DNA, 25 bp, probe
ctaagagatgtgactacagcctgcc

SEQ ID NO: 176078 - DNA, 25 bp, probe
ctacaatgatggtgacagcctgcag

SEQ ID NO: 176079 - DNA, 25 bp, probe
ctactatatccttgagacagccacc

SEQ ID NO: 176080 - DNA, 25 bp, probe
ctacttgaagtcctgaagctcgcct

SEQ ID NO: 176081 - DNA, 25 bp, probe
ctacactccagtgagacagctctgc

SEQ ID NO: 176082 - DNA, 25 bp, probe
ctacattctttttagagtctgattt

SEQ ID NO: 176083 - DNA, 25 bp, probe
ctactatccttgctaagttttcata

SEQ ID NO: 176084 - DNA, 25 bp, probe
ctaacttctccgcaagttgtcctat

SEQ ID NO: 176085 - DNA, 25 bp, probe
ctaactaacgtgaaagccttacaga

SEQ ID NO: 176086 - DNA, 25 bp, probe
ctaactaacagtcacgccgtgggat

SEQ ID NO: 176087 - DNA, 25 bp, probe
ctcaaccagccatctacttcttggc

SEQ ID NO: 176088 - DNA, 25 bp, probe
ctaaccagttaccacacatctatga

SEQ ID NO: 176089 - DNA, 25 bp, probe
ctaaccagttaccacacatctatga

SEQ ID NO: 176090 - DNA, 25 bp, probe
ctcaaccaggatttcactcttcaaa

SEQ ID NO: 176091 - DNA, 25 bp, probe
ctcaagccagaaaatctcatcctag

SEQ ID NO: 176092 - DNA, 25 bp, probe
ctcaacgtgaagcttttctgggaga

SEQ ID NO: 176093 - DNA, 25 bp, probe
ctcaagaggaatctgtttctctgct

SEQ ID NO: 176094 - DNA, 25 bp, probe
ctcaagaggaatctgtttctctgct

SEQ ID NO: 176095 - DNA, 25 bp, probe
ctaagaggcgtgctgtgggcgctgt

SEQ ID NO: 176096 - DNA, 25 bp, probe
ctactgatagggctgggtctgtgtg

SEQ ID NO: 176097 - DNA, 25 bp, probe
cgtctgtcaggggcttggatttcgt

SEQ ID NO: 176098 - DNA, 25 bp, probe
cgctccatgggggtatggttttgtc

SEQ ID NO: 176099 - DNA, 25 bp, probe
ctctccatgggtgttttcaaggctg

SEQ ID NO: 176100 - DNA, 25 bp, probe
ctctaattttggattccttggtgga

SEQ ID NO: 176101 - DNA, 25 bp, probe
ctcgaacttttcataactcagggga

SEQ ID NO: 176102 - DNA, 25 bp, probe
ctcaaacttcctggtaactcaaggc

SEQ ID NO: 176103 - DNA, 25 bp, probe
tcccaatttaaacaactcaagtcag

SEQ ID NO: 176104 - DNA, 25 bp, probe
cccaacctcaaataaccattccaag

SEQ ID NO: 176105 - DNA, 25 bp, probe
ctcaaacagccaaacgaaacttccg

SEQ ID NO: 176106 - DNA, 25 bp, probe
ctcaaacgcgtggaaaatatctatc

SEQ ID NO: 176107 - DNA, 25 bp, probe
ctcaaacacgggaagttcaccagca

SEQ ID NO: 176108 - DNA, 25 bp, probe
ctcagacacctgtggaatacccaat

SEQ ID NO: 176109 - DNA, 25 bp, probe
ctaagctcagtatgcaaaagcccaa

SEQ ID NO: 176110 - DNA, 25 bp, probe
ctacaccatgtttgagctcagaccc

SEQ ID NO: 176111 - DNA, 25 bp, probe
ctaacctgcttgggtatgcagcagc

SEQ ID NO: 176112 - DNA, 25 bp, probe
ctaacctgcttgggtatgcagcagc

SEQ ID NO: 176113 - DNA, 25 bp, probe
ctacatcgtcatggagcttgtgcag

SEQ ID NO: 176114 - DNA, 25 bp, probe
ctacatccacattgtgccagctatc

SEQ ID NO: 176115 - DNA, 25 bp, probe
ctactactcagattgccagctttaa

SEQ ID NO: 176116 - DNA, 25 bp, probe
ctactttatctacggatttagaatg

SEQ ID NO: 176117 - DNA, 25 bp, probe
ctactttctctacagcttttcatgt

SEQ ID NO: 176118 - DNA, 25 bp, probe
ctactagcaacaacaactttcttgt

SEQ ID NO: 176119 - DNA, 25 bp, probe
ctcactagataaaaccattggcctt

SEQ ID NO: 176120 - DNA, 25 bp, probe
ctcagtaataaactccctggcctct

SEQ ID NO: 176121 - DNA, 25 bp, probe
ctcagtaataaactccctggcctct

SEQ ID NO: 176122 - DNA, 25 bp, probe
ctcagatggatacacccctgagcca

SEQ ID NO: 176123 - DNA, 25 bp, probe
ctaatgtatgaactcctgactggca

SEQ ID NO: 176124 - DNA, 25 bp, probe
ctaagtcagcattatctctgagtcc

SEQ ID NO: 176125 - DNA, 25 bp, probe
ctacacatgtggtactctgagctcc

SEQ ID NO: 176126 - DNA, 25 bp, probe
ctactctgtggagcacgatgtgccc

SEQ ID NO: 176127 - DNA, 25 bp, probe
ctactctgtggagcacgatgtgccc

SEQ ID NO: 176128 - DNA, 25 bp, probe
ctactcttgtcagacaatggctata

SEQ ID NO: 176129 - DNA, 25 bp, probe
ctcaccttggacggaatgggatggg

SEQ ID NO: 176130 - DNA, 25 bp, probe
ctactcttgtgtttaggggatggtg

SEQ ID NO: 176131 - DNA, 25 bp, probe
ctaatcttgttcttcacggtgatat

SEQ ID NO: 176132 - DNA, 25 bp, probe
ctaaggacctcattcatcgtctctt

SEQ ID NO: 176133 - DNA, 25 bp, probe
ctaaggacctcattcatcgtctctt

SEQ ID NO: 176134 - DNA, 25 bp, probe
ctcaaggactgctattctccttctt

SEQ ID NO: 176135 - DNA, 25 bp, probe
ctcacaggagcatctcctcaactct

SEQ ID NO: 176136 - DNA, 25 bp, probe
ctcacctggaactgccaaggcagcc

SEQ ID NO: 176137 - DNA, 25 bp, probe
ctcaccgaaagctcacagattgcag

SEQ ID NO: 176138 - DNA, 25 bp, probe
ctcacggaaatctcggagtggctgg

SEQ ID NO: 176139 - DNA, 25 bp, probe
ctctcagcaaaatgggagggacggg

SEQ ID NO: 176140 - DNA, 25 bp, probe
ctctcagaaccttggggaaggtggc

SEQ ID NO: 176141 - DNA, 25 bp, probe
ctcttcaaccttctgaagaccggcc

SEQ ID NO: 176142 - DNA, 25 bp, probe
ctaacaaccctttgaagctccgagc

SEQ ID NO: 176143 - DNA, 25 bp, probe
ctaacttacactttatagcatttat

SEQ ID NO: 176144 - DNA, 25 bp, probe
ctaacatagaccagtctgattttga

SEQ ID NO: 176145 - DNA, 25 bp, probe
ctcaagaaaccacatctggttcaga

SEQ ID NO: 176146 - DNA, 25 bp, probe
ctaaccacacaacatgaggctacag

SEQ ID NO: 176147 - DNA, 25 bp, probe
ctaacccagagacttcagtgtcctg

SEQ ID NO: 176148 - DNA, 25 bp, probe
ctaaccctaggcatcacatgctcaa

SEQ ID NO: 176149 - DNA, 25 bp, probe
ctactccactcagattgacatgtgg

SEQ ID NO: 176150 - DNA, 25 bp, probe
ctactccacagagatcgggatcagt

SEQ ID NO: 176151 - DNA, 25 bp, probe
ctactctgagcaggacacgggccag

SEQ ID NO: 176152 - DNA, 25 bp, probe
ctacttggactattcagggagctgc

SEQ ID NO: 176153 - DNA, 25 bp, probe
ctactctgtgaccaactgcggggag

SEQ ID NO: 176154 - DNA, 25 bp, probe
ctacttcagccgactctgggaggat

SEQ ID NO: 176155 - DNA, 25 bp, probe
ctaaacagacaggctacggatggat

SEQ ID NO: 176156 - DNA, 25 bp, probe
ctacaacgtcatggtcctggtgaac

SEQ ID NO: 176157 - DNA, 25 bp, probe
ctcacagacagtaggatcccagtaa

SEQ ID NO: 176158 - DNA, 25 bp, probe
ctcacagacagtaggatcccagtaa

SEQ ID NO: 176159 - DNA, 25 bp, probe
ctcaatacgctggagtccacgtgag

SEQ ID NO: 176160 - DNA, 25 bp, probe
ctacaagcgctggcgtaagcatggg

SEQ ID NO: 176161 - DNA, 25 bp, probe
ctacaatcgctctctagacatgtgg

SEQ ID NO: 176162 - DNA, 25 bp, probe
ctacaacttcatccgaagcatggcc

SEQ ID NO: 176163 - DNA, 25 bp, probe
ctacatagccccggagatcattgcc

SEQ ID NO: 176164 - DNA, 25 bp, probe
ctactagcttccagacaatcatgtc

SEQ ID NO: 176165 - DNA, 25 bp, probe
ctactattttgccagtgactagtcc

SEQ ID NO: 176166 - DNA, 25 bp, probe
ctaatcatttgggagatggctcgtc

SEQ ID NO: 176167 - DNA, 25 bp, probe
ctcaacattggagacatcacttgcc

SEQ ID NO: 176168 - DNA, 25 bp, probe
ctcgtgctggaagaattcaagacgg

SEQ ID NO: 176169 - DNA, 25 bp, probe
ctcgtgctggaagaattcaagacgg

SEQ ID NO: 176170 - DNA, 25 bp, probe
ctcagtgggattgaaacccagggtc

SEQ ID NO: 176171 - DNA, 25 bp, probe
ctcaaggtgcatttcaaactccagg

SEQ ID NO: 176172 - DNA, 25 bp, probe
ctcactttcattatactacctggcc

SEQ ID NO: 176173 - DNA, 25 bp, probe
ctcactattcttttagccgtctgga

SEQ ID NO: 176174 - DNA, 25 bp, probe
ctcctgcagttttctctgcacgtgg

SEQ ID NO: 176175 - DNA, 25 bp, probe
ctacatggtgattctcttgtccagg

SEQ ID NO: 176176 - DNA, 25 bp, probe
ctacatggcttatcttatgatctgg

SEQ ID NO: 176177 - DNA, 25 bp, probe
ctaatggttcatcctctataaggcc

SEQ ID NO: 176178 - DNA, 25 bp, probe
ctacattgttcttccgatatcagag

SEQ ID NO: 176179 - DNA, 25 bp, probe
ctcaattggagcggccgtcatcgag

SEQ ID NO: 176180 - DNA, 25 bp, probe
ctcaattggagcggccgtcatcgag

SEQ ID NO: 176181 - DNA, 25 bp, probe
ctacttgcaaccctcttattcatgg

SEQ ID NO: 176182 - DNA, 25 bp, probe
ctacttgcaaccctcttattcatgg

SEQ ID NO: 176183 - DNA, 25 bp, probe
ctacttaaagctctggattactgcc

SEQ ID NO: 176184 - DNA, 25 bp, probe
ctcagcttagaagttcgaaaactca

SEQ ID NO: 176185 - DNA, 25 bp, probe
ctcactctcgatcgtgttataacac

SEQ ID NO: 176186 - DNA, 25 bp, probe
ctcaactcgggcgtattcaacaacc

SEQ ID NO: 176187 - DNA, 25 bp, probe
ctcaacactgggctgatcctgaatg

SEQ ID NO: 176188 - DNA, 25 bp, probe
ctcaacactgggctgatcctgaatg

SEQ ID NO: 176189 - DNA, 25 bp, probe
ctaacctagaggccaccgagaaaca

SEQ ID NO: 176190 - DNA, 25 bp, probe
ctacactcttgagcaataccagaaa

SEQ ID NO: 176191 - DNA, 25 bp, probe
ctacactcttgagcaataccagaaa

SEQ ID NO: 176192 - DNA, 25 bp, probe
ctaagcctggctgcaaagaagaatc

SEQ ID NO: 176193 - DNA, 25 bp, probe
ctacacgctggccagcaaggagatg

SEQ ID NO: 176194 - DNA, 25 bp, probe
ctacacgctgcggaacatggaagtg

SEQ ID NO: 176195 - DNA, 25 bp, probe
ctacagcagcgggactttgcaacat

SEQ ID NO: 176196 - DNA, 25 bp, probe
ctcacagtcgatgactttgaaatcg

SEQ ID NO: 176197 - DNA, 25 bp, probe
ctcactaggcatgtcttgggaattg

SEQ ID NO: 176198 - DNA, 25 bp, probe
ctcactggcaagctcttgcagttca

SEQ ID NO: 176199 - DNA, 25 bp, probe
ctcattgccgtgtccaatcattatg

SEQ ID NO: 176200 - DNA, 25 bp, probe
ctcaccgtgtttgcatgctgtatgt

SEQ ID NO: 176201 - DNA, 25 bp, probe
ctcacctgttggaatgcactaatgt

SEQ ID NO: 176202 - DNA, 25 bp, probe
ctcaccttttgctgagcttcaatca

SEQ ID NO: 176203 - DNA, 25 bp, probe
ctcaagcttttcaggcatcctcata

SEQ ID NO: 176204 - DNA, 25 bp, probe
ctcacagctgtgatcacgagccatt

SEQ ID NO: 176205 - DNA, 25 bp, probe
ctcacagctgtgatcacgagccatt

SEQ ID NO: 176206 - DNA, 25 bp, probe
ctcagcgcgctggagacgctgcagc

SEQ ID NO: 176207 - DNA, 25 bp, probe
ctcagccgtgaactacgacttcgac

SEQ ID NO: 176208 - DNA, 25 bp, probe
ctacagcgtggacaaatctctcagc

SEQ ID NO: 176209 - DNA, 25 bp, probe
ctacagcttcggcctaatcatttgg

SEQ ID NO: 176210 - DNA, 25 bp, probe
ctacatctactgatgctagacactt

SEQ ID NO: 176211 - DNA, 25 bp, probe
ctacatctagccatgcgaggtcttg

SEQ ID NO: 176212 - DNA, 25 bp, probe
ctacactgagcaccaggtggtctcc

SEQ ID NO: 176213 - DNA, 25 bp, probe
ctacaatgagctgcgtgtggctccc

SEQ ID NO: 176214 - DNA, 25 bp, probe
ctcaacatggccggttatgcacatc

SEQ ID NO: 176215 - DNA, 25 bp, probe
ctcacacagaggccactttgatgct

SEQ ID NO: 176216 - DNA, 25 bp, probe
ctaatcgaatgtctgctaatgcttt

SEQ ID NO: 176217 - DNA, 25 bp, probe
ctacattgatagcatttattgtgat

SEQ ID NO: 176218 - DNA, 25 bp, probe
ctacatcatgaagcattacaggatg

SEQ ID NO: 176219 - DNA, 25 bp, probe
ctaatatcatagacccatctggagg

SEQ ID NO: 176220 - DNA, 25 bp, probe
ctacattgatctacctcttgggaaa

SEQ ID NO: 176221 - DNA, 25 bp, probe
ctacattgatctacctcttgggaaa

SEQ ID NO: 176222 - DNA, 25 bp, probe
ctcggtgacgtcttcttggggacgt

SEQ ID NO: 176223 - DNA, 25 bp, probe
ctcggtgacgtcttcttggggacgt

SEQ ID NO: 176224 - DNA, 25 bp, probe
ctcttagggctctgtgagaggtggg

SEQ ID NO: 176225 - DNA, 25 bp, probe
ctcttgagtaccggtggacctgggg

SEQ ID NO: 176226 - DNA, 25 bp, probe
ctctttgaacctttggaggccgttg

SEQ ID NO: 176227 - DNA, 25 bp, probe
ctctaaaagaatatggcgtcatgcg

SEQ ID NO: 176228 - DNA, 25 bp, probe
ctgtttaagaacaggtcctgcagaa

SEQ ID NO: 176229 - DNA, 25 bp, probe
ctctttaaggaccagaaccaggaat

SEQ ID NO: 176230 - DNA, 25 bp, probe
ctacactcaaggatgtgaacctgga

SEQ ID NO: 176231 - DNA, 25 bp, probe
ctaatccacaggcctgtgagaactg

SEQ ID NO: 176232 - DNA, 25 bp, probe
ctacacccagatctgcaaatacatg

SEQ ID NO: 176233 - DNA, 25 bp, probe
ctaacccaagctggcagactggctg

SEQ ID NO: 176234 - DNA, 25 bp, probe
ctcacagggaacaagacacggctgg

SEQ ID NO: 176235 - DNA, 25 bp, probe
ctcacgcagtacattgacgggcagg

SEQ ID NO: 176236 - DNA, 25 bp, probe
ctcagggatcctttacagagcggga

SEQ ID NO: 176237 - DNA, 25 bp, probe
gttcggaaccaagcagacgttattt

SEQ ID NO: 176238 - DNA, 25 bp, probe
cccagggcccaagagacttagattg

SEQ ID NO: 176239 - DNA, 25 bp, probe
cccaaccccactgagaactaaatgc

SEQ ID NO: 176240 - DNA, 25 bp, probe
cccaaccccactgagaactaaatgc

SEQ ID NO: 176241 - DNA, 25 bp, probe
ccctacgaccccaagaagtacgatg

SEQ ID NO: 176242 - DNA, 25 bp, probe
tgtaattcgacccgagaaattccgg

SEQ ID NO: 176243 - DNA, 25 bp, probe
ctacatgtccccagaaagattccag

SEQ ID NO: 176244 - DNA, 25 bp, probe
ctcacttccctagagaaggcctgcc

SEQ ID NO: 176245 - DNA, 25 bp, probe
ctcagccttttagctaaggtcagtg

SEQ ID NO: 176246 - DNA, 25 bp, probe
ctcagacttttctctcagttgggat

SEQ ID NO: 176247 - DNA, 25 bp, probe
ctcagactctttttgtacctggtga

SEQ ID NO: 176248 - DNA, 25 bp, probe
ctcagactctttttgtacctggtga

SEQ ID NO: 176249 - DNA, 25 bp, probe
ctaactcaagactgttctggaatga

SEQ ID NO: 176250 - DNA, 25 bp, probe
ctaaggaaaccgttctgtgatatca

SEQ ID NO: 176251 - DNA, 25 bp, probe
ctcaggaaaacccattggcagatat

SEQ ID NO: 176252 - DNA, 25 bp, probe
ctcggaacattctgctgtcggaaag

SEQ ID NO: 176253 - DNA, 25 bp, probe
ctcggaaattacatggtgctgacca

SEQ ID NO: 176254 - DNA, 25 bp, probe
ctcggtcagcaccaacatggactga

SEQ ID NO: 176255 - DNA, 25 bp, probe
ctcggtcagcaccaacatggactga

SEQ ID NO: 176256 - DNA, 25 bp, probe
ctcagattcaaccgacagaaagaac

SEQ ID NO: 176257 - DNA, 25 bp, probe
ctcaagtcgggctacacggagaagc

SEQ ID NO: 176258 - DNA, 25 bp, probe
ctcaaacgttgctaccgagagatgg

SEQ ID NO: 176259 - DNA, 25 bp, probe
ctcaaagccacccaccgtaatggtg

SEQ ID NO: 176260 - DNA, 25 bp, probe
ctcaaggcggccacctggaaggtgc

SEQ ID NO: 176261 - DNA, 25 bp, probe
ctcaaggcggccacctggaaggtgc

SEQ ID NO: 176262 - DNA, 25 bp, probe
ctcaaagggcaatcgggaaggagca

SEQ ID NO: 176263 - DNA, 25 bp, probe
ctaaatggaggatctgatgctcaag

SEQ ID NO: 176264 - DNA, 25 bp, probe
ctaaatggaggatctgatgctcaag

SEQ ID NO: 176265 - DNA, 25 bp, probe
ctgtactcgggctctgactacagaa

SEQ ID NO: 176266 - DNA, 25 bp, probe
ctaactcggtcattgctgttgaaaa

SEQ ID NO: 176267 - DNA, 25 bp, probe
ctcaagctcagtgcatagtggtaaa

SEQ ID NO: 176268 - DNA, 25 bp, probe
ctaagtcaggaaatggggtatgcag

SEQ ID NO: 176269 - DNA, 25 bp, probe
ctaagtatggataggctgggcctgg

SEQ ID NO: 176270 - DNA, 25 bp, probe
ctaagtatggataggctgggcctgg

SEQ ID NO: 176271 - DNA, 25 bp, probe
ctcacagtcatggaggcaccgtggg

SEQ ID NO: 176272 - DNA, 25 bp, probe
ctcacagtcgggcagcagtggcagt

SEQ ID NO: 176273 - DNA, 25 bp, probe
ctacactcagcagcagggtgtggtg

SEQ ID NO: 176274 - DNA, 25 bp, probe
ctacagtccccaggagatgtggaac

SEQ ID NO: 176275 - DNA, 25 bp, probe
ctaagtggaccaggaagggactgga

SEQ ID NO: 176276 - DNA, 25 bp, probe
ctaagggatccagagacctgctcca

SEQ ID NO: 176277 - DNA, 25 bp, probe
ctacagtaaggacagtctctgcttc

SEQ ID NO: 176278 - DNA, 25 bp, probe
ctcacagtgacaggaaggtatggct

SEQ ID NO: 176279 - DNA, 25 bp, probe
ctcacagtgacaggaaggtatggct

SEQ ID NO: 176280 - DNA, 25 bp, probe
ctcacagtggatgaatggaagcagc

SEQ ID NO: 176281 - DNA, 25 bp, probe
ctcagaaggtgtttggtatgggaac

SEQ ID NO: 176282 - DNA, 25 bp, probe
ctcagcaaggggctgcttctggggc

SEQ ID NO: 176283 - DNA, 25 bp, probe
ctcactgggaggcccctttgtagac

SEQ ID NO: 176284 - DNA, 25 bp, probe
ctcacggagaagtccgcctgtaaga

SEQ ID NO: 176285 - DNA, 25 bp, probe
ctcacccagggacggccatgtgaag

SEQ ID NO: 176286 - DNA, 25 bp, probe
ctcaccaacgtggagggcaggatag

SEQ ID NO: 176287 - DNA, 25 bp, probe
ctcaccaacgtggagggcaggatag

SEQ ID NO: 176288 - DNA, 25 bp, probe
ctcaccagtcttgagggaggtgcag

SEQ ID NO: 176289 - DNA, 25 bp, probe
ctcaaattcttcctggagaggtgat

SEQ ID NO: 176290 - DNA, 25 bp, probe
ctcaatctatttgctggagtctagg

SEQ ID NO: 176291 - DNA, 25 bp, probe
ctaactccatgtctctgagcattag

SEQ ID NO: 176292 - DNA, 25 bp, probe
ctaactcatgccattgctgatggta

SEQ ID NO: 176293 - DNA, 25 bp, probe
ctacaccttttccatgtggtaactg

SEQ ID NO: 176294 - DNA, 25 bp, probe
ctacaccttttccatgtggtaactg

SEQ ID NO: 176295 - DNA, 25 bp, probe
ctaaatcctttccaataattgactg

SEQ ID NO: 176296 - DNA, 25 bp, probe
ctaaatcccatcttgatatactatg

SEQ ID NO: 176297 - DNA, 25 bp, probe
ctaatgaccacatttgtattactga

SEQ ID NO: 176298 - DNA, 25 bp, probe
ctcataagccacctctgtaatcgga

SEQ ID NO: 176299 - DNA, 25 bp, probe
ctcaacagctacatccataccagat

SEQ ID NO: 176300 - DNA, 25 bp, probe
ctcagagcgcaagatccaccgagat

SEQ ID NO: 176301 - DNA, 25 bp, probe
ctcagagcgcaagatccaccgagat

SEQ ID NO: 176302 - DNA, 25 bp, probe
ctcagcaggcacggtcaaaagggca

SEQ ID NO: 176303 - DNA, 25 bp, probe
ctcagcagcctgttaaagaaggatg

SEQ ID NO: 176304 - DNA, 25 bp, probe
ctcacagacttttagacatcgtagc

SEQ ID NO: 176305 - DNA, 25 bp, probe
ctcacagacttttagacatcgtagc

SEQ ID NO: 176306 - DNA, 25 bp, probe
ctaaaaccttagtcatcagatatgc

SEQ ID NO: 176307 - DNA, 25 bp, probe
ctcaagcaaccatgaactcagctat

SEQ ID NO: 176308 - DNA, 25 bp, probe
ctcaaccatcctcatatcatcagta

SEQ ID NO: 176309 - DNA, 25 bp, probe
ctcaaccatcctcatatcatcagta

SEQ ID NO: 176310 - DNA, 25 bp, probe
ctcaatcgccctggaagcaggacac

SEQ ID NO: 176311 - DNA, 25 bp, probe
ctcagtcccctgaagaagtgattcg

SEQ ID NO: 176312 - DNA, 25 bp, probe
ctcatctacctccatttagaagatc

SEQ ID NO: 176313 - DNA, 25 bp, probe
ctcacttttccttttgatggtgcgg

SEQ ID NO: 176314 - DNA, 25 bp, probe
ctcaattttcctactctgcaagtgg

SEQ ID NO: 176315 - DNA, 25 bp, probe
ctcaattttcctactctgcaagtgg

SEQ ID NO: 176316 - DNA, 25 bp, probe
ctcactattcccgacccaaagggtg

SEQ ID NO: 176317 - DNA, 25 bp, probe
ccctgaagttcatcccaaaattggg

SEQ ID NO: 176318 - DNA, 25 bp, probe
ctcactaaatcctttccaataattg

SEQ ID NO: 176319 - DNA, 25 bp, probe
ctcactgtggtcattgtccactaca

SEQ ID NO: 176320 - DNA, 25 bp, probe
ctcagtctgaacttatctaactcca

SEQ ID NO: 176321 - DNA, 25 bp, probe
ctcaccacagatggaattaacttca

SEQ ID NO: 176322 - DNA, 25 bp, probe
ctcagccgcagacaagtaatcacta

SEQ ID NO: 176323 - DNA, 25 bp, probe
ctcaccagcgaatgcaccattccaa

SEQ ID NO: 176324 - DNA, 25 bp, probe
ctcacctgccaatcaactttataag

SEQ ID NO: 176325 - DNA, 25 bp, probe
ctcacctctaaaacagtccttcaaa

SEQ ID NO: 176326 - DNA, 25 bp, probe
ctcacatccgaaagtcagtctctac

SEQ ID NO: 176327 - DNA, 25 bp, probe
ctcaatcctcgtatagcgtatgaca

SEQ ID NO: 176328 - DNA, 25 bp, probe
ctaatcacctgatcataggaaagaa

SEQ ID NO: 176329 - DNA, 25 bp, probe
ctcacccgtgtctatgacgcaaaga

SEQ ID NO: 176330 - DNA, 25 bp, probe
ctcacccaggtgtgtcgacatcagt

SEQ ID NO: 176331 - DNA, 25 bp, probe
ctcacccggcagagcctgagccggg

SEQ ID NO: 176332 - DNA, 25 bp, probe
ctcaaccggcagatccggggggagc

SEQ ID NO: 176333 - DNA, 25 bp, probe
ctaagccagcccaccctgggctggg

SEQ ID NO: 176334 - DNA, 25 bp, probe
ctcaggaggccctgaccgtggaagg

SEQ ID NO: 176335 - DNA, 25 bp, probe
ctcagtgagtcggccggtcagggcc

SEQ ID NO: 176336 - DNA, 25 bp, probe
ctcagtgagtcggccggtcagggcc

SEQ ID NO: 176337 - DNA, 25 bp, probe
ctcggaatccaaggtgtagggcccg

SEQ ID NO: 176338 - DNA, 25 bp, probe
ctcaaacaccaggcagatgggggcc

SEQ ID NO: 176339 - DNA, 25 bp, probe
ctcaaacaccaggcagatgggggcc

SEQ ID NO: 176340 - DNA, 25 bp, probe
ctaaaagtcacaggtggtggccagg

SEQ ID NO: 176341 - DNA, 25 bp, probe
ctcaacatcgtcaacgtggtgtgcc

SEQ ID NO: 176342 - DNA, 25 bp, probe
ctcaagtctggccggagcaggtgcc

SEQ ID NO: 176343 - DNA, 25 bp, probe
ctcaagttgagctgtagtgcctgct

SEQ ID NO: 176344 - DNA, 25 bp, probe
ctcatcgattcctacgagtcttcta

SEQ ID NO: 176345 - DNA, 25 bp, probe
ctcaagatgtcctccttgttctact

SEQ ID NO: 176346 - DNA, 25 bp, probe
ctaattgttcatcctaattgttcct

SEQ ID NO: 176347 - DNA, 25 bp, probe
ctaaacttcacctacattatctcac

SEQ ID NO: 176348 - DNA, 25 bp, probe
ctaaaagaaccaccagatctgcttc

SEQ ID NO: 176349 - DNA, 25 bp, probe
ctcagaaaagccaactcgaagtcat

SEQ ID NO: 176350 - DNA, 25 bp, probe
ctcgggaatcctaaaaactctgctt

SEQ ID NO: 176351 - DNA, 25 bp, probe
ctcacaggagttggttagaatttct

SEQ ID NO: 176352 - DNA, 25 bp, probe
ctccaggtgggtctcgtaagtgtcc

SEQ ID NO: 176353 - DNA, 25 bp, probe
ctccaggtgggtctcgtaagtgtcc

SEQ ID NO: 176354 - DNA, 25 bp, probe
ctaagggctggtctctgctgaaggt

SEQ ID NO: 176355 - DNA, 25 bp, probe
ctacaacctgatgcgtctgctgagg

SEQ ID NO: 176356 - DNA, 25 bp, probe
ctcaaccactgtggcgttctgctgc

SEQ ID NO: 176357 - DNA, 25 bp, probe
ctcaaccactgtggcgttctgctgc

SEQ ID NO: 176358 - DNA, 25 bp, probe
ctaaggccattgacgtggcctgcga

SEQ ID NO: 176359 - DNA, 25 bp, probe
ctcaatgtccaaatagcggcctcgg

SEQ ID NO: 176360 - DNA, 25 bp, probe
ctcaatgtccaaatagcggcctcgg

SEQ ID NO: 176361 - DNA, 25 bp, probe
ctcagaatccatattgtgtgtgctt

SEQ ID NO: 176362 - DNA, 25 bp, probe
ctcagtcatcctcatttgcatctgg

SEQ ID NO: 176363 - DNA, 25 bp, probe
ctcagcctcccgagtagctgggatt

SEQ ID NO: 176364 - DNA, 25 bp, probe
ctcacgccgcccatgaagatggtga

SEQ ID NO: 176365 - DNA, 25 bp, probe
ctcaccctgcatcactgaagagcgg

SEQ ID NO: 176366 - DNA, 25 bp, probe
ctcaccctgcatcactgaagagcgg

SEQ ID NO: 176367 - DNA, 25 bp, probe
ctcagcccttcctagaagagtcagg

SEQ ID NO: 176368 - DNA, 25 bp, probe
ctcccccatagctgggactaggggt

SEQ ID NO: 176369 - DNA, 25 bp, probe
ctcccctaccatgtgccaaacggga

SEQ ID NO: 176370 - DNA, 25 bp, probe
ctcccctaccatgtgccaaacggga

SEQ ID NO: 176371 - DNA, 25 bp, probe
ctcggacggtcagatgccggacgac

SEQ ID NO: 176372 - DNA, 25 bp, probe
ctcggacggtcagatgccggacgac

SEQ ID NO: 176373 - DNA, 25 bp, probe
cgactacggtctggacaactttgac

SEQ ID NO: 176374 - DNA, 25 bp, probe
ctaaagggtcgcctgcaacttaggc

SEQ ID NO: 176375 - DNA, 25 bp, probe
ctaaatgtggaagctgcctctgaag

SEQ ID NO: 176376 - DNA, 25 bp, probe
ctacaattggtagccgctgcggagc

SEQ ID NO: 176377 - DNA, 25 bp, probe
ctcaaaatttaaccgctgcgcacca

SEQ ID NO: 176378 - DNA, 25 bp, probe
ctaatagactctcagccattcagca

SEQ ID NO: 176379 - DNA, 25 bp, probe
ctaatagactctcagccattcagca

SEQ ID NO: 176380 - DNA, 25 bp, probe
ctaataacatgttagcctccaccca

SEQ ID NO: 176381 - DNA, 25 bp, probe
ctcaatgcacaactattgcccacag

SEQ ID NO: 176382 - DNA, 25 bp, probe
ctcagcagatcaaacatctggaaat

SEQ ID NO: 176383 - DNA, 25 bp, probe
ctgccgaaaacgagacaattgaaaa

SEQ ID NO: 176384 - DNA, 25 bp, probe
ccacgttacaagaggcaagggaaat

SEQ ID NO: 176385 - DNA, 25 bp, probe
ccacgttacaagaggcaagggaaat

SEQ ID NO: 176386 - DNA, 25 bp, probe
ctcacgttagcatagggctcagggc

SEQ ID NO: 176387 - DNA, 25 bp, probe
ctcacttctatcagaggcccaggtg

SEQ ID NO: 176388 - DNA, 25 bp, probe
ctcactgccaggagaactacgtgtg

SEQ ID NO: 176389 - DNA, 25 bp, probe
ctcagtggaggagaactatttatgc

SEQ ID NO: 176390 - DNA, 25 bp, probe
ctcagcaggatggcaaagactacat

SEQ ID NO: 176391 - DNA, 25 bp, probe
ctcagctgggagaaagcacaaagcg

SEQ ID NO: 176392 - DNA, 25 bp, probe
cgcctggtggactccaaagccaaga

SEQ ID NO: 176393 - DNA, 25 bp, probe
cgcctggtggactccaaagccaaga

SEQ ID NO: 176394 - DNA, 25 bp, probe
cgcctggtggactccaaagccaaga

SEQ ID NO: 176395 - DNA, 25 bp, probe
ctccgtctggtcaccatgagaccga

SEQ ID NO: 176396 - DNA, 25 bp, probe
ctcttggtgtggaaccattacgccc

SEQ ID NO: 176397 - DNA, 25 bp, probe
ctcaatgtgaatcagaccctacccc

SEQ ID NO: 176398 - DNA, 25 bp, probe
ctcaagtctgacgatgacacctcca

SEQ ID NO: 176399 - DNA, 25 bp, probe
ctcaattatgcatttgtccccaacc

SEQ ID NO: 176400 - DNA, 25 bp, probe
ctcagaatggagagtctcccccgct

SEQ ID NO: 176401 - DNA, 25 bp, probe
ctcagaatggaatgcctccaactta

SEQ ID NO: 176402 - DNA, 25 bp, probe
ctcaaagaatgaggcctccaaacaa

SEQ ID NO: 176403 - DNA, 25 bp, probe
ctcaactggtagacgctcccaagaa

SEQ ID NO: 176404 - DNA, 25 bp, probe
ctcaactggtagacgctcccaagaa

SEQ ID NO: 176405 - DNA, 25 bp, probe
ctcaactgcgtaggtggctgtcaaa

SEQ ID NO: 176406 - DNA, 25 bp, probe
ctcagagcaggggagtggcttccca

SEQ ID NO: 176407 - DNA, 25 bp, probe
ctcatggcaggggtggtttatctgc

SEQ ID NO: 176408 - DNA, 25 bp, probe
ctctcgaaagccagctttacctctc

SEQ ID NO: 176409 - DNA, 25 bp, probe
ctctcgaaagccagctttacctctc

SEQ ID NO: 176410 - DNA, 25 bp, probe
ctcggataccacaagtgctttccca

SEQ ID NO: 176411 - DNA, 25 bp, probe
ctcagtaacatcatcggtatcatcg

SEQ ID NO: 176412 - DNA, 25 bp, probe
ctcaatagtgaggtccgttctgcca

SEQ ID NO: 176413 - DNA, 25 bp, probe
ctaaaaggcctcggattctgtcaca

SEQ ID NO: 176414 - DNA, 25 bp, probe
ctcaaactgggtgggttctgtgtca

SEQ ID NO: 176415 - DNA, 25 bp, probe
ctccatcactccaggggtggtgtct

SEQ ID NO: 176416 - DNA, 25 bp, probe
ctcatgaccgacaagggttgtgtga

SEQ ID NO: 176417 - DNA, 25 bp, probe
ctcttctgcccaggtgggttggaac

SEQ ID NO: 176418 - DNA, 25 bp, probe
ctcatttgcttctgctaggttaaac

SEQ ID NO: 176419 - DNA, 25 bp, probe
ctcagttttcagcggaggtcaaagc

SEQ ID NO: 176420 - DNA, 25 bp, probe
ctcacctgtggcacggaatgaaaac

SEQ ID NO: 176421 - DNA, 25 bp, probe
ctcagggagcgacctgggcaaagac

SEQ ID NO: 176422 - DNA, 25 bp, probe
ctcaggtggcctctgaaacaccact

SEQ ID NO: 176423 - DNA, 25 bp, probe
ctcaaaggccttaagtacatccact

SEQ ID NO: 176424 - DNA, 25 bp, probe
ctctaacttttcaagccaatccctt

SEQ ID NO: 176425 - DNA, 25 bp, probe
ctcatgaaggtgggcagcacgcact

SEQ ID NO: 176426 - DNA, 25 bp, probe
ctcgtcaggtgcaggtcagcacgtt

SEQ ID NO: 176427 - DNA, 25 bp, probe
ctcagtatggttcttcagtcgatat

SEQ ID NO: 176428 - DNA, 25 bp, probe
ctcagtatggttcttcagtcgatat

SEQ ID NO: 176429 - DNA, 25 bp, probe
ctcagtacagatagcaattagtcag

SEQ ID NO: 176430 - DNA, 25 bp, probe
ctcagctgccatagctgccttttag

SEQ ID NO: 176431 - DNA, 25 bp, probe
ctcagcgccatcaaaatggtccagt

SEQ ID NO: 176432 - DNA, 25 bp, probe
ctcagggcactcaaatgtggcacct

SEQ ID NO: 176433 - DNA, 25 bp, probe
ctcaggctgcctgagtcgtgacctg

SEQ ID NO: 176434 - DNA, 25 bp, probe
ctcaggctgcctgagtcgtgacctg

SEQ ID NO: 176435 - DNA, 25 bp, probe
ctcaatgtcttcgagttggagcggc

SEQ ID NO: 176436 - DNA, 25 bp, probe
ctcagagaattggagttggcccaag

SEQ ID NO: 176437 - DNA, 25 bp, probe
ctcagagaattggagttggcccaag

SEQ ID NO: 176438 - DNA, 25 bp, probe
ctcaggagtctggcgttatctccac

SEQ ID NO: 176439 - DNA, 25 bp, probe
ctctgtgaatgagctgctaaccccc

SEQ ID NO: 176440 - DNA, 25 bp, probe
ctcactgaagaggcattcaacaccc

SEQ ID NO: 176441 - DNA, 25 bp, probe
ctcactgcccgtgtgcagaaaccgg

SEQ ID NO: 176442 - DNA, 25 bp, probe
ctcacccttgtggacgaagcaattg

SEQ ID NO: 176443 - DNA, 25 bp, probe
ctaacactggctgattgtagcttgt

SEQ ID NO: 176444 - DNA, 25 bp, probe
ctaacactggctgattgtagcttgt

SEQ ID NO: 176445 - DNA, 25 bp, probe
ctcaagcacgagctcacggactgtg

SEQ ID NO: 176446 - DNA, 25 bp, probe
ctcaaagatgagactatcgctgttg

SEQ ID NO: 176447 - DNA, 25 bp, probe
ctcacacagttgactatctgaatca

SEQ ID NO: 176448 - DNA, 25 bp, probe
ctcacacagttgactatctgaatca

SEQ ID NO: 176449 - DNA, 25 bp, probe
ctcagcatggtcttctttgtcatca

SEQ ID NO: 176450 - DNA, 25 bp, probe
ctcagcggctgaccttgggtgaagc

SEQ ID NO: 176451 - DNA, 25 bp, probe
ctcacggggccttggagcatgagac

SEQ ID NO: 176452 - DNA, 25 bp, probe
ctcacggtgtctctggatcagtatc

SEQ ID NO: 176453 - DNA, 25 bp, probe
ctcttttgatgtctgcagaagaatg

SEQ ID NO: 176454 - DNA, 25 bp, probe
ccatactttgtctgaaaaattcctt

SEQ ID NO: 176455 - DNA, 25 bp, probe
ccatatctttgttttaaccagtact

SEQ ID NO: 176456 - DNA, 25 bp, probe
ctaattcctgtatgttatccactac

SEQ ID NO: 176457 - DNA, 25 bp, probe
ctaagcaccgtaagacctacagtac

SEQ ID NO: 176458 - DNA, 25 bp, probe
ctaagcatccagaggccctgagcag

SEQ ID NO: 176459 - DNA, 25 bp, probe
ctaatgcatcctatatccagtaagt

SEQ ID NO: 176460 - DNA, 25 bp, probe
ctaagtcatctttgaggtgtaatct

SEQ ID NO: 176461 - DNA, 25 bp, probe
ctaaggacactatggagaaatcaga

SEQ ID NO: 176462 - DNA, 25 bp, probe
ctaaggacactatggagaaatcaga

SEQ ID NO: 176463 - DNA, 25 bp, probe
ctaatggacctccgtggccaaaaag

SEQ ID NO: 176464 - DNA, 25 bp, probe
ctaatgccctctgttgtgacaacaa

SEQ ID NO: 176465 - DNA, 25 bp, probe
ctaatgtttcatatgcagcgacaaa

SEQ ID NO: 176466 - DNA, 25 bp, probe
ctaatgtttgagacgatggcaggaa

SEQ ID NO: 176467 - DNA, 25 bp, probe
ctcaatgtctttcgcagatcgcaga

SEQ ID NO: 176468 - DNA, 25 bp, probe
ctcaatgtctttcgcagatcgcaga

SEQ ID NO: 176469 - DNA, 25 bp, probe
ctcagattcttccagtggggatagt

SEQ ID NO: 176470 - DNA, 25 bp, probe
ctcaactgctcccgtggaagattaa

SEQ ID NO: 176471 - DNA, 25 bp, probe
ctcagcttccctcttaagctaagac

SEQ ID NO: 176472 - DNA, 25 bp, probe
ctcagggcccacattaaggaaatag

SEQ ID NO: 176473 - DNA, 25 bp, probe
ctcggtccccatgaacggaacaagc

SEQ ID NO: 176474 - DNA, 25 bp, probe
ctctggttccctgcagacaggaaag

SEQ ID NO: 176475 - DNA, 25 bp, probe
ctctactaagacatcaacggaatta

SEQ ID NO: 176476 - DNA, 25 bp, probe
ctcaatctagaacgctacacaagaa

SEQ ID NO: 176477 - DNA, 25 bp, probe
ctcaaccagaagggatacagtgtga

SEQ ID NO: 176478 - DNA, 25 bp, probe
ctcaatcataaaggtgccacgttac

SEQ ID NO: 176479 - DNA, 25 bp, probe
ctcaatcataaaggtgccacgttac

SEQ ID NO: 176480 - DNA, 25 bp, probe
ctcagcatcaactggcaggacgtgg

SEQ ID NO: 176481 - DNA, 25 bp, probe
ctcagcgagcactgagctggcccta

SEQ ID NO: 176482 - DNA, 25 bp, probe
ctcagaagaacgccatggcccacgg

SEQ ID NO: 176483 - DNA, 25 bp, probe
ctcagtcaaaggcattcgccacgac

SEQ ID NO: 176484 - DNA, 25 bp, probe
ctcagtcaaaggcattcgccacgac

SEQ ID NO: 176485 - DNA, 25 bp, probe
ctcgttacagggagtccaacaccgc

SEQ ID NO: 176486 - DNA, 25 bp, probe
ccgttgtcagcgtggaccactaacc

SEQ ID NO: 176487 - DNA, 25 bp, probe
ctcgggtggagaagggctacaagat

SEQ ID NO: 176488 - DNA, 25 bp, probe
ctcaggatgggatatagacttctaa

SEQ ID NO: 176489 - DNA, 25 bp, probe
ctcagaaccctgaatgcaacttctg

SEQ ID NO: 176490 - DNA, 25 bp, probe
ctctatcgccctctgcaagtggcga

SEQ ID NO: 176491 - DNA, 25 bp, probe
ctaattcaccttaacatgtgggaag

SEQ ID NO: 176492 - DNA, 25 bp, probe
ctaaggaccttgactgtgtggaaga

SEQ ID NO: 176493 - DNA, 25 bp, probe
ctaatcgatcgcttctctttgaaaa

SEQ ID NO: 176494 - DNA, 25 bp, probe
ctaatcgatcgcttctctttgaaaa

SEQ ID NO: 176495 - DNA, 25 bp, probe
ctcccaatccctatttgagaaacac

SEQ ID NO: 176496 - DNA, 25 bp, probe
ctcctttcccaaattctacaacaag

SEQ ID NO: 176497 - DNA, 25 bp, probe
ctcagttcccctagctgtaaaacag

SEQ ID NO: 176498 - DNA, 25 bp, probe
ctcggtcattgctgttgaaaaagat

SEQ ID NO: 176499 - DNA, 25 bp, probe
ctcggtcaccagtgtgaaccaagcc

SEQ ID NO: 176500 - DNA, 25 bp, probe
ctcaatgtcaccgtggtgaccttct

SEQ ID NO: 176501 - DNA, 25 bp, probe
ctcagcatcccctatttgattttca

SEQ ID NO: 176502 - DNA, 25 bp, probe
ctcagcatcccctatttgattttca

SEQ ID NO: 176503 - DNA, 25 bp, probe
ctcagcttctgcgatcagattatca

SEQ ID NO: 176504 - DNA, 25 bp, probe
ctcatgcaactcctgcagtatgacc

SEQ ID NO: 176505 - DNA, 25 bp, probe
ctcatcagctcccaatgtgcatata

SEQ ID NO: 176506 - DNA, 25 bp, probe
ctcacatgctgcgcacaggagcgac

SEQ ID NO: 176507 - DNA, 25 bp, probe
ctcactgctgggagtggaccatgct

SEQ ID NO: 176508 - DNA, 25 bp, probe
ctcaatgggcagctgcggtccatct

SEQ ID NO: 176509 - DNA, 25 bp, probe
ctcacttgtcatcagctaatccttt

SEQ ID NO: 176510 - DNA, 25 bp, probe
ctcacttgtcatcagctaatccttt

SEQ ID NO: 176511 - DNA, 25 bp, probe
ctcacttcctatgctttcattttta

SEQ ID NO: 176512 - DNA, 25 bp, probe
ctcacttcaactcatttcttctaaa

SEQ ID NO: 176513 - DNA, 25 bp, probe
ctcagcccaatcattttcagtctaa

SEQ ID NO: 176514 - DNA, 25 bp, probe
ctcaacgaccactttgtcaagctca

SEQ ID NO: 176515 - DNA, 25 bp, probe
ctcaacaggtgaccttacaggctcc

SEQ ID NO: 176516 - DNA, 25 bp, probe
ctcacaacctgaacctaggagtgcc

SEQ ID NO: 176517 - DNA, 25 bp, probe
ctcaccaccgagacagttggttttg

SEQ ID NO: 176518 - DNA, 25 bp, probe
ctcaccatcctgtgcatttagatta

SEQ ID NO: 176519 - DNA, 25 bp, probe
ctcagacatctctcctttagtggaa

SEQ ID NO: 176520 - DNA, 25 bp, probe
ctcaactctcaatctatttgctgga

SEQ ID NO: 176521 - DNA, 25 bp, probe
ctcacaagccaatgtacacttggag

SEQ ID NO: 176522 - DNA, 25 bp, probe
ctcacaagccaatgtacacttggag

SEQ ID NO: 176523 - DNA, 25 bp, probe
ctcacaaacacttggctcctagaga

SEQ ID NO: 176524 - DNA, 25 bp, probe
ctcactcaccactgaggttagagcc

SEQ ID NO: 176525 - DNA, 25 bp, probe
ctcactgccacattccagtgggacg

SEQ ID NO: 176526 - DNA, 25 bp, probe
ctcaccccatagacaaggcaatggc

SEQ ID NO: 176527 - DNA, 25 bp, probe
ctcacccagctgctgaactcaatgc

SEQ ID NO: 176528 - DNA, 25 bp, probe
ctcatccgatacctggagaccatga

SEQ ID NO: 176529 - DNA, 25 bp, probe
ctcattcgtgcactaaggaccttaa

SEQ ID NO: 176530 - DNA, 25 bp, probe
ctcacagggctgcaacaaccagtag

SEQ ID NO: 176531 - DNA, 25 bp, probe
ctcaagagttctcaccagccttagt

SEQ ID NO: 176532 - DNA, 25 bp, probe
ctcaagagttctcaccagccttagt

SEQ ID NO: 176533 - DNA, 25 bp, probe
ctcagaagatcctcaccaagttcaa

SEQ ID NO: 176534 - DNA, 25 bp, probe
ctcaagaatccgaaccacaggacaa

SEQ ID NO: 176535 - DNA, 25 bp, probe
ctcaatgacatcctcaacctgggaa

SEQ ID NO: 176536 - DNA, 25 bp, probe
ctcacatagcttacaagccagctgg

SEQ ID NO: 176537 - DNA, 25 bp, probe
ctcaaggcaatgaaggctgcaatgg

SEQ ID NO: 176538 - DNA, 25 bp, probe
ctcaacctcatggtgcgcatcaagg

SEQ ID NO: 176539 - DNA, 25 bp, probe
ctcattgcctgtgtggcacaatgga

SEQ ID NO: 176540 - DNA, 25 bp, probe
ctcatgtggactgggaccgtgcgag

SEQ ID NO: 176541 - DNA, 25 bp, probe
ctcatgtgagactcgagccagtagc

SEQ ID NO: 176542 - DNA, 25 bp, probe
ctcatgtgagactcgagccagtagc

SEQ ID NO: 176543 - DNA, 25 bp, probe
ctctctgctgactgagctgctgcag

SEQ ID NO: 176544 - DNA, 25 bp, probe
ctctctgctgactgagctgctgcag

SEQ ID NO: 176545 - DNA, 25 bp, probe
ctctctgctgactgagctgctgcag

SEQ ID NO: 176546 - DNA, 25 bp, probe
ctcacagtggtatgtgctgctggtg

SEQ ID NO: 176547 - DNA, 25 bp, probe
ctcaggctggataccacctggaggt

SEQ ID NO: 176548 - DNA, 25 bp, probe
ctcagttgtgccagcagagttgggt

SEQ ID NO: 176549 - DNA, 25 bp, probe
ctcagtgtgttctggtcatcttgtg

SEQ ID NO: 176550 - DNA, 25 bp, probe
ctcagcgtatgttcaggactcaggg

SEQ ID NO: 176551 - DNA, 25 bp, probe
ctcagcttagccgggagctgcggca

SEQ ID NO: 176552 - DNA, 25 bp, probe
ctcactttcgaggaggctgtggcca

SEQ ID NO: 176553 - DNA, 25 bp, probe
ctcaggttctgctatgaggcagtgg

SEQ ID NO: 176554 - DNA, 25 bp, probe
ctaccggggagggatggatggttgg

SEQ ID NO: 176555 - DNA, 25 bp, probe
ctcaattggttgactgcagcagctg

SEQ ID NO: 176556 - DNA, 25 bp, probe
ctcagtttgtggtctgccagctaaa

SEQ ID NO: 176557 - DNA, 25 bp, probe
ctcagcatcagtatatcccatgcaa

SEQ ID NO: 176558 - DNA, 25 bp, probe
ctcactctgaatttgcccacatgtg

SEQ ID NO: 176559 - DNA, 25 bp, probe
ctcagctataaattgcgctctcagc

SEQ ID NO: 176560 - DNA, 25 bp, probe
ctcactcattcaacagctcttgcag

SEQ ID NO: 176561 - DNA, 25 bp, probe
ctcacactatatacagatgcaagca

SEQ ID NO: 176562 - DNA, 25 bp, probe
ctcacaccatgacaatgcagccaaa

SEQ ID NO: 176563 - DNA, 25 bp, probe
ctcacaccatgacaatgcagccaaa

SEQ ID NO: 176564 - DNA, 25 bp, probe
ctcaacctatcttacatccaaatct

SEQ ID NO: 176565 - DNA, 25 bp, probe
ctcaagtgcctgctacacatacaac

SEQ ID NO: 176566 - DNA, 25 bp, probe
ctcacagtgcctgtgcaccattcga

SEQ ID NO: 176567 - DNA, 25 bp, probe
ctcacactgccagagcaccaaatat

SEQ ID NO: 176568 - DNA, 25 bp, probe
ctcacactgtatggaacccacatct

SEQ ID NO: 176569 - DNA, 25 bp, probe
ctcagggaggcgagcacgccatctt

SEQ ID NO: 176570 - DNA, 25 bp, probe
ctcagagcgagccagcttttgagac

SEQ ID NO: 176571 - DNA, 25 bp, probe
ctcagaatctgatgctttctgatca

SEQ ID NO: 176572 - DNA, 25 bp, probe
ctcagcaatggcagattatcgacat

SEQ ID NO: 176573 - DNA, 25 bp, probe
ctcacaatgtcatgatagatcacca

SEQ ID NO: 176574 - DNA, 25 bp, probe
ctcactcattcatgggagatccagc

SEQ ID NO: 176575 - DNA, 25 bp, probe
ctcactttcaagaagcaatagactt

SEQ ID NO: 176576 - DNA, 25 bp, probe
ctctttccaagagaataacttttga

SEQ ID NO: 176577 - DNA, 25 bp, probe
ctctttccaagagaataacttttga

SEQ ID NO: 176578 - DNA, 25 bp, probe
ctcttatcccaattcaagacccttc

SEQ ID NO: 176579 - DNA, 25 bp, probe
ctcttatcccaattcaagacccttc

SEQ ID NO: 176580 - DNA, 25 bp, probe
ctcagtaccaagaaaaagcccaaca

SEQ ID NO: 176581 - DNA, 25 bp, probe
ctctgggccatacaaaaaacaagct

SEQ ID NO: 176582 - DNA, 25 bp, probe
ctcggccagaatttataaaacacct

SEQ ID NO: 176583 - DNA, 25 bp, probe
ctctggcagagttctttaaaacaca

SEQ ID NO: 176584 - DNA, 25 bp, probe
ctcccaggctcacattaaaccaggg

SEQ ID NO: 176585 - DNA, 25 bp, probe
ctcagcagagtgtgtttaagaccaa

SEQ ID NO: 176586 - DNA, 25 bp, probe
ctcagatgactctgtgtttttataa

SEQ ID NO: 176587 - DNA, 25 bp, probe
ctcacagcagcttcgtgcttttgta

SEQ ID NO: 176588 - DNA, 25 bp, probe
ctcacagcagcttcgtgcttttgta

SEQ ID NO: 176589 - DNA, 25 bp, probe
ctcaatcacttcttctacgatgtca

SEQ ID NO: 176590 - DNA, 25 bp, probe
ctcagtagtgtctttgcaggaccac

SEQ ID NO: 176591 - DNA, 25 bp, probe
ctcagcaaagtctggcgtgatcaac

SEQ ID NO: 176592 - DNA, 25 bp, probe
ctcagaggcagggcagcacacggcc

SEQ ID NO: 176593 - DNA, 25 bp, probe
ctcaggggtggcaagatcaagctct

SEQ ID NO: 176594 - DNA, 25 bp, probe
ctcaggcgagtggcttatagcctcc

SEQ ID NO: 176595 - DNA, 25 bp, probe
ctcagccggatcctgatgatcagtt

SEQ ID NO: 176596 - DNA, 25 bp, probe
ctcagctgcatggagcctggaactg

SEQ ID NO: 176597 - DNA, 25 bp, probe
ctcagcaggccacctggacatgctg

SEQ ID NO: 176598 - DNA, 25 bp, probe
ctcaggagctcaacatggaacagaa

SEQ ID NO: 176599 - DNA, 25 bp, probe
ctcaggagctcaacatggaacagaa

SEQ ID NO: 176600 - DNA, 25 bp, probe
ctcaagagcctgatggagaccatga

SEQ ID NO: 176601 - DNA, 25 bp, probe
ctcaaggctgtggatgtgtacctgt

SEQ ID NO: 176602 - DNA, 25 bp, probe
ctcagaggcttggcatttgccatat

SEQ ID NO: 176603 - DNA, 25 bp, probe
ctcagcatgacttgaatgtcttcaa

SEQ ID NO: 176604 - DNA, 25 bp, probe
ctcagtgccatgccaattctttacc

SEQ ID NO: 176605 - DNA, 25 bp, probe
ctcagtgcagagacagataatatat

SEQ ID NO: 176606 - DNA, 25 bp, probe
ctcagagcagacagaaacattattt

SEQ ID NO: 176607 - DNA, 25 bp, probe
ctcaaaatctagaagagtctattgt

SEQ ID NO: 176608 - DNA, 25 bp, probe
ctcagaagttcaagctaaatattgt

SEQ ID NO: 176609 - DNA, 25 bp, probe
ctcaacatattcgagctcaacggtt

SEQ ID NO: 176610 - DNA, 25 bp, probe
ctcaacaagcacgagctgcaagcgc

SEQ ID NO: 176611 - DNA, 25 bp, probe
ctcacagaatcacagctaaggaact

SEQ ID NO: 176612 - DNA, 25 bp, probe
ctcaagaagctcaccaagtcaacta

SEQ ID NO: 176613 - DNA, 25 bp, probe
ctcaagaaatggtcaggagccacct

SEQ ID NO: 176614 - DNA, 25 bp, probe
ctcaagaaattcatggatgcctctg

SEQ ID NO: 176615 - DNA, 25 bp, probe
ctcaaggagttcctgggcgagcagc

SEQ ID NO: 176616 - DNA, 25 bp, probe
ctcaaggagttcctgggcgagcagc

SEQ ID NO: 176617 - DNA, 25 bp, probe
ctcaagaagattctgctggaggagc

SEQ ID NO: 176618 - DNA, 25 bp, probe
ctcacacaggctcccgaggaggagc

SEQ ID NO: 176619 - DNA, 25 bp, probe
ctcacacagagtcagcactggggag

SEQ ID NO: 176620 - DNA, 25 bp, probe
ctcaaaattaggccttgggcagggg

SEQ ID NO: 176621 - DNA, 25 bp, probe
gtcaaggttaagtctttcgagaagg

SEQ ID NO: 176622 - DNA, 25 bp, probe
gcgaattgttaactttcccaaatgc

SEQ ID NO: 176623 - DNA, 25 bp, probe
cgactgttgtaacttacccttctgc

SEQ ID NO: 176624 - DNA, 25 bp, probe
ctcagctttggacattaggtctttg

SEQ ID NO: 176625 - DNA, 25 bp, probe
ctcacccaggacctctgggggttgt

SEQ ID NO: 176626 - DNA, 25 bp, probe
ctcacccaggacctctgggggttgt

SEQ ID NO: 176627 - DNA, 25 bp, probe
ctcagctacaagtttctgggcgagc

SEQ ID NO: 176628 - DNA, 25 bp, probe
ctcagcccaagaatttgtcaggagg

SEQ ID NO: 176629 - DNA, 25 bp, probe
ctcagcccagagtgttctgcgtggg

SEQ ID NO: 176630 - DNA, 25 bp, probe
ctcatgctcatcaagttggacgaat

SEQ ID NO: 176631 - DNA, 25 bp, probe
ctcatgccattgctgatggtatata

SEQ ID NO: 176632 - DNA, 25 bp, probe
ctcatgccattgctgatggtatata

SEQ ID NO: 176633 - DNA, 25 bp, probe
ctgcaccaggggtgcacaataaagg

SEQ ID NO: 176634 - DNA, 25 bp, probe
ctcaccagaagggggcttaccaaga

SEQ ID NO: 176635 - DNA, 25 bp, probe
ctctaccaagagggtcttcctaaga

SEQ ID NO: 176636 - DNA, 25 bp, probe
gctttcctaagcagtatacctttaa

SEQ ID NO: 176637 - DNA, 25 bp, probe
ctcttgctgtaacacttgaccttaa

SEQ ID NO: 176638 - DNA, 25 bp, probe
ctcaatgtgtaacacactgcagttt

SEQ ID NO: 176639 - DNA, 25 bp, probe
ctcagtccttggcacagccatgttt

SEQ ID NO: 176640 - DNA, 25 bp, probe
ctcagagccattaaacactagttca

SEQ ID NO: 176641 - DNA, 25 bp, probe
ctcagagccattaaacactagttca

SEQ ID NO: 176642 - DNA, 25 bp, probe
ctcagagccattaaacactagttca

SEQ ID NO: 176643 - DNA, 25 bp, probe
ctcaaccccaacaatcattgcttca

SEQ ID NO: 176644 - DNA, 25 bp, probe
ctcaacctctcatgcactgatatgt

SEQ ID NO: 176645 - DNA, 25 bp, probe
ctcaacctccatgcctaaggctggt

SEQ ID NO: 176646 - DNA, 25 bp, probe
ctcacaacagccccctgaaagtggg

SEQ ID NO: 176647 - DNA, 25 bp, probe
ctcagacaagtccccgtgaagtgga

SEQ ID NO: 176648 - DNA, 25 bp, probe
ctcaaagactctcccgtggatgacg

SEQ ID NO: 176649 - DNA, 25 bp, probe
ctcaccaacatctcagccgtgaact

SEQ ID NO: 176650 - DNA, 25 bp, probe
ctcaaatcacactcagtctgaggag

SEQ ID NO: 176651 - DNA, 25 bp, probe
ctcaaatcacactcagtctgaggag

SEQ ID NO: 176652 - DNA, 25 bp, probe
ctcacactcagcgatgacctgtggg

SEQ ID NO: 176653 - DNA, 25 bp, probe
ctcacactcgcccagttgtgtgtgt

SEQ ID NO: 176654 - DNA, 25 bp, probe
ctcaagccgcaccagagatggctgc

SEQ ID NO: 176655 - DNA, 25 bp, probe
ctcaagccgcaccagagatggctgc

SEQ ID NO: 176656 - DNA, 25 bp, probe
ctcacggcgccggagtggcatgaag

SEQ ID NO: 176657 - DNA, 25 bp, probe
ctcacggcgccggagtggcatgaag

SEQ ID NO: 176658 - DNA, 25 bp, probe
ctcacggcagcacgatgaagactgg

SEQ ID NO: 176659 - DNA, 25 bp, probe
ctcacgtatgaggagaagccgccct

SEQ ID NO: 176660 - DNA, 25 bp, probe
ctcacaggaagatatcatgccccac

SEQ ID NO: 176661 - DNA, 25 bp, probe
ctcacaggaagatatcatgccccac

SEQ ID NO: 176662 - DNA, 25 bp, probe
ctcatcaaggagacctaccagctcc

SEQ ID NO: 176663 - DNA, 25 bp, probe
ctcagcgagagtgccaaccaggcct

SEQ ID NO: 176664 - DNA, 25 bp, probe
ctcagcgagagtgccaaccaggcct

SEQ ID NO: 176665 - DNA, 25 bp, probe
ctcacagctgactccaagctgcatg

SEQ ID NO: 176666 - DNA, 25 bp, probe
ctcacagctgactccaagctgcatg

SEQ ID NO: 176667 - DNA, 25 bp, probe
ctcacagctgactccaagctgcatg

SEQ ID NO: 176668 - DNA, 25 bp, probe
ctcacaagacacatgcaatgatgtt

SEQ ID NO: 176669 - DNA, 25 bp, probe
ctcaagagcccaatgcattccattt

SEQ ID NO: 176670 - DNA, 25 bp, probe
ctcaaatccaatagttcacagctga

SEQ ID NO: 176671 - DNA, 25 bp, probe
ctctgacacaaactgttcacccatc

SEQ ID NO: 176672 - DNA, 25 bp, probe
ctcatgacacagcctgtttcaacca

SEQ ID NO: 176673 - DNA, 25 bp, probe
ctcagcagccgccttaagctgatcc

SEQ ID NO: 176674 - DNA, 25 bp, probe
ctcagcgaggagccataatgtgcat

SEQ ID NO: 176675 - DNA, 25 bp, probe
ctcagcgaggagccataatgtgcat

SEQ ID NO: 176676 - DNA, 25 bp, probe
ctcagcgaggagccataatgtgcat

SEQ ID NO: 176677 - DNA, 25 bp, probe
ctcagcaacgagcaagattcatgta

SEQ ID NO: 176678 - DNA, 25 bp, probe
ctcagcaacgagcaagattcatgta

SEQ ID NO: 176679 - DNA, 25 bp, probe
ctcactgacgaccatgaattcatgg

SEQ ID NO: 176680 - DNA, 25 bp, probe
ctcactgagctgggtgtaggagggg

SEQ ID NO: 176681 - DNA, 25 bp, probe
ctcactgggcggcttggagtggccc

SEQ ID NO: 176682 - DNA, 25 bp, probe
ctcactgggcggcaagaggtctccc

SEQ ID NO: 176683 - DNA, 25 bp, probe
ctcttccggaggagggtctctccag

SEQ ID NO: 176684 - DNA, 25 bp, probe
ctcttccagacccacgaaaaccgag

SEQ ID NO: 176685 - DNA, 25 bp, probe
ctcttccagacccatgacaacagac

SEQ ID NO: 176686 - DNA, 25 bp, probe
ctctacgccttcttgaataagtctt

SEQ ID NO: 176687 - DNA, 25 bp, probe
ctcaaacttctgtgcacaaagtgct

SEQ ID NO: 176688 - DNA, 25 bp, probe
ctcaacaccctgggcagctacaagt

SEQ ID NO: 176689 - DNA, 25 bp, probe
ctcaactccctgagagccacaggtg

SEQ ID NO: 176690 - DNA, 25 bp, probe
ctcaactgccccacagaggatggtg

SEQ ID NO: 176691 - DNA, 25 bp, probe
ctcaactgcccaccgtagggaagca

SEQ ID NO: 176692 - DNA, 25 bp, probe
ctcaagccgccaccataaaaacaga

SEQ ID NO: 176693 - DNA, 25 bp, probe
ctcggcacctacaataaaaccatgt

SEQ ID NO: 176694 - DNA, 25 bp, probe
ctctggcagccggtaacagctgacc

SEQ ID NO: 176695 - DNA, 25 bp, probe
ctctgtaccggacactgtgtctcct

SEQ ID NO: 176696 - DNA, 25 bp, probe
ctcagtcccaaactacagttcttgt

SEQ ID NO: 176697 - DNA, 25 bp, probe
ctcagatgcccagtatcatacgttg

SEQ ID NO: 176698 - DNA, 25 bp, probe
ctcagtgctgtagtccaactgtccc

SEQ ID NO: 176699 - DNA, 25 bp, probe
ctcgattctattcgctacattacaa

SEQ ID NO: 176700 - DNA, 25 bp, probe
ctcaacatgctaattgctatgatta

SEQ ID NO: 176701 - DNA, 25 bp, probe
ctcaccagcaagaggcatgattgga

SEQ ID NO: 176702 - DNA, 25 bp, probe
ctcacttcagagagctcagatacag

SEQ ID NO: 176703 - DNA, 25 bp, probe
ctcaagccagagaatctgctgtact

SEQ ID NO: 176704 - DNA, 25 bp, probe
ctcacatccaagctgtgcttagctc

SEQ ID NO: 176705 - DNA, 25 bp, probe
ctcatccgaagcctcctaagacgag

SEQ ID NO: 176706 - DNA, 25 bp, probe
ctcatcggcgtcccgaaggaagctc

SEQ ID NO: 176707 - DNA, 25 bp, probe
cgtcgacctcctgaagtacaatcaa

SEQ ID NO: 176708 - DNA, 25 bp, probe
ctgtgcctacaactaaagtactaaa

SEQ ID NO: 176709 - DNA, 25 bp, probe
ctcgacccaagcagaagtaaatcaa

SEQ ID NO: 176710 - DNA, 25 bp, probe
ctcgacccaagcagaagtaaatcaa

SEQ ID NO: 176711 - DNA, 25 bp, probe
ctcgttaaagcaaagcgctaagtaa

SEQ ID NO: 176712 - DNA, 25 bp, probe
ctcctaaacagacaggctacggatg

SEQ ID NO: 176713 - DNA, 25 bp, probe
ctcttaagagtgctaggtaccaaat

SEQ ID NO: 176714 - DNA, 25 bp, probe
ctcttacagtcgatggacttcctga

SEQ ID NO: 176715 - DNA, 25 bp, probe
ctctctaagtacatccacctgtgta

SEQ ID NO: 176716 - DNA, 25 bp, probe
ctcccaaggacgagcccagtgtagt

SEQ ID NO: 176717 - DNA, 25 bp, probe
ctcactacgggaagacctcaggggt

SEQ ID NO: 176718 - DNA, 25 bp, probe
ctcagtcaagattggagacctcggt

SEQ ID NO: 176719 - DNA, 25 bp, probe
ctcacacaagcagaaacactcctgt

SEQ ID NO: 176720 - DNA, 25 bp, probe
cccacacacagataaagttttccct

SEQ ID NO: 176721 - DNA, 25 bp, probe
cccacgactcagtgaagtttctcca

SEQ ID NO: 176722 - DNA, 25 bp, probe
cccacgactcagtgaagtttctcca

SEQ ID NO: 176723 - DNA, 25 bp, probe
ctccctgaagagtgaaccctcttta

SEQ ID NO: 176724 - DNA, 25 bp, probe
ctccctgaagagtgaaccctcttta

SEQ ID NO: 176725 - DNA, 25 bp, probe
ctcgtcacaaggtgacccttgcagc

SEQ ID NO: 176726 - DNA, 25 bp, probe
ctcttcaatggggctgataccttca

SEQ ID NO: 176727 - DNA, 25 bp, probe
ctctgtcacattacctgaatcaccc

SEQ ID NO: 176728 - DNA, 25 bp, probe
ctctataatgtgaactttcccctgt

SEQ ID NO: 176729 - DNA, 25 bp, probe
ctcattccaggtttcattcctaata

SEQ ID NO: 176730 - DNA, 25 bp, probe
ctcagaccaggtggaattacttaaa

SEQ ID NO: 176731 - DNA, 25 bp, probe
ctcaaagcatgtcagtttccttaat

SEQ ID NO: 176732 - DNA, 25 bp, probe
ctcaaagagtatatgttccctccag

SEQ ID NO: 176733 - DNA, 25 bp, probe
ctcaaagcgtggaattgctgccctg

SEQ ID NO: 176734 - DNA, 25 bp, probe
ctcaaaccagtgaggctgcacagct

SEQ ID NO: 176735 - DNA, 25 bp, probe
ctcaaaccagacaagcggctaccag

SEQ ID NO: 176736 - DNA, 25 bp, probe
ctcaaagccaagctggggatgccgc

SEQ ID NO: 176737 - DNA, 25 bp, probe
ctcttcctaggcctgggggcaggca

SEQ ID NO: 176738 - DNA, 25 bp, probe
ctcttttgggctcttctggagggaa

SEQ ID NO: 176739 - DNA, 25 bp, probe
ctcttacgtgcgcctttctgccgga

SEQ ID NO: 176740 - DNA, 25 bp, probe
ctcttgaaggtgtgttctccaggac

SEQ ID NO: 176741 - DNA, 25 bp, probe
ctcttcaaggtctttaccccagaag

SEQ ID NO: 176742 - DNA, 25 bp, probe
ctctgacccaaatttagtcccagaa

SEQ ID NO: 176743 - DNA, 25 bp, probe
ctcactgtccaaaatgtagtcccgg

SEQ ID NO: 176744 - DNA, 25 bp, probe
ctcatttgccaataataatacctcc

SEQ ID NO: 176745 - DNA, 25 bp, probe
ctcttgtctaagagacctacctctg

SEQ ID NO: 176746 - DNA, 25 bp, probe
ctcggcctgaagagtttgaccacta

SEQ ID NO: 176747 - DNA, 25 bp, probe
ctcggcctgaagagtttgaccacta

SEQ ID NO: 176748 - DNA, 25 bp, probe
ctctggttcatgtgagtttactatt

SEQ ID NO: 176749 - DNA, 25 bp, probe
ctcttctaaaagctactgagctcat

SEQ ID NO: 176750 - DNA, 25 bp, probe
ctcttctctgcgtacgttcgagtat

SEQ ID NO: 176751 - DNA, 25 bp, probe
ctcaggcctagctcagatgatgcgg

SEQ ID NO: 176752 - DNA, 25 bp, probe
ctcagtgcctcagtctggaatggtt

SEQ ID NO: 176753 - DNA, 25 bp, probe
ctcaaatctcagacgccgtggttgc

SEQ ID NO: 176754 - DNA, 25 bp, probe
ctcagcatattaccaggggtttggc

SEQ ID NO: 176755 - DNA, 25 bp, probe
ccgagttactcagagcaactttgca

SEQ ID NO: 176756 - DNA, 25 bp, probe
ctcaggtttcaaacagacctttgca

SEQ ID NO: 176757 - DNA, 25 bp, probe
ctcaggtacggagccagccttgagc

SEQ ID NO: 176758 - DNA, 25 bp, probe
ctcagggtggaagtcctgcctatgc

SEQ ID NO: 176759 - DNA, 25 bp, probe
ctcactggctgggaaaccctagacc

SEQ ID NO: 176760 - DNA, 25 bp, probe
ctcagccctgagtgaacccattgag

SEQ ID NO: 176761 - DNA, 25 bp, probe
ctcagctcctgaaaaatgcctcatt

SEQ ID NO: 176762 - DNA, 25 bp, probe
ctcaccctgaggacatcagcagtca

SEQ ID NO: 176763 - DNA, 25 bp, probe
ctcacctctattaagctgctgaccc

SEQ ID NO: 176764 - DNA, 25 bp, probe
ctcaccatcgagggagtgctggacc

SEQ ID NO: 176765 - DNA, 25 bp, probe
ctcagccatctacggaggcagtgcc

SEQ ID NO: 176766 - DNA, 25 bp, probe
ctcaggctcagaagggaatgtcaag

SEQ ID NO: 176767 - DNA, 25 bp, probe
ctcacccatatccgaagctgtggag

SEQ ID NO: 176768 - DNA, 25 bp, probe
ctcactcttacttgcaatctgagga

SEQ ID NO: 176769 - DNA, 25 bp, probe
ctctatcttactgctatggggaatt

SEQ ID NO: 176770 - DNA, 25 bp, probe
ctcagccttagcactacggacattt

SEQ ID NO: 176771 - DNA, 25 bp, probe
ctcacgtctgtaatcccaggacttt

SEQ ID NO: 176772 - DNA, 25 bp, probe
ctcacgcctgtaatcccagcacttt

SEQ ID NO: 176773 - DNA, 25 bp, probe
ctcagagcgtgttctgcctgagacc

SEQ ID NO: 176774 - DNA, 25 bp, probe
ctcagagagagaatcctgcagaagc

SEQ ID NO: 176775 - DNA, 25 bp, probe
ctcagaggagcaatgacgaggtggc

SEQ ID NO: 176776 - DNA, 25 bp, probe
ctcagaggacttggcaagggccgca

SEQ ID NO: 176777 - DNA, 25 bp, probe
ctctgaatgacttcgggggccaggt

SEQ ID NO: 176778 - DNA, 25 bp, probe
ctctgaatgacttcgggggccaggt

SEQ ID NO: 176779 - DNA, 25 bp, probe
tttaacctcaggtggcacccagggc

SEQ ID NO: 176780 - DNA, 25 bp, probe
ctgtataccccgtgaagcatccagg

SEQ ID NO: 176781 - DNA, 25 bp, probe
ctctacatcccctggaagtacaagg

SEQ ID NO: 176782 - DNA, 25 bp, probe
ctctacatcccctggaagtacaagg

SEQ ID NO: 176783 - DNA, 25 bp, probe
cgcttgaccccagctcaagcattaa

SEQ ID NO: 176784 - DNA, 25 bp, probe
ctcttcacctgtcttaagattaaat

SEQ ID NO: 176785 - DNA, 25 bp, probe
ctcttcctcataagcttctaaatta

SEQ ID NO: 176786 - DNA, 25 bp, probe
ctcatcaccctaggttctacaggaa

SEQ ID NO: 176787 - DNA, 25 bp, probe
ctcaccacttaaggctccacagtgg

SEQ ID NO: 176788 - DNA, 25 bp, probe
ctcacccatcaaaagcaccagcagg

SEQ ID NO: 176789 - DNA, 25 bp, probe
ctcagcatctacctgaacatccaga

SEQ ID NO: 176790 - DNA, 25 bp, probe
ctcagcttcagtcaacaccgagacc

SEQ ID NO: 176791 - DNA, 25 bp, probe
ctcagctgatttcagacacgtgaga

SEQ ID NO: 176792 - DNA, 25 bp, probe
ctcactgttctcgtgacctggagtt

SEQ ID NO: 176793 - DNA, 25 bp, probe
ctcattttgcagccgcacactgaga

SEQ ID NO: 176794 - DNA, 25 bp, probe
ctcagatgggaattgcacagtagga

SEQ ID NO: 176795 - DNA, 25 bp, probe
ctcagtggcaaattccgggagcagt

SEQ ID NO: 176796 - DNA, 25 bp, probe
ctcatagaccaagtcccgggggtct

SEQ ID NO: 176797 - DNA, 25 bp, probe
ctcaggcaccaagcctcaagtgggg

SEQ ID NO: 176798 - DNA, 25 bp, probe
ctcgtgttccagacctttgaggtgg

SEQ ID NO: 176799 - DNA, 25 bp, probe
ctccgcacctcagcagtttggggtg

SEQ ID NO: 176800 - DNA, 25 bp, probe
ctcaccgctctagcggtggctgggg

SEQ ID NO: 176801 - DNA, 25 bp, probe
ctcactcgccttggggttctgcgag

SEQ ID NO: 176802 - DNA, 25 bp, probe
ctcactcaggcatgctggtattctg

SEQ ID NO: 176803 - DNA, 25 bp, probe
ctcactcagatccagtacatagcct

SEQ ID NO: 176804 - DNA, 25 bp, probe
ctcaccaacctgcagcatgagcaca

SEQ ID NO: 176805 - DNA, 25 bp, probe
ctcactcagatggccgacgagctga

SEQ ID NO: 176806 - DNA, 25 bp, probe
ctcacgcattcagccaggagatgat

SEQ ID NO: 176807 - DNA, 25 bp, probe
ctcactctgtcacccaggatggagt

SEQ ID NO: 176808 - DNA, 25 bp, probe
ctcagctgagtcctctaagtgggag

SEQ ID NO: 176809 - DNA, 25 bp, probe
ctcagctggatgcactacaaccaga

SEQ ID NO: 176810 - DNA, 25 bp, probe
ctcagctggatgcactacaaccaga

SEQ ID NO: 176811 - DNA, 25 bp, probe
ctcagctggatgcagtgaaccttga

SEQ ID NO: 176812 - DNA, 25 bp, probe
ctcagctgcaggcatgcatgaagcc

SEQ ID NO: 176813 - DNA, 25 bp, probe
ctcactccatgcaacatgcatagcc

SEQ ID NO: 176814 - DNA, 25 bp, probe
ctcagctccatgaacagcggcagga

SEQ ID NO: 176815 - DNA, 25 bp, probe
ctcatcccactgtgggggagtccct

SEQ ID NO: 176816 - DNA, 25 bp, probe
ctcatcccactgtgggggagtccct

SEQ ID NO: 176817 - DNA, 25 bp, probe
ctcattactgtctgtggctaagtcc

SEQ ID NO: 176818 - DNA, 25 bp, probe
ctcatgttctgtgggggtcatcagg

SEQ ID NO: 176819 - DNA, 25 bp, probe
ctcatttcaacgccgactacaggaa

SEQ ID NO: 176820 - DNA, 25 bp, probe
ctcacttgaagctttgcccacagga

SEQ ID NO: 176821 - DNA, 25 bp, probe
ctcagcttgcaaccatggtaacgtt

SEQ ID NO: 176822 - DNA, 25 bp, probe
ctcagcttgcctcatgtcaaactga

SEQ ID NO: 176823 - DNA, 25 bp, probe
ctcactctgtgtcttcaacagcatc

SEQ ID NO: 176824 - DNA, 25 bp, probe
ctcatctctttgttctaaagatgga

SEQ ID NO: 176825 - DNA, 25 bp, probe
ctctattttcagatgatcacagtcg

SEQ ID NO: 176826 - DNA, 25 bp, probe
ctctattttcagatgatcacagtcg

SEQ ID NO: 176827 - DNA, 25 bp, probe
ctctactttcaggccacatggctaa

SEQ ID NO: 176828 - DNA, 25 bp, probe
ctcaggctccgagccagctggattc

SEQ ID NO: 176829 - DNA, 25 bp, probe
ctcaccattccagcctgggatatct

SEQ ID NO: 176830 - DNA, 25 bp, probe
ctcactattccttttggactgattc

SEQ ID NO: 176831 - DNA, 25 bp, probe
ctcttcattcctcttaggagagtgc

SEQ ID NO: 176832 - DNA, 25 bp, probe
ctctttctcctgtttgcgggtggag

SEQ ID NO: 176833 - DNA, 25 bp, probe
ctctttctcctgtttgcgggtggag

SEQ ID NO: 176834 - DNA, 25 bp, probe
ctctattccttatatggagttgttg

SEQ ID NO: 176835 - DNA, 25 bp, probe
ctcttcttcatgttcattgggttta

SEQ ID NO: 176836 - DNA, 25 bp, probe
ctcattgctacagtgtattggttta

SEQ ID NO: 176837 - DNA, 25 bp, probe
ctgcctgccactgtcagggttaagc

SEQ ID NO: 176838 - DNA, 25 bp, probe
ctcactgtcttggtcactggcaaaa

SEQ ID NO: 176839 - DNA, 25 bp, probe
ctcagagtgcttctaatcatcacag

SEQ ID NO: 176840 - DNA, 25 bp, probe
ctcagctgtgtgtccatcaacacac

SEQ ID NO: 176841 - DNA, 25 bp, probe
ctcaggctctgatgctaagcagctg

SEQ ID NO: 176842 - DNA, 25 bp, probe
ctcaggctctgatgctaagcagctg

SEQ ID NO: 176843 - DNA, 25 bp, probe
ctcaggtgcatgccatgctcagaac

SEQ ID NO: 176844 - DNA, 25 bp, probe
ctcagcgtgctggagaagaccgcct

SEQ ID NO: 176845 - DNA, 25 bp, probe
ctcagcctcatcaaggagacctacc

SEQ ID NO: 176846 - DNA, 25 bp, probe
ctcagcatccaggagggcttcatcc

SEQ ID NO: 176847 - DNA, 25 bp, probe
ctcagatgcctgtggtctctctgat

SEQ ID NO: 176848 - DNA, 25 bp, probe
ctcagatgacagtggatttctctct

SEQ ID NO: 176849 - DNA, 25 bp, probe
ctcatgccacagtggtactctgtgt

SEQ ID NO: 176850 - DNA, 25 bp, probe
ctcagtcatcactatggtgcttctg

SEQ ID NO: 176851 - DNA, 25 bp, probe
ctcagccaaatctgtctgctgctcc

SEQ ID NO: 176852 - DNA, 25 bp, probe
ctcagccaaatctgtctgctgctcc

SEQ ID NO: 176853 - DNA, 25 bp, probe
ctcaccagagtgacgtctggtcctt

SEQ ID NO: 176854 - DNA, 25 bp, probe
ctcaccgagtatgtgcgggcgcagt

SEQ ID NO: 176855 - DNA, 25 bp, probe
ctcaccagagatattgtggatggca

SEQ ID NO: 176856 - DNA, 25 bp, probe
ctcactgaggactttgcgaatatca

SEQ ID NO: 176857 - DNA, 25 bp, probe
ctcactgaagagtctatgccttgga

SEQ ID NO: 176858 - DNA, 25 bp, probe
ctcagggaggtcgtccttgatgcaa

SEQ ID NO: 176859 - DNA, 25 bp, probe
ctcaggtgatttgtatgctcattga

SEQ ID NO: 176860 - DNA, 25 bp, probe
ctcagggtggtgatgtccttgaatg

SEQ ID NO: 176861 - DNA, 25 bp, probe
ctgcggtggttcattcctttcagcc

SEQ ID NO: 176862 - DNA, 25 bp, probe
ctcttgagacttattcgctactacg

SEQ ID NO: 176863 - DNA, 25 bp, probe
ctcattatgaaaaacatcccaaact

SEQ ID NO: 176864 - DNA, 25 bp, probe
ctctttgaagcaccctgtaaacctt

SEQ ID NO: 176865 - DNA, 25 bp, probe
ctcattaataagaagattactcccc

SEQ ID NO: 176866 - DNA, 25 bp, probe
ctcaggaaacggctttgtccgcaca

SEQ ID NO: 176867 - DNA, 25 bp, probe
ctcggaaccgggacctagaggcaca

SEQ ID NO: 176868 - DNA, 25 bp, probe
ctgcggaaccccgaattacatcgcc

SEQ ID NO: 176869 - DNA, 25 bp, probe
ctcagaacacgcccggacatatatc

SEQ ID NO: 176870 - DNA, 25 bp, probe
ctcagaccaaggcgcagagcaacta

SEQ ID NO: 176871 - DNA, 25 bp, probe
ctcatgactatacgctaagagaact

SEQ ID NO: 176872 - DNA, 25 bp, probe
ctcagcacttgctaccagagaggac

SEQ ID NO: 176873 - DNA, 25 bp, probe
ctcagccgtgctacactacggacac

SEQ ID NO: 176874 - DNA, 25 bp, probe
ctcacgtgttcggtactgagcagcc

SEQ ID NO: 176875 - DNA, 25 bp, probe
ctctttttccaggcaatgacgtcga

SEQ ID NO: 176876 - DNA, 25 bp, probe
ctctttatcccatcttgattggggc

SEQ ID NO: 176877 - DNA, 25 bp, probe
ctcttatagcctgccttcaattttg

SEQ ID NO: 176878 - DNA, 25 bp, probe
ctgttaagacctcctattgagtttt

SEQ ID NO: 176879 - DNA, 25 bp, probe
ctcttaatacttaaaatcgttcttg

SEQ ID NO: 176880 - DNA, 25 bp, probe
ctcttcttacttaaaccagtcccag

SEQ ID NO: 176881 - DNA, 25 bp, probe
ctctttccacttaaacgtgtcccat

SEQ ID NO: 176882 - DNA, 25 bp, probe
ctctctggcgactggaaagtttcca

SEQ ID NO: 176883 - DNA, 25 bp, probe
ctcccacgactcagtgaagtttctc

SEQ ID NO: 176884 - DNA, 25 bp, probe
ctcacccctatcagtatactagcac

SEQ ID NO: 176885 - DNA, 25 bp, probe
ctcaccatccttttgttgaaatggc

SEQ ID NO: 176886 - DNA, 25 bp, probe
ctcagtcatttttctgtgtaccagg

SEQ ID NO: 176887 - DNA, 25 bp, probe
ctcagatattcttctatgtgtccct

SEQ ID NO: 176888 - DNA, 25 bp, probe
ctcagaaatctgtctatgaatgtta

SEQ ID NO: 176889 - DNA, 25 bp, probe
ctcatagacactgtgctaatgtgaa

SEQ ID NO: 176890 - DNA, 25 bp, probe
ctcactgtctcgtctgtctatgtga

SEQ ID NO: 176891 - DNA, 25 bp, probe
ctcagctattcttcagcttggtatg

SEQ ID NO: 176892 - DNA, 25 bp, probe
ctcagccatctctatatattctttc

SEQ ID NO: 176893 - DNA, 25 bp, probe
ctcatgcccatattcataatgcttt

SEQ ID NO: 176894 - DNA, 25 bp, probe
ctcatctctcacacagacttttgat

SEQ ID NO: 176895 - DNA, 25 bp, probe
ctcactgtagtggtcctgttctatg

SEQ ID NO: 176896 - DNA, 25 bp, probe
ctcactgggagggccaggactcagt

SEQ ID NO: 176897 - DNA, 25 bp, probe
ctcaggggacagcaaatggcatcag

SEQ ID NO: 176898 - DNA, 25 bp, probe
ctcagggaacagcagcagtgccata

SEQ ID NO: 176899 - DNA, 25 bp, probe
ctctggaaaaaaggagccatttggg

SEQ ID NO: 176900 - DNA, 25 bp, probe
ctcctaaacacagcagggctttgga

SEQ ID NO: 176901 - DNA, 25 bp, probe
ctcagcctgaaccccagggctgtaa

SEQ ID NO: 176902 - DNA, 25 bp, probe
ctcaggtaacctgcgtgctttataa

SEQ ID NO: 176903 - DNA, 25 bp, probe
ctgctggaaaccacacttcttgaaa

SEQ ID NO: 176904 - DNA, 25 bp, probe
ctgctaattcccaacatttcttaaa

SEQ ID NO: 176905 - DNA, 25 bp, probe
ctcgtatggccctagcattactaga

SEQ ID NO: 176906 - DNA, 25 bp, probe
ctctgttggtcctaggagtcattac

SEQ ID NO: 176907 - DNA, 25 bp, probe
ctctgttggtcctaggagtcattac

SEQ ID NO: 176908 - DNA, 25 bp, probe
ctctttgtgtccttgtgagacactt

SEQ ID NO: 176909 - DNA, 25 bp, probe
ctcttgtattacgattcgcacgatg

SEQ ID NO: 176910 - DNA, 25 bp, probe
ctcatgtttgaagatgatggcagga

SEQ ID NO: 176911 - DNA, 25 bp, probe
ctcagctcctggggatcatggtggt

SEQ ID NO: 176912 - DNA, 25 bp, probe
ctcatcatcctggtcactatagctg

SEQ ID NO: 176913 - DNA, 25 bp, probe
ctctcattcgtgcactaaggacctt

SEQ ID NO: 176914 - DNA, 25 bp, probe
ctcagcaaccatgacctgaaacctc

SEQ ID NO: 176915 - DNA, 25 bp, probe
ctcatcgtcaaggaccagagggccc

SEQ ID NO: 176916 - DNA, 25 bp, probe
ctcatgtctaagaacggggaccagc

SEQ ID NO: 176917 - DNA, 25 bp, probe
ctcagtaaggtacggagtaactgtc

SEQ ID NO: 176918 - DNA, 25 bp, probe
ctcagagaagtgcagggggagcctt

SEQ ID NO: 176919 - DNA, 25 bp, probe
ctcagagaagtacctcgagcggccg

SEQ ID NO: 176920 - DNA, 25 bp, probe
ctcatggggtggttctaggactgga

SEQ ID NO: 176921 - DNA, 25 bp, probe
ctcatggagtatgttccgggctgtg

SEQ ID NO: 176922 - DNA, 25 bp, probe
ctcaggcatgctggtattctggggc

SEQ ID NO: 176923 - DNA, 25 bp, probe
ctcagatgatgcgggagtgctggta

SEQ ID NO: 176924 - DNA, 25 bp, probe
ctcatgacgctctggttgagctcag

SEQ ID NO: 176925 - DNA, 25 bp, probe
ctcatgcacttatcgagatgtgcca

SEQ ID NO: 176926 - DNA, 25 bp, probe
ctcagccgttacctgtgtgtggtga

SEQ ID NO: 176927 - DNA, 25 bp, probe
ctcagcttcttcaggcggtagctga

SEQ ID NO: 176928 - DNA, 25 bp, probe
ctcagactcttcacagggtcaggac

SEQ ID NO: 176929 - DNA, 25 bp, probe
ctcagactcccataatggtatgagt

SEQ ID NO: 176930 - DNA, 25 bp, probe
ctccttcccattctgagatccagta

SEQ ID NO: 176931 - DNA, 25 bp, probe
ctctttcccattctgtattggagta

SEQ ID NO: 176932 - DNA, 25 bp, probe
ctctttcccgatctgggctggagag

SEQ ID NO: 176933 - DNA, 25 bp, probe
ctctttccttgtcccaggatggagc

SEQ ID NO: 176934 - DNA, 25 bp, probe
ctcttctccctgtgccagaagatcg

SEQ ID NO: 176935 - DNA, 25 bp, probe
ctcttcaccgtgttaacataatcta

SEQ ID NO: 176936 - DNA, 25 bp, probe
ctcttccctttgttattcagtgtga

SEQ ID NO: 176937 - DNA, 25 bp, probe
ctctagctacttggactattcaggg

SEQ ID NO: 176938 - DNA, 25 bp, probe
ctcatcgtagccgttctgattcaag

SEQ ID NO: 176939 - DNA, 25 bp, probe
ctcagagctgacagtcctgcttaga

SEQ ID NO: 176940 - DNA, 25 bp, probe
ctcagcctactttcacactaagaaa

SEQ ID NO: 176941 - DNA, 25 bp, probe
ctcagaatacagaagacctagcaga

SEQ ID NO: 176942 - DNA, 25 bp, probe
ctcagtcatgacgcaactgcggcat

SEQ ID NO: 176943 - DNA, 25 bp, probe
ctcaccatcctggaagtggcatgca

SEQ ID NO: 176944 - DNA, 25 bp, probe
ctcaccgcctgctacacaggcagga

SEQ ID NO: 176945 - DNA, 25 bp, probe
ctcaggcgcctctcaagaaaacgct

SEQ ID NO: 176946 - DNA, 25 bp, probe
ctcaggcgcctctcaagaaaacgct

SEQ ID NO: 176947 - DNA, 25 bp, probe
ctcaggctccctgaaacagctaggc

SEQ ID NO: 176948 - DNA, 25 bp, probe
ctcggtcctctgaacacagagtccc

SEQ ID NO: 176949 - DNA, 25 bp, probe
ctcagatgtcccttgatgcacagag

SEQ ID NO: 176950 - DNA, 25 bp, probe
ctcatctacctcatgagcacgggcc

SEQ ID NO: 176951 - DNA, 25 bp, probe
ctcatctacctcatgagcacgggcc

SEQ ID NO: 176952 - DNA, 25 bp, probe
ctcatcttcgctatgcccatgagac

SEQ ID NO: 176953 - DNA, 25 bp, probe
ctcagctttgccatctcaatgacaa

SEQ ID NO: 176954 - DNA, 25 bp, probe
ctcagctttgccatctcaatgacaa

SEQ ID NO: 176955 - DNA, 25 bp, probe
ctcagctgtactctatcaggaaaga

SEQ ID NO: 176956 - DNA, 25 bp, probe
ctcagctgtactctatcaggaaaga

SEQ ID NO: 176957 - DNA, 25 bp, probe
ctcagtgccaatcttccatgcaata

SEQ ID NO: 176958 - DNA, 25 bp, probe
ctcagtgccaatcttccatgcaata

SEQ ID NO: 176959 - DNA, 25 bp, probe
ctcagtgccatgcgttcgctgaaag

SEQ ID NO: 176960 - DNA, 25 bp, probe
ctcagctccaggctatctggcaata

SEQ ID NO: 176961 - DNA, 25 bp, probe
ctcagcaccgtgacttctgctaaaa

SEQ ID NO: 176962 - DNA, 25 bp, probe
ctcatacctcgacatgcactaaata

SEQ ID NO: 176963 - DNA, 25 bp, probe
ctcaccatctccctcatgagtaaga

SEQ ID NO: 176964 - DNA, 25 bp, probe
ctcatcctctacaatgatggtgaca

SEQ ID NO: 176965 - DNA, 25 bp, probe
ctcagcctcccaagtagctagacta

SEQ ID NO: 176966 - DNA, 25 bp, probe
ctcagccatcccaagctggttaaat

SEQ ID NO: 176967 - DNA, 25 bp, probe
ctcagccatcccaagctggttaaat

SEQ ID NO: 176968 - DNA, 25 bp, probe
ctcaccacccacagtgtgaatcctg

SEQ ID NO: 176969 - DNA, 25 bp, probe
ctctcaacacccagtttccttggga

SEQ ID NO: 176970 - DNA, 25 bp, probe
ctgaaacaccactcctttttgtgtg

SEQ ID NO: 176971 - DNA, 25 bp, probe
gcatcaaaaccctccttgaattggg

SEQ ID NO: 176972 - DNA, 25 bp, probe
ctccaaaccacctcttgacaatggg

SEQ ID NO: 176973 - DNA, 25 bp, probe
ctctaaaccctgctcatcaactagg

SEQ ID NO: 176974 - DNA, 25 bp, probe
ctcagagacagcgcgagtagcaccc

SEQ ID NO: 176975 - DNA, 25 bp, probe
ctcagtatccgagagctgacacacc

SEQ ID NO: 176976 - DNA, 25 bp, probe
ctcagaatcccagaggcagtcccag

SEQ ID NO: 176977 - DNA, 25 bp, probe
ctcagcaatcacaagccaaggtctg

SEQ ID NO: 176978 - DNA, 25 bp, probe
ctcagcaacactggtcacgtttgga

SEQ ID NO: 176979 - DNA, 25 bp, probe
ctcagcaagccctacagagctgtgg

SEQ ID NO: 176980 - DNA, 25 bp, probe
ctcagacagctggcatgagagaggg

SEQ ID NO: 176981 - DNA, 25 bp, probe
ctcagaactctggggcagggctgcg

SEQ ID NO: 176982 - DNA, 25 bp, probe
ctcagaactctggggcagggctgcg

SEQ ID NO: 176983 - DNA, 25 bp, probe
ctcagtgactcgagcaagggtgcga

SEQ ID NO: 176984 - DNA, 25 bp, probe
ctcagtgactcgagcaagggtgcga

SEQ ID NO: 176985 - DNA, 25 bp, probe
ctcatggacttcccaacagattcca

SEQ ID NO: 176986 - DNA, 25 bp, probe
ctcagtaatgaacaacagcattcag

SEQ ID NO: 176987 - DNA, 25 bp, probe
ctcagaaaacaccaaccatgctgtt

SEQ ID NO: 176988 - DNA, 25 bp, probe
ctcagtggcaacctcatgaacagga

SEQ ID NO: 176989 - DNA, 25 bp, probe
ctcagatggaatgctttacatggtt

SEQ ID NO: 176990 - DNA, 25 bp, probe
ctcagtgacaatgatctgcttctgg

SEQ ID NO: 176991 - DNA, 25 bp, probe
ctcagcgaccatgacttctgctaaa

SEQ ID NO: 176992 - DNA, 25 bp, probe
ctcagcgacctgctctttgagaagc

SEQ ID NO: 176993 - DNA, 25 bp, probe
ctcagataccagcccttggagagac

SEQ ID NO: 176994 - DNA, 25 bp, probe
ctcagaatacagcccagttggatca

SEQ ID NO: 176995 - DNA, 25 bp, probe
ctcagaatatcccgagtgctgcgtg

SEQ ID NO: 176996 - DNA, 25 bp, probe
ctcagaatatcccgagtgctgcgtg

SEQ ID NO: 176997 - DNA, 25 bp, probe
ctcagatttccattgtgtggcctgg

SEQ ID NO: 176998 - DNA, 25 bp, probe
ctcagatttccattgtgtggcctgg

SEQ ID NO: 176999 - DNA, 25 bp, probe
ctcagatgttcatcctgtggctctg

SEQ ID NO: 177000 - DNA, 25 bp, probe
ctcagatgttcatcctgtggctctg

SEQ ID NO: 177001 - DNA, 25 bp, probe
ctcagtttgccagtcttgcaatcag

SEQ ID NO: 177002 - DNA, 25 bp, probe
ctcagcaacggcagcgtgcagatca

SEQ ID NO: 177003 - DNA, 25 bp, probe
ctcaggtcaagcagtggcagacgca

SEQ ID NO: 177004 - DNA, 25 bp, probe
ctcagctgtccagcgctgagggcca

SEQ ID NO: 177005 - DNA, 25 bp, probe
ctcatggccaacgacgaggagtcag

SEQ ID NO: 177006 - DNA, 25 bp, probe
ctcatggccaacgacgaggagtcag

SEQ ID NO: 177007 - DNA, 25 bp, probe
ctcattgccaatggcctcctaatag

SEQ ID NO: 177008 - DNA, 25 bp, probe
ctctcccaaggtacttcaaaggctc

SEQ ID NO: 177009 - DNA, 25 bp, probe
ctccagaagggtgcccagtcaggcc

SEQ ID NO: 177010 - DNA, 25 bp, probe
ctctggacaggtcccttcagtaggc

SEQ ID NO: 177011 - DNA, 25 bp, probe
ctctcgtagttcccaaactcatgga

SEQ ID NO: 177012 - DNA, 25 bp, probe
ctctgaataggtcccaaacttaaat

SEQ ID NO: 177013 - DNA, 25 bp, probe
ctctaactggctgtacagaaaagaa

SEQ ID NO: 177014 - DNA, 25 bp, probe
ctgtccattggtgattcggcgaaga

SEQ ID NO: 177015 - DNA, 25 bp, probe
ctcatcgattgatttacggcgctaa

SEQ ID NO: 177016 - DNA, 25 bp, probe
ctcatggatctgcataaccgcacag

SEQ ID NO: 177017 - DNA, 25 bp, probe
ctcagatagcgcatgaacccatcca

SEQ ID NO: 177018 - DNA, 25 bp, probe
ctcagatagcgcatgaacccatcca

SEQ ID NO: 177019 - DNA, 25 bp, probe
ctcaggcacagcatgacctcctgaa

SEQ ID NO: 177020 - DNA, 25 bp, probe
ctcaggctgatgagctccaacataa

SEQ ID NO: 177021 - DNA, 25 bp, probe
ctcttctggttggccatgagctcta

SEQ ID NO: 177022 - DNA, 25 bp, probe
ctctactggttcaccctgtaccagt

SEQ ID NO: 177023 - DNA, 25 bp, probe
ctctagatggcaaagcccacttagc

SEQ ID NO: 177024 - DNA, 25 bp, probe
ctcatttgatctcagcctcatcatg

SEQ ID NO: 177025 - DNA, 25 bp, probe
ctcatgttcattcagcgtgcttggt

SEQ ID NO: 177026 - DNA, 25 bp, probe
ctcatgttcattcagcgtgcttggt

SEQ ID NO: 177027 - DNA, 25 bp, probe
ctcagtctgaggcaaggctgtggag

SEQ ID NO: 177028 - DNA, 25 bp, probe
ctcagactggggaagagtccaagga

SEQ ID NO: 177029 - DNA, 25 bp, probe
ctcatttggggaggtgtacaagggg

SEQ ID NO: 177030 - DNA, 25 bp, probe
ctctgttgtaaagggataaagtgga

SEQ ID NO: 177031 - DNA, 25 bp, probe
ctcttggtcaacaggcaaaagacaa

SEQ ID NO: 177032 - DNA, 25 bp, probe
ctcttcaccaactgtcagaaggcaa

SEQ ID NO: 177033 - DNA, 25 bp, probe
ctctttttgactcttgcaatccaca

SEQ ID NO: 177034 - DNA, 25 bp, probe
ctctttttgattgaactatcccaga

SEQ ID NO: 177035 - DNA, 25 bp, probe
ctcagtttatttaaccattcccatg

SEQ ID NO: 177036 - DNA, 25 bp, probe
ctcagttctacttatgacacctcac

SEQ ID NO: 177037 - DNA, 25 bp, probe
ctcagttctacttatgacacctcac

SEQ ID NO: 177038 - DNA, 25 bp, probe
ctcagtgcctgaggaagaaccccgc

SEQ ID NO: 177039 - DNA, 25 bp, probe
ctcaggcagtgcaggacaacccagc

SEQ ID NO: 177040 - DNA, 25 bp, probe
ctcaggcagtgcaggacaacccagc

SEQ ID NO: 177041 - DNA, 25 bp, probe
ctctgagggccggaggaaccgcatc

SEQ ID NO: 177042 - DNA, 25 bp, probe
ctctgagggccggaggaaccgcatc

SEQ ID NO: 177043 - DNA, 25 bp, probe
ctctagggttgctggagcctgagtc

SEQ ID NO: 177044 - DNA, 25 bp, probe
ctcttggcggtcatggcctatgact

SEQ ID NO: 177045 - DNA, 25 bp, probe
ctcattgtgcaggaaggtctataac

SEQ ID NO: 177046 - DNA, 25 bp, probe
ctcattgtgcaggaaggtctataac

SEQ ID NO: 177047 - DNA, 25 bp, probe
ctcttgaagcacaggtttagcccca

SEQ ID NO: 177048 - DNA, 25 bp, probe
ctcttgaagcacaggtttagcccca

SEQ ID NO: 177049 - DNA, 25 bp, probe
ctctctcaacaaaaggtatatgcct

SEQ ID NO: 177050 - DNA, 25 bp, probe
ctcttcttgcgaaaggttctctctg

SEQ ID NO: 177051 - DNA, 25 bp, probe
ctcttcagaggacagggtacctgct

SEQ ID NO: 177052 - DNA, 25 bp, probe
ctcattcacgggactagttagcttt

SEQ ID NO: 177053 - DNA, 25 bp, probe
ctcttcctggatctgagaatttatt

SEQ ID NO: 177054 - DNA, 25 bp, probe
ctcattcctttattgggcgttcatg

SEQ ID NO: 177055 - DNA, 25 bp, probe
ctctagcttttgcaggccgactgag

SEQ ID NO: 177056 - DNA, 25 bp, probe
ctctatgtcttcgtgggggtcaagt

SEQ ID NO: 177057 - DNA, 25 bp, probe
ctctatgtcttcgtgggggtcaagt

SEQ ID NO: 177058 - DNA, 25 bp, probe
ctctacttgctcactggggacaaat

SEQ ID NO: 177059 - DNA, 25 bp, probe
ctctagttgaaccctgggaacaatt

SEQ ID NO: 177060 - DNA, 25 bp, probe
ctcttgtggaatggagtaaaccagt

SEQ ID NO: 177061 - DNA, 25 bp, probe
ctctttcttctttgtaaaccatgtc

SEQ ID NO: 177062 - DNA, 25 bp, probe
ctcttgactttttatatacacctat

SEQ ID NO: 177063 - DNA, 25 bp, probe
ctctttcagtattaaactctccttt

SEQ ID NO: 177064 - DNA, 25 bp, probe
ctctttggatagtaaactcacttat

SEQ ID NO: 177065 - DNA, 25 bp, probe
ctcgttgagaaggaagagccgttca

SEQ ID NO: 177066 - DNA, 25 bp, probe
ctcggaggaccttaagccagttatc

SEQ ID NO: 177067 - DNA, 25 bp, probe
ctcaggactgcaccttagggcagtg

SEQ ID NO: 177068 - DNA, 25 bp, probe
ctcaggaaccccagtctggggtagg

SEQ ID NO: 177069 - DNA, 25 bp, probe
ctcaggcataccgggggcagagggt

SEQ ID NO: 177070 - DNA, 25 bp, probe
ctcagagcataatccttggcagggc

SEQ ID NO: 177071 - DNA, 25 bp, probe
ctcagagcataatccttggcagggc

SEQ ID NO: 177072 - DNA, 25 bp, probe
ctcagagtcaacctcctgtgatgcc

SEQ ID NO: 177073 - DNA, 25 bp, probe
ctcatggttatggtgccttgcagca

SEQ ID NO: 177074 - DNA, 25 bp, probe
ctcagatgtttggagctttggagtg

SEQ ID NO: 177075 - DNA, 25 bp, probe
ctcatggtcttcgagtatatgcggc

SEQ ID NO: 177076 - DNA, 25 bp, probe
ctcagacatgttgagaatcatggac

SEQ ID NO: 177077 - DNA, 25 bp, probe
ctcatcgtgttctgcaatgcaggca

SEQ ID NO: 177078 - DNA, 25 bp, probe
ctcatctgagtgacggatatgtgaa

SEQ ID NO: 177079 - DNA, 25 bp, probe
ctctccgatgtggcagtcagtaacc

SEQ ID NO: 177080 - DNA, 25 bp, probe
ctcccctggccacagtaattggtca

SEQ ID NO: 177081 - DNA, 25 bp, probe
ctcccctggccacagtaattggtca

SEQ ID NO: 177082 - DNA, 25 bp, probe
ctcccctggccacagtaattggtca

SEQ ID NO: 177083 - DNA, 25 bp, probe
ctcatccaccaggggatgaaatgtg

SEQ ID NO: 177084 - DNA, 25 bp, probe
ctctagagtcagtcattatgaaatg

SEQ ID NO: 177085 - DNA, 25 bp, probe
ctctgagttcatggatgttaattga

SEQ ID NO: 177086 - DNA, 25 bp, probe
ctcagaggtattcctttattatgtg

SEQ ID NO: 177087 - DNA, 25 bp, probe
ctcgacgtcattcagcttcacggtg

SEQ ID NO: 177088 - DNA, 25 bp, probe
ctctgatcctaacaggccacgttaa

SEQ ID NO: 177089 - DNA, 25 bp, probe
ctcagtcggcaaaaggcgcggtgtg

SEQ ID NO: 177090 - DNA, 25 bp, probe
ctcagttgagcatctaggaagtatt

SEQ ID NO: 177091 - DNA, 25 bp, probe
ctcagtggatgctcctgctagagta

SEQ ID NO: 177092 - DNA, 25 bp, probe
ctctatgaccaagctgccagactat

SEQ ID NO: 177093 - DNA, 25 bp, probe
ctctatgaccaagctgccagactat

SEQ ID NO: 177094 - DNA, 25 bp, probe
cgatgagacctgtacccgattttac

SEQ ID NO: 177095 - DNA, 25 bp, probe
ctgtaaattgtaatcctttctccag

SEQ ID NO: 177096 - DNA, 25 bp, probe
ctgttactttttctttgcgggatgg

SEQ ID NO: 177097 - DNA, 25 bp, probe
cgtccattttttcatattagaggtg

SEQ ID NO: 177098 - DNA, 25 bp, probe
ctcttccttttagtattcttagttg

SEQ ID NO: 177099 - DNA, 25 bp, probe
ctcttagaatttgtttcatctattt

SEQ ID NO: 177100 - DNA, 25 bp, probe
ctcttaggcagctatgggtttcttt

SEQ ID NO: 177101 - DNA, 25 bp, probe
ctcttagcccttggtgtttcattgt

SEQ ID NO: 177102 - DNA, 25 bp, probe
ctcttggcccctgtgtgagttgagt

SEQ ID NO: 177103 - DNA, 25 bp, probe
ctcttggtgcctaacctggattagt

SEQ ID NO: 177104 - DNA, 25 bp, probe
ctcttggagcgcaagaggctgctga

SEQ ID NO: 177105 - DNA, 25 bp, probe
ctcttggagtgctcatgtttgaaga

SEQ ID NO: 177106 - DNA, 25 bp, probe
ctcttggatgtggtcagctctccag

SEQ ID NO: 177107 - DNA, 25 bp, probe
ctctatggcattgctggttctacca

SEQ ID NO: 177108 - DNA, 25 bp, probe
ctcatatcccaggatgggactcagc

SEQ ID NO: 177109 - DNA, 25 bp, probe
ctcatctaccaggagtggcggtggg

SEQ ID NO: 177110 - DNA, 25 bp, probe
ctcattcccaaaccggtggagcagt

SEQ ID NO: 177111 - DNA, 25 bp, probe
ctcatttccaacataggaggatcca

SEQ ID NO: 177112 - DNA, 25 bp, probe
ctctgttaaactcaccatgcgacgc

SEQ ID NO: 177113 - DNA, 25 bp, probe
ctctttaggtctgaactggctgaga

SEQ ID NO: 177114 - DNA, 25 bp, probe
ctctacttggggaaatcaggtgcag

SEQ ID NO: 177115 - DNA, 25 bp, probe
ctctatgagatggggaacaagcttg

SEQ ID NO: 177116 - DNA, 25 bp, probe
ctctacgtgcaagtcaacaagtttg

SEQ ID NO: 177117 - DNA, 25 bp, probe
ctcgacgtggccgccaagttagtcg

SEQ ID NO: 177118 - DNA, 25 bp, probe
ctctacaaagcccactactttttcg

SEQ ID NO: 177119 - DNA, 25 bp, probe
ctctgaaacaccactcctttttgtg

SEQ ID NO: 177120 - DNA, 25 bp, probe
ctctgaaacaccactcctttttgtg

SEQ ID NO: 177121 - DNA, 25 bp, probe
ctctcagaaggtattccttttgtgt

SEQ ID NO: 177122 - DNA, 25 bp, probe
ctcatctggaaatagttccgtttgt

SEQ ID NO: 177123 - DNA, 25 bp, probe
cctcttgaaattgtcccagttactg

SEQ ID NO: 177124 - DNA, 25 bp, probe
ccttttaaacctcaagtaacatctg

SEQ ID NO: 177125 - DNA, 25 bp, probe
ccggttggaacctgcaataaactcg

SEQ ID NO: 177126 - DNA, 25 bp, probe
ccaggttaaacctcttcactcagtc

SEQ ID NO: 177127 - DNA, 25 bp, probe
ctcaggtacaaactcgacttcagac

SEQ ID NO: 177128 - DNA, 25 bp, probe
ctctttacaaagtctaattcagcac

SEQ ID NO: 177129 - DNA, 25 bp, probe
ctctttacaaagtctaattcagcac

SEQ ID NO: 177130 - DNA, 25 bp, probe
ctcttaactccatgctacactgcaa

SEQ ID NO: 177131 - DNA, 25 bp, probe
ctcatttaccatcatgtatccagta

SEQ ID NO: 177132 - DNA, 25 bp, probe
ctcattgtacctccctgactaaaaa

SEQ ID NO: 177133 - DNA, 25 bp, probe
ctctgtgcaacgccacctttaaaaa

SEQ ID NO: 177134 - DNA, 25 bp, probe
ctctttagacgacctcttccaaaag

SEQ ID NO: 177135 - DNA, 25 bp, probe
ctctgttgacccgaggttccaaagg

SEQ ID NO: 177136 - DNA, 25 bp, probe
ctctagttctccaaggacctagaag

SEQ ID NO: 177137 - DNA, 25 bp, probe
ctctactaccacaaggaaaatagtt

SEQ ID NO: 177138 - DNA, 25 bp, probe
ctctactacgtcaggcagaattctt

SEQ ID NO: 177139 - DNA, 25 bp, probe
ctctactacctcactagacatccaa

SEQ ID NO: 177140 - DNA, 25 bp, probe
ctctactacacaggcctgataactc

SEQ ID NO: 177141 - DNA, 25 bp, probe
ctctttatacaagcatgcccaatct

SEQ ID NO: 177142 - DNA, 25 bp, probe
ctctaccaccaaggatgccctagat

SEQ ID NO: 177143 - DNA, 25 bp, probe
ctctaccaccaaggatgccctagat

SEQ ID NO: 177144 - DNA, 25 bp, probe
ctctaccaccaaggatgccctagat

SEQ ID NO: 177145 - DNA, 25 bp, probe
ctctacagcagcaagaggagtccaa

SEQ ID NO: 177146 - DNA, 25 bp, probe
ctcttcgacatcgaggatgacatca

SEQ ID NO: 177147 - DNA, 25 bp, probe
ctctgcgcggcagaggaccagcatg

SEQ ID NO: 177148 - DNA, 25 bp, probe
ctctctgggaaacgtcccttgtcag

SEQ ID NO: 177149 - DNA, 25 bp, probe
ctctctgggaaacgtcccttgtcag

SEQ ID NO: 177150 - DNA, 25 bp, probe
ctctctggagaaagggccctgggcc

SEQ ID NO: 177151 - DNA, 25 bp, probe
ctctttgagaatgtgttcttctggc

SEQ ID NO: 177152 - DNA, 25 bp, probe
ctcttcagcaaacatgtatcgattc

SEQ ID NO: 177153 - DNA, 25 bp, probe
ctcttcagcaaacatgtatcgattc

SEQ ID NO: 177154 - DNA, 25 bp, probe
ctcttagaaatgtgctacgatgtct

SEQ ID NO: 177155 - DNA, 25 bp, probe
ctctcaagctgagtgggtccgggct

SEQ ID NO: 177156 - DNA, 25 bp, probe
ctctcacgacggagatctgggcttt

SEQ ID NO: 177157 - DNA, 25 bp, probe
ctctcccacaccaattcggttgtga

SEQ ID NO: 177158 - DNA, 25 bp, probe
ctcttccagcacggctttggtaggg

SEQ ID NO: 177159 - DNA, 25 bp, probe
ctcttccagcacggctttggtaggg

SEQ ID NO: 177160 - DNA, 25 bp, probe
ctcatctcctacactctcattgtag

SEQ ID NO: 177161 - DNA, 25 bp, probe
ctcatggcccacatggcctccaagg

SEQ ID NO: 177162 - DNA, 25 bp, probe
ctcaggctgcccagggatgctggag

SEQ ID NO: 177163 - DNA, 25 bp, probe
ctcatcccccatcagatgatgggag

SEQ ID NO: 177164 - DNA, 25 bp, probe
ctcatccccacgcacgatgagcagg

SEQ ID NO: 177165 - DNA, 25 bp, probe
ctcatccacactgccacaatgcagg

SEQ ID NO: 177166 - DNA, 25 bp, probe
ctcatccctcagtggcaacagaaac

SEQ ID NO: 177167 - DNA, 25 bp, probe
ctctctcctttacgagacgaaaagg

SEQ ID NO: 177168 - DNA, 25 bp, probe
ctcatgccctgttgataaaccaatc

SEQ ID NO: 177169 - DNA, 25 bp, probe
ctcatgactccttgttacactgcaa

SEQ ID NO: 177170 - DNA, 25 bp, probe
ctcatcagcttcttttacgctctga

SEQ ID NO: 177171 - DNA, 25 bp, probe
ctcatcatctctgttatacacctgt

SEQ ID NO: 177172 - DNA, 25 bp, probe
ctcatacctctgaccaacaggctgt

SEQ ID NO: 177173 - DNA, 25 bp, probe
ctctagcctcgagtccgaggtatga

SEQ ID NO: 177174 - DNA, 25 bp, probe
ctctcagcagctagatgcatgcctg

SEQ ID NO: 177175 - DNA, 25 bp, probe
ctctcagcagctagatgcatgcctg

SEQ ID NO: 177176 - DNA, 25 bp, probe
ctctcagctgcaggcatgcatgaag

SEQ ID NO: 177177 - DNA, 25 bp, probe
ctctccatgtgctatatgaatgaag

SEQ ID NO: 177178 - DNA, 25 bp, probe
ctcatccaggcagtgacacgacgat

SEQ ID NO: 177179 - DNA, 25 bp, probe
ctcatccagacagaacgacagaacc

SEQ ID NO: 177180 - DNA, 25 bp, probe
ctctcaggacacggacgcagtggtc

SEQ ID NO: 177181 - DNA, 25 bp, probe
ctcatcagggacatgtcagggaatg

SEQ ID NO: 177182 - DNA, 25 bp, probe
ctcaggagaggcctgtcgcgaggag

SEQ ID NO: 177183 - DNA, 25 bp, probe
ctcttgggcgcccatcatggaggag

SEQ ID NO: 177184 - DNA, 25 bp, probe
ctcatcgggcgggagctgtggagca

SEQ ID NO: 177185 - DNA, 25 bp, probe
ctcatctgggcatgccagcgtggac

SEQ ID NO: 177186 - DNA, 25 bp, probe
ctcatgctggtcatggagatggctg

SEQ ID NO: 177187 - DNA, 25 bp, probe
gctaccttgaacttcagcggtacgc

SEQ ID NO: 177188 - DNA, 25 bp, probe
ctcatcttcttagtgtgccacttgc

SEQ ID NO: 177189 - DNA, 25 bp, probe
ctcatcatttgtggcagtcccttat

SEQ ID NO: 177190 - DNA, 25 bp, probe
ctctcttatggtggtggcctggtga

SEQ ID NO: 177191 - DNA, 25 bp, probe
ctcatgatgtagctggcttccgtct

SEQ ID NO: 177192 - DNA, 25 bp, probe
ctcagtgtacttgttcctattgcct

SEQ ID NO: 177193 - DNA, 25 bp, probe
ctgcagttacttttgacccatgtgc

SEQ ID NO: 177194 - DNA, 25 bp, probe
ctcagtcttctgaactccagggacc

SEQ ID NO: 177195 - DNA, 25 bp, probe
ctcttctttgattccctgggatagt

SEQ ID NO: 177196 - DNA, 25 bp, probe
ctctctagttgaaccctgggaacaa

SEQ ID NO: 177197 - DNA, 25 bp, probe
ctcttgacttagacctatactgaaa

SEQ ID NO: 177198 - DNA, 25 bp, probe
ctcttgacttagcttagagctttta

SEQ ID NO: 177199 - DNA, 25 bp, probe
ctcttgctctttcattagatttgct

SEQ ID NO: 177200 - DNA, 25 bp, probe
ctcttcctctatcagggacagtgtg

SEQ ID NO: 177201 - DNA, 25 bp, probe
ctcttctcctacaaatgccaagtgg

SEQ ID NO: 177202 - DNA, 25 bp, probe
ctctactgcttcctcaaccaagagg

SEQ ID NO: 177203 - DNA, 25 bp, probe
ctctaggctatctacacactaaaga

SEQ ID NO: 177204 - DNA, 25 bp, probe
ctctgcagcccagggaccgaaaagt

SEQ ID NO: 177205 - DNA, 25 bp, probe
ctctgctgccaatgggtcggacaac

SEQ ID NO: 177206 - DNA, 25 bp, probe
ctcatcatcctatatggccggatct

SEQ ID NO: 177207 - DNA, 25 bp, probe
ctcttggtgtggtgcagggatcctg

SEQ ID NO: 177208 - DNA, 25 bp, probe
ctcttggacaagcacagggatctcg

SEQ ID NO: 177209 - DNA, 25 bp, probe
ctcttgtccaggcatcagaggcgct

SEQ ID NO: 177210 - DNA, 25 bp, probe
ctcttgtccaggcatcagaggcgct

SEQ ID NO: 177211 - DNA, 25 bp, probe
ctctttctcagcagtatcgtagcct

SEQ ID NO: 177212 - DNA, 25 bp, probe
ctcatgtactcagaggcacttccct

SEQ ID NO: 177213 - DNA, 25 bp, probe
ctcttatctagcaaatgaaatcctg

SEQ ID NO: 177214 - DNA, 25 bp, probe
ctcatctcctacaaccaagacatcg

SEQ ID NO: 177215 - DNA, 25 bp, probe
ctgattccccactcaatgacatcat

SEQ ID NO: 177216 - DNA, 25 bp, probe
ctcttcccctcatcaagagctatct

SEQ ID NO: 177217 - DNA, 25 bp, probe
ctcttctccttaatcagaagcttag

SEQ ID NO: 177218 - DNA, 25 bp, probe
ctcttctccttaatcagaagcttag

SEQ ID NO: 177219 - DNA, 25 bp, probe
ctctcaaccttaacaaacactgtga

SEQ ID NO: 177220 - DNA, 25 bp, probe
ctctcaaccttaacaaacactgtga

SEQ ID NO: 177221 - DNA, 25 bp, probe
ctctacacacaggtcccaaacagga

SEQ ID NO: 177222 - DNA, 25 bp, probe
ctctccagcgcctccaaaacggagg

SEQ ID NO: 177223 - DNA, 25 bp, probe
ctctcaggcgcctctcaagaaaacg

SEQ ID NO: 177224 - DNA, 25 bp, probe
ctctcaggcgcctctcaagaaaacg

SEQ ID NO: 177225 - DNA, 25 bp, probe
ctctcaacgagttcccagaggaact

SEQ ID NO: 177226 - DNA, 25 bp, probe
ctctcaaaaactgcacggacataca

SEQ ID NO: 177227 - DNA, 25 bp, probe
ctctctaccaactaccatgaggcta

SEQ ID NO: 177228 - DNA, 25 bp, probe
ctcttacccaatttctgggctctgg

SEQ ID NO: 177229 - DNA, 25 bp, probe
ctctgatccgccaagtcttggacgc

SEQ ID NO: 177230 - DNA, 25 bp, probe
ctcatggggaggcgcgagggcagga

SEQ ID NO: 177231 - DNA, 25 bp, probe
ctcaggggtaggcccaggtgggatg

SEQ ID NO: 177232 - DNA, 25 bp, probe
ctcaggggacaggtacctggtgtgc

SEQ ID NO: 177233 - DNA, 25 bp, probe
ctcaggggacaggtacctggtgtgc

SEQ ID NO: 177234 - DNA, 25 bp, probe
ctcgcctggaagctggcctaattga

SEQ ID NO: 177235 - DNA, 25 bp, probe
ctcgcctggaagctggcctaattga

SEQ ID NO: 177236 - DNA, 25 bp, probe
ctcttgctgtcatgttggcctaatg

SEQ ID NO: 177237 - DNA, 25 bp, probe
ctctcttctcactttgagattgaag

SEQ ID NO: 177238 - DNA, 25 bp, probe
ctctcaatctcatgcttgagtctct

SEQ ID NO: 177239 - DNA, 25 bp, probe
ctctaatctgttttgagtctttaca

SEQ ID NO: 177240 - DNA, 25 bp, probe
ctcttggctttagatgacatttagc

SEQ ID NO: 177241 - DNA, 25 bp, probe
ctctgtggcctgggaatccattttc

SEQ ID NO: 177242 - DNA, 25 bp, probe
ctcatttcgctgggactcatttccc

SEQ ID NO: 177243 - DNA, 25 bp, probe
ctcatttggctttgtgaattgtcac

SEQ ID NO: 177244 - DNA, 25 bp, probe
ctcggagccatttgtacatttcatc

SEQ ID NO: 177245 - DNA, 25 bp, probe
ctctggagccttggagttctttgct

SEQ ID NO: 177246 - DNA, 25 bp, probe
ctctggagccttggagttctttgct

SEQ ID NO: 177247 - DNA, 25 bp, probe
ctctgacatgacagtattttttctg

SEQ ID NO: 177248 - DNA, 25 bp, probe
ctcatacaaggcttattcttattta

SEQ ID NO: 177249 - DNA, 25 bp, probe
ctctatgaacgccttcggtcaatta

SEQ ID NO: 177250 - DNA, 25 bp, probe
ctctatgaacgccttcggtcaatta

SEQ ID NO: 177251 - DNA, 25 bp, probe
ctctaaagggaactgtgacatttca

SEQ ID NO: 177252 - DNA, 25 bp, probe
gctcgaaaaggttttgactgtgttg

SEQ ID NO: 177253 - DNA, 25 bp, probe
ctcatcaaacagtcccttgactgga

SEQ ID NO: 177254 - DNA, 25 bp, probe
ctcatgatagagaaccctgcagtgt

SEQ ID NO: 177255 - DNA, 25 bp, probe
ctcatgtgtcaattccctactggac

SEQ ID NO: 177256 - DNA, 25 bp, probe
ctcaggtatgagttccgcaaggtgg

SEQ ID NO: 177257 - DNA, 25 bp, probe
ctcaggagaggaccctcaaggctgc

SEQ ID NO: 177258 - DNA, 25 bp, probe
ctcgggaaatgcaggaaggccgggt

SEQ ID NO: 177259 - DNA, 25 bp, probe
ctcgggaaatgagaagacggctcgg

SEQ ID NO: 177260 - DNA, 25 bp, probe
ctctgggccttaggaagagccttcc

SEQ ID NO: 177261 - DNA, 25 bp, probe
cgctggggaaacggataggcttcta

SEQ ID NO: 177262 - DNA, 25 bp, probe
ctctttgggacctaatgactcattt

SEQ ID NO: 177263 - DNA, 25 bp, probe
ctcatctccggagctgatagcactc

SEQ ID NO: 177264 - DNA, 25 bp, probe
ctcatcccggaagcatgacagcatt

SEQ ID NO: 177265 - DNA, 25 bp, probe
ctcatcctgaggaacatgaaagaga

SEQ ID NO: 177266 - DNA, 25 bp, probe
ctcatcggcaggaagctgtggcgga

SEQ ID NO: 177267 - DNA, 25 bp, probe
ctcttgactgagaagttgtggtgga

SEQ ID NO: 177268 - DNA, 25 bp, probe
ctcatgtttgagatgctcacggggt

SEQ ID NO: 177269 - DNA, 25 bp, probe
ctcatccttgagtgcctcagtggtg

SEQ ID NO: 177270 - DNA, 25 bp, probe
ctcatccttgagtgcctcagtggtg

SEQ ID NO: 177271 - DNA, 25 bp, probe
ctcatcacgggtgcctggagtgtgg

SEQ ID NO: 177272 - DNA, 25 bp, probe
ctcatcacgggtgcctggagtgtgg

SEQ ID NO: 177273 - DNA, 25 bp, probe
ctctacggatttgcctgttctgggc

SEQ ID NO: 177274 - DNA, 25 bp, probe
ctcttcgaaatcaggtggttagctc

SEQ ID NO: 177275 - DNA, 25 bp, probe
ctcttcgaaagcctggaggctattt

SEQ ID NO: 177276 - DNA, 25 bp, probe
ctcttccgaaaaccaggccttatct

SEQ ID NO: 177277 - DNA, 25 bp, probe
ctcttccgaaaaccaggccttatct

SEQ ID NO: 177278 - DNA, 25 bp, probe
ctcttgccgaggagccaggcaactt

SEQ ID NO: 177279 - DNA, 25 bp, probe
ctcttcagggtgagccagcctcacc

SEQ ID NO: 177280 - DNA, 25 bp, probe
ctcattcgtgggaacagcgcagtac

SEQ ID NO: 177281 - DNA, 25 bp, probe
ctctccctgtgacacagcttgtaca

SEQ ID NO: 177282 - DNA, 25 bp, probe
ctctcgccagtcagacgtctggagc

SEQ ID NO: 177283 - DNA, 25 bp, probe
ctctaccaatcacacttgctgcgag

SEQ ID NO: 177284 - DNA, 25 bp, probe
ctctaccacatggccctaggagtga

SEQ ID NO: 177285 - DNA, 25 bp, probe
ctctaccacatggccctaggagtga

SEQ ID NO: 177286 - DNA, 25 bp, probe
ctcttcgagctcatcctcatggaag

SEQ ID NO: 177287 - DNA, 25 bp, probe
ctcttcgagctcatcctcatggaag

SEQ ID NO: 177288 - DNA, 25 bp, probe
ctctgtaacatcactatccgatgca

SEQ ID NO: 177289 - DNA, 25 bp, probe
ctcttcaacatcaacttctacgcag

SEQ ID NO: 177290 - DNA, 25 bp, probe
ctcatcataaatatcatctctagca

SEQ ID NO: 177291 - DNA, 25 bp, probe
ctcatctcctaagtagctcttcaga

SEQ ID NO: 177292 - DNA, 25 bp, probe
ctcatcctctaaggcaggcttcaca

SEQ ID NO: 177293 - DNA, 25 bp, probe
ctcatcctctaaggcaggcttcaca

SEQ ID NO: 177294 - DNA, 25 bp, probe
ctctcttggaatccatgtgcccagg

SEQ ID NO: 177295 - DNA, 25 bp, probe
ctctcttggaatccatgtgcccagg

SEQ ID NO: 177296 - DNA, 25 bp, probe
ctctttgatcgactcattgctcagg

SEQ ID NO: 177297 - DNA, 25 bp, probe
ctcatttgtggcttctgatgtccca

SEQ ID NO: 177298 - DNA, 25 bp, probe
ctcattgggagctttgctctatcct

SEQ ID NO: 177299 - DNA, 25 bp, probe
ctctatggtagaatttcccatgcat

SEQ ID NO: 177300 - DNA, 25 bp, probe
ctcttgacaatgactattccctgac

SEQ ID NO: 177301 - DNA, 25 bp, probe
ctcttgacctgcttctgaaagtgcc

SEQ ID NO: 177302 - DNA, 25 bp, probe
ctcttccagctgctaaaaggcctcg

SEQ ID NO: 177303 - DNA, 25 bp, probe
ctcttccagctgctgatcgaagaaa

SEQ ID NO: 177304 - DNA, 25 bp, probe
ctcttccacatccgcaagatcatga

SEQ ID NO: 177305 - DNA, 25 bp, probe
ctcattgccacagtacaagctaagt

SEQ ID NO: 177306 - DNA, 25 bp, probe
ctcatgatcccagataagtgtgtgt

SEQ ID NO: 177307 - DNA, 25 bp, probe
ctcatcgaccgctataagcgctgga

SEQ ID NO: 177308 - DNA, 25 bp, probe
ctctcaatcctcgtatagcgtatga

SEQ ID NO: 177309 - DNA, 25 bp, probe
ctctacatcgtcactgagtacatgg

SEQ ID NO: 177310 - DNA, 25 bp, probe
ctctagcctgtggtctcattactag

SEQ ID NO: 177311 - DNA, 25 bp, probe
ctctcagcgtatgttcaggactcag

SEQ ID NO: 177312 - DNA, 25 bp, probe
ctcatgctggtggacttcgagtaca

SEQ ID NO: 177313 - DNA, 25 bp, probe
ctcatgctgtgtgactcaaaccaaa

SEQ ID NO: 177314 - DNA, 25 bp, probe
ctctctggatccggaagaatcataa

SEQ ID NO: 177315 - DNA, 25 bp, probe
ctcttcctccaccaatgaagctgaa

SEQ ID NO: 177316 - DNA, 25 bp, probe
ctcttccccagccatttagaaacaa

SEQ ID NO: 177317 - DNA, 25 bp, probe
ctctgcttcccaggttcaagcgatt

SEQ ID NO: 177318 - DNA, 25 bp, probe
ctctcttatcccaattcaagaccct

SEQ ID NO: 177319 - DNA, 25 bp, probe
ctctcttatcccaattcaagaccct

SEQ ID NO: 177320 - DNA, 25 bp, probe
ctctattactgggaccaggacccac

SEQ ID NO: 177321 - DNA, 25 bp, probe
ctcttttggggtagatgcggccccg

SEQ ID NO: 177322 - DNA, 25 bp, probe
ctctccttaccgagaaggaccccag

SEQ ID NO: 177323 - DNA, 25 bp, probe
ctccctgggctcataagccagacca

SEQ ID NO: 177324 - DNA, 25 bp, probe
ctctcctggcgtcttaggaatactc

SEQ ID NO: 177325 - DNA, 25 bp, probe
ctctaccacgtatatgaggtgaacc

SEQ ID NO: 177326 - DNA, 25 bp, probe
ctctaccaactaccatgaggctaaa

SEQ ID NO: 177327 - DNA, 25 bp, probe
ctctgacccctacatgagccagaag

SEQ ID NO: 177328 - DNA, 25 bp, probe
ctctgacccctacatgagccagaag

SEQ ID NO: 177329 - DNA, 25 bp, probe
ctctgacccttccattgaggaaatg

SEQ ID NO: 177330 - DNA, 25 bp, probe
ctctacctctgtccttcaaggaagc

SEQ ID NO: 177331 - DNA, 25 bp, probe
ctctggtggcattcctttaggaatg

SEQ ID NO: 177332 - DNA, 25 bp, probe
ctcttgggcatattttccatgggat

SEQ ID NO: 177333 - DNA, 25 bp, probe
ctctttcattagatttgctgggctt

SEQ ID NO: 177334 - DNA, 25 bp, probe
ctcttacattctagttctggtgctc

SEQ ID NO: 177335 - DNA, 25 bp, probe
ctcattgtcttctatcaatcgggcc

SEQ ID NO: 177336 - DNA, 25 bp, probe
ctcattgtcttctatcaatcgggcc

SEQ ID NO: 177337 - DNA, 25 bp, probe
ctcattgtctttttgcatcagtact

SEQ ID NO: 177338 - DNA, 25 bp, probe
ctcttgttatcttttgtgtcctgta

SEQ ID NO: 177339 - DNA, 25 bp, probe
ctcattccatatgcatctgtgtgtg

SEQ ID NO: 177340 - DNA, 25 bp, probe
ctcatcttcataataccagtgtgat

SEQ ID NO: 177341 - DNA, 25 bp, probe
ctcatctctccagttcatcattaat

SEQ ID NO: 177342 - DNA, 25 bp, probe
ctcatctctccagttcatcattaat

SEQ ID NO: 177343 - DNA, 25 bp, probe
ctcatctctcaggctgtgccttaat

SEQ ID NO: 177344 - DNA, 25 bp, probe
ctcatcgactgtggaccttgtattc

SEQ ID NO: 177345 - DNA, 25 bp, probe
ctcatcaaatctatccatttttctg

SEQ ID NO: 177346 - DNA, 25 bp, probe
ctcatcagtggtatccagttgcctc

SEQ ID NO: 177347 - DNA, 25 bp, probe
ctctgaggttgcatggcatggtcct

SEQ ID NO: 177348 - DNA, 25 bp, probe
ctctgagaggccaggacgtccatgg

SEQ ID NO: 177349 - DNA, 25 bp, probe
ctcttcggcacggtgccgtacatgg

SEQ ID NO: 177350 - DNA, 25 bp, probe
ctcttcggcacggtgccgtacatgg

SEQ ID NO: 177351 - DNA, 25 bp, probe
ctcttcgagagggtgtcagtgagca

SEQ ID NO: 177352 - DNA, 25 bp, probe
ctcttctgcatgggtgatgtcaatg

SEQ ID NO: 177353 - DNA, 25 bp, probe
ctcttcttggggcccagtgcatggt

SEQ ID NO: 177354 - DNA, 25 bp, probe
ctctaataggggcggctcaggcact

SEQ ID NO: 177355 - DNA, 25 bp, probe
ctctaaagcaggacgcctgccaggg

SEQ ID NO: 177356 - DNA, 25 bp, probe
ctcatcaaacaagcgacatcccatg

SEQ ID NO: 177357 - DNA, 25 bp, probe
ctcataattctgcagagacttccag

SEQ ID NO: 177358 - DNA, 25 bp, probe
ctcataattctgcagagacttccag

SEQ ID NO: 177359 - DNA, 25 bp, probe
ctctcgttctgggaggcttacaggg

SEQ ID NO: 177360 - DNA, 25 bp, probe
ctctcactttagtggatgtaaatgg

SEQ ID NO: 177361 - DNA, 25 bp, probe
ctctaagttacatgacctatatctt

SEQ ID NO: 177362 - DNA, 25 bp, probe
ctctcagtcttaaagatccgctctt

SEQ ID NO: 177363 - DNA, 25 bp, probe
ctctaggcttccagtctgtgtttgg

SEQ ID NO: 177364 - DNA, 25 bp, probe
ctctaacgtctttgttgtttatgga

SEQ ID NO: 177365 - DNA, 25 bp, probe
ctctgaaatatctcgttatttattg

SEQ ID NO: 177366 - DNA, 25 bp, probe
ctctagaatgtccatatttattttt

SEQ ID NO: 177367 - DNA, 25 bp, probe
ctctcaggggctatgtgtacttctt

SEQ ID NO: 177368 - DNA, 25 bp, probe
ctctacctggctagagtttcttctc

SEQ ID NO: 177369 - DNA, 25 bp, probe
ctctttctcactaggttctttctag

SEQ ID NO: 177370 - DNA, 25 bp, probe
ctcttcctgcttgggttggcccaag

SEQ ID NO: 177371 - DNA, 25 bp, probe
ctcttactctgggatgtggactctg

SEQ ID NO: 177372 - DNA, 25 bp, probe
ctgttactaggcagggcccatggtc

SEQ ID NO: 177373 - DNA, 25 bp, probe
ctcttaggggtcaggcaccagcatg

SEQ ID NO: 177374 - DNA, 25 bp, probe
ctctcggccaggaattgtggcccag

SEQ ID NO: 177375 - DNA, 25 bp, probe
ctctcggccaggaattgtggcccag

SEQ ID NO: 177376 - DNA, 25 bp, probe
ctcttctggcagctagttagtgcca

SEQ ID NO: 177377 - DNA, 25 bp, probe
ctctttgagccctagctaagtcact

SEQ ID NO: 177378 - DNA, 25 bp, probe
ctcattctggccgagagtagggcag

SEQ ID NO: 177379 - DNA, 25 bp, probe
ctctctctgggttcagatgacgaag

SEQ ID NO: 177380 - DNA, 25 bp, probe
ctctcactgacgaccatgaattcat

SEQ ID NO: 177381 - DNA, 25 bp, probe
ctctcctcacgtgcagtaatcaacg

SEQ ID NO: 177382 - DNA, 25 bp, probe
ctctcctctgcctcagtaagtatct

SEQ ID NO: 177383 - DNA, 25 bp, probe
ctctacttctatcatttcagcttct

SEQ ID NO: 177384 - DNA, 25 bp, probe
ctctacttctatcatttcagcttct

SEQ ID NO: 177385 - DNA, 25 bp, probe
ctcattctttcaattgttatgcacc

SEQ ID NO: 177386 - DNA, 25 bp, probe
ctcatttttcagtacttctacagaa

SEQ ID NO: 177387 - DNA, 25 bp, probe
ctcattttacgctgtctctgacata

SEQ ID NO: 177388 - DNA, 25 bp, probe
ctctttctcatggaagtcccaatca

SEQ ID NO: 177389 - DNA, 25 bp, probe
ctctggtgtagctgatgatccgaat

SEQ ID NO: 177390 - DNA, 25 bp, probe
ctctagtgtagctgccacattgatt

SEQ ID NO: 177391 - DNA, 25 bp, probe
ctctttctagattgccagctcatga

SEQ ID NO: 177392 - DNA, 25 bp, probe
ctccttttgaatgcagccagtctga

SEQ ID NO: 177393 - DNA, 25 bp, probe
ctctccatttgctacctgtagtagc

SEQ ID NO: 177394 - DNA, 25 bp, probe
ctctcactttcaagaagcaatagac

SEQ ID NO: 177395 - DNA, 25 bp, probe
ctcttgtttacacagctgcatcaga

SEQ ID NO: 177396 - DNA, 25 bp, probe
ctcttgtgttacatcatctcattaa

SEQ ID NO: 177397 - DNA, 25 bp, probe
ctcttgtgttacatcatctcattaa

SEQ ID NO: 177398 - DNA, 25 bp, probe
ctcatttaatagatattcactgaaa

SEQ ID NO: 177399 - DNA, 25 bp, probe
ctcttctacagaaattactctcaaa

SEQ ID NO: 177400 - DNA, 25 bp, probe
ctcattcaacagctcttgcagttca

SEQ ID NO: 177401 - DNA, 25 bp, probe
ctcttgcatgattcttcttggtcta

SEQ ID NO: 177402 - DNA, 25 bp, probe
ctcattgatgtggcctgcagggtgc

SEQ ID NO: 177403 - DNA, 25 bp, probe
ctcattgatgtggcctgcagggtgc

SEQ ID NO: 177404 - DNA, 25 bp, probe
ctcttgctggctgggcgagatgagc

SEQ ID NO: 177405 - DNA, 25 bp, probe
ctctccttctgttggcagtgacggt

SEQ ID NO: 177406 - DNA, 25 bp, probe
ctctgccattccggtgcagtgcagg

SEQ ID NO: 177407 - DNA, 25 bp, probe
cggccctcagacccagagggtttgg

SEQ ID NO: 177408 - DNA, 25 bp, probe
ctctcctaaacacagcagggctttg

SEQ ID NO: 177409 - DNA, 25 bp, probe
ctctcctccaactcagggttggctg

SEQ ID NO: 177410 - DNA, 25 bp, probe
ctctacctccatttagggatttgct

SEQ ID NO: 177411 - DNA, 25 bp, probe
ctctagcctgtttgttgtggggtgg

SEQ ID NO: 177412 - DNA, 25 bp, probe
ctcgagcgttgctgggggggattgt

SEQ ID NO: 177413 - DNA, 25 bp, probe
ctcgagcgttgctgggggggattgt

SEQ ID NO: 177414 - DNA, 25 bp, probe
ctctacggtcagggtctggaggact

SEQ ID NO: 177415 - DNA, 25 bp, probe
ctctcctggatcagggtggatcatg

SEQ ID NO: 177416 - DNA, 25 bp, probe
ctctcctggatcagggtggatcatg

SEQ ID NO: 177417 - DNA, 25 bp, probe
ctctcactggacagtggtgcccgac

SEQ ID NO: 177418 - DNA, 25 bp, probe
ctcgagcatgcatctagagggccct

SEQ ID NO: 177419 - DNA, 25 bp, probe
ctctcagcagcatcaaagcagacat

SEQ ID NO: 177420 - DNA, 25 bp, probe
ctctcagtcagatactgcgcaagaa

SEQ ID NO: 177421 - DNA, 25 bp, probe
ctctagtccaggtgccaagaatttc

SEQ ID NO: 177422 - DNA, 25 bp, probe
ctcttgtgaccgtgccaagaaaacg

SEQ ID NO: 177423 - DNA, 25 bp, probe
ctcttcgatacttacacaaggagaa

SEQ ID NO: 177424 - DNA, 25 bp, probe
ctcttcgagtatcgtcaccgcaaga

SEQ ID NO: 177425 - DNA, 25 bp, probe
ctcttcaacttcaccactcaagaac

SEQ ID NO: 177426 - DNA, 25 bp, probe
ctcttcaacttcaccactcaagaac

SEQ ID NO: 177427 - DNA, 25 bp, probe
cgacttactagatctcatacaaggc

SEQ ID NO: 177428 - DNA, 25 bp, probe
ctctctgagtccataaccaggctca

SEQ ID NO: 177429 - DNA, 25 bp, probe
ctctctgacctgctgaaagggatgc

SEQ ID NO: 177430 - DNA, 25 bp, probe
ctctctgacctgctgaaagggatgc

SEQ ID NO: 177431 - DNA, 25 bp, probe
ctctttctgctggtgaacgtgctgt

SEQ ID NO: 177432 - DNA, 25 bp, probe
ctctttctcgattgaaaatctcatg

SEQ ID NO: 177433 - DNA, 25 bp, probe
ctcttcctcgcttcacaatgaacag

SEQ ID NO: 177434 - DNA, 25 bp, probe
ctctatgccctgcagagcaataaca

SEQ ID NO: 177435 - DNA, 25 bp, probe
ctctagctcccattggctgaagaca

SEQ ID NO: 177436 - DNA, 25 bp, probe
ctcttgtcagacaatggctataaac

SEQ ID NO: 177437 - DNA, 25 bp, probe
ctcattgctcagggatcctttacag

SEQ ID NO: 177438 - DNA, 25 bp, probe
ctcttgcacagtaacctttccagat

SEQ ID NO: 177439 - DNA, 25 bp, probe
ctcttgacacttagccgctgtctcg

SEQ ID NO: 177440 - DNA, 25 bp, probe
ctcttgcagcacattcgggatcatg

SEQ ID NO: 177441 - DNA, 25 bp, probe
ctcattgtgacttatgaggagcaag

SEQ ID NO: 177442 - DNA, 25 bp, probe
ctcgtgtgactatataggcaagcat

SEQ ID NO: 177443 - DNA, 25 bp, probe
ctcttatgaggacatgagggagatt

SEQ ID NO: 177444 - DNA, 25 bp, probe
ctcttagacatgttgtgaggagact

SEQ ID NO: 177445 - DNA, 25 bp, probe
ctctttcacttccatggaacactac

SEQ ID NO: 177446 - DNA, 25 bp, probe
ctcgtacctgtccggatatatttcc

SEQ ID NO: 177447 - DNA, 25 bp, probe
ctcgtggcagagtcatggtaatagt

SEQ ID NO: 177448 - DNA, 25 bp, probe
ctcgtggcagagtcatggtaatagt

SEQ ID NO: 177449 - DNA, 25 bp, probe
ctctgtggccatgtggatactatcc

SEQ ID NO: 177450 - DNA, 25 bp, probe
ctcattgcctatggagcaaacgtca

SEQ ID NO: 177451 - DNA, 25 bp, probe
ctctcatgtctttgctgcagaactg

SEQ ID NO: 177452 - DNA, 25 bp, probe
ctctctccttgactggaattgctgc

SEQ ID NO: 177453 - DNA, 25 bp, probe
ctctctccttgactggaattgctgc

SEQ ID NO: 177454 - DNA, 25 bp, probe
ctcttccactgacttgctgtgtgac

SEQ ID NO: 177455 - DNA, 25 bp, probe
ctctttactgtgtgctgtaactctc

SEQ ID NO: 177456 - DNA, 25 bp, probe
ctcttatactcgtgtgctctttgat

SEQ ID NO: 177457 - DNA, 25 bp, probe
ctcttatactcgtgtgctctttgat

SEQ ID NO: 177458 - DNA, 25 bp, probe
ctcttaaccagttctccatactgct

SEQ ID NO: 177459 - DNA, 25 bp, probe
ctctgggcagcgctatctagatagg

SEQ ID NO: 177460 - DNA, 25 bp, probe
ctcattggcaatgtttcgatagaca

SEQ ID NO: 177461 - DNA, 25 bp, probe
ctctcccagttcattcctggaacca

SEQ ID NO: 177462 - DNA, 25 bp, probe
ctctcccagtgtaaatctggagcca

SEQ ID NO: 177463 - DNA, 25 bp, probe
ctctcaccagccttgaactgtggcc

SEQ ID NO: 177464 - DNA, 25 bp, probe
ctctcaccaccatagacaaggtgtc

SEQ ID NO: 177465 - DNA, 25 bp, probe
ctctactggcgctgccaaggctgtg

SEQ ID NO: 177466 - DNA, 25 bp, probe
ctcttcttgcaaagcacaagctggg

SEQ ID NO: 177467 - DNA, 25 bp, probe
ctcttctggccaacctgtatgatgg

SEQ ID NO: 177468 - DNA, 25 bp, probe
ctcttgtgactctcagcgtatgttc

SEQ ID NO: 177469 - DNA, 25 bp, probe
ctcttctgtcagtggcttatgtcat

SEQ ID NO: 177470 - DNA, 25 bp, probe
ctcttctgtcagtggcttatgtcat

SEQ ID NO: 177471 - DNA, 25 bp, probe
ctcttcttcctgagttatgctcatg

SEQ ID NO: 177472 - DNA, 25 bp, probe
ctcttacccagcactgtcatctaga

SEQ ID NO: 177473 - DNA, 25 bp, probe
ctctctccccaaagtgatcctaaga

SEQ ID NO: 177474 - DNA, 25 bp, probe
ctctctttccctaatgtgccataag

SEQ ID NO: 177475 - DNA, 25 bp, probe
ctctctttccctaatgtgccataag

SEQ ID NO: 177476 - DNA, 25 bp, probe
ctcttttctttcagacagagaagat

SEQ ID NO: 177477 - DNA, 25 bp, probe
ctctaattatttaagattggaacaa

SEQ ID NO: 177478 - DNA, 25 bp, probe
ctcttttactctagacgacgaataa

SEQ ID NO: 177479 - DNA, 25 bp, probe
ctctgtttcagagaacggctacatt

SEQ ID NO: 177480 - DNA, 25 bp, probe
ctctgtttcagagaacggctacatt

SEQ ID NO: 177481 - DNA, 25 bp, probe
ctcgagttggcaccaaacgctatat

SEQ ID NO: 177482 - DNA, 25 bp, probe
ctcggcttctcagactagcctgtac

SEQ ID NO: 177483 - DNA, 25 bp, probe
ctcgagttctgagaccaccaaacat

SEQ ID NO: 177484 - DNA, 25 bp, probe
ctcgagtcactagagcccaactcag

SEQ ID NO: 177485 - DNA, 25 bp, probe
ctctgcagctctgacccaaatttag

SEQ ID NO: 177486 - DNA, 25 bp, probe
ctctagctctgctgcataaaatctt

SEQ ID NO: 177487 - DNA, 25 bp, probe
ctctagccctggctgacattgctgt

SEQ ID NO: 177488 - DNA, 25 bp, probe
ctctacgccaagcattatgtgctgt

SEQ ID NO: 177489 - DNA, 25 bp, probe
ctctacaccagagagtgctgccatg

SEQ ID NO: 177490 - DNA, 25 bp, probe
ctctaccacgagcacatcatcaagt

SEQ ID NO: 177491 - DNA, 25 bp, probe
ctctatcataaacatatgctgcaga

SEQ ID NO: 177492 - DNA, 25 bp, probe
ctctgatcatggagtatgtggatgg

SEQ ID NO: 177493 - DNA, 25 bp, probe
ctctgatcatggagtatgtggatgg

SEQ ID NO: 177494 - DNA, 25 bp, probe
ctctgagagcgaattgtgtggagaa

SEQ ID NO: 177495 - DNA, 25 bp, probe
ctctgaagaactgtggctggaaaat

SEQ ID NO: 177496 - DNA, 25 bp, probe
ctctgggaagctggattgggacaac

SEQ ID NO: 177497 - DNA, 25 bp, probe
ctctgggaagctgagcatgtggtcc

SEQ ID NO: 177498 - DNA, 25 bp, probe
ctctgtggaaggtacctttacctgc

SEQ ID NO: 177499 - DNA, 25 bp, probe
ctgcttgagaggcttccttggtcac

SEQ ID NO: 177500 - DNA, 25 bp, probe
ctgcttgagaggcttccttggtcac

SEQ ID NO: 177501 - DNA, 25 bp, probe
ctctgttggtggtacatcttgttga

SEQ ID NO: 177502 - DNA, 25 bp, probe
ctctttgatgtggtccttaagatga

SEQ ID NO: 177503 - DNA, 25 bp, probe
ctcttctgtagggagcagtaagcag

SEQ ID NO: 177504 - DNA, 25 bp, probe
ctctatttagcggagaaatatggta

SEQ ID NO: 177505 - DNA, 25 bp, probe
ctctctacttggggaaatcaggtgc

SEQ ID NO: 177506 - DNA, 25 bp, probe
ctcgctacctggggaattcacccta

SEQ ID NO: 177507 - DNA, 25 bp, probe
ctcgccttcaggagaatctacacgc

SEQ ID NO: 177508 - DNA, 25 bp, probe
ctcgcccgagtgggatgattactcg

SEQ ID NO: 177509 - DNA, 25 bp, probe
ctcgacaggtggaacatgttaccat

SEQ ID NO: 177510 - DNA, 25 bp, probe
ctctcacggtgacatgtttacagct

SEQ ID NO: 177511 - DNA, 25 bp, probe
ctctcacggtgacatgtttacagct

SEQ ID NO: 177512 - DNA, 25 bp, probe
ctctcagcagttcatatgccgtcac

SEQ ID NO: 177513 - DNA, 25 bp, probe
ctctatcagctacatcgctcgacag

SEQ ID NO: 177514 - DNA, 25 bp, probe
ctctataaaaacgtcgcacatgcag

SEQ ID NO: 177515 - DNA, 25 bp, probe
ctctgatgaagatctcctgcaccag

SEQ ID NO: 177516 - DNA, 25 bp, probe
ctctgatgaagatctcctgcaccag

SEQ ID NO: 177517 - DNA, 25 bp, probe
ctctatgacagcgacgccaagacag

SEQ ID NO: 177518 - DNA, 25 bp, probe
ctctgtggctgcaacggcatgaact

SEQ ID NO: 177519 - DNA, 25 bp, probe
ctcttactatactcatacattttta

SEQ ID NO: 177520 - DNA, 25 bp, probe
ctctgtttattgtttcaattcttta

SEQ ID NO: 177521 - DNA, 25 bp, probe
ctctttcacattcttgtatttttcc

SEQ ID NO: 177522 - DNA, 25 bp, probe
ctctttcaattctgtgatattgtcc

SEQ ID NO: 177523 - DNA, 25 bp, probe
ctcttctcactttgagattgaagcc

SEQ ID NO: 177524 - DNA, 25 bp, probe
ctcttcatccagtaagttcatacca

SEQ ID NO: 177525 - DNA, 25 bp, probe
ctcttaccgtcatgtcttgcaacaa

SEQ ID NO: 177526 - DNA, 25 bp, probe
ctcttaaccatcagtttgtgacaat

SEQ ID NO: 177527 - DNA, 25 bp, probe
ctctttgaccctgaatttgacctac

SEQ ID NO: 177528 - DNA, 25 bp, probe
ctctttacctcttgctattttgtta

SEQ ID NO: 177529 - DNA, 25 bp, probe
ctcttttccctgcttgatattttgc

SEQ ID NO: 177530 - DNA, 25 bp, probe
ctcttcccacctgactgtggttggg

SEQ ID NO: 177531 - DNA, 25 bp, probe
ctctaccagaccacagttgctgttg

SEQ ID NO: 177532 - DNA, 25 bp, probe
ctctaccagaccacagttgctgttg

SEQ ID NO: 177533 - DNA, 25 bp, probe
ctctagattgcctcacagttgtttg

SEQ ID NO: 177534 - DNA, 25 bp, probe
ctctatgggatctcctggcagtttg

SEQ ID NO: 177535 - DNA, 25 bp, probe
ctcttcggagacccaggatttaggg

SEQ ID NO: 177536 - DNA, 25 bp, probe
ctgctggggagagtccggtttactg

SEQ ID NO: 177537 - DNA, 25 bp, probe
ctcggagaaagtgtgtgtattcctt

SEQ ID NO: 177538 - DNA, 25 bp, probe
ccctgcgaaacctgttattccaaca

SEQ ID NO: 177539 - DNA, 25 bp, probe
ctcgatccaaaggccgttttctcga

SEQ ID NO: 177540 - DNA, 25 bp, probe
gcatcgggctaagactttaactcag

SEQ ID NO: 177541 - DNA, 25 bp, probe
ctcgtggtaaaactgttaatgaagc

SEQ ID NO: 177542 - DNA, 25 bp, probe
ctctctgttgtacactttcaatcaa

SEQ ID NO: 177543 - DNA, 25 bp, probe
ctctcttttgcatattctaataaat

SEQ ID NO: 177544 - DNA, 25 bp, probe
ctctttccagcagtgattcataatc

SEQ ID NO: 177545 - DNA, 25 bp, probe
ctctttccagcagtgattcataatc

SEQ ID NO: 177546 - DNA, 25 bp, probe
ctctctttgcgctgatgttgactgc

SEQ ID NO: 177547 - DNA, 25 bp, probe
ctctgctgatgtctggctgttcatc

SEQ ID NO: 177548 - DNA, 25 bp, probe
ctctgtgatctcatttcatctgcac

SEQ ID NO: 177549 - DNA, 25 bp, probe
ctcttcactgaaggtcatttgcaga

SEQ ID NO: 177550 - DNA, 25 bp, probe
ctcttcactgaaggtcatttgcaga

SEQ ID NO: 177551 - DNA, 25 bp, probe
ctctcatactgctcagtgacatggc

SEQ ID NO: 177552 - DNA, 25 bp, probe
ctctaactcatgccattgctgatgg

SEQ ID NO: 177553 - DNA, 25 bp, probe
ctctaactcatgccattgctgatgg

SEQ ID NO: 177554 - DNA, 25 bp, probe
ctcttcaacagggagctgagggact

SEQ ID NO: 177555 - DNA, 25 bp, probe
ctcttcaacagggagctgagggact

SEQ ID NO: 177556 - DNA, 25 bp, probe
ctcttaccatgcacacgggtgctct

SEQ ID NO: 177557 - DNA, 25 bp, probe
ctcttaccatgcacacgggtgctct

SEQ ID NO: 177558 - DNA, 25 bp, probe
ctctgtagttcaaatctgttagctt

SEQ ID NO: 177559 - DNA, 25 bp, probe
ctctgtagttcaaatctgttagctt

SEQ ID NO: 177560 - DNA, 25 bp, probe
ctgcttagcccaaactgagtacaac

SEQ ID NO: 177561 - DNA, 25 bp, probe
ctctgtagacgaagctctgcgtcac

SEQ ID NO: 177562 - DNA, 25 bp, probe
ctctgatgctgagaggcttgcctcc

SEQ ID NO: 177563 - DNA, 25 bp, probe
ctctgactgctttggatagtctcct

SEQ ID NO: 177564 - DNA, 25 bp, probe
ctctagcgctagtgatgtgtgggcc

SEQ ID NO: 177565 - DNA, 25 bp, probe
ctctgcactactgacatgtggggcc

SEQ ID NO: 177566 - DNA, 25 bp, probe
ctctgcccagcgaagcaggagtagc

SEQ ID NO: 177567 - DNA, 25 bp, probe
ctctgcccagcgaagcaggagtagc

SEQ ID NO: 177568 - DNA, 25 bp, probe
ctctgtgctgcacgtatgcagtatc

SEQ ID NO: 177569 - DNA, 25 bp, probe
ctctggcacaagatgcacaattatt

SEQ ID NO: 177570 - DNA, 25 bp, probe
ctctggatccggaagaatcataata

SEQ ID NO: 177571 - DNA, 25 bp, probe
ctctggtgccaacacagttgccaaa

SEQ ID NO: 177572 - DNA, 25 bp, probe
ctctgcccccaaaagtgtcaagggg

SEQ ID NO: 177573 - DNA, 25 bp, probe
ctctgtacgcccagggaaagcggcg

SEQ ID NO: 177574 - DNA, 25 bp, probe
ctcttaccctttgtgaactgcaggg

SEQ ID NO: 177575 - DNA, 25 bp, probe
ctcttcacacctgttctgaatccag

SEQ ID NO: 177576 - DNA, 25 bp, probe
ctcttcataccggttttatgacaaa

SEQ ID NO: 177577 - DNA, 25 bp, probe
ctcgttactcaactccagttgacat

SEQ ID NO: 177578 - DNA, 25 bp, probe
ctcttatactatcatccaggtgaag

SEQ ID NO: 177579 - DNA, 25 bp, probe
ctcttatactgtcatcctggtgatg

SEQ ID NO: 177580 - DNA, 25 bp, probe
ctcttatttgctcacacggggtatt

SEQ ID NO: 177581 - DNA, 25 bp, probe
ctctcttttgctaagaagggatttt

SEQ ID NO: 177582 - DNA, 25 bp, probe
ctctgtctagttacaggacggtttc

SEQ ID NO: 177583 - DNA, 25 bp, probe
ctctgatgtttgctcagtgcaaggt

SEQ ID NO: 177584 - DNA, 25 bp, probe
ctctatgctattttcaccaaggcct

SEQ ID NO: 177585 - DNA, 25 bp, probe
ctctcagtactttaacatcgtcgct

SEQ ID NO: 177586 - DNA, 25 bp, probe
ctctcagtactttaacatcgtcgct

SEQ ID NO: 177587 - DNA, 25 bp, probe
ctctcagtaatgaacaacagcattc

SEQ ID NO: 177588 - DNA, 25 bp, probe
ctctcaatgtgtaacacactgcagt

SEQ ID NO: 177589 - DNA, 25 bp, probe
ctctcatctttcaatagttgcttag

SEQ ID NO: 177590 - DNA, 25 bp, probe
ctctcatctttcaatagttgcttag

SEQ ID NO: 177591 - DNA, 25 bp, probe
ctctctttcttcagttcagtagatt

SEQ ID NO: 177592 - DNA, 25 bp, probe
ctctctttgcccagttggagactgt

SEQ ID NO: 177593 - DNA, 25 bp, probe
ctcctgtctcccagaagggtcagct

SEQ ID NO: 177594 - DNA, 25 bp, probe
ctcctacactacagaggggccaggg

SEQ ID NO: 177595 - DNA, 25 bp, probe
ctcctacactacagaggggccaggg

SEQ ID NO: 177596 - DNA, 25 bp, probe
ctctcgacaatacccgttggcaagg

SEQ ID NO: 177597 - DNA, 25 bp, probe
ctctcagcaaaaagccagttggaag

SEQ ID NO: 177598 - DNA, 25 bp, probe
ctctgctcaaaaaccacctgtaaaa

SEQ ID NO: 177599 - DNA, 25 bp, probe
ctctgccaaaggtctcctatgtaaa

SEQ ID NO: 177600 - DNA, 25 bp, probe
ctctgccaaaggtctcctatgtaaa

SEQ ID NO: 177601 - DNA, 25 bp, probe
ctctagaacaggtcggtggccacac

SEQ ID NO: 177602 - DNA, 25 bp, probe
ctctaggcatcaccacggtgctgac

SEQ ID NO: 177603 - DNA, 25 bp, probe
ctcgtccatcctgctgggtgacgac

SEQ ID NO: 177604 - DNA, 25 bp, probe
ctctgcctgaccactgggtgtggac

SEQ ID NO: 177605 - DNA, 25 bp, probe
ctctgcctgaccactgggtgtggac

SEQ ID NO: 177606 - DNA, 25 bp, probe
ctctcactcaccactgaggttagag

SEQ ID NO: 177607 - DNA, 25 bp, probe
ctctctctcccttagagtttatgag

SEQ ID NO: 177608 - DNA, 25 bp, probe
ctctgtgtcccttagggcttatcac

SEQ ID NO: 177609 - DNA, 25 bp, probe
ctctgtactcctcaagcactggaac

SEQ ID NO: 177610 - DNA, 25 bp, probe
ctctctactacacaggcctgataac

SEQ ID NO: 177611 - DNA, 25 bp, probe
ctcctaatgacgcggctcaaaagga

SEQ ID NO: 177612 - DNA, 25 bp, probe
ctcttatcagcctgggcaacacagt

SEQ ID NO: 177613 - DNA, 25 bp, probe
ctcgtcatccacagggacaacacca

SEQ ID NO: 177614 - DNA, 25 bp, probe
ctctgtaccgcacaggaataacaaa

SEQ ID NO: 177615 - DNA, 25 bp, probe
ctctaacctcagtgggattgaaacc

SEQ ID NO: 177616 - DNA, 25 bp, probe
ctctaacctcagtggtgagtgagag

SEQ ID NO: 177617 - DNA, 25 bp, probe
ctcggaccatcgaggtcctgatgaa

SEQ ID NO: 177618 - DNA, 25 bp, probe
ctcggagccaccaagagatccatgg

SEQ ID NO: 177619 - DNA, 25 bp, probe
ctcggagctgcaccgagggcaacca

SEQ ID NO: 177620 - DNA, 25 bp, probe
ctgtgaacttgactgggtgagaccc

SEQ ID NO: 177621 - DNA, 25 bp, probe
ctgtaactctgagggggggcaccca

SEQ ID NO: 177622 - DNA, 25 bp, probe
ctctcaactgcgtaggtggctgtca

SEQ ID NO: 177623 - DNA, 25 bp, probe
ctctcaatctatttgctggagtcta

SEQ ID NO: 177624 - DNA, 25 bp, probe
ctctcaaatacattgcgaagtctag

SEQ ID NO: 177625 - DNA, 25 bp, probe
ctctgaaacacactgaaagctctgt

SEQ ID NO: 177626 - DNA, 25 bp, probe
ctctgtcaaccactgcaactgtaat

SEQ ID NO: 177627 - DNA, 25 bp, probe
ctctagctattcttcgtcgtgagat

SEQ ID NO: 177628 - DNA, 25 bp, probe
ctcggcaattgttgcctcggcagct

SEQ ID NO: 177629 - DNA, 25 bp, probe
ctcggcaattgttgcctcggcagct

SEQ ID NO: 177630 - DNA, 25 bp, probe
ctctggaatttgtgcctgatgtgcc

SEQ ID NO: 177631 - DNA, 25 bp, probe
ctctacctctggtggctatggcagc

SEQ ID NO: 177632 - DNA, 25 bp, probe
ctctccctaggaagtgccagtgcag

SEQ ID NO: 177633 - DNA, 25 bp, probe
ctctcataccaggaagccacatctc

SEQ ID NO: 177634 - DNA, 25 bp, probe
ctctcatgttccaaacctcattgaa

SEQ ID NO: 177635 - DNA, 25 bp, probe
ctctcgcgtagttacctatctgaat

SEQ ID NO: 177636 - DNA, 25 bp, probe
ctctttgtagttagcgttcaggcag

SEQ ID NO: 177637 - DNA, 25 bp, probe
ctcttttcatactggctgttggcat

SEQ ID NO: 177638 - DNA, 25 bp, probe
ctcttttcatactggctgttggcat

SEQ ID NO: 177639 - DNA, 25 bp, probe
ctctctgtctgaacttgggcaaggc

SEQ ID NO: 177640 - DNA, 25 bp, probe
ctctcttgctggctgggcgagatga

SEQ ID NO: 177641 - DNA, 25 bp, probe
ctctttctgactctgctcatgagat

SEQ ID NO: 177642 - DNA, 25 bp, probe
ctcttttcatcatgctgatctgcaa

SEQ ID NO: 177643 - DNA, 25 bp, probe
ctctttcatctctgcttggattatt

SEQ ID NO: 177644 - DNA, 25 bp, probe
ctctctcactcaccactgaggttag

SEQ ID NO: 177645 - DNA, 25 bp, probe
ctctgtcacttccagtgaagtccag

SEQ ID NO: 177646 - DNA, 25 bp, probe
ctctgatccaaccctgtactgatag

SEQ ID NO: 177647 - DNA, 25 bp, probe
ctctgagccagttcagtacctggag

SEQ ID NO: 177648 - DNA, 25 bp, probe
ctctgggcatgtcccgatatctgga

SEQ ID NO: 177649 - DNA, 25 bp, probe
ctctggctctttccaaactagaaaa

SEQ ID NO: 177650 - DNA, 25 bp, probe
ctctactgtgttcctaactccaaaa

SEQ ID NO: 177651 - DNA, 25 bp, probe
ctctactgtgttcctaactccaaaa

SEQ ID NO: 177652 - DNA, 25 bp, probe
ctctcctggtctctcaacaggcaaa

SEQ ID NO: 177653 - DNA, 25 bp, probe
ctctcctggtctctcaacaggcaaa

SEQ ID NO: 177654 - DNA, 25 bp, probe
ctcggtctactagcaacaacaactt

SEQ ID NO: 177655 - DNA, 25 bp, probe
ctctgggtacctgcaagcagaactt

SEQ ID NO: 177656 - DNA, 25 bp, probe
ctctgtggccaatcccaatgacttt

SEQ ID NO: 177657 - DNA, 25 bp, probe
ctctgtggccaatcccaatgacttt

SEQ ID NO: 177658 - DNA, 25 bp, probe
ctctgtggcagtgatccaccatcca

SEQ ID NO: 177659 - DNA, 25 bp, probe
ctctgatctggtggatcagactgaa

SEQ ID NO: 177660 - DNA, 25 bp, probe
ctctatcggctgatgcagcgctgct

SEQ ID NO: 177661 - DNA, 25 bp, probe
ctctacagggaccacggctttggtt

SEQ ID NO: 177662 - DNA, 25 bp, probe
ctctggaggtgatacggcatccgga

SEQ ID NO: 177663 - DNA, 25 bp, probe
ctctggccgtaccactggcatcgtg

SEQ ID NO: 177664 - DNA, 25 bp, probe
ctctgtgcacggagttggcatggtg

SEQ ID NO: 177665 - DNA, 25 bp, probe
ctcggctcagttcttggaggtcaag

SEQ ID NO: 177666 - DNA, 25 bp, probe
ctgctggtgggttttggcagcgtca

SEQ ID NO: 177667 - DNA, 25 bp, probe
ctcggatgggctctctgacaaggag

SEQ ID NO: 177668 - DNA, 25 bp, probe
ctctagtgggaccttgactggagaa

SEQ ID NO: 177669 - DNA, 25 bp, probe
ctctagggacactggcagctgtgga

SEQ ID NO: 177670 - DNA, 25 bp, probe
ctctagcggaccagacgagtggaga

SEQ ID NO: 177671 - DNA, 25 bp, probe
ctctagtggaccagacgagtgggga

SEQ ID NO: 177672 - DNA, 25 bp, probe
ctctatggtcttcaacaaggagggg

SEQ ID NO: 177673 - DNA, 25 bp, probe
ctctagtgtctaaaacctggtatgg

SEQ ID NO: 177674 - DNA, 25 bp, probe
ctctgtcttctttcaacctggatga

SEQ ID NO: 177675 - DNA, 25 bp, probe
ctgcgtgctttataagcctctcacc

SEQ ID NO: 177676 - DNA, 25 bp, probe
ctcgatttctaatgacagcttccgt

SEQ ID NO: 177677 - DNA, 25 bp, probe
ctcgaagatttattggcagcccacg

SEQ ID NO: 177678 - DNA, 25 bp, probe
ctcgagcaagggtgcgacccagctg

SEQ ID NO: 177679 - DNA, 25 bp, probe
ctcgacaaggacttcaacatcaagc

SEQ ID NO: 177680 - DNA, 25 bp, probe
ccgaggggcacatcaaaatcgctga

SEQ ID NO: 177681 - DNA, 25 bp, probe
ctcgaaggaagcacaaaccctccat

SEQ ID NO: 177682 - DNA, 25 bp, probe
ctctagggatactcagggggctcct

SEQ ID NO: 177683 - DNA, 25 bp, probe
ctctgaggaggaaccggaggtctgc

SEQ ID NO: 177684 - DNA, 25 bp, probe
ctctttggctgaacatcgagaggcc

SEQ ID NO: 177685 - DNA, 25 bp, probe
ctctgttggcatccgtcatgtggag

SEQ ID NO: 177686 - DNA, 25 bp, probe
ctctgttggcaagggtctgggtcct

SEQ ID NO: 177687 - DNA, 25 bp, probe
ctctactgggacatgttaggccctt

SEQ ID NO: 177688 - DNA, 25 bp, probe
ctctatcagggacagtgtgggtgcc

SEQ ID NO: 177689 - DNA, 25 bp, probe
ctgcaacggagactccggtgggccg

SEQ ID NO: 177690 - DNA, 25 bp, probe
ctctgatccgagctcaggggggtgg

SEQ ID NO: 177691 - DNA, 25 bp, probe
ctctctcctggatcagggtggatca

SEQ ID NO: 177692 - DNA, 25 bp, probe
ctctctcctggatcagggtggatca

SEQ ID NO: 177693 - DNA, 25 bp, probe
ctctccttggtgtcgggcatgacac

SEQ ID NO: 177694 - DNA, 25 bp, probe
ctctcagcactgtggcgagggaagc

SEQ ID NO: 177695 - DNA, 25 bp, probe
ctctgtgaccaactgcggggagcat

SEQ ID NO: 177696 - DNA, 25 bp, probe
ctctgaaatcactgcgcaggagaaa

SEQ ID NO: 177697 - DNA, 25 bp, probe
ctctcgaaacccctgtgatgaaact

SEQ ID NO: 177698 - DNA, 25 bp, probe
ctccagagtacccagctattaatag

SEQ ID NO: 177699 - DNA, 25 bp, probe
ctctgggtatcatggctattgagat

SEQ ID NO: 177700 - DNA, 25 bp, probe
ctctgggatttatgctcatgaacta

SEQ ID NO: 177701 - DNA, 25 bp, probe
ctctgggttaacatcaaagctggca

SEQ ID NO: 177702 - DNA, 25 bp, probe
ctcggtgtcccaactagaactgaaa

SEQ ID NO: 177703 - DNA, 25 bp, probe
ctcggtaccaagcttggcgtaatca

SEQ ID NO: 177704 - DNA, 25 bp, probe
ctcgggggacagatgggcctgttca

SEQ ID NO: 177705 - DNA, 25 bp, probe
ctcgggacagactaagggcgcttgt

SEQ ID NO: 177706 - DNA, 25 bp, probe
ctccaagaaccctggttgcttgctc

SEQ ID NO: 177707 - DNA, 25 bp, probe
ctccaagaacctgacctgcgagtgc

SEQ ID NO: 177708 - DNA, 25 bp, probe
ctcccagtacaacaacatgcgcgtg

SEQ ID NO: 177709 - DNA, 25 bp, probe
ctcccagtacaacaacatgcgcgtg

SEQ ID NO: 177710 - DNA, 25 bp, probe
ctcccagtacaacaacatgcgcgtg

SEQ ID NO: 177711 - DNA, 25 bp, probe
ctcccagtacaacaacatgcgcgtg

SEQ ID NO: 177712 - DNA, 25 bp, probe
ctctctttaccagacaggcagcagg

SEQ ID NO: 177713 - DNA, 25 bp, probe
ctctctggtaccgaagagccgctga

SEQ ID NO: 177714 - DNA, 25 bp, probe
ctctcagacccttgaagatgtagct

SEQ ID NO: 177715 - DNA, 25 bp, probe
ctctctgccccacataattatgtta

SEQ ID NO: 177716 - DNA, 25 bp, probe
ctctcacctggcagttgtttgctta

SEQ ID NO: 177717 - DNA, 25 bp, probe
ctctgaggctggctttgttacctgg

SEQ ID NO: 177718 - DNA, 25 bp, probe
ctcggagacgtttttctacctcagc

SEQ ID NO: 177719 - DNA, 25 bp, probe
ctctccaagggttttcaccttagca

SEQ ID NO: 177720 - DNA, 25 bp, probe
ctccccagggattggaaacggatga

SEQ ID NO: 177721 - DNA, 25 bp, probe
ctctcccgggaaagaacaggtcgtg

SEQ ID NO: 177722 - DNA, 25 bp, probe
ctctcctgccggaggaagggcatct

SEQ ID NO: 177723 - DNA, 25 bp, probe
ctcggcttccgcaggaagtggtctt

SEQ ID NO: 177724 - DNA, 25 bp, probe
ctcgcgcccacgacgtggagatggt

SEQ ID NO: 177725 - DNA, 25 bp, probe
ctctgccccacgggtagagggggtg

SEQ ID NO: 177726 - DNA, 25 bp, probe
ctctgagactaagggtgaaagtggt

SEQ ID NO: 177727 - DNA, 25 bp, probe
ctctgacccaagaatggtgaagtgg

SEQ ID NO: 177728 - DNA, 25 bp, probe
ctctcaccgcagaagagggagaagg

SEQ ID NO: 177729 - DNA, 25 bp, probe
ctctctggtcagacatcgctggaaa

SEQ ID NO: 177730 - DNA, 25 bp, probe
ctctcgtgggagacgcaggcacaac

SEQ ID NO: 177731 - DNA, 25 bp, probe
ctctcagggaacagcagcagtgcca

SEQ ID NO: 177732 - DNA, 25 bp, probe
ctctcaggcctagctcagatgatgc

SEQ ID NO: 177733 - DNA, 25 bp, probe
ctctcaggctcttgactacttggaa

SEQ ID NO: 177734 - DNA, 25 bp, probe
ctctgcagagtttgttgactttacc

SEQ ID NO: 177735 - DNA, 25 bp, probe
ctctgcagagtttgttgactttacc

SEQ ID NO: 177736 - DNA, 25 bp, probe
ctcgctgagcttgctctggttttcg

SEQ ID NO: 177737 - DNA, 25 bp, probe
ctcgtggcatcacctgcattgttaa

SEQ ID NO: 177738 - DNA, 25 bp, probe
ctcgtggcatcacctgcattgttaa

SEQ ID NO: 177739 - DNA, 25 bp, probe
ctcgtggcatcacctgcattgttaa

SEQ ID NO: 177740 - DNA, 25 bp, probe
ctctggagattcctgcaacctcaag

SEQ ID NO: 177741 - DNA, 25 bp, probe
ctctgctgagcttcgtcaaagaatt

SEQ ID NO: 177742 - DNA, 25 bp, probe
ctctgctggattctaaattatgtga

SEQ ID NO: 177743 - DNA, 25 bp, probe
ctctgttgatgtgataatttgattt

SEQ ID NO: 177744 - DNA, 25 bp, probe
ctctgggatgctcctagtttgacct

SEQ ID NO: 177745 - DNA, 25 bp, probe
ctctgggatgctcctagtttgacct

SEQ ID NO: 177746 - DNA, 25 bp, probe
ctctgtgccaccaatagcttctgag

SEQ ID NO: 177747 - DNA, 25 bp, probe
ctctccccacgaacatctctggagg

SEQ ID NO: 177748 - DNA, 25 bp, probe
ctccccctccaatcttggagacaag

SEQ ID NO: 177749 - DNA, 25 bp, probe
ctcgtgtccgcaaatccaagggcaa

SEQ ID NO: 177750 - DNA, 25 bp, probe
ctcgagtccgaggtatgacgcggcc

SEQ ID NO: 177751 - DNA, 25 bp, probe
ctctggttggaggacagagtgggtc

SEQ ID NO: 177752 - DNA, 25 bp, probe
ctctggccggacagaactggtgctc

SEQ ID NO: 177753 - DNA, 25 bp, probe
ctctgacctggacaatccgggactg

SEQ ID NO: 177754 - DNA, 25 bp, probe
ctctgacctggacaatccggggatg

SEQ ID NO: 177755 - DNA, 25 bp, probe
ctctggactcgggctaccaggtgga

SEQ ID NO: 177756 - DNA, 25 bp, probe
ctctaactccatcgctgaggggtgg

SEQ ID NO: 177757 - DNA, 25 bp, probe
ctctcggccctggagatggggggcc

SEQ ID NO: 177758 - DNA, 25 bp, probe
ctctctgagactgctaagtaggggc

SEQ ID NO: 177759 - DNA, 25 bp, probe
ctcctgaaggtcaaaccggaggaga

SEQ ID NO: 177760 - DNA, 25 bp, probe
ctctcggtgactgccaccgtagggg

SEQ ID NO: 177761 - DNA, 25 bp, probe
ctcctgggacccatcctggatgggg

SEQ ID NO: 177762 - DNA, 25 bp, probe
ctccctaagtccactctagttgtgg

SEQ ID NO: 177763 - DNA, 25 bp, probe
ctccccaagacacatcctaaaaggt

SEQ ID NO: 177764 - DNA, 25 bp, probe
ctgcccctggaagattaaaccagcc

SEQ ID NO: 177765 - DNA, 25 bp, probe
ctccctgggaatgtgacttgagccc

SEQ ID NO: 177766 - DNA, 25 bp, probe
ctgccttggagaaaatacttcaacc

SEQ ID NO: 177767 - DNA, 25 bp, probe
ctctcttcataaaaacactctcacc

SEQ ID NO: 177768 - DNA, 25 bp, probe
ctctcattagaaaagctccctcaca

SEQ ID NO: 177769 - DNA, 25 bp, probe
ctctcaaagaatgaggcctccaaac

SEQ ID NO: 177770 - DNA, 25 bp, probe
ctctctcaaagaatgaggcctccaa

SEQ ID NO: 177771 - DNA, 25 bp, probe
ctctctcagagcatctggctgttta

SEQ ID NO: 177772 - DNA, 25 bp, probe
ctctctgctacattcagttcttgtg

SEQ ID NO: 177773 - DNA, 25 bp, probe
ctctcgtacatccgcattttctgga

SEQ ID NO: 177774 - DNA, 25 bp, probe
ctctcgtacatccgcattttctgga

SEQ ID NO: 177775 - DNA, 25 bp, probe
ctccttactgggatagtcaggtaaa

SEQ ID NO: 177776 - DNA, 25 bp, probe
ccacctaccctgcggatggggaaat

SEQ ID NO: 177777 - DNA, 25 bp, probe
ccacctaccctgcggatggggaaat

SEQ ID NO: 177778 - DNA, 25 bp, probe
ccacctaccctgcggatggggaaat

SEQ ID NO: 177779 - DNA, 25 bp, probe
ctcctgtaatcctgggggtgtaact

SEQ ID NO: 177780 - DNA, 25 bp, probe
ctccccaatgccttggaggccataa

SEQ ID NO: 177781 - DNA, 25 bp, probe
ctctcccctgacatgaaggcaatac

SEQ ID NO: 177782 - DNA, 25 bp, probe
ctcccacctcacagtagtaattctg

SEQ ID NO: 177783 - DNA, 25 bp, probe
cccgtttcaaggctgtaattctgag

SEQ ID NO: 177784 - DNA, 25 bp, probe
ctccgtcctaagagtatcatctgcc

SEQ ID NO: 177785 - DNA, 25 bp, probe
ctcggccttaaggagctgaagagtc

SEQ ID NO: 177786 - DNA, 25 bp, probe
ctcggcaacataaggagctgctccg

SEQ ID NO: 177787 - DNA, 25 bp, probe
ctcggcaacataaggagctgctccg

SEQ ID NO: 177788 - DNA, 25 bp, probe
ctcggtagacgtggggtctctgggg

SEQ ID NO: 177789 - DNA, 25 bp, probe
ctccttgaatcgggctggtttccaa

SEQ ID NO: 177790 - DNA, 25 bp, probe
ctccttgaatcgggctggtttccaa

SEQ ID NO: 177791 - DNA, 25 bp, probe
ctctcttaagagtgctaggtaccaa

SEQ ID NO: 177792 - DNA, 25 bp, probe
ctctcttgccgaggagccaggcaac

SEQ ID NO: 177793 - DNA, 25 bp, probe
ctctcagctgtccaggacccaaagc

SEQ ID NO: 177794 - DNA, 25 bp, probe
ctctcactgatgcgggctcataggg

SEQ ID NO: 177795 - DNA, 25 bp, probe
ctctcactgatgcgggctcataggg

SEQ ID NO: 177796 - DNA, 25 bp, probe
ctctcggtgtgggcctatgatctag

SEQ ID NO: 177797 - DNA, 25 bp, probe
ctctctgccagtacacatttgtgta

SEQ ID NO: 177798 - DNA, 25 bp, probe
ctctctacgccaagcattatgtgct

SEQ ID NO: 177799 - DNA, 25 bp, probe
ctctcccagcacatgtgtatcagcc

SEQ ID NO: 177800 - DNA, 25 bp, probe
ctctccgcagccagaaatgctgccg

SEQ ID NO: 177801 - DNA, 25 bp, probe
ctctccgcagccagaaatgctgccg

SEQ ID NO: 177802 - DNA, 25 bp, probe
ctctcggagcctgcacaagcagatc

SEQ ID NO: 177803 - DNA, 25 bp, probe
ctctctcagcacttgctaccagaga

SEQ ID NO: 177804 - DNA, 25 bp, probe
ctctcagcacttgctaccagagagg

SEQ ID NO: 177805 - DNA, 25 bp, probe
ctctccctcctctggcaaagggaaa

SEQ ID NO: 177806 - DNA, 25 bp, probe
ctctccttccttgctgcaaaatggc

SEQ ID NO: 177807 - DNA, 25 bp, probe
ctctccttccttgctgcaaaatggc

SEQ ID NO: 177808 - DNA, 25 bp, probe
ctctcgttccattggtacaaatccg

SEQ ID NO: 177809 - DNA, 25 bp, probe
ctctcagtgtacttgttcctattgc

SEQ ID NO: 177810 - DNA, 25 bp, probe
ctcgagctctatttttactgtctgg

SEQ ID NO: 177811 - DNA, 25 bp, probe
ctctcatccttattcttatatccta

SEQ ID NO: 177812 - DNA, 25 bp, probe
ctctccgctgcttttggaaagtcag

SEQ ID NO: 177813 - DNA, 25 bp, probe
ctctctccctccaggaggagtgaga

SEQ ID NO: 177814 - DNA, 25 bp, probe
cgatcccacaccaggaagatctcca

SEQ ID NO: 177815 - DNA, 25 bp, probe
cgtcatccaaatatagtcagtcttc

SEQ ID NO: 177816 - DNA, 25 bp, probe
cgtcatccaaatatagtcagtcttc

SEQ ID NO: 177817 - DNA, 25 bp, probe
cgttcaacttcaaaacatgtttcct

SEQ ID NO: 177818 - DNA, 25 bp, probe
cgttcaacttcaaaacatgtttcct

SEQ ID NO: 177819 - DNA, 25 bp, probe
cctgtaacctcatcgggattgtctt

SEQ ID NO: 177820 - DNA, 25 bp, probe
ctctgtaaactctcgggaaagcact

SEQ ID NO: 177821 - DNA, 25 bp, probe
ctctgtaaactctcgggaaagcact

SEQ ID NO: 177822 - DNA, 25 bp, probe
ctctctgatccagcccgggagagga

SEQ ID NO: 177823 - DNA, 25 bp, probe
ctctctgatccagcccgggagagga

SEQ ID NO: 177824 - DNA, 25 bp, probe
ctctcttcaacttcagtgctggtga

SEQ ID NO: 177825 - DNA, 25 bp, probe
ctctctttactgtgtgctgtaactc

SEQ ID NO: 177826 - DNA, 25 bp, probe
ctctgttgtaggttttgtacagtgt

SEQ ID NO: 177827 - DNA, 25 bp, probe
ctctcctgtatgcgtttcttgatgg

SEQ ID NO: 177828 - DNA, 25 bp, probe
ctcgccttggggttctgcgagtgcc

SEQ ID NO: 177829 - DNA, 25 bp, probe
ctctgtcttgtgggtgtctgacagt

SEQ ID NO: 177830 - DNA, 25 bp, probe
ctctgttttctggctgaacacagct

SEQ ID NO: 177831 - DNA, 25 bp, probe
ctctgctgtttctagtgaccctgag

SEQ ID NO: 177832 - DNA, 25 bp, probe
ctctgctgtttctagtgaccctgag

SEQ ID NO: 177833 - DNA, 25 bp, probe
ctctgctgtttctagtgaccctgag

SEQ ID NO: 177834 - DNA, 25 bp, probe
ctctcatggttatggtgccttgcag

SEQ ID NO: 177835 - DNA, 25 bp, probe
ctctcagtgtgttctggtcatcttg

SEQ ID NO: 177836 - DNA, 25 bp, probe
ctctctgtgtcaggggacagcttgt

SEQ ID NO: 177837 - DNA, 25 bp, probe
ctctgtgctctatgtggcaagcatt

SEQ ID NO: 177838 - DNA, 25 bp, probe
ctgcttgctgcttttactagaatca

SEQ ID NO: 177839 - DNA, 25 bp, probe
ctctgctgccatttgaattagaaga

SEQ ID NO: 177840 - DNA, 25 bp, probe
ctctggcctatgcctttgagagcaa

SEQ ID NO: 177841 - DNA, 25 bp, probe
ctctgcagagcttgcccttctgcag

SEQ ID NO: 177842 - DNA, 25 bp, probe
ctctgcagagcttgcccttctgcag

SEQ ID NO: 177843 - DNA, 25 bp, probe
ctctgaatgcatgacctttggtaca

SEQ ID NO: 177844 - DNA, 25 bp, probe
ctgcgacctgaaaggcattggttta

SEQ ID NO: 177845 - DNA, 25 bp, probe
ctctgaatcctaagggctggtctct

SEQ ID NO: 177846 - DNA, 25 bp, probe
ctctgagtccaaagcaggctggttg

SEQ ID NO: 177847 - DNA, 25 bp, probe
ctctgagctccatcaaggctgacat

SEQ ID NO: 177848 - DNA, 25 bp, probe
ctctcatgtctagaatgggcatctt

SEQ ID NO: 177849 - DNA, 25 bp, probe
ctctcatttgactgtgagaactcat

SEQ ID NO: 177850 - DNA, 25 bp, probe
ctctgtttgcactggacatattccc

SEQ ID NO: 177851 - DNA, 25 bp, probe
ctcccttcatgcatggaaattccct

SEQ ID NO: 177852 - DNA, 25 bp, probe
ctctccctcctgcaataattcgggg

SEQ ID NO: 177853 - DNA, 25 bp, probe
ctctgtccgcaaaaccaaatctggg

SEQ ID NO: 177854 - DNA, 25 bp, probe
ctctgctcctacacacacaaaagaa

SEQ ID NO: 177855 - DNA, 25 bp, probe
ctctctccctcaccaaaacaaaagg

SEQ ID NO: 177856 - DNA, 25 bp, probe
ctctctccctcaccaaaacaaaagg

SEQ ID NO: 177857 - DNA, 25 bp, probe
ctctctccctcaccaaaacaaaagg

SEQ ID NO: 177858 - DNA, 25 bp, probe
ctgcccacctgtcaaacaaagccag

SEQ ID NO: 177859 - DNA, 25 bp, probe
ctctccaccagcacaaatcgaagca

SEQ ID NO: 177860 - DNA, 25 bp, probe
ctctccaccagcacaaatcgaagca

SEQ ID NO: 177861 - DNA, 25 bp, probe
ctctcatcactgttagcaactccaa

SEQ ID NO: 177862 - DNA, 25 bp, probe
ctctcatacctcgacatgcactaaa

SEQ ID NO: 177863 - DNA, 25 bp, probe
ctctcatctagcacacatccaaagt

SEQ ID NO: 177864 - DNA, 25 bp, probe
ctctcatatatatcaccctaaatat

SEQ ID NO: 177865 - DNA, 25 bp, probe
ctctcctgtctgcaacctaagtgca

SEQ ID NO: 177866 - DNA, 25 bp, probe
ctcccaatctcagacactggcagtc

SEQ ID NO: 177867 - DNA, 25 bp, probe
ctcggactgtgcagatcctgggtgc

SEQ ID NO: 177868 - DNA, 25 bp, probe
ctctggtggcagcgttgagaagggg

SEQ ID NO: 177869 - DNA, 25 bp, probe
ctctggggcggcataatgaagggtg

SEQ ID NO: 177870 - DNA, 25 bp, probe
ctcctggtgcggttgaagaagaatg

SEQ ID NO: 177871 - DNA, 25 bp, probe
ctccgactgccgctgagaagggttg

SEQ ID NO: 177872 - DNA, 25 bp, probe
ctctccatctgtttggtgggggtag

SEQ ID NO: 177873 - DNA, 25 bp, probe
ctctgccagtgtttgggtgggtgtc

SEQ ID NO: 177874 - DNA, 25 bp, probe
ctctgtcagtgctactgtggctgag

SEQ ID NO: 177875 - DNA, 25 bp, probe
ctctgtcagcgaacgtggcattttc

SEQ ID NO: 177876 - DNA, 25 bp, probe
ctctctagctaatgtgtggtttctc

SEQ ID NO: 177877 - DNA, 25 bp, probe
ctctctagctaatgtgtggtttctc

SEQ ID NO: 177878 - DNA, 25 bp, probe
ctctctgaatagtgtgtatgtgttg

SEQ ID NO: 177879 - DNA, 25 bp, probe
ctctcatagaacattgatctgtttt

SEQ ID NO: 177880 - DNA, 25 bp, probe
ctctcatcaaatctatccatttttc

SEQ ID NO: 177881 - DNA, 25 bp, probe
ctctctcagcaaaaagccagttgga

SEQ ID NO: 177882 - DNA, 25 bp, probe
ctctccagcataaaacctagtgagc

SEQ ID NO: 177883 - DNA, 25 bp, probe
ctctgcccagaagactgtacttcaa

SEQ ID NO: 177884 - DNA, 25 bp, probe
ctctctgcccagaagactgtacttc

SEQ ID NO: 177885 - DNA, 25 bp, probe
ctctcatcactacagtattactctt

SEQ ID NO: 177886 - DNA, 25 bp, probe
ctccaatccccagtttgtatttagc

SEQ ID NO: 177887 - DNA, 25 bp, probe
ctccaatccccagtttgtatttagc

SEQ ID NO: 177888 - DNA, 25 bp, probe
ctcctgagccgggattgtccaatta

SEQ ID NO: 177889 - DNA, 25 bp, probe
ctctctcaacggggttcgatttaag

SEQ ID NO: 177890 - DNA, 25 bp, probe
ctccaaacagggcttgcgatgtaag

SEQ ID NO: 177891 - DNA, 25 bp, probe
ctccaaacgttgcttagatgcttca

SEQ ID NO: 177892 - DNA, 25 bp, probe
ctccaaactgacccgaagttgccat

SEQ ID NO: 177893 - DNA, 25 bp, probe
ctctgcgtaggaccctacaacgcct

SEQ ID NO: 177894 - DNA, 25 bp, probe
ctctgcgtaggaccctacaacgcct

SEQ ID NO: 177895 - DNA, 25 bp, probe
ctctcggggaccaataagcctgccc

SEQ ID NO: 177896 - DNA, 25 bp, probe
ctcggggaccaataagcctgcccgc

SEQ ID NO: 177897 - DNA, 25 bp, probe
ctctgggaaaatctattcctgccac

SEQ ID NO: 177898 - DNA, 25 bp, probe
ctctgaggaaaactatgtgcccgtc

SEQ ID NO: 177899 - DNA, 25 bp, probe
ctctgagggaaacagtgactgctac

SEQ ID NO: 177900 - DNA, 25 bp, probe
ctctgtggtagagacagctacttac

SEQ ID NO: 177901 - DNA, 25 bp, probe
ctctcggggaactgtcatcattgac

SEQ ID NO: 177902 - DNA, 25 bp, probe
ctcccagggaactgaactcttgtgg

SEQ ID NO: 177903 - DNA, 25 bp, probe
ctctctcaggagtatcttacctgta

SEQ ID NO: 177904 - DNA, 25 bp, probe
ctctctgagagatactatgattaaa

SEQ ID NO: 177905 - DNA, 25 bp, probe
ctctctgagagatactatgattaaa

SEQ ID NO: 177906 - DNA, 25 bp, probe
ctctctgcagagtgatttggtagcc

SEQ ID NO: 177907 - DNA, 25 bp, probe
ctctccgtgaaatcatggtacagtc

SEQ ID NO: 177908 - DNA, 25 bp, probe
ctccctggcatagtacggtaaggca

SEQ ID NO: 177909 - DNA, 25 bp, probe
ctccctggcatagtacggtaaggca

SEQ ID NO: 177910 - DNA, 25 bp, probe
ctgaccaggaacaccgtgttggagg

SEQ ID NO: 177911 - DNA, 25 bp, probe
ctcccaggtactgcaagtcctgggc

SEQ ID NO: 177912 - DNA, 25 bp, probe
ctcccaggagtcctcaggccctggg

SEQ ID NO: 177913 - DNA, 25 bp, probe
ctctccgggatggtgcggagccggg

SEQ ID NO: 177914 - DNA, 25 bp, probe
ctctcctgggacaactagggctgcg

SEQ ID NO: 177915 - DNA, 25 bp, probe
ctctctctcaaagaatgaggcctcc

SEQ ID NO: 177916 - DNA, 25 bp, probe
ctctccctatccggagagcagccct

SEQ ID NO: 177917 - DNA, 25 bp, probe
ctctctccttctggcgcaagagaac

SEQ ID NO: 177918 - DNA, 25 bp, probe
ctctgtccactttctgaatgagaac

SEQ ID NO: 177919 - DNA, 25 bp, probe
ctctgaccagtttgctgcagcattt

SEQ ID NO: 177920 - DNA, 25 bp, probe
ctctgcaccgtcttgtagcatggtt

SEQ ID NO: 177921 - DNA, 25 bp, probe
ctctgcatcacttaggtattcgttt

SEQ ID NO: 177922 - DNA, 25 bp, probe
ctctgcatcacttaggtattcgttt

SEQ ID NO: 177923 - DNA, 25 bp, probe
ctctgcaaaagacttcattcggaac

SEQ ID NO: 177924 - DNA, 25 bp, probe
ctccataaaggcctcttgggatgtc

SEQ ID NO: 177925 - DNA, 25 bp, probe
ctctctaaatcttccttgtgaggat

SEQ ID NO: 177926 - DNA, 25 bp, probe
ctctctaaatctggtgtatgggtat

SEQ ID NO: 177927 - DNA, 25 bp, probe
ctcctaaatccgttgcaaagtttgc

SEQ ID NO: 177928 - DNA, 25 bp, probe
ctcctaaatccgttgcaaagtttgc

SEQ ID NO: 177929 - DNA, 25 bp, probe
ctctccaaggcctttgcaaagtagt

SEQ ID NO: 177930 - DNA, 25 bp, probe
ctctccacagcacctttgtgaactc

SEQ ID NO: 177931 - DNA, 25 bp, probe
ctctcctcaaaccttgtgtagcatt

SEQ ID NO: 177932 - DNA, 25 bp, probe
ctctcctaaagatctcatgctcaga

SEQ ID NO: 177933 - DNA, 25 bp, probe
ctctcctaaagatctcatgctcaga

SEQ ID NO: 177934 - DNA, 25 bp, probe
ctctctctgaaatcactgcgcagga

SEQ ID NO: 177935 - DNA, 25 bp, probe
ctctctctctactgagctgtaacaa

SEQ ID NO: 177936 - DNA, 25 bp, probe
ctctctcccagcacatgtgtatcag

SEQ ID NO: 177937 - DNA, 25 bp, probe
ctctctcccagcacatgtgtatcag

SEQ ID NO: 177938 - DNA, 25 bp, probe
ctctctgccaatgaatgtgcctctc

SEQ ID NO: 177939 - DNA, 25 bp, probe
ctctctgccaatgaatgtgcctctc

SEQ ID NO: 177940 - DNA, 25 bp, probe
ctctgactacagaagtggccttgca

SEQ ID NO: 177941 - DNA, 25 bp, probe
ctctgacaaggagtgtgccgtgcgc

SEQ ID NO: 177942 - DNA, 25 bp, probe
ctctccacatacggcagctcagtgg

SEQ ID NO: 177943 - DNA, 25 bp, probe
ctctgctagcaagccaccagtgagg

SEQ ID NO: 177944 - DNA, 25 bp, probe
ctctgtatccagacacacttggcag

SEQ ID NO: 177945 - DNA, 25 bp, probe
ctctgatagcctgctacatcatgaa

SEQ ID NO: 177946 - DNA, 25 bp, probe
ctctgcatctgcgctttccagataa

SEQ ID NO: 177947 - DNA, 25 bp, probe
ctctgcaccctgatatacagcacgg

SEQ ID NO: 177948 - DNA, 25 bp, probe
ctctcgccatctatagatacactgg

SEQ ID NO: 177949 - DNA, 25 bp, probe
ctctctggctctttccaaactagaa

SEQ ID NO: 177950 - DNA, 25 bp, probe
ctctctggctctttccaaactagaa

SEQ ID NO: 177951 - DNA, 25 bp, probe
ctcctgctctctatccaaaataaag

SEQ ID NO: 177952 - DNA, 25 bp, probe
ctcccttgccaacttacatcagaaa

SEQ ID NO: 177953 - DNA, 25 bp, probe
ctcccttgccaacttacatcagaaa

SEQ ID NO: 177954 - DNA, 25 bp, probe
ctctcccgccagactgttagaaaat

SEQ ID NO: 177955 - DNA, 25 bp, probe
ctctctggcttaagtttagaagtta

SEQ ID NO: 177956 - DNA, 25 bp, probe
ccttcttagaagcttcgaactcaaa

SEQ ID NO: 177957 - DNA, 25 bp, probe
ctcctctttaaggaccgacccagag

SEQ ID NO: 177958 - DNA, 25 bp, probe
ctccttttcaaagcaatagccgccg

SEQ ID NO: 177959 - DNA, 25 bp, probe
ctccctttgaaatggatggccccag

SEQ ID NO: 177960 - DNA, 25 bp, probe
ctccctgtacggtggatggcaccgg

SEQ ID NO: 177961 - DNA, 25 bp, probe
ctcccagaaggacaaggcagccgcc

SEQ ID NO: 177962 - DNA, 25 bp, probe
ctccgcaggacgctcaaggaggtgc

SEQ ID NO: 177963 - DNA, 25 bp, probe
ctctcgcagcgcagcaacgacgagg

SEQ ID NO: 177964 - DNA, 25 bp, probe
ctctcgcagcgcagcaacgacgagg

SEQ ID NO: 177965 - DNA, 25 bp, probe
ctctgccatgcccagagaatcaggg

SEQ ID NO: 177966 - DNA, 25 bp, probe
ctctgccatctgcaaagttcagcag

SEQ ID NO: 177967 - DNA, 25 bp, probe
ctctgcacattggaacttgtccatg

SEQ ID NO: 177968 - DNA, 25 bp, probe
ctctgacttggtatatgctcatctg

SEQ ID NO: 177969 - DNA, 25 bp, probe
ctctgagcattagatttctcatttg

SEQ ID NO: 177970 - DNA, 25 bp, probe
ctctgggatgctgattgtctctttg

SEQ ID NO: 177971 - DNA, 25 bp, probe
ctctgtgtgattggactcgtttatg

SEQ ID NO: 177972 - DNA, 25 bp, probe
ctctctgtatcattaaggctttatg

SEQ ID NO: 177973 - DNA, 25 bp, probe
ctctctgtatcattaaggctttatg

SEQ ID NO: 177974 - DNA, 25 bp, probe
ctctctgttattacactctctgtat

SEQ ID NO: 177975 - DNA, 25 bp, probe
ctctctgttattacactctctgtat

SEQ ID NO: 177976 - DNA, 25 bp, probe
ctctctgtggaatcctattctctta

SEQ ID NO: 177977 - DNA, 25 bp, probe
ctctgtagtgaccacgtatattttc

SEQ ID NO: 177978 - DNA, 25 bp, probe
ctctgtatgctgtcacacctatatt

SEQ ID NO: 177979 - DNA, 25 bp, probe
ctctgaagcatctagtacttatcaa

SEQ ID NO: 177980 - DNA, 25 bp, probe
ctctgaagctgacgaacttccatgg

SEQ ID NO: 177981 - DNA, 25 bp, probe
ctcgttctgggaggcttacagggtg

SEQ ID NO: 177982 - DNA, 25 bp, probe
ctgcttttgtgccccttaaatgtag

SEQ ID NO: 177983 - DNA, 25 bp, probe
ctgcttgctttgaacctaccagtta

SEQ ID NO: 177984 - DNA, 25 bp, probe
ctctcgctggtgaagccaagcggga

SEQ ID NO: 177985 - DNA, 25 bp, probe
ctccggagatggtgaagggagaacc

SEQ ID NO: 177986 - DNA, 25 bp, probe
ctctgccaggggccgaaggtcagga

SEQ ID NO: 177987 - DNA, 25 bp, probe
ctctgccaggggccgaaggtcagga

SEQ ID NO: 177988 - DNA, 25 bp, probe
ctctgccagtgacgtgtggagcttc

SEQ ID NO: 177989 - DNA, 25 bp, probe
ctctccgcagacctgcagtggattc

SEQ ID NO: 177990 - DNA, 25 bp, probe
ctctgacctcatgtgcgtggatgtc

SEQ ID NO: 177991 - DNA, 25 bp, probe
ctctgcatccctggtgtgtaagatt

SEQ ID NO: 177992 - DNA, 25 bp, probe
ctctcctcatgctgtttagtgatgg

SEQ ID NO: 177993 - DNA, 25 bp, probe
ctctccatctggctgtgcaaaatgg

SEQ ID NO: 177994 - DNA, 25 bp, probe
ctctccaaaggccctaccagaggga

SEQ ID NO: 177995 - DNA, 25 bp, probe
ctctccaggaacatctactcagcag

SEQ ID NO: 177996 - DNA, 25 bp, probe
ctctccacaccacagtactcagagt

SEQ ID NO: 177997 - DNA, 25 bp, probe
ctctccacaccacagtactcagagt

SEQ ID NO: 177998 - DNA, 25 bp, probe
ctctccctccaggaggagtgagaat

SEQ ID NO: 177999 - DNA, 25 bp, probe
ctctccaattccaaggagttctcag

SEQ ID NO: 178000 - DNA, 25 bp, probe
ctctcccttgagaagctgagtcttc

SEQ ID NO: 178001 - DNA, 25 bp, probe
ctctcccttgagaagctgagtcttc

SEQ ID NO: 178002 - DNA, 25 bp, probe
ctctcgctgtgtggtatctgaggct

SEQ ID NO: 178003 - DNA, 25 bp, probe
ctctgcgtgttgcactgcatagtga

SEQ ID NO: 178004 - DNA, 25 bp, probe
ctctgcgtctgtgattcatttcatg

SEQ ID NO: 178005 - DNA, 25 bp, probe
ctctgcttctacattctgttcattg

SEQ ID NO: 178006 - DNA, 25 bp, probe
ctctgcgttgtttgtgtgttctatg

SEQ ID NO: 178007 - DNA, 25 bp, probe
ctctgcgttgtttgtgtgttctatg

SEQ ID NO: 178008 - DNA, 25 bp, probe
ctctcgctgctgctaggtttacaaa

SEQ ID NO: 178009 - DNA, 25 bp, probe
ctctgcttccttaggttacaaaaca

SEQ ID NO: 178010 - DNA, 25 bp, probe
ctctgctaatcatgtgggtgagcca

SEQ ID NO: 178011 - DNA, 25 bp, probe
ctctgtgagaggtggggcagtcaag

SEQ ID NO: 178012 - DNA, 25 bp, probe
ctctgctggagcgggtgggaaccaa

SEQ ID NO: 178013 - DNA, 25 bp, probe
ctctgctggagcgggtgggaaccaa

SEQ ID NO: 178014 - DNA, 25 bp, probe
ctctgctgatacgagggtggaacgc

SEQ ID NO: 178015 - DNA, 25 bp, probe
ctccctaccagatgcaggaactcct

SEQ ID NO: 178016 - DNA, 25 bp, probe
ctctgcctaggcgagggaggacctc

SEQ ID NO: 178017 - DNA, 25 bp, probe
ctctgcctagagcccaggagggact

SEQ ID NO: 178018 - DNA, 25 bp, probe
ctctgccgcaatggccatgtgggga

SEQ ID NO: 178019 - DNA, 25 bp, probe
ctctccagtatcggcagtggctgaa

SEQ ID NO: 178020 - DNA, 25 bp, probe
ctctccagtatcggcagtggctgaa

SEQ ID NO: 178021 - DNA, 25 bp, probe
ctctccttgactggaattgctgcta

SEQ ID NO: 178022 - DNA, 25 bp, probe
ctctccttgactggaattgctgcta

SEQ ID NO: 178023 - DNA, 25 bp, probe
ctcccagatacgttgcattgtgcca

SEQ ID NO: 178024 - DNA, 25 bp, probe
ctcccagatacgttgcattgtgcca

SEQ ID NO: 178025 - DNA, 25 bp, probe
ctctgcatttaccaagcacttccac

SEQ ID NO: 178026 - DNA, 25 bp, probe
ctctgcatttaccaagcacttccac

SEQ ID NO: 178027 - DNA, 25 bp, probe
ctctgcggtcaccaagggtcaactg

SEQ ID NO: 178028 - DNA, 25 bp, probe
ctccgttcctagctggaatgatctg

SEQ ID NO: 178029 - DNA, 25 bp, probe
ctctgccttcggagggaaattgtaa

SEQ ID NO: 178030 - DNA, 25 bp, probe
ctcggcatttggagagggagctctg

SEQ ID NO: 178031 - DNA, 25 bp, probe
ctcggctcttgacacttagccgctg

SEQ ID NO: 178032 - DNA, 25 bp, probe
ctctgtctatttcaatatagaactg

SEQ ID NO: 178033 - DNA, 25 bp, probe
ctctgtcttctttagcaaaatatct

SEQ ID NO: 178034 - DNA, 25 bp, probe
ctctgcgttttttctgtgtaatcta

SEQ ID NO: 178035 - DNA, 25 bp, probe
ctctgcttacatctcctggataaat

SEQ ID NO: 178036 - DNA, 25 bp, probe
ctctgcttgactattattaccacat

SEQ ID NO: 178037 - DNA, 25 bp, probe
ctctgcctacatgttatctccaaag

SEQ ID NO: 178038 - DNA, 25 bp, probe
ctctgcctacatgttatctccaaag

SEQ ID NO: 178039 - DNA, 25 bp, probe
ctctgcccctgcactttgtgcagaa

SEQ ID NO: 178040 - DNA, 25 bp, probe
ctctgctcttggaagcccgtgcaga

SEQ ID NO: 178041 - DNA, 25 bp, probe
ctctgccttgtcatgagcctgatga

SEQ ID NO: 178042 - DNA, 25 bp, probe
ctctgccttgtcatgagcctgatga

SEQ ID NO: 178043 - DNA, 25 bp, probe
ctctgccacttgctagctgtgagac

SEQ ID NO: 178044 - DNA, 25 bp, probe
ctctgccacttgctagctgtgagac

SEQ ID NO: 178045 - DNA, 25 bp, probe
ctctccagcctatctcatgatgaga

SEQ ID NO: 178046 - DNA, 25 bp, probe
ctctcctgctaattcctgaagatgt

SEQ ID NO: 178047 - DNA, 25 bp, probe
ctctgtcttagcaacctgataggtt

SEQ ID NO: 178048 - DNA, 25 bp, probe
ctctgcctccacaccagtggagtct

SEQ ID NO: 178049 - DNA, 25 bp, probe
ctctgagtccataaccaggctcagg

SEQ ID NO: 178050 - DNA, 25 bp, probe
ctctgagcaggacacgggccagatg

SEQ ID NO: 178051 - DNA, 25 bp, probe
ctcgagcggggagggtaatgtgcac

SEQ ID NO: 178052 - DNA, 25 bp, probe
cccaaggggaagcttcggagcctgt

SEQ ID NO: 178053 - DNA, 25 bp, probe
ctccaaaaggggcatattagcaatt

SEQ ID NO: 178054 - DNA, 25 bp, probe
cccaagtacattctaattaccagta

SEQ ID NO: 178055 - DNA, 25 bp, probe
cccaagtagtagtgtcctcctagta

SEQ ID NO: 178056 - DNA, 25 bp, probe
ctcgaaccaaagtcgtcactccata

SEQ ID NO: 178057 - DNA, 25 bp, probe
ctcgcgaataaaaggccctccatcg

SEQ ID NO: 178058 - DNA, 25 bp, probe
ctccgctgtaaaggagtcccccaga

SEQ ID NO: 178059 - DNA, 25 bp, probe
tcctgggctagggggccggcccagg

SEQ ID NO: 178060 - DNA, 25 bp, probe
ctctgagtgtagcagggccaggaaa

SEQ ID NO: 178061 - DNA, 25 bp, probe
ctcggcgtccagtgaccaggagaag

SEQ ID NO: 178062 - DNA, 25 bp, probe
ctcgcgcgactgagaaccgtgacat

SEQ ID NO: 178063 - DNA, 25 bp, probe
ctctcctacttggataactgtggta

SEQ ID NO: 178064 - DNA, 25 bp, probe
ctctccaccttgttacacattatgt

SEQ ID NO: 178065 - DNA, 25 bp, probe
ctcccagaccgagagcgcttagtag

SEQ ID NO: 178066 - DNA, 25 bp, probe
ctcccatgtctctgacatcgttggt

SEQ ID NO: 178067 - DNA, 25 bp, probe
ctctccatggagtgaccagctttgt

SEQ ID NO: 178068 - DNA, 25 bp, probe
ctctccacgagagtcaacaggtgtc

SEQ ID NO: 178069 - DNA, 25 bp, probe
ctctccacgagagtcaacaggtgtc

SEQ ID NO: 178070 - DNA, 25 bp, probe
ctctgtcctggagatggagaatggc

SEQ ID NO: 178071 - DNA, 25 bp, probe
ctctgctgccggtgatgggaggcct

SEQ ID NO: 178072 - DNA, 25 bp, probe
ctctccacctgctgatggaagcgag

SEQ ID NO: 178073 - DNA, 25 bp, probe
ctctggccacgctaggtgaacaggg

SEQ ID NO: 178074 - DNA, 25 bp, probe
ctcggccatgtcatggtaaacggtc

SEQ ID NO: 178075 - DNA, 25 bp, probe
ctcggccatgttgagctacttcaag

SEQ ID NO: 178076 - DNA, 25 bp, probe
ctctgcctagtctacagtactgaca

SEQ ID NO: 178077 - DNA, 25 bp, probe
ctctgccacagttatcaagaatggg

SEQ ID NO: 178078 - DNA, 25 bp, probe
ctctgtcacgctggcataagggccg

SEQ ID NO: 178079 - DNA, 25 bp, probe
ctcgatacgctggaaaaagtgcgcg

SEQ ID NO: 178080 - DNA, 25 bp, probe
ctctgacctgctgaaagggatgctt

SEQ ID NO: 178081 - DNA, 25 bp, probe
ctctgtctcctgatgaacgggttga

SEQ ID NO: 178082 - DNA, 25 bp, probe
ctctggcaaatgatgatggggtggg

SEQ ID NO: 178083 - DNA, 25 bp, probe
ctctggcaagctataggagagaatg

SEQ ID NO: 178084 - DNA, 25 bp, probe
ctcggaagcatggccaggaaactgg

SEQ ID NO: 178085 - DNA, 25 bp, probe
ctgctggaaaagcggaggttggagc

SEQ ID NO: 178086 - DNA, 25 bp, probe
ctctgctggaaaagcggaggttgga

SEQ ID NO: 178087 - DNA, 25 bp, probe
ctcgggcaaacactgaaggcatcca

SEQ ID NO: 178088 - DNA, 25 bp, probe
ctcggtggcggagcaaggctccaat

SEQ ID NO: 178089 - DNA, 25 bp, probe
ctcgggggagcagatgagggccctg

SEQ ID NO: 178090 - DNA, 25 bp, probe
ctctgggttgaagggcagtgttccc

SEQ ID NO: 178091 - DNA, 25 bp, probe
ctctgtcttctggactggttttcac

SEQ ID NO: 178092 - DNA, 25 bp, probe
ctctgtcttctggactggttttcac

SEQ ID NO: 178093 - DNA, 25 bp, probe
ctctgtatactgtatcagcagcttt

SEQ ID NO: 178094 - DNA, 25 bp, probe
ctctgtaagaagtcagctctcttca

SEQ ID NO: 178095 - DNA, 25 bp, probe
ctctgtacatacacatgttcctcct

SEQ ID NO: 178096 - DNA, 25 bp, probe
ctctgtagaagtgatcctcaccctt

SEQ ID NO: 178097 - DNA, 25 bp, probe
ctctgaggaagcgccctacagcgcg

SEQ ID NO: 178098 - DNA, 25 bp, probe
ctctgggaacgcatcctgagaggcc

SEQ ID NO: 178099 - DNA, 25 bp, probe
ctctgggaggtcttctcatatggac

SEQ ID NO: 178100 - DNA, 25 bp, probe
ctctgagggatgtcacagccaaggg

SEQ ID NO: 178101 - DNA, 25 bp, probe
ctcgcagcgcagcaacgacgaggtg

SEQ ID NO: 178102 - DNA, 25 bp, probe
ctcgcagcgcagcaacgacgaggtg

SEQ ID NO: 178103 - DNA, 25 bp, probe
ctctgagagagccaccaaggaggag

SEQ ID NO: 178104 - DNA, 25 bp, probe
ctcgcgaagcacacaagacagggaa

SEQ ID NO: 178105 - DNA, 25 bp, probe
ctccgattcccctggagtgtgaagc

SEQ ID NO: 178106 - DNA, 25 bp, probe
ctccgattcccctggagtgtgaagc

SEQ ID NO: 178107 - DNA, 25 bp, probe
ctcgaaacgtcttgcgggtgtgaac

SEQ ID NO: 178108 - DNA, 25 bp, probe
ctcgaagtagtggctgcgggtgctg

SEQ ID NO: 178109 - DNA, 25 bp, probe
ctctggattaggtctctgttgactg

SEQ ID NO: 178110 - DNA, 25 bp, probe
ctctgtttcacgttcgttgagtgta

SEQ ID NO: 178111 - DNA, 25 bp, probe
ctctgttttcagtgggctatggatg

SEQ ID NO: 178112 - DNA, 25 bp, probe
ctctgtctcttctaaaagcggaagc

SEQ ID NO: 178113 - DNA, 25 bp, probe
ctctgtatcccattattactataag

SEQ ID NO: 178114 - DNA, 25 bp, probe
ctctgtatcccattattactataag

SEQ ID NO: 178115 - DNA, 25 bp, probe
ctctgtattcaatttataatgccaa

SEQ ID NO: 178116 - DNA, 25 bp, probe
ctctgtattcaatttataatgccaa

SEQ ID NO: 178117 - DNA, 25 bp, probe
ctctgtcttcacctgattcaactaa

SEQ ID NO: 178118 - DNA, 25 bp, probe
ctctgcctggcagaatcacagtctc

SEQ ID NO: 178119 - DNA, 25 bp, probe
ctcggggagcagaatcacctgtgca

SEQ ID NO: 178120 - DNA, 25 bp, probe
ctcgggtgaagaactgccgtttgtg

SEQ ID NO: 178121 - DNA, 25 bp, probe
ctcgggaatgaacttccgctttggt

SEQ ID NO: 178122 - DNA, 25 bp, probe
ctctgggaaacgtcccttgtcagga

SEQ ID NO: 178123 - DNA, 25 bp, probe
ctctgggaaatctactcctttgggc

SEQ ID NO: 178124 - DNA, 25 bp, probe
ctctgggaaatctactcctttgggc

SEQ ID NO: 178125 - DNA, 25 bp, probe
ctctgggcaaattgtcgcctttaca

SEQ ID NO: 178126 - DNA, 25 bp, probe
ctgctggggaaagtccctcgaaaat

SEQ ID NO: 178127 - DNA, 25 bp, probe
ctctggacgtgaagtctcgggcaaa

SEQ ID NO: 178128 - DNA, 25 bp, probe
ctctgagacaggaagctcctgccct

SEQ ID NO: 178129 - DNA, 25 bp, probe
ctctggaaggcttcaggctgcacac

SEQ ID NO: 178130 - DNA, 25 bp, probe
ctctggttgagctcagtggagccat

SEQ ID NO: 178131 - DNA, 25 bp, probe
ctctgttgctgagatcagggagccc

SEQ ID NO: 178132 - DNA, 25 bp, probe
ctctgttgcgccttcaggaggatgc

SEQ ID NO: 178133 - DNA, 25 bp, probe
ctctgtctgaacttgggcaaggcga

SEQ ID NO: 178134 - DNA, 25 bp, probe
ctctgtccacatgtgggacagggct

SEQ ID NO: 178135 - DNA, 25 bp, probe
ctctgtggcaagcgaggacacgcct

SEQ ID NO: 178136 - DNA, 25 bp, probe
ctctggtcacagcgacccaggatgc

SEQ ID NO: 178137 - DNA, 25 bp, probe
ctctgagataccctgtcctcatgag

SEQ ID NO: 178138 - DNA, 25 bp, probe
ctctgagataccctgtcctcatgag

SEQ ID NO: 178139 - DNA, 25 bp, probe
ctctgagaactggtactctcagtgt

SEQ ID NO: 178140 - DNA, 25 bp, probe
ctctgagaggctcatccctcagtgg

SEQ ID NO: 178141 - DNA, 25 bp, probe
ctctgaatggagtgcgcttcaagcg

SEQ ID NO: 178142 - DNA, 25 bp, probe
ctctggcatgctaactagttacgcg

SEQ ID NO: 178143 - DNA, 25 bp, probe
ctcgcgcgtttgcggcaaccgcaag

SEQ ID NO: 178144 - DNA, 25 bp, probe
ctcgcgcgtttgcggcaaccgcaag

SEQ ID NO: 178145 - DNA, 25 bp, probe
ctccgcgttcatcaagaacccggtg

SEQ ID NO: 178146 - DNA, 25 bp, probe
ctgcccttatctcaaagtccgtggc

SEQ ID NO: 178147 - DNA, 25 bp, probe
ctgcccttatctcaaagtccgtggc

SEQ ID NO: 178148 - DNA, 25 bp, probe
ctcccagaatggaaagtcccagtgg

SEQ ID NO: 178149 - DNA, 25 bp, probe
ctgcccggaaggatttccagaggga

SEQ ID NO: 178150 - DNA, 25 bp, probe
ctcccgtggaagattaaagggctga

SEQ ID NO: 178151 - DNA, 25 bp, probe
ctcccgggacaggatgcaaaagagg

SEQ ID NO: 178152 - DNA, 25 bp, probe
ctcgccggaaaccgcaacagcatgg

SEQ ID NO: 178153 - DNA, 25 bp, probe
ctctgtctggaatccagggaccgcc

SEQ ID NO: 178154 - DNA, 25 bp, probe
ctctgttctgattcaccaggggtcc

SEQ ID NO: 178155 - DNA, 25 bp, probe
ctctgctagctggacagccaggtgg

SEQ ID NO: 178156 - DNA, 25 bp, probe
ctctgtatgtgtgagccagggatgg

SEQ ID NO: 178157 - DNA, 25 bp, probe
ctcgctctgttacccagggtggagt

SEQ ID NO: 178158 - DNA, 25 bp, probe
ctcccttataacctggacgtgagct

SEQ ID NO: 178159 - DNA, 25 bp, probe
ctccctctgtttcgggactggatca

SEQ ID NO: 178160 - DNA, 25 bp, probe
ctcccttgtctcagatggtgtgtcc

SEQ ID NO: 178161 - DNA, 25 bp, probe
ctcccttgtctcagatggtgtgtcc

SEQ ID NO: 178162 - DNA, 25 bp, probe
ctcccattttcatgttttgtctttc

SEQ ID NO: 178163 - DNA, 25 bp, probe
ctcccattttcatgttttgtctttc

SEQ ID NO: 178164 - DNA, 25 bp, probe
ctcctgaatttatgaggtttattta

SEQ ID NO: 178165 - DNA, 25 bp, probe
ctcctgaacccacaaattattctta

SEQ ID NO: 178166 - DNA, 25 bp, probe
ctccgctgacctacgataattatac

SEQ ID NO: 178167 - DNA, 25 bp, probe
ctcctggaccttgggccataatttc

SEQ ID NO: 178168 - DNA, 25 bp, probe
ctcgccgacgtcatgggcataggtg

SEQ ID NO: 178169 - DNA, 25 bp, probe
ctcgtccaagtcagggatgtgtctg

SEQ ID NO: 178170 - DNA, 25 bp, probe
ctctgtgggccctgggatgtgatct

SEQ ID NO: 178171 - DNA, 25 bp, probe
ctcctagagctagccggatggactc

SEQ ID NO: 178172 - DNA, 25 bp, probe
ctcctagagctagccggatggactc

SEQ ID NO: 178173 - DNA, 25 bp, probe
ctcgcacggtcatccggagtactaa

SEQ ID NO: 178174 - DNA, 25 bp, probe
ctccatcgttgagcctggggtgtaa

SEQ ID NO: 178175 - DNA, 25 bp, probe
ctcccgtttccctgtgatgtgaaac

SEQ ID NO: 178176 - DNA, 25 bp, probe
ctcccgtttccctgtgatgtgaaac

SEQ ID NO: 178177 - DNA, 25 bp, probe
tccccttttcccagtattactgaat

SEQ ID NO: 178178 - DNA, 25 bp, probe
ccctgtgtatacattttttactcga

SEQ ID NO: 178179 - DNA, 25 bp, probe
ctcctgggttacacagctttaccga

SEQ ID NO: 178180 - DNA, 25 bp, probe
ctccgaagttaaaatctgtaatagg

SEQ ID NO: 178181 - DNA, 25 bp, probe
ctcccacattgtcaccatttcaaag

SEQ ID NO: 178182 - DNA, 25 bp, probe
ctcccaaatttagttcctcatcaca

SEQ ID NO: 178183 - DNA, 25 bp, probe
ctccccaagtggtttccacatgctc

SEQ ID NO: 178184 - DNA, 25 bp, probe
ctcccctgtgtagattggcacttct

SEQ ID NO: 178185 - DNA, 25 bp, probe
ctctgcaacttttctatctgagcgc

SEQ ID NO: 178186 - DNA, 25 bp, probe
ctctgcaacttttctatctgagcgc

SEQ ID NO: 178187 - DNA, 25 bp, probe
ctggaactactttatctacggattt

SEQ ID NO: 178188 - DNA, 25 bp, probe
ctcgtggctactttcacttcagagt

SEQ ID NO: 178189 - DNA, 25 bp, probe
ctcgacttgaattatccttccagac

SEQ ID NO: 178190 - DNA, 25 bp, probe
ctctgtgattgatcaactctcccga

SEQ ID NO: 178191 - DNA, 25 bp, probe
ctctgagatctttggactctgccca

SEQ ID NO: 178192 - DNA, 25 bp, probe
ctctgatgagctatgggccttggca

SEQ ID NO: 178193 - DNA, 25 bp, probe
ctcgacagctgattggcggattgga

SEQ ID NO: 178194 - DNA, 25 bp, probe
ctctgacattgatggcgaggcggag

SEQ ID NO: 178195 - DNA, 25 bp, probe
ctctgtcacccaggctggagggcag

SEQ ID NO: 178196 - DNA, 25 bp, probe
ctctgtcacccaggctggagtgcag

SEQ ID NO: 178197 - DNA, 25 bp, probe
ctctgttgcccaggctggagtgcaa

SEQ ID NO: 178198 - DNA, 25 bp, probe
ctctgttgcccaggctggagtgcag

SEQ ID NO: 178199 - DNA, 25 bp, probe
ctctgtgtgctaaactgaagtctgc

SEQ ID NO: 178200 - DNA, 25 bp, probe
ctctgtgtgctaaactgaagtctgc

SEQ ID NO: 178201 - DNA, 25 bp, probe
ctctgtgtctgtgggaaattctcac

SEQ ID NO: 178202 - DNA, 25 bp, probe
ctctggtgctctgaggagatctccc

SEQ ID NO: 178203 - DNA, 25 bp, probe
ctctgtgtctctgagaaggctgcta

SEQ ID NO: 178204 - DNA, 25 bp, probe
ctctgtcctctgacacagagagctg

SEQ ID NO: 178205 - DNA, 25 bp, probe
ctctgtctcagtccatgaagatgta

SEQ ID NO: 178206 - DNA, 25 bp, probe
ctctggctcggctatatcaattccg

SEQ ID NO: 178207 - DNA, 25 bp, probe
ctctggatcaggtctaccattgctt

SEQ ID NO: 178208 - DNA, 25 bp, probe
ctctggatcaggtctaccattgctt

SEQ ID NO: 178209 - DNA, 25 bp, probe
ctctgtgtcaggggacagcttgtgt

SEQ ID NO: 178210 - DNA, 25 bp, probe
ctcgctgtatggagagcacctggcc

SEQ ID NO: 178211 - DNA, 25 bp, probe
ctcgtatagcgtatgacaaggcagc

SEQ ID NO: 178212 - DNA, 25 bp, probe
ctctggacaggtggtaaagacactt

SEQ ID NO: 178213 - DNA, 25 bp, probe
ctcccacaggcagctttaaccatta

SEQ ID NO: 178214 - DNA, 25 bp, probe
ctcccacaggcagctttaaccatta

SEQ ID NO: 178215 - DNA, 25 bp, probe
ctcccacaggcagctttaaccatta

SEQ ID NO: 178216 - DNA, 25 bp, probe
ctgcccccaactgttagtcaattga

SEQ ID NO: 178217 - DNA, 25 bp, probe
ctgcccctcgagattttggaattcg

SEQ ID NO: 178218 - DNA, 25 bp, probe
ctcccactgccaagaacttggaaat

SEQ ID NO: 178219 - DNA, 25 bp, probe
ctcccctccaagagcattaactatt

SEQ ID NO: 178220 - DNA, 25 bp, probe
ctcccttgaaaagcatttctctcat

SEQ ID NO: 178221 - DNA, 25 bp, probe
ctcccctggacacagaggtgcccat

SEQ ID NO: 178222 - DNA, 25 bp, probe
tcagccacgatgaacaccagatctt

SEQ ID NO: 178223 - DNA, 25 bp, probe
ctcgtgggagacgcaggcacaactc

SEQ ID NO: 178224 - DNA, 25 bp, probe
ctcctgggatacgctatgaactctc

SEQ ID NO: 178225 - DNA, 25 bp, probe
ctcctgggatacgctatgaactctc

SEQ ID NO: 178226 - DNA, 25 bp, probe
cccggagtttccataggctccatta

SEQ ID NO: 178227 - DNA, 25 bp, probe
ctcgccgagtttgttagccgaaata

SEQ ID NO: 178228 - DNA, 25 bp, probe
ctcgccgagtttgttagccgaaata

SEQ ID NO: 178229 - DNA, 25 bp, probe
ctccccagctttgtcgaactgaagt

SEQ ID NO: 178230 - DNA, 25 bp, probe
ctccccagctttgtcgaactgaagt

SEQ ID NO: 178231 - DNA, 25 bp, probe
ctccctactttctgtaaatatctgt

SEQ ID NO: 178232 - DNA, 25 bp, probe
ctccctactttctgtaaatatctgt

SEQ ID NO: 178233 - DNA, 25 bp, probe
ctcctttgctttgcgtaccaagtgg

SEQ ID NO: 178234 - DNA, 25 bp, probe
ctctgtggctgtttccagtccaaag

SEQ ID NO: 178235 - DNA, 25 bp, probe
ctctgttcatgagtgctcagagtcc

SEQ ID NO: 178236 - DNA, 25 bp, probe
ctctgtgtcaaggccatgatcctgc

SEQ ID NO: 178237 - DNA, 25 bp, probe
ctctgtgctctgatcacagccttgc

SEQ ID NO: 178238 - DNA, 25 bp, probe
ctctgtgcagtagcatcaccttgaa

SEQ ID NO: 178239 - DNA, 25 bp, probe
ctgctctgcgtaggaccctacaacg

SEQ ID NO: 178240 - DNA, 25 bp, probe
ctgctctgcgtaggaccctacaacg

SEQ ID NO: 178241 - DNA, 25 bp, probe
ctgcgatgaggggactttagaagag

SEQ ID NO: 178242 - DNA, 25 bp, probe
ctcggcgggaaccgctggacgaggg

SEQ ID NO: 178243 - DNA, 25 bp, probe
ctcggcgggaaccgctggacgaggg

SEQ ID NO: 178244 - DNA, 25 bp, probe
ctctgggggggccctgagagggaag

SEQ ID NO: 178245 - DNA, 25 bp, probe
ctccggggtggcagtgaggaccacc

SEQ ID NO: 178246 - DNA, 25 bp, probe
ctcccgacagctcctgggaatatcc

SEQ ID NO: 178247 - DNA, 25 bp, probe
ctcgccacaaatatgggtactgcgg

SEQ ID NO: 178248 - DNA, 25 bp, probe
ctcccaggcaatgtgggccaccagg

SEQ ID NO: 178249 - DNA, 25 bp, probe
ctcccaggagcagcgggcaagcaag

SEQ ID NO: 178250 - DNA, 25 bp, probe
ctcccaggagcagcgggcaagcaag

SEQ ID NO: 178251 - DNA, 25 bp, probe
ctcgcatggaactcgggtgaagaga

SEQ ID NO: 178252 - DNA, 25 bp, probe
ctcgggacgccccgaggaagcagcc

SEQ ID NO: 178253 - DNA, 25 bp, probe
ctcggaccccagccatgggaagagg

SEQ ID NO: 178254 - DNA, 25 bp, probe
ctctgtagcctttgtcaagtgagga

SEQ ID NO: 178255 - DNA, 25 bp, probe
ctctgtagcctttgtcaagtgagga

SEQ ID NO: 178256 - DNA, 25 bp, probe
ctcggagcctcattgagacagggga

SEQ ID NO: 178257 - DNA, 25 bp, probe
ctcggagcctgcacaagcagatccg

SEQ ID NO: 178258 - DNA, 25 bp, probe
ctcggatgactggaggtcgtccacc

SEQ ID NO: 178259 - DNA, 25 bp, probe
ctcggatgactggaggtcgtccacc

SEQ ID NO: 178260 - DNA, 25 bp, probe
ctcggatgactggaggtcgtccacc

SEQ ID NO: 178261 - DNA, 25 bp, probe
ctcctggcaccatggacgatgccac

SEQ ID NO: 178262 - DNA, 25 bp, probe
ctcggacaccagagacaataactga

SEQ ID NO: 178263 - DNA, 25 bp, probe
ctcggacaccagagacaataactga

SEQ ID NO: 178264 - DNA, 25 bp, probe
ctcgagaagccaacagagcagtaag

SEQ ID NO: 178265 - DNA, 25 bp, probe
ctctgtgactacccaggcagatggg

SEQ ID NO: 178266 - DNA, 25 bp, probe
ctctgtcatctaccaagccagtgga

SEQ ID NO: 178267 - DNA, 25 bp, probe
ctctgtcatctaccaagccagtgga

SEQ ID NO: 178268 - DNA, 25 bp, probe
ctctgtctactgccagagccaggcc

SEQ ID NO: 178269 - DNA, 25 bp, probe
ctcgactgcacaggagcccgagaca

SEQ ID NO: 178270 - DNA, 25 bp, probe
ctcgtcaggaggtgcctgagagcag

SEQ ID NO: 178271 - DNA, 25 bp, probe
ctctgtgaggggagccacctgaggg

SEQ ID NO: 178272 - DNA, 25 bp, probe
ctctgggagattgtgaccctggcag

SEQ ID NO: 178273 - DNA, 25 bp, probe
ctcgggatggtcgatcacaactggg

SEQ ID NO: 178274 - DNA, 25 bp, probe
ctcgggtgatggccaccattggggt

SEQ ID NO: 178275 - DNA, 25 bp, probe
ctctggaatgcaggctgccagatgg

SEQ ID NO: 178276 - DNA, 25 bp, probe
ctctgggcatcaggcccagcttgtg

SEQ ID NO: 178277 - DNA, 25 bp, probe
ctcctgtgctgagccaggctgagtg

SEQ ID NO: 178278 - DNA, 25 bp, probe
ctcggcagtgacgctggcagatgcg

SEQ ID NO: 178279 - DNA, 25 bp, probe
ctcggcagtgacgctggcagatgcg

SEQ ID NO: 178280 - DNA, 25 bp, probe
ctctgtctgatatcactgatgaaga

SEQ ID NO: 178281 - DNA, 25 bp, probe
ctcgtttctacgctgcagagatcat

SEQ ID NO: 178282 - DNA, 25 bp, probe
ctcgtttctacgctgcagagatcat

SEQ ID NO: 178283 - DNA, 25 bp, probe
ctcggctatctggggagcagatttt

SEQ ID NO: 178284 - DNA, 25 bp, probe
ctctggctggaaggggactattttc

SEQ ID NO: 178285 - DNA, 25 bp, probe
ctctggggagacgggcgctagattt

SEQ ID NO: 178286 - DNA, 25 bp, probe
ctctggagaggctgtggctgggatg

SEQ ID NO: 178287 - DNA, 25 bp, probe
ctctggagaggctgtggctgggatg

SEQ ID NO: 178288 - DNA, 25 bp, probe
ctctggcgagtctgcttctttgcag

SEQ ID NO: 178289 - DNA, 25 bp, probe
ctctggcgagtctgcttctttgcag

SEQ ID NO: 178290 - DNA, 25 bp, probe
ctcgcctggtcaatgctctaagtga

SEQ ID NO: 178291 - DNA, 25 bp, probe
ctccctggtctgaccaccaggatcc

SEQ ID NO: 178292 - DNA, 25 bp, probe
ctcgcgtagttacctatctgaatgc

SEQ ID NO: 178293 - DNA, 25 bp, probe
ctcgggaattcttcaatcgcagagc

SEQ ID NO: 178294 - DNA, 25 bp, probe
ctctgggaaatcgccactggagata

SEQ ID NO: 178295 - DNA, 25 bp, probe
ctgctgggagagatcccctggcttg

SEQ ID NO: 178296 - DNA, 25 bp, probe
ctctgtggagcacgatgtgcccagc

SEQ ID NO: 178297 - DNA, 25 bp, probe
ctctgtggagcacgatgtgcccagc

SEQ ID NO: 178298 - DNA, 25 bp, probe
ctctgtgctggaggtgtcactgcag

SEQ ID NO: 178299 - DNA, 25 bp, probe
ctctggctgagagcgaccgtgcagc

SEQ ID NO: 178300 - DNA, 25 bp, probe
ctctggggaccggcagcagaggcac

SEQ ID NO: 178301 - DNA, 25 bp, probe
ctgcgggggaaggtgcatcaggcca

SEQ ID NO: 178302 - DNA, 25 bp, probe
ctcggagcggaaggtgacgcgcatg

SEQ ID NO: 178303 - DNA, 25 bp, probe
ctcggtggggatgtgcccatcagct

SEQ ID NO: 178304 - DNA, 25 bp, probe
ctcggtggggatgtgcccatcagct

SEQ ID NO: 178305 - DNA, 25 bp, probe
ctcggtggggatgtgcccatcagct

SEQ ID NO: 178306 - DNA, 25 bp, probe
ctcgagtttgaatatccagaatctt

SEQ ID NO: 178307 - DNA, 25 bp, probe
ctcggcttggattattctgcaggtt

SEQ ID NO: 178308 - DNA, 25 bp, probe
ctctggtctaataaactgggtttca

SEQ ID NO: 178309 - DNA, 25 bp, probe
ctctggcttgagactagacgggggc

SEQ ID NO: 178310 - DNA, 25 bp, probe
ctctggggtgtcaccaagcaaggct

SEQ ID NO: 178311 - DNA, 25 bp, probe
ctcggtgttgacatccaccgggtgt

SEQ ID NO: 178312 - DNA, 25 bp, probe
ctgtggttctgagaagcccgaggtc

SEQ ID NO: 178313 - DNA, 25 bp, probe
ctgtgttcccaggaaccaaatgggg

SEQ ID NO: 178314 - DNA, 25 bp, probe
cggcttcctcaggaaaccctggaga

SEQ ID NO: 178315 - DNA, 25 bp, probe
cggccacatcctgctaaaactggga

SEQ ID NO: 178316 - DNA, 25 bp, probe
ctgtcaatgacccctaaacctgaag

SEQ ID NO: 178317 - DNA, 25 bp, probe
ctcctacagcgacaagaacctcatc

SEQ ID NO: 178318 - DNA, 25 bp, probe
ctccccggagctggcaaaacgctcc

SEQ ID NO: 178319 - DNA, 25 bp, probe
ctccccggagctggcaaaacgctcc

SEQ ID NO: 178320 - DNA, 25 bp, probe
ctccccggagctggcaaaacgctcc

SEQ ID NO: 178321 - DNA, 25 bp, probe
ctccaccggatagcaaagtcgggga

SEQ ID NO: 178322 - DNA, 25 bp, probe
ctccaggctggatacaaggggcggg

SEQ ID NO: 178323 - DNA, 25 bp, probe
ctcgctggtgaagccaagcgggagg

SEQ ID NO: 178324 - DNA, 25 bp, probe
ctcgctggtgaagccaagcgggagg

SEQ ID NO: 178325 - DNA, 25 bp, probe
ctcctggggacctgatcgggaggcc

SEQ ID NO: 178326 - DNA, 25 bp, probe
ctccccggaccacatgggggtgcag

SEQ ID NO: 178327 - DNA, 25 bp, probe
ctcccccgcaacagcggggcaggag

SEQ ID NO: 178328 - DNA, 25 bp, probe
ctcccccaggcctgtagtggtggag

SEQ ID NO: 178329 - DNA, 25 bp, probe
ctcctcccacctttgcatggtggga

SEQ ID NO: 178330 - DNA, 25 bp, probe
ctcctcccatcttattgtagttttc

SEQ ID NO: 178331 - DNA, 25 bp, probe
ctccccgcagtggaagtgaatcctt

SEQ ID NO: 178332 - DNA, 25 bp, probe
ctcccctgacatgaaggcaatacat

SEQ ID NO: 178333 - DNA, 25 bp, probe
ctgcgaccacaagaaggatgattca

SEQ ID NO: 178334 - DNA, 25 bp, probe
ctcgatcccacaccaggaagatctc

SEQ ID NO: 178335 - DNA, 25 bp, probe
ctcgatcccacaccaggaagatctc

SEQ ID NO: 178336 - DNA, 25 bp, probe
ctcgccaccacacctggataattaa

SEQ ID NO: 178337 - DNA, 25 bp, probe
ctcccagccaccatgttacactgga

SEQ ID NO: 178338 - DNA, 25 bp, probe
ctcccagccaccatgttacactgga

SEQ ID NO: 178339 - DNA, 25 bp, probe
ctcccagccaccatgttacactgga

SEQ ID NO: 178340 - DNA, 25 bp, probe
ctccctcctgtgaagttacactgta

SEQ ID NO: 178341 - DNA, 25 bp, probe
ttccccccgaagaggagttacagcg

SEQ ID NO: 178342 - DNA, 25 bp, probe
ctcccccggcagtacggagttagag

SEQ ID NO: 178343 - DNA, 25 bp, probe
ctccgccgatggcaagcgggtctac

SEQ ID NO: 178344 - DNA, 25 bp, probe
ctccctgcttttaagcaggcgtttg

SEQ ID NO: 178345 - DNA, 25 bp, probe
ctccctgattttaaaggctttgact

SEQ ID NO: 178346 - DNA, 25 bp, probe
ctccctttagtttgtggccaacact

SEQ ID NO: 178347 - DNA, 25 bp, probe
ctccttttaatctagtgccaagtcc

SEQ ID NO: 178348 - DNA, 25 bp, probe
ctccttttaatctagtgccaagtcc

SEQ ID NO: 178349 - DNA, 25 bp, probe
ctcccttaataaactcacaactctc

SEQ ID NO: 178350 - DNA, 25 bp, probe
ctcctattaaagaacctcgtcccag

SEQ ID NO: 178351 - DNA, 25 bp, probe
ctccgagtaaaaaggccggacacag

SEQ ID NO: 178352 - DNA, 25 bp, probe
ctccgataaccctgaccagaacaca

SEQ ID NO: 178353 - DNA, 25 bp, probe
ctcggtgtccccacaggatgaaaca

SEQ ID NO: 178354 - DNA, 25 bp, probe
ctccttagccccactggtataaata

SEQ ID NO: 178355 - DNA, 25 bp, probe
ctcccgggcccatgatggccataga

SEQ ID NO: 178356 - DNA, 25 bp, probe
ctcccaggtgttaacattccaagac

SEQ ID NO: 178357 - DNA, 25 bp, probe
ctcccaggtgttaacattccaagac

SEQ ID NO: 178358 - DNA, 25 bp, probe
ctcccaggatggtaccattgctctt

SEQ ID NO: 178359 - DNA, 25 bp, probe
ctcccattatgagcatccttcatct

SEQ ID NO: 178360 - DNA, 25 bp, probe
ctccattcatggtgcactttattta

SEQ ID NO: 178361 - DNA, 25 bp, probe
ctccagtaccttgcttcttactgat

SEQ ID NO: 178362 - DNA, 25 bp, probe
ctccttaccatcatctccatatgag

SEQ ID NO: 178363 - DNA, 25 bp, probe
ctccctgaccacacatcggaagggc

SEQ ID NO: 178364 - DNA, 25 bp, probe
ctcccataaatcactggggggctgg

SEQ ID NO: 178365 - DNA, 25 bp, probe
ctccctccaccggggaagggcatgg

SEQ ID NO: 178366 - DNA, 25 bp, probe
ctcccaccagggggtgaattggcaa

SEQ ID NO: 178367 - DNA, 25 bp, probe
ctccttccatttctgtccattagaa

SEQ ID NO: 178368 - DNA, 25 bp, probe
ctcctgtgccagttgggaacattac

SEQ ID NO: 178369 - DNA, 25 bp, probe
ctccatggtaggagtcaatctgcca

SEQ ID NO: 178370 - DNA, 25 bp, probe
ctcctggattccagcaattctcctg

SEQ ID NO: 178371 - DNA, 25 bp, probe
ctgcgatggacttcacagatttgtc

SEQ ID NO: 178372 - DNA, 25 bp, probe
ctgcagctctgacccaaatttagtc

SEQ ID NO: 178373 - DNA, 25 bp, probe
ctcctgggtaaattttgatgtcgca

SEQ ID NO: 178374 - DNA, 25 bp, probe
ctcctggctcttgattttgtctgcc

SEQ ID NO: 178375 - DNA, 25 bp, probe
ctcctggctcttgattttgtctgcc

SEQ ID NO: 178376 - DNA, 25 bp, probe
ctcctggtgtctacatgtttgctta

SEQ ID NO: 178377 - DNA, 25 bp, probe
ctcctggcaatgctcagttctgatt

SEQ ID NO: 178378 - DNA, 25 bp, probe
ctcgaggcagaggtcatgttcccag

SEQ ID NO: 178379 - DNA, 25 bp, probe
ctcggacatggcgtatgtcatcaac

SEQ ID NO: 178380 - DNA, 25 bp, probe
ctccggctcctgtatgaatgcaatc

SEQ ID NO: 178381 - DNA, 25 bp, probe
ctccttgccaccaacagatgaatct

SEQ ID NO: 178382 - DNA, 25 bp, probe
ctcctgaaatctatcagatcatgct

SEQ ID NO: 178383 - DNA, 25 bp, probe
ctcgggtgatatctagcctgcttgt

SEQ ID NO: 178384 - DNA, 25 bp, probe
ctcggctgtattaatcacgcgatgt

SEQ ID NO: 178385 - DNA, 25 bp, probe
ctcggctatatcaattccgggttga

SEQ ID NO: 178386 - DNA, 25 bp, probe
ctcggccttccaaagtgctgggata

SEQ ID NO: 178387 - DNA, 25 bp, probe
ctcgtgcccctcagactggggaaga

SEQ ID NO: 178388 - DNA, 25 bp, probe
ctcgtgcccctcagactggggaaga

SEQ ID NO: 178389 - DNA, 25 bp, probe
ctcggcctcgctggagaagcgcatg

SEQ ID NO: 178390 - DNA, 25 bp, probe
ctcgctgcgatctattgaaagtcag

SEQ ID NO: 178391 - DNA, 25 bp, probe
ctcctagctctttaactgtaggaag

SEQ ID NO: 178392 - DNA, 25 bp, probe
ctgcttatctgtctaacttggctgg

SEQ ID NO: 178393 - DNA, 25 bp, probe
ctcgtatcatccatctacttgggga

SEQ ID NO: 178394 - DNA, 25 bp, probe
ctcctagatcgccctgactgggagg

SEQ ID NO: 178395 - DNA, 25 bp, probe
ctcctagatcgccctgactgggagg

SEQ ID NO: 178396 - DNA, 25 bp, probe
ctccctgagccctgatttgtggtag

SEQ ID NO: 178397 - DNA, 25 bp, probe
ctccttgaccacattttgggaagag

SEQ ID NO: 178398 - DNA, 25 bp, probe
ctccttggtcacattattttggttg

SEQ ID NO: 178399 - DNA, 25 bp, probe
ctcctagtaaccttctgcttgtggt

SEQ ID NO: 178400 - DNA, 25 bp, probe
ctccccaacaggtctctcttgttgg

SEQ ID NO: 178401 - DNA, 25 bp, probe
cctatccaaaatccttgtccaagga

SEQ ID NO: 178402 - DNA, 25 bp, probe
ctcgcccagaaaccttacagcaaag

SEQ ID NO: 178403 - DNA, 25 bp, probe
ctcctacgtaaagatcattgccaag

SEQ ID NO: 178404 - DNA, 25 bp, probe
ctccttcgtcaacgacatcttcgaa

SEQ ID NO: 178405 - DNA, 25 bp, probe
ctcctccatacagagtctcttccaa

SEQ ID NO: 178406 - DNA, 25 bp, probe
ctcctccattcagaagttccatcac

SEQ ID NO: 178407 - DNA, 25 bp, probe
ctcccacattagttgtgttcttatc

SEQ ID NO: 178408 - DNA, 25 bp, probe
ctcccacataattgcagtttctctg

SEQ ID NO: 178409 - DNA, 25 bp, probe
ctcctcgaccattcgtttgtcaagg

SEQ ID NO: 178410 - DNA, 25 bp, probe
ctcctcgaccattcgtttgtcaagg

SEQ ID NO: 178411 - DNA, 25 bp, probe
ctcctcgaccattcgtttgtcaagg

SEQ ID NO: 178412 - DNA, 25 bp, probe
ctcgttgacatttacatcttttcag

SEQ ID NO: 178413 - DNA, 25 bp, probe
ctcgtgctcctgatcaatttcgtat

SEQ ID NO: 178414 - DNA, 25 bp, probe
ctccagtactgcacaaattcctaag

SEQ ID NO: 178415 - DNA, 25 bp, probe
ctccagtacctctaaggactctaga

SEQ ID NO: 178416 - DNA, 25 bp, probe
ctccattccctatgggttctgtgac

SEQ ID NO: 178417 - DNA, 25 bp, probe
ctccaagacggatggcgtttgtgaa

SEQ ID NO: 178418 - DNA, 25 bp, probe
ctcccagctagggggcgttatttat

SEQ ID NO: 178419 - DNA, 25 bp, probe
ctgctccaccaacaggctaaatttg

SEQ ID NO: 178420 - DNA, 25 bp, probe
ctgctccaccaacaggctaaatttg

SEQ ID NO: 178421 - DNA, 25 bp, probe
ctcctaccaacgtcggtaacttgag

SEQ ID NO: 178422 - DNA, 25 bp, probe
ctccgacgccaagcgttacactgga

SEQ ID NO: 178423 - DNA, 25 bp, probe
ctccggcggacagctgcttacatgt

SEQ ID NO: 178424 - DNA, 25 bp, probe
ctcggacgaggagagcgtgcatagc

SEQ ID NO: 178425 - DNA, 25 bp, probe
ctcggacgaggtgggcatgctgccg

SEQ ID NO: 178426 - DNA, 25 bp, probe
ctcggacgaggtgggcatgctgccg

SEQ ID NO: 178427 - DNA, 25 bp, probe
ctccccgaggtgggagcggcgttgg

SEQ ID NO: 178428 - DNA, 25 bp, probe
ctcgctcctgggtgcagagcgtggt

SEQ ID NO: 178429 - DNA, 25 bp, probe
ctcgctgcagcaagagaacaaggtg

SEQ ID NO: 178430 - DNA, 25 bp, probe
ctcgctggacgacagcggcagctgc

SEQ ID NO: 178431 - DNA, 25 bp, probe
ctccttactgggacgacatctctga

SEQ ID NO: 178432 - DNA, 25 bp, probe
ctcgctttcatgggaccagacgtga

SEQ ID NO: 178433 - DNA, 25 bp, probe
ctcgctttcatgggaccagacgtga

SEQ ID NO: 178434 - DNA, 25 bp, probe
ctcctttgggacccagatcatcggg

SEQ ID NO: 178435 - DNA, 25 bp, probe
ctccttatggggcccggtatgtggg

SEQ ID NO: 178436 - DNA, 25 bp, probe
ctccttttgtccacaggtatgaggt

SEQ ID NO: 178437 - DNA, 25 bp, probe
ctccctattctcttaagcggtggcg

SEQ ID NO: 178438 - DNA, 25 bp, probe
ctccctatacccttatggggtgtcg

SEQ ID NO: 178439 - DNA, 25 bp, probe
ctccagtacacatcgtatggggtga

SEQ ID NO: 178440 - DNA, 25 bp, probe
ctccagttcctccctcagtggagga

SEQ ID NO: 178441 - DNA, 25 bp, probe
ctcccttcatcttgatctgggaaga

SEQ ID NO: 178442 - DNA, 25 bp, probe
ctcccttcatcttgatctgggaaga

SEQ ID NO: 178443 - DNA, 25 bp, probe
ctccccatctcttcaatggggctga

SEQ ID NO: 178444 - DNA, 25 bp, probe
ctccttcatgtttaatggcacctca

SEQ ID NO: 178445 - DNA, 25 bp, probe
ctcctcctttaactgagtcatcatc

SEQ ID NO: 178446 - DNA, 25 bp, probe
ctcccctgtcaatgagaatcagatc

SEQ ID NO: 178447 - DNA, 25 bp, probe
ctcccctgtcaatgagaatcagatc

SEQ ID NO: 178448 - DNA, 25 bp, probe
ctcccagtgacaatatggaattctg

SEQ ID NO: 178449 - DNA, 25 bp, probe
ctcccgtggaattccatgatcctga

SEQ ID NO: 178450 - DNA, 25 bp, probe
ctgccggagctggtgtccagtagta

SEQ ID NO: 178451 - DNA, 25 bp, probe
ctgccggagctggtgtccagtagta

SEQ ID NO: 178452 - DNA, 25 bp, probe
ctgcgctcgattctattcgctacat

SEQ ID NO: 178453 - DNA, 25 bp, probe
cgtgctagaggtgtcacgctccatt

SEQ ID NO: 178454 - DNA, 25 bp, probe
cgatgaagggatgctttacttcctc

SEQ ID NO: 178455 - DNA, 25 bp, probe
ctggctaggctatttaaactccctc

SEQ ID NO: 178456 - DNA, 25 bp, probe
ctgcttattttaggattacccactc

SEQ ID NO: 178457 - DNA, 25 bp, probe
ctgctgtctactccaagaaaccaac

SEQ ID NO: 178458 - DNA, 25 bp, probe
ctcgaacactctcttcagatgcaaa

SEQ ID NO: 178459 - DNA, 25 bp, probe
ctccagaaccatctctaggcaacta

SEQ ID NO: 178460 - DNA, 25 bp, probe
ctccagaaccatctctaggcaacta

SEQ ID NO: 178461 - DNA, 25 bp, probe
ctgccataccaaccccaggtattaa

SEQ ID NO: 178462 - DNA, 25 bp, probe
ctccaaacaagctcactgtgtttct

SEQ ID NO: 178463 - DNA, 25 bp, probe
ctccctagaatctcctggaatgctt

SEQ ID NO: 178464 - DNA, 25 bp, probe
ctcctccgagatgtcctgaaattct

SEQ ID NO: 178465 - DNA, 25 bp, probe
ctcccgtagcacactataacatctg

SEQ ID NO: 178466 - DNA, 25 bp, probe
ctcccgtggcctgtagaatagcctg

SEQ ID NO: 178467 - DNA, 25 bp, probe
ctccctgctgtgctttaacacaggc

SEQ ID NO: 178468 - DNA, 25 bp, probe
gctcctatgttggtattaacggtgg

SEQ ID NO: 178469 - DNA, 25 bp, probe
ctccttgttttgatgtcaccttggt

SEQ ID NO: 178470 - DNA, 25 bp, probe
ctcctttacctgctgtactatgagt

SEQ ID NO: 178471 - DNA, 25 bp, probe
ctcgctgttatcctggatctggtgt

SEQ ID NO: 178472 - DNA, 25 bp, probe
ctcctgttcatattagcactttgca

SEQ ID NO: 178473 - DNA, 25 bp, probe
ctcgcaagtatttagcacagtctga

SEQ ID NO: 178474 - DNA, 25 bp, probe
ctcgcattgtccggagatacctact

SEQ ID NO: 178475 - DNA, 25 bp, probe
ctcgtttcaggcttgtgactcaaca

SEQ ID NO: 178476 - DNA, 25 bp, probe
ctcgttaagatgtagtgactgcgga

SEQ ID NO: 178477 - DNA, 25 bp, probe
ctcgatctatgactcatttgacaga

SEQ ID NO: 178478 - DNA, 25 bp, probe
ctcgatctatgactcatttgacaga

SEQ ID NO: 178479 - DNA, 25 bp, probe
ctcgacatgtgcttgcatttctagc

SEQ ID NO: 178480 - DNA, 25 bp, probe
ctcgatcatgaccctgtgcgtgatc

SEQ ID NO: 178481 - DNA, 25 bp, probe
ctcgatatgatcaacactgcctgtg

SEQ ID NO: 178482 - DNA, 25 bp, probe
ctcgacacaacatcatcctgagtgc

SEQ ID NO: 178483 - DNA, 25 bp, probe
ctcgaccagaaccaggatggctgca

SEQ ID NO: 178484 - DNA, 25 bp, probe
ctcgaccactacatcgagcgtgcac

SEQ ID NO: 178485 - DNA, 25 bp, probe
ctcgacatgcactaaatagccgtag

SEQ ID NO: 178486 - DNA, 25 bp, probe
ctcgtgctcacatgtcagacagcgt

SEQ ID NO: 178487 - DNA, 25 bp, probe
ctcctgctctcagatcagatcaagc

SEQ ID NO: 178488 - DNA, 25 bp, probe
ctccatgtctctgagcattagattt

SEQ ID NO: 178489 - DNA, 25 bp, probe
ctccgtctcctagtgataatgctcc

SEQ ID NO: 178490 - DNA, 25 bp, probe
ctccgtctcctagtgataatgctcc

SEQ ID NO: 178491 - DNA, 25 bp, probe
ctcccactgcttctataatgactcc

SEQ ID NO: 178492 - DNA, 25 bp, probe
ctccagatcttcacgtacaacagcc

SEQ ID NO: 178493 - DNA, 25 bp, probe
ctccagccttatgcagaacacctgc

SEQ ID NO: 178494 - DNA, 25 bp, probe
ctccaggtcaaccatgacccttgca

SEQ ID NO: 178495 - DNA, 25 bp, probe
ctccagtccaactgatggcccagat

SEQ ID NO: 178496 - DNA, 25 bp, probe
ctccagataaagtaaaccatgcagt

SEQ ID NO: 178497 - DNA, 25 bp, probe
ctgctgcaaaaccaagaagccagac

SEQ ID NO: 178498 - DNA, 25 bp, probe
ctcccacagactcaaatgctcagac

SEQ ID NO: 178499 - DNA, 25 bp, probe
ctcccagagaccaacgttcaagcag

SEQ ID NO: 178500 - DNA, 25 bp, probe
ctcccagagaccaacgttcaagcag

SEQ ID NO: 178501 - DNA, 25 bp, probe
ctccgcaagccctccaaagatgagt

SEQ ID NO: 178502 - DNA, 25 bp, probe
ctcccatctaaccccaaagaagcaa

SEQ ID NO: 178503 - DNA, 25 bp, probe
ctccctgaagagcgcaatataaaaa

SEQ ID NO: 178504 - DNA, 25 bp, probe
ctccgctatgaactccttgaagaaa

SEQ ID NO: 178505 - DNA, 25 bp, probe
ctcctgactagcctctcttacagga

SEQ ID NO: 178506 - DNA, 25 bp, probe
ctcggtgactgccaccgtaggggaa

SEQ ID NO: 178507 - DNA, 25 bp, probe
ctcgcgggtcgaccgggagaggaag

SEQ ID NO: 178508 - DNA, 25 bp, probe
ctcctgaggtcctaaggaacaaggg

SEQ ID NO: 178509 - DNA, 25 bp, probe
ctcctgggagccttgaaaaaactgg

SEQ ID NO: 178510 - DNA, 25 bp, probe
ctccttgggccaccaaaggtggtgg

SEQ ID NO: 178511 - DNA, 25 bp, probe
ctccctggagcacaaagagtgtttg

SEQ ID NO: 178512 - DNA, 25 bp, probe
ctcccggacatcacatgagaggtct

SEQ ID NO: 178513 - DNA, 25 bp, probe
ctcccagcaactacagagaaggcct

SEQ ID NO: 178514 - DNA, 25 bp, probe
ctcctactcctgataaaagtcataa

SEQ ID NO: 178515 - DNA, 25 bp, probe
ctccatacccagtctcagtattggc

SEQ ID NO: 178516 - DNA, 25 bp, probe
ctccaaagccattgtaaatgtgtgt

SEQ ID NO: 178517 - DNA, 25 bp, probe
ctgccaataacattcttcgatctct

SEQ ID NO: 178518 - DNA, 25 bp, probe
ctccaaaatcatgatctccgacttt

SEQ ID NO: 178519 - DNA, 25 bp, probe
ctgaagaaaaggatcacttctctgt

SEQ ID NO: 178520 - DNA, 25 bp, probe
ctgaaaaagggcacaagggctgtcc

SEQ ID NO: 178521 - DNA, 25 bp, probe
ctgaaaataggtgacaacggcaaac

SEQ ID NO: 178522 - DNA, 25 bp, probe
ctgaaattcgtgagtcacctggagg

SEQ ID NO: 178523 - DNA, 25 bp, probe
ctcgaaattggaggactcctttgag

SEQ ID NO: 178524 - DNA, 25 bp, probe
ctcgaatctgggtggccagtttggc

SEQ ID NO: 178525 - DNA, 25 bp, probe
ctccaactgcctaaggccctttgtg

SEQ ID NO: 178526 - DNA, 25 bp, probe
ctcccacatcactaaagtccttcag

SEQ ID NO: 178527 - DNA, 25 bp, probe
ctccaacactcaatccagtcattta

SEQ ID NO: 178528 - DNA, 25 bp, probe
ctccaatgcctactcggccataaag

SEQ ID NO: 178529 - DNA, 25 bp, probe
ctccaagccgttgggcactaggcaa

SEQ ID NO: 178530 - DNA, 25 bp, probe
ctgccaaggctgtgggcaaggtcat

SEQ ID NO: 178531 - DNA, 25 bp, probe
ctccggcatgtgcaaggccggcttc

SEQ ID NO: 178532 - DNA, 25 bp, probe
ctcctggcgtcttaggaatactcca

SEQ ID NO: 178533 - DNA, 25 bp, probe
ctgcctgtgggttcggaaagcccat

SEQ ID NO: 178534 - DNA, 25 bp, probe
ctgcgtgtggctcccgaggagcacc

SEQ ID NO: 178535 - DNA, 25 bp, probe
ctcgcttggatgcctgtaaggatcc

SEQ ID NO: 178536 - DNA, 25 bp, probe
ctccactggacttgaacatcgaccc

SEQ ID NO: 178537 - DNA, 25 bp, probe
ctccaagcgactagaccggagtgtc

SEQ ID NO: 178538 - DNA, 25 bp, probe
ctccaagtagtccaccttcatttaa

SEQ ID NO: 178539 - DNA, 25 bp, probe
ctccagaaagtactccctcagtaaa

SEQ ID NO: 178540 - DNA, 25 bp, probe
ctccaaggagctactgacattccta

SEQ ID NO: 178541 - DNA, 25 bp, probe
ctcccaggacatggctgactttgcc

SEQ ID NO: 178542 - DNA, 25 bp, probe
ctcccagcagacaagttctctgcag

SEQ ID NO: 178543 - DNA, 25 bp, probe
ctcccagcagacaagttctctgcag

SEQ ID NO: 178544 - DNA, 25 bp, probe
ctcccactgcagggcttgctggaga

SEQ ID NO: 178545 - DNA, 25 bp, probe
ctccaaacaaacactggagatcaaa

SEQ ID NO: 178546 - DNA, 25 bp, probe
ctccaagaaaccaacgctgagaaaa

SEQ ID NO: 178547 - DNA, 25 bp, probe
ctcctcaggaaggacacgtatgaga

SEQ ID NO: 178548 - DNA, 25 bp, probe
ctcctccagtacacatcgtatgggg

SEQ ID NO: 178549 - DNA, 25 bp, probe
ctcctccaactcagggttggctgtg

SEQ ID NO: 178550 - DNA, 25 bp, probe
ctcccacgacgatgcggacgtgtgg

SEQ ID NO: 178551 - DNA, 25 bp, probe
ctcccacgacgatgcggacgtgtgg

SEQ ID NO: 178552 - DNA, 25 bp, probe
ctcccgcggcgacttggagagaggg

SEQ ID NO: 178553 - DNA, 25 bp, probe
ctcccaggccgaaatggtcaacgcc

SEQ ID NO: 178554 - DNA, 25 bp, probe
ctccaagccccaaatgagtccttgt

SEQ ID NO: 178555 - DNA, 25 bp, probe
ctccaaggttctggaggcccatttg

SEQ ID NO: 178556 - DNA, 25 bp, probe
ctccaaggcctttgcaaagtagttc

SEQ ID NO: 178557 - DNA, 25 bp, probe
ctccaaggtcctgtgcaaatagtgt

SEQ ID NO: 178558 - DNA, 25 bp, probe
ctccaaggtttgtctgcagttgaag

SEQ ID NO: 178559 - DNA, 25 bp, probe
ctccaagtgtttaccactttctgtt

SEQ ID NO: 178560 - DNA, 25 bp, probe
ctcctttattgtacttatcattttt

SEQ ID NO: 178561 - DNA, 25 bp, probe
ctccttttggttcctcacatattat

SEQ ID NO: 178562 - DNA, 25 bp, probe
ctccttttggttcctcacatattat

SEQ ID NO: 178563 - DNA, 25 bp, probe
ctccattttgcaaatgctgctccac

SEQ ID NO: 178564 - DNA, 25 bp, probe
ctccgtatcgaaatgatgtgccatc

SEQ ID NO: 178565 - DNA, 25 bp, probe
ctccgtatcgaaatgatgtgccatc

SEQ ID NO: 178566 - DNA, 25 bp, probe
ctcgccacatctaaatgctgccaat

SEQ ID NO: 178567 - DNA, 25 bp, probe
ctcgcacacacacacatacacagag

SEQ ID NO: 178568 - DNA, 25 bp, probe
ctcccaccacatagaatcaacatat

SEQ ID NO: 178569 - DNA, 25 bp, probe
ctcccagccaactaccagaaattac

SEQ ID NO: 178570 - DNA, 25 bp, probe
ctcccagccaactaccagaaattac

SEQ ID NO: 178571 - DNA, 25 bp, probe
ctccctgcagcaaatctccaaaatg

SEQ ID NO: 178572 - DNA, 25 bp, probe
ctcctatgcataaagctgctggaca

SEQ ID NO: 178573 - DNA, 25 bp, probe
ctcctatgcataaagctgctggaca

SEQ ID NO: 178574 - DNA, 25 bp, probe
ctcgagatcatcgtcatcctggaag

SEQ ID NO: 178575 - DNA, 25 bp, probe
ctcgagtcatcagccatgtgcctga

SEQ ID NO: 178576 - DNA, 25 bp, probe
ctcgagtcatcagccatgtgcctga

SEQ ID NO: 178577 - DNA, 25 bp, probe
ctcgatgatatagcaatggcacgtc

SEQ ID NO: 178578 - DNA, 25 bp, probe
ctcgaagcacaggagagaccagtcc

SEQ ID NO: 178579 - DNA, 25 bp, probe
ctcgatcagcaagcggggcgtgagc

SEQ ID NO: 178580 - DNA, 25 bp, probe
ctcgtcagacctgcaggggctgcag

SEQ ID NO: 178581 - DNA, 25 bp, probe
ctcgaactccatgatctgggggacg

SEQ ID NO: 178582 - DNA, 25 bp, probe
ctcgtaccaatcatcttgggacagc

SEQ ID NO: 178583 - DNA, 25 bp, probe
ctcgttccgcaaatcctaaagctcc

SEQ ID NO: 178584 - DNA, 25 bp, probe
ctccctctccaattccaaggagttc

SEQ ID NO: 178585 - DNA, 25 bp, probe
ctccacttccgacaaatgggtctca

SEQ ID NO: 178586 - DNA, 25 bp, probe
ctccccttctctgaaatgggtaaag

SEQ ID NO: 178587 - DNA, 25 bp, probe
ctccctgttgtctcaaagcggtacc

SEQ ID NO: 178588 - DNA, 25 bp, probe
ctccgttattccgaaaggggcacag

SEQ ID NO: 178589 - DNA, 25 bp, probe
ctccttcatttctctcaagggaaat

SEQ ID NO: 178590 - DNA, 25 bp, probe
ctcctacatatttttcaacttaatt

SEQ ID NO: 178591 - DNA, 25 bp, probe
ctcctactacattgatgtaaaacaa

SEQ ID NO: 178592 - DNA, 25 bp, probe
ctcctttgaccttgttcaatcacta

SEQ ID NO: 178593 - DNA, 25 bp, probe
ctccttcgagctggtttatagactg

SEQ ID NO: 178594 - DNA, 25 bp, probe
ctccttcgagctggtttatagactg

SEQ ID NO: 178595 - DNA, 25 bp, probe
ccctcttcaaggaccttaactggag

SEQ ID NO: 178596 - DNA, 25 bp, probe
ccctcttcaaggaccttaactggag

SEQ ID NO: 178597 - DNA, 25 bp, probe
tcctctttaaggaccgacccagagg

SEQ ID NO: 178598 - DNA, 25 bp, probe
ctcctttaaggagcaggtgcccatg

SEQ ID NO: 178599 - DNA, 25 bp, probe
ctcccttgacggggaggcctggcag

SEQ ID NO: 178600 - DNA, 25 bp, probe
ctcccttcgatggggaggacgagga

SEQ ID NO: 178601 - DNA, 25 bp, probe
ctcccctctgtggggcagtatctgg

SEQ ID NO: 178602 - DNA, 25 bp, probe
ctccccgctggcaccagtcagcggg

SEQ ID NO: 178603 - DNA, 25 bp, probe
tttcctcctttcaaccgagactatt

SEQ ID NO: 178604 - DNA, 25 bp, probe
ctcccattgtgtgggcaccggaggg

SEQ ID NO: 178605 - DNA, 25 bp, probe
ctcccaggagtacgacaagatgcgg

SEQ ID NO: 178606 - DNA, 25 bp, probe
ctcccatgggttctccatatcgaga

SEQ ID NO: 178607 - DNA, 25 bp, probe
ctcccatgggttctccatatcgaga

SEQ ID NO: 178608 - DNA, 25 bp, probe
ctcccataatttttgtcattctgtg

SEQ ID NO: 178609 - DNA, 25 bp, probe
ctccgctttcttttatagctgcttc

SEQ ID NO: 178610 - DNA, 25 bp, probe
ctcccatttttgatgaaagctttga

SEQ ID NO: 178611 - DNA, 25 bp, probe
ctcccctgtttgacgacagtgcatt

SEQ ID NO: 178612 - DNA, 25 bp, probe
ctccaactgctcttcacgaagtgac

SEQ ID NO: 178613 - DNA, 25 bp, probe
ctccaagatcatcatcactgacttc

SEQ ID NO: 178614 - DNA, 25 bp, probe
ctccagagatgcgcacctagtgagc

SEQ ID NO: 178615 - DNA, 25 bp, probe
ctccagcataaaacctagtgagcta

SEQ ID NO: 178616 - DNA, 25 bp, probe
ctcccagagaaccctactgtgtcat

SEQ ID NO: 178617 - DNA, 25 bp, probe
ctcctacagaaactcacagccaaat

SEQ ID NO: 178618 - DNA, 25 bp, probe
ctcctacagaaactcacagccaaat

SEQ ID NO: 178619 - DNA, 25 bp, probe
ctccataccgaactccgaagagtgt

SEQ ID NO: 178620 - DNA, 25 bp, probe
ctcctacttctatccgaactggaca

SEQ ID NO: 178621 - DNA, 25 bp, probe
ctccgccttgtaaaaccactggaca

SEQ ID NO: 178622 - DNA, 25 bp, probe
ctccgccaggctaaaagccttggtc

SEQ ID NO: 178623 - DNA, 25 bp, probe
ctccggcaccagagaaccgtggatg

SEQ ID NO: 178624 - DNA, 25 bp, probe
ctcctgaactcgatgatgaccgtgg

SEQ ID NO: 178625 - DNA, 25 bp, probe
ctcctggactggattgagggcaagg

SEQ ID NO: 178626 - DNA, 25 bp, probe
ctcctggactggattgagggcaagg

SEQ ID NO: 178627 - DNA, 25 bp, probe
ctcccgtcatccagggagaccagag

SEQ ID NO: 178628 - DNA, 25 bp, probe
ctcgcctttcctgggaggatcaagc

SEQ ID NO: 178629 - DNA, 25 bp, probe
ctcgcctttcctgggaggatcaagc

SEQ ID NO: 178630 - DNA, 25 bp, probe
ctcccttgtacttgtcaagtcgaca

SEQ ID NO: 178631 - DNA, 25 bp, probe
ctcccatttcctagcaaaatcagaa

SEQ ID NO: 178632 - DNA, 25 bp, probe
ctcccatttcctgagaccacagaga

SEQ ID NO: 178633 - DNA, 25 bp, probe
ctccctcatatacacagacccagga

SEQ ID NO: 178634 - DNA, 25 bp, probe
ctcgctcatcaatggggacgacatg

SEQ ID NO: 178635 - DNA, 25 bp, probe
ctcctatccaaagctacggatgagc

SEQ ID NO: 178636 - DNA, 25 bp, probe
ctcctgtcccaggattagcagagtg

SEQ ID NO: 178637 - DNA, 25 bp, probe
ctcgctgccaccagaaagggtgtgg

SEQ ID NO: 178638 - DNA, 25 bp, probe
ctccccattgggaacagggtgattg

SEQ ID NO: 178639 - DNA, 25 bp, probe
ctccccttcaggatgcaagttccat

SEQ ID NO: 178640 - DNA, 25 bp, probe
ctcccattctcagtgggctgcagtt

SEQ ID NO: 178641 - DNA, 25 bp, probe
ctcccttctatgacgagaatgatgc

SEQ ID NO: 178642 - DNA, 25 bp, probe
ctccgcttttgttgcatcactatgt

SEQ ID NO: 178643 - DNA, 25 bp, probe
ctcccttattatccactgctaatgt

SEQ ID NO: 178644 - DNA, 25 bp, probe
ctccctgttttcttctgtaattata

SEQ ID NO: 178645 - DNA, 25 bp, probe
ctcccactttctctttttgatgtgg

SEQ ID NO: 178646 - DNA, 25 bp, probe
ctcccacttgtagttcttatgctga

SEQ ID NO: 178647 - DNA, 25 bp, probe
ctccccttttgtttctcagtaacat

SEQ ID NO: 178648 - DNA, 25 bp, probe
ctgccacccaattgtgaaccctaaa

SEQ ID NO: 178649 - DNA, 25 bp, probe
cgccatccaggtttaaccctgcaag

SEQ ID NO: 178650 - DNA, 25 bp, probe
ctcctccggaacgtgttgactgaag

SEQ ID NO: 178651 - DNA, 25 bp, probe
ctccctgaggactggcttgacaggg

SEQ ID NO: 178652 - DNA, 25 bp, probe
ctcccttccagctggtggagcggac

SEQ ID NO: 178653 - DNA, 25 bp, probe
ctccctctccacgagagtcaacagg

SEQ ID NO: 178654 - DNA, 25 bp, probe
ctccctctccacgagagtcaacagg

SEQ ID NO: 178655 - DNA, 25 bp, probe
ctccctgtgccagaagatcgagcag

SEQ ID NO: 178656 - DNA, 25 bp, probe
ctccggcatcactgtggccgagcaa

SEQ ID NO: 178657 - DNA, 25 bp, probe
ctccatgaatcccaatggcctgcac

SEQ ID NO: 178658 - DNA, 25 bp, probe
ctccgagagcagcttgagcacatca

SEQ ID NO: 178659 - DNA, 25 bp, probe
ctccaggaacatctactcagcagac

SEQ ID NO: 178660 - DNA, 25 bp, probe
ctcctgtacaccgtcattcacagat

SEQ ID NO: 178661 - DNA, 25 bp, probe
ctcctctagctctgctgcataaaat

SEQ ID NO: 178662 - DNA, 25 bp, probe
ctcctaagcctgcctcagatacaag

SEQ ID NO: 178663 - DNA, 25 bp, probe
ctcctagagcaggtccataccaagt

SEQ ID NO: 178664 - DNA, 25 bp, probe
ctcctggttagtacattctcagagg

SEQ ID NO: 178665 - DNA, 25 bp, probe
ctcctggttcatggaagccatagag

SEQ ID NO: 178666 - DNA, 25 bp, probe
ctcctggttcatggaagccatagag

SEQ ID NO: 178667 - DNA, 25 bp, probe
ctccctttgagtcagccacagacag

SEQ ID NO: 178668 - DNA, 25 bp, probe
ctccctttgagtcagccacagacag

SEQ ID NO: 178669 - DNA, 25 bp, probe
ctccctttgaggccgacaatgagga

SEQ ID NO: 178670 - DNA, 25 bp, probe
ctccctaggaagtgccagtgcagcg

SEQ ID NO: 178671 - DNA, 25 bp, probe
ctccccacgataagcaccagtggga

SEQ ID NO: 178672 - DNA, 25 bp, probe
ctccctcacttggacactcagggga

SEQ ID NO: 178673 - DNA, 25 bp, probe
ctccctggcgcttaccgaggaggag

SEQ ID NO: 178674 - DNA, 25 bp, probe
ctcgccgtggcttatggggtagcag

SEQ ID NO: 178675 - DNA, 25 bp, probe
ctcccagggctgtgtggatctgaca

SEQ ID NO: 178676 - DNA, 25 bp, probe
ctccgcaagagtctgtcttcgatga

SEQ ID NO: 178677 - DNA, 25 bp, probe
ctcccaagagctttgttggatgaga

SEQ ID NO: 178678 - DNA, 25 bp, probe
ctccccaggctctagtgcaggagga

SEQ ID NO: 178679 - DNA, 25 bp, probe
ctccccagcctaaggaggagccgcc

SEQ ID NO: 178680 - DNA, 25 bp, probe
ctccccagcctaaggaggagccgcc

SEQ ID NO: 178681 - DNA, 25 bp, probe
ctccccagcctaaggaggagccgcc

SEQ ID NO: 178682 - DNA, 25 bp, probe
ctccctctgccagtcgggagagcca

SEQ ID NO: 178683 - DNA, 25 bp, probe
ctcctgactgccatctggcacaagt

SEQ ID NO: 178684 - DNA, 25 bp, probe
ctccgagtcactcatgtgcaaaatt

SEQ ID NO: 178685 - DNA, 25 bp, probe
ctcctggtgactgatggacgagtgt

SEQ ID NO: 178686 - DNA, 25 bp, probe
ctccaggcctctgcaaggctagtct

SEQ ID NO: 178687 - DNA, 25 bp, probe
ctccaggcctctgcaaggctagtct

SEQ ID NO: 178688 - DNA, 25 bp, probe
ctccctgccattgatggtctggatt

SEQ ID NO: 178689 - DNA, 25 bp, probe
ctcccatctcaggcaaggtgtagta

SEQ ID NO: 178690 - DNA, 25 bp, probe
ctccagatctcagtaaggtacggag

SEQ ID NO: 178691 - DNA, 25 bp, probe
ctcccaataatgaagtgtggccaga

SEQ ID NO: 178692 - DNA, 25 bp, probe
ctccgcaataattcaccagaccaga

SEQ ID NO: 178693 - DNA, 25 bp, probe
ctcctaatcaacaactcagcaccgt

SEQ ID NO: 178694 - DNA, 25 bp, probe
ctcctcactaatgcacttgactagt

SEQ ID NO: 178695 - DNA, 25 bp, probe
ctcccagctaagaggtcacttggtt

SEQ ID NO: 178696 - DNA, 25 bp, probe
ctccactgtgaagggcgtcaatctg

SEQ ID NO: 178697 - DNA, 25 bp, probe
ctcccagtggagcaggctcagtcac

SEQ ID NO: 178698 - DNA, 25 bp, probe
ctcccagttgaggtgcgacaggcac

SEQ ID NO: 178699 - DNA, 25 bp, probe
ctcccagttgaggggcacagggctg

SEQ ID NO: 178700 - DNA, 25 bp, probe
ctccaagatggaggacccgggcagt

SEQ ID NO: 178701 - DNA, 25 bp, probe
ctccagaatcgtgtaccaggcagag

SEQ ID NO: 178702 - DNA, 25 bp, probe
ctccagccctgggtaccaagatgaa

SEQ ID NO: 178703 - DNA, 25 bp, probe
ctcccgggggaagtcacagatgaag

SEQ ID NO: 178704 - DNA, 25 bp, probe
ctcccgtggagaggaggccgtgctg

SEQ ID NO: 178705 - DNA, 25 bp, probe
ctccctggagatctgcaggcggctg

SEQ ID NO: 178706 - DNA, 25 bp, probe
ctccctggagatctgcaggcggctg

SEQ ID NO: 178707 - DNA, 25 bp, probe
ctcccaggtgacttcagtgtgtgta

SEQ ID NO: 178708 - DNA, 25 bp, probe
ctcctgggtgcagagcgtggttgta

SEQ ID NO: 178709 - DNA, 25 bp, probe
ctccgaggatgagtgcagcacgcag

SEQ ID NO: 178710 - DNA, 25 bp, probe
ctccagagcctgggctactgcatgc

SEQ ID NO: 178711 - DNA, 25 bp, probe
ctccagagtcagagtgccaagccag

SEQ ID NO: 178712 - DNA, 25 bp, probe
ctccgccatctgcaggccaagaaga

SEQ ID NO: 178713 - DNA, 25 bp, probe
ctccctagttagacacaccaagcag

SEQ ID NO: 178714 - DNA, 25 bp, probe
ctccctcagtaaagcatttgcacaa

SEQ ID NO: 178715 - DNA, 25 bp, probe
ctccctcagtaaagcatttgcacaa

SEQ ID NO: 178716 - DNA, 25 bp, probe
ctcccacagtgagacttacagacgc

SEQ ID NO: 178717 - DNA, 25 bp, probe
ctcctcactggagactacaagtggt

SEQ ID NO: 178718 - DNA, 25 bp, probe
ctcctttgtgcaaattaaatttgat

SEQ ID NO: 178719 - DNA, 25 bp, probe
ctccttatctgtgcagtacaggttg

SEQ ID NO: 178720 - DNA, 25 bp, probe
ctccttcattctctgtgaacatgta

SEQ ID NO: 178721 - DNA, 25 bp, probe
ctccctcactctcaggaaatgctga

SEQ ID NO: 178722 - DNA, 25 bp, probe
ctccctacgaccagcaaatgctgag

SEQ ID NO: 178723 - DNA, 25 bp, probe
ctcccagagaacgtctgcaacatcg

SEQ ID NO: 178724 - DNA, 25 bp, probe
ctcctgagcaaggggctgcaggtcg

SEQ ID NO: 178725 - DNA, 25 bp, probe
ctcctgagcaaggggctgcaggtcg

SEQ ID NO: 178726 - DNA, 25 bp, probe
ctccgaaagagggccaggtcctaag

SEQ ID NO: 178727 - DNA, 25 bp, probe
ctccgagagcggattgagttcctca

SEQ ID NO: 178728 - DNA, 25 bp, probe
ctccgaggggtcatgaggtccatca

SEQ ID NO: 178729 - DNA, 25 bp, probe
ctcccactgtggttttaggcgcaca

SEQ ID NO: 178730 - DNA, 25 bp, probe
ctcccagtctggtatattatttcat

SEQ ID NO: 178731 - DNA, 25 bp, probe
ctcccagtgggtgatgcttttgctg

SEQ ID NO: 178732 - DNA, 25 bp, probe
ctccccgagaggagcttcttcagcc

SEQ ID NO: 178733 - DNA, 25 bp, probe
cggcttcggtgggtattttctgcct

SEQ ID NO: 178734 - DNA, 25 bp, probe
cgcagttactggttggtgttcttcc

SEQ ID NO: 178735 - DNA, 25 bp, probe
ctgagttagtgacagggtggcagtc

SEQ ID NO: 178736 - DNA, 25 bp, probe
ctgtttcaattctggggagagcagc

SEQ ID NO: 178737 - DNA, 25 bp, probe
ctccttaattaactgggatgatctc

SEQ ID NO: 178738 - DNA, 25 bp, probe
ctcctgtaatggaacctgtggtgat

SEQ ID NO: 178739 - DNA, 25 bp, probe
ctccggaaggaattctggtttcgcg

SEQ ID NO: 178740 - DNA, 25 bp, probe
ctccagtggggccatgattggtttc

SEQ ID NO: 178741 - DNA, 25 bp, probe
ctcctgatggggcccagacggtaca

SEQ ID NO: 178742 - DNA, 25 bp, probe
ctcctgatggggcccagacggtaca

SEQ ID NO: 178743 - DNA, 25 bp, probe
ctcccatcgctgggggacggtgaac

SEQ ID NO: 178744 - DNA, 25 bp, probe
ctccgacgcggaggtggtggatgaa

SEQ ID NO: 178745 - DNA, 25 bp, probe
ctccgacgcggaggtggtggatgaa

SEQ ID NO: 178746 - DNA, 25 bp, probe
ctccagggcacggcgtgggaggggt

SEQ ID NO: 178747 - DNA, 25 bp, probe
ctccgcccaggcgagatggggtggg

SEQ ID NO: 178748 - DNA, 25 bp, probe
ctcccgctgcggaatgggcgggtgg

SEQ ID NO: 178749 - DNA, 25 bp, probe
ctccctgtgggatgggcagatgggc

SEQ ID NO: 178750 - DNA, 25 bp, probe
ctcccgactaagcgtgcgagggcct

SEQ ID NO: 178751 - DNA, 25 bp, probe
ctcccaggctgcaaggggtggactg

SEQ ID NO: 178752 - DNA, 25 bp, probe
ctcccaggctgcaaggggtggactg

SEQ ID NO: 178753 - DNA, 25 bp, probe
ctccctggccaaggagggctactga

SEQ ID NO: 178754 - DNA, 25 bp, probe
ctcccttcaggagtggaggccactg

SEQ ID NO: 178755 - DNA, 25 bp, probe
ctccctctcaggatccaagctaagc

SEQ ID NO: 178756 - DNA, 25 bp, probe
ctccctctcaggatccaagctaagc

SEQ ID NO: 178757 - DNA, 25 bp, probe
ctccctgcacaggatatcaaagctc

SEQ ID NO: 178758 - DNA, 25 bp, probe
ctgcggatcaagaagacactacaaa

SEQ ID NO: 178759 - DNA, 25 bp, probe
ctccaaaagggcttcaatgcgaagg

SEQ ID NO: 178760 - DNA, 25 bp, probe
ctccacaataggctctcaacaaatg

SEQ ID NO: 178761 - DNA, 25 bp, probe
ctccacaataggctctcaacaaatg

SEQ ID NO: 178762 - DNA, 25 bp, probe
ctccaaaccagatccaatcaaacct

SEQ ID NO: 178763 - DNA, 25 bp, probe
ctccgagcacaataaactcaaagcc

SEQ ID NO: 178764 - DNA, 25 bp, probe
ctccgaggaaaatcactcctacacg

SEQ ID NO: 178765 - DNA, 25 bp, probe
ctgaggaggaatcttacttctccac

SEQ ID NO: 178766 - DNA, 25 bp, probe
ctgagggatggacttcagcccctct

SEQ ID NO: 178767 - DNA, 25 bp, probe
ctgagggaagtggacggcaccgcta

SEQ ID NO: 178768 - DNA, 25 bp, probe
ctgagggaagtggacggcaccgcta

SEQ ID NO: 178769 - DNA, 25 bp, probe
ctgccgtggcaaggactaagggcta

SEQ ID NO: 178770 - DNA, 25 bp, probe
ctccatttgacagagctaaggccaa

SEQ ID NO: 178771 - DNA, 25 bp, probe
ctgcctggtcaagcagctacggcca

SEQ ID NO: 178772 - DNA, 25 bp, probe
ctcccgacagacgggagcagggcat

SEQ ID NO: 178773 - DNA, 25 bp, probe
ctcccaggagcaagaggagcggagc

SEQ ID NO: 178774 - DNA, 25 bp, probe
ctcctgcgggctaggcagccaggag

SEQ ID NO: 178775 - DNA, 25 bp, probe
ctcctgctcttcaaggaccggattt

SEQ ID NO: 178776 - DNA, 25 bp, probe
ctcctgcttctatgtaattggcttc

SEQ ID NO: 178777 - DNA, 25 bp, probe
ctccgattctgagtgccacattggt

SEQ ID NO: 178778 - DNA, 25 bp, probe
ctccgattctgagtgccacattggt

SEQ ID NO: 178779 - DNA, 25 bp, probe
ctgctacatgctagactgcgctatt

SEQ ID NO: 178780 - DNA, 25 bp, probe
ctgctacatgctagactgcgctatt

SEQ ID NO: 178781 - DNA, 25 bp, probe
ctgatcgctgccaatgcactcgatc

SEQ ID NO: 178782 - DNA, 25 bp, probe
ctgccaggctgcgatgcgtgctggc

SEQ ID NO: 178783 - DNA, 25 bp, probe
ctccgttgctatggatgcaggccat

SEQ ID NO: 178784 - DNA, 25 bp, probe
ctcccttctatcagtagccagtgtt

SEQ ID NO: 178785 - DNA, 25 bp, probe
ctccctgttatctgctagatctagt

SEQ ID NO: 178786 - DNA, 25 bp, probe
ctccctttatcatgtgtttctgtgt

SEQ ID NO: 178787 - DNA, 25 bp, probe
ctccgctctacatttgtgtttgtgt

SEQ ID NO: 178788 - DNA, 25 bp, probe
ctgccaactacatgtgtccttagtc

SEQ ID NO: 178789 - DNA, 25 bp, probe
ctccaagagtaagttctgctacctc

SEQ ID NO: 178790 - DNA, 25 bp, probe
ctcccggaaaagtctctgagctgct

SEQ ID NO: 178791 - DNA, 25 bp, probe
ctccagtgccaacaatcctagtgct

SEQ ID NO: 178792 - DNA, 25 bp, probe
ctccagtgccaacaatcctagtgct

SEQ ID NO: 178793 - DNA, 25 bp, probe
ctccagtgggaactcttcaaggtct

SEQ ID NO: 178794 - DNA, 25 bp, probe
ctccgctgggaagcacttgaggtag

SEQ ID NO: 178795 - DNA, 25 bp, probe
ctgcctccgggagcacttgaggtat

SEQ ID NO: 178796 - DNA, 25 bp, probe
ctccccagagtcaaccttgggtgat

SEQ ID NO: 178797 - DNA, 25 bp, probe
ctgccccagtttatcttgcgggatg

SEQ ID NO: 178798 - DNA, 25 bp, probe
ctgccccagtttatcttgcgggatg

SEQ ID NO: 178799 - DNA, 25 bp, probe
ctccctgcagtttgacttctttgag

SEQ ID NO: 178800 - DNA, 25 bp, probe
ctccctgcagtttgacttctttgag

SEQ ID NO: 178801 - DNA, 25 bp, probe
ctccctgcagtttgacttctttgag

SEQ ID NO: 178802 - DNA, 25 bp, probe
ctccctgcagtttgacttctttgag

SEQ ID NO: 178803 - DNA, 25 bp, probe
ctccgcaagttgtcctatttttgtc

SEQ ID NO: 178804 - DNA, 25 bp, probe
ctcctgggtgttcattcattttgtt

SEQ ID NO: 178805 - DNA, 25 bp, probe
ctcctgggtgttcattcattttgtt

SEQ ID NO: 178806 - DNA, 25 bp, probe
ctcctgcgggcagggaagtcttctt

SEQ ID NO: 178807 - DNA, 25 bp, probe
ctcctgctgctggcacttaaggttc

SEQ ID NO: 178808 - DNA, 25 bp, probe
ctcctcgtccaagtcagggatgtgt

SEQ ID NO: 178809 - DNA, 25 bp, probe
ctcctcgtccaagtcagggatgtgt

SEQ ID NO: 178810 - DNA, 25 bp, probe
ctcccggtgtatgcagtggtgatgc

SEQ ID NO: 178811 - DNA, 25 bp, probe
ctccctggccttgggtgggattgag

SEQ ID NO: 178812 - DNA, 25 bp, probe
ctgcctgcttactcgggaaatttgc

SEQ ID NO: 178813 - DNA, 25 bp, probe
ctgcctgcttactcgggaaatttgc

SEQ ID NO: 178814 - DNA, 25 bp, probe
ctccctttgcacgctggaacagtta

SEQ ID NO: 178815 - DNA, 25 bp, probe
ctgcccttttgagccgagattttga

SEQ ID NO: 178816 - DNA, 25 bp, probe
cgtcctttccaatacgattttctgt

SEQ ID NO: 178817 - DNA, 25 bp, probe
ccccctgaacaatccttttcagtat

SEQ ID NO: 178818 - DNA, 25 bp, probe
ctccccctgaacaatccttttcagt

SEQ ID NO: 178819 - DNA, 25 bp, probe
ctccccctgaacaatccttttcagt

SEQ ID NO: 178820 - DNA, 25 bp, probe
ctcccctattacatacatctttcaa

SEQ ID NO: 178821 - DNA, 25 bp, probe
ctcccccattgagcatgagctgtaa

SEQ ID NO: 178822 - DNA, 25 bp, probe
ctgccccgtgaaatacaggtaatga

SEQ ID NO: 178823 - DNA, 25 bp, probe
ctccctgcggagacatatcaggcga

SEQ ID NO: 178824 - DNA, 25 bp, probe
ctccctgatagaccaatcagctgtg

SEQ ID NO: 178825 - DNA, 25 bp, probe
ctccccatactccaatatgcttggc

SEQ ID NO: 178826 - DNA, 25 bp, probe
ctccctctaccacgtatatgaggtg

SEQ ID NO: 178827 - DNA, 25 bp, probe
ctccacttgttccttgtgtgagctg

SEQ ID NO: 178828 - DNA, 25 bp, probe
ctgccgattgttgacttgctagatg

SEQ ID NO: 178829 - DNA, 25 bp, probe
ctgccgattgttgacttgctagatg

SEQ ID NO: 178830 - DNA, 25 bp, probe
ctgcccattgtttggttgccagtca

SEQ ID NO: 178831 - DNA, 25 bp, probe
ctgcccattgtttggttgccagtca

SEQ ID NO: 178832 - DNA, 25 bp, probe
ctgaccattatatgccttcactggc

SEQ ID NO: 178833 - DNA, 25 bp, probe
ctgtcctaaaacgttaccagcagct

SEQ ID NO: 178834 - DNA, 25 bp, probe
ctccctcaacaaggtatacctcagt

SEQ ID NO: 178835 - DNA, 25 bp, probe
ctccataaaatgggctttcctctgt

SEQ ID NO: 178836 - DNA, 25 bp, probe
ctcctaagtcagggtgttatgtcct

SEQ ID NO: 178837 - DNA, 25 bp, probe
ctccgaagccagcggcatggtgacc

SEQ ID NO: 178838 - DNA, 25 bp, probe
ctcctgacagtccctgtcattgctg

SEQ ID NO: 178839 - DNA, 25 bp, probe
ctccagatcaggccttggcctctga

SEQ ID NO: 178840 - DNA, 25 bp, probe
ctccagcatcacttatgacctgcct

SEQ ID NO: 178841 - DNA, 25 bp, probe
ctccagcatcacttatgacctgcct

SEQ ID NO: 178842 - DNA, 25 bp, probe
ctcctgtccagtggatacagccctg

SEQ ID NO: 178843 - DNA, 25 bp, probe
ctccttccagccttgactgaagcga

SEQ ID NO: 178844 - DNA, 25 bp, probe
ctccttccatccttgactgaagcga

SEQ ID NO: 178845 - DNA, 25 bp, probe
ctcctcaacatattcgagctcaacg

SEQ ID NO: 178846 - DNA, 25 bp, probe
ctccatcaagagagctactgaagca

SEQ ID NO: 178847 - DNA, 25 bp, probe
ctccatgccaggaggcatctgttga

SEQ ID NO: 178848 - DNA, 25 bp, probe
ctcctcagctgcatggagcctggaa

SEQ ID NO: 178849 - DNA, 25 bp, probe
ctcctacatcatggtgtggctggtg

SEQ ID NO: 178850 - DNA, 25 bp, probe
ctcctacagcagcctgtgtttgagc

SEQ ID NO: 178851 - DNA, 25 bp, probe
ctgcctaaggccctttgtgtaaggt

SEQ ID NO: 178852 - DNA, 25 bp, probe
ctcctgaagccctcttgtggcaaga

SEQ ID NO: 178853 - DNA, 25 bp, probe
ctcctgaagcactccttcttggaga

SEQ ID NO: 178854 - DNA, 25 bp, probe
ctcctggagagctcctactttgatt

SEQ ID NO: 178855 - DNA, 25 bp, probe
ctgcctggagagctcctatttcaag

SEQ ID NO: 178856 - DNA, 25 bp, probe
ctgcctggagagctcctatttcaag

SEQ ID NO: 178857 - DNA, 25 bp, probe
ctcccgtaaagcttcatttgcaaga

SEQ ID NO: 178858 - DNA, 25 bp, probe
ctcccgtaaagcttcatttgcaaga

SEQ ID NO: 178859 - DNA, 25 bp, probe
ctcccctagagacctcttgtacaga

SEQ ID NO: 178860 - DNA, 25 bp, probe
ctccccaaggccgtgtgtatgaacg

SEQ ID NO: 178861 - DNA, 25 bp, probe
ctcctccaaggggtggcatggcaca

SEQ ID NO: 178862 - DNA, 25 bp, probe
ctcctccaaggggtggcatggcaca

SEQ ID NO: 178863 - DNA, 25 bp, probe
ctcctcccaaggatgagatgacctc

SEQ ID NO: 178864 - DNA, 25 bp, probe
ctcctcccaaggatgagatgacctc

SEQ ID NO: 178865 - DNA, 25 bp, probe
ctcctggccaatgtgcaggtggtcc

SEQ ID NO: 178866 - DNA, 25 bp, probe
ctcctggggatcatggtggtggcca

SEQ ID NO: 178867 - DNA, 25 bp, probe
ctccttcgtgatctggggatgtgcc

SEQ ID NO: 178868 - DNA, 25 bp, probe
ctcctctctattcctgggcagaggc

SEQ ID NO: 178869 - DNA, 25 bp, probe
ctccatgttatattctggggaaagc

SEQ ID NO: 178870 - DNA, 25 bp, probe
ctccattatgttcgtggtgtaaagt

SEQ ID NO: 178871 - DNA, 25 bp, probe
ctccacttggtggggtcaccaacta

SEQ ID NO: 178872 - DNA, 25 bp, probe
ctcctctcggtgaacagtccaaaac

SEQ ID NO: 178873 - DNA, 25 bp, probe
ctcctgccgtgaaagatgtcccagg

SEQ ID NO: 178874 - DNA, 25 bp, probe
ctcctggggagacgtgactctggtg

SEQ ID NO: 178875 - DNA, 25 bp, probe
ctccggctgcaatggtgactctgga

SEQ ID NO: 178876 - DNA, 25 bp, probe
ctcctccatcacctgaaacactgga

SEQ ID NO: 178877 - DNA, 25 bp, probe
ctcctgcctcccaataccagcagga

SEQ ID NO: 178878 - DNA, 25 bp, probe
ctcctgcctcccaataccagcagga

SEQ ID NO: 178879 - DNA, 25 bp, probe
ctgccatttccagttatcgagccaa

SEQ ID NO: 178880 - DNA, 25 bp, probe
ctgcgatcatgtccaaggattggcc

SEQ ID NO: 178881 - DNA, 25 bp, probe
ctccttgctggaatgtgtctggccc

SEQ ID NO: 178882 - DNA, 25 bp, probe
ctccttcggcatggtgtatgagggc

SEQ ID NO: 178883 - DNA, 25 bp, probe
ctccttggcaatgcatttgatggcc

SEQ ID NO: 178884 - DNA, 25 bp, probe
ctcccgacataggctttgagtctaa

SEQ ID NO: 178885 - DNA, 25 bp, probe
ctccccaaagtgtttacctaatcag

SEQ ID NO: 178886 - DNA, 25 bp, probe
ctccccaaagtggacaagaccaaag

SEQ ID NO: 178887 - DNA, 25 bp, probe
ctcctccaaaagtcataaatccaac

SEQ ID NO: 178888 - DNA, 25 bp, probe
ctcctctcaacatgggtacagcaaa

SEQ ID NO: 178889 - DNA, 25 bp, probe
ctcctgcccacgggaggacaagcaa

SEQ ID NO: 178890 - DNA, 25 bp, probe
ctcctgcccacgggaggacaagcaa

SEQ ID NO: 178891 - DNA, 25 bp, probe
ctgccagcaaacctgagggaaagag

SEQ ID NO: 178892 - DNA, 25 bp, probe
ctgcgcgaaatcctggcggggaagg

SEQ ID NO: 178893 - DNA, 25 bp, probe
ctccggagattatctcgtggatagt

SEQ ID NO: 178894 - DNA, 25 bp, probe
ctccgagagctttcccagcatggag

SEQ ID NO: 178895 - DNA, 25 bp, probe
ctccgagagctttcccagcatggag

SEQ ID NO: 178896 - DNA, 25 bp, probe
ctccagctggtcacccagatgacat

SEQ ID NO: 178897 - DNA, 25 bp, probe
ctcctgggcatcactcagaagaatt

SEQ ID NO: 178898 - DNA, 25 bp, probe
ctcctgatggccagctgatgagccc

SEQ ID NO: 178899 - DNA, 25 bp, probe
ctgcctgcggccaacatgatggctg

SEQ ID NO: 178900 - DNA, 25 bp, probe
ctcctgttcctttgggtgatcacta

SEQ ID NO: 178901 - DNA, 25 bp, probe
ctccgcttcacgtggagtatgaaga

SEQ ID NO: 178902 - DNA, 25 bp, probe
ctccgcttcacatgcagaagtgaca

SEQ ID NO: 178903 - DNA, 25 bp, probe
ctcctctacacaggcaagacagcct

SEQ ID NO: 178904 - DNA, 25 bp, probe
ctccgtgatcatgagcaaggctgcc

SEQ ID NO: 178905 - DNA, 25 bp, probe
ctccgtcatcatgaacacggctcta

SEQ ID NO: 178906 - DNA, 25 bp, probe
ctccgtcatcatgaacacggctcta

SEQ ID NO: 178907 - DNA, 25 bp, probe
ctccagattctcaaaccagaggcta

SEQ ID NO: 178908 - DNA, 25 bp, probe
ctccaaggtccattcctggtgtgag

SEQ ID NO: 178909 - DNA, 25 bp, probe
ctccagggtcagtccctggatgggt

SEQ ID NO: 178910 - DNA, 25 bp, probe
ctccactagcatctacctggaggcc

SEQ ID NO: 178911 - DNA, 25 bp, probe
ctccaggagcgtgacactggtgatc

SEQ ID NO: 178912 - DNA, 25 bp, probe
ctgctaggtggtgccctgattgttg

SEQ ID NO: 178913 - DNA, 25 bp, probe
ctgcgggctcaagccctgtcagatt

SEQ ID NO: 178914 - DNA, 25 bp, probe
ctccaggctatgtcgctcctgaagt

SEQ ID NO: 178915 - DNA, 25 bp, probe
ctcctgtgtgcttcacatcactgag

SEQ ID NO: 178916 - DNA, 25 bp, probe
ctcctctgcagagacatagctagca

SEQ ID NO: 178917 - DNA, 25 bp, probe
ctcctcgagaagccaacagagcagt

SEQ ID NO: 178918 - DNA, 25 bp, probe
ctgcctagaaacagacctgcattca

SEQ ID NO: 178919 - DNA, 25 bp, probe
ctccttgcaaccaggcagctgagac

SEQ ID NO: 178920 - DNA, 25 bp, probe
ctccttcagcatcatctggcaggaa

SEQ ID NO: 178921 - DNA, 25 bp, probe
ctcctgtcgctgcatgcgacgtgtt

SEQ ID NO: 178922 - DNA, 25 bp, probe
ctcctcctgtgtgagacctgattct

SEQ ID NO: 178923 - DNA, 25 bp, probe
ctccaggctgggcctggcctattta

SEQ ID NO: 178924 - DNA, 25 bp, probe
ctccaagtgtggctggccatccgag

SEQ ID NO: 178925 - DNA, 25 bp, probe
ctccgacaggtgcgggaccagcaga

SEQ ID NO: 178926 - DNA, 25 bp, probe
ctccacagtggtgggggcccacgag

SEQ ID NO: 178927 - DNA, 25 bp, probe
ctccagcagtggctgatttggggga

SEQ ID NO: 178928 - DNA, 25 bp, probe
ctccatgctgggggaccgtggggag

SEQ ID NO: 178929 - DNA, 25 bp, probe
ctcctctggtctgacccagaagaca

SEQ ID NO: 178930 - DNA, 25 bp, probe
ctcctgctattctgacccagaagga

SEQ ID NO: 178931 - DNA, 25 bp, probe
ctcctgtactttttccagacacttt

SEQ ID NO: 178932 - DNA, 25 bp, probe
ctcctgggctatattcctgacaaaa

SEQ ID NO: 178933 - DNA, 25 bp, probe
ctccggggatacagccatggctaag

SEQ ID NO: 178934 - DNA, 25 bp, probe
ctccggggagacagatctctcaaag

SEQ ID NO: 178935 - DNA, 25 bp, probe
ctccgtggtggaattgaccgaaagc

SEQ ID NO: 178936 - DNA, 25 bp, probe
ctcctgctgcagtggtatgagccgc

SEQ ID NO: 178937 - DNA, 25 bp, probe
ctcctgttgatggtgttattgcagc

SEQ ID NO: 178938 - DNA, 25 bp, probe
ctcctggcagtgcgtcaatcagagc

SEQ ID NO: 178939 - DNA, 25 bp, probe
ctcctggcagtgcgtcaatcagagc

SEQ ID NO: 178940 - DNA, 25 bp, probe
ctcctggcctgcattgacagcagtg

SEQ ID NO: 178941 - DNA, 25 bp, probe
ctcctactctgtttgcaagcgatgc

SEQ ID NO: 178942 - DNA, 25 bp, probe
ctcctttcagtgttcaacctggctg

SEQ ID NO: 178943 - DNA, 25 bp, probe
ctcctttgaggagaccacatcctgc

SEQ ID NO: 178944 - DNA, 25 bp, probe
ctcctttatatagttccctcacttg

SEQ ID NO: 178945 - DNA, 25 bp, probe
ctcctttatatagttccctcacttg

SEQ ID NO: 178946 - DNA, 25 bp, probe
ctgcttttactaaaccagtacttcg

SEQ ID NO: 178947 - DNA, 25 bp, probe
ctgcttatctagctacacgggaccc

SEQ ID NO: 178948 - DNA, 25 bp, probe
ctgcttttaccatcacattggagcc

SEQ ID NO: 178949 - DNA, 25 bp, probe
ccttaggagtcttaacattggccag

SEQ ID NO: 178950 - DNA, 25 bp, probe
cctaatgcaggtctcagaacggccc

SEQ ID NO: 178951 - DNA, 25 bp, probe
cgtactcgttaccaacacgtcactg

SEQ ID NO: 178952 - DNA, 25 bp, probe
cgtccttttatcaaacccaagctga

SEQ ID NO: 178953 - DNA, 25 bp, probe
cgtcctgacctataacctgtaggaa

SEQ ID NO: 178954 - DNA, 25 bp, probe
cgtcctgacctataacctgtaggaa

SEQ ID NO: 178955 - DNA, 25 bp, probe
cggcacaacctgtttgagcctgaag

SEQ ID NO: 178956 - DNA, 25 bp, probe
ctccaaactcgcttaggtagaaact

SEQ ID NO: 178957 - DNA, 25 bp, probe
ctccatacttcggtagcagtcgaca

SEQ ID NO: 178958 - DNA, 25 bp, probe
ctccacctagctgtagcagacacgc

SEQ ID NO: 178959 - DNA, 25 bp, probe
ctccccaagattgagcggagtgcct

SEQ ID NO: 178960 - DNA, 25 bp, probe
ctccacgccgaaaaatgaagtgcac

SEQ ID NO: 178961 - DNA, 25 bp, probe
ctccaccatcctaaagatccagtcc

SEQ ID NO: 178962 - DNA, 25 bp, probe
ctccatctgcccttaaatgctgtat

SEQ ID NO: 178963 - DNA, 25 bp, probe
ctccatctcctgtccaatgacatgt

SEQ ID NO: 178964 - DNA, 25 bp, probe
ctccatctcctgtccaatgacatgt

SEQ ID NO: 178965 - DNA, 25 bp, probe
ctcctgtccatgtgaaggtgtggag

SEQ ID NO: 178966 - DNA, 25 bp, probe
ctcctgtccatgtgaaggtgtggag

SEQ ID NO: 178967 - DNA, 25 bp, probe
ctcctgggacaactagggctgcgaa

SEQ ID NO: 178968 - DNA, 25 bp, probe
ctccttggtcattttggtgtgctat

SEQ ID NO: 178969 - DNA, 25 bp, probe
ctccttggtcattttggtgtgctat

SEQ ID NO: 178970 - DNA, 25 bp, probe
ctccttcaatatttctagtagcaca

SEQ ID NO: 178971 - DNA, 25 bp, probe
ctccttcacatcttcttaggcagtc

SEQ ID NO: 178972 - DNA, 25 bp, probe
ctcctgccactatctttagagccaa

SEQ ID NO: 178973 - DNA, 25 bp, probe
ctcctcacagttgccatgtagaccc

SEQ ID NO: 178974 - DNA, 25 bp, probe
ctcctccaccatggaagtcagttcc

SEQ ID NO: 178975 - DNA, 25 bp, probe
ctcctccaaataccagatactgttt

SEQ ID NO: 178976 - DNA, 25 bp, probe
ctcctccaaataccagatactgttt

SEQ ID NO: 178977 - DNA, 25 bp, probe
ctcctaacttcactgtattctttac

SEQ ID NO: 178978 - DNA, 25 bp, probe
ctcctgaggcttgtggatttctatg

SEQ ID NO: 178979 - DNA, 25 bp, probe
ctgccaaggcctgtgacagaattcg

SEQ ID NO: 178980 - DNA, 25 bp, probe
ctgcctgggcgttaacagcctttgg

SEQ ID NO: 178981 - DNA, 25 bp, probe
ctccgacagcgacaccaggtttgag

SEQ ID NO: 178982 - DNA, 25 bp, probe
ctccgacagcgacaccaggtttgag

SEQ ID NO: 178983 - DNA, 25 bp, probe
ctccgacagcgacaccaggtttgag

SEQ ID NO: 178984 - DNA, 25 bp, probe
ctccgcacggagaacgagctgcatg

SEQ ID NO: 178985 - DNA, 25 bp, probe
ctccgcagccgaaagcagggcatca

SEQ ID NO: 178986 - DNA, 25 bp, probe
ctccgcaccatagctgtggtgctga

SEQ ID NO: 178987 - DNA, 25 bp, probe
ctccactccaagggtttctgaccca

SEQ ID NO: 178988 - DNA, 25 bp, probe
ctccactccaagggtttctgaccca

SEQ ID NO: 178989 - DNA, 25 bp, probe
ctccagggatcagtagttcctaccc

SEQ ID NO: 178990 - DNA, 25 bp, probe
ctccagggatcagtagttcctaccc

SEQ ID NO: 178991 - DNA, 25 bp, probe
ctgccaggttcttattttctaccac

SEQ ID NO: 178992 - DNA, 25 bp, probe
ctgactgttcctctttttaagaaca

SEQ ID NO: 178993 - DNA, 25 bp, probe
ctgagcttcccaaagtttcctatgt

SEQ ID NO: 178994 - DNA, 25 bp, probe
ctgagcttcgtcaaagaattcaaat

SEQ ID NO: 178995 - DNA, 25 bp, probe
ctcctcgtgctggaagaattcaaga

SEQ ID NO: 178996 - DNA, 25 bp, probe
ctcctcgtgctggaagaattcaaga

SEQ ID NO: 178997 - DNA, 25 bp, probe
ctccacgcttgatctacttcaagag

SEQ ID NO: 178998 - DNA, 25 bp, probe
ctccaagtggagtcccttcattcag

SEQ ID NO: 178999 - DNA, 25 bp, probe
ctccaagcagaggacgccctcatac

SEQ ID NO: 179000 - DNA, 25 bp, probe
ctcctgactggtgctgcagcaccga

SEQ ID NO: 179001 - DNA, 25 bp, probe
ctcctgtgcagaatggccgaccaga

SEQ ID NO: 179002 - DNA, 25 bp, probe
ctccatcatcaaatggccaatctag

SEQ ID NO: 179003 - DNA, 25 bp, probe
ctccagcatcaacgacgaggtcatg

SEQ ID NO: 179004 - DNA, 25 bp, probe
ctccagcatcaacgacgaggtcatg

SEQ ID NO: 179005 - DNA, 25 bp, probe
ctccagcatcaacgatgagatgctc

SEQ ID NO: 179006 - DNA, 25 bp, probe
ctccgatgaaagcagccatttctcc

SEQ ID NO: 179007 - DNA, 25 bp, probe
ctccatgcgaaaacagccattgcct

SEQ ID NO: 179008 - DNA, 25 bp, probe
ctccatgcgaaaacagccattgcct

SEQ ID NO: 179009 - DNA, 25 bp, probe
ctcctggaagattgaggttcctgga

SEQ ID NO: 179010 - DNA, 25 bp, probe
ctgccttaagtttctgttccatgga

SEQ ID NO: 179011 - DNA, 25 bp, probe
ctccttataaggacatttccatgta

SEQ ID NO: 179012 - DNA, 25 bp, probe
ctcctgaaatcagacatgttcctgt

SEQ ID NO: 179013 - DNA, 25 bp, probe
ctccaggttcacaactgtatccaga

SEQ ID NO: 179014 - DNA, 25 bp, probe
ctccaggttcacaactgtatccaga

SEQ ID NO: 179015 - DNA, 25 bp, probe
ctccagtgcagtctactttgctgag

SEQ ID NO: 179016 - DNA, 25 bp, probe
ctccatgtgcgtccatatttaacat

SEQ ID NO: 179017 - DNA, 25 bp, probe
ctccatttatagcacctcagacatt

SEQ ID NO: 179018 - DNA, 25 bp, probe
ctccatttcctgtatcgctaattta

SEQ ID NO: 179019 - DNA, 25 bp, probe
ctccatttcctgtatcgctaattta

SEQ ID NO: 179020 - DNA, 25 bp, probe
ctccttatcctggacatgaatgtat

SEQ ID NO: 179021 - DNA, 25 bp, probe
ctcctgtccaatgacatgtgtgcta

SEQ ID NO: 179022 - DNA, 25 bp, probe
ctgccgtctcaagaagtgcttccgg

SEQ ID NO: 179023 - DNA, 25 bp, probe
ctgccgttagcgactgcgacgttcg

SEQ ID NO: 179024 - DNA, 25 bp, probe
ctccgttgccatatgggtggtgtgg

SEQ ID NO: 179025 - DNA, 25 bp, probe
ctccagggccccgaggagggatggg

SEQ ID NO: 179026 - DNA, 25 bp, probe
ctgccgcaacccagacggggatgag

SEQ ID NO: 179027 - DNA, 25 bp, probe
cccaggaagccgcacggggtgaagc

SEQ ID NO: 179028 - DNA, 25 bp, probe
cgccggaaactgcaagttccgacgc

SEQ ID NO: 179029 - DNA, 25 bp, probe
ctgcctacaaaacacagtgaacgac

SEQ ID NO: 179030 - DNA, 25 bp, probe
ctgccttgaagacctaagtcatagc

SEQ ID NO: 179031 - DNA, 25 bp, probe
ctcctcgacggcctgaactgcaggc

SEQ ID NO: 179032 - DNA, 25 bp, probe
ctcctggacatgcggtactgaggtg

SEQ ID NO: 179033 - DNA, 25 bp, probe
ctcctggatcagggtggatcatgtg

SEQ ID NO: 179034 - DNA, 25 bp, probe
ctcctggatcagggtggatcatgtg

SEQ ID NO: 179035 - DNA, 25 bp, probe
ctccagctgatccagatgttatgct

SEQ ID NO: 179036 - DNA, 25 bp, probe
ctccatcgtctacgttatctgcatc

SEQ ID NO: 179037 - DNA, 25 bp, probe
ctcctcacattgccagttatcattc

SEQ ID NO: 179038 - DNA, 25 bp, probe
ctcctcatcattctagtcatcatta

SEQ ID NO: 179039 - DNA, 25 bp, probe
ctcctgccaacattcagtctggtat

SEQ ID NO: 179040 - DNA, 25 bp, probe
ctccagcccaaattgctttgcagat

SEQ ID NO: 179041 - DNA, 25 bp, probe
ctccagctctactttatgtcctgaa

SEQ ID NO: 179042 - DNA, 25 bp, probe
ctccagcattcccaaagctcttaat

SEQ ID NO: 179043 - DNA, 25 bp, probe
ctccatatgtgagcactatctttca

SEQ ID NO: 179044 - DNA, 25 bp, probe
ctcctctctgaagctatgcttatag

SEQ ID NO: 179045 - DNA, 25 bp, probe
ctcctctctgaagctatgcttatag

SEQ ID NO: 179046 - DNA, 25 bp, probe
ctcctccaagaatgacttcattggc

SEQ ID NO: 179047 - DNA, 25 bp, probe
ctcctgcgaaagtgccttctaggtg

SEQ ID NO: 179048 - DNA, 25 bp, probe
ctcctgcgaaagtgccttctaggtg

SEQ ID NO: 179049 - DNA, 25 bp, probe
ctccttgaaatgtgactcttcagag

SEQ ID NO: 179050 - DNA, 25 bp, probe
ctcctggacttgagaccttccatat

SEQ ID NO: 179051 - DNA, 25 bp, probe
ctcctgtccttcaagaacctccagg

SEQ ID NO: 179052 - DNA, 25 bp, probe
ctcctgtccttcaagaacctccagg

SEQ ID NO: 179053 - DNA, 25 bp, probe
ctcctgttgttaagaagcgtccctg

SEQ ID NO: 179054 - DNA, 25 bp, probe
ctccatgctttggggaaggccaccc

SEQ ID NO: 179055 - DNA, 25 bp, probe
ctgccatattacgacttagtgccct

SEQ ID NO: 179056 - DNA, 25 bp, probe
ctgcctatgtaggcagcaccggccc

SEQ ID NO: 179057 - DNA, 25 bp, probe
ctgccacatgatcggaccatcggct

SEQ ID NO: 179058 - DNA, 25 bp, probe
ctgcgcagcatgcaagagctcagca

SEQ ID NO: 179059 - DNA, 25 bp, probe
ctgccagcaggaagccctgcaacca

SEQ ID NO: 179060 - DNA, 25 bp, probe
ctccaggagcaagtcctgtgtggca

SEQ ID NO: 179061 - DNA, 25 bp, probe
ctgcctgggaacacgtgtgcacatg

SEQ ID NO: 179062 - DNA, 25 bp, probe
ctcctgaggtgttcacgcagtgcac

SEQ ID NO: 179063 - DNA, 25 bp, probe
ctcctggggctatggctgtgcccag

SEQ ID NO: 179064 - DNA, 25 bp, probe
ctcctgaggtgctcgagggagccat

SEQ ID NO: 179065 - DNA, 25 bp, probe
ctccaggactgctcagaggggcgat

SEQ ID NO: 179066 - DNA, 25 bp, probe
ctccaggactgctcagaggggcgat

SEQ ID NO: 179067 - DNA, 25 bp, probe
ctgccttcagtggggagggggtgcc

SEQ ID NO: 179068 - DNA, 25 bp, probe
ctcctccagactcgagagggctgag

SEQ ID NO: 179069 - DNA, 25 bp, probe
ctcctcggcagggtaggcctgatga

SEQ ID NO: 179070 - DNA, 25 bp, probe
ctcctagccgaggaggctgacgatg

SEQ ID NO: 179071 - DNA, 25 bp, probe
ctcctaccatgcctaagctactgag

SEQ ID NO: 179072 - DNA, 25 bp, probe
ctcctatggtcacagacttctggcc

SEQ ID NO: 179073 - DNA, 25 bp, probe
ctcctgctgagtggtccacattctg

SEQ ID NO: 179074 - DNA, 25 bp, probe
ctcctgtacttgaccacattgaatt

SEQ ID NO: 179075 - DNA, 25 bp, probe
ctgcctttttgcatcaacatagtaa

SEQ ID NO: 179076 - DNA, 25 bp, probe
ctccactctcttctcaaatggctga

SEQ ID NO: 179077 - DNA, 25 bp, probe
ctccactctcttctcaaatggctga

SEQ ID NO: 179078 - DNA, 25 bp, probe
ctccaaactgctctcctagggaatg

SEQ ID NO: 179079 - DNA, 25 bp, probe
ctccaaactgctctcctagggaatg

SEQ ID NO: 179080 - DNA, 25 bp, probe
ctccaaactgctctcctagggaatg

SEQ ID NO: 179081 - DNA, 25 bp, probe
ctccatacctctctgtgggaagaga

SEQ ID NO: 179082 - DNA, 25 bp, probe
ctcctccctctggctgggatatgga

SEQ ID NO: 179083 - DNA, 25 bp, probe
ctcctcctgtcgccagctgaggagg

SEQ ID NO: 179084 - DNA, 25 bp, probe
ctcctcctgcacagagcgacagagg

SEQ ID NO: 179085 - DNA, 25 bp, probe
ctcctccatctcaagggatcaaccc

SEQ ID NO: 179086 - DNA, 25 bp, probe
ctccacgatgccaaggcagaaccca

SEQ ID NO: 179087 - DNA, 25 bp, probe
ctccacgatgccaaggcagaaccca

SEQ ID NO: 179088 - DNA, 25 bp, probe
ctccagctgtgcctgagaggtactg

SEQ ID NO: 179089 - DNA, 25 bp, probe
ctccagcggtgcaatgaactatatg

SEQ ID NO: 179090 - DNA, 25 bp, probe
ctccagcaagtctgagtctgatatc

SEQ ID NO: 179091 - DNA, 25 bp, probe
ctccatcaaggctgacatcgtgcac

SEQ ID NO: 179092 - DNA, 25 bp, probe
ctccatagggaagcctgtgtctcct

SEQ ID NO: 179093 - DNA, 25 bp, probe
ctgcgctccggaatccggattgccc

SEQ ID NO: 179094 - DNA, 25 bp, probe
ctgcttcgtgggtcattgtttcccc

SEQ ID NO: 179095 - DNA, 25 bp, probe
ctgcttcgagggcaggaaccccatc

SEQ ID NO: 179096 - DNA, 25 bp, probe
ctgcttcgagggcaggaaccccatc

SEQ ID NO: 179097 - DNA, 25 bp, probe
ctgcttcggggggtgagcaaacttt

SEQ ID NO: 179098 - DNA, 25 bp, probe
ctcctcgggatggtcgatcacaact

SEQ ID NO: 179099 - DNA, 25 bp, probe
cgctgagcgacgagcacgttcaatt

SEQ ID NO: 179100 - DNA, 25 bp, probe
cgtagccacggcagtgtttttggtc

SEQ ID NO: 179101 - DNA, 25 bp, probe
cgtaccacggattctctttaatatt

SEQ ID NO: 179102 - DNA, 25 bp, probe
gcagtaccaagagttccgtaaacag

SEQ ID NO: 179103 - DNA, 25 bp, probe
cggccacattcagttcttatcaaag

SEQ ID NO: 179104 - DNA, 25 bp, probe
cggtcatgattgcttttgaaaccaa

SEQ ID NO: 179105 - DNA, 25 bp, probe
ctcctgctgattgtgtgtgtgaaac

SEQ ID NO: 179106 - DNA, 25 bp, probe
ctcctgctgattgtgtgtgtgaaac

SEQ ID NO: 179107 - DNA, 25 bp, probe
ctccttgttagtggctgcatcatac

SEQ ID NO: 179108 - DNA, 25 bp, probe
ctccttgtaggggtctctcagaggt

SEQ ID NO: 179109 - DNA, 25 bp, probe
ctccatttagggatttgcttgggat

SEQ ID NO: 179110 - DNA, 25 bp, probe
ctccatgtctgaagaggatttcatt

SEQ ID NO: 179111 - DNA, 25 bp, probe
ctccaagctgcatggcaagttctgt

SEQ ID NO: 179112 - DNA, 25 bp, probe
ctccaagccattcagtgatgtcttc

SEQ ID NO: 179113 - DNA, 25 bp, probe
ctccattctatgtacagtgatgcct

SEQ ID NO: 179114 - DNA, 25 bp, probe
ctcctcagctaaacagatgtgtgct

SEQ ID NO: 179115 - DNA, 25 bp, probe
ctccaagcaaagccatatggagcat

SEQ ID NO: 179116 - DNA, 25 bp, probe
ctgccacactgaaccatatcgatga

SEQ ID NO: 179117 - DNA, 25 bp, probe
ctgccacctgcaacaaggctctgaa

SEQ ID NO: 179118 - DNA, 25 bp, probe
ctcctaattacattgctcctgaaat

SEQ ID NO: 179119 - DNA, 25 bp, probe
ctcctaattcaatgctctattatgt

SEQ ID NO: 179120 - DNA, 25 bp, probe
ctcctagagccagcctcagttgatg

SEQ ID NO: 179121 - DNA, 25 bp, probe
ctccaagatcccggtcaagtggaca

SEQ ID NO: 179122 - DNA, 25 bp, probe
ctccaggacatccaccataaggaaa

SEQ ID NO: 179123 - DNA, 25 bp, probe
ctccacgatcatcaaatccaccaga

SEQ ID NO: 179124 - DNA, 25 bp, probe
ctccatagcactccaaaagcagcca

SEQ ID NO: 179125 - DNA, 25 bp, probe
ctccatagcactccaaaagcagcca

SEQ ID NO: 179126 - DNA, 25 bp, probe
ctccatacccacaatctgagcacgc

SEQ ID NO: 179127 - DNA, 25 bp, probe
ctccaacgacatcatgctactgcag

SEQ ID NO: 179128 - DNA, 25 bp, probe
ctccaactgatccagatgctacgct

SEQ ID NO: 179129 - DNA, 25 bp, probe
ctgccacaatgcaggtgtacctgtc

SEQ ID NO: 179130 - DNA, 25 bp, probe
ctccacaagcagcggaagcctgacc

SEQ ID NO: 179131 - DNA, 25 bp, probe
ctcctcaagcactggaacacgatcc

SEQ ID NO: 179132 - DNA, 25 bp, probe
ctgcccgtgcagtgggaccagattc

SEQ ID NO: 179133 - DNA, 25 bp, probe
ctccatctccagtgggaactcttca

SEQ ID NO: 179134 - DNA, 25 bp, probe
ctccatctccagttctggaggctcc

SEQ ID NO: 179135 - DNA, 25 bp, probe
ctccagctcgaattctgtgactcca

SEQ ID NO: 179136 - DNA, 25 bp, probe
ctccagctcgaattctgtgactcca

SEQ ID NO: 179137 - DNA, 25 bp, probe
ctccaggaggctggctggaccacag

SEQ ID NO: 179138 - DNA, 25 bp, probe
ctccagaaagtcgagcagcacccac

SEQ ID NO: 179139 - DNA, 25 bp, probe
ctccaacacggaggcaatcgactgc

SEQ ID NO: 179140 - DNA, 25 bp, probe
ctccatacggaggcgccaggagtcc

SEQ ID NO: 179141 - DNA, 25 bp, probe
ctccagcacggagctgacactgttc

SEQ ID NO: 179142 - DNA, 25 bp, probe
ctccagcaaggagttcaagcgcgct

SEQ ID NO: 179143 - DNA, 25 bp, probe
ctccagtcaggatatcagtccgtga

SEQ ID NO: 179144 - DNA, 25 bp, probe
ctgctggaaggcaccatggttagag

SEQ ID NO: 179145 - DNA, 25 bp, probe
ctgcttggcctgggcctggtagagc

SEQ ID NO: 179146 - DNA, 25 bp, probe
ctgctgggcacgcccagtgagaaca

SEQ ID NO: 179147 - DNA, 25 bp, probe
gcaagtggaaccggcgaaacgacat

SEQ ID NO: 179148 - DNA, 25 bp, probe
ctgccggaacccggacaacgacatc

SEQ ID NO: 179149 - DNA, 25 bp, probe
ctccacgcagaagccgaaggtgagc

SEQ ID NO: 179150 - DNA, 25 bp, probe
ctccacgactttctgaacagtgcgc

SEQ ID NO: 179151 - DNA, 25 bp, probe
ctccaagactttccagacctggcag

SEQ ID NO: 179152 - DNA, 25 bp, probe
ctccaatgtccttatcaacaaggag

SEQ ID NO: 179153 - DNA, 25 bp, probe
ctccagtccacgttcacaaaatgtg

SEQ ID NO: 179154 - DNA, 25 bp, probe
ctccaagcctgcgtgtcataaactg

SEQ ID NO: 179155 - DNA, 25 bp, probe
ctccatatccaggtatgtccaactc

SEQ ID NO: 179156 - DNA, 25 bp, probe
ctccttcacaggatgcatcatgcaa

SEQ ID NO: 179157 - DNA, 25 bp, probe
ctgccagtcaaggcctgcatatgca

SEQ ID NO: 179158 - DNA, 25 bp, probe
ctgccagtcaaggcctgcatatgca

SEQ ID NO: 179159 - DNA, 25 bp, probe
ctgccagtcaaggcctgcatatgca

SEQ ID NO: 179160 - DNA, 25 bp, probe
ctgccatcttggacttgtcagcaaa

SEQ ID NO: 179161 - DNA, 25 bp, probe
ctccatcctgaaaagaacacaaaag

SEQ ID NO: 179162 - DNA, 25 bp, probe
ctccatcctgaaaagaacacaaaag

SEQ ID NO: 179163 - DNA, 25 bp, probe
ctccagcctctaaaggccacaaaga

SEQ ID NO: 179164 - DNA, 25 bp, probe
ctccagcctctaaaggccacaaaga

SEQ ID NO: 179165 - DNA, 25 bp, probe
ctccagcctccagagtgtacagtga

SEQ ID NO: 179166 - DNA, 25 bp, probe
ctccatggccacaggttgaagcagc

SEQ ID NO: 179167 - DNA, 25 bp, probe
ctccatggcctctaagataacagac

SEQ ID NO: 179168 - DNA, 25 bp, probe
ctccaggctctagatggcaaagccc

SEQ ID NO: 179169 - DNA, 25 bp, probe
ctccagactcgagagggctgagccc

SEQ ID NO: 179170 - DNA, 25 bp, probe
ctgcgggtggggagactgagcccct

SEQ ID NO: 179171 - DNA, 25 bp, probe
ctgcgggtggggagactgagcccct

SEQ ID NO: 179172 - DNA, 25 bp, probe
ctggtagtaaggagcacaaagacgt

SEQ ID NO: 179173 - DNA, 25 bp, probe
ctgccatgagtaagtatagaaattt

SEQ ID NO: 179174 - DNA, 25 bp, probe
ctgccagttcagttaatcaaatgtc

SEQ ID NO: 179175 - DNA, 25 bp, probe
ctccagaaggcattacagcagaagt

SEQ ID NO: 179176 - DNA, 25 bp, probe
ctccagcagcagctaaacaccgttc

SEQ ID NO: 179177 - DNA, 25 bp, probe
ctccatgagcatggcatagtccacc

SEQ ID NO: 179178 - DNA, 25 bp, probe
ctcctacatgagacacatccacaga

SEQ ID NO: 179179 - DNA, 25 bp, probe
ctcctagtgataatgctccaagtct

SEQ ID NO: 179180 - DNA, 25 bp, probe
ctcctagtgataatgctccaagtct

SEQ ID NO: 179181 - DNA, 25 bp, probe
ctgcccctgtggactctaatgatgc

SEQ ID NO: 179182 - DNA, 25 bp, probe
ctcctctctgtggtctcgtcagaga

SEQ ID NO: 179183 - DNA, 25 bp, probe
ctccactgcgaggtttgtgctcaga

SEQ ID NO: 179184 - DNA, 25 bp, probe
ctgccatcagcccgttagctgtaac

SEQ ID NO: 179185 - DNA, 25 bp, probe
ctgccatctgcaaagttcagcagta

SEQ ID NO: 179186 - DNA, 25 bp, probe
ctgcctgtgcatgacctgatcatta

SEQ ID NO: 179187 - DNA, 25 bp, probe
ctccttgctttgctgtttggtgtag

SEQ ID NO: 179188 - DNA, 25 bp, probe
ctccatctgtttggtgggggtagag

SEQ ID NO: 179189 - DNA, 25 bp, probe
ctccatcggggcagggggtatgcag

SEQ ID NO: 179190 - DNA, 25 bp, probe
ctccaccggggagggacagtctgga

SEQ ID NO: 179191 - DNA, 25 bp, probe
ctccacggggcagggatacatctcg

SEQ ID NO: 179192 - DNA, 25 bp, probe
ctccaggtggcctggtgactccatg

SEQ ID NO: 179193 - DNA, 25 bp, probe
ctgccagggtgattctggtggccct

SEQ ID NO: 179194 - DNA, 25 bp, probe
ctgccaaggtggcacaggggcctgt

SEQ ID NO: 179195 - DNA, 25 bp, probe
ctgggagggccaggcagttactcct

SEQ ID NO: 179196 - DNA, 25 bp, probe
ctccattcaggactacacgaggcgc

SEQ ID NO: 179197 - DNA, 25 bp, probe
ctccaatgaggtcaccatcatggtg

SEQ ID NO: 179198 - DNA, 25 bp, probe
ctccagtggggaactcagcaaatac

SEQ ID NO: 179199 - DNA, 25 bp, probe
cgggtcgggacaccagtgaaacttg

SEQ ID NO: 179200 - DNA, 25 bp, probe
ctgcggtggttgtgtgggaaacttc

SEQ ID NO: 179201 - DNA, 25 bp, probe
cggagtttgcgtttgaggtagttgt

SEQ ID NO: 179202 - DNA, 25 bp, probe
ctgctggttgctggattatgggtgg

SEQ ID NO: 179203 - DNA, 25 bp, probe
ctccagcttctgcagtgcattgttg

SEQ ID NO: 179204 - DNA, 25 bp, probe
ctgccactacatccaggctgagaag

SEQ ID NO: 179205 - DNA, 25 bp, probe
ctccaccagcacaaatcgaagcagg

SEQ ID NO: 179206 - DNA, 25 bp, probe
ctccaccagcacaaatcgaagcagg

SEQ ID NO: 179207 - DNA, 25 bp, probe
ctccactcgcacttatcaaacgtgt

SEQ ID NO: 179208 - DNA, 25 bp, probe
ctccactcgcacttatcaaacgtgt

SEQ ID NO: 179209 - DNA, 25 bp, probe
ctccactatagttcatcaagactta

SEQ ID NO: 179210 - DNA, 25 bp, probe
ctgccatcgatcttgcaccaagact

SEQ ID NO: 179211 - DNA, 25 bp, probe
ctgccatcgatcttgcaccaagact

SEQ ID NO: 179212 - DNA, 25 bp, probe
ctccatgagctcttatgccagaacc

SEQ ID NO: 179213 - DNA, 25 bp, probe
ctgctggagtatacaccaactgccc

SEQ ID NO: 179214 - DNA, 25 bp, probe
ctgctggagtatacaccaactgccc

SEQ ID NO: 179215 - DNA, 25 bp, probe
ctgctggagtatacaccaactgccc

SEQ ID NO: 179216 - DNA, 25 bp, probe
ctgctgtggttgcagccacaggggc

SEQ ID NO: 179217 - DNA, 25 bp, probe
ctgaggccaagcccgaaggacctag

SEQ ID NO: 179218 - DNA, 25 bp, probe
ctgcgtcgaagacagaatggacagt

SEQ ID NO: 179219 - DNA, 25 bp, probe
ctgcggagaacacccttggtggctt

SEQ ID NO: 179220 - DNA, 25 bp, probe
ctgcggagctacgttttgcagggct

SEQ ID NO: 179221 - DNA, 25 bp, probe
ctgcgcggttctatgttaaagccac

SEQ ID NO: 179222 - DNA, 25 bp, probe
ctgccctgtgactgcttgtaaagct

SEQ ID NO: 179223 - DNA, 25 bp, probe
ctgccctgtgactgcttgtaaagct

SEQ ID NO: 179224 - DNA, 25 bp, probe
ctgcccagaccccttatatgaagta

SEQ ID NO: 179225 - DNA, 25 bp, probe
ctgcctctgtccatttcaagggtga

SEQ ID NO: 179226 - DNA, 25 bp, probe
ctccttcctactcaaagaggtgacg

SEQ ID NO: 179227 - DNA, 25 bp, probe
ctccatgtccccagaaatgatggca

SEQ ID NO: 179228 - DNA, 25 bp, probe
ctcctactctacagcattaaagact

SEQ ID NO: 179229 - DNA, 25 bp, probe
ctccacactagatctgttagaacct

SEQ ID NO: 179230 - DNA, 25 bp, probe
ctccacacagacccatgttaatgac

SEQ ID NO: 179231 - DNA, 25 bp, probe
ctgactcacaagacctttcaaccag

SEQ ID NO: 179232 - DNA, 25 bp, probe
ctccatacagagtctcttccaacga

SEQ ID NO: 179233 - DNA, 25 bp, probe
ctccttcagaacttggccaaggcat

SEQ ID NO: 179234 - DNA, 25 bp, probe
ctccttcagaacttggccaaggcat

SEQ ID NO: 179235 - DNA, 25 bp, probe
ctccttcagtgagattgccagcgcc

SEQ ID NO: 179236 - DNA, 25 bp, probe
ctccttcagtgagattgccagcgcc

SEQ ID NO: 179237 - DNA, 25 bp, probe
ctccttcgagctggtcagccagatc

SEQ ID NO: 179238 - DNA, 25 bp, probe
ctccttctggcgcaagagaacattt

SEQ ID NO: 179239 - DNA, 25 bp, probe
ctccagcctgggcagcagagcaaca

SEQ ID NO: 179240 - DNA, 25 bp, probe
ctgctaactgtgccccagcagtaca

SEQ ID NO: 179241 - DNA, 25 bp, probe
ctccaagctgagcacgctcgtggaa

SEQ ID NO: 179242 - DNA, 25 bp, probe
ctccaagtgtgccaggccaggacag

SEQ ID NO: 179243 - DNA, 25 bp, probe
ctccacggtgagggccgatgtctgg

SEQ ID NO: 179244 - DNA, 25 bp, probe
ctccacggtgagggccgatgtctgg

SEQ ID NO: 179245 - DNA, 25 bp, probe
ctccacaggagagactggttcggct

SEQ ID NO: 179246 - DNA, 25 bp, probe
ctgcaacgagccggacgtttcgaat

SEQ ID NO: 179247 - DNA, 25 bp, probe
ctgagacctcgcgagactttcggtc

SEQ ID NO: 179248 - DNA, 25 bp, probe
ctgctgtccctggggattatcctgt

SEQ ID NO: 179249 - DNA, 25 bp, probe
ctgctttcttgggttaatccatgtt

SEQ ID NO: 179250 - DNA, 25 bp, probe
ctgccattcttgtcctaaagcaatt

SEQ ID NO: 179251 - DNA, 25 bp, probe
ctccatgattattagaagaccaact

SEQ ID NO: 179252 - DNA, 25 bp, probe
ctccatgattattagaagaccaact

SEQ ID NO: 179253 - DNA, 25 bp, probe
ctgccacttaaagaatatcacacat

SEQ ID NO: 179254 - DNA, 25 bp, probe
ctccaccataaagcaactgctggca

SEQ ID NO: 179255 - DNA, 25 bp, probe
ctccaaagccaagacgcggagcgcc

SEQ ID NO: 179256 - DNA, 25 bp, probe
ctccaaagccaagacgcggagcgcc

SEQ ID NO: 179257 - DNA, 25 bp, probe
ctccaaagccaagacgcggagcgcc

SEQ ID NO: 179258 - DNA, 25 bp, probe
ctccaaagccaagacgcggagcgcc

SEQ ID NO: 179259 - DNA, 25 bp, probe
ctccaagaccaaggtggcttgggcc

SEQ ID NO: 179260 - DNA, 25 bp, probe
ctgctgcaagaggccgggccttcgg

SEQ ID NO: 179261 - DNA, 25 bp, probe
ctgctgcaagaggccgggccttcgg

SEQ ID NO: 179262 - DNA, 25 bp, probe
ctgctgcatgaacccggtgatctac

SEQ ID NO: 179263 - DNA, 25 bp, probe
ctgctgtgagggccagtatttccaa

SEQ ID NO: 179264 - DNA, 25 bp, probe
ctgcttggatctgatgtttcacgca

SEQ ID NO: 179265 - DNA, 25 bp, probe
ctgccagaacatgctgtttgagagc

SEQ ID NO: 179266 - DNA, 25 bp, probe
ctgccgcactcaggtgaaagctcac

SEQ ID NO: 179267 - DNA, 25 bp, probe
ctgcggaccaggacaagcagcgacc

SEQ ID NO: 179268 - DNA, 25 bp, probe
ctgcggactaggtggcagaggccaa

SEQ ID NO: 179269 - DNA, 25 bp, probe
ctgccgccctgaccaggatagggcg

SEQ ID NO: 179270 - DNA, 25 bp, probe
ctgccccactgagccggggagagtg

SEQ ID NO: 179271 - DNA, 25 bp, probe
ctgccccactgagccggggagagtg

SEQ ID NO: 179272 - DNA, 25 bp, probe
ctgcccacctcaggcactggaaatg

SEQ ID NO: 179273 - DNA, 25 bp, probe
ctccagcacccaggcctgggaagag

SEQ ID NO: 179274 - DNA, 25 bp, probe
ctccaccctgccatctgaggaaggg

SEQ ID NO: 179275 - DNA, 25 bp, probe
ctccataccccgccaaggaaaggca

SEQ ID NO: 179276 - DNA, 25 bp, probe
ctgcccccggcgcaatgagtggggc

SEQ ID NO: 179277 - DNA, 25 bp, probe
ctgccacccaaggggaagcttcgga

SEQ ID NO: 179278 - DNA, 25 bp, probe
ctccacttctagggtgctagcgttg

SEQ ID NO: 179279 - DNA, 25 bp, probe
ctccattgttcagggtaaaggctgt

SEQ ID NO: 179280 - DNA, 25 bp, probe
ctgcctggtgtctgctgtaaatgtt

SEQ ID NO: 179281 - DNA, 25 bp, probe
ctgcctggtgtctgctgtaaatgtt

SEQ ID NO: 179282 - DNA, 25 bp, probe
ctccagtgttcatcttatgaagtta

SEQ ID NO: 179283 - DNA, 25 bp, probe
ctccagcatctttattttattttat

SEQ ID NO: 179284 - DNA, 25 bp, probe
ctccatcctttttgttatatgggat

SEQ ID NO: 179285 - DNA, 25 bp, probe
ctccatcctttttgttatatgggat

SEQ ID NO: 179286 - DNA, 25 bp, probe
ctgccaccatgttttgtaatttgag

SEQ ID NO: 179287 - DNA, 25 bp, probe
ctgccaccgtgtataaatcctggtg

SEQ ID NO: 179288 - DNA, 25 bp, probe
ctccaccggaggcaattgcactgtg

SEQ ID NO: 179289 - DNA, 25 bp, probe
ctccaccatggaagtcagttcctgg

SEQ ID NO: 179290 - DNA, 25 bp, probe
ctccacctcgaagtagtggctgcgg

SEQ ID NO: 179291 - DNA, 25 bp, probe
ctccacctcgaagtagtggctgcgg

SEQ ID NO: 179292 - DNA, 25 bp, probe
ctccacagtcgtagtcagtgctgtc

SEQ ID NO: 179293 - DNA, 25 bp, probe
ctccacatgtccacaggtgttgcat

SEQ ID NO: 179294 - DNA, 25 bp, probe
ctccagatgaggacaagagggacaa

SEQ ID NO: 179295 - DNA, 25 bp, probe
ctccagagatggtcacatgacccag

SEQ ID NO: 179296 - DNA, 25 bp, probe
ctccagcaactgggatgacgacagc

SEQ ID NO: 179297 - DNA, 25 bp, probe
ctccagcaactgggatgacgacagc

SEQ ID NO: 179298 - DNA, 25 bp, probe
ctccacctctgggaagctgagcatg

SEQ ID NO: 179299 - DNA, 25 bp, probe
ctccacctcatggcttaaggagacc

SEQ ID NO: 179300 - DNA, 25 bp, probe
ctgccaccacagctctaaggaagac

SEQ ID NO: 179301 - DNA, 25 bp, probe
ctgccaccactgggcaaacagaaga

SEQ ID NO: 179302 - DNA, 25 bp, probe
ctgccaggcctacgaattggccgac

SEQ ID NO: 179303 - DNA, 25 bp, probe
ctgccaggataacgaattggaaaag

SEQ ID NO: 179304 - DNA, 25 bp, probe
ctgcctggtgaactgtatgaaataa

SEQ ID NO: 179305 - DNA, 25 bp, probe
ctgcctgtgtgcttatgttaaaaaa

SEQ ID NO: 179306 - DNA, 25 bp, probe
ctgcctctgtctatttcaatataga

SEQ ID NO: 179307 - DNA, 25 bp, probe
ctgcttgcttctacctggcaaaacg

SEQ ID NO: 179308 - DNA, 25 bp, probe
ctgctttacttaagatgcgattacg

SEQ ID NO: 179309 - DNA, 25 bp, probe
ctgccactatctttagagccaataa

SEQ ID NO: 179310 - DNA, 25 bp, probe
ctccaatatgctagtaaacacaaga

SEQ ID NO: 179311 - DNA, 25 bp, probe
ctccagcctggataacagagcgaga

SEQ ID NO: 179312 - DNA, 25 bp, probe
ctccagcctgggtgacagagtgaga

SEQ ID NO: 179313 - DNA, 25 bp, probe
ctccagcctgggtgacagagtgaga

SEQ ID NO: 179314 - DNA, 25 bp, probe
ctccagcctgggtgacagagtgaga

SEQ ID NO: 179315 - DNA, 25 bp, probe
ctccagcctgggtgacagagtgaga

SEQ ID NO: 179316 - DNA, 25 bp, probe
ctccagcctgggcgacagagcgaga

SEQ ID NO: 179317 - DNA, 25 bp, probe
ctccatgctctgctgtggccagagc

SEQ ID NO: 179318 - DNA, 25 bp, probe
ctccatgccagcatctgggggcaag

SEQ ID NO: 179319 - DNA, 25 bp, probe
ctccatctcagccattggggcaggg

SEQ ID NO: 179320 - DNA, 25 bp, probe
ctccatctcagccattggggcaggg

SEQ ID NO: 179321 - DNA, 25 bp, probe
ctccacagctgccttcagtgggtag

SEQ ID NO: 179322 - DNA, 25 bp, probe
ctccacagctgccttcagtgggtag

SEQ ID NO: 179323 - DNA, 25 bp, probe
ctccacgtagctgtgctgggcatga

SEQ ID NO: 179324 - DNA, 25 bp, probe
ctccactgaatcgctggactgtgaa

SEQ ID NO: 179325 - DNA, 25 bp, probe
ctccagcgagtcccaggagagtgac

SEQ ID NO: 179326 - DNA, 25 bp, probe
ctccagctggtcctgggacatgcag

SEQ ID NO: 179327 - DNA, 25 bp, probe
ctccagtgtgcgttggaatcacctg

SEQ ID NO: 179328 - DNA, 25 bp, probe
ctccagttctggaggctccagtggc

SEQ ID NO: 179329 - DNA, 25 bp, probe
ctgccacttcccaggtaagcaggag

SEQ ID NO: 179330 - DNA, 25 bp, probe
ctgcccttcaccatagacacgatgg

SEQ ID NO: 179331 - DNA, 25 bp, probe
ctgcctcacatagcttacaagccag

SEQ ID NO: 179332 - DNA, 25 bp, probe
ctgccatcatctaaccattacagcc

SEQ ID NO: 179333 - DNA, 25 bp, probe
ctgccacctataaatctatcagcat

SEQ ID NO: 179334 - DNA, 25 bp, probe
ctgccacggatcgaatggtacttac

SEQ ID NO: 179335 - DNA, 25 bp, probe
ctgccactggtttcaggatactcat

SEQ ID NO: 179336 - DNA, 25 bp, probe
ctgctacgggcgtctggagaagctg

SEQ ID NO: 179337 - DNA, 25 bp, probe
ctgctgcggttacctggatgggcga

SEQ ID NO: 179338 - DNA, 25 bp, probe
ctccatggttacgtcagtcgtgtgc

SEQ ID NO: 179339 - DNA, 25 bp, probe
ctccatggttacgtcagtcgtgtgc

SEQ ID NO: 179340 - DNA, 25 bp, probe
ctccatgtggtagctcctttggcaa

SEQ ID NO: 179341 - DNA, 25 bp, probe
ctccaggaggaacactttgatgcaa

SEQ ID NO: 179342 - DNA, 25 bp, probe
ctgccaagaggaacgacttctgtaa

SEQ ID NO: 179343 - DNA, 25 bp, probe
ctgcccaaggaccagtatttgtcac

SEQ ID NO: 179344 - DNA, 25 bp, probe
ctgccctagtgggtatctcttagac

SEQ ID NO: 179345 - DNA, 25 bp, probe
ctgcccttgttggtgcatggttcta

SEQ ID NO: 179346 - DNA, 25 bp, probe
ctgcccggtgatgctgttgatttct

SEQ ID NO: 179347 - DNA, 25 bp, probe
ctccagggatcagctgtgtgtgtgt

SEQ ID NO: 179348 - DNA, 25 bp, probe
ctgccagggcagtgctagtgagctg

SEQ ID NO: 179349 - DNA, 25 bp, probe
ctgcctgggctaatgctcaaagctg

SEQ ID NO: 179350 - DNA, 25 bp, probe
ctgcctggctctgtctgaacagaag

SEQ ID NO: 179351 - DNA, 25 bp, probe
ctgcttgactattattaccacatac

SEQ ID NO: 179352 - DNA, 25 bp, probe
ctgtttctgaaagtagccccattca

SEQ ID NO: 179353 - DNA, 25 bp, probe
ctgactcttgaacttacccacaata

SEQ ID NO: 179354 - DNA, 25 bp, probe
ctgcctctataaaaacgtcgcacat

SEQ ID NO: 179355 - DNA, 25 bp, probe
ctgcctcaagagaaacctacggagc

SEQ ID NO: 179356 - DNA, 25 bp, probe
ctgccttgagagtgacccaaagatg

SEQ ID NO: 179357 - DNA, 25 bp, probe
ctgccttgacagttcatcttcaggt

SEQ ID NO: 179358 - DNA, 25 bp, probe
ctgcctatagcagccattgtggatg

SEQ ID NO: 179359 - DNA, 25 bp, probe
ctgcctatagcagccattgtggatg

SEQ ID NO: 179360 - DNA, 25 bp, probe
ctgcctgcatagcacaccttagatg

SEQ ID NO: 179361 - DNA, 25 bp, probe
ctgcctgcatagcacaccttagatg

SEQ ID NO: 179362 - DNA, 25 bp, probe
ctccagcgatgtacgcactgtcagt

SEQ ID NO: 179363 - DNA, 25 bp, probe
ctgccaggaattggagcctcagttc

SEQ ID NO: 179364 - DNA, 25 bp, probe
ctgccggttggggcacatcagttct

SEQ ID NO: 179365 - DNA, 25 bp, probe
ctgcctggccgggcaggaggttctc

SEQ ID NO: 179366 - DNA, 25 bp, probe
ctgcttgggggagaggcgtttgcca

SEQ ID NO: 179367 - DNA, 25 bp, probe
ctgccgtgtgggttagtcgggtgcc

SEQ ID NO: 179368 - DNA, 25 bp, probe
ctgcggtgttgggagagtctttgtg

SEQ ID NO: 179369 - DNA, 25 bp, probe
ctgcgttgtttgtgtgttctatggg

SEQ ID NO: 179370 - DNA, 25 bp, probe
ctgcccttaaatgcttccttgggca

SEQ ID NO: 179371 - DNA, 25 bp, probe
ctgcctttaaggacttcctgttggc

SEQ ID NO: 179372 - DNA, 25 bp, probe
ctgcttaaaaaggctcatccattct

SEQ ID NO: 179373 - DNA, 25 bp, probe
ctgctgtaaacgtcgggctgatcct

SEQ ID NO: 179374 - DNA, 25 bp, probe
ctgccttctacgtggtcgagtgcat

SEQ ID NO: 179375 - DNA, 25 bp, probe
ctgccatggtcagagggggatgtca

SEQ ID NO: 179376 - DNA, 25 bp, probe
ctccagctgccagacggtggatgtg

SEQ ID NO: 179377 - DNA, 25 bp, probe
ctccagccgcagcgatgtctggagc

SEQ ID NO: 179378 - DNA, 25 bp, probe
ctccatgcacagccagcagattcga

SEQ ID NO: 179379 - DNA, 25 bp, probe
ctccaacaggcgcttcgcgaggagc

SEQ ID NO: 179380 - DNA, 25 bp, probe
gctctaacggggacaacgggaccat

SEQ ID NO: 179381 - DNA, 25 bp, probe
gcgtgaacggggagccggtgaacgg

SEQ ID NO: 179382 - DNA, 25 bp, probe
gcgtgaacggggagccggtgaacgg

SEQ ID NO: 179383 - DNA, 25 bp, probe
cgttgactgggcctggcctttgaaa

SEQ ID NO: 179384 - DNA, 25 bp, probe
ctgtagaatagcctgtggcctttgc

SEQ ID NO: 179385 - DNA, 25 bp, probe
ctgctaaaaggcctcggattctgtc

SEQ ID NO: 179386 - DNA, 25 bp, probe
ctgccaacaacctgggcattgtgtt

SEQ ID NO: 179387 - DNA, 25 bp, probe
ctgccatgtatatccgaggctttgg

SEQ ID NO: 179388 - DNA, 25 bp, probe
ctgccatggacatatggggccttgg

SEQ ID NO: 179389 - DNA, 25 bp, probe
ctgcctgcgcaatcaagaggtcaag

SEQ ID NO: 179390 - DNA, 25 bp, probe
ctgcctccacaccagtggagtcttc

SEQ ID NO: 179391 - DNA, 25 bp, probe
ctgcgtcctgcagaatgggagctac

SEQ ID NO: 179392 - DNA, 25 bp, probe
ctgcgtcatccgaacatcgtggagc

SEQ ID NO: 179393 - DNA, 25 bp, probe
ctgcctcatgctaagactcagtggg

SEQ ID NO: 179394 - DNA, 25 bp, probe
ctgcctatgcttggagtcataagtg

SEQ ID NO: 179395 - DNA, 25 bp, probe
ctgctgcttccaggtatctacactg

SEQ ID NO: 179396 - DNA, 25 bp, probe
ctgctgtagccagtgcagacctcac

SEQ ID NO: 179397 - DNA, 25 bp, probe
ctgctgtatggactcatccaccagg

SEQ ID NO: 179398 - DNA, 25 bp, probe
ctgcttggagaagtccccaaggcct

SEQ ID NO: 179399 - DNA, 25 bp, probe
ctgcgtggaaagggcccaagaacct

SEQ ID NO: 179400 - DNA, 25 bp, probe
gaagggaagtcatccacaaagacct

SEQ ID NO: 179401 - DNA, 25 bp, probe
gaaggaaaggaatataccacaccga

SEQ ID NO: 179402 - DNA, 25 bp, probe
gaaggaaaggaatataccacaccga

SEQ ID NO: 179403 - DNA, 25 bp, probe
gaacggaaggagattgacccaccgt

SEQ ID NO: 179404 - DNA, 25 bp, probe
gcaaggtggggctgtttcccaccga

SEQ ID NO: 179405 - DNA, 25 bp, probe
ctgaggggtgacaagtttccccaag

SEQ ID NO: 179406 - DNA, 25 bp, probe
ctgattacaagccaagtttccccaa

SEQ ID NO: 179407 - DNA, 25 bp, probe
ctgttggcccaaaggttgccctgaa

SEQ ID NO: 179408 - DNA, 25 bp, probe
ctgccatggacaaattgccttccca

SEQ ID NO: 179409 - DNA, 25 bp, probe
ctgccatggacaaattgccttccca

SEQ ID NO: 179410 - DNA, 25 bp, probe
ctgcctgtaaaatggatggcccccg

SEQ ID NO: 179411 - DNA, 25 bp, probe
ctgcccgtcaaatggatggctcccg

SEQ ID NO: 179412 - DNA, 25 bp, probe
ctgctccagtagttcgaggaccacc

SEQ ID NO: 179413 - DNA, 25 bp, probe
ctgccggctatgtcggaagacgacg

SEQ ID NO: 179414 - DNA, 25 bp, probe
ctgtgcgttcagtgtgaaaaaccag

SEQ ID NO: 179415 - DNA, 25 bp, probe
ctgctgcagtatgtagtcgaagaat

SEQ ID NO: 179416 - DNA, 25 bp, probe
ctgctcagatatcttcctcaatgag

SEQ ID NO: 179417 - DNA, 25 bp, probe
ctgcggatgtttacactgaatgaag

SEQ ID NO: 179418 - DNA, 25 bp, probe
ctgcagagtttgttgactttacctc

SEQ ID NO: 179419 - DNA, 25 bp, probe
ctgcagactgctagtgttctgtcta

SEQ ID NO: 179420 - DNA, 25 bp, probe
ctgcgagcagctaatgttctggtct

SEQ ID NO: 179421 - DNA, 25 bp, probe
ctgcgagcactggcagggctggtct

SEQ ID NO: 179422 - DNA, 25 bp, probe
ctgcgggtggagcgtggtccagaga

SEQ ID NO: 179423 - DNA, 25 bp, probe
ctgcgggtggagcgtggtccagaga

SEQ ID NO: 179424 - DNA, 25 bp, probe
ctgcgccgggaaattgagatccagg

SEQ ID NO: 179425 - DNA, 25 bp, probe
ctgccccgaaagtgctgactatggg

SEQ ID NO: 179426 - DNA, 25 bp, probe
ctgccccaaagaggtgtacgatgtc

SEQ ID NO: 179427 - DNA, 25 bp, probe
ctgcccaagaaacctgtcaactgtc

SEQ ID NO: 179428 - DNA, 25 bp, probe
ctgcccaaattatgtgaaatgctta

SEQ ID NO: 179429 - DNA, 25 bp, probe
ctgcggaaattcttgtgcgcacact

SEQ ID NO: 179430 - DNA, 25 bp, probe
ctgctggtcaaagtcattgcccacg

SEQ ID NO: 179431 - DNA, 25 bp, probe
ctgctcgtcaaagatcccaagcgga

SEQ ID NO: 179432 - DNA, 25 bp, probe
ctgctggtccgtgacgccaagcaga

SEQ ID NO: 179433 - DNA, 25 bp, probe
ctgtggttcggaagtctaagcaggg

SEQ ID NO: 179434 - DNA, 25 bp, probe
ctggtgctacgtctttaaggcgggg

SEQ ID NO: 179435 - DNA, 25 bp, probe
ctgacctacgataattatacgacgg

SEQ ID NO: 179436 - DNA, 25 bp, probe
ctgaaccccatgatttacagcctaa

SEQ ID NO: 179437 - DNA, 25 bp, probe
ctgaaaccgcttattgacacagaat

SEQ ID NO: 179438 - DNA, 25 bp, probe
cgaagagcatgtgaagttacaatga

SEQ ID NO: 179439 - DNA, 25 bp, probe
ctgcgggcagggaagtcttcttgca

SEQ ID NO: 179440 - DNA, 25 bp, probe
ctgccttgctgaagacagctttttc

SEQ ID NO: 179441 - DNA, 25 bp, probe
ctccacatgctgatgatgactattt

SEQ ID NO: 179442 - DNA, 25 bp, probe
ctccaatgctctctacttattactg

SEQ ID NO: 179443 - DNA, 25 bp, probe
ctgcctccttggtcacattattttg

SEQ ID NO: 179444 - DNA, 25 bp, probe
ctgcctcttatggtgatgcttattc

SEQ ID NO: 179445 - DNA, 25 bp, probe
ctgcctctcagagggttttctctcc

SEQ ID NO: 179446 - DNA, 25 bp, probe
ctgcacattctgtcaaattcttttg

SEQ ID NO: 179447 - DNA, 25 bp, probe
ctgcctgagggcaatcattctgttt

SEQ ID NO: 179448 - DNA, 25 bp, probe
ctgccaacgggttctgtgtgttcaa

SEQ ID NO: 179449 - DNA, 25 bp, probe
ctccacatgggcttcacgtggtttg

SEQ ID NO: 179450 - DNA, 25 bp, probe
ctgccacagaaggctggtgggtttt

SEQ ID NO: 179451 - DNA, 25 bp, probe
ctgcgacttcgccaagggcgttttc

SEQ ID NO: 179452 - DNA, 25 bp, probe
ctgccagtttgccaacggcatcttc

SEQ ID NO: 179453 - DNA, 25 bp, probe
ctgccagtttgccaacggcatcttc

SEQ ID NO: 179454 - DNA, 25 bp, probe
ctgaccgtagccacggcagtgtttt

SEQ ID NO: 179455 - DNA, 25 bp, probe
ctgaccagctaaacaccaatttctt

SEQ ID NO: 179456 - DNA, 25 bp, probe
ctccaagccagaaaccacatttaat

SEQ ID NO: 179457 - DNA, 25 bp, probe
ctccacttctggaactactttatct

SEQ ID NO: 179458 - DNA, 25 bp, probe
ctgcccttgcatggaaaactgttta

SEQ ID NO: 179459 - DNA, 25 bp, probe
ctccactctgcattaaagtgctaat

SEQ ID NO: 179460 - DNA, 25 bp, probe
ctccactctgcattaaagtgctaat

SEQ ID NO: 179461 - DNA, 25 bp, probe
ctgccatcttcattgctcaagttaa

SEQ ID NO: 179462 - DNA, 25 bp, probe
ctgctctggtattctcaaggcttgc

SEQ ID NO: 179463 - DNA, 25 bp, probe
ctgctctggtattctcaaggcttgc

SEQ ID NO: 179464 - DNA, 25 bp, probe
ctgccggtgatactggtagttggtg

SEQ ID NO: 179465 - DNA, 25 bp, probe
ctgccgggtgttgtatgtgtggtga

SEQ ID NO: 179466 - DNA, 25 bp, probe
ctgccaggctggattgtacgggccc

SEQ ID NO: 179467 - DNA, 25 bp, probe
ctgccagtggagacggaatctgccg

SEQ ID NO: 179468 - DNA, 25 bp, probe
ctgccatgatgcagtgggtccgcac

SEQ ID NO: 179469 - DNA, 25 bp, probe
ctgccatgatgcagtgggtccgcac

SEQ ID NO: 179470 - DNA, 25 bp, probe
ctgcagtgctggaataggtcgaacc

SEQ ID NO: 179471 - DNA, 25 bp, probe
ctgccgctgagaagggttgatcctg

SEQ ID NO: 179472 - DNA, 25 bp, probe
ctgcccaagaagtgtacatcctgac

SEQ ID NO: 179473 - DNA, 25 bp, probe
ctgccccaggagggagccatcctgg

SEQ ID NO: 179474 - DNA, 25 bp, probe
ctgcaccctggagagcgtcaggggc

SEQ ID NO: 179475 - DNA, 25 bp, probe
ctgccccagtgagatagtgagtggt

SEQ ID NO: 179476 - DNA, 25 bp, probe
ctgccaaagtagtcctggcagctgg

SEQ ID NO: 179477 - DNA, 25 bp, probe
ctgccaggagtagcgggcatctcag

SEQ ID NO: 179478 - DNA, 25 bp, probe
ctgcctgtgagtgacatcggttcag

SEQ ID NO: 179479 - DNA, 25 bp, probe
ctgcggtgagtgtatgcaccctcca

SEQ ID NO: 179480 - DNA, 25 bp, probe
ctgcggtgagtgtatgcaccctcca

SEQ ID NO: 179481 - DNA, 25 bp, probe
ctgcgggagattaaggctctgcagg

SEQ ID NO: 179482 - DNA, 25 bp, probe
ctgcgtgtgaacagggctggaggga

SEQ ID NO: 179483 - DNA, 25 bp, probe
ctgcagtactacatgggcttggccg

SEQ ID NO: 179484 - DNA, 25 bp, probe
ctgcatgaacccggtgatctacgcc

SEQ ID NO: 179485 - DNA, 25 bp, probe
ctgtacaatcgtttcatcattcggc

SEQ ID NO: 179486 - DNA, 25 bp, probe
ctgcccagactgatgagcacatctc

SEQ ID NO: 179487 - DNA, 25 bp, probe
ctgcctctgcacgaggagatagccc

SEQ ID NO: 179488 - DNA, 25 bp, probe
ctgcctctgcacgaggagatagccc

SEQ ID NO: 179489 - DNA, 25 bp, probe
ctgcctgtaacacagaagcccaggg

SEQ ID NO: 179490 - DNA, 25 bp, probe
ctgcctgtagtctgatgacgatagc

SEQ ID NO: 179491 - DNA, 25 bp, probe
ctgcctgggtcttagcattgatcag

SEQ ID NO: 179492 - DNA, 25 bp, probe
ctgcctgggtcttagcattgatcag

SEQ ID NO: 179493 - DNA, 25 bp, probe
ctgccatggcgtatgaccgctatgt

SEQ ID NO: 179494 - DNA, 25 bp, probe
ctgccattcatgtgtatcctggtat

SEQ ID NO: 179495 - DNA, 25 bp, probe
ctgcgctctcagtcagatactgcgc

SEQ ID NO: 179496 - DNA, 25 bp, probe
ctgcctcctgaactacctgagggag

SEQ ID NO: 179497 - DNA, 25 bp, probe
ctgccacctagcagacgtggggagc

SEQ ID NO: 179498 - DNA, 25 bp, probe
ctgccacccagaagactgtggatgg

SEQ ID NO: 179499 - DNA, 25 bp, probe
ctgcctctgaaaagctgctcggggt

SEQ ID NO: 179500 - DNA, 25 bp, probe
ctgcctcgcatatatcttcagagag

SEQ ID NO: 179501 - DNA, 25 bp, probe
ctgcctcgcatatatcttcagagag

SEQ ID NO: 179502 - DNA, 25 bp, probe
ctgcagctcccaaatttcaaatttt

SEQ ID NO: 179503 - DNA, 25 bp, probe
ctgcccccagaagctcaaaatccag

SEQ ID NO: 179504 - DNA, 25 bp, probe
ctgcccccagaagctcaaaatccag

SEQ ID NO: 179505 - DNA, 25 bp, probe
ctgccacccagatgctgctagagaa

SEQ ID NO: 179506 - DNA, 25 bp, probe
ctgccacccagatgctgctagagaa

SEQ ID NO: 179507 - DNA, 25 bp, probe
ctgcctggtcagtgcccagagacaa

SEQ ID NO: 179508 - DNA, 25 bp, probe
ctgcctgttggggtcggaagacaag

SEQ ID NO: 179509 - DNA, 25 bp, probe
ctgcctttggtccctggagataaga

SEQ ID NO: 179510 - DNA, 25 bp, probe
ctgcctttggtccctggagataaga

SEQ ID NO: 179511 - DNA, 25 bp, probe
ctgcctgtcacgtctgttgggcaaa

SEQ ID NO: 179512 - DNA, 25 bp, probe
ctgcctggctcttagcttggccagg

SEQ ID NO: 179513 - DNA, 25 bp, probe
ctgcctggctcttagcttggccagg

SEQ ID NO: 179514 - DNA, 25 bp, probe
ctgccaagctcttctgtttggcagg

SEQ ID NO: 179515 - DNA, 25 bp, probe
ctgccacactgtgcttggatgtgga

SEQ ID NO: 179516 - DNA, 25 bp, probe
ctgcatcggttcctggcagaggatg

SEQ ID NO: 179517 - DNA, 25 bp, probe
ctgcatgcgagtgctcatttcagga

SEQ ID NO: 179518 - DNA, 25 bp, probe
ctgctgtagatgactacttgggcca

SEQ ID NO: 179519 - DNA, 25 bp, probe
ctgccaaaggcaagcttgcaagcca

SEQ ID NO: 179520 - DNA, 25 bp, probe
ctgccaaaggcaagcttgcaagcca

SEQ ID NO: 179521 - DNA, 25 bp, probe
ctccacgggcatcatcatgtaccgc

SEQ ID NO: 179522 - DNA, 25 bp, probe
ctccacgggcatcatcatgtaccgc

SEQ ID NO: 179523 - DNA, 25 bp, probe
ctgcatcatggaggatttagtaccc

SEQ ID NO: 179524 - DNA, 25 bp, probe
ctgccggagagtgtcagaactcttc

SEQ ID NO: 179525 - DNA, 25 bp, probe
ctgcgggaggaggacgagatattta

SEQ ID NO: 179526 - DNA, 25 bp, probe
ctgaaggggaaaggcattctttcat

SEQ ID NO: 179527 - DNA, 25 bp, probe
ctgtaggcagcgttaggcgttacca

SEQ ID NO: 179528 - DNA, 25 bp, probe
ctgtaggccatgttagcactgcaaa

SEQ ID NO: 179529 - DNA, 25 bp, probe
ctgctgaccctggtagaggtcatca

SEQ ID NO: 179530 - DNA, 25 bp, probe
ctgctgcctccaagtcatgggagaa

SEQ ID NO: 179531 - DNA, 25 bp, probe
ctgctgcgaggaccaaggcgagaag

SEQ ID NO: 179532 - DNA, 25 bp, probe
ctgccacgtgcacaagctggagagg

SEQ ID NO: 179533 - DNA, 25 bp, probe
ctgccgcagaggtaactgaggagag

SEQ ID NO: 179534 - DNA, 25 bp, probe
ctgctcacagaatcacagctaagga

SEQ ID NO: 179535 - DNA, 25 bp, probe
ctgctgctcggagccaccaagagat

SEQ ID NO: 179536 - DNA, 25 bp, probe
cgtgctgcgggatcagcaacgctac

SEQ ID NO: 179537 - DNA, 25 bp, probe
ctgcttgggtatgcagcagcctgct

SEQ ID NO: 179538 - DNA, 25 bp, probe
ctgcttgggtatgcagcagcctgct

SEQ ID NO: 179539 - DNA, 25 bp, probe
ctgccagtgtgcagccacagggcta

SEQ ID NO: 179540 - DNA, 25 bp, probe
ctccacttgcttccaaggtgctagg

SEQ ID NO: 179541 - DNA, 25 bp, probe
ctccactggcctcctagaggcttag

SEQ ID NO: 179542 - DNA, 25 bp, probe
ctccactgcccaacaagaagtaatg

SEQ ID NO: 179543 - DNA, 25 bp, probe
ctgccctcacctgcaaatgagttaa

SEQ ID NO: 179544 - DNA, 25 bp, probe
ctgccctcacctgcaaatgagttaa

SEQ ID NO: 179545 - DNA, 25 bp, probe
ctgccctcacctgcaaatgagttaa

SEQ ID NO: 179546 - DNA, 25 bp, probe
ctgccgcccactgcaagatgaatga

SEQ ID NO: 179547 - DNA, 25 bp, probe
ctgccgcgacatcatccagcggatg

SEQ ID NO: 179548 - DNA, 25 bp, probe
ctgccaggatcacctccgagaaggc

SEQ ID NO: 179549 - DNA, 25 bp, probe
ctgccaggatcacctccgagaaggc

SEQ ID NO: 179550 - DNA, 25 bp, probe
ctgccagagaactcctatgcatccc

SEQ ID NO: 179551 - DNA, 25 bp, probe
ctgccggagaacgtcttcatcagcg

SEQ ID NO: 179552 - DNA, 25 bp, probe
cgtccgcaggaagctgcttcggggg

SEQ ID NO: 179553 - DNA, 25 bp, probe
ctgtccaggtgaacttctacgggga

SEQ ID NO: 179554 - DNA, 25 bp, probe
ctgcttatggaaaactctatcgggg

SEQ ID NO: 179555 - DNA, 25 bp, probe
ctgccttgtgaaagacagatgtcag

SEQ ID NO: 179556 - DNA, 25 bp, probe
ctgccttgctggagtatgctgccat

SEQ ID NO: 179557 - DNA, 25 bp, probe
ctgccattgatggtctggattccac

SEQ ID NO: 179558 - DNA, 25 bp, probe
ctgctgttgctggactgaggaccac

SEQ ID NO: 179559 - DNA, 25 bp, probe
ctgctctgtgctgggatcatggaac

SEQ ID NO: 179560 - DNA, 25 bp, probe
ctgcctgcctgacaaggtcagcatc

SEQ ID NO: 179561 - DNA, 25 bp, probe
ctgccgcactggaaggagacgcacc

SEQ ID NO: 179562 - DNA, 25 bp, probe
ctgccctgctggaggggcaccatgt

SEQ ID NO: 179563 - DNA, 25 bp, probe
ctgcccctgctggaggggcaccatg

SEQ ID NO: 179564 - DNA, 25 bp, probe
ctgcccctgctggaggggcaccatg

SEQ ID NO: 179565 - DNA, 25 bp, probe
ctgcctgtcagcagatggggccggc

SEQ ID NO: 179566 - DNA, 25 bp, probe
ctgcctgtccggaacgggaggctga

SEQ ID NO: 179567 - DNA, 25 bp, probe
ctgccttctaggacacctgtgcagg

SEQ ID NO: 179568 - DNA, 25 bp, probe
ctgcctgttgctcgatacatccgag

SEQ ID NO: 179569 - DNA, 25 bp, probe
ctgcctgttgctcgatacatccgag

SEQ ID NO: 179570 - DNA, 25 bp, probe
ctgcctgttgctcgatacatccgag

SEQ ID NO: 179571 - DNA, 25 bp, probe
ctgcgccaggcggtgatcaccgtga

SEQ ID NO: 179572 - DNA, 25 bp, probe
ctgcgccaggcggtgatcaccgtga

SEQ ID NO: 179573 - DNA, 25 bp, probe
ctgcgcctgtgggattcccacgtat

SEQ ID NO: 179574 - DNA, 25 bp, probe
ctgcctgctagggaataccagcgct

SEQ ID NO: 179575 - DNA, 25 bp, probe
ctgcctgtactgaagctgaaatgca

SEQ ID NO: 179576 - DNA, 25 bp, probe
ctgccgtcactgagtacatccagag

SEQ ID NO: 179577 - DNA, 25 bp, probe
ctgccgatattgagtccctgcagcg

SEQ ID NO: 179578 - DNA, 25 bp, probe
ctgcctgtgttgaggcagccgcggg

SEQ ID NO: 179579 - DNA, 25 bp, probe
ctgcctgtgttgaggcagccgcggg

SEQ ID NO: 179580 - DNA, 25 bp, probe
ctgccttttgtggtcatcacagccg

SEQ ID NO: 179581 - DNA, 25 bp, probe
ctgcctttatctatcatcaactgca

SEQ ID NO: 179582 - DNA, 25 bp, probe
ctgctcattttcaattccaaactct

SEQ ID NO: 179583 - DNA, 25 bp, probe
ctgcctttgatcattcaccaaacaa

SEQ ID NO: 179584 - DNA, 25 bp, probe
ctgctctcttatcccaattcaagac

SEQ ID NO: 179585 - DNA, 25 bp, probe
ctgctctcttatcccaattcaagac

SEQ ID NO: 179586 - DNA, 25 bp, probe
ctgcttctttggccaagtagtggca

SEQ ID NO: 179587 - DNA, 25 bp, probe
ctgcttcccatgggcattgcaagtg

SEQ ID NO: 179588 - DNA, 25 bp, probe
ctgcttcaacaggattctcaacgac

SEQ ID NO: 179589 - DNA, 25 bp, probe
ctgctgcacgaggttttcacctatg

SEQ ID NO: 179590 - DNA, 25 bp, probe
ctgctgcacgaggttttcacctatg

SEQ ID NO: 179591 - DNA, 25 bp, probe
ctgctgcacgaggttttcacctatg

SEQ ID NO: 179592 - DNA, 25 bp, probe
ctgctactgacctacttgactttgg

SEQ ID NO: 179593 - DNA, 25 bp, probe
ctgctactgacctacttgactttgg

SEQ ID NO: 179594 - DNA, 25 bp, probe
ctgtaaaccccttcattatgtggtc

SEQ ID NO: 179595 - DNA, 25 bp, probe
ctgtaaaccccttcattatgtggtc

SEQ ID NO: 179596 - DNA, 25 bp, probe
ctgctaaatactgtacatagatgta

SEQ ID NO: 179597 - DNA, 25 bp, probe
ctgaaccaacatgctacagtagcta

SEQ ID NO: 179598 - DNA, 25 bp, probe
ctgaaccaacatgctacagtagcta

SEQ ID NO: 179599 - DNA, 25 bp, probe
ctgaaaacctatgacaccagcttcc

SEQ ID NO: 179600 - DNA, 25 bp, probe
ctgaaggccacattaaactcactga

SEQ ID NO: 179601 - DNA, 25 bp, probe
ctgcacctgctcaagaaaaacctga

SEQ ID NO: 179602 - DNA, 25 bp, probe
ctgccacagttatcaagaatgggtc

SEQ ID NO: 179603 - DNA, 25 bp, probe
ctgccaggtctcagaagagtgcgga

SEQ ID NO: 179604 - DNA, 25 bp, probe
ctgcctacgccaggagaagttgagg

SEQ ID NO: 179605 - DNA, 25 bp, probe
ctgcctgcagcagtcacggaaggtg

SEQ ID NO: 179606 - DNA, 25 bp, probe
ctgcctgcacttacaggcgtttcga

SEQ ID NO: 179607 - DNA, 25 bp, probe
ctgctggcgtctaagtgtttgggaa

SEQ ID NO: 179608 - DNA, 25 bp, probe
ctgctgggatctttgagcttgtgga

SEQ ID NO: 179609 - DNA, 25 bp, probe
ctgctgtgtcactcatgactgttgc

SEQ ID NO: 179610 - DNA, 25 bp, probe
ctgcctgctcatgtgaggctgttgc

SEQ ID NO: 179611 - DNA, 25 bp, probe
ctgctgtccatggtagtcagtatgg

SEQ ID NO: 179612 - DNA, 25 bp, probe
ctgctgtgccagtatcggaacatcg

SEQ ID NO: 179613 - DNA, 25 bp, probe
ctgctaccagtagtgggcactcagg

SEQ ID NO: 179614 - DNA, 25 bp, probe
ctgcctccccatagggaatctgggg

SEQ ID NO: 179615 - DNA, 25 bp, probe
ctgcctccccatagggaatctgggg

SEQ ID NO: 179616 - DNA, 25 bp, probe
ctgcgtggatcctgggtactttgga

SEQ ID NO: 179617 - DNA, 25 bp, probe
ctgctgggcccagaggtgacatttg

SEQ ID NO: 179618 - DNA, 25 bp, probe
gcttcaggcggagttggtacttttg

SEQ ID NO: 179619 - DNA, 25 bp, probe
tcttcccgggaagcgactacattga

SEQ ID NO: 179620 - DNA, 25 bp, probe
ctgacccgggaagtcaggccatttt

SEQ ID NO: 179621 - DNA, 25 bp, probe
ctgacccgggaagtcaggccatttt

SEQ ID NO: 179622 - DNA, 25 bp, probe
ctgaactccagggaccagccctggt

SEQ ID NO: 179623 - DNA, 25 bp, probe
ctgcttcttggggaacggcactggg

SEQ ID NO: 179624 - DNA, 25 bp, probe
ctgcttcttgggaggagtggtgggt

SEQ ID NO: 179625 - DNA, 25 bp, probe
ctgcttcttgggaggagtggtgggt

SEQ ID NO: 179626 - DNA, 25 bp, probe
ctgccccgggtggtgagcgggcagg

SEQ ID NO: 179627 - DNA, 25 bp, probe
ctgctccctgacggggggtgaagaa

SEQ ID NO: 179628 - DNA, 25 bp, probe
ctgacctgggcctggctgttaaatt

SEQ ID NO: 179629 - DNA, 25 bp, probe
gtacctgaatttattactaactctg

SEQ ID NO: 179630 - DNA, 25 bp, probe
gcataactttttgtctttaagtcgt

SEQ ID NO: 179631 - DNA, 25 bp, probe
ctgcataactttttgtctttaagtc

SEQ ID NO: 179632 - DNA, 25 bp, probe
ctgcttacttttatctcctacatga

SEQ ID NO: 179633 - DNA, 25 bp, probe
ctgtaccttactattcctgacaaga

SEQ ID NO: 179634 - DNA, 25 bp, probe
ctgtacggatttgctctccggaagg

SEQ ID NO: 179635 - DNA, 25 bp, probe
ctgaagcggaatatctccccaaaga

SEQ ID NO: 179636 - DNA, 25 bp, probe
ctgctgaagtgcagttcccaccaaa

SEQ ID NO: 179637 - DNA, 25 bp, probe
ctgcgaaggatgatcgcccgataaa

SEQ ID NO: 179638 - DNA, 25 bp, probe
ctgcctaggatgttctgggctaata

SEQ ID NO: 179639 - DNA, 25 bp, probe
ctgcctagtgttggagggtagacca

SEQ ID NO: 179640 - DNA, 25 bp, probe
ctgcctgagtcgtgacctgctaggc

SEQ ID NO: 179641 - DNA, 25 bp, probe
ctgcctgagtcgtgacctgctaggc

SEQ ID NO: 179642 - DNA, 25 bp, probe
ctgctgcattgtgggtgatgacgta

SEQ ID NO: 179643 - DNA, 25 bp, probe
ctgctgattagtggagagtgcttat

SEQ ID NO: 179644 - DNA, 25 bp, probe
ctgctaatgcagagtaggctactcc

SEQ ID NO: 179645 - DNA, 25 bp, probe
ctgctaattcgagtcatggctaatt

SEQ ID NO: 179646 - DNA, 25 bp, probe
ctgctcaaaccattcgtctgatatc

SEQ ID NO: 179647 - DNA, 25 bp, probe
ctgccgtcacatgacgtctatcctc

SEQ ID NO: 179648 - DNA, 25 bp, probe
ctgccagtagcatatgcttgtctca

SEQ ID NO: 179649 - DNA, 25 bp, probe
ctgccagtagcatatgcttgtctca

SEQ ID NO: 179650 - DNA, 25 bp, probe
ctgcctgccagaacatgctgtttga

SEQ ID NO: 179651 - DNA, 25 bp, probe
ctgcctggcagaatcacagtctcac

SEQ ID NO: 179652 - DNA, 25 bp, probe
ctgcacatggcattaaaggacagcc

SEQ ID NO: 179653 - DNA, 25 bp, probe
ctgctcggcgtggaactgtcagaca

SEQ ID NO: 179654 - DNA, 25 bp, probe
ctgccgctgcaggaaacatttgaca

SEQ ID NO: 179655 - DNA, 25 bp, probe
ctgccatctgaggaaggggtgacaa

SEQ ID NO: 179656 - DNA, 25 bp, probe
ctgcctctctgtgtcaggggacagc

SEQ ID NO: 179657 - DNA, 25 bp, probe
ctgcactttgtccatatggtgtaca

SEQ ID NO: 179658 - DNA, 25 bp, probe
ctgccatgttgtcctgtgggattca

SEQ ID NO: 179659 - DNA, 25 bp, probe
ctgcctgattcaactgtagcctgta

SEQ ID NO: 179660 - DNA, 25 bp, probe
ctgcctgattcaactgtagcctgta

SEQ ID NO: 179661 - DNA, 25 bp, probe
ctgccgtagcatgattgcgctcatg

SEQ ID NO: 179662 - DNA, 25 bp, probe
ctgcatcgtcctttgggtatggttg

SEQ ID NO: 179663 - DNA, 25 bp, probe
ctgctacccagctggggtgggtgag

SEQ ID NO: 179664 - DNA, 25 bp, probe
ctgcctgaccactgggtgtggacgg

SEQ ID NO: 179665 - DNA, 25 bp, probe
ctgcctgggaacggggtggacgagg

SEQ ID NO: 179666 - DNA, 25 bp, probe
ctgcccggaacagagggtgggactg

SEQ ID NO: 179667 - DNA, 25 bp, probe
ctgaccgaaacagcgctgggtccac

SEQ ID NO: 179668 - DNA, 25 bp, probe
ctgacggagattaaccgtcggcaca

SEQ ID NO: 179669 - DNA, 25 bp, probe
ctgcacgaggttttcacctatggcc

SEQ ID NO: 179670 - DNA, 25 bp, probe
ctgcaggtggacgaggcccaagtcc

SEQ ID NO: 179671 - DNA, 25 bp, probe
ctgcgtggagccgggcacagaactg

SEQ ID NO: 179672 - DNA, 25 bp, probe
ctgcgtgctgactgggccagatgat

SEQ ID NO: 179673 - DNA, 25 bp, probe
ctgcggctacagaggccacacatgg

SEQ ID NO: 179674 - DNA, 25 bp, probe
ctgctggggctgaaggtcagaagta

SEQ ID NO: 179675 - DNA, 25 bp, probe
ctgcctgaggctgcaggacccagaa

SEQ ID NO: 179676 - DNA, 25 bp, probe
ctgcctgacggccaggtcatcacca

SEQ ID NO: 179677 - DNA, 25 bp, probe
ctgcctgacggccaggtcatcacca

SEQ ID NO: 179678 - DNA, 25 bp, probe
ctgccagcacccaaagtatcattgt

SEQ ID NO: 179679 - DNA, 25 bp, probe
ctgccagcacccaaagtatcattgt

SEQ ID NO: 179680 - DNA, 25 bp, probe
ctgccagcacccaaagtatcattgt

SEQ ID NO: 179681 - DNA, 25 bp, probe
ctgccagcaacctacatgaacttgg

SEQ ID NO: 179682 - DNA, 25 bp, probe
ctgcgatgctgtggtccattacttg

SEQ ID NO: 179683 - DNA, 25 bp, probe
ctgcgatgctgtggtccattacttg

SEQ ID NO: 179684 - DNA, 25 bp, probe
ctgctgagtcaacccaatagttgtt

SEQ ID NO: 179685 - DNA, 25 bp, probe
ctgctggtcaccagaatgttctgtg

SEQ ID NO: 179686 - DNA, 25 bp, probe
ctgctggatgcccagggattcctga

SEQ ID NO: 179687 - DNA, 25 bp, probe
ctgctggatgcccagggattcctga

SEQ ID NO: 179688 - DNA, 25 bp, probe
ctgctgagaggccggagaccgtatc

SEQ ID NO: 179689 - DNA, 25 bp, probe
ctgcggagcctagcagactcaggcc

SEQ ID NO: 179690 - DNA, 25 bp, probe
ctgagttccttagacacaggcagcc

SEQ ID NO: 179691 - DNA, 25 bp, probe
ctgctgtctccgtggacaggtacct

SEQ ID NO: 179692 - DNA, 25 bp, probe
ctgctgcccgtgtgcatgaaggtac

SEQ ID NO: 179693 - DNA, 25 bp, probe
ctgctgacctttgcaaaggctgccg

SEQ ID NO: 179694 - DNA, 25 bp, probe
ctgctgagggaacaccagtgctctg

SEQ ID NO: 179695 - DNA, 25 bp, probe
ctgctgcgatatgaccaccagtcac

SEQ ID NO: 179696 - DNA, 25 bp, probe
ctgctggcagagagccacgcaaaca

SEQ ID NO: 179697 - DNA, 25 bp, probe
ctgcaggcacaaagacccaaaagaa

SEQ ID NO: 179698 - DNA, 25 bp, probe
ctgcctgaaaagtcccaaggagaag

SEQ ID NO: 179699 - DNA, 25 bp, probe
ctgccgggagactgccagtggagac

SEQ ID NO: 179700 - DNA, 25 bp, probe
ctgccgggcagagtggagcagcttg

SEQ ID NO: 179701 - DNA, 25 bp, probe
ctgcccaggacagagaccttcctgg

SEQ ID NO: 179702 - DNA, 25 bp, probe
ctgcccaggacagagaccttcctgg

SEQ ID NO: 179703 - DNA, 25 bp, probe
ctgccggccacataacatttgcact

SEQ ID NO: 179704 - DNA, 25 bp, probe
ctgccctgcaactcaattgggcctt

SEQ ID NO: 179705 - DNA, 25 bp, probe
ctgccccattgtccagatgggcact

SEQ ID NO: 179706 - DNA, 25 bp, probe
ctgcccgcaatgccagagaggactc

SEQ ID NO: 179707 - DNA, 25 bp, probe
ctgcccgcaatgtgctggtgactga

SEQ ID NO: 179708 - DNA, 25 bp, probe
ctgcccgcaatgtgctggtgactga

SEQ ID NO: 179709 - DNA, 25 bp, probe
ctgcccagcctgagtggctcagatg

SEQ ID NO: 179710 - DNA, 25 bp, probe
ctgccctggcgatgggccagaggcg

SEQ ID NO: 179711 - DNA, 25 bp, probe
ctgcctctgagctgggcagaccggc

SEQ ID NO: 179712 - DNA, 25 bp, probe
ctgcaccatgactgtcgtactggat

SEQ ID NO: 179713 - DNA, 25 bp, probe
ctgccgctgacttgttgacactgcg

SEQ ID NO: 179714 - DNA, 25 bp, probe
ctgcccccttgtacagaatcgaact

SEQ ID NO: 179715 - DNA, 25 bp, probe
ctgcccgccttgaccaaggaggact

SEQ ID NO: 179716 - DNA, 25 bp, probe
ctgcccactgactccgaatgggact

SEQ ID NO: 179717 - DNA, 25 bp, probe
ctgcccactgactccgaatgggact

SEQ ID NO: 179718 - DNA, 25 bp, probe
ctgaggacctgctccgaatcggagt

SEQ ID NO: 179719 - DNA, 25 bp, probe
cgaggacccgggcaagaatgagacc

SEQ ID NO: 179720 - DNA, 25 bp, probe
ctgcggccgccgcggaataataagc

SEQ ID NO: 179721 - DNA, 25 bp, probe
ctgctggagcgggtgggaaccaaac

SEQ ID NO: 179722 - DNA, 25 bp, probe
ctgctgctgagccaaggagcggacc

SEQ ID NO: 179723 - DNA, 25 bp, probe
ctgctgctgagccaaggagcggacc

SEQ ID NO: 179724 - DNA, 25 bp, probe
ctgcggaggctacggcaggagctgc

SEQ ID NO: 179725 - DNA, 25 bp, probe
ctgccgaggccacggagtggcaaca

SEQ ID NO: 179726 - DNA, 25 bp, probe
ctgcctggagcctggaatgacaaat

SEQ ID NO: 179727 - DNA, 25 bp, probe
ctgcctggagcctggaatgacaaat

SEQ ID NO: 179728 - DNA, 25 bp, probe
ctgccattggccatggccatggcaa

SEQ ID NO: 179729 - DNA, 25 bp, probe
ctgcccaagcacaggccagatgcaa

SEQ ID NO: 179730 - DNA, 25 bp, probe
ctgcccaagaacatcacgtgcattt

SEQ ID NO: 179731 - DNA, 25 bp, probe
ctgcccaatgagactctagggtcca

SEQ ID NO: 179732 - DNA, 25 bp, probe
ctgcccagatgagctctatgacatt

SEQ ID NO: 179733 - DNA, 25 bp, probe
ctgctcaaggacgacatctactccc

SEQ ID NO: 179734 - DNA, 25 bp, probe
ctgctcaaggacgacatctactccc

SEQ ID NO: 179735 - DNA, 25 bp, probe
ctgctcaaggacgacatctactccc

SEQ ID NO: 179736 - DNA, 25 bp, probe
ctgcccagaggagctctacaacatc

SEQ ID NO: 179737 - DNA, 25 bp, probe
ctgcaactacgggcatctagaaatt

SEQ ID NO: 179738 - DNA, 25 bp, probe
ctgcaaatacatgtcctggatcaat

SEQ ID NO: 179739 - DNA, 25 bp, probe
ctgacattagctctcactttcaaga

SEQ ID NO: 179740 - DNA, 25 bp, probe
ctgaactcagttccatccgtaaaat

SEQ ID NO: 179741 - DNA, 25 bp, probe
ctgaagtgcagttcccaccaaaatg

SEQ ID NO: 179742 - DNA, 25 bp, probe
ctgcagcctgttgcccaataaattt

SEQ ID NO: 179743 - DNA, 25 bp, probe
ctgcagcctgttgcccaataaattt

SEQ ID NO: 179744 - DNA, 25 bp, probe
ctgctgcactgcatggctggagtga

SEQ ID NO: 179745 - DNA, 25 bp, probe
ctgctgcactgcatggctggagtga

SEQ ID NO: 179746 - DNA, 25 bp, probe
ctgtacacattggtggttttaggtg

SEQ ID NO: 179747 - DNA, 25 bp, probe
ctgaagctttgggtaatttagtgga

SEQ ID NO: 179748 - DNA, 25 bp, probe
ctgcaactttggaaaactcctcttc

SEQ ID NO: 179749 - DNA, 25 bp, probe
ctgaactggctgagaattctccttt

SEQ ID NO: 179750 - DNA, 25 bp, probe
ctgagttgcgagagaggtttccttc

SEQ ID NO: 179751 - DNA, 25 bp, probe
ctgcctctggtgagaggtagctcct

SEQ ID NO: 179752 - DNA, 25 bp, probe
ctgcgccgtgtcacatggtttttga

SEQ ID NO: 179753 - DNA, 25 bp, probe
ctgcaaagtctgagcaggttttgaa

SEQ ID NO: 179754 - DNA, 25 bp, probe
ctgatgaccctgagaaagtttacaa

SEQ ID NO: 179755 - DNA, 25 bp, probe
ctgcaaccctgagaagttacttcac

SEQ ID NO: 179756 - DNA, 25 bp, probe
ctgtccctggggtgtgtgaattcct

SEQ ID NO: 179757 - DNA, 25 bp, probe
ctgtcctcatagctgggtttgttca

SEQ ID NO: 179758 - DNA, 25 bp, probe
ctgctctctaacctttggtgctgat

SEQ ID NO: 179759 - DNA, 25 bp, probe
ctgctgggacaccagttgcgcagtg

SEQ ID NO: 179760 - DNA, 25 bp, probe
ctgctgggacaccagttgcgcagtg

SEQ ID NO: 179761 - DNA, 25 bp, probe
ctgcggagacgccagtgtgacctgg

SEQ ID NO: 179762 - DNA, 25 bp, probe
ctgcggagtggcaactgggagctgg

SEQ ID NO: 179763 - DNA, 25 bp, probe
ctgcctgcaagtgagcagggatggg

SEQ ID NO: 179764 - DNA, 25 bp, probe
ctgaatcgcatggccaaaggagtga

SEQ ID NO: 179765 - DNA, 25 bp, probe
ctgctcaccatctcagtgaggggca

SEQ ID NO: 179766 - DNA, 25 bp, probe
ctgccccacttagtgatgaagtcac

SEQ ID NO: 179767 - DNA, 25 bp, probe
ctgcccaccaaaggtcaatgtcaag

SEQ ID NO: 179768 - DNA, 25 bp, probe
ctgctccaccgaagcggaattctcc

SEQ ID NO: 179769 - DNA, 25 bp, probe
ctgcaccctcctagggcattgtatc

SEQ ID NO: 179770 - DNA, 25 bp, probe
ctgcaccgtcttgtagcatggttcc

SEQ ID NO: 179771 - DNA, 25 bp, probe
ctgctacgtgcaacttccacgttcc

SEQ ID NO: 179772 - DNA, 25 bp, probe
ctgctacgtgcaacttccacgttcc

SEQ ID NO: 179773 - DNA, 25 bp, probe
ctgcaacgtgaacatcttcgacgcc

SEQ ID NO: 179774 - DNA, 25 bp, probe
ctgcaactggcaaacctgccgacgc

SEQ ID NO: 179775 - DNA, 25 bp, probe
ctgcgagtgacctcacttcagagcc

SEQ ID NO: 179776 - DNA, 25 bp, probe
ctgctcggacactcagaccgagcag

SEQ ID NO: 179777 - DNA, 25 bp, probe
ctgctcggacactcagaccgagcag

SEQ ID NO: 179778 - DNA, 25 bp, probe
ctgctggaggcgtacaactgggtga

SEQ ID NO: 179779 - DNA, 25 bp, probe
ctgcgtaatggaggacactttgtga

SEQ ID NO: 179780 - DNA, 25 bp, probe
ctgcgtggggacaatccatcgtgga

SEQ ID NO: 179781 - DNA, 25 bp, probe
ctgctaatgaggacattcgtccgga

SEQ ID NO: 179782 - DNA, 25 bp, probe
ctgcggcagcagacatggcttacca

SEQ ID NO: 179783 - DNA, 25 bp, probe
ctgcgaggcaccagcagtcctgaag

SEQ ID NO: 179784 - DNA, 25 bp, probe
ctgcgaggcaccagcagtcctgaag

SEQ ID NO: 179785 - DNA, 25 bp, probe
ctgcagggccacaggtgtctgagga

SEQ ID NO: 179786 - DNA, 25 bp, probe
ctgacggacacgtcgtacacgcgag

SEQ ID NO: 179787 - DNA, 25 bp, probe
ctgacggacacgtcgtacacgcgag

SEQ ID NO: 179788 - DNA, 25 bp, probe
ctggaggaaccgcaagccggagagg

SEQ ID NO: 179789 - DNA, 25 bp, probe
ctgctggtgaacaatgcctaccggg

SEQ ID NO: 179790 - DNA, 25 bp, probe
ctgctgggaccccagctagggctgg

SEQ ID NO: 179791 - DNA, 25 bp, probe
ctgctggtacctgggtgggcaatgg

SEQ ID NO: 179792 - DNA, 25 bp, probe
ctgctggtacctgggtgggcaatgg

SEQ ID NO: 179793 - DNA, 25 bp, probe
ctgcggtagactggtgggcacttgg

SEQ ID NO: 179794 - DNA, 25 bp, probe
ctgcaggtatattgcaggggcctgg

SEQ ID NO: 179795 - DNA, 25 bp, probe
ctgcaggctggaccactggtcctta

SEQ ID NO: 179796 - DNA, 25 bp, probe
ctgctggctggatggtgagtcactt

SEQ ID NO: 179797 - DNA, 25 bp, probe
ctgctgcagctgaaatcggattcgt

SEQ ID NO: 179798 - DNA, 25 bp, probe
ctgcgcagcattatcctgtgtcagg

SEQ ID NO: 179799 - DNA, 25 bp, probe
ctgccgctaggcacgtggaggagga

SEQ ID NO: 179800 - DNA, 25 bp, probe
ctgcacactaagaacaagagggagg

SEQ ID NO: 179801 - DNA, 25 bp, probe
ctgcgcctccgaagaagacagaaga

SEQ ID NO: 179802 - DNA, 25 bp, probe
ctgcgcctccgaagaagacagaaga

SEQ ID NO: 179803 - DNA, 25 bp, probe
ctgctgagccccaagtggaacgaga

SEQ ID NO: 179804 - DNA, 25 bp, probe
ctgcgtggcccaggtgtacaaagca

SEQ ID NO: 179805 - DNA, 25 bp, probe
ctgctttgccgctgggacaagagac

SEQ ID NO: 179806 - DNA, 25 bp, probe
ctgctttgccgctgggacaagagac

SEQ ID NO: 179807 - DNA, 25 bp, probe
ctgccgacgccgccggaaagcgtgc

SEQ ID NO: 179808 - DNA, 25 bp, probe
ctgcctggtccggctggagaatgcg

SEQ ID NO: 179809 - DNA, 25 bp, probe
ctgccgtgctcagcgggaggagggg

SEQ ID NO: 179810 - DNA, 25 bp, probe
ctgttggctcacagggctgaaaggg

SEQ ID NO: 179811 - DNA, 25 bp, probe
ctgctgtttcatgtggactgaataa

SEQ ID NO: 179812 - DNA, 25 bp, probe
ctgcgttatcacctgcaacagaacg

SEQ ID NO: 179813 - DNA, 25 bp, probe
ctgcgatacgaccatcaacagagac

SEQ ID NO: 179814 - DNA, 25 bp, probe
ctgcgacagcagcctgactgacaag

SEQ ID NO: 179815 - DNA, 25 bp, probe
ctgcgacatgaccatagaggagatg

SEQ ID NO: 179816 - DNA, 25 bp, probe
ctgcaatgcaggcatcatcagggct

SEQ ID NO: 179817 - DNA, 25 bp, probe
ctgctagcgtggacatagccctgtg

SEQ ID NO: 179818 - DNA, 25 bp, probe
ctgctaaggagggacccgtgttgcc

SEQ ID NO: 179819 - DNA, 25 bp, probe
ctgctagcaaggggacacgtggttc

SEQ ID NO: 179820 - DNA, 25 bp, probe
ctgctccagtggggccatgattggt

SEQ ID NO: 179821 - DNA, 25 bp, probe
ctgcccatggatctgcaaaatggga

SEQ ID NO: 179822 - DNA, 25 bp, probe
ctgcgaatggctcattaaatcagtt

SEQ ID NO: 179823 - DNA, 25 bp, probe
ctgctgcagggcttaatacattagt

SEQ ID NO: 179824 - DNA, 25 bp, probe
ctgcgtgggcagaagatgatcatat

SEQ ID NO: 179825 - DNA, 25 bp, probe
ctgctgctggcctataagatcaagt

SEQ ID NO: 179826 - DNA, 25 bp, probe
ctgctgcctgcttcaccagaagcag

SEQ ID NO: 179827 - DNA, 25 bp, probe
ctgcgccggtgacaaagcaggtaga

SEQ ID NO: 179828 - DNA, 25 bp, probe
ctgcccggtctggagaggaagaaga

SEQ ID NO: 179829 - DNA, 25 bp, probe
ctgcccgagcccaggtgaggagaag

SEQ ID NO: 179830 - DNA, 25 bp, probe
ctgccgctgagagggggctgggaaa

SEQ ID NO: 179831 - DNA, 25 bp, probe
ctgccctggagttgtggtggaacag

SEQ ID NO: 179832 - DNA, 25 bp, probe
ctgcccatgggggttggctgaactg

SEQ ID NO: 179833 - DNA, 25 bp, probe
ctgcccttggtggtcaggatgggtg

SEQ ID NO: 179834 - DNA, 25 bp, probe
ctgccctgcgggtcacaggagggag

SEQ ID NO: 179835 - DNA, 25 bp, probe
ctgccccagggctacagactggaga

SEQ ID NO: 179836 - DNA, 25 bp, probe
ctgccccagggcacataagagcaaa

SEQ ID NO: 179837 - DNA, 25 bp, probe
ctgctccctggagactgggaaaagg

SEQ ID NO: 179838 - DNA, 25 bp, probe
ctgctccctggagactgggaaaagg

SEQ ID NO: 179839 - DNA, 25 bp, probe
ctgttttgaagctcatgggaaaatt

SEQ ID NO: 179840 - DNA, 25 bp, probe
ctgctgtttgaagcgcagcaggtgc

SEQ ID NO: 179841 - DNA, 25 bp, probe
ctgcgttcccaggtgcaggtgagct

SEQ ID NO: 179842 - DNA, 25 bp, probe
ctgcgtgtcctgggtggagatgaag

SEQ ID NO: 179843 - DNA, 25 bp, probe
ctgccccctttgatgatgatgacaa

SEQ ID NO: 179844 - DNA, 25 bp, probe
ctgccccctttgatgatgatgacaa

SEQ ID NO: 179845 - DNA, 25 bp, probe
ctgccccagatttactaaatcaatc

SEQ ID NO: 179846 - DNA, 25 bp, probe
ctgcccacaacttgccaaaacagat

SEQ ID NO: 179847 - DNA, 25 bp, probe
ctgcccactacattctcaaacaaga

SEQ ID NO: 179848 - DNA, 25 bp, probe
ctgccctctatggtcttcaacaagg

SEQ ID NO: 179849 - DNA, 25 bp, probe
ctgcccagcgagtcttccagaaggg

SEQ ID NO: 179850 - DNA, 25 bp, probe
ctgctgctaccattcttcaagagag

SEQ ID NO: 179851 - DNA, 25 bp, probe
ctgagcttcgccctggaagaagcct

SEQ ID NO: 179852 - DNA, 25 bp, probe
ctgaattcactcctgccaatggagc

SEQ ID NO: 179853 - DNA, 25 bp, probe
ctgctgggcacagtgggcaatgggc

SEQ ID NO: 179854 - DNA, 25 bp, probe
ctgcattcctgatgaccaatgggat

SEQ ID NO: 179855 - DNA, 25 bp, probe
ctgcccctgatggaactcatggaga

SEQ ID NO: 179856 - DNA, 25 bp, probe
tgtgcctaatttcatgtatcttgta

SEQ ID NO: 179857 - DNA, 25 bp, probe
ctgccgccagtgatgacggaggagt

SEQ ID NO: 179858 - DNA, 25 bp, probe
ctgctgggcgagatgccggaggggc

SEQ ID NO: 179859 - DNA, 25 bp, probe
cggtgacgtcttcttggggacgtat

SEQ ID NO: 179860 - DNA, 25 bp, probe
cgggacttcgactttgtgtcagagc

SEQ ID NO: 179861 - DNA, 25 bp, probe
ctgcggcactgtcacttgttaaaca

SEQ ID NO: 179862 - DNA, 25 bp, probe
ctgcgacccttacttttgagaacat

SEQ ID NO: 179863 - DNA, 25 bp, probe
ctgagtccactttattctggggcac

SEQ ID NO: 179864 - DNA, 25 bp, probe
ctgacttcagctactttaggggaca

SEQ ID NO: 179865 - DNA, 25 bp, probe
ctgacccctccttgtaatgtagaca

SEQ ID NO: 179866 - DNA, 25 bp, probe
ctgacccctccttgtaatgtagaca

SEQ ID NO: 179867 - DNA, 25 bp, probe
ctgctcccgtcgtagtaagaagacc

SEQ ID NO: 179868 - DNA, 25 bp, probe
ctgctcccgtggaagattaaagggc

SEQ ID NO: 179869 - DNA, 25 bp, probe
ctgctctccctgggatgtttaaaga

SEQ ID NO: 179870 - DNA, 25 bp, probe
ctgctacaaccatggtgtctaaaga

SEQ ID NO: 179871 - DNA, 25 bp, probe
ctgcttgtagccagtgatgcccaaa

SEQ ID NO: 179872 - DNA, 25 bp, probe
ctgcttgtagccagtgatgcccaaa

SEQ ID NO: 179873 - DNA, 25 bp, probe
ctgctcttcacgaagtgactccaag

SEQ ID NO: 179874 - DNA, 25 bp, probe
ctgctctacagtgtggactccagcc

SEQ ID NO: 179875 - DNA, 25 bp, probe
ctgctggaagtgagtggcccaccag

SEQ ID NO: 179876 - DNA, 25 bp, probe
ctgctggacgagcggggccagatca

SEQ ID NO: 179877 - DNA, 25 bp, probe
ctgctggacgagcggggccagatca

SEQ ID NO: 179878 - DNA, 25 bp, probe
ctgctaatcatgtgggtgagccagt

SEQ ID NO: 179879 - DNA, 25 bp, probe
ctgctacaggacgcgctggcgagat

SEQ ID NO: 179880 - DNA, 25 bp, probe
ctgctgaaacccgatgctgtggaca

SEQ ID NO: 179881 - DNA, 25 bp, probe
ctgctgtaacctctgtcttggcagg

SEQ ID NO: 179882 - DNA, 25 bp, probe
ctgctttacctggaggtcatgggtg

SEQ ID NO: 179883 - DNA, 25 bp, probe
ctgcccacaactgcagtgttgggga

SEQ ID NO: 179884 - DNA, 25 bp, probe
cgacccaacagcggcttttgggagc

SEQ ID NO: 179885 - DNA, 25 bp, probe
ctgacagctgttgtcctttggggat

SEQ ID NO: 179886 - DNA, 25 bp, probe
ctgaacgttagtctcttgcatggta

SEQ ID NO: 179887 - DNA, 25 bp, probe
ccgattatgtagctacgagatggta

SEQ ID NO: 179888 - DNA, 25 bp, probe
ctgctttatggcagtaaaatgtcta

SEQ ID NO: 179889 - DNA, 25 bp, probe
ctgctgttctgtgtacataaagtca

SEQ ID NO: 179890 - DNA, 25 bp, probe
ctgctgtttcttcaagaggagaaag

SEQ ID NO: 179891 - DNA, 25 bp, probe
ctgcagtttttcacaatggtggcat

SEQ ID NO: 179892 - DNA, 25 bp, probe
ctgctatcctttaccagagttggaa

SEQ ID NO: 179893 - DNA, 25 bp, probe
ctgcaaggctgtcaacagtcttgga

SEQ ID NO: 179894 - DNA, 25 bp, probe
ctgcaaggcagtaattccccttagg

SEQ ID NO: 179895 - DNA, 25 bp, probe
ctgcaaggatctgcagttactttga

SEQ ID NO: 179896 - DNA, 25 bp, probe
ctgcagaggaagtagccttctttgg

SEQ ID NO: 179897 - DNA, 25 bp, probe
ctgagggtactggcctagccatgtg

SEQ ID NO: 179898 - DNA, 25 bp, probe
ctgaaatgctagaaactgagccagt

SEQ ID NO: 179899 - DNA, 25 bp, probe
ctgaatatcggggtcattgccaatg

SEQ ID NO: 179900 - DNA, 25 bp, probe
ctgcacaaaggtggacatgttcagt

SEQ ID NO: 179901 - DNA, 25 bp, probe
ctgcacttacaggcgtttcgagctg

SEQ ID NO: 179902 - DNA, 25 bp, probe
ctgctcattgtggccagtttagagt

SEQ ID NO: 179903 - DNA, 25 bp, probe
ctgctcattgtggccagtttagagt

SEQ ID NO: 179904 - DNA, 25 bp, probe
ctgctgcgtcagaccagtactggga

SEQ ID NO: 179905 - DNA, 25 bp, probe
ctgcggccaacatgatggctgggct

SEQ ID NO: 179906 - DNA, 25 bp, probe
ctgcatggacaatgagaggcggccg

SEQ ID NO: 179907 - DNA, 25 bp, probe
ctgctgggcatatgaccgtgcccgc

SEQ ID NO: 179908 - DNA, 25 bp, probe
ctgcgttcaagacctcagtgaccag

SEQ ID NO: 179909 - DNA, 25 bp, probe
ctgcgaccaggatccattgagacgt

SEQ ID NO: 179910 - DNA, 25 bp, probe
ctgctgaccagctaaacaccaattt

SEQ ID NO: 179911 - DNA, 25 bp, probe
ctgctttccaaatctggcagatgtt

SEQ ID NO: 179912 - DNA, 25 bp, probe
ctgcttttctccacttggtttggaa

SEQ ID NO: 179913 - DNA, 25 bp, probe
ctgctttcctccagatcgggaagga

SEQ ID NO: 179914 - DNA, 25 bp, probe
ctgactctttcctcacagggaaggc

SEQ ID NO: 179915 - DNA, 25 bp, probe
ctgagcccttactgccggaagggca

SEQ ID NO: 179916 - DNA, 25 bp, probe
ctgtcccctgagtgctttgaattgg

SEQ ID NO: 179917 - DNA, 25 bp, probe
gtgccaacttagagttaaacgagac

SEQ ID NO: 179918 - DNA, 25 bp, probe
gtgccaacttagagttaaacgagac

SEQ ID NO: 179919 - DNA, 25 bp, probe
ctggctttatagagttaacaaaaca

SEQ ID NO: 179920 - DNA, 25 bp, probe
ctgagtgttaagcgttgagccacca

SEQ ID NO: 179921 - DNA, 25 bp, probe
ctgcccttgtatctttgcagtcatt

SEQ ID NO: 179922 - DNA, 25 bp, probe
ctgcacccatgttttcttattcaat

SEQ ID NO: 179923 - DNA, 25 bp, probe
ctgcacacggtgtctgtttatccgt

SEQ ID NO: 179924 - DNA, 25 bp, probe
ctgcccagtggagtgttcagtctgg

SEQ ID NO: 179925 - DNA, 25 bp, probe
ctgcccagctgccttgtatcagctg

SEQ ID NO: 179926 - DNA, 25 bp, probe
ctgcccagccttacagcagatgctg

SEQ ID NO: 179927 - DNA, 25 bp, probe
ctgcccagccttacagcagatgctg

SEQ ID NO: 179928 - DNA, 25 bp, probe
ctgcccagacctagcagtgacatct

SEQ ID NO: 179929 - DNA, 25 bp, probe
ctgcccaatctctgagaagcctgca

SEQ ID NO: 179930 - DNA, 25 bp, probe
ctgcccaatctctgagaagcctgca

SEQ ID NO: 179931 - DNA, 25 bp, probe
ctgcccagattctgaggttctgcac

SEQ ID NO: 179932 - DNA, 25 bp, probe
ctgcccagtatctgaaggtggagca

SEQ ID NO: 179933 - DNA, 25 bp, probe
ctgcccagtgtaccatagaccagac

SEQ ID NO: 179934 - DNA, 25 bp, probe
ctgcgtggtgtatgataacaacagc

SEQ ID NO: 179935 - DNA, 25 bp, probe
ctgcagagagtatagaatacacaaa

SEQ ID NO: 179936 - DNA, 25 bp, probe
ctgcgcagcctctggataacagcat

SEQ ID NO: 179937 - DNA, 25 bp, probe
ctgcaagcctgaggtaaagcccagc

SEQ ID NO: 179938 - DNA, 25 bp, probe
ctgctgacctcactggaattaccaa

SEQ ID NO: 179939 - DNA, 25 bp, probe
ctgctgaccacgccgaatccggaag

SEQ ID NO: 179940 - DNA, 25 bp, probe
ctgctactccacagagatcgggatc

SEQ ID NO: 179941 - DNA, 25 bp, probe
ctgcaactgcactaagaatgggaac

SEQ ID NO: 179942 - DNA, 25 bp, probe
ctgctgccgcactggaaggagacgc

SEQ ID NO: 179943 - DNA, 25 bp, probe
ctgcatggagcctggaactgcatca

SEQ ID NO: 179944 - DNA, 25 bp, probe
ctgctgtgattctttgacctgccag

SEQ ID NO: 179945 - DNA, 25 bp, probe
ctgctgtgattcttcgaaatctcaa

SEQ ID NO: 179946 - DNA, 25 bp, probe
ctgcttatatttaggaacatatgct

SEQ ID NO: 179947 - DNA, 25 bp, probe
ctgcatttattttgcctgtgcatag

SEQ ID NO: 179948 - DNA, 25 bp, probe
ctgctttctgcttgtggttcatagg

SEQ ID NO: 179949 - DNA, 25 bp, probe
ctgcttggctctttgtgtgtaacac

SEQ ID NO: 179950 - DNA, 25 bp, probe
ctgctttgctgatcttggatacaag

SEQ ID NO: 179951 - DNA, 25 bp, probe
ctgctgggtgtccattgccatatcg

SEQ ID NO: 179952 - DNA, 25 bp, probe
ctgctatgggactattgctgtgatc

SEQ ID NO: 179953 - DNA, 25 bp, probe
ctgctctcggagcagggtgatgtga

SEQ ID NO: 179954 - DNA, 25 bp, probe
ctgctcacggggccttggagcatga

SEQ ID NO: 179955 - DNA, 25 bp, probe
ctgcatcacgcagggacgtgagttg

SEQ ID NO: 179956 - DNA, 25 bp, probe
ctgcccagcgctggggtgaggctgc

SEQ ID NO: 179957 - DNA, 25 bp, probe
ctgcgcgccgcagggaggcgcggag

SEQ ID NO: 179958 - DNA, 25 bp, probe
ctgcgcgccgcagggaggcgcggag

SEQ ID NO: 179959 - DNA, 25 bp, probe
ctgcggccctgggcagggggtgatg

SEQ ID NO: 179960 - DNA, 25 bp, probe
ctgctggcccttgaggtggggctgg

SEQ ID NO: 179961 - DNA, 25 bp, probe
ctgctggaggttgtgggcgtgacgg

SEQ ID NO: 179962 - DNA, 25 bp, probe
ctgctggaggttgtgggcgtgacgg

SEQ ID NO: 179963 - DNA, 25 bp, probe
ctgctggaggttgtgggcgtgacgg

SEQ ID NO: 179964 - DNA, 25 bp, probe
ctgctggtggttctggacatggagg

SEQ ID NO: 179965 - DNA, 25 bp, probe
ctgcgcagtggtccgggacaactgg

SEQ ID NO: 179966 - DNA, 25 bp, probe
ctgctagagttgtggtggcaggggc

SEQ ID NO: 179967 - DNA, 25 bp, probe
ctgcggaacatggaagtgaagggcg

SEQ ID NO: 179968 - DNA, 25 bp, probe
ctgctggaagactcactgacggagc

SEQ ID NO: 179969 - DNA, 25 bp, probe
ctgcaggagaacaaccgcctggaga

SEQ ID NO: 179970 - DNA, 25 bp, probe
ctgaagcagaaaccctgcacacggg

SEQ ID NO: 179971 - DNA, 25 bp, probe
ctgaagcacaagttcatcacacgct

SEQ ID NO: 179972 - DNA, 25 bp, probe
ctgcgatcagattatcatcaccacc

SEQ ID NO: 179973 - DNA, 25 bp, probe
ctgcgtctgagatctctctgcatag

SEQ ID NO: 179974 - DNA, 25 bp, probe
ctgcgtctcagacatgttgagaatc

SEQ ID NO: 179975 - DNA, 25 bp, probe
ctgctggcacattttcttgcagaac

SEQ ID NO: 179976 - DNA, 25 bp, probe
ctgcttgcatctcgttgctggcaga

SEQ ID NO: 179977 - DNA, 25 bp, probe
ctgctgtttgattatgcagagcatg

SEQ ID NO: 179978 - DNA, 25 bp, probe
ctgctgtacagatatcgagagtttc

SEQ ID NO: 179979 - DNA, 25 bp, probe
ctgctctacaagtcaggagtgtacc

SEQ ID NO: 179980 - DNA, 25 bp, probe
ctgcactcagagggaggagtctttc

SEQ ID NO: 179981 - DNA, 25 bp, probe
ctgcactcagagggaggagtctttc

SEQ ID NO: 179982 - DNA, 25 bp, probe
ctgctcggcagtggggttcttacag

SEQ ID NO: 179983 - DNA, 25 bp, probe
ctgcggcggatcccgattctataag

SEQ ID NO: 179984 - DNA, 25 bp, probe
ctgcatgtgcaggtcctctattttt

SEQ ID NO: 179985 - DNA, 25 bp, probe
ctgctcaggcgtcgctggatttatt

SEQ ID NO: 179986 - DNA, 25 bp, probe
ctgcatagagtgctgtctgcatttt

SEQ ID NO: 179987 - DNA, 25 bp, probe
ctgcatagagtgctgtctgcatttt

SEQ ID NO: 179988 - DNA, 25 bp, probe
ctgctgcaaccgctgtgaatgctgc

SEQ ID NO: 179989 - DNA, 25 bp, probe
ctgctgaaggcaggctgtgacttga

SEQ ID NO: 179990 - DNA, 25 bp, probe
ctgctgaaggcaggctgtgacttga

SEQ ID NO: 179991 - DNA, 25 bp, probe
ctgctcttcgcaagctgacaggctg

SEQ ID NO: 179992 - DNA, 25 bp, probe
ctgcttctcctagacagggctgagt

SEQ ID NO: 179993 - DNA, 25 bp, probe
ctgcttctcctagacagggctgagt

SEQ ID NO: 179994 - DNA, 25 bp, probe
ctgttctcaaggcacctggatggtg

SEQ ID NO: 179995 - DNA, 25 bp, probe
ctgttgctgccaggagacttgggga

SEQ ID NO: 179996 - DNA, 25 bp, probe
ctgctcagcccagtgacacttaggc

SEQ ID NO: 179997 - DNA, 25 bp, probe
ctgcacacatcgttgaagctttgga

SEQ ID NO: 179998 - DNA, 25 bp, probe
ctgacaccaggtattttgatgagga

SEQ ID NO: 179999 - DNA, 25 bp, probe
ctgacttcagtctctttgatgtggt

SEQ ID NO: 180000 - DNA, 25 bp, probe
ctgaatacaatcttgagtaactggg

SEQ ID NO: 180001 - DNA, 25 bp, probe
ctgcacaagccatttaatctcactc

SEQ ID NO: 180002 - DNA, 25 bp, probe
ctgcacagagacttttactgagctc

SEQ ID NO: 180003 - DNA, 25 bp, probe
ctgcagcagtggcttagaaagtcca

SEQ ID NO: 180004 - DNA, 25 bp, probe
ctgctgcagtgggtcaagacggatc

SEQ ID NO: 180005 - DNA, 25 bp, probe
ctgcggctgtgagtcagcgaccgac

SEQ ID NO: 180006 - DNA, 25 bp, probe
ctgcggctgtgaggtgcgggaacac

SEQ ID NO: 180007 - DNA, 25 bp, probe
ctgcagtggtgtcgtgggtgttacg

SEQ ID NO: 180008 - DNA, 25 bp, probe
ctgcattctagttgtggtttgtcca

SEQ ID NO: 180009 - DNA, 25 bp, probe
ctgcttttggagtcctattgtcgtg

SEQ ID NO: 180010 - DNA, 25 bp, probe
ctgtttcatggaacctatgtttatt

SEQ ID NO: 180011 - DNA, 25 bp, probe
ctgctgtttgggctgttgtttctta

SEQ ID NO: 180012 - DNA, 25 bp, probe
ctgctaatgctcagagatctttttt

SEQ ID NO: 180013 - DNA, 25 bp, probe
ctgctaagtcaggaaatggggtatg

SEQ ID NO: 180014 - DNA, 25 bp, probe
ctgctggatctacaagtgggaggat

SEQ ID NO: 180015 - DNA, 25 bp, probe
ctgctggacaggggcgtgggattga

SEQ ID NO: 180016 - DNA, 25 bp, probe
ctgctgtgcaaggaggcttgctgga

SEQ ID NO: 180017 - DNA, 25 bp, probe
ctgcagatgctgcagagcctcctgg

SEQ ID NO: 180018 - DNA, 25 bp, probe
ctgcagggaaggccccagagtcaga

SEQ ID NO: 180019 - DNA, 25 bp, probe
ctgctggcagaaggacccaggtgag

SEQ ID NO: 180020 - DNA, 25 bp, probe
ctgctggatcagggcagccggggag

SEQ ID NO: 180021 - DNA, 25 bp, probe
ctgctgagacagggccacggccctg

SEQ ID NO: 180022 - DNA, 25 bp, probe
ctgctacaagaagatcgctgccgcc

SEQ ID NO: 180023 - DNA, 25 bp, probe
ctgatgataaaaggaagatgccctt

SEQ ID NO: 180024 - DNA, 25 bp, probe
ctgcacctcaaaggggatccctgta

SEQ ID NO: 180025 - DNA, 25 bp, probe
ctgacagctaaggatgggccacctc

SEQ ID NO: 180026 - DNA, 25 bp, probe
ctgacagctaaggatgggccacctc

SEQ ID NO: 180027 - DNA, 25 bp, probe
ctgcaggcaagagatggaggtccaa

SEQ ID NO: 180028 - DNA, 25 bp, probe
ctgcactactgacatgtggggccag

SEQ ID NO: 180029 - DNA, 25 bp, probe
ctgcactactgacatgtggggccag

SEQ ID NO: 180030 - DNA, 25 bp, probe
ctgcactgattggggcctggggcag

SEQ ID NO: 180031 - DNA, 25 bp, probe
ctgcactgattggggcctggggcag

SEQ ID NO: 180032 - DNA, 25 bp, probe
ctgactgcttgttgccaaactggaa

SEQ ID NO: 180033 - DNA, 25 bp, probe
ctgacatttgtttggaatcgtgcca

SEQ ID NO: 180034 - DNA, 25 bp, probe
ctgctgtttggatgagcttcgccca

SEQ ID NO: 180035 - DNA, 25 bp, probe
ctgcatgataagccacagaccctct

SEQ ID NO: 180036 - DNA, 25 bp, probe
ctgcatgataagccacagaccctct

SEQ ID NO: 180037 - DNA, 25 bp, probe
ctgcatatagcccagcagatcgccg

SEQ ID NO: 180038 - DNA, 25 bp, probe
ctgcatatagcccagcagatcgccg

SEQ ID NO: 180039 - DNA, 25 bp, probe
ctgcacagatgctgccagctctggc

SEQ ID NO: 180040 - DNA, 25 bp, probe
ctgcagcatgacaagctcgtgaggc

SEQ ID NO: 180041 - DNA, 25 bp, probe
ctgcaagcattgtctgagctgaggg

SEQ ID NO: 180042 - DNA, 25 bp, probe
ctgcagcatgttgctgaggagtgag

SEQ ID NO: 180043 - DNA, 25 bp, probe
ctgcagcagatcatgcgagggtacc

SEQ ID NO: 180044 - DNA, 25 bp, probe
ctgagaagcccgaggtcatcacctc

SEQ ID NO: 180045 - DNA, 25 bp, probe
ctgagaagcccgaggtcatcacctc

SEQ ID NO: 180046 - DNA, 25 bp, probe
ctgagaagcccgaggtcatcacctc

SEQ ID NO: 180047 - DNA, 25 bp, probe
ctgagaagcccgaggtcatcacctc

SEQ ID NO: 180048 - DNA, 25 bp, probe
ctgaacaacaaagggcttctcgcca

SEQ ID NO: 180049 - DNA, 25 bp, probe
ctgaacaacaaagggcttctcgcca

SEQ ID NO: 180050 - DNA, 25 bp, probe
ctgaaaggaagggctggtcctgccc

SEQ ID NO: 180051 - DNA, 25 bp, probe
ctgaaagtgaccggggtgcctggca

SEQ ID NO: 180052 - DNA, 25 bp, probe
ctgtaatgtacctgaagtttctgaa

SEQ ID NO: 180053 - DNA, 25 bp, probe
ctgctgcactaatcattgcctgttt

SEQ ID NO: 180054 - DNA, 25 bp, probe
ctgctgagtagcactatgccctttg

SEQ ID NO: 180055 - DNA, 25 bp, probe
ctgctgagattcatcaatgccaatg

SEQ ID NO: 180056 - DNA, 25 bp, probe
ctgctgagcttcgtcaaagaattca

SEQ ID NO: 180057 - DNA, 25 bp, probe
ctgctacctcctcagagtttcagaa

SEQ ID NO: 180058 - DNA, 25 bp, probe
ctgaaacctgcatagagtttgcaaa

SEQ ID NO: 180059 - DNA, 25 bp, probe
ctgagacacttgtgggtggtaaaca

SEQ ID NO: 180060 - DNA, 25 bp, probe
ctgaaaccagggccggagttagaga

SEQ ID NO: 180061 - DNA, 25 bp, probe
ctgatcaaacaccccgaggtgaaaa

SEQ ID NO: 180062 - DNA, 25 bp, probe
ctgacttgagaccagttgaataaaa

SEQ ID NO: 180063 - DNA, 25 bp, probe
ctgaagatgagatagaggacattca

SEQ ID NO: 180064 - DNA, 25 bp, probe
ctgctggatagggacggacacatca

SEQ ID NO: 180065 - DNA, 25 bp, probe
ctgctgccaatgggtcggacaacaa

SEQ ID NO: 180066 - DNA, 25 bp, probe
ctgctccgtgctgtgaggaacaaga

SEQ ID NO: 180067 - DNA, 25 bp, probe
ctgacctggctctcggaaacgcagg

SEQ ID NO: 180068 - DNA, 25 bp, probe
ctgacggaccgggtcgagaccaggg

SEQ ID NO: 180069 - DNA, 25 bp, probe
ctgaagggacagccctgggtctagg

SEQ ID NO: 180070 - DNA, 25 bp, probe
ctgcaaacggagacctcggtcatct

SEQ ID NO: 180071 - DNA, 25 bp, probe
ctgaatttccagacacctgggccag

SEQ ID NO: 180072 - DNA, 25 bp, probe
ctgaagttccatgatgttgttcctg

SEQ ID NO: 180073 - DNA, 25 bp, probe
ctgaagtatccagttcttagtcctt

SEQ ID NO: 180074 - DNA, 25 bp, probe
ctgaagatgccccgttattgtcttt

SEQ ID NO: 180075 - DNA, 25 bp, probe
ctgaaaccctgccattgaattgcat

SEQ ID NO: 180076 - DNA, 25 bp, probe
ctgaaaccctgccattgaattgcat

SEQ ID NO: 180077 - DNA, 25 bp, probe
cggaaagcgtgccaatcaacatgct

SEQ ID NO: 180078 - DNA, 25 bp, probe
ctgaacttgtggaccatgtactgca

SEQ ID NO: 180079 - DNA, 25 bp, probe
ctgaagctgttccggcattactatg

SEQ ID NO: 180080 - DNA, 25 bp, probe
ctgcaaagtcccgagttactcagag

SEQ ID NO: 180081 - DNA, 25 bp, probe
ctgctcatggtcttcgagtatatgc

SEQ ID NO: 180082 - DNA, 25 bp, probe
ctgcttgacctgagagctctgtctg

SEQ ID NO: 180083 - DNA, 25 bp, probe
ctgcattgtaagagttctgtcatgc

SEQ ID NO: 180084 - DNA, 25 bp, probe
ctgctggtcatcagcgtgtttaccg

SEQ ID NO: 180085 - DNA, 25 bp, probe
ctgcatggtcgcccatgattttact

SEQ ID NO: 180086 - DNA, 25 bp, probe
ctgcatgaaccccattctgtatgtt

SEQ ID NO: 180087 - DNA, 25 bp, probe
ctgagaatatgtgttcgtctgtttg

SEQ ID NO: 180088 - DNA, 25 bp, probe
ctgaatgctagtctgttttgtttct

SEQ ID NO: 180089 - DNA, 25 bp, probe
ctgaatctttgtatttgcttttgca

SEQ ID NO: 180090 - DNA, 25 bp, probe
ctgaattcttggatattacttatgt

SEQ ID NO: 180091 - DNA, 25 bp, probe
ctgcacagtcttctaagtcacatta

SEQ ID NO: 180092 - DNA, 25 bp, probe
ctgaggtttccttaggcagcttatt

SEQ ID NO: 180093 - DNA, 25 bp, probe
ctgcatggtatcactaaaggtttca

SEQ ID NO: 180094 - DNA, 25 bp, probe
ctgaagaaatttcacagcagtttat

SEQ ID NO: 180095 - DNA, 25 bp, probe
ctgcaacttgttgagcaacatttta

SEQ ID NO: 180096 - DNA, 25 bp, probe
ctgctgccttttggatccaattctt

SEQ ID NO: 180097 - DNA, 25 bp, probe
ctgctggtttgagacctattctgac

SEQ ID NO: 180098 - DNA, 25 bp, probe
ctgcttttctgtcacctgatgaatc

SEQ ID NO: 180099 - DNA, 25 bp, probe
ctgcttctcttactatactcataca

SEQ ID NO: 180100 - DNA, 25 bp, probe
ctgcttttgatcattcaccgaacaa

SEQ ID NO: 180101 - DNA, 25 bp, probe
ctgcttttcatattcaaggtaaaca

SEQ ID NO: 180102 - DNA, 25 bp, probe
ctgtgtttcgcattcggcgttatct

SEQ ID NO: 180103 - DNA, 25 bp, probe
ctgttggtgccttcttggtattgta

SEQ ID NO: 180104 - DNA, 25 bp, probe
ctgctgctggtggtactgtttcagg

SEQ ID NO: 180105 - DNA, 25 bp, probe
ctgctgctggtatgttgtatctcga

SEQ ID NO: 180106 - DNA, 25 bp, probe
ctgcatggtattggaataactcaca

SEQ ID NO: 180107 - DNA, 25 bp, probe
ctgcatcagtttgcagttcactgca

SEQ ID NO: 180108 - DNA, 25 bp, probe
ctgctagtgttctgtctaaaaacca

SEQ ID NO: 180109 - DNA, 25 bp, probe
ctgctagtgttctgtctaaaaacca

SEQ ID NO: 180110 - DNA, 25 bp, probe
ctgagggaaatagccaaaaaggcaa

SEQ ID NO: 180111 - DNA, 25 bp, probe
ctgacggaaattgtcacccacggcc

SEQ ID NO: 180112 - DNA, 25 bp, probe
ctgaccgaggatcaaatcctttggc

SEQ ID NO: 180113 - DNA, 25 bp, probe
ctgactaaggcacaaatccaacatg

SEQ ID NO: 180114 - DNA, 25 bp, probe
ctgagtaagtctgaacctctaatgg

SEQ ID NO: 180115 - DNA, 25 bp, probe
ctgaaaagctccaggctcatctaag

SEQ ID NO: 180116 - DNA, 25 bp, probe
ctgacaaatcatgacccattttgag

SEQ ID NO: 180117 - DNA, 25 bp, probe
ctgacaaatcatgacccattttgag

SEQ ID NO: 180118 - DNA, 25 bp, probe
ctgactgacacagagccttctctag

SEQ ID NO: 180119 - DNA, 25 bp, probe
ctgactgacacagagccttctctag

SEQ ID NO: 180120 - DNA, 25 bp, probe
ctgaataaactagttctgtgcgggt

SEQ ID NO: 180121 - DNA, 25 bp, probe
ctgactgcaaacttctcactgtggg

SEQ ID NO: 180122 - DNA, 25 bp, probe
ctgcagtgaacctcgatggtgccag

SEQ ID NO: 180123 - DNA, 25 bp, probe
ctgactcaattgtacctgcagctcc

SEQ ID NO: 180124 - DNA, 25 bp, probe
ctgcatcatcatttgcttcaagccc

SEQ ID NO: 180125 - DNA, 25 bp, probe
ctgcaacatcaaagtgcaagctgcc

SEQ ID NO: 180126 - DNA, 25 bp, probe
ctgcaaccaacagtaaggacttacg

SEQ ID NO: 180127 - DNA, 25 bp, probe
ctgcaaccaacagtaaggacttacg

SEQ ID NO: 180128 - DNA, 25 bp, probe
ctgcagagaaacacggaaactagga

SEQ ID NO: 180129 - DNA, 25 bp, probe
ctgaagcccactccggaaactaaag

SEQ ID NO: 180130 - DNA, 25 bp, probe
ctgtagcggttgccagggaccttaa

SEQ ID NO: 180131 - DNA, 25 bp, probe
ctgcacggagctgggcatccgcacc

SEQ ID NO: 180132 - DNA, 25 bp, probe
ctgcacgtatgcagtatcctatctc

SEQ ID NO: 180133 - DNA, 25 bp, probe
ctgcatgcctagagtaccagcttcc

SEQ ID NO: 180134 - DNA, 25 bp, probe
ctgcagcgacacaagtgaccctggg

SEQ ID NO: 180135 - DNA, 25 bp, probe
ctgcaggccctgagacacttgtggg

SEQ ID NO: 180136 - DNA, 25 bp, probe
ctgaagaccggccaccggatggaga

SEQ ID NO: 180137 - DNA, 25 bp, probe
ctgcacgggcaacaaaggatgggac

SEQ ID NO: 180138 - DNA, 25 bp, probe
ctgctccccaagagacacggggcat

SEQ ID NO: 180139 - DNA, 25 bp, probe
ctgcaccccaagaggcgtgagggca

SEQ ID NO: 180140 - DNA, 25 bp, probe
ctgcacccctagagatgccatttgt

SEQ ID NO: 180141 - DNA, 25 bp, probe
ctgcaaccaccgcgatgcaagtatg

SEQ ID NO: 180142 - DNA, 25 bp, probe
ctgcacacagccaaggcctaactat

SEQ ID NO: 180143 - DNA, 25 bp, probe
ctgcacacagccaaggcctaactat

SEQ ID NO: 180144 - DNA, 25 bp, probe
ctgcaagatgtcaagggccaagaag

SEQ ID NO: 180145 - DNA, 25 bp, probe
ctgcaagatgtcaagggccaagaag

SEQ ID NO: 180146 - DNA, 25 bp, probe
ctgcagcacttcactaccaaatgag

SEQ ID NO: 180147 - DNA, 25 bp, probe
ctgcagctttccaaagctacattga

SEQ ID NO: 180148 - DNA, 25 bp, probe
ctgctgctcttcgcaagctgacagg

SEQ ID NO: 180149 - DNA, 25 bp, probe
ctgctgtgcttcgacatcatcgagg

SEQ ID NO: 180150 - DNA, 25 bp, probe
ctgctgatgttcccctatgggtaca

SEQ ID NO: 180151 - DNA, 25 bp, probe
ctgctgatgttcccctatgggtaca

SEQ ID NO: 180152 - DNA, 25 bp, probe
ctgcttatgtgccaatttagtggaa

SEQ ID NO: 180153 - DNA, 25 bp, probe
ctgctcacagtcctcatttactgga

SEQ ID NO: 180154 - DNA, 25 bp, probe
ctgctagctggccttgtagcttgga

SEQ ID NO: 180155 - DNA, 25 bp, probe
ctgctagctggccttgtagcttgga

SEQ ID NO: 180156 - DNA, 25 bp, probe
ctgcttctgggcataagtcctgcaa

SEQ ID NO: 180157 - DNA, 25 bp, probe
ctgctgttgggaaccaccacgcaga

SEQ ID NO: 180158 - DNA, 25 bp, probe
ctgcagaatgggagctaccgctgca

SEQ ID NO: 180159 - DNA, 25 bp, probe
ctgcaaaatggctctgcaccagccg

SEQ ID NO: 180160 - DNA, 25 bp, probe
ctgcaaaatggctctgcaccagccg

SEQ ID NO: 180161 - DNA, 25 bp, probe
ctgcaacaaggctctgaaacccgag

SEQ ID NO: 180162 - DNA, 25 bp, probe
ctgcaaccagtaaggacaactttga

SEQ ID NO: 180163 - DNA, 25 bp, probe
ctgaactggactagtgaaaaatcta

SEQ ID NO: 180164 - DNA, 25 bp, probe
ctgaaccgacttttctaaagctctg

SEQ ID NO: 180165 - DNA, 25 bp, probe
ctgtcaaccccattatctataacct

SEQ ID NO: 180166 - DNA, 25 bp, probe
ctgacaacgataccttctacgacct

SEQ ID NO: 180167 - DNA, 25 bp, probe
ctgcatcaaggtctcttctttcacc

SEQ ID NO: 180168 - DNA, 25 bp, probe
ctgctgccggtggtggactatgaac

SEQ ID NO: 180169 - DNA, 25 bp, probe
ctgtccaggcctgagccaatgcaac

SEQ ID NO: 180170 - DNA, 25 bp, probe
ctgtccaggcctgagccaatgcaac

SEQ ID NO: 180171 - DNA, 25 bp, probe
ctgctccatgcagatctagccaggc

SEQ ID NO: 180172 - DNA, 25 bp, probe
ctgcatctacagcatcgcagccagc

SEQ ID NO: 180173 - DNA, 25 bp, probe
ctgcatctacagcatcgcagccagc

SEQ ID NO: 180174 - DNA, 25 bp, probe
ctgactcagggaggcgagcacgcca

SEQ ID NO: 180175 - DNA, 25 bp, probe
ctgcttggtcaaggtgagcggcaca

SEQ ID NO: 180176 - DNA, 25 bp, probe
ctgctttgtgaagtatgcacacgga

SEQ ID NO: 180177 - DNA, 25 bp, probe
ctgctctgtggtccatgagacagcg

SEQ ID NO: 180178 - DNA, 25 bp, probe
ctgctcgtggtgggaggggcggcag

SEQ ID NO: 180179 - DNA, 25 bp, probe
ctgctgctgctgtgaggagtgcggc

SEQ ID NO: 180180 - DNA, 25 bp, probe
ctgctctgtccgtggatgaggccac

SEQ ID NO: 180181 - DNA, 25 bp, probe
ctgctccccgcaatgctgatggggc

SEQ ID NO: 180182 - DNA, 25 bp, probe
ctgctcttcgctatcatgtggtggc

SEQ ID NO: 180183 - DNA, 25 bp, probe
ctgctgcccacaactgcagtgttgg

SEQ ID NO: 180184 - DNA, 25 bp, probe
ctgcatgtccaaacgaagtaacaaa

SEQ ID NO: 180185 - DNA, 25 bp, probe
ctgcattccctgccacaaggaaagg

SEQ ID NO: 180186 - DNA, 25 bp, probe
ctgcattccctgccacaaggaaagg

SEQ ID NO: 180187 - DNA, 25 bp, probe
ctgcaccgtccttacggcaatatgc

SEQ ID NO: 180188 - DNA, 25 bp, probe
ctgcacacgcccatcattgtgcact

SEQ ID NO: 180189 - DNA, 25 bp, probe
ctgcactggtacatgcatctgtaat

SEQ ID NO: 180190 - DNA, 25 bp, probe
ctgcacacagtatatcatctatgaa

SEQ ID NO: 180191 - DNA, 25 bp, probe
ctgcatcaagtcttctgatctcaga

SEQ ID NO: 180192 - DNA, 25 bp, probe
ctgatcatcaccagctactgctaca

SEQ ID NO: 180193 - DNA, 25 bp, probe
ctgatatgagctatgtgcatcgtga

SEQ ID NO: 180194 - DNA, 25 bp, probe
ctgcttgagctttctgtgcatgtgc

SEQ ID NO: 180195 - DNA, 25 bp, probe
ctgctctacttcttctatgatgtca

SEQ ID NO: 180196 - DNA, 25 bp, probe
ctgctttgtcctttgatgctgtcag

SEQ ID NO: 180197 - DNA, 25 bp, probe
ctgcttgtgtctcttgcatgattct

SEQ ID NO: 180198 - DNA, 25 bp, probe
ctgcaaggtataattgatggattct

SEQ ID NO: 180199 - DNA, 25 bp, probe
ctgaaggtcagtatatggagtccat

SEQ ID NO: 180200 - DNA, 25 bp, probe
ctgaaggaggagagggatgatagct

SEQ ID NO: 180201 - DNA, 25 bp, probe
ctgaacttcttgtgggagatactca

SEQ ID NO: 180202 - DNA, 25 bp, probe
ctgaccccttgtgggatgaaagcca

SEQ ID NO: 180203 - DNA, 25 bp, probe
ctgacctcgtttgagcctgaagcac

SEQ ID NO: 180204 - DNA, 25 bp, probe
ctgcacctctatgtcaggattacca

SEQ ID NO: 180205 - DNA, 25 bp, probe
ctgcaccttagggcagtgtccgtca

SEQ ID NO: 180206 - DNA, 25 bp, probe
ctgagccttggggagtccacaggct

SEQ ID NO: 180207 - DNA, 25 bp, probe
ctgatcttttccacccaaggtatca

SEQ ID NO: 180208 - DNA, 25 bp, probe
ctgatcttttccacccaaggtatca

SEQ ID NO: 180209 - DNA, 25 bp, probe
ctgcacttctttggagcccaaggga

SEQ ID NO: 180210 - DNA, 25 bp, probe
ctgactgacaaggctggccgcacag

SEQ ID NO: 180211 - DNA, 25 bp, probe
ctgcactctaaggagatcatctaca

SEQ ID NO: 180212 - DNA, 25 bp, probe
ctgaatctagaggagcctcccagct

SEQ ID NO: 180213 - DNA, 25 bp, probe
ctgaatatatgaccacgctcacccg

SEQ ID NO: 180214 - DNA, 25 bp, probe
ctgattactgagtggccaccagggg

SEQ ID NO: 180215 - DNA, 25 bp, probe
ctgttccggcagagcccggtgaaga

SEQ ID NO: 180216 - DNA, 25 bp, probe
ctgcttcggaggaacccagagcgga

SEQ ID NO: 180217 - DNA, 25 bp, probe
ctgcttcggaggaacccagagcgga

SEQ ID NO: 180218 - DNA, 25 bp, probe
ctgctttagagtacttgcacggcaa

SEQ ID NO: 180219 - DNA, 25 bp, probe
ctgctcactgcgtggattaccagaa

SEQ ID NO: 180220 - DNA, 25 bp, probe
ctgctcattgcctgtgtggcacaat

SEQ ID NO: 180221 - DNA, 25 bp, probe
ctgcatcttctatgagatggccaca

SEQ ID NO: 180222 - DNA, 25 bp, probe
ctgcactactacctgcaggcacaaa

SEQ ID NO: 180223 - DNA, 25 bp, probe
ctgcatctccctgatagaccaatca

SEQ ID NO: 180224 - DNA, 25 bp, probe
ctgcttctctcccatggagctaatg

SEQ ID NO: 180225 - DNA, 25 bp, probe
ctgcttctctcccatggagctaatg

SEQ ID NO: 180226 - DNA, 25 bp, probe
ctgcttctgacacagtgagcaacaa

SEQ ID NO: 180227 - DNA, 25 bp, probe
ctgctgccttcgaagtgtgcgaaca

SEQ ID NO: 180228 - DNA, 25 bp, probe
ctgctctctcggactttgcagacac

SEQ ID NO: 180229 - DNA, 25 bp, probe
ctgcatgctacagggttcagagacc

SEQ ID NO: 180230 - DNA, 25 bp, probe
ctgcattaccggtcgatgcaacgag

SEQ ID NO: 180231 - DNA, 25 bp, probe
ctgcttgagccacacgtgcaagcgc

SEQ ID NO: 180232 - DNA, 25 bp, probe
ctgctataccacaactacagtccct

SEQ ID NO: 180233 - DNA, 25 bp, probe
ctgcataaccgcacagacactgaca

SEQ ID NO: 180234 - DNA, 25 bp, probe
ctgctatacctccttagcactgaga

SEQ ID NO: 180235 - DNA, 25 bp, probe
ctgctcaacgcttaccagagcaaga

SEQ ID NO: 180236 - DNA, 25 bp, probe
ctgaatcacctctctcatggaagaa

SEQ ID NO: 180237 - DNA, 25 bp, probe
ctgactaccttgacttgaaatgctc

SEQ ID NO: 180238 - DNA, 25 bp, probe
ctgactccctgatttatgacgacgg

SEQ ID NO: 180239 - DNA, 25 bp, probe
ctgaccctgtgtgtacaatccagga

SEQ ID NO: 180240 - DNA, 25 bp, probe
ctgagccagttcagtacctggagga

SEQ ID NO: 180241 - DNA, 25 bp, probe
ctgcaactgttccgcaaactggggc

SEQ ID NO: 180242 - DNA, 25 bp, probe
ctgcaagtgctttccagggattggg

SEQ ID NO: 180243 - DNA, 25 bp, probe
ctgctcaacctactgcaggggctgg

SEQ ID NO: 180244 - DNA, 25 bp, probe
ctgctcatgacgctctggttgagct

SEQ ID NO: 180245 - DNA, 25 bp, probe
ctgctcatccgaaatggctctgagg

SEQ ID NO: 180246 - DNA, 25 bp, probe
ctgctctcggaggatgcctagaaga

SEQ ID NO: 180247 - DNA, 25 bp, probe
ctgctctgggaggtcttctcatatg

SEQ ID NO: 180248 - DNA, 25 bp, probe
ctgcatctggttggtctttattgag

SEQ ID NO: 180249 - DNA, 25 bp, probe
ctgcatcttgtaagcctttttgtaa

SEQ ID NO: 180250 - DNA, 25 bp, probe
ctgcacattggaacttgtccatggg

SEQ ID NO: 180251 - DNA, 25 bp, probe
ctgctcataagtacttgtgtcatcc

SEQ ID NO: 180252 - DNA, 25 bp, probe
ctgcttcgacgtgtgtgtcatggct

SEQ ID NO: 180253 - DNA, 25 bp, probe
ctgcttcggccaggtggtcatggcg

SEQ ID NO: 180254 - DNA, 25 bp, probe
ctgcttctacacatgtggtactctg

SEQ ID NO: 180255 - DNA, 25 bp, probe
ctgtttgccacttgatggggcctgg

SEQ ID NO: 180256 - DNA, 25 bp, probe
ctgactggccgcagtggtagccatc

SEQ ID NO: 180257 - DNA, 25 bp, probe
ctgactggaagaaagcctgtggatc

SEQ ID NO: 180258 - DNA, 25 bp, probe
ctgactggaagaaagcctgtggatc

SEQ ID NO: 180259 - DNA, 25 bp, probe
ctgacttacaatatgcctgttatct

SEQ ID NO: 180260 - DNA, 25 bp, probe
ctgacagtctcagtttgccagtctt

SEQ ID NO: 180261 - DNA, 25 bp, probe
ctgcattgtcactgttgactgtgga

SEQ ID NO: 180262 - DNA, 25 bp, probe
ctgtttcactggttatgcggcggat

SEQ ID NO: 180263 - DNA, 25 bp, probe
ctgcttccgtggttgaggcgcggaa

SEQ ID NO: 180264 - DNA, 25 bp, probe
ctgcttccgtggttgaggcgcggaa

SEQ ID NO: 180265 - DNA, 25 bp, probe
ctgctactgtgggcttggggataaa

SEQ ID NO: 180266 - DNA, 25 bp, probe
ctgaactaggcctggtggaaggagg

SEQ ID NO: 180267 - DNA, 25 bp, probe
ctgacctacctcaggtggaacggtg

SEQ ID NO: 180268 - DNA, 25 bp, probe
ctgacgatgaccacgctcatggtca

SEQ ID NO: 180269 - DNA, 25 bp, probe
ctgcaagaggctggcttcttggtca

SEQ ID NO: 180270 - DNA, 25 bp, probe
ctgaccatgatgccctgtattggtc

SEQ ID NO: 180271 - DNA, 25 bp, probe
ctgacactttcacttttgcagattg

SEQ ID NO: 180272 - DNA, 25 bp, probe
ctgaatttgacctacttgctggggt

SEQ ID NO: 180273 - DNA, 25 bp, probe
ctgaacatcggatactggggcggtg

SEQ ID NO: 180274 - DNA, 25 bp, probe
ctgaccactgggtgtggacggtgtg

SEQ ID NO: 180275 - DNA, 25 bp, probe
ctgaaaggtgtggggtcagcggggg

SEQ ID NO: 180276 - DNA, 25 bp, probe
ctgaaaggtacctgccaggcacagg

SEQ ID NO: 180277 - DNA, 25 bp, probe
ctgaagaagtacggggctaccactg

SEQ ID NO: 180278 - DNA, 25 bp, probe
ctgaagacactgaagtagcccaccc

SEQ ID NO: 180279 - DNA, 25 bp, probe
ctgaagaccattaacctccagagcc

SEQ ID NO: 180280 - DNA, 25 bp, probe
ctgaaagactgcaagacctgaaatc

SEQ ID NO: 180281 - DNA, 25 bp, probe
ctgctacggcgcaagagcctgcagt

SEQ ID NO: 180282 - DNA, 25 bp, probe
ctgctacaggaggggtctcatgtcc

SEQ ID NO: 180283 - DNA, 25 bp, probe
ctgctactggtgggctgtcatcacc

SEQ ID NO: 180284 - DNA, 25 bp, probe
ctgaacatcggctacgtcatcaacg

SEQ ID NO: 180285 - DNA, 25 bp, probe
ctgcactcacaggctacagttgaac

SEQ ID NO: 180286 - DNA, 25 bp, probe
ctgcacagcaagctgtcggtgatcc

SEQ ID NO: 180287 - DNA, 25 bp, probe
ctgcacagcttgcttgtcgatgtcc

SEQ ID NO: 180288 - DNA, 25 bp, probe
ctgcacacatctttggctgatgttc

SEQ ID NO: 180289 - DNA, 25 bp, probe
ctgcaccatcagtgcactgtctttc

SEQ ID NO: 180290 - DNA, 25 bp, probe
ctgcacaaaatagatgctgctttct

SEQ ID NO: 180291 - DNA, 25 bp, probe
ctgcacaagcagtaccacctggtaa

SEQ ID NO: 180292 - DNA, 25 bp, probe
ctgcagcaagagaacaaggtgctga

SEQ ID NO: 180293 - DNA, 25 bp, probe
ctgacctgagcaccaaggttgaggg

SEQ ID NO: 180294 - DNA, 25 bp, probe
ctgacgctatgacacacagcgcgag

SEQ ID NO: 180295 - DNA, 25 bp, probe
ctgcaatggcgaggtacaagctgag

SEQ ID NO: 180296 - DNA, 25 bp, probe
ctgcattactgtggtcccagtgtcc

SEQ ID NO: 180297 - DNA, 25 bp, probe
ctgcttccttggatgtcattgctta

SEQ ID NO: 180298 - DNA, 25 bp, probe
ctgctttgtttctttgcaatgcatt

SEQ ID NO: 180299 - DNA, 25 bp, probe
ctgcattttacacatgtgctgatgt

SEQ ID NO: 180300 - DNA, 25 bp, probe
ctgctttgttcactgcagctcttgt

SEQ ID NO: 180301 - DNA, 25 bp, probe
ctgctatgtgcaaacagcgtccatt

SEQ ID NO: 180302 - DNA, 25 bp, probe
ctgctatgtgacttgcatcgtggag

SEQ ID NO: 180303 - DNA, 25 bp, probe
ctgcatcatggaggtacgcggaggg

SEQ ID NO: 180304 - DNA, 25 bp, probe
ctgactggtgctgcagcaccgaggg

SEQ ID NO: 180305 - DNA, 25 bp, probe
ctgagcagcgtcaacaaacggggct

SEQ ID NO: 180306 - DNA, 25 bp, probe
ctgcagccctcacttaacagtgggc

SEQ ID NO: 180307 - DNA, 25 bp, probe
ctgcagccccctatagtcatggggt

SEQ ID NO: 180308 - DNA, 25 bp, probe
ctgaggtccccaatggggcgggcca

SEQ ID NO: 180309 - DNA, 25 bp, probe
ctgaggtccccaatggggcgggcca

SEQ ID NO: 180310 - DNA, 25 bp, probe
ctgcagtgtttctgtccggaggaaa

SEQ ID NO: 180311 - DNA, 25 bp, probe
ctgcttttcgattggccagcgatgg

SEQ ID NO: 180312 - DNA, 25 bp, probe
ctgcatttgtgcccaggtcaggagc

SEQ ID NO: 180313 - DNA, 25 bp, probe
ctgcagtatgtcccaagacctacca

SEQ ID NO: 180314 - DNA, 25 bp, probe
ctgcactcagagcgcaagatccacc

SEQ ID NO: 180315 - DNA, 25 bp, probe
ctgactatggctcgaggtctacgga

SEQ ID NO: 180316 - DNA, 25 bp, probe
ctgcacgcaggacaggtgcttcagg

SEQ ID NO: 180317 - DNA, 25 bp, probe
ctgacctgctgaaagggatgcttga

SEQ ID NO: 180318 - DNA, 25 bp, probe
ctgcagggcttgaaatggacatctg

SEQ ID NO: 180319 - DNA, 25 bp, probe
ctgcaggagcccgaaacactgctgg

SEQ ID NO: 180320 - DNA, 25 bp, probe
ctgcaggaccacgatggatcctcgg

SEQ ID NO: 180321 - DNA, 25 bp, probe
ctgcagagtcactcagccaaatctg

SEQ ID NO: 180322 - DNA, 25 bp, probe
ctgcagagtcactcagccaaatctg

SEQ ID NO: 180323 - DNA, 25 bp, probe
ctgagagctcctgaggaatgtctgg

SEQ ID NO: 180324 - DNA, 25 bp, probe
ctgagcccccaagtgaaactgaggt

SEQ ID NO: 180325 - DNA, 25 bp, probe
ctgagactaagggtgaaagtggttt

SEQ ID NO: 180326 - DNA, 25 bp, probe
ctgtgactcgggggaaagtggaagg

SEQ ID NO: 180327 - DNA, 25 bp, probe
ctgctatggcaatccgaaaggggag

SEQ ID NO: 180328 - DNA, 25 bp, probe
ctgcagatggaatccgagcagggcg

SEQ ID NO: 180329 - DNA, 25 bp, probe
ctgcagctggattacgcaacagtaa

SEQ ID NO: 180330 - DNA, 25 bp, probe
ctgcagtcatcttgaccaagcagga

SEQ ID NO: 180331 - DNA, 25 bp, probe
ctgcagacacttcccaagtgtctgc

SEQ ID NO: 180332 - DNA, 25 bp, probe
ctgcagccagtatgccagggagctg

SEQ ID NO: 180333 - DNA, 25 bp, probe
ctgcagcaaatctccaaaatgatgg

SEQ ID NO: 180334 - DNA, 25 bp, probe
ctgcatgcaaaactacacagaattc

SEQ ID NO: 180335 - DNA, 25 bp, probe
ctgaaaaacgaggccaatgaccccg

SEQ ID NO: 180336 - DNA, 25 bp, probe
ctgaaagaatagacccaagcgcatc

SEQ ID NO: 180337 - DNA, 25 bp, probe
ctgacagagcatcagaaccagaggc

SEQ ID NO: 180338 - DNA, 25 bp, probe
ctgaaggaggcgtccgagagtgctc

SEQ ID NO: 180339 - DNA, 25 bp, probe
ctgaaagaggtgtcggaggccgtgg

SEQ ID NO: 180340 - DNA, 25 bp, probe
ctgaaagaggtgtcggaggccgtgg

SEQ ID NO: 180341 - DNA, 25 bp, probe
ctgaagaggcggaagaaagctcggg

SEQ ID NO: 180342 - DNA, 25 bp, probe
ctgaagcagcccgcatattaggcgc

SEQ ID NO: 180343 - DNA, 25 bp, probe
ctgcaaccctctgctttatggcagt

SEQ ID NO: 180344 - DNA, 25 bp, probe
ctgacaccctgagctgcaagattgc

SEQ ID NO: 180345 - DNA, 25 bp, probe
ctgacaccctgagctgcaagattgc

SEQ ID NO: 180346 - DNA, 25 bp, probe
ctgacaccctgagctgcaagattgc

SEQ ID NO: 180347 - DNA, 25 bp, probe
ctgcaccctggatttgcatacattc

SEQ ID NO: 180348 - DNA, 25 bp, probe
ctgcatccctggtgtgtaagattgc

SEQ ID NO: 180349 - DNA, 25 bp, probe
ctgcacctgcgggggtgggcataga

SEQ ID NO: 180350 - DNA, 25 bp, probe
ggggtgggggagagaatgacttctg

SEQ ID NO: 180351 - DNA, 25 bp, probe
ctgcacaatggggccgacgaggcct

SEQ ID NO: 180352 - DNA, 25 bp, probe
ctgcacgtggggctgacagtgcgcc

SEQ ID NO: 180353 - DNA, 25 bp, probe
ctgcagggcttgctggagaggcctc

SEQ ID NO: 180354 - DNA, 25 bp, probe
ctgcagggcgtggagtgcgggctgc

SEQ ID NO: 180355 - DNA, 25 bp, probe
ctgcaggaggttatcggcagtggag

SEQ ID NO: 180356 - DNA, 25 bp, probe
ctgcaggcggtatccagaggtgagg

SEQ ID NO: 180357 - DNA, 25 bp, probe
ctgagacaggatttacatgggtata

SEQ ID NO: 180358 - DNA, 25 bp, probe
ctgcagtcacctatacattatttaa

SEQ ID NO: 180359 - DNA, 25 bp, probe
ctgatggcacctataaaattatgaa

SEQ ID NO: 180360 - DNA, 25 bp, probe
ctgcaggcccagatagataaggaga

SEQ ID NO: 180361 - DNA, 25 bp, probe
ctgcatggcgtacctcatgaagacc

SEQ ID NO: 180362 - DNA, 25 bp, probe
ctgcatggccttctcaaagatcagc

SEQ ID NO: 180363 - DNA, 25 bp, probe
ctgcatggcaggtcttaaggaagct

SEQ ID NO: 180364 - DNA, 25 bp, probe
ctgaatgcatgacctttggtacatg

SEQ ID NO: 180365 - DNA, 25 bp, probe
ctgagcatgcaggccaaggagtacc

SEQ ID NO: 180366 - DNA, 25 bp, probe
ctgactgcccaaaggctgtacacac

SEQ ID NO: 180367 - DNA, 25 bp, probe
ctgaccctgcacaagccatttaatc

SEQ ID NO: 180368 - DNA, 25 bp, probe
ctggccgtgacctcattaacttggc

SEQ ID NO: 180369 - DNA, 25 bp, probe
ctgaccctgaggcttgttacattgg

SEQ ID NO: 180370 - DNA, 25 bp, probe
ctgaccctgaacgttagtctcttgc

SEQ ID NO: 180371 - DNA, 25 bp, probe
ctgcatctcacacgactttagtttg

SEQ ID NO: 180372 - DNA, 25 bp, probe
ctgtcatcatcaatgatctcttcac

SEQ ID NO: 180373 - DNA, 25 bp, probe
ctgcatcagacaatgccatttctcc

SEQ ID NO: 180374 - DNA, 25 bp, probe
ctgcattaaatcctgtgtgctcctc

SEQ ID NO: 180375 - DNA, 25 bp, probe
ctgcagtgaaatctttatactgtat

SEQ ID NO: 180376 - DNA, 25 bp, probe
ctgcaggcgaaccatatttacctat

SEQ ID NO: 180377 - DNA, 25 bp, probe
ctgaggctgaatccttcttcgcagc

SEQ ID NO: 180378 - DNA, 25 bp, probe
ctgcaggctgaatgtctattatcaa

SEQ ID NO: 180379 - DNA, 25 bp, probe
ctgcacgctcaatgcccagtaaaat

SEQ ID NO: 180380 - DNA, 25 bp, probe
ctgacactcagatgcccagtatcat

SEQ ID NO: 180381 - DNA, 25 bp, probe
ctgaccatggtccccagtgagaagg

SEQ ID NO: 180382 - DNA, 25 bp, probe
ctgaccatggtccccagtgagaagg

SEQ ID NO: 180383 - DNA, 25 bp, probe
ctgacactcgtgccggaggcaaagg

SEQ ID NO: 180384 - DNA, 25 bp, probe
ctgcacacacctgggtggacacaag

SEQ ID NO: 180385 - DNA, 25 bp, probe
ctgacagcattcggcgtatacctaa

SEQ ID NO: 180386 - DNA, 25 bp, probe
ctgaaggtcagggtcacccaagcaa

SEQ ID NO: 180387 - DNA, 25 bp, probe
ctgaaggtcagaagtaatcctgaga

SEQ ID NO: 180388 - DNA, 25 bp, probe
ctgtagtgccaactgaagtgccgac

SEQ ID NO: 180389 - DNA, 25 bp, probe
ctgttgctgccgtgaagtcaggact

SEQ ID NO: 180390 - DNA, 25 bp, probe
ctgttggtcctaggagtcattacta

SEQ ID NO: 180391 - DNA, 25 bp, probe
ctggggtcttcattggttggactcc

SEQ ID NO: 180392 - DNA, 25 bp, probe
ctggtggtttccacattgctaccca

SEQ ID NO: 180393 - DNA, 25 bp, probe
ctgaaggtttccaacttgctcatga

SEQ ID NO: 180394 - DNA, 25 bp, probe
ctgacaggtggaccaacggactgat

SEQ ID NO: 180395 - DNA, 25 bp, probe
ctgagcggttggtgccgggtataaa

SEQ ID NO: 180396 - DNA, 25 bp, probe
tattcctgtaggttatggggtataa

SEQ ID NO: 180397 - DNA, 25 bp, probe
tagtcctgaacgctacggggaaaat

SEQ ID NO: 180398 - DNA, 25 bp, probe
cgtcctctaaccacgggggagagtg

SEQ ID NO: 180399 - DNA, 25 bp, probe
ctgtacaccaaacttccaggaggag

SEQ ID NO: 180400 - DNA, 25 bp, probe
ctgtaactgtccctgaccagggcac

SEQ ID NO: 180401 - DNA, 25 bp, probe
ctgacaaagtctgcatgtccgagga

SEQ ID NO: 180402 - DNA, 25 bp, probe
ctgacccagacctagagccaggaga

SEQ ID NO: 180403 - DNA, 25 bp, probe
ctgacgacgtcctgaggctggtgaa

SEQ ID NO: 180404 - DNA, 25 bp, probe
ctgacgtcaactcctcagtgggtaa

SEQ ID NO: 180405 - DNA, 25 bp, probe
ctgaccatagccaactccttggtta

SEQ ID NO: 180406 - DNA, 25 bp, probe
ctgaccaactgcacgctattgctgt

SEQ ID NO: 180407 - DNA, 25 bp, probe
ctgaccaactgcacgctattgctgt

SEQ ID NO: 180408 - DNA, 25 bp, probe
ctgaccaactgcacgctattgctgt

SEQ ID NO: 180409 - DNA, 25 bp, probe
ctgacaaagtgtttctagggtgtag

SEQ ID NO: 180410 - DNA, 25 bp, probe
ctgaaacatgttctccggcagttct

SEQ ID NO: 180411 - DNA, 25 bp, probe
ctgtaggaacacatccgggattcta

SEQ ID NO: 180412 - DNA, 25 bp, probe
gcttaccgcaccattccggagtgta

SEQ ID NO: 180413 - DNA, 25 bp, probe
gttaaactcaacatggccggttatg

SEQ ID NO: 180414 - DNA, 25 bp, probe
ctgtaaatgcactcattgggggttt

SEQ ID NO: 180415 - DNA, 25 bp, probe
ctgtaaaacacctatttgggataat

SEQ ID NO: 180416 - DNA, 25 bp, probe
ctgaaataaaactctgctgcaggaa

SEQ ID NO: 180417 - DNA, 25 bp, probe
ctgacaatggacagcaaattatgga

SEQ ID NO: 180418 - DNA, 25 bp, probe
ctgacaatggacagcaaattatgga

SEQ ID NO: 180419 - DNA, 25 bp, probe
ctgaaatggtgcctaccttctggaa

SEQ ID NO: 180420 - DNA, 25 bp, probe
ctgcagccaagcctgagctttcagg

SEQ ID NO: 180421 - DNA, 25 bp, probe
ctgcagctccaggtacatatcacgc

SEQ ID NO: 180422 - DNA, 25 bp, probe
ctgcattcagctggtataattcata

SEQ ID NO: 180423 - DNA, 25 bp, probe
ctgcagtatgctgctaacatcttga

SEQ ID NO: 180424 - DNA, 25 bp, probe
ctgcagttgcccaaccacaggaaga

SEQ ID NO: 180425 - DNA, 25 bp, probe
ctgagtagatccccccagagaaaga

SEQ ID NO: 180426 - DNA, 25 bp, probe
ctgttagaacctggcccgttagatg

SEQ ID NO: 180427 - DNA, 25 bp, probe
ctgttcctacgcgtctacgaggaga

SEQ ID NO: 180428 - DNA, 25 bp, probe
ctgactcccgagggctagggctaga

SEQ ID NO: 180429 - DNA, 25 bp, probe
ctgaccccgcagacagtgatggaaa

SEQ ID NO: 180430 - DNA, 25 bp, probe
ctgcaggcccagaagagcgtggacg

SEQ ID NO: 180431 - DNA, 25 bp, probe
ctgcatccctgagcaggctgtgtga

SEQ ID NO: 180432 - DNA, 25 bp, probe
ctgcatggtctaaatctttgtgtac

SEQ ID NO: 180433 - DNA, 25 bp, probe
ctgcatggtgttttctggtctgtgc

SEQ ID NO: 180434 - DNA, 25 bp, probe
ctgcatggcaagttctgtggttctg

SEQ ID NO: 180435 - DNA, 25 bp, probe
ctgcatgtgcacttttgtttactga

SEQ ID NO: 180436 - DNA, 25 bp, probe
ctgcatcagctttttgtattaacaa

SEQ ID NO: 180437 - DNA, 25 bp, probe
ctgcatcagctttttgtattaacaa

SEQ ID NO: 180438 - DNA, 25 bp, probe
ctgcacagttaagtttatgagaagg

SEQ ID NO: 180439 - DNA, 25 bp, probe
ctgaagcttaatattagagacccaa

SEQ ID NO: 180440 - DNA, 25 bp, probe
ctgaactccaagataaagacaccat

SEQ ID NO: 180441 - DNA, 25 bp, probe
ctgaactccacggaaaaatcagaag

SEQ ID NO: 180442 - DNA, 25 bp, probe
ctgagatttcactgacaactttaag

SEQ ID NO: 180443 - DNA, 25 bp, probe
ctgaagttcatcccaaaattggggc

SEQ ID NO: 180444 - DNA, 25 bp, probe
ctgaatttgcacagaggaaagcggg

SEQ ID NO: 180445 - DNA, 25 bp, probe
ctgcaaattcactgagtggatagag

SEQ ID NO: 180446 - DNA, 25 bp, probe
ctgcaccccctcaaggtgaagagct

SEQ ID NO: 180447 - DNA, 25 bp, probe
ctgcacccccagctgggggagctgg

SEQ ID NO: 180448 - DNA, 25 bp, probe
ctgcaaggcccacaggaggcaagca

SEQ ID NO: 180449 - DNA, 25 bp, probe
ctgagagttcctgctggggcaagca

SEQ ID NO: 180450 - DNA, 25 bp, probe
ctgcaagtctccattcagaagcggc

SEQ ID NO: 180451 - DNA, 25 bp, probe
ctgcagtgatccattgtagcgaagg

SEQ ID NO: 180452 - DNA, 25 bp, probe
ctgcatggcaccatatccgcaaggg

SEQ ID NO: 180453 - DNA, 25 bp, probe
ctgcatggccctcagggacagtgag

SEQ ID NO: 180454 - DNA, 25 bp, probe
ctgcagggctcctatgggacagcag

SEQ ID NO: 180455 - DNA, 25 bp, probe
ctgcaggctgtggcaaggacagcta

SEQ ID NO: 180456 - DNA, 25 bp, probe
ctgcagatctaccagggcatcctga

SEQ ID NO: 180457 - DNA, 25 bp, probe
ctgcaccatcaactggccaggtgaa

SEQ ID NO: 180458 - DNA, 25 bp, probe
ctgcatgccaaggggaagagcgaca

SEQ ID NO: 180459 - DNA, 25 bp, probe
ctgcagccaggatggtaaggccagc

SEQ ID NO: 180460 - DNA, 25 bp, probe
ctgcagccaggttggcatcaaaagg

SEQ ID NO: 180461 - DNA, 25 bp, probe
ctgcagccaggccttgcaaattgaa

SEQ ID NO: 180462 - DNA, 25 bp, probe
ctgcatgaactggtccgccattaca

SEQ ID NO: 180463 - DNA, 25 bp, probe
ctgcatgttctgctcatggctcaga

SEQ ID NO: 180464 - DNA, 25 bp, probe
ctgcatgttctgctcatggctcaga

SEQ ID NO: 180465 - DNA, 25 bp, probe
ctgcagtttgctcctggacagcagc

SEQ ID NO: 180466 - DNA, 25 bp, probe
ctgcagagtcttcggcagaagcact

SEQ ID NO: 180467 - DNA, 25 bp, probe
ctgcaggccatgcgcgaggagcagg

SEQ ID NO: 180468 - DNA, 25 bp, probe
ctgcacctcagccagcagtgtgagc

SEQ ID NO: 180469 - DNA, 25 bp, probe
ctgcactcaaggtcgctggatgctg

SEQ ID NO: 180470 - DNA, 25 bp, probe
ctgcagcacaaggaggctgtggctg

SEQ ID NO: 180471 - DNA, 25 bp, probe
ctgagcactgcgaggtgaagctggt

SEQ ID NO: 180472 - DNA, 25 bp, probe
ctgacagtggcgacgatgaacatgc

SEQ ID NO: 180473 - DNA, 25 bp, probe
ctgacagtggcgacgatgaacatgc

SEQ ID NO: 180474 - DNA, 25 bp, probe
ctgacagggctggcttgtactggct

SEQ ID NO: 180475 - DNA, 25 bp, probe
ctgcagcacgtcgcttatattggga

SEQ ID NO: 180476 - DNA, 25 bp, probe
ctgcagatggccacttctttggaca

SEQ ID NO: 180477 - DNA, 25 bp, probe
ctgaagttcccttctgttcagcaaa

SEQ ID NO: 180478 - DNA, 25 bp, probe
gcttagtttccgtttgggctaatct

SEQ ID NO: 180479 - DNA, 25 bp, probe
gttggacttcctttgggactaagcg

SEQ ID NO: 180480 - DNA, 25 bp, probe
ctggtacttcctttcagtagggcgc

SEQ ID NO: 180481 - DNA, 25 bp, probe
ctggtacttcctttcagtagggcgc

SEQ ID NO: 180482 - DNA, 25 bp, probe
gttgtgaccccgggagtcaagagcc

SEQ ID NO: 180483 - DNA, 25 bp, probe
ctgtttccccagtgactcagagaga

SEQ ID NO: 180484 - DNA, 25 bp, probe
ctgcagttcagctcagggaccttga

SEQ ID NO: 180485 - DNA, 25 bp, probe
ctgcagttactttgaagacatcaaa

SEQ ID NO: 180486 - DNA, 25 bp, probe
ctgaggtacattttgaatgacagca

SEQ ID NO: 180487 - DNA, 25 bp, probe
ctgcaggacacattttgccatgtaa

SEQ ID NO: 180488 - DNA, 25 bp, probe
ctgcacgagcaagtttctcattact

SEQ ID NO: 180489 - DNA, 25 bp, probe
ctgacaaaagttccatatagacacc

SEQ ID NO: 180490 - DNA, 25 bp, probe
ctgaaagcacaggtggcatatgcga

SEQ ID NO: 180491 - DNA, 25 bp, probe
ctgagagacacagggcgctacggct

SEQ ID NO: 180492 - DNA, 25 bp, probe
ctgagagacacagggcgctacggct

SEQ ID NO: 180493 - DNA, 25 bp, probe
ctgaatccagcatggagcagacgag

SEQ ID NO: 180494 - DNA, 25 bp, probe
ctgcactccagcctgggcgacagag

SEQ ID NO: 180495 - DNA, 25 bp, probe
ctgcagaccgctcgggcatggagaa

SEQ ID NO: 180496 - DNA, 25 bp, probe
ctgcagcacccatttgtcaggagtg

SEQ ID NO: 180497 - DNA, 25 bp, probe
ctgaaaccaattggctctggggccc

SEQ ID NO: 180498 - DNA, 25 bp, probe
ctgcaacaaccagtagctcatgggg

SEQ ID NO: 180499 - DNA, 25 bp, probe
ctgcagactcatgcagccctatggc

SEQ ID NO: 180500 - DNA, 25 bp, probe
ctgcagactcatgcagccctatggc

SEQ ID NO: 180501 - DNA, 25 bp, probe
ctgagattcatcaatgccaatgtca

SEQ ID NO: 180502 - DNA, 25 bp, probe
ctgagctgctcaccatgctgcagca

SEQ ID NO: 180503 - DNA, 25 bp, probe
ctgagctgctgcagttcgagcctac

SEQ ID NO: 180504 - DNA, 25 bp, probe
ctgagctgctgcagttcgagcctac

SEQ ID NO: 180505 - DNA, 25 bp, probe
ctgttgctgcataatgatcctccca

SEQ ID NO: 180506 - DNA, 25 bp, probe
ctgtttattcttactccatcagggg

SEQ ID NO: 180507 - DNA, 25 bp, probe
ctgtaaattctaatacttgaagtgg

SEQ ID NO: 180508 - DNA, 25 bp, probe
ctgtaaattcatgtattcaaaggaa

SEQ ID NO: 180509 - DNA, 25 bp, probe
cgataaagacggattctaaggactc

SEQ ID NO: 180510 - DNA, 25 bp, probe
ccgataaagacggattctaaggact

SEQ ID NO: 180511 - DNA, 25 bp, probe
ccgaaaacacccatccaagcagggg

SEQ ID NO: 180512 - DNA, 25 bp, probe
cgctacaaggacagcttcgcggctg

SEQ ID NO: 180513 - DNA, 25 bp, probe
ctgcaacaaggacagcttctgccct

SEQ ID NO: 180514 - DNA, 25 bp, probe
ctgagcacatatcagctgtgctcct

SEQ ID NO: 180515 - DNA, 25 bp, probe
ctgagctatctggaggagatcctaa

SEQ ID NO: 180516 - DNA, 25 bp, probe
ctgagctatctggaggagatcctaa

SEQ ID NO: 180517 - DNA, 25 bp, probe
ctgttcctgcaaggtctccagaacc

SEQ ID NO: 180518 - DNA, 25 bp, probe
ctgttcaagactgctctccatagca

SEQ ID NO: 180519 - DNA, 25 bp, probe
ctgttgctagcaggcaatctccatt

SEQ ID NO: 180520 - DNA, 25 bp, probe
ctgatgatcccaggaaacatcattt

SEQ ID NO: 180521 - DNA, 25 bp, probe
ctgacccatcaacagactttgataa

SEQ ID NO: 180522 - DNA, 25 bp, probe
ctgacccatcaacagactttgataa

SEQ ID NO: 180523 - DNA, 25 bp, probe
ctgacgaagaagcaactaagttaat

SEQ ID NO: 180524 - DNA, 25 bp, probe
ctgacaaaaagtttccatatgttat

SEQ ID NO: 180525 - DNA, 25 bp, probe
ctgcaaatagtagttcctgaagtgt

SEQ ID NO: 180526 - DNA, 25 bp, probe
ctgcactcttgaactgggcgaatgt

SEQ ID NO: 180527 - DNA, 25 bp, probe
ctgactttgatcatcaggagcctgt

SEQ ID NO: 180528 - DNA, 25 bp, probe
ctgactgatttttacttggcattta

SEQ ID NO: 180529 - DNA, 25 bp, probe
ctgcaacttttctatctgagcgcat

SEQ ID NO: 180530 - DNA, 25 bp, probe
ctgcaagctgtttccacatcagaac

SEQ ID NO: 180531 - DNA, 25 bp, probe
ctgaagcagcttcacactctgcatt

SEQ ID NO: 180532 - DNA, 25 bp, probe
ctgaagcgccattatgctgcctttc

SEQ ID NO: 180533 - DNA, 25 bp, probe
ctgaatgcaacttctgtgccttgcc

SEQ ID NO: 180534 - DNA, 25 bp, probe
ctgcagagcaataacactatattta

SEQ ID NO: 180535 - DNA, 25 bp, probe
ctgagacagatactagatattttga

SEQ ID NO: 180536 - DNA, 25 bp, probe
ctgaaatgtttgacatcatcctgga

SEQ ID NO: 180537 - DNA, 25 bp, probe
ctgaaatctatcagatcatgctgga

SEQ ID NO: 180538 - DNA, 25 bp, probe
ctgaaagtgactggaattggcagct

SEQ ID NO: 180539 - DNA, 25 bp, probe
ctgcaaagtgtctgattttggcatg

SEQ ID NO: 180540 - DNA, 25 bp, probe
ctgcaaatgctgttctattttccag

SEQ ID NO: 180541 - DNA, 25 bp, probe
ctgaagatgattgcttttccctgct

SEQ ID NO: 180542 - DNA, 25 bp, probe
ctgcacgatattcagatttcggcct

SEQ ID NO: 180543 - DNA, 25 bp, probe
cgggatgtattactccttagccatg

SEQ ID NO: 180544 - DNA, 25 bp, probe
ctgatttgcttaagaccctaccaac

SEQ ID NO: 180545 - DNA, 25 bp, probe
cgaactctttgaccggatcacggat

SEQ ID NO: 180546 - DNA, 25 bp, probe
ctgaacacagttttcaggactctgg

SEQ ID NO: 180547 - DNA, 25 bp, probe
ctgaacgcagtcatccggaagggcg

SEQ ID NO: 180548 - DNA, 25 bp, probe
ctgaacgacatcaccgaggagtgta

SEQ ID NO: 180549 - DNA, 25 bp, probe
ctgcaaggacaaaggctatggaggt

SEQ ID NO: 180550 - DNA, 25 bp, probe
ctgcaaggacaaaggctatggaggt

SEQ ID NO: 180551 - DNA, 25 bp, probe
ctgaagcgcaaatggtgggaaggag

SEQ ID NO: 180552 - DNA, 25 bp, probe
ctgagcaccaaatccagggcggagg

SEQ ID NO: 180553 - DNA, 25 bp, probe
ctgagacaaaacctgaggggttggc

SEQ ID NO: 180554 - DNA, 25 bp, probe
ctgacctttacactgtgtagtgttg

SEQ ID NO: 180555 - DNA, 25 bp, probe
ctgacaccctacatgagctcggtgc

SEQ ID NO: 180556 - DNA, 25 bp, probe
ctgcacgcgcgctacactgactggc

SEQ ID NO: 180557 - DNA, 25 bp, probe
ctgcagcgtcactcaggaaaggaaa

SEQ ID NO: 180558 - DNA, 25 bp, probe
ctgagggcacaaggaattagtaaca

SEQ ID NO: 180559 - DNA, 25 bp, probe
ctgcagctgaaatcggattcgtccc

SEQ ID NO: 180560 - DNA, 25 bp, probe
ctgcacgacaactggatcctgcacc

SEQ ID NO: 180561 - DNA, 25 bp, probe
ctgcagcgccaatgaggatctgctg

SEQ ID NO: 180562 - DNA, 25 bp, probe
ctgcacacacaatgcaagtcctggc

SEQ ID NO: 180563 - DNA, 25 bp, probe
ctgagacgctgaacaacatcctggc

SEQ ID NO: 180564 - DNA, 25 bp, probe
ctgaaccagacacagcattgctgac

SEQ ID NO: 180565 - DNA, 25 bp, probe
ctgaaacatccacacattgtagagt

SEQ ID NO: 180566 - DNA, 25 bp, probe
cgaaagcaccactgctttacagaaa

SEQ ID NO: 180567 - DNA, 25 bp, probe
ctgaaagcccactgcctgtatgaga

SEQ ID NO: 180568 - DNA, 25 bp, probe
ctgacctcccaagctctggagagca

SEQ ID NO: 180569 - DNA, 25 bp, probe
ctgacctgcctaaagactgatgaca

SEQ ID NO: 180570 - DNA, 25 bp, probe
ctgacattcctaagagtggaggagg

SEQ ID NO: 180571 - DNA, 25 bp, probe
ctgttctcgctcatcaatggggacg

SEQ ID NO: 180572 - DNA, 25 bp, probe
ctgaggcttgttacattggcacaga

SEQ ID NO: 180573 - DNA, 25 bp, probe
ctgagctctgtgggcactttcaaga

SEQ ID NO: 180574 - DNA, 25 bp, probe
ctgagcctgctgagatcataccagg

SEQ ID NO: 180575 - DNA, 25 bp, probe
ctgaacctgagttcaaccaaccgca

SEQ ID NO: 180576 - DNA, 25 bp, probe
ctgaccctactgtagtcactaccag

SEQ ID NO: 180577 - DNA, 25 bp, probe
ctgaccccagtgaagacaccagata

SEQ ID NO: 180578 - DNA, 25 bp, probe
ctgacctgtctttggaaccagaaca

SEQ ID NO: 180579 - DNA, 25 bp, probe
ctgaatcatccgaggcaaagagaaa

SEQ ID NO: 180580 - DNA, 25 bp, probe
ctgaattacgagcagaaagatccat

SEQ ID NO: 180581 - DNA, 25 bp, probe
ctgaattacgagcacgacagcaaat

SEQ ID NO: 180582 - DNA, 25 bp, probe
ctgaattatgcttccacaggcaaaa

SEQ ID NO: 180583 - DNA, 25 bp, probe
ctgaatttttccagatctgacagga

SEQ ID NO: 180584 - DNA, 25 bp, probe
ctgaatttttccagatctgacagga

SEQ ID NO: 180585 - DNA, 25 bp, probe
ctgagtttagattcccttgaagatg

SEQ ID NO: 180586 - DNA, 25 bp, probe
ctgcaattctggttcctctgaaagt

SEQ ID NO: 180587 - DNA, 25 bp, probe
ctgcaattctggttcctctgaaagt

SEQ ID NO: 180588 - DNA, 25 bp, probe
ctgactgtccagctatcctgaaagt

SEQ ID NO: 180589 - DNA, 25 bp, probe
ctgacttcaatctgtgcctgcaaga

SEQ ID NO: 180590 - DNA, 25 bp, probe
ctgcacatggtgtctgggcttgcta

SEQ ID NO: 180591 - DNA, 25 bp, probe
ctgcacatggtgtctgggcttgcta

SEQ ID NO: 180592 - DNA, 25 bp, probe
ctgcactgcgggggatgtgatgctc

SEQ ID NO: 180593 - DNA, 25 bp, probe
ctgagcactggccgaggtgatgccc

SEQ ID NO: 180594 - DNA, 25 bp, probe
ctgaatcatgggcacggagggccgc

SEQ ID NO: 180595 - DNA, 25 bp, probe
ctgagtcgggccctagcagtggggc

SEQ ID NO: 180596 - DNA, 25 bp, probe
ctgagtggggggtgctggcaagtgt

SEQ ID NO: 180597 - DNA, 25 bp, probe
cggtgggatgtttggggcaattggc

SEQ ID NO: 180598 - DNA, 25 bp, probe
cggcgggaggttgatggcgagtggt

SEQ ID NO: 180599 - DNA, 25 bp, probe
cgtcgttggaggaggccggatggac

SEQ ID NO: 180600 - DNA, 25 bp, probe
ctgtcagttgagtgtcggcgcaggg

SEQ ID NO: 180601 - DNA, 25 bp, probe
ctgtcctgggattgtgcaagaaggt

SEQ ID NO: 180602 - DNA, 25 bp, probe
gctgtcggcagtttggggaagtctg

SEQ ID NO: 180603 - DNA, 25 bp, probe
ctgaaggagtacaccatcaagtcgc

SEQ ID NO: 180604 - DNA, 25 bp, probe
ctgaagggctagaacctggagggct

SEQ ID NO: 180605 - DNA, 25 bp, probe
ctgaagaggtggatcccagagtggc

SEQ ID NO: 180606 - DNA, 25 bp, probe
ctgcacagagggctacttcatggag

SEQ ID NO: 180607 - DNA, 25 bp, probe
ctgaagatggagctgcagcctgcgg

SEQ ID NO: 180608 - DNA, 25 bp, probe
ctgaacaacatcctggcctgcaggt

SEQ ID NO: 180609 - DNA, 25 bp, probe
ctgagaactctcatgagcccagcag

SEQ ID NO: 180610 - DNA, 25 bp, probe
ctgagaactctcatgagcccagcag

SEQ ID NO: 180611 - DNA, 25 bp, probe
ctgagtacatggagatcgaagagga

SEQ ID NO: 180612 - DNA, 25 bp, probe
ctgagtacatggagatcgaagagga

SEQ ID NO: 180613 - DNA, 25 bp, probe
ctgacaagcggatctctgtagacga

SEQ ID NO: 180614 - DNA, 25 bp, probe
ctgacacaatggtagctctgaaggg

SEQ ID NO: 180615 - DNA, 25 bp, probe
ctgaatcacatgattgctcagaagc

SEQ ID NO: 180616 - DNA, 25 bp, probe
ctgttcaaagtcgtagggcttataa

SEQ ID NO: 180617 - DNA, 25 bp, probe
ctgttaaagtgatgaacgctcgtaa

SEQ ID NO: 180618 - DNA, 25 bp, probe
ctgttaaactgttagcactgttgat

SEQ ID NO: 180619 - DNA, 25 bp, probe
ctgtataacctgcataactttttgt

SEQ ID NO: 180620 - DNA, 25 bp, probe
ctgaatgaaactggagaagttgtca

SEQ ID NO: 180621 - DNA, 25 bp, probe
ctgaaagatacaggggatcatgtta

SEQ ID NO: 180622 - DNA, 25 bp, probe
ctgcaatagatgacactgatggttt

SEQ ID NO: 180623 - DNA, 25 bp, probe
ctgcacaagagcactgcagtgtttt

SEQ ID NO: 180624 - DNA, 25 bp, probe
cgcagcaggtgcatcgccagcattt

SEQ ID NO: 180625 - DNA, 25 bp, probe
ctgacaggcatggtactagatttat

SEQ ID NO: 180626 - DNA, 25 bp, probe
ctgacaaaggtagcgatgttgattt

SEQ ID NO: 180627 - DNA, 25 bp, probe
ctgcaaagagaaaccgcttttggtt

SEQ ID NO: 180628 - DNA, 25 bp, probe
ctgcaacagaacgtccacttcaagg

SEQ ID NO: 180629 - DNA, 25 bp, probe
ctgaatatgcaactgtccacttaat

SEQ ID NO: 180630 - DNA, 25 bp, probe
ctgaatctgcactactcaacttata

SEQ ID NO: 180631 - DNA, 25 bp, probe
ctgactctgcactacaaagtcctat

SEQ ID NO: 180632 - DNA, 25 bp, probe
cccctccaaaatgtgcctattgcta

SEQ ID NO: 180633 - DNA, 25 bp, probe
cccctccaaaatgtgcctattgcta

SEQ ID NO: 180634 - DNA, 25 bp, probe
ctgcaactgccagaacttggtattg

SEQ ID NO: 180635 - DNA, 25 bp, probe
ctgcaacggcatgaacttgggatag

SEQ ID NO: 180636 - DNA, 25 bp, probe
ctgcaacggcatgaacttgggatag

SEQ ID NO: 180637 - DNA, 25 bp, probe
ctgcaacctgacacgctatgggaaa

SEQ ID NO: 180638 - DNA, 25 bp, probe
ctgtaccagatcacctggtggaggt

SEQ ID NO: 180639 - DNA, 25 bp, probe
ctgaagccagacttcctgcgtgata

SEQ ID NO: 180640 - DNA, 25 bp, probe
ctgaagcctggattccagcagtgaa

SEQ ID NO: 180641 - DNA, 25 bp, probe
ctgaagcctggatccaagggaccca

SEQ ID NO: 180642 - DNA, 25 bp, probe
ctgaccactggcttaggcgggagcc

SEQ ID NO: 180643 - DNA, 25 bp, probe
ctgaagagggctcagagcgagccag

SEQ ID NO: 180644 - DNA, 25 bp, probe
ctgactgggagctaggggaccacct

SEQ ID NO: 180645 - DNA, 25 bp, probe
ctgacatgtggagtgtgggggtcat

SEQ ID NO: 180646 - DNA, 25 bp, probe
ctgacttggaaggtgccctgtgcta

SEQ ID NO: 180647 - DNA, 25 bp, probe
ctgacttggaaggtgccctgtgcta

SEQ ID NO: 180648 - DNA, 25 bp, probe
ctgaatttgaaggttttgagtatat

SEQ ID NO: 180649 - DNA, 25 bp, probe
ctgattttgaagggttctcgtatgt

SEQ ID NO: 180650 - DNA, 25 bp, probe
ctgtacttcagggatttgccaattc

SEQ ID NO: 180651 - DNA, 25 bp, probe
ctgtacttcagggatttgccaattc

SEQ ID NO: 180652 - DNA, 25 bp, probe
ctgtagatccaggttttgggaggcc

SEQ ID NO: 180653 - DNA, 25 bp, probe
ctgtcaacactgggccttaggagac

SEQ ID NO: 180654 - DNA, 25 bp, probe
ctgtacacagccagccttgggaatc

SEQ ID NO: 180655 - DNA, 25 bp, probe
ctgagccaggcgggcctggggcttc

SEQ ID NO: 180656 - DNA, 25 bp, probe
ctgaccacgggccaggaaggcttca

SEQ ID NO: 180657 - DNA, 25 bp, probe
ctgatacgagggtggaacgcatgtc

SEQ ID NO: 180658 - DNA, 25 bp, probe
ctgaagagagtggtcggcgccaggt

SEQ ID NO: 180659 - DNA, 25 bp, probe
ctgagatagagcaccgtgccctggg

SEQ ID NO: 180660 - DNA, 25 bp, probe
ctgagatagagcaccgtgccctggg

SEQ ID NO: 180661 - DNA, 25 bp, probe
ctgaataggcaagtcgaggcaatgg

SEQ ID NO: 180662 - DNA, 25 bp, probe
ctgacaaggacccgtgtcacatcgt

SEQ ID NO: 180663 - DNA, 25 bp, probe
ctgaagcggagccgagtgaccacct

SEQ ID NO: 180664 - DNA, 25 bp, probe
ctgaaggaaccaacagtccacctca

SEQ ID NO: 180665 - DNA, 25 bp, probe
ctgaagaaacttccagttcctctca

SEQ ID NO: 180666 - DNA, 25 bp, probe
ctgacaaatactggggtgtcctcaa

SEQ ID NO: 180667 - DNA, 25 bp, probe
ctgacccaactctggattccacaga

SEQ ID NO: 180668 - DNA, 25 bp, probe
ctgacccaaatttagtcccagaaat

SEQ ID NO: 180669 - DNA, 25 bp, probe
ctgacgggaatggcactgtcccaga

SEQ ID NO: 180670 - DNA, 25 bp, probe
ctgagctggtgtaagccagttccag

SEQ ID NO: 180671 - DNA, 25 bp, probe
ctgagctcttggaagcgaatcatgc

SEQ ID NO: 180672 - DNA, 25 bp, probe
ctgagctcttggaagcgaatcatgc

SEQ ID NO: 180673 - DNA, 25 bp, probe
ctgagctcttggatgtggtcagctc

SEQ ID NO: 180674 - DNA, 25 bp, probe
ctgactctgttcatttcaagcctgc

SEQ ID NO: 180675 - DNA, 25 bp, probe
ctgatgcttggcttcttttagggct

SEQ ID NO: 180676 - DNA, 25 bp, probe
ctgagttacttgcagatcttggtgg

SEQ ID NO: 180677 - DNA, 25 bp, probe
ctgagttacttgcagatcttggtgg

SEQ ID NO: 180678 - DNA, 25 bp, probe
ctgagttattctctctgttggtggc

SEQ ID NO: 180679 - DNA, 25 bp, probe
ctgagttttaggggtgtgcttgtgc

SEQ ID NO: 180680 - DNA, 25 bp, probe
ctgagttgtaggcctggctgccttg

SEQ ID NO: 180681 - DNA, 25 bp, probe
ctgaggtcatcaagcagtcggccta

SEQ ID NO: 180682 - DNA, 25 bp, probe
ctgaggatgatcatgagcggcaact

SEQ ID NO: 180683 - DNA, 25 bp, probe
ctgatgtgatgcctgttgagtcaga

SEQ ID NO: 180684 - DNA, 25 bp, probe
ctgatgtgtgccagtgagtatgggc

SEQ ID NO: 180685 - DNA, 25 bp, probe
ctgagtgtaccgtggatctgtttaa

SEQ ID NO: 180686 - DNA, 25 bp, probe
ctgagtgtaccgtggatctgtttaa

SEQ ID NO: 180687 - DNA, 25 bp, probe
ctgagcgaagctataggctcttgtt

SEQ ID NO: 180688 - DNA, 25 bp, probe
ctgacagagattccttggctttatt

SEQ ID NO: 180689 - DNA, 25 bp, probe
ctgaacatgttccaagagcctttta

SEQ ID NO: 180690 - DNA, 25 bp, probe
ctgaacatgttccaagagcctttta

SEQ ID NO: 180691 - DNA, 25 bp, probe
ctgaccattttgtatgtgtccttgt

SEQ ID NO: 180692 - DNA, 25 bp, probe
ctgaccattttgtatgtgtccttgt

SEQ ID NO: 180693 - DNA, 25 bp, probe
ctgactctgctcatgagatggtatc

SEQ ID NO: 180694 - DNA, 25 bp, probe
ctgagtctgtgaataaagccacata

SEQ ID NO: 180695 - DNA, 25 bp, probe
ctgagtttcttatcagccctcaagc

SEQ ID NO: 180696 - DNA, 25 bp, probe
ctgagtttcttatcagccctcaagc

SEQ ID NO: 180697 - DNA, 25 bp, probe
ctgagttgttaaccagtcgggagct

SEQ ID NO: 180698 - DNA, 25 bp, probe
ctgaaggtcaaaccggaggagagac

SEQ ID NO: 180699 - DNA, 25 bp, probe
ctgaagaacagatccggaagaagaa

SEQ ID NO: 180700 - DNA, 25 bp, probe
ctgaatatgagaggaacgggagata

SEQ ID NO: 180701 - DNA, 25 bp, probe
ctgacattgatggcgaggcggagga

SEQ ID NO: 180702 - DNA, 25 bp, probe
ctgactctatgagatggggaacaag

SEQ ID NO: 180703 - DNA, 25 bp, probe
ctgacggtgatcttgggcagaacat

SEQ ID NO: 180704 - DNA, 25 bp, probe
ctgaaggtgatcaggctgcaggaag

SEQ ID NO: 180705 - DNA, 25 bp, probe
ctgaaggtgatcaggctgcaggaag

SEQ ID NO: 180706 - DNA, 25 bp, probe
ctgaaggcaggctgtgacttgaagg

SEQ ID NO: 180707 - DNA, 25 bp, probe
ctgagaggcagtcttccttggcaag

SEQ ID NO: 180708 - DNA, 25 bp, probe
ctgaaggggcaccttctgttcactc

SEQ ID NO: 180709 - DNA, 25 bp, probe
ctgagagtgtcagccattcttggta

SEQ ID NO: 180710 - DNA, 25 bp, probe
ctgaggaggcaggtcggcttttaca

SEQ ID NO: 180711 - DNA, 25 bp, probe
ctgacgatgacacctccaattttga

SEQ ID NO: 180712 - DNA, 25 bp, probe
ctgactagcagctggactgattttg

SEQ ID NO: 180713 - DNA, 25 bp, probe
ctgagctgaccaagccagagattgc

SEQ ID NO: 180714 - DNA, 25 bp, probe
ctgagctgaccaagccagagattgc

SEQ ID NO: 180715 - DNA, 25 bp, probe
ctgagacacagctgccagcaaacct

SEQ ID NO: 180716 - DNA, 25 bp, probe
ctgactacttaccacatcaaatctg

SEQ ID NO: 180717 - DNA, 25 bp, probe
ctgacgacttgccgactaactggcc

SEQ ID NO: 180718 - DNA, 25 bp, probe
gctgaccgttggcactaagccagat

SEQ ID NO: 180719 - DNA, 25 bp, probe
ctgacatcgtgtcggactagtgcct

SEQ ID NO: 180720 - DNA, 25 bp, probe
ctgaagtatgtgctgtctcatgtct

SEQ ID NO: 180721 - DNA, 25 bp, probe
ctgaagtatgtgctgtctcatgtct

SEQ ID NO: 180722 - DNA, 25 bp, probe
ctgaagtgtcttcatgtgcattctc

SEQ ID NO: 180723 - DNA, 25 bp, probe
ctgaggtggcttcacagattcttcc

SEQ ID NO: 180724 - DNA, 25 bp, probe
ctgagttggacttcatctttctctg

SEQ ID NO: 180725 - DNA, 25 bp, probe
ctgagcattagatttctcatttgcc

SEQ ID NO: 180726 - DNA, 25 bp, probe
ctgaagtacacattctctgtggact

SEQ ID NO: 180727 - DNA, 25 bp, probe
ctgaagatcgcagactttggactct

SEQ ID NO: 180728 - DNA, 25 bp, probe
ctgaagatcgcagactttggactct

SEQ ID NO: 180729 - DNA, 25 bp, probe
ctgaatgagcaaggcctcttggaca

SEQ ID NO: 180730 - DNA, 25 bp, probe
ctgaaacaccctgagtgagacatta

SEQ ID NO: 180731 - DNA, 25 bp, probe
ctgaggaactccaaaagggcttcaa

SEQ ID NO: 180732 - DNA, 25 bp, probe
ctgaggaatttgcaacgagagattg

SEQ ID NO: 180733 - DNA, 25 bp, probe
cgaagtgtgtatcaaaagagactaa

SEQ ID NO: 180734 - DNA, 25 bp, probe
ctgtactttcagcaactattaataa

SEQ ID NO: 180735 - DNA, 25 bp, probe
ctgtatcttttctaccttcttattt

SEQ ID NO: 180736 - DNA, 25 bp, probe
ctgtttccttttctgatcattctta

SEQ ID NO: 180737 - DNA, 25 bp, probe
ctgttttctggtgttatatctttat

SEQ ID NO: 180738 - DNA, 25 bp, probe
ctgtctcttggctattttaacctaa

SEQ ID NO: 180739 - DNA, 25 bp, probe
ctgttattaattcttatgacgaaaa

SEQ ID NO: 180740 - DNA, 25 bp, probe
ctgtttttcactcttatgtcagagc

SEQ ID NO: 180741 - DNA, 25 bp, probe
ctggatttgtccatcaacttcagga

SEQ ID NO: 180742 - DNA, 25 bp, probe
ctgtgcaatgttatttactgttgta

SEQ ID NO: 180743 - DNA, 25 bp, probe
ctgatgctgtttgttgtactgagag

SEQ ID NO: 180744 - DNA, 25 bp, probe
ctgatgtctggtcatttgccatgaa

SEQ ID NO: 180745 - DNA, 25 bp, probe
ctgatgtctggtcatttgccatgaa

SEQ ID NO: 180746 - DNA, 25 bp, probe
ctgttgctctgatgtttgctcagtg

SEQ ID NO: 180747 - DNA, 25 bp, probe
ctgtttgctgtcattctgagcagcg

SEQ ID NO: 180748 - DNA, 25 bp, probe
ctgacttggtatatgctcatctgag

SEQ ID NO: 180749 - DNA, 25 bp, probe
ctgactgggagaccgccatccagaa

SEQ ID NO: 180750 - DNA, 25 bp, probe
ctgacaagaagtctgccaccaagct

SEQ ID NO: 180751 - DNA, 25 bp, probe
ctgaagagaaagctgccaccaagaa

SEQ ID NO: 180752 - DNA, 25 bp, probe
ctgaaagatctctgtcacatccaac

SEQ ID NO: 180753 - DNA, 25 bp, probe
ctgaaaacttcccacatcagcacac

SEQ ID NO: 180754 - DNA, 25 bp, probe
ctgaaaacttcccacatcagcacac

SEQ ID NO: 180755 - DNA, 25 bp, probe
ctgatgaagatctcctgcaccagca

SEQ ID NO: 180756 - DNA, 25 bp, probe
ctgatgaagatctcctgcaccagca

SEQ ID NO: 180757 - DNA, 25 bp, probe
ctgactgagacccagatagccatga

SEQ ID NO: 180758 - DNA, 25 bp, probe
ctgagctaatagccactagcagaac

SEQ ID NO: 180759 - DNA, 25 bp, probe
ctgagtagacagccccaagcatggc

SEQ ID NO: 180760 - DNA, 25 bp, probe
cggatgaactcagccaactacagtc

SEQ ID NO: 180761 - DNA, 25 bp, probe
ctgaagatatctgaaatgacccagt

SEQ ID NO: 180762 - DNA, 25 bp, probe
ctgaagatatctgaaatgacccagt

SEQ ID NO: 180763 - DNA, 25 bp, probe
ctgagaaattgctttgtgtcccact

SEQ ID NO: 180764 - DNA, 25 bp, probe
ctgagaccacaatttgttcactttt

SEQ ID NO: 180765 - DNA, 25 bp, probe
ctgaacccacaaattattcttacag

SEQ ID NO: 180766 - DNA, 25 bp, probe
ctgacacccctgacttttattaaag

SEQ ID NO: 180767 - DNA, 25 bp, probe
gctaacccttgttgggaactaacag

SEQ ID NO: 180768 - DNA, 25 bp, probe
ctgaaccgttgcttgtggatttata

SEQ ID NO: 180769 - DNA, 25 bp, probe
ctgatacaagttgttcagcttcttg

SEQ ID NO: 180770 - DNA, 25 bp, probe
ctgatacaagttgttcagcttcttg

SEQ ID NO: 180771 - DNA, 25 bp, probe
ctgagtcaagttttctagttctgtg

SEQ ID NO: 180772 - DNA, 25 bp, probe
cggcccacttgacttagttcttggg

SEQ ID NO: 180773 - DNA, 25 bp, probe
ctgagccccttaaatatcttgtcta

SEQ ID NO: 180774 - DNA, 25 bp, probe
ctgaggcccgacactatgttgtctg

SEQ ID NO: 180775 - DNA, 25 bp, probe
ctgaagccgctgtcgaaatgggtcg

SEQ ID NO: 180776 - DNA, 25 bp, probe
ctgaagcgcatcatggaagtggtgg

SEQ ID NO: 180777 - DNA, 25 bp, probe
ctgatggcccttgggagacagatgg

SEQ ID NO: 180778 - DNA, 25 bp, probe
ctgaccccaatgctgcagagcagtc

SEQ ID NO: 180779 - DNA, 25 bp, probe
ctgaccccaatgctgcagagcagtc

SEQ ID NO: 180780 - DNA, 25 bp, probe
ctgaccccaatgctgcagagcagtc

SEQ ID NO: 180781 - DNA, 25 bp, probe
ctgaccaacaatagccagacacccc

SEQ ID NO: 180782 - DNA, 25 bp, probe
ctgagccaatcctgccagaaattca

SEQ ID NO: 180783 - DNA, 25 bp, probe
ctgacacaatcctgaaagaaagcat

SEQ ID NO: 180784 - DNA, 25 bp, probe
ctgacccatcagttgaagaaatgag

SEQ ID NO: 180785 - DNA, 25 bp, probe
ctgacccatcagttgaagaaatgag

SEQ ID NO: 180786 - DNA, 25 bp, probe
ctgaagcctcagtcatgacgcaact

SEQ ID NO: 180787 - DNA, 25 bp, probe
ctgaaccacacactgagcgagaggc

SEQ ID NO: 180788 - DNA, 25 bp, probe
ctgaagctgccaggcaagagagaga

SEQ ID NO: 180789 - DNA, 25 bp, probe
ctgaagctgtgtgccagggagtgag

SEQ ID NO: 180790 - DNA, 25 bp, probe
ctgaacagtgcgcccgtagatgggc

SEQ ID NO: 180791 - DNA, 25 bp, probe
ctgaagcagagccctgggacggacc

SEQ ID NO: 180792 - DNA, 25 bp, probe
ctgaagcagagccctgggacggacc

SEQ ID NO: 180793 - DNA, 25 bp, probe
ctgagagcagagccgttggacttcc

SEQ ID NO: 180794 - DNA, 25 bp, probe
ctgaacgggcgactgtgtcttgact

SEQ ID NO: 180795 - DNA, 25 bp, probe
ctgaacgggaagctcactggcatgg

SEQ ID NO: 180796 - DNA, 25 bp, probe
ctgagcaccaggtggtctcctctga

SEQ ID NO: 180797 - DNA, 25 bp, probe
ctgaagcctggcacgatgtctccag

SEQ ID NO: 180798 - DNA, 25 bp, probe
ctgaagcctggaactgattgcggag

SEQ ID NO: 180799 - DNA, 25 bp, probe
ctgaagccaggaactatgtctgtgc

SEQ ID NO: 180800 - DNA, 25 bp, probe
ctgacacgcatctttgcttacagtg

SEQ ID NO: 180801 - DNA, 25 bp, probe
ctgacaggtgaccgatgtacaggac

SEQ ID NO: 180802 - DNA, 25 bp, probe
ctgacaggtgccctttgtcagaccc

SEQ ID NO: 180803 - DNA, 25 bp, probe
ctgagacagttccttttagactcac

SEQ ID NO: 180804 - DNA, 25 bp, probe
ctgtgccagtacacttgcggagtac

SEQ ID NO: 180805 - DNA, 25 bp, probe
ctgatccagaatgtttccgtgctac

SEQ ID NO: 180806 - DNA, 25 bp, probe
ctgatccgaatgagtatgcctttag

SEQ ID NO: 180807 - DNA, 25 bp, probe
ctgaccgacttttggacttttggca

SEQ ID NO: 180808 - DNA, 25 bp, probe
ctgaccgacttttggacttttggca

SEQ ID NO: 180809 - DNA, 25 bp, probe
cgaccacgcttttgtcaaggtttgc

SEQ ID NO: 180810 - DNA, 25 bp, probe
ctgatcccgatgttagaaatggttc

SEQ ID NO: 180811 - DNA, 25 bp, probe
ctgactccaagctgcatggcaagtt

SEQ ID NO: 180812 - DNA, 25 bp, probe
ctgacatcacaaggtgctggcactt

SEQ ID NO: 180813 - DNA, 25 bp, probe
ctgacatgtattgcgggcgctctag

SEQ ID NO: 180814 - DNA, 25 bp, probe
ctgacctttgcaaaggctgccgagc

SEQ ID NO: 180815 - DNA, 25 bp, probe
ctgactgctttggatagtctcctac

SEQ ID NO: 180816 - DNA, 25 bp, probe
ctgacttcatctggggttggcaaca

SEQ ID NO: 180817 - DNA, 25 bp, probe
ctgagctctatccagggtcataaaa

SEQ ID NO: 180818 - DNA, 25 bp, probe
ctgagtctgtgccagtgggacctaa

SEQ ID NO: 180819 - DNA, 25 bp, probe
ctgtcttgctcctatggagtcacat

SEQ ID NO: 180820 - DNA, 25 bp, probe
ctgtgttcccaaagtccatgatgac

SEQ ID NO: 180821 - DNA, 25 bp, probe
ctgtgttccatacagccttggacta

SEQ ID NO: 180822 - DNA, 25 bp, probe
ctgagttcctcaagggaagaacaca

SEQ ID NO: 180823 - DNA, 25 bp, probe
ctgagtcccctccaggaagaagcag

SEQ ID NO: 180824 - DNA, 25 bp, probe
ctgttcccctgcagttcaaatgcag

SEQ ID NO: 180825 - DNA, 25 bp, probe
ctgttcccctgcagttcaaatgcag

SEQ ID NO: 180826 - DNA, 25 bp, probe
ctgttcacgaccagtgtgccatgaa

SEQ ID NO: 180827 - DNA, 25 bp, probe
ctgtatcgtacctgggctcatggag

SEQ ID NO: 180828 - DNA, 25 bp, probe
ctgataactactgacttcactggag

SEQ ID NO: 180829 - DNA, 25 bp, probe
ctgtcaactatttcaccaagcggag

SEQ ID NO: 180830 - DNA, 25 bp, probe
ctgtcaacatccacactaggcagga

SEQ ID NO: 180831 - DNA, 25 bp, probe
ctgtcagcaacgctcagacggctga

SEQ ID NO: 180832 - DNA, 25 bp, probe
ctgtctgaacttgggcaaggcgatg

SEQ ID NO: 180833 - DNA, 25 bp, probe
ctgttatactaccagaaggctttaa

SEQ ID NO: 180834 - DNA, 25 bp, probe
ctgtttgattatgcagagcatgact

SEQ ID NO: 180835 - DNA, 25 bp, probe
ctgttctatctcacgagacctttga

SEQ ID NO: 180836 - DNA, 25 bp, probe
ctgacctggccaaccaagacttgga

SEQ ID NO: 180837 - DNA, 25 bp, probe
ctgacgtacccatcaggacagtgag

SEQ ID NO: 180838 - DNA, 25 bp, probe
ctgacgtcagaggccgaggccagga

SEQ ID NO: 180839 - DNA, 25 bp, probe
ctgacctcgatagctaggccaagtt

SEQ ID NO: 180840 - DNA, 25 bp, probe
ctgacctcgatagctaggccaagtt

SEQ ID NO: 180841 - DNA, 25 bp, probe
ctgaccacagtgttctcaggcagca

SEQ ID NO: 180842 - DNA, 25 bp, probe
ctgatcccagttttctggaagcaat

SEQ ID NO: 180843 - DNA, 25 bp, probe
ctgacgctggttttgtgtacagtga

SEQ ID NO: 180844 - DNA, 25 bp, probe
ctgacctgtgcgattgctgtagcgg

SEQ ID NO: 180845 - DNA, 25 bp, probe
ctgagccctgatttgtggtagggaa

SEQ ID NO: 180846 - DNA, 25 bp, probe
ctggccttttttctacgaatgcact

SEQ ID NO: 180847 - DNA, 25 bp, probe
cgcgtgttttatattaggacgactc

SEQ ID NO: 180848 - DNA, 25 bp, probe
cggtggcttcctgatacaagacgac

SEQ ID NO: 180849 - DNA, 25 bp, probe
ctgtgattcttcgaaatctcaaaga

SEQ ID NO: 180850 - DNA, 25 bp, probe
ctgtttgcactggacatattcccta

SEQ ID NO: 180851 - DNA, 25 bp, probe
ctgttcagcattcactaaccctgtt

SEQ ID NO: 180852 - DNA, 25 bp, probe
ctgtagaagtgatcctcaccctttt

SEQ ID NO: 180853 - DNA, 25 bp, probe
cggagcttggaagtcatacccgaaa

SEQ ID NO: 180854 - DNA, 25 bp, probe
cgtgtccgaagataaccggcagtag

SEQ ID NO: 180855 - DNA, 25 bp, probe
cgttctagaggtgcccttggcagga

SEQ ID NO: 180856 - DNA, 25 bp, probe
ctgtttcagagcttcttccctaagc

SEQ ID NO: 180857 - DNA, 25 bp, probe
ctgtttcagagcttcttccctaagc

SEQ ID NO: 180858 - DNA, 25 bp, probe
ctggttccagtttgcccaatggagt

SEQ ID NO: 180859 - DNA, 25 bp, probe
ctgtgttggggtcctcaaagaagta

SEQ ID NO: 180860 - DNA, 25 bp, probe
ctgacttcgggatgtgcaaggaagg

SEQ ID NO: 180861 - DNA, 25 bp, probe
ctgaccttcggagccaaggctaatg

SEQ ID NO: 180862 - DNA, 25 bp, probe
gctgaccttcggagccaaggctaat

SEQ ID NO: 180863 - DNA, 25 bp, probe
gctgaccttcggagccaaggctaat

SEQ ID NO: 180864 - DNA, 25 bp, probe
ctgaccttcgccagcaacaatgtga

SEQ ID NO: 180865 - DNA, 25 bp, probe
ctgaccttcgccagcaacaatgtga

SEQ ID NO: 180866 - DNA, 25 bp, probe
ctgtccttctgcaccgaaatggaaa

SEQ ID NO: 180867 - DNA, 25 bp, probe
ctgtccactcgattccaagggtaaa

SEQ ID NO: 180868 - DNA, 25 bp, probe
ctgtcggccgaagccatcggcatca

SEQ ID NO: 180869 - DNA, 25 bp, probe
ctgtcggccgaagccatcggcatca

SEQ ID NO: 180870 - DNA, 25 bp, probe
ctgtaggcccgactcacagggccag

SEQ ID NO: 180871 - DNA, 25 bp, probe
ctgtagtcccagatgaatggataca

SEQ ID NO: 180872 - DNA, 25 bp, probe
ctgtagtcccagatgaatggataca

SEQ ID NO: 180873 - DNA, 25 bp, probe
ctgttacttacactgactggatcca

SEQ ID NO: 180874 - DNA, 25 bp, probe
ctgttacttacactgactggatcca

SEQ ID NO: 180875 - DNA, 25 bp, probe
ctgataactctgtacgaggcttctc

SEQ ID NO: 180876 - DNA, 25 bp, probe
ctgacattcttgaaggggttctgtg

SEQ ID NO: 180877 - DNA, 25 bp, probe
ctgagatcttttgggtgcagttctg

SEQ ID NO: 180878 - DNA, 25 bp, probe
ctgagactctttagagcagctttgg

SEQ ID NO: 180879 - DNA, 25 bp, probe
ctgacatcttatgccagaattgtgg

SEQ ID NO: 180880 - DNA, 25 bp, probe
ctgaccatctgtgccaagagcttgg

SEQ ID NO: 180881 - DNA, 25 bp, probe
ctgactctctgtgccaagggctgtg

SEQ ID NO: 180882 - DNA, 25 bp, probe
ctgacttccttctagggcagtctgg

SEQ ID NO: 180883 - DNA, 25 bp, probe
ctgacttccttcttgaaatgactgt

SEQ ID NO: 180884 - DNA, 25 bp, probe
ctgtttccctttcactggcatggga

SEQ ID NO: 180885 - DNA, 25 bp, probe
ctgtttccatctttaagttcccaga

SEQ ID NO: 180886 - DNA, 25 bp, probe
ctggttttctggatggttcccagag

SEQ ID NO: 180887 - DNA, 25 bp, probe
ctggcttttgggagtgctatggcaa

SEQ ID NO: 180888 - DNA, 25 bp, probe
ctgacattgtattggaactgcttcc

SEQ ID NO: 180889 - DNA, 25 bp, probe
ctgactacatttcaagctctccagc

SEQ ID NO: 180890 - DNA, 25 bp, probe
ctgttttttgtctatgtcccagctg

SEQ ID NO: 180891 - DNA, 25 bp, probe
ctgtttctctatgtagtctggcagt

SEQ ID NO: 180892 - DNA, 25 bp, probe
cgttacctgtcactattgtgccttc

SEQ ID NO: 180893 - DNA, 25 bp, probe
cgttacctgtcactattgtgccttc

SEQ ID NO: 180894 - DNA, 25 bp, probe
ctgttacacgctgcttgtagacatg

SEQ ID NO: 180895 - DNA, 25 bp, probe
ctgtttcctctggtttcagacagag

SEQ ID NO: 180896 - DNA, 25 bp, probe
ctgtttcatgctttgctccgaacaa

SEQ ID NO: 180897 - DNA, 25 bp, probe
ctgttctgcttgtatcccagtgata

SEQ ID NO: 180898 - DNA, 25 bp, probe
ctgacagtgcttctacacatttcat

SEQ ID NO: 180899 - DNA, 25 bp, probe
ctgatcgatcatgcagatacaatgt

SEQ ID NO: 180900 - DNA, 25 bp, probe
ctgagagctctgtctgatatcactg

SEQ ID NO: 180901 - DNA, 25 bp, probe
ctgagatctctctgcatagaggtga

SEQ ID NO: 180902 - DNA, 25 bp, probe
ctgaggactctgacattgatggcga

SEQ ID NO: 180903 - DNA, 25 bp, probe
ctgaggactctgacattgatggcga

SEQ ID NO: 180904 - DNA, 25 bp, probe
ctgacggctgctcatgttgtggagg

SEQ ID NO: 180905 - DNA, 25 bp, probe
ctgaccgttctattgtgtggatgac

SEQ ID NO: 180906 - DNA, 25 bp, probe
ctgaccgttctattgtgtggatgac

SEQ ID NO: 180907 - DNA, 25 bp, probe
ctgaccagtgtgcgtgtgtgtgtgt

SEQ ID NO: 180908 - DNA, 25 bp, probe
ctgacctgtgagcacattggctgtt

SEQ ID NO: 180909 - DNA, 25 bp, probe
ctgaccgtacagatgatggcatatg

SEQ ID NO: 180910 - DNA, 25 bp, probe
ctgacacttagcattctggtagacg

SEQ ID NO: 180911 - DNA, 25 bp, probe
ctgttttatggatctggtctgactg

SEQ ID NO: 180912 - DNA, 25 bp, probe
ctgttactgggccctgagtctgggc

SEQ ID NO: 180913 - DNA, 25 bp, probe
ctgagcaaggggctgcaggtcgggg

SEQ ID NO: 180914 - DNA, 25 bp, probe
ctgagaagaggctgggcgtgagggg

SEQ ID NO: 180915 - DNA, 25 bp, probe
ctgtaaaccctgacggtgggcctgg

SEQ ID NO: 180916 - DNA, 25 bp, probe
ctgataaacccggggtgacctcatg

SEQ ID NO: 180917 - DNA, 25 bp, probe
ctgtaagccttcccgtaaatctcag

SEQ ID NO: 180918 - DNA, 25 bp, probe
ctgtaagccttcccgtaaatctcag

SEQ ID NO: 180919 - DNA, 25 bp, probe
ctgtcccactttgagtacgtcaaga

SEQ ID NO: 180920 - DNA, 25 bp, probe
ctgtccggtttgcagtacttgcaca

SEQ ID NO: 180921 - DNA, 25 bp, probe
ctgattccatgtctgggatgacttc

SEQ ID NO: 180922 - DNA, 25 bp, probe
ctgttcacattgcttggcaaccttc

SEQ ID NO: 180923 - DNA, 25 bp, probe
ctgtctccgtggacaggtacctggc

SEQ ID NO: 180924 - DNA, 25 bp, probe
ctgtttcggacccagatcatccgga

SEQ ID NO: 180925 - DNA, 25 bp, probe
ctgtttcggacccagatcatccgga

SEQ ID NO: 180926 - DNA, 25 bp, probe
ctgtttctgtgcgcttacccagaat

SEQ ID NO: 180927 - DNA, 25 bp, probe
ctgttctgattgacccatacctaga

SEQ ID NO: 180928 - DNA, 25 bp, probe
ctggacgacaacggccacattattc

SEQ ID NO: 180929 - DNA, 25 bp, probe
ctgagaatgacgatacccgtgactc

SEQ ID NO: 180930 - DNA, 25 bp, probe
ctgagataccgcaacaggccgaact

SEQ ID NO: 180931 - DNA, 25 bp, probe
cgttacagcgcaacagcagcctgca

SEQ ID NO: 180932 - DNA, 25 bp, probe
ctgactggtgaggaagcagcctgca

SEQ ID NO: 180933 - DNA, 25 bp, probe
ctgtagggagcagtaagcagctgca

SEQ ID NO: 180934 - DNA, 25 bp, probe
ctgagacagcgaggacctgcaggct

SEQ ID NO: 180935 - DNA, 25 bp, probe
ctgagacagcgaggacctgcaggct

SEQ ID NO: 180936 - DNA, 25 bp, probe
ctgagaagctttctctgctgcagct

SEQ ID NO: 180937 - DNA, 25 bp, probe
ctgagatggctgttgagctctgctc

SEQ ID NO: 180938 - DNA, 25 bp, probe
ctgagatggctgttgagctctgctc

SEQ ID NO: 180939 - DNA, 25 bp, probe
ctgagattctgttcagcattcacta

SEQ ID NO: 180940 - DNA, 25 bp, probe
ctgagaatgtgccatccttcagatg

SEQ ID NO: 180941 - DNA, 25 bp, probe
ctgagcaatgtcgtcttcatggcat

SEQ ID NO: 180942 - DNA, 25 bp, probe
ctgagagcatctcgaatatcaggat

SEQ ID NO: 180943 - DNA, 25 bp, probe
ctgagagcatctcgaatatcaggat

SEQ ID NO: 180944 - DNA, 25 bp, probe
ctgaggatccatcatatagttcaac

SEQ ID NO: 180945 - DNA, 25 bp, probe
ctgaggctcgatctgtacttcaaga

SEQ ID NO: 180946 - DNA, 25 bp, probe
ctgagagtcaggagttttactgcct

SEQ ID NO: 180947 - DNA, 25 bp, probe
ctgaggtcaggtcttggtaggtgcc

SEQ ID NO: 180948 - DNA, 25 bp, probe
ctgaggtaagctgcttcgggggacc

SEQ ID NO: 180949 - DNA, 25 bp, probe
ctgatggggagggtctcggtggtac

SEQ ID NO: 180950 - DNA, 25 bp, probe
ctgttcgagaacgtccagtgctgga

SEQ ID NO: 180951 - DNA, 25 bp, probe
ctgttcgtggccagcctgctggcca

SEQ ID NO: 180952 - DNA, 25 bp, probe
ctgtcatctgggacaggccgtccag

SEQ ID NO: 180953 - DNA, 25 bp, probe
ctgtcattctgagcagcgtcaacaa

SEQ ID NO: 180954 - DNA, 25 bp, probe
ctgatgctgcggaccaggacaagca

SEQ ID NO: 180955 - DNA, 25 bp, probe
ctgatgccgtgttcaggctcatgga

SEQ ID NO: 180956 - DNA, 25 bp, probe
ctgatcagctggttattgctaacat

SEQ ID NO: 180957 - DNA, 25 bp, probe
ctgtagatgcagtatatggaatcag

SEQ ID NO: 180958 - DNA, 25 bp, probe
ctgtctacatcattatggaactggt

SEQ ID NO: 180959 - DNA, 25 bp, probe
ctgtctacatcattatggaactggt

SEQ ID NO: 180960 - DNA, 25 bp, probe
ctgtcatactctgcacgaactcgac

SEQ ID NO: 180961 - DNA, 25 bp, probe
ctgtcatactctgcacgaactcgac

SEQ ID NO: 180962 - DNA, 25 bp, probe
ctgtttttccagcaaaccacgctaa

SEQ ID NO: 180963 - DNA, 25 bp, probe
ctgattcttttccaaacagtcccct

SEQ ID NO: 180964 - DNA, 25 bp, probe
ctgttctgtgtacataaagtcatca

SEQ ID NO: 180965 - DNA, 25 bp, probe
ctgtttagcattcactaagccctac

SEQ ID NO: 180966 - DNA, 25 bp, probe
ctgtttccattacaaccactgctac

SEQ ID NO: 180967 - DNA, 25 bp, probe
ctggtttgactaccatggccacatg

SEQ ID NO: 180968 - DNA, 25 bp, probe
ctgaggctctgagaactggtactct

SEQ ID NO: 180969 - DNA, 25 bp, probe
ctgaggcctgacacggcagatcagc

SEQ ID NO: 180970 - DNA, 25 bp, probe
ctgactgcagcgtcactcaggaaag

SEQ ID NO: 180971 - DNA, 25 bp, probe
ctgtcagagcctgccaagatcacag

SEQ ID NO: 180972 - DNA, 25 bp, probe
ctgtcatgcctcaccaagaatactg

SEQ ID NO: 180973 - DNA, 25 bp, probe
ctgtacccccagtaaagagctttct

SEQ ID NO: 180974 - DNA, 25 bp, probe
ctgtacgcccagggaaagcggcgtt

SEQ ID NO: 180975 - DNA, 25 bp, probe
ctgagaccccagagctgacagggcc

SEQ ID NO: 180976 - DNA, 25 bp, probe
ctgaggaccaagaagtgcaaggatc

SEQ ID NO: 180977 - DNA, 25 bp, probe
ctgggatggggtttgagatggatta

SEQ ID NO: 180978 - DNA, 25 bp, probe
ctgggatggggtttgagatggatta

SEQ ID NO: 180979 - DNA, 25 bp, probe
ctgaggggcggaagatgaagatttc

SEQ ID NO: 180980 - DNA, 25 bp, probe
tcttggggccagtttgcacagttat

SEQ ID NO: 180981 - DNA, 25 bp, probe
cgtggcgtcctggttcaaggatgtc

SEQ ID NO: 180982 - DNA, 25 bp, probe
ctgaggggcctgtggcggtgcaggc

SEQ ID NO: 180983 - DNA, 25 bp, probe
ctgagccggcgtccaagggatgacg

SEQ ID NO: 180984 - DNA, 25 bp, probe
ctgaccggctgcgcaaatggatgtt

SEQ ID NO: 180985 - DNA, 25 bp, probe
ctgacccactgttgcagaatgaagt

SEQ ID NO: 180986 - DNA, 25 bp, probe
ctgaccctcatgccggagtgaaggc

SEQ ID NO: 180987 - DNA, 25 bp, probe
ctgagcgccagcggcgggtacgaga

SEQ ID NO: 180988 - DNA, 25 bp, probe
ctgagtgcccggggcacggcacaga

SEQ ID NO: 180989 - DNA, 25 bp, probe
ctgagtgcccggggcacggcacaga

SEQ ID NO: 180990 - DNA, 25 bp, probe
ctgagttccttcagatcagccacac

SEQ ID NO: 180991 - DNA, 25 bp, probe
ctgagttgcctgaggtcattcacat

SEQ ID NO: 180992 - DNA, 25 bp, probe
ctgagttgcctgaggtcattcacat

SEQ ID NO: 180993 - DNA, 25 bp, probe
ctgagtttgctgttggtgcaggaat

SEQ ID NO: 180994 - DNA, 25 bp, probe
ctgagctgtatggtccagcagggga

SEQ ID NO: 180995 - DNA, 25 bp, probe
ctgagtgactggagacagggatgat

SEQ ID NO: 180996 - DNA, 25 bp, probe
ctgagctgccggactacaacaagat

SEQ ID NO: 180997 - DNA, 25 bp, probe
ctgagctgccggactacaacaagat

SEQ ID NO: 180998 - DNA, 25 bp, probe
ctgagctgccggactacaacaagat

SEQ ID NO: 180999 - DNA, 25 bp, probe
ctgagctgccggactacaacaagat

SEQ ID NO: 181000 - DNA, 25 bp, probe
ctgaggccacgacaaagcacagctc

SEQ ID NO: 181001 - DNA, 25 bp, probe
ctgagagctcagatttagaaagctc

SEQ ID NO: 181002 - DNA, 25 bp, probe
ctgatgaacagatttctacaattgt

SEQ ID NO: 181003 - DNA, 25 bp, probe
ctgataacagaattgccaaggcagc

SEQ ID NO: 181004 - DNA, 25 bp, probe
ctgataacagaattgccaaggcagc

SEQ ID NO: 181005 - DNA, 25 bp, probe
ctgataagcgctatgccatggtcct

SEQ ID NO: 181006 - DNA, 25 bp, probe
ctgaggggccagagctggtccttac

SEQ ID NO: 181007 - DNA, 25 bp, probe
ctgaggcggccaattatcgtgtctt

SEQ ID NO: 181008 - DNA, 25 bp, probe
ctgatcctttcaatatacgttcttc

SEQ ID NO: 181009 - DNA, 25 bp, probe
ctgatcttggtatttttgtctcctc

SEQ ID NO: 181010 - DNA, 25 bp, probe
ctgaccataaagtcttttgctccgc

SEQ ID NO: 181011 - DNA, 25 bp, probe
ctgagccagaaggtcttctcaccgc

SEQ ID NO: 181012 - DNA, 25 bp, probe
ctgtccagaagggctactttccaca

SEQ ID NO: 181013 - DNA, 25 bp, probe
ctgtagatgaagctctccaacaccc

SEQ ID NO: 181014 - DNA, 25 bp, probe
ctgtagatgaagctctccaacaccc

SEQ ID NO: 181015 - DNA, 25 bp, probe
ctgttctgaagcaccgagacacacc

SEQ ID NO: 181016 - DNA, 25 bp, probe
ctgttctgaagcaccgagacacacc

SEQ ID NO: 181017 - DNA, 25 bp, probe
ctgtttactgagccttaatccacca

SEQ ID NO: 181018 - DNA, 25 bp, probe
ctgttgggacagccattttccaaca

SEQ ID NO: 181019 - DNA, 25 bp, probe
ctgatggggaacctaccatccgtgc

SEQ ID NO: 181020 - DNA, 25 bp, probe
ctgtgcggtgcattggagacgtccg

SEQ ID NO: 181021 - DNA, 25 bp, probe
ctgtgcggtgcattggagacgtccg

SEQ ID NO: 181022 - DNA, 25 bp, probe
ctgagcctgtgcaggaagcaccctg

SEQ ID NO: 181023 - DNA, 25 bp, probe
ctgagacgtctaggaacacaccaga

SEQ ID NO: 181024 - DNA, 25 bp, probe
ctgagcacgctcgtggaaaccacac

SEQ ID NO: 181025 - DNA, 25 bp, probe
ctgagggtcctacagagccaaccag

SEQ ID NO: 181026 - DNA, 25 bp, probe
ctgagggaaaatctgaccataagaa

SEQ ID NO: 181027 - DNA, 25 bp, probe
ctgagtgttataatccttcgtgaaa

SEQ ID NO: 181028 - DNA, 25 bp, probe
ctgagtgttataatccttcgtgaaa

SEQ ID NO: 181029 - DNA, 25 bp, probe
ctgaggaggttccctttgtgattac

SEQ ID NO: 181030 - DNA, 25 bp, probe
ctgagggaggcattcacctttatgt

SEQ ID NO: 181031 - DNA, 25 bp, probe
ctgagaagaggagccctcatcttga

SEQ ID NO: 181032 - DNA, 25 bp, probe
ctgagaagggttgatcctgcatctg

SEQ ID NO: 181033 - DNA, 25 bp, probe
ctgagcaagatggtgcaggacccag

SEQ ID NO: 181034 - DNA, 25 bp, probe
ctgaccagctgaggcagcagtgccc

SEQ ID NO: 181035 - DNA, 25 bp, probe
ctgacctgaacgcagtcatccggaa

SEQ ID NO: 181036 - DNA, 25 bp, probe
ctgacctcaaagctgtccgggagaa

SEQ ID NO: 181037 - DNA, 25 bp, probe
ctgacctcaaagctgtccgggagaa

SEQ ID NO: 181038 - DNA, 25 bp, probe
ctgaccaagccagagattgcgggca

SEQ ID NO: 181039 - DNA, 25 bp, probe
ctgaccacagcctgatattccagaa

SEQ ID NO: 181040 - DNA, 25 bp, probe
ctgagcccaggctaaactgccaaca

SEQ ID NO: 181041 - DNA, 25 bp, probe
ctgatgccacagttaggaccaataa

SEQ ID NO: 181042 - DNA, 25 bp, probe
gcattggccagacagggacgttcat

SEQ ID NO: 181043 - DNA, 25 bp, probe
ctgtggccaggtataactttgccgc

SEQ ID NO: 181044 - DNA, 25 bp, probe
ctgatgtgccgctggctgaactttg

SEQ ID NO: 181045 - DNA, 25 bp, probe
cgttgccgatccgaaatcgctttcg

SEQ ID NO: 181046 - DNA, 25 bp, probe
ctgtgcgcttacccagaattcttgt

SEQ ID NO: 181047 - DNA, 25 bp, probe
cgagcgtccgcatgctaatcgcttt

SEQ ID NO: 181048 - DNA, 25 bp, probe
cgggagcaatgctgtacggttttgt

SEQ ID NO: 181049 - DNA, 25 bp, probe
cgggagcaatgctgtacggttttgt

SEQ ID NO: 181050 - DNA, 25 bp, probe
cgaagacgcacacaaaggtatttta

SEQ ID NO: 181051 - DNA, 25 bp, probe
ctggaagccaaacaccggcatttta

SEQ ID NO: 181052 - DNA, 25 bp, probe
ctgtacaaagaaaaccccttgctat

SEQ ID NO: 181053 - DNA, 25 bp, probe
ctgtggaataaagatccttcttaca

SEQ ID NO: 181054 - DNA, 25 bp, probe
ctgtggaataaagatccttcttaca

SEQ ID NO: 181055 - DNA, 25 bp, probe
ctgtgctcagtaaaccgctttttaa

SEQ ID NO: 181056 - DNA, 25 bp, probe
ctgatccagagaatgaaccttttga

SEQ ID NO: 181057 - DNA, 25 bp, probe
ctgatgaaggtgcaagccttagaga

SEQ ID NO: 181058 - DNA, 25 bp, probe
ctgagctccatcaaggctgacatcg

SEQ ID NO: 181059 - DNA, 25 bp, probe
ctgagatcgcacaggatgagattta

SEQ ID NO: 181060 - DNA, 25 bp, probe
ctgagacagcagagctcgatgatat

SEQ ID NO: 181061 - DNA, 25 bp, probe
ctgagagcaccggtgctatcacatc

SEQ ID NO: 181062 - DNA, 25 bp, probe
ctgagaagcaccttttcagcaccat

SEQ ID NO: 181063 - DNA, 25 bp, probe
ctgatataacactttccagcctata

SEQ ID NO: 181064 - DNA, 25 bp, probe
ctgtcatcagaatctgtcggccaaa

SEQ ID NO: 181065 - DNA, 25 bp, probe
ctgaccaacaacctgctggatgaca

SEQ ID NO: 181066 - DNA, 25 bp, probe
ctgaccagggaccagcatgagcgac

SEQ ID NO: 181067 - DNA, 25 bp, probe
ctgagccctgtgagaggcacgactg

SEQ ID NO: 181068 - DNA, 25 bp, probe
ctgttcctgctgcgtggcatggaag

SEQ ID NO: 181069 - DNA, 25 bp, probe
ctgttcctgctgcgtggcatggaag

SEQ ID NO: 181070 - DNA, 25 bp, probe
ctgttcttcatccttgtgattggta

SEQ ID NO: 181071 - DNA, 25 bp, probe
ctgttcttggtcatgtatgtggtga

SEQ ID NO: 181072 - DNA, 25 bp, probe
ctgttcctgttactgttgggtcttg

SEQ ID NO: 181073 - DNA, 25 bp, probe
ctgtctgcctgtattttcggacttt

SEQ ID NO: 181074 - DNA, 25 bp, probe
cgtagccgttctgattcaagagctc

SEQ ID NO: 181075 - DNA, 25 bp, probe
ctgtatttttctctgctaagaccgg

SEQ ID NO: 181076 - DNA, 25 bp, probe
ctgttttgcttccatggctcaaata

SEQ ID NO: 181077 - DNA, 25 bp, probe
ctgtcttttgctgatctacaaataa

SEQ ID NO: 181078 - DNA, 25 bp, probe
ctgagtcctagagattacataaata

SEQ ID NO: 181079 - DNA, 25 bp, probe
cgactttcaaggttaattagataca

SEQ ID NO: 181080 - DNA, 25 bp, probe
cgactttcaaggttaattagataca

SEQ ID NO: 181081 - DNA, 25 bp, probe
cggcgattcaaagttagtcaggtaa

SEQ ID NO: 181082 - DNA, 25 bp, probe
cggcgattcaaagttagtcaggtaa

SEQ ID NO: 181083 - DNA, 25 bp, probe
cgtccttcgtaacggtcagagtgaa

SEQ ID NO: 181084 - DNA, 25 bp, probe
ctgtcctaagtgagggtctgcggag

SEQ ID NO: 181085 - DNA, 25 bp, probe
ctgttctaggctctgtgggcatagg

SEQ ID NO: 181086 - DNA, 25 bp, probe
ctgttgtatcccggtgagggcagcc

SEQ ID NO: 181087 - DNA, 25 bp, probe
ctgtgtgttagctacttgaaggcgt

SEQ ID NO: 181088 - DNA, 25 bp, probe
ctgtgtgttagctacttgaaggcgt

SEQ ID NO: 181089 - DNA, 25 bp, probe
ctgaggcattcctcagtgcacagcg

SEQ ID NO: 181090 - DNA, 25 bp, probe
ctgaggatcctcacaggagcagaca

SEQ ID NO: 181091 - DNA, 25 bp, probe
ctgaggatcctcacaggagcagaca

SEQ ID NO: 181092 - DNA, 25 bp, probe
ctgagtcatcccaggactcagcaca

SEQ ID NO: 181093 - DNA, 25 bp, probe
ctgagagctacgtggcccagatgat

SEQ ID NO: 181094 - DNA, 25 bp, probe
ctgagcagtacgtgagtgtgcagaa

SEQ ID NO: 181095 - DNA, 25 bp, probe
ctgagcagtatccaggacatgcggc

SEQ ID NO: 181096 - DNA, 25 bp, probe
ctgagatgctcaagaggcaacgctc

SEQ ID NO: 181097 - DNA, 25 bp, probe
ctgagatgctgagagagatagctcc

SEQ ID NO: 181098 - DNA, 25 bp, probe
ctgagctgaacgggaagctcactgg

SEQ ID NO: 181099 - DNA, 25 bp, probe
ctgagaaacagcccaagcttcagcg

SEQ ID NO: 181100 - DNA, 25 bp, probe
ctgagaatcaacccaactgaagcat

SEQ ID NO: 181101 - DNA, 25 bp, probe
ctgaggtcaaggtcagcactggact

SEQ ID NO: 181102 - DNA, 25 bp, probe
ctgaggtatggccatgccctagacc

SEQ ID NO: 181103 - DNA, 25 bp, probe
ctgaggtatggcccatccaagactt

SEQ ID NO: 181104 - DNA, 25 bp, probe
ctgagagtagagtcactggaacact

SEQ ID NO: 181105 - DNA, 25 bp, probe
ctggagtatatgacagctgcggtac

SEQ ID NO: 181106 - DNA, 25 bp, probe
ctgataggattgcctgcttagatga

SEQ ID NO: 181107 - DNA, 25 bp, probe
ctgtacatactgtgcatataatgaa

SEQ ID NO: 181108 - DNA, 25 bp, probe
ctgtcactcactacatgaataagca

SEQ ID NO: 181109 - DNA, 25 bp, probe
ctgtcactcactacatgaataagca

SEQ ID NO: 181110 - DNA, 25 bp, probe
ctgtccctctgactggaaaacagac

SEQ ID NO: 181111 - DNA, 25 bp, probe
ctgtcacgtctgttgggcaaactgc

SEQ ID NO: 181112 - DNA, 25 bp, probe
ctgtcacgcctgccaaagcaaagat

SEQ ID NO: 181113 - DNA, 25 bp, probe
ctgtcatcgtcaacaacttcggcat

SEQ ID NO: 181114 - DNA, 25 bp, probe
ctgtcattgtctccaacttcaatta

SEQ ID NO: 181115 - DNA, 25 bp, probe
ctgtcattgtacccattgtacagat

SEQ ID NO: 181116 - DNA, 25 bp, probe
ctgtttcatatcctcacgtggcaat

SEQ ID NO: 181117 - DNA, 25 bp, probe
ctgtgctacgtcgccctggacttcg

SEQ ID NO: 181118 - DNA, 25 bp, probe
ctgtgctacgtcgccctggacttcg

SEQ ID NO: 181119 - DNA, 25 bp, probe
ctgtcaaccactgcaactgtaattc

SEQ ID NO: 181120 - DNA, 25 bp, probe
ctgttcccactcaatacgctggagt

SEQ ID NO: 181121 - DNA, 25 bp, probe
ctgttccgcaccaagagcaagcgcc

SEQ ID NO: 181122 - DNA, 25 bp, probe
ctgatggaccaggcaacagacccca

SEQ ID NO: 181123 - DNA, 25 bp, probe
ctgagtgactcagcagcctgttaaa

SEQ ID NO: 181124 - DNA, 25 bp, probe
ctgagttctcagtgccattgcttat

SEQ ID NO: 181125 - DNA, 25 bp, probe
ctgagctatgctttgtgtttgttaa

SEQ ID NO: 181126 - DNA, 25 bp, probe
ctgagctatgtagtatgctatgatt

SEQ ID NO: 181127 - DNA, 25 bp, probe
ctgagctgtgacctgatgccaaatg

SEQ ID NO: 181128 - DNA, 25 bp, probe
ctgatgtgtgatggtgtgctccaag

SEQ ID NO: 181129 - DNA, 25 bp, probe
ctgatgctgagaggcttgcctccgg

SEQ ID NO: 181130 - DNA, 25 bp, probe
ctgagaggagcggagtctgccaggt

SEQ ID NO: 181131 - DNA, 25 bp, probe
ctgagtggactggagtggagcattg

SEQ ID NO: 181132 - DNA, 25 bp, probe
ctgaggcaacgagtgggaggttcaa

SEQ ID NO: 181133 - DNA, 25 bp, probe
ctgatggcccaaatgtcagggttct

SEQ ID NO: 181134 - DNA, 25 bp, probe
ctgatggcccagatgcagcaggagg

SEQ ID NO: 181135 - DNA, 25 bp, probe
ctgatggccatggagaagagcaagg

SEQ ID NO: 181136 - DNA, 25 bp, probe
ctgagtccataaccaggctcaggag

SEQ ID NO: 181137 - DNA, 25 bp, probe
ctgagctccataagaactgtgctga

SEQ ID NO: 181138 - DNA, 25 bp, probe
ctgagtcaagcaaacacttgcctgc

SEQ ID NO: 181139 - DNA, 25 bp, probe
ctgagattgacaacgccctacagca

SEQ ID NO: 181140 - DNA, 25 bp, probe
ctgagactgtcacttgggctaagca

SEQ ID NO: 181141 - DNA, 25 bp, probe
ctgaggctgtacattgagcagaaaa

SEQ ID NO: 181142 - DNA, 25 bp, probe
ctgaggcgatagaattggcgcatgc

SEQ ID NO: 181143 - DNA, 25 bp, probe
ctgaggagatccaatggggccaccg

SEQ ID NO: 181144 - DNA, 25 bp, probe
ctgagagcagttactggggtcaccc

SEQ ID NO: 181145 - DNA, 25 bp, probe
ctgtagatgactacttgggccatcg

SEQ ID NO: 181146 - DNA, 25 bp, probe
ctgtcaatgattagatcgggtctcg

SEQ ID NO: 181147 - DNA, 25 bp, probe
ctgatttatgacgacggcctctcag

SEQ ID NO: 181148 - DNA, 25 bp, probe
gcaaaaaagcccacgtccagaaggt

SEQ ID NO: 181149 - DNA, 25 bp, probe
cgaaagagggccaggtcctaagctg

SEQ ID NO: 181150 - DNA, 25 bp, probe
cggaagtggaaacttctcccaagtg

SEQ ID NO: 181151 - DNA, 25 bp, probe
cgtgccatgtggaaactttttagtt

SEQ ID NO: 181152 - DNA, 25 bp, probe
ctgtccagtggaaaccttaaaggag

SEQ ID NO: 181153 - DNA, 25 bp, probe
ctgtctagatggatgaattatgata

SEQ ID NO: 181154 - DNA, 25 bp, probe
ctgttacagctgagcattatgatgt

SEQ ID NO: 181155 - DNA, 25 bp, probe
ctgttgatgtgataatttgatttgg

SEQ ID NO: 181156 - DNA, 25 bp, probe
ctgattgtttcattgttcgcttctg

SEQ ID NO: 181157 - DNA, 25 bp, probe
ctgatacttcacgtttatgcttctg

SEQ ID NO: 181158 - DNA, 25 bp, probe
ctgtacgccaacacagtgctgtctg

SEQ ID NO: 181159 - DNA, 25 bp, probe
ctgtcatcaccaacaaatggtttca

SEQ ID NO: 181160 - DNA, 25 bp, probe
ctgtcatctaaaagcaattgtgatt

SEQ ID NO: 181161 - DNA, 25 bp, probe
ctgttaaagaatcatctggattata

SEQ ID NO: 181162 - DNA, 25 bp, probe
ctgttattacactctctgtatcatt

SEQ ID NO: 181163 - DNA, 25 bp, probe
ctgttttaaatggtcttcatgcccc

SEQ ID NO: 181164 - DNA, 25 bp, probe
ctgtctttgagattgacctgactgc

SEQ ID NO: 181165 - DNA, 25 bp, probe
ctgattttgtttccttatctgtaaa

SEQ ID NO: 181166 - DNA, 25 bp, probe
ctgttttcttctgtaattatacaca

SEQ ID NO: 181167 - DNA, 25 bp, probe
cgtattttgttgctcaagaatccaa

SEQ ID NO: 181168 - DNA, 25 bp, probe
cgtattttgttgctcaagaatccaa

SEQ ID NO: 181169 - DNA, 25 bp, probe
ctgtatttctgatgttgcaagccat

SEQ ID NO: 181170 - DNA, 25 bp, probe
ctgtataactatttccatgatgcac

SEQ ID NO: 181171 - DNA, 25 bp, probe
ctgtatgaacttttcacatacattg

SEQ ID NO: 181172 - DNA, 25 bp, probe
ctgtacatagatgtatcattaatgt

SEQ ID NO: 181173 - DNA, 25 bp, probe
ctgtactgtgtttcgcattaagcac

SEQ ID NO: 181174 - DNA, 25 bp, probe
ctgtaactgttgagatgtatgtgca

SEQ ID NO: 181175 - DNA, 25 bp, probe
ctgtgaaatgtcactgatttctcaa

SEQ ID NO: 181176 - DNA, 25 bp, probe
ctgtgaaatgtcactgatttctcaa

SEQ ID NO: 181177 - DNA, 25 bp, probe
ctgattaagcctgctcatttccact

SEQ ID NO: 181178 - DNA, 25 bp, probe
ctgatttagtgtcccttatacactg

SEQ ID NO: 181179 - DNA, 25 bp, probe
cgatagtaaggagcatttagcaatg

SEQ ID NO: 181180 - DNA, 25 bp, probe
ctgatgggttggggcagttacctgg

SEQ ID NO: 181181 - DNA, 25 bp, probe
ctgatggtgttcgtggcacctaccc

SEQ ID NO: 181182 - DNA, 25 bp, probe
ctgatggtgttcgtggcacctaccc

SEQ ID NO: 181183 - DNA, 25 bp, probe
ctgatggggtctatgcagcctcagg

SEQ ID NO: 181184 - DNA, 25 bp, probe
ctgatggagcgttaccagcactacc

SEQ ID NO: 181185 - DNA, 25 bp, probe
ctgaggagctgttatctcgaatggc

SEQ ID NO: 181186 - DNA, 25 bp, probe
ctgagggctttgctcgagctgtgcg

SEQ ID NO: 181187 - DNA, 25 bp, probe
ctgaggttcacgctgctagcgtgga

SEQ ID NO: 181188 - DNA, 25 bp, probe
ctgagggtaaggactgaggcactga

SEQ ID NO: 181189 - DNA, 25 bp, probe
ctgaggttggggaaggcgactgagc

SEQ ID NO: 181190 - DNA, 25 bp, probe
ctgagtggtgtaggtgggggtgggg

SEQ ID NO: 181191 - DNA, 25 bp, probe
ctgattggctggagtggctgggttt

SEQ ID NO: 181192 - DNA, 25 bp, probe
ctgattggctggagtggctgggttt

SEQ ID NO: 181193 - DNA, 25 bp, probe
ctgatatggccatcacaggctgggt

SEQ ID NO: 181194 - DNA, 25 bp, probe
ctgagtgtctcatcttggtaatgat

SEQ ID NO: 181195 - DNA, 25 bp, probe
ctgagggcactgtcagaagtacaga

SEQ ID NO: 181196 - DNA, 25 bp, probe
ctgatgtggagtggaaatttgcaag

SEQ ID NO: 181197 - DNA, 25 bp, probe
ctgaggcaggaaggaatttgggtct

SEQ ID NO: 181198 - DNA, 25 bp, probe
ctgaggagccaatggcctttggatc

SEQ ID NO: 181199 - DNA, 25 bp, probe
ctgatgtggcaaaaggccctctgga

SEQ ID NO: 181200 - DNA, 25 bp, probe
ctgttggatgatgagcagcccctgc

SEQ ID NO: 181201 - DNA, 25 bp, probe
ctgatgggatgaacagccctgagct

SEQ ID NO: 181202 - DNA, 25 bp, probe
ctgatgggatgaacagccctgagct

SEQ ID NO: 181203 - DNA, 25 bp, probe
ctgaggtggacacctccatgctcca

SEQ ID NO: 181204 - DNA, 25 bp, probe
ctgaggtggacacctccatgctcca

SEQ ID NO: 181205 - DNA, 25 bp, probe
ctgaggtgggcatttcacgggaagg

SEQ ID NO: 181206 - DNA, 25 bp, probe
ctgaggtgggcatttcacgggaagg

SEQ ID NO: 181207 - DNA, 25 bp, probe
ctgttgtggtctaatccgggcaggt

SEQ ID NO: 181208 - DNA, 25 bp, probe
ctgttgtggtctaatccgggcaggt

SEQ ID NO: 181209 - DNA, 25 bp, probe
ctgttcattctggtaccacaggcag

SEQ ID NO: 181210 - DNA, 25 bp, probe
ctgtccatgtgggagacccaggagg

SEQ ID NO: 181211 - DNA, 25 bp, probe
ctgatgcacgtgctgaaagccgagg

SEQ ID NO: 181212 - DNA, 25 bp, probe
ctgatgatcagtttatcataccccc

SEQ ID NO: 181213 - DNA, 25 bp, probe
ctgatccagatgttatgctcctgct

SEQ ID NO: 181214 - DNA, 25 bp, probe
ctgatcgcagatctctatggatata

SEQ ID NO: 181215 - DNA, 25 bp, probe
ctgtcagagctgctcagcagatcat

SEQ ID NO: 181216 - DNA, 25 bp, probe
ctgtcaagtgcgagccacaggaaaa

SEQ ID NO: 181217 - DNA, 25 bp, probe
ctgatctctactaccacaaggaaaa

SEQ ID NO: 181218 - DNA, 25 bp, probe
ctgatcttatccacaccatcgatat

SEQ ID NO: 181219 - DNA, 25 bp, probe
ctgatcttatccacaccatcgatat

SEQ ID NO: 181220 - DNA, 25 bp, probe
ctgtctatcttcatcaccaatgtca

SEQ ID NO: 181221 - DNA, 25 bp, probe
cgagcagttttgaagctaatgtcag

SEQ ID NO: 181222 - DNA, 25 bp, probe
ctgagtgttttgtatgttagcatcg

SEQ ID NO: 181223 - DNA, 25 bp, probe
ctgggcttttgcttttactggtttg

SEQ ID NO: 181224 - DNA, 25 bp, probe
ctgggatttatttttcaaattggtg

SEQ ID NO: 181225 - DNA, 25 bp, probe
ctgtaactcttcaattctaaaatgt

SEQ ID NO: 181226 - DNA, 25 bp, probe
ctgttattccacagcctcaaaattt

SEQ ID NO: 181227 - DNA, 25 bp, probe
ctgtaagtacaatcccaagtattct

SEQ ID NO: 181228 - DNA, 25 bp, probe
ctgttagtacagatcccaatattct

SEQ ID NO: 181229 - DNA, 25 bp, probe
ctgattcgggagatctggcattacc

SEQ ID NO: 181230 - DNA, 25 bp, probe
ctgagtcctgggaagctggcactgc

SEQ ID NO: 181231 - DNA, 25 bp, probe
ctgagtccagggatgctgcggagcc

SEQ ID NO: 181232 - DNA, 25 bp, probe
ctgagtccagggatgctgcggagcc

SEQ ID NO: 181233 - DNA, 25 bp, probe
ctgagtcgcgaggcatttggagagc

SEQ ID NO: 181234 - DNA, 25 bp, probe
ctgagggcagagcctgtaggtgcag

SEQ ID NO: 181235 - DNA, 25 bp, probe
ctgagggcagagtctgtgggtgcag

SEQ ID NO: 181236 - DNA, 25 bp, probe
ctgtctgagtgacctgctgggtcat

SEQ ID NO: 181237 - DNA, 25 bp, probe
ctgtctgcagcttagggcagaaatg

SEQ ID NO: 181238 - DNA, 25 bp, probe
ctgtcgggactgagcaggcaatggc

SEQ ID NO: 181239 - DNA, 25 bp, probe
ctgtcccgcaagggcggcaagtgag

SEQ ID NO: 181240 - DNA, 25 bp, probe
ctgtcccgcaagggcggcaagacgg

SEQ ID NO: 181241 - DNA, 25 bp, probe
cgtggggaaccgcgagatagggcag

SEQ ID NO: 181242 - DNA, 25 bp, probe
cgtggggaaccgcgagatagggcag

SEQ ID NO: 181243 - DNA, 25 bp, probe
ctgtggggagacaccagactggggg

SEQ ID NO: 181244 - DNA, 25 bp, probe
ctgtatggggactccaattgcttgg

SEQ ID NO: 181245 - DNA, 25 bp, probe
ctgttgagggacccttatgcgctgc

SEQ ID NO: 181246 - DNA, 25 bp, probe
ctgagtgcagctgagcggctgtatg

SEQ ID NO: 181247 - DNA, 25 bp, probe
ctgatgtatgtcccttgatgtcacc

SEQ ID NO: 181248 - DNA, 25 bp, probe
ctgttatctgtcgttgctgtcacaa

SEQ ID NO: 181249 - DNA, 25 bp, probe
ctgatggacgaccttctgaacaaaa

SEQ ID NO: 181250 - DNA, 25 bp, probe
ctgtgcaggggccattcaaccaaag

SEQ ID NO: 181251 - DNA, 25 bp, probe
ctgatcgacatggttctcaacaaga

SEQ ID NO: 181252 - DNA, 25 bp, probe
ctgatgtcagctgctttgcacaaag

SEQ ID NO: 181253 - DNA, 25 bp, probe
ctgttcatctccgtctcagaaaaga

SEQ ID NO: 181254 - DNA, 25 bp, probe
ctgtttgcaacagctagaattaaat

SEQ ID NO: 181255 - DNA, 25 bp, probe
ctgtttgcaacagctagaattaaat

SEQ ID NO: 181256 - DNA, 25 bp, probe
ctgttaccacagactattttttgat

SEQ ID NO: 181257 - DNA, 25 bp, probe
ctggtacctctacttttagccattt

SEQ ID NO: 181258 - DNA, 25 bp, probe
ctgaggcccactttattctgaggaa

SEQ ID NO: 181259 - DNA, 25 bp, probe
ctgagggatcactgtgtcattgatg

SEQ ID NO: 181260 - DNA, 25 bp, probe
ctgagggaacaccagtgctctgtca

SEQ ID NO: 181261 - DNA, 25 bp, probe
ctgatgggcagattacagtgggaca

SEQ ID NO: 181262 - DNA, 25 bp, probe
ctgattggcactttcactgagagtt

SEQ ID NO: 181263 - DNA, 25 bp, probe
ctgatgggtgtttacttgttctttg

SEQ ID NO: 181264 - DNA, 25 bp, probe
ctgatgggtgtttacttgttctttg

SEQ ID NO: 181265 - DNA, 25 bp, probe
ctgtagtaatgttagcttgttctaa

SEQ ID NO: 181266 - DNA, 25 bp, probe
ctgtcagtattctcgctattttata

SEQ ID NO: 181267 - DNA, 25 bp, probe
ctgtctgtatctttggttatcctgt

SEQ ID NO: 181268 - DNA, 25 bp, probe
ctgtggtactcctaattacattgct

SEQ ID NO: 181269 - DNA, 25 bp, probe
ctgtgctaaacagtatattacctct

SEQ ID NO: 181270 - DNA, 25 bp, probe
ctggttgaaaaatctttctcatata

SEQ ID NO: 181271 - DNA, 25 bp, probe
ctgtctctgaaataaccttttactt

SEQ ID NO: 181272 - DNA, 25 bp, probe
ctgatactgagaaaaccaggctctt

SEQ ID NO: 181273 - DNA, 25 bp, probe
ctgtatctggacaaggccaccttaa

SEQ ID NO: 181274 - DNA, 25 bp, probe
ctgtatctggacaaggccaccttaa

SEQ ID NO: 181275 - DNA, 25 bp, probe
ctgtccttgtctatgccagaatcta

SEQ ID NO: 181276 - DNA, 25 bp, probe
ctgtccttgtcatgatgctggagcc

SEQ ID NO: 181277 - DNA, 25 bp, probe
ctgtccttgtcatgatgctggagcc

SEQ ID NO: 181278 - DNA, 25 bp, probe
ctgtacctcgaagtctatgggctcc

SEQ ID NO: 181279 - DNA, 25 bp, probe
ctgtcccaggaaattgtgcggctca

SEQ ID NO: 181280 - DNA, 25 bp, probe
ctgtcgcgaggagaagggcctggct

SEQ ID NO: 181281 - DNA, 25 bp, probe
ctgttcacaaagtggaggcctcgtt

SEQ ID NO: 181282 - DNA, 25 bp, probe
ctgttggagaagtggagcggcggtc

SEQ ID NO: 181283 - DNA, 25 bp, probe
ctgttggagaagtggagcggcggtc

SEQ ID NO: 181284 - DNA, 25 bp, probe
ctgtgatgggaacggtcccgggcac

SEQ ID NO: 181285 - DNA, 25 bp, probe
ctggtctggacacagtgcccgtgtc

SEQ ID NO: 181286 - DNA, 25 bp, probe
ctgtgttggaagaaggaccctgatg

SEQ ID NO: 181287 - DNA, 25 bp, probe
ctgtgttggaagaaggaccctgatg

SEQ ID NO: 181288 - DNA, 25 bp, probe
ctgtgtttacttaagaccgatagca

SEQ ID NO: 181289 - DNA, 25 bp, probe
gctaatgaggacattcgtccggaaa

SEQ ID NO: 181290 - DNA, 25 bp, probe
ctgttgcaggctgcttcgtagcggg

SEQ ID NO: 181291 - DNA, 25 bp, probe
ctgtctccagctgctctaatgatgg

SEQ ID NO: 181292 - DNA, 25 bp, probe
ctgttcgagccgcattctggagaag

SEQ ID NO: 181293 - DNA, 25 bp, probe
ctgttctggcggcattgtgggctta

SEQ ID NO: 181294 - DNA, 25 bp, probe
ctgtttggtgggggtagagctgatc

SEQ ID NO: 181295 - DNA, 25 bp, probe
ctgtttgtgtctgaggaggagaaaa

SEQ ID NO: 181296 - DNA, 25 bp, probe
ctgtgataattcttacgggagaaag

SEQ ID NO: 181297 - DNA, 25 bp, probe
ctgatagaagcttccctggagagaa

SEQ ID NO: 181298 - DNA, 25 bp, probe
ctgatgggggatggcctggaatgag

SEQ ID NO: 181299 - DNA, 25 bp, probe
ctgatggactggtgtcctatggaga

SEQ ID NO: 181300 - DNA, 25 bp, probe
cgaaattggaggactcctttgaggc

SEQ ID NO: 181301 - DNA, 25 bp, probe
ctgaggagggcacgactcctttgca

SEQ ID NO: 181302 - DNA, 25 bp, probe
ctgaggaaggcacacttgctcctgt

SEQ ID NO: 181303 - DNA, 25 bp, probe
ctggtaaagcaattcctccttgtca

SEQ ID NO: 181304 - DNA, 25 bp, probe
ctgggtaacacatacacccattgca

SEQ ID NO: 181305 - DNA, 25 bp, probe
ctggcttaaagcagattcccattaa

SEQ ID NO: 181306 - DNA, 25 bp, probe
ctgtttgtaatcattatctcacttt

SEQ ID NO: 181307 - DNA, 25 bp, probe
ctgtccggatatatttccctgctgt

SEQ ID NO: 181308 - DNA, 25 bp, probe
ctgttgctggatcttgagtcccatt

SEQ ID NO: 181309 - DNA, 25 bp, probe
ctgttgtgtgaaactcactccacaa

SEQ ID NO: 181310 - DNA, 25 bp, probe
ctgttgttgaattgtactctgcccc

SEQ ID NO: 181311 - DNA, 25 bp, probe
ctgttgttgaattgtactctgcccc

SEQ ID NO: 181312 - DNA, 25 bp, probe
ctgtctttgagttgtggtggacgct

SEQ ID NO: 181313 - DNA, 25 bp, probe
ctgatgcaggtggttctggggtcct

SEQ ID NO: 181314 - DNA, 25 bp, probe
ctgatggatgtgagcctggtgggcg

SEQ ID NO: 181315 - DNA, 25 bp, probe
ctgatggatgtgagcctggtgggcg

SEQ ID NO: 181316 - DNA, 25 bp, probe
ctgatggcagtcacagggggcctgt

SEQ ID NO: 181317 - DNA, 25 bp, probe
ctgatgttgactgcagggcttcctg

SEQ ID NO: 181318 - DNA, 25 bp, probe
ctgatggttgctgcaggacgtggct

SEQ ID NO: 181319 - DNA, 25 bp, probe
ctgatggttgctgcaggacgtggct

SEQ ID NO: 181320 - DNA, 25 bp, probe
ctgaggttgcatggcatggtccttg

SEQ ID NO: 181321 - DNA, 25 bp, probe
ctgatgggctgagggagctcctaga

SEQ ID NO: 181322 - DNA, 25 bp, probe
ctgatgagaagatggtcaactacct

SEQ ID NO: 181323 - DNA, 25 bp, probe
ctgaggtcacaagttgccatctacc

SEQ ID NO: 181324 - DNA, 25 bp, probe
ctgaggtcagaatttgaacatatca

SEQ ID NO: 181325 - DNA, 25 bp, probe
ctgaggagcgaggcctgaagcatta

SEQ ID NO: 181326 - DNA, 25 bp, probe
ctgaggatcgtgaccagcacctata

SEQ ID NO: 181327 - DNA, 25 bp, probe
ctgtggatggggcaaacttcattgt

SEQ ID NO: 181328 - DNA, 25 bp, probe
ctgtggtagagacagctacttactc

SEQ ID NO: 181329 - DNA, 25 bp, probe
ctgatgtctggcttaagtccttagc

SEQ ID NO: 181330 - DNA, 25 bp, probe
ctgatcttctgcttaatgcagtttg

SEQ ID NO: 181331 - DNA, 25 bp, probe
ctgatgtttgctcagtgcaaggtgg

SEQ ID NO: 181332 - DNA, 25 bp, probe
ctgaggttcttatgcaacagggata

SEQ ID NO: 181333 - DNA, 25 bp, probe
ctgttgtccttactgcccaaggaag

SEQ ID NO: 181334 - DNA, 25 bp, probe
ctgtttgcctgtacgcacaaaggag

SEQ ID NO: 181335 - DNA, 25 bp, probe
ctgtatggactcatccaccagggga

SEQ ID NO: 181336 - DNA, 25 bp, probe
ctgtgaggacacacgggaagtgaag

SEQ ID NO: 181337 - DNA, 25 bp, probe
ctgtgaaggtcttaaagaaggacgt

SEQ ID NO: 181338 - DNA, 25 bp, probe
ctgtgacagttctccaggaaggagg

SEQ ID NO: 181339 - DNA, 25 bp, probe
ctgatccagtaacctcggagacggg

SEQ ID NO: 181340 - DNA, 25 bp, probe
ctgtgagcaggatcctggggccgag

SEQ ID NO: 181341 - DNA, 25 bp, probe
ctgatatgggactgagcctggccca

SEQ ID NO: 181342 - DNA, 25 bp, probe
ctgaggagtgacgggcaaggggcca

SEQ ID NO: 181343 - DNA, 25 bp, probe
ctgaggagtggcaggaaagagggag

SEQ ID NO: 181344 - DNA, 25 bp, probe
ctgggaggtcttctcatatggacgg

SEQ ID NO: 181345 - DNA, 25 bp, probe
ctgggggacactttcgagctcccag

SEQ ID NO: 181346 - DNA, 25 bp, probe
ctggatggaacctgttagctgctcc

SEQ ID NO: 181347 - DNA, 25 bp, probe
ctggatggaacctgttagctgctcc

SEQ ID NO: 181348 - DNA, 25 bp, probe
ctgggtaagactcctctatgttgcc

SEQ ID NO: 181349 - DNA, 25 bp, probe
ctgaggccaagggacagctttcgcg

SEQ ID NO: 181350 - DNA, 25 bp, probe
ctgaggccaagggacagctttcgcg

SEQ ID NO: 181351 - DNA, 25 bp, probe
ctgaggccacaggccaagttctaag

SEQ ID NO: 181352 - DNA, 25 bp, probe
ctgaggaacaacctagaagctttgc

SEQ ID NO: 181353 - DNA, 25 bp, probe
ctggggctgaaggtcagaagtaatc

SEQ ID NO: 181354 - DNA, 25 bp, probe
ctgggactacgaggctcacgtcccg

SEQ ID NO: 181355 - DNA, 25 bp, probe
ctggacaccgagggctacgtcaaga

SEQ ID NO: 181356 - DNA, 25 bp, probe
cgtgtactcgggaatccggcacaag

SEQ ID NO: 181357 - DNA, 25 bp, probe
ctgttctcggtactatagggcacca

SEQ ID NO: 181358 - DNA, 25 bp, probe
cggctttggtgactctagataacct

SEQ ID NO: 181359 - DNA, 25 bp, probe
cgttttggatgcactgagaccccga

SEQ ID NO: 181360 - DNA, 25 bp, probe
cgttttggatgcactgagaccccga

SEQ ID NO: 181361 - DNA, 25 bp, probe
ctgtctttggaaccagaacatccca

SEQ ID NO: 181362 - DNA, 25 bp, probe
ctgtcttgggcatcaaaacaggtgc

SEQ ID NO: 181363 - DNA, 25 bp, probe
ctgtcctgggattcaacccactatt

SEQ ID NO: 181364 - DNA, 25 bp, probe
ctgattctggaagcaacgttctttc

SEQ ID NO: 181365 - DNA, 25 bp, probe
ctgtgttggaaggtgacgtcctccc

SEQ ID NO: 181366 - DNA, 25 bp, probe
ctgttggagactctgattgtcatgc

SEQ ID NO: 181367 - DNA, 25 bp, probe
ctgattgagaccagctgttgtgcct

SEQ ID NO: 181368 - DNA, 25 bp, probe
ctgatggaagcgaggagggctcccc

SEQ ID NO: 181369 - DNA, 25 bp, probe
ctgatggacatgttcagggatcgcc

SEQ ID NO: 181370 - DNA, 25 bp, probe
ctgatgagtatgctctaaaagaata

SEQ ID NO: 181371 - DNA, 25 bp, probe
ctgtgagctgttcctcgagttgaat

SEQ ID NO: 181372 - DNA, 25 bp, probe
ctgtgcgctatgacccggaaagtga

SEQ ID NO: 181373 - DNA, 25 bp, probe
ctgtcactttcctgagacatgactg

SEQ ID NO: 181374 - DNA, 25 bp, probe
ctgttgtttctataaatgactattg

SEQ ID NO: 181375 - DNA, 25 bp, probe
ctgtaccttcaataatggactatgc

SEQ ID NO: 181376 - DNA, 25 bp, probe
ctgtgaccccaatatcatagataac

SEQ ID NO: 181377 - DNA, 25 bp, probe
ctgtgaccccaatatcatagataac

SEQ ID NO: 181378 - DNA, 25 bp, probe
ctgtaattccaacctacattagaag

SEQ ID NO: 181379 - DNA, 25 bp, probe
ctgttcatttcgtttaattaaagct

SEQ ID NO: 181380 - DNA, 25 bp, probe
ctgttacctgaatttattataaagt

SEQ ID NO: 181381 - DNA, 25 bp, probe
ctgttacctgaatttattataaagt

SEQ ID NO: 181382 - DNA, 25 bp, probe
ctgattatccggtggctttagccgt

SEQ ID NO: 181383 - DNA, 25 bp, probe
ctgatttccgtgacatggctttggg

SEQ ID NO: 181384 - DNA, 25 bp, probe
ctgtttctcctgttggctcacaggg

SEQ ID NO: 181385 - DNA, 25 bp, probe
ctgtcttgtgggtgtctgacagtgg

SEQ ID NO: 181386 - DNA, 25 bp, probe
ctgatctggtggatcagactgaagg

SEQ ID NO: 181387 - DNA, 25 bp, probe
ctgttggcatcagccagtccacagg

SEQ ID NO: 181388 - DNA, 25 bp, probe
ctgtagtcactaccagtaccaatga

SEQ ID NO: 181389 - DNA, 25 bp, probe
ctgtattcaaagcagatcaccattg

SEQ ID NO: 181390 - DNA, 25 bp, probe
ctgtcaccaaaggaggccaactcca

SEQ ID NO: 181391 - DNA, 25 bp, probe
ctgatcctgaatggcacaggccaag

SEQ ID NO: 181392 - DNA, 25 bp, probe
ctgatccagatgcccagaggctcca

SEQ ID NO: 181393 - DNA, 25 bp, probe
ctgatgtgaatgcgcaggatgcgga

SEQ ID NO: 181394 - DNA, 25 bp, probe
ctgatgctaagcagctgtatgccat

SEQ ID NO: 181395 - DNA, 25 bp, probe
ctgatgctaagcagctgtatgccat

SEQ ID NO: 181396 - DNA, 25 bp, probe
ctgatgctgagcgaagctataggct

SEQ ID NO: 181397 - DNA, 25 bp, probe
ctgatgtgacgctactaacctgaca

SEQ ID NO: 181398 - DNA, 25 bp, probe
ctgtgatgatcctcatatggcccag

SEQ ID NO: 181399 - DNA, 25 bp, probe
ctgttgctcacagaaggaccacatt

SEQ ID NO: 181400 - DNA, 25 bp, probe
ctgttgctggactgaggaccacact

SEQ ID NO: 181401 - DNA, 25 bp, probe
ctgttgcaagagggggtccctctgc

SEQ ID NO: 181402 - DNA, 25 bp, probe
ctgttacagtgcgaagtaccccagc

SEQ ID NO: 181403 - DNA, 25 bp, probe
ctgtctcaagtcttgatgttttcca

SEQ ID NO: 181404 - DNA, 25 bp, probe
ctgttccgtttactctgtttacaca

SEQ ID NO: 181405 - DNA, 25 bp, probe
ctgtcgccagttgtgcacttttaca

SEQ ID NO: 181406 - DNA, 25 bp, probe
ctgttgctcatgactttcttttgta

SEQ ID NO: 181407 - DNA, 25 bp, probe
ctgttgctcatgactttcttttgta

SEQ ID NO: 181408 - DNA, 25 bp, probe
ctgtttctattttatttattgatta

SEQ ID NO: 181409 - DNA, 25 bp, probe
ctggcccaatgtatttggattctta

SEQ ID NO: 181410 - DNA, 25 bp, probe
ctgtcctcactgataggggttctgt

SEQ ID NO: 181411 - DNA, 25 bp, probe
ctgtcctcactgataggggttctgt

SEQ ID NO: 181412 - DNA, 25 bp, probe
ctgtcaccactgctaagggactcta

SEQ ID NO: 181413 - DNA, 25 bp, probe
ctgtcaccactgctaagggactcta

SEQ ID NO: 181414 - DNA, 25 bp, probe
ctgtcccacttcgaagtggaggtct

SEQ ID NO: 181415 - DNA, 25 bp, probe
ctgtcccctagtgagggactgtgtt

SEQ ID NO: 181416 - DNA, 25 bp, probe
ctgttgcaccttgtagtggattctg

SEQ ID NO: 181417 - DNA, 25 bp, probe
ctgtctaacttggctggtggtgtgg

SEQ ID NO: 181418 - DNA, 25 bp, probe
ctgtacaagctgccctagtgggtat

SEQ ID NO: 181419 - DNA, 25 bp, probe
ctgtacgagatgctcattggccagt

SEQ ID NO: 181420 - DNA, 25 bp, probe
ctgtccagagatgctcataggtcac

SEQ ID NO: 181421 - DNA, 25 bp, probe
ctgtcccagggctacaggatgcccc

SEQ ID NO: 181422 - DNA, 25 bp, probe
ctgtcccagggctacaggatgcccc

SEQ ID NO: 181423 - DNA, 25 bp, probe
ctgtcagtcagggatgcacgagact

SEQ ID NO: 181424 - DNA, 25 bp, probe
ctgtcactcactgagcactgagcca

SEQ ID NO: 181425 - DNA, 25 bp, probe
ctgtatgtcaccagcagtgcaggca

SEQ ID NO: 181426 - DNA, 25 bp, probe
ctgttggcatccgtcatgtggagag

SEQ ID NO: 181427 - DNA, 25 bp, probe
ctgatctgcatggtggccagtggga

SEQ ID NO: 181428 - DNA, 25 bp, probe
ctgtcactgcggactaggtggcaga

SEQ ID NO: 181429 - DNA, 25 bp, probe
ctgatgacgagggtgagcctgagga

SEQ ID NO: 181430 - DNA, 25 bp, probe
ctgatagggctgggtctgtgtgaga

SEQ ID NO: 181431 - DNA, 25 bp, probe
ctgtagggtgggtcctggatgcagt

SEQ ID NO: 181432 - DNA, 25 bp, probe
ctgtagggtgggtcctggatgcagt

SEQ ID NO: 181433 - DNA, 25 bp, probe
ctgtagccagtgcagacctcactgt

SEQ ID NO: 181434 - DNA, 25 bp, probe
ctgttagcaatgtagtactgcctct

SEQ ID NO: 181435 - DNA, 25 bp, probe
ctgttagcaatgtagtactgcctct

SEQ ID NO: 181436 - DNA, 25 bp, probe
ctgtatgcgaagttgctaggcctgc

SEQ ID NO: 181437 - DNA, 25 bp, probe
ctgtgaccagcactgtctcagtttc

SEQ ID NO: 181438 - DNA, 25 bp, probe
ctgtaccacacggtggctcagatgt

SEQ ID NO: 181439 - DNA, 25 bp, probe
ctgtatccacctggttttgttcttt

SEQ ID NO: 181440 - DNA, 25 bp, probe
ctgtgacatactttttttttcttat

SEQ ID NO: 181441 - DNA, 25 bp, probe
ctgtttcatctactgttgctgtgtt

SEQ ID NO: 181442 - DNA, 25 bp, probe
ctggcctcaataccttgtttaggat

SEQ ID NO: 181443 - DNA, 25 bp, probe
ctggcctcaataccttgtttaggat

SEQ ID NO: 181444 - DNA, 25 bp, probe
ctgtttaaaactctcctaggaggca

SEQ ID NO: 181445 - DNA, 25 bp, probe
cgtgttaaattcagacgtactggct

SEQ ID NO: 181446 - DNA, 25 bp, probe
ctgtttaatgttatgaggacgtgtc

SEQ ID NO: 181447 - DNA, 25 bp, probe
ctgttttattctagcaatgaatttg

SEQ ID NO: 181448 - DNA, 25 bp, probe
ctgttctgctcagccagaattatct

SEQ ID NO: 181449 - DNA, 25 bp, probe
ctgttcgcatcagtggcgatgactt

SEQ ID NO: 181450 - DNA, 25 bp, probe
ctgtacatgatcatgcgggagtgct

SEQ ID NO: 181451 - DNA, 25 bp, probe
ctgttctgcatcataaggctgctgc

SEQ ID NO: 181452 - DNA, 25 bp, probe
ctgatctgctgatttacatacctgc

SEQ ID NO: 181453 - DNA, 25 bp, probe
ctgattgatgcatttgcagttccag

SEQ ID NO: 181454 - DNA, 25 bp, probe
ctgattgagacatggtgtacaggtc

SEQ ID NO: 181455 - DNA, 25 bp, probe
ctgtccagagagagtgtaagtgtag

SEQ ID NO: 181456 - DNA, 25 bp, probe
ctgtctcagctgaatcgtgtgtcct

SEQ ID NO: 181457 - DNA, 25 bp, probe
ctgtaatcatgcaatagctgttcgg

SEQ ID NO: 181458 - DNA, 25 bp, probe
ctgtaatatcagaaatggttggcct

SEQ ID NO: 181459 - DNA, 25 bp, probe
ctgtaatatcagaaatggttggcct

SEQ ID NO: 181460 - DNA, 25 bp, probe
ctgtgaaaatgctgagggtgccatt

SEQ ID NO: 181461 - DNA, 25 bp, probe
ctgtcaaaccagcatggttaattgt

SEQ ID NO: 181462 - DNA, 25 bp, probe
ctgtcaaaccagcatggttaattgt

SEQ ID NO: 181463 - DNA, 25 bp, probe
ctgtccagactcagtggatctgaag

SEQ ID NO: 181464 - DNA, 25 bp, probe
ctgttctgaatccagcatggagcag

SEQ ID NO: 181465 - DNA, 25 bp, probe
ctgtccgatatgccagcatcaatgc

SEQ ID NO: 181466 - DNA, 25 bp, probe
ctgtgcagatacccacatcaatgag

SEQ ID NO: 181467 - DNA, 25 bp, probe
ctgtgcagtgacctccacatatgaa

SEQ ID NO: 181468 - DNA, 25 bp, probe
ctgtcagtaggggcatggtataagg

SEQ ID NO: 181469 - DNA, 25 bp, probe
ctgttgtagatgaaactgtataaga

SEQ ID NO: 181470 - DNA, 25 bp, probe
ctgttggaatgagtatgtgattctt

SEQ ID NO: 181471 - DNA, 25 bp, probe
ctgtgctgtgcaagtcactggtttt

SEQ ID NO: 181472 - DNA, 25 bp, probe
ctgtggctttgtgttgcgttttgtg

SEQ ID NO: 181473 - DNA, 25 bp, probe
ctgtttgtttccctggttatgtgtg

SEQ ID NO: 181474 - DNA, 25 bp, probe
ctgtttgtttccctggttatgtgtg

SEQ ID NO: 181475 - DNA, 25 bp, probe
ctgtttagggccctgatttgctggg

SEQ ID NO: 181476 - DNA, 25 bp, probe
ctgtgttcagtggcacctagaggct

SEQ ID NO: 181477 - DNA, 25 bp, probe
ctgtttgcaatggccgtgaggtggt

SEQ ID NO: 181478 - DNA, 25 bp, probe
ctgtgtctcaatgcctgggactgga

SEQ ID NO: 181479 - DNA, 25 bp, probe
ctgtgtctcaatgcctgggactgga

SEQ ID NO: 181480 - DNA, 25 bp, probe
ctgtgtcctgatgccgtgttcaggc

SEQ ID NO: 181481 - DNA, 25 bp, probe
ctgtgtcctgatgccgtgttcaggc

SEQ ID NO: 181482 - DNA, 25 bp, probe
ctggacttgtccgttctaaggacca

SEQ ID NO: 181483 - DNA, 25 bp, probe
ctggcacctactctttagagagccc

SEQ ID NO: 181484 - DNA, 25 bp, probe
cgggttactttcacatacagccctc

SEQ ID NO: 181485 - DNA, 25 bp, probe
ctggggttcttcagagaacaccctc

SEQ ID NO: 181486 - DNA, 25 bp, probe
ctgtgggttcggaaagcccatccca

SEQ ID NO: 181487 - DNA, 25 bp, probe
ctggggtaccacatggtccatttca

SEQ ID NO: 181488 - DNA, 25 bp, probe
ctggggctagccagttactggtcat

SEQ ID NO: 181489 - DNA, 25 bp, probe
ctggtgggagaatctataccttgtt

SEQ ID NO: 181490 - DNA, 25 bp, probe
ctggctttgggaactaactcggtca

SEQ ID NO: 181491 - DNA, 25 bp, probe
cgggcgttggaagaactggagtctt

SEQ ID NO: 181492 - DNA, 25 bp, probe
ctgtacggtggatggcaccggagtc

SEQ ID NO: 181493 - DNA, 25 bp, probe
ctgtacgaactgatgaccggccagc

SEQ ID NO: 181494 - DNA, 25 bp, probe
ctgtttcaacagatgaccgtgtaca

SEQ ID NO: 181495 - DNA, 25 bp, probe
ctgttctcacagctgtgatcacgag

SEQ ID NO: 181496 - DNA, 25 bp, probe
ctgttctcacagctgtgatcacgag

SEQ ID NO: 181497 - DNA, 25 bp, probe
ctgtctctgtggcagtgatccacca

SEQ ID NO: 181498 - DNA, 25 bp, probe
ctgtctactgggcatgctccagtca

SEQ ID NO: 181499 - DNA, 25 bp, probe
ctgttctggcggcagcaagctgctc

SEQ ID NO: 181500 - DNA, 25 bp, probe
ctgttttctggccacaactgccaaa

SEQ ID NO: 181501 - DNA, 25 bp, probe
ctgttttcgcggccagacaatcaag

SEQ ID NO: 181502 - DNA, 25 bp, probe
ctgttttcgcggccagacaatcaag

SEQ ID NO: 181503 - DNA, 25 bp, probe
ctgttttcatctagtcagagattca

SEQ ID NO: 181504 - DNA, 25 bp, probe
ctgtcaattcagatgctaggttttc

SEQ ID NO: 181505 - DNA, 25 bp, probe
ctggcaactacttcaaggtttcgag

SEQ ID NO: 181506 - DNA, 25 bp, probe
cggacacctcataaagggttcaaag

SEQ ID NO: 181507 - DNA, 25 bp, probe
cggaccactaagctggggacaggaa

SEQ ID NO: 181508 - DNA, 25 bp, probe
ctgtgactacccaggcagatgggag

SEQ ID NO: 181509 - DNA, 25 bp, probe
ctgtgcccaccgttggagacaggaa

SEQ ID NO: 181510 - DNA, 25 bp, probe
ctgtgcccctgaatcatgggcacgg

SEQ ID NO: 181511 - DNA, 25 bp, probe
ctgtctgccgatatggatggcgcac

SEQ ID NO: 181512 - DNA, 25 bp, probe
ctgattggcggattggagatgccac

SEQ ID NO: 181513 - DNA, 25 bp, probe
ctgttggcagtgacggtgcaggccg

SEQ ID NO: 181514 - DNA, 25 bp, probe
ctgttgcacatgagcgaggcggcgg

SEQ ID NO: 181515 - DNA, 25 bp, probe
ctgtccacatgtgggacagggctgg

SEQ ID NO: 181516 - DNA, 25 bp, probe
ctgtccactgatcccaaaggctggg

SEQ ID NO: 181517 - DNA, 25 bp, probe
ctgtccgcatataccaccagggact

SEQ ID NO: 181518 - DNA, 25 bp, probe
ctgtctgccattactccaaagtgac

SEQ ID NO: 181519 - DNA, 25 bp, probe
ctgtgctgccatgtccacaagattt

SEQ ID NO: 181520 - DNA, 25 bp, probe
ctgtgctgccatgtccacaagattt

SEQ ID NO: 181521 - DNA, 25 bp, probe
ctgtgtcccctgggaggattctggg

SEQ ID NO: 181522 - DNA, 25 bp, probe
ctgtgtcccctgggaggattctggg

SEQ ID NO: 181523 - DNA, 25 bp, probe
ctggttcctgtttagctgttctgaa

SEQ ID NO: 181524 - DNA, 25 bp, probe
ctggttcctgtttagctgttctgaa

SEQ ID NO: 181525 - DNA, 25 bp, probe
ctgtttatctgttaactattatcca

SEQ ID NO: 181526 - DNA, 25 bp, probe
ctgtttcacgtgtacctgtgtcatc

SEQ ID NO: 181527 - DNA, 25 bp, probe
ctgtttgtcctgttcttggtcatgt

SEQ ID NO: 181528 - DNA, 25 bp, probe
ctgtttctctctctttgaggcattt

SEQ ID NO: 181529 - DNA, 25 bp, probe
ctgtttctctctctttgaggcattt

SEQ ID NO: 181530 - DNA, 25 bp, probe
ctgggacgctggctttgggttgtcc

SEQ ID NO: 181531 - DNA, 25 bp, probe
ctggtacctgggtgggcaatggcca

SEQ ID NO: 181532 - DNA, 25 bp, probe
ctggtacctgggtgggcaatggcca

SEQ ID NO: 181533 - DNA, 25 bp, probe
ctgtatgaactgctgacgggaatgg

SEQ ID NO: 181534 - DNA, 25 bp, probe
ctgtatcacctttgccaagtaagag

SEQ ID NO: 181535 - DNA, 25 bp, probe
ctgtatagttttcacctctgagaat

SEQ ID NO: 181536 - DNA, 25 bp, probe
ctgtatgcactaatgaagaccctaa

SEQ ID NO: 181537 - DNA, 25 bp, probe
ctgttctgctgaagaagcggcctag

SEQ ID NO: 181538 - DNA, 25 bp, probe
ctgtttgccaagtcatgtgagaata

SEQ ID NO: 181539 - DNA, 25 bp, probe
ctgtatttagtgtggcagaataata

SEQ ID NO: 181540 - DNA, 25 bp, probe
ctgtgttctttgcagggaatgaata

SEQ ID NO: 181541 - DNA, 25 bp, probe
ctgtctgtctgccacaaggaaataa

SEQ ID NO: 181542 - DNA, 25 bp, probe
ctgtcagcatccctcagaggagaaa

SEQ ID NO: 181543 - DNA, 25 bp, probe
ctggacccaatcagggaaaatctgg

SEQ ID NO: 181544 - DNA, 25 bp, probe
ctggacccaatcagggaaaatctgg

SEQ ID NO: 181545 - DNA, 25 bp, probe
ctgggtgacacagccggtaaacgga

SEQ ID NO: 181546 - DNA, 25 bp, probe
ctgggtgacacagccggtaaacgga

SEQ ID NO: 181547 - DNA, 25 bp, probe
ctgggctttcactctggtgaaactg

SEQ ID NO: 181548 - DNA, 25 bp, probe
cggccttatacatctggtcttacaa

SEQ ID NO: 181549 - DNA, 25 bp, probe
ctgggggaagccctggatttcagaa

SEQ ID NO: 181550 - DNA, 25 bp, probe
ctggcgaagaagtcctggtttggga

SEQ ID NO: 181551 - DNA, 25 bp, probe
gccggaacaaatgcgagtacgggaa

SEQ ID NO: 181552 - DNA, 25 bp, probe
ccttgaacttcagcggtacgcggca

SEQ ID NO: 181553 - DNA, 25 bp, probe
ccttgaacttcagcggtacgcggca

SEQ ID NO: 181554 - DNA, 25 bp, probe
cgggaagttcagcctgattcccacc

SEQ ID NO: 181555 - DNA, 25 bp, probe
cctatgcactgttagcatgagaaca

SEQ ID NO: 181556 - DNA, 25 bp, probe
cggatcacgcccggagtagaagcgc

SEQ ID NO: 181557 - DNA, 25 bp, probe
ctggtcacgtttggaaagaatatta

SEQ ID NO: 181558 - DNA, 25 bp, probe
ctgtccactttctgaatgagaactt

SEQ ID NO: 181559 - DNA, 25 bp, probe
ctgtctgcattttcttggagaaatt

SEQ ID NO: 181560 - DNA, 25 bp, probe
ctgtcttgctgtctagggatggact

SEQ ID NO: 181561 - DNA, 25 bp, probe
ctgtgcgattgctgtagcggttgcc

SEQ ID NO: 181562 - DNA, 25 bp, probe
ctgtctaatgaacaggtgttgaaat

SEQ ID NO: 181563 - DNA, 25 bp, probe
ctgtatcgtggaccttttgtgaaca

SEQ ID NO: 181564 - DNA, 25 bp, probe
ctgtgatcgtgttctcctacgtaaa

SEQ ID NO: 181565 - DNA, 25 bp, probe
ctgtgatcgtgttctcctacgtaaa

SEQ ID NO: 181566 - DNA, 25 bp, probe
ctgtattgctgtttccaactgttgt

SEQ ID NO: 181567 - DNA, 25 bp, probe
ctgtatactgtatcagcagctttgt

SEQ ID NO: 181568 - DNA, 25 bp, probe
ctgtgtactgtatagacagtttgta

SEQ ID NO: 181569 - DNA, 25 bp, probe
cgttggtggcatttacgtgctttat

SEQ ID NO: 181570 - DNA, 25 bp, probe
cgttggtggcatttacgtgctttat

SEQ ID NO: 181571 - DNA, 25 bp, probe
ctgttagaggcagttacttgtgtaa

SEQ ID NO: 181572 - DNA, 25 bp, probe
ctgttagaggcagttacttgtgtaa

SEQ ID NO: 181573 - DNA, 25 bp, probe
ctgtgaaaggcagatgtttgattat

SEQ ID NO: 181574 - DNA, 25 bp, probe
ctgtagaagtgagtttgtaaatatt

SEQ ID NO: 181575 - DNA, 25 bp, probe
ctgttatatggaatgtctgtaaatt

SEQ ID NO: 181576 - DNA, 25 bp, probe
ctgtacattgtgagctctggttatt

SEQ ID NO: 181577 - DNA, 25 bp, probe
ctgtacattgtgagctctggttatt

SEQ ID NO: 181578 - DNA, 25 bp, probe
ctgtgcctcttcctgtagagttact

SEQ ID NO: 181579 - DNA, 25 bp, probe
ctgtgcctcttcctgtagagttact

SEQ ID NO: 181580 - DNA, 25 bp, probe
ctgtccactgagcttcaggctctac

SEQ ID NO: 181581 - DNA, 25 bp, probe
ctgtacactgaccttaggcatggag

SEQ ID NO: 181582 - DNA, 25 bp, probe
ctgtgcagccgagcttgggaaactg

SEQ ID NO: 181583 - DNA, 25 bp, probe
ctgtcagccaatgtggggggtcctg

SEQ ID NO: 181584 - DNA, 25 bp, probe
ctgtagctcaaggggggcagccccc

SEQ ID NO: 181585 - DNA, 25 bp, probe
ctgtcagtcggccgaggtgcacggc

SEQ ID NO: 181586 - DNA, 25 bp, probe
ctgtattggaggcctttgcagcggc

SEQ ID NO: 181587 - DNA, 25 bp, probe
ctgtattggaggcctttgcagcggc

SEQ ID NO: 181588 - DNA, 25 bp, probe
ctgtagggactcatcttgcatggca

SEQ ID NO: 181589 - DNA, 25 bp, probe
ctgtagatgtgcgtgcagtctggca

SEQ ID NO: 181590 - DNA, 25 bp, probe
ctgtgagtgtgtggatgcgtgtgaa

SEQ ID NO: 181591 - DNA, 25 bp, probe
ctgtgcaggctcaagagctggcgga

SEQ ID NO: 181592 - DNA, 25 bp, probe
ctgtgcagagtcactgtgtcatcga

SEQ ID NO: 181593 - DNA, 25 bp, probe
ctgtgcagcttgctgctttcagctg

SEQ ID NO: 181594 - DNA, 25 bp, probe
ctgtgctgcacgtatgcagtatcct

SEQ ID NO: 181595 - DNA, 25 bp, probe
ctgtgccaagtcgactatgccttag

SEQ ID NO: 181596 - DNA, 25 bp, probe
ctgtcacaagcctgtcagcctaaga

SEQ ID NO: 181597 - DNA, 25 bp, probe
ctgtcacaagcctgtcagcctaaga

SEQ ID NO: 181598 - DNA, 25 bp, probe
ctgtctacaccatacacgcaaaaga

SEQ ID NO: 181599 - DNA, 25 bp, probe
ctgtctactccaagaaaccaacgct

SEQ ID NO: 181600 - DNA, 25 bp, probe
ctgtctcccgatgaaaacatatctt

SEQ ID NO: 181601 - DNA, 25 bp, probe
ctgtctcccgatgaaaacatatctt

SEQ ID NO: 181602 - DNA, 25 bp, probe
ctgtctccctgaagagtgaaccctc

SEQ ID NO: 181603 - DNA, 25 bp, probe
ctgtctccctgaagagtgaaccctc

SEQ ID NO: 181604 - DNA, 25 bp, probe
ctgtctccagcacggagctgacact

SEQ ID NO: 181605 - DNA, 25 bp, probe
ctgtgcctgagaggtactgcctctc

SEQ ID NO: 181606 - DNA, 25 bp, probe
ctgtttgaagcgcagcaggtgcatc

SEQ ID NO: 181607 - DNA, 25 bp, probe
ctgtctctcaagctgagtgggtccg

SEQ ID NO: 181608 - DNA, 25 bp, probe
ctgtgactccagcctgaatcgaacc

SEQ ID NO: 181609 - DNA, 25 bp, probe
ctgtggctccgaggaaaatcactcc

SEQ ID NO: 181610 - DNA, 25 bp, probe
ctggtcgcctgggaaacaagccctt

SEQ ID NO: 181611 - DNA, 25 bp, probe
ctgggagccttgaaaaaactggagt

SEQ ID NO: 181612 - DNA, 25 bp, probe
ctggggccggacagcaagccggaaa

SEQ ID NO: 181613 - DNA, 25 bp, probe
ctgggcgtggggagcaaattgccca

SEQ ID NO: 181614 - DNA, 25 bp, probe
ctggtactggggagcacaaggtcac

SEQ ID NO: 181615 - DNA, 25 bp, probe
ctggtgatggaaggttacaagtggc

SEQ ID NO: 181616 - DNA, 25 bp, probe
cgagggtggacgctacacagtgggt

SEQ ID NO: 181617 - DNA, 25 bp, probe
cggagtgtggaagatgacaaggagg

SEQ ID NO: 181618 - DNA, 25 bp, probe
cggatggtgccttgttaaagggcaa

SEQ ID NO: 181619 - DNA, 25 bp, probe
cggatggtgccttgttaaagggcaa

SEQ ID NO: 181620 - DNA, 25 bp, probe
cggcacggcgcttttaacagcaagc

SEQ ID NO: 181621 - DNA, 25 bp, probe
cggccgaggctgcgtgtaaagatgt

SEQ ID NO: 181622 - DNA, 25 bp, probe
ctgtacgaggtactcatggaaaagt

SEQ ID NO: 181623 - DNA, 25 bp, probe
ctgtccgcaaggttcatgtgaccaa

SEQ ID NO: 181624 - DNA, 25 bp, probe
ctgtcccagcgagatttctccaagt

SEQ ID NO: 181625 - DNA, 25 bp, probe
ctgtggtccagagactcttctgcat

SEQ ID NO: 181626 - DNA, 25 bp, probe
ctgtttgccaggcgctttctatact

SEQ ID NO: 181627 - DNA, 25 bp, probe
ctgtttccaatgccaattcatctca

SEQ ID NO: 181628 - DNA, 25 bp, probe
ctgggtctaatccttctcattaccc

SEQ ID NO: 181629 - DNA, 25 bp, probe
ctgggtacaatgcttctatgaatat

SEQ ID NO: 181630 - DNA, 25 bp, probe
ctgtggttgctgtggttggaattct

SEQ ID NO: 181631 - DNA, 25 bp, probe
ctgtggttggagcgaatggaagttg

SEQ ID NO: 181632 - DNA, 25 bp, probe
ctggactggagacgcgggcggaatt

SEQ ID NO: 181633 - DNA, 25 bp, probe
ctgtccggaacgggaggctgaaatg

SEQ ID NO: 181634 - DNA, 25 bp, probe
ctgtcaccaactgaagtggctaaag

SEQ ID NO: 181635 - DNA, 25 bp, probe
ctgtcaccaacaaccaagctaaata

SEQ ID NO: 181636 - DNA, 25 bp, probe
ctggcatccctaagtgccctaatat

SEQ ID NO: 181637 - DNA, 25 bp, probe
ctggcagacctgattcaacaactca

SEQ ID NO: 181638 - DNA, 25 bp, probe
ctgtgagtccagatatctagcccac

SEQ ID NO: 181639 - DNA, 25 bp, probe
ctgtaaaagtcttctgagagctcct

SEQ ID NO: 181640 - DNA, 25 bp, probe
ctgtaataacatatctgccctcttc

SEQ ID NO: 181641 - DNA, 25 bp, probe
ctgtaacagatcaaacaccggcgct

SEQ ID NO: 181642 - DNA, 25 bp, probe
ctgtagactgtaaactcctcgtgag

SEQ ID NO: 181643 - DNA, 25 bp, probe
ctgtcatggcttatgaccgctatgt

SEQ ID NO: 181644 - DNA, 25 bp, probe
ctgtgattgctgcggaccgctacat

SEQ ID NO: 181645 - DNA, 25 bp, probe
ctgtgattgctgcggaccgctacat

SEQ ID NO: 181646 - DNA, 25 bp, probe
ctgtgtcttgggaacctgtgattac

SEQ ID NO: 181647 - DNA, 25 bp, probe
ctgtgtcttagaccctgttatctac

SEQ ID NO: 181648 - DNA, 25 bp, probe
ctgtgccaataaccttgtcaaccac

SEQ ID NO: 181649 - DNA, 25 bp, probe
ctggtttgagacctattctgaccaa

SEQ ID NO: 181650 - DNA, 25 bp, probe
ctgtgttttacaccattctcacacc

SEQ ID NO: 181651 - DNA, 25 bp, probe
ctgtgttttacaccattctcacacc

SEQ ID NO: 181652 - DNA, 25 bp, probe
ctgtgactccaatgccattgatcat

SEQ ID NO: 181653 - DNA, 25 bp, probe
ctgtgactccaatgccattgatcat

SEQ ID NO: 181654 - DNA, 25 bp, probe
ctgtcacttcttgggcatgtggttc

SEQ ID NO: 181655 - DNA, 25 bp, probe
ctgtcggtgcaagggcttgagttca

SEQ ID NO: 181656 - DNA, 25 bp, probe
ctgtggttaacgccttcatttatag

SEQ ID NO: 181657 - DNA, 25 bp, probe
ctgggattcaacccactattacttg

SEQ ID NO: 181658 - DNA, 25 bp, probe
ctgggagctatgtttcctttcactg

SEQ ID NO: 181659 - DNA, 25 bp, probe
ctgggactcagtttaccttaatgcc

SEQ ID NO: 181660 - DNA, 25 bp, probe
ctggacccagttgtacctaatcaca

SEQ ID NO: 181661 - DNA, 25 bp, probe
ctggtgtgccagcgaaaccaaacca

SEQ ID NO: 181662 - DNA, 25 bp, probe
ctggtgtgccagcgaaaccaaacca

SEQ ID NO: 181663 - DNA, 25 bp, probe
ctggtgaccagcagcggacaaataa

SEQ ID NO: 181664 - DNA, 25 bp, probe
ctgtgggtcagtgagtagaactaca

SEQ ID NO: 181665 - DNA, 25 bp, probe
cggaggccattatgctatgtaaaat

SEQ ID NO: 181666 - DNA, 25 bp, probe
cgaaggcgataatgttctggtgaac

SEQ ID NO: 181667 - DNA, 25 bp, probe
ctgtcagggaagtgcctctggtggc

SEQ ID NO: 181668 - DNA, 25 bp, probe
ctgtagtgggagttttcttatgtgg

SEQ ID NO: 181669 - DNA, 25 bp, probe
cgaagtggggagcacctgtttggct

SEQ ID NO: 181670 - DNA, 25 bp, probe
ctggcggaggagaggccctttgcca

SEQ ID NO: 181671 - DNA, 25 bp, probe
ctgggagaccagagtcccctttagg

SEQ ID NO: 181672 - DNA, 25 bp, probe
ctgggcaaactactccctacttaag

SEQ ID NO: 181673 - DNA, 25 bp, probe
ctgggagaggtactttcgcctccaa

SEQ ID NO: 181674 - DNA, 25 bp, probe
ctgggcacagtttggtccgttagaa

SEQ ID NO: 181675 - DNA, 25 bp, probe
ctgggcaaattgtcgcctttacaac

SEQ ID NO: 181676 - DNA, 25 bp, probe
ctgtgggcaataatatggcatttaa

SEQ ID NO: 181677 - DNA, 25 bp, probe
ctgtgtggcaaaactgcctcctacg

SEQ ID NO: 181678 - DNA, 25 bp, probe
ctggtcacacaaagcgacggatacg

SEQ ID NO: 181679 - DNA, 25 bp, probe
ctgtgtccaagtccattggctgtac

SEQ ID NO: 181680 - DNA, 25 bp, probe
ctgtgcagcccagttatttttctcc

SEQ ID NO: 181681 - DNA, 25 bp, probe
ctgggccccagttgtatttatttag

SEQ ID NO: 181682 - DNA, 25 bp, probe
ctgggcaaacagaagaatttttctg

SEQ ID NO: 181683 - DNA, 25 bp, probe
ctgtggacaggcaccaatttcttta

SEQ ID NO: 181684 - DNA, 25 bp, probe
ctgtggcaagcgaggacacgccttt

SEQ ID NO: 181685 - DNA, 25 bp, probe
ctgtacactgacttgagaccagttg

SEQ ID NO: 181686 - DNA, 25 bp, probe
cccaaccacattgaccagttttact

SEQ ID NO: 181687 - DNA, 25 bp, probe
cccaaccacattgaccagttttact

SEQ ID NO: 181688 - DNA, 25 bp, probe
cggaaccaagcagacgttatttacg

SEQ ID NO: 181689 - DNA, 25 bp, probe
ctggaccaaactgggctttccttag

SEQ ID NO: 181690 - DNA, 25 bp, probe
cggtccgaattcgaattggccttca

SEQ ID NO: 181691 - DNA, 25 bp, probe
cgggttgaattcacattccctgact

SEQ ID NO: 181692 - DNA, 25 bp, probe
ccgaatttagtcacaccatcttaaa

SEQ ID NO: 181693 - DNA, 25 bp, probe
cccctttatgccacctactgaaaag

SEQ ID NO: 181694 - DNA, 25 bp, probe
ctggctttgggttgtccggagccag

SEQ ID NO: 181695 - DNA, 25 bp, probe
ctggcccgggtctgcttgggccagg

SEQ ID NO: 181696 - DNA, 25 bp, probe
ctggccttgggtgggattgagtttg

SEQ ID NO: 181697 - DNA, 25 bp, probe
ctgtgtcatcgatgagcggactgat

SEQ ID NO: 181698 - DNA, 25 bp, probe
ctgtctcatatgtctatccaacaca

SEQ ID NO: 181699 - DNA, 25 bp, probe
ctgtaacatcactatccgatgcacc

SEQ ID NO: 181700 - DNA, 25 bp, probe
ctgtatgagacctatcagagcagcc

SEQ ID NO: 181701 - DNA, 25 bp, probe
ctgtggaatcgccacagcagccagc

SEQ ID NO: 181702 - DNA, 25 bp, probe
ctgtctgagatggccaacggctgcc

SEQ ID NO: 181703 - DNA, 25 bp, probe
ctgtgctgacttggaaggtgccctg

SEQ ID NO: 181704 - DNA, 25 bp, probe
ctgtgctgacttggaaggtgccctg

SEQ ID NO: 181705 - DNA, 25 bp, probe
ctgtctgctttgtgaggcagtcttg

SEQ ID NO: 181706 - DNA, 25 bp, probe
ctgtctctgttggtggtacatcttg

SEQ ID NO: 181707 - DNA, 25 bp, probe
ctgtcacctgaggtggtgaattatg

SEQ ID NO: 181708 - DNA, 25 bp, probe
ctgtcagcgaacgtggcattttctg

SEQ ID NO: 181709 - DNA, 25 bp, probe
ctgtcaggggcttggatttcgtgtg

SEQ ID NO: 181710 - DNA, 25 bp, probe
ctgtcaggggcttggatttcgtgtg

SEQ ID NO: 181711 - DNA, 25 bp, probe
ctgtcagagttatgcgttctttgct

SEQ ID NO: 181712 - DNA, 25 bp, probe
ctgtcaagcctgtggatgatttttt

SEQ ID NO: 181713 - DNA, 25 bp, probe
ctgtaacctcatcgggattgtcttt

SEQ ID NO: 181714 - DNA, 25 bp, probe
ctgtacgcctttggtatctgaccat

SEQ ID NO: 181715 - DNA, 25 bp, probe
ctggaccccatcacgatggacgatg

SEQ ID NO: 181716 - DNA, 25 bp, probe
ctggtcctgccatattcatagggtg

SEQ ID NO: 181717 - DNA, 25 bp, probe
ctggtcccctcttttggggtagatg

SEQ ID NO: 181718 - DNA, 25 bp, probe
ctggtcccctcttttggggtagatg

SEQ ID NO: 181719 - DNA, 25 bp, probe
ctggagcccctgtgttggggggcaa

SEQ ID NO: 181720 - DNA, 25 bp, probe
ctggcccgttgaagttccagggagc

SEQ ID NO: 181721 - DNA, 25 bp, probe
cgtactgaggtaacttccacgtagc

SEQ ID NO: 181722 - DNA, 25 bp, probe
cgtcagtgagaccaccttcgacgtc

SEQ ID NO: 181723 - DNA, 25 bp, probe
cgtctgggacgcgttcataactgtc

SEQ ID NO: 181724 - DNA, 25 bp, probe
ctgtctgggagcagcttcaactggc

SEQ ID NO: 181725 - DNA, 25 bp, probe
ctgtatgaggagagcttcaggcccc

SEQ ID NO: 181726 - DNA, 25 bp, probe
ctgtagacgaagctctgcgtcaccc

SEQ ID NO: 181727 - DNA, 25 bp, probe
ctgggacagttgctcggtcccaggg

SEQ ID NO: 181728 - DNA, 25 bp, probe
ctggataccaatgaggtgacccagg

SEQ ID NO: 181729 - DNA, 25 bp, probe
cgagatctacaaaaacggccccgtg

SEQ ID NO: 181730 - DNA, 25 bp, probe
cggcattgacaaggaccgggccgcc

SEQ ID NO: 181731 - DNA, 25 bp, probe
cggcctacaaaggcacgcggccgtt

SEQ ID NO: 181732 - DNA, 25 bp, probe
cggcgctaaggatgactctggtcag

SEQ ID NO: 181733 - DNA, 25 bp, probe
ctggtttcaggatactcatcagtcc

SEQ ID NO: 181734 - DNA, 25 bp, probe
ctggtttgggaacttcatcagcctg

SEQ ID NO: 181735 - DNA, 25 bp, probe
ctgtaattggagcagcttttggctg

SEQ ID NO: 181736 - DNA, 25 bp, probe
ctgtaatcccagcactttgggaggc

SEQ ID NO: 181737 - DNA, 25 bp, probe
ctgtaatcccagctactcgggaggc

SEQ ID NO: 181738 - DNA, 25 bp, probe
ctgtagtcccaggtactcaggaggc

SEQ ID NO: 181739 - DNA, 25 bp, probe
ctgtggtcctagctactcagtagtc

SEQ ID NO: 181740 - DNA, 25 bp, probe
ctgtggtcctgagagcaacaagaat

SEQ ID NO: 181741 - DNA, 25 bp, probe
ctgtgctgtttgtcgtgaaaagctt

SEQ ID NO: 181742 - DNA, 25 bp, probe
ctgtgcaaatagtgtcaaaagtaaa

SEQ ID NO: 181743 - DNA, 25 bp, probe
ctgtgtcaaagaagtgcagaacgta

SEQ ID NO: 181744 - DNA, 25 bp, probe
ctgtgctcaacgtcactctgaacga

SEQ ID NO: 181745 - DNA, 25 bp, probe
ctgtgctcaacgtcactctgaacga

SEQ ID NO: 181746 - DNA, 25 bp, probe
ctgtccgaggtgcagctgcaacagt

SEQ ID NO: 181747 - DNA, 25 bp, probe
ctgtcacgagcggtatgtctagatt

SEQ ID NO: 181748 - DNA, 25 bp, probe
ctgtcacgagcggtatgtctagatt

SEQ ID NO: 181749 - DNA, 25 bp, probe
ctgtacagtcaggtctgctctggtc

SEQ ID NO: 181750 - DNA, 25 bp, probe
ctgtccagtcagatgcaggctcttc

SEQ ID NO: 181751 - DNA, 25 bp, probe
ctgtcagatttgtgcaagccctgct

SEQ ID NO: 181752 - DNA, 25 bp, probe
ctgtgcaccattcgagaagcccagc

SEQ ID NO: 181753 - DNA, 25 bp, probe
ctgtgccagttgggaacattactta

SEQ ID NO: 181754 - DNA, 25 bp, probe
ctgtgctcctaatgacacttgacct

SEQ ID NO: 181755 - DNA, 25 bp, probe
ctgtccctcagatcatcatcagtgc

SEQ ID NO: 181756 - DNA, 25 bp, probe
ctgtccctcagatcatcatcagtgc

SEQ ID NO: 181757 - DNA, 25 bp, probe
ctgtgcctctcacatcattaagcac

SEQ ID NO: 181758 - DNA, 25 bp, probe
ctgtgccaccgacttcacagagaca

SEQ ID NO: 181759 - DNA, 25 bp, probe
ctgtgctatccttcagatccaatca

SEQ ID NO: 181760 - DNA, 25 bp, probe
ctgtgctatccctgtacgcctctgg

SEQ ID NO: 181761 - DNA, 25 bp, probe
ctgtgccgctacaaggacagcttcg

SEQ ID NO: 181762 - DNA, 25 bp, probe
ctgtgccgctacaaggacagcttcg

SEQ ID NO: 181763 - DNA, 25 bp, probe
ctgtgctcagcagtgctgggccagc

SEQ ID NO: 181764 - DNA, 25 bp, probe
ctgtgcatcgtgagggccagagaca

SEQ ID NO: 181765 - DNA, 25 bp, probe
ctgtgtcagtattaccaccagactg

SEQ ID NO: 181766 - DNA, 25 bp, probe
ctgtgttgccacaaacactgcagag

SEQ ID NO: 181767 - DNA, 25 bp, probe
ctgtgtgtgacatagacaccaggga

SEQ ID NO: 181768 - DNA, 25 bp, probe
ctgtgttgactgacgagccgagggg

SEQ ID NO: 181769 - DNA, 25 bp, probe
ctgtgttcatctaaaccggaaggtt

SEQ ID NO: 181770 - DNA, 25 bp, probe
ctgtgctgctgccttaacagggaag

SEQ ID NO: 181771 - DNA, 25 bp, probe
ctgtgcgcaccaaagactcgggaga

SEQ ID NO: 181772 - DNA, 25 bp, probe
ctgtgcgacagataatgcctgagga

SEQ ID NO: 181773 - DNA, 25 bp, probe
ctgtgtagcagtgagacatcatggc

SEQ ID NO: 181774 - DNA, 25 bp, probe
ctgtgtcaaggccatgatcctgctc

SEQ ID NO: 181775 - DNA, 25 bp, probe
ctgtgctgagaggcctggtgctgcc

SEQ ID NO: 181776 - DNA, 25 bp, probe
ctgtgctaggcatggtgtcttcaca

SEQ ID NO: 181777 - DNA, 25 bp, probe
ctgtgcttcctgtggacttcaagaa

SEQ ID NO: 181778 - DNA, 25 bp, probe
ctgtgttcgtgattcccttgcacag

SEQ ID NO: 181779 - DNA, 25 bp, probe
ctggaatggtcgtggattcacagat

SEQ ID NO: 181780 - DNA, 25 bp, probe
ctgtgaacgtcgtgtgactcagtgc

SEQ ID NO: 181781 - DNA, 25 bp, probe
ctgtgaacgtcgtgtgactcagtgc

SEQ ID NO: 181782 - DNA, 25 bp, probe
ctgtaactctccaaggactctcatg

SEQ ID NO: 181783 - DNA, 25 bp, probe
ctgtacataaccagcaagctctcag

SEQ ID NO: 181784 - DNA, 25 bp, probe
cgtccagaacagccgcagttctcac

SEQ ID NO: 181785 - DNA, 25 bp, probe
ctgtaaaggcagccgaggaatccaa

SEQ ID NO: 181786 - DNA, 25 bp, probe
ctgtgaagggcgtcaatctggacca

SEQ ID NO: 181787 - DNA, 25 bp, probe
ctgtgtggatggcaaactccccagg

SEQ ID NO: 181788 - DNA, 25 bp, probe
ctgtgaagtactaactttccaaggc

SEQ ID NO: 181789 - DNA, 25 bp, probe
ctgtgtagttgtatatttgtaagat

SEQ ID NO: 181790 - DNA, 25 bp, probe
ctgtgtatattgttgcttattgttt

SEQ ID NO: 181791 - DNA, 25 bp, probe
ctgtgtgatatatgccacaatgttt

SEQ ID NO: 181792 - DNA, 25 bp, probe
ctgtggccaatcccaatgactttga

SEQ ID NO: 181793 - DNA, 25 bp, probe
ctgtggccaatcccaatgactttga

SEQ ID NO: 181794 - DNA, 25 bp, probe
ctgtgactcaactcaagccttggta

SEQ ID NO: 181795 - DNA, 25 bp, probe
ctgtgactcaactcaagccttggta

SEQ ID NO: 181796 - DNA, 25 bp, probe
ctgtgcctctcatttcaatgttgtg

SEQ ID NO: 181797 - DNA, 25 bp, probe
ctgtgtcctcaaagcaatgctggtg

SEQ ID NO: 181798 - DNA, 25 bp, probe
ctggtcctcagaaccctgaatgcaa

SEQ ID NO: 181799 - DNA, 25 bp, probe
ctggtcctcagaaccctgaatgcaa

SEQ ID NO: 181800 - DNA, 25 bp, probe
ctggtcctcagaaccctgaatgcaa

SEQ ID NO: 181801 - DNA, 25 bp, probe
ctgggctcaagaacccgaccaaaga

SEQ ID NO: 181802 - DNA, 25 bp, probe
ctggtttaaacattcagcaccaaag

SEQ ID NO: 181803 - DNA, 25 bp, probe
ctggtgttttaccacagaccccagc

SEQ ID NO: 181804 - DNA, 25 bp, probe
ctggatttttactacaggcccttca

SEQ ID NO: 181805 - DNA, 25 bp, probe
ctggcattgccctcaacgaccactt

SEQ ID NO: 181806 - DNA, 25 bp, probe
ctggagtccacgtttaactcctctg

SEQ ID NO: 181807 - DNA, 25 bp, probe
ctggaaaccgagtgaactggctggc

SEQ ID NO: 181808 - DNA, 25 bp, probe
ctgtgaagagcccctctacgtgggg

SEQ ID NO: 181809 - DNA, 25 bp, probe
ctgtgagcaatctgcagtctactgg

SEQ ID NO: 181810 - DNA, 25 bp, probe
ctgtgagcaatgtggccgagctgct

SEQ ID NO: 181811 - DNA, 25 bp, probe
ctgtgaagcagctgctgtcacgcct

SEQ ID NO: 181812 - DNA, 25 bp, probe
ctgtgcacagagtgtacctcctgac

SEQ ID NO: 181813 - DNA, 25 bp, probe
ctgtcagaagttgacctttgcactg

SEQ ID NO: 181814 - DNA, 25 bp, probe
ctgtcagtatgtccccactttgaca

SEQ ID NO: 181815 - DNA, 25 bp, probe
ctgtcagtatgtccccactttgaca

SEQ ID NO: 181816 - DNA, 25 bp, probe
ctgtcatttcatcgcggactgtgcg

SEQ ID NO: 181817 - DNA, 25 bp, probe
ctgtcatttcatcgcggactgtgcg

SEQ ID NO: 181818 - DNA, 25 bp, probe
ctgtgtctacatccggaatgctgtg

SEQ ID NO: 181819 - DNA, 25 bp, probe
ctgtgagtgacatcggttcaggagg

SEQ ID NO: 181820 - DNA, 25 bp, probe
ctgtggggacctgattgggggaggg

SEQ ID NO: 181821 - DNA, 25 bp, probe
ctgtggggtccagacttgttggggc

SEQ ID NO: 181822 - DNA, 25 bp, probe
ctggggactggacaatttggggtag

SEQ ID NO: 181823 - DNA, 25 bp, probe
ctgggtattggagctctcagtgggg

SEQ ID NO: 181824 - DNA, 25 bp, probe
ctggggagacgggcgctagatttgg

SEQ ID NO: 181825 - DNA, 25 bp, probe
ctggggcaggggggtcaaggagagg

SEQ ID NO: 181826 - DNA, 25 bp, probe
ctggggcaggggggtcaaggagagg

SEQ ID NO: 181827 - DNA, 25 bp, probe
ctgtgtgggtgaaggggatagggcg

SEQ ID NO: 181828 - DNA, 25 bp, probe
ctgtgtgacctgagggtgatttgtc

SEQ ID NO: 181829 - DNA, 25 bp, probe
ctgtctgaccaccggggatgtgatt

SEQ ID NO: 181830 - DNA, 25 bp, probe
ctgtcttctcagtcctggaggatga

SEQ ID NO: 181831 - DNA, 25 bp, probe
ctgtcgttgctgtcacaaggggcag

SEQ ID NO: 181832 - DNA, 25 bp, probe
ctgtggtggtgctcacaggcgggag

SEQ ID NO: 181833 - DNA, 25 bp, probe
ctgggtggccacaactgggatgcca

SEQ ID NO: 181834 - DNA, 25 bp, probe
ctgggtggccacaactgggatgcca

SEQ ID NO: 181835 - DNA, 25 bp, probe
ctgggaggagatacacatttcgaca

SEQ ID NO: 181836 - DNA, 25 bp, probe
ctgtcgagtgtatcctcctgatgaa

SEQ ID NO: 181837 - DNA, 25 bp, probe
ctgtggagttttggcttcatgtgaa

SEQ ID NO: 181838 - DNA, 25 bp, probe
ctggacaatttggggtagtgaagta

SEQ ID NO: 181839 - DNA, 25 bp, probe
ctgtgagactgaaggggtagataag

SEQ ID NO: 181840 - DNA, 25 bp, probe
ctggggcgaaggctgtgctcaaagg

SEQ ID NO: 181841 - DNA, 25 bp, probe
ctggggcgaaggctgtgctcaaagg

SEQ ID NO: 181842 - DNA, 25 bp, probe
ctgtggtggtgaactccccacaagg

SEQ ID NO: 181843 - DNA, 25 bp, probe
ctgtggggtatagccggcacatggt

SEQ ID NO: 181844 - DNA, 25 bp, probe
ctgtgaaggagggccccgagcaggt

SEQ ID NO: 181845 - DNA, 25 bp, probe
ctgtctggttgtgtcccaagaggtg

SEQ ID NO: 181846 - DNA, 25 bp, probe
ctgtcgattggtggtcctttggagt

SEQ ID NO: 181847 - DNA, 25 bp, probe
ctgtccttggcagagaccttgctgc

SEQ ID NO: 181848 - DNA, 25 bp, probe
cggctcttgacacttagccgctgtc

SEQ ID NO: 181849 - DNA, 25 bp, probe
ctgtgtcttggaatctagccgatgg

SEQ ID NO: 181850 - DNA, 25 bp, probe
ctgtgctgcaaggtgtctgactttg

SEQ ID NO: 181851 - DNA, 25 bp, probe
ctgtgtgagcaggacccactcatag

SEQ ID NO: 181852 - DNA, 25 bp, probe
ctgtgctggaggtgtcactgcagat

SEQ ID NO: 181853 - DNA, 25 bp, probe
ctgtgctgggagaaatacttgaact

SEQ ID NO: 181854 - DNA, 25 bp, probe
ctgtctgtgtgaagcaatcatttag

SEQ ID NO: 181855 - DNA, 25 bp, probe
ctgtcttgagaatagctgtgtatga

SEQ ID NO: 181856 - DNA, 25 bp, probe
ctgtctgagggatcactgtgtcatt

SEQ ID NO: 181857 - DNA, 25 bp, probe
ctgtcagcatcttgaaagctttcat

SEQ ID NO: 181858 - DNA, 25 bp, probe
ctgtcagagcttttaattatatttg

SEQ ID NO: 181859 - DNA, 25 bp, probe
ctgggatttttattgtatatgttat

SEQ ID NO: 181860 - DNA, 25 bp, probe
ctgggatttttattgtatatgttat

SEQ ID NO: 181861 - DNA, 25 bp, probe
ctgtgtatgttttatatcaaatgcc

SEQ ID NO: 181862 - DNA, 25 bp, probe
ctgtgaatgtcatctcaacaacctc

SEQ ID NO: 181863 - DNA, 25 bp, probe
ctgtgaagtcaacaataatggcagt

SEQ ID NO: 181864 - DNA, 25 bp, probe
ctgtgtagataagtaagaagtagtg

SEQ ID NO: 181865 - DNA, 25 bp, probe
ctgtgcatcagtgacttagggctag

SEQ ID NO: 181866 - DNA, 25 bp, probe
ctgtcattgtgattttcgacctcat

SEQ ID NO: 181867 - DNA, 25 bp, probe
ctgtcattgggggtcagacctcggc

SEQ ID NO: 181868 - DNA, 25 bp, probe
ctgtctgggatccgccagaactgcc

SEQ ID NO: 181869 - DNA, 25 bp, probe
ctgtctgggatccgccagaactgcc

SEQ ID NO: 181870 - DNA, 25 bp, probe
ctgtcatgcggtttccaaggtgcac

SEQ ID NO: 181871 - DNA, 25 bp, probe
ctgtggaagcatttcgcgatggaca

SEQ ID NO: 181872 - DNA, 25 bp, probe
ctgtgccataatgctgctcgcagga

SEQ ID NO: 181873 - DNA, 25 bp, probe
ctgtgccagaagatcgagcagtgtg

SEQ ID NO: 181874 - DNA, 25 bp, probe
ctgtcccaggattagcagagtggag

SEQ ID NO: 181875 - DNA, 25 bp, probe
ctgtgcaccagttcctaggtgtgtg

SEQ ID NO: 181876 - DNA, 25 bp, probe
ctgtgagtcagcgagcctcggtgaa

SEQ ID NO: 181877 - DNA, 25 bp, probe
ctgtgcaccccgacaaggtgagcag

SEQ ID NO: 181878 - DNA, 25 bp, probe
ctgtgcaccccgacaaggtgagcag

SEQ ID NO: 181879 - DNA, 25 bp, probe
ctgtccctcacaagcagggtggcaa

SEQ ID NO: 181880 - DNA, 25 bp, probe
ctgtcggctggaagctgctttggcg

SEQ ID NO: 181881 - DNA, 25 bp, probe
ctgtcggctggaagctgctttggcg

SEQ ID NO: 181882 - DNA, 25 bp, probe
ctgggagcgagagggcatcttcctg

SEQ ID NO: 181883 - DNA, 25 bp, probe
ctgggagcgagagggcatcttcctg

SEQ ID NO: 181884 - DNA, 25 bp, probe
ctgtggagccaaggcggctccaggc

SEQ ID NO: 181885 - DNA, 25 bp, probe
ctgtgggcaatgcagcctaccaggc

SEQ ID NO: 181886 - DNA, 25 bp, probe
ctgtggctgggctatgccaactcag

SEQ ID NO: 181887 - DNA, 25 bp, probe
ctgtggcacggaatgaaaacagagc

SEQ ID NO: 181888 - DNA, 25 bp, probe
ctgtgccaccgcgtgcaaatgaagg

SEQ ID NO: 181889 - DNA, 25 bp, probe
ctgtgccaccgcgtgcaaatgaagg

SEQ ID NO: 181890 - DNA, 25 bp, probe
ctgtgacatccgccctgtgatgaag

SEQ ID NO: 181891 - DNA, 25 bp, probe
ctgtgatcacgagccattgtcattc

SEQ ID NO: 181892 - DNA, 25 bp, probe
ctgtgtcacgaaccatttctctggt

SEQ ID NO: 181893 - DNA, 25 bp, probe
cggtgcacgccgaaatttctgttta

SEQ ID NO: 181894 - DNA, 25 bp, probe
ctgggcagccttcatatttgccatt

SEQ ID NO: 181895 - DNA, 25 bp, probe
ctgggagatcttctcctatggcctg

SEQ ID NO: 181896 - DNA, 25 bp, probe
ctgtggagacccgtcctgaacgggc

SEQ ID NO: 181897 - DNA, 25 bp, probe
ctgggagaacccagtgaccagcggg

SEQ ID NO: 181898 - DNA, 25 bp, probe
ctggggactaccagagactctggga

SEQ ID NO: 181899 - DNA, 25 bp, probe
ctggggactaccagagactctggga

SEQ ID NO: 181900 - DNA, 25 bp, probe
ctgggggttccccagagactagtga

SEQ ID NO: 181901 - DNA, 25 bp, probe
ctgtgtggggtggagccaaacaagt

SEQ ID NO: 181902 - DNA, 25 bp, probe
ctgtgttgttcatagtcaatcaaac

SEQ ID NO: 181903 - DNA, 25 bp, probe
ctgtgtttgtaatttaatgctgcta

SEQ ID NO: 181904 - DNA, 25 bp, probe
ctgtgtttgtaatttaatgctgcta

SEQ ID NO: 181905 - DNA, 25 bp, probe
ctgtctatttcaatatagaactgtt

SEQ ID NO: 181906 - DNA, 25 bp, probe
ctgtctcattaaatatacatccttt

SEQ ID NO: 181907 - DNA, 25 bp, probe
ctgtctcattaaatatacatccttt

SEQ ID NO: 181908 - DNA, 25 bp, probe
ctgtcctgctatatgaagatcacct

SEQ ID NO: 181909 - DNA, 25 bp, probe
ctgtgcacatgcctctgtagagagc

SEQ ID NO: 181910 - DNA, 25 bp, probe
ctgtgaagatgcctgtgggcatcct

SEQ ID NO: 181911 - DNA, 25 bp, probe
ctgtgacaggcaccgtgggcaatgt

SEQ ID NO: 181912 - DNA, 25 bp, probe
ctgtctgcagtcagaggaggacgtg

SEQ ID NO: 181913 - DNA, 25 bp, probe
ctgtccatgtgaaggtgtggagcga

SEQ ID NO: 181914 - DNA, 25 bp, probe
ctgtccatgatgcactgttagaggc

SEQ ID NO: 181915 - DNA, 25 bp, probe
ctgtccatgatgcactgttagaggc

SEQ ID NO: 181916 - DNA, 25 bp, probe
ctgtccatggtagtcagtatggctc

SEQ ID NO: 181917 - DNA, 25 bp, probe
ctgtctcttgtagtacaatgtatcc

SEQ ID NO: 181918 - DNA, 25 bp, probe
ctgtgcctttgaatacaaatttcag

SEQ ID NO: 181919 - DNA, 25 bp, probe
ctgtccttagaatgcagaagtccgt

SEQ ID NO: 181920 - DNA, 25 bp, probe
ctgtccttaagacggcaggaagcag

SEQ ID NO: 181921 - DNA, 25 bp, probe
ctggcttctcaaacggccgaagttg

SEQ ID NO: 181922 - DNA, 25 bp, probe
ctggtttcagacagaggcgacttct

SEQ ID NO: 181923 - DNA, 25 bp, probe
ctgtgtttgaactggaggctctgac

SEQ ID NO: 181924 - DNA, 25 bp, probe
ctgtgtttacctgagttggctgaaa

SEQ ID NO: 181925 - DNA, 25 bp, probe
ctggactggaccttagtactgtaaa

SEQ ID NO: 181926 - DNA, 25 bp, probe
ctggggagactcctcagtagggcaa

SEQ ID NO: 181927 - DNA, 25 bp, probe
ctggtgtcagtccctacttaggaaa

SEQ ID NO: 181928 - DNA, 25 bp, probe
gctggtgaccggttacttgggaagg

SEQ ID NO: 181929 - DNA, 25 bp, probe
gctggtgaccggttacttgggaagg

SEQ ID NO: 181930 - DNA, 25 bp, probe
ctgggtccgaatcagtaggtgaccc

SEQ ID NO: 181931 - DNA, 25 bp, probe
ctgggtccgccttaatctggaaggc

SEQ ID NO: 181932 - DNA, 25 bp, probe
ctggggcctcccagaatggaaagtc

SEQ ID NO: 181933 - DNA, 25 bp, probe
ctgtggtgccgtacttggaggacct

SEQ ID NO: 181934 - DNA, 25 bp, probe
ctgtggtgcgtgtgtgtgaagtgac

SEQ ID NO: 181935 - DNA, 25 bp, probe
ctgggacggaagatcgggagcgggt

SEQ ID NO: 181936 - DNA, 25 bp, probe
gctggaaaaaccgtccggaggagcg

SEQ ID NO: 181937 - DNA, 25 bp, probe
ctggaaatacacacctcggaggaca

SEQ ID NO: 181938 - DNA, 25 bp, probe
cggacaagtacggccttgggtatca

SEQ ID NO: 181939 - DNA, 25 bp, probe
ctggactaggactcccataaatcac

SEQ ID NO: 181940 - DNA, 25 bp, probe
ctgggtgaagactgcccttcagagc

SEQ ID NO: 181941 - DNA, 25 bp, probe
ctggggaagactattccagagacga

SEQ ID NO: 181942 - DNA, 25 bp, probe
ctgggaaaatctattcctgccacca

SEQ ID NO: 181943 - DNA, 25 bp, probe
cggagaggatttggtccctcaacta

SEQ ID NO: 181944 - DNA, 25 bp, probe
ctgggggatttagtgccactgaagc

SEQ ID NO: 181945 - DNA, 25 bp, probe
ctggtgggttttggcagcgtcaagt

SEQ ID NO: 181946 - DNA, 25 bp, probe
cgatttatctatatggcggtccagc

SEQ ID NO: 181947 - DNA, 25 bp, probe
ctggtttatatcatggccagcccct

SEQ ID NO: 181948 - DNA, 25 bp, probe
ctggttgagttcaggtagctgcccc

SEQ ID NO: 181949 - DNA, 25 bp, probe
ctggtcggcttcagagtttccacag

SEQ ID NO: 181950 - DNA, 25 bp, probe
ctggtcgtcctcaggttcttgacca

SEQ ID NO: 181951 - DNA, 25 bp, probe
ctggtcgtcctcaggttcttgacca

SEQ ID NO: 181952 - DNA, 25 bp, probe
ctgggttcatccaggttgttcccag

SEQ ID NO: 181953 - DNA, 25 bp, probe
ctggagggatccagcgtatcttgcc

SEQ ID NO: 181954 - DNA, 25 bp, probe
cggagtgcttgtgacagtccttgcc

SEQ ID NO: 181955 - DNA, 25 bp, probe
ctggggtttgccagtcagttgctca

SEQ ID NO: 181956 - DNA, 25 bp, probe
ctgtgtgttttgcaagaatgtgtgg

SEQ ID NO: 181957 - DNA, 25 bp, probe
ctggggctactgcactttgtgaagg

SEQ ID NO: 181958 - DNA, 25 bp, probe
ctggtgttgactgactttaacaagg

SEQ ID NO: 181959 - DNA, 25 bp, probe
ctggtgttactggtttcttacattg

SEQ ID NO: 181960 - DNA, 25 bp, probe
ctggatgcttgagtcttaccgtaat

SEQ ID NO: 181961 - DNA, 25 bp, probe
ctggtgcggagcttctacctgaaga

SEQ ID NO: 181962 - DNA, 25 bp, probe
ctgggccggatcaagagcctgcaaa

SEQ ID NO: 181963 - DNA, 25 bp, probe
ctgggacagaagccaatgcctcccg

SEQ ID NO: 181964 - DNA, 25 bp, probe
ctgggagcagaacagtccctcacac

SEQ ID NO: 181965 - DNA, 25 bp, probe
ctggtagggaaagactctgcacctg

SEQ ID NO: 181966 - DNA, 25 bp, probe
cggtaggtaacatccctgacatcta

SEQ ID NO: 181967 - DNA, 25 bp, probe
cggtaggtaacatccctgacatcta

SEQ ID NO: 181968 - DNA, 25 bp, probe
ctgggaagttactctcatggttatg

SEQ ID NO: 181969 - DNA, 25 bp, probe
ctgggacatgttaggcccttgtttt

SEQ ID NO: 181970 - DNA, 25 bp, probe
ctgggactgtttcagacttggaaag

SEQ ID NO: 181971 - DNA, 25 bp, probe
ctgtgggattttcaacatctggttc

SEQ ID NO: 181972 - DNA, 25 bp, probe
ctgtgagaactcatcgaaactgggg

SEQ ID NO: 181973 - DNA, 25 bp, probe
ctgtggcaacggacaaaactctggc

SEQ ID NO: 181974 - DNA, 25 bp, probe
ctgtccaggctgagataaatcccgg

SEQ ID NO: 181975 - DNA, 25 bp, probe
ctgtccacaggcactgaggacccag

SEQ ID NO: 181976 - DNA, 25 bp, probe
cgtggccagcctgctggccaccgac

SEQ ID NO: 181977 - DNA, 25 bp, probe
ctgtgagccaggctgaggctaccag

SEQ ID NO: 181978 - DNA, 25 bp, probe
ctgtggcccagcctggagtacagtg

SEQ ID NO: 181979 - DNA, 25 bp, probe
ctggagaccactcgcaacaacgatg

SEQ ID NO: 181980 - DNA, 25 bp, probe
ctgggtcccttggccatatcaaggc

SEQ ID NO: 181981 - DNA, 25 bp, probe
ctggttacctgtgcatgctgttaac

SEQ ID NO: 181982 - DNA, 25 bp, probe
ctggttcatactccagcctttgaac

SEQ ID NO: 181983 - DNA, 25 bp, probe
ctggttcaacgaggccattgacttc

SEQ ID NO: 181984 - DNA, 25 bp, probe
ctgggcagatacatcccattccttc

SEQ ID NO: 181985 - DNA, 25 bp, probe
ctgtggcagattgactcctaccatg

SEQ ID NO: 181986 - DNA, 25 bp, probe
ctgggtgcataccagtcttaccaat

SEQ ID NO: 181987 - DNA, 25 bp, probe
ctgtggtcaccgaatctgtactaag

SEQ ID NO: 181988 - DNA, 25 bp, probe
ctgggtacctgcaagcagaacttcc

SEQ ID NO: 181989 - DNA, 25 bp, probe
ctgggccagttcccagaagcttcgc

SEQ ID NO: 181990 - DNA, 25 bp, probe
ctggggttctggaccaagttcgacg

SEQ ID NO: 181991 - DNA, 25 bp, probe
ctggagggcatgggaaaagtccaga

SEQ ID NO: 181992 - DNA, 25 bp, probe
ctgtgaggtgcgggaacacctgagc

SEQ ID NO: 181993 - DNA, 25 bp, probe
ctgtgcatgggctcgaagggagagc

SEQ ID NO: 181994 - DNA, 25 bp, probe
ctggcgggcaacgagaagctaacca

SEQ ID NO: 181995 - DNA, 25 bp, probe
ctgggaggcataggagaagggtcgg

SEQ ID NO: 181996 - DNA, 25 bp, probe
ctgtgtgattctggggaagtcccgg

SEQ ID NO: 181997 - DNA, 25 bp, probe
ctgtgtttctcccaggtaatccggg

SEQ ID NO: 181998 - DNA, 25 bp, probe
ctgtgccttgctgccacagtagacc

SEQ ID NO: 181999 - DNA, 25 bp, probe
ctgtgccttgctgccacagtagacc

SEQ ID NO: 182000 - DNA, 25 bp, probe
ctgtgcctcatgaaccagacgtacc

SEQ ID NO: 182001 - DNA, 25 bp, probe
ctgtgcctcatgaaccagacgtacc

SEQ ID NO: 182002 - DNA, 25 bp, probe
ctgtgctatcagagcaaggcgctat

SEQ ID NO: 182003 - DNA, 25 bp, probe
ctgtgctatcggcagatgatgcttt

SEQ ID NO: 182004 - DNA, 25 bp, probe
ctgtggacatggcagttgttgctcc

SEQ ID NO: 182005 - DNA, 25 bp, probe
ctgtggacatggcagttgttgctcc

SEQ ID NO: 182006 - DNA, 25 bp, probe
ctgggttgggggtcagtgcatctca

SEQ ID NO: 182007 - DNA, 25 bp, probe
ctgggttgggattatgctgctgtta

SEQ ID NO: 182008 - DNA, 25 bp, probe
ctggggtccagaaccatgagatgta

SEQ ID NO: 182009 - DNA, 25 bp, probe
ctgggaggcttatctcactgagtga

SEQ ID NO: 182010 - DNA, 25 bp, probe
ctgtgggccatttaacctggatgcc

SEQ ID NO: 182011 - DNA, 25 bp, probe
ctgtggactataacacctctgaccc

SEQ ID NO: 182012 - DNA, 25 bp, probe
ctgtgcaggctgaaaaccatgacac

SEQ ID NO: 182013 - DNA, 25 bp, probe
ctggacggcctggacttgaaactca

SEQ ID NO: 182014 - DNA, 25 bp, probe
ctggacccctggatgcaaacaccag

SEQ ID NO: 182015 - DNA, 25 bp, probe
cggccttccgtgatggaaaccactt

SEQ ID NO: 182016 - DNA, 25 bp, probe
ctggcccccgggtgtaaatagattg

SEQ ID NO: 182017 - DNA, 25 bp, probe
ctggtccccgtttgtcaaagaggat

SEQ ID NO: 182018 - DNA, 25 bp, probe
ctggtcccagtgttagggtagcatg

SEQ ID NO: 182019 - DNA, 25 bp, probe
ctggtccactgtgaagctgggttct

SEQ ID NO: 182020 - DNA, 25 bp, probe
ctgtgtcgcacttaaactggagaag

SEQ ID NO: 182021 - DNA, 25 bp, probe
ctgtgctctacttcattgagtaaaa

SEQ ID NO: 182022 - DNA, 25 bp, probe
ctgtgctgtgatgttgagagctgag

SEQ ID NO: 182023 - DNA, 25 bp, probe
ctgtccaatgacatgtgtgctagag

SEQ ID NO: 182024 - DNA, 25 bp, probe
ctgtccaatactgggttcagctgta

SEQ ID NO: 182025 - DNA, 25 bp, probe
ctgtggctcaagggagtcaccttca

SEQ ID NO: 182026 - DNA, 25 bp, probe
ctgtggctcaagggagtcaccttca

SEQ ID NO: 182027 - DNA, 25 bp, probe
ctgtgcccagaggagcagtactcaa

SEQ ID NO: 182028 - DNA, 25 bp, probe
ctgtgcccagaggagcagtactcaa

SEQ ID NO: 182029 - DNA, 25 bp, probe
cggctctcagcggagcaggcccaac

SEQ ID NO: 182030 - DNA, 25 bp, probe
ctgtgtctctgagaaggctgctaac

SEQ ID NO: 182031 - DNA, 25 bp, probe
ctgtgtctcatggtgttggcttatc

SEQ ID NO: 182032 - DNA, 25 bp, probe
ctgtgtcatcttctggagttatcaa

SEQ ID NO: 182033 - DNA, 25 bp, probe
ctgtgtatctaggtggacctcactt

SEQ ID NO: 182034 - DNA, 25 bp, probe
ctgtgagcatgcagtacggcctgac

SEQ ID NO: 182035 - DNA, 25 bp, probe
ctgtgagcatgcagtacggcctgac

SEQ ID NO: 182036 - DNA, 25 bp, probe
ctgtgacaaggctacgctgacaatc

SEQ ID NO: 182037 - DNA, 25 bp, probe
ctggaagaggcctgtgatccctagc

SEQ ID NO: 182038 - DNA, 25 bp, probe
ctggaagaggcctgtgatccctagc

SEQ ID NO: 182039 - DNA, 25 bp, probe
ctggctcaaaggtagtgagttctac

SEQ ID NO: 182040 - DNA, 25 bp, probe
ctggctcctgggaacgagaactact

SEQ ID NO: 182041 - DNA, 25 bp, probe
ctgtggcctgggaatccattttcct

SEQ ID NO: 182042 - DNA, 25 bp, probe
cgtggcctgggagttcagcttttag

SEQ ID NO: 182043 - DNA, 25 bp, probe
ctgtgtggctgacagtctcagtttg

SEQ ID NO: 182044 - DNA, 25 bp, probe
ctgtgctctcgacagattcttcttg

SEQ ID NO: 182045 - DNA, 25 bp, probe
ctgtgtcttcaggagtctcatggcc

SEQ ID NO: 182046 - DNA, 25 bp, probe
ctgtgctcatctccggagctgatag

SEQ ID NO: 182047 - DNA, 25 bp, probe
ctgtgtttgccttgatgctgatcat

SEQ ID NO: 182048 - DNA, 25 bp, probe
ctgtgtgttggctgagctgttacta

SEQ ID NO: 182049 - DNA, 25 bp, probe
ctgtgtgtgggggacgcttacatca

SEQ ID NO: 182050 - DNA, 25 bp, probe
ctgtgttgcggggaagctgtgtgga

SEQ ID NO: 182051 - DNA, 25 bp, probe
ctgtgtccttagtgatgtgtgtgtg

SEQ ID NO: 182052 - DNA, 25 bp, probe
ctgtgttttgaatggtgttgtatgc

SEQ ID NO: 182053 - DNA, 25 bp, probe
cgtttaccttcatggtgctgttgcc

SEQ ID NO: 182054 - DNA, 25 bp, probe
cgttgaagttccagggagcttgccc

SEQ ID NO: 182055 - DNA, 25 bp, probe
cggtcaagttccaggttgatatcac

SEQ ID NO: 182056 - DNA, 25 bp, probe
ctggtcagagatacctggcctggtc

SEQ ID NO: 182057 - DNA, 25 bp, probe
ctgggtagtcagctgagcctgttgc

SEQ ID NO: 182058 - DNA, 25 bp, probe
ctgtgggaggtgctgatgctctgta

SEQ ID NO: 182059 - DNA, 25 bp, probe
ctgggagacaggctcatggctcatg

SEQ ID NO: 182060 - DNA, 25 bp, probe
ctgtgatggactcgttctgtagatg

SEQ ID NO: 182061 - DNA, 25 bp, probe
ctggtggacctggagctggagagct

SEQ ID NO: 182062 - DNA, 25 bp, probe
ctgtgtagccgtctgctggagtata

SEQ ID NO: 182063 - DNA, 25 bp, probe
ctgtgtagccgccctgagagagaat

SEQ ID NO: 182064 - DNA, 25 bp, probe
ctgtgtctgccctttagaagctaag

SEQ ID NO: 182065 - DNA, 25 bp, probe
ctgtgtctccacttcaggtggtaca

SEQ ID NO: 182066 - DNA, 25 bp, probe
ctgtgtagtagctcgtgtgcttaga

SEQ ID NO: 182067 - DNA, 25 bp, probe
ctgtgtggtcagcttttggaaggcc

SEQ ID NO: 182068 - DNA, 25 bp, probe
ctgtgaggtcagggttttagagagc

SEQ ID NO: 182069 - DNA, 25 bp, probe
ctgtgagaggtggggcagtcaaggt

SEQ ID NO: 182070 - DNA, 25 bp, probe
ctgtgtggcagggggatggcaggtt

SEQ ID NO: 182071 - DNA, 25 bp, probe
ctgtggtgcatggcagcggaggccc

SEQ ID NO: 182072 - DNA, 25 bp, probe
ctgtggtgcatggcagcggaggccc

SEQ ID NO: 182073 - DNA, 25 bp, probe
ctgtgaggcagaggttgcagtgagc

SEQ ID NO: 182074 - DNA, 25 bp, probe
ctgtgcaaggaggcttgctggacct

SEQ ID NO: 182075 - DNA, 25 bp, probe
ctgtgaaatcacattctgtattttt

SEQ ID NO: 182076 - DNA, 25 bp, probe
ctggagccctagtatctaatttttt

SEQ ID NO: 182077 - DNA, 25 bp, probe
ctggcatgccactgtttatgcattg

SEQ ID NO: 182078 - DNA, 25 bp, probe
ctgtgcagccactgttaagccatgt

SEQ ID NO: 182079 - DNA, 25 bp, probe
ctgtgcagccactgttaagccatgt

SEQ ID NO: 182080 - DNA, 25 bp, probe
cgtgcccaaactcaatgccacaggg

SEQ ID NO: 182081 - DNA, 25 bp, probe
cgtgcccaaactcaatgccacaggg

SEQ ID NO: 182082 - DNA, 25 bp, probe
ctgtgctccatagctggtaggagag

SEQ ID NO: 182083 - DNA, 25 bp, probe
ctgtgttcatattctgtctagtgta

SEQ ID NO: 182084 - DNA, 25 bp, probe
ctggttcacatgccttgtagctaag

SEQ ID NO: 182085 - DNA, 25 bp, probe
ctgtgtctgcaaagtggtcaaaagt

SEQ ID NO: 182086 - DNA, 25 bp, probe
ctgtgatctataccatgaggaacaa

SEQ ID NO: 182087 - DNA, 25 bp, probe
ctgtgatctataccatgaggaacaa

SEQ ID NO: 182088 - DNA, 25 bp, probe
ctgtgtctgcaaggatgagtgggcc

SEQ ID NO: 182089 - DNA, 25 bp, probe
ctggtttacgagatgtggctcttcg

SEQ ID NO: 182090 - DNA, 25 bp, probe
ctgggttccggggatgacatctctg

SEQ ID NO: 182091 - DNA, 25 bp, probe
ctgggctacactatctaacatctgg

SEQ ID NO: 182092 - DNA, 25 bp, probe
ctgtggcatattacctgtaacatgt

SEQ ID NO: 182093 - DNA, 25 bp, probe
ctgtgacttcatgctctgataactg

SEQ ID NO: 182094 - DNA, 25 bp, probe
ctgtggctctgaacttcatgaaggg

SEQ ID NO: 182095 - DNA, 25 bp, probe
ctgggcttcatgcttatgttggctg

SEQ ID NO: 182096 - DNA, 25 bp, probe
ctgtgacatttcaagctctgttggt

SEQ ID NO: 182097 - DNA, 25 bp, probe
ctgtgcatcacagcatagcttttag

SEQ ID NO: 182098 - DNA, 25 bp, probe
ctgtgcacagcactttattgttaca

SEQ ID NO: 182099 - DNA, 25 bp, probe
ctgtgagccagtattcatttaagag

SEQ ID NO: 182100 - DNA, 25 bp, probe
ctggtgccgtcagatccttaaaggt

SEQ ID NO: 182101 - DNA, 25 bp, probe
ctgggctgtgttggtctttgaaggg

SEQ ID NO: 182102 - DNA, 25 bp, probe
ctgggcatgtcccgatatctggata

SEQ ID NO: 182103 - DNA, 25 bp, probe
ctgggctgatcctgaatggcacagg

SEQ ID NO: 182104 - DNA, 25 bp, probe
ctgtgaggtgcctgcacttctcaag

SEQ ID NO: 182105 - DNA, 25 bp, probe
ctgtggtggatttcacttacaagaa

SEQ ID NO: 182106 - DNA, 25 bp, probe
ctgggcaggatgttcactctattta

SEQ ID NO: 182107 - DNA, 25 bp, probe
ctggtgggcatgtcatgtgtctttt

SEQ ID NO: 182108 - DNA, 25 bp, probe
ctggtggcatctctgttttcagtgg

SEQ ID NO: 182109 - DNA, 25 bp, probe
ctgggatgatctcattaataagaag

SEQ ID NO: 182110 - DNA, 25 bp, probe
ctggttggtccaaactgaataggct

SEQ ID NO: 182111 - DNA, 25 bp, probe
ctggcttttggcttctctaattggc

SEQ ID NO: 182112 - DNA, 25 bp, probe
ctggtctttgacatctttatctggt

SEQ ID NO: 182113 - DNA, 25 bp, probe
ctgtgatctattccaatgttcttcc

SEQ ID NO: 182114 - DNA, 25 bp, probe
ctgtgatgccacacagagtggtctt

SEQ ID NO: 182115 - DNA, 25 bp, probe
ctgtgtccatctatggtagcacatt

SEQ ID NO: 182116 - DNA, 25 bp, probe
ctggtcctgctgatcaatttcatct

SEQ ID NO: 182117 - DNA, 25 bp, probe
ctgtggcggcagacacagcttgtcc

SEQ ID NO: 182118 - DNA, 25 bp, probe
ctgtggccacagacaacttcatcag

SEQ ID NO: 182119 - DNA, 25 bp, probe
ctgggttcagatgacgaagcagatc

SEQ ID NO: 182120 - DNA, 25 bp, probe
ctgtggaatcagacctccaggagat

SEQ ID NO: 182121 - DNA, 25 bp, probe
ctgggcaatttctatatcaggacag

SEQ ID NO: 182122 - DNA, 25 bp, probe
ctggtggcattcctttaggaatgct

SEQ ID NO: 182123 - DNA, 25 bp, probe
cggggatcacagacttagaaagttc

SEQ ID NO: 182124 - DNA, 25 bp, probe
cggggttcgatttaagcggatatcg

SEQ ID NO: 182125 - DNA, 25 bp, probe
ctggggggcgcaagaaagcgttctc

SEQ ID NO: 182126 - DNA, 25 bp, probe
ctggggggcgcaagaaagcgttctc

SEQ ID NO: 182127 - DNA, 25 bp, probe
cgcgtggtggacgacaacgggttca

SEQ ID NO: 182128 - DNA, 25 bp, probe
ctgggcagggacaaccaccaggtgt

SEQ ID NO: 182129 - DNA, 25 bp, probe
ctggggaatactggccatgcctgga

SEQ ID NO: 182130 - DNA, 25 bp, probe
ctgtgggaaattctcactggcgaaa

SEQ ID NO: 182131 - DNA, 25 bp, probe
ctgtggtgcacagtggcccaatgtg

SEQ ID NO: 182132 - DNA, 25 bp, probe
ctgtgggcaaggtcatccctgagct

SEQ ID NO: 182133 - DNA, 25 bp, probe
ctgtggagcacgatgtgcccagcac

SEQ ID NO: 182134 - DNA, 25 bp, probe
ctgtggagcacgatgtgcccagcac

SEQ ID NO: 182135 - DNA, 25 bp, probe
ctgtgtgagcatctctgtgtaccca

SEQ ID NO: 182136 - DNA, 25 bp, probe
ctgtggtctctctgatgtagcccat

SEQ ID NO: 182137 - DNA, 25 bp, probe
ctgggctacatttgtgctttctgca

SEQ ID NO: 182138 - DNA, 25 bp, probe
ctgtgagccctttggtgctaataag

SEQ ID NO: 182139 - DNA, 25 bp, probe
ctgtgacctcttattgcgacatgca

SEQ ID NO: 182140 - DNA, 25 bp, probe
ctgtgaactcctagctgtggtcagg

SEQ ID NO: 182141 - DNA, 25 bp, probe
ctgtgagagtgcaggcggggggtgg

SEQ ID NO: 182142 - DNA, 25 bp, probe
ctgtggacccgaaaggagggcagag

SEQ ID NO: 182143 - DNA, 25 bp, probe
ctggggcctacagaggtgggcagga

SEQ ID NO: 182144 - DNA, 25 bp, probe
ctgggccctacatggatgtggtcgt

SEQ ID NO: 182145 - DNA, 25 bp, probe
ctgggccctgcaaagtgtgagccgc

SEQ ID NO: 182146 - DNA, 25 bp, probe
ctgggcgtcatcatagaggaaggga

SEQ ID NO: 182147 - DNA, 25 bp, probe
ctgtgtcactctaaagggaactgtg

SEQ ID NO: 182148 - DNA, 25 bp, probe
ctgtgtgactcaaaccaaatcactg

SEQ ID NO: 182149 - DNA, 25 bp, probe
ctgtgtgtgcctcacgaaatggctg

SEQ ID NO: 182150 - DNA, 25 bp, probe
ctgtgtctgctcataagtacttgtg

SEQ ID NO: 182151 - DNA, 25 bp, probe
ctggtcgtcttcaaggacctgagcg

SEQ ID NO: 182152 - DNA, 25 bp, probe
ctggtcgtcttcaaggacctgagcg

SEQ ID NO: 182153 - DNA, 25 bp, probe
ctggtagcatttgctcagagcctac

SEQ ID NO: 182154 - DNA, 25 bp, probe
ctgtgtactcttgccgagatgctga

SEQ ID NO: 182155 - DNA, 25 bp, probe
ctgtgtactcttgccgagatgctga

SEQ ID NO: 182156 - DNA, 25 bp, probe
ctgtgtcctgatggcccaaatgtca

SEQ ID NO: 182157 - DNA, 25 bp, probe
ctgtgtcctgatggcccaaatgtca

SEQ ID NO: 182158 - DNA, 25 bp, probe
ctgggcctgaccaaaaatatactgg

SEQ ID NO: 182159 - DNA, 25 bp, probe
ctgggccatacaaaaaacaagcttt

SEQ ID NO: 182160 - DNA, 25 bp, probe
ctgggcacacacgtagacaagggca

SEQ ID NO: 182161 - DNA, 25 bp, probe
ctgggcattccagagagacagctga

SEQ ID NO: 182162 - DNA, 25 bp, probe
ctgtggcctccaggagcaaccatag

SEQ ID NO: 182163 - DNA, 25 bp, probe
ctgggcctgtcactggcataggaag

SEQ ID NO: 182164 - DNA, 25 bp, probe
ctgggcattacatcgcatagaaatc

SEQ ID NO: 182165 - DNA, 25 bp, probe
ctgtggctttctccatcatagaata

SEQ ID NO: 182166 - DNA, 25 bp, probe
ctgtggtggtcatgcactatagttt

SEQ ID NO: 182167 - DNA, 25 bp, probe
ctgtggcggttagcattggatttgc

SEQ ID NO: 182168 - DNA, 25 bp, probe
ctgtggagaggtaaagctggctttc

SEQ ID NO: 182169 - DNA, 25 bp, probe
ctgtgggagtgggaactgttctctg

SEQ ID NO: 182170 - DNA, 25 bp, probe
ctggggcctgtacgaggtactcatg

SEQ ID NO: 182171 - DNA, 25 bp, probe
ctgggcagcttgttgaaggctcgtc

SEQ ID NO: 182172 - DNA, 25 bp, probe
ctgggcattgtgtttgggccgacac

SEQ ID NO: 182173 - DNA, 25 bp, probe
ctggatttgtgagtgctgggacggc

SEQ ID NO: 182174 - DNA, 25 bp, probe
ctgtgtctctgggagcggagaccgg

SEQ ID NO: 182175 - DNA, 25 bp, probe
ctgggcattggtgagggagccaggc

SEQ ID NO: 182176 - DNA, 25 bp, probe
ctgggcttactggagctggaccagc

SEQ ID NO: 182177 - DNA, 25 bp, probe
ctgggcttactggagctggaccagc

SEQ ID NO: 182178 - DNA, 25 bp, probe
ctgggcttactggagctggaccagc

SEQ ID NO: 182179 - DNA, 25 bp, probe
ctgggcatctacaagcagggcctca

SEQ ID NO: 182180 - DNA, 25 bp, probe
ctggtgcactcaacagttgggtgca

SEQ ID NO: 182181 - DNA, 25 bp, probe
ctggtgaacagcaacttggtctgca

SEQ ID NO: 182182 - DNA, 25 bp, probe
ctggtgggcaatggtgtggtctgct

SEQ ID NO: 182183 - DNA, 25 bp, probe
ctgggtgacaatgatgctgagacgc

SEQ ID NO: 182184 - DNA, 25 bp, probe
ctgggtgcaatgaaactgggagtga

SEQ ID NO: 182185 - DNA, 25 bp, probe
ctggtgtgccggatcggcgattggc

SEQ ID NO: 182186 - DNA, 25 bp, probe
ctgtggaggggatgcgactgtaggg

SEQ ID NO: 182187 - DNA, 25 bp, probe
ctgggaacgagaactactgataggg

SEQ ID NO: 182188 - DNA, 25 bp, probe
ctggcgaaccatctcaatgtaaggg

SEQ ID NO: 182189 - DNA, 25 bp, probe
ctggcgaaccatctcaatgtaaggg

SEQ ID NO: 182190 - DNA, 25 bp, probe
ctggctcggctatatcaattccggg

SEQ ID NO: 182191 - DNA, 25 bp, probe
ctggtgcaggtacatgacattccgc

SEQ ID NO: 182192 - DNA, 25 bp, probe
ctggatagggacggacacatcaagc

SEQ ID NO: 182193 - DNA, 25 bp, probe
ctggagggtgtcgtgaccaagagca

SEQ ID NO: 182194 - DNA, 25 bp, probe
ctgtggctgtttccagtccaaagtg

SEQ ID NO: 182195 - DNA, 25 bp, probe
ctgggctatattcctgacaaaagtt

SEQ ID NO: 182196 - DNA, 25 bp, probe
ctggttataccacactagaggctgt

SEQ ID NO: 182197 - DNA, 25 bp, probe
ctgggcaaacgcccggagagctgct

SEQ ID NO: 182198 - DNA, 25 bp, probe
ctgggaaaagtgaagtatggctgta

SEQ ID NO: 182199 - DNA, 25 bp, probe
ctggggaaagccaggatggcccgag

SEQ ID NO: 182200 - DNA, 25 bp, probe
cggccgaagacctcaagggtggctg

SEQ ID NO: 182201 - DNA, 25 bp, probe
cgatccggagaaaaacacggaccat

SEQ ID NO: 182202 - DNA, 25 bp, probe
cgccctggtaagaaacagtgatgag

SEQ ID NO: 182203 - DNA, 25 bp, probe
cgccctccgaagtatcgaaagattc

SEQ ID NO: 182204 - DNA, 25 bp, probe
ccctccgaagtatcgaaagattccg

SEQ ID NO: 182205 - DNA, 25 bp, probe
cctctcgggcatgaccggaaaggcc

SEQ ID NO: 182206 - DNA, 25 bp, probe
ctggtggggcagcaccgtgaagacg

SEQ ID NO: 182207 - DNA, 25 bp, probe
ctggggtggaggcccaggcagaacc

SEQ ID NO: 182208 - DNA, 25 bp, probe
ctgggttggggcccaaggatgtgac

SEQ ID NO: 182209 - DNA, 25 bp, probe
ctgggaaggggcccatcctgatgga

SEQ ID NO: 182210 - DNA, 25 bp, probe
ctgggaaggggcccatcctgatgga

SEQ ID NO: 182211 - DNA, 25 bp, probe
ctgggcaaggggacttactgagtgg

SEQ ID NO: 182212 - DNA, 25 bp, probe
ctggtccaggggctgagcctgagtg

SEQ ID NO: 182213 - DNA, 25 bp, probe
ctggtccaggggctgagcctgagtg

SEQ ID NO: 182214 - DNA, 25 bp, probe
ctggagtcaggcaggttccaggctt

SEQ ID NO: 182215 - DNA, 25 bp, probe
ctgggcatcaccatggtactgtggg

SEQ ID NO: 182216 - DNA, 25 bp, probe
ctggtgaagcacagggagagtggga

SEQ ID NO: 182217 - DNA, 25 bp, probe
ctggtgaagacgctgtacatgctgg

SEQ ID NO: 182218 - DNA, 25 bp, probe
ctgtgtgaggacccgtcaggggcag

SEQ ID NO: 182219 - DNA, 25 bp, probe
ctgtggaggacgaggcggaacgctc

SEQ ID NO: 182220 - DNA, 25 bp, probe
ctggggggcagtcgtgggagcccct

SEQ ID NO: 182221 - DNA, 25 bp, probe
cgtggggtcagcagaggtaccacga

SEQ ID NO: 182222 - DNA, 25 bp, probe
cgtcctggctccagttggaacactt

SEQ ID NO: 182223 - DNA, 25 bp, probe
cgcttcaggcggagttggtactttt

SEQ ID NO: 182224 - DNA, 25 bp, probe
ctgtgtcaggggacagcttgtgtca

SEQ ID NO: 182225 - DNA, 25 bp, probe
ctgtggcgggtgaatctcgtgtagc

SEQ ID NO: 182226 - DNA, 25 bp, probe
ctggtggtgttgatcatctgctggg

SEQ ID NO: 182227 - DNA, 25 bp, probe
ctgggatctttgagcttgtggaggt

SEQ ID NO: 182228 - DNA, 25 bp, probe
ctgggccttagatccagaggagagg

SEQ ID NO: 182229 - DNA, 25 bp, probe
ctggtgcgcattgagatccatgggg

SEQ ID NO: 182230 - DNA, 25 bp, probe
ctggtgtctctgtacatacacatgt

SEQ ID NO: 182231 - DNA, 25 bp, probe
ctgggctaatgctcaaagctgtgca

SEQ ID NO: 182232 - DNA, 25 bp, probe
ctgggctgtgagcccaaactggaaa

SEQ ID NO: 182233 - DNA, 25 bp, probe
ctgggctctgcagagcaaactggaa

SEQ ID NO: 182234 - DNA, 25 bp, probe
ctgtgtgcccaaaaaagtgctcaga

SEQ ID NO: 182235 - DNA, 25 bp, probe
ctgtgtcccagaggaaagtgcgtca

SEQ ID NO: 182236 - DNA, 25 bp, probe
ctggtccctgggaataactgccata

SEQ ID NO: 182237 - DNA, 25 bp, probe
ctggtctatcttctgcatgaaccca

SEQ ID NO: 182238 - DNA, 25 bp, probe
ctggctctggtcaatactaatccct

SEQ ID NO: 182239 - DNA, 25 bp, probe
ctggctctggtcaatactaatccct

SEQ ID NO: 182240 - DNA, 25 bp, probe
cggctggcgtgcaagatcgcagact

SEQ ID NO: 182241 - DNA, 25 bp, probe
ctggcagaatgagatgatcgaatct

SEQ ID NO: 182242 - DNA, 25 bp, probe
ctgggagatgaccaatcaagatgtg

SEQ ID NO: 182243 - DNA, 25 bp, probe
ctgggctggacaccatggagtgtgt

SEQ ID NO: 182244 - DNA, 25 bp, probe
ctgtggctgcaacggcatgaacttg

SEQ ID NO: 182245 - DNA, 25 bp, probe
ctgggcacgcaggtgcatggtcttc

SEQ ID NO: 182246 - DNA, 25 bp, probe
ctggctgcccggaaggatttccaga

SEQ ID NO: 182247 - DNA, 25 bp, probe
ctggtggcggtgaagtcttgtcgag

SEQ ID NO: 182248 - DNA, 25 bp, probe
ctggggcggagcaagtccagcttga

SEQ ID NO: 182249 - DNA, 25 bp, probe
ctggatggtggaagcagttcactta

SEQ ID NO: 182250 - DNA, 25 bp, probe
ctgggcctggatgagttcaacttca

SEQ ID NO: 182251 - DNA, 25 bp, probe
ctggggcgattgcagttcagcatct

SEQ ID NO: 182252 - DNA, 25 bp, probe
ctggggcttttcctattgatttggg

SEQ ID NO: 182253 - DNA, 25 bp, probe
ctggaagtgtatgccaattacctgg

SEQ ID NO: 182254 - DNA, 25 bp, probe
ctggtagctgtagattctggacctg

SEQ ID NO: 182255 - DNA, 25 bp, probe
ctggtcatgcagctctttcaggacc

SEQ ID NO: 182256 - DNA, 25 bp, probe
ctgtgtccagctctgttggaagcaa

SEQ ID NO: 182257 - DNA, 25 bp, probe
ctggcctggcagtggtgtaagaacc

SEQ ID NO: 182258 - DNA, 25 bp, probe
ctggcctggcagtggtgtaagaacc

SEQ ID NO: 182259 - DNA, 25 bp, probe
cgtcctgatcgacatggttctcaac

SEQ ID NO: 182260 - DNA, 25 bp, probe
cgtcctgatcgacatggttctcaac

SEQ ID NO: 182261 - DNA, 25 bp, probe
ctgggctgtcgacaggtgtctgacg

SEQ ID NO: 182262 - DNA, 25 bp, probe
ctggtttctgagaggtcctcaacaa

SEQ ID NO: 182263 - DNA, 25 bp, probe
ctggatttctagcacattactaaaa

SEQ ID NO: 182264 - DNA, 25 bp, probe
ctgggatttatgctcatgaactaaa

SEQ ID NO: 182265 - DNA, 25 bp, probe
ctggtgtggcttctcacaatgaaac

SEQ ID NO: 182266 - DNA, 25 bp, probe
ctgtggggcttagacatgatgaata

SEQ ID NO: 182267 - DNA, 25 bp, probe
ctgtggtgactgaacgagggataat

SEQ ID NO: 182268 - DNA, 25 bp, probe
ctgtggtgactgaacgagggataat

SEQ ID NO: 182269 - DNA, 25 bp, probe
ctgtgggaccacctgagcgagaaga

SEQ ID NO: 182270 - DNA, 25 bp, probe
ctgtgtggtatctgaggctggcaaa

SEQ ID NO: 182271 - DNA, 25 bp, probe
ctgtggccaatctagtcctggaaca

SEQ ID NO: 182272 - DNA, 25 bp, probe
ctgggcatttcatgtcaatggaatc

SEQ ID NO: 182273 - DNA, 25 bp, probe
ctggagctttgtgtcagctgggcca

SEQ ID NO: 182274 - DNA, 25 bp, probe
ctggagctttgtgtcagctgggcca

SEQ ID NO: 182275 - DNA, 25 bp, probe
ctgggcttggatgacagcagaacca

SEQ ID NO: 182276 - DNA, 25 bp, probe
ctgggaatggagtatctgagcaaca

SEQ ID NO: 182277 - DNA, 25 bp, probe
ctgggaagggcttcagcaccagcag

SEQ ID NO: 182278 - DNA, 25 bp, probe
ctgtgggggctcatgacacagcctg

SEQ ID NO: 182279 - DNA, 25 bp, probe
ctgtggagtttggtggatgacgtgc

SEQ ID NO: 182280 - DNA, 25 bp, probe
ctgtggatgggtggggagcaaatca

SEQ ID NO: 182281 - DNA, 25 bp, probe
ctgggtgcaggagggatgataacca

SEQ ID NO: 182282 - DNA, 25 bp, probe
ctgggatatgtgttggaaaactgct

SEQ ID NO: 182283 - DNA, 25 bp, probe
ctgggaatgtaccaagagaaatttt

SEQ ID NO: 182284 - DNA, 25 bp, probe
ctgtggagatttcctgtgagaacat

SEQ ID NO: 182285 - DNA, 25 bp, probe
ctgggagatgtgtcctggaatgaat

SEQ ID NO: 182286 - DNA, 25 bp, probe
cgtggaatgtccctggagtactatg

SEQ ID NO: 182287 - DNA, 25 bp, probe
ctggggtgtacaccgactacatcta

SEQ ID NO: 182288 - DNA, 25 bp, probe
ctggggtgtacaccgactacatcta

SEQ ID NO: 182289 - DNA, 25 bp, probe
ctggggctaaatccgcagcaaactg

SEQ ID NO: 182290 - DNA, 25 bp, probe
ctgggcctgcaattggccaacttct

SEQ ID NO: 182291 - DNA, 25 bp, probe
ctgggcctgcaattggccaacttct

SEQ ID NO: 182292 - DNA, 25 bp, probe
ctgggctccaaagcagactttcttg

SEQ ID NO: 182293 - DNA, 25 bp, probe
ctgggctccaaagcagactttcttg

SEQ ID NO: 182294 - DNA, 25 bp, probe
cgggttccaagccgactttcatgag

SEQ ID NO: 182295 - DNA, 25 bp, probe
ctggccatttaactagcactttata

SEQ ID NO: 182296 - DNA, 25 bp, probe
ctggatgctttataaatttgttcaa

SEQ ID NO: 182297 - DNA, 25 bp, probe
ctggtcactttgtacaatgtagatt

SEQ ID NO: 182298 - DNA, 25 bp, probe
ctggtatccggcgcaatgttgcatc

SEQ ID NO: 182299 - DNA, 25 bp, probe
ctggtaccgcgaggagagcgacagc

SEQ ID NO: 182300 - DNA, 25 bp, probe
ctgggaacgcatcctgagaggccaa

SEQ ID NO: 182301 - DNA, 25 bp, probe
ctgggctccagctctgaggaggaca

SEQ ID NO: 182302 - DNA, 25 bp, probe
ctggggcggcataatgaagggtgaa

SEQ ID NO: 182303 - DNA, 25 bp, probe
ctgggggtgctgatgtacgagatga

SEQ ID NO: 182304 - DNA, 25 bp, probe
ctggacgactgccaaggactgagga

SEQ ID NO: 182305 - DNA, 25 bp, probe
cgaacgtccgggcactgacgtactg

SEQ ID NO: 182306 - DNA, 25 bp, probe
cggaagacccggtccaaggtatctg

SEQ ID NO: 182307 - DNA, 25 bp, probe
cggaagacccggtccaaggtatctg

SEQ ID NO: 182308 - DNA, 25 bp, probe
cggaaagcatcctctccaaagttgg

SEQ ID NO: 182309 - DNA, 25 bp, probe
cggaaactgcaagttccgacgccgg

SEQ ID NO: 182310 - DNA, 25 bp, probe
ctggacaagttcattcacgtggcac

SEQ ID NO: 182311 - DNA, 25 bp, probe
ctggacaagcttatccggaatcccg

SEQ ID NO: 182312 - DNA, 25 bp, probe
gctggaaacattgtatcgaaaccga

SEQ ID NO: 182313 - DNA, 25 bp, probe
ctggacaacattttactactgaggg

SEQ ID NO: 182314 - DNA, 25 bp, probe
ctggtcaacattctgatcctgtcag

SEQ ID NO: 182315 - DNA, 25 bp, probe
ctggtcaatactaatcccttcaccc

SEQ ID NO: 182316 - DNA, 25 bp, probe
ctggtcaatactaatcccttcaccc

SEQ ID NO: 182317 - DNA, 25 bp, probe
ctggccaaaatcaacatcgtctacc

SEQ ID NO: 182318 - DNA, 25 bp, probe
ctgggccagagatggacgtgtacca

SEQ ID NO: 182319 - DNA, 25 bp, probe
ctggtgccagtgtggaagctgcctc

SEQ ID NO: 182320 - DNA, 25 bp, probe
ctggtgccagtgtggaagctgcctc

SEQ ID NO: 182321 - DNA, 25 bp, probe
ctggggcacactggagccatggccc

SEQ ID NO: 182322 - DNA, 25 bp, probe
ctggaggtagctgactccagccctt

SEQ ID NO: 182323 - DNA, 25 bp, probe
cggaaatactgggtccgcttcttgc

SEQ ID NO: 182324 - DNA, 25 bp, probe
cggaaccactgagtgtcggtacctc

SEQ ID NO: 182325 - DNA, 25 bp, probe
cggaaccactgagtgtcggtacctc

SEQ ID NO: 182326 - DNA, 25 bp, probe
ctggatactgccgatctactggctg

SEQ ID NO: 182327 - DNA, 25 bp, probe
ctggtttcagagacatcctgctgcg

SEQ ID NO: 182328 - DNA, 25 bp, probe
cggagttcaagttccctcagattaa

SEQ ID NO: 182329 - DNA, 25 bp, probe
cggacttcggcctctctaagaagat

SEQ ID NO: 182330 - DNA, 25 bp, probe
ctggatacagtagaggtgtgcccca

SEQ ID NO: 182331 - DNA, 25 bp, probe
ctgggcttgctacaggtgggtccag

SEQ ID NO: 182332 - DNA, 25 bp, probe
ctgggcttgctacaggtgggtccag

SEQ ID NO: 182333 - DNA, 25 bp, probe
ctgggcatgcgctagccaggtagag

SEQ ID NO: 182334 - DNA, 25 bp, probe
ctgggactgcaacctggacagagcc

SEQ ID NO: 182335 - DNA, 25 bp, probe
ctgggcacgcccagtgagaacatct

SEQ ID NO: 182336 - DNA, 25 bp, probe
ctgggcacgcccagtgagaacatct

SEQ ID NO: 182337 - DNA, 25 bp, probe
ctgggcacgcccagtgagaacatct

SEQ ID NO: 182338 - DNA, 25 bp, probe
ctgggaccctccatgagagttttgg

SEQ ID NO: 182339 - DNA, 25 bp, probe
ctgggacccatcctggatggggctt

SEQ ID NO: 182340 - DNA, 25 bp, probe
ctgggactgtctgagatggcagggc

SEQ ID NO: 182341 - DNA, 25 bp, probe
ctgggcacaggctacagagacagtg

SEQ ID NO: 182342 - DNA, 25 bp, probe
ctgggcctatgtcaagaagtgcaaa

SEQ ID NO: 182343 - DNA, 25 bp, probe
ctgggcctatgtcaagaagtgcaaa

SEQ ID NO: 182344 - DNA, 25 bp, probe
ctgggcctatgtcaagaagtgcaaa

SEQ ID NO: 182345 - DNA, 25 bp, probe
ctgggcctatgtcaagaagtgcaaa

SEQ ID NO: 182346 - DNA, 25 bp, probe
ctgggcctggtagagccaggcaccc

SEQ ID NO: 182347 - DNA, 25 bp, probe
ctggagtcttattggcctaggaccc

SEQ ID NO: 182348 - DNA, 25 bp, probe
ccgaattctaaagcttgcccggcac

SEQ ID NO: 182349 - DNA, 25 bp, probe
cctgaatcagtatgtcctgtcccgg

SEQ ID NO: 182350 - DNA, 25 bp, probe
cgtgaaggattactgctttgcccgg

SEQ ID NO: 182351 - DNA, 25 bp, probe
cggcaacgaccagtctcagtacaag

SEQ ID NO: 182352 - DNA, 25 bp, probe
cggcaacgaccagtctcagtacaag

SEQ ID NO: 182353 - DNA, 25 bp, probe
ctggaagccactgtcaatgattaga

SEQ ID NO: 182354 - DNA, 25 bp, probe
cgtgaagccctccaatatgctagta

SEQ ID NO: 182355 - DNA, 25 bp, probe
ctggaaacgattttctgtatgatgt

SEQ ID NO: 182356 - DNA, 25 bp, probe
ctggatttccgtagtattgatgatg

SEQ ID NO: 182357 - DNA, 25 bp, probe
cggtgctatcacatctatatccaag

SEQ ID NO: 182358 - DNA, 25 bp, probe
ctggtgctgaactctgtgctgagca

SEQ ID NO: 182359 - DNA, 25 bp, probe
ctgggctatgaccacttcatgaagt

SEQ ID NO: 182360 - DNA, 25 bp, probe
ctgtggccacagcagctttgtacac

SEQ ID NO: 182361 - DNA, 25 bp, probe
ctggtctcagaggacctggtaacca

SEQ ID NO: 182362 - DNA, 25 bp, probe
ctggaccgacattctcggtactaag

SEQ ID NO: 182363 - DNA, 25 bp, probe
ctggaccagaaggtcgtcacctggg

SEQ ID NO: 182364 - DNA, 25 bp, probe
cggccagaggtggaggaccctgaag

SEQ ID NO: 182365 - DNA, 25 bp, probe
gggcaaagttaagaccatcaatgga

SEQ ID NO: 182366 - DNA, 25 bp, probe
cggaaaataaactccaagcagccag

SEQ ID NO: 182367 - DNA, 25 bp, probe
ctgggaaatccagctaccagggccc

SEQ ID NO: 182368 - DNA, 25 bp, probe
ctggcagaggatgcactcaacacgg

SEQ ID NO: 182369 - DNA, 25 bp, probe
ctggattcagatgactcatccccct

SEQ ID NO: 182370 - DNA, 25 bp, probe
ctggattcagatgactcatccccct

SEQ ID NO: 182371 - DNA, 25 bp, probe
ctggggagcatgaacaacactcgcc

SEQ ID NO: 182372 - DNA, 25 bp, probe
ctgggtcagatcacaaccatcagca

SEQ ID NO: 182373 - DNA, 25 bp, probe
ctgggtcttctgcagactcatgcag

SEQ ID NO: 182374 - DNA, 25 bp, probe
ctggttcctccatgagatcagatgg

SEQ ID NO: 182375 - DNA, 25 bp, probe
ctggagatcctcgactacatctatg

SEQ ID NO: 182376 - DNA, 25 bp, probe
ctggaggcccaagaacatgatgctt

SEQ ID NO: 182377 - DNA, 25 bp, probe
ctggaggcccaagaacatgatgctt

SEQ ID NO: 182378 - DNA, 25 bp, probe
ctggcaagtagtccagaacttctta

SEQ ID NO: 182379 - DNA, 25 bp, probe
cggcctgtacatcggcaacttcaaa

SEQ ID NO: 182380 - DNA, 25 bp, probe
cggcacatctggagctgaagcgtta

SEQ ID NO: 182381 - DNA, 25 bp, probe
ctggtcatgcttacactgatacagg

SEQ ID NO: 182382 - DNA, 25 bp, probe
ctgggctgtgtggcatcgcagaatg

SEQ ID NO: 182383 - DNA, 25 bp, probe
ctggattatctgcactcagagcgca

SEQ ID NO: 182384 - DNA, 25 bp, probe
ctggattatctgcactcagagcgca

SEQ ID NO: 182385 - DNA, 25 bp, probe
ctggatatatcaagactgagttgat

SEQ ID NO: 182386 - DNA, 25 bp, probe
ctggatggatgcatttatgccatta

SEQ ID NO: 182387 - DNA, 25 bp, probe
ctgggctgtgtgatatatgccacaa

SEQ ID NO: 182388 - DNA, 25 bp, probe
ctgggcatgtggcagcataccacac

SEQ ID NO: 182389 - DNA, 25 bp, probe
ctgggcatgtggcagcataccacac

SEQ ID NO: 182390 - DNA, 25 bp, probe
ctgggcaatgcacagagcctcagcc

SEQ ID NO: 182391 - DNA, 25 bp, probe
ctgggcgagatgagcaccgagcaca

SEQ ID NO: 182392 - DNA, 25 bp, probe
ctgggcgagatgagcaccgagcaca

SEQ ID NO: 182393 - DNA, 25 bp, probe
ctggtcactgatggtctccagagcc

SEQ ID NO: 182394 - DNA, 25 bp, probe
ctggtcactgatggtctccagagcc

SEQ ID NO: 182395 - DNA, 25 bp, probe
ctggtcatcagtatgtcctacgtca

SEQ ID NO: 182396 - DNA, 25 bp, probe
ctggtatcctcaaacctgacattgc

SEQ ID NO: 182397 - DNA, 25 bp, probe
ctggtcatcttgtggcttagttgta

SEQ ID NO: 182398 - DNA, 25 bp, probe
ctggtcatgcctttggccattgttg

SEQ ID NO: 182399 - DNA, 25 bp, probe
ctggtgacctgtaggccatgttagc

SEQ ID NO: 182400 - DNA, 25 bp, probe
ctgggaccatggccgccaatgagac

SEQ ID NO: 182401 - DNA, 25 bp, probe
ctgggacaatgacccagaagacagc

SEQ ID NO: 182402 - DNA, 25 bp, probe
ctgggaacatgacccagcctgaaag

SEQ ID NO: 182403 - DNA, 25 bp, probe
ctgggaactcgctggctcagaaaag

SEQ ID NO: 182404 - DNA, 25 bp, probe
ctggggactttgggcgccaagaagc

SEQ ID NO: 182405 - DNA, 25 bp, probe
ctggggaccctgatcattcaagaca

SEQ ID NO: 182406 - DNA, 25 bp, probe
cgggggcccttcaggagaacaatgt

SEQ ID NO: 182407 - DNA, 25 bp, probe
ctggagaaccttcgtggtggaacaa

SEQ ID NO: 182408 - DNA, 25 bp, probe
ctgggcacagccattgtggtggggt

SEQ ID NO: 182409 - DNA, 25 bp, probe
ctgggcatcacgatgattgagttgg

SEQ ID NO: 182410 - DNA, 25 bp, probe
ctgggcacagtgggcaatgggctgg

SEQ ID NO: 182411 - DNA, 25 bp, probe
ctgggcacagaggtggctgtgcgaa

SEQ ID NO: 182412 - DNA, 25 bp, probe
ctgggacaagagacgctggcgcaag

SEQ ID NO: 182413 - DNA, 25 bp, probe
ctgggacaagagacgctggcgcaag

SEQ ID NO: 182414 - DNA, 25 bp, probe
ctgggatcagagctccatcagtaag

SEQ ID NO: 182415 - DNA, 25 bp, probe
ctggtagaggtcatcatcaatacag

SEQ ID NO: 182416 - DNA, 25 bp, probe
ctggtaaggctgactctcactccag

SEQ ID NO: 182417 - DNA, 25 bp, probe
ctgggatcatggaacttgcactgct

SEQ ID NO: 182418 - DNA, 25 bp, probe
ctggtgatcgcatacatcatgaccg

SEQ ID NO: 182419 - DNA, 25 bp, probe
ctgggatgccattaatcgactctca

SEQ ID NO: 182420 - DNA, 25 bp, probe
ctgggaggatcaagctagacttcaa

SEQ ID NO: 182421 - DNA, 25 bp, probe
ctgggaggatcaagctagacttcaa

SEQ ID NO: 182422 - DNA, 25 bp, probe
ctgggggtcacagagcatgttctcg

SEQ ID NO: 182423 - DNA, 25 bp, probe
ctggggggacaatctgactcgagtc

SEQ ID NO: 182424 - DNA, 25 bp, probe
cgtggtgacacggtactaccgggcg

SEQ ID NO: 182425 - DNA, 25 bp, probe
ctggggacatgggctatcttccagg

SEQ ID NO: 182426 - DNA, 25 bp, probe
cgagtaaagtgtgatcattactggc

SEQ ID NO: 182427 - DNA, 25 bp, probe
cggtatcatcgtctacatttccagc

SEQ ID NO: 182428 - DNA, 25 bp, probe
ctgggatacgctatgaactctcacc

SEQ ID NO: 182429 - DNA, 25 bp, probe
ctgggaaactgaaatgcccacatcc

SEQ ID NO: 182430 - DNA, 25 bp, probe
ctgggacaactagggctgcgaatct

SEQ ID NO: 182431 - DNA, 25 bp, probe
ctgggaaacactgggcacgagattg

SEQ ID NO: 182432 - DNA, 25 bp, probe
ctgggaatatcctggcactgaggtc

SEQ ID NO: 182433 - DNA, 25 bp, probe
ctggggataccgaaagtgggtcatg

SEQ ID NO: 182434 - DNA, 25 bp, probe
ctgggtgagacccaaagcggtccct

SEQ ID NO: 182435 - DNA, 25 bp, probe
ctggttgtgtcccaagaggtgttga

SEQ ID NO: 182436 - DNA, 25 bp, probe
ctggttttcgtccaggacgtctgag

SEQ ID NO: 182437 - DNA, 25 bp, probe
ctggttttcctcctagaggaccaag

SEQ ID NO: 182438 - DNA, 25 bp, probe
ctggttttcctcctagaggaccaag

SEQ ID NO: 182439 - DNA, 25 bp, probe
cgggtggtcgcctttatggaccaca

SEQ ID NO: 182440 - DNA, 25 bp, probe
cgggatgccctggttaaagagttca

SEQ ID NO: 182441 - DNA, 25 bp, probe
ctgggtgccttggaacgcaagttta

SEQ ID NO: 182442 - DNA, 25 bp, probe
ctgggtcctggggacagcagagtgt

SEQ ID NO: 182443 - DNA, 25 bp, probe
ctggtaactggaggcccagatgtgc

SEQ ID NO: 182444 - DNA, 25 bp, probe
ctggaataatggacgccgctggcag

SEQ ID NO: 182445 - DNA, 25 bp, probe
ctggtatcatatggctacattgggg

SEQ ID NO: 182446 - DNA, 25 bp, probe
ctggattcatgcagccagctttgca

SEQ ID NO: 182447 - DNA, 25 bp, probe
ctggatgtcagcccaaagcatgtgc

SEQ ID NO: 182448 - DNA, 25 bp, probe
ctggatgtcagcccaaagcatgtgc

SEQ ID NO: 182449 - DNA, 25 bp, probe
ctggatgtcagcccaaagcatgtgc

SEQ ID NO: 182450 - DNA, 25 bp, probe
ctggagctggtgacaactctgtgct

SEQ ID NO: 182451 - DNA, 25 bp, probe
ctgggcagagctgcatcatccttgc

SEQ ID NO: 182452 - DNA, 25 bp, probe
ctggtcgcagcttcaatctatcagc

SEQ ID NO: 182453 - DNA, 25 bp, probe
ctggtctcattggcaatgtttcgat

SEQ ID NO: 182454 - DNA, 25 bp, probe
ctggtctgtgggctgtatcatggca

SEQ ID NO: 182455 - DNA, 25 bp, probe
ctggtctgtgggctgtatcatggca

SEQ ID NO: 182456 - DNA, 25 bp, probe
ctggtatggagtccagtctaagcag

SEQ ID NO: 182457 - DNA, 25 bp, probe
ctggtctgaggggcaactgagtctg

SEQ ID NO: 182458 - DNA, 25 bp, probe
ctggctggaaggggactattttcgt

SEQ ID NO: 182459 - DNA, 25 bp, probe
ctggggtaggcagcttctttgtttc

SEQ ID NO: 182460 - DNA, 25 bp, probe
ctggggattggcgactcctgaagtt

SEQ ID NO: 182461 - DNA, 25 bp, probe
ctggtgagttcacccgactggagtt

SEQ ID NO: 182462 - DNA, 25 bp, probe
cggatggcgtttgtgaatggaaatt

SEQ ID NO: 182463 - DNA, 25 bp, probe
ctggtgacgtttgggacattgacaa

SEQ ID NO: 182464 - DNA, 25 bp, probe
ctggtggagctttgggtctctactg

SEQ ID NO: 182465 - DNA, 25 bp, probe
ctggtgggcacttggagtttgcttg

SEQ ID NO: 182466 - DNA, 25 bp, probe
ctggggctgcgtttggatttattgt

SEQ ID NO: 182467 - DNA, 25 bp, probe
ctggggcagcgtctggacagtgagg

SEQ ID NO: 182468 - DNA, 25 bp, probe
ctggggcagcgtctggacagtgagg

SEQ ID NO: 182469 - DNA, 25 bp, probe
ctgggtgtgcgacttggacaaggcc

SEQ ID NO: 182470 - DNA, 25 bp, probe
ctgggtctgcaactttggaaaactc

SEQ ID NO: 182471 - DNA, 25 bp, probe
ctgggactgcagctatgtgccatca

SEQ ID NO: 182472 - DNA, 25 bp, probe
ctggagactcatctcaggacactga

SEQ ID NO: 182473 - DNA, 25 bp, probe
ctggatggcttcatgatgtacctgt

SEQ ID NO: 182474 - DNA, 25 bp, probe
ctggatggcttgcctcatgtttgtt

SEQ ID NO: 182475 - DNA, 25 bp, probe
ctggagagcttcctcattgttaagg

SEQ ID NO: 182476 - DNA, 25 bp, probe
ctggaggtacctggatgggcagggc

SEQ ID NO: 182477 - DNA, 25 bp, probe
ctggggatcatggtggtggccagcg

SEQ ID NO: 182478 - DNA, 25 bp, probe
ctggaggagatccagcgtgcgcacg

SEQ ID NO: 182479 - DNA, 25 bp, probe
ctggtgtggatcctcggcagagggg

SEQ ID NO: 182480 - DNA, 25 bp, probe
ctggtgaggaagcagcctgcagggg

SEQ ID NO: 182481 - DNA, 25 bp, probe
ctggtgaggggtccgtacagggtgg

SEQ ID NO: 182482 - DNA, 25 bp, probe
ctgggggtggtgccagtttggagct

SEQ ID NO: 182483 - DNA, 25 bp, probe
cggctttggaggcagtttcgagtgg

SEQ ID NO: 182484 - DNA, 25 bp, probe
cggcttttgtggaagactcactagc

SEQ ID NO: 182485 - DNA, 25 bp, probe
ctggtttggtgtcaacagctcacag

SEQ ID NO: 182486 - DNA, 25 bp, probe
ctggtttggtgtcaacagctcacag

SEQ ID NO: 182487 - DNA, 25 bp, probe
ctggttcatggaagccatagagtac

SEQ ID NO: 182488 - DNA, 25 bp, probe
ctggtagatggaacagcatgtggtg

SEQ ID NO: 182489 - DNA, 25 bp, probe
ctggtatggtgaacagtgctcttgt

SEQ ID NO: 182490 - DNA, 25 bp, probe
ctggatcaggtctaccattgcttgt

SEQ ID NO: 182491 - DNA, 25 bp, probe
ctggatcaggtctaccattgcttgt

SEQ ID NO: 182492 - DNA, 25 bp, probe
ctggaagagctacatagtcatcatt

SEQ ID NO: 182493 - DNA, 25 bp, probe
ctggacatgaatgtattgtacactg

SEQ ID NO: 182494 - DNA, 25 bp, probe
ctggacagtagcttgactgcttccc

SEQ ID NO: 182495 - DNA, 25 bp, probe
ctggaagtcagctgagttgtaggcc

SEQ ID NO: 182496 - DNA, 25 bp, probe
ctggaagtcagctgaagttagatca

SEQ ID NO: 182497 - DNA, 25 bp, probe
ctggaagtactggagcgaatatgat

SEQ ID NO: 182498 - DNA, 25 bp, probe
ctgggagaactccaatgctgaatgg

SEQ ID NO: 182499 - DNA, 25 bp, probe
ctgggagaactccaatgctgaatgg

SEQ ID NO: 182500 - DNA, 25 bp, probe
ctgggagcggctggaacgattggag

SEQ ID NO: 182501 - DNA, 25 bp, probe
cggacagggacatacgttgtgattg

SEQ ID NO: 182502 - DNA, 25 bp, probe
cggacctgagactgagttttgtctt

SEQ ID NO: 182503 - DNA, 25 bp, probe
ctggcagttcggctagatttctgtc

SEQ ID NO: 182504 - DNA, 25 bp, probe
ctggcgttttggaatgcaatttgca

SEQ ID NO: 182505 - DNA, 25 bp, probe
ctggtgtttgcgggatgttggctgc

SEQ ID NO: 182506 - DNA, 25 bp, probe
ctggtggatagcttccagacggcgc

SEQ ID NO: 182507 - DNA, 25 bp, probe
ctggggagaagtccagcacgatgcg

SEQ ID NO: 182508 - DNA, 25 bp, probe
ctggtggcaagcgtggagcaggagc

SEQ ID NO: 182509 - DNA, 25 bp, probe
ctggtggcagcgttgagaagggggt

SEQ ID NO: 182510 - DNA, 25 bp, probe
ctggttgctggattatgggtggttg

SEQ ID NO: 182511 - DNA, 25 bp, probe
ctggtggcaggtctgagggttctct

SEQ ID NO: 182512 - DNA, 25 bp, probe
ctgggtgcagagcgtggttgtatct

SEQ ID NO: 182513 - DNA, 25 bp, probe
ctggactgcgagggggagatttctt

SEQ ID NO: 182514 - DNA, 25 bp, probe
ctggaccaaggacgtggatgaccct

SEQ ID NO: 182515 - DNA, 25 bp, probe
ctggaccttgcaccgtggataccag

SEQ ID NO: 182516 - DNA, 25 bp, probe
ctggacctggctggccgggacctga

SEQ ID NO: 182517 - DNA, 25 bp, probe
ctggcatgttggtgggtggtcactg

SEQ ID NO: 182518 - DNA, 25 bp, probe
ctggcccggaaggcgtggttgtgaa

SEQ ID NO: 182519 - DNA, 25 bp, probe
ctggcccggaaggcgtggttgtgaa

SEQ ID NO: 182520 - DNA, 25 bp, probe
ctggtccgagaagggacatgtggga

SEQ ID NO: 182521 - DNA, 25 bp, probe
ctggtggtaggtgggaagcatggtg

SEQ ID NO: 182522 - DNA, 25 bp, probe
ctggtggtcaggccacaacgcaggg

SEQ ID NO: 182523 - DNA, 25 bp, probe
ctgggtgtcagatgctctcaggagg

SEQ ID NO: 182524 - DNA, 25 bp, probe
ctgggtgtcagatgctctcaggagg

SEQ ID NO: 182525 - DNA, 25 bp, probe
ctgggatgtgcaccatggccagggg

SEQ ID NO: 182526 - DNA, 25 bp, probe
ctgggaggcggcagaatgcagccag

SEQ ID NO: 182527 - DNA, 25 bp, probe
ctggaagggctggaatatctgcata

SEQ ID NO: 182528 - DNA, 25 bp, probe
ctggatcagggtggatcatgtgctt

SEQ ID NO: 182529 - DNA, 25 bp, probe
ctggtgagcctaggcatctctttgg

SEQ ID NO: 182530 - DNA, 25 bp, probe
ctggtgtcctatggagatattacag

SEQ ID NO: 182531 - DNA, 25 bp, probe
ctggcgtcttaggaatactccacgg

SEQ ID NO: 182532 - DNA, 25 bp, probe
ctggcgtctataccaacatctgccg

SEQ ID NO: 182533 - DNA, 25 bp, probe
ctgggtctacagacctgaccctgca

SEQ ID NO: 182534 - DNA, 25 bp, probe
ctgggtggaaatgtggccactgcag

SEQ ID NO: 182535 - DNA, 25 bp, probe
ctggggctgcagaagggaccctgcg

SEQ ID NO: 182536 - DNA, 25 bp, probe
ctggcggatggcaacgggaacacgg

SEQ ID NO: 182537 - DNA, 25 bp, probe
ctgggggttgcaagggaacagagag

SEQ ID NO: 182538 - DNA, 25 bp, probe
ctggggatgcccaaggccagaatga

SEQ ID NO: 182539 - DNA, 25 bp, probe
ctgggtgtcctcaggcagaattgct

SEQ ID NO: 182540 - DNA, 25 bp, probe
ctggccttcaccagctaatgttgga

SEQ ID NO: 182541 - DNA, 25 bp, probe
ctggtcttatcatggacaatttggg

SEQ ID NO: 182542 - DNA, 25 bp, probe
ctggcgtaagcatggggtctttgtg

SEQ ID NO: 182543 - DNA, 25 bp, probe
ctgggtacatattaagtggcttgtt

SEQ ID NO: 182544 - DNA, 25 bp, probe
ctggacagtctttaagatcccttct

SEQ ID NO: 182545 - DNA, 25 bp, probe
ctggacagtctttaagatcccttct

SEQ ID NO: 182546 - DNA, 25 bp, probe
ctggaaatctttgacatgctcctgg

SEQ ID NO: 182547 - DNA, 25 bp, probe
cgctgactagcagctggactgattt

SEQ ID NO: 182548 - DNA, 25 bp, probe
cgtaaagcgagctgacgctggtttt

SEQ ID NO: 182549 - DNA, 25 bp, probe
cgtaaccacagtcaggaagtcttct

SEQ ID NO: 182550 - DNA, 25 bp, probe
cgtgggaacagcgcagtacgtttct

SEQ ID NO: 182551 - DNA, 25 bp, probe
ctggggaacactgctgtcgtgtgaa

SEQ ID NO: 182552 - DNA, 25 bp, probe
ctggggaaatctatcttgtctgcaa

SEQ ID NO: 182553 - DNA, 25 bp, probe
ctggggaaatctatcttgtctgcaa

SEQ ID NO: 182554 - DNA, 25 bp, probe
ctggggagtacatcatcctgtgctc

SEQ ID NO: 182555 - DNA, 25 bp, probe
ctggggaggaaaatactgctctgtg

SEQ ID NO: 182556 - DNA, 25 bp, probe
ctggggagaaagttgagtgtcaggg

SEQ ID NO: 182557 - DNA, 25 bp, probe
ctggggccaacgaagcgtgatcagc

SEQ ID NO: 182558 - DNA, 25 bp, probe
ctggcggcctacagagcgtatagcc

SEQ ID NO: 182559 - DNA, 25 bp, probe
ctggtgttaaatggagctattcaat

SEQ ID NO: 182560 - DNA, 25 bp, probe
ctggtgactgatggacgagtgtcca

SEQ ID NO: 182561 - DNA, 25 bp, probe
ctggatgtatgtgacgtggttcttc

SEQ ID NO: 182562 - DNA, 25 bp, probe
ctgggtgcaggctggcattgtgagc

SEQ ID NO: 182563 - DNA, 25 bp, probe
ctgggtgcaggctggcattgtgagc

SEQ ID NO: 182564 - DNA, 25 bp, probe
ctggggcaggagcaaggctgagttc

SEQ ID NO: 182565 - DNA, 25 bp, probe
ctgggggaagaatgctctggctacg

SEQ ID NO: 182566 - DNA, 25 bp, probe
ctggggtgtcaccaagcaaggctac

SEQ ID NO: 182567 - DNA, 25 bp, probe
ctggggtcatcctgagaaggtcatg

SEQ ID NO: 182568 - DNA, 25 bp, probe
ctggagggcctcctgagaaggacag

SEQ ID NO: 182569 - DNA, 25 bp, probe
ctggaggggctgctgcaagaggccg

SEQ ID NO: 182570 - DNA, 25 bp, probe
ctggggtgctggcagcgagagcccc

SEQ ID NO: 182571 - DNA, 25 bp, probe
ctggaactgcgacggggaggtcctg

SEQ ID NO: 182572 - DNA, 25 bp, probe
ctggaactgcgacggggaggtcctg

SEQ ID NO: 182573 - DNA, 25 bp, probe
cggaacgggaggctagtgatatact

SEQ ID NO: 182574 - DNA, 25 bp, probe
cggacacgtgggtcttttcaaacat

SEQ ID NO: 182575 - DNA, 25 bp, probe
ctggaaggcagtctttctatagaaa

SEQ ID NO: 182576 - DNA, 25 bp, probe
ctggacttgagaccttccatattgc

SEQ ID NO: 182577 - DNA, 25 bp, probe
cggactcagaacctaactctacctg

SEQ ID NO: 182578 - DNA, 25 bp, probe
ctggaatgaacaggttccctccctg

SEQ ID NO: 182579 - DNA, 25 bp, probe
ctggcaagttcaacatcatccccac

SEQ ID NO: 182580 - DNA, 25 bp, probe
ctggaagttctcatcacctccaggt

SEQ ID NO: 182581 - DNA, 25 bp, probe
ctggaagttctcatcacctccaggt

SEQ ID NO: 182582 - DNA, 25 bp, probe
ctggaaatgctctttcctagccgga

SEQ ID NO: 182583 - DNA, 25 bp, probe
ctggcataattttgtccttgcactc

SEQ ID NO: 182584 - DNA, 25 bp, probe
cggctagatttctgtcttgtttgtt

SEQ ID NO: 182585 - DNA, 25 bp, probe
ctggctagaattgctacttttgctg

SEQ ID NO: 182586 - DNA, 25 bp, probe
ctggtgtgaattgccatttttttct

SEQ ID NO: 182587 - DNA, 25 bp, probe
ctggtgctagtctttttcatttttc

SEQ ID NO: 182588 - DNA, 25 bp, probe
ctggctttttatattgcattttgca

SEQ ID NO: 182589 - DNA, 25 bp, probe
ctggggtctttttatgcatttgcat

SEQ ID NO: 182590 - DNA, 25 bp, probe
ctggagagtattcatttgtttgctt

SEQ ID NO: 182591 - DNA, 25 bp, probe
cggggtgatgctctatacgcttttg

SEQ ID NO: 182592 - DNA, 25 bp, probe
ctggagttgatggaataaaggttgg

SEQ ID NO: 182593 - DNA, 25 bp, probe
ctggagtatgtgcaagaaagtggtt

SEQ ID NO: 182594 - DNA, 25 bp, probe
ctggagtttcaataccggagatcat

SEQ ID NO: 182595 - DNA, 25 bp, probe
ctggagtcttcataacgctaagcat

SEQ ID NO: 182596 - DNA, 25 bp, probe
ctggtctctggctgcaacttaatgc

SEQ ID NO: 182597 - DNA, 25 bp, probe
ctggtcttgccgccaacgatgcaag

SEQ ID NO: 182598 - DNA, 25 bp, probe
ctggtcttgccgccaacgatgcaag

SEQ ID NO: 182599 - DNA, 25 bp, probe
ctggatatctgctggaagcctcaag

SEQ ID NO: 182600 - DNA, 25 bp, probe
ctggttctggaggaaccgcaagccg

SEQ ID NO: 182601 - DNA, 25 bp, probe
ctggtatgtggagaccacctccgag

SEQ ID NO: 182602 - DNA, 25 bp, probe
ctggttgtggactatgccacctgct

SEQ ID NO: 182603 - DNA, 25 bp, probe
ctggttgtgtaaaaccctgcggctg

SEQ ID NO: 182604 - DNA, 25 bp, probe
ctggggtgtaatgagctcctgctca

SEQ ID NO: 182605 - DNA, 25 bp, probe
ctggggtgtaatgagctcctgctca

SEQ ID NO: 182606 - DNA, 25 bp, probe
ctggtaggggatgatgccgcctgca

SEQ ID NO: 182607 - DNA, 25 bp, probe
cggcggacttgtgatcggcctgcat

SEQ ID NO: 182608 - DNA, 25 bp, probe
cggaaacatattcttgcagcccatc

SEQ ID NO: 182609 - DNA, 25 bp, probe
cggaaacatggtcagaacacgatct

SEQ ID NO: 182610 - DNA, 25 bp, probe
ctggaagacgtgttggaacacctca

SEQ ID NO: 182611 - DNA, 25 bp, probe
ctggggacagttcaggacacacaca

SEQ ID NO: 182612 - DNA, 25 bp, probe
ctggggacacagcctcagtacccag

SEQ ID NO: 182613 - DNA, 25 bp, probe
ctggggacagcgtggtaggcagcag

SEQ ID NO: 182614 - DNA, 25 bp, probe
ctggggacgctgtcacaggggacag

SEQ ID NO: 182615 - DNA, 25 bp, probe
ctggtagacgctcccaagaagtcag

SEQ ID NO: 182616 - DNA, 25 bp, probe
ctggtggcagcagtcagctccagaa

SEQ ID NO: 182617 - DNA, 25 bp, probe
ctggcctgatgagtatgctctaaaa

SEQ ID NO: 182618 - DNA, 25 bp, probe
cggatctgtggttcctttgaaagcc

SEQ ID NO: 182619 - DNA, 25 bp, probe
ctggattaggtctctgttgactggc

SEQ ID NO: 182620 - DNA, 25 bp, probe
ctggacaaggccaccttaatatgga

SEQ ID NO: 182621 - DNA, 25 bp, probe
ctggaagagtccactgccaaaagag

SEQ ID NO: 182622 - DNA, 25 bp, probe
ctggcatatactaaacgctaaataa

SEQ ID NO: 182623 - DNA, 25 bp, probe
ctggcttgcagaaaatccagaaaat

SEQ ID NO: 182624 - DNA, 25 bp, probe
ctggagtcagaagaccaggctacaa

SEQ ID NO: 182625 - DNA, 25 bp, probe
ctggagtcggcgcgcaaagcgaaag

SEQ ID NO: 182626 - DNA, 25 bp, probe
ctggcaccccgaggcaaagagggca

SEQ ID NO: 182627 - DNA, 25 bp, probe
ctggcttccccgtcaaaattgagat

SEQ ID NO: 182628 - DNA, 25 bp, probe
ctggatattgtccgaaaaatgcgag

SEQ ID NO: 182629 - DNA, 25 bp, probe
ctggatctggtcgggcaagacgctg

SEQ ID NO: 182630 - DNA, 25 bp, probe
ctggcactggtcacaaagctcagct

SEQ ID NO: 182631 - DNA, 25 bp, probe
ctggacggctctgcaacatcgagcc

SEQ ID NO: 182632 - DNA, 25 bp, probe
ctggatcagattcggacaatcgacc

SEQ ID NO: 182633 - DNA, 25 bp, probe
ctggatcagtatcagacggaggatg

SEQ ID NO: 182634 - DNA, 25 bp, probe
ctggacatgtatcagatgctgagac

SEQ ID NO: 182635 - DNA, 25 bp, probe
ctggcagcattgcaatagtgaggca

SEQ ID NO: 182636 - DNA, 25 bp, probe
ctggctgctggccaggatgtcgcca

SEQ ID NO: 182637 - DNA, 25 bp, probe
ctggcattgttgctgattctgttcc

SEQ ID NO: 182638 - DNA, 25 bp, probe
ctggcttcgtgcatgatttctttga

SEQ ID NO: 182639 - DNA, 25 bp, probe
cgacaacggccacattattctgaat

SEQ ID NO: 182640 - DNA, 25 bp, probe
ctggcaacgggagattatttgtttg

SEQ ID NO: 182641 - DNA, 25 bp, probe
ctggaaggggactattttcgtcaga

SEQ ID NO: 182642 - DNA, 25 bp, probe
ctggagggggactttgtgctcatgt

SEQ ID NO: 182643 - DNA, 25 bp, probe
ctggaggggtgaggactctggcttc

SEQ ID NO: 182644 - DNA, 25 bp, probe
ctggggcctgggacactgttgtccc

SEQ ID NO: 182645 - DNA, 25 bp, probe
ctggcggccgttactagtggatccg

SEQ ID NO: 182646 - DNA, 25 bp, probe
ctggtggcctgtaccagagggactc

SEQ ID NO: 182647 - DNA, 25 bp, probe
ctggtggccttgaacttccagacgc

SEQ ID NO: 182648 - DNA, 25 bp, probe
ctggggctgtgaaacgctcacagat

SEQ ID NO: 182649 - DNA, 25 bp, probe
cggtggctttagccgtgcaaatcca

SEQ ID NO: 182650 - DNA, 25 bp, probe
ctggtttcattggcccgccaatacc

SEQ ID NO: 182651 - DNA, 25 bp, probe
ctggcacttattgcaatttaacacc

SEQ ID NO: 182652 - DNA, 25 bp, probe
ctggcaccaagcggaaaataaactc

SEQ ID NO: 182653 - DNA, 25 bp, probe
cggcccccagcacataaagaactgc

SEQ ID NO: 182654 - DNA, 25 bp, probe
ctggcctacctgatgatgaagaaac

SEQ ID NO: 182655 - DNA, 25 bp, probe
ctggccaactctcgtagtggaacta

SEQ ID NO: 182656 - DNA, 25 bp, probe
ctggccaactctcgtagtggaacta

SEQ ID NO: 182657 - DNA, 25 bp, probe
cggtccacattagagttgaaatttt

SEQ ID NO: 182658 - DNA, 25 bp, probe
ctggctttcccagactagaaatttt

SEQ ID NO: 182659 - DNA, 25 bp, probe
ctggctctttccaaactagaaaaga

SEQ ID NO: 182660 - DNA, 25 bp, probe
ctggcctacctccctgtaggaagag

SEQ ID NO: 182661 - DNA, 25 bp, probe
ctggcctacctccctgtaggaagag

SEQ ID NO: 182662 - DNA, 25 bp, probe
ctggccatcttccttgggaggataa

SEQ ID NO: 182663 - DNA, 25 bp, probe
ctggtcatgcctgctgtgggcatgg

SEQ ID NO: 182664 - DNA, 25 bp, probe
ctggatctccatacggaggcgccag

SEQ ID NO: 182665 - DNA, 25 bp, probe
ctggtccactgcaagatgggcgtca

SEQ ID NO: 182666 - DNA, 25 bp, probe
ctggtggccatcaaatgcattgcca

SEQ ID NO: 182667 - DNA, 25 bp, probe
ctggatgccatatggatctctctac

SEQ ID NO: 182668 - DNA, 25 bp, probe
ctggatcaattcggtgattgcaaat

SEQ ID NO: 182669 - DNA, 25 bp, probe
ctggttttcctttccaagcattgta

SEQ ID NO: 182670 - DNA, 25 bp, probe
ctggtgttaccaattgccaagcaag

SEQ ID NO: 182671 - DNA, 25 bp, probe
ctggtgtctatattcttctctcaaa

SEQ ID NO: 182672 - DNA, 25 bp, probe
ctggtactggaactgcatcccaagg

SEQ ID NO: 182673 - DNA, 25 bp, probe
ctggtaggaacaggtcccaagcggt

SEQ ID NO: 182674 - DNA, 25 bp, probe
ctggtaggaacaggtcccaagcggt

SEQ ID NO: 182675 - DNA, 25 bp, probe
ctggtgaggcaccaggagaccggcg

SEQ ID NO: 182676 - DNA, 25 bp, probe
cggctggaacgattggagatcccgc

SEQ ID NO: 182677 - DNA, 25 bp, probe
cggagagactcgttccagatcatcc

SEQ ID NO: 182678 - DNA, 25 bp, probe
ctggatggtgtgccttccagatcct

SEQ ID NO: 182679 - DNA, 25 bp, probe
cgagggtggaacgcatgtcctgaag

SEQ ID NO: 182680 - DNA, 25 bp, probe
ctggtccggaaggacgacctgcaca

SEQ ID NO: 182681 - DNA, 25 bp, probe
ctggtctcgaaatcctgacctcaga

SEQ ID NO: 182682 - DNA, 25 bp, probe
ctggtctcgaactcttgacgtcaag

SEQ ID NO: 182683 - DNA, 25 bp, probe
ctggctatcgagtctgaatctgcac

SEQ ID NO: 182684 - DNA, 25 bp, probe
ctggagatcgagtgatcttgcccca

SEQ ID NO: 182685 - DNA, 25 bp, probe
ctggagtcagactggctgtgtcaaa

SEQ ID NO: 182686 - DNA, 25 bp, probe
ctggtagctgaggggcggaagatga

SEQ ID NO: 182687 - DNA, 25 bp, probe
ctggacgtggggccggaggatgagc

SEQ ID NO: 182688 - DNA, 25 bp, probe
cggccggagatgagccgaggcttgc

SEQ ID NO: 182689 - DNA, 25 bp, probe
cggctccggcatgtgcaaggccggc

SEQ ID NO: 182690 - DNA, 25 bp, probe
cggctccggcatgtgcaaggccggc

SEQ ID NO: 182691 - DNA, 25 bp, probe
cggctcccctcccaggggagccagc

SEQ ID NO: 182692 - DNA, 25 bp, probe
cggtgcaataccgaacgcagggggc

SEQ ID NO: 182693 - DNA, 25 bp, probe
ctggagctatggggtcaccatgtgg

SEQ ID NO: 182694 - DNA, 25 bp, probe
ctggagcattggttgtactgtgttt

SEQ ID NO: 182695 - DNA, 25 bp, probe
ctggagcattggttgcatctttgca

SEQ ID NO: 182696 - DNA, 25 bp, probe
ctggatctagtgttgctgcgagtga

SEQ ID NO: 182697 - DNA, 25 bp, probe
ctggtgcagaggtgagcagaggagt

SEQ ID NO: 182698 - DNA, 25 bp, probe
ctggtgaatgtgacgagtgaggaca

SEQ ID NO: 182699 - DNA, 25 bp, probe
ctggtgtttgacctgatgcggaagg

SEQ ID NO: 182700 - DNA, 25 bp, probe
ctggtgtctatccggcagagggagg

SEQ ID NO: 182701 - DNA, 25 bp, probe
ctggatgctccccgaggtgggagcg

SEQ ID NO: 182702 - DNA, 25 bp, probe
ctggatggtcagcggttgcgtggag

SEQ ID NO: 182703 - DNA, 25 bp, probe
ctggatggtcagcggttgcgtggag

SEQ ID NO: 182704 - DNA, 25 bp, probe
ctggatggtcagcggttgcgtggag

SEQ ID NO: 182705 - DNA, 25 bp, probe
ctggatggtcagcggttgcgtggag

SEQ ID NO: 182706 - DNA, 25 bp, probe
ctggatgttcggggtgacactgtgg

SEQ ID NO: 182707 - DNA, 25 bp, probe
ctggagtgtggtgcttaatccgctg

SEQ ID NO: 182708 - DNA, 25 bp, probe
ctggaggctgggatgctgatgcccc

SEQ ID NO: 182709 - DNA, 25 bp, probe
ctggaggctgggatgctgatgcccc

SEQ ID NO: 182710 - DNA, 25 bp, probe
ctggaagttggaagctggccgcatc

SEQ ID NO: 182711 - DNA, 25 bp, probe
ctggaagttctctctgagcacttcc

SEQ ID NO: 182712 - DNA, 25 bp, probe
ctggaacctccagtgtacagcttcc

SEQ ID NO: 182713 - DNA, 25 bp, probe
ctggcaagcactacctggatcagct

SEQ ID NO: 182714 - DNA, 25 bp, probe
ctggcagaaatcagctagacgctat

SEQ ID NO: 182715 - DNA, 25 bp, probe
ctggagataattttgcaactcatgt

SEQ ID NO: 182716 - DNA, 25 bp, probe
cgtagatcaatgtttaactcagctc

SEQ ID NO: 182717 - DNA, 25 bp, probe
cgtagaataattcgctatccagata

SEQ ID NO: 182718 - DNA, 25 bp, probe
ctggagaacaactactagccggaag

SEQ ID NO: 182719 - DNA, 25 bp, probe
ctggaagactactttaccgcgacag

SEQ ID NO: 182720 - DNA, 25 bp, probe
ctggaagactactttaccgcgacag

SEQ ID NO: 182721 - DNA, 25 bp, probe
ctggtaactcaaggctaccaagtga

SEQ ID NO: 182722 - DNA, 25 bp, probe
cggtcacactccagccaaatagtgt

SEQ ID NO: 182723 - DNA, 25 bp, probe
ctggaccacaccagaaaccagctga

SEQ ID NO: 182724 - DNA, 25 bp, probe
ctggtctgacccagaagacaccaca

SEQ ID NO: 182725 - DNA, 25 bp, probe
ctggttggagccatgttgagcccac

SEQ ID NO: 182726 - DNA, 25 bp, probe
ctggcgggacgtgcttgaagccatc

SEQ ID NO: 182727 - DNA, 25 bp, probe
ctggcgggacgtgcttgaagccatc

SEQ ID NO: 182728 - DNA, 25 bp, probe
ctggcggtgcacatgtttatcgacc

SEQ ID NO: 182729 - DNA, 25 bp, probe
ctggcggtgcacatgtttatcgacc

SEQ ID NO: 182730 - DNA, 25 bp, probe
ctggtctgtgtcagtattaccacca

SEQ ID NO: 182731 - DNA, 25 bp, probe
ctggcttctgcattactattaactc

SEQ ID NO: 182732 - DNA, 25 bp, probe
ctggatcttgctaacattcatgaac

SEQ ID NO: 182733 - DNA, 25 bp, probe
ctggatttgcatacattcttcaaga

SEQ ID NO: 182734 - DNA, 25 bp, probe
ctggtcttgatgtatttgataagaa

SEQ ID NO: 182735 - DNA, 25 bp, probe
ctggtcatctggtgtgctgatctag

SEQ ID NO: 182736 - DNA, 25 bp, probe
ctggtgcatttacagctgttaaagt

SEQ ID NO: 182737 - DNA, 25 bp, probe
ctggtttctaccttctgtgacaagt

SEQ ID NO: 182738 - DNA, 25 bp, probe
ctggtttctagacttgtgctgatcg

SEQ ID NO: 182739 - DNA, 25 bp, probe
ctggttctctcatctttcaatagtt

SEQ ID NO: 182740 - DNA, 25 bp, probe
ctggttctctcatctttcaatagtt

SEQ ID NO: 182741 - DNA, 25 bp, probe
ctggtttcttacattgccattttct

SEQ ID NO: 182742 - DNA, 25 bp, probe
ctggttgtgtatgctttgtctttta

SEQ ID NO: 182743 - DNA, 25 bp, probe
ctggttgtgtatgctttgtctttta

SEQ ID NO: 182744 - DNA, 25 bp, probe
ctggttgcacttgctttgattgaat

SEQ ID NO: 182745 - DNA, 25 bp, probe
ctggcgtgatcaacattttgttaag

SEQ ID NO: 182746 - DNA, 25 bp, probe
ctggaggtctcatttcttgtaaagt

SEQ ID NO: 182747 - DNA, 25 bp, probe
cggagttcttatactattagttcgt

SEQ ID NO: 182748 - DNA, 25 bp, probe
ctggatgttttctgctactactttg

SEQ ID NO: 182749 - DNA, 25 bp, probe
ctggatgttttctgctactactttg

SEQ ID NO: 182750 - DNA, 25 bp, probe
ctggaatccttccagggcttctttg

SEQ ID NO: 182751 - DNA, 25 bp, probe
ctggactttctcagaaggtgtttgg

SEQ ID NO: 182752 - DNA, 25 bp, probe
ctggactttttaatgaagcgtggtt

SEQ ID NO: 182753 - DNA, 25 bp, probe
ctggcattattgttactgaagctgg

SEQ ID NO: 182754 - DNA, 25 bp, probe
cggcacaatttcaactccatgcggt

SEQ ID NO: 182755 - DNA, 25 bp, probe
ctggcaatacttctcccagagcgat

SEQ ID NO: 182756 - DNA, 25 bp, probe
ctggccaacatactacccaaatctg

SEQ ID NO: 182757 - DNA, 25 bp, probe
ctggaacaattgcacaccagcaaag

SEQ ID NO: 182758 - DNA, 25 bp, probe
ctggaacccagaggacgccaagagc

SEQ ID NO: 182759 - DNA, 25 bp, probe
ctggacgcccatacatggaccaagt

SEQ ID NO: 182760 - DNA, 25 bp, probe
ctggacgcccatacatggaccaagt

SEQ ID NO: 182761 - DNA, 25 bp, probe
ctggaggcgcactatgaggcactgc

SEQ ID NO: 182762 - DNA, 25 bp, probe
ctggagggcagttacgacggccacc

SEQ ID NO: 182763 - DNA, 25 bp, probe
ctggcgcgggatgaggacgggccac

SEQ ID NO: 182764 - DNA, 25 bp, probe
ctggcgcgggagcaatagcgagggt

SEQ ID NO: 182765 - DNA, 25 bp, probe
ctggagcggggctgacagcaggtgt

SEQ ID NO: 182766 - DNA, 25 bp, probe
ctggaccaagttcgacgtggctgat

SEQ ID NO: 182767 - DNA, 25 bp, probe
ctggcaccagacacttctggggatg

SEQ ID NO: 182768 - DNA, 25 bp, probe
ctggcatagcagatgacttccgtgc

SEQ ID NO: 182769 - DNA, 25 bp, probe
ctggatatgcagcgtttccagctgc

SEQ ID NO: 182770 - DNA, 25 bp, probe
ctggttgagtggtcttgccagtgcc

SEQ ID NO: 182771 - DNA, 25 bp, probe
ctggtctgagtgctctagcacctgc

SEQ ID NO: 182772 - DNA, 25 bp, probe
ctggttgagctcagtggagccatga

SEQ ID NO: 182773 - DNA, 25 bp, probe
ctggcctgacacaatggtagctctg

SEQ ID NO: 182774 - DNA, 25 bp, probe
ctggcacagtgccttgggactggac

SEQ ID NO: 182775 - DNA, 25 bp, probe
ctggacggatgttgggagtggggta

SEQ ID NO: 182776 - DNA, 25 bp, probe
ctggatctccctggggagtgggtcc

SEQ ID NO: 182777 - DNA, 25 bp, probe
ctggacagcccagggagtgtggggg

SEQ ID NO: 182778 - DNA, 25 bp, probe
ctggacactagggtcaggcggggtg

SEQ ID NO: 182779 - DNA, 25 bp, probe
ctggacactagggtcaggcggggtg

SEQ ID NO: 182780 - DNA, 25 bp, probe
ctggcccttgaggtggggctggtgg

SEQ ID NO: 182781 - DNA, 25 bp, probe
ctggcccaagacaggggccgcaggc

SEQ ID NO: 182782 - DNA, 25 bp, probe
ctggccaaagccgagcggaaggggc

SEQ ID NO: 182783 - DNA, 25 bp, probe
ctggagctcactcccgaggaagtgg

SEQ ID NO: 182784 - DNA, 25 bp, probe
ctggcagctccacgccgaaaaatga

SEQ ID NO: 182785 - DNA, 25 bp, probe
ctggcagctccacgccgaaaaatga

SEQ ID NO: 182786 - DNA, 25 bp, probe
ctggtaccagctgtcaaacaatgag

SEQ ID NO: 182787 - DNA, 25 bp, probe
ctggagaccgtggacagaccaataa

SEQ ID NO: 182788 - DNA, 25 bp, probe
ctggattccgaggggcacatcaaaa

SEQ ID NO: 182789 - DNA, 25 bp, probe
ctggactccgatgcggtcagcaaga

SEQ ID NO: 182790 - DNA, 25 bp, probe
ctggactcttctggcagctagttag

SEQ ID NO: 182791 - DNA, 25 bp, probe
ctggacctccttccagcagatgtat

SEQ ID NO: 182792 - DNA, 25 bp, probe
cggaatcgactgcatcatgaatgat

SEQ ID NO: 182793 - DNA, 25 bp, probe
ctggattccacagagatcaatgttc

SEQ ID NO: 182794 - DNA, 25 bp, probe
cggaccatgacatcaaaaggccttg

SEQ ID NO: 182795 - DNA, 25 bp, probe
cggaccatgacatcaaaaggccttg

SEQ ID NO: 182796 - DNA, 25 bp, probe
ctggaccaaaggaacatagccctag

SEQ ID NO: 182797 - DNA, 25 bp, probe
ctggaaccatcagaaacaccctcac

SEQ ID NO: 182798 - DNA, 25 bp, probe
ctggaaatcacagtaaacctcctgt

SEQ ID NO: 182799 - DNA, 25 bp, probe
ctggacttaccttgcaagcgatcct

SEQ ID NO: 182800 - DNA, 25 bp, probe
cggacttcgtcaacaagttcctgcc

SEQ ID NO: 182801 - DNA, 25 bp, probe
cggacttcgtcaacaagttcctgcc

SEQ ID NO: 182802 - DNA, 25 bp, probe
ctggagcctctttccaagttgtatg

SEQ ID NO: 182803 - DNA, 25 bp, probe
ctggagcctctttccaagttgtatg

SEQ ID NO: 182804 - DNA, 25 bp, probe
ctggaggtcatctccgtgtgtgatt

SEQ ID NO: 182805 - DNA, 25 bp, probe
cgtgcaggaagagcggctttgatat

SEQ ID NO: 182806 - DNA, 25 bp, probe
cggcaggcaggattgggcttttctg

SEQ ID NO: 182807 - DNA, 25 bp, probe
ctggcagccataaatggagttattc

SEQ ID NO: 182808 - DNA, 25 bp, probe
ctggcagcattgactctgtggcttt

SEQ ID NO: 182809 - DNA, 25 bp, probe
ctggatctctgttatgtgccatttt

SEQ ID NO: 182810 - DNA, 25 bp, probe
ctggatcctcagtagtgtctttgca

SEQ ID NO: 182811 - DNA, 25 bp, probe
ctggactacacattcttctgtggca

SEQ ID NO: 182812 - DNA, 25 bp, probe
ctggatcaaccagatcctgcaggca

SEQ ID NO: 182813 - DNA, 25 bp, probe
ctggtagagccaggcacccagtgtg

SEQ ID NO: 182814 - DNA, 25 bp, probe
ctggaggagttggaccacactgtga

SEQ ID NO: 182815 - DNA, 25 bp, probe
cgtggagaattggccagagcctgtg

SEQ ID NO: 182816 - DNA, 25 bp, probe
ctggccgaattcctcaaggctgtgc

SEQ ID NO: 182817 - DNA, 25 bp, probe
ctggccgaattcctcaaggctgtgc

SEQ ID NO: 182818 - DNA, 25 bp, probe
ctggctcacagaccgtcaagtatgc

SEQ ID NO: 182819 - DNA, 25 bp, probe
ctggcagcgagaaactgcatggtcg

SEQ ID NO: 182820 - DNA, 25 bp, probe
ctggcagctggagaacatggtttaa

SEQ ID NO: 182821 - DNA, 25 bp, probe
ctggatgcctcaggaactggatgca

SEQ ID NO: 182822 - DNA, 25 bp, probe
ctggatgcctcaggaactggatgca

SEQ ID NO: 182823 - DNA, 25 bp, probe
ctggaagatcatggacctggtgccc

SEQ ID NO: 182824 - DNA, 25 bp, probe
ctggagagattcgagcgcagggccc

SEQ ID NO: 182825 - DNA, 25 bp, probe
ctggagaagatcggcatgggtcggc

SEQ ID NO: 182826 - DNA, 25 bp, probe
ctggaggagctgggtgtggggtgcg

SEQ ID NO: 182827 - DNA, 25 bp, probe
ctggatgcggtggtgcattgtgggc

SEQ ID NO: 182828 - DNA, 25 bp, probe
ctggagatggtgcttattggctgcc

SEQ ID NO: 182829 - DNA, 25 bp, probe
ctggagtgtgtgaagtactgcgtgg

SEQ ID NO: 182830 - DNA, 25 bp, probe
ctggagtgtgaagctgaccagctcg

SEQ ID NO: 182831 - DNA, 25 bp, probe
ctggagtgtgaagctgaccagctcg

SEQ ID NO: 182832 - DNA, 25 bp, probe
ctggaagtacaaggactcatctgtg

SEQ ID NO: 182833 - DNA, 25 bp, probe
ctggaagaaaaacttcattgctgtc

SEQ ID NO: 182834 - DNA, 25 bp, probe
cggctatgaaaagagtgatggttcc

SEQ ID NO: 182835 - DNA, 25 bp, probe
cggaatgaaaacagagcttcccgtg

SEQ ID NO: 182836 - DNA, 25 bp, probe
ctggaataaaccacacttagtcctg

SEQ ID NO: 182837 - DNA, 25 bp, probe
cggaaaacagctactacctggtcat

SEQ ID NO: 182838 - DNA, 25 bp, probe
gggccaaaaacatacagaggtgcat

SEQ ID NO: 182839 - DNA, 25 bp, probe
ccctcaggaaaatccaagtggaata

SEQ ID NO: 182840 - DNA, 25 bp, probe
ccccattaataatcctggccaactc

SEQ ID NO: 182841 - DNA, 25 bp, probe
ccccattaataatcctggccaactc

SEQ ID NO: 182842 - DNA, 25 bp, probe
tttccaggaaaatccggaacctgat

SEQ ID NO: 182843 - DNA, 25 bp, probe
tttccaggaaaatccggaacctgat

SEQ ID NO: 182844 - DNA, 25 bp, probe
cgtgcacaggaagcaccgaggaatc

SEQ ID NO: 182845 - DNA, 25 bp, probe
cggcagaggacagtaaaagcaaaga

SEQ ID NO: 182846 - DNA, 25 bp, probe
ctggcgggagtctcagccgaagaga

SEQ ID NO: 182847 - DNA, 25 bp, probe
ctggaggtggtcggcttggaaggag

SEQ ID NO: 182848 - DNA, 25 bp, probe
ctggaggaggtagctagggtatagt

SEQ ID NO: 182849 - DNA, 25 bp, probe
ctggaggaggtggtcaaggttgtga

SEQ ID NO: 182850 - DNA, 25 bp, probe
cggagagcaggtggcgtacgacggt

SEQ ID NO: 182851 - DNA, 25 bp, probe
cggcagaagtaccagtccaagcggc

SEQ ID NO: 182852 - DNA, 25 bp, probe
ctggaggagtacggctgctgcaagg

SEQ ID NO: 182853 - DNA, 25 bp, probe
ctggaggcatcaaaggctgcatccg

SEQ ID NO: 182854 - DNA, 25 bp, probe
ctggaggtgatcgaggtgcaccgag

SEQ ID NO: 182855 - DNA, 25 bp, probe
ctggaggaaggatgtccctgcactg

SEQ ID NO: 182856 - DNA, 25 bp, probe
cgggaagggaagtccgcagccgaag

SEQ ID NO: 182857 - DNA, 25 bp, probe
cggggagggtaatgtgcaccacagg

SEQ ID NO: 182858 - DNA, 25 bp, probe
cggggttggttctggacattacaca

SEQ ID NO: 182859 - DNA, 25 bp, probe
cggggggagttctgggcattaagat

SEQ ID NO: 182860 - DNA, 25 bp, probe
gcggcgggggctcattaaaaatagt

SEQ ID NO: 182861 - DNA, 25 bp, probe
cggaggggagctctttgatcgactc

SEQ ID NO: 182862 - DNA, 25 bp, probe
cggggagttcattttggtggacaag

SEQ ID NO: 182863 - DNA, 25 bp, probe
cggggtgttaatgtgggagatcttc

SEQ ID NO: 182864 - DNA, 25 bp, probe
cggcacctgttaaacttggaggctt

SEQ ID NO: 182865 - DNA, 25 bp, probe
ctggttctagtaatcctgggtgttt

SEQ ID NO: 182866 - DNA, 25 bp, probe
cggtgctctcagaaacctcagagct

SEQ ID NO: 182867 - DNA, 25 bp, probe
ctggctgcattcacaacgtctgcag

SEQ ID NO: 182868 - DNA, 25 bp, probe
ctggctatgttcaagatcagctgtg

SEQ ID NO: 182869 - DNA, 25 bp, probe
cggccagcagacaagatccagatgg

SEQ ID NO: 182870 - DNA, 25 bp, probe
ctggccatctgatggactggtgtcc

SEQ ID NO: 182871 - DNA, 25 bp, probe
ctggctaccatgggccagtgctgct

SEQ ID NO: 182872 - DNA, 25 bp, probe
cggatagacatggtgaagggccttc

SEQ ID NO: 182873 - DNA, 25 bp, probe
cggcacatgaattgggacgaccttc

SEQ ID NO: 182874 - DNA, 25 bp, probe
ctggccggatgaaggatcttccctc

SEQ ID NO: 182875 - DNA, 25 bp, probe
ctggagggacatcagtgcttcctct

SEQ ID NO: 182876 - DNA, 25 bp, probe
ctggcggagaatcatagcacttcgg

SEQ ID NO: 182877 - DNA, 25 bp, probe
ctggagaaactccacgatcttcctg

SEQ ID NO: 182878 - DNA, 25 bp, probe
ctggcaaaatggcactgaatcatcc

SEQ ID NO: 182879 - DNA, 25 bp, probe
ctggacaaactgctgcgatatgacc

SEQ ID NO: 182880 - DNA, 25 bp, probe
ctggaggcaaggttcgactgcagcc

SEQ ID NO: 182881 - DNA, 25 bp, probe
ctggagggcagtggcacgatctcag

SEQ ID NO: 182882 - DNA, 25 bp, probe
ctggaggcgggccagagaccaggga

SEQ ID NO: 182883 - DNA, 25 bp, probe
ctggatggggctcgagaggcagccg

SEQ ID NO: 182884 - DNA, 25 bp, probe
ctggagctgctgtccgaggtgcagc

SEQ ID NO: 182885 - DNA, 25 bp, probe
ctggagctgctgtccgaggtgcagc

SEQ ID NO: 182886 - DNA, 25 bp, probe
ctggagcctgagactgggtgccagc

SEQ ID NO: 182887 - DNA, 25 bp, probe
ctggagccacattctgacttcagat

SEQ ID NO: 182888 - DNA, 25 bp, probe
ctggagccacattctgacttcagat

SEQ ID NO: 182889 - DNA, 25 bp, probe
ctggagggcatcttcacatccaaga

SEQ ID NO: 182890 - DNA, 25 bp, probe
ctggaggagccactattccagaagg

SEQ ID NO: 182891 - DNA, 25 bp, probe
ctggcagtgcaggcattactaaaag

SEQ ID NO: 182892 - DNA, 25 bp, probe
ctggatgtgactgtagctgtaagca

SEQ ID NO: 182893 - DNA, 25 bp, probe
ctggagtccagcgcacttaagattg

SEQ ID NO: 182894 - DNA, 25 bp, probe
ctggactccatagcactccaaaagc

SEQ ID NO: 182895 - DNA, 25 bp, probe
ctggactggtcagcagtgccttaga

SEQ ID NO: 182896 - DNA, 25 bp, probe
ctggagttggctgcagcagctttcg

SEQ ID NO: 182897 - DNA, 25 bp, probe
ctggaattgcgcaacacctttaggg

SEQ ID NO: 182898 - DNA, 25 bp, probe
ctggactgccaggataacgaattgg

SEQ ID NO: 182899 - DNA, 25 bp, probe
ctggacctaaaatcaatgatcgaga

SEQ ID NO: 182900 - DNA, 25 bp, probe
ctggaaattaccttaatatgcaaga

SEQ ID NO: 182901 - DNA, 25 bp, probe
ctggatgcagtgaaccttgagaaaa

SEQ ID NO: 182902 - DNA, 25 bp, probe
ctggagtatgcttcacctagaaaca

SEQ ID NO: 182903 - DNA, 25 bp, probe
ctggactggatggacgccgagacca

SEQ ID NO: 182904 - DNA, 25 bp, probe
ctggactggctccgcacggagaacg

SEQ ID NO: 182905 - DNA, 25 bp, probe
ctggcaggactccagatgaggacaa

SEQ ID NO: 182906 - DNA, 25 bp, probe
ctggaggactcaagcaatggagagc

SEQ ID NO: 182907 - DNA, 25 bp, probe
ctggatggacaacgccgcggaggag

SEQ ID NO: 182908 - DNA, 25 bp, probe
ctggagcgacaacccaaggcaacgc

SEQ ID NO: 182909 - DNA, 25 bp, probe
ctggacgtgaagtctcgggcaaagc

SEQ ID NO: 182910 - DNA, 25 bp, probe
ctggcaccatgccatttcgggcaga

SEQ ID NO: 182911 - DNA, 25 bp, probe
ctggacatgcggtactgaggtgcag

SEQ ID NO: 182912 - DNA, 25 bp, probe
ctggagctcaggtacaaggtggact

SEQ ID NO: 182913 - DNA, 25 bp, probe
ctggcagaaggacccaggtgagcgg

SEQ ID NO: 182914 - DNA, 25 bp, probe
ctggcaggggacatgacctggctgg

SEQ ID NO: 182915 - DNA, 25 bp, probe
ctggaggtccacaggtcaactgcag

SEQ ID NO: 182916 - DNA, 25 bp, probe
cgcgtgggctccaggaagaccaata

SEQ ID NO: 182917 - DNA, 25 bp, probe
cggtgtaccgcgggacaaatcctga

SEQ ID NO: 182918 - DNA, 25 bp, probe
cggtgtaccgcgggacaaatcctga

SEQ ID NO: 182919 - DNA, 25 bp, probe
cgggaacggcgaaccgcaacatata

SEQ ID NO: 182920 - DNA, 25 bp, probe
ctggagaacagggagatccagccac

SEQ ID NO: 182921 - DNA, 25 bp, probe
ctggaggagggcaagaccgcctgca

SEQ ID NO: 182922 - DNA, 25 bp, probe
ctggaggagtccaggcagctcacgg

SEQ ID NO: 182923 - DNA, 25 bp, probe
ctggaggaagcactaggatgttcag

SEQ ID NO: 182924 - DNA, 25 bp, probe
ctggaggagatgccaaccgttcaac

SEQ ID NO: 182925 - DNA, 25 bp, probe
ctggaggatgtgcggctcgtacaca

SEQ ID NO: 182926 - DNA, 25 bp, probe
ctggagaaccggcagcactaccaga

SEQ ID NO: 182927 - DNA, 25 bp, probe
ctggagaacgggccgagcgtgtctg

SEQ ID NO: 182928 - DNA, 25 bp, probe
ctggagaaagtgtggatgccctctg

SEQ ID NO: 182929 - DNA, 25 bp, probe
ctggaacgcaagaggatttctgctg

SEQ ID NO: 182930 - DNA, 25 bp, probe
cgcaagccggagaggatttggtccc

SEQ ID NO: 182931 - DNA, 25 bp, probe
cggactcggatgactggaggtcgtc

SEQ ID NO: 182932 - DNA, 25 bp, probe
cggactcggatgactggaggtcgtc

SEQ ID NO: 182933 - DNA, 25 bp, probe
cggactcggatgactggaggtcgtc

SEQ ID NO: 182934 - DNA, 25 bp, probe
ctggaccacgagatcgatggctccc

SEQ ID NO: 182935 - DNA, 25 bp, probe
ctggacccggaactgatggtgcgga

SEQ ID NO: 182936 - DNA, 25 bp, probe
cggcgccacctatgtatggtcatgg

SEQ ID NO: 182937 - DNA, 25 bp, probe
ctggcccatccatcttatgaggatc

SEQ ID NO: 182938 - DNA, 25 bp, probe
ctggctcctgactctcagagaggat

SEQ ID NO: 182939 - DNA, 25 bp, probe
ctggccctacttccaggatggatgc

SEQ ID NO: 182940 - DNA, 25 bp, probe
cggcccagattgcggtgtgagatgg

SEQ ID NO: 182941 - DNA, 25 bp, probe
cgtgcccaactgggggtggttctag

SEQ ID NO: 182942 - DNA, 25 bp, probe
cggcgccagtgggtggaggagttct

SEQ ID NO: 182943 - DNA, 25 bp, probe
cgggcaggtgagattaggggttggg

SEQ ID NO: 182944 - DNA, 25 bp, probe
cggaaagctatgcttctgggcgtcc

SEQ ID NO: 182945 - DNA, 25 bp, probe
cggaaagctatgcttctgggcgtcc

SEQ ID NO: 182946 - DNA, 25 bp, probe
cggacaagctgcatttagcgagtct

SEQ ID NO: 182947 - DNA, 25 bp, probe
cgctaaagtcttatgggcgtcccct

SEQ ID NO: 182948 - DNA, 25 bp, probe
cgtgaaaagcttaatgggctggcca

SEQ ID NO: 182949 - DNA, 25 bp, probe
ctggcaaacagcagtgacccttcca

SEQ ID NO: 182950 - DNA, 25 bp, probe
ctggcaataccatgtcagcctcttc

SEQ ID NO: 182951 - DNA, 25 bp, probe
cgtgtatgacgctgggcacgttgag

SEQ ID NO: 182952 - DNA, 25 bp, probe
ctggctagagcagaaaatctgttga

SEQ ID NO: 182953 - DNA, 25 bp, probe
ctggcacaagatgcacaattatttc

SEQ ID NO: 182954 - DNA, 25 bp, probe
cggcgccgaccaggaaatttcgatt

SEQ ID NO: 182955 - DNA, 25 bp, probe
ctggctccagttggaacactttcct

SEQ ID NO: 182956 - DNA, 25 bp, probe
ctggctcctttcagaactcatatca

SEQ ID NO: 182957 - DNA, 25 bp, probe
ctggctactgtgtggccacgtacgt

SEQ ID NO: 182958 - DNA, 25 bp, probe
ctggaagcttgagtggcaccagggc

SEQ ID NO: 182959 - DNA, 25 bp, probe
ctggaagattgaggttcctggacag

SEQ ID NO: 182960 - DNA, 25 bp, probe
ctggaagatgttgggtgctgggaca

SEQ ID NO: 182961 - DNA, 25 bp, probe
ctggaagcaggagcgacggtgaacc

SEQ ID NO: 182962 - DNA, 25 bp, probe
ctggaagcaggagcgacggtgaacc

SEQ ID NO: 182963 - DNA, 25 bp, probe
ctggaagcgggtggtgtgtgtcccc

SEQ ID NO: 182964 - DNA, 25 bp, probe
ctggaatctcactcttgtttttcac

SEQ ID NO: 182965 - DNA, 25 bp, probe
cggaatcccggcagcctgaagatca

SEQ ID NO: 182966 - DNA, 25 bp, probe
cggaacgtgactgccgagcaagcgc

SEQ ID NO: 182967 - DNA, 25 bp, probe
ctggagggctagaacctggagaggc

SEQ ID NO: 182968 - DNA, 25 bp, probe
ctggagaactagaacctggagggct

SEQ ID NO: 182969 - DNA, 25 bp, probe
ctggagggctagaacctggcaggtt

SEQ ID NO: 182970 - DNA, 25 bp, probe
ctggagggcaaggaaggcagcatgg

SEQ ID NO: 182971 - DNA, 25 bp, probe
ctggagttcatggctccggagatgg

SEQ ID NO: 182972 - DNA, 25 bp, probe
ctggacttcagccgctattgcaaga

SEQ ID NO: 182973 - DNA, 25 bp, probe
ctggagatatcccgtttcaaggctg

SEQ ID NO: 182974 - DNA, 25 bp, probe
ctggaaatcccttattgagggccca

SEQ ID NO: 182975 - DNA, 25 bp, probe
ctggagaatcgcctgcaggtggggc

SEQ ID NO: 182976 - DNA, 25 bp, probe
ctggagacgctgcagcagtgggtga

SEQ ID NO: 182977 - DNA, 25 bp, probe
ctggctgacctgaagcgccagcgag

SEQ ID NO: 182978 - DNA, 25 bp, probe
ctggaagccagaacgcagactgcag

SEQ ID NO: 182979 - DNA, 25 bp, probe
ctggaatgtgcattcctgccactgg

SEQ ID NO: 182980 - DNA, 25 bp, probe
ctggcaatgatttggcaacagtgcg

SEQ ID NO: 182981 - DNA, 25 bp, probe
ctggcaagctataggagagaatggg

SEQ ID NO: 182982 - DNA, 25 bp, probe
cggcagcgctggagaagctagagaa

SEQ ID NO: 182983 - DNA, 25 bp, probe
cggcgccgtggaggactacgagccg

SEQ ID NO: 182984 - DNA, 25 bp, probe
cggctacgtcaaggtctacaccggc

SEQ ID NO: 182985 - DNA, 25 bp, probe
cggataccacaagtgctttcccaag

SEQ ID NO: 182986 - DNA, 25 bp, probe
cggataccacaagtgctttcccaag

SEQ ID NO: 182987 - DNA, 25 bp, probe
cggataccacaagtgctttcccaag

SEQ ID NO: 182988 - DNA, 25 bp, probe
cggtctggacaactttgacacacag

SEQ ID NO: 182989 - DNA, 25 bp, probe
cggattggcccgattgatagaagac

SEQ ID NO: 182990 - DNA, 25 bp, probe
cggattggcccgattgatagaagac

SEQ ID NO: 182991 - DNA, 25 bp, probe
cggattggcactccgtctgtatgaa

SEQ ID NO: 182992 - DNA, 25 bp, probe
ctggagttcctcatgatcttcaaca

SEQ ID NO: 182993 - DNA, 25 bp, probe
ctggagttcctcatgatcttcaaca

SEQ ID NO: 182994 - DNA, 25 bp, probe
ctggcacctcaactgtgacaatcag

SEQ ID NO: 182995 - DNA, 25 bp, probe
ctggactgctacctttcaaagcttg

SEQ ID NO: 182996 - DNA, 25 bp, probe
ctggacagcacagacttcaccagca

SEQ ID NO: 182997 - DNA, 25 bp, probe
ctggaccagactgctggagccacac

SEQ ID NO: 182998 - DNA, 25 bp, probe
ctggccacagacgccaggcaacaaa

SEQ ID NO: 182999 - DNA, 25 bp, probe
ctggccgcaacggctcagtgacagc

SEQ ID NO: 183000 - DNA, 25 bp, probe
cggaccaggggctgtgacagctccg

SEQ ID NO: 183001 - DNA, 25 bp, probe
ctggaccctgtagggtgccatttgg

SEQ ID NO: 183002 - DNA, 25 bp, probe
cgggaccagaagccgtccaatgtgc

SEQ ID NO: 183003 - DNA, 25 bp, probe
cggggcgagacaacattccgttggc

SEQ ID NO: 183004 - DNA, 25 bp, probe
cggaggagagactcaccatcgaggg

SEQ ID NO: 183005 - DNA, 25 bp, probe
ctggcaaggaaaccccatacagaag

SEQ ID NO: 183006 - DNA, 25 bp, probe
ctggacttgaaactcagctctgcac

SEQ ID NO: 183007 - DNA, 25 bp, probe
ctggactacatctactgatgctaga

SEQ ID NO: 183008 - DNA, 25 bp, probe
ctggaccctttctatctagataata

SEQ ID NO: 183009 - DNA, 25 bp, probe
ctggacccttgggtgtacatcctac

SEQ ID NO: 183010 - DNA, 25 bp, probe
ctggacccctgggtgtatatcctgt

SEQ ID NO: 183011 - DNA, 25 bp, probe
cggcagatccctcaggaaacctgct

SEQ ID NO: 183012 - DNA, 25 bp, probe
cggagatggtgaagggagaacccat

SEQ ID NO: 183013 - DNA, 25 bp, probe
ctggagctgcctagcggggatcagc

SEQ ID NO: 183014 - DNA, 25 bp, probe
cggcattgtcatgcactggctgacc

SEQ ID NO: 183015 - DNA, 25 bp, probe
ctggcttgtactggctggtacgcca

SEQ ID NO: 183016 - DNA, 25 bp, probe
cggccttactgggacatgtctggcc

SEQ ID NO: 183017 - DNA, 25 bp, probe
cggcctttctggcatgcagccaggt

SEQ ID NO: 183018 - DNA, 25 bp, probe
ctggcctctgtgccatggatgattc

SEQ ID NO: 183019 - DNA, 25 bp, probe
ctggctctcattggtatcatgttgc

SEQ ID NO: 183020 - DNA, 25 bp, probe
ctggcttcttggtcaatcttgacta

SEQ ID NO: 183021 - DNA, 25 bp, probe
ctggcaactcggacgtgtatgaaaa

SEQ ID NO: 183022 - DNA, 25 bp, probe
ctggcaactggtactttgatgaaga

SEQ ID NO: 183023 - DNA, 25 bp, probe
ctggccacgagtttgcggtgaagat

SEQ ID NO: 183024 - DNA, 25 bp, probe
ctggacagaggtttctgggagacct

SEQ ID NO: 183025 - DNA, 25 bp, probe
ctggacagtagatgggccgacacac

SEQ ID NO: 183026 - DNA, 25 bp, probe
ctggacacaagccagggctgggaca

SEQ ID NO: 183027 - DNA, 25 bp, probe
cggacagcaagccggaaaagcagca

SEQ ID NO: 183028 - DNA, 25 bp, probe
ctggacagaaagcgccataacagca

SEQ ID NO: 183029 - DNA, 25 bp, probe
ctggacaaagatggccacatcaaga

SEQ ID NO: 183030 - DNA, 25 bp, probe
ctggagcagcatgaggcccagcaag

SEQ ID NO: 183031 - DNA, 25 bp, probe
ctggacatcccatgttcagcaatgt

SEQ ID NO: 183032 - DNA, 25 bp, probe
ctggacatccctgtccagcgagtct

SEQ ID NO: 183033 - DNA, 25 bp, probe
cggaagcgctctttacttggtcgct

SEQ ID NO: 183034 - DNA, 25 bp, probe
ctggaagcctctgtgttggtgtgga

SEQ ID NO: 183035 - DNA, 25 bp, probe
ctggaagccctttgttgtgcgaggg

SEQ ID NO: 183036 - DNA, 25 bp, probe
cgaaaggttgtatgtgatcagaagc

SEQ ID NO: 183037 - DNA, 25 bp, probe
cgaccggttggagtgggcggagcct

SEQ ID NO: 183038 - DNA, 25 bp, probe
cgactatgagtacgactgggccggg

SEQ ID NO: 183039 - DNA, 25 bp, probe
cggttgaccctactgtggattggtg

SEQ ID NO: 183040 - DNA, 25 bp, probe
cggttgacttctctgctagaagaga

SEQ ID NO: 183041 - DNA, 25 bp, probe
cggctcgacagcgtttctgagaaaa

SEQ ID NO: 183042 - DNA, 25 bp, probe
cggccggactctttgtgataaacac

SEQ ID NO: 183043 - DNA, 25 bp, probe
cggccggactctttgtgataaacac

SEQ ID NO: 183044 - DNA, 25 bp, probe
ctggacaaacttctgcgatacgacc

SEQ ID NO: 183045 - DNA, 25 bp, probe
ctggacaaacttctgcgatacgacc

SEQ ID NO: 183046 - DNA, 25 bp, probe
ctggaaaagcggaggttggagccac

SEQ ID NO: 183047 - DNA, 25 bp, probe
ctggcacaagtgcaggcgtttggag

SEQ ID NO: 183048 - DNA, 25 bp, probe
ctggaacagcagcagacgtgtcggg

SEQ ID NO: 183049 - DNA, 25 bp, probe
ctggaacagcagcagacgtgtcggg

SEQ ID NO: 183050 - DNA, 25 bp, probe
ctggcagtcaggagatcctgtgcaa

SEQ ID NO: 183051 - DNA, 25 bp, probe
ctggcagctagttagtgccatggca

SEQ ID NO: 183052 - DNA, 25 bp, probe
ctggcttatggtttggcagcagaag

SEQ ID NO: 183053 - DNA, 25 bp, probe
ctggccatggagaagggcaggcata

SEQ ID NO: 183054 - DNA, 25 bp, probe
ctggcgccaggaaggagcatgtgtt

SEQ ID NO: 183055 - DNA, 25 bp, probe
ctggcagccggtaacagctgacctt

SEQ ID NO: 183056 - DNA, 25 bp, probe
ctggagcgcgtgcagacacagctct

SEQ ID NO: 183057 - DNA, 25 bp, probe
ctggcatggtagcacacacctgtag

SEQ ID NO: 183058 - DNA, 25 bp, probe
ctggcagctgtggtacaaatgtgat

SEQ ID NO: 183059 - DNA, 25 bp, probe
ctggcgtgtggttaactgtgatcgg

SEQ ID NO: 183060 - DNA, 25 bp, probe
cggctgtgtagtaaatctccccggc

SEQ ID NO: 183061 - DNA, 25 bp, probe
cggaggtggtggcatctactccgtc

SEQ ID NO: 183062 - DNA, 25 bp, probe
cggaggtggtggcatctactccgtc

SEQ ID NO: 183063 - DNA, 25 bp, probe
cggaggtggtggcatctactccgtc

SEQ ID NO: 183064 - DNA, 25 bp, probe
cggaggttctgtgacaatgccaccc

SEQ ID NO: 183065 - DNA, 25 bp, probe
cggaggttctgtgacaatgccaccc

SEQ ID NO: 183066 - DNA, 25 bp, probe
ctggcagagttctttaaaacacacc

SEQ ID NO: 183067 - DNA, 25 bp, probe
ctggctacacatttggacaagacat

SEQ ID NO: 183068 - DNA, 25 bp, probe
ctggcttgtcattctgtacactgac

SEQ ID NO: 183069 - DNA, 25 bp, probe
ctggcttgacatgctgtattccacg

SEQ ID NO: 183070 - DNA, 25 bp, probe
ctggcccagcagtatgtcatgacca

SEQ ID NO: 183071 - DNA, 25 bp, probe
ctggacagcaggcatcacagcagaa

SEQ ID NO: 183072 - DNA, 25 bp, probe
ctggactgcaggcacaaagacccaa

SEQ ID NO: 183073 - DNA, 25 bp, probe
ctggcacggaggtataaccccaacg

SEQ ID NO: 183074 - DNA, 25 bp, probe
ctggcctggggtcaggccgggcaga

SEQ ID NO: 183075 - DNA, 25 bp, probe
cgggtggatggtccagtttggccag

SEQ ID NO: 183076 - DNA, 25 bp, probe
cgggatggtcgatcacaactgggga

SEQ ID NO: 183077 - DNA, 25 bp, probe
cggtggtgtccatgaccactgtagg

SEQ ID NO: 183078 - DNA, 25 bp, probe
cggaggaccttaagccagttatcga

SEQ ID NO: 183079 - DNA, 25 bp, probe
cgggtagactacgaccaggtgaaga

SEQ ID NO: 183080 - DNA, 25 bp, probe
cggaagaaacatcctccggctgaag

SEQ ID NO: 183081 - DNA, 25 bp, probe
cggaagaaacatcctccggctgaag

SEQ ID NO: 183082 - DNA, 25 bp, probe
ctggacgcgaacagctgccagagcg

SEQ ID NO: 183083 - DNA, 25 bp, probe
ctggacgggacggcagacgatgcca

SEQ ID NO: 183084 - DNA, 25 bp, probe
ctggactggcgaggaagatcagtgc

SEQ ID NO: 183085 - DNA, 25 bp, probe
ctggactcaggctcactgagcaggc

SEQ ID NO: 183086 - DNA, 25 bp, probe
ctggactcaggctcactgagcaggc

SEQ ID NO: 183087 - DNA, 25 bp, probe
ctggctgaagcctcagtcatgacgc

SEQ ID NO: 183088 - DNA, 25 bp, probe
ctggctacgccaaagtcatcaagaa

SEQ ID NO: 183089 - DNA, 25 bp, probe
ctggctccactcagtgtctaaggca

SEQ ID NO: 183090 - DNA, 25 bp, probe
ctggctccactcagtgtctaaggca

SEQ ID NO: 183091 - DNA, 25 bp, probe
ctggctctttgtgtgtctccaggta

SEQ ID NO: 183092 - DNA, 25 bp, probe
ctggctctttgtgtgtctccaggta

SEQ ID NO: 183093 - DNA, 25 bp, probe
ctggcttaagtccttagctgcggtg

SEQ ID NO: 183094 - DNA, 25 bp, probe
cggcttaagggcgatgcctgggttt

SEQ ID NO: 183095 - DNA, 25 bp, probe
cggcacccaggggtggatagggatc

SEQ ID NO: 183096 - DNA, 25 bp, probe
cggccgcgatggccgtggaaggttc

SEQ ID NO: 183097 - DNA, 25 bp, probe
ctggccagttgagctcaggaaggtt

SEQ ID NO: 183098 - DNA, 25 bp, probe
ctggctggtgggttgcaagaaattt

SEQ ID NO: 183099 - DNA, 25 bp, probe
ctggctgttgggtatggagaaaaaa

SEQ ID NO: 183100 - DNA, 25 bp, probe
cggcggctttggtgactctagataa

SEQ ID NO: 183101 - DNA, 25 bp, probe
cggccctctgtggatgaaatcttaa

SEQ ID NO: 183102 - DNA, 25 bp, probe
cggaggctcgtgcatgtaatcctag

SEQ ID NO: 183103 - DNA, 25 bp, probe
cgggagtggctgggtaatcgggaag

SEQ ID NO: 183104 - DNA, 25 bp, probe
cgttgctgtcggcagtttggggaag

SEQ ID NO: 183105 - DNA, 25 bp, probe
cgtcgcttcaagagggtggtggaga

SEQ ID NO: 183106 - DNA, 25 bp, probe
ctggcgtctaagtgtttgggaagca

SEQ ID NO: 183107 - DNA, 25 bp, probe
ctggcgtctaagtgtttgggaagca

SEQ ID NO: 183108 - DNA, 25 bp, probe
ctggcggtcaagtgtggaggagagg

SEQ ID NO: 183109 - DNA, 25 bp, probe
cggaggctcggattgtggggggccg

SEQ ID NO: 183110 - DNA, 25 bp, probe
cggaggctcggattgtggggggccg

SEQ ID NO: 183111 - DNA, 25 bp, probe
ctggaacttgtggttgaggcagggc

SEQ ID NO: 183112 - DNA, 25 bp, probe
ctggcagatcttcgccgtagccagt

SEQ ID NO: 183113 - DNA, 25 bp, probe
ctggaatttgtgcctgatgtgcctt

SEQ ID NO: 183114 - DNA, 25 bp, probe
ctggcctgtttgtgatgatcagctc

SEQ ID NO: 183115 - DNA, 25 bp, probe
ctggcaatcattaaagtgcatagat

SEQ ID NO: 183116 - DNA, 25 bp, probe
ctggaaaataatactgctgagatac

SEQ ID NO: 183117 - DNA, 25 bp, probe
cggacaaataaaactcgctgacttc

SEQ ID NO: 183118 - DNA, 25 bp, probe
cggacttctacatggctcctgaagt

SEQ ID NO: 183119 - DNA, 25 bp, probe
cggtgcattggagacgtccgttgtc

SEQ ID NO: 183120 - DNA, 25 bp, probe
cggtcattgctgttgaaaaagatta

SEQ ID NO: 183121 - DNA, 25 bp, probe
ctggaattctgtttcagacacagca

SEQ ID NO: 183122 - DNA, 25 bp, probe
ctggaatttgtggctgatgaaggca

SEQ ID NO: 183123 - DNA, 25 bp, probe
ctggaacgcatgtgtgagagggcag

SEQ ID NO: 183124 - DNA, 25 bp, probe
ctggaactgcatcagtgactgaatt

SEQ ID NO: 183125 - DNA, 25 bp, probe
ctggaagacaaactaccaatttctc

SEQ ID NO: 183126 - DNA, 25 bp, probe
ctggaaaacttccaacttgtgttct

SEQ ID NO: 183127 - DNA, 25 bp, probe
ctggctacaactaccaagcttttga

SEQ ID NO: 183128 - DNA, 25 bp, probe
ctggcaaattctaccactgtattaa

SEQ ID NO: 183129 - DNA, 25 bp, probe
ctggaagaattcagcagtgttgtaa

SEQ ID NO: 183130 - DNA, 25 bp, probe
ctggaacagatacgggagatggaaa

SEQ ID NO: 183131 - DNA, 25 bp, probe
ctggaatgactagagggagccaaga

SEQ ID NO: 183132 - DNA, 25 bp, probe
ctggaagactcactgacggagctca

SEQ ID NO: 183133 - DNA, 25 bp, probe
cggaagttcactacagagagtgatg

SEQ ID NO: 183134 - DNA, 25 bp, probe
ctggaagctctcagaaagaaggaca

SEQ ID NO: 183135 - DNA, 25 bp, probe
ctggaagcctgccgaaaacaggagc

SEQ ID NO: 183136 - DNA, 25 bp, probe
ctggaacaccctggatacactggag

SEQ ID NO: 183137 - DNA, 25 bp, probe
ctggacaccgtacaacatcatggtg

SEQ ID NO: 183138 - DNA, 25 bp, probe
cggagcctcattacgagaactggtc

SEQ ID NO: 183139 - DNA, 25 bp, probe
cgcaggccccgtggagaattgattc

SEQ ID NO: 183140 - DNA, 25 bp, probe
cgggtccttgctggacagactgtcc

SEQ ID NO: 183141 - DNA, 25 bp, probe
cgggtccttcggagatatctacctg

SEQ ID NO: 183142 - DNA, 25 bp, probe
ccgtccttacggcaatatgcttttg

SEQ ID NO: 183143 - DNA, 25 bp, probe
cggtcaaaagggcaagtgcctctcc

SEQ ID NO: 183144 - DNA, 25 bp, probe
cggctccacaagcagcggaagcctg

SEQ ID NO: 183145 - DNA, 25 bp, probe
cggctgcaccgagggagcaatacct

SEQ ID NO: 183146 - DNA, 25 bp, probe
cggctacctatttggcagtgacgtg

SEQ ID NO: 183147 - DNA, 25 bp, probe
cggctggttttgtaagatactgggt

SEQ ID NO: 183148 - DNA, 25 bp, probe
ctggctgtgtaggggaggaaggggt

SEQ ID NO: 183149 - DNA, 25 bp, probe
ctggctgtgtaggggaggaaggggt

SEQ ID NO: 183150 - DNA, 25 bp, probe
ctggcattgtgagctggggtgaggg

SEQ ID NO: 183151 - DNA, 25 bp, probe
ctggcagattggaagcggggaagga

SEQ ID NO: 183152 - DNA, 25 bp, probe
ctggctgtttcttgcggggcaaggg

SEQ ID NO: 183153 - DNA, 25 bp, probe
cgtcttctacattctggttggcggc

SEQ ID NO: 183154 - DNA, 25 bp, probe
cgtccactacatggtgtttgccgtg

SEQ ID NO: 183155 - DNA, 25 bp, probe
cgtccactacatggtgtttgccgtg

SEQ ID NO: 183156 - DNA, 25 bp, probe
cggcctctcagcagttcatatgccg

SEQ ID NO: 183157 - DNA, 25 bp, probe
cggcctacagagcgtatagcctggt

SEQ ID NO: 183158 - DNA, 25 bp, probe
ctggcttgacaggggctatgggttt

SEQ ID NO: 183159 - DNA, 25 bp, probe
ctggcatagcacagggtcatggtga

SEQ ID NO: 183160 - DNA, 25 bp, probe
ctggcgagcagggcggtgggaagct

SEQ ID NO: 183161 - DNA, 25 bp, probe
ctggcgagatgctcgtgtgcagaga

SEQ ID NO: 183162 - DNA, 25 bp, probe
ctggcgcatggtgtggcaggagcac

SEQ ID NO: 183163 - DNA, 25 bp, probe
ctggcgatgggccagaggcgggccg

SEQ ID NO: 183164 - DNA, 25 bp, probe
ctggcgagtggggtgagtgctctgc

SEQ ID NO: 183165 - DNA, 25 bp, probe
ctggctcagcatagggtcactttgc

SEQ ID NO: 183166 - DNA, 25 bp, probe
ctggctcagcatagggtcactttgc

SEQ ID NO: 183167 - DNA, 25 bp, probe
ctggcatacatggaggatcaccttc

SEQ ID NO: 183168 - DNA, 25 bp, probe
ctggctaattagcatggccacatct

SEQ ID NO: 183169 - DNA, 25 bp, probe
ctggctcaaaaggtggagccccctt

SEQ ID NO: 183170 - DNA, 25 bp, probe
ctggctcagtcaagattggagacct

SEQ ID NO: 183171 - DNA, 25 bp, probe
cggtcagccttcatggagcaggatg

SEQ ID NO: 183172 - DNA, 25 bp, probe
cggccacacctcaatggagcagaag

SEQ ID NO: 183173 - DNA, 25 bp, probe
cggcgcagagcctttgggaataaaa

SEQ ID NO: 183174 - DNA, 25 bp, probe
cggccgagatcttcgtggagtcaga

SEQ ID NO: 183175 - DNA, 25 bp, probe
cggcctaatcatttgggagatggct

SEQ ID NO: 183176 - DNA, 25 bp, probe
cggctcgtacacagggacttggccg

SEQ ID NO: 183177 - DNA, 25 bp, probe
ctggcttctaccatgaaatcctggc

SEQ ID NO: 183178 - DNA, 25 bp, probe
ccctttcccaagtgatccttgactc

SEQ ID NO: 183179 - DNA, 25 bp, probe
cggtttccaaggtgcacattttcca

SEQ ID NO: 183180 - DNA, 25 bp, probe
cggctacttcaacgagaacttccgc

SEQ ID NO: 183181 - DNA, 25 bp, probe
cggttcattcgatgagacctgtacc

SEQ ID NO: 183182 - DNA, 25 bp, probe
ctggaatcatccttaatcaccttga

SEQ ID NO: 183183 - DNA, 25 bp, probe
ctggaattgcctctgcaacatctct

SEQ ID NO: 183184 - DNA, 25 bp, probe
ctggaatacctttgcatcacatctt

SEQ ID NO: 183185 - DNA, 25 bp, probe
cgtgcaaatccaaaatcaattattt

SEQ ID NO: 183186 - DNA, 25 bp, probe
cgtcttcatcctgtttactgtttgg

SEQ ID NO: 183187 - DNA, 25 bp, probe
cgactataccgacctttctgattag

SEQ ID NO: 183188 - DNA, 25 bp, probe
cgtcaattttgtccttttcattagt

SEQ ID NO: 183189 - DNA, 25 bp, probe
cgtcaattttgtccttttcattagt

SEQ ID NO: 183190 - DNA, 25 bp, probe
cgtaggtttgtaactgtttcataga

SEQ ID NO: 183191 - DNA, 25 bp, probe
gcgtagtgttttgacctttctaggt

SEQ ID NO: 183192 - DNA, 25 bp, probe
cgtaggtaacatgtggtttcttgcc

SEQ ID NO: 183193 - DNA, 25 bp, probe
cgtggagtccactggcgtcttcacc

SEQ ID NO: 183194 - DNA, 25 bp, probe
cgtggagtccactggcgtcttcacc

SEQ ID NO: 183195 - DNA, 25 bp, probe
ctggctgagtacctggaggtttact

SEQ ID NO: 183196 - DNA, 25 bp, probe
ctggctggtacgccaggttttctcc

SEQ ID NO: 183197 - DNA, 25 bp, probe
ctggcatggttaaagtggttttcac

SEQ ID NO: 183198 - DNA, 25 bp, probe
ctggctggctcaaaggtagtgagtt

SEQ ID NO: 183199 - DNA, 25 bp, probe
ctggctgttgagtgacattgtgagg

SEQ ID NO: 183200 - DNA, 25 bp, probe
ctggctggatggtgagtcacttgag

SEQ ID NO: 183201 - DNA, 25 bp, probe
ctggctgggcgagatgagcaccgag

SEQ ID NO: 183202 - DNA, 25 bp, probe
ctggctgggcgagatgagcaccgag

SEQ ID NO: 183203 - DNA, 25 bp, probe
cggatggtctagtctatgcagtcga

SEQ ID NO: 183204 - DNA, 25 bp, probe
cggaggtcggtcaatggcactacct

SEQ ID NO: 183205 - DNA, 25 bp, probe
cggggtggcagtgaggaccaccttc

SEQ ID NO: 183206 - DNA, 25 bp, probe
cgggtgctggatttaggcagccccc

SEQ ID NO: 183207 - DNA, 25 bp, probe
cgggtgctggatttaggcagccccc

SEQ ID NO: 183208 - DNA, 25 bp, probe
ctggaagggccccagtgaggcccca

SEQ ID NO: 183209 - DNA, 25 bp, probe
cggaagcggggccttgagtgggcca

SEQ ID NO: 183210 - DNA, 25 bp, probe
cggaagcggggccttgagtgggcca

SEQ ID NO: 183211 - DNA, 25 bp, probe
ctggcaagggggccctgccagggaa

SEQ ID NO: 183212 - DNA, 25 bp, probe
ctggaagtgagtggcccaccagagc

SEQ ID NO: 183213 - DNA, 25 bp, probe
ctggaatgagagggtcaagccaggc

SEQ ID NO: 183214 - DNA, 25 bp, probe
cggaagaagaggcatggcggcccca

SEQ ID NO: 183215 - DNA, 25 bp, probe
cgggacaagattcttggtgccacca

SEQ ID NO: 183216 - DNA, 25 bp, probe
cgcggacaatgcattttgggacccc

SEQ ID NO: 183217 - DNA, 25 bp, probe
ctggcgagccatgttctttggtttc

SEQ ID NO: 183218 - DNA, 25 bp, probe
ctggcaatggccttgtcatttgggt

SEQ ID NO: 183219 - DNA, 25 bp, probe
ctggcaatggccttgtcatttgggt

SEQ ID NO: 183220 - DNA, 25 bp, probe
ctggcaatgggcgattatttgtttg

SEQ ID NO: 183221 - DNA, 25 bp, probe
ctggcaaaacgtcctttgcattatc

SEQ ID NO: 183222 - DNA, 25 bp, probe
cgtgcaacagactgccttatattat

SEQ ID NO: 183223 - DNA, 25 bp, probe
cgtgcaacagactgccttatattat

SEQ ID NO: 183224 - DNA, 25 bp, probe
ctggaatcaggcttggttcatttta

SEQ ID NO: 183225 - DNA, 25 bp, probe
ctggcagtggcctggtgtttgtaca

SEQ ID NO: 183226 - DNA, 25 bp, probe
ctggcagagtcctcttgtacttcaa

SEQ ID NO: 183227 - DNA, 25 bp, probe
cggcagtggagctactgctgtggtt

SEQ ID NO: 183228 - DNA, 25 bp, probe
cggcttggattattctgcaggttca

SEQ ID NO: 183229 - DNA, 25 bp, probe
cgagctttgattgactccgttattc

SEQ ID NO: 183230 - DNA, 25 bp, probe
ctggcttctaaaaccctgccaaatc

SEQ ID NO: 183231 - DNA, 25 bp, probe
ctggctttaaatcacagtgcacaat

SEQ ID NO: 183232 - DNA, 25 bp, probe
ctggctcttagcttggccaggccta

SEQ ID NO: 183233 - DNA, 25 bp, probe
ctggctcttgacaatgacgaggacc

SEQ ID NO: 183234 - DNA, 25 bp, probe
cggcctgcatgaggatgacgagacc

SEQ ID NO: 183235 - DNA, 25 bp, probe
cggcctgcatgaggatgacgagacc

SEQ ID NO: 183236 - DNA, 25 bp, probe
ctggcctcatgagcagtcagcatgc

SEQ ID NO: 183237 - DNA, 25 bp, probe
ctggcagcctcggctgagcagatgc

SEQ ID NO: 183238 - DNA, 25 bp, probe
cggcatggctaggctgagagcaggg

SEQ ID NO: 183239 - DNA, 25 bp, probe
ctggctgtgctacgtcaacagcacc

SEQ ID NO: 183240 - DNA, 25 bp, probe
ctggcgtctacagcaacgagctgca

SEQ ID NO: 183241 - DNA, 25 bp, probe
ctggcagcgctcaaaccagtgaggc

SEQ ID NO: 183242 - DNA, 25 bp, probe
ctggcagaggcgaactgtagagtgc

SEQ ID NO: 183243 - DNA, 25 bp, probe
ctggcagagcgcgagatcgacgtgc

SEQ ID NO: 183244 - DNA, 25 bp, probe
ctggcagatgcccaacgggcactat

SEQ ID NO: 183245 - DNA, 25 bp, probe
ctggcaggcacacaaggacaactaa

SEQ ID NO: 183246 - DNA, 25 bp, probe
ctggcaggcacacaaggacaactaa

SEQ ID NO: 183247 - DNA, 25 bp, probe
cggagaaaaacacggaccatgacat

SEQ ID NO: 183248 - DNA, 25 bp, probe
cggaaacagaactcgatgcactgac

SEQ ID NO: 183249 - DNA, 25 bp, probe
cggaaaacatcctctgtgagcaccc

SEQ ID NO: 183250 - DNA, 25 bp, probe
cgggaaggctcctttgaatcccgct

SEQ ID NO: 183251 - DNA, 25 bp, probe
cggtagaggcccgggaagccatcag

SEQ ID NO: 183252 - DNA, 25 bp, probe
cggctgaatgagaccacggagaccc

SEQ ID NO: 183253 - DNA, 25 bp, probe
ctggctgtggacgttcagatgcaga

SEQ ID NO: 183254 - DNA, 25 bp, probe
ctggctggggctgccaagcatgaga

SEQ ID NO: 183255 - DNA, 25 bp, probe
cggctctgggtcacagaggagcatg

SEQ ID NO: 183256 - DNA, 25 bp, probe
cggccattgtgttaaaggaaaggat

SEQ ID NO: 183257 - DNA, 25 bp, probe
cggccagggctccaagagaaaagga

SEQ ID NO: 183258 - DNA, 25 bp, probe
cggtaagctgtccaaaaacaagagg

SEQ ID NO: 183259 - DNA, 25 bp, probe
ctggctaactgcatacaaagaaagg

SEQ ID NO: 183260 - DNA, 25 bp, probe
ctggcttagctgaagaccaagacaa

SEQ ID NO: 183261 - DNA, 25 bp, probe
ctggcttagctgaagaccaagacaa

SEQ ID NO: 183262 - DNA, 25 bp, probe
ctggcatgtcatttgcacacaaaaa

SEQ ID NO: 183263 - DNA, 25 bp, probe
cggctgctgcttgggccaaaaacat

SEQ ID NO: 183264 - DNA, 25 bp, probe
cggctgctgcttgggccaaaaacat

SEQ ID NO: 183265 - DNA, 25 bp, probe
cggctgctgcttgggccaaaaacat

SEQ ID NO: 183266 - DNA, 25 bp, probe
cggctgctgcttgggccaaaaacat

SEQ ID NO: 183267 - DNA, 25 bp, probe
ctggcctgtttgctcacatgcaaga

SEQ ID NO: 183268 - DNA, 25 bp, probe
ctggccatgcctggagacatatcac

SEQ ID NO: 183269 - DNA, 25 bp, probe
ctggctctgtcaggcagaacagcag

SEQ ID NO: 183270 - DNA, 25 bp, probe
ctggcattgccgacaggatgcagaa

SEQ ID NO: 183271 - DNA, 25 bp, probe
cggacatggcgtatgtcatcaacgg

SEQ ID NO: 183272 - DNA, 25 bp, probe
cggcctgggatgtttctgaactttg

SEQ ID NO: 183273 - DNA, 25 bp, probe
cggcacgaggattattcaagaattc

SEQ ID NO: 183274 - DNA, 25 bp, probe
ctggctctggggttctcaagattta

SEQ ID NO: 183275 - DNA, 25 bp, probe
ctggcttaggtgtctccagacctga

SEQ ID NO: 183276 - DNA, 25 bp, probe
ctggcagagggaaccacagcagcgg

SEQ ID NO: 183277 - DNA, 25 bp, probe
ctggcagagggaaccacagcagcgg

SEQ ID NO: 183278 - DNA, 25 bp, probe
ctggcagagggaaccacagcagcgg

SEQ ID NO: 183279 - DNA, 25 bp, probe
cggcagagggaacacacgggtcctt

SEQ ID NO: 183280 - DNA, 25 bp, probe
cggcagagggaacacacgggtcctt

SEQ ID NO: 183281 - DNA, 25 bp, probe
cgggagcggaaatgcagtccggcct

SEQ ID NO: 183282 - DNA, 25 bp, probe
cggagaggcgaaactgagtcagagc

SEQ ID NO: 183283 - DNA, 25 bp, probe
cggggagctgaatgcggacgacccc

SEQ ID NO: 183284 - DNA, 25 bp, probe
cggggacatgatgcgggaaatccgc

SEQ ID NO: 183285 - DNA, 25 bp, probe
cggggacatgatgcgggaaatccgc

SEQ ID NO: 183286 - DNA, 25 bp, probe
cggggacatgatgcgggaaatccgc

SEQ ID NO: 183287 - DNA, 25 bp, probe
cctgaggaatgtctgggaagttact

SEQ ID NO: 183288 - DNA, 25 bp, probe
cctgggaattttgaatagccatttt

SEQ ID NO: 183289 - DNA, 25 bp, probe
cctgggagccttgaaaaaactggag

SEQ ID NO: 183290 - DNA, 25 bp, probe
cggttagtcattgatagaactactt

SEQ ID NO: 183291 - DNA, 25 bp, probe
cggattcagctggtagggaaagact

SEQ ID NO: 183292 - DNA, 25 bp, probe
cggaccctgcttcggtggaagcaat

SEQ ID NO: 183293 - DNA, 25 bp, probe
cggactcacggcacgggacaatgag

SEQ ID NO: 183294 - DNA, 25 bp, probe
cggactcacggcacgggacaatgag

SEQ ID NO: 183295 - DNA, 25 bp, probe
cgggcttagccaccattgctaaaag

SEQ ID NO: 183296 - DNA, 25 bp, probe
cgggcttagccaccattgctaaaag

SEQ ID NO: 183297 - DNA, 25 bp, probe
cggggtcgcctggattgggatgaga

SEQ ID NO: 183298 - DNA, 25 bp, probe
cggggtcgcctggattgggatgaga

SEQ ID NO: 183299 - DNA, 25 bp, probe
cggagtcactgcctggagttggaaa

SEQ ID NO: 183300 - DNA, 25 bp, probe
ctggcctactgcctgcagaagtgca

SEQ ID NO: 183301 - DNA, 25 bp, probe
ctggcctcgctgcagcaagagaaca

SEQ ID NO: 183302 - DNA, 25 bp, probe
ctggcggcgcagcacaagtgcaaaa

SEQ ID NO: 183303 - DNA, 25 bp, probe
ctggcgcaagagaacatttctagaa

SEQ ID NO: 183304 - DNA, 25 bp, probe
ctggctgcaagaaatgtgttgctag

SEQ ID NO: 183305 - DNA, 25 bp, probe
ctggctagagtttcttctcatcaga

SEQ ID NO: 183306 - DNA, 25 bp, probe
ctggctacactccatttgctaatgg

SEQ ID NO: 183307 - DNA, 25 bp, probe
ctggctacttcaatcttgttcgggg

SEQ ID NO: 183308 - DNA, 25 bp, probe
ctggcttcgacaacttcttccaggt

SEQ ID NO: 183309 - DNA, 25 bp, probe
ctggcttcgacaacttcttccaggt

SEQ ID NO: 183310 - DNA, 25 bp, probe
ctggcttagcaaccggcattccagc

SEQ ID NO: 183311 - DNA, 25 bp, probe
ctggcataggaaggccagccccgca

SEQ ID NO: 183312 - DNA, 25 bp, probe
cggttgcaaactgctgaccacgccg

SEQ ID NO: 183313 - DNA, 25 bp, probe
cggggaaatatccacatccatcggc

SEQ ID NO: 183314 - DNA, 25 bp, probe
cggggacaaattccagcagctgctg

SEQ ID NO: 183315 - DNA, 25 bp, probe
cgggtctgcaaagccctgtcagaca

SEQ ID NO: 183316 - DNA, 25 bp, probe
cggtccagaagaatcccttctagaa

SEQ ID NO: 183317 - DNA, 25 bp, probe
cggcctcaaatctttccatttaaca

SEQ ID NO: 183318 - DNA, 25 bp, probe
cgtcctcgaactttctgactctaag

SEQ ID NO: 183319 - DNA, 25 bp, probe
cgtttcgatgactcattacccaatc

SEQ ID NO: 183320 - DNA, 25 bp, probe
cgtgattccaagtgcttatccaact

SEQ ID NO: 183321 - DNA, 25 bp, probe
cgtgattccaagtgcttatccaact

SEQ ID NO: 183322 - DNA, 25 bp, probe
cgaattccataccgttactctgatg

SEQ ID NO: 183323 - DNA, 25 bp, probe
cggatccttcattgggtactcctga

SEQ ID NO: 183324 - DNA, 25 bp, probe
ccgccctcatcatgggggtcttaac

SEQ ID NO: 183325 - DNA, 25 bp, probe
cggccccaatggggggtcgagctgg

SEQ ID NO: 183326 - DNA, 25 bp, probe
cggccccaatggggggtcgagctgg

SEQ ID NO: 183327 - DNA, 25 bp, probe
cggcccccatgcacgggggagggag

SEQ ID NO: 183328 - DNA, 25 bp, probe
cgaggccaacgcacggggagaggct

SEQ ID NO: 183329 - DNA, 25 bp, probe
ctggccaagaccatcgtggtggtgg

SEQ ID NO: 183330 - DNA, 25 bp, probe
ctggccaagaccatcgtggtggtgg

SEQ ID NO: 183331 - DNA, 25 bp, probe
ctggccatagacctccttggaagga

SEQ ID NO: 183332 - DNA, 25 bp, probe
ctggccatagacctccttggaagga

SEQ ID NO: 183333 - DNA, 25 bp, probe
ctggctcaacaacctggcggagaaa

SEQ ID NO: 183334 - DNA, 25 bp, probe
ctggccaatcagcccaggaggggca

SEQ ID NO: 183335 - DNA, 25 bp, probe
cggccagtcgaggctacaggatccg

SEQ ID NO: 183336 - DNA, 25 bp, probe
cggccgtcaaggaccaggcatggaa

SEQ ID NO: 183337 - DNA, 25 bp, probe
cggcgcgccaagcgcaaggtgacac

SEQ ID NO: 183338 - DNA, 25 bp, probe
cggaggcggaggtcaagggcgcact

SEQ ID NO: 183339 - DNA, 25 bp, probe
cggatttggtcgtattgggcgcctg

SEQ ID NO: 183340 - DNA, 25 bp, probe
cggagttcttcgtgctgatggagcg

SEQ ID NO: 183341 - DNA, 25 bp, probe
cggagctgtcccctagtgagggact

SEQ ID NO: 183342 - DNA, 25 bp, probe
cgggcttcgtgcccaacaaaggccg

SEQ ID NO: 183343 - DNA, 25 bp, probe
cgtgtttagtatcaaaagagcccaa

SEQ ID NO: 183344 - DNA, 25 bp, probe
ctggctttttaccacaaggcacacc

SEQ ID NO: 183345 - DNA, 25 bp, probe
cggccttccatctgaaaggcagagc

SEQ ID NO: 183346 - DNA, 25 bp, probe
cggccttcgccatgtacatggtcaa

SEQ ID NO: 183347 - DNA, 25 bp, probe
cggccttcgccatgtacatggtcaa

SEQ ID NO: 183348 - DNA, 25 bp, probe
cggcctgtgcccagtacagaaaggt

SEQ ID NO: 183349 - DNA, 25 bp, probe
ctggccagtggagtggtccatgcta

SEQ ID NO: 183350 - DNA, 25 bp, probe
ctggccagcgtggtctacgctgtca

SEQ ID NO: 183351 - DNA, 25 bp, probe
cggacagcgtgcactaacttcatga

SEQ ID NO: 183352 - DNA, 25 bp, probe
cggaagcatggggcttttgagcaca

SEQ ID NO: 183353 - DNA, 25 bp, probe
cggccagattgttgctattaagcaa

SEQ ID NO: 183354 - DNA, 25 bp, probe
ctggccgatggtactatttagatat

SEQ ID NO: 183355 - DNA, 25 bp, probe
ctggccagctggatgttcttaaaga

SEQ ID NO: 183356 - DNA, 25 bp, probe
ctggccaaggactttattcggaagc

SEQ ID NO: 183357 - DNA, 25 bp, probe
ctggccaagaacaagtcccgggaca

SEQ ID NO: 183358 - DNA, 25 bp, probe
ctggccaagcaagtagcctccgaga

SEQ ID NO: 183359 - DNA, 25 bp, probe
ctggccaagcaggctggtttgcaag

SEQ ID NO: 183360 - DNA, 25 bp, probe
ctggcccagggctgcaatgcagcat

SEQ ID NO: 183361 - DNA, 25 bp, probe
ctggcccggaatgtagcagcagccc

SEQ ID NO: 183362 - DNA, 25 bp, probe
ctggcccccaatggtcagaagagcc

SEQ ID NO: 183363 - DNA, 25 bp, probe
ctggcccccaatggtcagaagagcc

SEQ ID NO: 183364 - DNA, 25 bp, probe
ctggcccgctcattgccaaaaattc

SEQ ID NO: 183365 - DNA, 25 bp, probe
ctggcccgctcattgccaaaaattc

SEQ ID NO: 183366 - DNA, 25 bp, probe
ctggctcggctcaaggaaagccatt

SEQ ID NO: 183367 - DNA, 25 bp, probe
ctggccagagccaagaaacactttc

SEQ ID NO: 183368 - DNA, 25 bp, probe
ctggccagagcttagtcacgcagcc

SEQ ID NO: 183369 - DNA, 25 bp, probe
ctggcccagtatatgtctcagcatc

SEQ ID NO: 183370 - DNA, 25 bp, probe
ctggccacagtaattggtcatgtga

SEQ ID NO: 183371 - DNA, 25 bp, probe
cggccctgtgtgtttgacatgtgaa

SEQ ID NO: 183372 - DNA, 25 bp, probe
cgtgtgccttggtcactactgaaga

SEQ ID NO: 183373 - DNA, 25 bp, probe
cgtgtgccttggtcactactgaaga

SEQ ID NO: 183374 - DNA, 25 bp, probe
cggatccttgacaactttatcagcc

SEQ ID NO: 183375 - DNA, 25 bp, probe
cggagccatttgtacatttcatcac

SEQ ID NO: 183376 - DNA, 25 bp, probe
cgggtttttccatggcatcagtata

SEQ ID NO: 183377 - DNA, 25 bp, probe
cgggtttctttcttcgagagtatag

SEQ ID NO: 183378 - DNA, 25 bp, probe
cgggtttcatattttgctgtttttg

SEQ ID NO: 183379 - DNA, 25 bp, probe
cggggtggattggatttgtctttgg

SEQ ID NO: 183380 - DNA, 25 bp, probe
cggcaggatcgacgcgcttctgtat

SEQ ID NO: 183381 - DNA, 25 bp, probe
cggcggatgctgctgctcttcgcaa

SEQ ID NO: 183382 - DNA, 25 bp, probe
ctggcgagctgtggcatgcttttaa

SEQ ID NO: 183383 - DNA, 25 bp, probe
ctggctgagaattctcctttagaca

SEQ ID NO: 183384 - DNA, 25 bp, probe
cgggagatttcttgttgctcaaaaa

SEQ ID NO: 183385 - DNA, 25 bp, probe
cgggagatttcttgttgctcaaaaa

SEQ ID NO: 183386 - DNA, 25 bp, probe
cgggcaatcttgtgtcgttataatg

SEQ ID NO: 183387 - DNA, 25 bp, probe
cgggatgtgccctgacatggttaat

SEQ ID NO: 183388 - DNA, 25 bp, probe
cgaggtggccctggaatacttgaat

SEQ ID NO: 183389 - DNA, 25 bp, probe
ctggctgtggccacagacaacttca

SEQ ID NO: 183390 - DNA, 25 bp, probe
ctggctgtttagcagaactcattct

SEQ ID NO: 183391 - DNA, 25 bp, probe
ctggcgttacagcgcaacagcagcc

SEQ ID NO: 183392 - DNA, 25 bp, probe
cggtactatagggcaccagagttga

SEQ ID NO: 183393 - DNA, 25 bp, probe
cggctaaatagagtcccagcacctc

SEQ ID NO: 183394 - DNA, 25 bp, probe
cggtcaagaagatccgctgcgacgc

SEQ ID NO: 183395 - DNA, 25 bp, probe
cggctgcaaagtgaggcttctgggt

SEQ ID NO: 183396 - DNA, 25 bp, probe
cgggcccagctgtatggtcttggga

SEQ ID NO: 183397 - DNA, 25 bp, probe
cggctcccacagtgagtgcagttga

SEQ ID NO: 183398 - DNA, 25 bp, probe
ctggcctcccaatatggattcgcat

SEQ ID NO: 183399 - DNA, 25 bp, probe
cggctgcccgtcaaatggatggctc

SEQ ID NO: 183400 - DNA, 25 bp, probe
ctggccgccattgaaagatgggagg

SEQ ID NO: 183401 - DNA, 25 bp, probe
ctggccacgctaggtgaacaggggc

SEQ ID NO: 183402 - DNA, 25 bp, probe
cggccccaacatgggcaagggtgga

SEQ ID NO: 183403 - DNA, 25 bp, probe
ctggcctcaaacagccacgaggtgg

SEQ ID NO: 183404 - DNA, 25 bp, probe
ctggcgcctacgaggacgtggcggg

SEQ ID NO: 183405 - DNA, 25 bp, probe
cggctcccacggagaccgtgggctt

SEQ ID NO: 183406 - DNA, 25 bp, probe
cggcccgaggcgggacactggaggt

SEQ ID NO: 183407 - DNA, 25 bp, probe
cggccctggagggagcatctcgggc

SEQ ID NO: 183408 - DNA, 25 bp, probe
ctggcctcaagactggtgactaggg

SEQ ID NO: 183409 - DNA, 25 bp, probe
cgtcctgcagaatgggagctaccgc

SEQ ID NO: 183410 - DNA, 25 bp, probe
ctggccagtgaaaaggactacccgt

SEQ ID NO: 183411 - DNA, 25 bp, probe
ctggccgtgaaatcgactgctgcgg

SEQ ID NO: 183412 - DNA, 25 bp, probe
ctggccatgggccagatcgacggcg

SEQ ID NO: 183413 - DNA, 25 bp, probe
ctggccatgggccagatcgacggcg

SEQ ID NO: 183414 - DNA, 25 bp, probe
ctggcgcgacatgcagacgccgaga

SEQ ID NO: 183415 - DNA, 25 bp, probe
ctggccaacagatgaccaagagatg

SEQ ID NO: 183416 - DNA, 25 bp, probe
cggcgcgacagtgtagaaagtggct

SEQ ID NO: 183417 - DNA, 25 bp, probe
cggcgggcagtgcggaagatgctgc

SEQ ID NO: 183418 - DNA, 25 bp, probe
cggcgctcggagcggaaggtgacgc

SEQ ID NO: 183419 - DNA, 25 bp, probe
cggcgccggagtggcatgaagctgt

SEQ ID NO: 183420 - DNA, 25 bp, probe
ctggcccgaggtgggcatgcagcgt

SEQ ID NO: 183421 - DNA, 25 bp, probe
cggcccagaggggagtgccacaaag

SEQ ID NO: 183422 - DNA, 25 bp, probe
cggccacagagggccagtaccagcc

SEQ ID NO: 183423 - DNA, 25 bp, probe
cggccacagagagccagtaccaaca

SEQ ID NO: 183424 - DNA, 25 bp, probe
ctggccatccgagcggtggcaaagc

SEQ ID NO: 183425 - DNA, 25 bp, probe
ctggccatccgagcggtggcaaagc

SEQ ID NO: 183426 - DNA, 25 bp, probe
ctggcccaggcaggccgtggtgaag

SEQ ID NO: 183427 - DNA, 25 bp, probe
cggcaccgatgcgtgccagggtgat

SEQ ID NO: 183428 - DNA, 25 bp, probe
cggctgcggcagcagacatggctta

SEQ ID NO: 183429 - DNA, 25 bp, probe
ctggcgggcacacagtgcaatgtga

SEQ ID NO: 183430 - DNA, 25 bp, probe
cggcgaggacacacgcagagtgccg

SEQ ID NO: 183431 - DNA, 25 bp, probe
cggagaatacatagaccaggcccag

SEQ ID NO: 183432 - DNA, 25 bp, probe
cggcaagcaacaaatccacagcccc

SEQ ID NO: 183433 - DNA, 25 bp, probe
cggcaagcaacaaatccacagcccc

SEQ ID NO: 183434 - DNA, 25 bp, probe
cggcaagaagaattccatcctcctg

SEQ ID NO: 183435 - DNA, 25 bp, probe
cctcagattaaagctcacccctgga

SEQ ID NO: 183436 - DNA, 25 bp, probe
cggcaatatcatcaccacacgcact

SEQ ID NO: 183437 - DNA, 25 bp, probe
cggctcttcaggaccaaggtctggg

SEQ ID NO: 183438 - DNA, 25 bp, probe
cgagtttgcggtgaagattatggaa

SEQ ID NO: 183439 - DNA, 25 bp, probe
cggtttatgagcacacaattatagc

SEQ ID NO: 183440 - DNA, 25 bp, probe
cggagttacactcccgactaagcgt

SEQ ID NO: 183441 - DNA, 25 bp, probe
cggagattaaccgtcggcacatcac

SEQ ID NO: 183442 - DNA, 25 bp, probe
cggagtacagacgtctcaagactga

SEQ ID NO: 183443 - DNA, 25 bp, probe
cggcaccagcattggcttcaagaac

SEQ ID NO: 183444 - DNA, 25 bp, probe
cgtcactcagatccacattcaagtg

SEQ ID NO: 183445 - DNA, 25 bp, probe
cgtcctccatgagcatggcatagtc

SEQ ID NO: 183446 - DNA, 25 bp, probe
cggcagcttatagattgtattcgaa

SEQ ID NO: 183447 - DNA, 25 bp, probe
cggcattaatccgtttatgtgatgt

SEQ ID NO: 183448 - DNA, 25 bp, probe
cggcacaagactttctccacttgtg

SEQ ID NO: 183449 - DNA, 25 bp, probe
cggaagatcatcttctcctacgtgg

SEQ ID NO: 183450 - DNA, 25 bp, probe
cggacaatgctggcgcttctctcgt

SEQ ID NO: 183451 - DNA, 25 bp, probe
cggaaagcatgaggctgggcttctc

SEQ ID NO: 183452 - DNA, 25 bp, probe
cggaaactgatcagggcagctgctc

SEQ ID NO: 183453 - DNA, 25 bp, probe
cggatacaattcctacagcgtctcc

SEQ ID NO: 183454 - DNA, 25 bp, probe
cggctacagaggccacacatggtcc

SEQ ID NO: 183455 - DNA, 25 bp, probe
cggaccagagcgaaagcatttgcca

SEQ ID NO: 183456 - DNA, 25 bp, probe
cggctctcagagcataatccttggc

SEQ ID NO: 183457 - DNA, 25 bp, probe
ctggcctgctggacaagatccgggc

SEQ ID NO: 183458 - DNA, 25 bp, probe
ctggccacacgcaactgtctagtgg

SEQ ID NO: 183459 - DNA, 25 bp, probe
cggctgagcaacactgtgctggggc

SEQ ID NO: 183460 - DNA, 25 bp, probe
cggaggtacaaccctgggagtgaga

SEQ ID NO: 183461 - DNA, 25 bp, probe
cggcggaacgtgcgtggtgaggaca

SEQ ID NO: 183462 - DNA, 25 bp, probe
ctggcctgagtcgtgggggatggac

SEQ ID NO: 183463 - DNA, 25 bp, probe
ctggcctgtgtcctgaaggccacgg

SEQ ID NO: 183464 - DNA, 25 bp, probe
cggcgtgtgctagcaaggcctgccg

SEQ ID NO: 183465 - DNA, 25 bp, probe
cggcggcgggaggaggcagcgccgc

SEQ ID NO: 183466 - DNA, 25 bp, probe
cggggcggaggtgtccatgacctcc

SEQ ID NO: 183467 - DNA, 25 bp, probe
cggggcggaggtgtccatgacctcc

SEQ ID NO: 183468 - DNA, 25 bp, probe
cctgtggccaatctagtcctggaac

SEQ ID NO: 183469 - DNA, 25 bp, probe
cccagtcaattacatgtttggtacc

SEQ ID NO: 183470 - DNA, 25 bp, probe
cgtcgaattctaccgtgcttggttc

SEQ ID NO: 183471 - DNA, 25 bp, probe
cgggcaattctattgggttttctca

SEQ ID NO: 183472 - DNA, 25 bp, probe
cggagaagaacctgcactttgtcca

SEQ ID NO: 183473 - DNA, 25 bp, probe
cgggaagatcccgtcagttgtgcct

SEQ ID NO: 183474 - DNA, 25 bp, probe
gcgggagaagacactaagggcccca

SEQ ID NO: 183475 - DNA, 25 bp, probe
gctgccggaaaaagccgggggcctg

SEQ ID NO: 183476 - DNA, 25 bp, probe
gctgccggaaaaagccgggggcctg

SEQ ID NO: 183477 - DNA, 25 bp, probe
gtgacggaaaacacggagaatattc

SEQ ID NO: 183478 - DNA, 25 bp, probe
gtgacggaaaacacggagaatattc

SEQ ID NO: 183479 - DNA, 25 bp, probe
gaaggagaaaccacgcggaaactct

SEQ ID NO: 183480 - DNA, 25 bp, probe
gaaggagaaaccacgcggaaactct

SEQ ID NO: 183481 - DNA, 25 bp, probe
gcaggggaacccataccaaagactg

SEQ ID NO: 183482 - DNA, 25 bp, probe
tcggggaactccagaccaagggtga

SEQ ID NO: 183483 - DNA, 25 bp, probe
cggaggaacccagagcggaggctgg

SEQ ID NO: 183484 - DNA, 25 bp, probe
cggagaagtcccctatcggggcatt

SEQ ID NO: 183485 - DNA, 25 bp, probe
cgggaagttcaccagcaagtcggat

SEQ ID NO: 183486 - DNA, 25 bp, probe
cgggaaggtgtctcaagtgggtggg

SEQ ID NO: 183487 - DNA, 25 bp, probe
cgggacaggatgcaaaagaggctcc

SEQ ID NO: 183488 - DNA, 25 bp, probe
cggcgaaccgcaacatataatggcc

SEQ ID NO: 183489 - DNA, 25 bp, probe
cggagcaggcccaacgattctcgtc

SEQ ID NO: 183490 - DNA, 25 bp, probe
cggagctggcaaaacgctcctggtt

SEQ ID NO: 183491 - DNA, 25 bp, probe
cggagcggaaggtgacgcgcatggt

SEQ ID NO: 183492 - DNA, 25 bp, probe
cggggacaacgggaccatctagttg

SEQ ID NO: 183493 - DNA, 25 bp, probe
cggggacggggaggcaacgagagtg

SEQ ID NO: 183494 - DNA, 25 bp, probe
cggggacggggaggcaacgagagtg

SEQ ID NO: 183495 - DNA, 25 bp, probe
cgggggagggtaggtgagagtcagg

SEQ ID NO: 183496 - DNA, 25 bp, probe
cgggcaggggggatccaagatcagg

SEQ ID NO: 183497 - DNA, 25 bp, probe
cgtgggaggggtagtcgaagagctc

SEQ ID NO: 183498 - DNA, 25 bp, probe
cggggagacagatctctcaaaggcc

SEQ ID NO: 183499 - DNA, 25 bp, probe
cgggagattcagatcctcaaagcac

SEQ ID NO: 183500 - DNA, 25 bp, probe
cggccatgttgagctacttcaagcc

SEQ ID NO: 183501 - DNA, 25 bp, probe
cgggacttggttttctcaagctctg

SEQ ID NO: 183502 - DNA, 25 bp, probe
cgtggtcctaatcttctgaacttgg

SEQ ID NO: 183503 - DNA, 25 bp, probe
cggtgtccttgtaggtggcaactgg

SEQ ID NO: 183504 - DNA, 25 bp, probe
cgaaatgcctttgggtgggcagggc

SEQ ID NO: 183505 - DNA, 25 bp, probe
cggccagccatcatgagggaggagg

SEQ ID NO: 183506 - DNA, 25 bp, probe
ctggccagcctcaagagggctttcg

SEQ ID NO: 183507 - DNA, 25 bp, probe
ctggccagcctcaagagggctttcg

SEQ ID NO: 183508 - DNA, 25 bp, probe
cggccacacatctggtgggctgttt

SEQ ID NO: 183509 - DNA, 25 bp, probe
cggacagactgctgggtgactggct

SEQ ID NO: 183510 - DNA, 25 bp, probe
cggcccactgcatggatgagtccaa

SEQ ID NO: 183511 - DNA, 25 bp, probe
ctggccaatgtgcaggtggtcctca

SEQ ID NO: 183512 - DNA, 25 bp, probe
ctggccaaggtttgagatgcttccc

SEQ ID NO: 183513 - DNA, 25 bp, probe
cggaaaagtctctgagctgctcctc

SEQ ID NO: 183514 - DNA, 25 bp, probe
cggaaaagctggcacagtgcccccc

SEQ ID NO: 183515 - DNA, 25 bp, probe
cggaatcaagctctgagcagaggcc

SEQ ID NO: 183516 - DNA, 25 bp, probe
cggcctcagaggctatcacaggctc

SEQ ID NO: 183517 - DNA, 25 bp, probe
cggagctgcgaggccaaacagcagc

SEQ ID NO: 183518 - DNA, 25 bp, probe
cggatcggatcctatggactccaaa

SEQ ID NO: 183519 - DNA, 25 bp, probe
cgtggtggtcttttcacagctcaaa

SEQ ID NO: 183520 - DNA, 25 bp, probe
cggcctggacttgaaactcagctct

SEQ ID NO: 183521 - DNA, 25 bp, probe
cggctgaggccattgccatgaaccg

SEQ ID NO: 183522 - DNA, 25 bp, probe
cggccagtgcagttggatgagacac

SEQ ID NO: 183523 - DNA, 25 bp, probe
cggccaccatgaagtctggcaactc

SEQ ID NO: 183524 - DNA, 25 bp, probe
cggcatcccaacattgtgcatatgc

SEQ ID NO: 183525 - DNA, 25 bp, probe
cggcatccttgagtttgctcacagt

SEQ ID NO: 183526 - DNA, 25 bp, probe
cggcccttgcaggaggacaagatgc

SEQ ID NO: 183527 - DNA, 25 bp, probe
cggcccttgcaggaggacaagatgc

SEQ ID NO: 183528 - DNA, 25 bp, probe
cggccggtgggaggtgcatggcatc

SEQ ID NO: 183529 - DNA, 25 bp, probe
cggccaggagcacgcatggtattga

SEQ ID NO: 183530 - DNA, 25 bp, probe
cggccagacaatcaagctcttgaag

SEQ ID NO: 183531 - DNA, 25 bp, probe
cggccagacaatcaagctcttgaag

SEQ ID NO: 183532 - DNA, 25 bp, probe
cggacagtcgtacacatcttacaga

SEQ ID NO: 183533 - DNA, 25 bp, probe
cggacagtcgtacacatcttacaga

SEQ ID NO: 183534 - DNA, 25 bp, probe
cggacctcgtcagacacgatgagaa

SEQ ID NO: 183535 - DNA, 25 bp, probe
cggacctcgtcagacacgatgagaa

SEQ ID NO: 183536 - DNA, 25 bp, probe
cggattgttctctccaacatggaaa

SEQ ID NO: 183537 - DNA, 25 bp, probe
cgtgtctgttatttcctaatcaaaa

SEQ ID NO: 183538 - DNA, 25 bp, probe
cgtgcctttgactctcagaacaaca

SEQ ID NO: 183539 - DNA, 25 bp, probe
cggtttaagcaccactggactacac

SEQ ID NO: 183540 - DNA, 25 bp, probe
cggttctaggagcccggactggctc

SEQ ID NO: 183541 - DNA, 25 bp, probe
cggcttctactgtacaggacactgg

SEQ ID NO: 183542 - DNA, 25 bp, probe
cggctctcgccaaaaggaaggagag

SEQ ID NO: 183543 - DNA, 25 bp, probe
cggcattcgttatacggaagatgat

SEQ ID NO: 183544 - DNA, 25 bp, probe
cggctgtattaatcacgcgatgttg

SEQ ID NO: 183545 - DNA, 25 bp, probe
ccttcctaatcatcccaatgttgta

SEQ ID NO: 183546 - DNA, 25 bp, probe
ccttcctaatcatcccaatgttgta

SEQ ID NO: 183547 - DNA, 25 bp, probe
tacaatttaccagcctccgtatttc

SEQ ID NO: 183548 - DNA, 25 bp, probe
ccaattcggccaacttggagtcctt

SEQ ID NO: 183549 - DNA, 25 bp, probe
cgactactggtcactgggaatccta

SEQ ID NO: 183550 - DNA, 25 bp, probe
cgacggtggactatggcgacatggt

SEQ ID NO: 183551 - DNA, 25 bp, probe
cgacggtggactatggcgacatggt

SEQ ID NO: 183552 - DNA, 25 bp, probe
cggggtgacactgtgggaaatgttc

SEQ ID NO: 183553 - DNA, 25 bp, probe
cgggaagccctcaaggtgaaagctg

SEQ ID NO: 183554 - DNA, 25 bp, probe
cggtgtccccacaggatgaaacagc

SEQ ID NO: 183555 - DNA, 25 bp, probe
cggtgtcccaactagaactgaaaag

SEQ ID NO: 183556 - DNA, 25 bp, probe
cggcttaccatccaagaggctacaa

SEQ ID NO: 183557 - DNA, 25 bp, probe
cggcttgcagcagtctaagtgcccg

SEQ ID NO: 183558 - DNA, 25 bp, probe
cggctacaacctggagtgtccgtaa

SEQ ID NO: 183559 - DNA, 25 bp, probe
cgaggagaacccaatgtttcgtata

SEQ ID NO: 183560 - DNA, 25 bp, probe
cggggagaggccctattgggatatg

SEQ ID NO: 183561 - DNA, 25 bp, probe
cggggagaggaggtttatgtgaaga

SEQ ID NO: 183562 - DNA, 25 bp, probe
cgggagcaggggatccttctgcaag

SEQ ID NO: 183563 - DNA, 25 bp, probe
cggacgagtgggaggtgtctcgaga

SEQ ID NO: 183564 - DNA, 25 bp, probe
cggacagatgtgtgagtggccccga

SEQ ID NO: 183565 - DNA, 25 bp, probe
cgggcagttagtggggctgcccagt

SEQ ID NO: 183566 - DNA, 25 bp, probe
cgggcaggtagggacctggagtggc

SEQ ID NO: 183567 - DNA, 25 bp, probe
cgggagttcttcaaccggagaggag

SEQ ID NO: 183568 - DNA, 25 bp, probe
cggaggctttacacaccaaagaagc

SEQ ID NO: 183569 - DNA, 25 bp, probe
cggcacgtttacagccgcaagcacc

SEQ ID NO: 183570 - DNA, 25 bp, probe
cggcagtgtttttggtctgccacct

SEQ ID NO: 183571 - DNA, 25 bp, probe
cggcaggcccgtgagatcgaggcct

SEQ ID NO: 183572 - DNA, 25 bp, probe
cggcagtgacgctggcagatgcggg

SEQ ID NO: 183573 - DNA, 25 bp, probe
cggcgtcctcaaggcatctggaggg

SEQ ID NO: 183574 - DNA, 25 bp, probe
cggcgtcctcaaggcatctggaggg

SEQ ID NO: 183575 - DNA, 25 bp, probe
cggagccgcatcctgagcaggaacg

SEQ ID NO: 183576 - DNA, 25 bp, probe
cggcggcgctcggagcggaaggtga

SEQ ID NO: 183577 - DNA, 25 bp, probe
cggcgacgcctcagtgagagggaga

SEQ ID NO: 183578 - DNA, 25 bp, probe
cggcgacggtgcagtgcaggggccg

SEQ ID NO: 183579 - DNA, 25 bp, probe
cggcgcctgggcatgggagaaggtg

SEQ ID NO: 183580 - DNA, 25 bp, probe
cggcgcctgggcatgggagaaggtg

SEQ ID NO: 183581 - DNA, 25 bp, probe
cgacgcctacaggttcgtgaaggac

SEQ ID NO: 183582 - DNA, 25 bp, probe
cgtcctctactgtttcctgaacagt

SEQ ID NO: 183583 - DNA, 25 bp, probe
gcgtctccttcatgtttaatggcac

SEQ ID NO: 183584 - DNA, 25 bp, probe
cgtctccttcatgtttaatggcacc

SEQ ID NO: 183585 - DNA, 25 bp, probe
cgcctccctttgaaatggatggccc

SEQ ID NO: 183586 - DNA, 25 bp, probe
cggcatccaccaagcatcaagttgg

SEQ ID NO: 183587 - DNA, 25 bp, probe
cggctacaccattcagaagcacctg

SEQ ID NO: 183588 - DNA, 25 bp, probe
cggctccagctcatatgctgacagc

SEQ ID NO: 183589 - DNA, 25 bp, probe
cggctgcacgtcaagcgcatagcag

SEQ ID NO: 183590 - DNA, 25 bp, probe
cggctgcacgtcaagcgcatagcag

SEQ ID NO: 183591 - DNA, 25 bp, probe
cggacaccatctaccagatcatgta

SEQ ID NO: 183592 - DNA, 25 bp, probe
cggactcctaattcaatgctctatt

SEQ ID NO: 183593 - DNA, 25 bp, probe
cgtggcctcgaatcaagcttatcga

SEQ ID NO: 183594 - DNA, 25 bp, probe
cggtcttctgcacgagcaagtttct

SEQ ID NO: 183595 - DNA, 25 bp, probe
cggtcttctgcacgagcaagtttct

SEQ ID NO: 183596 - DNA, 25 bp, probe
cggtcttctctgcaaatgggctccg

SEQ ID NO: 183597 - DNA, 25 bp, probe
cggtcctctgaacacagagtccctg

SEQ ID NO: 183598 - DNA, 25 bp, probe
cggtactgtgaacgtcgtgtgactc

SEQ ID NO: 183599 - DNA, 25 bp, probe
cgagtagtgggtcgtcttgtttcta

SEQ ID NO: 183600 - DNA, 25 bp, probe
cgagtagtgggtcgtcttgtttcta

SEQ ID NO: 183601 - DNA, 25 bp, probe
cgaggaggccgtcggcctggtgact

SEQ ID NO: 183602 - DNA, 25 bp, probe
gctgggaccaaagattgggccgggt

SEQ ID NO: 183603 - DNA, 25 bp, probe
cggcagacgatgccacgacggtgga

SEQ ID NO: 183604 - DNA, 25 bp, probe
cggcagcacatactgtacgcggtgg

SEQ ID NO: 183605 - DNA, 25 bp, probe
cggcagagattgctgacgggatggc

SEQ ID NO: 183606 - DNA, 25 bp, probe
cggaagctggggacacggcagtgat

SEQ ID NO: 183607 - DNA, 25 bp, probe
cgggagctcggtaccagagtgtaac

SEQ ID NO: 183608 - DNA, 25 bp, probe
cggagtgttggaacagcagctgtta

SEQ ID NO: 183609 - DNA, 25 bp, probe
cggagtttgtgcagaagctgaacga

SEQ ID NO: 183610 - DNA, 25 bp, probe
cggcgttggtcaaagcggagaccac

SEQ ID NO: 183611 - DNA, 25 bp, probe
cggcggtgggaaaaggtgtcaggca

SEQ ID NO: 183612 - DNA, 25 bp, probe
cggctggtgcgggagtagcaggtcc

SEQ ID NO: 183613 - DNA, 25 bp, probe
cggctggtgcgggagtagcaggtcc

SEQ ID NO: 183614 - DNA, 25 bp, probe
cggatggctctggacgtgaagtctc

SEQ ID NO: 183615 - DNA, 25 bp, probe
cggaggtggtgacggactggcacat

SEQ ID NO: 183616 - DNA, 25 bp, probe
cggcacagatgatggggagcggagt

SEQ ID NO: 183617 - DNA, 25 bp, probe
cggctgaggacggggcagagctgag

SEQ ID NO: 183618 - DNA, 25 bp, probe
cggctgctcgaagaacaatgtcaga

SEQ ID NO: 183619 - DNA, 25 bp, probe
cgtctgccctatcaactttcgatgg

SEQ ID NO: 183620 - DNA, 25 bp, probe
cggctccatcatcaagacttacgag

SEQ ID NO: 183621 - DNA, 25 bp, probe
cggctagcagcagaattcattgtcg

SEQ ID NO: 183622 - DNA, 25 bp, probe
cggatcatgatgccaacctcttacg

SEQ ID NO: 183623 - DNA, 25 bp, probe
cggtagatgcacaccttgtgccact

SEQ ID NO: 183624 - DNA, 25 bp, probe
cggtgacatgtaccctgtgacaatt

SEQ ID NO: 183625 - DNA, 25 bp, probe
cggcagcatatgcagcccgtgctaa

SEQ ID NO: 183626 - DNA, 25 bp, probe
cggcactgtgcctacaggtgctacg

SEQ ID NO: 183627 - DNA, 25 bp, probe
cggcgtgtgctcacgtgtgtatgca

SEQ ID NO: 183628 - DNA, 25 bp, probe
cgtggattctgctaagggaaaatga

SEQ ID NO: 183629 - DNA, 25 bp, probe
cgtgtattccatatgtctataacaa

SEQ ID NO: 183630 - DNA, 25 bp, probe
cggtgcctcctttgtgcaaattaaa

SEQ ID NO: 183631 - DNA, 25 bp, probe
cggctctcatatctgtgtcatattt

SEQ ID NO: 183632 - DNA, 25 bp, probe
cggcacagctatggtgttcgcttta

SEQ ID NO: 183633 - DNA, 25 bp, probe
cggaagcagatgcagctggcctttg

SEQ ID NO: 183634 - DNA, 25 bp, probe
cggacatcacatgagaggtctgctc

SEQ ID NO: 183635 - DNA, 25 bp, probe
cggcacatcactgagtcagtcaact

SEQ ID NO: 183636 - DNA, 25 bp, probe
cggcacacagcggagagcgaacgcc

SEQ ID NO: 183637 - DNA, 25 bp, probe
cggcatccacgcgaggtggtcatcc

SEQ ID NO: 183638 - DNA, 25 bp, probe
cggcaggcaccaaagcaggtcatca

SEQ ID NO: 183639 - DNA, 25 bp, probe
cggggaaattcaacgtccactggag

SEQ ID NO: 183640 - DNA, 25 bp, probe
cggggaaattcaacgtccactggag

SEQ ID NO: 183641 - DNA, 25 bp, probe
cgctgctggaaaaaccgtccggagg

SEQ ID NO: 183642 - DNA, 25 bp, probe
cggcgggaacgagagcgccggcagg

SEQ ID NO: 183643 - DNA, 25 bp, probe
cggcaatggaacctacggacaggtg

SEQ ID NO: 183644 - DNA, 25 bp, probe
cggacaggtaggcacgagacggtac

SEQ ID NO: 183645 - DNA, 25 bp, probe
cggacagggcagggagcatgagcct

SEQ ID NO: 183646 - DNA, 25 bp, probe
cggagccgcgcgagatatggcccgc

SEQ ID NO: 183647 - DNA, 25 bp, probe
cgggcccgttgaggatgaggccgct

SEQ ID NO: 183648 - DNA, 25 bp, probe
cggggccttggagcatgagaccagt

SEQ ID NO: 183649 - DNA, 25 bp, probe
cggaggcctgtgcagggacagcgag

SEQ ID NO: 183650 - DNA, 25 bp, probe
cggaggcctgtgcagggacagcgag

SEQ ID NO: 183651 - DNA, 25 bp, probe
cggtgagcagcgagggtgcacgcga

SEQ ID NO: 183652 - DNA, 25 bp, probe
cggctgctggctatgggagcctgga

SEQ ID NO: 183653 - DNA, 25 bp, probe
cggttctgatctggcaggcagccag

SEQ ID NO: 183654 - DNA, 25 bp, probe
cggttctgatctggcaggcagccag

SEQ ID NO: 183655 - DNA, 25 bp, probe
cggttgcatactggactcttcaaaa

SEQ ID NO: 183656 - DNA, 25 bp, probe
cggttgcatttgccacttcatttac

SEQ ID NO: 183657 - DNA, 25 bp, probe
cgggtgattgctacacttttggcag

SEQ ID NO: 183658 - DNA, 25 bp, probe
cggtaacagctgaccttattgtgaa

SEQ ID NO: 183659 - DNA, 25 bp, probe
cgagtaccagtgacacgtctcgcca

SEQ ID NO: 183660 - DNA, 25 bp, probe
cggtcaagagtaagctgtccaacac

SEQ ID NO: 183661 - DNA, 25 bp, probe
cggtcaagagtaagctgtccaacac

SEQ ID NO: 183662 - DNA, 25 bp, probe
cgagccaatacctactgctccaagt

SEQ ID NO: 183663 - DNA, 25 bp, probe
cggaggaacctgagtgcctcagtca

SEQ ID NO: 183664 - DNA, 25 bp, probe
cggggcaaagtgagggccatccaac

SEQ ID NO: 183665 - DNA, 25 bp, probe
cgagaccaagggaggcagacttacc

SEQ ID NO: 183666 - DNA, 25 bp, probe
cggacccgtggcagatgatggctgt

SEQ ID NO: 183667 - DNA, 25 bp, probe
cggactccagtgccactgtgaggaa

SEQ ID NO: 183668 - DNA, 25 bp, probe
cggactacatagccccggagatcat

SEQ ID NO: 183669 - DNA, 25 bp, probe
cgtggtactgagctcacgtggactc

SEQ ID NO: 183670 - DNA, 25 bp, probe
cgggtgcaatgactcatgcctgtaa

SEQ ID NO: 183671 - DNA, 25 bp, probe
cggacagcactgctcagacagtcaa

SEQ ID NO: 183672 - DNA, 25 bp, probe
cggaacattttcaagcagatagcag

SEQ ID NO: 183673 - DNA, 25 bp, probe
cggcaacattatgctggacaagaag

SEQ ID NO: 183674 - DNA, 25 bp, probe
cggcataatgaagggtgaagcatgg

SEQ ID NO: 183675 - DNA, 25 bp, probe
cggagaagaggctgtgcaagatgtt

SEQ ID NO: 183676 - DNA, 25 bp, probe
cggaacaggctctgcgcatgagcgt

SEQ ID NO: 183677 - DNA, 25 bp, probe
cggcagaggagtgagctctgtggtc

SEQ ID NO: 183678 - DNA, 25 bp, probe
cggcaggagactgactacgtgctca

SEQ ID NO: 183679 - DNA, 25 bp, probe
cggggataccagactacaggtcaga

SEQ ID NO: 183680 - DNA, 25 bp, probe
cggtgaagacggtcaacgagtcagc

SEQ ID NO: 183681 - DNA, 25 bp, probe
cggcaggaacgtggacaagactcgc

SEQ ID NO: 183682 - DNA, 25 bp, probe
cgtggggcacctgagcagaatctac

SEQ ID NO: 183683 - DNA, 25 bp, probe
cgggcaaacactgaaggcatccatg

SEQ ID NO: 183684 - DNA, 25 bp, probe
cgggcaacaaaggatgggacttttg

SEQ ID NO: 183685 - DNA, 25 bp, probe
cggtggacacgggcgtggacgtgtg

SEQ ID NO: 183686 - DNA, 25 bp, probe
cggcatgagcaggaggcggggacgt

SEQ ID NO: 183687 - DNA, 25 bp, probe
cggcatggcagggcagtggctagcc

SEQ ID NO: 183688 - DNA, 25 bp, probe
cggctctgaggtctggtacagcaat

SEQ ID NO: 183689 - DNA, 25 bp, probe
cggctctgaggtctggtacagcaat

SEQ ID NO: 183690 - DNA, 25 bp, probe
cggctctcaggggagatgatctcca

SEQ ID NO: 183691 - DNA, 25 bp, probe
cggagccaaggctaatgtgctgact

SEQ ID NO: 183692 - DNA, 25 bp, probe
cggagccaaggctaatgtgctgact

SEQ ID NO: 183693 - DNA, 25 bp, probe
cgtggaggagtggcaagtcgtctgt

SEQ ID NO: 183694 - DNA, 25 bp, probe
cgtggaggagtggcaagtcgtctgt

SEQ ID NO: 183695 - DNA, 25 bp, probe
cgtcgaggcagtgaacatcccggag

SEQ ID NO: 183696 - DNA, 25 bp, probe
cgtccagggcgtaggaagccgggtg

SEQ ID NO: 183697 - DNA, 25 bp, probe
cgggcaagacggtggagtcgtggcg

SEQ ID NO: 183698 - DNA, 25 bp, probe
cggagaaggcggtggatcgcaggcg

SEQ ID NO: 183699 - DNA, 25 bp, probe
cgggaaggccgtagatgtgtgggcc

SEQ ID NO: 183700 - DNA, 25 bp, probe
cgggagaggaaggtgagtatgaggc

SEQ ID NO: 183701 - DNA, 25 bp, probe
cggtgaagattatggaagtgacagc

SEQ ID NO: 183702 - DNA, 25 bp, probe
cggcatgggtcctggatcacagaac

SEQ ID NO: 183703 - DNA, 25 bp, probe
cggaggtgatcctggcagaagataa

SEQ ID NO: 183704 - DNA, 25 bp, probe
cggagcttgtccggaagattgcaaa

SEQ ID NO: 183705 - DNA, 25 bp, probe
cggtgtgtcatcctgtgaggactgc

SEQ ID NO: 183706 - DNA, 25 bp, probe
cggtgtcaccctggatgacatccgg

SEQ ID NO: 183707 - DNA, 25 bp, probe
cggcatgtgcaaggccggcttcgcg

SEQ ID NO: 183708 - DNA, 25 bp, probe
cggcagagaagccatgcgttccagc

SEQ ID NO: 183709 - DNA, 25 bp, probe
gacagcagcgacagcagtgatagca

SEQ ID NO: 183710 - DNA, 25 bp, probe
cggcaaggagggcagcatcctgctg

SEQ ID NO: 183711 - DNA, 25 bp, probe
cccatcgggcgtgacttcattggcc

SEQ ID NO: 183712 - DNA, 25 bp, probe
cgtccgggcactgacgtactgtgac

SEQ ID NO: 183713 - DNA, 25 bp, probe
cgattcggactcggacctagaggag

SEQ ID NO: 183714 - DNA, 25 bp, probe
cgtatggagcctgggcatctcgttg

SEQ ID NO: 183715 - DNA, 25 bp, probe
cgtatggagcctgggcatctcgttg

SEQ ID NO: 183716 - DNA, 25 bp, probe
cgtcattgggcaaggtctggtctgg

SEQ ID NO: 183717 - DNA, 25 bp, probe
cggtagaggaaggctatcgtctgcc

SEQ ID NO: 183718 - DNA, 25 bp, probe
cggtcaggagcactggctgtggacg

SEQ ID NO: 183719 - DNA, 25 bp, probe
cggcagaggaccagcatgcagggcg

SEQ ID NO: 183720 - DNA, 25 bp, probe
cggcagctgcacgcaggacaggtgc

SEQ ID NO: 183721 - DNA, 25 bp, probe
cggcactacgccaagatcagcgact

SEQ ID NO: 183722 - DNA, 25 bp, probe
cggcactactgcaggagaggagctt

SEQ ID NO: 183723 - DNA, 25 bp, probe
cggatcctgtgagtaggctgggcct

SEQ ID NO: 183724 - DNA, 25 bp, probe
cggtcatcatctcgcgagggaagcc

SEQ ID NO: 183725 - DNA, 25 bp, probe
cggttcaagcgagtggtggagacca

SEQ ID NO: 183726 - DNA, 25 bp, probe
cggtgctcactgtgtggtcggcacc

SEQ ID NO: 183727 - DNA, 25 bp, probe
cggtgctcactgtgtggtcggcacc

SEQ ID NO: 183728 - DNA, 25 bp, probe
cggttgtgtgacaatggtctggatg

SEQ ID NO: 183729 - DNA, 25 bp, probe
cgtgctgttcgaggatgtgtacgag

SEQ ID NO: 183730 - DNA, 25 bp, probe
cggcagttctggttctgccggctgc

SEQ ID NO: 183731 - DNA, 25 bp, probe
cggagaatcatagcacttcggtgcc

SEQ ID NO: 183732 - DNA, 25 bp, probe
cggagacgcaaggcctgtcaggcct

SEQ ID NO: 183733 - DNA, 25 bp, probe
cgggctgcgctaggcgcagtggggt

SEQ ID NO: 183734 - DNA, 25 bp, probe
cggagcgggagcgggtggaggattt

SEQ ID NO: 183735 - DNA, 25 bp, probe
cggcagctcgggcaggggagaacat

SEQ ID NO: 183736 - DNA, 25 bp, probe
cggaggcagtgggagcggtggaaga

SEQ ID NO: 183737 - DNA, 25 bp, probe
cggaggcagtgggagcggtggaaga

SEQ ID NO: 183738 - DNA, 25 bp, probe
cggaggcagtgggagcggtggaaga

SEQ ID NO: 183739 - DNA, 25 bp, probe
cggatggcggcgggaggttgatggc

SEQ ID NO: 183740 - DNA, 25 bp, probe
cgtgggaggcgggagtggagtggaa

SEQ ID NO: 183741 - DNA, 25 bp, probe
cgtgggaggcgggagtggagtggaa

SEQ ID NO: 183742 - DNA, 25 bp, probe
cgggagggagagcggcgagggtaag

SEQ ID NO: 183743 - DNA, 25 bp, probe
cgggatggtgtggtggaagagggga

SEQ ID NO: 183744 - DNA, 25 bp, probe
cggggtgctgtggtggggagaggca

SEQ ID NO: 183745 - DNA, 25 bp, probe
cgcagggacgtgagttggagcggcc

SEQ ID NO: 183746 - DNA, 25 bp, probe
cggaggcgcgtgactggttgagcgg

SEQ ID NO: 183747 - DNA, 25 bp, probe
cggagtcatttgatgtgattctgga

SEQ ID NO: 183748 - DNA, 25 bp, probe
cggagtcttcatgcttgtttgcatc

SEQ ID NO: 183749 - DNA, 25 bp, probe
cggagtcttcatgcttgtttgcatc

SEQ ID NO: 183750 - DNA, 25 bp, probe
cgtggctttgtgcttatgtcatttc

SEQ ID NO: 183751 - DNA, 25 bp, probe
cgtgtgatttgtgctccattttttc

SEQ ID NO: 183752 - DNA, 25 bp, probe
cgtgtgatttgtgtagtgagccttt

SEQ ID NO: 183753 - DNA, 25 bp, probe
cgtgccatcttgcaaactacacttt

SEQ ID NO: 183754 - DNA, 25 bp, probe
cggagactgtcgaaggtcaccaaat

SEQ ID NO: 183755 - DNA, 25 bp, probe
cggtgactgaacaggtgacccagag

SEQ ID NO: 183756 - DNA, 25 bp, probe
cgtgtgcgtgaacaacgacctagag

SEQ ID NO: 183757 - DNA, 25 bp, probe
cgtgtgcgtgaacaacgacctagag

SEQ ID NO: 183758 - DNA, 25 bp, probe
cgtgggtgaatgcatccgaactgtc

SEQ ID NO: 183759 - DNA, 25 bp, probe
cgtggttgaggcgcggaagctggag

SEQ ID NO: 183760 - DNA, 25 bp, probe
cgtggttgaggcgcggaagctggag

SEQ ID NO: 183761 - DNA, 25 bp, probe
cgtggaggaggagcccagagttggg

SEQ ID NO: 183762 - DNA, 25 bp, probe
cggggagagagaccacacgcagtat

SEQ ID NO: 183763 - DNA, 25 bp, probe
cggaggcagacaagcccaatggcat

SEQ ID NO: 183764 - DNA, 25 bp, probe
cgtggtgaacctggcggatggcaac

SEQ ID NO: 183765 - DNA, 25 bp, probe
cggaggagatccagcggcatctgga

SEQ ID NO: 183766 - DNA, 25 bp, probe
cgggaggagagccgggactggacac

SEQ ID NO: 183767 - DNA, 25 bp, probe
cggagtggcaacaggcaggggcgcc

SEQ ID NO: 183768 - DNA, 25 bp, probe
cggagtggcaactgggagctggaga

SEQ ID NO: 183769 - DNA, 25 bp, probe
cggagaacgagctgcatggggagaa

SEQ ID NO: 183770 - DNA, 25 bp, probe
cggagaacgacaccaaagagatgaa

SEQ ID NO: 183771 - DNA, 25 bp, probe
cggagaacgacaccaaagagatgaa

SEQ ID NO: 183772 - DNA, 25 bp, probe
cggacaatcgaccgaaagcaagagg

SEQ ID NO: 183773 - DNA, 25 bp, probe
cgtgaacttgtcctcttaaaatgtg

SEQ ID NO: 183774 - DNA, 25 bp, probe
cgtttctactccaattaagaatata

SEQ ID NO: 183775 - DNA, 25 bp, probe
cgctctttccgacgcattcggaatt

SEQ ID NO: 183776 - DNA, 25 bp, probe
cgtgtttgaccccaacgatgcagac

SEQ ID NO: 183777 - DNA, 25 bp, probe
cgtgtttgcctccgaagtgaaaaag

SEQ ID NO: 183778 - DNA, 25 bp, probe
cgtagactgtcccgaaaatattaag

SEQ ID NO: 183779 - DNA, 25 bp, probe
cgtactcttggcagaaaggatttaa

SEQ ID NO: 183780 - DNA, 25 bp, probe
cgtcccttgtcaggagacggctctt

SEQ ID NO: 183781 - DNA, 25 bp, probe
cgtcccttgtcaggagacggctctt

SEQ ID NO: 183782 - DNA, 25 bp, probe
cgcctctcgttctgggaggcttaca

SEQ ID NO: 183783 - DNA, 25 bp, probe
cgaccttctttaggtaaccgagcat

SEQ ID NO: 183784 - DNA, 25 bp, probe
cgaactttgttatggagggagcagc

SEQ ID NO: 183785 - DNA, 25 bp, probe
cgttggttttattggcagtgggcac

SEQ ID NO: 183786 - DNA, 25 bp, probe
cgttggttttattggcagtgggcac

SEQ ID NO: 183787 - DNA, 25 bp, probe
cgtggtgcgtctactgatggagtgg

SEQ ID NO: 183788 - DNA, 25 bp, probe
cgtcagttctgtccatgtgggagac

SEQ ID NO: 183789 - DNA, 25 bp, probe
cgtggcattgggtctgggatgaagt

SEQ ID NO: 183790 - DNA, 25 bp, probe
cgtcgtggagacctggataaagcat

SEQ ID NO: 183791 - DNA, 25 bp, probe
cgggtccagcacattgataggagcg

SEQ ID NO: 183792 - DNA, 25 bp, probe
cggattcctgccttttgatgatgaa

SEQ ID NO: 183793 - DNA, 25 bp, probe
cggattccagccctgtattgagtga

SEQ ID NO: 183794 - DNA, 25 bp, probe
cggatctcctggcgtactggaatga

SEQ ID NO: 183795 - DNA, 25 bp, probe
cggttctctcagcgtatgcattaaa

SEQ ID NO: 183796 - DNA, 25 bp, probe
cggagatcatgcaagctggtggctg

SEQ ID NO: 183797 - DNA, 25 bp, probe
cggagacatctgtctggcgatcagc

SEQ ID NO: 183798 - DNA, 25 bp, probe
cggtgagcattgtggctgtcagcag

SEQ ID NO: 183799 - DNA, 25 bp, probe
cgggggcatgctggagcttccagcc

SEQ ID NO: 183800 - DNA, 25 bp, probe
cggagatgagccgaggcttgctcgc

SEQ ID NO: 183801 - DNA, 25 bp, probe
cgtggatgcaccgtgccttatcaaa

SEQ ID NO: 183802 - DNA, 25 bp, probe
cgtgaataccacgctttatgagaag

SEQ ID NO: 183803 - DNA, 25 bp, probe
cgtcaacgcaaagcccacagagaag

SEQ ID NO: 183804 - DNA, 25 bp, probe
cggtacagtgaggaccccacagtac

SEQ ID NO: 183805 - DNA, 25 bp, probe
cggtcacgtgagcgccagcgaaaag

SEQ ID NO: 183806 - DNA, 25 bp, probe
cggtcactgcaaggggatgctgcac

SEQ ID NO: 183807 - DNA, 25 bp, probe
cggtcagatgccggacgacatgaag

SEQ ID NO: 183808 - DNA, 25 bp, probe
cggtcagcaccaacatggactgagg

SEQ ID NO: 183809 - DNA, 25 bp, probe
cggtcagcaccgtggtgtgaggccc

SEQ ID NO: 183810 - DNA, 25 bp, probe
cggaccatcctactggtgtgtggcc

SEQ ID NO: 183811 - DNA, 25 bp, probe
cggaccatcctactggtgtgtggcc

SEQ ID NO: 183812 - DNA, 25 bp, probe
cggaaatctcggagtggctggagcg

SEQ ID NO: 183813 - DNA, 25 bp, probe
cgtattttccgtagtgctctgggtg

SEQ ID NO: 183814 - DNA, 25 bp, probe
cgggtattccaaattctcttgtgac

SEQ ID NO: 183815 - DNA, 25 bp, probe
cgggcttactgaagattccttctac

SEQ ID NO: 183816 - DNA, 25 bp, probe
cgtgggatcaagagagaccttctac

SEQ ID NO: 183817 - DNA, 25 bp, probe
cgtgctaaaggacaaacctctcagc

SEQ ID NO: 183818 - DNA, 25 bp, probe
cgtggacatccgcaaagacctgtac

SEQ ID NO: 183819 - DNA, 25 bp, probe
ccgtctcccttataacctggacgtg

SEQ ID NO: 183820 - DNA, 25 bp, probe
gttgttaccattataaccctacaga

SEQ ID NO: 183821 - DNA, 25 bp, probe
gttgttaccattataaccctacaga

SEQ ID NO: 183822 - DNA, 25 bp, probe
cggattcaccatctcaaaacctgac

SEQ ID NO: 183823 - DNA, 25 bp, probe
cggtctactagcaacaacaactttc

SEQ ID NO: 183824 - DNA, 25 bp, probe
cgtgttacagtcacaatctactttt

SEQ ID NO: 183825 - DNA, 25 bp, probe
cgtagtaattctgtgacatactttt

SEQ ID NO: 183826 - DNA, 25 bp, probe
cgatattcagatttcggccttagtt

SEQ ID NO: 183827 - DNA, 25 bp, probe
cgtatttgtattctccatattttgg

SEQ ID NO: 183828 - DNA, 25 bp, probe
cgtgtgtttttctttgcaatacttg

SEQ ID NO: 183829 - DNA, 25 bp, probe
cgtggttctctctgtgtttattagc

SEQ ID NO: 183830 - DNA, 25 bp, probe
cgtggttctctctgtgtttattagc

SEQ ID NO: 183831 - DNA, 25 bp, probe
cgtgttttattcctgtatgttgtcc
